United States Patent Application Publication US 2023/0026259 A1 - sequence listing, part 4

SEQ ID NO: 13369 - protein, 1018 aa, Homo sapiens
  Payload ID: 2600
  Gene Symbol: CDC42BPA
  Gene Name: CDC42 binding protein kinase alpha (DMPK-like)
  ENSP ID: ENSP00000355728
MILKDKLEKTRRESQSEREEFESEFKQQYEREKVLLTEENKKLTSELDKLTTLYENLSIHNQQLEEEVKDLADKKESVAHWEAQITEIIQWVSDEKDARGYLQALASKMTEELEALRNSSLGTRATDMPWKMRRFAKLDMSARLELQSALDAEIRAKQAIQEELNKVKASNIITECKLKDSEKKNLELLSEIEQLIKDTEELRSEKGIEHQDSQHSFLAFLNTPTDALDQFETDPVENTYVWNPSVKFHIQSRSTSPSTSSEAEPVKTVDSTPLSVHTPTLRKKGCPGSTGFPPKRKTHQFFVKSFTTPTKCHQCTSLMVGLIRQGCSCEVCGFSCHITCVNKAPTTCPVPPEQTKGPLGIDPQKGIGTAYEGHVRIPKPAGVKKGWQRALAIVCDFKLFLYDIAEGKASQPSVVISQVIDMRDEEFSVSSVLASDVIHASRKDIPCIFRVTASQLSASNNKCSILMLADTENEKNKWVGVLSELHKILKKNKFRDRSVYVPKEAYDSTLPLIKTTQAAAIIDHERIALGNEEGLFVVHVTKDEIIRVGDNKKIHQIELIPNDQLVAVISGRNRHVRLFPMSALDGRETDFYKLSETKGCQTVTSGKVRHGALTCLCVAMKRQVLCYELFQSKTRHRKFKEIQVPYNVQWMAIFSEQLCVGFQSGFLRYPLNGEGNPYSMLHSNDHTLSFIAHQPMDAICAVEISSKEYLLCFNSIGIYTDCQGRRSRQQELMWPANPSSCCYNAPYLSVYSENAVDIFDVNSMEWIQTLPLKKVRPLNNEGSLNLLGLETIRLIYFKNKMAEGDELVVPETSDNSRKQMVRNINNKRRYSFRVPEEERMQQRREMLRDPEMRNKLISNPTNFNHIAHMGPGDGIQILKDLPMNPRPQESRTVFSGSVSIPSITKSRPEPGRSMSASSGLSARSSAQNGSALKREFSGGSYSAKRQPMPSPSEGSLSSGGMDQGSDAPARDFDGEDSDSPRHSTASNSSNLSSPPSPASPRKTKSLSLESTDRGSWDP

SEQ ID NO: 13370 - protein, 1638 aa, Homo sapiens
  Payload ID: 2600
  Gene Symbol: CDC42BPA
  Gene Name: CDC42 binding protein kinase alpha (DMPK-like)
  Uniprot ID: Q5VT25
  ENSP ID: ENSP00000355729
MSGEVRLRQLEQFILDGPAQTNGQCFSVETLLDILICLYDECNNSPLRREKNILEYLEWAKPFTSKVKQMRLHREDFEILKVIGRGAFGEVAVVKLKNADKVFAMKILNKWEMLKRAETACFREERDVLVNGDNKWITTLHYAFQDDNNLYLVMDYYVGGDLLTLLSKFEDRLPEDMARFYLAEMVIAIDSVHQLHYVHRDIKPDNILMDMNGHIRLADFGSCLKLMEDGTVQSSVAVGTPDYISPEILQAMEDGKGRYGPECDWWSLGVCMYEMLYGETPFYAESLVETYGKIMNHKERFQFPAQVTDVSENAKDLIRRLICSREHRLGQNGIEDFKKHPFFSGIDWDNIRNCEAPYIPEVSSPTDTSNFDVDDDCLKNSETMPPPTHTAFSGHHLPFVGFTYTSSCVLSDRSCLRVTAGPTSLDLDVNVQRTLDNNLATEAYERRIKRLEQEKLELSRKLQESTQTVQALQYSTVDGPLTASKDLEIKNLKEEIEKLRKQVTESSHLEQQLEEANAVRQELDDAFRQIKAYEKQIKTLQQEREDLNKLEVHTEALAAEASKDRKLREQSEHYSKQLENELEGLKQKQISYSPGVCSIEHQQEITKLKTDLEKKSIFYEEELSKREGIHANEIKNLKKELHDSEGQQLALNKEIMILKDKLEKTRRESQSEREEFESEFKQQYEREKVLLTEENKKLTSELDKLTTLYENLSIHNQQLEEEVKDLADKKESVAHWEAQITEIIQWVSDEKDARGYLQALASKMTEELEALRNSSLGTRATDMPWKMRRFAKLDMSARLELQSALDAEIRAKQAIQEELNKVKASNIITECKLKDSEKKNLELLSEIEQLIKDTEELRSEKGIEHQDSQHSFLAFLNTPTDALDQFETVDSTPLSVHTPTLRKKGCPGSTGFPPKRKTHQFFVKSFTTPTKCHQCTSLMVGLIRQGCSCEVCGFSCHITCVNKAPTTCPVPPEQTKGPLGIDPQKGIGTAYEGHVRIPKPAGVKKGWQRALAIVCDFKLFLYDIAEGKASQPSVVISQVIDMRDEEFSVSSVLASDVIHASRKDIPCIFRVTASQLSASNNKCSILMLADTENEKNKWVGVLSELHKILKKNKFRDRSVYVPKEAYDSTLPLIKTTQAAAIIDHERIALGNEEGLFVVHVTKDEIIRVGDNKKIHQIELIPNDQLVAVISGRNRHVRLFPMSALDGRETDFYKLSETKGCQTVTSGKVRHGALTCLCVAMKRQVLCYELFQSKTRHRKFKEIQVPYNVQWMAIFSEQLCVGFQSGFLRYPLNGEGNPYSMLHSNDHTLSFIAHQPMDAICAVEISSKEYLLCFNSIGIYTDCQGRRSRQQELMWPANPSSCCYNAPYLSVYSENAVDIFDVNSMEWIQTLPLKKVRPLNNEGSLNLLGLETIRLIYFKNKMAEGDELVVPETSDNSRKQMVRNINNKRRYSFRVPEEERMQQRREMLRDPEMRNKLISNPTNFNHIAHMGPGDGIQILKDLPMNPRPQESRTVFSGSVSIPSITKSRPEPGRSMSASSGLSARSSAQNGSALKREFSGGSYSAKRQPMPSPSEGSLSSGGMDQGSDAPARDFDGEDSDSPRHSTASNSSNLSSPPSPASPRKTKSLSLESTDRGSWDP

SEQ ID NO: 13371 - protein, 1719 aa, Homo sapiens
  Payload ID: 2600
  Gene Symbol: CDC42BPA
  Gene Name: CDC42 binding protein kinase alpha (DMPK-like)
  Uniprot ID: Q5VT25
  ENSP ID: ENSP00000355731
MSGEVRLRQLEQFILDGPAQTNGQCFSVETLLDILICLYDECNNSPLRREKNILEYLEWAKPFTSKVKQMRLHREDFEILKVIGRGAFGEVAVVKLKNADKVFAMKILNKWEMLKRAETACFREERDVLVNGDNKWITTLHYAFQDDNNLYLVMDYYVGGDLLTLLSKFEDRLPEDMARFYLAEMVIAIDSVHQLHYVHRDIKPDNILMDMNGHIRLADFGSCLKLMEDGTVQSSVAVGTPDYISPEILQAMEDGKGRYGPECDWWSLGVCMYEMLYGETPFYAESLVETYGKIMNHKERFQFPAQVTDVSENAKDLIRRLICSREHRLGQNGIEDFKKHPFFSGIDWDNIRNCEAPYIPEVSSPTDTSNFDVDDDCLKNSETMPPPTHTAFSGHHLPFVGFTYTSSCVLSDRSCLRVTAGPTSLDLDVNVQRTLDNNLATEAYERRIKRLEQEKLELSRKLQESTQTVQALQYSTVDGPLTASKDLEIKNLKEEIEKLRKQVTESSHLEQQLEEANAVRQELDDAFRQIKAYEKQIKTLQQEREDLNKELVQASERLKNQSKELKDAHCQRKLAMQEFMEINERLTELHTQKQKLARHVRDKEEEVDLVMQKVESLRQELRRTERAKKELEVHTEALAAEASKDRKLREQSEHYSKQLENELEGLKQKQISYSPGVCSIEHQQEITKLKTDLEKKSIFYEEELSKREGIHANEIKNLKKELHDSEGQQLALNKEIMILKDKLEKTRRESQSEREEFESEFKQQYEREKVLLTEENKKLTSELDKLTTLYENLSIHNQQLEEEVKDLADKKESVAHWEAQITEIIQWVSDEKDARGYLQALASKMTEELEALRNSSLGTRATDMPWKMRRFAKLDMSARLELQSALDAEIRAKQAIQEELNKVKASNIITECKLKDSEKKNLELLSEIEQLIKDTEELRSEKGIEHQDSQHSFLAFLNTPTDALDQFETVDSTPLSVHTPTLRKKGCPGSTGFPPKRKTHQFFVKSFTTPTKCHQCTSLMVGLIRQGCSCEVCGFSCHITCVNKAPTTCPVPPEQTKGPLGIDPQKGIGTAYEGHVRIPKPAGVKKGWQRALAIVCDFKLFLYDIAEGKASQPSVVISQVIDMRDEEFSVSSVLASDVIHASRKDIPCIFRVTASQLSASNNKCSILMLADTENEKNKWVGVLSELHKILKKNKFRDRSVYVPKEAYDSTLPLIKTTQAAAIIDHERIALGNEEGLFVVHVTKDEIIRVGDNKKIHQIELIPNDQLVAVISGRNRHVRLFPMSALDGRETDFYKLSETKGCQTVTSGKVRHGALTCLCVAMKRQVLCYELFQSKTRHRKFKEIQVPYNVQWMAIFSEQLCVGFQSGFLRYPLNGEGNPYSMLHSNDHTLSFIAHQPMDAICAVEISSKEYLLCFNSIGIYTDCQGRRSRQQELMWPANPSSCCYNAPYLSVYSENAVDIFDVNSMEWIQTLPLKKVRPLNNEGSLNLLGLETIRLIYFKNKMAEGDELVVPETSDNSRKQMVRNINNKRRYSFRVPEEERMQQRREMLRDPEMRNKLISNPTNFNHIAHMGPGDGIQILKDLPMNPRPQESRTVFSGSVSIPSITKSRPEPGRSMSASSGLSARSSAQNGSALKREFSGGSYSAKRQPMPSPSEGSLSSGGMDQGSDAPARDFDGEDSDSPRHSTASNSSNLSSPPSPASPRKTKSLSLESTDRGSWDP

SEQ ID NO: 13372 - protein, 1048 aa, Homo sapiens
  Payload ID: 2600
  Gene Symbol: CDC42BPA
  Gene Name: CDC42 binding protein kinase alpha (DMPK-like)
  ENSP ID: ENSP00000401051
  MOD_RES (1)..(1): Any amino acid
XEGIHANEIKNLKKELHDSEGQQLALNKEIMILKDKLEKTRRESQSEREEFESEFKQQYEREKVLLTEENKKLTSELDKLTTLYENLSIHNQQLEEEVKDLADKKESVAHWEAQITEIIQWVSDEKDARGYLQALASKMTEELEALRNSSLGTRATDMPWKMRRFAKLDMSARLELQSALDAEIRAKQAIQEELNKVKASNIITECKLKDSEKKNLELLSEIEQLIKDTEELRSEKGIEHQDSQHSFLAFLNTPTDALDQFETDPVENTYVWNPSVKFHIQSRSTSPSTSSEAEPVKTVDSTPLSVHTPTLRKKGCPGSTGFPPKRKTHQFFVKSFTTPTKCHQCTSLMVGLIRQGCSCEVCGFSCHITCVNKAPTTCPVPPEQTKGPLGIDPQKGIGTAYEGHVRIPKPAGVKKGWQRALAIVCDFKLFLYDIAEGKASQPSVVISQVIDMRDEEFSVSSVLASDVIHASRKDIPCIFRVTASQLSASNNKCSILMLADTENEKNKWVGVLSELHKILKKNKFRDRSVYVPKEAYDSTLPLIKTTQAAAIIDHERIALGNEEGLFVVHVTKDEIIRVGDNKKIHQIELIPNDQLVAVISGRNRHVRLFPMSALDGRETDFYKLSETKGCQTVTSGKVRHGALTCLCVAMKRQVLCYELFQSKTRHRKFKEIQVPYNVQWMAIFSEQLCVGFQSGFLRYPLNGEGNPYSMLHSNDHTLSFIAHQPMDAICAVEISSKEYLLCFNSIGIYTDCQGRRSRQQELMWPANPSSCCYNAPYLSVYSENAVDIFDVNSMEWIQTLPLKKVRPLNNEGSLNLLGLETIRLIYFKNKMAEGDELVVPETSDNSRKQMVRNINNKRRYSFRVPEEERMQQRREMLRDPEMRNKLISNPTNFNHIAHMGPGDGIQILKDLPMNPRPQESRTVFSGSVSIPSITKSRPEPGRSMSASSGLSARSSAQNGSALKREFSGGSYSAKRQPMPSPSEGSLSSGGMDQGSDAPARDFDGEDSDSPRHSTASNSSNLSSPPSPASPRKTKSLSLESTDRGSWDP

SEQ ID NO: 13373 - protein, 546 aa, Homo sapiens
  Payload ID: 2600
  Gene Symbol: CDC42BPA
  Gene Name: CDC42 binding protein kinase alpha (DMPK-like)
  ENSP ID: ENSP00000407120
  MOD_RES (1)..(1): Any amino acid
XDIAEGKASQPSVVISQVIDMRDEEFSVSSVLASDVIHASRKDIPCIFRVTASQLSASNNKCSILMLADTENEKNKWVGVLSELHKILKKNKFRDRSVYVPKEAYDSTLPLIKTTQAAAIIDHERIALGNEEGLFVVHVTKDEIIRVGDNKKIHQIELIPNDQLVAVISGRNRHVRLFPMSALDGRETDFYKLSETKGCQTVTSGKVRHGALTCLCVAMKRQVLCYELFQSKTRHRKFKEIQVPYNVQWMAIFSEQLCVGFQSGFLRYPLNGEGNPYSMLHSNDHTLSFIAHQPMDAICAVEISSKEYLLCFNSIGIYTDCQGRRSRQQELMWPANPSSCCYNAPYLSVYSENAVDIFDVNSMEWIQTLPLKKVRPLNNEGSLNLLGLETIRLIYFKNKMAEGDELVVPETSDNSRKQMVRNINNKRRYSFRVPEEERMQQRREMLRDPEMRNKLISNPTNFNHIAHMGPGDGIQILKDLPMNPRPQESRTVFSGSVSIPSITKSRPEPGRSMSASSGLSASKCRGYRKVPLRQGDPQLPPLLSRG

SEQ ID NO: 13374 - protein, 728 aa, Homo sapiens
  Payload ID: 2600
  Gene Symbol: CDC42BPA
  Gene Name: CDC42 binding protein kinase alpha (DMPK-like)
  ENSP ID: ENSP00000408165
  MOD_RES (1)..(1): Any amino acid
XVSDEKDARGYLQALASKMTEELEALRNSSLGTRATDMPWKMRRFAKLDMSARLELQSALDAEIRAKQAIQEELNKVKASNIITECKLKDSEKKNLELLSEIEQLIKDTEELRSEKGIEHQDSQHSFLAFLNTPTDALDQFEDSFSSSSSSLIDFLDDTDPVENTYVWNPSVKFHIQSRSTSPSTSSEAEPVKTVDSTPLSVHTPTLRKKGCPGSTGFPPKRKTHQFFVKSFTTPTKCHQCTSLMVGLIRQGCSCEVCGFSCHITCVNKAPTTCPVPPEQTKGPLGIDPQKGIGTAYEGHVRIPKPAGVKKGWQRALAIVCDFKLFLYDIAEGKASQPSVVISQVIDMRDEEFSVSSVLASDVIHASRKDIPCIFRVTASQLSASNNKCSILMLADTENEKNKWVGVLSELHKILKKNKFRDRSVYVPKEAYDSTLPLIKTTQAAAIIDHERIALGNEEGLFVVHVTKDEIIRVGDNKKIHQIELIPNDQLVAVISGRNRHVRLFPMSALDGRETDFYKLSETKGCQTVTSGKVRHGALTCLCVAMKRQVLCYELFQSKTRHRKFKEIQVPYNVQWMAIFSEQLCVGFQSGFLRYPLNGEGNPYSMLHSNDHTLSFIAHQPMDAICAVEISSKEYLLCFNSIGIYTDCQGRRSRQQELMWPANPSSCCYNAPYLSVYSENAVDIFDVNSMEWIQTLPLKKVRPLNNEGSLNLLGLETIRLIYFKNKMA

SEQ ID NO: 13375 - protein, 984 aa, Homo sapiens
  Payload ID: 2600
  Gene Symbol: CDC42BPA
  Gene Name: CDC42 binding protein kinase alpha (DMPK-like)
  ENSP ID: ENSP00000415388
  MOD_RES (1)..(1): Any amino acid
XQLEEEVKDLADKKESVAHWEAQITEIIQWVSDEKDARGYLQALASKMTEELEALRNSSLGTRATDMPWKMRRFAKLDMSARLELQSALDAEIRAKQAIQEELNKVKASNIITECKLKDSEKKNLELLSEIEQLIKDTEELRSEKGIEHQDSQHSFLAFLNTPTDALDQFETVDSTPLSVHTPTLRKKGCPGSTGFPPKRKTHQFFVKSFTTPTKCHQCTSLMVGLIRQGCSCEVCGFSCHITCVNKAPTTCPVPPEQTKGPLGIDPQKGIGTAYEGHVRIPKPAGVKKGWQRALAIVCDFKLFLYDIAEGKASQPSVVISQVIDMRDEEFSVSSVLASDVIHASRKDIPCIFRVTASQLSASNNKCSILMLADTENEKNKWVGVLSELHKILKKNKFRDRSVYVPKEAYDSTLPLIKTTQAAAIIDHERIALGNEEGLFVVHVTKDEIIRVGDNKKIHQIELIPNDQLVAVISGRNRHVRLFPMSALDGRETDFYKLSETKGCQTVTSGKVRHGALTCLCVAMKRQVLCYELFQSKTRHRKFKEIQVPYNVQWMAIFSEQLCVGFQSGFLRYPLNGEGNPYSMLHSNDHTLSFIAHQPMDAICAVEISSKEYLLCFNSIGIYTDCQGRRSRQQELMWPANPSSCCYNAPYLSVYSENAVDIFDVNSMEWIQTLPLKKVRPLNNEGSLNLLGLETIRLIYFKNKMAEGDELVVPETSDNSRKQMVRNINNKRRYSFRVPEEERMQQRREMLRDPEMRNKLISNPTNFNHIAHMGPGDGIQILKDLPMPGFPYPSPHHHSGLISSPINFEHIYHMTVNSAEKFLSPDSINPEYSPSLRSVPGTPSFMTLRNPRPQESRTVFSGSVSIPSITKSRPEPGRSMSASSGLSARSSAQNGSALKREFSGGSYSAKRQPMPSPSEGSLSSGGMDQGSDAPARDFDGEDSDSPRHSTASNSSNLSSPPSPASPRKTKSLSLESTDRGSWDP

SEQ ID NO: 13376 - protein, 1711 aa, Homo sapiens
  Payload ID: 2601
  Gene Symbol: CDC42BPB
  Gene Name: CDC42 binding protein kinase beta (DMPK-like)
  Uniprot ID: Q9Y5S2
  ENSP ID: ENSP00000355237
MSAKVRLKKLEQLLLDGPWRNESALSVETLLDVLVCLYTECSHSALRRDKYVAEFLEWAKPFTQLVKEMQLHREDFEIIKVIGRGAFGEVAVVKMKNTERIYAMKILNKWEMLKRAETACFREERDVLVNGDCQWITALHYAFQDENHLYLVMDYYVGGDLLTLLSKFEDKLPEDMARFYIGEMVLAIDSIHQLHYVHRDIKPDNVLLDVNGHIRLADFGSCLKMNDDGTVQSSVAVGTPDYISPEILQAMEDGMGKYGPECDWWSLGVCMYEMLYGETPFYAESLVETYGKIMNHEERFQFPSHVTDVSEEAKDLIQRLICSRERRLGQNGIEDFKKHAFFEGLNWENIRNLEAPYIPDVSSPSDTSNFDVDDDVLRNTEILPPGSHTGFSGLHLPFIGFTFTTESCFSDRGSLKSIMQSNTLTKDEDVQRDLEHSLQMEAYERRIRRLEQEKLELSRKLQESTQTVQSLHGSSRALSNSNRDKEIKKLNEEIERLKNKIADSNRLERQLEDTVALRQEREDSTQRLRGLEKQHRVVRQEKEELHKQLVEASERLKSQAKELKDAHQQRKLALQEFSELNERMAELRAQKQKVSRQLRDKEEEMEVATQKVDAMRQEMRRAEKLRKELEAQLDDAVAEASKERKLREHSENFCKQMESELEALKVKQGGRGAGATLEHQQEISKIKSELEKKVLFYEEELVRREASHVLEVKNVKKEVHDSESHQLALQKEILMLKDKLEKSKRERHNEMEEAVGTIKDKYERERAMLFDENKKLTAENEKLCSFVDKLTAQNRQLEDELQDLAAKKESVAHWEAQIAEIIQWVSDEKDARGYLQALASKMTEELEALRSSSLGSRTLDPLWKVRRSQKLDMSARLELQSALEAEIRAKQLVQEELRKVKDANLTLESKLKDSEAKNRELLEEMEILKKKMEEKFRADTGLKLPDFQDSIFEYFNTAPLAHDLTFRTSSASEQETQAPKPEASPSMSVAASEQQEDMARPPQRPSAVPLPTTQALALAGPKPKAHQFSIKSFSSPTQCSHCTSLMVGLIRQGYACEVCSFACHVSCKDGAPQVCPIPPEQSKRPLGVDVQRGIGTAYKGHVKVPKPTGVKKGWQRAYAVVCDCKLFLYDLPEGKSTQPGVIASQVLDLRDDEFSVSSVLASDVIHATRRDIPCIFRVTASLLGAPSKTSSLLILTENENEKRKWVGILEGLQSILHKNRLRNQVVHVPLEAYDSSLPLIKAILTAAIVDADRIAVGLEEGLYVIEVTRDVIVRAADCKKVHQIELAPREKIVILLCGRNHHVHLYPWSSLDGAEGSFDIKLPETKGCQLMATATLKRNSGTCLFVAVKRLILCYEIQRTKPFHRKFNEIVAPGSVQCLAVLRDRLCVGYPSGFCLLSIQGDGQPLNLVNPNDPSLAFLSQQSFDALCAVELESEEYLLCFSHMGLYVDPQGRRARAQELMWPAAPVACSCSPTHVTVYSEYGVDVFDVRTMEWVQTIGLRRIRPLNSEGTLNLLNCEPPRLIYFKSKFSGAVLNVPDTSDNSKKQMLRTRSKRRFVFKVPEEERLQQRREMLRDPELRSKMISNPTNFNHVAHMGPGDGMQVLMDLPLSAVPPSQEERPGPAPTNLARQPPSRNKPYISWPSSGGSEPSVTVPLRSMSDPDQDFDKEPDSDSTKHSTPSNSSNPSGPPSPNSPHRSQLPLEGLEQPACDT

SEQ ID NO: 13377 - protein, 666 aa, Homo sapiens
  Payload ID: 2601
  Gene Symbol: CDC42BPB
  Gene Name: CDC42 binding protein kinase beta (DMPK-like)
  ENSP ID: ENSP00000453384
  MOD_RES (1)..(1): Any amino acid
XALQKEILMLKDKLEKSKRERHNEMEEAVGTIKDKYERERAMLFDENKKLTAENEKLCSFVDKLTAQNRQLEDELQDLAAKKESVAHWEAQIAEIIQWVSDEKDARGYLQALASKMTEELEALRSSSLGSRTLDPLWKVRRSQKLDMSARLELQSALEAEIRAKQLVQEELRKVKDANLTLESKLKDSEAKNRELLEEMEILKKKMEEKFRADTGLKLPDFQDSIFEYFNTAPLAHDLTFRTSSASEQETQAPKPEASPSMSVAASEQQEPKAHQFSIKSFSSPTQCSHCTSLMVGLIRQGYACEVCSFACHVSCKDGAPQVCPIPPEQSKRPLGVDVQRGIGTAYKGHVKVPKPTGVKKGWQRAYAVVCDCKLFLYDLPEGKSTQPGVIASQVLDLRDDEFSVSSVLASDVIHATRRDIPCIFRVTASLLGAPSKTSSLLILTENENEKRKWVGILEGLQSILHKNRLRNQVVHVPLEAYDSSLPLIKAILTAAIVDADRIAVGLEEGLYVIEVTRDVIVRAADCKKVHQIELAPREKIVILLCGRNHHVHLYPWSSLDGAEGSFDIKLPETKGCQLMATATLKRNSGTCLFVAVKRLILCYEIQRTKPFHRKFNEIVAPGSVQCLAVLRDRLCVGYPSGFCLLSIQGDGQPLNLVNPNDPSLAF

SEQ ID NO: 13378 - protein, 129 aa, Homo sapiens
  Payload ID: 2601
  Gene Symbol: CDC42BPB
  Gene Name: CDC42 binding protein kinase beta (DMPK-like)
  ENSP ID: ENSP00000489452
TACFREERDVLVNGDCQWITALHYAFQDENHLYLVMDYYVGGDLLTLLSKFEDKLPEDMARFYIGEMVLAIDSIHQLHYVHRDIKPDNVLLDVNGHIRLADFGSCLKMNDDGTVGIFVGDFPFGFGFGI

SEQ ID NO: 13379 - protein, 1551 aa, Homo sapiens
  Payload ID: 2602
  Gene Symbol: CDC42BPG
  Gene Name: CDC42 binding protein kinase gamma (DMPK-like)
  Uniprot ID: Q6DT37
  ENSP ID: ENSP00000345133
MERRLRALEQLARGEAGGCPGLDGLLDLLLALHHELSSGPLRRERSVAQFLSWASPFVSKVKELRLQRDDFEILKVIGRGAFGEVTVVRQRDTGQIFAMKMLHKWEMLKRAETACFREERDVLVKGDSRWVTTLHYAFQDEEYLYLVMDYYAGGDLLTLLSRFEDRLPPELAQFYLAEMVLAIHSLHQLGYVHRDVKPDNVLLDVNGHIRLADFGSCLRLNTNGMVDSSVAVGTPDYISPEILQAMEEGKGHYGPQCDWWSLGVCAYELLFGETPFYAESLVETYGKIMNHEDHLQFPPDVPDVPASAQDLIRQLLCRQEERLGRGGLDDFRNHPFFEGVDWERLASSTAPYIPELRGPMDTSNFDVDDDTLNHPGTLPPPSHGAFSGHHLPFVGFTYTSGSHSPESSSEAWAALERKLQCLEQEKVELSRKHQEALHAPTDHRELEQLRKEVQTLRDRLPEMLRDKASLSQTDGPPAGSPGQDSDLRQELDRLHRELAEGRAGLQAQEQELCRAQGQQEELLQRLQEAQEREAATASQTRALSSQLEEARAAQRELEAQVSSLSRQVTQLQGQWEQRLEESSQAKTIHTASETNGMGPPEGGPQEAQLRKEVAALREQLEQAHSHRPSGKEEALCQLQEENRRLSREQERLEAELAQEQESKQRLEGERRETESNWEAQLADILSWVNDEKVSRGYLQALATKMAEELESLRNVGTQTLPARPLDHQWKARRLQKMEASARLELQSALEAEIRAKQGLQERLTQVQEAQLQAERRLQEAEKQSQALQQELAMLREELRARGPVDTKPSNSLIPFLSFRSSEKDSAKDPGISGEATRHGGEPDLRPEGRRSLRMGAVFPRAPTANTASTEGLPAKPGSHTLRPRSFPSPTKCLRCTSLMLGLGRQGLGCDACGYFCHTTCAPQAPPCPVPPDLLRTALGVHPETGTGTAYEGFLSVPRPSGVRRGWQRVFAALSDSRLLLFDAPDLRLSPPSGALLQVLDLRDPQFSATPVLASDVIHAQSRDLPRIFRVTTSQLAVPPTTCTVLLLAESEGERERWLQVLGELQRLLLDARPRPRPVYTLKEAYDNGLPLLPHTLCAAILDQDRLALGTEEGLFVIHLRSNDIFQVGECRRVQQLTLSPSAGLLVVLCGRGPSVRLFALAELENIEVAGAKIPESRGCQVLAAGSILQARTPVLCVAVKRQVLCYQLGPGPGPWQRRIRELQAPATVQSLGLLGDRLCVGAAGGFALYPLLNEAAPLALGAGLVPEELPPSRGGLGEALGAVELSLSEFLLLFTTAGIYVDGAGRKSRGHELLWPAAPMGWGYAAPYLTVFSENSIDVFDVRRAEWVQTVPLKKVRPLNPEGSLFLYGTEKVRLTYLRNQLAEKDEFDIPDLTDNSRRQLFRTKSKRRFFFRVSEEQQKQQRREMLKDPFVRSKLISPPTNFNHLVHVGPANGRPGARDKSPAPEEKGRVARGSGPQRPHSFSEALRRPASMGSEGLGGDADPMKRKPWTSLSSESVSCPQGSLSPATSLMQVSERPRSLPLSPELESSP

SEQ ID NO: 13380 - protein, 391 aa, Homo sapiens
  Payload ID: 2603
  Gene Symbol: CDC42EP1
  Gene Name: CDC42 effector protein (Rho GTPase binding) 1
  Uniprot ID: Q00587
  ENSP ID: ENSP00000249014
MPGPQGGRGAATMSLGKLSPVGWVSSSQGKRRLTADMISHPLGDFRHTMHVGRGGDVFGDTSFLSNHGGSSGSTHRSPRSFLAKKLQLVRRVGAPPRRMASPPAPSPAPPAISPIIKNAISLPQLNQAAYDSLVVGKLSFDSSPTSSTDGHSSYGLDSGFCTISRLPRSEKPHDRDRDGSFPSEPGLRRSDSLLSFRLDLDLGPSLLSELLGVMSLPEAPAAETPAPAANPPAPTANPTGPAANPPATTANPPAPAANPSAPAATPTGPAANPPAPAASSTPHGHCPNGVTAGLGPVAEVKSSPVGGGPRGPAGPALGRHWGAGWDGGHHYPEMDARQERVEVLPQARASWESLDEEWRAPQAGSRTPVPSTVQANTFEFADAEEDDEVKV

SEQ ID NO: 13381 - protein, 48 aa, Homo sapiens
  Payload ID: 2603
  Gene Symbol: CDC42EP1
  Gene Name: CDC42 effector protein (Rho GTPase binding) 1
  ENSP ID: ENSP00000403710
MPGPQGGRGAATMSLGKLSPVGWVSSSQGKRRLTADMISHPLGDFRHT

SEQ ID NO: 13382 - protein, 60 aa, Homo sapiens
  Payload ID: 2603
  Gene Symbol: CDC42EP1
  Gene Name: CDC42 effector protein (Rho GTPase binding) 1
  ENSP ID: ENSP00000405006
MPGPQGGRGAATMSLGKLSPVGWVSSSQGKRRLTADMISHPLGDFRHTMHVGRGGDVFGD

SEQ ID NO: 13383 - protein, 70 aa, Homo sapiens
  Payload ID: 2603
  Gene Symbol: CDC42EP1
  Gene Name: CDC42 effector protein (Rho GTPase binding) 1
  ENSP ID: ENSP00000411682
MPGPQGGRGAATMSLGKLSPVGWVSSSQGKRRLTADMISHPLGDFRHTMHVGRGGDVFGDTSFLSNHGGS

SEQ ID NO: 13384 - protein, 210 aa, Homo sapiens
  Payload ID: 2604
  Gene Symbol: CDC42EP2
  Gene Name: CDC42 effector protein (Rho GTPase binding) 2
  Uniprot ID: O14613
  ENSP ID: ENSP00000279249
MSTKVPIYLKRGSRKGKKEKLRDLLSSDMISPPLGDFRHTIHIGSGGGSDMFGDISFLQGKFHLLPGTMVEGPEEDGTFDLPFQFTRTATVCGRELPDGPSPLLKNAISLPVIGGPQALTLPTAQAPPKPPRLHLETPQPSPQEGGSVDIWRIPETGSPNSGLTPESGAEEPFLSNASSLLSLHVDLGPSILDDVLQIMDQDLDSMQIPT

SEQ ID NO: 13385 - protein, 210 aa, Homo sapiens; identical to SEQ ID NO: 13384
  Payload ID: 2604
  Gene Symbol: CDC42EP2
  Gene Name: CDC42 effector protein (Rho GTPase binding) 2
  Uniprot ID: O14613
  ENSP ID: ENSP00000431660

SEQ ID NO: 13386 - protein, 254 aa, Homo sapiens
  Payload ID: 2605
  Gene Symbol: CDC42EP3
  Gene Name: CDC42 effector protein (Rho GTPase binding) 3
  Uniprot ID: Q9UKI2
  ENSP ID: ENSP00000295324
MPAKTPIYLKAANNKKGKKFKLRDILSPDMISPPLGDFRHTIHIGKEGQHDVFGDISFLQGNYELLPGNQEKAHLGQFPGHNEFFRANSTSDSVFTETPSPVLKNAISLPTIGGSQALMLPLLSPVTFNSKQESFGPAKLPRLSCEPVMEEKAQEKSSLLENGTVHQGDTSWGSSGSASQSSQGRDSHSSSLSEQYPDWPAEDMFDHPTPCELIKGKTKSEESLSDLTGSLLSLQLDLGPSLLDEVLNVMDKNK

SEQ ID NO: 13387 - protein, 34 aa, Homo sapiens
  Payload ID: 2605
  Gene Symbol: CDC42EP3
  Gene Name: CDC42 effector protein (Rho GTPase binding) 3
  ENSP ID: ENSP00000398062
MPAKTPIYLKAANNKKGKKFKLRDILSPDMISPP

SEQ ID NO: 13388 - protein, 215 aa, Homo sapiens
  Payload ID: 2605
  Gene Symbol: CDC42EP3
  Gene Name: CDC42 effector protein (Rho GTPase binding) 3
  ENSP ID: ENSP00000403298
MPAKTPIYLKAANNKKGKKFKLRDILSPDMISPPLGDFRHTIHIGKEGQHDVFGDISFLQGNYELLPGNQEKAHLGQFPGHNEFFRANSTSDSVFTETPSPVLKNAISLPTIGGSQALMLPLLSPVTFNSKQESFGPAKLPRLSCEPVMEEKAQEKSSLLENGTVHQGDTSWGSSGSASQSSQGRDSHSSSLSEQYPDWPAEDMFDHPTPCELIK

SEQ ID NO: 13389 - protein, 14 aa, Homo sapiens
  Payload ID: 2605
  Gene Symbol: CDC42EP3
  Gene Name: CDC42 effector protein (Rho GTPase binding) 3
  ENSP ID: ENSP00000409147
MPAKTPIYLKAANN

SEQ ID NO: 13390 - protein, 254 aa, Homo sapiens; identical to SEQ ID NO: 13386
  Payload ID: 2605
  Gene Symbol: CDC42EP3
  Gene Name: CDC42 effector protein (Rho GTPase binding) 3
  Uniprot ID: Q9UKI2
  ENSP ID: ENSP00000480549

SEQ ID NO: 13391 - protein, 356 aa, Homo sapiens
  Payload ID: 2606
  Gene Symbol: CDC42EP4
  Gene Name: CDC42 effector protein (Rho GTPase binding) 4
  Uniprot ID: Q9H3Q1
  ENSP ID: ENSP00000338258
MPILKQLVSSSVHSKRRSRADLTAEMISAPLGDFRHTMHVGRAGDAFGDTSFLNSKAGEPDGESLDEQPSSSSSKRSLLSRKFRGSKRSQSVTRGEREQRDMLGSLRDSALFVKNAMSLPQLNEKEAAEKGTSKLPKSLSSSPVKKANDGEGGDEEAGTEEAVPRRNGAAGPHSPDPLLDEQAFGDLTDLPVVPKATYGLKHAESIMSFHIDLGPSMLGDVLSIMDKEEWDPEEGEGGYHGDEGAAGTITQAPPYAVAAPPLARQEGKAGPDLPSLPSHALEDEGWAAAAPSPGSARSMGSHTTRDSSSLSSCTSGILEERSPAFRGPDRARAAVSRQPDKEFSFMDEEEEDEIRV

SEQ ID NO: 13392 - protein, 286 aa, Homo sapiens
  Payload ID: 2606
  Gene Symbol: CDC42EP4
  Gene Name: CDC42 effector protein (Rho GTPase binding) 4
  Uniprot ID: Q9H3Q1
  ENSP ID: ENSP00000404270
MPILKQLVSSSVHSKRRSRADLTAEMISAPLGDFRHTMHVGRAGDAFGDTSFLNSKAAEKGTSKLPKSLSSSPVKKANDGEGGDEEAGTEEAVPRRNGAAGPHSPDPLLDEQAFGDLTDLPVVPKATYGLKHAESIMSFHIDLGPSMLGDVLSIMDKEEWDPEEGEGGYHGDEGAAGTITQAPPYAVAAPPLARQEGKAGPDLPSLPSHALEDEGWAAAAPSPGSARSMGSHTTRDSSSLSSCTSGILEERSPAFRGPDRARAAVSRQPDKEFSFMDEEEEDEIRV

SEQ ID NO: 13393 - protein, 127 aa, Homo sapiens
  Payload ID: 2606
  Gene Symbol: CDC42EP4
  Gene Name: CDC42 effector protein (Rho GTPase binding) 4
  ENSP ID: ENSP00000462231
MPILKQLVSSSVHSKRRSRADLTAEMISAPLGDFRHTMHVGRAGDAFGDTSFLNSKAGEPDGESLDEQPSSSSSKRSLLSRKFRGSKRSQSVTRGEREQRDMLGSLRDSALFVKNAMSLPQLNEKEA

SEQ ID NO: 13394 - protein, 73 aa, Homo sapiens
  Payload ID: 2606
  Gene Symbol: CDC42EP4
  Gene Name: CDC42 effector protein (Rho GTPase binding) 4
  ENSP ID: ENSP00000463877
MPILKQLVSSSVHSKRRSRADLTAEMISAPLGDFRHTMHVGRAGDAFGDTSFLNSKAGEPDGESLDEQPSSSS

SEQ ID NO: 13395 - protein, 79 aa, Homo sapiens
  Payload ID: 2606
  Gene Symbol: CDC42EP4
  Gene Name: CDC42 effector protein (Rho GTPase binding) 4
  ENSP ID: ENSP00000464104
MPILKQLVSSSVHSKRRSRADLTAEMISAPLGDFRHTMHQLPLQLHLRHPGGAQPCLPGAGQGPGCCLKTARQGVLLHG

SEQ ID NO: 13396 - protein, 79 aa, Homo sapiens; identical to SEQ ID NO: 13395
  Payload ID: 2606
  Gene Symbol: CDC42EP4
  Gene Name: CDC42 effector protein (Rho GTPase binding) 4
  ENSP ID: ENSP00000485861

SEQ ID NO: 13397 - protein, 148 aa, Homo sapiens
  Payload ID: 2607
  Gene Symbol: CDC42EP5
  Gene Name: CDC42 effector protein (Rho GTPase binding) 5
  Uniprot ID: Q6NZY7
  ENSP ID: ENSP00000301200
MPVLKQLGPAQPKKRPDRGALSISAPLGDFRHTLHVGRGGDAFGDTSFLSRHGGGPPPEPRAPPAGAPRSPPPPAVPQSAAPSPADPLLSFHLDLGPSMLDAVLGVMDAARPEAAAAKPDAEPRPGTQPPQARCRPNADLELNDVIGL

SEQ ID NO: 13398 - protein, 148 aa, Homo sapiens; identical to SEQ ID NO: 13397
  Payload ID: 2607
  Gene Symbol: CDC42EP5
  Gene Name: CDC42 effector protein (Rho GTPase binding) 5
  Uniprot ID: Q6NZY7
  ENSP ID: ENSP00000479726

SEQ ID NO: 13399 - protein, 17 aa, Homo sapiens
  Payload ID: 2607
  Gene Symbol: CDC42EP5
  Gene Name: CDC42 effector protein (Rho GTPase binding) 5
  ENSP ID: ENSP00000483465
MPVLKQLGPAQPKKRPD

SEQ ID NO: 13400 - protein, 148 aa, Homo sapiens; identical to SEQ ID NO: 13397
  Payload ID: 2607
  Gene Symbol: CDC42EP5
  Gene Name: CDC42 effector protein (Rho GTPase binding) 5
  Uniprot ID: Q6NZY7
  ENSP ID: ENSP00000484158

SEQ ID NO: 13401 - protein, 17 aa, Homo sapiens
  Payload ID: 2607
  Gene Symbol: CDC42EP5
  Gene Name: CDC42 effector protein (Rho GTPase binding) 5
  ENSP ID: ENSP00000484979
MPVLKQLGPAQPKKRPD

SEQ ID NO: 13402 - protein, 148 aa, Homo sapiens; identical to SEQ ID NO: 13397
  Payload ID: 2607
  Gene Symbol: CDC42EP5
  Gene Name: CDC42 effector protein (Rho GTPase binding) 5
  Uniprot ID: Q6NZY7
  ENSP ID: ENSP00000484985

SEQ ID NO: 13403 - protein, 516 aa, Homo sapiens
  Payload ID: 2608
  Gene Symbol: ARHGEF9
  Gene Name: Cdc42 guanine nucleotide exchange  factor (GEF) 9
  Uniprot ID: O43307
  ENSP ID: ENSP00000253401
MTLLITGDSIVSAEAVWDHVTMANRELAFKAGDVIKVLDASNKDWWWGQIDDEEGWFPASFVRLWVNQEDEVEEGPSDVQNGHLDPNSDCLCLGRPLQNRDQMRANVINEIMSTERHYIKHLKDICEGYLKQCRKRRDMFSDEQLKVIFGNIEDIYRFQMGFVRDLEKQYNNDDPHLSEIGPCFLEHQDGFWIYSEYCNNHLDACMELSKLMKDSRYQHFFEACRLLQQMIDIAIDGFLLTPVQKICKYPLQLAELLKYTAQDHSDYRYVAAALAVMRNVTQQINERKRRLENIDKIAQWQASVLDWEGEDILDRSSELIYTGEMAWIYQPYGRNQQRVFFLFDHQMVLCKKDLIRRDILYYKGRIDMDKYEVVDIEDGRDDDFNVSMKNAFKLHNKETEEIHLFFAKKLEEKIRWLRAFREERKMVQEDEKIGFEISENQKRQAAMTVRKVPKQKGVNSARSVPPSYPPPQDPLNHGQYLVPDGIAQSQVFEFTEPKRSQSPFWQNFSRLTPFKK

SEQ ID NO: 13404 - protein, 564 aa, Homo sapiens
  Payload ID: 2608
  Gene Symbol: ARHGEF9
  Gene Name: Cdc42 guanine nucleotide exchange  factor (GEF) 9
  ENSP ID: ENSP00000364004
MTLLITGDSIVSAEAVWDHVTMANRELAFKAGDVIKVLDASNKDWWWGQIDDEEGWFPASFVRLWVNQEDEVEEGPSDVQNGHLDPNSDCLCLGRPLQNRDQMRANVINEIMSTERHYIKHLKDICEGYLKQCRKRRDMFSDEQLKVIFGNIEDIYRFQMGFVRDLEKQYNNDDPHLSEIGPCFLEHQDGFWIYSEYCNNHLDACMELSKLMKDSRYQHFFEACRLLQQMIDIAIDGFLLTPVQKICKYPLQLAELLKYTAQDHSDYRYVAAALAVMRNVTQQINERKRRLENIDKIAQWQASVLDWEGEDILDRSSELIYTGEMAWIYQPYGRNQQRVFFLFDHQMVLCKKDLIRRDILYYKGRIDMDKYEVVDIEDGRDDDFNVSMKNAFKLHNKETEEIHLFFAKKLEEKIRWLRAFREERKMVQEDEKIGFEISENQKRQAAMTVRKVPKQKGVNSARSVPPSYPPPQDPLNHGQYLVPDGIAQSQVFEFTEPKRSQSPFWQNFSRYCEGIKKPNRSKGVSDYDDAGVDFCSGNILHSGCFFYHWGFPCCSTSGSLQFCI

SEQ ID NO: 13405 - protein, 495 aa, Homo sapiens
  Payload ID: 2608
  Gene Symbol: ARHGEF9
  Gene Name: Cdc42 guanine nucleotide exchange  factor (GEF) 9
  ENSP ID: ENSP00000364006
MANRELAFKAGDVIKVLDASNKDWWWGQIDDEEGWFPASFVRLWVNQEDEVEEGPSDVQNGHLDPNSDCLCLGRPLQNRDQMRANVINEIMSTERHYIKHLKDICEGYLKQCRKRRDMFSDEQLKVIFGNIEDIYRFQMGFVRDLEKQYNNDDPHLSEIGPCFLEHQDGFWIYSEYCNNHLDACMELSKLMKDSRYQHFFEACRLLQQMIDIAIDGFLLTPVQKICKYPLQLAELLKYTAQDHSDYRYVAAALAVMRNVTQQINERKRRLENIDKIAQWQASVLDWEGEDILDRSSELIYTGEMAWIYQPYGRNQQRVFFLFDHQMVLCKKDLIRRDILYYKGRIDMDKYEVVDIEDGRDDDFNVSMKNAFKLHNKETEEIHLFFAKKLEEKIRWLRAFREERKMVQEDEKIGFEISENQKRQAAMTVRKVPKQKGVNSARSVPPSYPPPQDPLNHGQYLVPDGIAQSQVFEFTEPKRSQSPFWQNFSRLTPFKK

SEQ ID NO: 13406 - protein, 487 aa, Homo sapiens
  Payload ID: 2608
  Gene Symbol: ARHGEF9
  Gene Name: Cdc42 guanine nucleotide exchange  factor (GEF) 9
  ENSP ID: ENSP00000364012
MQWIRGGSGMLITGDSIVSAEAVWDHVTMANRELAFKAGDVIKVLDASNKDWWWGQIDDEEGWFPASFVRLWVNQEDEVEEGPSDVQNGHLDPNSDCLCLGRPLQNRDQMRANVINEIMSTERHYIKHLKDICEGYLKQCRKRRDMFSDEQLKVIFGNIEDIYRFQMGFVRDLEKQYNNDDPHLSEIGPCFLEHQDGFWIYSEYCNNHLDACMELSKLMKDSRYQHFFEACRLLQQMIDIAIDGFLLTPVQKICKYPLQLAELLKYTAQDHSDYRYVAAALAVMRNVTQQINERKRRLENIDKIAQWQASVLDWEGEDILDRSSELIYTGEMAWIYQPYGRNQQRVFFLFDHQMVLCKKDLIRRDILYYKGRIDMDKYEVVDIEDGRDDDFNVSMKNAFKLHNKETEEIHLFFAKKLEEKIRWLRAFREERKMVQEDEKIGFEISENQKRQAAMTVRKLPFPQLSEARICSPKGFASVFNGTCCGES

SEQ ID NO: 13407 - protein, 483 aa, Homo sapiens
  Payload ID: 2608
  Gene Symbol: ARHGEF9
  Gene Name: Cdc42 guanine nucleotide exchange  factor (GEF) 9
  ENSP ID: ENSP00000399994
MQWIRGGSGMLITGDSIVSAEAVWDHVTMANRELAFKAGDVIKVLDASNKDWWWGQIDDEEGWFPASFVRLWVNQEDEVEEGPSDVQNGHLDPNSDCLCLGRPLQNRDQMRANVINEIMSTERHYIKHLKDICEGYLKQCRKRRDMFSDEQLKVIFGNIEDIYRFQMGFVRDLEKQYNNDDPHLSEIGPCFLEHQDGFWIYSEYCNNHLDACMELSKLMKDSRYQHFFEACRLLQQMIDIAIDGFLLTPVQKICKYPLQLAELLKYTAQDHSDYRYVAAALAVMRNVTQQINERKRRLENIDKIAQWQASVLDWEGEDILDRSSELIYTGEMAWIYQPYGRNQQRVFFLFDHQMVLCKKDLIRRDILYYKGRIDMDKYEVVDIEDGRDDDFNVSMKNAFKLHNKETEEIHLFFAKKLEEKIRWLRAFREERKMVQEDEKIGFEISENQKRQAAMTVRKVPKQKGGTGEGEIEFVGFFAGPTPA

SEQ ID NO: 13408 - protein, 110 aa, Homo sapiens
  Payload ID: 2608
  Gene Symbol: ARHGEF9
  Gene Name: Cdc42 guanine nucleotide exchange  factor (GEF) 9
  ENSP ID: ENSP00000485083
MRANVINEIMSTERHYIKHLKDICEGYLKQCRKRRDMFSDEQLKVIFGNIEDIYRFQMGFVRDLEKQYNNDDPHLSEIGPCFLEHQDGFWIYSEYCNNHLDACMELSKLM

SEQ ID NO: 13409 - protein, 91 aa, Homo sapiens
  Payload ID: 2608
  Gene Symbol: ARHGEF9
  Gene Name: Cdc42 guanine nucleotide exchange  factor (GEF) 9
  ENSP ID: ENSP00000485086
  MOD_RES (1)..(1): Any amino acid
XVMRNVTQQINERKRRLENIDKIAQWQASVLDWEGEDILDRSSELIYTGEMAWIYQPYGRNQQRVFFLFDHQMVLCKKALKFLKTRRGRLQ

SEQ ID NO: 13410 - protein, 495 aa, Homo sapiens; identical to SEQ ID NO: 13405
  Payload ID: 2608
  Gene Symbol: ARHGEF9
  Gene Name: Cdc42 guanine nucleotide exchange  factor (GEF) 9
  ENSP ID: ENSP00000485144

SEQ ID NO: 13411 - protein, 108 aa, Homo sapiens
  Payload ID: 2608
  Gene Symbol: ARHGEF9
  Gene Name: Cdc42 guanine nucleotide exchange  factor (GEF) 9
  ENSP ID: ENSP00000485160
MRANVINEIMSTERHYIKHLKDICEGYLKQCRKRRDMFSDEQLKVIFGNIEDIYRFQMGFVRDLEKQYNNDDPHLSEIGPCFLEHQDGFWIYSEYCNNHLDACMELSK

SEQ ID NO: 13412 - protein, 42 aa, Homo sapiens
  Payload ID: 2608
  Gene Symbol: ARHGEF9
  Gene Name: Cdc42 guanine nucleotide exchange  factor (GEF) 9
  ENSP ID: ENSP00000485282
MANRELAFKAGDVIKVLDASNKDWWWGQIDDEEGWFPASFVR

SEQ ID NO: 13413 - protein, 115 aa, Homo sapiens
  Payload ID: 2608
  Gene Symbol: ARHGEF9
  Gene Name: Cdc42 guanine nucleotide exchange  factor (GEF) 9
  ENSP ID: ENSP00000485327
MANRELAFKAGDVIKVLDASNKDWWWGQIDDEEGWFPASFVRLWVNQEDEVEEGPSDVQNGHLDPNSDCLCLGRPLQNRDQMRANVINEIMSTERHYIKHLKDICEGYLKQCRKR

SEQ ID NO: 13414 - protein, 463 aa, Homo sapiens
  Payload ID: 2608
  Gene Symbol: ARHGEF9
  Gene Name: Cdc42 guanine nucleotide exchange  factor (GEF) 9
  Uniprot ID: O43307
  ENSP ID: ENSP00000485369
MQWIRGGSGMLWVNQEDEVEEGPSDVQNGHLDPNSDCLCLGRPLQNRDQMRANVINEIMSTERHYIKHLKDICEGYLKQCRKRRDMFSDEQLKVIFGNIEDIYRFQMGFVRDLEKQYNNDDPHLSEIGPCFLEHQDGFWIYSEYCNNHLDACMELSKLMKDSRYQHFFEACRLLQQMIDIAIDGFLLTPVQKICKYPLQLAELLKYTAQDHSDYRYVAAALAVMRNVTQQINERKRRLENIDKIAQWQASVLDWEGEDILDRSSELIYTGEMAWIYQPYGRNQQRVFFLFDHQMVLCKKDLIRRDILYYKGRIDMDKYEVVDIEDGRDDDFNVSMKNAFKLHNKETEEIHLFFAKKLEEKIRWLRAFREERKMVQEDEKIGFEISENQKRQAAMTVRKVPKQKGVNSARSVPPSYPPPQDPLNHGQYLVPDGIAQSQVFEFTEPKRSQSPFWQNFSRLTPFKK

SEQ ID NO: 13415 - protein, 134 aa, Homo sapiens
  Payload ID: 2608
  Gene Symbol: ARHGEF9
  Gene Name: Cdc42 guanine nucleotide exchange  factor (GEF) 9
  ENSP ID: ENSP00000485559
MANRELAFKAGDVIKVLDASNKDWWWGQIDDEEGWFPASFVRLWVNQEDEVEEGPSDVQNGHLDPNSDCLCLGRPLQNRDQMRANVINEIMSTERHYIKHLKDICEGYLKQCRKRRDMFSDEQLKVIFGNIEDI

SEQ ID NO: 13416 - protein, 414 aa, Homo sapiens
  Payload ID: 2608
  Gene Symbol: ARHGEF9
  Gene Name: Cdc42 guanine nucleotide exchange  factor (GEF) 9
  Uniprot ID: O43307
  ENSP ID: ENSP00000485626
MRANVINEIMSTERHYIKHLKDICEGYLKQCRKRRDMFSDEQLKVIFGNIEDIYRFQMGFVRDLEKQYNNDDPHLSEIGPCFLEHQDGFWIYSEYCNNHLDACMELSKLMKDSRYQHFFEACRLLQQMIDIAIDGFLLTPVQKICKYPLQLAELLKYTAQDHSDYRYVAAALAVMRNVTQQINERKRRLENIDKIAQWQASVLDWEGEDILDRSSELIYTGEMAWIYQPYGRNQQRVFFLFDHQMVLCKKDLIRRDILYYKGRIDMDKYEVVDIEDGRDDDFNVSMKNAFKLHNKETEEIHLFFAKKLEEKIRWLRAFREERKMVQEDEKIGFEISENQKRQAAMTVRKVPKQKGVNSARSVPPSYPPPQDPLNHGQYLVPDGIAQSQVFEFTEPKRSQSPFWQNFSRLTPFKK

SEQ ID NO: 13417 - protein, 136 aa, Homo sapiens
  Payload ID: 2608
  Gene Symbol: ARHGEF9
  Gene Name: Cdc42 guanine nucleotide exchange  factor (GEF) 9
  ENSP ID: ENSP00000485633
MTLLITGDSIVSAEAVWDHVTMANRELAFKAGDVIKVLDASNKDWWWGQIDDEEGWFPASFVRLWVNQEDEVEEGPSDVQNGHLDPNSDCLCLGRPLQNRDQMRANVINEIMSTERHYIKHLKDICEKVGGDMILL

SEQ ID NO: 13418 - protein, 79 aa, Homo sapiens
  Payload ID: 2609
  Gene Symbol: CDC42SE1
  Gene Name: CDC42 small effector 1
  Uniprot ID: Q9NRR8
  ENSP ID: ENSP00000349773
MSEFWHKLGCCVVEKPQPKKKRRRIDRTMIGEPMNFVHLTHIGSGEMGAGDGLAMTGAVQEQMRSKGNRDRPWSNSRGL

SEQ ID NO: 13419 - protein, 79 aa, Homo sapiens; identical to SEQ ID NO: 13418
  Payload ID: 2609
  Gene Symbol: CDC42SE1
  Gene Name: CDC42 small effector 1
  Uniprot ID: Q9NRR8
  ENSP ID: ENSP00000445647

SEQ ID NO: 13420 - protein, 79 aa, Homo sapiens; identical to SEQ ID NO: 13418
  Payload ID: 2609
  Gene Symbol: CDC42SE1
  Gene Name: CDC42 small effector 1
  Uniprot ID: Q9NRR8
  ENSP ID: ENSP00000475845

SEQ ID NO: 13421 - protein, 84 aa, Homo sapiens
  Payload ID: 2610
  Gene Symbol: CDC42SE2
  Gene Name: CDC42 small effector 2
  Uniprot ID: Q9NRR3
  ENSP ID: ENSP00000353706
MSEFWLCFNCCIAEQPQPKRRRRIDRSMIGEPTNFVHTAHVGSGDLFSGMNSVSSIQNQMQSKGGYGGGMPANVQMQLVDTKAG

SEQ ID NO: 13422 - protein, 84 aa, Homo sapiens; identical to SEQ ID NO: 13421
  Payload ID: 2610
  Gene Symbol: CDC42SE2
  Gene Name: CDC42 small effector 2
  Uniprot ID: Q9NRR3
  ENSP ID: ENSP00000378667

SEQ ID NO: 13423 - protein, 54 aa, Homo sapiens
  Payload ID: 2610
  Gene Symbol: CDC42SE2
  Gene Name: CDC42 small effector 2
  ENSP ID: ENSP00000425292
HVGSGDLFSGMNSPSRTFCSEDSHIQLWEIIISLIIPSTFEDYQISQQQYCGLE

SEQ ID NO: 13424 - protein, 57 aa, Homo sapiens
  Payload ID: 2610
  Gene Symbol: CDC42SE2
  Gene Name: CDC42 small effector 2
  ENSP ID: ENSP00000426779
MIGEPTNFVHTAHVGSGDLFSGMNSVSSIQNQMQSKGGYGGGMPANVQMQLVDTKAG

SEQ ID NO: 13425 - protein, 84 aa, Homo sapiens; identical to SEQ ID NO: 13421
  Payload ID: 2610
  Gene Symbol: CDC42SE2
  Gene Name: CDC42 small effector 2
  Uniprot ID: Q9NRR3
  ENSP ID: ENSP00000427421

SEQ ID NO: 13426 - protein, 484 aa, Homo sapiens
  Payload ID: 2611
  Gene Symbol: CLK1
  Gene Name: CDC-like kinase 1
  Uniprot ID: P49759
  ENSP ID: ENSP00000326830
MRHSKRTYCPDWDDKDWDYGKWRSSSSHKRRKRSHSSAQENKRCKYNHSKMCDSHYLESRSINEKDYHSRRYIDEYRNDYTQGCEPGHRQRDHESRYQNHSSKSSGRSGRSSYKSKHRIHHSTSHRRSHGKSHRRKRTRSVEDDEEGHLICQSGDVLSARYEIVDTLGEGAFGKVVECIDHKAGGRHVAVKIVKNVDRYCEAARSEIQVLEHLNTTDPNSTFRCVQMLEWFEHHGHICIVFELLGLSTYDFIKENGFLPFRLDHIRKMAYQICKSVNFLHSNKLTHTDLKPENILFVQSDYTEAYNPKIKRDERTLINPDIKVVDFGSATYDDEHHSTLVSTRHYRAPEVILALGWSQPCDVWSIGCILIEYYLGFTVFPTHDSKEHLAMMERILGPLPKHMIQKTRKRKYFHHDRLDWDEHSSAGRYVSRRCKPLKEFMLSQDVEHERLFDLIQKMLEYDPAKRITLREALKHPFFDLLKKSI

SEQ ID NO: 13427 - protein, 307 aa, Homo sapiens
  Payload ID: 2611
  Gene Symbol: CLK1
  Gene Name: CDC-like kinase 1
  ENSP ID: ENSP00000386358
MHLSNRGGRHVAVKIVKNVDRYCEAARSEIQVLEHLNTTDPNSTFRCVQMLEWFEHHGHICIVFELLGLSTYDFIKENGFLPFRLDHIRKMAYQICKSVNFLHSNKLTHTDLKPENILFVQSDYTEAYNPKIKRDERTLINPDIKVVDFGSATYDDEHHSTLVSTRHYRAPEVILALGWSQPCDVWSIGCILIEYYLGFTVFPTHDSKEHLAMMERILGPLPKHMIQKTRKRKYFHHDRLDWDEHSSAGRYVSRRCKPLKEFMLSQDVEHERLFDLIQKMLEYDPAKRITLREALKHPFFDLLKKSI

SEQ ID NO: 13428 - protein, 355 aa, Homo sapiens
  Payload ID: 2611
  Gene Symbol: CLK1
  Gene Name: CDC-like kinase 1
  ENSP ID: ENSP00000386875
MRHSKRTYCPDWDDKDWDYGKWRSSSSHKRRKRSHSSAQENKRCKYNHSKMCDSHYLESRSINEKDYHSRRYIDEYRNDYTQGCEPGHRQRDHESRYQNHSSKSSGRSGRSSYKSKHRIHHSTSHRRSHGKSHRRKRTRSVEDDEEGHLICQSGDVLSARYEIVDTLGEGAFGKVVECIDHKAGGRHVAVKIVKNVDRYCEAARSEIQVLEHLNTTDPNSTFRCVQMLEWFEHHGHICIVFELLGLSTYDFIKENGFLPFRLDHIRKMAYQICKSVNFLHSNKLTHTDLKPENILFVQSDYTEAYNPKIKRDERTLINPDIKVVDFGSATYDDEHHSTLVSTRHYRAPEVILDTR

SEQ ID NO: 13429 - protein, 526 aa, Homo sapiens
  Payload ID: 2611
  Gene Symbol: CLK1
  Gene Name: CDC-like kinase 1
  Uniprot ID: P49759
  ENSP ID: ENSP00000394734
MAAGRRPASALWPERRGSPLRGDLLGFQNVREPSSCGETLSGMRHSKRTYCPDWDDKDWDYGKWRSSSSHKRRKRSHSSAQENKRCKYNHSKMCDSHYLESRSINEKDYHSRRYIDEYRNDYTQGCEPGHRQRDHESRYQNHSSKSSGRSGRSSYKSKHRIHHSTSHRRSHGKSHRRKRTRSVEDDEEGHLICQSGDVLSARYEIVDTLGEGAFGKVVECIDHKAGGRHVAVKIVKNVDRYCEAARSEIQVLEHLNTTDPNSTFRCVQMLEWFEHHGHICIVFELLGLSTYDFIKENGFLPFRLDHIRKMAYQICKSVNFLHSNKLTHTDLKPENILFVQSDYTEAYNPKIKRDERTLINPDIKVVDFGSATYDDEHHSTLVSTRHYRAPEVILALGWSQPCDVWSIGCILIEYYLGFTVFPTHDSKEHLAMMERILGPLPKHMIQKTRKRKYFHHDRLDWDEHSSAGRYVSRRCKPLKEFMLSQDVEHERLFDLIQKMLEYDPAKRITLREALKHPFFDLLKKSI

SEQ ID NO: 13430 - protein, 136 aa, Homo sapiens
  Payload ID: 2611
  Gene Symbol: CLK1
  Gene Name: CDC-like kinase 1
  Uniprot ID: P49759
  ENSP ID: ENSP00000400487
MRHSKRTYCPDWDDKDWDYGKWRSSSSHKRRKRSHSSAQENKRCKYNHSKMCDSHYLESRSINEKDYHSRRYIDEYRNDYTQGCEPGHRQRDHESRYQNHSSKSSGRSGRSSYKSKHRIHHSTSHRRSHGMKLLIL

SEQ ID NO: 13431 - protein, 454 aa, Homo sapiens
  Payload ID: 2611
  Gene Symbol: CLK1
  Gene Name: CDC-like kinase 1
  ENSP ID: ENSP00000479484
MRHSKRTYCPDWDDKDWDYGKWRSSSSHKRRKRSHSSAQENKRCKYNHSKMCDSHYLESRSINEKDYHSRRYIDEYRNDYTQGCEPGHRQRDHESRYQNHSSKSSGRSGRSSYKSKHRIHHSTSHRRSHGDEIVDTLGEGAFGKVVECIDHKAGGRHVAVKIVKNVDRYCEAARSEIQVLEHLNTTDPNSTFRCVQMLEWFEHHGHICIVFELLGLSTYDFIKENGFLPFRLDHIRKMAYQICKSVNFLHSNKLTHTDLKPENILFVQSDYTEAYNPKIKRDERTLINPDIKVVDFGSATYDDEHHSTLVSTRHYRAPEVILALGWSQPCDVWSIGCILIEYYLGFTVFPTHDSKEHLAMMERILGPLPKHMIQKTRKRKYFHHDRLDWDEHSSAGRYVSRRCKPLKEFMLSQDVEHERLFDLIQKMLEYDPAKRITLREALKHPFFDLLKKSI

SEQ ID NO: 13432 - protein, 497 aa, Homo sapiens
  Payload ID: 2612
  Gene Symbol: CLK2
  Gene Name: CDC-like kinase 2
  ENSP ID: ENSP00000347759
MPHPRRYHSSERGSRGSYREHYRSRKHKRRRSRSWSSSSDRTRRRRREDSYHVRSRSYDDRSSDRRVYDRRYCGSYRRNDYSRDRGDAYYDTDYRHSYEYQRENSSYRSQRSSRRKHRRRRRRSRTFSRSSSHSSRRAKSVEDDAEGHLIYHVGDWLQERYEIVSTLGEGTFGRVVQCVDHRRGGARVALKIIKNVEKYKEAARLEINVLEKINEKDPDNKNLCVQMFDWFDYHGHMCISFELLGLSTFDFLKDNNYLPYPIHQVRHMAFQLCQAVKFLHDNKLTHTDLKPENILFVNSDYELTYNLEKKRDERSVKSTAVRVVDFGSATFDHEHHSTIVSTRHYRAPEVILELGWSQPCDVWSIGCIIFEYYVGFTLFQTHDNREHLAMMERILGPIPSRMIRKTRKQKYFYRGRLDWDENTSAGRYVRENCKPLRRYLTSEAEEHHQLFDLIESMLEYEPAKRLTLGEALQHPFFARLRAEPPNKLWDSSRDISR

SEQ ID NO: 13433 - protein, 498 aa, Homo sapiens
  Payload ID: 2612
  Gene Symbol: CLK2
  Gene Name: CDC-like kinase 2
  Uniprot ID: P49760
  ENSP ID: ENSP00000354856
MPHPRRYHSSERGSRGSYREHYRSRKHKRRRSRSWSSSSDRTRRRRREDSYHVRSRSSYDDRSSDRRVYDRRYCGSYRRNDYSRDRGDAYYDTDYRHSYEYQRENSSYRSQRSSRRKHRRRRRRSRTFSRSSSHSSRRAKSVEDDAEGHLIYHVGDWLQERYEIVSTLGEGTFGRVVQCVDHRRGGARVALKIIKNVEKYKEAARLEINVLEKINEKDPDNKNLCVQMFDWFDYHGHMCISFELLGLSTFDFLKDNNYLPYPIHQVRHMAFQLCQAVKFLHDNKLTHTDLKPENILFVNSDYELTYNLEKKRDERSVKSTAVRVVDFGSATFDHEHHSTIVSTRHYRAPEVILELGWSQPCDVWSIGCIIFEYYVGFTLFQTHDNREHLAMMERILGPIPSRMIRKTRKQKYFYRGRLDWDENTSAGRYVRENCKPLRRYLTSEAEEHHQLFDLIESMLEYEPAKRLTLGEALQHPFFARLRAEPPNKLWDSSRDISR

SEQ ID NO: 13434 - protein, 499 aa, Homo sapiens
  Payload ID: 2612
  Gene Symbol: CLK2
  Gene Name: CDC-like kinase 2
  Uniprot ID: P49760
  ENSP ID: ENSP00000357345
MPHPRRYHSSERGSRGSYREHYRSRKHKRRRSRSWSSSSDRTRRRRREDSYHVRSRSSYDDRSSDRRVYDRRYCGSYRRNDYSRDRGDAYYDTDYRHSYEYQRENSSYRSQRSSRRKHRRRRRRSRTFSRSSSQHSSRRAKSVEDDAEGHLIYHVGDWLQERYEIVSTLGEGTFGRVVQCVDHRRGGARVALKIIKNVEKYKEAARLEINVLEKINEKDPDNKNLCVQMFDWFDYHGHMCISFELLGLSTFDFLKDNNYLPYPIHQVRHMAFQLCQAVKFLHDNKLTHTDLKPENILFVNSDYELTYNLEKKRDERSVKSTAVRVVDFGSATFDHEHHSTIVSTRHYRAPEVILELGWSQPCDVWSIGCIIFEYYVGFTLFQTHDNREHLAMMERILGPIPSRMIRKTRKQKYFYRGRLDWDENTSAGRYVRENCKPLRRYLTSEAEEHHQLFDLIESMLEYEPAKRLTLGEALQHPFFARLRAEPPNKLWDSSRDISR

SEQ ID NO: 13435 - protein, 497 aa, Homo sapiens; identical to SEQ ID NO: 13432
  Payload ID: 2612
  Gene Symbol: CLK2
  Gene Name: CDC-like kinase 2
  ENSP ID: ENSP00000458788

SEQ ID NO: 13436 - protein, 498 aa, Homo sapiens; identical to SEQ ID NO: 13433
  Payload ID: 2612
  Gene Symbol: CLK2
  Gene Name: CDC-like kinase 2
  Uniprot ID: P49760
  ENSP ID: ENSP00000459461

SEQ ID NO: 13437 - protein, 499 aa, Homo sapiens; identical to SEQ ID NO: 13434
  Payload ID: 2612
  Gene Symbol: CLK2
  Gene Name: CDC-like kinase 2
  Uniprot ID: P49760
  ENSP ID: ENSP00000460443

SEQ ID NO: 13438 - protein, 490 aa, Homo sapiens
  Payload ID: 2613
  Gene Symbol: CLK3
  Gene Name: CDC-like kinase 3
  Uniprot ID: P49761
  ENSP ID: ENSP00000344112
MHHCKRYRSPEPDPYLSYRWKRRRSYSREHEGRLRYPSRREPPPRRSRSRSHDRLPYQRRYRERRDSDTYRCEERSPSFGEDYYGPSRSRHRRRSRERGPYRTRKHAHHCHKRRTRSCSSASSRSQQSSKRSSRSVEDDKEGHLVCRIGDWLQERYEIVGNLGEGTFGKVVECLDHARGKSQVALKIIRNVGKYREAARLEINVLKKIKEKDKENKFLCVLMSDWFNFHGHMCIAFELLGKNTFEFLKENNFQPYPLPHVRHMAYQLCHALRFLHENQLTHTDLKPENILFVNSEFETLYNEHKSCEEKSVKNTSIRVADFGSATFDHEHHTTIVATRHYRPPEVILELGWAQPCDVWSIGCILFEYYRGFTLFQTHENREHLVMMEKILGPIPSHMIHRTRKQKYFYKGGLVWDENSSDGRYVKENCKPLKSYMLQDSLEHVQLFDLMRRMLEFDPAQRITLAEALLHPFFAGLTPEERSFHTSRNPSR

SEQ ID NO: 13439 - protein, 638 aa, Homo sapiens
  Payload ID: 2613
  Gene Symbol: CLK3
  Gene Name: CDC-like kinase 3
  Uniprot ID: P49761
  ENSP ID: ENSP00000378505
MPVLSARRRELADHAGSGRRSGPSPTARSGPHLSALRAQPARAAHLSGRGTYVRRDTAGGGPGQARPLGPPGTSLLGRGARRSGEGWCPGAFESGARAARPPSRVEPRLATAASREGAGLPRAEVAAGSGRGARSGEWGLAAAGAWETMHHCKRYRSPEPDPYLSYRWKRRRSYSREHEGRLRYPSRREPPPRRSRSRSHDRLPYQRRYRERRDSDTYRCEERSPSFGEDYYGPSRSRHRRRSRERGPYRTRKHAHHCHKRRTRSCSSASSRSQQSSKRSSRSVEDDKEGHLVCRIGDWLQERYEIVGNLGEGTFGKVVECLDHARGKSQVALKIIRNVGKYREAARLEINVLKKIKEKDKENKFLCVLMSDWFNFHGHMCIAFELLGKNTFEFLKENNFQPYPLPHVRHMAYQLCHALRFLHENQLTHTDLKPENILFVNSEFETLYNEHKSCEEKSVKNTSIRVADFGSATFDHEHHTTIVATRHYRPPEVILELGWAQPCDVWSIGCILFEYYRGFTLFQTHENREHLVMMEKILGPIPSHMIHRTRKQKYFYKGGLVWDENSSDGRYVKENCKPLKSYMLQDSLEHVQLFDLMRRMLEFDPAQRITLAEALLHPFFAGLTPEERSFHTSRNPSR

SEQ ID NO: 13440 - protein, 152 aa, Homo sapiens
  Payload ID: 2613
  Gene Symbol: CLK3
  Gene Name: CDC-like kinase 3
  Uniprot ID: P49761
  ENSP ID: ENSP00000431825
MHHCKRYRSPEPDPYLSYRWKRRRSYSREHEGRLRYPSRREPPPRRSRSRSHDRLPYQRRYRERRDSDTYRCEERSPSFGEDYYGPSRSRHRRRSRERGPYRTRKHAHHCHKRRTRSCSSASSMRLWGTWVKAPLARWWSAWTMPEGSLRLP

SEQ ID NO: 13441 - protein, 59 aa, Homo sapiens
  Payload ID: 2613
  Gene Symbol: CLK3
  Gene Name: CDC-like kinase 3
  ENSP ID: ENSP00000454785
  MOD_RES (1)..(1): Any amino acid
XAFELLGKNTFEFLKENNFQPYPLPHVRHMAYQLCHALRWPCKLCSWCREEGTTSRLLL

SEQ ID NO: 13442 - protein, 193 aa, Homo sapiens
  Payload ID: 2613
  Gene Symbol: CLK3
  Gene Name: CDC-like kinase 3
  ENSP ID: ENSP00000454961
EHKSCEEKSVKNTSIRVADFGSATFDHEHHTTIVATRHYRPPEVILELGWAQPCDVWSIGCILFEYYRGFTLFQTHENREHLVMMEKILGPIPSHMIHRTRKQKYFYKGGLVWDENSSDGRYVKENCKPLKVSFWLPPAELMPRRDPRHWADIQQRQARPLKAASLIQLYGRRHPRLLGAGNGASCKLPQRGP

SEQ ID NO: 13443 - protein, 306 aa, Homo sapiens
  Payload ID: 2613
  Gene Symbol: CLK3
  Gene Name: CDC-like kinase 3
  ENSP ID: ENSP00000455762
SGRGARSGEWGLAAAGAWETMHHCKRYRSPEPDPYLSYRWKRRRSYSREHEGRLRYPSRREPPPRRSRSRSKDPADQRPHPPFGSHDRLPYQRRYRERRDSDTYRCEERSPSFGEDYYGPSRSRHRRRSRERGPYRTRKHAHHCHKRRTRSCSSASSRSQQSSKRSSRSVEDDKEGHLVCRIGDWLQERYEIVGNLGEGTFGKVVECLDHARGKSQVALKIIRNVGKYREAARLEINVLKKIKEKDKENKFLCVLMSDWFNFHGHMCIAFELLGKNTFEFLKENNFQPYPLPHVRHMAYQLCHALR

SEQ ID NO: 13444 - protein, 145 aa, Homo sapiens
  Payload ID: 2613
  Gene Symbol: CLK3
  Gene Name: CDC-like kinase 3
  ENSP ID: ENSP00000455905
MHHCKRYRSPEPDPYLSYRWKRRRSYSREHEGRLRYPSRREPPPRRSRSRSHDRLPYQRRYRERRDSDTYRCEERSPSFGEDYYGPSRSRHRRRSRERGPYRTRKHAHHCHKRRTRSCSSASSMRLWGTWVKAPLARWWSAWTMP

SEQ ID NO: 13445 - protein, 190 aa, Homo sapiens
  Payload ID: 2613
  Gene Symbol: CLK3
  Gene Name: CDC-like kinase 3
  ENSP ID: ENSP00000456202
MSDWFNFHGHMCIAFELLGKNTFEFLKENNFQPYPLPHVRHMAYQLCHALRFLHENQLTHTDLKPENILFVNSEFETLYNEHKSCEEKSVKNTSIRVADFGSATFDHEHHTTIVATRHYRPPEVILELGWAQPCDVWSIGCILFEYYRGFTLFQTHENREHLVMMEKILGPIPSHMIHRTRKQKYFYKGG

SEQ ID NO: 13446 - protein, 173 aa, Homo sapiens
  Payload ID: 2613
  Gene Symbol: CLK3
  Gene Name: CDC-like kinase 3
  ENSP ID: ENSP00000456278
GSGRGARSGEWGLAAAGAWETMHHCKRYRSPEPDPYLSYRWKRRRSYSREHEGRLRYPSRREPPPRRSRSRSHDRLPYQRRYRERRDSDTYRCEERSPSFGEDYYGPSRSRHRRRSRERGPYRTRKHAHHCHKRRTRSCSSASSMRLWGTWVKAPLARWWSAWTMPEGSLRLP

SEQ ID NO: 13447 - protein, 117 aa, Homo sapiens
  Payload ID: 2613
  Gene Symbol: CLK3
  Gene Name: CDC-like kinase 3
  ENSP ID: ENSP00000456399
MHHCKRYRSPEPDPYLSYRWKRRRSYSREHEGRLRYPSRREPPPRRSRSRSHDRLPYQRRYRERRDSDTYRCEERSPSFGEDYYGPSRSRHRRRSRERGPYRTRKHAHHCHKRRTRS

SEQ ID NO: 13448 - protein, 70 aa, Homo sapiens
  Payload ID: 2613
  Gene Symbol: CLK3
  Gene Name: CDC-like kinase 3
  ENSP ID: ENSP00000456431
  MOD_RES (1)..(1): Any amino acid
XLPQTHENREHLVMMEKILGPIPSHMIHRTRKQKYFYKGGLVWDENSSDGRYVKENCKPLKNISSTEEWI

SEQ ID NO: 13449 - protein, 19 aa, Homo sapiens
  Payload ID: 2613
  Gene Symbol: CLK3
  Gene Name: CDC-like kinase 3
  ENSP ID: ENSP00000457362
MSDWFNFHGHMCIAFELLG

SEQ ID NO: 13450 - protein, 224 aa, Homo sapiens
  Payload ID: 2613
  Gene Symbol: CLK3
  Gene Name: CDC-like kinase 3
  ENSP ID: ENSP00000457696
MHHCKRYRSPEPDPYLSYRWKRRRSYSREHEGRLRYPSRREPPPRRSRSRSHDRLPYQRRYRERRDSDTYRCEERSPSFGEDYYGPSRSRHRRRSRERGPYRTRKHAHHCHKRRTRSCSSASSRSQQSSKRSSRSVEDDKEGHLVCRIGDWLQERYEIVGNLGEGTFGKVVECLDHARGKSQVALKIIRNVGKYREAARLEINVLKKIKEKDKENKFLCVLMSD

SEQ ID NO: 13451 - protein, 160 aa, Homo sapiens
  Payload ID: 2613
  Gene Symbol: CLK3
  Gene Name: CDC-like kinase 3
  ENSP ID: ENSP00000457936
  MOD_RES (1)..(1): Any amino acid
XSGEWGLAAAGAWETMHHCKRYRSPEPDPYLSYRWKRRRSYSREHEGRLRYPSRREPPPRRSRSRSHDRLPYQRRYRERRDSDTYRCEERSPSFGEDYYGPSRSRHRRRSRERGPYRTRKHAHHCHKRRTRSCSSASSREVSGCPEDHPQRGQVPGGCPA

SEQ ID NO: 13452 - protein, 239 aa, Homo sapiens
  Payload ID: 2613
  Gene Symbol: CLK3
  Gene Name: CDC-like kinase 3
  ENSP ID: ENSP00000458099
MHHCKRYRSPEPDPYLSYRWKRRRSYSREHEGRLRYPSRREPPPRRSRSRSHDRLPYQRRYRERRDSDTYRCEERSPSFGEDYYGPSRSRHRRRSRERGPYRTRKHAHHCHKRRTRSCSSASSRSQQSSKRSSRSVEDDKEGHLVCRIGDWLQERYEIVGNLGEGTFGKVVECLDHARGKSQVALKIIRNVGKYREAARLEINVLKKIKEKDKENKFLCVLMSDWFNFHGHMCIAFELL

SEQ ID NO: 13453 - protein, 481 aa, Homo sapiens
  Payload ID: 2614
  Gene Symbol: CLK4
  Gene Name: CDC-like kinase 4
  Uniprot ID: Q9HAZ1
  ENSP ID: ENSP00000316948
MRHSKRTHCPDWDSRESWGHESYRGSHKRKRRSHSSTQENRHCKPHHQFKESDCHYLEARSLNERDYRDRRYVDEYRNDYCEGYVPRHYHRDIESGYRIHCSKSSVRSRRSSPKRKRNRHCSSHQSRSKSHRRKRSRSIEDDEEGHLICQSGDVLRARYEIVDTLGEGAFGKVVECIDHGMDGMHVAVKIVKNVGRYREAARSEIQVLEHLNSTDPNSVFRCVQMLEWFDHHGHVCIVFELLGLSTYDFIKENSFLPFQIDHIRQMAYQICQSINFLHHNKLTHTDLKPENILFVKSDYVVKYNSKMKRDERTLKNTDIKVVDFGSATYDDEHHSTLVSTRHYRAPEVILALGWSQPCDVWSIGCILIEYYLGFTVFQTHDSKEHLAMMERILGPIPQHMIQKTRKRKYFHHNQLDWDEHSSAGRYVRRRCKPLKEFMLCHDEEHEKLFDLVRRMLEYDPTQRITLDEALQHPFFDLLKKK

SEQ ID NO: 13454 - protein, 53 aa, Homo sapiens
  Payload ID: 2614
  Gene Symbol: CLK4
  Gene Name: CDC-like kinase 4
  ENSP ID: ENSP00000428651
MRHSKRTHCPDWDSRESWGHESYRGSHKRKRRSHSSTQENRHCKPHHQFKESD

SEQ ID NO: 13455 - protein, 143 aa, Homo sapiens
  Payload ID: 2614
  Gene Symbol: CLK4
  Gene Name: CDC-like kinase 4
  ENSP ID: ENSP00000429195
MRHSKRTHCPDWDSRESWGHESYRGSHKRKRRSHSSTQENRHCKPHHQFKESDCHYLEARSLNERDYRDRRYVDEYRNDYCEGYVPRHYHRDIESGYRIHCSKSSVRSRRSSPKRKRNRHCSSHQSRSMKSWTLWVKEPLAKL

SEQ ID NO: 13456 - protein, 89 aa, Homo sapiens
  Payload ID: 2614
  Gene Symbol: CLK4
  Gene Name: CDC-like kinase 4
  ENSP ID: ENSP00000430216
MRHSKRTHCPDWDSRESWGHESYRGSHKRKRRSHSSTQENRHCKPHHQFKESDWTCVDIKTNALTLIRLGYLKGYSEIFTGHSVDILKN

SEQ ID NO: 13457 - protein, 54 aa, Homo sapiens
  Payload ID: 2614
  Gene Symbol: CLK4
  Gene Name: CDC-like kinase 4
  ENSP ID: ENSP00000430892
MRHSKRTHCPDWDSRESWGHESYRGSHKRKRRSHSSTQENRHCKPHHQFKESDW

SEQ ID NO: 13458 - protein, 373 aa, Homo sapiens
  Payload ID: 2614
  Gene Symbol: CLK4
  Gene Name: CDC-like kinase 4
  ENSP ID: ENSP00000479788
MRHSKRTHCPDWDSRESWGHESYRGSHKRKRRSHSSTQENRHCKPHHQFKESDCHYLEARSLNERDYRDRRYVDEYRNDYCEGYVPRHYHRDIESGYRIHCSKSSVRSRRSSPKRKRNRHCSSHQSRSKSHRRKRSRSIEDDEEGHLICQSGDVLRARYEIVDTLGEGAFGKVVECIDHGMDGMHVAVKIVKNVGRYREAARSEIQVLEHLNSTDPNSVFRCVQMLEWFDHHGHVCIVFELLGLSTYDFIKENSFLPFQIDHIRQMAYQICQSINFLHHNKLTHTDLKPENILFVKSDYVVKYNSKMKRDEHSSAGRYVRRRCKPLKEFMLCHDEEHEKLFDLVRRMLEYDPTQRITLDEALQHPFFDLLKKK

SEQ ID NO: 13459 - protein, 373 aa, Homo sapiens [sequence omitted]

SEQ ID NO: 13460 - protein, 108 aa, Homo sapiens
  Payload ID: 2615
  Gene Symbol: CISD1
  Gene Name: CDGSH iron sulfur domain 1
  Uniprot ID: Q9NZ45
  ENSP ID: ENSP00000363041
MSLTSSSSVRVEWIAAVTIAAGTAAIGYLAYKRFYVKDHRNKAMINLHIQKDNPKIVHAFDMEDLGDKAVYCRCWRSKKFPFCDGAHTKHNEETGDNVGPLIIKKKET

SEQ ID NO: 13461 - protein, 135 aa, Homo sapiens
  Payload ID: 2616
  Gene Symbol: CISD2
  Gene Name: CDGSH iron sulfur domain 2
  Uniprot ID: Q8N5K1
  ENSP ID: ENSP00000273986
MVLESVARIVKVQLPAYLKRLPVPESITGFARLTVSEWLRLLPFLGVLALLGYLAVRPFLPKKKQQKDSLINLKIQKENPKVVNEINIEDLCLTKAAYCRCWRSKTFPACDGSHNKHNELTGDNVGPLILKKKEV

SEQ ID NO: 13462 - protein, 145 aa, Homo sapiens
  Payload ID: 2616
  Gene Symbol: CISD2
  Gene Name: CDGSH iron sulfur domain 2
  ENSP ID: ENSP00000423716
MPQGLLSSELSPVSFRGKIPGFCREGAELGTGQSLSSPVLLIALFSEWLRLLPFLGVLALLGYLAVRPFLPKKKQQKDSLINLKIQKENPKVVNEINIEDLCLTKAAYCRCWRSKTFPACDGSHNKHNELTGDNVGPLILKKKEV

SEQ ID NO: 13463 - protein, 47 aa, Homo sapiens
  Payload ID: 2616
  Gene Symbol: CISD2
  Gene Name: CDGSH iron sulfur domain 2
  ENSP ID: ENSP00000458976
MVLESVARIVKVQLPAYLKRLPVPESITGFARLTESCSCHPGWSAMA

SEQ ID NO: 13464 - protein, 127 aa, Homo sapiens
  Payload ID: 2617
  Gene Symbol: CISD3
  Gene Name: CDGSH iron sulfur domain 3
  Uniprot ID: P0C7P0
  ENSP ID: ENSP00000483781
MRGAGAILRPAARGARDLNPRRDISSWLAQWFPRTPARSVVALKTPIKVELVAGKTYRWCVCGRSKKQPFCDGSHFFQRTGLSPLKFKAQETRMVALCTCKATQRPPYCDGTHRSERVQKAEVGSPL

SEQ ID NO: 13465 - protein, 127 aa, Homo sapiens; identical to SEQ ID NO: 13464
  Payload ID: 2617
  Gene Symbol: CISD3
  Gene Name: CDGSH iron sulfur domain 3
  Uniprot ID: P0C7P0
  ENSP ID: ENSP00000484950

SEQ ID NO: 13466 - protein, 369 aa, Homo sapiens
  Payload ID: 2618
  Gene Symbol: CACUL1
  Gene Name: CDK2-associated, cullin domain 1
  Uniprot ID: Q86Y37
  ENSP ID: ENSP00000358147
MEESMEEEEGGSYEAMMDDQNHNNWEAAVDGFRQPLPPPPPPSSIPAPAREPPGGQLLAVPAVSVDRKGPKEGLPMGPQPPPEANGVIMMLKSCDAAAAVAKAAPAPTASSTININTSTSKFLMNVITIEDYKSTYWPKLDGAIDQLLTQSPGDYIPISYEQIYSCVYKCVCQQHSEQMYSDLIKKITNHLERVSKELQASPPDLYIERFNIALGQYMGALQSIVPLFIYMNKFYIETKLNRDLKDDLIKLFTEHVAEKHIYSLMPLLLEAQSTPFQVTPSTMANIVKGLYTLRPEWVQMAPTLFSKFIPNILPPAVESELSEYAAQDQKFQRELIQNGFTRGDQSRKRAGDELAYNSSSACASSRGYR

SEQ ID NO: 13467 - protein, 303 aa, Homo sapiens
  Payload ID: 2618
  Gene Symbol: CACUL1
  Gene Name: CDK2-associated, cullin domain 1
  Uniprot ID: Q86Y37
  ENSP ID: ENSP00000431329
MEESMEEEEGGSYEAMMDDQNHNNWEAAVDGFRQPLPPPPPPSSIPAPAREPPGGQLLAVPAVSVDRKGPKEGLPMGPQPPPEANGVIMMLKSCDAAAAVAKAAPAPTASSTININTSTSKFLMNVITIEDYKSTYWPKLDGAIDQLLTQSPGDYIPISYEQIYSCVYKCVCQQHSEQMYSDLIKKITNHLERVSKELQASPPDLYIERFNIALGQYMGALQSIVPLFIYMNKFYIETKLNRDLKDDLIKLFTEHVAEKHIYSLMPLLLEAQSTPFQVTPSTMANIVKGLYTLRPVSQNFTAV

SEQ ID NO: 13468 - protein, 633 aa, Homo sapiens
  Payload ID: 2619
  Gene Symbol: CABLES1
  Gene Name: Cdk5 and Abl enzyme substrate 1
  Uniprot ID: Q8TDN4
  ENSP ID: ENSP00000256925
MAAAAAAATTAACSSGSAGTDAAGASGLQQPPPQPQPQPAAAAPAQPPPEPPRKPRMDPRRRQAALSFLTNISLDGRLPPQDAEWGGGEEGGAAKPGAGGACGARTRFSLLAAAERGGCIALAAPGTPAAGLAAGSGPCLPQPSSLPPLIPGGHATVSGPGVARGFASPLGAGRASGEQWQPPRPAPLAACAQLQLLDGSGAAGQEELEEDDAFISVQVPAAAFLGSGTPGSGSGSRGRLNSFTQGILPIAFSRPTSQNYCSLEQPGQGGSTSAFEQLQRSRRRLISQRSSLETLEDIEENAPLRRCRTLSGSPRPKNFKKIHFIKNMRQHDTRNGRIVLISGRRSFCSIFSVLPYRDSTQVGDLKLDGGRQSTGAVSLKEIIGLEGVELGADGKTVSYTQFLLPTNAFGARRNTIDSTSSFSQFRNLSHRSLSIGRASGTQGSLDTGSDLGDFMDYDPNLLDDPQWPCGKHKRVLIFPSYMTTVIDYVKPSDLKKDMNETFKEKFPHIKLTLSKIRSLKREMRKLAQEDCGLEEPTVAMAFVYFEKLALKGKLNKQNRKLCAGACVLLAAKIGSDLKKHEVKHLIDKLEEKFRLNRRELIAFEFPVLVALEFALHLPEHEVMPHYRRLVQSS

SEQ ID NO: 13469 - protein, 306 aa, Homo sapiens
  Payload ID: 2619
  Gene Symbol: CABLES1
  Gene Name: Cdk5 and Abl enzyme substrate 1
  Uniprot ID: Q8TDN4
  ENSP ID: ENSP00000383321
MRQHDTRNGRIVLISGRRSFCSIFSVLPYRDSTQVGDLKLDGGRQSTGAVSLKEIIGLEGVELGADGKTVSYTQFLLPTNAFGARRNTIDSTSSFSQFRNLSHRSLSIGRASGTQGSLDTGSDLGDFMDYDPNLLDDPQWPCGKHKRVLIFPSYMTTVIDYVKPSDLKKDMNETFKEKFPHIKLTLSKIRSLKREMRKLAQEDCGLEEPTVAMAFVYFEKLALKGKLNKQNRKLCAGACVLLAAKIGSDLKKHEVKHLIDKLEEKFRLNRRELIAFEFPVLVALEFALHLPEHEVMPHYRRLVQSS

SEQ ID NO: 13470 - protein, 368 aa, Homo sapiens
  Payload ID: 2619
  Gene Symbol: CABLES1
  Gene Name: Cdk5 and Abl enzyme substrate 1
  Uniprot ID: Q8TDN4
  ENSP ID: ENSP00000413851
MLSKRGCHARIYADFPIRRLISQRSSLETLEDIEENAPLRRCRTLSGSPRPKNFKKIHFIKNMRQHDTRNGRIVLISGRRSFCSIFSVLPYRDSTQVGDLKLDGGRQSTGAVSLKEIIGLEGVELGADGKTVSYTQFLLPTNAFGARRNTIDSTSSFSQFRNLSHRSLSIGRASGTQGSLDTGSDLGDFMDYDPNLLDDPQWPCGKHKRVLIFPSYMTTVIDYVKPSDLKKDMNETFKEKFPHIKLTLSKIRSLKREMRKLAQEDCGLEEPTVAMAFVYFEKLALKGKLNKQNRKLCAGACVLLAAKIGSDLKKHEVKHLIDKLEEKFRLNRRELIAFEFPVLVALEFALHLPEHEVMPHYRRLVQSS

SEQ ID NO: 13471 - protein, 9 aa, Homo sapiens
  Payload ID: 2619
  Gene Symbol: CABLES1
  Gene Name: Cdk5 and Abl enzyme substrate 1
  ENSP ID: ENSP00000461994
MRQHDTRNG

SEQ ID NO: 13472 - protein, 38 aa, Homo sapiens
  Payload ID: 2619
  Gene Symbol: CABLES1
  Gene Name: Cdk5 and Abl enzyme substrate 1
  ENSP ID: ENSP00000464435
MRQHDTRNGRIVLISGRRSFCSIFSVLPYRDSTQVGQQ

SEQ ID NO: 13473 - protein, 163 aa, Homo sapiens
  Payload ID: 2619
  Gene Symbol: CABLES1
  Gene Name: Cdk5 and Abl enzyme substrate 1
  ENSP ID: ENSP00000476575
  MOD_RES (1)..(1): Any amino acid
XAAFLGSGTPGSGSGSRGRLNSFTQGILPIAFSRPTSQNYCSLEQPGQGGSTSAFEQLQRSRRRLISQRSSLETLEDIEENAPLRRCRTLSGSPRPKNFKKIHFIKNMRQHDTRNGRIVLISGRRSFCSIFSVLPYRDSTQVGYVYACMLCSSLGEKISHQCT

SEQ ID NO: 13474 - protein, 478 aa, Homo sapiens
  Payload ID: 2620
  Gene Symbol: CABLES2
  Gene Name: Cdk5 and Abl enzyme substrate 2
  Uniprot ID: Q9BTV7
  ENSP ID: ENSP00000279101
MAAAAAGGAPGPAPGPAGPPPPAAPTSAARAPPQALRRRGDSRRRQAALFFLNNISLDGRPPSLGPGGEKPPPPPAEAREPPAPPPPEPPTGLPARTPAPQGLLSPTQVPTGLGLDGQRQRKRVTSQRCSLEFLEDAVGCAPAQRTKHTSGSPRHKGLKKTHFIKNMRQYDTRNSRIVLICAKRSLCAAFSVLPYGEGLRISDLRVDSQKQRHPSGGVSVSSEMVFELEGVELGADGKVVSYAKFLYPTNALVTHKSDSHGLLPTPRPSVPRTLPGSRHKPAPTKSAPASTELGSDVGDTLEYNPNLLDDPQWPCGKHKRVLIFASYMTTVIEYVKPSDLKKDMNETFREKFPHVKLTLSKIRSLKREMRSLSEECSLEPVTVAMAYVYFEKLVLQGKLSKQNRKLCAGACVLLAAKISSDLRKSGVTQLIDKLEERFRFNRRDLIGFEFTVLVALELALYLPENQVLPHYRRLTQQF

SEQ ID NO: 13475 - protein, 258 aa, Homo sapiens
  Payload ID: 2620
  Gene Symbol: CABLES2
  Gene Name: Cdk5 and Abl enzyme substrate 2
  ENSP ID: ENSP00000398535
  MOD_RES (1)..(1): Any amino acid
XHQEQQDRAHLCQAVPVRGLLGPALWGRPADQVVSYAKFLYPTNALVTHKSDSHGLLPTPRPSVPRTLPGSRHKPAPTKSAPASTELGSDVGDTLEYNPNLLDDPQWPCGKHKRVLIFASYMTTVIEYVKPSDLKKDMNETFREKFPHVKLTLSKIRSLKREMRSLSEECSLEPVTVAMAYVYFEKLVLQGKLSKQNRKLCAGACVLLAAKISSDLRKSGVTQLIDKLEERFRFNRRDLIGFEFTVLVALELALYLPE

SEQ ID NO: 13476 - protein, 587 aa, Homo sapiens
  Payload ID: 2621
  Gene Symbol: CDK5RAP1
  Gene Name: CDK5 regulatory subunit associated protein 1
  Uniprot ID: Q96SZ6
  ENSP ID: ENSP00000217372
MHPLQCVLQVQRSLGWGPLASVSWLSLRMCRAHSSLSSTMCPSPERQEDGARKDFSSRLAAGPTFQHFLKSASAPQEKLSSEVEDPPPYLMMDELLGRQRKVYLETYGCQMNVNDTEIAWSILQKSGYLRTSNLQEADVILLVTCSIREKAEQTIWNRLHQLKALKTRRPRSRVPLRIGILGCMAERLKEEILNREKMVDILAGPDAYRDLPRLLAVAESGQQAANVLLSLDETYADVMPVQTSASATSAFVSIMRGCDNMCSYCIVPFTRGRERSRPIASILEEVKKLSEQGLKEVTLLGQNVNSFRDNSEVQFNSAVPTNLSRGFTTNYKTKQGGLRFAHLLDQVSRVDPEMRIRFTSPHPKDFPDEVLQLIHERDNICKQIHLPAQSGSSRVLEAMRRGYSREAYVELVHHIRESIPGVSLSSDFIAGFCGETEEDHVQTVSLLREVQYNMGFLFAYSMRQKTRAYHRLKDDVPEEVKLRRLEELITIFREEATKANQTSVGCTQLVLVEGLSKRSATDLCGRNDGNLKVIFPDAEMEDVNNPGLRVRAQPGDYVLVKITSASSQTLRGHVLCRTTLRDSSAYC

SEQ ID NO: 13477 - protein, 510 aa, Homo sapiens
  Payload ID: 2621
  Gene Symbol: CDK5RAP1
  Gene Name: CDK5 regulatory subunit associated protein 1
  Uniprot ID: Q96SZ6
  ENSP ID: ENSP00000341840
MHPLQCVLQVQRSLGWGPLASVSWLSLRMCRAHSSLSSTMCPSPERQEDGARKDFSSRLAAGPTFQHFLKSASAPQEKLSSEVEDPPPYLMMDELLGRQRKVYLETYGCQMNVNDTEIAWSILQKSGYLRTSNLQEADVILLVTCSIREKAEQTIWNRLHQLKALKTRRPRSRVPLRIGILGCMAERLKEEILNREKMVDILAGPDAYRDLPRLLAVAESGQQAANVLLSLDETYADVMPVQTSASATSAFVSIMRGCDNMCSYCIVPFTRGRERSRPIASILEEVKKLSEQVLQLIHERDNICKQIHLPAQSGSSRVLEAMRRGYSREAYVELVHHIRESIPGVSLSSDFIAGFCGETEEDHVQTVSLLREVQYNMGFLFAYSMRQKTRAYHRLKDDVPEEVKLRRLEELITIFREEATKANQTSVGCTQLVLVEGLSKRSATDLCGRNDGNLKVIFPDAEMEDVNNPGLRVRAQPGDYVLVKITSASSQTLRGHVLCRTTLRDSSAYC

SEQ ID NO: 13478 - protein, 601 aa, Homo sapiens
  Payload ID: 2621
  Gene Symbol: CDK5RAP1
  Gene Name: CDK5 regulatory subunit associated protein 1
  Uniprot ID: Q96SZ6
  ENSP ID: ENSP00000350558
MHPLQCVLQVQRSLGWGPLASVSWLSLRMCRAHSSLSSTMCPSPERQEDGARKDFSSRLAAGPTFQHFLKSASAPQEKLSSEVEDPPPYLMMDELLGRQRKVYLETYGCQMNVNDTEIAWSILQKSGYLRTSNLQEADVILLVTCSIREKAEQTIWNRLHQLKALKTRRPRSRVPLRIGILGCMAERLKEEILNREKMVDILAGPDAYRDLPRLLAVAESGQQAANVLLSLDETYADVMPVQTSASATSAFVSIMRGCDNMCSYCIVPFTRGRERSRPIASILEEVKKLSEQVFLPPRPPKVLGLQGLKEVTLLGQNVNSFRDNSEVQFNSAVPTNLSRGFTTNYKTKQGGLRFAHLLDQVSRVDPEMRIRFTSPHPKDFPDEVLQLIHERDNICKQIHLPAQSGSSRVLEAMRRGYSREAYVELVHHIRESIPGVSLSSDFIAGFCGETEEDHVQTVSLLREVQYNMGFLFAYSMRQKTRAYHRLKDDVPEEVKLRRLEELITIFREEATKANQTSVGCTQLVLVEGLSKRSATDLCGRNDGNLKVIFPDAEMEDVNNPGLRVRAQPGDYVLVKITSASSQTLRGHVLCRTTLRDSSAYC

SEQ ID NO: 13479 - protein, 256 aa, Homo sapiens
  Payload ID: 2621
  Gene Symbol: CDK5RAP1
  Gene Name: CDK5 regulatory subunit associated protein 1
  ENSP ID: ENSP00000409474
  MOD_RES (1)..(1): Any amino acid
XCMAERLKEEILNREKMVDILAGPDAYRDLPRLLAVAESGQQAANVLLSLDETYADVMPVQTSASATSAFVYSREAYVELVHHIRESIPGVSLSSDFIAGFCGETEEDHVQTVSLLREVQYNMGFLFAYSMRQKTRAYHRLKDDVPEEVKLRRLEELITIFREEATKANQTSVGCTQLVLVEGLSKRSATDLCGRNDGNLKVIFPDAEMEDVNNPGLRVRAQPGDYVLVKITSASSQTLRGHVLCRTTLRDSSAYC

SEQ ID NO: 13480 - protein, 497 aa, Homo sapiens
  Payload ID: 2621
  Gene Symbol: CDK5RAP1
  Gene Name: CDK5 regulatory subunit associated protein 1
  Uniprot ID: Q96SZ6
  ENSP ID: ENSP00000476857
MMDELLGRQRKVYLETYGCQMNVNDTEIAWSILQKSGYLRTSNLQEADVILLVTCSIREKAEQTIWNRLHQLKALKTRRPRSRVPLRIGILGCMAERLKEEILNREKMVDILAGPDAYRDLPRLLAVAESGQQAANVLLSLDETYADVMPVQTSASATSAFVSIMRGCDNMCSYCIVPFTRGRERSRPIASILEEVKKLSEQGLKEVTLLGQNVNSFRDNSEVQFNSAVPTNLSRGFTTNYKTKQGGLRFAHLLDQVSRVDPEMRIRFTSPHPKDFPDEVLQLIHERDNICKQIHLPAQSGSSRVLEAMRRGYSREAYVELVHHIRESIPGVSLSSDFIAGFCGETEEDHVQTVSLLREVQYNMGFLFAYSMRQKTRAYHRLKDDVPEEVKLRRLEELITIFREEATKANQTSVGCTQLVLVEGLSKRSATDLCGRNDGNLKVIFPDAEMEDVNNPGLRVRAQPGDYVLVKITSASSQTLRGHVLCRTTLRDSSAYC

SEQ ID NO: 13481 - protein, 579 aa, Homo sapiens
  Payload ID: 2622
  Gene Symbol: CDKAL1
  Gene Name: CDK5 regulatory subunit associated protein 1-like 1
  Uniprot ID: Q5VV42
  ENSP ID: ENSP00000274695
MPSASCDTLLDDIEDIVSQEDSKPQDRHFVRKDVVPKVRRRNTQKYLQEEENSPPSDSTIPGIQKIWIRTWGCSHNNSDGEYMAGQLAAYGYKITENASDADLWLLNSCTVKNPAEDHFRNSIKKAQEENKKIVLAGCVPQAQPRQDYLKGLSIIGVQQIDRVVEVVEETIKGHSVRLLGQKKDNGRRLGGARLDLPKIRKNPLIEIISINTGCLNACTYCKTKHARGNLASYPIDELVDRAKQSFQEGVCEIWLTSEDTGAYGRDIGTNLPTLLWKLVEVIPEGAMLRLGMTNPPYILEHLEEMAKILNHPRVYAFLHIPVQSASDSVLMEMKREYCVADFKRVVDFLKEKVPGITIATDIICGFPGETDQDFQETVKLVEEYKFPSLFINQFYPRPGTPAAKMEQVPAQVKKQRTKDLSRVFHSYSPYDHKIGERQQVLVTEESFDSKFYVAHNQFYEQVLVPKNPAFMGKMVEVDIYESGKHFMKGQPVSDAKVYTPSISKPLAKGEVSGLTKDFRNGLGNQLSSGSHTSAASQCDSASSRMVLPMPRLHQDCALRMSVGLALLGLLFAFFVKVYN

SEQ ID NO: 13482 - protein, 579 aa, Homo sapiens; identical to SEQ ID NO: 13481
  Payload ID: 2622
  Gene Symbol: CDKAL1
  Gene Name: CDK5 regulatory subunit associated protein 1-like 1
  Uniprot ID: Q5VV42
  ENSP ID: ENSP00000367873

SEQ ID NO: 13483 - protein, 97 aa, Homo sapiens
  Payload ID: 2622
  Gene Symbol: CDKAL1
  Gene Name: CDK5 regulatory subunit associated protein 1-like 1
  Uniprot ID: Q5VV42
  ENSP ID: ENSP00000481755
MPSASCDTLLDDIEDIVSQEDSKPQDRHFVRKDVVPKVRRRNTQKYLQEEENSPPSDSTIPGIQKIWIRTWGCSHNNSDGEYMAGQLAAYGYKITGE

SEQ ID NO: 13484 - protein, 1893 aa, Homo sapiens
  Payload ID: 2623
  Gene Symbol: CDK5RAP2
  Gene Name: CDK5 regulatory subunit associated protein 2
  Uniprot ID: Q96SN8
  ENSP ID: ENSP00000343818
MMDLVLEEDVTVPGTLSGCSGLVPSVPDDLDGINPNAGLGNGLLPNVSEETVSPTRARNMKDFENQITELKKENFNLKLRIYFLEERMQQEFHGPTEHIYKTNIELKVEVESLKRELQEREQLLIKASKAVESLAEAGGSEIQRVKEDARKKVQQVEDLLTKRILLLEKDVTAAQAELEKAFAGTETEKALRLRLESKLSEMKKMHEGDLAMALVLDEKDRLIEELKLSLKSKEALIQCLKEEKSQMACPDENVSSGELRGLCAAPREEKERETEAAQMEHQKERNSFEERIQALEEDLREKEREIATEKKNSLKRDKAIQGLTMALKSKEKKVEELNSEIEKLSAAFAKAREALQKAQTQEFQGSEDYETALSGKEALSAALRSQNLTKSTENHRLRRSIKKITQELSDLQQERERLEKDLEEAHREKSKGDCTIRDLRNEVEKLRNEVNEREKAMENRYKSLLSESNKKLHNQEQVIKHLTESTNQKDVLLQKFNEKDLEVIQQNCYLMAAEDLELRSEGLITEKCSSQQPPGSKTIFSKEKKQSSDYEELIQVLKKEQDIYTHLVKSLQESDSINNLQAELNKIFALRKQLEQDVLSYQNLRKTLEEQISEIRRREEESFSLYSDQTSYLSICLEENNRFQVEHFSQEELKKKVSDLIQLVKELYTDNQHLKKTIFDLSCMGFQGNGFPDRLASTEQTELLASKEDEDTIKIGEDDEINFLSDQHLQQSNEIMKDLSKGGCKNGYLRHTESKISDCDGAHAPGCLEEGAFINLLAPLFNEKATLLLESRPDLLKVVRELLLGQLFLTEQEVSGEHLDGKTEKTPKQKGELVHFVQTNSFSKPHDELKLSCEAQLVKAGEVPKVGLKDASVQTVATEGDLLRFKHEATREAWEEKPINTALSAEHRPENLHGVPGWQAALLSLPGITNREAKKSRLPILIKPSRSLGNMYRLPATQEVVTQLQSQILELQGELKEFKTCNKQLHQKLILAEAVMEGRPTPDKTLLNAQPPVGAAYQDSPGEQKGIKTTSSVWRDKEMDSDQQRSYEIDSEICPPDDLASLPSCKENPEDVLSPTSVATYLSSKSQPSAKVSVMGTDQSESINTSNETEYLKQKIHDLETELEGYQNFIFQLQKHSQCSEAIITVLCGTEGAQDGLSKPKNGSDGEEMTFSSLHQVRYVKHVKILGPLAPEMIDSRVLENLKQQLEEQEYKLQKEQNLNMQLFSEIHNLQNKFRDLSPPRYDSLVQSQARELSLQRQQIKDGHGICVISRQHMNTMIKAFEELLQASDVDYCVAEGFQEQLNQCAELLEKLEKLFLNGKSVGVEMNTQNELMERIEEDNLTYQHLLPESPEPSASHALSDYETSEKSFFSRDQKQDNETEKTSVMVNSFSQDLLMEHIQEIRTLRKRLEESIKTNEKLRKQLERQGSEFVQGSTSIFASGSELHSSLTSEIHFLRKQNQALNAMLIKGSRDKQKENDKLRESLSRKTVSLEHLQREYASVKEENERLQKEGSEKERHNQQLIQEVRCSGQELSRVQEEVKLRQQLLSQNDKLLQSLRVELKAYEKLDEEHRRLREASGEGWKGQDPFRDLHSLLMEIQALRLQLERSIETSSTLQSRLKEQLARGAEKAQEGALTLAVQAVSIPEVPLQPDKHDGDKYPMESDNSFDLFDSSQAVTPKSVSETPPLSGNDTDSLSCDSGSSATSTPCVSRLVTGHHLWASKNGRHVLGLIEDYEALLKQISQGQRLLAEMDIQTQEAPSSTSQELGTKGPHPAPLSKFVSSVSTAKLTLEEAYRRLKLLWRVSLPEDGQCPLHCEQIGEMKAEVTKLHKKLFEQEKKLQNTMKLLQLSKRQEKVIFDQLVVTHKILRKARGNLELRPGGAHPGTCSPSRPGS

SEQ ID NO: 13485 - protein, 1814 aa, Homo sapiens
  Payload ID: 2623
  Gene Symbol: CDK5RAP2
  Gene Name: CDK5 regulatory subunit associated protein 2
  Uniprot ID: Q96SN8
  ENSP ID: ENSP00000353317
MMDLVLEEDVTVPGTLSGCSGLVPSVPDDLDGINPNAGLGNGLLPNVSEETVSPTRARNMKDFENQITELKKENFNLKLRIYFLEERMQQEFHGPTEHIYKTNIELKVEVESLKRELQEREQLLIKASKAVESLAEAGGSEIQRVKEDARKKVQQVEDLLTKRILLLEKDVTAAQAELEKAFAGTETEKALRLRLESKLSEMKKMHEGDLAMALVLDEKDRLIEELKLSLKSKEALIQCLKEEKSQMACPDENVSSGELRGLCAAPREEKERETEAAQMEHQKERNSFEERIQALEEDLREKEREIATEKKNSLKRDKAIQGLTMALKSKEKKVEELNSEIEKLSAAFAKAREALQKAQTQEFQGSEDYETALSGKEALSAALRSQNLTKSTENHRLRRSIKKITQELSDLQQERERLEKDLEEAHREKSKGDCTIRDLRNEVEKLRNEVNEREKAMENRYKSLLSESNKKLHNQEQVIKHLTESTNQKDVLLQKFNEKDLEVIQQNCYLMAAEDLELRSEGLITEKCSSQQPPGSKTIFSKEKKQSSDYEELIQVLKKEQDIYTHLVKSLQESDSINNLQAELNKIFALRKQLEQDVLSYQNLRKTLEEQISEIRRREEESFSLYSDQTSYLSICLEENNRFQVEHFSQEELKKKVSDLIQLVKELYTDNQHLKKTIFDLSCMGFQGNGFPDRLASTEQTELLASKEDEDTIKIGEDDEINFLSDQHLQQSNEIMKDLSKGGCKNGYLRHTESKISDCDGAHAPGCLEEGAFINLLAPLFNEKATLLLESRPDLLKVVRELLLGQLFLTEQEVSGEHLDGKTEKTPKQKGELVHFVQTNSFSKPHDELKLSCEAQLVKAGEVPKVGLKDASVQTVATEGDLLRFKHEATREAWEEKPINTALSAEHRPENLHGVPGWQAALLSLPGITNREAKKSRLPILIKPSRSLGNMYRLPATQEVVTQLQSQILELQGELKEFKTCNKQLHQKLILAEAVMEGRPTPDKTLLNAQPPVGAAYQDSPGEQKGIKTTSSVWRDKEMDSDQQRSYEIDSEICPPDDLASLPSCKENPEDVLSPTSVATYLSSKSQPSAKVSVMGTDQSESINTSNETEYLKQKIHDLETELEGYQNFIFQLQKHSQCSEAIITVLCGTEGAQDGLSKPKNGSDGEEMTFSSLHQVRYVKHVKILGPLAPEMIDSRVLENLKQQLEEQEYKLQKEQNLNMQLFSEIHNLQNKFRDLSPPRYDSLVQSQARELSLQRQQIKDGHGICVISRQHMNTMIKAFEELLQASDVDYCVAEGFQEQLNQCAELLEKLEKLFLNGKSVGVEMNTQNELMERIEEDNLTYQHLLPESPEPSASHALSDYETSEKSFFSRDQKQDNETEKTSVMVNSFSQDLLMEHIQEIRTLRKRLEESIKTNEKLRKQLERQGSEFVQGSTSIFASGSELHSSLTSEIHFLRKQNQALNAMLIKGSRDKQKENDKLRESLSRKTVSLEHLQREYASVKEENERLQKEGSEKERHNQQLIQEVRCSGQELSRVQEEVKLRQQLLSQNDKLLQSLRVELKAYEKLDEEHRRLRDGDKYPMESDNSFDLFDSSQAVTPKSVSETPPLSGNDTDSLSCDSGSSATSTPCVSRLVTGHHLWASKNGRHVLGLIEDYEALLKQISQGQRLLAEMDIQTQEAPSSTSQELGTKGPHPAPLSKFVSSVSTAKLTLEEAYRRLKLLWRVSLPEDGQCPLHCEQIGEMKAEVTKLHKKLFEQEKKLQNTMKLLQLSKRQEKVIFDQLVVTHKILRKARGNLELRPGGAHPGTCSPSRPGS

SEQ ID NO: 13486 - protein, 1663 aa, Homo sapiens
  Payload ID: 2623
  Gene Symbol: CDK5RAP2
  Gene Name: CDK5 regulatory subunit associated protein 2
  ENSP ID: ENSP00000354065
MMDLVLEEDVTVPGTLSGCSGLVPSVPDDLDGINPNAGLGNGLLPNVSEETVSPTRARNMKDFENQITELKKENFNLKLRIYFLEERMQQEFHGPTEHIYKTNIELKVEVESLKRELQEREQLLIKASKAVESLAEAGGSEIQRVKEDARKKVQQVEDLLTKRILLLEKDVTAAQAELEKAFAGTETEKALRLRLESKLSEMKKMHEGDLAMALVLDEKDRLIEELKLSLKSKEALIQCLKEEKSQMACPDENVSSGELRGLCAAPREEKERETEAAQMEHQKERNSFEERIQALEEDLREKEREIATEKKNSLKRDKAIQGLTMALKSKEKKVEELNSEIEKLSAAFAKAREALQKAQTQEFQGSEDYETALSGKEALSAALRSQNLTKSTENHRLRRSIKKITQELSDLQQERERLEKDLEEAHREKSKGDCTIRDLRNEVEKLRNEVNEREKAMENRYKSLLSESNKKLHNQEQVIKHLTESTNQKDVLLQKFNEKDLEVIQQNCYLMAAEDLELRSEGLITEKCSSQQPPGSKTIFSKEKKQSSDYEELIQVLKKEQDIYTHLVKSLQESDSINNLQAELNKIFALRKQLEQDVLSYQNLRKTLEEQISEIRRREESFSLYSDQTSYLSICLEENNRFQVEHFSQEELKKKVSDLIQLVKELYTDNQHLKKTIFDLSCMGFQGNGFPDRLASTEQTEEAKKSRLPILIKPSRSLGNMYRLPATQEVVTQLQSQILELQGELKEFKTCNKQLHQKLILAEAVMEGRPTPDKTLLNAQPPVGAAYQDSPGEQKGIKTTSSVWRDKEMDSDQQRSYEIDSEICPPDDLASLPSCKENPEDVLSPTSVATYLSSKSQPSAKVSVMGTDQSESINTSNETEYLKQKIHDLETELEGYQNFIFQLQKHSQCSEAIITVLCGTEGAQDGLSKPKNGSDGEEMTFSSLHQVRYVKHVKILGPLAPEMIDSRVLENLKQQLEEQEYKLQKEQNLNMQLFSEIHNLQNKFRDLSPPRYDSLVQSQARELSLQRQQIKDGHGICVISRQHMNTMIKAFEELLQASDVDYCVAEGFQEQLNQCAELLEKLEKLFLNGKSVGVEMNTQNELMERIEEDNLTYQHLLPESPEPSASHALSDYETSEKSFFSRDQKQDNETEKTSVMVNSFSQDLLMEHIQEIRTLRKRLEESIKTNEKLRKQLERQGSEFVQGSTSIFASGSELHSSLTSEIHFLRKQNQALNAMLIKGSRDKQKENDKLRESLSRKTVSLEHLQREYASVKEENERLQKEGSEKERHNQQLIQEVRCSGQELSRVQEEVKLRQQLLSQNDKLLQSLRVELKAYEKLDEEHRRLREASGEGWKGQDPFRDLHSLLMEIQALRLQLERSIETSSTLQSRLKEQLARGAEKAQEGALTLAVQAVSIPEVPLQPDKHDGDKYPMESDNSFDLFDSSQAVTPKSVSETPPLSGNDTDSLSCDSGSSATSTPCVSRLVTGHHLWASKNGRHVLGLIEDYEALLKQISQGQRLLAEMDIQTQEAPSSTSQELGTKGPHPAPLSKFVSSVSTAKLTLEEAYRRLKLLWRVSLPEDGQCPLHCEQIGEMKAEVTKLHKKLFEQEKKLQNTMKLLQLSKRQEKVIFDQLVVTHKILRKARGNLELRPGGAHPGTCSPSRPGS

SEQ ID NO: 13487 - protein, 1287 aa, Homo sapiens
  Payload ID: 2623
  Gene Symbol: CDK5RAP2
  Gene Name: CDK5 regulatory subunit associated protein 2
  ENSP ID: ENSP00000400395
DSINNLQAELNKIFALRKQLEQDVLSYQNLRKTLEEQISEIRRREEESFSLYSDQTSYLSICLEENNRFQVEHFSQEELKKKVSDLIQLVKELYTDNQHLKKTIFDLSCMGFQGNGFPDRLASTEQTEIMKDLSKGGCKNGYLRHTESKISDCDGAHAPGCLEEGAFINLLAPLFNEKATLLLESRPDLLKVVRELLLGQLFLTEQEVSGEHLDGKTEKTPKQKGELVHFVQTNSFSKPHDELKLSCEAQLVKAGEVPKVGLKDASVQTVATEGDLLRFKHEATREAWEEKPINTALSAEHRPENLHGVPGWQAALLSLPGITNREAKKSRLPILIKPSRSLGNMYRLPATQEVVTQLQSQILELQGELKEFKTCNKQLHQKLILAEAVMEGRPTPDKTLLNAQPPVGAAYQDSPGEQKGIKTTSSVWRDKEMDSDQQRSYEIDSEICPPDDLASLPSCKENPEDVLSPTSVATYLSSKSQPSAKVSVMGTDQSESINTSNETEYLKQKIHDLETELEGYQNFIFQLQKHSQCSEAIITVLCGTEGAQDGLSKPKNGSDGEEMTFSSLHQVRYVKHVKILGPLAPEMIDSRVLENLKQQLEEQEYKLQKEQNLNMQLFSEIHNLQNKFRDLSPPRYDSLVQSQARELSLQRQQIKDGHGICVISRQHMNTMIKAFEELLQASDVDYCVAEGFQEQLNQCAELLEKLEKLFLNGKSVGVEMNTQNELMERIEEDNLTYQHLLPESPEPSASHALSDYETSEKSFFSRDQKQDNETEKTSVMVNSFSQDLLMEHIQEIRTLRKRLEESIKTNEKLRKQLERQGSEFVQGSTSIFASGSELHSSLTSEIHFLRKQNQALNAMLIKGSRDKQKENDKLRESLSRKTVSLEHLQREYASVKEENERLQKEGSEKERHNQQLIQEVRCSGQELSRVQEEVKLRQQLLSQNDKLLQSLRVELKAYEKLDEEHRRLREASGEGWKGQDPFRDLHSLLMEIQALRLQLERSIETSSTLQSRLKEQLARGAEKAQEGALTLAVQAVSIPEVPLQPDKHDGDKYPMESDNSFDLFDSSQAVTPKSVSETPPLSGNDTDSLSCDSGSSATSTPCVSRLVTGHHLWASKNGRHVLGLIEDYEALLKQISQGQRLLAEMDIQTQEAPSSTSQELGTKGPHPAPLSKFVSSVSTAKLTLEEAYRRLKLLWRVSLPEDGQCPLHCEQIGEMKAEVTKLHKKLFEQEKKLQNTMKLLQLSKRQEKVIFDQLVVTHKILRKARGNLELRPGGAHPGTCSPSRPGS

SEQ ID NO: 13488 - protein, 903 aa, Homo sapiens
  Payload ID: 2623
  Gene Symbol: CDK5RAP2
  Gene Name: CDK5 regulatory subunit associated protein 2
  ENSP ID: ENSP00000409941
NMYRLPATQEVVTQLQSQILELQGELKEFKTCNKQLHQKLILAEAVMEGRPTPDKTLLNDSEICPPDDLASLPSCKENPEDVLSPTSVATYLSSKSQPSAKVSVMGTDQSESINTSNETEYLKQKIHDLETELEGYQNFIFQLQKHSQCSEAIITVLCGTEGAQDGLSKPKNGSDGEEMTFSSLHQVRYVKHVKILGPLAPEMIDSRVLENLKQQLEEQEYKLQKEQNLNMQLFSEIHNLQNKFRDLSPPRYDSLVQSQARELSLQRQQIKDGHGICVISRQHMNTMIKAFEELLQASDVDYCVAEGFQEQLNQCAELLEKLEKLFLNGKSVGVEMNTQNELMERIEEDNLTYQHLLPESPEPSASHALSDYETSEKSFFSRDQKQDNETEKTSVMVNSFSQDLLMEHIQEIRTLRKRLEESIKTNEKLRKQLERQGSEFVQGSTSIFASGSELHSSLTSEIHFLRKQNQALNAMLIKGSRDKQKENDKLRESLSRKTVSLEHLQREYASVKEENERLQKEGSEKERHNQQLIQEVRCSGQELSRVQEEVKLRQQLLSQNDKLLQSLRVELKAYEKLDEEHRRLREASGEGWKGQDPFRDLHSLLMEIQALRLQLERSIETSSTLQSRLKEQLARGAEKAQEGALTLAVQAVSIPEVPLQPDKHDGDKYPMESDNSFDLFDSSQAVTPKSVSETPPLSGNDTDSLSCDSGSSATSTPCVSRLVTGHHLWASKNGRHVLGLIEDYEALLKQISQGQRLLAEMDIQTQEAPSSTSQELGTKGPHPAPLSKFVSSVSTAKLTLEEAYRRLKLLWRVSLPEDGQCPLHCEQIGEMKAEVTKLHKKLFEQEKKLQNTMKLLQLSKRQEKVIFDQLVVTHKILRKARGNLELRPGGAHPGTCSPSRPGS

SEQ ID NO: 13489 - protein, 275 aa, Homo sapiens
  Payload ID: 2623
  Gene Symbol: CDK5RAP2
  Gene Name: CDK5 regulatory subunit associated protein 2
  ENSP ID: ENSP00000417925
MMDLVLEEDVTVPGTLSGCSGLVPSVPDDLDGINPNAGLGNGLLPNVSEETVSPTRARNMKDFENQITELKKENFNLKLRIYFLEERMQQEFHGPTEHIYKTNIELKVEVESLKRELQEREQLLIKASKAVESLAEAGGSEIQRVKEDARKKVQQVEDLLTKRILLLEKDVTAAQAELEKAFAGTETEKALRLRLESKLSEMKKMHEGDLAMALVLDEKDRLIEELKLSLKSKEALIQCLKEEKSQMACPDENVSSGELRGLCAAPREEKERETE

SEQ ID NO: 13490 - protein, 749 aa, Homo sapiens
  Payload ID: 2623
  Gene Symbol: CDK5RAP2
  Gene Name: CDK5 regulatory subunit associated protein 2
  ENSP ID: ENSP00000418418
MMDLVLEEDVTVPGTLSGCSGLVPSVPDDLDGINPNAGLGNVLPNVSEETVSPTRARNMKDFENQITELKKENFNLKLRIYFLEERMQQEFHGPTEHIYKTNIELKVEVESLKRELQEREQLLIKASKAVESLAEAGGSEIQRVKEDARKKVQQVEDLLTKRILLLEKDVTAAQAELEKAFAGTETEKALRLRLESKLSEMKKMHEGDLAMALVLDEKDRLIEELKLSLKSKEALIQCLKEEKSQMACPDENVSSGELRGLCAAPREEKERETEAAQMEHQKERNSFEERIQALEEDLREKEREIATEKKNSLKRDKAIQGLTMALKSKEKKVEELNSEIEKLSAAFAKAREALQKAQTQEFQGSEDYETALSGKEALSAALRSQNLTKSTENHRLRRSIKKITQELSDLQQERERLEKDLEEAHREKSKGDCTIRDLRNEVEKLRNEVNEREKAMENRYKSLLSESNKKLHNQEQVIKHLTESTNQKDVLLQKFNEKDLEVIQQNCYLMAAEDLELRSEGLITEKCSSQQPPGSKTIFSKEKKQSSDYEELIQVLKKEQDIYTHLVKSLQESDSINNLQAELNKIFALRKQLEQDVLSYQNLRKTLEEQISEIRRREEESFSLYSDQTSYLSICLEENNRFQVEHFSQEELKKKVSDLIQLVKELYTDNQHLKKTIFDLSCMGFQGNGFPDRLASTEQTETSLTYSYIFMLHTFLGCIFTPFHAPCSFWLARRTRTRSKLGRMTRLIS

SEQ ID NO: 13491 - protein, 460 aa, Homo sapiens
  Payload ID: 2623
  Gene Symbol: CDK5RAP2
  Gene Name: CDK5 regulatory subunit associated protein 2
  ENSP ID: ENSP00000419265
MMDLVLEEDVTVPGTLSGCSGLVPSVPDDLDGINPNAGLGNVLPNVSEETVSPTRARNMKDFENQITELKKENFNLKLRIYFLEERMQQEFHGPTEHIYKTNIELKVEVESLKRELQEREQLLIKASKAVESLAEAGGSEIQRVKEDARKKVQQVEDLLTKRILLLEKDVTAAQAELEKAFAGTETEKALRLRLESKLSEMKKMHEGDLAMALVLDEKDRLIEELKLSLKSKEALIQCLKEEKSQMACPDENVSSGELRGLCAAPREEKERETEAAQMEHQKERNSFEERIQALEEDLREKEREIATEKKNSLKRDKAIQGLTMALKSKEKKVEELNSEIEKLSAAFAKAREALQKAQTQEFQGSEDYETALSGKEALSAALRSQNLTKSTENHRLRRSIKKITQELSDLQQERERLEKDLEEAHREKSKGDCTIRGLTLFPGLFLNSWAQVILPPQFLE

SEQ ID NO: 13492 - protein, 133 aa, Homo sapiens
  Payload ID: 2623
  Gene Symbol: CDK5RAP2
  Gene Name: CDK5 regulatory subunit associated protein 2
  ENSP ID: ENSP00000419640
MACPDENVSSGELRGLCAAPREEKERETEAAQMEHQKERNSFEERIQALEEDLREKEREIATEKKNSLKRDKAIQGLTMALKSKEKKVEELNSEIEKLSAAFAKAREALQKAQTQEFQGSEDYETALSGKEAL

SEQ ID NO: 13493 - protein, 506 aa, Homo sapiens
  Payload ID: 2624
  Gene Symbol: CDK5RAP3
  Gene Name: CDK5 regulatory subunit associated protein 3
  Uniprot ID: Q96JB5
  ENSP ID: ENSP00000344683
MEDHQHVPIDIQTSKLLDWLVDRRHCSLKWQSLVLTIREKINAAIQDMPESEEIAQLLSGSYIHYFHCLRILDLLKGTEASTKNIFGRYSSQRMKDWQEIIALYEKDNTYLVELSSLLVRNVNYEIPSLKKQIAKCQQLQQEYSRKEEECQAGAAEMREQFYHSCKQYGITGENVRGELLALVKDLPSQLAEIGAAAQQSLGEAIDVYQASVGFVCESPTEQVLPMLRFVQKRGNSTVYEWRTGTEPSVVERPHLEELPEQVAEDAIDWGDFGVEAVSEGTDSGISAEAAGIDWGIFPESDSKDPGGDGIDWGDDAVALQITVLEAGTQAPEGVARGPDALTLLEYTETRNQFLDELMELEIFLAQRAVELSEEADVLSVSQFQLAPAILQGQTKEKMVTMVSVLEDLIGKLTSLQLQHLFMILASPRYVDRVTEFLQQKLKQSQLLALKKELMVQKQQEALEEQAALEPKLDLLLEKTKELQKLIEADISKRYSGRPVNLMGTSL

SEQ ID NO: 13494 - protein, 531 aa, Homo sapiens
  Payload ID: 2624
  Gene Symbol: CDK5RAP3
  Gene Name: CDK5 regulatory subunit associated protein 3
  Uniprot ID: Q96JB5
  ENSP ID: ENSP00000438886
MRRQSMTSATRDLHTALDGKATQGGKKDHQHVPIDIQTSKLLDWLVDRRHCSLKWQSLVLTIREKINAAIQDMPESEEIAQLLSGSYIHYFHCLRILDLLKGTEASTKNIFGRYSSQRMKDWQEIIALYEKDNTYLVELSSLLVRNVNYEIPSLKKQIAKCQQLQQEYSRKEEECQAGAAEMREQFYHSCKQYGITGENVRGELLALVKDLPSQLAEIGAAAQQSLGEAIDVYQASVGFVCESPTEQVLPMLRFVQKRGNSTVYEWRTGTEPSVVERPHLEELPEQVAEDAIDWGDFGVEAVSEGTDSGISAEAAGIDWGIFPESDSKDPGGDGIDWGDDAVALQITVLEAGTQAPEGVARGPDALTLLEYTETRNQFLDELMELEIFLAQRAVELSEEADVLSVSQFQLAPAILQGQTKEKMVTMVSVLEDLIGKLTSLQLQHLFMILASPRYVDRVTEFLQQKLKQSQLLALKKELMVQKQQEALEEQAALEPKLDLLLEKTKELQKLIEADISKRYSGRPVNLMGTSL

SEQ ID NO: 13495 - protein, 105 aa, Homo sapiens
  Payload ID: 2624
  Gene Symbol: CDK5RAP3
  Gene Name: CDK5 regulatory subunit associated protein 3
  ENSP ID: ENSP00000462012
MEDHQHVPIDIQTSKLLDWLVDRRHCSLKWQSLVLTIREKINAAIQDMPESEEIAQLLSGSYIHYFHCLRILDLLKGTEASTKNIFGRYSSQRMKARLAGDYSSV

SEQ ID NO: 13496 - protein, 118 aa, Homo sapiens
  Payload ID: 2624
  Gene Symbol: CDK5RAP3
  Gene Name: CDK5 regulatory subunit associated protein 3
  ENSP ID: ENSP00000462042
MEDHQHVPIDIQTSKLLDWLVDRRHCSLKWQSLVLTIREKINAAIQDMPESEEIAQLLSGSYIHYFHCLRILDLLKGTEASTKNIFGRYSSQRMKDWQEIIALYEKDNTYLGGKINCF

SEQ ID NO: 13497 - protein, 124 aa, Homo sapiens
  Payload ID: 2624
  Gene Symbol: CDK5RAP3
  Gene Name: CDK5 regulatory subunit associated protein 3
  ENSP ID: ENSP00000462328
MEDHQHVPIDIQTSKLLDWLVDRRHCSLKWQSLVLTIREKINAAIQDMPESEEIAQLLSGSYIHYFHCLRILDLLKGTEASTKNIFGRYSSQRMKDWQEIIALYEKDNTYLASWFGMSTMRSPH

SEQ ID NO: 13498 - protein, 48 aa, Homo sapiens
  Payload ID: 2624
  Gene Symbol: CDK5RAP3
  Gene Name: CDK5 regulatory subunit associated protein 3
  ENSP ID: ENSP00000462431
MEVWGQELGVLGTGRGPLTCVSGLPPEAAQPSPSLWPRSGPAGWWLGR

SEQ ID NO: 13499 - protein, 64 aa, Homo sapiens
  Payload ID: 2624
  Gene Symbol: CDK5RAP3
  Gene Name: CDK5 regulatory subunit associated protein 3
  ENSP ID: ENSP00000462886
MPESEEIAQLLSGSYIHYFHCLRILDLLKGTEASTKNIFGRYSSQRMKDWQEIIALYEKDNTYL

SEQ ID NO: 13500 - protein, 123 aa, Homo sapiens
  Payload ID: 2624
  Gene Symbol: CDK5RAP3
  Gene Name: CDK5 regulatory subunit associated protein 3
  ENSP ID: ENSP00000463431
MKDWQEIIALYEKDNTYLVELSSLLVRNVNYEIPSLKKQIAKCQQLQQEYSRKEEECQAGAAEMREQFYHSCKQYGITGENVRGELLALVKDLPSQLAEIGAAAQQSLGEAIDVYQASVGFVC

SEQ ID NO: 13501 - protein, 103 aa, Homo sapiens
  Payload ID: 2624
  Gene Symbol: CDK5RAP3
  Gene Name: CDK5 regulatory subunit associated protein 3
  ENSP ID: ENSP00000463442
DHQHVPIDIQTSKLLDWLVDRRHCSLKWQSLVLTIREKINAAIQDMPESEEIAQLLSGSYIHYFHCLRILDLLKGTEASTKNIFGRYSSQRMKARLAGDYSSV

SEQ ID NO: 13502 - protein, 58 aa, Homo sapiens
  Payload ID: 2624
  Gene Symbol: CDK5RAP3
  Gene Name: CDK5 regulatory subunit associated protein 3
  ENSP ID: ENSP00000463878
MPESEEIAQLLSGSYIHYFHCLRILDLLKGTEASTKNIFGRYSSQRMKARLAGDYSSV

SEQ ID NO: 13503 - protein, 281 aa, Homo sapiens
  Payload ID: 2624
  Gene Symbol: CDK5RAP3
  Gene Name: CDK5 regulatory subunit associated protein 3
  ENSP ID: ENSP00000463950
MEDHQHVPIDIQTSKLLDWLVDRRHCSLKWQSLVLTIREKINAAIQDMPESEEIAQLLSGSYIHYFHCLRILDLLKGTEASTKNIFGRYSSQRMKDWQEIIALYEKDNTYLVELSSLLVRNVNYEIPSLKKQIAKCQQLQQEYSRKEEECQAGAAEMREQFYHSCKQYGITGENVRGELLALVKDLPSQLAEIGAAAQQSLGEAIDVYQASVGPTEQVLPMLRFVQKRGNSTVYEWRTGTEPSVVERPHLEELPEQVAEDAIDWGDFGVEAVSEGTDSGIS

SEQ ID NO: 13504 - protein, 272 aa, Homo sapiens
  Payload ID: 2624
  Gene Symbol: CDK5RAP3
  Gene Name: CDK5 regulatory subunit associated protein 3
  ENSP ID: ENSP00000464286
  MOD_RES (1)..(1): Any amino acid
XDFGVEAVSEGTDSGISAEAAGIDWGIFPESDSKDPGGDGIDWGDDAVALQITVLEAGTQAPEGVARGPDALTLLEYTETRNQFLDELMELEIFLAQRAVELSEEADVLSVSQFQLAPAILQGQTKEKMVTMVSVLEDLIGKLTSLQLQHLFMILASPRYVDRVTEFLQQKLKQSQLLALKKELMVQKQQEALEEQAALEPKLDLLLEKTKELQKLIEADISKRQKTRLTGRWKATGRKRHLMVILALSMFSTRSCGDWPCGLSGENHRFSF

SEQ ID NO: 13505 - protein, 110 aa, Homo sapiens
  Payload ID: 2624
  Gene Symbol: CDK5RAP3
  Gene Name: CDK5 regulatory subunit associated protein 3
  ENSP ID: ENSP00000464419
MEVWGQELGPSARAHRHPDQQAARLAGGQKALQPEMAESGADDPREDQCCHPGHARERRDRPAAVWVLHSLLSLPKNPGPSQRHRGLHEEYFWPILFTADEGLAGDYSSV

SEQ ID NO: 13506 - protein, 196 aa, Homo sapiens
  Payload ID: 2624
  Gene Symbol: CDK5RAP3
  Gene Name: CDK5 regulatory subunit associated protein 3
  ENSP ID: ENSP00000464542
MRRQSMTSATRDLHTALDGKATQGGKKDHQHVPIDIQTSKLLDWLVDRRHCSLKWQSLVLTIREKINAAIQDMPESEEIAQLLSGSYIHYFHCLRILDLLKGTEASTKNIFGRYSSQRMKDWQEIIALYEKDNTYLVELSSLLVRNVNYEIPSLKKQIAKCQQLQQEYSRKEEECQAGAAEMREQFYHSCKQYGIT

SEQ ID NO: 13507 - protein, 870 aa, Homo sapiens
  Payload ID: 2625
  Gene Symbol: CIZ1
  Gene Name: CDKN1A interacting zinc finger protein 1
  ENSP ID: ENSP00000277465
MFSQQQQQQLQQQQQQLQQLQQQQLQQQQLQQQQLLQLQQLLQQSPPQAPLPMAVSRGLPPQQPQQPLLNLQGTNSASLLNGSMLQRALLLQQLQGLDQFAMPPATYDTAGLTMPTATLGNLRGYGMASPGLAAPSLTPPQLATPNLQQFFPQATRQSLLGPPPVGVPMNPSQFNLSGRNPQKQARTSSSTTPNRKDSSSQTMPVEDKSDPPEGSEEAAEPRMDTPEDQDLPPCPEDIAKEKRTPAPEPEPCEASELPAKRLRSSEEPTEKEPPGQLQVKAQPQARMTVPKQTQTPDLLPEALEAQVLPRFQPRVLQVQAQVQSQTQPRIPSTDTQVQPKLQKQAQTQTSPEHLVLQQKQVQPQLQQEAEPQKQVQPQVQPQAHSQGPRQVQLQQEAEPLKQVQPQVHTQAQPSVQPQEHPPAQVSVQPPEQTHEQPHTQPQVSLLAPEQTPVVVHVCGLEMPPDAVEAGGGMEKTLPEPVGTQVSMEEIQNESACGLDVGECENRAREMPGVWGAGGSLKVTILQSSDSRAFSTVPLTPVPRPSDSVSSTPAATSTPSKQALQFFCYICKASCSSQQEFQDHMSEPQHQQRLGEIQHMSQACLLSLLPVPRDVLETEDEEPPPRRWCNTCQLYYMGDLIQHRRTQDHKIAKQSLRPFCTVCNRYFKTPRKFVEHVKSQGHKDKAKELKSLEKEIAGQDEDHFITVDAVGCFEGDEEEEEDDEDEEEIEVEEELCKQVRSRDISREEWKGSETYSPNTAYGVDFLVPVMGYICRICHKFYHSNSGAQLSHCKSLGHFENLQKYKAAKNPSPTTRPVSRRCAINARNALTALFTSSGRPPSQPNTQDKTPSKVTARPSQPPLPRRSTRLKT

SEQ ID NO: 13508 - protein, 252 aa, Homo sapiens
  Payload ID: 2625
  Gene Symbol: CIZ1
  Gene Name: CDKN1A interacting zinc finger protein 1
  ENSP ID: ENSP00000321780
MFSQQQQQQLQQQQQQLQQLQQQQLQQQQLQQQQLLQLQQLLQQSPPQAPLPMAVSRGLPPQQPQQPLLNLQGTNSASLLNGSMLQRALLLQQLQGLDQFAMPPATYDTAGLTMPTATLGNLRGYGMASPGLAAPSLTPPQLATPNLQQFFPQATRQSLLGPPPVGVPMNPSQFNLSGRNPQKQARTSSSTTPNRKDSSSQTMPVEDKSDPPEGSEEAAEPRMDTPEDQDLPPCPEDIAKEKRTPAPEPEPC

SEQ ID NO: 13509 - protein, 870 aa, Homo sapiens; identical to SEQ ID NO: 13507
  Payload ID: 2625
  Gene Symbol: CIZ1
  Gene Name: CDKN1A interacting zinc finger protein 1
  ENSP ID: ENSP00000350169

SEQ ID NO: 13510 - protein, 898 aa, Homo sapiens
  Payload ID: 2625
  Gene Symbol: CIZ1
  Gene Name: CDKN1A interacting zinc finger protein 1
  Uniprot ID: Q9ULV3
  ENSP ID: ENSP00000362029
MFSQQQQQQLQQQQQQLQQLQQQQLQQQQLQQQQLLQLQQLLQQSPPQAPLPMAVSRGLPPQQPQQPLLNLQGTNSASLLNGSMLQRALLLQQLQGLDQFAMPPATYDTAGLTMPTATLGNLRGYGMASPGLAAPSLTPPQLATPNLQQFFPQATRQSLLGPPPVGVPMNPSQFNLSGRNPQKQARTSSSTTPNRKDSSSQTMPVEDKSDPPEGSEEAAEPRMDTPEDQDLPPCPEDIAKEKRTPAPEPEPCEASELPAKRLRSSEEPTEKEPPGQLQVKAQPQARMTVPKQTQTPDLLPEALEAQVLPRFQPRVLQVQAQVQSQTQPRIPSTDTQVQPKLQKQAQTQTSPEHLVLQQKQVQPQLQQEAEPQKQVQPQVQPQAHSQGPRQVQLQQEAEPLKQVQPQVQPQAHSQPPRQVQLQLQKQVQTQTYPQVHTQAQPSVQPQEHPPAQVSVQPPEQTHEQPHTQPQVSLLAPEQTPVVVHVCGLEMPPDAVEAGGGMEKTLPEPVGTQVSMEEIQNESACGLDVGECENRAREMPGVWGAGGSLKVTILQSSDSRAFSTVPLTPVPRPSDSVSSTPAATSTPSKQALQFFCYICKASCSSQQEFQDHMSEPQHQQRLGEIQHMSQACLLSLLPVPRDVLETEDEEPPPRRWCNTCQLYYMGDLIQHRRTQDHKIAKQSLRPFCTVCNRYFKTPRKFVEHVKSQGHKDKAKELKSLEKEIAGQDEDHFITVDAVGCFEGDEEEEEDDEDEEEIEVEEELCKQVRSRDISREEWKGSETYSPNTAYGVDFLVPVMGYICRICHKFYHSNSGAQLSHCKSLGHFENLQKYKAAKNPSPTTRPVSRRCAINARNALTALFTSSGRPPSQPNTQDKTPSKVTARPSQPPLPRRSTRLKT

SEQ ID NO: 13511 - protein, 842 aa, Homo sapiens
  Payload ID: 2625
  Gene Symbol: CIZ1
  Gene Name: CDKN1A interacting zinc finger protein 1
  Uniprot ID: Q9ULV3
  ENSP ID: ENSP00000362039
MFSQQQQQQLQQQQQQLQQLQQQQLQQQQLQQQQLLQLQQLLQQSPPQAPLPMAVSRGLPPQQPQQPLLNLQGTNSASLLNGSMLQRALLLQQLQGLDQFAMPPATYDTAGLTMPTATLGNLRGYGMASPGLAAPSLTPPQLATPNLQQFFPQATRQSLLGPPPVGVPMNPSQFNLSGRNPQKQARTSSSTTPNRKDSSSQTMPVEDKSDPPEGSEEAAEPRMDTPEDQDLPPCPEDIAKEKRTPAPEPEPCEASELPAKRLRSSEEPTEKEPPGQLQVKAQPQARMTVPKQTQTPDLLPEALEAQVLPRFQPRVLQVQAQVQSQTQPRIPSTDTQVQPKLQKQAQTQTSPEHLVLQQKQVQPQLQQEAEPQKQVQPQVHTQAQPSVQPQEHPPAQVSVQPPEQTHEQPHTQPQVSLLAPEQTPVVVHVCGLEMPPDAVEAGGGMEKTLPEPVGTQVSMEEIQNESACGLDVGECENRAREMPGVWGAGGSLKVTILQSSDSRAFSTVPLTPVPRPSDSVSSTPAATSTPSKQALQFFCYICKASCSSQQEFQDHMSEPQHQQRLGEIQHMSQACLLSLLPVPRDVLETEDEEPPPRRWCNTCQLYYMGDLIQHRRTQDHKIAKQSLRPFCTVCNRYFKTPRKFVEHVKSQGHKDKAKELKSLEKEIAGQDEDHFITVDAVGCFEGDEEEEEDDEDEEEIEVEEELCKQVRSRDISREEWKGSETYSPNTAYGVDFLVPVMGYICRICHKFYHSNSGAQLSHCKSLGHFENLQKYKAAKNPSPTTRPVSRRCAINARNALTALFTSSGRPPSQPNTQDKTPSKVTARPSQPPLPRRSTRLKT

SEQ ID NO: 13512 - protein, 818 aa, Homo sapiens
  Payload ID: 2625
  Gene Symbol: CIZ1
  Gene Name: CDKN1A interacting zinc finger protein 1
  Uniprot ID: Q9ULV3
  ENSP ID: ENSP00000362045
MFSQQQQQQLQQQQQQLQQLQQQQLQQQQLQQQQLLQLQQLLQQSPPQAPLPMAVSRGLPPQQPQQPLLNLQGTNSASLLNGSMLQRALLLQQLQGNLRGYGMASPGLAAPSLTPPQLATPNLQQFFPQATRQSLLGPPPVGVPMNPSQFNLSGRNPQKQARTSSSTTPNRKDSSSQTMPVEDKSDPPEGSEEAAEPRMDTPEDQDLPPCPEDIAKEKRTPAPEPEPCEASELPAKRLRSSEEPTEKEPPGQLQVKAQPQARMTVPKQTQTPDLLPEALEAQVLPRFQPRVLQVQAQVQSQTQPRIPSTDTQVQPKLQKQAQTQTSPEHLVLQQKQVQPQLQQEAEPQKQVQPQVHTQAQPSVQPQEHPPAQVSVQPPEQTHEQPHTQPQVSLLAPEQTPVVVHVCGLEMPPDAVEAGGGMEKTLPEPVGTQVSMEEIQNESACGLDVGECENRAREMPGVWGAGGSLKVTILQSSDSRAFSTVPLTPVPRPSDSVSSTPAATSTPSKQALQFFCYICKASCSSQQEFQDHMSEPQHQQRLGEIQHMSQACLLSLLPVPRDVLETEDEEPPPRRWCNTCQLYYMGDLIQHRRTQDHKIAKQSLRPFCTVCNRYFKTPRKFVEHVKSQGHKDKAKELKSLEKEIAGQDEDHFITVDAVGCFEGDEEEEEDDEDEEEIEVEEELCKQVRSRDISREEWKGSETYSPNTAYGVDFLVPVMGYICRICHKFYHSNSGAQLSHCKSLGHFENLQKYKAAKNPSPTTRPVSRRCAINARNALTALFTSSGRPPSQPNTQDKTPSKVTARPSQPPLPRRSTRLKT

SEQ ID NO: 13513 - protein, 837 aa, Homo sapiens
  Payload ID: 2625
  Gene Symbol: CIZ1
  Gene Name: CDKN1A interacting zinc finger protein 1
  ENSP ID: ENSP00000377232
MFSQQQQQQLQQQQQAPLPMAVSRGLPPQQPQQPLLNLQGTNSASLLNGSMLQRALLLQQLQGLDQFAMPPATYDTAGLTMPTATLGNLRGYGMASPGLAAPSLTPPQLATPNLQQFFPQATRQSLLGPPPVGVPMNPSQFNLSGRNPQKQARTSSSTTPNRKDSSSQTMPVEDKSDPPEGSEEAAEPRMDTPEDQDLPPCPEDIAKEKRTPAPEPEPCEASELPAKRLRSSEEPTEKEPPGQLQVKAQPQARMTVPKQTQTPDLLPEALEAQVLPRFQPRVLQVQAQVQSQTQPRIPSTDTQVQPKLQKQAQTQTSPEHLVLQQKQVQPQLQQEAEPQKQVQPQVQPQAHSQGPRQVQLQQEAEPLKQVQPQVHTQAQPSVQPQEHPPAQVSVQPPEQTHEQPHTQPQVSLLAPEQTPVVVHVCGLEMPPDAVEAGGGMEKTLPEPVGTQVSMEEIQNESACGLDVGECENRAREMPGVWGAGGSLKVTILQSSDSRAFSTVPLTPVPRPSDSVSSTPAATSTPSKQALQFFCYICKASCSSQQEFQDHMSEPQHQQRLGEIQHMSQACLLSLLPVPRDVLETEDEEPPPRRWCNTCQLYYMGDLIQHRRTQDHKIAKQSLRPFCTVCNRYFKTPRKFVEHVKSQGHKDKAKELKSLEKEIAGQDEDHFITVDAVGCFEGDEEEEEDDEDEEEIEVEEELCKQVRSRDISREEWKGSETYSPNTAYGVDFLVPVMGYICRICHKFYHSNSGAQLSHCKSLGHFENLQKYKAAKNPSPTTRPVSRRCAINARNALTALFTSSGRPPSQPNTQDKTPSKVTARPSQPPLPRRSTRLKT

SEQ ID NO: 13514 - protein, 820 aa, Homo sapiens
  Payload ID: 2625
  Gene Symbol: CIZ1
  Gene Name: CDKN1A interacting zinc finger protein 1
  ENSP ID: ENSP00000398011
PLPMAVSRGLPPQQPQQPLLNLQGTNSASLLNGSMLQRALLLQQLQGNLRGYGMASPGLAAPSLTPPQLATPNLQQFFPQATRQSLLGPPPVGVPMNPSQFNLSGRNPQKQARTSSSTTPNRKTMPVEDKSDPPEGSEEAAEPRMDTPEDQDLPPCPEDIAKEKRTPAPEPEPCEASELPAKRLRSSEEPTEKEPPGQLQVKAQPQARMTVPKQTQTPDLLPEALEAQVLPRFQPRVLQVQAQVQSQTQPRIPSTDTQVQPKLQKQAQTQTSPEHLVLQQKQVQPQLQQEAEPQKQVQPQVQPQAHSQGPRQVQLQQEAEPLKQVQPQVQPQAHSQPPRQVQLQLQKQVQTQTYPQVHTQAQPSVQPQEHPPAQVSVQPPEQTHEQPHTQPQVSLLAPEQTPVVVHVCGLEMPPDAVEAGGGMEKTLPEPVGTQVSMEEIQNESACGLDVGECENRAREMPGVWGAGGSLKVTILQSSDSRAFSTVPLTPVPRPSDSVSSTPAATSTPSKQALQFFCYICKASCSSQQEFQDHMSEPQHQQRLGEIQHMSQACLLSLLPVPRDVLETEDEEPPPRRWCNTCQLYYMGDLIQHRRTQDHKIAKQSLRPFCTVCNRYFKTPRKFVEHVKSQGHKDKAKELKSLEKEIAGQDEDHFITVDAVGCFEGDEEEEEDDEDEEEIEVEEELCKQVRSRDISREEWKGSETYSPNTAYGVDFLVPVMGYICRICHKFYHSNSGAQLSHCKSLGHFENLQKYKAAKNPSPTTRPVSRRCAINARNALTALFTSSGRPPSQPNTQDKTPSKVTARPSQPPLPRRSTRLKT

SEQ ID NO: 13515 - protein, 168 aa, Homo sapiens
  Payload ID: 2625
  Gene Symbol: CIZ1
  Gene Name: CDKN1A interacting zinc finger protein 1
  ENSP ID: ENSP00000407265
MFSQQQQQQLQQQQQQLQQLQQQQLQQQQLQQQQLLQLQQLLQQSPPQAPLPMAVSRGLPPQQPQQPLLNLQGTNSASLLNGSMLQRALLLQQLQGLDQFAMPPATYDTAGLTMPTATLGNLRGYGMASPGLAAPSLTPPQLATPNLQQFFPQATRQSLLGPPPVGVP

SEQ ID NO: 13516 - protein, 954 aa, Homo sapiens
  Payload ID: 2625
  Gene Symbol: CIZ1
  Gene Name: CDKN1A interacting zinc finger protein 1
  ENSP ID: ENSP00000439244
MYIRQLRAPSHRSPARGPRIAGPRRPQGATMFSQQQQQQLQQQQQQLQQLQQQQLQQQQLQQQQLLQLQQLLQQSPPQAPLPMAVSRGLPPQQPQQPLLNLQGTNSASLLNGSMLQRALLLQQLQGLDQFAMPPATYDTAGLTMPTATLGNLRGYGMASPGLAAPSLTPPQLATPNLQQFFPQATRQSLLGPPPVGVPMNPSQFNLSGRNPQKQARTSSSTTPNRKDSSSQTMPVEDKSDPPEGSEEAAEPRMDTPEDQDLPPCPEDIAKEKRTPAPEPEPCEASELPAKRLRSSEEPTEKEPPGQLQVKAQPQARMTVPKQTQTPDLLPEALEAQVLPRFQPRVLQVQAQVQSQTQPRIPSTDTQVQPKLQKQAQTQTSPEHLVLQQKQVQPQLQQEAEPQKQVQPQVQPQAHSQGPRQVQLQQEAEPLKQVQPQVQPQAHSQPPRQVQLQLQKQVQTQTYPQVHTQAQPSVQPQEHPPAQVSVQPPEQTHEQPHTQPQVSLLAPEQTPVVVHVCGLEMPPDAVEAGGGMEKTLPEPVGTQVSMEEIQNESACGLDVGECENRAREMPGVWGAGGSLKVTILQSSDSRAFSTVPLTPVPRPSDSVSSTPAATSTPSKQALQFFCYICKASCSSQQEFQDHMSEPQHQQRLGEIQHMSQACLLSLLPVPRDVLETEDEEPPPRRWCNTCQLYYMGDLIQHRRTQDHKPPTPRRDVFAHVPVQGWSTARLVTDMIAKQSLRPFCTVCNRYFKTPRKFVEHVKSQGHKDKAKELKSLEKEIAGQDEDHFITVDAVGCFEGDEEEEEDDEDEEEIEVEEELCKQVRSRDISREEWKGSETYSPNTAYGVDFLVPVMGYICRICHKFYHSNSGAQLSHCKSLGHFENLQKYKAAKNPSPTTRPVSRRCAINARNALTALFTSSGRPPSQPNTQDKTPSKVTARPSQPPLPRRSTRLKT

SEQ ID NO: 13517 - protein, 797 aa, Homo sapiens
  Payload ID: 2625
  Gene Symbol: CIZ1
  Gene Name: CDKN1A interacting zinc finger protein 1
  Uniprot ID: Q9ULV3
  ENSP ID: ENSP00000486816
MPPATYDTAGLTMPTATLGNLRGYGMASPGLAAPSLTPPQLATPNLQQFFPQATRQSLLGPPPVGVPMNPSQFNLSGRNPQKQARTSSSTTPNRKDSSSQTMPVEDKSDPPEGSEEAAEPRMDTPEDQDLPPCPEDIAKEKRTPAPEPEPCEASELPAKRLRSSEEPTEKEPPGQLQVKAQPQARMTVPKQTQTPDLLPEALEAQVLPRFQPRVLQVQAQVQSQTQPRIPSTDTQVQPKLQKQAQTQTSPEHLVLQQKQVQPQLQQEAEPQKQVQPQVQPQAHSQGPRQVQLQQEAEPLKQVQPQVQPQAHSQPPRQVQLQLQKQVQTQTYPQVHTQAQPSVQPQEHPPAQVSVQPPEQTHEQPHTQPQVSLLAPEQTPVVVHVCGLEMPPDAVEAGGGMEKTLPEPVGTQVSMEEIQNESACGLDVGECENRAREMPGVWGAGGSLKVTILQSSDSRAFSTVPLTPVPRPSDSVSSTPAATSTPSKQALQFFCYICKASCSSQQEFQDHMSEPQHQQRLGEIQHMSQACLLSLLPVPRDVLETEDEEPPPRRWCNTCQLYYMGDLIQHRRTQDHKIAKQSLRPFCTVCNRYFKTPRKFVEHVKSQGHKDKAKELKSLEKEIAGQDEDHFITVDAVGCFEGDEEEEEDDEDEEEIEVEEELCKQVRSRDISREEWKGSETYSPNTAYGVDFLVPVMGYICRICHKFYHSNSGAQLSHCKSLGHFENLQKYKAAKNPSPTTRPVSRRCAINARNALTALFTSSGRPPSQPNTQDKTPSKVTARPSQPPLPRRSTRLKT

SEQ ID NO: 13518 - protein, 310 aa, Homo sapiens
  Payload ID: 2625
  Gene Symbol: CIZ1
  Gene Name: CDKN1A interacting zinc finger protein 1
  ENSP ID: ENSP00000489129
  MOD_RES (1)..(1): Any amino acid
XFFCYICKASCSSQQEFQDHMSEPQHQQRLGEIQHMSQACLLSLLPVPRDVLETEDEEPPPRRWCNTCQLYYMGDLIQHRRTQDHKPPTPRRDVFAHVPVQGWSTARLVTDMIAKQSLRPFCTVCNRYFKTPRKFVEHVKSQGHKDKAKELKSLEKEIAGQDEDHFITVDAVGCFEGDEEEEEDDEDEEEIEVEEELCKQVRSRDISREEWKGSETYSPNTAYGVDFLVPVMGYICRICHKFYHSNSGAQLSHCKSLGHFENLQKYKAAKNPSPTTRPVSRRCAINARNALTALFTSSGRPPSQPNTQDK

SEQ ID NO: 13519 - protein, 898 aa, Homo sapiens; identical to SEQ ID NO: 13510
  Payload ID: 2625
  Gene Symbol: CIZ1
  Gene Name: CDKN1A interacting zinc finger protein 1
  ENSP ID: ENSP00000489425

SEQ ID NO: 13520 - protein, 126 aa, Homo sapiens
  Payload ID: 2626
  Gene Symbol: CDKN2AIP
  Gene Name: CDKN2A interacting protein
  ENSP ID: ENSP00000303788
MAQEVSEYLSQNPRVAAWVEALRCDGETDKHWRHRRDFLLRNAGDLAPAGGAASASTDEAADAESGTRNRQLQQLISFSMAWANHVFLGCRYPQKVMDKILSMAEGIKVTDAPTYTTRDELVAKKG

SEQ ID NO: 13521 - protein, 135 aa, Homo sapiens
  Payload ID: 2626
  Gene Symbol: CDKN2AIP
  Gene Name: CDKN2A interacting protein
  ENSP ID: ENSP00000421308
MAQEVSEYLSQNPRVAAWVEALRCDGETDKHWRHRRDFLLRNAGDLAPAGGAASASTDEAADAESGTRNRQLQQLISFSMAWANHVFLGCRYPQKVMDKILSMAEGIKVTDAPTYTTRDELVAKVKKRGISSSNG

SEQ ID NO: 13522 - protein, 580 aa, Homo sapiens
  Payload ID: 2626
  Gene Symbol: CDKN2AIP
  Gene Name: CDKN2A interacting protein
  Uniprot ID: Q9NXV6
  ENSP ID: ENSP00000427108
MAQEVSEYLSQNPRVAAWVEALRCDGETDKHWRHRRDFLLRNAGDLAPAGGAASASTDEAADAESGTRNRQLQQLISFSMAWANHVFLGCRYPQKVMDKILSMAEGIKVTDAPTYTTRDELVAKVKKRGISSSNEGVEEPSKKRVIEGKNSSAVEQDHAKTSAKTERASAQQENSSTCIGSAIKSESGNSARSSGISSQNSSTSDGDRSVSSQSSSSVSSQVTTAGSGKASEAEAPDKHGSASFVSLLKSSVNSHMTQSTDSRQQSGSPKKSALEGSSASASQSSSEIEVPLLGSSGSSEVELPLLSSKPSSETASSGLTSKTSSEASVSSSVAKNSSSSGTSLLTPKSSSSTNTSLLTSKSTSQVAASLLASKSSSQTSGSLVSKSTSLASVSQLASKSSSQTSTSQLPSKSTSQSSESSVKFSCKLTNEDVKQKQPFFNRLYKTVAWKLVAVGGFSPNVNHGELLNAAIEALKATLDVFFVPLKELADLPQNKSSQESIVCELRCKSVYLGTGCGKSKENAKAVASREALKLFLKKKVVVKICKRKYRGSEIEDLVLLDEESRPVNLPPALKHPQELL

SEQ ID NO: 13523 - protein, 85 aa, Homo sapiens
  Payload ID: 2627
  Gene Symbol: CDKN2AIPNL
  Gene Name: CDKN2A interacting protein N-terminal like
  Uniprot ID: Q96HQ2
  ENSP ID: ENSP00000378456
MVGGEAAAAVEELVSGVRQAADFAEQFRSYSESEKQWKARMEFILRHLPDYRDPPDGSGRLDQLLSLSMVWANHLFLGCSPRGPK

SEQ ID NO: 13524 - protein, 116 aa, Homo sapiens
  Payload ID: 2627
  Gene Symbol: CDKN2AIPNL
  Gene Name: CDKN2A interacting protein N-terminal like
  Uniprot ID: Q96HQ2
  ENSP ID: ENSP00000394183
MVGGEAAAAVEELVSGVRQAADFAEQFRSYSESEKQWKARMEFILRHLPDYRDPPDGSGRLDQLLSLSMVWANHLFLGCSYNKDLLDKVMEMADGIEVEDLPQFTTRSELMKKHQS

SEQ ID NO: 13525 - protein, 461 aa, Homo sapiens
  Payload ID: 2628
  Gene Symbol: CDS1
  Gene Name: CDP-diacylglycerol synthase (phosphatidate cytidylyltransferase) 1
  Uniprot ID: Q92903
  ENSP ID: ENSP00000295887
MLELRHRGSCPGPREAVSPPHREGEAAGGDHETESTSDKETDIDDRYGDLDSRTDSDIPEIPPSSDRTPEILKKALSGLSSRWKNWWIRGILTLTMISLFFLIIYMGSFMLMLLVLGIQVKCFHEIITIGYRVYHSYDLPWFRTLSWYFLLCVNYFFYGETVADYFATFVQREEQLQFLIRYHRFISFALYLAGFCMFVLSLVKKHYRLQFYMFAWTHVTLLITVTQSHLVIQNLFEGMIWFLVPISSVICNDITAYLFGFFFGRTPLIKLSPKKTWEGFIGGFFSTVVFGFIAAYVLSKYQYFVCPVEYRSDVNSFVTECEPSELFQLQTYSLPPFLKAVLRQERVSLYPFQIHSIALSTFASLIGPFGGFFASGFKRAFKIKDFANTIPGHGGIMDRFDCQYLMATFVHVYITSFIRGPNPSKVLQQLLVLQPEQQLNIYKTLKTHLIEKGILQPTLKV

SEQ ID NO: 13526 - protein, 81 aa, Homo sapiens
  Payload ID: 2628
  Gene Symbol: CDS1
  Gene Name: CDP-diacylglycerol synthase (phosphatidate cytidylyltransferase) 1
  ENSP ID: ENSP00000421316
MLELRHRGSCPGPREAVSPPHREGEAAGGDHETESTSDKVEKLVDTWNSHSNYDLVVFPDHLYGILHADASCSGHPSEMLP

SEQ ID NO: 13527 - protein, 250 aa, Homo sapiens
  Payload ID: 2629
  Gene Symbol: CDS2
  Gene Name: CDP-diacylglycerol synthase (phosphatidate cytidylyltransferase) 2
  Uniprot ID: O95674
  ENSP ID: ENSP00000403205
MSRLRHPRTRWKNWWVRGILTLAMIAFFFIIIYLGPMVLMIIVMCVQIKCFHEIITIGYNVYHSYDLPWFRTLSWYFLLCVNYFFYGETVTDYFFTLVQREEPLRILSKYHRFISFTLYLIGFCMFVLSLVKKHYRLQFYMFGWTHVTLLIVVTQSHLVIHNLFEGMIWFIVPISCVICNDIMAYMFGFFFGRTPLIKLSPKKTWEGFIGGFFATVVFGLLLSYVMSGYRCFVCPVEYNNDTNSFTVDCE

SEQ ID NO: 13528 - protein, 445 aa, Homo sapiens
  Payload ID: 2629
  Gene Symbol: CDS2
  Gene Name: CDP-diacylglycerol synthase (phosphatidate cytidylyltransferase) 2
  Uniprot ID: O95674
  ENSP ID: ENSP00000419879
MTELRQRVAHEPVAPPEDKESESEAKVDGETASDSESRAESAPLPVSADDTPEVLNRALSNLSSRWKNWWVRGILTLAMIAFFFIIIYLGPMVLMIIVMCVQIKCFHEIITIGYNVYHSYDLPWFRTLSWYFLLCVNYFFYGETVTDYFFTLVQREEPLRILSKYHRFISFTLYLIGFCMFVLSLVKKHYRLQFYMFGWTHVTLLIVVTQSHLVIHNLFEGMIWFIVPISCVICNDIMAYMFGFFFGRTPLIKLSPKKTWEGFIGGFFATVVFGLLLSYVMSGYRCFVCPVEYNNDTNSFTVDCEPSDLFRLQEYNIPGVIQSVIGWKTVRMYPFQIHSIALSTFASLIGPFGGFFASGFKRAFKIKDFANTIPGHGGIMDRFDCQYLMATFVNVYIASFIRGPNPSKLIQQFLTLRPDQQLHIFNTLRSHLIDKGMLTSTTEDE

SEQ ID NO: 13529 - protein, 213 aa, Homo sapiens
  Payload ID: 2630
  Gene Symbol: CDIPT
  Gene Name: CDP-diacylglycerol--inositol 3-phosphatidyltransferase
  Uniprot ID: O14735
  ENSP ID: ENSP00000219789
MPDENIFLFVPNLIGYARIVFAIISFYFMPCCPLTASSFYLLSGLLDAFDGHAARALNQGTRFGAMLDMLTDRCSTMCLLVNLALLYPGATLFFQISMSLDVASHWLHLHSSVVRGSESHKMIDLSGNPVLRIYYTSRPALFTLCAGNELFYCLLYLFHFSEGPLVGSVGLFRMGLWVTAPIALLKSLISVIHLITAARNMAALDAADRAKKK

SEQ ID NO: 13530 - protein, 213 aa, Homo sapiens; identical to SEQ ID NO: 13529
  Payload ID: 2630
  Gene Symbol: CDIPT
  Gene Name: CDP-diacylglycerol--inositol 3-phosphatidyltransferase
  Uniprot ID: O14735
  ENSP ID: ENSP00000454453

SEQ ID NO: 13531 - protein, 237 aa, Homo sapiens
  Payload ID: 2630
  Gene Symbol: CDIPT
  Gene Name: CDP-diacylglycerol--inositol 3-phosphatidyltransferase
  ENSP ID: ENSP00000455042
MSCRHSFPLLLPCSLHSHAFLSSCHGDLCPLTSHTACFLACVPPQAGGHFQSSFTPCVRVINQIWAPVLHPLCHNSPCPPNLPGTRFGAMLDMLTDRCSTMCLLVNLALLYPGATLFFQISMSLDVASHWLHLHSSVVRGSESHKMIDLSGNPVLRIYYTSRPALFTLCAGNELFYCLLYLFHFSEGPLVGSVGLFRMGLWVTAPIALLKSLISVIHLITAARNMAALDAADRAKKK

SEQ ID NO: 13532 - protein, 41 aa, Homo sapiens
  Payload ID: 2630
  Gene Symbol: CDIPT
  Gene Name: CDP-diacylglycerol--inositol 3-phosphatidyltransferase
  ENSP ID: ENSP00000457207
MPDENIFLFVPNLIAACWTLSMDTLLALLIKEPGLGPCWTC

SEQ ID NO: 13533 - protein, 213 aa, Homo sapiens; identical to SEQ ID NO: 13529
  Payload ID: 2630
  Gene Symbol: CDIPT
  Gene Name: CDP-diacylglycerol--inositol 3-phosphatidyltransferase
  Uniprot ID: O14735
  ENSP ID: ENSP00000457339

SEQ ID NO: 13534 - protein, 168 aa, Homo sapiens
  Payload ID: 2630
  Gene Symbol: CDIPT
  Gene Name: CDP-diacylglycerol--inositol 3-phosphatidyltransferase
  Uniprot ID: O14735
  ENSP ID: ENSP00000457340
MPDENIFLFVPNLIGTRFGAMLDMLTDRCSTMCLLVNLALLYPGATLFFQISMSLDVASHWLHLHSSVVRGSESHKMIDLSGNPVLRIYYTSRPALFTLCAGNELFYCLLYLFHFSEGPLVGSVGLFRMGLWVTAPIALLKSLISVIHLITAARNMAALDAADRAKKK

SEQ ID NO: 13535 - protein, 157 aa, Homo sapiens
  Payload ID: 2630
  Gene Symbol: CDIPT
  Gene Name: CDP-diacylglycerol--inositol 3-phosphatidyltransferase
  ENSP ID: ENSP00000457766
MPDENIFLFVPNLIGYARIVFAIISFYFMPCCPLTASSFYLLSGLLDAFDGHAARALNQGTRFGAMLDMLTDRCSTMCLLVNLALLYPGATLFFQISMSLDVASHWLHLHSSVVRGSESHKMIDLSGNPVLRIYYTSRLALWDCSGWASGSLPPSPC

SEQ ID NO: 13536 - protein, 258 aa, Homo sapiens
  Payload ID: 2631
  Gene Symbol: CDV3
  Gene Name: CDV3 homolog (mouse)
  Uniprot ID: Q9UKY7
  ENSP ID: ENSP00000264993
MAETEERSLDNFFAKRDKKKKKERSNRAASAAGAAGSAGGSSGAAGAAGGGAGAGTRPGDGGTASAGAAGPGAATKAVTKDEDEWKELEQKEVDYSGLRVQAMQISSEKEEDDNEKRQDPGDNWEEGGGGGGGMEKSSGPWNKTAPVQAPPAPVIVTETPEPAMTSGVYRPPGARLTTTRKTPQGPPEIYSDTQFPSLQSTAKHVESRKDKEMEKSFEVVRHKNRGRDEVSKNQALKLQLDNQYAVLENQKSSHSQYN

SEQ ID NO: 13537 - protein, 213 aa, Homo sapiens
  Payload ID: 2631
  Gene Symbol: CDV3
  Gene Name: CDV3 homolog (mouse)
  Uniprot ID: Q9UKY7
  ENSP ID: ENSP00000391955
MAETEERSLDNFFAKRDKKKKKERSNRAASAAGAAGSAGGSSGAAGAAGGGAGAGTRPGDGGTASAGAAGPGAATKAVTKDEDEWKELEQKEVDYSGLRVQAMQISSEKEEDDNEKRQDPGDNWEEGGGGGGGMEKSSGPWNKTAPVQAPPAPVIVTETPEPAMTSGVYRPPGARLTTTRKTPQGPPEIYSDTQFPSLQSTAKHVESRNRYLK

SEQ ID NO: 13538 - protein, 110 aa, Homo sapiens
  Payload ID: 2631
  Gene Symbol: CDV3
  Gene Name: CDV3 homolog (mouse)
  Uniprot ID: Q9UKY7
  ENSP ID: ENSP00000413272
MQISSEKEEDDNEKRQDPGDNWEEGGGGGGGMEKSSGPWNKTAPVQAPPAPVIVTETPEPAMTSGVYRPPGARLTTTRKTPQGPPEIYSDTQFPSLQSTAKHVESRKYLK

SEQ ID NO: 13539 - protein, 188 aa, Homo sapiens
  Payload ID: 2631
  Gene Symbol: CDV3
  Gene Name: CDV3 homolog (mouse)
  ENSP ID: ENSP00000421340
  MOD_RES (1)..(1): Any amino acid
XLPRGTRRRRRSGATGRRVPRAQRAAPAEAVEPRDEDEWKELEQKEVDYSGLRVQAMQISSEKEEDDNEKRQDPGDNWEEGGGGGGGMEKSSGPWNKTAPVQAPPAPVIVTETPEPAMTSGVYRPPGARLTTTRKTPQGPPEIYSDTQFPSLQSTAKHVESRKDKEMEKSFEVVRHKNRGRDEVSKNQ

SEQ ID NO: 13540 - protein, 108 aa, Homo sapiens
  Payload ID: 2631
  Gene Symbol: CDV3
  Gene Name: CDV3 homolog (mouse)
  ENSP ID: ENSP00000421495
MQISSEKEEDDNEKRQDPGDNWEEGGGGGGGMEKSSGPWNKTAPVQAPPAPVIVTETPEPAMTSGVYRPPGARLTTTRKTPQGPPEIYSDTQFPSLQSTAKHVESRKY

SEQ ID NO: 13541 - protein, 156 aa, Homo sapiens
  Payload ID: 2631
  Gene Symbol: CDV3
  Gene Name: CDV3 homolog (mouse)
  ENSP ID: ENSP00000422866
MQISSEKEEDDNEKRQDPGDNWEEGGGGGGGMEKSSGPWNKTAPVQAPPAPVIVTETPEPAMTSGVYRPPGARLTTTRKTPQGPPEIYSDTQFPSLQSTAKHVESRKDKEMEKSFEVVRHKNRGRDEVSKNQALKLQLDNQYAVLENQKSSHSQYN

SEQ ID NO: 13542 - protein, 53 aa, Homo sapiens
  Payload ID: 2631
  Gene Symbol: CDV3
  Gene Name: CDV3 homolog (mouse)
  ENSP ID: ENSP00000423349
MQISSEKEEDDNEKRQDPGDNWEEGGGGGGGMEKSSGPWNKTAPVQAPPAPVI

SEQ ID NO: 13543 - protein, 92 aa, Homo sapiens
  Payload ID: 2631
  Gene Symbol: CDV3
  Gene Name: CDV3 homolog (mouse)
  ENSP ID: ENSP00000424742
MQISEKEEDDNEKRQDPGDNWEEGGGGGGGMEKSSGPWNKTAPVQAPPAPVIVTETPEPAMTSGVYRPPGARLTTTRKTPQGPPEIYSDTQF

SEQ ID NO: 13544 - protein, 108 aa, Homo sapiens
  Payload ID: 2631
  Gene Symbol: CDV3
  Gene Name: CDV3 homolog (mouse)
  ENSP ID: ENSP00000425297
MQISSEKEEDDNEKRQDPGDNWEEGGGGGGGMEKSSGPWNKTAPVQAPPAPVIETPEPAMTSGVYRPPGARLTTTRKTPQGPPEIYSDTQFPSLQSTAKHVESRKYLK

SEQ ID NO: 13545 - protein, 80 aa, Homo sapiens
  Payload ID: 2632
  Gene Symbol: CEBPZOS
  Gene Name: CEBPZ opposite strand
  Uniprot ID: A8MTT3
  ENSP ID: ENSP00000380254
MARTLEPLAKKIFKGVLVAELVGVFGAYFLFSKMHTSQDFRQTMSKKYPFILEVYYKSTEKSGMYGIRELDQKTWLNSKN

SEQ ID NO: 13546 - protein, 80 aa, Homo sapiens; identical to SEQ ID NO: 13545
  Payload ID: 2632
  Gene Symbol: CEBPZOS
  Gene Name: CEBPZ opposite strand
  Uniprot ID: A8MTT3
  ENSP ID: ENSP00000380403

SEQ ID NO: 13547 - protein, 80 aa, Homo sapiens; identical to SEQ ID NO: 13545
  Payload ID: 2632
  Gene Symbol: CEBPZOS
  Gene Name: CEBPZ opposite strand
  Uniprot ID: A8MTT3
  ENSP ID: ENSP00000383895

SEQ ID NO: 13548 - protein, 80 aa, Homo sapiens; identical to SEQ ID NO: 13545
  Payload ID: 2632
  Gene Symbol: CEBPZOS
  Gene Name: CEBPZ opposite strand
  Uniprot ID: A8MTT3
  ENSP ID: ENSP00000384331

SEQ ID NO: 13549 - protein, 80 aa, Homo sapiens; identical to SEQ ID NO: 13545
  Payload ID: 2632
  Gene Symbol: CEBPZOS
  Gene Name: CEBPZ opposite strand
  Uniprot ID: A8MTT3
  ENSP ID: ENSP00000384813

SEQ ID NO: 13550 - protein, 1264 aa, Homo sapiens
  Payload ID: 2633
  Gene Symbol: CDON
  Gene Name: cell adhesion associated, oncogene regulated
  Uniprot ID: Q4KMG0
  ENSP ID: ENSP00000263577
MHPDLGPLCTLLYVTLTILCSSVSSDLAPYFTSEPLSAVQKLGGPVVLHCSAQPVTTRISWLHNGKTLDGNLEHVKIHQGTLTILSLNSSLLGYYQCLANNSIGAIVSGPATVSVAVLGDFGSSTKHVITAEEKSAGFIGCRVPESNPKAEVRYKIRGKWLEHSTENYLILPSGNLQILNVSLEDKGSYKCAAYNPVTHQLKVEPIGRKLLVSRPSSDDVHILHPTHSQALAVLSRSPVTLECVVSGVPAPQVYWLKDGQDIAPGSNWRRLYSHLATDSVDPADSGNYSCMAGNKSGDVKYVTYMVNVLEHASISKGLQDQIVSLGATVHFTCDVHGNPAPNCTWFHNAQPIHPSARHLTAGNGLKISGVTVEDVGMYQCVADNGIGFMHSTGRLEIENDGGFKPVIITAPVSAKVADGDFVTLSCNASGLPVPVIRWYDSHGLITSHPSQVLRSKSRKSQLSRPEGLNLEPVYFVLSQAGASSLHIQAVTQEHAGKYICEAANEHGTTQAEASLMVVPFETNTKAETVTLPDAAQNDDRSKRDGSETGLLSSFPVKVHPSAVESAPEKNASGISVPDAPIILSPPQTHTPDTYNLVWRAGKDGGLPINAYFVKYRKLDDGVGMLGSWHTVRVPGSENELHLAELEPSSLYEVLMVARSAAGEGQPAMLTFRTSKEKTASSKNTQASSPPVGIPKYPVVSEAANNNFGVVLTDSSRHSGVPEAPDRPTISTASETSVYVTWIPRANGGSPITAFKVEYKRMRTSNWLVAAEDIPPSKLSVEVRSLEPGSTYKFRVIAINHYGESFRSSASRPYQVVGFPNRFSSRPITGPHIAYTEAVSDTQIMLKWTYIPSSNNNTPIQGFYIYYRPTDSDNDSDYKRDVVEGSKQWHMIGHLQPETSYDIKMQCFNEGGESEFSNVMICETKVKRVPGASEYPVKDLSTPPNSLGSGGNVGPATSPARSSDMLYLIVGCVLGVMVLILMVFIAMCLWKNRQQNTIQKYDPPGYLYQGSDMNGQMVDYTTLSGASQINGNVHGGFLTNGGLSSGYSHLHHKVPNAVNGIVNGSLNGGLYSGHSNSLTRTHVDFEHPHHLVNGGGMYTAVPQIDPLECVNCRNCRNNNRCFTKTNSTFSSSPPPVVPVVAPYPQDGLEMKPLSHVKVPVCLTSAVPDCGQLPEESVKDNVEPVPTQRTCCQDIVNDVSSDGSEDPAEFSRGDSCAHSETEINIVSWNALILPPVPEGCAEKTMWSPPGIPLDSPTEVLQQPRET

SEQ ID NO: 13551 - protein, 1287 aa, Homo sapiens
  Payload ID: 2633
  Gene Symbol: CDON
  Gene Name: cell adhesion associated, oncogene regulated
  Uniprot ID: Q4KMG0
  ENSP ID: ENSP00000376458
MHPDLGPLCTLLYVTLTILCSSVSSDLAPYFTSEPLSAVQKLGGPVVLHCSAQPVTTRISWLHNGKTLDGNLEHVKIHQGTLTILSLNSSLLGYYQCLANNSIGAIVSGPATVSVAVLGDFGSSTKHVITAEEKSAGFIGCRVPESNPKAEVRYKIRGKWLEHSTENYLILPSGNLQILNVSLEDKGSYKCAAYNPVTHQLKVEPIGRKLLVSRPSSDDVHILHPTHSQALAVLSRSPVTLECVVSGVPAPQVYWLKDGQDIAPGSNWRRLYSHLATDSVDPADSGNYSCMAGNKSGDVKYVTYMVNVLEHASISKGLQDQIVSLGATVHFTCDVHGNPAPNCTWFHNAQPIHPSARHLTAGNGLKISGVTVEDVGMYQCVADNGIGFMHSTGRLEIENDGGFKPVIITAPVSAKVADGDFVTLSCNASGLPVPVIRWYDSHGLITSHPSQVLRSKSRKSQLSRPEGLNLEPVYFVLSQAGASSLHIQAVTQEHAGKYICEAANEHGTTQAEASLMVVPFETNTKAETVTLPDAAQNDDRSKRDGSETGLLSSFPVKVHPSAVESAPEKNASGISVPDAPIILSPPQTHTPDTYNLVWRAGKDGGLPINAYFVKYRKLDDGVGMLGSWHTVRVPGSENELHLAELEPSSLYEVLMVARSAAGEGQPAMLTFRTSKEKTASSKNTQASSPPVGIPKYPVVSEAANNNFGVVLTDSSRHSGVPEAPDRPTISTASETSVYVTWIPRANGGSPITAFKVEYKRMRTSNWLVAAEDIPPSKLSVEVRSLEPGSTYKFRVIAINHYGESFRSSASRPYQVVGFPNRFSSRPITGPHIAYTEAVSDTQIMLKWTYIPSSNNNTPIQGFYIYYRPTDSDNDSDYKRDVVEGSKQWHMIGHLQPETSYDIKMQCFNEGGESEFSNVMICETKVKRVPGASEYPVKDLSTPPNSLGSGGNVGPATSPARSSDMLYLIVGCVLGVMVLILMVFIAMCLWKNRQQNTIQKYDPPGYLYQGSDMNGQMVDYTTLSGASQINGNVHGGFLTNGGLSSGYSHLHHKVPNAVNGIVNGSLNGGLYSGHSNSLTRTHVDFEHPHHLVNGGGMYTAVPQIDPLECVNCRNCRNNNRCFTKTNSTFSSSPPPVVPVVAPYPQDGLEMKPLSHVKVPVCLTSAVPDCGQLPEESVKDNVEPVPTQRTCCQDIVNDVSSDGSEDPAEFSRGQEGMINLRIPDHLQLAKSCVWEGDSCAHSETEINIVSWNALILPPVPEGCAEKTMWSPPGIPLDSPTEVLQQPRET

SEQ ID NO: 13552 - protein, 243 aa, Homo sapiens
  Payload ID: 2633
  Gene Symbol: CDON
  Gene Name: cell adhesion associated, oncogene regulated
  ENSP ID: ENSP00000432571
  MOD_RES (1)..(1): Any amino acid
XNYLILPSGNLQILNVSLEDKGSYKCAAYNPVTHQLKVEPIGRKLLVSRPSSDDVHILHPTHSQALAVLSRSPVTLECVVSGVPAPQVYWLKDGQDIAPGSNWRRLYSHLATDSVDPADSGNYSCMAGNKSGDVKYVTYMVNVLEHASISKGLQDQIVSLGATVHFTCDVHGNPAPNCTWFHNAQPIHPSARHLTAGNGLKISGVTVEDVGMYQCVADNGIGFMHSTGRLEIENGQEIYVGNV

SEQ ID NO: 13553 - protein, 641 aa, Homo sapiens
  Payload ID: 2633
  Gene Symbol: CDON
  Gene Name: cell adhesion associated, oncogene regulated
  ENSP ID: ENSP00000432901
MLGSWHTVRVPGSENELHLAELEPSSLYEVLMVARSAAGEGQPAMLTFRTSKEKTASSKNTQASSPPVGIPKYPVVSEAANNNFGVVLTDSSRHSGVPEAPDRPTISTASETSVYVTWIPRANGGSPITAFKVEYKRMRTSNWLVAAEDIPPSKLSVEVRSLEPGSTYKFRVIAINHYGESFRSSASRPYQVVGFPNRFSSRPITGPHIAYTEAVSDTQIMLKWTYIPSSNNNTPIQGFYIYYRPTDSDNDSDYKRDVVEGSKQWHMIGHLQPETSYDIKMQCFNEGGESEFSNVMICETKVKRVPGASEYPVKDLSTPPNSLGSGGNVGPATSPARSSDMLYLIVGCVLGVMVLILMVFIAMCLWKNRQQNTIQKYDPPGYLYQGSDMNGQMVDYTTLSGASQINGNVHGGFLTNGGLSSGYSHLHHKVPNAVNGIVNGSLNGGLYSGHSNSLTRTHVDFEHPHHLVNGGGMYTAVPQIDPLECVNCRNCRNNNRCFTKTNSTFSSSPPPVVPVVAPYPQDGLEMKPLSHVKVPVCLTSAVPDCGQLPEESVKDNVEPVPTQRTCCQDIVNDVSSDGSEDPAEFSRGDSCAHSETEINIVSWNALILPPVPEGCAEKTMWSPPGIPLDSPTEVLQQPRET

SEQ ID NO: 13554 - protein, 165 aa, Homo sapiens
  Payload ID: 2633
  Gene Symbol: CDON
  Gene Name: cell adhesion associated, oncogene regulated
  ENSP ID: ENSP00000434212
MHPDLGPLCTLLYVTLTILCSSVSSDLAPYFTSEPLSAVQKLGGPVVLHCSAQPVTTRISWLHNGKTLDGNLEHVKIHQGTLTILSLNSSLLGYYQCLANNSIGAIVSGPATVSVAVLGDFGSSTKHVITAEEKSAGFIGCRVPESNPKAEVRYKIRGKWLEHST

SEQ ID NO: 13555 - protein, 650 aa, Homo sapiens
  Payload ID: 2633
  Gene Symbol: CDON
  Gene Name: cell adhesion associated, oncogene regulated
  ENSP ID: ENSP00000436755
  MOD_RES (1)..(1): Any amino acid
XDLAPYFTSEPLSAVQKLGGPVVLHCSAQPVTTRISWLHNGKTLDGNLEHVKIHQGTLTILSLNSSLLGYYQCLANNSIGAIVSGPATVSVAVLGDFGSSTKHVITAEEKSAGFIGCRVPESNPKAEVRYKIRGKWLEHSTENYLILPSGNLQILNVSLEDKGSYKCAAYNPVTHQLKVEPIGRKLLVSRPSSDDVHILHPTHSQALAVLSRSPVTLECVVSGVPAPQVYWLKDGQDIAPGSNWRRLYSHLATDSVDPADSGNYSCMAGNKSGDVKYVTYMVNVLEHASISKGLQDQIVSLGATVHFTCDVHGNPAPNCTWFHNAQPIHPSARHLTAGNGLKISGVTVEDVGMYQCVADNGIGFMHSTGRLEIENDGGFKPVIITAPVSAKVADGDFVTLSCNASGLPVPVIRWYDSHGLITSHPSQVLRSKSRKSQLSRPEGLNLEPVYFVLSQAGASSLHIQAVTQEHAGKYICEAANEHGTTQAEASLMVVPFETNTKAETVTLPDAAQNDDRSKRDGSETGLLSSFPVKVHPSAVESAPEKNASGISVPDAPIILSPPQTHTPDTYNLVWRAGKDGGLPINAYFVKYRKLDDGVGMLGSWHTVRVPGSENELHLAELEPSSLYEVLMVARSAAGEGQPAMLTFRTS

SEQ ID NO: 13556 - protein, 142 aa, Homo sapiens
  Payload ID: 2633
  Gene Symbol: CDON
  Gene Name: cell adhesion associated, oncogene regulated
  ENSP ID: ENSP00000436940
MHPDLGPLCTLLYVTLTILCSSVSSDLAPYFTSEPLSAVQKLGGPVVLHCSAQPVTTRISWLHNGKTLDGNLEHVKIHQGTLTILSLNSSLLGYYQCLANNSIGAIVSGPATVSVAVLGDFGSSTKHVITAEEKSAGFIGCR

SEQ ID NO: 13557 - protein, 111 aa, Homo sapiens
  Payload ID: 2633
  Gene Symbol: CDON
  Gene Name: cell adhesion associated, oncogene regulated
  ENSP ID: ENSP00000437176
MHPDLGPLCTLLYVTLTILCSSVSSDLAPYFTSEPLSAVQKLGGPVVLHCSAQPVTTRISWLHNGKTLDGNLEHVKIHQGTLTILSLNSSLLGYYQCLANNSIGAIVSGPA

SEQ ID NO: 13558 - protein, 471 aa, Homo sapiens
  Payload ID: 2634
  Gene Symbol: CADM1
  Gene Name: cell adhesion molecule 1
  Uniprot ID: Q9BY67
  ENSP ID: ENSP00000329797
MASVVLPSGSQCAAAAAAAAPPGLRLRLLLLLFSAAALIPTGDGQNLFTKDVTVIEGEVATISCQVNKSDDSVIQLLNPNRQTIYFRDFRPLKDSRFQLLNFSSSELKVSLTNVSISDEGRYFCQLYTDPPQESYTTITVLVPPRNLMIDIQKDTAVEGEEIEVNCTAMASKPATTIRWFKGNTELKGKSEVEEWSDMYTVTSQLMLKVHKEDDGVPVICQVEHPAVTGNLQTQRYLEVQYKPQVHIQMTYPLQGLTREGDALELTCEAIGKPQPVMVTWVRVDDEMPQHAVLSGPNLFINNLNKTDNGTYRCEASNIVGKAHSDYMLYVYDPPTTIPPPTTTTTTTTTTTTTILTIITDTTATTEPAVHGLTQLPNSAEELDSEDLSDSRAGEEGSIRAVDHAVIGGVVAVVVFAMLCLLIILGRYFARHKGTYFTHEAKGADDAADADTAIINAEGGQNNSEEKKEYFI

SEQ ID NO: 13559 - protein, 442 aa, Homo sapiens
  Payload ID: 2634
  Gene Symbol: CADM1
  Gene Name: cell adhesion molecule 1
  Uniprot ID: Q9BY67
  ENSP ID: ENSP00000395359
MASVVLPSGSQCAAAAAAAAPPGLRLRLLLLLFSAAALIPTGDGQNLFTKDVTVIEGEVATISCQVNKSDDSVIQLLNPNRQTIYFRDFRPLKDSRFQLLNFSSSELKVSLTNVSISDEGRYFCQLYTDPPQESYTTITVLVPPRNLMIDIQKDTAVEGEEIEVNCTAMASKPATTIRWFKGNTELKGKSEVEEWSDMYTVTSQLMLKVHKEDDGVPVICQVEHPAVTGNLQTQRYLEVQYKPQVHIQMTYPLQGLTREGDALELTCEAIGKPQPVMVTWVRVDDEMPQHAVLSGPNLFINNLNKTDNGTYRCEASNIVGKAHSDYMLYVYDPPTTIPPPTTTTTTTTTTTTTILTIITDSRAGEEGSIRAVDHAVIGGVVAVVVFAMLCLLIILGRYFARHKGTYFTHEAKGADDAADADTAIINAEGGQNNSEEKKEYFI

SEQ ID NO: 13560 - protein, 414 aa, Homo sapiens
  Payload ID: 2634
  Gene Symbol: CADM1
  Gene Name: cell adhesion molecule 1
  Uniprot ID: Q9BY67
  ENSP ID: ENSP00000439176
MASVVLPSGSQCAAAAAAAAPPGLRLRLLLLLFSAAALIPTGDGQNLFTKDVTVIEGEVATISCQVNKSDDSVIQLLNPNRQTIYFRDFRPLKDSRFQLLNFSSSELKVSLTNVSISDEGRYFCQLYTDPPQESYTTITVLVPPRNLMIDIQKDTAVEGEEIEVNCTAMASKPATTIRWFKGNTELKGKSEVEEWSDMYTVTSQLMLKVHKEDDGVPVICQVEHPAVTGNLQTQRYLEVQYKPQVHIQMTYPLQGLTREGDALELTCEAIGKPQPVMVTWVRVDDEMPQHAVLSGPNLFINNLNKTDNGTYRCEASNIVGKAHSDYMLYVYDSRAGEEGSIRAVDHAVIGGVVAVVVFAMLCLLIILGRYFARHKGTYFTHEAKGADDAADADTAIINAEGGQNNSEEKKEYFI

SEQ ID NO: 13561 - protein, 182 aa, Homo sapiens
  Payload ID: 2634
  Gene Symbol: CADM1
  Gene Name: cell adhesion molecule 1
  ENSP ID: ENSP00000439696
MKASGHTSGDGQNLFTKDVTVIEGEVATISCQVNKSDDSVIQLLNPNRQTIYFRDFRPLKDSRFQLLNFSSSELKVSLTNVSISDEGRYFCQLYTDPPQESYTTITVLVPPRNLMIDIQKDTAVEGEEIEVNCTAMASKPATTIRWFKGNTELKGKSEVEEWSDMYTVTSQLMLKVHKEDDG

SEQ ID NO: 13562 - protein, 453 aa, Homo sapiens
  Payload ID: 2634
  Gene Symbol: CADM1
  Gene Name: cell adhesion molecule 1
  Uniprot ID: Q9BY67
  ENSP ID: ENSP00000439817
MASVVLPSGSQCAAAAAAAAPPGLRLRLLLLLFSAAALIPTGDGQNLFTKDVTVIEGEVATISCQVNKSDDSVIQLLNPNRQTIYFRDFRPLKDSRFQLLNFSSSELKVSLTNVSISDEGRYFCQLYTDPPQESYTTITVLVPPRNLMIDIQKDTAVEGEEIEVNCTAMASKPATTIRWFKGNTELKGKSEVEEWSDMYTVTSQLMLKVHKEDDGVPVICQVEHPAVTGNLQTQRYLEVQYKPQVHIQMTYPLQGLTREGDALELTCEAIGKPQPVMVTWVRVDDEMPQHAVLSGPNLFINNLNKTDNGTYRCEASNIVGKAHSDYMLYVYDPPTTIPPPTTTTTTTTTTTTTILTIITDTTATTEPAVHDSRAGEEGSIRAVDHAVIGGVVAVVVFAMLCLLIILGRYFARHKGTYFTHEAKGADDAADADTAIINAEGGQNNSEEKKEYFI

SEQ ID NO: 13563 - protein, 79 aa, Homo sapiens
  Payload ID: 2634
  Gene Symbol: CADM1
  Gene Name: cell adhesion molecule 1
  ENSP ID: ENSP00000439847
MIDIQKDTAVEGEEIEVNCTAMASKPATTIRWFKGNTELKGKSEVEEWSDMYTVTSQLMLKVHKEDDGVPVICQVEHPA

SEQ ID NO: 13564 - protein, 443 aa, Homo sapiens
  Payload ID: 2634
  Gene Symbol: CADM1
  Gene Name: cell adhesion molecule 1
  ENSP ID: ENSP00000440322
MASVVLPSGSQCAAAAAAAAPPGLRLRLLLLLFSAAALIPTGDGQNLFTKDVTVIEGEVATISCQVNKSDDSVIQLLNPNRQTIYFRDFRPLKDSRFQLLNFSSSELKVSLTNVSISDEGRYFCQLYTDPPQESYTTITVLVPPRNLMIDIQKDTAVEGEEIEVNCTAMASKPATTIRWFKGNTELKGKSEVEEWSDMYTVTSQLMLKVHKEDDGVPVICQVEHPAVTGNLQTQRYLEVQYKPQVHIQMTYPLQGLTREGDALELTCEAIGKPQPVMVTWVRVDDEMPQHAVLSGPNLFINNLNKTDNGTYRCEASNIVGKAHSDYMLYVYDTTATTEPAVHGLTQLPNSAEELDSEDLSDSRAGEEGSIRAVDHAVIGGVVAVVVFAMLCLLIILGRYFARHKGTYFTHEAKGADDAADADTAIINAEGGQNNSEEKKEYFI

SEQ ID NO: 13565 - protein, 110 aa, Homo sapiens
  Payload ID: 2634
  Gene Symbol: CADM1
  Gene Name: cell adhesion molecule 1
  ENSP ID: ENSP00000442001
MIDIQKDTAVEGEEIEVNCTAMASKPATTIRWFKGNTELKGKSEVEEWSDMYTVTSQLMLKVHKEDDGVPVICQVEHPAVTGNLQTQRYLEVQYKPQVHIQMTYPLQGLT

SEQ ID NO: 13566 - protein, 188 aa, Homo sapiens
  Payload ID: 2634
  Gene Symbol: CADM1
  Gene Name: cell adhesion molecule 1
  ENSP ID: ENSP00000442227
  MOD_RES (1)..(1): Any amino acid
XSGDLPSYSPLPHSPRSQRSIPSVQGDGQNLFTKDVTVIEGEVATISCQVNKSDDSVIQLLNPNRQTIYFRDFRPLKDSRFQLLNFSSSELKVSLTNVSISDEGRYFCQLYTDPPQESYTTITVLVPPRNLMIDIQKDTAVEGEEIEVNCTAMASKPATTIRWFKGNTELKGKSEVEEWSDMYTVTSQ

SEQ ID NO: 13567 - protein, 413 aa, Homo sapiens
  Payload ID: 2634
  Gene Symbol: CADM1
  Gene Name: cell adhesion molecule 1
  ENSP ID: ENSP00000442387
  MOD_RES (1)..(1): Any amino acid
XSVVLPSGSQCAAAAAAAAPPGLRLRLLLLLFSAAALIPTGDGQNLFTKDVTVIEGEVATISCQVNKSDDSVIQLLNPNRQTIYFRDFRPLKDSRFQLLNFSSSELKVSLTNVSISDEGRYFCQLYTDPPQESYTTITVLVPPRNLMIDIQKDTAVEGEEIEVNCTAMASKPATTIRWFKGNTELKGKSEVEEWSDMYTVTSQLMLKVHKEDDGVPVICQVEHPAVTGNLQTQRYLEVQYKPQVHIQMTYPLQGLTREGDALELTCEAIGKPQPVMVTWVRVDDEMPQHAVLSGPNLFINNLNKTDNGTYRCEASNIVGKAHSDYMLYVYDSRAGEEGSIRAVDHAVIGGVVAVVVFAMLCLLIILGRYFARHKGTYFTHEAKGADDAADADTAIINAEGGQNNSEEKKEYFI

SEQ ID NO: 13568 - protein, 67 aa, Homo sapiens
  Payload ID: 2634
  Gene Symbol: CADM1
  Gene Name: cell adhesion molecule 1
  ENSP ID: ENSP00000445375
MASVVLPSGSQCAAAAAAAAPPGLRLRLLLLLFSAAALIPTGLTSSPRLECGGTISAHCSLGLPVLR

SEQ ID NO: 13569 - protein, 430 aa, Homo sapiens
  Payload ID: 2634
  Gene Symbol: CADM1
  Gene Name: cell adhesion molecule 1
  ENSP ID: ENSP00000482840
GDGQNLFTKDVTVIEGEVATISCQVNKSDDSVIQLLNPNRQTIYFRDFRPLKDSRFQLLNFSSSELKVSLTNVSISDEGRYFCQLYTDPPQESYTTITVLVPPRNLMIDIQKDTAVEGEEIEVNCTAMASKPATTIRWFKGNTELKGKSEVEEWSDMYTVTSQLMLKVHKEDDGVPVICQVEHPAVTGNLQTQRYLEVQYKPQVHIQMTYPLQGLTREGDALELTCEAIGKPQPVMVTWVRVDDEMPQHAVLSGPNLFINNLNKTDNGTYRCEASNIVGKAHSDYMLYVYDPPTTIPPPTTTTTTTTTTTTTILTIITDTTATTEPAVHGLTQLPNSAEELDSEDLSDSRAGEEGSIRAVDHAVIGGVVAVVVFAMLCLLIILGRYFARHKGTYFTHEAKGADDAADADTAIINAEGGQNNSEEKKEYFI

SEQ ID NO: 13570 - protein, 401 aa, Homo sapiens
  Payload ID: 2634
  Gene Symbol: CADM1
  Gene Name: cell adhesion molecule 1
  ENSP ID: ENSP00000482924
GDGQNLFTKDVTVIEGEVATISCQVNKSDDSVIQLLNPNRQTIYFRDFRPLKDSRFQLLNFSSSELKVSLTNVSISDEGRYFCQLYTDPPQESYTTITVLVPPRNLMIDIQKDTAVEGEEIEVNCTAMASKPATTIRWFKGNTELKGKSEVEEWSDMYTVTSQLMLKVHKEDDGVPVICQVEHPAVTGNLQTQRYLEVQYKPQVHIQMTYPLQGLTREGDALELTCEAIGKPQPVMVTWVRVDDEMPQHAVLSGPNLFINNLNKTDNGTYRCEASNIVGKAHSDYMLYVYDPPTTIPPPTTTTTTTTTTTTTILTIITDSRAGEEGSIRAVDHAVIGGVVAVVVFAMLCLLIILGRYFARHKGTYFTHEAKGADDAADADTAIINAEGGQNNSEEKKEYFI

SEQ ID NO: 13571 - protein, 346 aa, Homo sapiens
  Payload ID: 2634
  Gene Symbol: CADM1
  Gene Name: cell adhesion molecule 1
  ENSP ID: ENSP00000483648
GDGQNLFTKDVTVIEGEVATISCQVNKSDDSVIQLLNPNRQTIYFRDFRPLKDSRFQLLNFSSSELKVSLTNVSISDEGRYFCQLYTDPPQESYTTITVLVPPRNLMIDIQKDTAVEGEEIEVNCTAMASKPATTIRWFKGNTELKGKSEVEEWSDMYTVTSQLMLKVHKEDDGVPVICQVEHPAVTGNLQTQRYLEVQYKPQVHIQMTYPLQGLTREGDALELTCEAIGKPQPVMVTWVRVDDEMPQHAVLSGPNLFINNLNKTDNGTYRCEASNIVGKAHSDYMLYVYDSRAGEEGSIRAVDHAVIGGVVAVVVFAMLCLLIILGRYFARHKGLFSLTSSPRIK

SEQ ID NO: 13572 - protein, 373 aa, Homo sapiens
  Payload ID: 2634
  Gene Symbol: CADM1
  Gene Name: cell adhesion molecule 1
  ENSP ID: ENSP00000483793
GDGQNLFTKDVTVIEGEVATISCQVNKSDDSVIQLLNPNRQTIYFRDFRPLKDSRFQLLNFSSSELKVSLTNVSISDEGRYFCQLYTDPPQESYTTITVLVPPRNLMIDIQKDTAVEGEEIEVNCTAMASKPATTIRWFKGNTELKGKSEVEEWSDMYTVTSQLMLKVHKEDDGVPVICQVEHPAVTGNLQTQRYLEVQYKPQVHIQMTYPLQGLTREGDALELTCEAIGKPQPVMVTWVRVDDEMPQHAVLSGPNLFINNLNKTDNGTYRCEASNIVGKAHSDYMLYVYDSRAGEEGSIRAVDHAVIGGVVAVVVFAMLCLLIILGRYFARHKGTYFTHEAKGADDAADADTAIINAEGGQNNSEEKKEYFI

SEQ ID NO: 13573 - protein, 412 aa, Homo sapiens
  Payload ID: 2634
  Gene Symbol: CADM1
  Gene Name: cell adhesion molecule 1
  ENSP ID: ENSP00000484516
GDGQNLFTKDVTVIEGEVATISCQVNKSDDSVIQLLNPNRQTIYFRDFRPLKDSRFQLLNFSSSELKVSLTNVSISDEGRYFCQLYTDPPQESYTTITVLVPPRNLMIDIQKDTAVEGEEIEVNCTAMASKPATTIRWFKGNTELKGKSEVEEWSDMYTVTSQLMLKVHKEDDGVPVICQVEHPAVTGNLQTQRYLEVQYKPQVHIQMTYPLQGLTREGDALELTCEAIGKPQPVMVTWVRVDDEMPQHAVLSGPNLFINNLNKTDNGTYRCEASNIVGKAHSDYMLYVYDPPTTIPPPTTTTTTTTTTTTTILTIITDTTATTEPAVHDSRAGEEGSIRAVDHAVIGGVVAVVVFAMLCLLIILGRYFARHKGTYFTHEAKGADDAADADTAIINAEGGQNNSEEKKEYFI

SEQ ID NO: 13574 - protein, 404 aa, Homo sapiens
  Payload ID: 2635
  Gene Symbol: CADM2
  Gene Name: cell adhesion molecule 2
  Uniprot ID: Q8N3J6
  ENSP ID: ENSP00000373200
MIWKRSAVLRFYSVCGLLLQAAASKNKVKGSQGQFPLTQNVTVVEGGTAILTCRVDQNDNTSLQWSNPAQQTLYFDDKKALRDNRIELVRASWHELSISVSDVSLSDEGQYTCSLFTMPVKTSKAYLTVLGVPEKPQISGFSSPVMEGDLMQLTCKTSGSKPAADIRWFKNDKEIKDVKYLKEEDANRKTFTVSSTLDFRVDRSDDGVAVICRVDHESLNATPQVAMQVLEIHYTPSVKIIPSTPFPQEGQPLILTCESKGKPLPEPVLWTKDGGELPDPDRMVVSGRELNILFLNKTDNGTYRCEATNTIGQSSAEYVLIVHDPNALAGQNGPDHALIGGIVAVVVFVTLCSIFLLGRYLARHKGTYLTNEAKGAEDAPDADTAIINAEGSQVNAEEKKEYFI

SEQ ID NO: 13575 - protein, 437 aa, Homo sapiens
  Payload ID: 2635
  Gene Symbol: CADM2
  Gene Name: cell adhesion molecule 2
  Uniprot ID: Q8N3J6
  ENSP ID: ENSP00000384193
MFVLFLCNLSLVPAAASKNKVKGSQGQFPLTQNVTVVEGGTAILTCRVDQNDNTSLQWSNPAQQTLYFDDKKALRDNRIELVRASWHELSISVSDVSLSDEGQYTCSLFTMPVKTSKAYLTVLGVPEKPQISGFSSPVMEGDLMQLTCKTSGSKPAADIRWFKNDKEIKDVKYLKEEDANRKTFTVSSTLDFRVDRSDDGVAVICRVDHESLNATPQVAMQVLEIHYTPSVKIIPSTPFPQEGQPLILTCESKGKPLPEPVLWTKDGGELPDPDRMVVSGRELNILFLNKTDNGTYRCEATNTIGQSSAEYVLIVHDVPNTLLPTTIIPSLTTATVTTTVAITTSPTTSATTSSIRDPNALAGQNGPDHALIGGIVAVVVFVTLCSIFLLGRYLARHKGTYLTNEAKGAEDAPDADTAIINAEGSQVNAEEKKEYFI

SEQ ID NO: 13576 - protein, 435 aa, Homo sapiens
  Payload ID: 2635
  Gene Symbol: CADM2
  Gene Name: cell adhesion molecule 2
  Uniprot ID: Q8N3J6
  ENSP ID: ENSP00000384575
MIWKRSAVLRFYSVCGLLLQGSQGQFPLTQNVTVVEGGTAILTCRVDQNDNTSLQWSNPAQQTLYFDDKKALRDNRIELVRASWHELSISVSDVSLSDEGQYTCSLFTMPVKTSKAYLTVLGVPEKPQISGFSSPVMEGDLMQLTCKTSGSKPAADIRWFKNDKEIKDVKYLKEEDANRKTFTVSSTLDFRVDRSDDGVAVICRVDHESLNATPQVAMQVLEIHYTPSVKIIPSTPFPQEGQPLILTCESKGKPLPEPVLWTKDGGELPDPDRMVVSGRELNILFLNKTDNGTYRCEATNTIGQSSAEYVLIVHDVPNTLLPTTIIPSLTTATVTTTVAITTSPTTSATTSSIRDPNALAGQNGPDHALIGGIVAVVVFVTLCSIFLLGRYLARHKGTYLTNEAKGAEDAPDADTAIINAEGSQVNAEEKKEYFI

SEQ ID NO: 13577 - protein, 432 aa, Homo sapiens
  Payload ID: 2636
  Gene Symbol: CADM3
  Gene Name: cell adhesion molecule 3
  Uniprot ID: Q8N126
  ENSP ID: ENSP00000357106
MGAPAASLLLLLLLFACCWAPGGANLSQDGYWQEQDLELGTLAPLDEAISSTVWSSPDMLASQDSQPWTSDETVVAGGTVVLKCQVKDHEDSSLQWSNPAQQTLYFGEKRALRDNRIQLVTSTPHELSISISNVALADEGEYTCSIFTMPVRTAKSLVTVLGIPQKPIITGYKSSLREKDTATLNCQSSGSKPAARLTWRKGDQELHGEPTRIQEDPNGKTFTVSSSVTFQVTREDDGASIVCSVNHESLKGADRSTSQRIEVLYTPTAMIRPDPPHPREGQKLLLHCEGRGNPVPQQYLWEKEGSVPPLKMTQESALIFPFLNKSDSGTYGCTATSNMGSYKAYYTLNVNDPSPVPSSSSTYHAIIGGIVAFIVFLLLIMLIFLGHYLIRHKGTYLTHEAKGSDDAPDADTAIINAEGGQSGGDDKKEYFI

SEQ ID NO: 13578 - protein, 398 aa, Homo sapiens
  Payload ID: 2636
  Gene Symbol: CADM3
  Gene Name: cell adhesion molecule 3
  Uniprot ID: Q8N126
  ENSP ID: ENSP00000357107
MGAPAASLLLLLLLFACCWAPGGANLSQDDSQPWTSDETVVAGGTVVLKCQVKDHEDSSLQWSNPAQQTLYFGEKRALRDNRIQLVTSTPHELSISISNVALADEGEYTCSIFTMPVRTAKSLVTVLGIPQKPIITGYKSSLREKDTATLNCQSSGSKPAARLTWRKGDQELHGEPTRIQEDPNGKTFTVSSSVTFQVTREDDGASIVCSVNHESLKGADRSTSQRIEVLYTPTAMIRPDPPHPREGQKLLLHCEGRGNPVPQQYLWEKEGSVPPLKMTQESALIFPFLNKSDSGTYGCTATSNMGSYKAYYTLNVNDPSPVPSSSSTYHAIIGGIVAFIVFLLLIMLIFLGHYLIRHKGTYLTHEAKGSDDAPDADTAIINAEGGQSGGDDKKEYFI

SEQ ID NO: 13579 - protein, 234 aa, Homo sapiens
  Payload ID: 2636
  Gene Symbol: CADM3
  Gene Name: cell adhesion molecule 3
  ENSP ID: ENSP00000387802
MGAPAASLLLLLLLFACCWAPGGANLSQDDSQPWTSDETVVAGGTVVLKCQVKDHEDSSLQWSNPAQQTLYFGEKRALRDNRIQLVTSTPHELSISISNVALADEGEYTCSIFTMPVRTAKSLVTVLGIPQKPIITGYKSSLREKDTATLNCQSSGSKPAARLTWRKGDQELHGEPTRIQEDPNDTPTAMIRPDPPHPREGQKLLLHCEGRGNPVPQQYLWEKEGSVPPLKMTQ

SEQ ID NO: 13580 - protein, 388 aa, Homo sapiens
  Payload ID: 2637
  Gene Symbol: CADM4
  Gene Name: cell adhesion molecule 4
  Uniprot ID: Q8NFZ8
  ENSP ID: ENSP00000222374
MGRARRFQWPLLLLWAAAAGPGAGQEVQTENVTVAEGGVAEITCRLHQYDGSIVVIQNPARQTLFFNGTRALKDERFQLEEFSPRRVRIRLSDARLEDEGGYFCQLYTEDTHHQIATLTVLVAPENPVVEVREQAVEGGEVELSCLVPRSRPAATLRWYRDRKELKGVSSSQENGKVWSVASTVRFRVDRKDDGGIIICEAQNQALPSGHSKQTQYVLDVQYSPTARIHASQAVVREGDTLVLTCAVTGNPRPNQIRWNRGNESLPERAEAVGETLTLPGLVSADNGTYTCEASNKHGHARALYVLVVYDPGAVVEAQTSVPYAIVGGILALLVFLIICVLVGMVWCSVRQKGSYLTHEASGLDEQGEAREAFLNGSDGHKRKEEFFI

SEQ ID NO: 13581 - protein, 1224 aa, Homo sapiens
  Payload ID: 2638
  Gene Symbol: CHL1
  Gene Name: cell adhesion molecule L1-like
  Uniprot ID: O00533
  ENSP ID: ENSP00000256509
MEPLLLGRGLIVYLMFLLLKFSKAIEIPSSVQQVPTIIKQSKVQVAFPFDEYFQIECEAKGNPEPTFSWTKDGNPFYFTDHRIIPSNNSGTFRIPNEGHISHFQGKYRCFASNKLGIAMSEEIEFIVPSVPKFPKEKIDPLEVEEGDPIVLPCNPPKGLPPLHIYWMNIELEHIEQDERVYMSQKGDLYFANVEEKDSRNDYCCFAAFPRLRTIVQKMPMKLTVNSLKHANDSSSSTEIGSKANSIKQRKPKLLLPPTESGSESSITILKGEILLLECFAEGLPTPQVDWNKIGGDLPKGRETKENYGKTLKIENVSYQDKGNYRCTASNFLGTATHDFHVIVEEPPRWTKKPQSAVYSTGSNGILLCEAEGEPQPTIKWRVNGSPVDNHPFAGDVVFPREISFTNLQPNHTAVYQCEASNVHGTILANANIDVVDVRPLIQTKDGENYATVVGYSAFLHCEFFASPEAVVSWQKVEEVKPLEGRRYHIYENGTLQINRTTEEDAGSYSCWVENAIGKTAVTANLDIRNATKLRVSPKNPRIPKLHMLELHCESKCDSHLKHSLKLSWSKDGEAFEINGTEDGRIIIDGANLTISNVTLEDQGIYCCSAHTALDSAADITQVTVLDVPDPPENLHLSERQNRSVRLTWEAGADHNSNISEYIVEFEGNKEEPGRWEELTRVQGKKTTVILPLAPFVRYQFRVIAVNEVGRSQPSQPSDHHETPPAAPDRNPQNIRVQASQPKEMIIKWEPLKSMEQNGPGLEYRVTWKPQGAPVEWEEETVTNHTLRVMTPAVYAPYDVKVQAINQLGSGPDPQSVTLYSGEDYPDTAPVIHGVDVINSTLVKVTWSTVPKDRVHGRLKGYQINWWKTKSLLDGRTHPKEVNILRFSGQRNSGMVPSLDAFSEFHLTVLAYNSKGAGPESEPYIFQTPEGVPEQPTFLKVIKVDKDTATLSWGLPKKLNGNLTGYLLQYQIINDTYEIGELNDINITTPSKPSWHLSNLNATTKYKFYLRACTSQGCGKPITEESSTLGEGSKGIGKISGVNLTQKTHPIEVFEPGAEHIVRLMTKNWGDNDSIFQDVIETRGREYAGLYDDISTQGWFIGLMCAIALLTLLLLTVCFVKRNRGGKYSVKEKEDLHPDPEIQSVKDETFGEYSDSDEKPLKGSLRSLNRDMQPTESADSLVEYGEGDHGLFSEDGSFIGAYAGSKEKGSVESNGSSTATFPLRA

SEQ ID NO: 13582 - protein, 1208 aa, Homo sapiens
  Payload ID: 2638
  Gene Symbol: CHL1
  Gene Name: cell adhesion molecule L1-like
  Uniprot ID: O00533
  ENSP ID: ENSP00000380628
MEPLLLGRGLIVYLMFLLLKFSKAIEIPSSVQQVPTIIKQSKVQVAFPFDEYFQIECEAKGNPEPTFSWTKDGNPFYFTDHRIIPSNNSGTFRIPNEGHISHFQGKYRCFASNKLGIAMSEEIEFIVPSVPKFPKEKIDPLEVEEGDPIVLPCNPPKGLPPLHIYWMNIELEHIEQDERVYMSQKGDLYFANVEEKDSRNDYCCFAAFPRLRTIVQKMPMKLTVNSSNSIKQRKPKLLLPPTESGSESSITILKGEILLLECFAEGLPTPQVDWNKIGGDLPKGRETKENYGKTLKIENVSYQDKGNYRCTASNFLGTATHDFHVIVEEPPRWTKKPQSAVYSTGSNGILLCEAEGEPQPTIKWRVNGSPVDNHPFAGDVVFPREISFTNLQPNHTAVYQCEASNVHGTILANANIDVVDVRPLIQTKDGENYATVVGYSAFLHCEFFASPEAVVSWQKVEEVKPLEGRRYHIYENGTLQINRTTEEDAGSYSCWVENAIGKTAVTANLDIRNATKLRVSPKNPRIPKLHMLELHCESKCDSHLKHSLKLSWSKDGEAFEINGTEDGRIIIDGANLTISNVTLEDQGIYCCSAHTALDSAADITQVTVLDVPDPPENLHLSERQNRSVRLTWEAGADHNSNISEYIVEFEGNKEEPGRWEELTRVQGKKTTVILPLAPFVRYQFRVIAVNEVGRSQPSQPSDHHETPPAAPDRNPQNIRVQASQPKEMIIKWEPLKSMEQNGPGLEYRVTWKPQGAPVEWEEETVTNHTLRVMTPAVYAPYDVKVQAINQLGSGPDPQSVTLYSGEDYPDTAPVIHGVDVINSTLVKVTWSTVPKDRVHGRLKGYQINWWKTKSLLDGRTHPKEVNILRFSGQRNSGMVPSLDAFSEFHLTVLAYNSKGAGPESEPYIFQTPEGVPEQPTFLKVIKVDKDTATLSWGLPKKLNGNLTGYLLQYQIINDTYEIGELNDINITTPSKPSWHLSNLNATTKYKFYLRACTSQGCGKPITEESSTLGEGSKGIGKISGVNLTQKTHPIEVFEPGAEHIVRLMTKNWGDNDSIFQDVIETRGREYAGLYDDISTQGWFIGLMCAIALLTLLLLTVCFVKRNRGGKYSVKEKEDLHPDPEIQSVKDETFGEYSDSDEKPLKGSLRSLNRDMQPTESADSLVEYGEGDHGLFSEDGSFIGAYAGSKEKGSVESNGSSTATFPLRA

SEQ ID NO: 13583 - protein, 84 aa, Homo sapiens
  Payload ID: 2638
  Gene Symbol: CHL1
  Gene Name: cell adhesion molecule L1-like
  ENSP ID: ENSP00000390440
MEPLLLGRGLIVYLMFLLLKFSKAIEIPSSVQQVPTIIKQSKVQVAFPFDEYFQIECEAKGNPEPTFSWTKDGNPFYFTDHRII

SEQ ID NO: 13584 - protein, 358 aa, Homo sapiens
  Payload ID: 2638
  Gene Symbol: CHL1
  Gene Name: cell adhesion molecule L1-like
  ENSP ID: ENSP00000395239
  MOD_RES (1)..(1): Any amino acid
XSVTLYSGEDYPDTAPVIHGVDVINSTLVKVTWSTVPKDRVHGRLKGYQINWWKTKSLLDGRTHPKEVNILRFSGQRNSGMVPSLDAFSEFHLTVLAYNSKGAGPESEPYIFQTPEGVPEQPTFLKVIKVDKDTATLSWGLPKKLNGNLTGYLLQYQIINDTYEIGELNDINITTPSKPSWHLSNLNATTKYKFYLRACTSQGCGKPITEESSTLGEGKYAGLYDDISTQGWFIGLMCAIALLTLLLLTVCFVKRNRGGKYSVKEKEDLHPDPEIQSVKDETFGEYSDSDEKPLKGSLRSLNRDMQPTESADSLVEYGEGDHGLFSEDGSFIGAYAGSKEKGSVESNGSSTATFPLRA

SEQ ID NO: 13585 - protein, 181 aa, Homo sapiens
  Payload ID: 2638
  Gene Symbol: CHL1
  Gene Name: cell adhesion molecule L1-like
  ENSP ID: ENSP00000397445
MEPLLLGRGLIVYLMFLLLKFSKAIEIPSSVQQVPTIIKQSKVQVAFPFDEYFQIECEAKGNPEPTFSWTKDGNPFYFTDHRIIPSNNSGTFRIPNEGHISHFQGKYRCFASNKLGIAMSEEIEFIVPSVPKFPKEKIDPLEVEEGDPIVLPCNPPKGLPPLHIYWMNIELEHIEQDERVY

SEQ ID NO: 13586 - protein, 65 aa, Homo sapiens
  Payload ID: 2638
  Gene Symbol: CHL1
  Gene Name: cell adhesion molecule L1-like
  ENSP ID: ENSP00000403311
MEPLLLGRGLIVYLMFLLLKFSKAIEIPSSVQQVPTIIKQSKVQVAFPFDEYFQIECEAKGNPEP

SEQ ID NO: 13587 - protein, 93 aa, Homo sapiens
  Payload ID: 2638
  Gene Symbol: CHL1
  Gene Name: cell adhesion molecule L1-like
  ENSP ID: ENSP00000413109
MPPAWSGESMDRGVVGLGSTKTQRGARAPPPQTAEGREGAPGAVVAMAPGSGARGAGDAGRGWSLLPLCASLFLSLFFFFWSVSVRGEAARRK

SEQ ID NO: 13588 - protein, 96 aa, Homo sapiens
  Payload ID: 2638
  Gene Symbol: CHL1
  Gene Name: cell adhesion molecule L1-like
  ENSP ID: ENSP00000413628
MEPLLLGRGLIVYLMFLLLKFSKAIEIPSSVQQVPTIIKQSKVQVAFPFDEYFQIECEAKGNPEPTFSWTKDGNPFYFTDHRIIPSNNSGTFRIPN

SEQ ID NO: 13589 - protein, 1171 aa, Homo sapiens
  Payload ID: 2638
  Gene Symbol: CHL1
  Gene Name: cell adhesion molecule L1-like
  ENSP ID: ENSP00000483512
MEPLLLGRGLIVYLMFLLLKFSKAIEIPSSVQQVPTIIKQSKVQVAFPFDEYFQIECEAKGNPEPTFSWTKDGNPFYFTDHRIIPSNNSGTFRIPNEGHISHFQGKYRCFASNKLGIAMSEEIEFIVPSVPKFPKEKIDPLEVEEGDPIVLPCNPPKGLPPLHIYWMNIELEHIEQDERVYMSQKGDLYFANVEEKDSRNDYCCFAAFPRLRTIVQKMPMKLTVNSLKHANDSSSSTEIGSKANSIKQRKPKLLLPPTESGSESSITILKGEILLLECFAEGLPTPQVDWNKIGGDLPKGRETKENYGKTLKIENVSYQDKGNYRCTASNFLGTATHDFHVIVEEPPRWTKKPQSAVYSTGSNGILLCEAEGEPQPTIKWRVNGSPVDNHPFAGDVVFPREISFTNLQPNHTAVYQCEASNVHGTILANANIDVVDVRPLIQTKDGENYATVVGYSAFLHCEFFASPEAVVSWQKVEEVKPLEGRRYHIYENGTLQINRTTEEDAGSYSCWVENAIGKTAVTANLDIRNATKLRVSPKNPRIPKLHMLELHCESKCDSHLKHSLKLSWSKDGEAFEINGTEDGRIIIDGANLTISNVTLEDQGIYCCSAHTALDSAADITQVTVLDVPDPPENLHLSERQNRSVRLTWEAGADHNSNISEYIVEFEGNKEEPGRWEELTRVQGKKTTVILPLAPFVRYQFRVIAVNEVGRSQPSQPSDHHETPPAAPDRNPQNIRVQASQPKEMIIKWEPLKSMEQNGPGLEYRVTWKPQGAPVEWEEETVTNHTLRVMTPAVYAPYDVKVQAINQLGSGPDPQSVTLYSGEDYPDTAPVIHGVDVINSTLVKVTWSTVPKDRVHGRLKGYQINWWKTKSLLDGRTHPKEVNILRFSGQRNSGMVPSLDAFSEFHLTVLAYNSKGAGPESEPYIFQTPEGVPEQPTFLKVIKVDKDTATLSWGLPKKLNGNLTGYLLQYQIINDTYEIGELNDINITTPSKPSWHLSNLNATTKYKFYLRACTSQGCGKPITEESSTLGEGKYAGLYDDISTQGWFIGLMCAIALLTLLLLTVCFVKRNRGGKYSVKEKEDLHPDPEIQSVKDETFGEYSDSDEKPLKGSLRSLNRDMQPTESADSLVEYGEGDHGLFSEDGSFIGAYAGSKEKGSVESNGSSTATFPLRA

SEQ ID NO: 13590 - protein, 923 aa, Homo sapiens
  Payload ID: 2639
  Gene Symbol: CCAR2
  Gene Name: cell cycle and apoptosis regulator 2
  Uniprot ID: Q8N163
  ENSP ID: ENSP00000310670
MSQFKRQRINPLPGGRNFSGTASTSLLGPPPGLLTPPVATELSQNARHLQGGEKQRVFTGIVTSLHDYFGVVDEEVFFQLSVVKGRLPQLGEKVLVKAAYNPGQAVPWNAVKVQTLSNQPLLKSPAPPLLHVAALGQKQGILGAQPQLIFQPHRIPPLFPQKPLSLFQTSHTLHLSHLNRFPARGPHGRLDQGRSDDYDSKKRKQRAGGEPWGAKKPRHDLPPYRVHLTPYTVDSPICDFLELQRRYRSLLVPSDFLSVHLSWLSAFPLSQPFSLHHPSRIQVSSEKEAAPDAGAEPITADSDPAYSSKVLLLSSPGLEELYRCCMLFVDDMAEPRETPEHPLKQIKFLLGRKEEEAVLVGGEWSPSLDGLDPQADPQVLVRTAIRCAQAQTGIDLSGCTKWWRFAEFQYLQPGPPRRLQTVVVYLPDVWTIMPTLEEWEALCQQKAAEAAPPTQEAQGETEPTEQAPDALEQAADTSRRNAETPEATTQQETDTDLPEAPPPPLEPAVIARPGCVNLSLHGIVEDRRPKERISFEVMVLAELFLEMLQRDFGYRVYKMLLSLPEKVVSPPEPEKEEAAKEEATKEEEAIKEEVVKEPKDEAQNEGPATESEAPLKEDGLLPKPLSSGGEEEEKPRGEASEDLCEMALDPELLLLRDDGEEEFAGAKLEDSEVRSVASNQSEMEFSSLQDMPKELDPSAVLPLDCLLAFVFFDANWCGYLHRRDLERILLTLGIRLSAEQAKQLVSRVVTQNICQYRSLQYSRQEGLDGGLPEEVLFGNLDLLPPPGKSTKPGAAPTEHKALVSHNGSLINVGSLLQRAEQQDSGRLYLENKIHTLELKLEESHNRFSATEVTNKTLAAEMQELRVRLAEAEETARTAERQKSQLQRLLQELRRRLTPLQLEIQRVVEKADSWVEKEEPAPSN

SEQ ID NO: 13591 - protein, 923 aa, Homo sapiens; identical to SEQ ID NO: 13590
  Payload ID: 2639
  Gene Symbol: CCAR2
  Gene Name: cell cycle and apoptosis regulator 2
  Uniprot ID: Q8N163
  ENSP ID: ENSP00000373930

SEQ ID NO: 13592 - protein, 615 aa, Homo sapiens
  Payload ID: 2639
  Gene Symbol: CCAR2
  Gene Name: cell cycle and apoptosis regulator 2
  ENSP ID: ENSP00000428549
  MOD_RES (1)..(1): Any amino acid
XVLLLSSPGLEELYRCCMLFVDDMAEPRETPEHPLKQIKFLLGRKEEEAVLVGGEWSPSLDGLDPQADPQVLVRTAIRCAQAQTGIDLSGCTKWWRFAEFQYLQPGPPRRLQTVVVYLPDVWTIMPTLEEWEALCQQKAAEAAPPTQEAQGETEPTEQAPDALEQAADTSRRNAETPEATTQQETDTDLPEAPPPPLEPAVIARPGCVNLSLHGIVEDRRPKERISFEVMVLAELFLEMLQRDFGYRVYKMLLSLPEKVVSPPEPEKEEAAKEEATKEEEAIKEEVVKEPKDEAQNEGPATESEAPLKEDGLLPKPLSSGGEEEEKPRGEASEDLCEMALDPELLLLRDDGEEEFAGAKLEDSEVRSVASNQSEMEFSSLQDMPKELDPSAVLPLDCLLAFVFFDANWCGYLHRRDLERILLTLGIRLSAEQAKQLVSRVVTQNICQYRSLQYSRQEGLDGGLPEEVLFGNLDLLPPPGKSTKPGAAPTEHKALVSHNGSLINVGSLLQRAEQQDSGRLYLENKIHTLELKLEESHNRFSATEVTNKTLAAEMQELRVRLAEAEETARTAERQKSQLQRLLQELRRRLTPLQLEIQRVVEKADSWVEKEEPAPSN

SEQ ID NO: 13593 - protein, 162 aa, Homo sapiens
  Payload ID: 2639
  Gene Symbol: CCAR2
  Gene Name: cell cycle and apoptosis regulator 2
  ENSP ID: ENSP00000428843
MSQFKRQRINPLPGGRNFSGTASTSLLGPPPGLLTPPVATELSQNARHLQGGEKQRVFTGIVTSLHDYFGVVDEEVFFQLSVVKGRLPQLGEKVLVKAAYNPGQAVPWNAVKVQTLSNQPLLKSPAPPLLHVAALGQKQGILGAQPQLIFQPHRIPPLFPQK

SEQ ID NO: 13594 - protein, 277 aa, Homo sapiens
  Payload ID: 2639
  Gene Symbol: CCAR2
  Gene Name: cell cycle and apoptosis regulator 2
  ENSP ID: ENSP00000429739
MWFLTVGDGSTSSDDYDSKKRKQRAGGEPWGAKKPRHDLPPYRVHLTPYTVDSPICDFLELQRRYRSLLVPSDFLSVHLSWLSAFPLSQPFSLHHPSRIQVSSEKEAAPDAGAEPITADSDPAYSSKVLLLSSPGLEELYRCCMLFVDDMAEPRETPEHPLKQIKFLLGRKEEEAVLVGGEWSPSLDGLDPQADPQVLVRTAIRCAQAQTGIDLSGCTKWWRFAEFQYLQPGPPRRLQTVVVYLPDVWTIMPTLEEWEALCQQKAAEAAPPTQEAQG

SEQ ID NO: 13595 - protein, 81 aa, Homo sapiens
  Payload ID: 2639
  Gene Symbol: CCAR2
  Gene Name: cell cycle and apoptosis regulator 2
  ENSP ID: ENSP00000429769
MSQFKRQRINPLPGGRNFSGTASTSLLGPPPGLLTPPVATELSQNARHLQGGEKQRVFTGIVTSLHDYFGVVDEEVFFQLR

SEQ ID NO: 13596 - protein, 598 aa, Homo sapiens
  Payload ID: 2639
  Gene Symbol: CCAR2
  Gene Name: cell cycle and apoptosis regulator 2
  ENSP ID: ENSP00000429773
MLFVDDMAEPRETPEHPLKQIKFLLGRKEEEAVLVGGEWSPSLDGLDPQADPQVLVRTAIRCAQAQTGIDLSGCTKWWRFAEFQYLQPGPPRRLQTVVVYLPDVWTIMPTLEEWEALCQQKAAEAAPPTQEAQGETEPTEQAPDALEQAADTSRRNAETPEATTQQETDTDLPEAPPPPLEPAVIARPGCVNLSLHGIVEDRRPKERISFEVMVLAELFLEMLQRDFGYRVYKMLLSLPEKVVSPPEPEKEEAAKEEATKEEEAIKEEVVKEPKDEAQNEGPATESEAPLKEDGLLPKPLSSGGEEEEKPRGEASEDLCEMALDPELLLLRDDGEEEFAGAKLEDSEVRSVASNQSEMEFSSLQDMPKELDPSAVLPLDCLLAFVFFDANWCGYLHRRDLERILLTLGIRLSAEQAKQLVSRVVTQNICQYRSLQYSRQEGLDGGLPEEVLFGNLDLLPPPGKSTKPGAAPTEHKALVSHNGSLINVGSLLQRAEQQDSGRLYLENKIHTLELKLEESHNRFSATEVTNKTLAAEMQELRVRLAEAEETARTAERQKSQLQRLLQELRRRLTPLQLEIQRVVEKVRWGWTRRQHSSFP

SEQ ID NO: 13597 - protein, 183 aa, Homo sapiens
  Payload ID: 2639
  Gene Symbol: CCAR2
  Gene Name: cell cycle and apoptosis regulator 2
  ENSP ID: ENSP00000430974
  MOD_RES (1)..(1): Any amino acid
XLPVAAAAAAVVVPGVFVPPVSLPWPAGTASTSLLGPPPGLLTPPVATELSQNARHLQGGEKQRVFTGIVTSLHDYFGVVDEEVFFQLSVVKGRLPQLGEKVLVKAAYNPGQAVPWNAVKVQTLSNQPLLKSPAPPLLHVAALGQKQGILGAQPQLIFQPHRIPPLFPQKPLSLFQTSHTLHL

SEQ ID NO: 13598 - protein, 150 aa, Homo sapiens
  Payload ID: 2639
  Gene Symbol: CCAR2
  Gene Name: cell cycle and apoptosis regulator 2
  ENSP ID: ENSP00000430978
MSQFKRQRINPLPGGRNFSGTASTSLLGPPPGLLTPPVATELSQNARHLQGGEKQRVFTGIVTSLHDYFGVVDEEVFFQLSVVKGRLPQLGEKVLVKAAYNPGQAVPWNAVKVQTLSNQPLLKSPAPPLLHVAALGQKQGILGAQPQLIF

SEQ ID NO: 13599 - protein, 148 aa, Homo sapiens
  Payload ID: 2639
  Gene Symbol: CCAR2
  Gene Name: cell cycle and apoptosis regulator 2
  ENSP ID: ENSP00000431046
  MOD_RES (1)..(1): Any amino acid
XLQGGEKQRVFTGIVTSLHDYFGVVDEEVFFQLSVVKGRLPQLGEKVLVKAAYNPGQAVPWNAVKVQTLSNQPLLKSPAPPLLHVAALGQKQGILGAQPQLIFQPHRIPPLFPQKPLSLFQTSHTLHLSHLNRFPARGPHGRLDQGRR

SEQ ID NO: 13600 - protein, 272 aa, Homo sapiens [sequence omitted]

SEQ ID NO: 13601 - protein, 709 aa, Homo sapiens
  Payload ID: 2640
  Gene Symbol: CAPRIN1
  Gene Name: cell cycle associated protein 1
  Uniprot ID: Q14444
  ENSP ID: ENSP00000340329
MPSATSHSGSGSKSSGPPPPSGSSGSEAAAGAGAAAPASQHPATGTGAVQTEAMKQILGVIDKKLRNLEKKKGKLDDYQERMNKGERLNQDQLDAVSKYQEVTNNLEFAKELQRSFMALSQDIQKTIKKTARREQLMREEAEQKRLKTVLELQYVLDKLGDDEVRTDLKQGLNGVPILSEEELSLLDEFYKLVDPERDMSLRLNEQYEHASIHLWDLLEGKEKPVCGTTYKVLKEIVERVFQSNYFDSTHNHQNGLCEEEEAASAPAVEDQVPEAEPEPAEEYTEQSEVESTEYVNRQFMAETQFTSGEKEQVDEWTVETVEVVNSLQQQPQAASPSVPEPHSLTPVAQADPLVRRQRVQDLMAQMQGPYNFIQDSMLDFENQTLDPAIVSAQPMNPTQNMDMPQLVCPPVHSESRLAQPNQVPVQPEATQVPLVSSTSEGYTASQPLYQPSHATEQRPQKEPIDQIQATISLNTDQTTASSSLPAASQPQVFQAGTSKPLHSSGINVNAAPFQSMQTVFNMNAPVPPVNEPETLKQQNQYQASYNQSFSSQPHQVEQTELQQEQLQTVVGTYHGSPDQSHQVTGNHQQPPQQNTGFPRSNQPYYNSRGVSRGGSRGARGLMNGYRGPANGFRGGYDGYRPSFSNTPNSGYTQSQFSAPRDYSGYQRDGYQQNFKRGSGQSGPRGAPRGRGGPPRPNRGMPQMNTQQVN

SEQ ID NO: 13602 - protein, 694 aa, Homo sapiens
  Payload ID: 2640
  Gene Symbol: CAPRIN1
  Gene Name: cell cycle associated protein 1
  Uniprot ID: Q14444
  ENSP ID: ENSP00000374296
MPSATSHSGSGSKSSGPPPPSGSSGSEAAAGAGAAAPASQHPATGTGAVQTEAMKQILGVIDKKLRNLEKKKGKLDDYQERMNKGERLNQDQLDAVSKYQEVTNNLEFAKELQRSFMALSQDIQKTIKKTARREQLMREEAEQKRLKTVLELQYVLDKLGDDEVRTDLKQGLNGVPILSEEELSLLDEFYKLVDPERDMSLRLNEQYEHASIHLWDLLEGKEKPVCGTTYKVLKEIVERVFQSNYFDSTHNHQNGLCEEEEAASAPAVEDQVPEAEPEPAEEYTEQSEVESTEYVNRQFMAETQFTSGEKEQVDEWTVETVEVVNSLQQQPQAASPSVPEPHSLTPVAQADPLVRRQRVQDLMAQMQGPYNFIQDSMLDFENQTLDPAIVSAQPMNPTQNMDMPQLVCPPVHSESRLAQPNQVPVQPEATQVPLVSSTSEGYTASQPLYQPSHATEQRPQKEPIDQIQATISLNTDQTTASSSLPAASQPQVFQAGTSKPLHSSGINVNAAPFQSMQTVFNMNAPVPPVNEPETLKQQNQYQASYNQSFSSQPHQVEQTELQQEQLQTVVGTYHGSPDQSHQVTGNHQQPPQQNTGFPRSNQPYYNSRGVSRGGSRGARGLMNGYRGPANGFRGGYDGYRPSFSNTPNSGYTQSQFSAPRDYSGYQRDGYQQNFKRGSGQSGPRGAPRGNILWW

SEQ ID NO: 13603 - protein, 186 aa, Homo sapiens
  Payload ID: 2640
  Gene Symbol: CAPRIN1
  Gene Name: cell cycle associated protein 1
  ENSP ID: ENSP00000431373
MPSATSHSGSGSKSSGPPPPSGSSGSEAAAGAGAAAPASQHPATGTGAVQTEAMKQILGVIDKKLRNLEKKKGKLDDYQERMNKGERLNQDQLDAVSKYQEVTNNLEFAKELQRSFMALSQDIQKTIKKTARREQLMREEAEQKRLKTVLELQYVLDKLGDDEVRTDLKQGLNGVPILSEEELSLL

SEQ ID NO: 13604 - protein, 628 aa, Homo sapiens
  Payload ID: 2640
  Gene Symbol: CAPRIN1
  Gene Name: cell cycle associated protein 1
  ENSP ID: ENSP00000431581
MNKGERLNQDQLDAVSKYQEVTNNLEFAKELQRSFMALSQDIQKTIKKTARREQLMREEAEQKRLKTVLELQYVLDKLGDDEVRTDLKQGLNGVPILSEEELSLLDEFYKLVDPERDMSLRLNEQYEHASIHLWDLLEGKEKPVCGTTYKVLKEIVERVFQSNYFDSTHNHQNGLCEEEEAASAPAVEDQVPEAEPEPAEEYTEQSEVESTEYVNRQFMAETQFTSGEKEQVDEWTVETVEVVNSLQQQPQAASPSVPEPHSLTPVAQADPLVRRQRVQDLMAQMQGPYNFIQDSMLDFENQTLDPAIVSAQPMNPTQNMDMPQLVCPPVHSESRLAQPNQVPVQPEATQVPLVSSTSEGYTASQPLYQPSHATEQRPQKEPIDQIQATISLNTDQTTASSSLPAASQPQVFQAGTSKPLHSSGINVNAAPFQSMQTVFNMNAPVPPVNEPETLKQQNQYQASYNQSFSSQPHQVEQTELQQEQLQTVVGTYHGSPDQSHQVTGNHQQPPQQNTGFPRSNQPYYNSRGVSRGGSRGARGLMNGYRGPANGFRGGYDGYRPSFSNTPNSGYTQSQFSAPRDYSGYQRDGYQQNFKRGSGQSGPRGAPRGRGGPPRPNRGMPQMNTQQVN

SEQ ID NO: 13605 - protein, 709 aa, Homo sapiens; identical to SEQ ID NO: 13601
  Payload ID: 2640
  Gene Symbol: CAPRIN1
  Gene Name: cell cycle associated protein 1
  Uniprot ID: Q14444
  ENSP ID: ENSP00000434150

SEQ ID NO: 13606 - protein, 694 aa, Homo sapiens; identical to SEQ ID NO: 13602
  Payload ID: 2640
  Gene Symbol: CAPRIN1
  Gene Name: cell cycle associated protein 1
  Uniprot ID: Q14444
  ENSP ID: ENSP00000434204

SEQ ID NO: 13607 - protein, 649 aa, Homo sapiens
  Payload ID: 2640
  Gene Symbol: CAPRIN1
  Gene Name: cell cycle associated protein 1
  ENSP ID: ENSP00000483169
MKQILGVIDKKLRNLEKKKGKLDDYQERMNKGERLNQDQLDAVSKYQEVTNNLEFAKELQRSFMALSQDIQKTIKKTARREQLMREEAEQKRLKTVLELQYVLDKLGDDEVRTDLKQGLNGVPILSEEELSLLDEFYKLVDPERDMSLRLNEQYEHASIHLWDLLEGKEKPVCGTTYKVLKEIVERVFQSNYFDSTHNHQNGLCEEEEAASAPAVEDQVPEAEPEPAEEYTEQSEVESTEYVNRQFMAETQFTSGEKEQVDEWTVETVEVVNSLQQQPQAASPSVPEPHSLTPVAQADPLVRRQRVQDLMAQMQGPYNFIQDSMLDFENQTLDPAIVSAQPMNPTQNMDMPQLVCPPVHSESRLAQPNQVPVQPEATQVPLVSSTSEGYTASQPLYQPSHATEQRPQKEPIDQIQATISLNTDQTTASSSLPAASQPQVFQAGTSKPLHSSGINVNAAPFQSMQTVFNMNAPVPPVNEPETLKQQNQYQASYNQSFSSQPHQVEQTELQQEQLQTVVGTYHGSPDQSHQVTGNHQQPPQQNTGFPRSNQPYYNSRGVSRGGSRGARGLMNGYRGPAMDSEEDMMVTALHSLTLQTVVIHSLSSVLPGITLAINGMDISRISSEALGRVDHGEPHEVVEGPQDPTEGCRK

SEQ ID NO: 13608 - protein, 149 aa, Homo sapiens [sequence omitted]

SEQ ID NO: 13609 - protein, 757 aa, Homo sapiens
  Payload ID: 2642
  Gene Symbol: CCPG1
  Gene Name: cell cycle progression 1
  Uniprot ID: Q9ULG6
  ENSP ID: ENSP00000311656
MSENSSDSDSSCGWTVISHEGSDIEMLNSVTPTDSCEPAPECSSLEQEELQALQIEQGESSQNGTVLMEETAYPALEETSSTIEAEEQKIPEDSIYIGTASDDSDIVTLEPPKLEEIGNQEVVIVEEAQSSEDFNMGSSSSSQYTFCQPETVFSSQPSDDESSSDETSNQPSPAFRRRRARKKTVSASESEDRLVAEQETEPSKELSKRQFSSGLNKCVILALVIAISMGFGHFYGTIQIQKRQQLVRKIHEDELNDMKDYLSQCQQEQESFIDYKSLKENLARCWTLTEAEKMSFETQKTNLATENQYLRVSLEKEEKALSSLQEELNKLREQIRILEDKGTSTELVKENQKLKQHLEEEKQKKHSFLSQRETLLTEAKMLKRELERERLVTTALRGELQQLSGSQLHGKSDSPNVYTEKKEIAILRERLTELERKLTFEQQRSDLWERLYVEAKDQNGKQGTDGKKKGGRGSHRAKNKSKETFLGSVKETFDAMKNSTKEFVRHHKEKIKQAKEAVKENLKKFSDSVKSTFRHFKDTTKNIFDEKGNKRFGATKEAAEKPRTVFSDYLHPQYKAPTENHHNRGPTMQNDGRKEKPVHFKEFRKNTNSKKCSPGHDCRENSHSFRKACSGVFDCAQQESMSLFNTVVNPIRMDEFRQIIQRYMLKELDTFCHWNELDQFINKFFLNGVFIHDQKLFTDFVNDVKDYLRNMKEYEVDNDGVFEKLDEYIYRHFFGHTFSPPYGPRSVYIKPCHYSSL

SEQ ID NO: 13610 - protein, 807 aa, Homo sapiens
  Payload ID: 2642
  Gene Symbol: CCPG1
  Gene Name: cell cycle progression 1
  Uniprot ID: Q9ULG6
  ENSP ID: ENSP00000403400
MSENSSDSDSSCGWTVISHEGSDIEMLNSVTPTDSCEPAPECSSLEQEELQALQIEQGESSQNGTVLMEETAYPALEETSSTIEAEEQKIPEDSIYIGTASDDSDIVTLEPPKLEEIGNQEVVIVEEAQSSEDFNMGSSSSSQYTFCQPETVFSSQPSDDESSSDETSNQPSPAFRRRRARKKTVSASESEDRLVAEQETEPSKELSKRQFSSGLNKCVILALVIAISMGFGHFYGTIQIQKRQQLVRKIHEDELNDMKDYLSQCQQEQESFIDYKSLKENLARCWTLTEAEKMSFETQKTNLATENQYLRVSLEKEEKALSSLQEELNKLREQIRILEDKGTSTELVKENQKLKQHLEEEKQKKHSFLSQRETLLTEAKMLKRELERERLVTTALRGELQQLSGSQLHGKSDSPNVYTEKKEIAILRERLTELERKLTFEQQRSDLWERLYVEAKDQNGKQGTDGKKKGGRGSHRAKNKSKETFLGSVKETFDAMKNSTKEFVRHHKEKIKQAKEAVKENLKKFSDSVKSTFRHFKDTTKNIFDEKGNKRFGATKEAAEKPRTVFSDYLHPQYKAPTENHHNRGPTMQNDGRKEKPVHFKEFRKNTNSKKCSPGHDCRENSHSFRKACSGVFDCAQQESMSLFNTVVNPIRMDEFRQIIQRYMLKELDTFCHWNELDQFINKFFLNGVFIHDQKLFTDFVNDVKDYLRNMKEYEVDNDGVFEKLDEYIYRHFFGHTFSPPYGPSRPDKKQRMVNIENSRHRKQEQKHLQPQPYKREGKWHKYGRTNGRQMANLEIELGQLPFDPQY

SEQ ID NO: 13611 - protein, 424 aa, Homo sapiens
  Payload ID: 2642
  Gene Symbol: CCPG1
  Gene Name: cell cycle progression 1
  Uniprot ID: Q9ULG6
  ENSP ID: ENSP00000415128
MSENSSDSDSSCGWTVISHEGSDIEMLNSVTPTDSCEPAPECSSLEQEELQALQIEQGESSQNGTVLMEETAYPALEETSSTIEAEEQKIPEDSIYIGTASDDSDIVTLEPPKLEEIGNQEVVIVEEAQSSEDFNMGSSSSSQYTFCQPETVFSSQPSDDESSSDETSNQPSPAFRRRRARKKTVSASESEDRLVAEQETEPSKELSKRQFSSGLNKCVILALVIAISMGFGHFYGTIQIQKRQQLVRKIHEDELNDMKDYLSQCQQEQESFIDYKSLKENLARCWTLTEAEKMSFETQKTNLATENQYLRKLFTDFVNDVKDYLRNMKEYEVDNDGVFEKLDEYIYRHFFGHTFSPPYGPSRPDKKQRMVNIENSRHRKQEQKHLQPQPYKREGKWHKYGRTNGRQMANLEIELGQLPFDPQY

SEQ ID NO: 13612 - protein, 757 aa, Homo sapiens; identical to SEQ ID NO: 13609
  Payload ID: 2642
  Gene Symbol: CCPG1
  Gene Name: cell cycle progression 1
  Uniprot ID: Q9ULG6
  ENSP ID: ENSP00000454456

SEQ ID NO: 13613 - protein, 203 aa, Homo sapiens
  Payload ID: 2642
  Gene Symbol: CCPG1
  Gene Name: cell cycle progression 1
  ENSP ID: ENSP00000454666
  MOD_RES (1)..(1): Any amino acid
XKKFSDSVKSTFRHFKDTTKNIFDEKGNKRFGATKEAAEKPRTVFSDYLHPQYKAPTENHHNRGPTMQNDGRKEKPVHFKEFRKNTNSKKCSPGHDCRENSHSFRKACSGVFDCAQQESMSLFNTVVNPIRMDEFRQIIQSRPDKKQRMVNIENSRHRKQEQKHLQPQPYKREGKWHKYGRTNGRQMANLEIELGQLPFDPQY

SEQ ID NO: 13614 - protein, 240 aa, Homo sapiens
  Payload ID: 2642
  Gene Symbol: CCPG1
  Gene Name: cell cycle progression 1
  ENSP ID: ENSP00000454802
MSENSSDSDSSCGWTVISHEGSDIEMLNSVTPTDSCEPAPECSSLEQEELQALQIEQGESSQNGTVLMEETAYPALEETSSTIEAEEQKIPEDSIYIGTASDDSDIVTLEPPKLEEIGNQEVVIVEEAQSSEDFNMGSSSSSQYTFCQPETERWWEKLWKIPECIWGWDDQLKHHVPSQLAFQVFSSQPSDDESSSDETSNQPSPAFRRRRARKKTVSASESEDRLVAEQETEPSKELSK

SEQ ID NO: 13615 - protein, 32 aa, Homo sapiens
  Payload ID: 2642
  Gene Symbol: CCPG1
  Gene Name: cell cycle progression 1
  ENSP ID: ENSP00000455406
  MOD_RES (1)..(1): Any amino acid
XRKIHEDELNDMKDYLSQCQQEQESFIDYKST

SEQ ID NO: 13616 - protein, 152 aa, Homo sapiens
  Payload ID: 2642
  Gene Symbol: CCPG1
  Gene Name: cell cycle progression 1
  ENSP ID: ENSP00000455852
MSENSSDSDSSCGWTVISHEGSDIEMLNSVTPTDSCEPAPECSSLEQEELQALQIEQGESSQNGTVLMEETAYPALEETSSTIEAEEQKIPEDSIYIGTASDDSDIVTLEPPKLEEIGNQEVVIVEEAQSSEDFNMGSSSSSQYTFCQPETA

SEQ ID NO: 13617 - protein, 92 aa, Homo sapiens
  Payload ID: 2642
  Gene Symbol: CCPG1
  Gene Name: cell cycle progression 1
  ENSP ID: ENSP00000456045
MSENSSDSDSSCGWTVISHEGSDIEMLNSVTPTDSCEPAPECSSLEQEELQALQIEQGESSQNGTVLMEETAYPALEETSSTIEAEEQKIPE

SEQ ID NO: 13618 - protein, 170 aa, Homo sapiens
  Payload ID: 2642
  Gene Symbol: CCPG1
  Gene Name: cell cycle progression 1
  ENSP ID: ENSP00000457393
MSENSSDSDSSCGWTVISHEGSDIEMLNSVTPTDSCEPAPECSSLEQEELQALQIEQGESSQNGTVLMEETAYPALEETSSTIEAEEQKIPEDSIYIGTASDDSDIVTLEPPKLEEIGNQEVVIVEEAQSSEDFNMGSSSSSQYTFCQPETVFSSQPSDDESSSDETSNQ

SEQ ID NO: 13619 - protein, 117 aa, Homo sapiens
  Payload ID: 2642
  Gene Symbol: CCPG1
  Gene Name: cell cycle progression 1
  ENSP ID: ENSP00000457967
  MOD_RES (1)..(1): Any amino acid
XTDFVNDVKDYLRNMKEYEVDNDGVFEKLDEYIYRHFFGHTFSPPYGPSRPDKKQRMVNIENSRHRKQEQKHLQPQPYKREDGVLLCRPGWSAVARSRLTASSASRVHAILLPQPPE

SEQ ID NO: 13620 - protein, 219 aa, Homo sapiens
  Payload ID: 2643
  Gene Symbol: CIDEA
  Gene Name: cell death-inducing DFFA-like effector a
  Uniprot ID: O60543
  ENSP ID: ENSP00000320209
MEAARDYAGALIRPLTFMGSQTKRVLFTPLMHPARPFRVSNHDRSSRRGVMASSLQELISKTLDALVIATGLVTLVLEEDGTVVDTEEFFQTLGDNTHFMILEKGQKWMPGSQHVPTCSPPKRSGIARVTFDLYRLNPKDFIGCLNVKATMYEMYSVSYDIRCTGLKGLLRSLLRFLSYSAQVTGQFLIYLGTYMLRVLDDKEERPSLRSQAKGRFTCG

SEQ ID NO: 13621 - protein, 200 aa, Homo sapiens
  Payload ID: 2643
  Gene Symbol: CIDEA
  Gene Name: cell death-inducing DFFA-like effector a
  ENSP ID: ENSP00000429238
MEAARDYAGALIRRVPRVPLIAVRFQSPCVRWPHIPLCASSTVPRSLQPPAPRILLRSATPRTHPSAPLVPKPSSRARGQSPIPSRASSPSCSWAQVPGVALARCAGVCKPGDSWRVAACISGRCCSRGRRRGSGPRNPEQSFRDARGPGFWGSWKSQRELGAGGAQAWPLLEARALVSEGRPQPSGGALQAPDIYGITD

SEQ ID NO: 13622 - protein, 219 aa, Homo sapiens
  Payload ID: 2644
  Gene Symbol: CIDEB
  Gene Name: cell death-inducing DFFA-like effector b
  Uniprot ID: Q9UHD4
  ENSP ID: ENSP00000258807
MEYLSALNPSDLLRSVSNISSEFGRRVWTSAPPPQRPFRVCDHKRTIRKGLTAATRQELLAKALETLLLNGVLTLVLEEDGTAVDSEDFFQLLEDDTCLMVLQSGQSWSPTRSGVLSYGLGRERPKHSKDIARFTFDVYKQNPRDLFGSLNVKATFYGLYSMSCDFQGLGPKKVLRELLRWTSTLLQGLGHMLLGISSTLRHAVEGAEQWQQKGRLHSY

SEQ ID NO: 13623 - protein, 219 aa, Homo sapiens; identical to SEQ ID NO: 13622
  Payload ID: 2644
  Gene Symbol: CIDEB
  Gene Name: cell death-inducing DFFA-like effector b
  Uniprot ID: Q9UHD4
  ENSP ID: ENSP00000337731

SEQ ID NO: 13624 - protein, 219 aa, Homo sapiens; identical to SEQ ID NO: 13622
  Payload ID: 2644
  Gene Symbol: CIDEB
  Gene Name: cell death-inducing DFFA-like effector b
  Uniprot ID: Q9UHD4
  ENSP ID: ENSP00000451089

SEQ ID NO: 13625 - protein, 61 aa, Homo sapiens
  Payload ID: 2644
  Gene Symbol: CIDEB
  Gene Name: cell death-inducing DFFA-like effector b
  ENSP ID: ENSP00000451744
  MOD_RES (1)..(1): Any amino acid
XVDSEDFFQLLEDDTCLMVLQSGQSWSPTRGAPSLDLHTAARPGPYVAGNFLHPSSCSGGG

SEQ ID NO: 13626 - protein, 238 aa, Homo sapiens
  Payload ID: 2645
  Gene Symbol: CIDEC
  Gene Name: cell death-inducing DFFA-like effector c
  Uniprot ID: Q96AQ7
  ENSP ID: ENSP00000338642
MEYAMKSLSLLYPKSLSRHVSVRTSVVTQQLLSEPSPKAPRARPCRVSTADRSVRKGIMAYSLEDLLLKVRDTLMLADKPFFLVLEEDGTTVETEEYFQALAGDTVFMVLQKGQKWQPPSEQGTRHPLSLSHKPAKKIDVARVTFDLYKLNPQDFIGCLNVKATFYDTYSLSYDLHCCGAKRIMKEAFRWALFSMQATGHVLLGTSCYLQQLLDATEEGQPPKGKASSLIPTCLKILQ

SEQ ID NO: 13627 - protein, 251 aa, Homo sapiens
  Payload ID: 2645
  Gene Symbol: CIDEC
  Gene Name: cell death-inducing DFFA-like effector c
  ENSP ID: ENSP00000373328
MRNMESNAVQLTRMEYAMKSLSLLYPKSLSRHVSVRTSVVTQQLLSEPSPKAPRARPCRVSTADRSVRKGIMAYSLEDLLLKVRDTLMLADKPFFLVLEEDGTTVETEEYFQALAGDTVFMVLQKGQKWQPPSEQGTRHPLSLSHKPAKKIDVARVTFDLYKLNPQDFIGCLNVKATFYDTYSLSYDLHCCGAKRIMKEAFRWALFSMQATGHVLLGTSCYLQQLLDATEEGQPPKGKASSLIPTCLKILQ

SEQ ID NO: 13628 - protein, 164 aa, Homo sapiens
  Payload ID: 2645
  Gene Symbol: CIDEC
  Gene Name: cell death-inducing DFFA-like effector c
  Uniprot ID: Q96AQ7
  ENSP ID: ENSP00000392975
MLADKPFFLVLEEDGTTVETEEYFQALAGDTVFMVLQKGQKWQPPSEQGTRHPLSLSHKPAKKIDVARVTFDLYKLNPQDFIGCLNVKATFYDTYSLSYDLHCCGAKRIMKEAFRWALFSMQATGHVLLGTSCYLQQLLDATEEGQPPKGKASSLIPTCLKILQ

SEQ ID NO: 13629 - protein, 164 aa, Homo sapiens; identical to SEQ ID NO: 13628
  Payload ID: 2645
  Gene Symbol: CIDEC
  Gene Name: cell death-inducing DFFA-like effector c
  Uniprot ID: Q96AQ7
  ENSP ID: ENSP00000400649

SEQ ID NO: 13630 - protein, 248 aa, Homo sapiens
  Payload ID: 2645
  Gene Symbol: CIDEC
  Gene Name: cell death-inducing DFFA-like effector c
  Uniprot ID: Q96AQ7
  ENSP ID: ENSP00000408631
MEYAMKSLSLLYPKSLSRHVSVRTSVVTQQLLSEPSPKAPRARPCRVSTADRSVRKGIMAYSLEDLLLKTRNPEARSQEVRDTLMLADKPFFLVLEEDGTTVETEEYFQALAGDTVFMVLQKGQKWQPPSEQGTRHPLSLSHKPAKKIDVARVTFDLYKLNPQDFIGCLNVKATFYDTYSLSYDLHCCGAKRIMKEAFRWALFSMQATGHVLLGTSCYLQQLLDATEEGQPPKGKASSLIPTCLKILQ

SEQ ID NO: 13631 - protein, 133 aa, Homo sapiens
  Payload ID: 2645
  Gene Symbol: CIDEC
  Gene Name: cell death-inducing DFFA-like effector c
  ENSP ID: ENSP00000411356
MEYAMKSLSLLYPKSLSRHVSVRTSVVTQQLLSEPSPKAPRARPCRVSTADRSVRKGIMAYSLEDLLLKGSFPLGPLQHAGHRPRTAWHLLLPAAAPRCYGGRAAPQGQGLIPYPDLSEDTAVKAQVLGSFPQ

SEQ ID NO: 13632 - protein, 248 aa, Homo sapiens; identical to SEQ ID NO: 13630
  Payload ID: 2645
  Gene Symbol: CIDEC
  Gene Name: cell death-inducing DFFA-like effector c
  Uniprot ID: Q96AQ7
  ENSP ID: ENSP00000483641

SEQ ID NO: 13633 - protein, 208 aa, Homo sapiens
  Payload ID: 2646
  Gene Symbol: CDIP1
  Gene Name: cell death-inducing p53 target 1
  Uniprot ID: Q9H305
  ENSP ID: ENSP00000382508
MSSEPPPPYPGGPTAPLLEEKSGAPPTPGRSSPAVMQPPPGMPLPPADIGPPPYEPPGHPMPQPGFIPPHMSADGTYMPPGFYPPPGPHPPMGYYPPGPYTPGPYPGPGGHTATVLVPSGAATTVTVLQGEIFEGAPVQTVCPHCQQAITTKISYEIGLMNFVLGFFCCFMGCDLGCCLIPCLINDFKDVTHTCPSCKAYIYTYKRLC

SEQ ID NO: 13634 - protein, 208 aa, Homo sapiens; identical to SEQ ID NO: 13633
  Payload ID: 2646
  Gene Symbol: CDIP1
  Gene Name: cell death-inducing p53 target 1
  Uniprot ID: Q9H305
  ENSP ID: ENSP00000454994

SEQ ID NO: 13635 - protein, 129 aa, Homo sapiens
  Payload ID: 2646
  Gene Symbol: CDIP1
  Gene Name: cell death-inducing p53 target 1
  Uniprot ID: Q9H305
  ENSP ID: ENSP00000455050
MSSEPPPPYPGGPTAPLLEEKSGAPPTPGRSSPAVMQPPPGAATTVTVLQGEIFEGAPVQTVCPHCQQAITTKISYEIGLMNFVLGFFCCFMGCDLGCCLIPCLINDFKDVTHTCPSCKAYIYTYKRLC

SEQ ID NO: 13636 - protein, 169 aa, Homo sapiens
  Payload ID: 2646
  Gene Symbol: CDIP1
  Gene Name: cell death-inducing p53 target 1
  Uniprot ID: Q9H305
  ENSP ID: ENSP00000455462
MSSEPPPPYPGGPTAPLLEEKSGAPPTPGRSSPAVMQPPPGMPLPPADIGPPPYEPPGHPMPQPGFIPPHMSADGTYMPPGAATTVTVLQGEIFEGAPVQTVCPHCQQAITTKISYEIGLMNFVLGFFCCFMGCDLGCCLIPCLINDFKDVTHTCPSCKAYIYTYKRLC

SEQ ID NO: 13637 - protein, 52 aa, Homo sapiens
  Payload ID: 2646
  Gene Symbol: CDIP1
  Gene Name: cell death-inducing p53 target 1
  ENSP ID: ENSP00000456461
MQPPPGMPLPPADIGPPPYEPPGHPMPQPGFIPPHMSADGTYMPPDVIWAAA

SEQ ID NO: 13638 - protein, 133 aa, Homo sapiens
  Payload ID: 2646
  Gene Symbol: CDIP1
  Gene Name: cell death-inducing p53 target 1
  ENSP ID: ENSP00000457255
MSSEPPPPYPGGPTAPLLEEKSGAPPTPGRSSPAVMQPPPGMPLPPADIGPPPYEPPGHPMPQPGFIPPHMSADGTYMPPAAKPTSTRTSACANGAGTRDSPACQSGPLCFAPCAQWSLSRSHLGLGAVPPSP

SEQ ID NO: 13639 - protein, 111 aa, Homo sapiens
  Payload ID: 2646
  Gene Symbol: CDIP1
  Gene Name: cell death-inducing p53 target 1
  ENSP ID: ENSP00000457370
MQPPPGMPLPPADIGPPPYEPPGHPMPQPGFIPPHMSADGTYMPPGFYPPPGPHPPMGYYPPGPYTPGPYPGPGGHTATVLVPSGAATTVTVLQGEIFEGAPVQTVCPHCQ

SEQ ID NO: 13640 - protein, 208 aa, Homo sapiens; identical to SEQ ID NO: 13633
  Payload ID: 2646
  Gene Symbol: CDIP1
  Gene Name: cell death-inducing p53 target 1
  Uniprot ID: Q9H305
  ENSP ID: ENSP00000457877

SEQ ID NO: 13641 - protein, 95 aa, Homo sapiens
  Payload ID: 2646
  Gene Symbol: CDIP1
  Gene Name: cell death-inducing p53 target 1
  ENSP ID: ENSP00000465412
MQPPPGMPLPPADIGPPPYEPPGHPMPQPGFIPPHMSADGTYMPPGFYPPPGPHPPMGYYPPGPYTPGPYPGPGGHTATVLVPSGAATTVTVLQG

SEQ ID NO: 13642 - protein, 152 aa, Homo sapiens
  Payload ID: 2646
  Gene Symbol: CDIP1
  Gene Name: cell death-inducing p53 target 1
  ENSP ID: ENSP00000466186
MSSEPPPPYPGGPTAPLLEEKSGAPPTPGRSSPAVMQPPPGMPLPPADIGPPPYEPPGHPMPQPGFIPPHMSADGTYMPPGPYTPGPYPGPGGHTATVLVPSGAATTVTVLQGEIFEGAPVQTVCPHCQQAITTKISYEIGLMNFVLGFFCC

SEQ ID NO: 13643 - protein, 89 aa, Homo sapiens
  Payload ID: 2646
  Gene Symbol: CDIP1
  Gene Name: cell death-inducing p53 target 1
  ENSP ID: ENSP00000466378
MQPPPGMPLPPADIGPPPYEPPGHPMPQPGFIPPHMSADGTYMPPGPYPGPGGHTATVLVPSGAATTVTVLQGEIFEGAPVQTVCPHCQ

SEQ ID NO: 13644 - protein, 28 aa, Homo sapiens
  Payload ID: 2646
  Gene Symbol: CDIP1
  Gene Name: cell death-inducing p53 target 1
  ENSP ID: ENSP00000467058
MSSEPPPPYPGGPTAPLLEEKSGAPPTP

SEQ ID NO: 13645 - protein, 81 aa, Homo sapiens
  Payload ID: 2646
  Gene Symbol: CDIP1
  Gene Name: cell death-inducing p53 target 1
  ENSP ID: ENSP00000468627
MSSEPPPPYPGGPTAPLLEEKSGAPPTPGRSSPAVMQPPPGMPLPPADIGPPPYEPPGHPMPQPGFIPPHMSADGTYMPPG

SEQ ID NO: 13646 - protein, 208 aa, Homo sapiens; identical to SEQ ID NO: 13633
  Payload ID: 2646
  Gene Symbol: CDIP1
  Gene Name: cell death-inducing p53 target 1
  Uniprot ID: Q9H305
  ENSP ID: ENSP00000480842

SEQ ID NO: 13647 - protein, 89 aa, Homo sapiens; identical to SEQ ID NO: 13643
  Payload ID: 2646
  Gene Symbol: CDIP1
  Gene Name: cell death-inducing p53 target 1
  ENSP ID: ENSP00000487615

SEQ ID NO: 13648 - protein, 169 aa, Homo sapiens; identical to SEQ ID NO: 13636
  Payload ID: 2646
  Gene Symbol: CDIP1
  Gene Name: cell death-inducing p53 target 1
  Uniprot ID: Q9H305
  ENSP ID: ENSP00000487657

SEQ ID NO: 13649 - protein, 133 aa, Homo sapiens; identical to SEQ ID NO: 13638
  Payload ID: 2646
  Gene Symbol: CDIP1
  Gene Name: cell death-inducing p53 target 1
  ENSP ID: ENSP00000487791

SEQ ID NO: 13650 - protein, 208 aa, Homo sapiens; identical to SEQ ID NO: 13633
  Payload ID: 2646
  Gene Symbol: CDIP1
  Gene Name: cell death-inducing p53 target 1
  Uniprot ID: Q9H305
  ENSP ID: ENSP00000488066

SEQ ID NO: 13651 - protein, 81 aa, Homo sapiens; identical to SEQ ID NO: 13645
  Payload ID: 2646
  Gene Symbol: CDIP1
  Gene Name: cell death-inducing p53 target 1
  ENSP ID: ENSP00000488219

SEQ ID NO: 13652 - protein, 28 aa, Homo sapiens
  Payload ID: 2646
  Gene Symbol: CDIP1
  Gene Name: cell death-inducing p53 target 1
  ENSP ID: ENSP00000488234
MSSEPPPPYPGGPTAPLLEEKSGAPPTP

SEQ ID NO: 13653 - protein, 111 aa, Homo sapiens; identical to SEQ ID NO: 13639
  Payload ID: 2646
  Gene Symbol: CDIP1
  Gene Name: cell death-inducing p53 target 1
  ENSP ID: ENSP00000488327

SEQ ID NO: 13654 - protein, 152 aa, Homo sapiens; identical to SEQ ID NO: 13642
  Payload ID: 2646
  Gene Symbol: CDIP1
  Gene Name: cell death-inducing p53 target 1
  ENSP ID: ENSP00000488447

SEQ ID NO: 13655 - protein, 208 aa, Homo sapiens; identical to SEQ ID NO: 13633
  Payload ID: 2646
  Gene Symbol: CDIP1
  Gene Name: cell death-inducing p53 target 1
  Uniprot ID: Q9H305
  ENSP ID: ENSP00000488474

SEQ ID NO: 13656 - protein, 52 aa, Homo sapiens; identical to SEQ ID NO: 13637
  Payload ID: 2646
  Gene Symbol: CDIP1
  Gene Name: cell death-inducing p53 target 1
  ENSP ID: ENSP00000488525

SEQ ID NO: 13657 - protein, 95 aa, Homo sapiens; identical to SEQ ID NO: 13641
  Payload ID: 2646
  Gene Symbol: CDIP1
  Gene Name: cell death-inducing p53 target 1
  ENSP ID: ENSP00000488573

SEQ ID NO: 13658 - protein, 129 aa, Homo sapiens; identical to SEQ ID NO: 13635
  Payload ID: 2646
  Gene Symbol: CDIP1
  Gene Name: cell death-inducing p53 target 1
  Uniprot ID: Q9H305
  ENSP ID: ENSP00000488843

SEQ ID NO: 13659 - protein, 336 aa, Homo sapiens
  Payload ID: 2647
  Gene Symbol: CDC123
  Gene Name: cell division cycle 123
  Uniprot ID: O75794
  ENSP ID: ENSP00000281141
MKKEHVLHCQFSAWYPFFRGVTIKSVILPLPQNVKDYLLDDGTLVVSGRDDPPTHSQPDSDDEAEEIQWSDDENTATLTAPEFPEFATKVQEAINSLGGSVFPKLNWSAPRDAYWIAMNSSLKCKTLSDIFLLFKSSDFITRDFTQPFIHCTDDSPDPCIEYELVLRKWCELIPGAEFRCFVKENKLIGISQRDYTQYYDHISKQKEEIRRCIQDFFKKHIQYKFLDEDFVFDIYRDSRGKVWLIDFNPFGEVTDSLLFTWEELISENNLNGDFSEVDAQEQDSPAFRCTNSEVTVQPSPYLSYRLPKDFVDLSTGEDAHKLIDFLKLKRNQQEDD

SEQ ID NO: 13660 - protein, 295 aa, Homo sapiens
  Payload ID: 2647
  Gene Symbol: CDC123
  Gene Name: cell division cycle 123
  ENSP ID: ENSP00000368178
MKKEHVLHCQFSAWYPFFRGVTIKSVILPLPQNVKDYLLDDGTLVVSGRDDPPTHSQPDSDDEAEEIQWSDDENTATLTAPEFPEFATKVQEAINSLGGSVFPKLNWSAPRDAYWIAMNSSLKCKTLSDIFLLFKSSDFITRDFTQPFIHCTDDSPDPCIEYELVLRKWCELIPGAEFRCFVKENKLIVVFDIYRDSRGKVWLIDFNPFGEVTDSLLFTWEELISENNLNGDFSEVDAQEQDSPAFRCTNSEVTVQPSPYLSYRLPKDFVDLSTGEDAHKLIDFLKLKRNQQEDD

SEQ ID NO: 13661 - protein, 144 aa, Homo sapiens
  Payload ID: 2647
  Gene Symbol: CDC123
  Gene Name: cell division cycle 123
  ENSP ID: ENSP00000391851
  MOD_RES (1)..(1): Any amino acid
XFIHCTDDSPDPCIEYELVLRKWCELIPGAEFRCFVKENKLIGISQRDYTQYYDHISKQKEEIRRCIQDFFKKHIQYKFLDEDFVFDIYRDSRGKVWLIDFNPFGEVTDSLLFTWEELISENNLNGDFSEVDAQEQKRNQQEDD

SEQ ID NO: 13662 - protein, 183 aa, Homo sapiens
  Payload ID: 2647
  Gene Symbol: CDC123
  Gene Name: cell division cycle 123
  ENSP ID: ENSP00000398724
MKKEHVLHCQFSAWYPFFRGVTIKSVILPLPQNVKDYLLDDGTLVVSGRDDPPTHSQPDSDDEAEEIQWSDDENTATLTDAYWIAMNSSLKCKTLSDIFLLFKSSDFITRDFTQPFIHCTDDSPDPCIEYELVLRKWCELIPGAEFRCFVKENKLIGISQRDYTQYYDHISKQKEEIRRCIQD

SEQ ID NO: 13663 - protein, 157 aa, Homo sapiens
  Payload ID: 2647
  Gene Symbol: CDC123
  Gene Name: cell division cycle 123
  ENSP ID: ENSP00000415806
MKKEHVLHCQFSAWYPFFRGVTIKSVILPLPQNVKDYLLDDGTLVVSGRDDPPTHSQPDSDDEAEEIQWSDDENTATLTAPEFPEFATKVQEAINSLGGSVFPKLNWSAPRDAYWIAMNSSLKCKTLSDIFLLFKSSDFITRDFTQPFIHCTDDSPD

SEQ ID NO: 13664 - protein, 594 aa, Homo sapiens
  Payload ID: 2648
  Gene Symbol: CDC14A
  Gene Name: cell division cycle 14A
  Uniprot ID: Q9UNH5
  ENSP ID: ENSP00000336739
MAAESGELIGACEFMKDRLYFATLRNRPKSTVNTHYFSIDEELVYENFYADFGPLNLAMVYRYCCKLNKKLKSYSLSRKKIVHYTCFDQRKRANAAFLIGAYAVIYLKKTPEEAYRALLSGSNPPYLPFRDASFGNCTYNLTILDCLQGIRKGLQHGFFDFETFDVDEYEHYERVENGDFNWIVPGKFLAFSGPHPKSKIENGYPLHAPEAYFPYFKKHNVTAVVRLNKKIYEAKRFTDAGFEHYDLFFIDGSTPSDNIVRRFLNICENTEGAIAVHCKAGLGRTGTLIACYVMKHYRFTHAEIIAWIRICRPGSIIGPQQHFLEEKQASLWVQGDIFRSKLKNRPSSEGSINKILSGLDDMSIGGNLSKTQNMERFGEDNLEDDDVEMKNGITQGDKLRALKSQRQPRTSPSCAFRSDDTKGHPRAVSQPFRLSSSLQGSAVTLKTSKMALSPSATAKRINRTSLSSGATVRSFSINSRLASSLGNLNAATDDPENKKTSSSSKAGFTASPFTNLLNGSSQPTTRNYPELNNNQYNRSSNSNGGNLNSPPGPHSAKTEEHTTILRPSYTGLSSSSARFLSRSIPSLQSEYVHY

SEQ ID NO: 13665 - protein, 623 aa, Homo sapiens
  Payload ID: 2648
  Gene Symbol: CDC14A
  Gene Name: cell division cycle 14A
  Uniprot ID: Q9UNH5
  ENSP ID: ENSP00000354916
MAAESGELIGACEFMKDRLYFATLRNRPKSTVNTHYFSIDEELVYENFYADFGPLNLAMVYRYCCKLNKKLKSYSLSRKKIVHYTCFDQRKRANAAFLIGAYAVIYLKKTPEEAYRALLSGSNPPYLPFRDASFGNCTYNLTILDCLQGIRKGLQHGFFDFETFDVDEYEHYERVENGDFNWIVPGKFLAFSGPHPKSKIENGYPLHAPEAYFPYFKKHNVTAVVRLNKKIYEAKRFTDAGFEHYDLFFIDGSTPSDNIVRRFLNICENTEGAIAVHCKAGLGRTGTLIACYVMKHYRFTHAEIIAWIRICRPGSIIGPQQHFLEEKQASLWVQGDIFRSKLKNRPSSEGSINKILSGLDDMSIGGNLSKTQNMERFGEDNLEDDDVEMKNGITQGDKLRALKSQRQPRTSPSCAFRSDDTKGHPRAVSQPFRLSSSLQGSAVTLKTSKMALSPSATAKRINRTSLSSGATVRSFSINSRLASSLGNLNAATDDPENKKTSSSSKAGFTASPFTNLLNGSSQPTTRNYPELNNNQYNRSSNSNGGNLNSPPGPHSAKTEEHTTILRPSYTGLSSSSARFLSRSIPVSAQTPPPGPQNPECNFCALPSQPRLPPKKFNSAKEAF

SEQ ID NO: 13666 - protein, 383 aa, Homo sapiens
  Payload ID: 2648
  Gene Symbol: CDC14A
  Gene Name: cell division cycle 14A
  Uniprot ID: Q9UNH5
  ENSP ID: ENSP00000359142
MAAESGELIGACEFMKDRLYFATLRNRPKSTVNTHYFSIDEELVYENFYADFGPLNLAMVYRYCCKLNKKLKSYSLSRKKIVHYTCFDQRKRANAAFLIGAYAVIYLKKTPEEAYRALLSGSNPPYLPFRDASFGNCTYNLTILDCLQGIRKGLQHGFFDFETFDVDEYEHYERVENGDFNWIVPGKFLAFSGPHPKSKIENGYPLHAPEAYFPYFKKHNVTAVVRLNKKIYEAKRFTDAGFEHYDLFFIDGSTPSDNIVRRFLNICENTEGAIAVHCKAGLGRTGTLIACYVMKHYRFTHAEIIAWIRICRPGSIIGPQQHFLEEKQASLWVQGDIFRSKLKNRPSSEGSINKILSGLDDMSIGGNLSKTQNMERFGEVSFP

SEQ ID NO: 13667 - protein, 272 aa, Homo sapiens
  Payload ID: 2648
  Gene Symbol: CDC14A
  Gene Name: cell division cycle 14A
  ENSP ID: ENSP00000388501
MGNFLSRENKVQVISESDRLYFATLRNRPKSTVNTHYFSIDEELVYENFYADFGPLNLAMVYRYCCKLNKKLKSYSLSRKKIVHYTCFDQRKRANAAFLIGAYAVIYLKKTPEEAYRALLSGSNPPYLPFRDASFGNCTYNLTILDCLQGIRKGLQHGFFDFETFDVDEYEHYERVENGDFNWIVPGKFLAFSGPHPKSKIENGYPLHAPEAYFPYFKKHNVTAVVRLNKKIYEAKRFTDAGFEHYDLFFIDGSTPSDNIVRRFLNICENTE

SEQ ID NO: 13668 - protein, 565 aa, Homo sapiens
  Payload ID: 2648
  Gene Symbol: CDC14A
  Gene Name: cell division cycle 14A
  ENSP ID: ENSP00000489217
MVYRYCCKLNKKLKSYSLSRKKIVHYTCFDQRKRANAAFLIGAYAVIYLKKTPEEAYRALLSGSNPPYLPFRDASFGNCTYNLTILDCLQGIRKGLQHGFFDFETFDVDEYEHYERVENGDFNWIVPGKFLAFSGPHPKSKIENGYPLHAPEAYFPYFKKHNVTAVVRLNKKIYEAKRFTDAGFEHYDLFFIDGSTPSDNIVRRFLNICENTEGAIAVHCKAGLGRTGTLIACYVMKHYRFTHAEIIAWIRICRPGSIIGPQQHFLEEKQASLWVQGDIFRSKLKNRPSSEGSINKILSGLDDMSIGGNLSKTQNMERFGEDNLEDDDVEMKNGITQGDKLRALKSQRQPRTSPSCAFRSDDTKGHPRAVSQPFRLSSSLQGSAVTLKTSKMALSPSATAKRINRTSLSSGATVRSFSINSRLASSLGNLNAATDDPENKKTSSSSKAGFTASPFTNLLNGSSQPTTRNYPELNNNQYNRSSNSNGGNLNSPPGPHSAKTEEHTTILRPSYTGLSSSSARFLSRSIPVSAQTPPPGPQNPECNFCALPSQPRLPPKKFNSAKEAF

SEQ ID NO: 13669 - protein, 459 aa, Homo sapiens
  Payload ID: 2649
  Gene Symbol: CDC14B
  Gene Name: cell division cycle 14B
  Uniprot ID: O60729
  ENSP ID: ENSP00000364388
MKRKSERRSSWAAAPPCSRRCSSTSPGVKKIRSSTQQDPRRRDPQDDVYLDITDRLCFAILYSRPKSASNVHYFSIDNELEYENFYADFGPLNLAMVYRYCCKINKKLKSITMLRKKIVHFTGSDQRKQANAAFLVGCYMVIYLGRTPEEAYRILIFGETSYIPFRDAAYGSCNFYITLLDCFHAVKKAMQYGFLNFNSFNLDEYEHYEKAENGDLNWIIPDRFIAFCGPHSRARLESGYHQHSPETYIQYFKNHNVTTIIRLNKRMYDAKRFTDAGFDHHDLFFADGSTPTDAIVKEFLDICENAEGAIAVHCKAGLGRTGTLIACYIMKHYRMTAAETIAWVRICRPGSVIGPQQQFLVMKQTNLWLEGDYFRQKLKGQENGQHRAAFSKLLSGVDDISINGVENQDQQEPEPYSDDDEINGVTQGDRLRALKSRRQSKTNAIPLTLSISRTKTVLR

SEQ ID NO: 13670 - protein, 498 aa, Homo sapiens
  Payload ID: 2649
  Gene Symbol: CDC14B
  Gene Name: cell division cycle 14B
  Uniprot ID: O60729
  ENSP ID: ENSP00000364389
MKRKSERRSSWAAAPPCSRRCSSTSPGVKKIRSSTQQDPRRRDPQDDVYLDITDRLCFAILYSRPKSASNVHYFSIDNELEYENFYADFGPLNLAMVYRYCCKINKKLKSITMLRKKIVHFTGSDQRKQANAAFLVGCYMVIYLGRTPEEAYRILIFGETSYIPFRDAAYGSCNFYITLLDCFHAVKKAMQYGFLNFNSFNLDEYEHYEKAENGDLNWIIPDRFIAFCGPHSRARLESGYHQHSPETYIQYFKNHNVTTIIRLNKRMYDAKRFTDAGFDHHDLFFADGSTPTDAIVKEFLDICENAEGAIAVHCKAGLGRTGTLIACYIMKHYRMTAAETIAWVRICRPGSVIGPQQQFLVMKQTNLWLEGDYFRQKLKGQENGQHRAAFSKLLSGVDDISINGVENQDQQEPEPYSDDDEINGVTQGDRLRALKSRRQSKTNAIPLTVILQSSVQSCKTSEPNISGSAGITKRTTRSASRKSSVKSLSISRTKTVLR

SEQ ID NO: 13671 - protein, 461 aa, Homo sapiens
  Payload ID: 2649
  Gene Symbol: CDC14B
  Gene Name: cell division cycle 14B
  Uniprot ID: O60729
  ENSP ID: ENSP00000364390
MSREGAGAALVAEVIKDRLCFAILYSRPKSASNVHYFSIDNELEYENFYADFGPLNLAMVYRYCCKINKKLKSITMLRKKIVHFTGSDQRKQANAAFLVGCYMVIYLGRTPEEAYRILIFGETSYIPFRDAAYGSCNFYITLLDCFHAVKKAMQYGFLNFNSFNLDEYEHYEKAENGDLNWIIPDRFIAFCGPHSRARLESGYHQHSPETYIQYFKNHNVTTIIRLNKRMYDAKRFTDAGFDHHDLFFADGSTPTDAIVKEFLDICENAEGAIAVHCKAGLGRTGTLIACYIMKHYRMTAAETIAWVRICRPGSVIGPQQQFLVMKQTNLWLEGDYFRQKLKGQENGQHRAAFSKLLSGVDDISINGVENQDQQEPEPYSDDDEINGVTQGDRLRALKSRRQSKTNAIPLTVILQSSVQSCKTSEPNISGSAGITKRTTRSASRKSSVKSLSISRTKTVLR

SEQ ID NO: 13672 - protein, 268 aa, Homo sapiens
  Payload ID: 2649
  Gene Symbol: CDC14B
  Gene Name: cell division cycle 14B
  ENSP ID: ENSP00000396951
  MOD_RES (1)..(1): Any amino acid
XMLWSHEPGGRGGSFGSRGDQRKEHCNFSISDRLCFAILYSRPKSASNVHYFSIDNELEYENFYADFGPLNLAMVYRYCCKINKKLKSITMLRKKIVHFTGSDQRKQANAAFLVGCYMVIYLGRTPEEAYRILIFGETSYIPFRDAAYGSCNFYITLLDCFHAVKKAMQYGFLNFNSFNLDEYEHYEKAENGDLNWIIPDRFIAFCGPHSRARLESGYHQHSPETYIQYFKNHNVTTIIRLNKRMYDAKRFTDAGFDHHDLFFADGST

SEQ ID NO: 13673 - protein, 228 aa, Homo sapiens
  Payload ID: 2649
  Gene Symbol: CDC14B
  Gene Name: cell division cycle 14B
  ENSP ID: ENSP00000400480
APRRGLEKEGVTLVAFEPAGKTNVRVVTFEKSQPARADRLCFAILYSRPKSASNVHYFSIDNELEYENFYADFGPLNLAMVYRYCCKINKKLKSITMLRKKIVHFTGSDQRKQANAAFLVGCYMVIYLGRTPEEAYRILIFGETSYIPFRDAAYGSCNFYITLLDCFHAVKKAMQYGFLNFNSFNLDEYEHYEKAENGDLNWIIPDRFIAFCGPHSRARLESGYHQHS

SEQ ID NO: 13674 - protein, 480 aa, Homo sapiens
  Payload ID: 2649
  Gene Symbol: CDC14B
  Gene Name: cell division cycle 14B
  ENSP ID: ENSP00000413940
ERRSSWAAAPPCSRRCSSTSPGVKKIRSSTQQDPRRRDPQDDVYLDITDRLCFAILYSRPKSASNVHYFSIDNELEYENFYADFGPLNLAMVYRYCCKINKKLKSITMLRKKIVHFTGSDQRKQANAAFLVGCYMVIYLGRTPEEAYRILIFGETSYIPFRDAAYGSCNFYITLLDCFHAVKKAMQYGFLNFNSFNLDEYEHYEKAENGDLNWIIPDRFIAFCGPHSRARLESGYHQHSPETYIQYFKNHNVTTIIRLNKRMYDAKRFTDAGFDHHDLFFADGSTPTDAIVKEFLDICENAEGAIAVHCKAGLGRTGTLIACYIMKHYRMTAAETIAWVRICRPGSVIGPQQQFLVMKQTNLWLEGDYFRQKLKGQENGQHRAAFSKLLSGVDDISINGVENQDQQEPEPYSDDDEINGVTQGDRLRALKSRRQSKTNAIPLTCPLAVLTSALCSVVIWWIVCDYILPILLFCLDGFRTQ

SEQ ID NO: 13675 - protein, 471 aa, Homo sapiens
  Payload ID: 2649
  Gene Symbol: CDC14B
  Gene Name: cell division cycle 14B
  Uniprot ID: O60729
  ENSP ID: ENSP00000417897
MKRKSERRSSWAAAPPCSRRCSSTSPGVKKIRSSTQQDPRRRDPQDDVYLDITDRLCFAILYSRPKSASNVHYFSIDNELEYENFYADFGPLNLAMVYRYCCKINKKLKSITMLRKKIVHFTGSDQRKQANAAFLVGCYMVIYLGRTPEEAYRILIFGETSYIPFRDAAYGSCNFYITLLDCFHAVKKAMQYGFLNFNSFNLDEYEHYEKAENGDLNWIIPDRFIAFCGPHSRARLESGYHQHSPETYIQYFKNHNVTTIIRLNKRMYDAKRFTDAGFDHHDLFFADGSTPTDAIVKEFLDICENAEGAIAVHCKAGLGRTGTLIACYIMKHYRMTAAETIAWVRICRPGSVIGPQQQFLVMKQTNLWLEGDYFRQKLKGQENGQHRAAFSKLLSGVDDISINGVENQDQQEPEPYSDDDEINGVTQGDRLRALKSRRQSKTNAIPLTDGWLSQAVTFLDRLLIWLGIHKD

SEQ ID NO: 13676 - protein, 485 aa, Homo sapiens
  Payload ID: 2649
  Gene Symbol: CDC14B
  Gene Name: cell division cycle 14B
  Uniprot ID: O60729
  ENSP ID: ENSP00000420572
MKRKSERRSSWAAAPPCSRRCSSTSPGVKKIRSSTQQDPRRRDPQDDVYLDITDRLCFAILYSRPKSASNVHYFSIDNELEYENFYADFGPLNLAMVYRYCCKINKKLKSITMLRKKIVHFTGSDQRKQANAAFLVGCYMVIYLGRTPEEAYRILIFGETSYIPFRDAAYGSCNFYITLLDCFHAVKKAMQYGFLNFNSFNLDEYEHYEKAENGDLNWIIPDRFIAFCGPHSRARLESGYHQHSPETYIQYFKNHNVTTIIRLNKRMYDAKRFTDAGFDHHDLFFADGSTPTDAIVKEFLDICENAEGAIAVHCKAGLGRTGTLIACYIMKHYRMTAAETIAWVRICRPGSVIGPQQQFLVMKQTNLWLEGDYFRQKLKGQENGQHRAAFSKLLSGVDDISINGVENQDQQEPEPYSDDDEINGVTQGDRLRALKSRRQSKTNAIPLTCPLAVLTSALCSVVIWWIVCDYILPILLFCLDGFRTQ

SEQ ID NO: 13677 - protein, 619 aa, Homo sapiens
  Payload ID: 2650
  Gene Symbol: CDC16
  Gene Name: cell division cycle 16
  Uniprot ID: Q13042
  ENSP ID: ENSP00000252457
MNLERLRKRVRQYLDQQQYQSALFWADKVASLSREPQDIYWLAQCLYLTAQYHRAAHALRSRKLDKLYEACRYLAARCHYAAKEHQQALDVLDMEEPINKRLFEKYLKDESGFKDPSSDWEMSQSSIKSSICLLRGKIYDALDNRTLATYSYKEALKLDVYCFEAFDLLTSHHMLTAQEEKELLESLPLSKLCNEEQELLRFLFENKLKKYNKPSETVIPESVDGLQENLDVVVSLAERHYYNCDFKMCYKLTSVVMEKDPFHASCLPVHIGTLVELNKANELFYLSHKLVDLYPSNPVSWFAVGCYYLMVGHKNEHARRYLSKATTLEKTYGPAWIAYGHSFAVESEHDQAMAAYFTAAQLMKGCHLPMLYIGLEYGLTNNSKLAERFFSQALSIAPEDPFVMHEVGVVAFQNGEWKTAEKWFLDALEKIKAIGNEVTVDKWEPLLNNLGHVCRKLKKYAEALDYHRQALVLIPQNASTYSAIGYIHSLMGNFENAVDYFHTALGLRRDDTFSVTMLGHCIEMYIGDSEAYIGADIKDKLKCYDFDVHTMKTLKNIISPPWDFREFEVEKQTAEETGLTPLETSRKTPDSRPSLEETFEIEMNESDMMLETSMSDHST

SEQ ID NO: 13678 - protein, 475 aa, Homo sapiens
  Payload ID: 2650
  Gene Symbol: CDC16
  Gene Name: cell division cycle 16
  ENSP ID: ENSP00000252458
MEEPINKRLFEKYLKDESGFKDPSSDWEMSQSSIKSSICLLRGKIYDALDNRTLATYSYKEALKLDVYCFEAFDLLTSHHMLTAQEEKELLESLPLSKLCNEEQELLRFLFENKLKKYNKPSETVIPESVDGLQENLDVVVSLAERHYYNCDFKMCYKLTSVVMEKDPFHASCLPVHIGTLVELNKANELFYLSHKLVDLYPSNPVSWFAVGCYYLMVGHKNEHARRYLSKATTLEKTYGPAWIAYGHSFAVESEHDQAMAAYFTAAQLMKGWKTAEKWFLDALEKIKAIGNEVTVDKWEPLLNNLGHVCRKLKKYAEALDYHRQALVLIPQNASTYSAIGYIHSLMGNFENAVDYFHTALGLRRDDTFSVTMLGHCIEMYIGDSEAYIGADIKDKLKCYDFDVHTMKTLKNIISPPWDFREFEVEKQTAEETGLTPLETSRKTPDSRPSLEETFEIEMNESDMMLETSMSDHST

SEQ ID NO: 13679 - protein, 620 aa, Homo sapiens
  Payload ID: 2650
  Gene Symbol: CDC16
  Gene Name: cell division cycle 16
  Uniprot ID: Q13042
  ENSP ID: ENSP00000348554
MNLERLRKRVRQYLDQQQYQSALFWADKVASLSREEPQDIYWLAQCLYLTAQYHRAAHALRSRKLDKLYEACRYLAARCHYAAKEHQQALDVLDMEEPINKRLFEKYLKDESGFKDPSSDWEMSQSSIKSSICLLRGKIYDALDNRTLATYSYKEALKLDVYCFEAFDLLTSHHMLTAQEEKELLESLPLSKLCNEEQELLRFLFENKLKKYNKPSETVIPESVDGLQENLDVVVSLAERHYYNCDFKMCYKLTSVVMEKDPFHASCLPVHIGTLVELNKANELFYLSHKLVDLYPSNPVSWFAVGCYYLMVGHKNEHARRYLSKATTLEKTYGPAWIAYGHSFAVESEHDQAMAAYFTAAQLMKGCHLPMLYIGLEYGLTNNSKLAERFFSQALSIAPEDPFVMHEVGVVAFQNGEWKTAEKWFLDALEKIKAIGNEVTVDKWEPLLNNLGHVCRKLKKYAEALDYHRQALVLIPQNASTYSAIGYIHSLMGNFENAVDYFHTALGLRRDDTFSVTMLGHCIEMYIGDSEAYIGADIKDKLKCYDFDVHTMKTLKNIISPPWDFREFEVEKQTAEETGLTPLETSRKTPDSRPSLEETFEIEMNESDMMLETSMSDHST

SEQ ID NO: 13680 - protein, 620 aa, Homo sapiens; identical to SEQ ID NO: 13679
  Payload ID: 2650
  Gene Symbol: CDC16
  Gene Name: cell division cycle 16
  Uniprot ID: Q13042
  ENSP ID: ENSP00000353549

SEQ ID NO: 13681 - protein, 526 aa, Homo sapiens
  Payload ID: 2650
  Gene Symbol: CDC16
  Gene Name: cell division cycle 16
  Uniprot ID: Q13042
  ENSP ID: ENSP00000364457
MEEPINKRLFEKYLKDESGFKDPSSDWEMSQSSIKSSICLLRGKIYDALDNRTLATYSYKEALKLDVYCFEAFDLLTSHHMLTAQEEKELLESLPLSKLCNEEQELLRFLFENKLKKYNKPSETVIPESVDGLQENLDVVVSLAERHYYNCDFKMCYKLTSVVMEKDPFHASCLPVHIGTLVELNKANELFYLSHKLVDLYPSNPVSWFAVGCYYLMVGHKNEHARRYLSKATTLEKTYGPAWIAYGHSFAVESEHDQAMAAYFTAAQLMKGCHLPMLYIGLEYGLTNNSKLAERFFSQALSIAPEDPFVMHEVGVVAFQNGEWKTAEKWFLDALEKIKAIGNEVTVDKWEPLLNNLGHVCRKLKKYAEALDYHRQALVLIPQNASTYSAIGYIHSLMGNFENAVDYFHTALGLRRDDTFSVTMLGHCIEMYIGDSEAYIGADIKDKLKCYDFDVHTMKTLKNIISPPWDFREFEVEKQTAEETGLTPLETSRKTPDSRPSLEETFEIEMNESDMMLETSMSDHST

SEQ ID NO: 13682 - protein, 526 aa, Homo sapiens; identical to SEQ ID NO: 13681
  Payload ID: 2650
  Gene Symbol: CDC16
  Gene Name: cell division cycle 16
  Uniprot ID: Q13042
  ENSP ID: ENSP00000364459

SEQ ID NO: 13683 - protein, 475 aa, Homo sapiens; identical to SEQ ID NO: 13678
  Payload ID: 2650
  Gene Symbol: CDC16
  Gene Name: cell division cycle 16
  ENSP ID: ENSP00000486027

SEQ ID NO: 13684 - protein, 499 aa, Homo sapiens
  Payload ID: 2651
  Gene Symbol: CDC20
  Gene Name: cell division cycle 20
  Uniprot ID: Q12834
  ENSP ID: ENSP00000308450
MAQFAFESDLHSLLQLDAPIPNAPPARWQRKAKEAAGPAPSPMRAANRSHSAGRTPGRTPGKSSSKVQTTPSKPGGDRYIPHRSAAQMEVASFLLSKENQPENSQTPTKKEHQKAWALNLNGFDVEEAKILRLSGKPQNAPEGYQNRLKVLYSQKATPGSSRKTCRYIPSLPDRILDAPEIRNDYYLNLVDWSSGNVLAVALDNSVYLWSASSGDILQLLQMEQPGEYISSVAWIKEGNYLAVGTSSAEVQLWDVQQQKRLRNMTSHSARVGSLSWNSYILSSGSRSGHIHHHDVRVAEHHVATLSGHSQEVCGLRWAPDGRHLASGGNDNLVNVWPSAPGEGGWVPLQTFTQHQGAVKAVAWCPWQSNVLATGGGTSDRHIRIWNVCSGACLSAVDAHSQVCSILWSPHYKELISGHGFAQNQLVIWKYPTMAKVAELKGHTSRVLSLTMSPDGATVASAAADETLRLWRCFELDPARRREREKASAAKSSLIHQGIR

SEQ ID NO: 13685 - protein, 499 aa, Homo sapiens; identical to SEQ ID NO: 13684
  Payload ID: 2651
  Gene Symbol: CDC20
  Gene Name: cell division cycle 20
  Uniprot ID: Q12834
  ENSP ID: ENSP00000361540

SEQ ID NO: 13686 - protein, 515 aa, Homo sapiens
  Payload ID: 2652
  Gene Symbol: CDC20B
  Gene Name: cell division cycle 20B
  Uniprot ID: Q86Y33
  ENSP ID: ENSP00000296733
MEWKLERTAPRRVRTEEEMLWESIMRVLSKDLKQKRSQDSANVLDSVNATYSDFKSNFAKRLSAEVPVASSPITTRWQQSQTRALSSDSFGEEQSTTYLPEASGSVLKTPPEKETLTLGSRKEQLKTPSKGISETSNSALHFCKAPHAMDRDWKESVASKGQKCLKQLFVTQNVVQQANGKMQLCEQSECVWKGCKDGVRDESFHLKSSGDINDSILQPEVKIHITGLRNDYYLNILDWSFQNLVAIALGSAVYIWNGENHNGIENIDLSLTCNYISSVSWIKEGTCLAVGTSEGEVQLWDVVTKKRLRNMLGHLSVVGALSWNHFILSSGSRLGRVYHHDVRVAQHHVGTLRHKQAVCALKWSPDGRLLSSGCSDGLLTIWPHDPGASAQGQPLKVITQSTAVKAMDWCPWQSGVLAIGGGMKDGRLHILDINAGKSIQTPSTNSQICSLIWLPKTKEIATGQGTPKNDVTVWTCPTVSRSGHRGRVLHLSLSPDQTRVFSAAADGTASVWNCY

SEQ ID NO: 13687 - protein, 477 aa, Homo sapiens
  Payload ID: 2652
  Gene Symbol: CDC20B
  Gene Name: cell division cycle 20B
  Uniprot ID: Q86Y33
  ENSP ID: ENSP00000315720
MEWKLERTAPRRVRTEEEMLWESIMRVLSKDLKQKRSQDSANVLDSVNATYSDFKSNFAKRLSAEVPVASSPITTRWQQSQTRALSSDSFGEEQSTTYLPEASGSVLKTPPEKETLTLGSRKEQLKTPSKGISETSNSALHFCKAPHAMDRDWKESVASKGQKCLKQLFVTQNVVQQANGKMQLCEQSECVWKGCKDGVRDESFHLKSSGDINDSILQPEVKIHITGLRNDYYLNILDWSFQNLVAIALGSAVYIWNGENHNGIENIDLSLTCNYISSVSWIKEGTCLAVGTSEGEVQLWDVVTKKRLRNMLGHLSVVGALSWNHFILSSGSRLGRVYHHDVRVAQHHVGTLRHKQAVCALKWSPDGRLLSSGCSDGLLTIWPHDPGASAQGQPLKVITQSTAVKICSLIWLPKTKEIATGQGTPKNDVTVWTCPTVSRSGGFFGHRGRVLHLSLSPDQTRVFSAAADGTASVWNCY

SEQ ID NO: 13688 - protein, 519 aa, Homo sapiens
  Payload ID: 2652
  Gene Symbol: CDC20B
  Gene Name: cell division cycle 20B
  Uniprot ID: Q86Y33
  ENSP ID: ENSP00000370781
MEWKLERTAPRRVRTEEEMLWESIMRVLSKDLKQKRSQDSANVLDSVNATYSDFKSNFAKRLSAEVPVASSPITTRWQQSQTRALSSDSFGEEQSTTYLPEASGSVLKTPPEKETLTLGSRKEQLKTPSKGISETSNSALHFCKAPHAMDRDWKESVASKGQKCLKQLFVTQNVVQQANGKMQLCEQSECVWKGCKDGVRDESFHLKSSGDINDSILQPEVKIHITGLRNDYYLNILDWSFQNLVAIALGSAVYIWNGENHNGIENIDLSLTCNYISSVSWIKEGTCLAVGTSEGEVQLWDVVTKKRLRNMLGHLSVVGALSWNHFILSSGSRLGRVYHHDVRVAQHHVGTLRHKQAVCALKWSPDGRLLSSGCSDGLLTIWPHDPGASAQGQPLKVITQSTAVKAMDWCPWQSGVLAIGGGMKDGRLHILDINAGKSIQTPSTNSQICSLIWLPKTKEIATGQGTPKNDVTVWTCPTVSRSGGFFGHRGRVLHLSLSPDQTRVFSAAADGTASVWNCY

SEQ ID NO: 13689 - protein, 192 aa, Homo sapiens
  Payload ID: 2652
  Gene Symbol: CDC20B
  Gene Name: cell division cycle 20B
  Uniprot ID: Q86Y33
  ENSP ID: ENSP00000423919
MEWKLERTAPRRVRTEEEMLWVLDSVNATYSDFKSNFAKRLSAEVPVASSPITTRWQQSQTRALSSDSFGEEQSTTYLPEASGSVLKTPPEKETLTLGSRKEQLKTPSKGISETSNSALHFCKAPHAMDRDWKESVASKGQKCLKQLFVTQNVVQQANGKMQLCEQSECVWKDHFSGSMKKRFEQEDVGGKD

SEQ ID NO: 13690 - protein, 372 aa, Homo sapiens
  Payload ID: 2652
  Gene Symbol: CDC20B
  Gene Name: cell division cycle 20B
  Uniprot ID: Q86Y33
  ENSP ID: ENSP00000426776
MEWKLERTAPRRVRTEEEMLWESIMRVLSKDLKQKRSQDSANVLDSVNATYSDFKSNFAKRLSAEVPVASSPITTRWQQSQTRALSSDSFGEEQSTTYLPEASGSVLKTPPEKETLTLGSRKEQLKTPSKGISETSNSALHFCKAPHAMDRDWKESVASKGQKCLKQLFVTQNVVQQANGKMQLCEQSECVWKGCKDGVRDESFHLKSSGDINDSILQPEVKIHITGLRNDYYLNILDWSFQNLVAIALGSAVYIWNGENHNGIENIDLSLTCNYISSVSWIKEGTCLAVGTSEGEVQLWDVVTKKRLRNMLGHLSVVGALSWNHFILSRLEFSGVISAHCNLHLPSSWDYRRPPPCLVGQDWGVFIITMFG

SEQ ID NO: 13691 - protein, 151 aa, Homo sapiens
  Payload ID: 2653
  Gene Symbol: CDC23
  Gene Name: cell division cycle 23
  Uniprot ID: Q9UJX2
  ENSP ID: ENSP00000378348
MAASTSMVPVAVTAAVAPVLSINSDFSDLREIKKQLLLIAGLTRERGLLHSSKWSAELAFSLPALPLAELQPPPPITEEDAQDMDAYTLAKAYFDVKEYDRAAHFLHGCNSKKAYFLYMYSRYLVRAILKCHSAFSETSIFRTNGKVKSFK

SEQ ID NO: 13692 - protein, 597 aa, Homo sapiens
  Payload ID: 2653
  Gene Symbol: CDC23
  Gene Name: cell division cycle 23
  Uniprot ID: Q9UJX2
  ENSP ID: ENSP00000378350
MAASTSMVPVAVTAAVAPVLSINSDFSDLREIKKQLLLIAGLTRERGLLHSSKWSAELAFSLPALPLAELQPPPPITEEDAQDMDAYTLAKAYFDVKEYDRAAHFLHGCNSKKAYFLYMYSRYLSGEKKKDDETVDSLGPLEKGQVKNEALRELRVELSKKHQARELDGFGLYLYGVVLRKLDLVKEAIDVFVEATHVLPLHWGAWLELCNLITDKEMLKFLSLPDTWMKEFFLAHIYTELQLIEEALQKYQNLIDVGFSKSSYIVSQIAVAYHNIRDIDKALSIFNELRKQDPYRIENMDTFSNLLYVRSMKSELSYLAHNLCEIDKYRVETCCVIGNYYSLRSQHEKAALYFQRALKLNPRYLGAWTLMGHEYMEMKNTSAAIQAYRHAIEVNKRDYRAWYGLGQTYEILKMPFYCLYYYRRAHQLRPNDSRMLVALGECYEKLNQLVEAKKCYWRAYAVGDVEKMALVKLAKLHEQLTESEQAAQCYIKYIQDIYSCGEIVEHLEESTAFRYLAQYYFKCKLWDEASTCAQKCCAFNDTREEGKALLRQILQLRNQGETPTTEVPAPFFLPASLSANNTPTRRVSPLNLSSVTP

SEQ ID NO: 13693 - protein, 109 aa, Homo sapiens
  Payload ID: 2653
  Gene Symbol: CDC23
  Gene Name: cell division cycle 23
  ENSP ID: ENSP00000422505
MAASTSMVPVAVTAAVAPVLSINSDFSDLREIKKQLLLIAGLTRERGLLHSSKWKMPRIWMPIPWPRPTLTLKSMIGQHISCMAAIARKPIFCICIPDIWPPGKRTSEK

SEQ ID NO: 13694 - protein, 134 aa, Homo sapiens
  Payload ID: 2653
  Gene Symbol: CDC23
  Gene Name: cell division cycle 23
  ENSP ID: ENSP00000422902
  MOD_RES (1)..(1): Any amino acid
XSTSMVPVAVTAAVAPVLSINSDFSDLREIKKQLLLIAGLTRERGLLHSSKWSAELAFSLPALPLAELQPPPPITEMPRIWMPIPWPRPTLTLKSMIGQHISCMAAIARKPIFCICIPDICLEKKRRTMKQLIA

SEQ ID NO: 13695 - protein, 123 aa, Homo sapiens
  Payload ID: 2653
  Gene Symbol: CDC23
  Gene Name: cell division cycle 23
  ENSP ID: ENSP00000423704
MAASTSMVPVAVTAAVAPVLSINSDFSDLREIKKQLLLIAGLTRERGLLHSSKWSAELAFSLPALPLAELQPPPPITEMPRIWMPIPWPRPTLTLKSMIGQHISCMAAIARKPIFCICIPDIW

SEQ ID NO: 13696 - protein, 524 aa, Homo sapiens
  Payload ID: 2654
  Gene Symbol: CDC25A
  Gene Name: cell division cycle 25A
  Uniprot ID: P30304
  ENSP ID: ENSP00000303706
MELGPEPPHRRRLLFACSPPPASQPVVKALFGASAAGGLSPVTNLTVTMDQLQGLGSDYEQPLEVKNNSNLQRMGSSESTDSGFCLDSPGPLDSKENLENPMRRIHSLPQKLLGCSPALKRSHSDSLDHDIFQLIDPDENKENEAFEFKKPVRPVSRGCLHSHGLQEGKDLFTQRQNSAPARMLSSNERDSSEPGNFIPLFTPQSPVTATLSDEDDGFVDLLDGENLKNEEETPSCMASLWTAPLVMRTTNLDNRCKLFDSPSLCSSSTRSVLKRPERSQEESPPGSTKRRKSMSGASPKESTNPEKAHETLHQSLSLASSPKGTIENILDNDPRDLIGDFSKGYLFHTVAGKHQDLKYISPEIMASVLNGKFANLIKEFVIIDCRYPYEYEGGHIKGAVNLHMEEEVEDFLLKKPIVPTDGKRVIVVFHCEFSSERGPRMCRYVRERDRLGNEYPKLHYPELYVLKGGYKEFFMKCQSYCEPPSYRPMHHEDFKEDLKKFRTKSRTWAGEKSKREMYSRLKKL

SEQ ID NO: 13697 - protein, 484 aa, Homo sapiens
  Payload ID: 2654
  Gene Symbol: CDC25A
  Gene Name: cell division cycle 25A
  Uniprot ID: P30304
  ENSP ID: ENSP00000343166
MELGPEPPHRRRLLFACSPPPASQPVVKALFGASAAGGLSPVTNLTVTMDQLQGLGSDYEQPLEVKNNSNLQRMGSSESTDSGFCLDSPGPLDSKENLENPMRRIHSLPQKLLGCSPALKRSHSDSLDHDIFQLIDPDENKENLSSNERDSSEPGNFIPLFTPQSPVTATLSDEDDGFVDLLDGENLKNEEETPSCMASLWTAPLVMRTTNLDNRCKLFDSPSLCSSSTRSVLKRPERSQEESPPGSTKRRKSMSGASPKESTNPEKAHETLHQSLSLASSPKGTIENILDNDPRDLIGDFSKGYLFHTVAGKHQDLKYISPEIMASVLNGKFANLIKEFVIIDCRYPYEYEGGHIKGAVNLHMEEEVEDFLLKKPIVPTDGKRVIVVFHCEFSSERGPRMCRYVRERDRLGNEYPKLHYPELYVLKGGYKEFFMKCQSYCEPPSYRPMHHEDFKEDLKKFRTKSRTWAGEKSKREMYSRLKKL

SEQ ID NO: 13698 - protein, 143 aa, Homo sapiens
  Payload ID: 2654
  Gene Symbol: CDC25A
  Gene Name: cell division cycle 25A
  ENSP ID: ENSP00000404285
MELGPEPPHRRRLLFACSPPPASQPVVKALFGASAAGGLSPVTNLTVTMDQLQGLGSDYEQPLEVKNNSNLQRMGSSESTDSGFCLDSPGPLDSKENLENPMRRIHSLPQKLLGCSPALKRSHSDSLDHDIFQLIDPDENKEN

SEQ ID NO: 13699 - protein, 252 aa, Homo sapiens
  Payload ID: 2654
  Gene Symbol: CDC25A
  Gene Name: cell division cycle 25A
  ENSP ID: ENSP00000416483
MELGPEPPHRRRLLFACSPPPASQPVVKALFGASAAGGLSPVTNLTVTMDQLQGLGSDYEQPLEVKNNSNLQRMGSSESTDSGFCLDSPGPLDSKENLENPMRRIHSLPKLLGCSPALKRSHSDSLDHDIFQLIDPDENKENEAFEFKKPVRPVSRGCLHSHGLQEGKDLFTQRQNSAPARMLSSNERDSSEPGNFIPLFTPQSPVTATLSDEDDGFVDLLDGENLKNEEETPSCMASLWTAPLVMRTTNLV

SEQ ID NO: 13700 - protein, 580 aa, Homo sapiens
  Payload ID: 2655
  Gene Symbol: CDC25B
  Gene Name: cell division cycle 25B
  Uniprot ID: P30305
  ENSP ID: ENSP00000245960
MEVPQPEPAPGSALSPAGVCGGAQRPGHLPGLLLGSHGLLGSPVRAAASSPVTTLTQTMHDLAGLGSETPKSQVGTLLFRSRSRLTHLSLSRRASESSLSSESSESSDAGLCMDSPSPMDPHMAEQTFEQAIQAASRIIRNEQFAIRRFQSMPVRLLGHSPVLRNITNSQAPDGRRKSEAGSGAASSSGEDKENDGFVFKMPWKPTHPSSTHALAEWASRREAFAQRPSSAPDLMCLSPDRKMEVEELSPLALGRFSLTPAEGDTEEDDGFVDILESDLKDDDAVPPGMESLISAPLVKTLEKEEEKDLVMYSKCQRLFRSPSMPCSVIRPILKRLERPQDRDTPVQNKRRRSVTPPEEQQEAEEPKARVLRSKSLCHDEIENLLDSDHRELIGDYSKAFLLQTVDGKHQDLKYISPETMVALLTGKFSNIVDKFVIVDCRYPYEYEGGHIKTAVNLPLERDAESFLLKSPIAPCSLDKRVILIFHCEFSSERGPRMCRFIRERDRAVNDYPSLYYPEMYILKGGYKEFFPQHPNFCEPQDYRPMNHEAFKDELKTFRLKTRSWAGERSRRELCSRLQDQ

SEQ ID NO: 13701 - protein, 516 aa, Homo sapiens
  Payload ID: 2655
  Gene Symbol: CDC25B
  Gene Name: cell division cycle 25B
  ENSP ID: ENSP00000339125
MHSETPKSQVGTLLFRSRSRLTHLSLSRRASESSLSSESSESSDAGLCMDSPSPMDPHMAEQTFEQAIQAASRIIRNEQFAIRRFQSMPVRLLGHSPVLRNITNSQAPDGRRKSEAGSGAASSSGEDKENDGFVFKMPWKPTHPSSTHALAEWASRREAFAQRPSSAPDLMCLSPDRKMEVEELSPLALGRFSLTPAEGDTEEDDGFVDILESDLKDDDAVPPGMESLISAPLVKTLEKEEEKDLVMYSKCQRLFRSPSMPCSVIRPILKRLERPQDRDTPVQNKRRRSVTPPEEQQEAEEPKARVLRSKSLCHDEIENLLDSDHRELIGDYSKAFLLQTVDGKHQDLKYISPETMVALLTGKFSNIVDKFVIVDCRYPYEYEGGHIKTAVNLPLERDAESFLLKSPIAPCSLDKRVILIFHCEFSSERGPRMCRFIRERDRAVNDYPSLYYPEMYILKGGYKEFFPQHPNFCEPQDYRPMNHEAFKDELKTFRLKTRSWAGERSRRELCSRLQDQ

SEQ ID NO: 13702 - protein, 539 aa, Homo sapiens
  Payload ID: 2655
  Gene Symbol: CDC25B
  Gene Name: cell division cycle 25B
  Uniprot ID: P30305
  ENSP ID: ENSP00000339170
MEVPQPEPAPGSALSPAGVCGGAQRPGHLPGLLLGSHGLLGSPVRAAASSPVTTLTQTMHDLAGLGSETPKSQVGTLLFRSRSRLTHLSLSRRASESSLSSESSESSDAGLCMDSPSPMDPHMAEQTFEQAIQAASRIIRNEQFAIRRFQSMPDGFVFKMPWKPTHPSSTHALAEWASRREAFAQRPSSAPDLMCLSPDRKMEVEELSPLALGRFSLTPAEGDTEEDDGFVDILESDLKDDDAVPPGMESLISAPLVKTLEKEEEKDLVMYSKCQRLFRSPSMPCSVIRPILKRLERPQDRDTPVQNKRRRSVTPPEEQQEAEEPKARVLRSKSLCHDEIENLLDSDHRELIGDYSKAFLLQTVDGKHQDLKYISPETMVALLTGKFSNIVDKFVIVDCRYPYEYEGGHIKTAVNLPLERDAESFLLKSPIAPCSLDKRVILIFHCEFSSERGPRMCRFIRERDRAVNDYPSLYYPEMYILKGGYKEFFPQHPNFCEPQDYRPMNHEAFKDELKTFRLKTRSWAGERSRRELCSRLQDQ

SEQ ID NO: 13703 - protein, 489 aa, Homo sapiens
  Payload ID: 2655
  Gene Symbol: CDC25B
  Gene Name: cell division cycle 25B
  ENSP ID: ENSP00000368918
MHSETPKSQVGTLLFRSRSRLTHLSLSRRASESSLSSESSESSDAGLCMDSPSPMDPHMAEQTFEQAIQAASRIIRNEQFAIRRFQSMPVRLLGHSPVLRNITNSQAPDGRRKSEAGSGAASSSGEDKENDGFVFKMPWKPTHPSSTHALAEWASRREAFAQRPSSAPDLMCLSPDRKMEVEELSPLALGRFSLTPAEGDTEEDDGFVDILESDLKDLVMYSKCQRLFRSPSMPCSVIRPILKRLERPQDRDTPVQNKRRRSVTPPEEQQEAEEPKARVLRSKSLCHDEIENLLDSDHRELIGDYSKAFLLQTVDGKHQDLKYISPETMVALLTGKFSNIVDKFVIVDCRYPYEYEGGHIKTAVNLPLERDAESFLLKSPIAPCSLDKRVILIFHCEFSSERGPRMCRFIRERDRAVNDYPSLYYPEMYILKGGYKEFFPQHPNFCEPQDYRPMNHEAFKDELKTFRLKTRSWAGERSRRELCSRLQDQ

SEQ ID NO: 13704 - protein, 566 aa, Homo sapiens
  Payload ID: 2655
  Gene Symbol: CDC25B
  Gene Name: cell division cycle 25B
  Uniprot ID: P30305
  ENSP ID: ENSP00000405972
MEVPQPEPAPGSALSPAGVCGGAQRPGHLPGLLLGSHGLLGSPVRAAASSPVTTLTQTMHDLAGLGSRSRLTHLSLSRRASESSLSSESSESSDAGLCMDSPSPMDPHMAEQTFEQAIQAASRIIRNEQFAIRRFQSMPVRLLGHSPVLRNITNSQAPDGRRKSEAGSGAASSSGEDKENDGFVFKMPWKPTHPSSTHALAEWASRREAFAQRPSSAPDLMCLSPDRKMEVEELSPLALGRFSLTPAEGDTEEDDGFVDILESDLKDDDAVPPGMESLISAPLVKTLEKEEEKDLVMYSKCQRLFRSPSMPCSVIRPILKRLERPQDRDTPVQNKRRRSVTPPEEQQEAEEPKARVLRSKSLCHDEIENLLDSDHRELIGDYSKAFLLQTVDGKHQDLKYISPETMVALLTGKFSNIVDKFVIVDCRYPYEYEGGHIKTAVNLPLERDAESFLLKSPIAPCSLDKRVILIFHCEFSSERGPRMCRFIRERDRAVNDYPSLYYPEMYILKGGYKEFFPQHPNFCEPQDYRPMNHEAFKDELKTFRLKTRSWAGERSRRELCSRLQDQ

SEQ ID NO: 13705 - protein, 473 aa, Homo sapiens
  Payload ID: 2656
  Gene Symbol: CDC25C
  Gene Name: cell division cycle 25C
  Uniprot ID: P30307
  ENSP ID: ENSP00000321656
MSTELFSSTREEGSSGSGPSFRSNQRKMLNLLLERDTSFTVCPDVPRTPVGKFLGDSANLSILSGGTPKRCLDLSNLSSGEITATQLTTSADLDETGHLDSSGLQEVHLAGMNHDQHLMKCSPAQLLCSTPNGLDRGHRKRDAMCSSSANKENDNGNLVDSEMKYLGSPITTVPKLDKNPNLGEDQAEEISDELMEFSLKDQEAKVSRSGLYRSPSMPENLNRPRLKQVEKFKDNTIPDKVKKKYFSGQGKLRKGLCLKKTVSLCDITITQMLEEDSNQGHLIGDFSKVCALPTVSGKHQDLKYVNPETVAALLSGKFQGLIEKFYVIDCRYPYEYLGGHIQGALNLYSQEELFNFFLKKPIVPLDTQKRIIIVFHCEFSSERGPRMCRCLREEDRSLNQYPALYYPELYILKGGYRDFFPEYMELCEPQSYCPMHHQDHKTELLRCRSQSKVQEGERQLREQIALLVKDMSP

SEQ ID NO: 13706 - protein, 400 aa, Homo sapiens
  Payload ID: 2656
  Gene Symbol: CDC25C
  Gene Name: cell division cycle 25C
  Uniprot ID: P30307
  ENSP ID: ENSP00000345205
MSTELFSSTREEGSSGSGPSFRSNQRKMLNLLLERDTSFTVCPDVPRTPVGKFLGDSANLSILSGSPGFFRTSGSAFSWDDNGNLVDSEMKYLGSPITTVPKLDKNPNLGEDQAEEISDELMEFSLKDQEAKVSRSGLYRSPSMPENLNRPRLKQVEKFKDNTIPDKVKKKYFSGQGKLRKGLCLKKTVSLCDITITQMLEEDSNQGHLIGDFSKVCALPTVSGKHQDLKYVNPETVAALLSGKFQGLIEKFYVIDCRYPYEYLGGHIQGALNLYSQEELFNFFLKKPIVPLDTQKRIIIVFHCEFSSERGPRMCRCLREEDRSLNQYPALYYPELYILKGGYRDFFPEYMELCEPQSYCPMHHQDHKTELLRCRSQSKVQEGERQLREQIALLVKDMSP

SEQ ID NO: 13707 - protein, 400 aa, Homo sapiens; identical to SEQ ID NO: 13706
  Payload ID: 2656
  Gene Symbol: CDC25C
  Gene Name: cell division cycle 25C
  Uniprot ID: P30307
  ENSP ID: ENSP00000392631

SEQ ID NO: 13708 - protein, 258 aa, Homo sapiens
  Payload ID: 2656
  Gene Symbol: CDC25C
  Gene Name: cell division cycle 25C
  ENSP ID: ENSP00000423525
  MOD_RES (1)..(1): Any amino acid
XSRSGLYRSPSMPENLNRPRLKQVEKFKDNTIPDKVKKKYFSGQGKLRKGLCLKKTVSLCDITITQMLEEDSNQGHLIGDFSKVCALPTVSGKHQDLKYVNPETVSRFLEMVAALLSGKFQGLIEKFYVIDCRYPYEYLGGHIQGALNLYSQEELFNFFLKKPIVPLDTQKRIIIVFHCEFSSERGPRMCRCLREEDRSLNQYPALYYPELYILKGGYRDFFPEYMELCEPQSYCPMHHQDHKTELLRCRSQSKVQEG

SEQ ID NO: 13709 - protein, 473 aa, Homo sapiens; identical to SEQ ID NO: 13705
  Payload ID: 2656
  Gene Symbol: CDC25C
  Gene Name: cell division cycle 25C
  Uniprot ID: P30307
  ENSP ID: ENSP00000424795

SEQ ID NO: 13710 - protein, 443 aa, Homo sapiens
  Payload ID: 2656
  Gene Symbol: CDC25C
  Gene Name: cell division cycle 25C
  Uniprot ID: P30307
  ENSP ID: ENSP00000425470
MSTELFSSTREEGSSGSGPSFRSNQRKMLNLLLERDTSFTVCPDVPRTPVGKFLGDSANLSILSGGTPKRCLDLSNLSSGEITATQLTTSADLDETGHLDSSGLQEVHLAGMNHDQHLMKCSPDNGNLVDSEMKYLGSPITTVPKLDKNPNLGEDQAEEISDELMEFSLKDQEAKVSRSGLYRSPSMPENLNRPRLKQVEKFKDNTIPDKVKKKYFSGQGKLRKGLCLKKTVSLCDITITQMLEEDSNQGHLIGDFSKVCALPTVSGKHQDLKYVNPETVAALLSGKFQGLIEKFYVIDCRYPYEYLGGHIQGALNLYSQEELFNFFLKKPIVPLDTQKRIIIVFHCEFSSERGPRMCRCLREEDRSLNQYPALYYPELYILKGGYRDFFPEYMELCEPQSYCPMHHQDHKTELLRCRSQSKVQEGERQLREQIALLVKDMSP

SEQ ID NO: 13711 - protein, 170 aa, Homo sapiens
  Payload ID: 2656
  Gene Symbol: CDC25C
  Gene Name: cell division cycle 25C
  ENSP ID: ENSP00000427105
MSEEARFCFSPGENSKTMSTELFSSTREEGSSGSGPSFRSNQRKMLNLLLERDTSFTVCPDVPRTPVGKFLGDSANLSILSGGTPKRCLDLSNLSSGEITATQLTTSADLDETGHLDSSGLQEVHLAGMNHDQHLMKCSPAQLLCSTPNGLDRGHRKRDAMCSSSANKEN

SEQ ID NO: 13712 - protein, 249 aa, Homo sapiens
  Payload ID: 2656
  Gene Symbol: CDC25C
  Gene Name: cell division cycle 25C
  ENSP ID: ENSP00000427251
MSTELFSSTREEGSSGSGPSFRSNQRKMLNLLLERDTSFTVCPDVPRTPVGKFLGDSANLSILSGGTPKRCLDLSNLSSGEITATQLTTSADLDETGHLDSSGLQEVHLAGMNHDQHLMKCSPAQLLCSTPNGLDRGHRKRDAMCSSSANKENDNGNLVDSEMKYLGSPITTVPKLDKNPNLGEDQAEEISDELMEFSLKDQEAKVSRSGLYRSPSMPENLNRPRLKQVEKFKDNTIPDKVKKKYFSGQ

SEQ ID NO: 13713 - protein, 85 aa, Homo sapiens
  Payload ID: 2657
  Gene Symbol: CDC26
  Gene Name: cell division cycle 26
  Uniprot ID: Q8NHZ8
  ENSP ID: ENSP00000363322
MLRRKPTRLELKLDDIEEFENIRKDLETRKKQKEDVEVVGGSDGEGAIGLSSDPKSREQMINDRIGYKPQPKPNNRSSQFGSLEF

SEQ ID NO: 13714 - protein, 824 aa, Homo sapiens
  Payload ID: 2658
  Gene Symbol: CDC27
  Gene Name: cell division cycle 27
  Uniprot ID: P30260
  ENSP ID: ENSP00000066544
MTVLQEPVQAAIWQALNHYAYRDAVFLAERLYAEVHSEEALFLLATCYYRSGKAYKAYRLLKGHSCTTPQCKYLLAKCCVDLSKLAEGEQILSGGVFNKQKSHDDIVTEFGDSACFTLSLLGHVYCKTDRLAKGSECYQKSLSLNPFLWSPFESLCEIGEKPDPDQTFKFTSLQNFSNCLPNSCTTQVPNHSLSHRQPETVLTETPQDTIELNRLNLESSNSKYSLNTDSSVSYIDSAVISPDTVPLGTGTSILSKQVQNKPKTGRSLLGGPAALSPLTPSFGILPLETPSPGDGSYLQNYTNTPPVIDVPSTGAPSKKSVARIGQTGTKSVFSQSGNSREVTPILAQTQSSGPQTSTTPQVLSPTITSPPNALPRRSSRLFTSDSSTTKENSKKLKMKFPPKIPNRKTKSKTNKGGITQPNINDSLEITKLDSSIISEGKISTITPQIQAFNLQKAAAEGLMSLLREMGKGYLALCSYNCKEAINILSHLPSHHYNTGWVLCQIGRAYFELSEYMQAERIFSEVRRIENYRVEGMEIYSTTLWHLQKDVALSVLSKDLTDMDKNSPEAWCAAGNCFSLQREHDIAIKFFQRAIQVDPNYAYAYTLLGHEFVLTEELDKALACFRNAIRVNPRHYNAWYGLGMIYYKQEKFSLAEMHFQKALDINPQSSVLLCHIGVVQHALKKSEKALDTLNKAIVIDPKNPLCKFHRASVLFANEKYKSALQELEELKQIVPKESLVYFLIGKVYKKLGQTHLALMNFSWAMDLDPKGANNQIKEAIDKRYLPDDEEPITQEEQIMGTDESQESSMTDADDTQLHAAESDEF

SEQ ID NO: 13715 - protein, 343 aa, Homo sapiens
  Payload ID: 2658
  Gene Symbol: CDC27
  Gene Name: cell division cycle 27
  ENSP ID: ENSP00000432105
MTVLQEPVQAAIWQALNHYAYRDAVFLAERLYAEVHSEEALFLLATCYYRSGKAYKAYRLLKGHSCTTPQCKYLLAKCCVDLSKLAEGEQILSGGVFNKQKSHDDIVTEFGDSACFTLSLLGHVYCKTDRLAKGSECYQKSLSLNPFLWSPFESLCEIGEKPDPDQTFKFTSLQNFSNCLPNSCTTQVPNHSLSHRQPETVLTETPQDTIELNRLNLESSNSKYSLNTDSSVSYIDSAVISPDTVPLGTGTSILSKQVQNKPKTGRSLLGGPAALSPLTPSFGILPLETPSPGDGSYLQNYTNTPPVIDVPSTGAPSKKVWFRNDLLQARKIQPCRNAFPKSA

SEQ ID NO: 13716 - protein, 94 aa, Homo sapiens
  Payload ID: 2658
  Gene Symbol: CDC27
  Gene Name: cell division cycle 27
  ENSP ID: ENSP00000432211
MTVLQEPVQAAIWQALNHYAYRDAVFLAERLYAEGLQKGNKSYLVECLISRKAMMILLLSLVIQLALLFHCWDMYIARQIGLPKDQNVTKRALV

SEQ ID NO: 13717 - protein, 830 aa, Homo sapiens
  Payload ID: 2658
  Gene Symbol: CDC27
  Gene Name: cell division cycle 27
  Uniprot ID: P30260
  ENSP ID: ENSP00000434614
MTVLQEPVQAAIWQALNHYAYRDAVFLAERLYAEVHSEEALFLLATCYYRSGKAYKAYRLLKGHSCTTPQCKYLLAKCCVDLSKLAEGEQILSGGVFNKQKSHDDIVTEFGDSACFTLSLLGHVYCKTDRLAKGSECYQKSLSLNPFLWSPFESLCEIGEKPDPDQTFKFTSLQNFSNCLPNSCTTQVPNHSLSHRQPETVLTETPQDTIELNRLNLESSNSKYSLNTDSSVSYIDSAVISPDTVPLGTGTSILSKQVQNKPKTGRSLLGGPAALSPLTPSFGILPLETPSPGDGSYLQNYTNTPPVIDVPSTGAPSKKTFRVLQSVARIGQTGTKSVFSQSGNSREVTPILAQTQSSGPQTSTTPQVLSPTITSPPNALPRRSSRLFTSDSSTTKENSKKLKMKFPPKIPNRKTKSKTNKGGITQPNINDSLEITKLDSSIISEGKISTITPQIQAFNLQKAAAEGLMSLLREMGKGYLALCSYNCKEAINILSHLPSHHYNTGWVLCQIGRAYFELSEYMQAERIFSEVRRIENYRVEGMEIYSTTLWHLQKDVALSVLSKDLTDMDKNSPEAWCAAGNCFSLQREHDIAIKFFQRAIQVDPNYAYAYTLLGHEFVLTEELDKALACFRNAIRVNPRHYNAWYGLGMIYYKQEKFSLAEMHFQKALDINPQSSVLLCHIGVVQHALKKSEKALDTLNKAIVIDPKNPLCKFHRASVLFANEKYKSALQELEELKQIVPKESLVYFLIGKVYKKLGQTHLALMNFSWAMDLDPKGANNQIKEAIDKRYLPDDEEPITQEEQIMGTDESQESSMTDADDTQLHAAESDEF

SEQ ID NO: 13718 - protein, 823 aa, Homo sapiens
  Payload ID: 2658
  Gene Symbol: CDC27
  Gene Name: cell division cycle 27
  ENSP ID: ENSP00000437339
MTVLQEPVQAAIWQALNHYAYRDAVFLAERLYAEVHSEEALFLLATCYYRSGKAYKAYRLLKGHSCTTPQCKYLLAKCCVDLSKLAEGEQILSGGVFNKQKSHDDIVTEFGDSACFTLSLLGHVYCKTDRLAKGSECYQKSLSLNPFLWSPFESLCEIGEKPDPDQTFKFTSLQNFSNCLPNSCTTQVPNHSLSHRQPETVLTETPQDTIELNRLNLESSNSKYSLNTDSSVSYIDSAVISPDTVPLGTGTSILSKQVQNKPKTGRSLLGGPAALSPLTPSFGILPLETPSPGDGSYLQNYTNTPPVIDVPSTGAPSKKSVARIGQTGTKSVFSQSGNSREVTPILAQTQSSGPQTSTTPQVLSPTITSPPNALPRRSSRLFTSDSSTTKENSKKLKMKFPPKIPNRKTKSKTNKGGITQPNINDSLEITKLDSSIISEGKISTITPQIQAFNLQKAAAGLMSLLREMGKGYLALCSYNCKEAINILSHLPSHHYNTGWVLCQIGRAYFELSEYMQAERIFSEVRRIENYRVEGMEIYSTTLWHLQKDVALSVLSKDLTDMDKNSPEAWCAAGNCFSLQREHDIAIKFFQRAIQVDPNYAYAYTLLGHEFVLTEELDKALACFRNAIRVNPRHYNAWYGLGMIYYKQEKFSLAEMHFQKALDINPQSSVLLCHIGVVQHALKKSEKALDTLNKAIVIDPKNPLCKFHRASVLFANEKYKSALQELEELKQIVPKESLVYFLIGKVYKKLGQTHLALMNFSWAMDLDPKGANNQIKEAIDKRYLPDDEEPITQEEQIMGTDESQESSMTDADDTQLHAAESDEF

SEQ ID NO: 13719 - protein, 59 aa, Homo sapiens
  Payload ID: 2658
  Gene Symbol: CDC27
  Gene Name: cell division cycle 27
  ENSP ID: ENSP00000458904
  MOD_RES (1)..(1): Any amino acid
XVTEFGDSACFTLSLLGHVYCKTDRLAKGSECYQKSLSLNPFLWSPFESLCEIVLGFCH

SEQ ID NO: 13720 - protein, 103 aa, Homo sapiens
  Payload ID: 2658
  Gene Symbol: CDC27
  Gene Name: cell division cycle 27
  ENSP ID: ENSP00000459307
  MOD_RES (1)..(1): Any amino acid
XETVLTETPQDTIELNRLNLESSNSKYSLNTDSSVSYIDSAVISPDTVPLGTGTSILSKQVQNKPKTGRSLLGGPAALSPLTPRPSNLSILLLYICLDDFLTP

SEQ ID NO: 13721 - protein, 86 aa, Homo sapiens
  Payload ID: 2658
  Gene Symbol: CDC27
  Gene Name: cell division cycle 27
  ENSP ID: ENSP00000460061
LFLLATCYYRSGKAYKAYRLLKGHSCTTPQCKYLLAKCCVDLSKLAEGEQILSGGVFNKQKSHDDIVTEFGDSACFTLSLLGHVYW

SEQ ID NO: 13722 - protein, 113 aa, Homo sapiens
  Payload ID: 2658
  Gene Symbol: CDC27
  Gene Name: cell division cycle 27
  ENSP ID: ENSP00000460132
  MOD_RES (1)..(1): Any amino acid
XKSKTNKGGITQPNINDSLEITKLDSSIISEGKISTITPQIQAFNLQKAAAGLMSLLREMGKGYLALCSYNCKEAINILSHLPSHHYNTGWVLCQIGRAYFELSEYMQTFSGS

SEQ ID NO: 13723 - protein, 163 aa, Homo sapiens
  Payload ID: 2658
  Gene Symbol: CDC27
  Gene Name: cell division cycle 27
  ENSP ID: ENSP00000460279
  MOD_RES (1)..(1): Any amino acid
XGHEFVLTEELDKALACFRNAIRVNPRHYNAWYGLGMIYYKQEKFSLAEMHFQKALDINPQSSVLLCHIGVVQHALKKSEKALDTLNKAIVIDPKNPLCKFHRASVLFANEKYKSALQELEELKQIVPKESLVYFLIGKILKEPITRLKRQLISVIFQMMRSQ

SEQ ID NO: 13724 - protein, 75 aa, Homo sapiens
  Payload ID: 2658
  Gene Symbol: CDC27
  Gene Name: cell division cycle 27
  ENSP ID: ENSP00000460424
  MOD_RES (1)..(1): Any amino acid
XYRDAVFLAERLYAEGLQKGNKSYLVECLISRKAMMILLLSLVIQLALLFHCWDMYIARQIGLPKDQNVTKRALV

SEQ ID NO: 13725 - protein, 233 aa, Homo sapiens
  Payload ID: 2658
  Gene Symbol: CDC27
  Gene Name: cell division cycle 27
  ENSP ID: ENSP00000460454
MTVLQEPVQAAIWQALNHYAYRDAVFLAERLYAEVHSEEALFLLATCYYRSGKAYKAYRLLKGHSCTTPQCKYLLAKCCVDLSKLAEGEQILSGGVFNKQKSHDDIVTEFGDSACFTLSLLGHVYCKTDRLAKGSECYQKSLSLNPFLWSPFESLCEIGEKPDPDQTFKFTSLQNFSNCLPNSCTTQVPNHSLSHRQPETVLTETPQDTIVQNKPKTGRSLLGGPAALSPLTP

SEQ ID NO: 13726 - protein, 33 aa, Homo sapiens
  Payload ID: 2658
  Gene Symbol: CDC27
  Gene Name: cell division cycle 27
  ENSP ID: ENSP00000460830
  MOD_RES (1)..(1): Any amino acid
XIGKCCCLFLGLQEVRSNAPRPDEFLLGYGFRS

SEQ ID NO: 13727 - protein, 52 aa, Homo sapiens
  Payload ID: 2658
  Gene Symbol: CDC27
  Gene Name: cell division cycle 27
  ENSP ID: ENSP00000466424
MTVLQEPVQAAIWQALNHYAYRDAVFLAERLYAEARQIGLPKDQNVTKRALV

SEQ ID NO: 13728 - protein, 236 aa, Homo sapiens
  Payload ID: 2659
  Gene Symbol: CDC34
  Gene Name: cell division cycle 34
  Uniprot ID: P49427
  ENSP ID: ENSP00000215574
MARPLVPSSQKALLLELKGLQEEPVEGFRVTLVDEGDLYNWEVAIFGPPNTYYEGGYFKARLKFPIDYPYSPPAFRFLTKMWHPNIYETGDVCISILHPPVDDPQSGELPSERWNPTQNVRTILLSVISLLNEPNTFSPANVDASVMYRKWKESKGKDREYTDIIRKQVLGTKVDAERDGVKVPTTLAEYCVKTKAPAPDEGSDLFYDDYYEDGEVEEEADSCFGDDEDDSGTEES

SEQ ID NO: 13729 - protein, 146 aa, Homo sapiens
  Payload ID: 2659
  Gene Symbol: CDC34
  Gene Name: cell division cycle 34
  ENSP ID: ENSP00000475282
  MOD_RES (1)..(1): Any amino acid
XEGDLYNWEVAIFGPPNTYYEGGYFKARLKFPIDYPYSPPAFRFLTKMWHPNIYETGDVCISILHPPVDDPQSGELPSERWNPTQNVRTILLSVISLLNEPNTFSPANVDASVMYRKWKESKGKDREYTDIIRRSWGPRWTRSVTA

SEQ ID NO: 13730 - protein, 119 aa, Homo sapiens
  Payload ID: 2659
  Gene Symbol: CDC34
  Gene Name: cell division cycle 34
  ENSP ID: ENSP00000475610
ARLKFPIDYPYSPPAFRFLTKMWHPNIYETGDVCISILHPPVDDPQSGELPSERWNPTQNVRTILLSVISLLNEPNTFSPANVDASVMYRKWKESKGKDREYTDIIRSWGPRWTRSVTA

SEQ ID NO: 13731 - protein, 107 aa, Homo sapiens
  Payload ID: 2659
  Gene Symbol: CDC34
  Gene Name: cell division cycle 34
  ENSP ID: ENSP00000476107
YFKARLKFPIDYPYSPPAFRFLTKMWHPNIYETGDVCISILHPPVDAERDGVKVPTTLAEYCVKTKAPAPDEGSDLFYDDYYEDGEVEEEADSCFGDDEDDSGTEES

SEQ ID NO: 13732 - protein, 378 aa, Homo sapiens
  Payload ID: 2660
  Gene Symbol: CDC37
  Gene Name: cell division cycle 37
  Uniprot ID: Q16543
  ENSP ID: ENSP00000222005
MVDYSVWDHIEVSDDEDETHPNIDTASLFRWRHQARVERMEQFQKEKEELDRGCRECKRKVAECQRKLKELEVAEGGKAELERLQAEAQQLRKEERSWEQKLEEMRKKEKSMPWNVDTLSKDGFSKSMVNTKPEKTEEDSEEVREQKHKTFVEKYEKQIKHFGMLRRWDDSQKYLSDNVHLVCEETANYLVIWCIDLEVEEKCALMEQVAHQTIVMQFILELAKSLKVDPRACFRQFFTKIKTADRQYMEGFNDELEAFKERVRGRAKLRIEKAMKEYEEEERKKRLGPGGLDPVEVYESLPEELQKCFDVKDVQMLQDAISKMDPTDAKYHMQRCIDSGLWVPNSKASEAKEGEEAGPGDPLLEAVPKTGDEKDVSV

SEQ ID NO: 13733 - protein, 104 aa, Homo sapiens
  Payload ID: 2660
  Gene Symbol: CDC37
  Gene Name: cell division cycle 37
  ENSP ID: ENSP00000464889
  MOD_RES (1)..(1): Any amino acid
XNDELEAFKERVRGRAKLRIEKAMKEYEEEERKKRLGPGGLDPVEVYESLPEELQKCFDVKDVQMLQDAISKMDPTVSNPRAPCLPGGPCVSPSPVSQVSEAGW

SEQ ID NO: 13734 - protein, 60 aa, Homo sapiens
  Payload ID: 2660
  Gene Symbol: CDC37
  Gene Name: cell division cycle 37
  ENSP ID: ENSP00000464971
MVDYSVWDHIEVSDDEDETHPNIDTASLFRWRHQTGPCFVTLRWQWRHLSSLQLPPSGLK

SEQ ID NO: 13735 - protein, 353 aa, Homo sapiens
  Payload ID: 2660
  Gene Symbol: CDC37
  Gene Name: cell division cycle 37
  ENSP ID: ENSP00000465724
MVDYSVWDHIEVSDDEDETHPNIDTASLFRWRHQARVERMEQFQKEKEELDRGCRECKRKVAECQRKLKELEVAEGGKAELERLQAEAQQLRKEERSWEQKLEEMRKKEKSMPWNVDTLSKDGFSKAHAHAPATLMLMASSPPPPWMGWALRPRPARPRSRRSAALPQPTPPLTLPQSMVNTKPEKTEEDSEEVREQKHKTFVEKYEKQIKHFGMLRRWDDSQKYLSDNVHLVCEETANYLVIWCIDLEVEEKCALMEQVAHQTIVMQFILELAKSLKVDPRACFRQFFTKIKTADRQYMEGFNDELEAFKERVRGRAKLRIEKAMKEYEEEERKKRLGPGGLDPVEVYESLP

SEQ ID NO: 13736 - protein, 184 aa, Homo sapiens
  Payload ID: 2660
  Gene Symbol: CDC37
  Gene Name: cell division cycle 37
  ENSP ID: ENSP00000465941
  MOD_RES (1)..(1): Any amino acid
XYLVIWCIDLEVEEKCALMEQVAHQTIVMQFILELAKSLKVDPRACFRQFFTKIKTADRQYMEGFNDELEAFKERVRGRAKLRIEKAMKEYEEEERKKRLGPGGLDPVEELQKCFDVKDVQMLQDAISKMDPTDAKYHMQRCIDSGLWVPNSKASEAKEGEEAGPGDPLLEAVPKTGDEKDVSV

SEQ ID NO: 13737 - protein, 230 aa, Homo sapiens
  Payload ID: 2660
  Gene Symbol: CDC37
  Gene Name: cell division cycle 37
  ENSP ID: ENSP00000467747
MVDYSVWDHIEVSDDEDETHPNIDTASLFRWRHQARVERMEQFQKEKEELDRGCRECKRKVAECQRKLKELEVAEGGKAELERLQAEAQQLRKEERSWEQKLEEMRKKEKSMPWNVDTLSKDGFSKSMVNTKPEKTEEDSEEFFTKIKTADRQYMEGFNDELEAFKERVRGRAKLRIEKAMKEYEEEERKKRLGPGGLDPVEVYESLPEELQKCFDVKDVQMLQDAISKM

SEQ ID NO: 13738 - protein, 337 aa, Homo sapiens
  Payload ID: 2661
  Gene Symbol: CDC37L1
  Gene Name: cell division cycle 37-like 1
  Uniprot ID: Q7L3B6
  ENSP ID: ENSP00000371278
MEQPWPPPGPWSLPRAEGEAEEESDFDVFPSSPRCPQLPGGGAQMYSHGIELACQKQKEFVKSSVACKWNLAEAQQKLGSLALHNSESLDQEHAKAQTAVSELRQREEEWRQKEEALVQREKMCLWSTDAISKDVFNKSFINQDKRKDTEDEDKSESFMQKYEQKIRHFGMLSRWDDSQRFLSDHPYLVCEETAKYLILWCFHLEAEKKGALMEQIAHQAVVMQFIMEMAKNCNVDPRGCFRLFFQKAKAEEEGYFEAFKNELEAFKSRVRLYSQSQSFQPMTVQNHVPHSGVGSIGLLESLPQNPDYLQYSISTALCSLNSVVHKEDDEPKMMDTV

SEQ ID NO: 13739 - protein, 308 aa, Homo sapiens
  Payload ID: 2661
  Gene Symbol: CDC37L1
  Gene Name: cell division cycle 37-like 1
  ENSP ID: ENSP00000371282
MEQPWPPPGPWSLPRAEGEAEEESDFDVFPSSPRCPQLPGGGAQMYSHGIELACQKQKEFVKSSVACKWNLAEAQQKLGSLALHNSESLDQEHAKAQTAVSELRQREEEWRQKEEALVQREKMCLWSTDAISKDVFNKSFINQDKRKDTEDEDKSESFMQKYEQKIRHFGMLSRWDDSQRFLSDHPYLVCEETAKYLILWCFHLEAEKKGALMEQIAHQAVVMQFIMEMAKNCNVDPRGCFRLFFQKAKAEEEGYFEAFKNELEAFKSRVRLYSQSQSFQPMTVQNHVPHSGVGSIGLLESLPQAPRF

SEQ ID NO: 13740 - protein, 579 aa, Homo sapiens
  Payload ID: 2662
  Gene Symbol: CDC40
  Gene Name: cell division cycle 40
  Uniprot ID: O60508
  ENSP ID: ENSP00000304370
MSAAIAALAASYGSGSGSESDSDSESSRCPLPAADSLMHLTKSPSSKPSLAVAVDSAPEVAVKEDLETGVHLDPAVKEVQYNPTYETMFAPEFGPENPFRTQQMAAPRNMLSGYAEPAHINDFMFEQQRRTFATYGYALDPSLDNHQVSAKYIGSVEEAEKNQGLTVFETGQKKTEKRKKFKENDASNIDGFLGPWAKYVDEKDVAKPSEEEQKELDEITAKRQKKGKQEEEKPGEEKTILHVKEMYDYQGRSYLHIPQDVGVNLRSTMPPEKCYLPKKQIHVWSGHTKGVSAVRLFPLSGHLLLSCSMDCKIKLWEVYGERRCLRTFIGHSKAVRDICFNTAGTQFLSAAYDRYLKLWDTETGQCISRFTNRKVPYCVKFNPDEDKQNLFVAGMSDKKIVQWDIRSGEIVQEYDRHLGAVNTIVFVDENRRFVSTSDDKSLRVWEWDIPVDFKYIAEPSMHSMPAVTLSPNGKWLACQSMDNQILIFGAQNRFRLNKKKIFKGHMVAGYACQVDFSPDMSYVISGDGNGKLNIWDWKTTKLYSRFKAHDKVCIGAVWHPHETSKVITCGWDGLIKLWD

SEQ ID NO: 13741 - protein, 539 aa, Homo sapiens
  Payload ID: 2662
  Gene Symbol: CDC40
  Gene Name: cell division cycle 40
  ENSP ID: ENSP00000357926
MSAAIAALAASYGSGSGSESDSDSESSRCPLPAADSLMHLTKSPSSKPSLAVAVDSAPEVAVKEDLETGVHLDPAVKEVQYNPTYETMFAPEFGPENPFRTQQMAAPRNMLSGYAEPAHINDFMFEQQRRTFATYGYALDPSLDNHQVSAKYIGSVEEAEKNQGLTVFETGQKKTEKRKKFKENDASNIDGFLGPWAKYVDEKDVAKPSEEEQKELDEITAKRQKKGKQEEEKPGEEKTILHVKEMYDYQGRSYLHIPQDVGVNLRSTMPPEKCYLPKKQIHVWSGHTKGVSAVRLFPLSGHLLLSCSMDCKIKLWEVYGERRCLRTFIGHSKAVRDICFNTAGTQFLSAAYDRYLKLWDTETGQCISRFTNRKVPYCVKFNPDEDKQNLFVAGMSDKKIVQWDIRSGEIVQEYDRHLGAVNTIVFVDENRRFVSTSDDKSLRVWEWDIPVDFKYIAEPSMHSMPAVTLSPNGKWLACQSMDNQILIFGAQNRFRLNKKKIFKGHMVAGYACQVDFSPDMRVPQSFQNLKEVTAGPQEG

SEQ ID NO: 13742 - protein, 579 aa, Homo sapiens; identical to SEQ ID NO: 13740
  Payload ID: 2662
  Gene Symbol: CDC40
  Gene Name: cell division cycle 40
  Uniprot ID: O60508
  ENSP ID: ENSP00000357928

SEQ ID NO: 13743 - protein, 191 aa, Homo sapiens
  Payload ID: 2663
  Gene Symbol: CDC42
  Gene Name: cell division cycle 42
  Uniprot ID: P60953
  ENSP ID: ENSP00000314458
MQTIKCVVVGDGAVGKTCLLISYTTNKFPSEYVPTVFDNYAVTVMIGGEPYTLGLFDTAGQEDYDRLRPLSYPQTDVFLVCFSVVSPSSFENVKEKWVPEITHHCPKTPFLLVGTQIDLRDDPSTIEKLAKNKQKPITPETAEKLARDLKAVKYVECSALTQRGLKNVFDEAILAALEPPETQPKRKCCIF

SEQ ID NO: 13744 - protein, 191 aa, Homo sapiens
  Payload ID: 2663
  Gene Symbol: CDC42
  Gene Name: cell division cycle 42
  Uniprot ID: P60953
  ENSP ID: ENSP00000341072
MQTIKCVVVGDGAVGKTCLLISYTTNKFPSEYVPTVFDNYAVTVMIGGEPYTLGLFDTAGQEDYDRLRPLSYPQTDVFLVCFSVVSPSSFENVKEKWVPEITHHCPKTPFLLVGTQIDLRDDPSTIEKLAKNKQKPITPETAEKLARDLKAVKYVECSALTQKGLKNVFDEAILAALEPPEPKKSRRCVLL

SEQ ID NO: 13745 - protein, 191 aa, Homo sapiens; identical to SEQ ID NO: 13744
  Payload ID: 2663
  Gene Symbol: CDC42
  Gene Name: cell division cycle 42
  Uniprot ID: P60953
  ENSP ID: ENSP00000383118

SEQ ID NO: 13746 - protein, 136 aa, Homo sapiens
  Payload ID: 2663
  Gene Symbol: CDC42
  Gene Name: cell division cycle 42
  ENSP ID: ENSP00000398327
MQTIKCVVVGDGAVGKTCLLISYTTNKFPSEYVPTVFDNYAVTVMIGGEPYTLGLFDTAGQEDYDRLRPLSYPQTDVFLVCFSVVSPSSFENVKEKWVPEITHHCPKTPFLLVGTQIDLRDDPSTIEKLAKNKQKP

SEQ ID NO: 13747 - protein, 566 aa, Homo sapiens
  Payload ID: 2664
  Gene Symbol: CDC45
  Gene Name: cell division cycle 45
  Uniprot ID: O75419
  ENSP ID: ENSP00000263201
MFVSDFRKEFYEVVQSQRVLLFVASDVDALCACKILQALFQCDHVQYTLVPVSGWQELETAFLEHKEQFHYFILINCGANVDLLDILQPDEDTIFFVCDTHRPVNVVNVYNDTQIKLLIKQDDDLEVPAYEDIFRDEEEDEEHSGNDSDGSEPSEKRTRLEEEIVEQTMRRRQRREWEARRRDILFDYEQYEYHGTSSAMVMFELAWMLSKDLNDMLWWAIVGLTDQWVQDKITQMKYVTDVGVLQRHVSRHNHRNEDEENTLSVDCTRISFEYDLRLVLYQHWSLHDSLCNTSYTAARFKLWSVHGQKRLQEFLADMGLPLKQVKQKFQAMDISLKENLREMIEESANKFGMKDMRVQTFSIHFGFKHKFLASDVVFATMSLMESPEKDGSGTDHFIQALDSLSRSNLDKLYHGLELAKKQLRATQQTIASCLCTNLVISQGPFLYCSLMEGTPDVMLFSRPASLSLLSKHLLKSFVCSTKNRRCKLLPLVMAAPLSMEHGTVTVVGIPPETDSSDRKNFFGRAFEKAAESTSSRMLHNHFDLSVIELKAEDRSKFLDALISLLS

SEQ ID NO: 13748 - protein, 520 aa, Homo sapiens
  Payload ID: 2664
  Gene Symbol: CDC45
  Gene Name: cell division cycle 45
  Uniprot ID: O75419
  ENSP ID: ENSP00000384978
MFVSDFRKEFYEVVQSQRVLLFVASDVDALCACKILQALFQCDHVQYTLVPVSGWQELETAFLEHKEQIKLLIKQDDDLEVPAYEDIFRDEEEDEEHSGNDSDGSEPSEKRTRLEEEIVEQTMRRRQRREWEARRRDILFDYEQYEYHGTSSAMVMFELAWMLSKDLNDMLWWAIVGLTDQWVQDKITQMKYVTDVGVLQRHVSRHNHRNEDEENTLSVDCTRISFEYDLRLVLYQHWSLHDSLCNTSYTAARFKLWSVHGQKRLQEFLADMGLPLKQVKQKFQAMDISLKENLREMIEESANKFGMKDMRVQTFSIHFGFKHKFLASDVVFATMSLMESPEKDGSGTDHFIQALDSLSRSNLDKLYHGLELAKKQLRATQQTIASCLCTNLVISQGPFLYCSLMEGTPDVMLFSRPASLSLLSKHLLKSFVCSTKNRRCKLLPLVMAAPLSMEHGTVTVVGIPPETDSSDRKNFFGRAFEKAAESTSSRMLHNHFDLSVIELKAEDRSKFLDALISLLS

SEQ ID NO: 13749 - protein, 566 aa, Homo sapiens; identical to SEQ ID NO: 13747
  Payload ID: 2664
  Gene Symbol: CDC45
  Gene Name: cell division cycle 45
  Uniprot ID: O75419
  ENSP ID: ENSP00000385240

SEQ ID NO: 13750 - protein, 96 aa, Homo sapiens
  Payload ID: 2664
  Gene Symbol: CDC45
  Gene Name: cell division cycle 45
  ENSP ID: ENSP00000388280
  MOD_RES (1)..(1): Any amino acid
XDEDTIFFVCDTHRPVNVVNVYNDTQIKLLIKQDDDLEVPAYEDIFRDEEEDEEHSGNDSDGSEPSEKRTRLEEEIVEQTMRRRQRREWEARRIIY

SEQ ID NO: 13751 - protein, 159 aa, Homo sapiens
  Payload ID: 2664
  Gene Symbol: CDC45
  Gene Name: cell division cycle 45
  ENSP ID: ENSP00000397434
MLPHWRVLLFVASDVDALCACKILQALFQCDHVQYTLVPVSGWQELETAFLEHKEQFHYFILINCGANVDLLDILQPDEDTIFFVCDTHRPVNVVNVYNDTQIKLLIKQDDDLEVPAYEDIFRDEEEDEEHSGNDSDGSEPSEKRTRLEEEIVEQTMRR

SEQ ID NO: 13752 - protein, 598 aa, Homo sapiens
  Payload ID: 2664
  Gene Symbol: CDC45
  Gene Name: cell division cycle 45
  Uniprot ID: O75419
  ENSP ID: ENSP00000405726
MFVSDFRKEFYEVVQSQRVLLFVASDVDALCACKILQALFQCDHVQYTLVPVSGWQELETAFLEHKEQFHYFILINCGANVDLLDILQPDEDTIFFVCDTHRPVNVVNVYNDTQIKLLIKQDDDLEVPAYEDIFRDEEEDEEHSGNDSDGSEPSEKRTRLEEEIVEQTMRRRQRREWEARSGSGSEPVAAALEKSSRLFAGPMSDRTAPRSPRRDILFDYEQYEYHGTSSAMVMFELAWMLSKDLNDMLWWAIVGLTDQWVQDKITQMKYVTDVGVLQRHVSRHNHRNEDEENTLSVDCTRISFEYDLRLVLYQHWSLHDSLCNTSYTAARFKLWSVHGQKRLQEFLADMGLPLKQVKQKFQAMDISLKENLREMIEESANKFGMKDMRVQTFSIHFGFKHKFLASDVVFATMSLMESPEKDGSGTDHFIQALDSLSRSNLDKLYHGLELAKKQLRATQQTIASCLCTNLVISQGPFLYCSLMEGTPDVMLFSRPASLSLLSKHLLKSFVCSTKNRRCKLLPLVMAAPLSMEHGTVTVVGIPPETDSSDRKNFFGRAFEKAAESTSSRMLHNHFDLSVIELKAEDRSKFLDALISLLS

SEQ ID NO: 13753 - protein, 112 aa, Homo sapiens
  Payload ID: 2664
  Gene Symbol: CDC45
  Gene Name: cell division cycle 45
  ENSP ID: ENSP00000413138
MFVSDFRKEFYEVVQSQRVLLFVASDVDALCACKILQALFQCDHVQYTLVPVSGWQELETAFLEHKEQFHYFILINCGANVDLLDILQPDEDTIFFVCDTHRPVNVVNVYND

SEQ ID NO: 13754 - protein, 802 aa, Homo sapiens
  Payload ID: 2665
  Gene Symbol: CDC5L
  Gene Name: cell division cycle 5-like
  Uniprot ID: Q99459
  ENSP ID: ENSP00000360532
MPRIMIKGGVWRNTEDEILKAAVMKYGKNQWSRIASLLHRKSAKQCKARWYEWLDPSIKKTEWSREEEEKLLHLAKLMPTQWRTIAPIIGRTAAQCLEHYEFLLDKAAQRDNEEETTDDPRKLKPGEIDPNPETKPARPDPIDMDEDELEMLSEARARLANTQGKKAKRKAREKQLEEARRLAALQKRRELRAAGIEIQKKRKRKRGVDYNAEIPFEKKPALGFYDTSEENYQALDADFRKLRQQDLDGELRSEKEGRDRKKDKQHLKRKKESDLPSAILQTSGVSEFTKKRSKLVLPAPQISDAELQEVVKVGQASEIARQTAEESGITNSASSTLLSEYNVTNNSVALRTPRTPASQDRILQEAQNLMALTNVDTPLKGGLNTPLHESDFSGVTPQRQVVQTPNTVLSTPFRTPSNGAEGLTPRSGTTPKPVINSTPGRTPLRDKLNINPEDGMADYSDPSYVKQMERESREHLRLGLLGLPAPKNDFEIVLPENAEKELEEREIDDTYIEDAADVDARKQAIRDAERVKEMKRMHKAVQKDLPRPSEVNETILRPLNVEPPLTDLQKSEELIKKEMITMLHYDLLHHPYEPSGNKKGKTVGFGTNNSEHITYLEHNPYEKFSKEELKKAQDVLVQEMEVVKQGMSHGELSSEAYNQVWEECYSQVLYLPGQSRYTRANLASKKDRIESLEKRLEINRGHMTTEAKRAAKMEKKMKILLGGYQSRAMGLMKQLNDLWDQIEQAHLELRTFEELKKHEDSAIPRRLECLKEDVQRQQEREKELQHRYADLLLEKETLKSKF

SEQ ID NO: 13755 - protein, 560 aa, Homo sapiens
  Payload ID: 2666
  Gene Symbol: CDC6
  Gene Name: cell division cycle 6
  Uniprot ID: Q99741
  ENSP ID: ENSP00000209728
MPQTRSQAQATISFPKRKLSRALNKAKNSSDAKLEPTNVQTVTCSPRVKALPLSPRKRLGDDNLCNTPHLPPCSPPKQGKKENGPPHSHTLKGRRLVFDNQLTIKSPSKRELAKVHQNKILSSVRKSQEITTNSEQRCPLKKESACVRLFKQEGTCYQQAKLVLNTAVPDRLPAREREMDVIRNFLREHICGKKAGSLYLSGAPGTGKTACLSRILQDLKKELKGFKTIMLNCMSLRTAQAVFPAIAQEICQEEVSRPAGKDMMRKLEKHMTAEKGPMIVLVLDEMDQLDSKGQDVLYTLFEWPWLSNSHLVLIGIANTLDLTDRILPRLQAREKCKPQLLNFPPYTRNQIVTILQDRLNQVSRDQVLDNAAVQFCARKVSAVSGDVRKALDVCRRAIEIVESDVKSQTILKPLSECKSPSEPLIPKRVGLIHISQVISEVDGNRMTLSQEGAQDSFPLQQKILVCSLMLLIRQLKIKEVTLGKLYEAYSKVCRKQQVAAVDQSECLSLSGLLEARGILGLKRNKETRLTKVFFKIEEKEIEHALKDKALIGNILATGLP

SEQ ID NO: 13756 - protein, 100 aa, Homo sapiens
  Payload ID: 2666
  Gene Symbol: CDC6
  Gene Name: cell division cycle 6
  ENSP ID: ENSP00000463004
MPQTRSQAQATISFPKRKLSRALNKAKNSSDAKLEPTNVQTVTCSPRVKALPLSPRKRLGDDNLCNTPHLPPCSPPKQGKKENGPPHSHTLKGRRLVFDN

SEQ ID NO: 13757 - protein, 182 aa, Homo sapiens
  Payload ID: 2666
  Gene Symbol: CDC6
  Gene Name: cell division cycle 6
  ENSP ID: ENSP00000463635
MPQTRSQAQATISFPKRKLSRALNKAKNSSDAKLEPTNVQTVTCSPRVKALPLSPRKRLGDDNLCNTPHLPPCSPPKQGKKENGPPHSHTLKGRRLVFDNQLTIKSPSKRELAKVHQNKILSSVRKSQEITTNSEQRCPLKKESACVRLFKQEGTCYQQAKLVLNTAVPDRLPAREREMDVI

SEQ ID NO: 13758 - protein, 118 aa, Homo sapiens
  Payload ID: 2666
  Gene Symbol: CDC6
  Gene Name: cell division cycle 6
  ENSP ID: ENSP00000464047
MPQTRSQAQATISFPKRKLSRALNKAKNSSDAKLEPTNVQTVTCSPRVKALPLSPRKRLGDDNLCNTPHLPPCSPPKQGKKENGPPHSHTLKGRRLVFDNQLTIKSPSKRELAKVHQN

SEQ ID NO: 13759 - protein, 574 aa, Homo sapiens
  Payload ID: 2667
  Gene Symbol: CDC7
  Gene Name: cell division cycle 7
  Uniprot ID: O00311
  ENSP ID: ENSP00000234626
MEASLGIQMDEPMAFSPQRDRFQAEGSLKKNEQNFKLAGVKKDIEKLYEAVPQLSNVFKIEDKIGEGTFSSVYLATAQLQVGPEEKIALKHLIPTSHPIRIAAELQCLTVAGGQDNVMGVKYCFRKNDHVVIAMPYLEHESFLDILNSLSFQEVREYMLNLFKALKRIHQFGIVHRDVKPSNFLYNRRLKKYALVDFGLAQGTHDTKIELLKFVQSEAQQERCSQNKSHIITGNKIPLSGPVPKELDQQSTTKASVKRPYTNAQIQIKQGKDGKEGSVGLSVQRSVFGERNFNIHSSISHESPAVKLMKQSKTVDVLSRKLATKKKAISTKVMNSAVMRKTASSCPASLTCDCYATDKVCSICLSRRQQVAPRAGTPGFRAPEVLTKCPNQTTAIDMWSAGVIFLSLLSGRYPFYKASDDLTALAQIMTIRGSRETIQAAKTFGKSILCSKEVPAQDLRKLCERLRGMDSSTPKLTSDIQGHASHQPAISEKTDHKASCLVQTPPGQYSGNSFKKGDSNSCEHCFDEYNTNLEGWNEVPDEAYDLLDKLLDLNPASRITAEEALLHPFFKDMSL

SEQ ID NO: 13760 - protein, 574 aa, Homo sapiens; identical to SEQ ID NO: 13759
  Payload ID: 2667
  Gene Symbol: CDC7
  Gene Name: cell division cycle 7
  Uniprot ID: O00311
  ENSP ID: ENSP00000393139

SEQ ID NO: 13761 - protein, 157 aa, Homo sapiens
  Payload ID: 2667
  Gene Symbol: CDC7
  Gene Name: cell division cycle 7
  ENSP ID: ENSP00000398077
MEASLGIQMDEPMAFSPQRDRFQAEGSLKKNEQNFKLAGVKKDIEKLYEAVPQLSNVFKIEDKIGEGTFSSVYLATAQLQVGPEEKIALKHLIPTSHPIRIAAELQCLTVAGGQDNVMGVKYCFRKNDHVVIAMPYLEHESFLDILNSLSFQEVREY

SEQ ID NO: 13762 - protein, 531 aa, Homo sapiens
  Payload ID: 2668
  Gene Symbol: CDC73
  Gene Name: cell division cycle 73
  Uniprot ID: Q6P1J9
  ENSP ID: ENSP00000356405
MADVLSVLRQYNIQKKEIVVKGDEVIFGEFSWPKNVKTNYVVWGTGKEGQPREYYTLDSILFLLNNVHLSHPVYVRRAATENIPVVRRPDRKDLLGYLNGEASTSASIDRSAPLEIGLQRSTQVKRAADEVLAEAKKPRIEDEECVRLDKERLAARLEGHKEGIVQTEQIRSLSEAMSVEKIAAIKAKIMAKKRSTIKTDLDDDITALKQRSFVDAEVDVTRDIVSRERVWRTRTTILQSTGKNFSKNIFAILQSVKAREEGRAPEQRPAPNAAPVDPTLRTKQPIPAAYNRYDQERFKGKEETEGFKIDTMGTYHGMTLKSVTEGASARKTQTPAAQPVPRPVSQARPPPNQKKGSRTPIIIIPAATTSLITMLNAKDLLQDLKFVPSDEKKKQGCQRENETLIQRRKDQMQPGGTAISVTVPYRVVDQPLKLMPQDWDRVVAVFVQGPAWQFKGWPWLLPDGSPVDIFAKIKAFHLKYDEVRLDPNVQKWDVTVLELSYHKRHLDRPVFLRFWETLDRYMVKHKSHLRF

SEQ ID NO: 13763 - protein, 1150 aa, Homo sapiens
  Payload ID: 2669
  Gene Symbol: CCAR1
  Gene Name: cell division cycle and apoptosis regulator 1
  Uniprot ID: Q8IX12
  ENSP ID: ENSP00000265872
MAQFGGQKNPPWATQFTATAVSQPAALGVQQPSLLGASPTIYTQQTALAAAGLTTQTPANYQLTQTAALQQQAAAAAAALQQQYSQPQQALYSVQQQLQQPQQTLLTQPAVALPTSLSLSTPQPTAQITVSYPTPRSSQQQTQPQKQRVFTGVVTKLHDTFGFVDEDVFFQLSAVKGKTPQVGDRVLVEATYNPNMPFKWNAQRIQTLPNQNQSQTQPLLKTPPAVLQPIAPQTTFGVQTQPQPQSLLQAQISAASITPLLQTQPQPLLQQPQQKAGLLQPPVRIVSQPQPARRLDPPSRFSGRNDRGDQVPNRKDDRSRERERERRRSRERSPQRKRSRERSPRRERERSPRRVRRVVPRYTVQFSKFSLDCPSCDMMELRRRYQNLYIPSDFFDAQFTWVDAFPLSRPFQLGNYCNFYVMHREVESLEKNMAILDPPDADHLYSAKVMLMASPSMEDLYHKSCALAEDPQELRDGFQHPARLVKFLVGMKGKDEAMAIGGHWSPSLDGPDPEKDPSVLIKTAIRCCKALTGIDLSVCTQWYRFAEIRYHRPEETHKGRTVPAHVETVVLFFPDVWHCLPTRSEWETLSRGYKQQLVEKLQGERKEADGEQDEEEKDDGEAKEISTPTHWSKLDPKTMKVNDLRKELESRALSSKGLKSQLIARLTKQLKVEEQKEEQKELEKSEKEEDEDDDRKSEDDKEEEERKRQEEIERQRRERRYILPDEPAIIVHPNWAAKSGKFDCSIMSLSVLLDYRLEDNKEHSFEVSLFAELFNEMLQRDFGVRIYKSLLSLPEKEDKKEKDKKSKKDERKDKKEERDDETDEPKPKRRKSGDDKDKKEDRDERKKEDKRKDDSKDDDETEEDNNQDEYDPMEAEEAEDEEDDRDEEEMTKRDDKRDINRYCKERPSKDKEKEKTQMITINRDLLMAFVYFDQSHCGYLLEKDLEEILYTLGLHLSRAQVKKLLNKVVLRESCFYRKLTDTSKDEENHEESESLQEDMLGNRLLLPTPTVKQESKDVEENVGLIVYNGAMVDVGSLLQKLEKSEKVRAEVEQKLQLLEEKTDEDEKTILNLENSNKSLSGELREVKKDLSQLQENLKISENMNLQFENQMNKTIRNLSTVMDEIHTVLKKDNVKNEDKDQKSKENGASV

SEQ ID NO: 13764 - protein, 568 aa, Homo sapiens
  Payload ID: 2669
  Gene Symbol: CCAR1
  Gene Name: cell division cycle and apoptosis regulator 1
  ENSP ID: ENSP00000437760
MAQFGGQKNPPWATQFTATAVSQPAALGVQQPSLLGASPTIYTQQTALAAAGLTTQTPANYQLTQTAALQQQAAAAAAALQQQYSQPQQALYSVQQQLQQPQQTLLTQPAVALPTSLSLSTPQPTAQITVSYPTPRSSQQQTQPQKQRVFTGVVTKLHDTFGFVDEDVFFQLSAVKGKTPQVGDRVLVEATYNPNMPFKWNAQRIQTLPNQNQSQTQPLLKTPPAVLQPIAPQTTFGVQTQPQPQSLLQAQISAASITPLLQTQPQPLLQQPQQKAGLLQPPVRIVSQPQPARRLDPPSRFSGRNDRGDQVPNRKDDRSRERERERRRSRERSPQRKRSRERSPRRERERSPRRVRRVVPRYTVQFSKFSLDCPSCDMMELRRRYQNLYIPSDFFDAQFTWVDAFPLSRPFQLGNYCNFYVMHREVESLEKNMAILDPPDADHLYSAKVMLMASPSMEDLYHKSCALAEDPQELRDGFQHPARLVKFLVGMKGKDEAMAIGGHWSPSLDGPDPEKDPSVLIKTAIRCCKALTGIDLSVCTQWMKKRRMMVKLKKFLHLPIGLNLIQRQ

SEQ ID NO: 13765 - protein, 772 aa, Homo sapiens
  Payload ID: 2669
  Gene Symbol: CCAR1
  Gene Name: cell division cycle and apoptosis regulator 1
  ENSP ID: ENSP00000438610
MAQFGGQKNPPWATQFTATAVSQPAALGVQQPSLLGASPTIYTQQTALAAAGLTTQTPANYQLTQTAALQQQAAAAAAALQQPAVALPTSLSLSTPQPTAQITVSYPTPRSSQQQTQPQKQRVFTGVVTKLHDTFGFVDEDVFFQLSAVKGKTPQVGDRVLVEATYNPNMPFKWNAQRIQTLPNQNQSQTQPLLKTPPAVLQPIAPQTTFGVQTQPQPQSLLQAQISAASITPLLQTQPQPLLQQPQQKAGLLQPPVRIVSQPQPARRLDPPSRFSGRNDRGDQVPNRKDDRSRERERERRRSRERSPQRKRSRERSPRRERERSPRRVRRVVPRYTVQFSKFSLDCPSCDMMELRRRYQNLYIPSDFFDAQFTWVDAFPLSRPFQLGNYCNFYVMHREVESLEKNMAILDPPDADHLYSAKVMLMASPSMEDLYHKSCALAEDPQELRDGFQHPARLVKFLVGMKGKDEAMAIGGHWSPSLDGPDPEKDPSVLIKTAIRCCKALTGIDLSVCTQWYRFAEIRYHRPEETHKGRTVPAHVETVVLFFPDVWHCLPTRSEWETLSRGYKQQLVEKLQGERKEADGEQDEEEKDDGEAKEISTPTHWSKLDPKTMKVNDLRKELESRALSSKGLKSQLIARLTKQLKVEEQKEEQKELEKSEKEEDEDDDRKSEDDKEEEERKRQEEIERQRRERRYILPDEPAIIVHPNWAAKSGKFDCSIMSLSVLLDYRLEDNKEHSFEVSLFAELFNEMLQRDFGVRIYKSLLSLPEKED

SEQ ID NO: 13766 - protein, 119 aa, Homo sapiens
  Payload ID: 2669
  Gene Symbol: CCAR1
  Gene Name: cell division cycle and apoptosis regulator 1
  ENSP ID: ENSP00000438881
MAQFGGQKNPPWATQFTATAVSQPAALGVQQPSLLGASPTIYTQQTALAAAGLTTQTPANYQLTQTAALQQQAAAAAAALQQQYSQPQQALYSVQQQLQQPQQTLLTQPAVALPTSLSL

SEQ ID NO: 13767 - protein, 290 aa, Homo sapiens
  Payload ID: 2669
  Gene Symbol: CCAR1
  Gene Name: cell division cycle and apoptosis regulator 1
  ENSP ID: ENSP00000438939
  MOD_RES (1)..(1): Any amino acid
XSKLDPKTMKVNDLRKELESRALSSKGLKSQLIARLTKQLKVEEQKEEQKELEKSEKEEDEDDDRKSEDDKEEEERKRQEEIERQRRERRYILPDEPAIIVHPNWAAKSGKFDCSIMSLSVLLDYRLEDNKEHSFEKEDKRKDDSKDDDETEEDNNQDEYDPMEAEEAEDEEDDRDEEEMTKRDDKRDINRYCKERPSKDKEKEKTQMITINRDLLMAFVYFDQSHCGYLLEKDLEEILYTLGLHLSRAQVKKLLNKVVLRESCFYRKLTDTSKDEENHEESESLQEDML

SEQ ID NO: 13768 - protein, 568 aa, Homo sapiens; identical to SEQ ID NO: 13764
  Payload ID: 2669
  Gene Symbol: CCAR1
  Gene Name: cell division cycle and apoptosis regulator 1
  ENSP ID: ENSP00000439153

SEQ ID NO: 13769 - protein, 1043 aa, Homo sapiens
  Payload ID: 2669
  Gene Symbol: CCAR1
  Gene Name: cell division cycle and apoptosis regulator 1
  ENSP ID: ENSP00000439252
MAQFGGQKNPPWATQFTATAVSQPAALGVQQPSLLGASPTIYTQQTALAAAGLTTQTPANYQLTQTAALQQQAAAAAAALQQLQQPQQTLLTQPAVALPTSLSLSTPQPTAQITVSYPTPRSSQQQTQPQKQRVFTGVVTKLHDTFGFVDEDVFFQLSAVKGKTPQVGDRVLVEATYNPNMPFKWNAQRIQTLPNQNQSQTQPLLKTPPAVLQPIAPQTTFGVQTQPQPQSLLQAQISAASITPLLQTQPQPLLQQPQQKAGLLQPPVRIVSQPQPARRLDPPSRFSGRNDRGDQVPNRKDDRSRERERERRRSRERSPQRKRSRERSPRRERERSPRRVRRVVPRYTVQFSKFSLDCPSCDMMELRRRYQNLYIPSDFFDAQFTWVDAFPLSRPFQLGNYCNFYVMHREVESLEKNMAILDPPDADHLYSAKVMLMASPSMEDLYHKSCALAEDPQELRDGFQHPARLVKFLVGMKGKDEAMAIGGHWSPSLDGPDPEKDPSVLIKTAIRCCKALTGIDLSVCTQWYRFAEIRYHRPEETHKGRTVPAHVETVVLFFPDVWHCLPTRSEWETLSRGYKQQLVEKLQGERKEADGEQDEEEKDDGEAKEISTPTHWSKLDPKTMKVNDLRKELESRALSSKGLKSQLIARLTKQLKVEEQKEEQKELEKSEKEEDEDDDRKSEDDKEEEERKRQEEIERQRRERRYILPDEPAIIVHPNWAAKSGKFDCSIMSLSVLLDYRLEDNKEHSFEVSLFAELFNEMLQRDFGVRIYKSLLSLPEKEDKKEKDKKSKKDERKDKKEERDDETDEPKPKRRKSGDDKDKKEDRDERKKEDKRKDDSKDDDETEEDNNQDEYDPMEAEEAEDEEDDRDEEEMTKRDDKRDINRYCKERPSKDKEKEKTQMITINRDLLMAFVYFDQSHCGYLLEKDLEEILYTLGLHLSRAQVKKLLNKVVLRESCFYRKLTDTSKDEENHEESESLQEDMLGNRLLLPTPTVKQESKDVEENVGLIVYNGAMVDVGSLLQKLEKSEKVRAEVEQKLQLL

SEQ ID NO: 13770 - protein, 84 aa, Homo sapiens
  Payload ID: 2669
  Gene Symbol: CCAR1
  Gene Name: cell division cycle and apoptosis regulator 1
  ENSP ID: ENSP00000439571
MAQFGGQKNPPWATQFTATAVSQPAALGVQQPSLLGASPTIYTQQTALAAAGLTTQTPANYQLTQTAALQQQAAAAAAALQQHK

SEQ ID NO: 13771 - protein, 646 aa, Homo sapiens
  Payload ID: 2669
  Gene Symbol: CCAR1
  Gene Name: cell division cycle and apoptosis regulator 1
  ENSP ID: ENSP00000439642
MPFKWNAQRIQTLPNQNQSQTQPLLKTPPAVLQPIAPQTTFGVQTQPQPQSLLQAQISAASITPLLQTQPQPLLQQPQQKAGLLQPPVRIVSQPQPARRLDPPSRFSGRNDRGDQVPNRKDDRSRERERERRRSRERSPQRKRSRERSPRRERERSPRRVRRVVPRYTVQFSKFSLDCPSCDMMELRRRYQNLYIPSDFFDAQFTWVDAFPLSRPFQLGNYCNFYVMHREVESLEKNMAILDPPDADHLYSAKVMLMASPSMEDLYHKSCALAEDPQELRDGFQHPARLVKFLVGMKGKDEAMAIGGHWSPSLDGPDPEKDPSVLIKTAIRCCKALTGIDLSVCTQWYRFAEIRYHRPEETHKGRTVPAHVETVVLFFPDVWHCLPTRSEWETLSRGYKQQLVEKLQGERKEADGEQDEEEKDDGEAKEISTPTHWSKLDPKTMKVNDLRKELESRALSSKGLKSQLIARLTKQLKVEEQKEEQKELEKSEKEEDEDDDRKSEDDKEEEERKRQEEIERQRRERRYILPDEPAIIVHPNWAAKSGKFDCSIMSLSVLLDYRLEDNKEHSFEVSLFAELFNEMLQRDFGVRIYKSLLSLPEKEDKKEKDKKSKKDERKDKKEERDDETDEPKPKRRKSGDDKDKKED

SEQ ID NO: 13772 - protein, 48 aa, Homo sapiens
  Payload ID: 2669
  Gene Symbol: CCAR1
  Gene Name: cell division cycle and apoptosis regulator 1
  ENSP ID: ENSP00000440224
  MOD_RES (1)..(1): Any amino acid
XTAIRCCKALTGIDLSVCTQWHRNTGTNAHHTLHNKHTWRNITGNSDW

SEQ ID NO: 13773 - protein, 171 aa, Homo sapiens
  Payload ID: 2669
  Gene Symbol: CCAR1
  Gene Name: cell division cycle and apoptosis regulator 1
  ENSP ID: ENSP00000442410
MAQFGGQKNPPWATQFTATAVSQPAALGVQQPSLLGASPTIYTQQTALAAAGLTTQTPANYQLTQTAALQQQAAAAAAALQQQYSQPQQALYSVQQQLQQPQQTLLTQPAVALPTSLSLSTPQPTAQITVSYPTPRSSQQQTQPQKQRVFTGVVTKLHDTFGFVDEDVFFQ

SEQ ID NO: 13774 - protein, 95 aa, Homo sapiens
  Payload ID: 2669
  Gene Symbol: CCAR1
  Gene Name: cell division cycle and apoptosis regulator 1
  ENSP ID: ENSP00000443808
MATLQSAAPLLPSRCGFTLLAPRPGTSWRLPAAWVLGNRGFLHRCYRRQTREGFFSFCIMAQFGGQKNPPWATQFTATAVSQPAALGVQQPSLLG

SEQ ID NO: 13775 - protein, 1135 aa, Homo sapiens
  Payload ID: 2669
  Gene Symbol: CCAR1
  Gene Name: cell division cycle and apoptosis regulator 1
  Uniprot ID: Q8IX12
  ENSP ID: ENSP00000445254
MAQFGGQKNPPWATQFTATAVSQPAALGVQQPSLLGASPTIYTQQTALAAAGLTTQTPANYQLTQTAALQQQAAAAAAALQQLQQPQQTLLTQPAVALPTSLSLSTPQPTAQITVSYPTPRSSQQQTQPQKQRVFTGVVTKLHDTFGFVDEDVFFQLSAVKGKTPQVGDRVLVEATYNPNMPFKWNAQRIQTLPNQNQSQTQPLLKTPPAVLQPIAPQTTFGVQTQPQPQSLLQAQISAASITPLLQTQPQPLLQQPQQKAGLLQPPVRIVSQPQPARRLDPPSRFSGRNDRGDQVPNRKDDRSRERERERRRSRERSPQRKRSRERSPRRERERSPRRVRRVVPRYTVQFSKFSLDCPSCDMMELRRRYQNLYIPSDFFDAQFTWVDAFPLSRPFQLGNYCNFYVMHREVESLEKNMAILDPPDADHLYSAKVMLMASPSMEDLYHKSCALAEDPQELRDGFQHPARLVKFLVGMKGKDEAMAIGGHWSPSLDGPDPEKDPSVLIKTAIRCCKALTGIDLSVCTQWYRFAEIRYHRPEETHKGRTVPAHVETVVLFFPDVWHCLPTRSEWETLSRGYKQQLVEKLQGERKEADGEQDEEEKDDGEAKEISTPTHWSKLDPKTMKVNDLRKELESRALSSKGLKSQLIARLTKQLKVEEQKEEQKELEKSEKEEDEDDDRKSEDDKEEEERKRQEEIERQRRERRYILPDEPAIIVHPNWAAKSGKFDCSIMSLSVLLDYRLEDNKEHSFEVSLFAELFNEMLQRDFGVRIYKSLLSLPEKEDKKEKDKKSKKDERKDKKEERDDETDEPKPKRRKSGDDKDKKEDRDERKKEDKRKDDSKDDDETEEDNNQDEYDPMEAEEAEDEEDDRDEEEMTKRDDKRDINRYCKERPSKDKEKEKTQMITINRDLLMAFVYFDQSHCGYLLEKDLEEILYTLGLHLSRAQVKKLLNKVVLRESCFYRKLTDTSKDEENHEESESLQEDMLGNRLLLPTPTVKQESKDVEENVGLIVYNGAMVDVGSLLQKLEKSEKVRAEVEQKLQLLEEKTDEDEKTILNLENSNKSLSGELREVKKDLSQLQENLKISENMNLQFENQMNKTIRNLSTVMDEIHTVLKKDNVKNEDKDQKSKENGASV

SEQ ID NO: 13776 - protein, 568 aa, Homo sapiens; identical to SEQ ID NO: 13764
  Payload ID: 2669
  Gene Symbol: CCAR1
  Gene Name: cell division cycle and apoptosis regulator 1
  ENSP ID: ENSP00000486408

SEQ ID NO: 13777 - protein, 1023 aa, Homo sapiens
  Payload ID: 2670
  Gene Symbol: CDCA2
  Gene Name: cell division cycle associated 2
  Uniprot ID: Q69YH5
  ENSP ID: ENSP00000328228
MDANSKDKPPETKESAMNNAGNASFILGTGKIVTPQKHAELPPNPCTPDTFKSPLNFSTVTVEQLGITPESFVRNSAGKSSSYLKKCRRRSAVGARGSPETNHLIRFIARQQNIKNARKSPLAQDSPSQGSPALYRNVNTLRERISAFQSAFHSIKENEKMTGCLEFSEAGKESEMTDLTRKEGLSACQQSGFPAVLSSKRRRISYQRDSDENLTDAEGKVIGLQIFNIDTDRACAVETSVDLSEISSKLGSTQSGFLVEESLPLSELTETSNALKVADCVVGKGSSDAVSPDTFTAEVSSDAVPDVRSPATPACRRDLPTPKTFVLRSVLKKPSVKMCLESLQEHCNNLYDDDGTHPSLISNLPNCCKEKEAEDEENFEAPAFLNMRKRKRVTFGEDLSPEVFDESLPANTPLRKGGTPVCKKDFSGLSSLLLEQSPVPEPLPQPDFDDKGENLENIEPLQVSFAVLSSPNKSSISETLSGTDTFSSSNNHEKISSPKVGRITRTSNRRNQLVSVVEESVCNLLNTEVQPCKEKKINRRKSQETKCTKRALPKKSQVLKSCRKKKGKGKKSVQKSLYGERDIASKKPLLSPIPELPEVPEMTPSIPSIRRLGSGYFSSNGKLEEVKTPKNPVKRKDLLRHDPDLHMHQGYDKYDVSEFCSYIKSSSSLGNATSDEDPNTNIMNINENKNIPKAKNKSESENEPKAGTDSPVSCASVTEERVASDSPKPALTLQQGQEFSAGGQNAENLCQFFKISPDLNIKCERKDDFLGAAEGKLQCNRLMPNSQKDCHCLGDVLIENTKESKSQSEDLGRKPMESSSVVSCRDRKDRRRSMCYSDGRSLHLEKNGNHTPSSSVGSSVEISLENSELFKDLSDAIEQTFQRRNSETKVRRSTRLQKDLENEGLVWISLPLPSTSQKAKRRTICTFDSSGFESMSPIKETVSSRQKPQMAPPVSDPENSQGPAAGSSDEPGKRRKSFCISTLANTKATSQFKGYRRRSSLNGKGESSLTALERIEHNGERKQ

SEQ ID NO: 13778 - protein, 1008 aa, Homo sapiens
  Payload ID: 2670
  Gene Symbol: CDCA2
  Gene Name: cell division cycle associated 2
  ENSP ID: ENSP00000370040
MSSVSGNASFILGTGKIVTPQKHAELPPNPCTPDTFKSPLNFSTVTVEQLGITPESFVRNSAGKSSSYLKKCRRRSAVGARGSPETNHLIRFIARQQNIKNARKSPLAQDSPSQGSPALYRNVNTLRERISAFQSAFHSIKENEKMTGCLEFSEAGKESEMTDLTRKEGLSACQQSGFPAVLSSKRRRISYQRDSDENLTDAEGKVIGLQIFNIDTDRACAVETSVDLSEISSKLGSTQSGFLVEESLPLSELTETSNALKVADCVVGKGSSDAVSPDTFTAEVSSDAVPDVRSPATPACRRDLPTPKTFVLRSVLKKPSVKMCLESLQEHCNNLYDDDGTHPSLISNLPNCCKEKEAEDEENFEAPAFLNMRKRKRVTFGEDLSPEVFDESLPANTPLRKGGTPVCKKDFSGLSSLLLEQSPVPEPLPQPDFDDKGENLENIEPLQVSFAVLSSPNKSSISETLSGTDTFSSSNNHEKISSPKVGRITRTSNRRNQLVSVVEESVCNLLNTEVQPCKEKKINRRKSQETKCTKRALPKKSQVLKSCRKKKGKGKKSVQKSLYGERDIASKKPLLSPIPELPEVPEMTPSIPSIRRLGSGYFSSNGKLEEVKTPKNPVKRKDLLRHDPDLHMHQGYDKYDVSEFCSYIKSSSSLGNATSDEDPNTNIMNINENKNIPKAKNKSESENEPKAGTDSPVSCASVTEERVASDSPKPALTLQQGQEFSAGGQNAENLCQFFKISPDLNIKCERKDDFLGAAEGKLQCNRLMPNSQKDCHCLGDVLIENTKESKSQSEDLGRKPMESSSVVSCRDRKDRRRSMCYSDGRSLHLEKNGNHTPSSSVGSSVEISLENSELFKDLSDAIEQTFQRRNSETKVRRSTRLQKDLENEGLVWISLPLPSTSQKAKRRTICTFDSSGFESMSPIKETVSSRQKPQMAPPVSDPENSQGPAAGSSDEPGKRRKSFCISTLANTKATSQFKGYRRRSSLNGKGESSLTALERIEHNGERKQ

SEQ ID NO: 13779 - protein, 243 aa, Homo sapiens
  Payload ID: 2671
  Gene Symbol: CDCA3
  Gene Name: cell division cycle associated 3
  ENSP ID: ENSP00000229265
MGSAKSVPVTPARPPPHNKHLARVADPRSPSAGILRTPIQVESSPQPGLPAGEQLEGLKHAQDSDPRSPTLGIARTPMKTSSGEPVLPPEAPLSSELDLPLGTQLSVEEQMPPWNQTEFPSKQVFSKEEARQPTETPVASQSSDKPSRDPETPRSSGSMRNRWKPNSSKVLGRSPLTILQDDNSPGTLTLRQGKRPSPLSENVSELKEGAILGTGRLLKTGGRAWEQGQDHDKENQHFPLVES

SEQ ID NO: 13780 - protein, 219 aa, Homo sapiens
  Payload ID: 2671
  Gene Symbol: CDCA3
  Gene Name: cell division cycle associated 3
  ENSP ID: ENSP00000415142
MGSAKSVPVTPARPPPHNKHLARVADPRSPSAGILRTPIQVESSPQPGLPAGEQLEGLKHAQDSDPRSPTLGIARTPMKTSSGDPPSPLVKQLSEVFETEDSKSNLPPEPVLPPEAPLSSELDLPLGTQLSVEEQMPPWNQTEFPSKQVFSKEEARQPTETPVASQSSDKPSRDPETPRSSASSVPDFEEAVPGTCGHSHPVSCDSQAAHPVIVAREDA

SEQ ID NO: 13781 - protein, 182 aa, Homo sapiens
  Payload ID: 2671
  Gene Symbol: CDCA3
  Gene Name: cell division cycle associated 3
  ENSP ID: ENSP00000441120
MGSAKSVPVTPARPPPHNKHLARVADPRSPSAGILRTPIQVESSPQPGLPAGEQLEGLKHAQDSDPRSPTLGIARTPMKTSSGDPPSPLVKQLSEVFETEDSKSNLPPEPVLPPEAPLSSELDLPLGTQLSVEEQMPPWNQTEFPSKQVFSKEEARQPTETPVASQSSDKPSRDPETPRSSG

SEQ ID NO: 13782 - protein, 268 aa, Homo sapiens
  Payload ID: 2671
  Gene Symbol: CDCA3
  Gene Name: cell division cycle associated 3
  Uniprot ID: Q99618
  ENSP ID: ENSP00000442068
MGSAKSVPVTPARPPPHNKHLARVADPRSPSAGILRTPIQVESSPQPGLPAGEQLEGLKHAQDSDPRSPTLGIARTPMKTSSGDPPSPLVKQLSEVFETEDSKSNLPPEPVLPPEAPLSSELDLPLGTQLSVEEQMPPWNQTEFPSKQVFSKEEARQPTETPVASQSSDKPSRDPETPRSSGSMRNRWKPNSSKVLGRSPLTILQDDNSPGTLTLRQGKRPSPLSENVSELKEGAILGTGRLLKTGGRAWEQGQDHDKENQHFPLVES

SEQ ID NO: 13783 - protein, 268 aa, Homo sapiens; identical to SEQ ID NO: 13782
  Payload ID: 2671
  Gene Symbol: CDCA3
  Gene Name: cell division cycle associated 3
  Uniprot ID: Q99618
  ENSP ID: ENSP00000446339

SEQ ID NO: 13784 - protein, 241 aa, Homo sapiens
  Payload ID: 2672
  Gene Symbol: CDCA4
  Gene Name: cell division cycle associated 4
  Uniprot ID: Q9BXL8
  ENSP ID: ENSP00000337226
MFARGLKRKCVGHEEDVEGALAGLKTVSSYSLQRQSLLDMSLVKLQLCHMLVEPNLCRSVLIANTVRQIQEEMTQDGTWRTVAPQAAERAPLDRLVSTEILCRAAWGQEGAHPAPGLGDGHTQGPVSDLCPVTSAQAPRHLQSSAWEMDGPRENRGSFHKSLDQIFETLETKNPSCMEELFSDVDSPYYDLDTVLTGMMGGARPGPCEGLEGLAPATPGPSSSCKSDLGELDHVVEILVET

SEQ ID NO: 13785 - protein, 241 aa, Homo sapiens; identical to SEQ ID NO: 13784
  Payload ID: 2672
  Gene Symbol: CDCA4
  Gene Name: cell division cycle associated 4
  Uniprot ID: Q9BXL8
  ENSP ID: ENSP00000376369

SEQ ID NO: 13786 - protein, 252 aa, Homo sapiens
  Payload ID: 2673
  Gene Symbol: CDCA5
  Gene Name: cell division cycle associated 5
  Uniprot ID: Q96FF9
  ENSP ID: ENSP00000275517
MSGRRTRSGGAAQRSGPRAPSPTKPLRRSQRKSGSELPSILPEIWPKTPSAAAVRKPIVLKRIVAHAVEVPAVQSPRRSPRISFFLEKENEPPGRELTKEDLFKTHSVPATPTSTPVPNPEAESSSKEGELDARDLEMSKKVRRSYSRLETLGSASTSTPGRRSCFGFEGLLGAEDLSGVSPVVCSKLTEVPRVCAKPWAPDMTLPGISPPPEKQKRKKKKMPEILKTELDEWAAAMNAEFEAAEQFDLLVE

SEQ ID NO: 13787 - protein, 307 aa, Homo sapiens
  Payload ID: 2673
  Gene Symbol: CDCA5
  Gene Name: cell division cycle associated 5
  ENSP ID: ENSP00000385711
MSGRRTRSGGAAQRSGPRAPSPTKPLRRSQRKSGSELPSILPEIWPKTPSAAAVRKPIVLKRIVAHAVEVPAVQSPRRSPRISFFLEKENEPPGRELTKEDLFKTHSVPATPTSTPVPNPEAESSSKEGELDARDLEMSKKVRRSYSRLETLGSASTSTPGRRSCFGFEGLLGAEDLSGVSPVVCSKLTEVPRVCAKPWAPDMTLPGISPPPEKQKRKKKKMPEILVSERQGFFSAVCSGRRAGLGLWLFWGIGSTCRVWVRCSSHHVPFSLTCSSFLFPQKTELDEWAAAMNAEFEAAEQFDLLVE

SEQ ID NO: 13788 - protein, 70 aa, Homo sapiens
  Payload ID: 2673
  Gene Symbol: CDCA5
  Gene Name: cell division cycle associated 5
  ENSP ID: ENSP00000431888
  MOD_RES (1)..(1): Any amino acid
XRKPIVLKRIVAHAVEVPAVQSPRRSPRAAGPALASRGCWGQKTCPESRQWCAPNSPRSPGFVQSPGPQT

SEQ ID NO: 13789 - protein, 254 aa, Homo sapiens
  Payload ID: 2673
  Gene Symbol: CDCA5
  Gene Name: cell division cycle associated 5
  ENSP ID: ENSP00000432183
  MOD_RES (1)..(1): Any amino acid
XQKRKKKKMPEILSLRGRQRAHSKLANKPVVQPVEEQEPKGPQASEERNLEPPSSEQLEPTVTFLFTLLNTSEPTEPKDPESDSEIQEYQFLDQEDWGPQRTSKEIRQLQNDCMRLRESLNTTQVHNLALGEKLQNLPTLLYKSLKEGAQAIQEEAQAIQDEVKALQEESQALPEVALLRCAGSHGSGEGRGGCPMLLTRAVSACSDPNPRKAGLLFKLPDLPHDHRDQGQAWPGPRPEVGHLLGRPLLQPAPP

SEQ ID NO: 13790 - protein, 224 aa, Homo sapiens
  Payload ID: 2673
  Gene Symbol: CDCA5
  Gene Name: cell division cycle associated 5
  ENSP ID: ENSP00000432342
PGISPPPEKQKRKKKKMPEILSLRGRQRAHSKLANKPVVQPVEEQEPKGPQASEERNLEPPSSEQLEPTVTFLFTLLNTSEPTEPKDPESDSEIQEYQFLDQEDWGPQRTSKEIRQLQNDCMRLRESLNTTQVHNLALGEKLQNLPTLLYKSLKEGAQAIQEEAQAIQDEVKALQEESQALPEVALLSDPNPRKAGLLFKLPDLPHDHRDQGQAWPGPRPEVGH

SEQ ID NO: 13791 - protein, 57 aa, Homo sapiens
  Payload ID: 2673
  Gene Symbol: CDCA5
  Gene Name: cell division cycle associated 5
  ENSP ID: ENSP00000432621
  MOD_RES (1)..(1): Any amino acid
XSGRRTRSGGAAQRSGPHLLLSLCGGPSGNQALNSRASSLKSGRRHPVRLQSESPSS

SEQ ID NO: 13792 - protein, 371 aa, Homo sapiens
  Payload ID: 2674
  Gene Symbol: CDCA7
  Gene Name: cell division cycle associated 7
  Uniprot ID: Q9BWT1
  ENSP ID: ENSP00000272789
MDARRVPQKDLRVKKNLKKFRYVKLISMETSSSSDDSCDSFASDNFANTRLQSVREGCRTRSQCRHSGPLRVAMKFPARSTRGATNKKAESRQPSENSVTDSNSDSEDESGMNFLEKRALNIKQNKAMLAKLMSELESFPGSFRGRHPLPGSDSQSRRPRRRTFPGVASRRNPERRARPLTRSRSRILGSLDALPMEEEEEEDKYMLVRKRKTVDGYMNEDDLPRSRRSRSSVTLPHIIRPVEEITEEELENVCSNSREKIYNRSLGSTCHQCRQKTIDTKTNCRNPDCWGVRGQFCGPCLRNRYGEEVRDALLDPNWHCPPCRGICNCSFCRQRDGRCATGVLVYLAKYHGFGNVHAYLKSLKQEFEMQA

SEQ ID NO: 13793 - protein, 450 aa, Homo sapiens
  Payload ID: 2674
  Gene Symbol: CDCA7
  Gene Name: cell division cycle associated 7
  Uniprot ID: Q9BWT1
  ENSP ID: ENSP00000306968
MDARRVPQKDLRVKKNLKKFRYVKLISMETSSSSDDSCDSFASDNFANTKPKFRSDISEELANVFYEDSDNESFCGFSESEVQDVLDHCGFLQKPRPDVTNELAGIFHADSDDESFCGFSESEIQDGMRLQSVREGCRTRSQCRHSGPLRVAMKFPARSTRGATNKKAESRQPSENSVTDSNSDSEDESGMNFLEKRALNIKQNKAMLAKLMSELESFPGSFRGRHPLPGSDSQSRRPRRRTFPGVASRRNPERRARPLTRSRSRILGSLDALPMEEEEEEDKYMLVRKRKTVDGYMNEDDLPRSRRSRSSVTLPHIIRPVEEITEEELENVCSNSREKIYNRSLGSTCHQCRQKTIDTKTNCRNPDCWGVRGQFCGPCLRNRYGEEVRDALLDPNWHCPPCRGICNCSFCRQRDGRCATGVLVYLAKYHGFGNVHAYLKSLKQEFEMQA

SEQ ID NO: 13794 - protein, 406 aa, Homo sapiens
  Payload ID: 2674
  Gene Symbol: CDCA7
  Gene Name: cell division cycle associated 7
  Uniprot ID: Q9BWT1
  ENSP ID: ENSP00000386656
MDARRVPQKDLRVKKNLKKFRYVKLISMETSSSSDDSCDSFASDNFANTKPRPDVTNELAGIFHADSDDESFCGFSESEIQDGMRLQSVREGCRTRSQCRHSGPLRVAMKFPARSTRGATNKKAESRQPSENSVTDSNSDSEDESGMNFLEKRALNIKQNKAMLAKLMSELESFPGSFRGRHPLPGSDSQSRRPRRRTFPGVASRRNPERRARPLTRSRSRILGSLDALPMEEEEEEDKYMLVRKRKTVDGYMNEDDLPRSRRSRSSVTLPHIIRPVEEITEEELENVCSNSREKIYNRSLGSTCHQCRQKTIDTKTNCRNPDCWGVRGQFCGPCLRNRYGEEVRDALLDPNWHCPPCRGICNCSFCRQRDGRCATGVLVYLAKYHGFGNVHAYLKSLKQEFEMQA

SEQ ID NO: 13795 - protein, 329 aa, Homo sapiens
  Payload ID: 2674
  Gene Symbol: CDCA7
  Gene Name: cell division cycle associated 7
  Uniprot ID: Q9BWT1
  ENSP ID: ENSP00000386833
MDARRVPRLQSVREGCRTRSQCRHSGPLRVAMKFPARSTRGATNKKAESRQPSENSVTDSNSDSEDESGMNFLEKRALNIKQNKAMLAKLMSELESFPGSFRGRHPLPGSDSQSRRPRRRTFPGVASRRNPERRARPLTRSRSRILGSLDALPMEEEEEEDKYMLVRKRKTVDGYMNEDDLPRSRRSRSSVTLPHIIRPVEEITEEELENVCSNSREKIYNRSLGSTCHQCRQKTIDTKTNCRNPDCWGVRGQFCGPCLRNRYGEEVRDALLDPNWHCPPCRGICNCSFCRQRDGRCATGVLVYLAKYHGFGNVHAYLKSLKQEFEMQA

SEQ ID NO: 13796 - protein, 56 aa, Homo sapiens
  Payload ID: 2674
  Gene Symbol: CDCA7
  Gene Name: cell division cycle associated 7
  ENSP ID: ENSP00000390470
MDARRVPQKDLRVKKNLKKFRYVKLISMETSSSSDDSCDSFASDNFANTKVRCKMY

SEQ ID NO: 13797 - protein, 420 aa, Homo sapiens
  Payload ID: 2675
  Gene Symbol: CDCA7L
  Gene Name: cell division cycle associated 7-like
  Uniprot ID: Q96GN5
  ENSP ID: ENSP00000348523
METLSSEESCDSFDSLESGKQQDVRFHSKYFTEELRRIFIEDTDSETEDFAGFTQSDLNGKTNPEVMVVESDLSDDGKASLVSEEEEDEEEDKATPRRSRSRRSSIGLRVAFQFPTKKLANKPDKNSSSEQLFSSARLQNEKKTILERKKDCRQVIQREDSTSESEDDSRDESQESSDALLKRTMNIKENKAMLAQLLAELNSMPDFFPVRTPTSASRKKTVRRAFSEGQITRRMNPTRSARPPEKFALENFTVSAAKFAEEFYSFRRRKTIGGKCREYRRRHRISSFRPVEDITEEDLENVAITVRDKIYDKVLGNTCHQCRQKTIDTKTVCRNQGCCGVRGQFCGPCLRNRYGEDVRSALLDPDWVCPPCRGICNCSYCRKRDGRCATGILIHLAKFYGYDNVKEYLESLQKELVEDN

SEQ ID NO: 13798 - protein, 408 aa, Homo sapiens
  Payload ID: 2675
  Gene Symbol: CDCA7L
  Gene Name: cell division cycle associated 7-like
  Uniprot ID: Q96GN5
  ENSP ID: ENSP00000363045
MELATRYQIPKEVADIFNAPSDDEEFVGFRDDVPMETLSSEESCDSFDSLESGKQVVESDLSDDGKASLVSEEEEDEEEDKATPRRSRSRRSSIGLRVAFQFPTKKLANKPDKNSSSEQLFSSARLQNEKKTILERKKDCRQVIQREDSTSESEDDSRDESQESSDALLKRTMNIKENKAMLAQLLAELNSMPDFFPVRTPTSASRKKTVRRAFSEGQITRRMNPTRSARPPEKFALENFTVSAAKFAEEFYSFRRRKTIGGKCREYRRRHRISSFRPVEDITEEDLENVAITVRDKIYDKVLGNTCHQCRQKTIDTKTVCRNQGCCGVRGQFCGPCLRNRYGEDVRSALLDPDWVCPPCRGICNCSYCRKRDGRCATGILIHLAKFYGYDNVKEYLESLQKELVEDN

SEQ ID NO: 13799 - protein, 454 aa, Homo sapiens
  Payload ID: 2675
  Gene Symbol: CDCA7L
  Gene Name: cell division cycle associated 7-like
  Uniprot ID: Q96GN5
  ENSP ID: ENSP00000383986
MELATRYQIPKEVADIFNAPSDDEEFVGFRDDVPMETLSSEESCDSFDSLESGKQQDVRFHSKYFTEELRRIFIEDTDSETEDFAGFTQSDLNGKTNPEVMVVESDLSDDGKASLVSEEEEDEEEDKATPRRSRSRRSSIGLRVAFQFPTKKLANKPDKNSSSEQLFSSARLQNEKKTILERKKDCRQVIQREDSTSESEDDSRDESQESSDALLKRTMNIKENKAMLAQLLAELNSMPDFFPVRTPTSASRKKTVRRAFSEGQITRRMNPTRSARPPEKFALENFTVSAAKFAEEFYSFRRRKTIGGKCREYRRRHRISSFRPVEDITEEDLENVAITVRDKIYDKVLGNTCHQCRQKTIDTKTVCRNQGCCGVRGQFCGPCLRNRYGEDVRSALLDPDWVCPPCRGICNCSYCRKRDGRCATGILIHLAKFYGYDNVKEYLESLQKELVEDN

SEQ ID NO: 13800 - protein, 98 aa, Homo sapiens
  Payload ID: 2675
  Gene Symbol: CDCA7L
  Gene Name: cell division cycle associated 7-like
  ENSP ID: ENSP00000400673
  MOD_RES (1)..(1): Any amino acid
XVTRAISVDKRPSTPRQCVGTRVAVVCEDSSVDHACGTAMGRMSDRHCWTRIGCVPPVVGSAIAATVGSVTAAVPQESSFIWPSFMVMTMLRNIWRGK

SEQ ID NO: 13801 - protein, 156 aa, Homo sapiens
  Payload ID: 2675
  Gene Symbol: CDCA7L
  Gene Name: cell division cycle associated 7-like
  ENSP ID: ENSP00000406616
MELATRYQQDVRFHSKYFTEELRRIFIEDTDSETEDFAGFTQSDLNGKTNPEVMVVESDLSDDGKASLVSEEEEDEEEDKATPRRSRSRRSSIGLRVAFQFPTKKLANKPDKNSSSEQLFSSARLQNEKKTILERKKDCRQVIQREDSTSESEDDS

SEQ ID NO: 13802 - protein, 96 aa, Homo sapiens
  Payload ID: 2675
  Gene Symbol: CDCA7L
  Gene Name: cell division cycle associated 7-like
  ENSP ID: ENSP00000410014
METLSSEESCDSFDSLESGKQQDVRFHSKYFTEELRRIFIEDTDSETEDFAGFTQSDLNGKTNPEVMVVESDLSDDGKASLVSEEEEDEEEDKATP

SEQ ID NO: 13803 - protein, 113 aa, Homo sapiens
  Payload ID: 2675
  Gene Symbol: CDCA7L
  Gene Name: cell division cycle associated 7-like
  ENSP ID: ENSP00000411337
METLSSEESCDSFDSLESGKQDVRFHSKYFTEELRRIFIEDTDSETEDFAGFTQSDLNGKTNPEVMVVESDLSDDGKASLVSEEEEDEEEDKATPRRSRSRRSSIGLRVAFQF

SEQ ID NO: 13804 - protein, 280 aa, Homo sapiens
  Payload ID: 2676
  Gene Symbol: CDCA8
  Gene Name: cell division cycle associated 8
  Uniprot ID: Q53HL2
  ENSP ID: ENSP00000316121
MAPRKGSSRVAKTNSLRRRKLASFLKDFDREVEIRIKQIESDRQNLLKEVDNLYNIEILRLPKALREMNWLDYFALGGNKQALEEAATADLDITEINKLTAEAIQTPLKSAKTRKVIQVDEMIVEEEEEEENERKNLQTARVKRCPPSKKRTQSIQGKGKGKRSSRANTVTPAVGRLEVSMVKPTPGLTPRFDSRVFKTPGLRTPAAGERIYNISGNGSPLADSKEIFLTVPVGGGESLRLLASDLQRHSIAQLDPEALGNIKKLSNRLAQICSSIRTHK

SEQ ID NO: 13805 - protein, 280 aa, Homo sapiens; identical to SEQ ID NO: 13804
  Payload ID: 2676
  Gene Symbol: CDCA8
  Gene Name: cell division cycle associated 8
  Uniprot ID: Q53HL2
  ENSP ID: ENSP00000362146

SEQ ID NO: 13806 - protein, 301 aa, Homo sapiens
  Payload ID: 2677
  Gene Symbol: CGREF1
  Gene Name: cell growth regulator with EF-hand domain 1
  Uniprot ID: Q99674
  ENSP ID: ENSP00000260595
MLPLTMTVLILLLLPTGQAAPKDGVTRPDSEVQHQLLPNPFQPGQEQLGLLQSYLKGLGRTEVQLEHLSREQVLLYLFALHDYDQSGQLDGLELLSMLTAALAPGAANSPTTNPVILIVDKVLETQDLNGDGLMTPAELINFPGVALRHVEPGEPLAPSPQEPQAVGRQSLLAKSPLRQETQEAPGPREEAKGQVEARRESLDPVQEPGGQAEADGDVPGPRGEAEGQAEAKGDAPGPRGEAGGQAEAEGDAPGPRGEAGGQAEARENGEEAKELPGETLESKNTQNDFEVHIVQVENDEI

SEQ ID NO: 13807 - protein, 318 aa, Homo sapiens
  Payload ID: 2677
  Gene Symbol: CGREF1
  Gene Name: cell growth regulator with EF-hand domain 1
  Uniprot ID: Q99674
  ENSP ID: ENSP00000324025
MLPLTMTVLILLLLPTGQAAPKDGVTRPDSEVQHQLLPNPFQPGQEQLGLLQSYLKGLGRTEVQLEHLSREQVLLYLFALHDYDQSGQLDGLELLSMLTAALAPGAANSPTTNPVILIVDKVLETQDLNGDGLMTPAELINFPGVALRHVEPGEPLAPSPQEPQAVGRQSLLAKSPLRQETQEAPGPREEAKGQVEARRESLDPVQEPGGQAEADGDVPGPRGEAEGQAEAKGDAPGPRGEAGGQAEAEGDAPGPRGEAGGQAEAEGDAPGPRGEAGGQAEARENGEEAKELPGETLESKNTQNDFEVHIVQVENDEI

SEQ ID NO: 13808 - protein, 132 aa, Homo sapiens
  Payload ID: 2677
  Gene Symbol: CGREF1
  Gene Name: cell growth regulator with EF-hand domain 1
  Uniprot ID: Q99674
  ENSP ID: ENSP00000385103
MLPLTMTVLILLLLPTGQAAPKDGVTRPDSEVQHQLLPNPFQPGQEQLGLLQSYLKGLGRTEVQLEHLSREQVLLYLFALHDYDQSGQLDGLELLSMLTAALAPGAANSPTTNPGNLDARLDGGEKAMQPQW

SEQ ID NO: 13809 - protein, 318 aa, Homo sapiens; identical to SEQ ID NO: 13807
  Payload ID: 2677
  Gene Symbol: CGREF1
  Gene Name: cell growth regulator with EF-hand domain 1
  Uniprot ID: Q99674
  ENSP ID: ENSP00000385452

SEQ ID NO: 13810 - protein, 440 aa, Homo sapiens
  Payload ID: 2677
  Gene Symbol: CGREF1
  Gene Name: cell growth regulator with EF-hand domain 1
  Uniprot ID: Q99674
  ENSP ID: ENSP00000385574
MNGLKEVRYACAVLLWAPWHLVGSKGMGRGVGMRPQLCFRHSRPAFMCFIYKSWSDIYFEHSSMGSLLSVCESSLSRSPVFGAAGRSRQKMRLCLTQPICDTVADASFPRPLILFLVPVPGRMLPLTMTVLILLLLPTGQAAPKDGVTRPDSEVQHQLLPNPFQPGQEQLGLLQSYLKGLGRTEVQLEHLSREQVLLYLFALHDYDQSGQLDGLELLSMLTAALAPGAANSPTTNPVILIVDKVLETQDLNGDGLMTPAELINFPGVALRHVEPGEPLAPSPQEPQAVGRQSLLAKSPLRQETQEAPGPREEAKGQVEARRESLDPVQEPGGQAEADGDVPGPRGEAEGQAEAKGDAPGPRGEAGGQAEAEGDAPGPRGEAGGQAEAEGDAPGPRGEAGGQAEARENGEEAKELPGETLESKNTQNDFEVHIVQVENDEI

SEQ ID NO: 13811 - protein, 318 aa, Homo sapiens; identical to SEQ ID NO: 13807
  Payload ID: 2677
  Gene Symbol: CGREF1
  Gene Name: cell growth regulator with EF-hand domain 1
  Uniprot ID: Q99674
  ENSP ID: ENSP00000386113

SEQ ID NO: 13812 - protein, 57 aa, Homo sapiens
  Payload ID: 2677
  Gene Symbol: CGREF1
  Gene Name: cell growth regulator with EF-hand domain 1
  ENSP ID: ENSP00000394306
MLPLTMTVLILLLLPTGQAAPKDGVTRPDSEVQHQLLPNPFQPGQEQLGSPLPLCPP

SEQ ID NO: 13813 - protein, 332 aa, Homo sapiens
  Payload ID: 2678
  Gene Symbol: CGRRF1
  Gene Name: cell growth regulator with ring finger domain 1
  Uniprot ID: Q99675
  ENSP ID: ENSP00000216420
MAAVFLVTLYEYSPLFYIAVVFTCFIVTTGLVLGWFGWDVPVILRNSEETQFSTRVFKKQMRQVKNPFGLEITNPSSASITTGITLTTDCLEDSLLTCYWGCSVQKLYEALQKHVYCFRISTPQALEDALYSEYLYQEQYFIKKDSKEEIYCQLPRDTKIEDFGTVPRSRYPLVALLTLADEDDREIYDIISMVSVIHIPDRTYKLSCRILYQYLLLAQGQFHDLKQLFMSANNNFTPSNNSSSEEKNTDRSLLEKVGLSESEVEPSEENSKDCVVCQNGTVNWVLLPCRHTCLCDGCVKYFQQCPMCRQFVQESFALCSQKEQDKDKPKTL

SEQ ID NO: 13814 - protein, 204 aa, Homo sapiens
  Payload ID: 2678
  Gene Symbol: CGRRF1
  Gene Name: cell growth regulator with ring finger domain 1
  ENSP ID: ENSP00000450430
MAAVFLVTLYEYSPLFYIAVVFTCFIVTTGLVLGWFGWDVPVILRNSEETQFSTRVFKKQMRQVKNPFGLEITNPSSASITIETVFHHVDQAGLKLLTSDDPPTSASQSAGITAGITLTTDCLEDSLLTCYWGCSVQKLYEALQKHVYCFRISTPQALEDALYSEYLYQEQYFIKKDSKEEIYCQLPRDTKIEDFGTVPRSRYP

SEQ ID NO: 13815 - protein, 44 aa, Homo sapiens
  Payload ID: 2678
  Gene Symbol: CGRRF1
  Gene Name: cell growth regulator with ring finger domain 1
  ENSP ID: ENSP00000450728
MAAVFLVTLYEYSPLFYIAVVFTCFIVTTGLVLGCWHNLDNRLP

SEQ ID NO: 13816 - protein, 91 aa, Homo sapiens
  Payload ID: 2678
  Gene Symbol: CGRRF1
  Gene Name: cell growth regulator with ring finger domain 1
  ENSP ID: ENSP00000451532
MAAVFLVTLYEYSPLFYIAVVFTCFIVTTGLVLGWFGWDVPVILRNSEETQFSTRVFKKQMRQVKNPFGLEITNPSSASITNFHGVSDSYS

SEQ ID NO: 13817 - protein, 73 aa, Homo sapiens
  Payload ID: 2678
  Gene Symbol: CGRRF1
  Gene Name: cell growth regulator with ring finger domain 1
  ENSP ID: ENSP00000470702
ISMVSVIHIPDRTYKLSCRILYQYLLLAQGQFHDLKKKKTQTEVCWKRWDSLKVKLSHRKRTARTVLFARMGL

SEQ ID NO: 13818 - protein, 1361 aa, Homo sapiens
  Payload ID: 2679
  Gene Symbol: CEMIP
  Gene Name: cell migration inducing protein, hyaluronan binding
  Uniprot ID: Q8WUJ3
  ENSP ID: ENSP00000220244
MGAAGRQDFLFKAMLTISWLTLTCFPGATSTVAAGCPDQSPELQPWNPGHDQDHHVHIGQGKTLLLTSSATVYSIHISEGGKLVIKDHDEPIVLRTRHILIDNGGELHAGSALCPFQGNFTIILYGRADEGIQPDPYYGLKYIGVGKGGALELHGQKKLSWTFLNKTLHPGGMAEGGYFFERSWGHRGVIVHVIDPKSGTVIHSDRFDTYRSKKESERLVQYLNAVPDGRILSVAVNDEGSRNLDDMARKAMTKLGSKHFLHLGFRHPWSFLTVKGNPSSSVEDHIEYHGHRGSAAARVFKLFQTEHGEYFNVSLSSEWVQDVEWTEWFDHDKVSQTKGGEKISDLWKAHPGKICNRPIDIQATTMDGVNLSTEVVYKKGQDYRFACYDRGRACRSYRVRFLCGKPVRPKLTVTIDTNVNSTILNLEDNVQSWKPGDTLVIASTDYSMYQAEEFQVLPCRSCAPNQVKVAGKPMYLHIGEEIDGVDMRAEVGLLSRNIIVMGEMEDKCYPYRNHICNFFDFDTFGGHIKFALGFKAAHLEGTELKHMGQQLVGQYPIHFHLAGDVDERGGYDPPTYIRDLSIHHTFSRCVTVHGSNGLLIKDVVGYNSLGHCFFTEDGPEERNTFDHCLGLLVKSGTLLPSDRDSKMCKMITEDSYPGYIPKPRQDCNAVSTFWMANPNNNLINCAAAGSEETGFWFIFHHVPTGPSVGMYSPGYSEHIPLGKFYNNRAHSNYRAGMIIDNGVKTTEASAKDKRPFLSIISARYSPHQDADPLKPREPAIIRHFIAYKNQDHGAWLRGGDVWLDSCRFADNGIGLTLASGGTFPYDDGSKQEIKNSLFVGESGNVGTEMMDNRIWGPGGLDHSGRTLPIGQNFPIRGIQLYDGPINIQNCTFRKFVALEGRHTSALAFRLNNAWQSCPHNNVTGIAFEDVPITSRVFFGEPGPWFNQLDMDGDKTSVFHDVDGSVSEYPGSYLTKNDNWLVRHPDCINVPDWRGAICSGCYAQMYIQAYKTSNLRMKIIKNDFPSHPLYLEGALTRSTHYQQYQPVVTLQKGYTIHWDQTAPAELAIWLINFNKGDWIRVGLCYPRGTTFSILSDVHNRLLKQTSKTGVFVRTLQMDKVEQSYPGRSHYYWDEDSGLLFLKLKAQNEREKFAFCSMKGCERIKIKALIPKNAGVSDCTATAYPKFTERAVVDVPMPKKLFGSQLKTKDHFLEVKMESSKQHFFHLWNDFAYIEVDGKKYPSSEDGIQVVVIDGNQGRVVSHTSFRNSILQGIPWQLFNYVATIPDNSIVLMASKGRYVSRGPWTRVLEKLGADRGLKLKEQMAFVGFKGSFRPIWVTLDTEDHKAKIFQVVPIPVVKKKKL

SEQ ID NO: 13819 - protein, 1361 aa, Homo sapiens; identical to SEQ ID NO: 13818
  Payload ID: 2679
  Gene Symbol: CEMIP
  Gene Name: cell migration inducing protein, hyaluronan binding
  Uniprot ID: Q8WUJ3
  ENSP ID: ENSP00000348583

SEQ ID NO: 13820 - protein, 1361 aa, Homo sapiens; identical to SEQ ID NO: 13818
  Payload ID: 2679
  Gene Symbol: CEMIP
  Gene Name: cell migration inducing protein, hyaluronan binding
  Uniprot ID: Q8WUJ3
  ENSP ID: ENSP00000378177

SEQ ID NO: 13821 - protein, 76 aa, Homo sapiens
  Payload ID: 2679
  Gene Symbol: CEMIP
  Gene Name: cell migration inducing protein, hyaluronan binding
  ENSP ID: ENSP00000431426
  MOD_RES (1)..(1): Any amino acid
XINFNKGDWIRVGLCYPRGTTFSILSDVHNRLLKQTSKTGVFVRTLQMDKVEQSYPGRSHYYWDEDSGKQRTISWR

SEQ ID NO: 13822 - protein, 145 aa, Homo sapiens
  Payload ID: 2679
  Gene Symbol: CEMIP
  Gene Name: cell migration inducing protein, hyaluronan binding
  ENSP ID: ENSP00000453066
  MOD_RES (1)..(1): Any amino acid
XRGAICSGCYAQMYIQAYKTSNLRMKIIKNDFPSHPLYLEGALTRSTHYQQYQPVVTLQKGYTIHWDQTAPAELAIWLINFNKGDWIRVGLCYPRGTTFSILSDVHNRLLKQTSKTGVFVRTLQMDKVEQSYPGRSHYYWDEDSG

SEQ ID NO: 13823 - protein, 992 aa, Homo sapiens
  Payload ID: 2679
  Gene Symbol: CEMIP
  Gene Name: cell migration inducing protein, hyaluronan binding
  Uniprot ID: Q8WUJ3
  ENSP ID: ENSP00000480324
MGAAGRQDFLFKAMLTISWLTLTCFPGATSTVAAGCPDQSPELQPWNPGHDQDHHVHIGQGKTLLLTSSATVYSIHISEGGKLVIKDHDEPIVLRTRHILIDNGGELHAGSALCPFQGNFTIILYGRADEGIQPDPYYGLKYIGVGKGGALELHGQKKLSWTFLNKTLHPGGMAEGGYFFERSWGHRGVIVHVIDPKSGTVIHSDRFDTYRSKKESERLVQYLNAVPDGRILSVAVNDEGSRNLDDMARKAMTKLGSKHFLHLGFRHPWSFLTVKGNPSSSVEDHIEYHGHRGSAAARVFKLFQTEHGEYFNVSLSSEWVQDVEWTEWFDHDKVSQTKGGEKISDLWKAHPGKICNRPIDIQATTMDGVNLSTEVVYKKGQDYRFACYDRGRACRSYRVRFLCGKPVRPKLTVTIDTNVNSTILNLEDNVQSWKPGDTLVIASTDYSMYQAEEFQVLPCRSCAPNQVKVAGKPMYLHIGEEIDGVDMRAEVGLLSRNIIVMGEMEDKCYPYRNHICNFFDFDTFGGHIKFALGFKAAHLEGTELKHMGQQLVGQYPIHFHLAGDVDERGGYDPPTYIRDLSIHHTFSRCVTVHGSNGLLIKDVVGYNSLGHCFFTEDGPEERNTFDHCLGLLVKSGTLLPSDRDSKMCKMITEDSYPGYIPKPRQDCNAVSTFWMANPNNNLINCAAAGSEETGFWFIFHHVPTGPSVGMYSPGYSEHIPLGKFYNNRAHSNYRAGMIIDNGVKTTEASAKDKRPFLSIISARYSPHQDADPLKPREPAIIRHFIAYKNQDHGAWLRGGDVWLDSCRFADNGIGLTLASGGTFPYDDGSKQEIKNSLFVGESGNVGTEMMDNRIWGPGGLDHSGRTLPIGQNFPIRGIQLYDGPINIQNCTFRKFVALEGRHTSALAFRLNNAWQSCPHNNVTGIAFEDVPITSRVFFGEPGPWFNQLDMDGDKTSVFHDVDGSVSEYPGSYLTKNDKWHSLASKAASGPSG

SEQ ID NO: 13824 - protein, 699 aa, Homo sapiens
  Payload ID: 2680
  Gene Symbol: CWH43
  Gene Name: cell wall biogenesis 43 C-terminal homolog
  Uniprot ID: Q9H720
  ENSP ID: ENSP00000226432
MPSLWREILLESLLGCVSWSLYHDLGPMIYYFPLQTLELTGLEGFSIAFLSPIFLTITPFWKLVNKKWMLTLLRIITIGSIASFQAPNAKLRLMVLALGVSSSLIVQAVTWWSGSHLQRYLRIWGFILGQIVLVVLRIWYTSLNPIWSYQMSNKVILTLSAIATLDRIGTDGDCSKPEEKKTGEVATGMASRPNWLLAGAAFGSLVFLTHWVFGEVSLVSRWAVSGHPHPGPDPNPFGGAVLLCLASGLMLPSCLWFRGTGLIWWVTGTASAAGLLYLHTWAAAVSGCVFAIFTASMWPQTLGHLINSGTNPGKTMTIAMIFYLLEIFFCAWCTAFKFVPGGVYARERSDVLLGTMMLIIGLNMLFGPKKNLDLLLQTKNSSKVLFRKSEKYMKLFLWLLVGVGLLGLGLRHKAYERKLGKVAPTKEVSAAIWPFRFGYDNEGWSSLERSAHLLNETGADFITILESDASKPYMGNNDLTMWLGEKLGFYTDFGPSTRYHTWGIMALSRYPIVKSEHHLLPSPEGEIAPAITLTVNISGKLVDFVVTHFGNHEDDLDRKLQAIAVSKLLKSSSNQVIFLGYITSAPGSRDYLQLTEHGNVKDIDSTDHDRWCEYIMYRGLIRLGYARISHAELSDSEIQMAKFRIPDDPTNYRDNQKVVIDHREVSEKIHFNPRFGSYKEGHNYENNHHFHMNTPKYFL

SEQ ID NO: 13825 - protein, 672 aa, Homo sapiens
  Payload ID: 2680
  Gene Symbol: CWH43
  Gene Name: cell wall biogenesis 43 C-terminal homolog
  ENSP ID: ENSP00000422802
MIYYFPLQTLELTGLEGFSIAFLSPIFLTITPFWKLVNKKWMLTLLRIITIGSIASFQAPNAKLRLMVLALGVSSSLIVQAVTWWSGSHLQRYLRIWGFILGQIVLVVLRIWYTSLNPIWSYQMSNKVILTLSAIATLDRIGTDGDCSKPEEKKTGEVATGMASRPNWLLAGAAFGSLVFLTHWVFGEVSLVSRWAVSGHPHPGPDPNPFGGAVLLCLASGLMLPSCLWFRGTGLIWWVTGTASAAGLLYLHTWAAAVSGCVFAIFTASMWPQTLGHLINSGTNPGKTMTIAMIFYLLEIFFCAWCTAFKFVPGGVYARERSDVLLGTMMLIIGLNMLFGPKKNLDLLLQTKNSSKVLFRKSEKYMKLFLWLLVGVGLLGLGLRHKAYERKLGKVAPTKEVSAAIWPFRFGYDNEGWSSLERSAHLLNETGADFITILESDASKPYMGNNDLTMWLGEKLGFYTDFGPSTRYHTWGIMALSRYPIVKSEHHLLPSPEGEIAPAITLTVNISGKLVDFVVTHFGNHEDDLDRKLQAIAVSKLLKSSSNQVIFLGYITSAPGSRDYLQLTEHGNVKDIDSTDHDRWCEYIMYRGLIRLGYARISHAELSDSEIQMAKFRIPDDPTNYRDNQKVVIDHREVSEKIHFNPRFGSYKEGHNYENNHHFHMNTPKYFL

SEQ ID NO: 13826 - protein, 238 aa, Homo sapiens
  Payload ID: 2680
  Gene Symbol: CWH43
  Gene Name: cell wall biogenesis 43 C-terminal homolog
  ENSP ID: ENSP00000425157
MPSLWREILLESLLGCVSWSLYHDLGPMIYYFPLQTLELTGLEGFSIAFLSPIFLTITPFWKLVNKKWMLTLLRIITIGSIASFQAPNAKLRLMVLALGVSSSLIVQAVTWWSGSHLQRYLRIWGFILGQIVLVVLRIWYTSLNPIWSYQMSNKVILTLSAIATLDRIGTDGDCSKPEEKKTGEVATGMASRPNWLLAGAAFGSLVFLTHWVFGEVSLVSRWAVSGHPHPGPDPNPFG

SEQ ID NO: 13827 - protein, 220 aa, Homo sapiens
  Payload ID: 2681
  Gene Symbol: CREG1
  Gene Name: cellular repressor of E1A-stimulated genes 1
  Uniprot ID: O75629
  ENSP ID: ENSP00000359540
MAGLSRGSARALLAALLASTLLALLVSPARGRGGRDHGDWDEASRLPPLPPREDAARVARFVTHVSDWGALATISTLEAVRGRPFADVLSLSDGPPGAGSGVPYFYLSPLQLSVSNLQENPYATLTMTLAQTNFCKKHGFDPQSPLCVHIMLSGTVTKVNETEMDIAKHSLFIRHPEMKTWPSSHNWFFAKLNITNIWVLDYFGGPKIVTPEEYYNVTVQ

SEQ ID NO: 13828 - protein, 290 aa, Homo sapiens
  Payload ID: 2682
  Gene Symbol: CREG2
  Gene Name: cellular repressor of E1A-stimulated genes 2
  Uniprot ID: Q8IUH2
  ENSP ID: ENSP00000315203
MSVRRGRRPARPGTRLSWLLCCSALLSPAAGYVIVSSVSWAVTNEVDEELDSASTEEAMPALLEDSGSIWQQSFPASAHKEDAHLRPRAGAARARPPPAPPGMFSYRREGGQTASAPPGPRLRAATARSLAHASVWGCLATVSTHKKIQGLPFGNCLPVSDGPFNNSTGIPFFYMTAKDPVVADLMKNPMASLMLPESEGEFCRKNIVDPEDPRCVQLTLTGQMIAVSPEEVEFAKQAMFSRHPGMRKWPRQYEWFFMKMRIEHIWLQKWYGGASSISREEYFKAVPRKA

SEQ ID NO: 13829 - protein, 137 aa, Homo sapiens
  Payload ID: 2683
  Gene Symbol: CRABP1
  Gene Name: cellular retinoic acid binding protein 1
  Uniprot ID: P29762
  ENSP ID: ENSP00000299529
MPNFAGTWKMRSSENFDELLKALGVNAMLRKVAVAAASKPHVEIRQDGDQFYIKTSTTVRTTEINFKVGEGFEEETVDGRKCRSLATWENENKIHCTQTLLEGDGPKTYWTRELANDELILTFGADDVVCTRIYVRE

SEQ ID NO: 13830 - protein, 113 aa, Homo sapiens
  Payload ID: 2683
  Gene Symbol: CRABP1
  Gene Name: cellular retinoic acid binding protein 1
  ENSP ID: ENSP00000385978
  MOD_RES (1)..(1): Any amino acid
XDELLKALGVNAMLRKVAVAAASKPHVEIRQDGDQFYIKTSTTVRTTEINFKVGEGFEEETVDGRKCRVRPQSHYSVPVSPLGAHGPLLLEEPVSPFAACGAPSLQEFSHLGE

SEQ ID NO: 13831 - protein, 82 aa, Homo sapiens
  Payload ID: 2684
  Gene Symbol: CRABP2
  Gene Name: cellular retinoic acid binding protein 2
  ENSP ID: ENSP00000357203
MPNFSGNWKIIRSENFEELLKVLGVNVMLRKIAVAAASKPAVEIKQEGDTFYIKTSTTVRTTEINFKVGEEFEEQTVDGRPC

SEQ ID NO: 13832 - protein, 138 aa, Homo sapiens
  Payload ID: 2684
  Gene Symbol: CRABP2
  Gene Name: cellular retinoic acid binding protein 2
  Uniprot ID: P29373
  ENSP ID: ENSP00000357204
MPNFSGNWKIIRSENFEELLKVLGVNVMLRKIAVAAASKPAVEIKQEGDTFYIKTSTTVRTTEINFKVGEEFEEQTVDGRPCKSLVKWESENKMVCEQKLLKGEGPKTSWTRELTNDGELILTMTADDVVCTRVYVRE

SEQ ID NO: 13833 - protein, 138 aa, Homo sapiens; identical to SEQ ID NO: 13832
  Payload ID: 2684
  Gene Symbol: CRABP2
  Gene Name: cellular retinoic acid binding protein 2
  Uniprot ID: P29373
  ENSP ID: ENSP00000357205

SEQ ID NO: 13834 - protein, 138 aa, Homo sapiens; identical to SEQ ID NO: 13832
  Payload ID: 2684
  Gene Symbol: CRABP2
  Gene Name: cellular retinoic acid binding protein 2
  Uniprot ID: P29373
  ENSP ID: ENSP00000482841

SEQ ID NO: 13835 - protein, 48 aa, Homo sapiens
  Payload ID: 2685
  Gene Symbol: CEMP1
  Gene Name: cementum protein 1
  ENSP ID: ENSP00000455479
MGTSSTDSQQAGHRRCSTSNTSAENLTCLSLPGSPGKTAPLPGPAQAG

SEQ ID NO: 13836 - protein, 247 aa, Homo sapiens
  Payload ID: 2685
  Gene Symbol: CEMP1
  Gene Name: cementum protein 1
  Uniprot ID: Q6PRD7
  ENSP ID: ENSP00000457380
MGTSSTDSQQAGHRRCSTSNTSAENLTCLSLPGSPGKTAPLPGPAQAGAGQPLPKGCAAVKAEVGIPAPHTSQEVRIHIRRLLSWAAPGACGLRSTPCALPQALPQARPCPGRWFFPGCSLPTGGAQTILSLWTWRHFLNWALQQREENSGRARRVPPVPRTAPVSKGEGSHPPQNSNGEKVKTITPDVGLHQSLTSDPTVAVLRAKRAPEAHPPRSCSGSLTARVCHMGVCQGQGDTEDGRMTLMG

SEQ ID NO: 13837 - protein, 187 aa, Homo sapiens
  Payload ID: 2686
  Gene Symbol: CENPBD1
  Gene Name: CENPB DNA-binding domains containing 1
  Uniprot ID: B2RD01
  ENSP ID: ENSP00000393854
MPGERPTDATVIPSAKRERKAITLDLKLEVLRRFEAGEKLSQIAKALDLAISTVATIRDSKEKIKASSQIATPLRASRLTRHRSAVMESMEQLLSLWLEDQSQPNATLSAAIVQEKAEFDDLQREHGEGSQTERFHASQGWLVRFKECHCLPHFKMNSAAPSNKDMYTEMLKSIIEEGEYTPQVSLT

SEQ ID NO: 13838 - protein, 685 aa, Homo sapiens
  Payload ID: 2687
  Gene Symbol: CTGLF11P
  Gene Name: centaurin, gamma-like family, member 11 pseudogene
  ENSP ID: ENSP00000485140
MGNILTCRVHPSVSLEFDQQQGSVCPSESEIYEAGAEDRMAGAPMAAAVQPAEVTVEVGEDLHMHHVRDREMPEALEFNLSANPEASTILQRNSQTDALEFNPSANPEASTIFQRNSQTDVVEIRRSNCTNHVSTERFSQQYSSCSTIFLDDSTASQHYLTMTIISVTLEIPHHITQRDADRSLSIPDEQLSFAVSTVHITKNRNGGGSLNNYSSSIPSTPSTSQEDPQFSVPPTANTPTPVCKRSMCWSNLFTSEKGSHPDKERKAPENHADTIGSSRAIPIKQGMLLKRSGKWLKTWKKKYVTLCSNGVLTYYSSLGDYMKNIHKKEIDLRTSTIKVPGKWPSLATSASAPISSSKSNGLSKDMDTGLGDSICFSPSISSTTSPKLNLPPSPHANKKKHLKKKSTNNFMIVSATGQTWHFEATTYEERDAWVQAIQSQIVASLQSCESSKSKSQLTSQSEAMALQSIQNMRGNAHCVDCETQNPKWASLNLGVLMCIECSGIHCSLGTRLSRVRSLELDDWPVELRKVMSSIGNDLANSIWEGSSQGQTKPSVKSTREEKERWIRSKYEKKLFLAPLPCTELSLGQHLLRATADEDLQTAILLLAHGSREEVNETCGEGDGCTALHLACRKGNVVLAQLLIWYRVDVMARDAHGNTALTYARQASSQECINVLLQYGCPDECV

SEQ ID NO: 13839 - protein, 391 aa, Homo sapiens
  Payload ID: 2688
  Gene Symbol: CNTLN
  Gene Name: centlein, centrosomal protein
  Uniprot ID: Q9NXG0
  ENSP ID: ENSP00000370015
MAARSPPSPHPSPPARQLGPRSPRVGRGAEVHAMRSEASGFAGAAREVVADESDKIWVGEEGSGGRRGPGGAAPAHAPLLSAPMGSRRLEGISVEEAMVTRTQLLEEELSSLKEELALCQADKEFVWSLWKRLQVTNPDLTQVVSLVVEREKQKSEAKDRKVLEILQVKDAKIQEFEQRESVLKQEINDLVKRKIAVDEENAFLRKEFSDLEKKFKDKSQEIKDTKECVQNKEEQNRLVIKNLEEENKKLSTRCTDLLNDLEKLRKQEAHLRKEKYSTDAKIKTFEDNLIEARKEVEVSQSKYNALSLQLSNKQTELIQKDMDITLVRKELQELQNLYKQNSTHTAQQAELIQQLQVLNMDTQKVLRNQEDVHTAESISYQKVCFYSVIKM

SEQ ID NO: 13840 - protein, 1406 aa, Homo sapiens
  Payload ID: 2688
  Gene Symbol: CNTLN
  Gene Name: centlein, centrosomal protein
  Uniprot ID: Q9NXG0
  ENSP ID: ENSP00000370021
MAARSPPSPHPSPPARQLGPRSPRVGRGAEVHAMRSEASGFAGAAREVVADESDKIWVGEEGSGGRRGPGGAAPAHAPLLSAPMGSRRLEGISVEEAMVTRTQLLEEELSSLKEELALCQADKEFVWSLWKRLQVTNPDLTQVVSLVVEREKQKSEAKDRKVLEILQVKDAKIQEFEQRESVLKQEINDLVKRKIAVDEENAFLRKEFSDLEKKFKDKSQEIKDTKECVQNKEEQNRLVIKNLEEENKKLSTRCTDLLNDLEKLRKQEAHLRKEKYSTDAKIKTFEDNLIEARKEVEVSQSKYNALSLQLSNKQTELIQKDMDITLVRKELQELQNLYKQNSTHTAQQAELIQQLQVLNMDTQKVLRNQEDVHTAESISYQKLYNELHICFETTKSNEAMLRQSVTNLQDQLLQKEQENAKLKEKLQESQGAPLPLPQESDPDYSAQVPHRPSLSSLETLMVSQKSEIEYLQEKLKIANEKLSENISANKGFSRKSIMTSAEGKHKEPPVKRSRSLSPKSSFTDSEELQKLRKAERKIENLEKALQLKSQENDELRDAHEKRKERLQMLQTNYRAVKEQLKQWEEGSGMTEIRKIKRADPQQLRQEDSDAVWNELAYFKRENQELMIQKMNLEEELDELKVHISIDKAAIQELNRCVAERREEQLFRSGEDDEVKRSTPEKNGKEMLEQTLQKVTELENRLKSFEKRSRKLKEGNKKLMKENDFLKSLLKQQQEDTETREKELEQIIKGSKDVEKENTELQVKISELETEVTSLRRQVAEANALRNENEELINPMEKSHQSADRAKSEMATMKVRSGRYDCKTTMTKVKFKAAKKNCSVGRHHTVLNHSIKVMSNVFENLSKDGWEDVSESSSDSEAQTSQTLGTIIVETSQKISPTEDGKDQKESDPTEDSQTQGKEIVQTYLNIDGKTPKDYFHDKNAKKPTFQKKNCKMQKSSHTAVPTRVNREKYKNITAQKSSSNIILLRERIISLQQQNSVLQNAKKTAELSVKEYKEVNEKLLHQQQVSDQRFQTSRQTIKKLNLDLAGLRKEKEDLLKKLESSSEITSLAEENSQVTFPRIQVTSLSPSRSMDLEMKQLQYKLKNATNELTKQSSNVKTLKFELLAKEEHIKEMHEKISRMERDITMKRHLIEDLKFRQKVNLESNKSFSEMLQNLDKKVKTLTEECSNKKVSIDSLKQRLNVAVKEKSQYEQMYQKSKEELEKKDLKLTLLVSRISETESAMAEIETAASKQLQELALQSEQVLEGAQKTLLLANEKVEEFTTFVKALAKELQNDVHVVRRQIRELKKMKKNRDACKTSTHKAQTLAASILNISRSDLEEILDTEDQVEIEKTKIDAENDKEWMLYIQKLLEGQLPFASYLLEAVLEKINEKKKLVEGYFTIMKDIR

SEQ ID NO: 13841 - protein, 172 aa, Homo sapiens
  Payload ID: 2689
  Gene Symbol: CETN1
  Gene Name: centrin, EF-hand protein, 1
  Uniprot ID: Q12798
  ENSP ID: ENSP00000319052
MASGFKKPSAASTGQKRKVAPKPELTEDQKQEVREAFDLFDVDGSGTIDAKELKVAMRALGFEPRKEEMKKMISEVDREGTGKISFNDFLAVMTQKMSEKDTKEEILKAFRLFDDDETGKISFKNLKRVANELGENLTDEELQEMIDEADRDGDGEVNEEEFLRIMKKTSLY

SEQ ID NO: 13842 - protein, 172 aa, Homo sapiens
  Payload ID: 2690
  Gene Symbol: CETN2
  Gene Name: centrin, EF-hand protein, 2
  Uniprot ID: P41208
  ENSP ID: ENSP00000359300
MASNFKKANMASSSQRKRMSPKPELTEEQKQEIREAFDLFDADGTGTIDVKELKVAMRALGFEPKKEEIKKMISEIDKEGTGKMNFGDFLTVMTQKMSEKDTKEEILKAFKLFDDDETGKISFKNLKRVAKELGENLTDEELQEMIDEADRDGDGEVSEQEFLRIMKKTSLY

SEQ ID NO: 13843 - protein, 167 aa, Homo sapiens
  Payload ID: 2691
  Gene Symbol: CETN3
  Gene Name: centrin, EF-hand protein, 3
  Uniprot ID: O15182
  ENSP ID: ENSP00000283122
MSLALRSELVVDKTKRKKRRELSEEQKQEIKDAFELFDTDKDEAIDYHELKVAMRALGFDVKKADVLKILKDYDREATGKITFEDFNEVVTDWILERDPHEEILKAFKLFDDDDSGKISLRNLRRVARELGENMSDEELRAMIEEFDKDGDGEINQEEFIAIMTGDI

SEQ ID NO: 13844 - protein, 191 aa, Homo sapiens
  Payload ID: 2691
  Gene Symbol: CETN3
  Gene Name: centrin, EF-hand protein, 3
  ENSP ID: ENSP00000428259
MSLALRSELVVDKTKRKKRRELSEEQKQEIKDAFELFDTDKDEAIDYHELKVAMRALGFDVKKADVLKILKDYDREATGKITFEDFNEVVTDWILERDPHEEILKAFKLFDDDDSGKISLRNLRRVARELGENMSDEELRAMIEEFDKDGDGEILKNILLLPIWSRCLSLNREFFSEVNQEEFIAIMTGDI

SEQ ID NO: 13845 - protein, 81 aa, Homo sapiens
  Payload ID: 2691
  Gene Symbol: CETN3
  Gene Name: centrin, EF-hand protein, 3
  ENSP ID: ENSP00000429772
ELVVDKTKRKKRRELSEEQKQEIKDAFELFDTDKDEAIDYHELKVAMRALGFDVKKADVLKILKDYDREATGKITFEDFNE

SEQ ID NO: 13846 - protein, 111 aa, Homo sapiens
  Payload ID: 2691
  Gene Symbol: CETN3
  Gene Name: centrin, EF-hand protein, 3
  ENSP ID: ENSP00000429875
MSLALRSELVVDKTKRKKRRELSEEQKQEIKDAFELFDTDKDEAIDYHELKVAMRALGFDVKKADVLKILKDYDREATGKITFEDFNEVGVYFNSLCNQQLLGNCLINITF

SEQ ID NO: 13847 - protein, 153 aa, Homo sapiens
  Payload ID: 2691
  Gene Symbol: CETN3
  Gene Name: centrin, EF-hand protein, 3
  ENSP ID: ENSP00000430361
MSLALRSELVVDKTKRKKRRELSEEQKQEIKDAFELFDTDKDEAIDYHELKVAMRALGFDVKKADVLKILKDYDREATGKITFEDFNEVVTDWILERDPHEEILKAFKLFDDDDSVLKNILLLPIWSRCLSLNREFFSEVNQEEFIAIMTGDI

SEQ ID NO: 13848 - protein, 156 aa, Homo sapiens
  Payload ID: 2691
  Gene Symbol: CETN3
  Gene Name: centrin, EF-hand protein, 3
  ENSP ID: ENSP00000430409
MSLALRSELVVDKTKRKKRRELSEEQKQEIKDAFELFDTDKDEAIDYHELKVAMRALGFDVKKADVLKILKDYDREATGKITFEDFNEVVTDWILERDPHEEILKAFKLFDDDDSGKISLRNLRRVARELGENMSDEELRAMIEEFDKDGDGESKF

SEQ ID NO: 13849 - protein, 1012 aa, Homo sapiens
  Payload ID: 2692
  Gene Symbol: CCP110
  Gene Name: centriolar coiled coil protein 110kDa
  Uniprot ID: O43303
  ENSP ID: ENSP00000370803
MEEYEKFCEKSLARIQEASLSTESFLPAQSESISLIRFHGVAILSPLLNIEKRKEMQQEKQKALDVEARKQVNRKKALLTRVQEILDNVQVRKAPNASDFDQWEMETVYSNSEVRNLNVPATFPNSFPSHTEHSTAAKLDKIAGILPLDNEDQCKTDGIDLARDSEGFNSPKQCDSSNISHVENEAFPKTSSATPQETLISDGPFSVNEQQDLPLLAEVIPDPYVMSLQNLMKKSKEYIEREQSRRSLRGSINRIVNESHLDKEHDAVEVADCVKEKGQLTGKHCVSVIPDKPSLNKSNVLLQGASTQASSMSMPVLASFSKVDIPIRTGHPTVLESNSDFKVIPTFVTENNVIKSLTGSYAKLPSPEPSMSPKMHRRRSRTSSACHILINNPINACELSPKGKEQAMDLIIQDTDENTNVPEIMPKLPTDLAGVCSSKVYVGKNTSEVKEDVVLGKSNQVCQSSGNHLENKVTHGLVTVEGQLTSDERGAHIMNSTCAAMPKLHEPYASSQCIASPNFGTVSGLKPASMLEKNCSLQTELNKSYDVKNPSPLLMQNQNTRQQMDTPMVSCGNEQFLDNSFEKVKRRLDLDIDGLQKENCPYVITSGITEQERQHLPEKRYPKGSGFVNKNKMLGTSSKESEELLKSKMLAFEEMRKRLEEQHAQQLSLLIAEQEREQERLQKEIEEQEKMLKEKKAMTAEASELDINNAVELEWRKISDSSLLETMLSQADSLHTSNSNSSGFTNSAMQYSFVSANEAPFYLWGSSTSGLTKLSVTRPFGRAKTRWSQVFSLEIQAKFNKITAVAKGFLTRRLMQTDKLKQLRQTVKDTMEFIRSFQSEAPLKRGIVSAQDASLQERVLAQLRAALYGIHDIFFVMDAAERMSILHHDREVRKEKMLRQMDKMKSPRVALSAATQKSLDRKKYMKAAEMGMPNKKFLVKQNPSETRVLQPNQGQNAPVHRLLSRQGTPKTSVKGVVQNRQKPSQSRVPNRVPVSGVYAGKIQRKRPNVATI

SEQ ID NO: 13850 - protein, 991 aa, Homo sapiens
  Payload ID: 2692
  Gene Symbol: CCP110
  Gene Name: centriolar coiled coil protein 110kDa
  Uniprot ID: O43303
  ENSP ID: ENSP00000379511
MEEYEKFCEKSLARIQEASLSTESFLPAQSESISLIRFHGVAILSPLLNIEKRKEMQQEKQKALDVEARKQVNRKKALLTRVQEILDNVQVRKAPNASDFDQWEMETVYSNSEVRNLNVPATFPNSFPSHTEHSTAAKLDKIAGILPLDNEDQCKTDGIDLARDSEGFNSPKQCDSSNISHVENEAFPKTSSATPQETLISDGPFSVNEQQDLPLLAEVIPDPYVMSLQNLMKKSKEYIEREQSRRSLRGSINRIVNESHLDKEHDAVEVADCVKEKGQLTGKHCVSVIPDKPSLNKSNVLLQGASTQASSMSMPVLASFSKVDIPIRTGHPTVLESNSDFKVIPTFVTENNVIKSLTGSYAKLPSPEPSMSPKMHRRRSRTSSACHILINNPINACELSPKGKEQAMDLIIQDTDENTNVPEIMPKLPTDLAGVCSSKVYVGKNTSEVKEDVVLGKSNQVCQSSGNHLENKVTHGLVTVEGQLTSDERGAHIMNSTCAAMPKLHEPYASSQCIASPNFGTVSGLKPASMLEKNCSLQTELNKSYDVKNPSPLLMQNQNTRQQMDTPMVSCGNEQFLDNSFEKVKRRLDLDIDGLQKENCPYVITSGITEQERQHLPEKRYPKGSGFVNKNKMLGTSSKESEELLKSKMLAFEEMRKRLEEQHAQQLSLLIAEQEREQERLQKEIEEQEKMLKEKKAMTAEASELDINNAVELEWRKISDSSLLETMLSQADSLHTSNSNSSGFTNSAMQYSFVSANEAPFYLWGSSTSGLTKLSVTRPFGRAKTRWSQVFSLEIQAKFNKITAVAKGFLTRRLMQTDKLKQLRQTVKDTMEFIRSFQSEAPLKRGIVSAQDASLQERVLAQLRAALYGIHDIFFVMDAAERMSILHHDREVRKEKMLRQMDKMKSPRVALSAATQKSLDRKKYMKAAEMGMPNKKFLVKQNPSETRVLQPNQGQNAPVHRLLSRQGSICRKNPKKAAKCCDNLRRQHSLG

SEQ ID NO: 13851 - protein, 991 aa, Homo sapiens; identical to SEQ ID NO: 13850
  Payload ID: 2692
  Gene Symbol: CCP110
  Gene Name: centriolar coiled coil protein 110kDa
  Uniprot ID: O43303
  ENSP ID: ENSP00000379515

SEQ ID NO: 13852 - protein, 50 aa, Homo sapiens
  Payload ID: 2692
  Gene Symbol: CCP110
  Gene Name: centriolar coiled coil protein 110kDa
  ENSP ID: ENSP00000454514
MEEYEKFCEKSLARIQEASLSTESFLPAQSESISLIRFHGVAILSPLVNL

SEQ ID NO: 13853 - protein, 52 aa, Homo sapiens
  Payload ID: 2692
  Gene Symbol: CCP110
  Gene Name: centriolar coiled coil protein 110kDa
  ENSP ID: ENSP00000458123
MEEYEKFCEKSLARIQEASLSTESFLPAQSESISLIRFHGVAILSPLKARSY

SEQ ID NO: 13854 - protein, 120 aa, Homo sapiens
  Payload ID: 2692
  Gene Symbol: CCP110
  Gene Name: centriolar coiled coil protein 110kDa
  ENSP ID: ENSP00000459410
RIQEASLSTESFLPAQSESISLIRFHGVAILSPLVRKAPNASDFDQWEMETVYSNSEVRNLNVPATFPNSFPSHTEHSTAAKLDKIAGILPLDNEDQCKTDGIDLARDSEGFNSPKQCDS

SEQ ID NO: 13855 - protein, 270 aa, Homo sapiens
  Payload ID: 2693
  Gene Symbol: CCSAP
  Gene Name: centriole, cilia and spindle-associated protein
  Uniprot ID: Q6IQ19
  ENSP ID: ENSP00000284617
MSPGSGVKSEYMKRYQEPRWEEYGPCYRELLHYRLGRRLLEQAHAPWLWDDWGPAGSSEDSASSESSGAGGPAPRCAPPSPPPPVEPATQEEAERRARGAPEEQDAEAGDAEAEDAEDAALPALPVKDVEDKPEQQTRTRETDKSPTSTEPRQQPSALFARGNRKAVKSPQRSSSKIKENKHPFALYGWGEKQTDTGSQKTHNVCASAPVHEIHESALRAKNRRQVEKRKLVAQRQRAHSVDVEKNRKMKASSSENPWMTEYMRCYSARA

SEQ ID NO: 13856 - protein, 156 aa, Homo sapiens
  Payload ID: 2693
  Gene Symbol: CCSAP
  Gene Name: centriole, cilia and spindle-associated protein
  Uniprot ID: Q6IQ19
  ENSP ID: ENSP00000355647
MVPVFTSSALPVKDVEDKPEQQTRTRETDKSPTSTEPRQQPSALFARGNRKAVKSPQRSSSKIKENKHPFALYGWGEKQTDTGSQKTHNVCASAPVHEIHESALRAKNRRQVEKRKLVAQRQRAHSVDVEKNRKMKASSSENPWMTEYMRCYSARA

SEQ ID NO: 13857 - protein, 270 aa, Homo sapiens; identical to SEQ ID NO: 13855
  Payload ID: 2693
  Gene Symbol: CCSAP
  Gene Name: centriole, cilia and spindle-associated protein
  Uniprot ID: Q6IQ19
  ENSP ID: ENSP00000355648

SEQ ID NO: 13858 - protein, 2325 aa, Homo sapiens
  Payload ID: 2694
  Gene Symbol: CNTRL
  Gene Name: centriolin
  Uniprot ID: Q7Z7A1
  ENSP ID: ENSP00000238341
MKKGSQQKIFSKAKIPSSSHSPIPSSMSNMRSRSLSPLIGSETLPFHSGGQWCEQVEIADENNMLLDYQDHKGADSHAGVRYITEALIKKLTKQDNLALIKSLNLSLSKDGGKKFKYIENLEKCVKLEVLNLSYNLIGKIEKLDKLLKLRELNLSYNKISKIEGIENMCNLQKLNLAGNEIEHIPVWLGKKLKSLRVLNLKGNKISSLQDISKLKPLQDLISLILVENPVVTLPHYLQFTIFHLRSLESLEGQPVTTQDRQEAFERFSLEEVERLERDLEKKMIETEELKSKQTRFLEEIKNQDKLNKSLKEEAMLQKQSCEELKSDLNTKNELLKQKTIELTRACQKQYELEQELAFYKIDAKFEPLNYYPSEYAEIDKAPDESPYIGKSRYKRNMFATESYIIDSAQAVQIKKMEPDEQLRNDHMNLRGHTPLDTQLEDKEKKISAAQTRLSELHDEIEKAEQQILRATEEFKQLEEAIQLKKISEAGKDLLYKQLSGRLQLVNKLRQEALDLELQMEKQKQEIAGKQKEIKDLQIAIDSLDSKDPKHSHMKAQKSGKEQQLDIMNKQYQQLESRLDEILSRIAKETEEIKDLEEQLTEGQIAANEALKKDLEGVISGLQEYLGTIKGQATQAQNECRKLRDEKETLLQRLTEVEQERDQLEIVAMDAENMRKELAELESALQEQHEVNASLQQTQGDLSAYEAELEARLNLRDAEANQLKEELEKVTRLTQLEQSALQAELEKERQALKNALGKAQFSEEKEQENSELHAKLKHLQDDNNLLKQQLKDFQNHLNHVVDGLVRPEEVAARVDELRRKLKLGTGEMNIHSPSDVLGKSLADLQKQFSEILARSKWERDEAQVRERKLQEEMALQQEKLATGQEEFRQACERALEARMNFDKRQHEARIQQMENEIHYLQENLKSMEEIQGLTDLQLQEADEEKERILAQLRELEKKKKLEDAKSQEQVFGLDKELKKLKKAVATSDKLATAELTIAKDQLKSLHGTVMKINQERAEELQEAERFSRKAAQAARDLTRAEAEIELLQNLLRQKGEQFRLEMEKTGVGTGANSQVLEIEKLNETMERQRTEIARLQNVLDLTGSDNKGGFENVLEEIAELRREVSYQNDYISSMADPFKRRGYWYFMPPPPSSKVSSHSSQATKDSGVGLKYSASTPVRKPRPGQQDGKEGSQPPPASGYWVYSPIRSGLHKLFPSRDADSGGDSQEESELDDQEEPPFVPPPGYMMYTVLPDGSPVPQGMALYAPPPPLPNNSRPLTPGTVVYGPPPAGAPMVYGPPPPNFSIPFIPMGVLHCNVPEHHNLENEVSRLEDIMQHLKSKKREERWMRASKRQSEKEMEELHHNIDDLLQEKKSLECEVEELHRTVQKRQQQKDFIDGNVESLMTELEIEKSLKHHEDIVDEIECIEKTLLKRRSELREADRLLAEAESELSCTKEKTKNAVEKFTDAKRSLLQTESDAEELERRAQETAVNLVKADQQLRSLQADAKDLEQHKIKQEEILKEINKIVAAKDSDFQCLSKKKEKLTEELQKLQKDIEMAERNEDHHLQVLKESEVLLQAKRAELEKLKSQVTSQQQEMAVLDRQLGHKKEELHLLQGSMVQAKADLQEALRLGETEVTEKCNHIREVKSLLEELSFQKGELNVQISERKTQLTLIKQEIEKEEENLQVVLRQMSKHKTELKNILDMLQLENHELQGLKLQHDQRVSELEKTQVAVLEEKLELENLQQISQQQKGEIEWQKQLLERDKREIERMTAESRALQSCVECLSKEKEDLQEKCDIWEKKLAQTKRVLAAAEENSKMEQSNLEKLELNVRKLQQELDQLNRDKLSLHNDISAMQQQLQEKREAVNSLQEELANVQDHLNLAKQDLLHTTKHQDVLLSEQTRLQKDISEWANRFEDCQKEEETKQQQLQVLQNEIEENKLKLVQQEMMFQRLQKERESEESKLETSKVTLKEQQHQLEKELTDQKSKLDQVLSKVLAAEERVRTLQEEERWCESLEKTLSQTKRQLSEREQQLVEKSGELLALQKEADSMRADFSLLRNQFLTERKKAEKQVASLKEALKIQRSQLEKNLLEQKQENSCIQKEMATIELVAQDNHERARRLMKELNQMQYEYTELKKQMANQKDLERRQMEISDAMRTLKSEVKDEIRTSLKNLNQFLPELPADLEAILERNENLEGELESLKENLPFTMNEGPFEEKLNFSQVHIMDEHWRGEALREKLRHREDRLKAQLRHCMSKQAEVLIKGKRQTEGTLHSLRRQVDALGELVTSTSADSASSPSLSQLESSLTEDSQLGQNQEKNASAR

SEQ ID NO: 13859 - protein, 145 aa, Homo sapiens
  Payload ID: 2694
  Gene Symbol: CNTRL
  Gene Name: centriolin
  ENSP ID: ENSP00000362950
MAERNEDHHLQVLKESEVLLQAKRAELEKLKSQVTSQQQEMAVLDRQLGHKKEELHLLQGSMVQAKADLQEALRLGETEVTEKCNHIREVKSLLEELSFQKGELNVQISERKTQLTLIKQEIEKEEENLQVVLRQMSKHKTAFLQ

SEQ ID NO: 13860 - protein, 994 aa, Homo sapiens
  Payload ID: 2694
  Gene Symbol: CNTRL
  Gene Name: centriolin
  ENSP ID: ENSP00000362953
MKAQKSGKEQQLDIMNKQYQQLESRLDEILSRIAKETEEIKDLEEQLTEGQIAANEALKKDLEGVISGLQEYLGTIKGQATQAQNECRKLRDEKETLLQRLTEVEQERDQLEIVAMDAENMRKELAELESALQEQHEVNASLQQTQGDLSAYEAELEARLNLRDAEANQLKEELEKVTRLTQLEQSALQAELEKERQALKNALGKAQFSEEKEQENSELHAKLKHLQDDNNLLKQQLKDFQNHLNHVVDGLVRPEEVAARVDELRRKLKLGTGEMNIHSPSDVLGKSLADLQKQFSEILARSKWERDEAQVRERKLQEEMALQQEKLATGQEEFRQACERALEARMNFDKRQHEARIQQMENEIHYLQENLKSMEEIQGLTDLQLQEADEEKERILAQLRELEKKKKLEDAKSQEQVFGLDKELKKLKKAVATSDKLATAELTIAKDQLKSLHGTVMKINQERAEELQEAERFSRKAAQAARDLTRAEAEIELLQNLLRQKGEQFRLEMEKTGVGTGANSQVLEIEKLNETMERQRTEIARLQNVLDLTGSDNKGGFENVLEEIAELRREVSYQNDYISSMADPFKRRGYWYFMPPPPSSKVSSHSSQATKDSGVGLKYSASTPVRKPRPGQQDGKEGSQPPPASGYWVYSPIRSGLHKLFPSRDADSGGDSQEESELDDQEEPPFVPPPGYMMYTVLPDGSPVPQGMALYAPPPPLPNNSRPLTPGTVVYGPPPAGAPMVYGPPPPNFSIPFIPMGVLHCNVPEHHNLENEVSRLEDIMQHLKSKKREERWMRASKRQSEKEMEELHHNIDDLLQEKKSLECEVEELHRTVQKRQQQKDFIDGNVESLMTELEIEKSLKHHEDIVDEIECIEKTLLKRRSELREADRLLAEAESELSCTKEKTKNAVEKFTDAKRSLLQTESDAEELERRAQETAVNLVKADQQLRSLQADAKDLEQHKIKQEEILKEINKIVAAKDSDFQCLSKKKEKLTEE

SEQ ID NO: 13861 - protein, 1773 aa, Homo sapiens
  Payload ID: 2694
  Gene Symbol: CNTRL
  Gene Name: centriolin
  Uniprot ID: Q7Z7A1
  ENSP ID: ENSP00000362956
MKAQKSGKEQQLDIMNKQYQQLESRLDEILSRIAKETEEIKDLEEQLTEGQIAANEALKKDLEGVISGLQEYLGTIKGQATQAQNECRKLRDEKETLLQRLTEVEQERDQLEIVAMDAENMRKELAELESALQEQHEVNASLQQTQGDLSAYEAELEARLNLRDAEANQLKEELEKVTRLTQLEQSALQAELEKERQALKNALGKAQFSEEKEQENSELHAKLKHLQDDNNLLKQQLKDFQNHLNHVVDGLVRPEEVAARVDELRRKLKLGTGEMNIHSPSDVLGKSLADLQKQFSEILARSKWERDEAQVRERKLQEEMALQQEKLATGQEEFRQACERALEARMNFDKRQHEARIQQMENEIHYLQENLKSMEEIQGLTDLQLQEADEEKERILAQLRELEKKKKLEDAKSQEQVFGLDKELKKLKKAVATSDKLATAELTIAKDQLKSLHGTVMKINQERAEELQEAERFSRKAAQAARDLTRAEAEIELLQNLLRQKGEQFRLEMEKTGVGTGANSQVLEIEKLNETMERQRTEIARLQNVLDLTGSDNKGGFENVLEEIAELRREVSYQNDYISSMADPFKRRGYWYFMPPPPSSKVSSHSSQATKDSGVGLKYSASTPVRKPRPGQQDGKEGSQPPPASGYWVYSPIRSGLHKLFPSRDADSGGDSQEESELDDQEEPPFVPPPGYMMYTVLPDGSPVPQGMALYAPPPPLPNNSRPLTPGTVVYGPPPAGAPMVYGPPPPNFSIPFIPMGVLHCNVPEHHNLENEVSRLEDIMQHLKSKKREERWMRASKRQSEKEMEELHHNIDDLLQEKKSLECEVEELHRTVQKRQQQKDFIDGNVESLMTELEIEKSLKHHEDIVDEIECIEKTLLKRRSELREADRLLAEAESELSCTKEKTKNAVEKFTDAKRSLLQTESDAEELERRAQETAVNLVKADQQLRSLQADAKDLEQHKIKQEEILKEINKIVAAKDSDFQCLSKKKEKLTEELQKLQKDIEMAERNEDHHLQVLKESEVLLQAKRAELEKLKSQVTSQQQEMAVLDRQLGHKKEELHLLQGSMVQAKADLQEALRLGETEVTEKCNHIREVKSLLEELSFQKGELNVQISERKTQLTLIKQEIEKEEENLQVVLRQMSKHKTELKNILDMLQLENHELQGLKLQHDQRVSELEKTQVAVLEEKLELENLQQISQQQKGEIEWQKQLLERDKREIERMTAESRALQSCVECLSKEKEDLQEKCDIWEKKLAQTKRVLAAAEENSKMEQSNLEKLELNVRKLQQELDQLNRDKLSLHNDISAMQQQLQEKREAVNSLQEELANVQDHLNLAKQDLLHTTKHQDVLLSEQTRLQKDISEWANRFEDCQKEEETKQQQLQVLQNEIEENKLKLVQQEMMFQRLQKERESEESKLETSKVTLKEQQHQLEKELTDQKSKLDQVLSKVLAAEERVRTLQEEERWCESLEKTLSQTKRQLSEREQQLVEKSGELLALQKEADSMRADFSLLRNQFLTERKKAEKQVASLKEALKIQRSQLEKNLLEQKQENSCIQKEMATIELVAQDNHERARRLMKELNQMQYEYTELKKQMANQKDLERRQMEISDAMRTLKSEVKDEIRTSLKNLNQFLPELPADLEAILERNENLEGELESLKENLPFTMNEGPFEEKLNFSQVHIMDEHWRGEALREKLRHREDRLKAQLRHCMSKQAEVLIKGKRQTEGTLHSLRRQVDALGELVTSTSADSASSPSLSQLESSLTEDSQLGQNQEKNASAR

SEQ ID NO: 13862 - protein, 2325 aa, Homo sapiens; identical to SEQ ID NO: 13858
  Payload ID: 2694
  Gene Symbol: CNTRL
  Gene Name: centriolin
  Uniprot ID: Q7Z7A1
  ENSP ID: ENSP00000362962

SEQ ID NO: 13863 - protein, 460 aa, Homo sapiens
  Payload ID: 2694
  Gene Symbol: CNTRL
  Gene Name: centriolin
  ENSP ID: ENSP00000362972
MKKGSQQKIFSKAKIPSSSHSPIPSSMSNMRSRSLSPLIGSETLPFHSGGQWCEQVEIADENNMLLDYQDHKGADSHAGVRYITEALIKKLTKQDNLALIKSLNLSLSKDGGKKFKYIENLEKCVKLEVLNLSYNLIGKIEKLDKLLKLRELNLSYNKISKIEGIENMCNLQKLNLAGNEIEHIPVWLGKKLKSLRVLNLKGNKISSLQDISKLKPLQDLISLILVENPVVTLPHYLQFTIFHLRSLESLEGQPVTTQDRQEAFERFSLEEVERLERDLEKKMIETEELKSKQTRFLEEIKNQDKLNKSLKEEAMLQKQSCEELKSDLNTKNELLKQKTIELTRACQKQYELEQELAFYKIDAKFEPLNYYPSEYAEIDKAPDESPYIGKSRYKRNMFATESYIIDSAQAVQIKKMEPDEQLRNDHMNLRGHTPLDTQLEDKEKKISAAQTRLSELHDEI

SEQ ID NO: 13864 - protein, 346 aa, Homo sapiens
  Payload ID: 2694
  Gene Symbol: CNTRL
  Gene Name: centriolin
  ENSP ID: ENSP00000413014
MQHLKSKKREERWMRASKRQSEKEMEELHHNIDDLLQEKKSLECEVEELHRTVQKRQQQKDFIDGNVESLMTELEIEKSLKHHEDIVDEIECIEKTLLKRRSELREADRLLAEAESELSCTKEKTKNAVEKFTDAKRSLLQTESDAEELERRAQETAVNLVKADQQLRSLQADAKDLEQHKIKQEEILKEINKIVAAKDSDFQCLSKKKEKLTEELQKLQKDIEMAERNEDHHLQVLKESEVLLQAKRAELEKLKSQVTSQQQEMAVLDRQLGHKKEELHLLQGSMVQAKADLQEALRLGETEVTEKCNHIREVKSLLEELSFQKGELNVQISERKTQLTLIKQEI

SEQ ID NO: 13865 - protein, 482 aa, Homo sapiens
  Payload ID: 2694
  Gene Symbol: CNTRL
  Gene Name: centriolin
  Uniprot ID: Q7Z7A1
  ENSP ID: ENSP00000481072
MEQSNLEKLELNVRKLQQELDQLNRDKLSLHNDISAMQQQLQEKREAVNSLQEELANVQDHLNLAKQDLLHTTKHQDVLLSEQTRLQKDISEWANRFEDCQKEEETKQQQLQVLQNEIEENKLKLVQQEMMFQRLQKERESEESKLDQVLSKVLAAEERVRTLQEEERWCESLEKTLSQTKRQLSEREQQLVEKSGELLALQKEADSMRADFSLLRNQFLTERKKAEKQVASLKEALKIQRSQLEKNLLEQKQENSCIQKEMATIELVAQDNHERARRLMKELNQMQYEYTELKKQMANQKDLERRQMEISDAMRTLKSEVKDEIRTSLKNLNQFLPELPADLEAILERNENLEGELESLKENLPFTMNEGPFEEKLNFSQVHIMDEHWRGEALREKLRHREDRLKAQLRHCMSKQAEVLIKGKRQTEGTLHSLRRQVDALGELVTSTSADSASSPSLSQLESSLTEDSQLGQNQEKNASAR

SEQ ID NO: 13866 - protein, 925 aa, Homo sapiens
  Payload ID: 2695
  Gene Symbol: CNTROB
  Gene Name: centrobin, centrosomal BRCA2 interacting protein
  Uniprot ID: Q8N137
  ENSP ID: ENSP00000369614
MATSADSPSSPLGAEDLLSDSSEPPGLNQVSSEVTSQLYASLRLSRQAEATARAQLYLPSTSPPHEGLDGFAQELSRSLSVGLEKNLKKKDGSKHIFEMESVRGQLQTMLQTSRDTAYRDPLIPGAGSERREEDSFDSDSTATLLNTRPLQDLSPSSSAQALEELFPRYTSLRPGPPLNPPDFQGLRDALDSEHTRRKHCERHIQSLQTRVLELQQQLAVAVAADRKKDTMIEQLDKTLARVVEGWNRHEAERTEVLRGLQEEHQAAELTRSKQQETVTRLEQSLSEAMEALNREQESARLQQRERETLEEERQALTLRLEAEQQRCCVLQEERDAARAGQLSEHRELETLRAALEEERQTWAQQEHQLKEHYQALQEESQAQLEREKEKSQREAQAAWETQHQLALVQSEVRRLEGELDTARRERDALQLEMSLVQARYESQRIQLESELAVQLEQRVTERLAQAQESSLRQAASLREHHRKQLQDLSGQHQQELASQLAQFKVEMAEREERQQQVAEDYELRLAREQARVCELQSGNQQLEEQRVELVERLQAMLQAHWDEANQLLSTTLPPPNPPAPPAGPSSPGPQEPEKEERRVWTMPPMAVALKPVLQQSREARDELPGAPPVLCSSSSDLSLLLGPSFQSQHSFQPLEPKPDLTSSTAGAFSALGAFHPDHRAERPFPEEDPGPDGEGLLKQGLPPAQLEGLKNFLHQLLETVPQNNENPSVDLLPPKSGPLTVPSWEEAPQVPRIPPPVHKTKVPLAMASSLFRVPEPPSSHSQGSGPSSGSPERGGDGLTFPRQLMEVSQLLRLYQARGWGALPAEDLLLYLKRLEHSGYKPGRKEEGFSGWKLDYGEWSGTDGRGDNVPRRNTDSRLGEIPRKEIPSQAVPRRLATAPKTEKPPARKKSGHPAPSSMRSRGGVWR

SEQ ID NO: 13867 - protein, 904 aa, Homo sapiens
  Payload ID: 2695
  Gene Symbol: CNTROB
  Gene Name: centrobin, centrosomal BRCA2 interacting protein
  Uniprot ID: Q8N137
  ENSP ID: ENSP00000454840
MATSADSPSSPLGAEDLLSDSSEPPGLNQVSSEVTSQLYASLRLSRQAEATARAQLYLPSTSPPHEGLDGFAQELSRSLSVGLEKNLKKKDGSKHIFEMESVRGQLQTMLQTSRDTAYRDPLIPGAGSERREEDSFDSDSTATLLNTRPLQDLSPSSSAQALEELFPRYTSLRPGPPLNPPDFQGLRDALDSEHTRRKHCERHIQSLQTRVLELQQQLAVAVAADRKKDTMIEQLDKTLARVVEGWNRHEAERTEVLRGLQEEHQAAELTRSKQQETVTRLEQSLSEAMEALNREQESARLQQRERETLEEERQALTLRLEAEQQRCCVLQEERDAARAGQLSEHRELETLRAALEEERQTWAQQEHQLKEHYQALQEESQAQLEREKEKSQREAQAAWETQHQLALVQSEVRRLEGELDTARRERDALQLEMSLVQARYESQRIQLESELAVQLEQRVTERLAQAQESSLRQAASLREHHRKQLQDLSGQHQQELASQLAQFKVEMAEREERQQQVAEDYELRLAREQARVCELQSGNQQLEEQRVELVERLQAMLQAHWDEANQLLSTTLPPPNPPAPPAGPSSPGPQEPEKEERRVWTMPPMAVALKPVLQQSREARDELPGAPPVLCSSSSDLSLLLGPSFQSQHSFQPLEPKPDLTSSTAGAFSALGAFHPDHRAERPFPEEDPGPDGEGLLKQGLPPAQLEGLKNFLHQLLETVPQNNENPSVDLLPPKSGPLTVPSWEEAPQVPRIPPPVHKTKVPLAMASSLFRVPEPPSSHSQGSGPSSGSPERGGDGLTFPRQLMEVSQLLRLYQARGWGALPAEDLLLYLKRLEHSGRTDGRGDNVPRRNTDSRLGEIPRKEIPSQAVPRRLATAPKTEKPPARKKSGHPAPSSMRSRGGVWR

SEQ ID NO: 13868 - protein, 903 aa, Homo sapiens
  Payload ID: 2695
  Gene Symbol: CNTROB
  Gene Name: centrobin, centrosomal BRCA2 interacting protein
  Uniprot ID: Q8N137
  ENSP ID: ENSP00000456335
MATSADSPSSPLGAEDLLSDSSEPPGLNQVSSEVTSQLYASLRLSRQAEATARAQLYLPSTSPPHEGLDGFAQELSRSLSVGLEKNLKKKDGSKHIFEMESVRGQLQTMLQTSRDTAYRDPLIPGAGSERREEDSFDSDSTATLLNTRPLQDLSPSSSAQALEELFPRYTSLRPGPPLNPPDFQGLRDALDSEHTRRKHCERHIQSLQTRVLELQQQLAVAVAADRKKDTMIEQLDKTLARVVEGWNRHEAERTEVLRGLQEEHQAAELTRSKQQETVTRLEQSLSEAMEALNREQESARLQQRERETLEEERQALTLRLEAEQQRCCVLQEERDAARAGQLSEHRELETLRAALEEERQTWAQQEHQLKEHYQALQEESQAQLEREKEKSQREAQAAWETQHQLALVQSEVRRLEGELDTARRERDALQLEMSLVQARYESQRIQLESELAVQLEQRVTERLAQAQESSLRQAASLREHHRKQLQDLSGQHQQELASQLAQFKVEMAEREERQQQVAEDYELRLAREQARVCELQSGNQQLEEQRVELVERLQAMLQAHWDEANQLLSTTLPPPNPPAPPAGPSSPGPQEPEKEERRVWTMPPMAVALKPVLQQSREARDELPGAPPVLCSSSSDLSLLLGPSFQSQHSFQPLEPKPDLTSSTAGAFSALGAFHPDHRAERPFPEEDPGPDGEGLLKQGLPPAQLEGLKNFLHQLLETVPQNNENPSVDLLPPKSGPLTVPSWEEAPQVPRIPPPVHKTKVPLAMASSLFRVPEPPSSHSQGSGPSSGSPERGGDGLTFPRQLMEVSQLLRLYQARGWGALPAEDLLLYLKRLEHSGTDGRGDNVPRRNTDSRLGEIPRKEIPSQAVPRRLATAPKTEKPPARKKSGHPAPSSMRSRGGVWR

SEQ ID NO: 13869 - protein, 187 aa, Homo sapiens
  Payload ID: 2695
  Gene Symbol: CNTROB
  Gene Name: centrobin, centrosomal BRCA2 interacting protein
  ENSP ID: ENSP00000458251
PFPEEDPGPDGEGLLKQGLPPAQLEGLKNFLHQLLETVPQNNENPSVDLLPPKSGPLTVPSWEEAPQVPRIPPPVHKTKVPLAMASSLFRVPEPPSSHSQGSGPSSGSPERGGDGLTFPRQLMEVSQLLRLYQARGWGALPAEDLLLYLKRLEHSGTDGRGDNVPRRNTDSRLDSLPGCPSPPCYSP

SEQ ID NO: 13870 - protein, 242 aa, Homo sapiens
  Payload ID: 2695
  Gene Symbol: CNTROB
  Gene Name: centrobin, centrosomal BRCA2 interacting protein
  ENSP ID: ENSP00000458688
  MOD_RES (1)..(1): Any amino acid
XAEDLLSDSSEPPGLNQVSSEVTSQLYASLRLSRQAEATARAQLYLPSTSPPHEGLDGFAQELSRSLSVGLEKNLKKKDGSKHIFEMESVRGQLQTMLQTSRDTAYRDPLIPGAGSERREEDSFDSDSTATLLNTRPLQDLSPSSSAQALEELFPRYTSLRPGPPLNPPDFQGLRDALDSEHTRRKTYSVLGTQASWLQPTPPLEELESLVLWSYQRWATPRLLTLFPSIVSAIFRACRPEC

SEQ ID NO: 13871 - protein, 199 aa, Homo sapiens
  Payload ID: 2695
  Gene Symbol: CNTROB
  Gene Name: centrobin, centrosomal BRCA2 interacting protein
  ENSP ID: ENSP00000458696
MESVRGQLQTMLQTSRDTAYRDPLIPGAGSERREEDSFDSDSTATLLNTRPLQDLSPSSSAQALEELFPRYTSLRPGPPLNPPDFQGLRDALDSEHTRRKHCERHIQSLQTRVLELQQQLAVAVAADRKKDTMIEQLDKTLARVVEGWNRHEAERTEVLRGLQEEHQAAELTRSKQQETVTRLEQSLSEAMEALNREQE

SEQ ID NO: 13872 - protein, 26 aa, Homo sapiens
  Payload ID: 2695
  Gene Symbol: CNTROB
  Gene Name: centrobin, centrosomal BRCA2 interacting protein
  ENSP ID: ENSP00000458787
  MOD_RES (1)..(1): Any amino acid
XTATLLKISQLDKWIPKAFPALTFST

SEQ ID NO: 13873 - protein, 198 aa, Homo sapiens
  Payload ID: 2695
  Gene Symbol: CNTROB
  Gene Name: centrobin, centrosomal BRCA2 interacting protein
  ENSP ID: ENSP00000459246
MATSADSPSSPLGAEDLLSDSSEPPGLNQVSSEVTSQLYASLRLSRQAEATARAQLYLPSTSPPHEGLDGFAQELSRSLSVGLEKNLKKKDGSKHIFEMESVRGQLQTMLQTSRDTAYRDPLIPGAGSERREEDSFDSDSTATLLNTRPLQDLSPSSSAQALEELFPRYTSLRPGPPLNPPDFQGLRDALDSEHTRRK

SEQ ID NO: 13874 - protein, 13 aa, Homo sapiens
  Payload ID: 2695
  Gene Symbol: CNTROB
  Gene Name: centrobin, centrosomal BRCA2 interacting protein
  ENSP ID: ENSP00000460583
MATSADSPSSPLG

SEQ ID NO: 13875 - protein, 77 aa, Homo sapiens
  Payload ID: 2695
  Gene Symbol: CNTROB
  Gene Name: centrobin, centrosomal BRCA2 interacting protein
  ENSP ID: ENSP00000461000
MATSADSPSSPLGAEDLLSDSSEPPGLNQVSSEVTSQLYASLRLSRQAEATARAQLYLPSTSPPHEGLDGFAQELSR

SEQ ID NO: 13876 - protein, 114 aa, Homo sapiens
  Payload ID: 2696
  Gene Symbol: CENPA
  Gene Name: centromere protein A
  Uniprot ID: P49450
  ENSP ID: ENSP00000233505
MGPRRRSRKPEAPRRRSPSPTPTPGPSRRGPSLGASSHQHSRRRQGWLKEIRKLQKSTHLLIRKLPFSRLAAEAFLVHLFEDAYLLTLHAGRVTLFPKDVQLARRIRGLEEGLG

SEQ ID NO: 13877 - protein, 140 aa, Homo sapiens
  Payload ID: 2696
  Gene Symbol: CENPA
  Gene Name: centromere protein A
  Uniprot ID: P49450
  ENSP ID: ENSP00000336868
MGPRRRSRKPEAPRRRSPSPTPTPGPSRRGPSLGASSHQHSRRRQGWLKEIRKLQKSTHLLIRKLPFSRLAREICVKFTRGVDFNWQAQALLALQEAAEAFLVHLFEDAYLLTLHAGRVTLFPKDVQLARRIRGLEEGLG

SEQ ID NO: 13878 - protein, 86 aa, Homo sapiens
  Payload ID: 2696
  Gene Symbol: CENPA
  Gene Name: centromere protein A
  ENSP ID: ENSP00000404963
MGPRRRSRKPEAPRRRSPSPTPTPGPSRRGPSLGASSHQHSRRRQGWLKEIRKLQKSTHLLIRKLPFSRLIPFPILGDCLSSPNYW

SEQ ID NO: 13879 - protein, 599 aa, Homo sapiens
  Payload ID: 2697
  Gene Symbol: CENPB
  Gene Name: centromere protein B, 80kDa
  Uniprot ID: P07199
  ENSP ID: ENSP00000369075
MGPKRRQLTFREKSRIIQEVEENPDLRKGEIARRFNIPPSTLSTILKNKRAILASERKYGVASTCRKTNKLSPYDKLEGLLIAWFQQIRAAGLPVKGIILKEKALRIAEELGMDDFTASNGWLDRFRRRHGVVSCSGVARARARNAAPRTPAAPASPAAVPSEGSGGSTTGWRAREEQPPSVAEGYASQDVFSATETSLWYDFLPDQAAGLCGGDGRPRQATQRLSVLLCANADGSEKLPPLVAGKSAKPRAGQAGLPCDYTANSKGGVTTQALAKYLKALDTRMAAESRRVLLLAGRLAAQSLDTSGLRHVQLAFFPPGTVHPLERGVVQQVKGHYRQAMLLKAMAALEGQDPSGLQLGLTEALHFVAAAWQAVEPSDIAACFREAGFGGGPNATITTSLKSEGEEEEEEEEEEEEEEGEGEEEEEEGEEEEEEGGEGEELGEEEEVEEEGDVDSDEEEEEDEESSSEGLEAEDWAQGVVEAGGSFGAYGAQEEAQCPTLHFLEGGEDSDSDSEEEDDEEEDDEDEDDDDDEEDGDEVPVPSFGEAMAYFAMVKRYLTSFPIDDRVQSHILHLEHDLVHVTRKNHARQAGVRGLGHQS

SEQ ID NO: 13880 - protein, 943 aa, Homo sapiens
  Payload ID: 2698
  Gene Symbol: CENPC
  Gene Name: centromere protein C
  Uniprot ID: Q03188
  ENSP ID: ENSP00000273853
MAASGLDHLKNGYRRRFCRPSRARDINTEQGQNVLEILQDCFEEKSLANDFSTNSTKSVPNSTRKIKDTCIQSPSKECQKSHPKSVPVSSKKKEASLQFVVEPSEATNRSVQAHEVHQKILATDVSSKNTPDSKKISSRNINDHHSEADEEFYLSVGSPSVLLDAKTSVSQNVIPSSAQKRETYTFENSVNMLPSSTEVSVKTKKRLNFDDKVMLKKIEIDNKVSDEEDKTSEGQERKPSGSSQNRIRDSEYEIQRQAKKSFSTLFLETVKRKSESSPIVRHAATAPPHSCPPDDTKLIEDEFIIDESDQSFASRSWITIPRKAGSLKQRTISPAESTALLQGRKSREKHHNILPKTLANDKHSHKPHPVETSQPSDKTVLDTSYALIGETVNNYRSTKYEMYSKNAEKPSRSKRTIKQKQRRKFMAKPAEEQLDVGQSKDENIHTSHITQDEFQRNSDRNMEEHEEMGNDCVSKKQMPPVGSKKSSTRKDKEESKKKRFSSESKNKLVPEEVTSTVTKSRRISRRPSDWWVVKSEESPVYSNSSVRNELPMHHNSSRKSTKKTNQSSKNIRKKTIPLKRQKTATKGNQRVQKFLNAEGSGGIVGHDEISRCSLSEPLESDEADLAKKKNLDCSRSTRSSKNEDNIMTAQNVPLKPQTSGYTCNIPTESNLDSGEHKTSVLEESGPSRLNNNYLMSGKNDVDDEEVHGSSDDSKQSKVIPKNRIHHKLVLPSNTPNVRRTKRTRLKPLEYWRGERIDYQGRPSGGFVISGVLSPDTISSKRKAKENIGKVNKKSNKKRICLDNDERKTNLMVNLGIPLGDPLQPTRVKDPETREIILMDLVRPQDTYQFFVKHGELKVYKTLDTPFFSTGKLILGPQEEKGKQHVGQDILVFYVNFGDLLCTLHETPYILSTGDSFYVPSGNYYNIKNLRNEESVLLFTQIKR

SEQ ID NO: 13881 - protein, 728 aa, Homo sapiens
  Payload ID: 2698
  Gene Symbol: CENPC
  Gene Name: centromere protein C
  ENSP ID: ENSP00000421234
EASLQFVVEPSEATNRSVQAHEVHQKILATDVSSKNTPDSKKISSRNINDHHSEADEEFYLSVGSPSVLLDAKTSVSQNVIPSSAQKRETYTFENSVNMLPSSTEVSVKTKKRLNFDDKVMLKKIEIDNKVSDEEDKTSEGQERKPSGSSQNRIRDSEYEIQRQAKKSFSTLFLETVKRKSESSPIVRHAATAPPHSCPPDDTKLIEDEFIIDESDQSFASRSWITIPRKAGSLKQRTISPAESTALLQGRKSREKHHNILPKTLANDKHSHKPHPVETSQPSDKTVLDTSYALIGETVNNYRSTKYEMYSKNAEKPSRSKRTIKQKQRRKFMAKPAEEQLDVGQSKDENIHTSHITQDEFQRNSDRNMEEHEEMGNDCVSKKQMPPVGSKKSSTRKDKEESKKKRFSSESKNKLVPEEVTSTVTKSRRISRRPSDWWVVKSEESPVYSNSSVRNELPMHHNSSRKSTKKTNQSSKNIRKKTIPLKRQKTATKGNQRVQKFLNAEGSGGIVGHDEISRCSLSEPLESDEADLAKKKNLDCSRSTRSSKNEDNIMTAQNVPLKPQTSGYTCNIPTESNLDSGEHKTSVLEESGPSRLNNNYLMSGKNDVDDEEVHGSSDDSKQSKVIPKNRIHHKLVLPSNTPNVRRTKRTRLKPLEYWRGERIDYQGRPSGGFVISGVLSPDTISSKRKAKENIGKVNKKSNKKRICLDNDERSMNLFLKVTFRFYFK

SEQ ID NO: 13882 - protein, 107 aa, Homo sapiens
  Payload ID: 2698
  Gene Symbol: CENPC
  Gene Name: centromere protein C
  ENSP ID: ENSP00000425255
QSKVIPKNRIHHKLVLPSNTPNVRRTKRTRLKPLEYWRGERIDYQGRPSGGFVISGVLSPDTISSKRKAKENIGKVNKKSNKKRICLDNDERSMNLFLKVTFRFYFK

SEQ ID NO: 13883 - protein, 542 aa, Homo sapiens
  Payload ID: 2698
  Gene Symbol: CENPC
  Gene Name: centromere protein C
  Uniprot ID: Q03188
  ENSP ID: ENSP00000426078
MAASGLDHLKNGYRRRFCRPSRARDINTEQGQNVLEILQDCFEEKSLANDFSTNSTKSVPNSTRKIKDTCIQSPSKECQKSHPKSVPVSSKKKEASLQFVVEPSEATNRSVQAHEVHQKILATDVSSKNTPDSKKISSRNINDHHSEADEEFYLSVGSPSVLLDAKTSVSQNVIPSSAQKRETYTFENSVNMLPSSTEVSVKTKKRLNFDDKVMLKKIEIDNKVSDEEDKTSEGQERKPSGSSQNRIRDSEYEIQRQAKKSFSTLFLETVKRKSESSPIVRHAATAPPHSCPPDDTKLIEDEFIIDESDQSFASRSWITIPRKAGSLKQRTISPAESTALLQGRKSREKHHNILPKTLANDKHSHKPHPVETSQPSDKTVLDTSYALIGETVNNYRSTKYEMYSKNAEKPSRSKRTIKQKQRRKFMAKPAEEQLDVGQSKDENIHTSHITQDEFQRNSDRNMEEHEEMGNDCVSKKQMPPVGSKKSSTRKDKEESKKKRFSSESKNKLVPEEVTSTVTKSRRISRRPSDWWVVKSEESCLKC

SEQ ID NO: 13884 - protein, 2701 aa, Homo sapiens
  Payload ID: 2699
  Gene Symbol: CENPE
  Gene Name: centromere protein E, 312kDa
  Uniprot ID: Q02224
  ENSP ID: ENSP00000265148
MAEEGAVAVCVRVRPLNSREESLGETAQVYWKTDNNVIYQVDGSKSFNFDRVFHGNETTKNVYEEIAAPIIDSAIQGYNGTIFAYGQTASGKTYTMMGSEDHLGVIPRAIHDIFQKIKKFPDREFLLRVSYMEIYNETITDLLCGTQKMKPLIIREDVNRNVYVADLTEEVVYTSEMALKWITKGEKSRHYGETKMNQRSSRSHTIFRMILESREKGEPSNCEGSVKVSHLNLVDLAGSERAAQTGAAGVRLKEGCNINRSLFILGQVIKKLSDGQVGGFINYRDSKLTRILQNSLGGNAKTRIICTITPVSFDETLTALQFASTAKYMKNTPYVNEVSTDEALLKRYRKEIMDLKKQLEEVSLETRAQAMEKDQLAQLLEEKDLLQKVQNEKIENLTRMLVTSSSLTLQQELKAKRKRRVTWCLGKINKMKNSNYADQFNIPTNITTKTHKLSINLLREIDESVCSESDVFSNTLDTLSEIEWNPATKLLNQENIESELNSLRADYDNLVLDYEQLRTEKEEMELKLKEKNDLDEFEALERKTKKDQEMQLIHEISNLKNLVKHAEVYNQDLENELSSKVELLREKEDQIKKLQEYIDSQKLENIKMDLSYSLESIEDPKQMKQTLFDAETVALDAKRESAFLRSENLELKEKMKELATTYKQMENDIQLYQSQLEAKKKMQVDLEKELQSAFNEITKLTSLIDGKVPKDLLCNLELEGKITDLQKELNKEVEENEALREEVILLSELKSLPSEVERLRKEIQDKSEELHIITSEKDKLFSEVVHKESRVQGLLEEIGKTKDDLATTQSNYKSTDQEFQNFKTLHMDFEQKYKMVLEENERMNQEIVNLSKEAQKFDSSLGALKTELSYKTQELQEKTREVQERLNEMEQLKEQLENRDSTLQTVEREKTLITEKLQQTLEEVKTLTQEKDDLKQLQESLQIERDQLKSDIHDTVNMNIDTQEQLRNALESLKQHQETINTLKSKISEEVSRNLHMEENTGETKDEFQQKMVGIDKKQDLEAKNTQTLTADVKDNEIIEQQRKIFSLIQEKNELQQMLESVIAEKEQLKTDLKENIEMTIENQEELRLLGDELKKQQEIVAQEKNHAIKKEGELSRTCDRLAEVEEKLKEKSQQLQEKQQQLLNVQEEMSEMQKKINEIENLKNELKNKELTLEHMETERLELAQKLNENYEEVKSITKERKVLKELQKSFETERDHLRGYIREIEATGLQTKEELKIAHIHLKEHQETIDELRRSVSEKTAQIINTQDLEKSHTKLQEEIPVLHEEQELLPNVKEVSETQETMNELELLTEQSTTKDSTTLARIEMERLRLNEKFQESQEEIKSLTKERDNLKTIKEALEVKHDQLKEHIRETLAKIQESQSKQEQSLNMKEKDNETTKIVSEMEQFKPKDSALLRIEIEMLGLSKRLQESHDEMKSVAKEKDDLQRLQEVLQSESDQLKENIKEIVAKHLETEEELKVAHCCLKEQEETINELRVNLSEKETEISTIQKQLEAINDKLQNKIQEIYEKEEQFNIKQISEVQEKVNELKQFKEHRKAKDSALQSIESKMLELTNRLQESQEEIQIMIKEKEEMKRVQEALQIERDQLKENTKEIVAKMKESQEKEYQFLKMTAVNETQEKMCEIEHLKEQFETQKLNLENIETENIRLTQILHENLEEMRSVTKERDDLRSVEETLKVERDQLKENLRETITRDLEKQEELKIVHMHLKEHQETIDKLRGIVSEKTNEISNMQKDLEHSNDALKAQDLKIQEELRIAHMHLKEQQETIDKLRGIVSEKTDKLSNMQKDLENSNAKLQEKIQELKANEHQLITLKKDVNETQKKVSEMEQLKKQIKDQSLTLSKLEIENLNLAQKLHENLEEMKSVMKERDNLRRVEETLKLERDQLKESLQETKARDLEIQQELKTARMLSKEHKETVDKLREKISEKTIQISDIQKDLDKSKDELQKKIQELQKKELQLLRVKEDVNMSHKKINEMEQLKKQFEAQNLSMQSVRMDNFQLTKKLHESLEEIRIVAKERDELRRIKESLKMERDQFIATLREMIARDRQNHQVKPEKRLLSDGQQHLTESLREKCSRIKELLKRYSEMDDHYECLNRLSLDLEKEIEFQKELSMRVKANLSLPYLQTKHIEKLFTANQRCSMEFHRIMKKLKYVLSYVTKIKEEQHESINKFEMDFIDEVEKQKELLIKIQHLQQDCDVPSRELRDLKLNQNMDLHIEEILKDFSESEFPSIKTEFQQVLSNRKEMTQFLEEWLNTRFDIEKLKNGIQKENDRICQVNNFFNNRIIAIMNESTEFEERSATISKEWEQDLKSLKEKNEKLFKNYQTLKTSLASGAQVNPTTQDNKNPHVTSRATQLTTEKIRELENSLHEAKESAMHKESKIIKMQKELEVTNDIIAKLQAKVHESNKCLEKTKETIQVLQDKVALGAKPYKEEIEDLKMKLVKIDLEKMKNAKEFEKEISATKATVEYQKEVIRLLRENLRRSQQAQDTSVISEHTDPQPSNKPLTCGGGSGIVQNTKALILKSEHIRLEKEISKLKQQNEQLIKQKNELLSNNQHLSNEVKTWKERTLKREAHKQVTCENSPKSPKVTGTASKKKQITPSQCKERNLQDPVPKESPKSCFFDSRSKSLPSPHPVRYFDNSSLGLCPEVQNAGAESVDSQPGPWHASSGKDVPECKTQ

SEQ ID NO: 13885 - protein, 2580 aa, Homo sapiens
  Payload ID: 2699
  Gene Symbol: CENPE
  Gene Name: centromere protein E, 312kDa
  Uniprot ID: Q02224
  ENSP ID: ENSP00000369365
MAEEGAVAVCVRVRPLNSREESLGETAQVYWKTDNNVIYQVDGSKSFNFDRVFHGNETTKNVYEEIAAPIIDSAIQGYNGTIFAYGQTASGKTYTMMGSEDHLGVIPRAIHDIFQKIKKFPDREFLLRVSYMEIYNETITDLLCGTQKMKPLIIREDVNRNVYVADLTEEVVYTSEMALKWITKGEKSRHYGETKMNQRSSRSHTIFRMILESREKGEPSNCEGSVKVSHLNLVDLAGSERAAQTGAAGVRLKEGCNINRSLFILGQVIKKLSDGQVGGFINYRDSKLTRILQNSLGGNAKTRIICTITPVSFDETLTALQFASTAKYMKNTPYVNEVSTDEALLKRYRKEIMDLKKQLEEVSLETRAQAMEKDQLAQLLEEKDLLQKVQNEKIENLTRMLVTSSSLTLQQELKAKRKRRVTWCLGKINKMKNSNYADQFNIPTNITTKTHKLSINLLREIDESVCSESDVFSNTLDTLSEIEWNPATKLLNQENIESELNSLRADYDNLVLDYEQLRTEKEEMELKLKEKNDLDEFEALERKTKKDQENELSSKVELLREKEDQIKKLQEYIDSQKLENIKMDLSYSLESIEDPKQMKQTLFDAETVALDAKRESAFLRSENLELKEKMKELATTYKQMENDIQLYQSQLEAKKKMQVDLEKELQSAFNEITKLTSLIDGKVPKDLLCNLELEGKITDLQKELNKEVEENEALREEVILLSELKSLPSEVERLRKEIQDKSEELHIITSEKDKLFSEVVHKESRVQGLLEEIGKTKDDLATTQSNYKSTDQEFQNFKTLHMDFEQKYKMVLEENERMNQEIVNLSKEAQKFDSSLGALKTELSYKTQELQEKTREVQERLNEMEQLKEQLENRDSTLQTVEREKTLITEKLQQTLEEVKTLTQEKDDLKQLQESLQIERDQLKSDIHDTVNMNIDTQEQLRNALESLKQHQETINTLKSKISEEVSRNLHMEENTGETKDEFQQKMVGIDKKQDLEAKNTQTLTADVKDNEIIEQQRKIFSLIQEKNELQQMLESVIAEKEQLKTDLKENIEMTIENQEELRLLGDELKKQQEIVAQEKNHAIKKEGELSRTCDRLAEVEEKLKEKSQQLQEKQQQLLNVQEEMSEMQKKINEIENLKNELKNKELTLEHMETERLELAQKLNENYEEVKSITKERKVLKELQKSFETERDHLRGYIREIEATGLQTKEELKIAHIHLKEHQETIDELRRSVSEKTAQIINTQDLEKSHTKLQEEIPVLHEEQELLPNVKEVSETQETMNELELLTEQSTTKDSTTLARIEMERLRLNEKFQESQEEIKSLTKERDNLKTIKEALEVKHDQLKEHIRETLAKIQESQSKQEQSLNMKEKDNETTKIVSEMEQFKPKDSALLRIEIEMLGLSKRLQESHDEMKSVAKEKDDLQRLQEVLQSESDQLKENIKEIVAKHLETEEELKVAHCCLKEQEETINELRVNLSEKETEISTIQKQLEAINDKLQNKIQEIYEKEEQFNIKQISEVQEKVNELKQFKEHRKAKDSALQSIESKMLELTNRLQESQEEIQIMIKEKEEMKRVQEALQIERDQLKENTKEIVAKMKESQEKEYQFLKMTAVNETQEKMCEIEHLKEQFETQKLNLENIETENIRLTQILHENLEEMRSVTKERDDLRSVEETLKVERDQLKENLRETITRDLEKQEELKIVHMHLKEHQETIDKLRGIVSEKTNEISNMQKDLEHSNDALKAQDLKIQEELRIAHMHLKEQQETIDKLRGIVSEKTDKLSNMQKDLENSNAKLQEKIQELKANEHQLITLKKDVNETQKKVSEMEQLKKQIKDQSLTLSKLEIENLNLAQKLHENLEEMKSVMKERDNLRRVEETLKLERDQLKESLQETKARDLEIQQELKTARMLSKEHKETVDKLREKISEKTIQISDIQKDLDKSKDELQKKQDRQNHQVKPEKRLLSDGQQHLTESLREKCSRIKELLKRYSEMDDHYECLNRLSLDLEKEIEFQKELSMRVKANLSLPYLQTKHIEKLFTANQRCSMEFHRIMKKLKYVLSYVTKIKEEQHESINKFEMDFIDEVEKQKELLIKIQHLQQDCDVPSRELRDLKLNQNMDLHIEEILKDFSESEFPSIKTEFQQVLSNRKEMTQFLEEWLNTRFDIEKLKNGIQKENDRICQVNNFFNNRIIAIMNESTEFEERSATISKEWEQDLKSLKEKNEKLFKNYQTLKTSLASGAQVNPTTQDNKNPHVTSRATQLTTEKIRELENSLHEAKESAMHKESKIIKMQKELEVTNDIIAKLQAKVHESNKCLEKTKETIQVLQDKVALGAKPYKEEIEDLKMKLVKIDLEKMKNAKEFEKEISATKATVEYQKEVIRLLRENLRRSQQAQDTSVISEHTDPQPSNKPLTCGGGSGIVQNTKALILKSEHIRLEKEISKLKQQNEQLIKQKNELLSNNQHLSNEVKTWKERTLKREAHKQVTCENSPKSPKVTGTASKKKQITPSQCKERNLQDPVPKESPKSCFFDSRSKSLPSPHPVRYFDNSSLGLCPEVQNAGAESVDSQPGPWHASSGKDVPECKTQ

SEQ ID NO: 13886 - protein, 1126 aa, Homo sapiens
  Payload ID: 2699
  Gene Symbol: CENPE
  Gene Name: centromere protein E, 312kDa
  ENSP ID: ENSP00000423981
MAEEGAVAVCVRVRPLNSREESLGETAQVYWKTDNNVIYQVDGSKSFNFDRVFHGNETTKNVYEEIAAPIIDSAIQGYNGTIFAYGQTASGKTYTMMGSEDHLGVIPRAIHDIFQKIKKFPDREFLLRVSYMEIYNETITDLLCGTQKMKPLIIREDVNRNVYVADLTEEVVYTSEMALKWITKGEKSRHYGETKMNQRSSRSHTIFRMILESREKGEPSNCEGSVKVSHLNLVDLAGSERAAQTGAAGVRLKEGCNINRSLFILGQVIKKLSDGQVGGFINYRDSKLTRILQNSLGGNAKTRIICTITPVSFDETLTALQFASTAKYMKNTPYVNEVSTDEALLKRYRKEIMDLKKQLEEVSLETRAQAMEKDQLAQLLEEKDLLQKVQNEKIENLTRMLVTSSSLTLQQELKAKRKRRVTWCLGKINKMKNSNYADQFNIPTNITTKTHKLSINLLREIDESVCSESDVFSNTLDTLSEIEWNPATKLLNQENIESELNSLRADYDNLVLDYEQLRTEKEEMELKLKEKNDLDEFEALERKTKKDQEMQLIHEISNLKNLVKHAEVYNQDLENELSSKVELLREKEDQIKKLQEYIDSQKLENIKMDLSYSLESIEDPKQMKQTLFDAETVALDAKRESAFLRSENLELKEKMKELATTYKQMENDIQLYQSQLEAKKKMQVDLEKELQSAFNEITKLTSLIDGKVPKDLLCNLELEGKITDLQKELNKEVEENEALREEVILLSELKSLPSEVERLRKEIQDKSEELHIITSEKDKLFSEVVHKESRVQGLLEEIGKTKDDLATTQSNYKSTDQEFQNFKTLHMDFEQKYKMVLEENERMNQEIVNLSKEAQKFDSSLGALKTELSYKTQELQEKTREVQERLNEMEQLKEQLENRDSTLQTVEREKTLITEKLQQTLEEVKTLTQEKDDLKQLQESLQIERDQLKSDIHDTVNMNIDTQEQLRNALESLKQHQETINTLKSKISEEVSRNLHMEENTGETKDEFQQKMVGIDKKQDLEAKNTQTLTADVKDNEIIEQQRKIFSLIQEKNELQQMLESVIAEKEQLKTDLKENIEMTIENQEELRLLGDELKKQQEIVAQEKNHAIKKEGELSRTCDRLAEVE

SEQ ID NO: 13887 - protein, 183 aa, Homo sapiens
  Payload ID: 2699
  Gene Symbol: CENPE
  Gene Name: centromere protein E, 312kDa
  ENSP ID: ENSP00000426023
MAEEGAVAVCVRVRPLNSREESLGETAQVYWKTDNNVIYQVDGSKSFNFDRVFHGNETTKNVYEEIAAPIIDSAIQGYNGTIFAYGQTASGKTYTMMGSEDHLGVIPRAIHDIFQKIKKRNVYVADLTEEVVYTSEMALKWITKGEKSRHYGETKMNQRSSRSHTIFRMILESREKGEPSNCE

SEQ ID NO: 13888 - protein, 2664 aa, Homo sapiens
  Payload ID: 2699
  Gene Symbol: CENPE
  Gene Name: centromere protein E, 312kDa
  ENSP ID: ENSP00000483542
MAEEGAVAVCVRVRPLNSREESLGETAQVYWKTDNNVIYQVDGSKSFNFDRVFHGNETTKNVYEEIAAPIIDSAIQGYNGTIFAYGQTASGKTYTMMGSEDHLGVIPRAIHDIFQKIKKFPDREFLLRVSYMEIYNETITDLLCGTQKMKPLIIREDVNRNVYVADLTEEVVYTSEMALKWITKGEKSRHYGETKMNQRSSRSHTIFRMILESREKGEPSNCEGSVKVSHLNLVDLAGSERAAQTGAAGVRLKEGCNINRSLFILGQVIKKLSDGQVGGFINYRDSKLTRILQNSLGGNAKTRIICTITPVSFDETLTALQFASTAKYMKNTPYVNEVSTDEALLKRYRKEIMDLKKQLEEVSLETRAQAMEKDQLAQLLEEKDLLQKVQNEKIENLTRMLVTSSSLTLQQELKAKRKRRVTWCLGKINKMKNSNYADQFNIPTNITTKTHKLSINLLREIDESVCSESDVFSNTLDTLSEIEWNPATKLLNQENIESELNSLRADYDNLVLDYEQLRTEKEEMELKLKEKNDLDEFEALERKTKKDQEMQLIHEISNLKNLVKHAEVYNQDLENELSSKVELLREKEDQIKKLQEYIDSQKLENIKMDLSYSLESIEDPKQMKQTLFDAETVALDAKRESAFLRSENLELKEKMKELATTYKQMENDIQLYQSQLEAKKKMQVDLEKELQSAFNEITKLTSLIDGKVPKDLLCNLELEGKITDLQKELNKEVEENEALREEVILLSELKSLPSEVERLRKEIQDKSEELHIITSEKDKLFSEVVHKESRVQGLLEEIGKTKDDLATTQSNYKSTDQEFQNFKTLHMDFEQKYKMVLEENERMNQEIVNLSKEAQKFDSSLGALKTELSYKTQELQEKTREVQERLNEMEQLKEQLENRDSTLQTVEREKTLITEKLQQTLEEVKTLTQEKDDLKQLQESLQIERDQLKSDIHDTVNMNIDTQEQLRNALESLKQHQETINTLKSKISEEVSRNLHMEENTGETKDEFQQKMVGIDKKQDLEAKNTQTLTADVKDNEIIEQQRKIFSLIQEKNELQQMLESVIAEKEQLKTDLKENIEMTIENQEELRLLGDELKKQQEIVAQEKNHAIKKEGELSRTCDRLAEVEEKLKEKSQQLQEKQQQLLNVQEEMSEMQKKINEIENLKNELKNKELTLEHMETERLELAQKLNENYEEVKSITKERKVLKELQKSFETERDHLRGYIREIEATGLQTKEELKIAHIHLKEHQETIDELRRSVSEKTAQIINTQDLEKSHTKLQEEIPVLHEEQELLPNVKEVSETQETMNELELLTEQSTTKDSTTLARIEMERLRLNEKFQESQEEIKSLTKERDNLKTIKEALEVKHDQLKEHIRETLAKIQESQSKQEQSLNMKEKDNETTKIVSEMEQFKPKDSALLRIEIEMLGLSKRLQESHDEMKSVAKEKDDLQRLQEVLQSESDQLKENIKEIVAKHLETEEELKVAHCCLKEQEETINELRVNLSEKETEISTIQKQLEAINDKLQNKIQEIYEKEEQFNIKQISEVQEKVNELKQFKEHRKAKDSALQSIESKMLELTNRLQESQEEIQIMIKEKEEMKRVQEALQIERDQLKENTKEIVAKMKESQEKEYQFLKMTAVNETQEKMCEIEHLKEQFETQKLNLENIETENIRLTQILHENLEEMRSVTKERDDLRSVEETLKVERDQLKENLRETITRDLEKQEELKIVHMHLKEHQETIDKLRGIVSEKTNEISNMQKDLEHSNDALKAQDLKIQEELRIAHMHLKEQQETIDKLRGIVSEKTDKLSNMQKDLENSNAKLQEKIQELKANEHQLITLKKDVNETQKKVSEMEQLKKQIKDQSLTLSKLEIENLNLAQKLHENLEEMKSVMKERDNLRRVEETLKLERDQLKESLQETKARDLEIQQELKTARMLSKEHKETVDKLREKISEKTIQISDIQKDLDKSKDELQKKIQELQKKELQLLRVKEDVNMSHKKINEMEQLKKQFEAQNYLCKCEMDNFQLTKKLHESLEEIRIVAKERDELRRIKESLKMERDQFIATLREMIARDRQNHQVKPEKRLLSDGQQHLTESLREKCSRIKELLKRYSEMDDHYECLNRLSLDLEKEMEFHRIMKKLKYVLSYVTKIKEEQHESINKFEMDFIDEVEKQKELLIKIQHLQQDCDVPSRELRDLKLNQNMDLHIEEILKDFSESEFPSIKTEFQQVLSNRKEMTQFLEEWLNTRFDIEKLKNGIQKENDRICQVNNFFNNRIIAIMNESTEFEERSATISKEWEQDLKSLKEKNEKLFKNYQTLKTSLASGAQVNPTTQDNKNPHVTSRATQLTTEKIRELENSLHEAKESAMHKESKIIKMQKELEVTNDIIAKLQAKVHESNKCLEKTKETIQVLQDKVALGAKPYKEEIEDLKMKLVKIDLEKMKNAKEFEKEISATKATVEYQKEVIRLLRENLRRSQQAQDTSVISEHTDPQPSNKPLTCGGGSGIVQNTKALILKSEHIRLEKEISKLKQQNEQLIKQKNELLSNNQHLSNEVKTWKERTLKREAHKQVTCENSPKSPKVTGTASKKKQITPSQCKERNLQDPVPKESPKSCFFDSRSKSLPSPHPVRYFDNSSLGLCPEVQNAGAESVDSQPGPWHASSGKDVPECKTQ

SEQ ID NO: 13889 - protein, 3114 aa, Homo sapiens
  Payload ID: 2700
  Gene Symbol: CENPF
  Gene Name: centromere protein F, 350/400kDa
  Uniprot ID: P49454
  ENSP ID: ENSP00000355922
MSWALEEWKEGLPTRALQKIQELEGQLDKLKKEKQQRQFQLDSLEAALQKQKQKVENEKTEGTNLKRENQRLMEICESLEKTKQKISHELQVKESQVNFQEGQLNSGKKQIEKLEQELKRCKSELERSQQAAQSADVSLNPCNTPQKIFTTPLTPSQYYSGSKYEDLKEKYNKEVEERKRLEAEVKALQAKKASQTLPQATMNHRDIARHQASSSVFSWQQEKTPSHLSSNSQRTPIRRDFSASYFSGEQEVTPSRSTLQIGKRDANSSFFDNSSSPHLLDQLKAQNQELRNKINELELRLQGHEKEMKGQVNKFQELQLQLEKAKVELIEKEKVLNKCRDELVRTTAQYDQASTKYTALEQKLKKLTEDLSCQRQNAESARCSLEQKIKEKEKEFQEELSRQQRSFQTLDQECIQMKARLTQELQQAKNMHNVLQAELDKLTSVKQQLENNLEEFKQKLCRAEQAFQASQIKENELRRSMEEMKKENNLLKSHSEQKAREVCHLEAELKNIKQCLNQSQNFAEEMKAKNTSQETMLRDLQEKINQQENSLTLEKLKLAVADLEKQRDCSQDLLKKREHHIEQLNDKLSKTEKESKALLSALELKKKEYEELKEEKTLFSCWKSENEKLLTQMESEKENLQSKINHLETCLKTQQIKSHEYNERVRTLEMDRENLSVEIRNLHNVLDSKSVEVETQKLAYMELQQKAEFSDQKHQKEIENMCLKTSQLTGQVEDLEHKLQLLSNEIMDKDRCYQDLHAEYESLRDLLKSKDASLVTNEDHQRSLLAFDQQPAMHHSFANIIGEQGSMPSERSECRLEADQSPKNSAILQNRVDSLEFSLESQKQMNSDLQKQCEELVQIKGEIEENLMKAEQMHQSFVAETSQRISKLQEDTSAHQNVVAETLSALENKEKELQLLNDKVETEQAEIQELKKSNHLLEDSLKELQLLSETLSLEKKEMSSIISLNKREIEELTQENGTLKEINASLNQEKMNLIQKSESFANYIDEREKSISELSDQYKQEKLILLQRCEETGNAYEDLSQKYKAAQEKNSKLECLLNECTSLCENRKNELEQLKEAFAKEHQEFLTKLAFAEERNQNLMLELETVQQALRSEMTDNQNNSKSEAGGLKQEIMTLKEEQNKMQKEVNDLLQENEQLMKVMKTKHECQNLESEPIRNSVKERESERNQCNFKPQMDLEVKEISLDSYNAQLVQLEAMLRNKELKLQESEKEKECLQHELQTIRGDLETSNLQDMQSQEISGLKDCEIDAEEKYISGPHELSTSQNDNAHLQCSLQTTMNKLNELEKICEILQAEKYELVTELNDSRSECITATRKMAEEVGKLLNEVKILNDDSGLLHGELVEDIPGGEFGEQPNEQHPVSLAPLDESNSYEHLTLSDKEVQMHFAELQEKFLSLQSEHKILHDQHCQMSSKMSELQTYVDSLKAENLVLSTNLRNFQGDLVKEMQLGLEEGLVPSLSSSCVPDSSSLSSLGDSSFYRALLEQTGDMSLLSNLEGAVSANQCSVDEVFCSSLQEENLTRKETPSAPAKGVEELESLCEVYRQSLEKLEEKMESQGIMKNKEIQELEQLLSSERQELDCLRKQYLSENEQWQQKLTSVTLEMESKLAAEKKQTEQLSLELEVARLQLQGLDLSSRSLLGIDTEDAIQGRNESCDISKEHTSETTERTPKHDVHQICDKDAQQDLNLDIEKITETGAVKPTGECSGEQSPDTNYEPPGEDKTQGSSECISELSFSGPNALVPMDFLGNQEDIHNLQLRVKETSNENLRLLHVIEDRDRKVESLLNEMKELDSKLHLQEVQLMTKIEACIELEKIVGELKKENSDLSEKLEYFSCDHQELLQRVETSEGLNSDLEMHADKSSREDIGDNVAKVNDSWKERFLDVENELSRIRSEKASIEHEALYLEADLEVVQTEKLCLEKDNENKQKVIVCLEEELSVVTSERNQLRGELDTMSKKTTALDQLSEKMKEKTQELESHQSECLHCIQVAEAEVKEKTELLQTLSSDVSELLKDKTHLQEKLQSLEKDSQALSLTKCELENQIAQLNKEKELLVKESESLQARLSESDYEKLNVSKALEAALVEKGEFALRLSSTQEEVHQLRRGIEKLRVRIEADEKKQLHIAEKLKERERENDSLKDKVENLERELQMSEENQELVILDAENSKAEVETLKTQIEEMARSLKVFELDLVTLRSEKENLTKQIQEKQGQLSELDKLLSSFKSLLEEKEQAEIQIKEESKTAVEMLQNQLKELNEAVAALCGDQEIMKATEQSLDPPIEEEHQLRNSIEKLRARLEADEKKQLCVLQQLKESEHHADLLKGRVENLERELEIARTNQEHAALEAENSKGEVETLKAKIEGMTQSLRGLELDVVTIRSEKENLTNELQKEQERISELEIINSSFENILQEKEQEKVQMKEKSSTAMEMLQTQLKELNERVAALHNDQEACKAKEQNLSSQVECLELEKAQLLQGLDEAKNNYIVLQSSVNGLIQEVEDGKQKLEKKDEEISRLKNQIQDQEQLVSKLSQVEGEHQLWKEQNLELRNLTVELEQKIQVLQSKNASLQDTLEVLQSSYKNLENELELTKMDKMSFVEKVNKMTAKETELQREMHEMAQKTAELQEELSGEKNRLAGELQLLLEEIKSSKDQLKELTLENSELKKSLDCMHKDQVEKEGKVREEIAEYQLRLHEAEKKHQALLLDTNKQYEVEIQTYREKLTSKEECLSSQKLEIDLLKSSKEELNNSLKATTQILEELKKTKMDNLKYVNQLKKENERAQGKMKLLIKSCKQLEEEKEILQKELSQLQAAQEKQKTGTVMDTKVDELTTEIKELKETLEEKTKEADEYLDKYCSLLISHEKLEKAKEMLETQVAHLCSQQSKQDSRGSPLLGPVVPGPSPIPSVTEKRLSSGQNKASGKRQRSSGIWENGRGPTPATPESFSKKSKKAVMSGIHPAEDTEGTEFEPEGLPEVVKKGFADIPTGKTSPYILRRTTMATRTSPRLAAQKLALSPLSLGKENLAESSKPTAGGSRSQKVKVAQRSPVDSGTILREPTTKSVPVNNLPERSPTDSPREGLRVKRGRLVPSPKAGLESNGSENCKVQ

SEQ ID NO: 13890 - protein, 175 aa, Homo sapiens
  Payload ID: 2700
  Gene Symbol: CENPF
  Gene Name: centromere protein F, 350/400kDa
  ENSP ID: ENSP00000478221
LMIKGRKGKVNKMTAKETELQREMHEMAQKTAELQEELSGEKNRLAGELQLLLEEIKSSKDQLKELTLENSELKKSLDCMHKDQVEKEGKVREEIAEYQLRLHEAEKKHQALLLDTNKQYEVEIQTYREKLTSKEECLSSQKLEIDLLKSSKEELNNSLKATTQILEELKKTKEQ

SEQ ID NO: 13891 - protein, 247 aa, Homo sapiens
  Payload ID: 2701
  Gene Symbol: CENPH
  Gene Name: centromere protein H
  Uniprot ID: Q9H3R5
  ENSP ID: ENSP00000283006
MEEQPQMQDADEPADSGGEGRAGGPPQVAGAQAACSEDRMTLLLRLRAQTKQQLLEYKSMVDASEEKTPEQIMQEKQIEAKIEDLENEIEEVKVAFEIKKLALDRMRLSTALKKNLEKISRQSSVLMDNMKHLLELNKLIMKSQQESWDLEEKLLDIRKKRLQLKQASESKLLEIQTEKNKQKIDLDSMENSERIKIIRQNLQMEIKITTVIQHVFQNLILGSKVNWAEDPALKEIVLQLEKNVDMM

SEQ ID NO: 13892 - protein, 98 aa, Homo sapiens
  Payload ID: 2701
  Gene Symbol: CENPH
  Gene Name: centromere protein H
  ENSP ID: ENSP00000422665
MEEQPQMQDADEPADSGGEGRAGGPPQVAGAQAACSEDRMTLLLRLRAQTKQQLLEYKSMVDASEEKTPEQIMQEKQIEAKIEDLENEIEEDETFNCT

SEQ ID NO: 13893 - protein, 187 aa, Homo sapiens
  Payload ID: 2701
  Gene Symbol: CENPH
  Gene Name: centromere protein H
  ENSP ID: ENSP00000423936
  MOD_RES (1)..(1): Any amino acid
XEDRMTLLLRLRAQTKQQLLEYKSMVDASEEKTPEQIMQEKQIEAMRLSTALKKNLEKISRQSSVLMDNMKHLLELNKLIMKSQQESWDLEEKLLDIRKKRLQLKQASESKLLEIQTEKNKQKIDLDSMENSERIKIIRQNLQMEIKITTVIQHVFQNLILGSKVNWAEDPALKEIVLQLEKNVDMM

SEQ ID NO: 13894 - protein, 228 aa, Homo sapiens
  Payload ID: 2701
  Gene Symbol: CENPH
  Gene Name: centromere protein H
  ENSP ID: ENSP00000426014
MEEQPQMQDADEPADSGGEGRAGGPPQVAGAQAACSEDRMTLLLRLRAQTKQQLLEYKSMVDASEEKTPEQIMQEKQIEAKIEDLENEIEEVKVAFEIKKLALDSVLMDNMKHLLELNKLIMKSQQESWDLEEKLLDIRKKRLQLKQASESKLLEIQTEKNKQKIDLDSMENSERIKIIRQNLQMEIKITTVIQHVFQNLILGSKVNWAEDPALKEIVLQLEKNVDMM

SEQ ID NO: 13895 - protein, 522 aa, Homo sapiens
  Payload ID: 2702
  Gene Symbol: CENPI
  Gene Name: centromere protein I
  Uniprot ID: Q92674
  ENSP ID: ENSP00000362017
MSPQKRVKNVQAQNRTSQGSSSFQTTLSAWKVKQDPSNSKNISKHGQNNPVGDYEHADDQAEEDALQMAVGYFEKGPIKASQNKDKTLEKHLKTVENVAWKNGLASEEIDILLNIALSGKFGNAVNTRILKCMIPATVISEDSVVKAVSWLCVGKCSGSTKVLFYRWLVAMFDFIDRKEQINLLYGFFFASLQDDALCPYVCHLLYLLTKKENVKPFRVRKLLDLQAKMGMQPHLQALLSLYKFFAPALISVSLPVRKKIYFKNSENLWKTALLAVKQRNRGPSPEPLKLMLGPANVRPLKRKWNSLSVIPVLNSSSYTKECGKKEMSLSDCLNRSGSFPLEQLQSFPQLLQNIHCLELPSQMGSVLNNSLLLHYINCVRDEPVLLRFYYWLSQTLQEECIWYKVNNYEHGKEFTNFLDTIIRAECFLQEGFYSCEAFLYKSLPLWDGLCCRSQFLQLVSWIPFSSFSEVKPLLFDHLAQLFFTSTIYFKCSVLQSLKELLQNWLLWLSMDIHMKPVTNSPL

SEQ ID NO: 13896 - protein, 756 aa, Homo sapiens
  Payload ID: 2702
  Gene Symbol: CENPI
  Gene Name: centromere protein I
  Uniprot ID: Q92674
  ENSP ID: ENSP00000362018
MSPQKRVKNVQAQNRTSQGSSSFQTTLSAWKVKQDPSNSKNISKHGQNNPVGDYEHADDQAEEDALQMAVGYFEKGPIKASQNKDKTLEKHLKTVENVAWKNGLASEEIDILLNIALSGKFGNAVNTRILKCMIPATVISEDSVVKAVSWLCVGKCSGSTKVLFYRWLVAMFDFIDRKEQINLLYGFFFASLQDDALCPYVCHLLYLLTKKENVKPFRVRKLLDLQAKMGMQPHLQALLSLYKFFAPALISVSLPVRKKIYFKNSENLWKTALLAVKQRNRGPSPEPLKLMLGPANVRPLKRKWNSLSVIPVLNSSSYTKECGKKEMSLSDCLNRSGSFPLEQLQSFPQLLQNIHCLELPSQMGSVLNNSLLLHYINCVRDEPVLLRFYYWLSQTLQEECIWYKVNNYEHGKEFTNFLDTIIRAECFLQEGFYSCEAFLYKSLPLWDGLCCRSQFLQLVSWIPFSSFSEVKPLLFDHLAQLFFTSTIYFKCSVLQSLKELLQNWLLWLSMDIHMKPVTNSPLETTLGGSMNSVSKLIHYVGWLSTTAMRLESNNTFLLHFILDFYEKVCDIYINYNLPLVVLFPPGIFYSALLSLDTSILNQLCFIMHRYRKNLTAAKKNELVQKTKSEFNFSSKTYQEFNHYLTSMVGCLWTSKPFGKGIYIDPEILEKTGVAEYKNSLNVVHHPSFLSYAVSFLLQESPEERTVNVSSIRGKKWSWYLDYLFSQGLQGLKLFIRSSVHHSSIPRAEGINCNNQY

SEQ ID NO: 13897 - protein, 75 aa, Homo sapiens
  Payload ID: 2702
  Gene Symbol: CENPI
  Gene Name: centromere protein I
  ENSP ID: ENSP00000384546
MSPQKRVKNVQAQNRTSQGSSSFQTTLSAWKVKQDPSNSKNISKHGQNNPVGDYEHADDQAEEDALQMAVGYFEK

SEQ ID NO: 13898 - protein, 756 aa, Homo sapiens; identical to SEQ ID NO: 13896
  Payload ID: 2702
  Gene Symbol: CENPI
  Gene Name: centromere protein I
  Uniprot ID: Q92674
  ENSP ID: ENSP00000399274

SEQ ID NO: 13899 - protein, 45 aa, Homo sapiens
  Payload ID: 2702
  Gene Symbol: CENPI
  Gene Name: centromere protein I
  ENSP ID: ENSP00000409173
MSPQKRVKNVQAQNRTSQGSSSFQTTLSAWKVKQDPSNSKNISKH

SEQ ID NO: 13900 - protein, 1338 aa, Homo sapiens
  Payload ID: 2703
  Gene Symbol: CENPJ
  Gene Name: centromere protein J
  Uniprot ID: Q9HC77
  ENSP ID: ENSP00000371308
MFLMPTSSELNSGQNFLTQWMTNPSRAGVILNRGFPILEADKEKRAAVDISTSFPIKGTHFSDSFSFINEEDSLLEEQKLESNNPYKPQSDKSETHTAFPCIKKGPQVAACHSAPGHQEENKNDFIPDLASEFKEGAYKDPLFKKLEQLKEVQQKKQEQLKRQQLEQLQRLMEEQEKLLTMVSGQCTLPGLSLLPDDQSQKHRSPGNTTTGERATCCFPSYVYPDPTQEETYPSNILSHEQSNFCRTAHGDFVLTSKRASPNLFSEAQYQEAPVEKNNLKEENRNHPTGESILCWEKVTEQIQEANDKNLQKHDDSSEVANIEERPIKAAIGERKQTFEDYLEEQIQLEEQELKQKQLKEAEGPLPIKAKPKQPFLKRGEGLARFTNAKSKFQKGKESKLVTNQSTSEDQPLFKMDRQQLQRKTALKNKELCADNPILKKDSKARTKSGSVTLSQKPKMLKCSNRKSLSPSGLKIQTGKKCDGQFRDQIKFENKVTSNNKENVTECPKPCDTGCTGWNKTQGKDRLPLSTGPASRLAAKSPIRETMKESESSLDVSLQKKLETWEREKEKENLELDEFLFLEQAADEISFSSNSSFVLKILERDQQICKGHRMSSTPVKAVPQKTNPADPISHCNRSEDLDHTAREKESECEVAPKQLHSLSSADELREQPCKIRKAVQKSTSENQTEWNARDDEGVPNSDSSTDSEEQLDVTIKPSTEDRERGISSREDSPQVCDDKGPFKDTRTQEDKRRDVDLDLSDKDYSSDESIMESIKHKVSEPSRSSSLSLSKMDFDDERTWTDLEENLCNHDVVLGNESTYGTPQTCYPNNEIGILDKTIKRKIAPVKRGEDLSKSRRSRSPPTSELMMKFFPSLKPKPKSDSHLGNELKLNISQDQPPGDNARSQVLREKIIELETEIEKFKAENASLAKLRIERESALEKLRKEIADFEQQKAKELARIEEFKKEEMRKLQKERKVFEKYTTAARTFPDKKEREEIQTLKQQIADLREDLKRKETKWSSTHSRLRSQIQMLVRENTDLREEIKVMERFRLDAWKRAEAIESSLEVEKKDKLANTSVRFQNSQISSGTQVEKYKKNYLPMQGNPPRRSKSAPPRDLGNLDKGQAASPREPLEPLNFPDPEYKEEEEDQDIQGEISHPDGKVEKVYKNGCRVILFPNGTRKEVSADGKTITVTFFNGDVKQVMPDQRVIYYYAAAQTTHTTYPEGLEVLHFSSGQIEKHYPDGRKEITFPDQTVKNLFPDGQEESIFPDGTIVRVQRDGNKLIEFNNGQRELHTAQFKRREYPDGTVKTVYANGHQETKYRSGRIRVKDKEGNVLMDTEL

SEQ ID NO: 13901 - protein, 196 aa, Homo sapiens
  Payload ID: 2703
  Gene Symbol: CENPJ
  Gene Name: centromere protein J
  ENSP ID: ENSP00000399334
  MOD_RES (1)..(1): Any amino acid
XFKAENASLAKLRIERESALEKLRKEIADFEQQKAKELARIEEFKKEEMRKLQKERKVFEKYTTAARTFPDKKEREEIQTLKQQIADLREDLKRKETKWSSTHSRLRSQIQMLVRENTDLREEIKVMERFRLDAWKRAEAIESSLEVEKKDKLANTSVRFQNSQISSGTQVEKYKKNYLPMQGKRLHDLFIKHFRM

SEQ ID NO: 13902 - protein, 1136 aa, Homo sapiens
  Payload ID: 2703
  Gene Symbol: CENPJ
  Gene Name: centromere protein J
  ENSP ID: ENSP00000441090
MFLMPTSSELNSGQNFLTQWMTNPSRAGVILNRGFPILEADKEKRAAVDISTSFPIKGTHFSDSFSFINEEDSLLEEQKLESNNPYKPQSDKSETHTAFPCIKKGPQVAACHSAPGHQEENKNDFIPDLASEFKEGAYKDPLFKKLEQLKEVQQKKQEQLKRQQLEQLQRLMEEQEKLLTMVSGQCTLPGLSLLPDDQSQKHRSPGNTTTGERATCCFPSYVYPDPTQEETYPSNILSHEQSNFCRTAHGDFVLTSKRASPNLFSEAQYQEAPVEKNNLKEENRNHPTGESILCWEKVTEQIQEANDKNLQKHDDSSEVANIEERPIKAAIGERKQTFEDYLEEQIQLEEQELKQKQLKEAEGPLPIKAKPKQPFLKRGEGLARFTNAKSKFQKGKESKLVTNQSTSEDQPLFKMDRQQLQRKTALKNKELCADNPILKKDSKARTKSGSVTLSQKPKMLKCSNRKSLSPSGLKIQTGKKCDGQFRDQIKFENKVTSNNKENVTECPKPCDTGCTGWNKTQGKDRLPLSTGPASRLAAKSPIRETMKESESSLDVSLQKKLETWEREKEKENLELDEFLFLEQAADEISFSSNSSFVLKILERDQQICKGHRMSSTPVKAVPQKTNPADPISHCNRSEDLDHTAREKESECEVAPKQLHSLSSADELREQPCKIRKAVQKSTSENQTEWNARDDEGVPNSDSSTDSEEQLDVTIKPSTEDRERGISSREDSPQVCDDKGPFKDTRTQEDKRRDVDLDLSDKDYSSDESIMESIKHKVSEPSRSSSLSLSKMDFDDERTWTDLEENLCNHDVVLGNESTYGTPQTCYPNNEIGILDKTIKRKIAPVKRGEDLSKSRRSRSPPTSELMMKFFPSLKPKPKSDSHLGNELKLNISQDQPPGDNARSQVLREKIIELETEIEKFKAENASLAKLRIERESALEKLRKEIADFEQQKAKELARIEEFKKEEMRKLQKERKVFEKYTTAARTFPDKKEREEIQTLKQQIADLREDLKRKETKWSSTHSRLRSQIQMLVRENTDLREEIKVMERFRLDAWKRAEAIESSLEVEKKDKLANTSVRFQNSQISSGTQVEKYKKNYLPMQGTAQPPHTPSSLLADHLPPLSSFRPFSRNIQLCYTF

SEQ ID NO: 13903 - protein, 1086 aa, Homo sapiens
  Payload ID: 2703
  Gene Symbol: CENPJ
  Gene Name: centromere protein J
  Uniprot ID: Q9HC77
  ENSP ID: ENSP00000477511
MFLMPTSSELNSGQNFLTQWMTNPSRAGVILNRGFPILEADKEKRAAVDISTSFPIKGTHFSDSFSFINEEDSLLEEQKLESNNPYKPQSDKSETHTAFPCIKKGPQVAACHSAPGHQEENKNDFIPDLASEFKEGAYKDPLFKKLEQLKEVQQKKQEQLKRQQLEQLQRLMEEQEKLLTMVSGQCTLPGLSLLPDDQSQKHRSPGNTTTGERATCCFPSYVYPDPTQEETYPSNILSHEQSNFCRTAHGDFVLTSKRASPNLFSEAQYQEAPVEKNNLKEENRNHPTGESILCWEKVTEQIQEANDKNLQKHDDSSEVANIEERPIKAAIGERKQTFEDYLEEQIQLEEQELKQKQLKEAEGPLPIKAKPKQPFLKRGEGLARFTNAKSKFQKGKESKLVTNQSTSEDQPLFKMDRQQLQRKTALKNKELCADNPILKKDSKARTKSGSVTLSQKPKMLKCSNRKSLSPSGLKIQTGKKCDGQFRDQIKFENKVTSNNKENVTECPKPCDTGCTGWNKTQGKDRLPLSTGPASRLAAKSPIRETMKESESSLDVSLQKKLETWEREKEKENLELDEFLFLEQAADEISFSSNSSFVLKILERDQQICKGHRMSSTPVKAVPQKTNPADPISHCNRSEDLDHTAREKESECEVAPKQLHSLSSADELREQPCKIRKAVQKSTSENQTEWNARDDEGVPNSDSSTDSEEQLDVTIKPSTEDRERGISSREDSPQVCDDKGPFKDTRTQEDKRRDVDLDLSDKDYSSDESIMESIKHKVSEPSRSSSLSLSKMDFDDERTWTDLEENLCNHDVVLGNESTYGTPQTCYPNNEIGILDKTIKRKIAPVKRGEDLSKSRRSRSPPTSELMMKFFPSLKPKPKSDSHLGNELKLNISQDQPPGDNARSQVLREKIIELETEIEKFKAENASLAKLRIERESALEKLRKEIADFEQQKAKELARIEEFKKEEMRKLQKERKVFEKYTTAARTFPDKKEREEIQTLKQQIADLREDLKRKETKWSSTHSRLRSQIQMLVRENTDLREEIKVMERFRLDAWKRAEAIESSLEVEKKDKLAAIHLEDPSLHLLVI

SEQ ID NO: 13904 - protein, 269 aa, Homo sapiens
  Payload ID: 2704
  Gene Symbol: CENPK
  Gene Name: centromere protein K
  Uniprot ID: Q9BS16
  ENSP ID: ENSP00000242872
MNQEDLDPDSTTDVGDVTNTEEELIRECEEMWKDMEECQNKLSLIGTETLTDSNAQLSLLIMQVKCLTAELSQWQKKTPETIPLTEDVLITLGKEEFQKLRQDLEMVLSTKESKNEKLKEDLEREQRWLDEQQQIMESLNVLHSELKNKVETFSESRIFNELKTKMLNIKEYKEKLLSTLGEFLEDHFPLPDRSVKKKKKNIQESSVNLITLHEMLEILINRLFDVPHDPYVKISDSFWPPYVELLLRNGIALRHPEDPTRIRLEAFHQ

SEQ ID NO: 13905 - protein, 269 aa, Homo sapiens; identical to SEQ ID NO: 13904
  Payload ID: 2704
  Gene Symbol: CENPK
  Gene Name: centromere protein K
  Uniprot ID: Q9BS16
  ENSP ID: ENSP00000379911

SEQ ID NO: 13906 - protein, 239 aa, Homo sapiens
  Payload ID: 2704
  Gene Symbol: CENPK
  Gene Name: centromere protein K
  ENSP ID: ENSP00000421034
MWKDMEECQNKLSLIGTETLTDSNAQLSLLIMQVKCLTAELSQWQKKTPETIPLTEDVLITLGKEEFQKLRQDLEMVLSTKESKNEKLKEDLEREQRWLDEQQQIMESLNVLHSELKNKVETFSESRIFNELKTKMLNIKEYKEKLLSTLGEFLEDHFPLPDRSVKKKKKNIQESSVNLITLHEMLEILINRLFDVPHDPYVKISDSFWPPYVELLLRNGIALRHPEDPTRIRLEAFHQ

SEQ ID NO: 13907 - protein, 176 aa, Homo sapiens
  Payload ID: 2704
  Gene Symbol: CENPK
  Gene Name: centromere protein K
  ENSP ID: ENSP00000422365
MTLFQEDLDPDSTTDVGDVTNTEEELIRECEEMWKDMEECQNKLSLIGTETLTDSNAQLSLLIMQVKCLTAELSQWQKKTPETIPLTEDVLITLGKEEFQKLRQDLEMVLSTKESKNEKLKEDLEREQRWLDEQQQIMESLNVLHSELKNKVETFSESRIFNELKTKMLNIKEYKE

SEQ ID NO: 13908 - protein, 269 aa, Homo sapiens; identical to SEQ ID NO: 13904
  Payload ID: 2704
  Gene Symbol: CENPK
  Gene Name: centromere protein K
  Uniprot ID: Q9BS16
  ENSP ID: ENSP00000422421

SEQ ID NO: 13909 - protein, 106 aa, Homo sapiens
  Payload ID: 2704
  Gene Symbol: CENPK
  Gene Name: centromere protein K
  ENSP ID: ENSP00000423308
MNQEDLDPDSTTDVGDVTNTEEELIRECEEMWKDMEECQNKLSLIGTETLTDSNAQLSLLIMQVKCLTAELSQWQKKTPERSHRVVQAGVQWHNHGSLQPRSPGFK

SEQ ID NO: 13910 - protein, 117 aa, Homo sapiens
  Payload ID: 2704
  Gene Symbol: CENPK
  Gene Name: centromere protein K
  ENSP ID: ENSP00000424039
MNQEDLDPDSTTDVGDVTNTEEELIRECEEMWKDMEECQNKLSLIGTETLTDSNAQLSLLIMQVKCLTAELSQWQKKTPETIPLTEDVLITLGKEEILQMMILSYKPVGCPLNSLQF

SEQ ID NO: 13911 - protein, 24 aa, Homo sapiens
  Payload ID: 2704
  Gene Symbol: CENPK
  Gene Name: centromere protein K
  ENSP ID: ENSP00000424450
  MOD_RES (1)..(1): Any amino acid
XRVVQAGVQWHNHGSLQPRSPGFK

SEQ ID NO: 13912 - protein, 132 aa, Homo sapiens
  Payload ID: 2704
  Gene Symbol: CENPK
  Gene Name: centromere protein K
  ENSP ID: ENSP00000424686
MNQEDLDPDSTTDVGDVTNTEEELIRECEEMWKDMEECQNKLSLIGTETLTDSNAQLSLLIMQVKCLTAELSQWQKKTPETIPLTEDVLITLGKEEFQKLRQDLEMVLSTKESKNEKLKEDLEREQRWLDEQ

SEQ ID NO: 13913 - protein, 206 aa, Homo sapiens
  Payload ID: 2704
  Gene Symbol: CENPK
  Gene Name: centromere protein K
  ENSP ID: ENSP00000425686
MWKDMEECQNKLSLIGTETLTDSNAQLSLLIMQVKCLTAELSQWQKKTPETIPLTEDVLITLGKEEFQKLRQDLEMVLSTKESKNEKLKEDLERIFNELKTKMLNIKEYKEKLLSTLGEFLEDHFPLPDRSVKKKKKNIQESSVNLITLHEMLEILINRLFDVPHDPYVKISDSFWPPYVELLLRNGIALRHPEDPTRIRLEAFHQ

SEQ ID NO: 13914 - protein, 106 aa, Homo sapiens; identical to SEQ ID NO: 13909
  Payload ID: 2704
  Gene Symbol: CENPK
  Gene Name: centromere protein K
  ENSP ID: ENSP00000427648

SEQ ID NO: 13915 - protein, 344 aa, Homo sapiens
  Payload ID: 2705
  Gene Symbol: CENPL
  Gene Name: centromere protein L
  Uniprot ID: Q8N0S6
  ENSP ID: ENSP00000323543
MDSYSAPESTPSASSRPEDYFIGATPLQKRLESVRKQSSFILTPPRRKIPQCSQLQEDVDPQKVAFLLHKQWTLYSLTPLYKFSYSNLKEYSRLLNAFIVAEKQKGLAVEVGEDFNIKVIFSTLLGMKGTQRDPEAFLVQIVSKSQLPSENREGKVLWTGWFCCVFGDSLLETVSEDFTCLPLFLANGAESNTAIIGTWFQKTFDCYFSPLAINAFNLSWMAAMWTACKMDHYVATTEFLWSVPCSPQSLDISFAIHPEDAKALWDSVHKTPGEVTQEEVDLFMDCLYSHFHRHFKIHLSATRLVRVSTSVASAHTDGKIKILCHKYLIGVLAYLTELAIFQIE

SEQ ID NO: 13916 - protein, 390 aa, Homo sapiens
  Payload ID: 2705
  Gene Symbol: CENPL
  Gene Name: centromere protein L
  Uniprot ID: Q8N0S6
  ENSP ID: ENSP00000348527
MDSYSAPESTPSASSRPEDYFIGATPLQKRLESVRKQSSFILTPPRRKIPQCSQLQEDVDPQKVAFLLHKQWTLYSLTPLYKFSYSNLKEYSRLLNAFIVAEKQKGLAVEVGEDFNIKVIFSTLLGMKGTQRDPEAFLVQGLILSPRLEYSGTILVDCNLCLLGSSDPSTLAFQVAGTAGACHHTRIVSKSQLPSENREGKVLWTGWFCCVFGDSLLETVSEDFTCLPLFLANGAESNTAIIGTWFQKTFDCYFSPLAINAFNLSWMAAMWTACKMDHYVATTEFLWSVPCSPQSLDISFAIHPEDAKALWDSVHKTPGEVTQEEVDLFMDCLYSHFHRHFKIHLSATRLVRVSTSVASAHTDGKIKILCHKYLIGVLAYLTELAIFQIE

SEQ ID NO: 13917 - protein, 344 aa, Homo sapiens; identical to SEQ ID NO: 13915
  Payload ID: 2705
  Gene Symbol: CENPL
  Gene Name: centromere protein L
  Uniprot ID: Q8N0S6
  ENSP ID: ENSP00000356683

SEQ ID NO: 13918 - protein, 180 aa, Homo sapiens
  Payload ID: 2706
  Gene Symbol: CENPM
  Gene Name: centromere protein M
  Uniprot ID: Q9NSP4
  ENSP ID: ENSP00000215980
MSVLRPLDKLPGLNTATILLVGTEDALLQQLADSMLKEDCASELKVHLAKSLPLPSSVNRPRIDLIVFVVNLHSKYSLQNTEESLRHVDASFFLGKVCFLATGAGRESHCSIHRHTVVKLAHTYQSPLLYCDLEVEGFRATMAQRLVRVLQICAGHVPGVSALNLLSLLRSSEGPSLEDL

SEQ ID NO: 13919 - protein, 125 aa, Homo sapiens
  Payload ID: 2706
  Gene Symbol: CENPM
  Gene Name: centromere protein M
  ENSP ID: ENSP00000384132
MLKEDCASELKVHLAKSLPLPSSVNRPRIDLIVFVVNLHSKYRIREARTSAFSVVKFCSLVCFLTLAWPPQSPEHRGVPAPCGCQLLLGEGVFPRHRCWAGEPLQHSPAHRGEAGPHLSKPPALL

SEQ ID NO: 13920 - protein, 146 aa, Homo sapiens
  Payload ID: 2706
  Gene Symbol: CENPM
  Gene Name: centromere protein M
  ENSP ID: ENSP00000384731
MLKEDCASELKVHLAKSLPLPSSVNRPRIDLIVFVVNLHSKYSLQNTEESLRHVDASFFLGKVCFLATGAGRESHCSIHRHTVVKLAHTYQSPLLYCDLEVEGFRATMAQRLVRVLQICAGHVPGVSALNLLSLLRSSEGPSLEDL

SEQ ID NO: 13921 - protein, 107 aa, Homo sapiens
  Payload ID: 2706
  Gene Symbol: CENPM
  Gene Name: centromere protein M
  Uniprot ID: Q9NSP4
  ENSP ID: ENSP00000384743
MSVLRPLDKLPGLNTATILLVGTEDALLQQLADSMLKEDCASELKVHLAKSLPLPSSVNRPRIDLIVFVVNLHSKYSLQNTEESLRHVDASFFLGKVCFLATGGGRL

SEQ ID NO: 13922 - protein, 73 aa, Homo sapiens
  Payload ID: 2706
  Gene Symbol: CENPM
  Gene Name: centromere protein M
  ENSP ID: ENSP00000384814
MLKEDCASELKVHLAKSLPLPSSVNRPRIDLIVFVVNLHSKYSLQNTEESLRHVDASFFLGKVCFLATGGGRL

SEQ ID NO: 13923 - protein, 58 aa, Homo sapiens
  Payload ID: 2706
  Gene Symbol: CENPM
  Gene Name: centromere protein M
  Uniprot ID: Q9NSP4
  ENSP ID: ENSP00000430624
MGRVWDLPGVLKVEGFRATMAQRLVRVLQICAGHVPGVSALNLLSLLRSSEGPSLEDL

SEQ ID NO: 13924 - protein, 204 aa, Homo sapiens
  Payload ID: 2707
  Gene Symbol: CENPN
  Gene Name: centromere protein N
  Uniprot ID: Q96H22
  ENSP ID: ENSP00000299572
MDETVAEFIKRTILKIPMNELTTILKAWDFLSENQLQTVNFRQRKESVVQHLIHLCEEKRASISDAALLDIIYMQFHQHQKVWEVFQMSKGPGEDVDLFDMKQFKNSFKKILQRALKNVTVSFRETEENAVWIRIAWGTQYTKPNQYKPTYVVYYSQTPYAFTSSSMLRRNTPLLGQELEATGKIYLRQEEIILDITEMKKACN

SEQ ID NO: 13925 - protein, 339 aa, Homo sapiens
  Payload ID: 2707
  Gene Symbol: CENPN
  Gene Name: centromere protein N
  Uniprot ID: Q96H22
  ENSP ID: ENSP00000305608
MDETVAEFIKRTILKIPMNELTTILKAWDFLSENQLQTVNFRQRKESVVQHLIHLCEEKRASISDAALLDIIYMQFHQHQKVWEVFQMSKGPGEDVDLFDMKQFKNSFKKILQRALKNVTVSFRETEENAVWIRIAWGTQYTKPNQYKPTYVVYYSQTPYAFTSSSMLRRNTPLLGQALTIASKHHQIVKMDLRSRYLDSLKAIVFKQYNQTFETHNSTTPLQERSLGLDINMDSRIIHENIVEKERVQRITQETFGDYPQPQLEFAQYKLETKFKSGLNGSILAEREEPLRCLIKFSSPHLLEALKSLAPAGIADAPLSPLLTCIPNKRMNYFKIRDK

SEQ ID NO: 13926 - protein, 353 aa, Homo sapiens
  Payload ID: 2707
  Gene Symbol: CENPN
  Gene Name: centromere protein N
  Uniprot ID: Q96H22
  ENSP ID: ENSP00000377007
MDETVAEFIKRTILKIPMNELTTILKAWDFLSENQLQTVNFRQRKESVVQHLIHLCEEKRASISDAALLDIIYMQFHQHQKVWEVFQMSKGPGEDVDLFDMKQFKNSFKKILQRALKNVTVSFRETEENAVWIRIAWGTQYTKPNQYKPTYVVYYSQTPYAFTSSSMLRRNTPLLGQALTIASKHHQIVKMDLRSRYLDSLKAIVFKQYNQTFETHNSTTPLQERSLGLDINMDSRIIHENIVEKERVQRITQETFGDYPQPQLEFAQYKLETKFKSGLNGSILAEREEPLRCLIKFSSPHLLEALKSLAPAALVCRIQKLLCYSGSHSQGTQDPSSWQKDLYLLFVPLYPRC

SEQ ID NO: 13927 - protein, 305 aa, Homo sapiens
  Payload ID: 2707
  Gene Symbol: CENPN
  Gene Name: centromere protein N
  Uniprot ID: Q96H22
  ENSP ID: ENSP00000393991
MDETVAEFIKRTILKIPMNELTTILKAWDFLSENQLQTVNFRQRKESVVQHLIHLCEEKRASISDAALLDIIYMQFHQHQKVWEVFQMSKGPGEDVDLFDMKQFKNSFKKILQRALKNVTVSFRETEENAVWIRIAWGTQYTKPNQYKPTYVVYYSQTPYAFTSSSMLRRNTPLLGQTFETHNSTTPLQERSLGLDINMDSRIIHENIVEKERVQRITQETFGDYPQPQLEFAQYKLETKFKSGLNGSILAEREEPLRCLIKFSSPHLLEALKSLAPAGIADAPLSPLLTCIPNKRMNYFKIRDK

SEQ ID NO: 13928 - protein, 319 aa, Homo sapiens
  Payload ID: 2707
  Gene Symbol: CENPN
  Gene Name: centromere protein N
  Uniprot ID: Q96H22
  ENSP ID: ENSP00000395235
MDETVAEFIKRTILKIPMNELTTILKAWDFLSENQLQTVNFRQRKESVVQHLIHLCEEKRASISDAALLDIICEDVDLFDMKQFKNSFKKILQRALKNVTVSFRETEENAVWIRIAWGTQYTKPNQYKPTYVVYYSQTPYAFTSSSMLRRNTPLLGQALTIASKHHQIVKMDLRSRYLDSLKAIVFKQYNQTFETHNSTTPLQERSLGLDINMDSRIIHENIVEKERVQRITQETFGDYPQPQLEFAQYKLETKFKSGLNGSILAEREEPLRCLIKFSSPHLLEALKSLAPAGIADAPLSPLLTCIPNKRMNYFKIRDK

SEQ ID NO: 13929 - protein, 177 aa, Homo sapiens
  Payload ID: 2707
  Gene Symbol: CENPN
  Gene Name: centromere protein N
  ENSP ID: ENSP00000454327
MDETVAEFIKRTILKIPMNELTTILKAWDFLSENQLQTVNFRQRKESVVQHLIHLCEEKRASISDAALLDIIYMQFHQHQKVWEVFQMSKGPGEDVDLFDMKQFKNSFKKILQRALKNVTVSFRETEENAVWIRIAWGTQYTKPNQYKPTYVVYYSQTPYAFTSSSMLRRNTPLLGQ

SEQ ID NO: 13930 - protein, 76 aa, Homo sapiens
  Payload ID: 2707
  Gene Symbol: CENPN
  Gene Name: centromere protein N
  ENSP ID: ENSP00000454337
MDETVAEFIKRTILKIPMNELTTILKAWDFLSENQLQTVNFRQRKESVVQHLIHLCEEKRASISDAALLDIICKCQ

SEQ ID NO: 13931 - protein, 105 aa, Homo sapiens
  Payload ID: 2707
  Gene Symbol: CENPN
  Gene Name: centromere protein N
  ENSP ID: ENSP00000456413
  MOD_RES (1)..(1): Any amino acid
XGEDVDLFDMKQFKNSFKKILQRALKNVTVSFRETEENAVWIRIAWGTQYTKPNQYKPTYVVYYSQTPYAFTSSSMLRRNTPLLGQALTIASKHHQIVKMDLRSR

SEQ ID NO: 13932 - protein, 300 aa, Homo sapiens
  Payload ID: 2708
  Gene Symbol: CENPO
  Gene Name: centromere protein O
  Uniprot ID: Q9BU64
  ENSP ID: ENSP00000260662
MEQANPLRPDGESKGGVLAHLERLETQVSRSRKQSEELQSVQAQEGALGTKIHKLRRLRDELRAVVRHRRASVKACIANVEPNQTVEINEQEALEEKLENVKAILQAYHFTGLSGKLTSRGVCVCISTAFEGNLLDSYFVDLVIQKPLRIHHHSVPVFIPLEEIAAKYLQTNIQHFLFSLCEYLNAYSGRKYQADRLQSDFAALLTGPLQRNPLCNLLSFTYKLDPGGQSFPFCARLLYKDLTATLPTDVTVTCQGVEVLSTSWEEQRASHETLFCTKPLHQVFASFTRKGEKLDMSLVS

SEQ ID NO: 13933 - protein, 300 aa, Homo sapiens; identical to SEQ ID NO: 13932
  Payload ID: 2708
  Gene Symbol: CENPO
  Gene Name: centromere protein O
  Uniprot ID: Q9BU64
  ENSP ID: ENSP00000370214

SEQ ID NO: 13934 - protein, 294 aa, Homo sapiens
  Payload ID: 2708
  Gene Symbol: CENPO
  Gene Name: centromere protein O
  Uniprot ID: Q9BU64
  ENSP ID: ENSP00000417787
MAGILASGLGVLAHLERLETQVSRSRKQSEELQSVQAQEGALGTKIHKLRRLRDELRAVVRHRRASVKACIANVEPNQTVEINEQEALEEKLENVKAILQAYHFTGLSGKLTSRGVCVCISTAFEGNLLDSYFVDLVIQKPLRIHHHSVPVFIPLEEIAAKYLQTNIQHFLFSLCEYLNAYSGRKYQADRLQSDFAALLTGPLQRNPLCNLLSFTYKLDPGGQSFPFCARLLYKDLTATLPTDVTVTCQGVEVLSTSWEEQRASHETLFCTKPLHQVFASFTRKGEKLDMSLVS

SEQ ID NO: 13935 - protein, 102 aa, Homo sapiens
  Payload ID: 2709
  Gene Symbol: CENPP
  Gene Name: centromere protein P
  ENSP ID: ENSP00000364726
MQEKYPDAVYLSEGPSSCSMGIRSASRPGFELVIVWRIQIDEDGKVFPKLDLLTKVPQRALELDKNRAIETAPLSFRTLVGLLGIEAALESLIKSLCAEENN

SEQ ID NO: 13936 - protein, 115 aa, Homo sapiens
  Payload ID: 2709
  Gene Symbol: CENPP
  Gene Name: centromere protein P
  Uniprot ID: Q6IPU0
  ENSP ID: ENSP00000364729
MEAPSWSVLQRSGDEEKYPDAVYLSEGPSSCSMGIRSASRPGFELVIVWRIQIDEDGKVFPKLDLLTKVPQRALELDKNRAIETAPLSFRTLVGLLGIEAALESLIKSLCAEENN

SEQ ID NO: 13937 - protein, 288 aa, Homo sapiens
  Payload ID: 2709
  Gene Symbol: CENPP
  Gene Name: centromere protein P
  Uniprot ID: Q6IPU0
  ENSP ID: ENSP00000364737
MDAELAEVRALQAEIAALRRACEDPPAPWEEKSRVQKSFQAIHQFNLEGWKSSKDLKNQLGHLESELSFLSTLTGINIRNHSKQTEDLTSTEMTEKSIRKVLQRHRLSGNCHMVTFQLEFQILEIQNKERLSSAVTDLNIIMEPTECSELSEFVSRAEERKDLFMFFRSLHFFVEWFEYRKRTFKHLKEKYPDAVYLSEGPSSCSMGIRSASRPGFELVIVWRIQIDEDGKVFPKLDLLTKVPQRALELDKNRAIETAPLSFRTLVGLLGIEAALESLIKSLCAEENN

SEQ ID NO: 13938 - protein, 190 aa, Homo sapiens
  Payload ID: 2709
  Gene Symbol: CENPP
  Gene Name: centromere protein P
  ENSP ID: ENSP00000477821
MDAELAEVRALQAEIAALRRACEDPPAPWEEKSRVQKSFQAIHQFNLEGWKSSKDLKNQLGHLESELSFLSTLTGINIRNHSKQTEDLTSTEMTEKSIRKVLQRHRLSGNCHMVTFQLEFQILEIQNKERLSSAVTDLNIIMEPTECSELSEFVSRAEERKDLFMFFRSLHFFVEWFEYRKRTFKHLKVK

SEQ ID NO: 13939 - protein, 268 aa, Homo sapiens
  Payload ID: 2710
  Gene Symbol: CENPQ
  Gene Name: centromere protein Q
  Uniprot ID: Q7L2Z9
  ENSP ID: ENSP00000337289
MSGKANASKKNAQQLKRNPKRKKDNEEVVLSENKVRNTVKKNKNHLKDLSSEGQTKHTNLKHGKTAASKRKTWQPLSKSTRDHLQTMMESVIMTILSNSIKEKEEIQYHLNFLKKRLLQQCETLKVPPKKMEDLTNVSSLLNMERARDKANEEGLALLQEEIDKMVETTELMTGNIQSLKNKIQILASEVEEEEERVKQMHQINSSGVLSLPELSQKTLKAPTLQKEILALIPNQNALLKDLDILHNSSQMKSMSTFIEEAYKKLDAS

SEQ ID NO: 13940 - protein, 561 aa, Homo sapiens
  Payload ID: 2711
  Gene Symbol: CENPT
  Gene Name: centromere protein T
  Uniprot ID: Q96BT3
  ENSP ID: ENSP00000400140
MADHNPDSDSTPRTLLRRVLDTADPRTPRRPRSARAGARRALLETASPRKLSGQTRTIARGRSHGARSVGRSAHIQASGHLEEQTPRTLLKNILLTAPESSILMPESVVKPVPAPQAVQPSRQESSCGSLELQLPELEPPTTLAPGLLAPGRRKQRLRLSVFQQGVDQGLSLSQEPQGNADASSLTRSLNLTFATPLQPQSVQRPGLARRPPARRAVDVGAFLRDLRDTSLAPPNIVLEDTQPFSQPMVGSPNVYHSLPCTPHTGAEDAEQAAGRKTQSSGPGLQKNSPGKPAQFLAGEAEEVNAFALGFLSTSSGVSGEDEVEPLHDGVEEAEKKMEEEGVSVSEMEATGAQGPSRVEEAEGHTEVTEAEGSQGTAEADGPGASSGDEDASGRAASPESASSTPESLQARRHHQFLEPAPAPGAAVLSSEPAEPLLVRHPPRPRTTGPRPRQDPHKAGLSHYVKLFSFYAKMPMERKALEMVEKCLDKYFQHLCDDLEVFAAHAGRKTVKPEDLELLMRRQGLVTDQVSLHVLVERHLPLEYRQLLIPCAYSGNSVFPAQ

SEQ ID NO: 13941 - protein, 64 aa, Homo sapiens
  Payload ID: 2711
  Gene Symbol: CENPT
  Gene Name: centromere protein T
  ENSP ID: ENSP00000454481
MADHNPDSDSTPRTLLRRVLDTADPRTPRRPRSARAGARRALLETASPRKLSGQTRTIARGRSH

SEQ ID NO: 13942 - protein, 79 aa, Homo sapiens
  Payload ID: 2711
  Gene Symbol: CENPT
  Gene Name: centromere protein T
  ENSP ID: ENSP00000454627
MADHNPDSDSTPRTLLRRVLDTADPRTPRRPRSARAGARRALLETASPRKLSGQTRTIARGRSHGARADGQTGCLVLCR

SEQ ID NO: 13943 - protein, 48 aa, Homo sapiens
  Payload ID: 2711
  Gene Symbol: CENPT
  Gene Name: centromere protein T
  ENSP ID: ENSP00000455638
MADHNPDSDSTPRTLLRRVLDTADPRTPRRPRSARAGARRALLETASP

SEQ ID NO: 13944 - protein, 114 aa, Homo sapiens
  Payload ID: 2711
  Gene Symbol: CENPT
  Gene Name: centromere protein T
  ENSP ID: ENSP00000455801
MADHNPDSDSTPRTLLRRVLDTADPRTPRRPRSARAGARRALLETASPRKLSGQTRTIARGRSHGARSVGRSAHIQASGHLEEQTPRTLLKNILLTAPPSPWCFCSPRIFHPDA

SEQ ID NO: 13945 - protein, 73 aa, Homo sapiens
  Payload ID: 2711
  Gene Symbol: CENPT
  Gene Name: centromere protein T
  ENSP ID: ENSP00000455918
MADHNPDSDSTPRTLLRRVLDTADPRTPRRPRSARAGARRALLETASPRKLSGQTRTIARGRSHGARPQNLPS

SEQ ID NO: 13946 - protein, 73 aa, Homo sapiens; identical to SEQ ID NO: 13945
  Payload ID: 2711
  Gene Symbol: CENPT
  Gene Name: centromere protein T
  ENSP ID: ENSP00000456714

SEQ ID NO: 13947 - protein, 506 aa, Homo sapiens
  Payload ID: 2711
  Gene Symbol: CENPT
  Gene Name: centromere protein T
  ENSP ID: ENSP00000457294
MADHNPDSDSTPRTLLRRVLDTADPRTPRRPRSARAGARRALLETASPRKLSGQTRTIARGRSHGARSVGRSAHIQASGHLEEQTPRTLLKNILLTAPESSILMPESVVKPVPAPQAVQPSRQESSCGSLELQLPELEPPTTLAPGLLAPGRRKQRLRLSVFQQGVDQGLSLSQEPQGNADASSLTRSLNLTFATPLQPQSVQRPGLARRPPARRAVDVGAFLRDLRDTSLAPPNIVLEDTQPFSQPMVGSPNVYHSLPCTPHTGAEDAEQAAGRKTQSSGPGLQKNSPGKPAQFLAGEAEEVNAFALGFLSTSSGVSGEDEVEPLHDGVEEAEKKMEEEASPESASSTPESLQARRHHQFLEPAPAPGAAVLSSEPAEPLLVRHPPRPRTTGPRPRQDPHKAGLSHYVKLFSFYAKMPMERKALEMVEKCLDKYFQHLCDDLEVFAAHAGRKTVKPEDLELLMRRQGLVTDQVSLHVLVERHLPLEYRQLLIPCAYSGNSVFPAQ

SEQ ID NO: 13948 - protein, 101 aa, Homo sapiens
  Payload ID: 2711
  Gene Symbol: CENPT
  Gene Name: centromere protein T
  ENSP ID: ENSP00000457304
MADHNPDSDSTPRTLLRRVLDTADPRTPRRPRSARAGARRALLETASPRKLSGQTRTIARGRSHGARTDRLVAWCFADSLLADRPIFRPVGTWRNRHLGRC

SEQ ID NO: 13949 - protein, 561 aa, Homo sapiens; identical to SEQ ID NO: 13940
  Payload ID: 2711
  Gene Symbol: CENPT
  Gene Name: centromere protein T
  Uniprot ID: Q96BT3
  ENSP ID: ENSP00000457810

SEQ ID NO: 13950 - protein, 277 aa, Homo sapiens
  Payload ID: 2711
  Gene Symbol: CENPT
  Gene Name: centromere protein T
  ENSP ID: ENSP00000457832
MADHNPDSDSTPRTLLRRVLDTADPRTPRRPRSARAGARRALLETASPRKLSGQTRTIARGRSHGARSVGRSAHIQASGHLEEQTPRTLLKNILLTAPESSILMPESVVKPVPAPQAVQPSRQESSCGRSLNLTFATPLQPQSVQRPGLARRPPARRAVDVGAFLRDLRDTSLAPPNIVLEDTQPFSQPMVGSPNVYHSLPCTPHTGAEDAEQAAGRKTQSSGPGLQKNSPGKPAQFLAGEAEEVNAFALGFLSTSSGVSGEDEVEPLHDGVEEAEK

SEQ ID NO: 13951 - protein, 6 aa, Homo sapiens
  Payload ID: 2711
  Gene Symbol: CENPT
  Gene Name: centromere protein T
  ENSP ID: ENSP00000460542
MADHNP

SEQ ID NO: 13952 - protein, 163 aa, Homo sapiens
  Payload ID: 2711
  Gene Symbol: CENPT
  Gene Name: centromere protein T
  ENSP ID: ENSP00000461212
MADHNPDSDSTPRTLLRRVLDTADPRTPRRPRSARAGARRALLETASPRKLSGQTRTIARGRSHGARSVGRSAHIQASGHLEEQTPRTLLKNILLTAPESSILMPESVVKPVPAPQAVQPSRQESSCGRSAGPWQEETEAETVSVSAGSGPGAVSLPRASREC

SEQ ID NO: 13953 - protein, 73 aa, Homo sapiens; identical to SEQ ID NO: 13945
  Payload ID: 2711
  Gene Symbol: CENPT
  Gene Name: centromere protein T
  ENSP ID: ENSP00000487410

SEQ ID NO: 13954 - protein, 418 aa, Homo sapiens
  Payload ID: 2712
  Gene Symbol: CENPU
  Gene Name: centromere protein U
  Uniprot ID: Q71F23
  ENSP ID: ENSP00000281453
MAPRGRRRPRPHRSEGARRSKNTLERTHSMKDKAGQKCKPIDVFDFPDNSDVSSIGRLGENEKDEETYETFDPPLHSTAIYADEEEFSKHCGLSLSSTPPGKEAKRSSDTSGNEASEIESVKISAKKPGRKLRPISDDSESIEESDTRRKVKSAEKISTQRHEVIRTTASSELSEKPAESVTSKKTGPLSAQPSVEKENLAIESQSKTQKKGKISHDKRKKSRSKAIGSDTSDIVHIWCPEGMKTSDIKELNIVLPEFEKTHLEHQQRIESKVCKAAIATFYVNVKEQFIKMLKESQMLTNLKRKNAKMISDIEKKRQRMIEVQDELLRLEPQLKQLQTKYDELKERKSSLRNAAYFLSNLKQLYQDYSDVQAQEPNVKETYDSSSLPALLFKARTLLGAESHLRNINHQLEKLLDQG

SEQ ID NO: 13955 - protein, 177 aa, Homo sapiens
  Payload ID: 2712
  Gene Symbol: CENPU
  Gene Name: centromere protein U
  ENSP ID: ENSP00000423167
MKDKAGQKCKPIDVFDFPDNSDVSSIGRLGENEKDEETYETFDPPLHSTAIYADEEEFSKHCGLSLSSTPPGKEAKRSSDTSGNEASEIESVKISAKKPGRKLRPISDDSESIEESDTRRKVKSAEKISTQRHEVIRTTASSELSEKPAESVTSKKTGPLSAQPSVEKENLAIESQS

SEQ ID NO: 13956 - protein, 320 aa, Homo sapiens
  Payload ID: 2712
  Gene Symbol: CENPU
  Gene Name: centromere protein U
  ENSP ID: ENSP00000423248
MAPRGRRRPRPHRSEGARRSKNTLERTHSMKDKAGQKCKPIDVFDFPDNSDVSSIGRLGENEKDEETYETFDPPLHSTAIYADEEEFSKHCGLSLSSTPPGKEAKRSSDTSGNEASEIESVKISAKKPGRKLRPISDDSESIEESDTRRKVKSAEKISTQRHEVIRTTASSELSEKPAESVTSKKTGPLSAQPSVEKENLAIESQSKTQKKGKISHDKRKKSRSKAIGSDTSDIVHIWCPEGMKTSDIKELNIVLPEFEKTHLEHQQRIESKVCKAAIATFYVNVKEQFIKMLKESQMLTNLKRKNAKVRATAETTTNKI

SEQ ID NO: 13957 - protein, 272 aa, Homo sapiens
  Payload ID: 2713
  Gene Symbol: CENPV
  Gene Name: centromere protein V
  Uniprot ID: Q7Z7K6
  ENSP ID: ENSP00000299736
MRRSRSSAAAKLRGQKRSGASAAPAASAAAALAPSATRTRRSASQAGSKSQAVEKPPSEKPRLRRSSPRAQEEGPGEPPPPELALLPPPPPPPPTPATPTSSASNLDLGEQRERWETFQKRQKLTSEGAAKLLLDTFEYQGLVKHTGGCHCGAVRFEVWASADLHIFDCNCSICKKKQNRHFIVPASRFKLLKGAEHITTYTFNTHKAQHTFCKRCGVQSFYTPRSNPGGFGIAPHCLDEGTVRSMVTEEFNGSDWEKAMKEHKTIKNMSKE

SEQ ID NO: 13958 - protein, 175 aa, Homo sapiens
  Payload ID: 2713
  Gene Symbol: CENPV
  Gene Name: centromere protein V
  ENSP ID: ENSP00000462377
MRRSRSSAAAKLRGQKRSGASAAPAASAAAALAPSATRTRRSASQAGSKSQAVEKPPSEKPRLRRSSPRAQEEGPGEPPPPELALLPPPPPPPPTPATPTSSASNLDLGEQRERWETFQKRQKLTSEGAAKLLLDTFEYQGLVKHTGGCHCGAVRFEVWASADLHIFDCKYRNYI

SEQ ID NO: 13959 - protein, 14 aa, Homo sapiens
  Payload ID: 2713
  Gene Symbol: CENPV
  Gene Name: centromere protein V
  ENSP ID: ENSP00000468338
ADLHIFDCKYRNYI

SEQ ID NO: 13960 - protein, 272 aa, Homo sapiens
  Payload ID: 2714
  Gene Symbol: CENPVP1
  Gene Name: centromere protein V pseudogene 1
  ENSP ID: ENSP00000489273
MGRVRNRATAQRRRRKRPGDPPAACAAIAVTGASRAQCPRVQVGVGSHAAAKRWLGRWRRKRRWRRVRKAGPRDLLPSAPTPDPPGPAPSPKDLDLGAQRERWETFRKLRGLSCEGAAKVLLDTFEYPGLVHHTGGCHCGAVRFAVWAPADLRVVDCSCRLCRKKQHRHFLVPASRFTLLQGAESIVTYRSNTHPALHSFCSRCGVQSFHAAVSDPRVYGVAPHCLDEGTVRSVVIEEVGGGDPGEEAAEEHKAIHKTSSQSAPACPREQEQ

SEQ ID NO: 13961 - protein, 287 aa, Homo sapiens
  Payload ID: 2715
  Gene Symbol: CENPVP3
  Gene Name: centromere protein V pseudogene 3
  ENSP ID: ENSP00000489547
MGVAGWARAPEAAGAMGRVRNRATAQRRRRKRPGDPPAACAAIAVMGASRAQCPRVQVGVGSHAAAKRWLGKLRRKRRWRRAREAGSRDPLPSAPLPDPPAPAESPKELDLGAQRERWETFRKLWGLSCEGAAKVLLDTFEYPGLVHHTGGCHCGAVRFAVWAPADLRVVDCSCRLCRKKQHRHFLVPASRFTLLQGAESIVTYRSNTHPALHSFCSRCGVQSFHAAVSDPRVYGVAPHCLDEGTVRSVVIEEVGGGDPGEEAAEEHKAIHKTSSQSAPACPREQEQ

SEQ ID NO: 13962 - protein, 103 aa, Homo sapiens
  Payload ID: 2716
  Gene Symbol: CENPW
  Gene Name: centromere protein W
  Uniprot ID: Q5EE01
  ENSP ID: ENSP00000357308
MALSTIVSQRKQIKRKAPRGFLKRVFKRKKPQLRLEKSGDLLVRFHPFSGWEWGTGEVHLNCLLFVHRLAEESRTNACASKCRVINKEHVLAAAKVILKKSRG

SEQ ID NO: 13963 - protein, 67 aa, Homo sapiens
  Payload ID: 2716
  Gene Symbol: CENPW
  Gene Name: centromere protein W
  ENSP ID: ENSP00000357309
MALSTIVSQRKQIKRKAPRGFLKRVFKRKKPQLRLEKSGDLLKSPGQTLVRVNVESLTRSMYWPQQR

SEQ ID NO: 13964 - protein, 88 aa, Homo sapiens
  Payload ID: 2716
  Gene Symbol: CENPW
  Gene Name: centromere protein W
  Uniprot ID: Q5EE01
  ENSP ID: ENSP00000357311
MALSTIVSQRKQIKRKAPRGFLKRVFKRKKPQLRLEKSGDLLVHLNCLLFVHRLAEESRTNACASKCRVINKEHVLAAAKVILKKSRG

SEQ ID NO: 13965 - protein, 244 aa, Homo sapiens
  Payload ID: 2717
  Gene Symbol: CEP104
  Gene Name: centrosomal protein 104kDa
  Uniprot ID: O60308
  ENSP ID: ENSP00000367468
MPHKIGFVVVSSSGHEDGFSARELMIHAPTVSGWRSPRFCQFPQEIVLQMVERCRIRKLQLLAHQYMISSKIEFYISESLPEYFAPYQAERFRRLGYVSLCDNEKTGCKARELKSVYVDAVGQFLKLIFHQNHVNKYNIYNQVALVAINIIGDPADFSDESNTASREKLIDHYLGHNSEDPALEGTYASSVRTGGESTFGELKGPAVPSSVTLSVLGTSLGQWFPCHLPAVDDNEGTPFQRCLV

SEQ ID NO: 13966 - protein, 925 aa, Homo sapiens
  Payload ID: 2717
  Gene Symbol: CEP104
  Gene Name: centrosomal protein 104kDa
  Uniprot ID: O60308
  ENSP ID: ENSP00000367476
MPHKIGFVVVSSSGHEDGFSARELMIHAPTVSGWRSPRFCQFPQEIVLQMVERCRIRKLQLLAHQYMISSKIEFYISESLPEYFAPYQAERFRRLGYVSLCDNEKTGCKARELKSVYVDAVGQFLKLIFHQNHVNKYNIYNQVALVAINIIGDPADFSDESNTASREKLIDHYLGHNSEDPALEGTYARKSDYISPLDDLAFDMYQDPEVAQIIRKLDERKREAVQKERYDYAKKLKQAIADLQKVGERLGRYEVEKRCAVEKEDYDLAKEKKQQMEQYRAEVYEQLELHSLLDAELMRRPFDLPLQPLARSGSPCHQKPMPSLPQLEERGTENQFAEPFLQEKPSSYSLTISPQHSAVDPLLPATDPHPKINAESLPYDERPLPAIRKHYGEAVVEPEMSNADISDARRGGMLGEPEPLTEKALREASSAIDVLGETLVAEAYCKTWSYREDALLALSKKLMEMPVGTPKEDLKNTLRASVFLVRRAIKDIVTSVFQASLKLLKMIITQYIPKHKLSKLETAHCVERTIPVLLTRTGDSSARLRVTAANFIQEMALFKEVKSLQIIPSYLVQPLKANSSVHLAMSQMGLLARLLKDLGTGSSGFTIDNVMKFSVSALEHRVYEVRETAVRIILDMYRQHQASILEYLPPDDSNTRRNILYKTIFEGFAKIDGRATDAEMRARRKAATEEAEKQKKEEIKALQGQLAALKEIQAEVQEKESDAVKPKNQDIQGGKAAPAEALGIPDEHYLDNLCIFCGERSESFTEEGLDLHYWKHCLMLTRCDHCKQVVEISSLTEHLLTECDKKDGFGKCYRCSEAVFKEELPRHIKHKDCNPAKPEKLANRCPLCHENFSPGEEAWKAHLMGPAGCTMNLRKTHILQKAPALQPGKSSAVAASGPLGSKAGSKIPTPKGGLSKSSSRTYAKR

SEQ ID NO: 13967 - protein, 199 aa, Homo sapiens
  Payload ID: 2717
  Gene Symbol: CEP104
  Gene Name: centrosomal protein 104kDa
  ENSP ID: ENSP00000394989
MPHKIGFVVVSSSGHEDGFSARELMIHAPTVSGWRSPSYVSLCDNEKTGCKARELKSVYVDAVGQFLKLIFHQNHVNKYNIYNQVALVAINIIGDPADFSDESNTASREKLIDHYLGHNSEDPALEGTYARKSDYISPLDDLAFDMYQDPEVAQIIRKLDERKREAVQKERYDYAKKLKQAIADLQKVGERLGRYEVEK

SEQ ID NO: 13968 - protein, 190 aa, Homo sapiens
  Payload ID: 2717
  Gene Symbol: CEP104
  Gene Name: centrosomal protein 104kDa
  ENSP ID: ENSP00000395283
  MOD_RES (1)..(1): Any amino acid
XQLAALKEIQAEVQEKESDAVKPKNQDIQGGKAAPAEALGIPDEHYLDNLCIFCGERSESFTEEGLDLHYWKHCLMLTRCDHCKQVVEISSLTEHLLTECDKKDGFGKCYRCSEAVFKEELPRHIKHKDCNPAKPEKLANRCPLCHENFSPGEEAWKAHLMGPAGCTMNLRKTHILQKAPALQPGEGQRR

SEQ ID NO: 13969 - protein, 143 aa, Homo sapiens
  Payload ID: 2717
  Gene Symbol: CEP104
  Gene Name: centrosomal protein 104kDa
  ENSP ID: ENSP00000411927
RLGRYEVEKRCAVEKEDYDLAKEKKQQMEQYRAEVYEQLELHSLLDAELHSAVDPLLPATDPHPKINAESLPYDERPLPAIRKHYGEAVVEPEMSNADISDARRGGMLGEPEPLTEKALREASSAIDVLGETLVAEAYCKTWS

SEQ ID NO: 13970 - protein, 185 aa, Homo sapiens
  Payload ID: 2717
  Gene Symbol: CEP104
  Gene Name: centrosomal protein 104kDa
  ENSP ID: ENSP00000463605
ARRKAATEEAEKQKKEEIKALQGQLAALKEIQAEVQEKESDAVKPKNQDIQGGKAAPAEALGIPDEHYLDNLCIFCGERSESFTEEGLDLHYWKHCLMLTRCDHCKQVVEISSLTEHLLTECDKKDGFGKCYRCSEAVFKEELPRHIKHKDCNPAKPEKLANRCPLCHENFSPGEEVRGLGRRDQ

SEQ ID NO: 13971 - protein, 211 aa, Homo sapiens
  Payload ID: 2718
  Gene Symbol: CEP112
  Gene Name: centrosomal protein 112kDa
  Uniprot ID: Q8N8E3
  ENSP ID: ENSP00000320592
MWASLSLDHPSAKENQALRLIEMREENGNVPKTEQAGSLKPLRDTGKSNLKEKKANSKLKQIEKEYTQKLAKSSQIIAELQTTISSLKEENSQQQLAAERRLQDVRQKFEDEKKQLIRDNDQAIKVLQDELENRSNQVRCAEKKLQHKELESQEQITYIRQEYETKLKGLMPASLRQELEDTISSLKSQVNFLQKRASILQEELTTYQGRR

SEQ ID NO: 13972 - protein, 955 aa, Homo sapiens
  Payload ID: 2718
  Gene Symbol: CEP112
  Gene Name: centrosomal protein 112kDa
  Uniprot ID: Q8N8E3
  ENSP ID: ENSP00000376522
MEVGSEEEKWEKLDAEFDHFVVDMKPFVLKLPHRTERQRCALWIRKLCEPSGTGAGIMGRKNRNLYAKLLLHMLKRGALEGPFTHRPEPGTLKILPSYMSIYFDEPNPARAKGSSPEGLPAWVLGELETSEHKLNESWKLSSGEDNTLVQSPTDVYSREQYTGKLRVRSHSLSPTHREDGQNITPKICEVYSKKSPVSLDDSDIEARLNSWNLGIENPRYLRQKPIPVSLMTPKFSLRKSSSFHDDHFLSRIREKELDMKTKMMEAKFHEEKLKLQQKHDADVQKILERKNNEIEELKTLYRSKQHETEETIRKLEKKVQTLIRDCQVIRETKEDQIAELKKICEQSTESLNNDWEKKLHNAVAEMEQEKFDLQKQHTENIQELLEDTNVRLNKMESEYMAQTQSTNHMIKELEARVQQLTGEAENSNLQRQKLIQEKAELERCYQITCSELQEVKARRNTLHKEKDHLVNDYEQNMKLLQTKYDADINLLKQEHALSASKASSMIEELEQNVCQLKQQLQESELQRKQQLRDQENKFQMEKSHLKHIYEKKAHDLQSELDKGKEDTQKKIHKFEEALKEKEEQLTRVTEVQRLQAQQADAALEEFKRQVELNSEKVYAEMKEQMEKVEADLTRSKSLREKQSKEFLWQLEDIRQRYEQQIVELKLEHEQEKTHLLQQHNAEKDSLVRDHEREIENLEKQLRAANMEHENQIQEFKKRDAQVIADMEAQVHKLREELINVNSQRKQQLVELGLLREEEKQRATREHEIVVNKLKAESEKMKIELKKTHAAETEMTLEKANSKLKQIEKEYTQKLAKSSQIIAELQTTISSLKEENSQQQLAAERRLQDVRQKFEDEKKQLIRDNDQAIKVLQDELENRSNQVRCAEKKLQHKELESQEQITYIRQEYETKLKGLMPASLRQELEDTISSLKSQVNFLQKRASILQEELTTYQGRR

SEQ ID NO: 13973 - protein, 913 aa, Homo sapiens
  Payload ID: 2718
  Gene Symbol: CEP112
  Gene Name: centrosomal protein 112kDa
  ENSP ID: ENSP00000440775
MEVGSEEEKWEKLDAEFDHFVVDMKPFVLKLPHRTERQRCALWIRKLCEPSGTGAGIMGRKNRNLYAKLLLHMLKRGALEGPFTHRPEPGTLKILPSYMSIYFDEPNPARAKGSSPEGLPAWVLGELETSEHKLNESWKLSSGEDNTLVQSPTDVYSREQYTGKLRVRSHSLSPTHREDGQNITPKICEVYSKKSPVSLDDSDIEARLNSWNLGLDMKTKMMEAKFHEEKLKLQQKHDADVQKILERKNNEIEELKTLYRSKQHETEETIRKLEKKVQTLIRDCQVIRETKEDQIAELKKICEQSTESLNNDWEKKLHNAVAEMEQEKFDLQKQHTENIQELLEDTNVRLNKMESEYMAQTQSTNHMIKELEARVQQLTGEAENSNLQRQKLIQEKAELERCYQITCSELQEVKARRNTLHKEKDHLVNDYEQNMKLLQTKYDADINLLKQEHALSASKASSMIEELEQNVCQLKQQLQESELQRKQQLRDQENKFQMEKSHLKHIYEKKAHDLQSELDKGKEDTQKKIHKFEEALKEKEEQLTRVTEVQRLQAQQADAALEEFKRQVELNSEKVYAEMKEQMEKVEADLTRSKSLREKQSKEFLWQLEDIRQRYEQQIVELKLEHEQEKTHLLQQHNAEKDSLVRDHEREIENLEKQLRAANMEHENQIQEFKKRDAQVIADMEAQVHKLREELINVNSQRKQQLVELGLLREEEKQRATREHEIVVNKLKAESEKMKIELKKTHAAETEMTLEKANSKLKQIEKEYTQKLAKSSQIIAELQTTISSLKEENSQQQLAAERRLQDVRQKFEDEKKQLIRDNDQAIKVLQDELENRSNQVRCAEKKLQHKELESQEQITYIRQEYETKLKGLMPASLRQELEDTISSLKSQVNFLQKRASILQEELTTYQGRR

SEQ ID NO: 13974 - protein, 955 aa, Homo sapiens; identical to SEQ ID NO: 13972
  Payload ID: 2718
  Gene Symbol: CEP112
  Gene Name: centrosomal protein 112kDa
  Uniprot ID: Q8N8E3
  ENSP ID: ENSP00000442784

SEQ ID NO: 13975 - protein, 53 aa, Homo sapiens
  Payload ID: 2718
  Gene Symbol: CEP112
  Gene Name: centrosomal protein 112kDa
  ENSP ID: ENSP00000462567
QKFEDEKKQLIRDNDQAIKVLQDELENRSNQVRCAEKKLQHKELESQEQMKCR

SEQ ID NO: 13976 - protein, 46 aa, Homo sapiens
  Payload ID: 2718
  Gene Symbol: CEP112
  Gene Name: centrosomal protein 112kDa
  ENSP ID: ENSP00000463445
  MOD_RES (1)..(1): Any amino acid
XLMPASLRQELEDTISSLKSQVNFLQKRASILQEELTTYQGRRYSP

SEQ ID NO: 13977 - protein, 565 aa, Homo sapiens
  Payload ID: 2718
  Gene Symbol: CEP112
  Gene Name: centrosomal protein 112kDa
  ENSP ID: ENSP00000463914
MEVGSEEEKWEKLDAEFDHFVVDMKPFVLKLPHRTERQRCALWIRKLCEPSGTGAGIMGRKNRNLYAKLLLHMLKRGALEGPFTHRPEPGTLKILPSYMSIYFDEPNPARAKGSSPEGLPAWVLGELETSEHKLNESWKLSSGEDNTLVQSPTDVYSREQYTGKLRVRSHSLSPTHREDGQNITPKICEVYSKKSPVSLDDSDIEARLNSWNLGIENPRYLRQKPIPVSLMTPKFSLRKSSSFHDDHFLSRIREKELDMKTKMMEAKFHEEKLKLQQKHDADVQKILERKNNEIEELKTLYRSKQHETEETIRKLEKKVQTLIRDCQVIRETKEDQIAELKKICEQSTESLNNDWEKKLHNAVAEMEQEKFDLQKQHTENIQELLEDTNVRLNKMESEYMAQTQSTNHMIKELEARVQQLTGEAENSNLQRQKLIQEKAELERCYQITCSELQEVKARRNTLHKEKDHLVNDYEQNMKLLQTKYDADINLLKQEHALSASKASSMIEELEQNVCQLKQQLQESELQRKQQLRDQENKFQMEKSHLKHIYEKKAHDLQSELDKGKE

SEQ ID NO: 13978 - protein, 14 aa, Homo sapiens
  Payload ID: 2718
  Gene Symbol: CEP112
  Gene Name: centrosomal protein 112kDa
  ENSP ID: ENSP00000464164
MGRKNRNLYAKLLL

SEQ ID NO: 13979 - protein, 105 aa, Homo sapiens
  Payload ID: 2718
  Gene Symbol: CEP112
  Gene Name: centrosomal protein 112kDa
  ENSP ID: ENSP00000464597
ANSKLKQIEKEYTQKLAKSSQIIAELQTTISSLKEENSQQQLAAERRLQDVRQKFEDEKKQLIRDNDQAIKVLQDELENRSNQVNFLQKRASILQEELTTYQGRR

SEQ ID NO: 13980 - protein, 986 aa, Homo sapiens
  Payload ID: 2719
  Gene Symbol: CEP120
  Gene Name: centrosomal protein 120kDa
  Uniprot ID: Q8N960
  ENSP ID: ENSP00000303058
MVSKSDQLLIVVSILEGRHFPKRPKHMLVVEAKFDGEQLATDPVDHTDQPEFATELAWEIDRKALHQHRLQRTPIKLQCFALDPVTSAKETIGYIVLDLRTAQETKQAPKWYQLLSNKYTKFKSEIQISIALETDTKPPVDSFKAKGAPPRDGKVPAILAGLDPRDIVAVLNEEGGYHQIGPAEYCTDSFIMSVTIAFATQLEQLIPCTMKLPERQPEFFFYYSLLGNDVTNEPFNDLINPNFEPERASVRIRSSVEILRVYLALQSKLQIHLCCGDQSLGSTEIPLTGLLKKGSTEINQHPVTVEGAFTLDPPNRAKQKLAPIPVELAPTVGVSVALQREGIDSQSLIELKTQNEHEPEHSKKKVLTPIKEKTLTGPKSPTVSPVPSHNQSPPTKDDATESEVESLQYDKDTKPNPKASSSVPASLAQLVTTSNASEVASGQKIAVPATSHHFCFSIDLRSIHALEIGFPINCILRYSYPFFGSAAPIMTNPPVEVRKNMEVFLPQSYCAFDFATMPHQLQDTFLRIPLLVELWHKDKMSKDLLLGIARIQLSNILSSEKTRFLGSNGEQCWRQTYSESVPVIAAQGSNNRIADLSYTVTLEDYGLVKMREIFISDSSQGVSAVQQKPSSLPPAPCPSEIQTEPRETLEYKAALELEMWKEMQEDIFENQLKQKELAHMQALAEEWKKRDRERESLVKKKVAEYTILEGKLQKTLIDLEKREQQLASVESELQREKKELQSERQRNLQELQDSIRRAKEDCIHQVELERLKIKQLEEDKHRLQQQLNDAENKYKILEKEFQQFKDQQNNKPEIRLQSEINLLTLEKVELERKLESATKSKLHYKQQWGRALKELARLKQREQESQMARLKKQQEELEQMRLRYLAAEEKDTVKTERQELLDIRNELNRLRQQEQKQYQDSTEIASGKKDGPHGSVLEEGLDDYLTRLIEERDTLMRTGVYNHEDRIISELDRQIREILAKSNASN

SEQ ID NO: 13981 - protein, 960 aa, Homo sapiens
  Payload ID: 2719
  Gene Symbol: CEP120
  Gene Name: centrosomal protein 120kDa
  Uniprot ID: Q8N960
  ENSP ID: ENSP00000307419
MLVVEAKFDGEQLATDPVDHTDQPEFATELAWEIDRKALHQHRLQRTPIKLQCFALDPVTSAKETIGYIVLDLRTAQETKQAPKWYQLLSNKYTKFKSEIQISIALETDTKPPVDSFKAKGAPPRDGKVPAILAGLDPRDIVAVLNEEGGYHQIGPAEYCTDSFIMSVTIAFATQLEQLIPCTMKLPERQPEFFFYYSLLGNDVTNEPFNDLINPNFEPERASVRIRSSVEILRVYLALQSKLQIHLCCGDQSLGSTEIPLTGLLKKGSTEINQHPVTVEGAFTLDPPNRAKQKLAPIPVELAPTVGVSVALQREGIDSQSLIELKTQNEHEPEHSKKKVLTPIKEKTLTGPKSPTVSPVPSHNQSPPTKDDATESEVESLQYDKDTKPNPKASSSVPASLAQLVTTSNASEVASGQKIAVPATSHHFCFSIDLRSIHALEIGFPINCILRYSYPFFGSAAPIMTNPPVEVRKNMEVFLPQSYCAFDFATMPHQLQDTFLRIPLLVELWHKDKMSKDLLLGIARIQLSNILSSEKTRFLGSNGEQCWRQTYSESVPVIAAQGSNNRIADLSYTVTLEDYGLVKMREIFISDSSQGVSAVQQKPSSLPPAPCPSEIQTEPRETLEYKAALELEMWKEMQEDIFENQLKQKELAHMQALAEEWKKRDRERESLVKKKVAEYTILEGKLQKTLIDLEKREQQLASVESELQREKKELQSERQRNLQELQDSIRRAKEDCIHQVELERLKIKQLEEDKHRLQQQLNDAENKYKILEKEFQQFKDQQNNKPEIRLQSEINLLTLEKVELERKLESATKSKLHYKQQWGRALKELARLKQREQESQMARLKKQQEELEQMRLRYLAAEEKDTVKTERQELLDIRNELNRLRQQEQKQYQDSTEIASGKKDGPHGSVLEEGLDDYLTRLIEERDTLMRTGVYNHEDRIISELDRQIREILAKSNASN

SEQ ID NO: 13982 - protein, 986 aa, Homo sapiens; identical to SEQ ID NO: 13980
  Payload ID: 2719
  Gene Symbol: CEP120
  Gene Name: centrosomal protein 120kDa
  Uniprot ID: Q8N960
  ENSP ID: ENSP00000327504

SEQ ID NO: 13983 - protein, 844 aa, Homo sapiens
  Payload ID: 2719
  Gene Symbol: CEP120
  Gene Name: centrosomal protein 120kDa
  ENSP ID: ENSP00000421620
MLVVEAKFDGEQLATDPVDHTDQPEFATELAWEIDRKALHQHRLQRTPIKLQCFALDPVTSAKETIGYIVLDLRTAQETKQAPKWYQLLSNKYTKFKSEIQISIALETDTKPPVDSFKAKGAPPRDGKVPAILAGLDPRDIVAVLNEEGGYHQIGPAEYCTDSFIMSVTIAFATQLEQLIPCTMKLPERQPEFFFYYSLLGNDVTNEPFNDLINPNFEPERASVRIRSSVEILRVYLALQSKLQIHLCCGDQSLGSTEIPLTGLLKKGSTEINQHPVTVEGAFTLDPPNRAKQKLAPIPVELAPTVGVSVALQREGIDSQSLIELKTQNEHEPEHSKKKVLTPIKEKTLTGPKSPTVSPVPSHNQSPPTKDDATESEVESLQYDKDTKPNPKASSSVPASLAQLVTTSNASEVASGQKIAVPATSHHFCFSIDLRSIHALEIGFPINCILRYSYPFFGSAAPIMTNPPVEVRKNMEVFLPQSYCAFDFATMPHQLQDTFLRIPLLVELWHKDKMSKDLLLGIARIQLSNILSSEKTRFLGSNGEQCWRQTYSESVPVIAAQGSNNRIADLSYTVTLEDYGLVKMREIFISDSSQGVSAVQQKPSSLPPAPCPSEIQTEPRETLEYKAALELEMWKEMQEDIFENQLKQKELAHMQALAEEWKKRDRERESLVKKKVAEYTILEGKLQKTLIDLEKREQQLASVESELQREKKELQSERQRNLQELQDSIRRAKEDCIHQVELERLKIKQLEEDKHRLQQQLNDAENKYKILEKEFQQFKDQQNNKPEIRLQSEINLLTLEKVELERKLESATKSKLHYKQQWGRALKELARLKQREQESQMARL

SEQ ID NO: 13984 - protein, 380 aa, Homo sapiens
  Payload ID: 2719
  Gene Symbol: CEP120
  Gene Name: centrosomal protein 120kDa
  Uniprot ID: Q8N960
  ENSP ID: ENSP00000422089
MVSKSDQLLIVVSILEGRHFPKRPKHMLVVEAKFDGEQLATDPVDHTDQPEFATELAWEIDRKALHQHRLQRTPIKLQCFALDPVTSAKETIGYIVLDLRTAQETKQAPKWYQLLSNKYTKFKSEIQISIALETDTKPPVDSFKAKGAPPRDGKVPAILAGLDPRDIVAVLNEEGGYHQIGPAEYCTDSFIMSVTIAFATQLEQLIPCTMKLPERQPEFFFYYSLLGNDVTNEPFNDLINPNFEPERASVRIRSSVEILRVYLALQSKLQIHLCCGDQSLGSTEIPLTGLLKKGSTEINQHPVTVEGAFTLDPPNRAKQKLAPIPVELAPTVGVSVALQREGIDSQDAFWYSALDIIFPLFIFLFLVLDAIRKFANYEEK

SEQ ID NO: 13985 - protein, 200 aa, Homo sapiens
  Payload ID: 2719
  Gene Symbol: CEP120
  Gene Name: centrosomal protein 120kDa
  ENSP ID: ENSP00000422234
MVSKSDQLLIVVSILEGRHFPKRPKHMLVVEAKFDGEQLATDPVDHTDQPEFATELAWEIDRKALHQHRLQRTPIKLQCFALDPVTSAKETIGYIVLDLRTAQETKQAPKWYQLLSNKYTKFKSEIQISIALETDTKPPVDSFKAKGAPPRDGKEISSNRCHVLPIASYQAQQDVPSSSCAYSVSALDSAISLRSPASFR

SEQ ID NO: 13986 - protein, 165 aa, Homo sapiens
  Payload ID: 2719
  Gene Symbol: CEP120
  Gene Name: centrosomal protein 120kDa
  ENSP ID: ENSP00000422382
MVSKSDQLLIVVSILEGRHFPKRPKHMLVVEAKFDGEQLATDPVDHTDQPEFATELAWEIDRKALHQHRLQRTPIKLQCFALDPVTSAKETIGYIVLDLRTAQETKQAPKWYQLLSNKYTKFKSEIQISIALETDTKPPVDSFKAKGAPPRDGKVPAILAGLDPR

SEQ ID NO: 13987 - protein, 70 aa, Homo sapiens
  Payload ID: 2719
  Gene Symbol: CEP120
  Gene Name: centrosomal protein 120kDa
  ENSP ID: ENSP00000428303
MVSKSDQLLIVVSILEGFLRFQKCSGGNSLYTSCWRTQGTTVLKRVYYTFLKRSAFPQTSKAYACSGSKV

SEQ ID NO: 13988 - protein, 1117 aa, Homo sapiens
  Payload ID: 2720
  Gene Symbol: CEP126
  Gene Name: centrosomal protein 126kDa
  Uniprot ID: Q9P2H0
  ENSP ID: ENSP00000263468
MLAGRPGTRSAVGELGTESSDNLDRAPLGPRESGGHHRPGSYLDMKIHLEKNLEEERQILLQQQKICRNRARKYFVESNRRKKAFEEKRKEQEEKEHQIREQILQQRKQKFEEVTEKFQRAHVPLSQRRKAVSRKPVPPLEEALKQIQESNLKSEVNLPFSRRPTINWRAIDSALPSALSKNDHKHQKQLLSKINCEKEMNENMRATLATSKNVFQLKLEETQKLLEDQHLSNLQKFCDEVNQITNSETLSSIDSLEATEHEEIYLTLNKEHSTSIQRNTISLKPANMQSTNLSCFDEDKLAFSKTQHINNWLTNLDASNTQNVTAFSDILSKSNVLPSWEYFNSKEQNPSPLNGTVERATNTANNSVPFVSSPPMFVLDKKCEKTSETSTMRTTDSTSGAFKRERPLVTESPTFKFSKSQSTSDSLTQEVATFPDQEKYSELNQENGTTSIPTSCVPVATPLVLPSNIQSARPSAKNSIHIKEIDAVQCSDKLDELKDGKEEEIKYFNCNKEELPLFSDSFQDAYIPHNPDSKDEKQKLAETSSLSNVTSNYDFVGQHKKMKYNIHERNGVRFLKSILKKESKYEHGYLKALIINQSFKFGNQKAAAIRDSIELTKEKGAEIPKTIKKLRWFDETSNIENNAENSHSLKNKTGTTQQHSQQFHIQSGAGSNIISVSTCAVNSADTKKSREDSISENVTTLGGSGADHMPLNCFIPSGYNFAKHAWPASKKEESKIPVHDDSKTKQGKPQRGRAKIIRKPGSAKVQSGFICTNRKGAVIQPQSASKVNIFTQAQGKLIIPCPPPQSTSNIRSGKNIQVSQCQPVTPENPQNIITHNSFNSKHVLPTEHSLNQWNQESSSPLSNACSDLVTVIPSLPSYCSSECQTFAKINHSNGTQAVARQDATLYCTQRSPVCEESYPSVTLRTAEEESVPLWKRGPNVLHQNKRATGSTVMRRKRIAETKRRNILEQKRQNPGSVGQKYSEQINNFGQSVLLSSSEPKQTTRGTSYIEEVSDSTSEFLMAENLVKASVPEDEILTVLNSKQIQKSNLPLNKTQQFNICTLSAEEQKILESLNDLSERLHYIQESICKNPSIKNTLQIIPLLEKREDRTSSCRDKR

SEQ ID NO: 13989 - protein, 432 aa, Homo sapiens
  Payload ID: 2720
  Gene Symbol: CEP126
  Gene Name: centrosomal protein 126kDa
  ENSP ID: ENSP00000433643
  MOD_RES (1)..(1): Any amino acid
XAHVPLSQRRKAVSRKPVPPLEEALKQIQESNLKSEVNLPFSRRPTINWRSIPACPAVSTPDPYLPDQLSPPRVPLRSHHFQILPSYPTVSPARQPHILPIHPSVPSTLPKTFAPVPLLPYPIKYHPCPPTPATSSISSSFPRLPAPIPSCPPGHPPHAPQSSPIIPDPESQHKLFYKTFRPKHFLPAQHSTAATLMPTLVRRSLPAPLVVSPTPLEPLPVLKPSCLSSHPPYPPVPTLSYVTPLPAHPASLDPFQSVQQSVPQATALSNQPEAFADHPPASVLSLASPCHSPSSSLPSSPSTSTSFSSACILFSSSSSILSSSSTSCSTSPSLPPSSIPLFSSPLHSSSSPGLPPTYLAFPSPVSPVSSSFMISSSFPPILHSPSVSTSPSPFIPIHPFNPPHWGKKVEKRREESGVEKKGIEKKVETRQL

SEQ ID NO: 13990 - protein, 81 aa, Homo sapiens
  Payload ID: 2720
  Gene Symbol: CEP126
  Gene Name: centrosomal protein 126kDa
  ENSP ID: ENSP00000437014
  MOD_RES (1)..(1): Any amino acid
XEQKRQNPGSVGQKYSEQINNFGQSVLLSSSEPKQTTRGTSYIEEDIQESICKNPSIKNTLQIIPLLEKREDRTSSCRDKR

SEQ ID NO: 13991 - protein, 435 aa, Homo sapiens
  Payload ID: 2721
  Gene Symbol: CEP128
  Gene Name: centrosomal protein 128kDa
  Uniprot ID: Q6ZU80
  ENSP ID: ENSP00000216517
MAESSSESDHFRCRDRLSPWAARSTHRGTRSLPTVEVTEKVNTITSTLQDTSRNLRQVDQMLGRYREYSNGQAGAIEHLKESLEQSIDQLRSQRLLRNSGGRSISVTSLSASDLDGGTGSELHHFPPTSPLKDYGDPQGIKRMRSRTGVRFVQETDDMTQLHGFHQSLRDLSSEQIRLGDDFNRELSRRSRSDAETKRALEELTEKLNEAQKQEVVSDRVERRLQELEREMRTERELVERRQDQLGLMSLQLQEALKKQEAKADEHEGAIKNKLRQTETEKNQLEQELELSRRLLNQSEGSRETLLHQVEELRTQLTKAEGDRKGLQHQVSQISKQQSNYQDEQGEDWRFRRGVEREKQDLEKQMSDLRVQLNFSAMASELEEVKRCMERKDKEKAHLASQVEHINRKCLLNLVQDLDCKDNEILTYSLQSPLHV

SEQ ID NO: 13992 - protein, 1094 aa, Homo sapiens
  Payload ID: 2721
  Gene Symbol: CEP128
  Gene Name: centrosomal protein 128kDa
  Uniprot ID: Q6ZU80
  ENSP ID: ENSP00000281129
MAESSSESDHFRCRDRLSPWAARSTHRGTRSLPTVEVTEKVNTITSTLQDTSRNLRQVDQMLGRYREYSNGQAGAIEHLKESLEQSIDQLRSQRLLRNSGGRSISVTSLSASDLDGGTGSELHHFPPTSPLKDYGDPQGIKRMRSRTGVRFVQETDDMTQLHGFHQSLRDLSSEQIRLGDDFNRELSRRSRSDAETKRALEELTEKLNEAQKQEVVSDRVERRLQELEREMRTERELVERRQDQLGLMSLQLQEALKKQEAKADEHEGAIKNKLRQTETEKNQLEQELELSRRLLNQSEGSRETLLHQVEELRTQLTKAEGDRKGLQHQVSQISKQQSNYQDEQGEDWRFRRGVEREKQDLEKQMSDLRVQLNFSAMASELEEVKRCMERKDKEKAHLASQVENLTRELENGEKQQLQMLDRLKEIQNHFDTCEAERKHADLQISELTRHAEDATKQAERYLSELQQSEALKEEAEKRREDLKLKAQESIRQWKLKHKKLERALEKQSETVDELTGKNNQILKEKDELKTQLYAALQQIENLRKELNDVLTKRALQEEELHSKEEKLRDIKSHQADLELEVKNSLDTIHRLESELKKQSKIQSQMKVEKAHLEEEIAELKKSQAQDKAKLLEMQESIKDLSAIRADLANKLAEEERAKKAVLKDLSDLTAQAKSRDEETATIITQLKLERDVHQRELKDLTSSLQSVKTKHEQNIQELMKHFKKEKSEAENHIRTLKAESLEEKNMAKIHRGQLEKLKSQCDRLTEELTQNENENKKLKLKYQCLKDQLEEREKHISIEEEHLRRMEEARLQLKDQLLCLETEQESILGVIGKEIDAACKTFSKDSVEKLKVFSSGPDIHYDPHRWLAESKTKLQWLCEELKERENREKNLRHQLMLCRQQLRNLTENKESELQCLFQQIERQEQLLDEIHREKRDLLEETQRKDEEMGSLQDRVIALETSTQVALDHLESVPEKLSLLEDFKDFRDSCSSSERTDGRYSKYRVRRNSLQHHQDDTKYRTKSFKGDRTFLEGSHTRGLDHSSSWQDHSRFLSSPRFSYVNSFTKRTVAPDSASNKEDATMNGTSSQPKKEEYGS

SEQ ID NO: 13993 - protein, 302 aa, Homo sapiens
  Payload ID: 2721
  Gene Symbol: CEP128
  Gene Name: centrosomal protein 128kDa
  ENSP ID: ENSP00000450555
  MOD_RES (1)..(1): Any amino acid
XHHFPPTSPLKDYGDPQGIKRMRSRTGVRFVQETDDMTQLHGFHQSLRDLSSEQIRLGDDFNRELSRRSRSDAETKRALEELTEKLNEAQKQEVVSDRVERRLQELEREMRTERELVERRQDQLGLMSLQLQEALKKQEAKADEHEGAIKNKLRQTETEKNQLEQELELSRRLLNQSEGSRETLLHQVEELRTQLTKAEGDRKGLQHQVSQISKQQSNYQDEQGEDWRFRRGVEREKQDLEKQMSDLRVQLNFSAMASELEEVKRCMERKDKEKAHLASQVEVTLLFLSHIRNILILSHGIA

SEQ ID NO: 13994 - protein, 179 aa, Homo sapiens
  Payload ID: 2721
  Gene Symbol: CEP128
  Gene Name: centrosomal protein 128kDa
  ENSP ID: ENSP00000451137
MAESSSESDHFRCRDRLSPWAARSTHRGTRSLPTVEVTEKVNTITSTLQDTSRNLRQVDQMLGRYREYSNGQAGAIEHLKESLEQSIDQLRSQRLLRNSGGRSISVTSLSASDLDGGTGSELHHFPPTSPLKDYGDPQGIKRMRSRTGVRFVQETDDMTQLHGFHQSLRDLSSEQIRLG

SEQ ID NO: 13995 - protein, 1094 aa, Homo sapiens; identical to SEQ ID NO: 13992
  Payload ID: 2721
  Gene Symbol: CEP128
  Gene Name: centrosomal protein 128kDa
  Uniprot ID: Q6ZU80
  ENSP ID: ENSP00000451162

SEQ ID NO: 13996 - protein, 127 aa, Homo sapiens
  Payload ID: 2721
  Gene Symbol: CEP128
  Gene Name: centrosomal protein 128kDa
  ENSP ID: ENSP00000451214
MAESSSESDHFRCRDRLSPWAARSTHRGTRSLPTVEVTEKVNTITSTLQDTSRNLRQVDQMLGRYREYSNGQAGAIEHLKESLEQSIDQLRSQRLLRNSGGRSISVTSLSASDLDGGTGSELHHFPP

SEQ ID NO: 13997 - protein, 139 aa, Homo sapiens
  Payload ID: 2721
  Gene Symbol: CEP128
  Gene Name: centrosomal protein 128kDa
  ENSP ID: ENSP00000451273
EEHLRRMEEARLQLKDQLLCLETEQESILGVIGKEIDAACKTFSKDSVEKLKVFSSGPDIHYDPHRWLAESKTKLQWLCEELKERENREKNLRHQLMLCRQQLRNLTENKESELQCLFQQIERQEQLLDEIHREKRGVC

SEQ ID NO: 13998 - protein, 679 aa, Homo sapiens
  Payload ID: 2721
  Gene Symbol: CEP128
  Gene Name: centrosomal protein 128kDa
  ENSP ID: ENSP00000451319
  MOD_RES (1)..(1): Any amino acid
XEELRTQLTKAEGDRKGLQHQVSQISKQQSNYQDEQGEDWRFRRGVEREKQDLEKQMSDLRVQLNFSAMASELEEVKRCMERKDKEKAHLASQVENLTRELENGEKQQLQMLDRLKEIQNHFDTCEAERKHADLQISELTRHAEDATKQAERYLSELQQSEALKEEAEKRREDLKLKAQESIRQWKLKHKKLERALEKQSETVDELTGKNNQILKEKDELKTQLYAALQQIENLRKELNDVLTKRALQEEELHSKEEKLRDIKSHQADLELEVKNSLDTIHRLESELKKQSKIQSQMKVEKAHLEEEIAELKKSQAQDKAKLLEMQESIKDLSAIRADLANKLAEEERAKKAVLKDLSDLTAQAKSRDEETATIITQLKLERDVHQRELKDLTSSLQSVKTKHEQNIQELMKHFKKEKSEAENHIRTLKAESLEEKNMAKIHRGQLEKLKSQCDRLTEELTQNENENKKLKLKYQCLKDQLEEREKHISIEEEHLRRMEEARLQLKDQLLCLETEQESILGVIGKEIDAACKTFSKDSVEKLKVFSSGPDIHYDPHRWLAESKTKLQWLCEELKERENREKNLRHQLMLCRQQLRNLTENKESELQCLFQQIERQEQLLDEIHREKRDLLEETQRKDEEMGSLQDRVIALETSTQVALDHLESVPEKLSLLEDFKDFRR

SEQ ID NO: 13999 - protein, 32 aa, Homo sapiens
  Payload ID: 2721
  Gene Symbol: CEP128
  Gene Name: centrosomal protein 128kDa
  ENSP ID: ENSP00000451428
MAESSSESDHFRCRDRLSPWAARSTHRGTRSL

SEQ ID NO: 14000 - protein, 160 aa, Homo sapiens
  Payload ID: 2721
  Gene Symbol: CEP128
  Gene Name: centrosomal protein 128kDa
  ENSP ID: ENSP00000451501
  MOD_RES (1)..(1): Any amino acid
XDLLEETQRKDEEMGSLQDRVIALETSTQVALDHLESVPEKLSLLEDFKDFRDSCSSSERTDGRYSKYRVRRNSLQHHQDDTKYRTKSFKGDRTFLEGSHTRGLDHSSSWQDHSRFLSSPRFSYVNSFTKRTVAPDSASNKEDATMNGTSSQPKKEEYGS

SEQ ID NO: 14001 - protein, 20 aa, Homo sapiens
  Payload ID: 2721
  Gene Symbol: CEP128
  Gene Name: centrosomal protein 128kDa
  ENSP ID: ENSP00000451849
MLGRYREYSNGQAGAIEHVR

SEQ ID NO: 14002 - protein, 1083 aa, Homo sapiens
  Payload ID: 2722
  Gene Symbol: CEP131
  Gene Name: centrosomal protein 131kDa
  Uniprot ID: Q9UPN4
  ENSP ID: ENSP00000269392
MKGTRAIGSVPERSPAGVDLSLTGLPPPVSRRPGSAATTKPIVRSVSVVTGSEQKRKVLEATGPGGSQAINNLRRSNSTTQVSQPRSGSPRPTEPTDFLMLFEGSPSGKKRPASLSTAPSEKGATWNVLDDQPRGFTLPSNARSSSALDSPAGPRRKECTVALAPNFTANNRSNKGAVGNCVTTMVHNRYTPSERAPPLKSSNQTAPSLNNIIKAATCEGSESSGFGKLPKNVSSATHSARNNTGGSTGLPRRKEVTEEEAERFIHQVNQATVTIQRWYRHQVQRRGAGAARLEHLLQAKREEQRQRSGEGTLLDLHQQKEAARRKAREEKARQARRAAIQELQQKRALRAQKASTAERGPPENPRETRVPGMRQPAQELSPTPGGTAHQALKANNTGGGLPAAGPGDRCLPTSDSSPEPQQPPEDRTQDVLAQDAAGDNLEMMAPSRGSAKSRGPLEELLHTLQLLEKEPDVLPRPRTHHRGRYAWASEVTTEDDASSLTADNLEKFGKLSAFPEPPEDGTLLSEAKLQSIMSFLDEMEKSGQDQLDSQQEGWVPEAGPGPLELGSEVSTSVMRLKLEVEEKKQAMLLLQRALAQQRDLTARRVKETEKALSRQLQRQREHYEATIQRHLAFIDQLIEDKKVLSEKCEAVVAELKQEDQRCTERVAQAQAQHELEIKKLKELMSATEKARREKWISEKTKKIKEVTVRGLEPEIQKLIARHKQEVRRLKSLHEAELLQSDERASQRCLRQAEELREQLEREKEALGQQERERARQRFQQHLEQEQWALQQQRQRLYSEVAEERERLGQQAARQRAELEELRQQLEESSSALTRALRAEFEKGREEQERRHQMELNTLKQQLELERQAWEAGRTRKEEAWLLNREQELREEIRKGRDKEIELVIHRLEADMALAKEESEKAAESRIKRLRDKYEAELSELEQSERKLQERCSELKGQLGEAEGENLRLQGLVRQKERALEDAQAVNEQLSSERSNLAQVIRQEFEDRLAASEEETRQAKAELATLQARQQLELEEVHRRVKTALARKEEAVSSLRTQHEAAVKRADHLEELLEQHRRPTPSTK

SEQ ID NO: 14003 - protein, 1044 aa, Homo sapiens
  Payload ID: 2722
  Gene Symbol: CEP131
  Gene Name: centrosomal protein 131kDa
  Uniprot ID: Q9UPN4
  ENSP ID: ENSP00000363914
MKGTRAIGSVPERSPAGVDLSLTGLPPPVSRRPGSAATTKPIVRSVSVVTGSEQKRKVLEATGPGGSQAINNLRRSNSTTQVSQPRSGSPRPTEPTDFLMLFEGSPSGKKRPASLSTAPSEKGATWNVLDDQPRGFTLPSNARSSSALDSPAGPRRKECTVALAPNFTANNRSNKGAVGNCVTTMVHNRYTPSERAPPLKSSNQTAPSLNNIIKAATCEGSESSGFGKLPKNVSSATHSARNNTGGSTGLPRRKEVTEEEAERFIHQVNQATVTIQRWYRHQVQRRGAGAARLEHLLQAKREEQRQRSGEGTLLDLHQQKEAARRKAREEKARQARRAAIQELQQKRALRAQKASTAERGPPENPRETRVPGMRQPAQELSPTPGGTAHQALKANNTGGGLPAAGPGDRCLPTSDSSPEPQQPPEDRTQDVLAQDAAGDNLEMMAPSRGSAKSRGPLEELLHTLQLLEKEPDVLPRPRTHHRGRYAWASEEDDASSLTADNLEKFGKLSAFPEPPEDGTLLSEAKLQSIMSFLDEMEKSGQDQLDSQQEGWVPEAGPGPLELGSEVSTSVMRLKLEVEEKKQAMLLLQRALAQQRDLTARRVKETEKALSRQLQRQREHYEATIQRHLAFIDQLIEDKKVLSEKCEAVVAELKQEDQRCTERVAQAQAQHELEIKKLKELMSATEKARREKWISEKTKKIKEVTVRGLEPEIQKLIARHKQEVRRLKSLHEAELLQSDERASQRCLRQAEELREQLEREKEALGQQERERARQRQRAELEELRQQLEESSSALTRALRAEFEKGREEQERRHQMELNTLKQQLELERQAWEAGRTRKEEAWLLNREQELREEIRKGRDKEIELVIHRLEADMALAKEESEKAAESRIKRLRDKYEAELSELEQSERKLQERCSELKGQLGEAEGENLRLQGLVRQKERALEDAQAVNEQLSSERSNLAQVIRQEFEDRLAASEEETRQAKAELATLQARQQLELEEVHRRVKTALARKEEAVSSLRTQHEAAVKRADHLEELLEQHRRPTPSTK

SEQ ID NO: 14004 - protein, 1080 aa, Homo sapiens
  Payload ID: 2722
  Gene Symbol: CEP131
  Gene Name: centrosomal protein 131kDa
  Uniprot ID: Q9UPN4
  ENSP ID: ENSP00000393583
MKGTRAIGSVPERSPAGVDLSLTGLPPPVSRRPGSAATTKPIVRSVSVVTGSEQKRKVLEATGPGGSQAINNLRRSNSTTQVSQPRSGSPRPTEPTDFLMLFEGSPSGKKRPASLSTAPSEKGATWNVLDDQPRGFTLPSNARSSSALDSPAGPRRKECTVALAPNFTANNRSNKGAVGNCVTTMVHNRYTPSERAPPLKSSNQTAPSLNNIIKAATCEGSESSGFGKLPKNVSSATHSARNNTGGSTGLPRRKEVTEEEAERFIHQVNQATVTIQRWYRHQVQRRGAGAARLEHLLQAKREEQRQRSGEGTLLDLHQQKEAARRKAREEKARQARRAAIQELQQKRALRAQKASTAERGPPENPRETRVPGMRQPAQELSPTPGGTAHQALKANNTGGGLPAAGPGDRCLPTSDSSPEPQQPPEDRTQDVLAQDAAGDNLEMMAPSRGSAKSRGPLEELLHTLQLLEKEPDVLPRPRTHHRGRYAWASEEDDASSLTADNLEKFGKLSAFPEPPEDGTLLSEAKLQSIMSFLDEMEKSGQDQLDSQQEGWVPEAGPGPLELGSEVSTSVMRLKLEVEEKKQAMLLLQRALAQQRDLTARRVKETEKALSRQLQRQREHYEATIQRHLAFIDQLIEDKKVLSEKCEAVVAELKQEDQRCTERVAQAQAQHELEIKKLKELMSATEKARREKWISEKTKKIKEVTVRGLEPEIQKLIARHKQEVRRLKSLHEAELLQSDERASQRCLRQAEELREQLEREKEALGQQERERARQRFQQHLEQEQWALQQQRQRLYSEVAEERERLGQQAARQRAELEELRQQLEESSSALTRALRAEFEKGREEQERRHQMELNTLKQQLELERQAWEAGRTRKEEAWLLNREQELREEIRKGRDKEIELVIHRLEADMALAKEESEKAAESRIKRLRDKYEAELSELEQSERKLQERCSELKGQLGEAEGENLRLQGLVRQKERALEDAQAVNEQLSSERSNLAQVIRQEFEDRLAASEEETRQAKAELATLQARQQLELEEVHRRVKTALARKEEAVSSLRTQHEAAVKRADHLEELLEQHRRPTPSTK

SEQ ID NO: 14005 - protein, 1047 aa, Homo sapiens
  Payload ID: 2722
  Gene Symbol: CEP131
  Gene Name: centrosomal protein 131kDa
  ENSP ID: ENSP00000459733
MKGTRAIGSVPERSPAGVDLSLTGLPPPVSRRPGSAATTKPIVRSVSVVTGSEQKRKVLEATGPGGSQAINNLRRSNSTTQVSQPRSGSPRPTEPTDFLMLFEGSPSGKKRPASLSTAPSEKGATWNVLDDQPRGFTLPSNARSSSALDSPAGPRRKECTVALAPNFTANNRSNKGAVGNCVTTMVHNRYTPSERAPPLKSSNQTAPSLNNIIKAATCEGSESSGFGKLPKNVSSATHSARNNTGGSTGLPRRKEVTEEEAERFIHQVNQATVTIQRWYRHQVQRRGAGAARLEHLLQAKREEQRQRSGEGTLLDLHQQKEAARRKAREEKARQARRAAIQELQQKRALRAQKASTAERGPPENPRETRVPGMRQPAQELSPTPGGTAHQALKANNTGGGLPAAGPGDRCLPTSDSSPEPQQPPEDRTQDVLAQDAAGDNLEMMAPSRGSAKSRGPLEELLHTLQLLEKEPDVLPRPRTHHRGRYAWASEVTTEDDASSLTADNLEKFGKLSAFPEPPEDGTLLSEAKLQSIMSFLDEMEKSGQDQLDSQQEGWVPEAGPGPLELGSEVSTSVMRLKLEVEEKKQAMLLLQRALAQQRDLTARRVKETEKALSRQLQRQREHYEATIQRHLAFIDQLIEDKKVLSEKCEAVVAELKQEDQRCTERVAQAQAQHELEIKKLKELMSATEKARREKWISEKTKKIKEVTVRGLEPEIQKLIARHKQEVRRLKSLHEAELLQSDERASQRCLRQAEELREQLEREKEALGQQERERARQRQRAELEELRQQLEESSSALTRALRAEFEKGREEQERRHQMELNTLKQQLELERQAWEAGRTRKEEAWLLNREQELREEIRKGRDKEIELVIHRLEADMALAKEESEKAAESRIKRLRDKYEAELSELEQSERKLQERCSELKGQLGEAEGENLRLQGLVRQKERALEDAQAVNEQLSSERSNLAQVIRQEFEDRLAASEEETRQAKAELATLQARQQLELEEVHRRVKTALARKEEAVSSLRTQHEAAVKRADHLEELLEQHRRPTPSTK

SEQ ID NO: 14006 - protein, 524 aa, Homo sapiens
  Payload ID: 2722
  Gene Symbol: CEP131
  Gene Name: centrosomal protein 131kDa
  ENSP ID: ENSP00000460006
LGSEVSTSVMRLKLEVEEKKQAMLLLQRALAQQRDLTARRVKETEKALSRQLQRQREHYEATIQRHLAFIDQLIEDKKVLSEKCEAVVAELKQEDQRCTERVAQAQAQHELEIKKLKELMSATEKARREKWISEKTKKIKEVTVRGLEPEIQKLIARHKQEVRRLKSLHEAELLQSDERASQRCLRQAEELREQLEREKEALGQQERERARQRFQQHLEQEQWALQQQRQRLYSEVAEERERLGQQAARQRAELEELRQQLEESSSALTRALRAEFEKGREEQERRHQMELNTLKQQLELERQAWEAGRTRKERMSPQEAWLLNREQELREEIRKGRDKEIELVIHRLEADMALAKEESEKAAESRIKRLRDKYEAELSELEQSERKLQERCSELKGQLGEAEGENLRLQGLVRQKERALEDAQAVNEQLSSERSNLAQVIRQEFEDRLAASEEETRQAKAELATLQARQQLELEEVHRRVKTALARKEEAVSSLRTQHEAAVKRADHLEELLEQHRRPTPSTK

SEQ ID NO: 14007 - protein, 206 aa, Homo sapiens
  Payload ID: 2722
  Gene Symbol: CEP131
  Gene Name: centrosomal protein 131kDa
  ENSP ID: ENSP00000460098
  MOD_RES (1)..(1): Any amino acid
XKQQLELERQAWEAGRTRKEAWLLNREQELREEIRKGRDKEIELVIHRLEADMALAKEESEKAAESRIKRLRDKYEAELSELEQSERKLQERCSELKGQLGEAEGENLRLQGLVRQKERALEDAQAVNEQLSSERSNLAQVIRQEFEDRLAASEEETRQAKAELATLQARQQLELEEVHRRVKTALARKEEAVSSLRTQHEAAVKR

SEQ ID NO: 14008 - protein, 307 aa, Homo sapiens
  Payload ID: 2722
  Gene Symbol: CEP131
  Gene Name: centrosomal protein 131kDa
  ENSP ID: ENSP00000461374
  MOD_RES (1)..(1): Any amino acid
XASQRCLRQAEELREQLEREKEALGQQERERARQRQRAELEELRQQLEESSSALTRALRAEFEKGREEQERRHQMELNTLKQQLELERQAWEAGRTRKEEAWLLNREQELREEIRKGRDKEIELVIHRLEADMALAKEESEKAAESRIKRLRDKYEAELSELEQSERKLQERCSELKGQLGEAEGENLRLQGLVRQKERALEDAQAVNEQLSSERSNLAQVIRQEFEDRLAASEEETRQAKAELATLQARQQLELEEVHRRVKTALARKEEAVSSLRTQHEVSPCGQPCWTSGLGAGLTLWVCCRLR

SEQ ID NO: 14009 - protein, 1140 aa, Homo sapiens
  Payload ID: 2723
  Gene Symbol: CEP135
  Gene Name: centrosomal protein 135kDa
  Uniprot ID: Q66GS9
  ENSP ID: ENSP00000257287
MTTAVERKYINIRKRLDQLGYRQTLTVECLPLVEKLFSDLVHTTESLRQSKLSAVKAEKESANFDFVLEPYKLENARLSRENNELYLELMKLREHSDQHVKELKTSLKKCARETADLKFLNNQYAHKLKLLEKESKAKNERIQQLQEKNLHAVVQTPGGKKRSIAFRRQRMQIDEPVPPSEVSSYPVPQPDDPYIADLLQVADNRIQELQQEVHQLQEKLAMMESGVRDYSKQIELREREIERLSVALDGGRSPDVLSLESRNKTNEKLIAHLNIQVDFLQQANKDLEKRIRELMETKETVTSEVVNLSNKNEKLCQELTEIDQLAQQLERHKEEVLETADKELGEAKKEIKRKLSEMQDLEETMAKLQLELNLCQKEKERLSDELLVKSDLETVVHQLEQEKQRLSKKVESFAVTERQLTLEVERMRLEHGIKRRDRSPSRLDTFLKGIEEERDYYKKELERLQHIIQRRSCSTSYSAREKSSIFRTPEKGDYNSEIHQITRERDELQRMLERFEKYMEDIQSNVKLLTAERDKLSVLYNEAQEELSALRKESTQTTAPHNIVSLMEKEKELALSDLRRIMAEKEALREKLEHIEEVSLFGKSELEKTIEHLTCVNHQLESEKYELKSKVLIMKETIESLENKLKVQAQKFSHVAGDSSHQKTEVNSLRIVNEQLQRSVDDYQHRLSIKRGELESAQAQIKILEEKIDELNLKMTSQDEEAHVMKKTIGVIDKEKDFLQETVDEKTEKIANLQENLANKEKAVAQMKIMISECESSVNQLKETLVNRDREINSLRRQLDAAHKELDEVGRSREIAFKENRRLQDDLATMARENQEISLELEAAVQEKEEMKSRVHKYITEVSRWESLMAAKEKENQDLLDRFQMLHNRAEDWEVKAHQAEGESSSVRLELLSIDTERRHLRERVELLEKEIQEHINAHHAYESQISSMAKAMSRLEEELRHQEDEKATVLNDLSSLRELCIKLDSGKDIMTQQLNSKNLEFERVVVELENVKSESDLLKKQLSNERHTVKNLESLLATNRDKEFHSHLTSHEKDTEIQLLKEKLTLSESKLTSQSRENTMLRAKVAQLQTDYDALKRQISTERYERERAIQEMRRHGLATPPLSSTLRSPSHSPEHRNV

SEQ ID NO: 14010 - protein, 249 aa, Homo sapiens
  Payload ID: 2723
  Gene Symbol: CEP135
  Gene Name: centrosomal protein 135kDa
  Uniprot ID: Q66GS9
  ENSP ID: ENSP00000412799
MTTAVERKYINIRKRLDQLGYRQTLTVECLPLVEKLFSDLVHTTESLRQSKLSAVKAEKESANFDFVLEPYKLENARLSRENNELYLELMKLREHSDQHVKELKTSLKKCARETADLKFLNNQYAHKLKLLEKESKAKNERIQQLQEKNLHAVVQTPGGKKRSIAFRRQRMQIDEPVPPSEVSSYPVPQPDDPYIADLLQVADNRIQELQQEVHQLQEKLAMMESGVRDYSKQVGFLFTCIVGIEIGML

SEQ ID NO: 14011 - protein, 1275 aa, Homo sapiens
  Payload ID: 2724
  Gene Symbol: CEP152
  Gene Name: centrosomal protein 152kDa
  Uniprot ID: O94986
  ENSP ID: ENSP00000321000
MSLDFGSVALPVQNEDEEYDEEDYEREKELQQLLTDLPHDMLDDDLSSPELQYSDCSEDGTDGQPHHPEQLEMSWNEQMLPKSQSVNGPSCQGLEPYNKVTYKPYQSSAQNNGSPAQEITGSDTFEGLQQQFLGANENSAENMQIIQLQVLNKAKERQLENLIEKLNESERQIRYLNHQLVIIKDEKDGLTLSLRESQKLFQNGKEREIQLEAQIKALETQIQALKVNEEQMIKKSRTTEMALESLKQQLVDLHHSESLQRAREQHESIVMGLTKKYEEQVLSLQKNLDATVTALKEQEDICSRLKDHVKQLERNQEAIKLEKTEIINKLTRSLEESQKQCAHLLQSGSVQEVAQLQFQLQQAQKAHAMSANMNKALQEELTELKDEISLYESAAKLGIHPSDSEGELNIELTESYVDLGIKKVNWKKSKVTSIVQEEDPNEELSKDEFILKLKAEVQRLLGSNSMKRHLVSQLQNDLKDCHKKIEDLHQVKKDEKSIEVETKTDTSEKPKNQLWPESSTSDVVRDDILLLKNEIQVLQQQNQELKETEGKLRNTNQDLCNQMRQMVQDFDHDKQEAVDRCERTYQQHHEAMKTQIRESLLAKHALEKQQLFEAYERTHLQLRSELDKLNKEVTAVQECYLEVCREKDNLELTLRKTTEKEQQTQEKIKEKLIQQLEKEWQSKLDQTIKAMKKKTLDCGSQTDQVTTSDVISKKEMAIMIEEQKCTIQQNLEQEKDIAIKGAMKKLEIELELKHCENITKQVEIAVQNAHQRWLGELPELAEYQALVKAEQKKWEEQHEVSVNKRISFAVSEAKEKWKSELENMRKNILPGKELEEKIHSLQKELELKNEEVPVVIRAELAKARSEWNKEKQEEIHRIQEQNEQDYRQFLDDHRNKINEVLAAAKEDFMKQKTELLLQKETELQTCLDQSRREWTMQEAKRIQLEIYQYEEDILTVLGVLLSDTQKEHISDSEDKQLLEIMSTCSSKWMSVQYFEKLKGCIQKAFQDTLPLLVENADPEWKKRNMAELSKDSASQGTGQGDPGPAAGHHAQPLALQATEAEADKKKVLEIKDLCCGHCFQELEKAKQECQDLKGKLEKCCRHLQHLERKHKAVVEKIGEENNKVVEELIEENNDMKNKLEELQTLCKTPPRSLSAGAIENACLPCSGGALEELRGQYIKAVKKIKCDMLRYIQESKERAAEMVKAEVLRERQETARKMRKYYLICLQQILQDDGKEGAEKKIMNAASKLATMAKLLETPISSKSQSKTTQSGMSK

SEQ ID NO: 14012 - protein, 1710 aa, Homo sapiens
  Payload ID: 2724
  Gene Symbol: CEP152
  Gene Name: centrosomal protein 152kDa
  Uniprot ID: O94986
  ENSP ID: ENSP00000370337
MSLDFGSVALPVQNEDEEYDEEDYEREKELQQLLTDLPHDMLDDDLSSPELQYSDCSEDGTDGQPHHPEQLEMSWNEQMLPKSQSVNGYNEIQSLYAGEKCGNVWEENRSKTEDRHPVYHPEEGGDEGGSGYSPPSKCEQTDLYHLPENFRPYTNGQKQEFNNQATNVIKFSDPQWNHFQGPSCQGLEPYNKVTYKPYQSSAQNNGSPAQEITGSDTFEGLQQQFLGANENSAENMQIIQLQVLNKAKERQLENLIEKLNESERQIRYLNHQLVIIKDEKDGLTLSLRESQKLFQNGKEREIQLEAQIKALETQIQALKVNEEQMIKKSRTTEMALESLKQQLVDLHHSESLQRAREQHESIVMGLTKKYEEQVLSLQKNLDATVTALKEQEDICSRLKDHVKQLERNQEAIKLEKTEIINKLTRSLEESQKQCAHLLQSGSVQEVAQLQFQLQQAQKAHAMSANMNKALQEELTELKDEISLYESAAKLGIHPSDSEGELNIELTESYVDLGIKKVNWKKSKVTSIVQEEDPNEELSKDEFILKLKAEVQRLLGSNSMKRHLVSQLQNDLKDCHKKIEDLHQVKKDEKSIEVETKTDTSEKPKNQLWPESSTSDVVRDDILLLKNEIQVLQQQNQELKETEGKLRNTNQDLCNQMRQMVQDFDHDKQEAVDRCERTYQQHHEAMKTQIRESLLAKHALEKQQLFEAYERTHLQLRSELDKLNKEVTAVQECYLEVCREKDNLELTLRKTTEKEQQTQEKIKEKLIQQLEKEWQSKLDQTIKAMKKKTLDCGSQTDQVTTSDVISKKEMAIMIEEQKCTIQQNLEQEKDIAIKGAMKKLEIELELKHCENITKQVEIAVQNAHQRWLGELPELAEYQALVKAEQKKWEEQHEVSVNKRISFAVSEAKEKWKSELENMRKNILPGKELEEKIHSLQKELELKNEEVPVVIRAELAKARSEWNKEKQEEIHRIQEQNEQDYRQFLDDHRNKINEVLAAAKEDFMKQKTELLLQKETELQTCLDQSRREWTMQEAKRIQLEIYQYEEDILTVLGVLLSDTQKEHISDSEDKQLLEIMSTCSSKWMSVQYFEKLKGCIQKAFQDTLPLLVENADPEWKKRNMAELSKDSASQGTGQGDPGPAAGHHAQPLALQATEAEADKKKVLEIKDLCCGHCFQELEKAKQECQDLKGKLEKCCRHLQHLERKHKAVVEKIGEENNKVVEELIEENNDMKNKLEELQTLCKTPPRSLSAGAIENACLPCSGGALEELRGQYIKAVKKIKCDMLRYIQESKERAAEMVKAEVLRERQETARKMRKYYLICLQQILQDDGKEGAEKKIMNAASKLATMAKLLETPISSKSQSKTTQSALPLTSEMLIAVKKSKRNDVNQKIPCCIESKSNSVNTITRTLCEQAPKRRAACNLQRLLENSEHQSIKHVGSKETHLEFQFGDGSCKHLNSLPRNVSPEFVPCEGEGGFGLHKKKDLLSDNGSESLPHSAAYPFLGTLGNKPSPRCTPGPSESGCMHITFRDSNERLGLKVYKCNPLMESENAASEKSQGLDVQEPPVKDGGDLSDCLGWPSSSATLSFDSREASFVHGRPQGTLEIPSESVKSKQFSPSGYLSDTEESNMICQTMKCQRYQTPYLSEETTYLEPGKISVNCGHPSRHKADRLKSDFKKLSSTLPSSVCQQPSRKLIVPLSSQQDSGFDSPFVNLD

SEQ ID NO: 14013 - protein, 1654 aa, Homo sapiens
  Payload ID: 2724
  Gene Symbol: CEP152
  Gene Name: centrosomal protein 152kDa
  Uniprot ID: O94986
  ENSP ID: ENSP00000382271
MSLDFGSVALPVQNEDEEYDEEDYEREKELQQLLTDLPHDMLDDDLSSPELQYSDCSEDGTDGQPHHPEQLEMSWNEQMLPKSQSVNGYNEIQSLYAGEKCGNVWEENRSKTEDRHPVYHPEEGGDEGGSGYSPPSKCEQTDLYHLPENFRPYTNGQKQEFNNQATNVIKFSDPQWNHFQGPSCQGLEPYNKVTYKPYQSSAQNNGSPAQEITGSDTFEGLQQQFLGANENSAENMQIIQLQVLNKAKERQLENLIEKLNESERQIRYLNHQLVIIKDEKDGLTLSLRESQKLFQNGKEREIQLEAQIKALETQIQALKVNEEQMIKKSRTTEMALESLKQQLVDLHHSESLQRAREQHESIVMGLTKKYEEQVLSLQKNLDATVTALKEQEDICSRLKDHVKQLERNQEAIKLEKTEIINKLTRSLEESQKQCAHLLQSGSVQEVAQLQFQLQQAQKAHAMSANMNKALQEELTELKDEISLYESAAKLGIHPSDSEGELNIELTESYVDLGIKKVNWKKSKVTSIVQEEDPNEELSKDEFILKLKAEVQRLLGSNSMKRHLVSQLQNDLKDCHKKIEDLHQVKKDEKSIEVETKTDTSEKPKNQLWPESSTSDVVRDDILLLKNEIQVLQQQNQELKETEGKLRNTNQDLCNQMRQMVQDFDHDKQEAVDRCERTYQQHHEAMKTQIRESLLAKHALEKQQLFEAYERTHLQLRSELDKLNKEVTAVQECYLEVCREKDNLELTLRKTTEKEQQTQEKIKEKLIQQLEKEWQSKLDQTIKAMKKKTLDCGSQTDQVTTSDVISKKEMAIMIEEQKCTIQQNLEQEKDIAIKGAMKKLEIELELKHCENITKQVEIAVQNAHQRWLGELPELAEYQALVKAEQKKWEEQHEVSVNKRISFAVSEAKEKWKSELENMRKNILPGKELEEKIHSLQKELELKNEEVPVVIRAELAKARSEWNKEKQEEIHRIQEQNEQDYRQFLDDHRNKINEVLAAAKEDFMKQKTELLLQKETELQTCLDQSRREWTMQEAKRIQLEIYQYEEDILTVLGVLLSDTQKEHISDSEDKQLLEIMSTCSSKWMSVQYFEKLKGCIQKAFQDTLPLLVENADPEWKKRNMAELSKDSASQGTGQGDPGPAAGHHAQPLALQATEAEAEENNKVVEELIEENNDMKNKLEELQTLCKTPPRSLSAGAIENACLPCSGGALEELRGQYIKAVKKIKCDMLRYIQESKERAAEMVKAEVLRERQETARKMRKYYLICLQQILQDDGKEGAEKKIMNAASKLATMAKLLETPISSKSQSKTTQSALPLTSEMLIAVKKSKRNDVNQKIPCCIESKSNSVNTITRTLCEQAPKRRAACNLQRLLENSEHQSIKHVGSKETHLEFQFGDGSCKHLNSLPRNVSPEFVPCEGEGGFGLHKKKDLLSDNGSESLPHSAAYPFLGTLGNKPSPRCTPGPSESGCMHITFRDSNERLGLKVYKCNPLMESENAASEKSQGLDVQEPPVKDGGDLSDCLGWPSSSATLSFDSREASFVHGRPQGTLEIPSESVKSKQFSPSGYLSDTEESNMICQTMKCQRYQTPYLSEETTYLEPGKISVNCGHPSRHKADRLKSDFKKLSSTLPSSVCQQPSRKLIVPLSSQQDSGFDSPFVNLD

SEQ ID NO: 14014 - protein, 584 aa, Homo sapiens
  Payload ID: 2724
  Gene Symbol: CEP152
  Gene Name: centrosomal protein 152kDa
  ENSP ID: ENSP00000453440
MSLDFGSVALPVQNEDEEYDEEDYEREKELQQLLTDLPHDMLDDDLSSPELQYSDCSEDGTDGQPHHPEQLEMSWNEQMLPKSQSVNGYNEIQSLYAGEKCGNVWEENRSKTEDRHPVYHPEEGGDEGGSGYSPPSKCEQTDLYHLPENFRPYTNGQKQEFNNQATNVIKFSDPQWNHFQGPSCQGLEPYNKVTYKPYQSSAQNNGSPAQEITGSDTFEGLQQQFLGANENSAENMQIIQLQVLNKAKERQLENLIEKLNESERQIRYLNHQLVIIKDEKDGLTLSLRESQKLFQNGKEREIQLEAQIKALETQIQALKVNEEQMIKKSRTTEMALESLKQQLVDLHHSESLQRAREQHESIVMGLTKKYEEQVLSLQKNLDATVTALKEQEDICSRLKDHVKQLERNQEAIKLEKTEIINKLTRSLEESQKQCAHLLQSGSVQEVAQLQFQLQQAQKAHAMSANMNKALQEELTELKDEISLYESAAKLGIHPSDSEGELNIELTESYVDLGIKKVNWKKSKVTSIVQEEDPNEELSKDEFILKLKAEVQRLLGSNSMKRHLVSQLQNDLKDCHKKIEDLHQV

SEQ ID NO: 14015 - protein, 64 aa, Homo sapiens
  Payload ID: 2724
  Gene Symbol: CEP152
  Gene Name: centrosomal protein 152kDa
  ENSP ID: ENSP00000453591
ARKMRKYYLICLQQILQDDGKEGAEKKIMNAASKLATMAKLLETPISSEEAKSQKDNSPKRTQG

SEQ ID NO: 14016 - protein, 68 aa, Homo sapiens
  Payload ID: 2724
  Gene Symbol: CEP152
  Gene Name: centrosomal protein 152kDa
  ENSP ID: ENSP00000453914
MSLDFGSVALPVQNEDEEYDEEDYEREKELQQLLTDLPHDMLDDDLSSPELQYSDCSEDGTDGQPHHP

SEQ ID NO: 14017 - protein, 1327 aa, Homo sapiens
  Payload ID: 2725
  Gene Symbol: CEP162
  Gene Name: centrosomal protein 162kDa
  Uniprot ID: Q5TB80
  ENSP ID: ENSP00000257766
MEIEEESAEKIQFLKSSGTSLLSTDSLETNELVVSELNHSSLGVGLDTLEEQEEKEQFFARLEKGLTSSIDYSRLNKELDSNDSTHFKALHSNQANAELTDDEHENESKHEELAENYSDDFEDEYVGAPLTTKDEEMPSKENSKSEKISVPKQEEEKTGMLANVVLLDSLDSVAEVNLDEQDKITPKPRCLPEMTENEMTGTGVSYGQSSSDVEALHQAYCHIAHSLGDEDKQKIESNTVEDIKSSVKGHPQENEENSKNISTMESDLPTVEELMKPIRIDSFGISGFDLQPVSSEKVAERKETEFFSSLPLKMNPNILSQDSQHVNLFFDKNDENVILQKTTNESMENSCPQVTEVTATEEHVDKMYLNILRKKITVNSSSLSQDDKINKTYRSQLSSEEEGAVMGKQVPYKKARSAPPLLKRKPQSGLYASVRSSGYGKPSSPLKMFSTLEKKTSEDIIKSKNLRSISTSNQPRKKEILSGTKLIKPAALDKPAHKTESCLSTRKKSENPTETDSCIQFQTDSLGYCGENKEKKLLMFKRVQEAEDKWRGAQALIEQIKATFSEKEKELENKLEELKKQQEKELFKLNQDNYILQAKLSSFEETNKKQRWLHFGEAADPVTGEKLKQIQKEIQEQETLLQGYQQENERLYNQVKDLQEQNKKNEERMFKENQSLFSEVASLKEQMHKSRFLSQVVEDSEPTRNQNFTDLLAELRMAQKEKDSLLEDIKRLKQDKQALEVDFEKMKKERDQAKDQIAYVTGEKLYEIKILEETHKQEISRLQKRLQWYAENQELLDKDALRLREANEEIEKLKLEIEKLKAESGNPSIRQKIRLKDKAADAKKIQDLERQVKEMEGILKRRYPNSLPALILAASAAGDTVDKNTVEFMEKRIKKLEADLEGKDEDAKKSLRTMEQQFQKMKIQYEQRLEQQEQLLACKLNQHDSPRIKALEKELDDIKEAHQITVRNLEAEIDVLKHQNAELDVKKNDKDDEDFQSIEFQVEQAHAKAKLVRLNEELAAKKREIQDLSKTVERLQKDRRMMLSNQNSKGREEMSAKRAKKDVLHSSKGNANSFPGTLDSKLYQPHTFTDSHVSEVLQENYRLKNELEGLISEKNELKMKSEAVMNQFENSMRRVKEDTAAHIASLKASHQREIEKLLCQNAVENSSSKVAELNRKIATQEVLIRHFQSQVNELQSKQESLVVSEVREEILQKEITKLLEELREAKENHTPEMKHFVGLEKKIKQMEMRHAQREQELQQIIQQTHQVVETEQNKEVEKWKRLAQLKNRELEKFRTELDSILDVLRELHRQGVVVPVAFADEMNAPEY

SEQ ID NO: 14018 - protein, 1403 aa, Homo sapiens
  Payload ID: 2725
  Gene Symbol: CEP162
  Gene Name: centrosomal protein 162kDa
  Uniprot ID: Q5TB80
  ENSP ID: ENSP00000385215
MANCSQEELDEEFEQFMKELSDDSFENSDKTARQSKKEMKKKDTVPWWITEDDFKDDGLLGTNVSYLKTKKTSQPVMEIEEESAEKIQFLKSSGTSLLSTDSLETNELVVSELNHSSLGVGLDTLEEQEEKEQFFARLEKGLTSSIDYSRLNKELDSNDSTHFKALHSNQANAELTDDEHENESKHEELAENYSDDFEDEYVGAPLTTKDEEMPSKENSKSEKISVPKQEEEKTGMLANVVLLDSLDSVAEVNLDEQDKITPKPRCLPEMTENEMTGTGVSYGQSSSDVEALHQAYCHIAHSLGDEDKQKIESNTVEDIKSSVKGHPQENEENSKNISTMESDLPTVEELMKPIRIDSFGISGFDLQPVSSEKVAERKETEFFSSLPLKMNPNILSQDSQHVNLFFDKNDENVILQKTTNESMENSCPQVTEVTATEEHVDKMYLNILRKKITVNSSSLSQDDKINKTYRSQLSSEEEGAVMGKQVPYKKARSAPPLLKRKPQSGLYASVRSSGYGKPSSPLKMFSTLEKKTSEDIIKSKNLRSISTSNQPRKKEILSGTKLIKPAALDKPAHKTESCLSTRKKSENPTETDSCIQFQTDSLGYCGENKEKKLLMFKRVQEAEDKWRGAQALIEQIKATFSEKEKELENKLEELKKQQEKELFKLNQDNYILQAKLSSFEETNKKQRWLHFGEAADPVTGEKLKQIQKEIQEQETLLQGYQQENERLYNQVKDLQEQNKKNEERMFKENQSLFSEVASLKEQMHKSRFLSQVVEDSEPTRNQNFTDLLAELRMAQKEKDSLLEDIKRLKQDKQALEVDFEKMKKERDQAKDQIAYVTGEKLYEIKILEETHKQEISRLQKRLQWYAENQELLDKDALRLREANEEIEKLKLEIEKLKAESGNPSIRQKIRLKDKAADAKKIQDLERQVKEMEGILKRRYPNSLPALILAASAAGDTVDKNTVEFMEKRIKKLEADLEGKDEDAKKSLRTMEQQFQKMKIQYEQRLEQQEQLLACKLNQHDSPRIKALEKELDDIKEAHQITVRNLEAEIDVLKHQNAELDVKKNDKDDEDFQSIEFQVEQAHAKAKLVRLNEELAAKKREIQDLSKTVERLQKDRRMMLSNQNSKGREEMSAKRAKKDVLHSSKGNANSFPGTLDSKLYQPHTFTDSHVSEVLQENYRLKNELEGLISEKNELKMKSEAVMNQFENSMRRVKEDTAAHIASLKASHQREIEKLLCQNAVENSSSKVAELNRKIATQEVLIRHFQSQVNELQSKQESLVVSEVREEILQKEITKLLEELREAKENHTPEMKHFVGLEKKIKQMEMRHAQREQELQQIIQQTHQVVETEQNKEVEKWKRLAQLKNRELEKFRTELDSILDVLRELHRQGVVVPVAFADEMNAPEY

SEQ ID NO: 14019 - protein, 72 aa, Homo sapiens
  Payload ID: 2725
  Gene Symbol: CEP162
  Gene Name: centrosomal protein 162kDa
  ENSP ID: ENSP00000410813
MANCSQEELDEEFEQFMKELSDDSFENSDKTARQSKKEMKKKDTVPWWITEDDFKDDGIIMKRQDVIPVSRV

SEQ ID NO: 14020 - protein, 1327 aa, Homo sapiens; identical to SEQ ID NO: 14017
  Payload ID: 2725
  Gene Symbol: CEP162
  Gene Name: centrosomal protein 162kDa
  Uniprot ID: Q5TB80
  ENSP ID: ENSP00000481760

SEQ ID NO: 14021 - protein, 1460 aa, Homo sapiens
  Payload ID: 2726
  Gene Symbol: CEP164
  Gene Name: centrosomal protein 164kDa
  Uniprot ID: Q9UPV0
  ENSP ID: ENSP00000278935
MAGRPLRIGDQLVLEEDYDETYIPSEQEILEFAREIGIDPIKEPELMWLAREGIVAPLPGEWKPCQDITGDIYYFNFANGQSMWDHPCDEHYRSLVIQERAKLSTSGAIKKKKKKKEKKDKKDRDPPKSSLALGSSLAPVHVPLGGLAPLRGLVDTPPSALRGSQSVSLGSSVESGRQLGELMLPSQGLKTSAYTKGLLGSIYEDKTALSLLGLGEETNEEDEEESDNQSVHSSSEPLRNLHLDIGALGGDFEYEESLRTSQPEEKKDVSLDSDAAGPPTPCKPSSPGADSSLSSAVGKGRQGSGARPGLPEKEENEKSEPKICRNLVTPKADPTGSEPAKASEKEAPEDTVDAGEEGSRREEAAKEPKKKASALEEGSSDASQELEISEHMKEPQLSDSIASDPKSFHGLDFGFRSRISEHLLDVDVLSPVLGGACRQAQQPLGIEDKDDSQSSQDELQSKQSKGLEERLSPPLPHEERAQSPPRSLATEEEPPQGPEGQPEWKEAEELGEDSAASLSLQLSLQREQAPSPPAACEKGKEQHSQAEELGPGQEEAEDPEEKVAVSPTPPVSPEVRSTEPVAPPEQLSEAALKAMEEAVAQVLEQDQRHLLESKQEKMQQLREKLCQEEEEEILRLHQQKEQSLSSLRERLQKAIEEEEARMREEESQRLSWLRAQVQSSTQADEDQIRAEQEASLQKLREELESQQKAERASLEQKNRQMLEQLKEEIEASEKSEQAALNAAKEKALQQLREQLEGERKEAVATLEKEHSAELERLCSSLEAKHREVVSSLQKKIQEAQQKEEAQLQKCLGQVEHRVHQKSYHVAGYEHELSSLLREKRQEVEGEHERRLDKMKEEHQQVMAKAREQYEAEERKQRAELLGHLTGELERLQRAHERELETVRQEQHKRLEDLRRRHREQERKLQDLELDLETRAKDVKARLALLEVQEETARREKQQLLDVQRQVALKSEEATATHQQLEEAQKEHTHLLQSNQQLREILDELQARKLKLESQVDLLQAQSQQLQKHFSSLEAEAQKKQHLLREVTVEENNASPHFEPDLHIEDLRKSLGTNQTKEVSSSLSQSKEDLYLDSLSSHNVWHLLSAEGVALRSAKEFLVQQTRSMRRRQTALKAAQQHWRHELASAQEVAKDPPGIKALEDMRKNLEKETRHLDEMKSAMRKGHNLLKKKEEKLNQLESSLWEEASDEGTLGGSPTKKAVTFDLSDMDSLSSESSESFSPPHREWWRQQRIDSTPSLTSRKIHGLSHSLRQISSQLSSVLSILDSLNPQSPPPLLASMPAQLPPRDPKSTPTPTYYGSLARFSALSSATPTSTQWAWDSGQGPRLPSSVAQTVDDFLLEKWRKYFPSGIPLLSNSPTPLESRLGYMSASEQLRLLQHSHSQVPEAGSTTFQGIIEANRRWLERVKNDPRLPLFSSTPKPKATLSLLQLGLDEHNRVKVYRF

SEQ ID NO: 14022 - protein, 121 aa, Homo sapiens
  Payload ID: 2726
  Gene Symbol: CEP164
  Gene Name: centrosomal protein 164kDa
  ENSP ID: ENSP00000431302
MAGRPLRIGDQLVLEEDYDETYIPSEQEILEFAREIGIDPIKEPELMWLAREGIVAPLPGEWKPCQDITGDIYYFNFANGQSMWDHPCDEHYRSLVIQERAKLSTSGAIKKKKKKKEKKDK

SEQ ID NO: 14023 - protein, 122 aa, Homo sapiens
  Payload ID: 2726
  Gene Symbol: CEP164
  Gene Name: centrosomal protein 164kDa
  ENSP ID: ENSP00000435759
MWLAREGIVAPLPGEWKPCQDITGDIYYFNFANGQSMWDHPCDEHYRSLVIQERAKLSTSGAIKKKKKKKEKKDKKDRDPPKSSLALGSSLAPVHVPLGGLAPLRGLVDTPPSALRGSQSVS

SEQ ID NO: 14024 - protein, 158 aa, Homo sapiens
  Payload ID: 2726
  Gene Symbol: CEP164
  Gene Name: centrosomal protein 164kDa
  ENSP ID: ENSP00000436034
MWLAREGIVAPLPGEWKPCQDITGDIYYFNFANGQSMWDHPCDEHYRSLVIQERAKLSTSGAIKKKKKKKEKKDKKDRDPPKSSLALGSSLAPVHVPLGGLAPLRGLVDTPPSALRGSQSVSLGSSVESGRQLGELMLPSQGLKTSAYTKGLLGSIYE

SEQ ID NO: 14025 - protein, 121 aa, Homo sapiens; identical to SEQ ID NO: 14022
  Payload ID: 2726
  Gene Symbol: CEP164
  Gene Name: centrosomal protein 164kDa
  ENSP ID: ENSP00000436351

SEQ ID NO: 14026 - protein, 115 aa, Homo sapiens
  Payload ID: 2726
  Gene Symbol: CEP164
  Gene Name: centrosomal protein 164kDa
  ENSP ID: ENSP00000436609
MAGRPLRIGDQLVLEEDYDETYIPSEQEILEFAREIGIDPIKEPELMWLAREGIVAPLPGEWKPCQDITGDIYYFNFANGQSMWDHPCDEHYRSLVIQERAKLSTSGAIKKKKKK

SEQ ID NO: 14027 - protein, 1554 aa, Homo sapiens
  Payload ID: 2727
  Gene Symbol: CEP170B
  Gene Name: centrosomal protein 170B
  Uniprot ID: Q9Y4F5
  ENSP ID: ENSP00000404151
MSATSWFLVSSSGARHRLPRELIFVGREECELMLQSRSVDKQHAVINYDQDRDEHWVKDLGSLNGTFVNDMRIPDQKYVTLKLNDVIRFGYDSNMYVLERVQHRVPEEALKHEKYTSQLQVSVKGLAPKRSEALPEHTPYCEASNPRPEKGDRRPGTEAASYRTPLYGQPSWWGEDDGSTLPDAQRQGEPYPERPKGPVQQDGELHGFRAPAEPQGCSFRREPSYFEIPTKETPQPSQPPEVPAHEMPTKDAEAGGGGAAPVVQSHASFTIEFDDCSPGKMKIKDHITKFSLRQRRPPGKEATPGEMVSAETKVADWLVQNDPSLLHRVGPGDDRHSTKSDLPVHTRTLKGHKHEDGTQSDSEDPLAKAASAAGVPLEASGEQVRLQRQIKRDPQELLHNQQAFVIEFFDEDTPRKKRSQSFTHSPSGDPKADKRRGPTPADRDRPSVPAPVQAGGRSSGPQRAGSLKREKTEERLGSPSPASRTPARPFGSVGRRSRLAQDFMAQCLRESSPAARPSPEKVPPVLPAPLTPHGTSPVGPPTPPPAPTDPQLTKARKQEEDDSLSDAGTYTIETEAQDTEVEEARKMIDQVFGVLESPELSRASSATFRPVIRGDRDESDDGGVAQRMALLQEFASRPLGAAPQAEHQGLPVPGSPGGQKWVSRWASLADSYSDPGLTEDGLGRRGGEPEGSLPVRMRRRLPQLPSERADSPAGPESSRRSGPGPPELDSEQPSRLFGQEELDPDSLSDASGSDGGRGPEPGVEPQDSRRRSPQEGPTWSRGRRSPRAPGEPTPASFFIGDQNGDAVLSRKPLAAPGDGEGLGQTAQPSPPARDGVYVSANGRMVIQLRPGRSPEPDGPAPAFLRQESFTKEPASGPPAPGKPPHISSHPLLQDLAATRAARMDFHSQDTHLILKETETALAALEARLLSNSVDAECEGGSTPRPPEDALSGDSDVDTASTVSLRSGKSGPSPTTPQPLRAQKEMSPSPPAAQDPGGTALVSAREQSSERQHHPLGPTDMGRGEPVRRSAIRRGHRPRGSLDWPSEERGPVLAHLPSSDVMASNHETPEATGAGRLGSRRKPAAPPPSPAAREEQSRSSASSQKGPQALTRSNSLSTPRPTRASRLRRARLGDASDTEAADGERGSLGNPEPVGRPAAEQAKKLSRLDILAMPRKRAGSFTGTSDPEAAPARTSFSGRSVELCCASRKPTMAEARAVSRKAANTATTTGPRQPFSRARSGSARYTSTTQTPRAGSSSRARSRAPGPRDTDDDEEEPDPYGFIVQTAEIAEIARLSQTLVKDVAILAQEIHDVAGDGDTLGSSEPAHSASLSNMPSTPASTISAREELVQRIPEASLNFQKVPPGSLNSRDFDQNMNDSCEDALANKTRPRNREEVIFDNLMLNPVSQLSQAIRENTEHLAEKMKILFQNTGRAWEDLEARINAENEVPILKTSNKEISSILKELRRVQKQLEVINAIVDPSGSLDLLTGNRSLASSAQPGLGKGRVAAQSPPSPASAEALLPALPLRNFPQRASCGPPSLPDPTFLPDAERFLI

SEQ ID NO: 14028 - protein, 1590 aa, Homo sapiens [sequence omitted]

SEQ ID NO: 14029 - protein, 1519 aa, Homo sapiens
  Payload ID: 2727
  Gene Symbol: CEP170B
  Gene Name: centrosomal protein 170B
  Uniprot ID: Q9Y4F5
  ENSP ID: ENSP00000451249
MRIPDQKYVTLKLNDVIRFGYDSNMYVLERVQHRVPEEALKHEKYTSQLQVSVKGLAPKRSEALPEHTPYCEASNPRPEKGDRRPGTEAASYRTPLYGQPSWWGEDDGSTLPDAQRQGEPYPERPKGPVQQDGELHGFRAPAEPQGCSFRREPSYFEIPTKETPQPSQPPEVPAHEMPTKDAEAGGGGAAPVVQSHASFTIEFDDCSPGKMKIKDHITKFSLRQRRPPGKEATPGEMVSAETKVADWLVQNDPSLLHRVGPGDDRHSTKSDLPVHTRTLKGHKHEDGTQSDSEDPLAKAASAAGVPLEASGEQVRLQRQIKRDPQELLHNQQAFVIEFFDEDTPRKKRSQSFTHSPSGDPKADKRRGPTPADRDRPSVPAPVQAGGRSSGPQRAGSLKREKTEERLGSPSPASRTPARPFGSVGRRSRLAQDFMAQCLRESSPAARPSPEKVPPVLPAPLTPHGTSPVGPPTPPPAPTDPQLTKARKQEEDDSLSDAGTYTIETEAQDTEVEEARKMIDQVFGVLESPELSRASSATFRPVIRGDRDESDDGGVAQRMALLQEFASRPLGAAPQAEHQGLPVPGSPGGQKWVSRWASLADSYSDPGLTEDGLGRRGGEPEGSLPVRMRRRLPQLPSERADSPAGPESSRRSGPGPPELDSEQPSRLFGQEELDPDSLSDASGSDGGRGPEPGVEPQDSRRRSPQEGPTWSRGRRSPRAPGEPTPASFFIGDQNGDAVLSRKPLAAPGDGEGLGQTAQPSPPARDGVYVSANGRMVIQLRPGRSPEPDGPAPAFLRQESFTKEPASGPPAPGKPPHISSHPLLQDLAATRAARMDFHSQDTHLILKETETALAALEARLLSNSVDAECEGGSTPRPPEDALSGDSDVDTASTVSLRSGKSGPSPTTPQPLRAQKEMSPSPPAAQDPGGTALVSAREQSSERQHHPLGPTDMGRGEPVRRSAIRRGHRPRGSLDWPSEERGPVLAHLPSSDVMASNHETPEATGAGRLGSRRKPAAPPPSPAAREEQSRSSASSQKGPQALTRSNSLSTPRPTRASRLRRARLGDASDTEAADGERGSLGNPEPVGRPAAEQAKKLSRLDILAMPRKRAGSFTGTSDPEAAPARTSFSGRSVELCCASRKPTMAEARAVSRKAANTATTTGPRQPFSRARSGSARYTSNTRRRQQGSDYTSTSEEEYGSRHGSPKHTRSHTSTATQTPRAGSSSRARSRAPGPRDTDDDEEEPDPYGFIVQTAEIAEIARLSQTLVKDVAILAQEIHDVAGDGDTLGSSEPAHSASLSNMPSTPASTISAREELVQRIPEASLNFQKVPPGSLNSRDFDQNMNDSCEDALANKTRPRNREEVIFDNLMLNPVSQLSQAIRENTEHLAEKMKILFQNTGRAWEDLEARINAENEVPILKTSNKEISSILKELRRVQKQLEVINAIVDPSGSLDLLTGNRSLASSAQPGLGKGRVAAQSPPSPASAEALLPALPLRNFPQRASCGPPSLPDPTFLPDAERFLI

SEQ ID NO: 14030 - protein, 1558 aa, Homo sapiens
  Payload ID: 2728
  Gene Symbol: CEP170
  Gene Name: centrosomal protein 170kDa
  ENSP ID: ENSP00000338161
  MOD_RES (1)..(1): Any amino acid
XQGEMRVPEEALKHEKFTIQLQLSQKSSESELSKSASAKSIDSKVADAATEVQHKTTEALKSEEKAMDISAMPRGTPLYGQPSWWGDDEVDEKRAFKTNGKPEEKNHEAGTSGCGIDAKQVEEQSAAANEEVLFPFCREPSYFEIPTKEFQQPSQITESTIHEIPTKDTPSSHITGAGHASFTIEFDDSTPGKVTIRDHVTKFTSDQRHKSKKSSPGTQDLLGIQTGMMAPENKVADWLAQNNPPQMLWERTEEDSKSIKSDVPVYLKRLKGNKHDDGTQSDSENAGAHRRCSKRATLEEHLRRHHSEHKKLQKVQATEKHQDQAVVSQTAFMIAFFDEDNPRKRRSYSFTQSAGILCQETTYSTPHTKLEKAKSPTADAKVVSLSLQTSSAHHRGGHGVPHGKLLKQKSEEPSVSIPFLQTALLRSSGSLGHRPSQEMDKMLKNQATSATSEKDNDDDQSDKGTYTIELENPNSEEVEARKMIDKVFGVDDNQDYNRPVINEKHKDLIKDWALSSAAAVMEERKPLTTSGFHHSEEGTSSSGSKRWVSQWASLAANHTRHDQEERIMEFSAPLPLENETEISESGMTVRSTGSATSLASQGERRRRTLPQLPNEEKSLESHRAKVVTQRSEIGEKQDTELQEKETPTQVYQKDKQDADRPLSKMNRAVNGETLKTGGDNKTLLHLGSSAPGKEKSETDKETSLVKQTLAKLQQQEQREEAQWTPTKLSSKNVSGQTDKCREETFKQESQPPEKNSGHSTSKGDRVAQSESKRRKAEEILKSQTPKGGDKKESSKSLVRQGSFTIEKPSPNIPIELIPHINKQTSSTPSSLALTSASRIRERSESLDPDSSMDTTLILKDTEAVMAFLEAKLREDNKTDEGPDTPSYNRDNSISPESDVDTASTISLVTGETERKSTQKRKSFTSLYKDRCSTGSPSKDVTKSSSSGAREKMEKKTKSRSTDVGSRADGRKFVQSSGRIRQPSVDLTDDDQTSSVPHSAISDIMSSDQETYSCKPHGRTPLTSADEHVHSKLEGSKVTKSKTSPVVSGSSSKSTTLPRPRPTRTSLLRRARLGEASDSELADADKASVASEVSTTSSTSKPPTGRRNISRIDLLAQPRRTRLGSLSARSDSEATISRSSASSRTAEAIIRSGARLVPSDKFSPRIRANSISRLSDSKVKSMTSAHGSASVNSRWRRFPTDYASTSEDEFGSNRNSPKHTRLRTSPALKTTRLQSAGSAMPTSSSFKHRIKEQEDYIRDWTAHREEIARISQDLALIAREINDVAGEIDSVTSSGTAPSTTVSTAATTPGSAIDTREEVGDLHGEMHKLVDRVFDESLNFRKIPPLVHSKTPEGNNGRSGDPRPQAAEPPDHLTITRRRTWSRDEVMGDNLLLSSVFQFSKKIRQSIDKTAGKIRILFKDKDRNWDDIESKLRAESEVPIVKTSSMEISSILQELKRVEKQLQAINAMIDPDGTLEALNNMGFPSAMLPSPPKQKSSPVNNHHSPGQTPTLGQPEARALHPAAVSAAAEFENAESEADFSIHFNRFNPDGEEEDVTVQE

SEQ ID NO: 14031 - protein, 1584 aa, Homo sapiens
  Payload ID: 2728
  Gene Symbol: CEP170
  Gene Name: centrosomal protein 170kDa
  Uniprot ID: Q5SW79
  ENSP ID: ENSP00000355500
MSLTSWFLVSSGGTRHRLPREMIFVGRDDCELMLQSRSVDKQHAVINYDASTDEHLVKDLGSLNGTFVNDVRIPEQTYITLKLEDKLRFGYDTNLFTVVQGEMRVPEEALKHEKFTIQLQLSQKSSESELSKSASAKSIDSKVADAATEVQHKTTEALKSEEKAMDISAMPRGTPLYGQPSWWGDDEVDEKRAFKTNGKPEEKNHEAGTSGCGIDAKQVEEQSAAANEEVLFPFCREPSYFEIPTKEFQQPSQITESTIHEIPTKDTPSSHITGAGHASFTIEFDDSTPGKVTIRDHVTKFTSDQRHKSKKSSPGTQDLLGIQTGMMAPENKVADWLAQNNPPQMLWERTEEDSKSIKSDVPVYLKRLKGNKHDDGTQSDSENAGAHRRCSKRATLEEHLRRHHSEHKKLQKVQATEKHQDQAVTSSAHHRGGHGVPHGKLLKQKSEEPSVSIPFLQTALLRSSGSLGHRPSQEMDKMLKNQATSATSEKDNDDDQSDKGTYTIELENPNSEEVEARKMIDKVFGVDDNQDYNRPVINEKHKDLIKDWALSSAAAVMEERKPLTTSGFHHSEEGTSSSGSKRWVSQWASLAANHTRHDQEERIMEFSAPLPLENETEISESGMTVRSTGSATSLASQGERRRRTLPQLPNEEKSLESHRAKVVTQRSEIGEKQDTELQEKETPTQVYQKDKQDADRPLSKMNRAVNGETLKTGGDNKTLLHLGSSAPGKEKSETDKETSLVKQTLAKLQQQEQREEAQWTPTKLSSKNVSGQTDKCREETFKQESQPPEKNSGHSTSKGDRVAQSESKRRKAEEILKSQTPKGGDKKESSKSLVRQGSFTIEKPSPNIPIELIPHINKQTSSTPSSLALTSASRIRERSESLDPDSSMDTTLILKDTEAVMAFLEAKLREDNKTDEGPDTPSYNRDNSISPESDVDTASTISLVTGETERKSTQKRKSFTSLYKDRCSTGSPSKDVTKSSSSGAREKMEKKTKSRSTDVGSRADGRKFVQSSGRIRQPSVDLTDDDQTSSVPHSAISDIMSSDQETYSCKPHGRTPLTSADEHVHSKLEGSKVTKSKTSPVVSGSSSKSTTLPRPRPTRTSLLRRARLGEASDSELADADKASVASEVSTTSSTSKPPTGRRNISRIDLLAQPRRTRLGSLSARSDSEATISRSSASSRTAEAIIRSGARLVPSDKFSPRIRANSISRLSDSKVKSMTSAHGSASVNSRWRRFPTDYASTSEDEFGSNRNSPKHTRLRTSPALKTTRLQSAGSAMPTSSSFKHRIKEQEDYIRDWTAHREEIARISQDLALIAREINDVAGEIDSVTSSGTAPSTTVSTAATTPGSAIDTREELVDRVFDESLNFRKIPPLVHSKTPEGNNGRSGDPRPQAAEPPDHLTITRRRTWSRDEVMGDNLLLSSVFQFSKKIRQSIDKTAGKIRILFKDKDRNWDDIESKLRAESEVPIVKTSSMEISSILQELKRVEKQLQAINAMIDPDGTLEALNNMGFPSAMLPSPPKQKSSPVNNHHSPGQTPTLGQPEARALHPAAVSAAAEFENAESEADFSIHFNRFNPDGEEEDVTVQE

SEQ ID NO: 14032 - protein, 1460 aa, Homo sapiens
  Payload ID: 2728
  Gene Symbol: CEP170
  Gene Name: centrosomal protein 170kDa
  Uniprot ID: Q5SW79
  ENSP ID: ENSP00000355501
MSLTSWFLVSSGGTRHRLPREMIFVGRDDCELMLQSRSVDKQHAVINYDASTDEHLVKDLGSLNGTFVNDVRIPEQTYITLKLEDKLRFGYDTNLFTVVQGEMRVPEEALKHEKFTIQLQLSQKSSESELSKSASAKSIDSKVADAATEVQHKTTEALKSEEKAMDISAMPRGTPLYGQPSWWGDDEVDEKRAFKTNGKPEEKNHEAGTSGCGIDAKQVEEQSAAANEEVLFPFCREPSYFEIPTKEFQQPSQITESTIHEIPTKDTPSSHITGAGHASFTIEFDDSTPGKVTIRDHVTKFTSDQRHKSKKSSPGTQDLLGIQTGMMAPENKVADWLAQNNPPQMLWERTEEDSKSIKSDVPVYLKRLKGNKHDDGTQSDSENAGAHRRCSKRATLEEHLRRHHSEHKKLQKVQATEKHQDQAVVFGVDDNQDYNRPVINEKHKDLIKDWALSSAAAVMEERKPLTTSGFHHSEEGTSSSGSKRWVSQWASLAANHTRHDQEERIMEFSAPLPLENETEISESGMTVRSTGSATSLASQGERRRRTLPQLPNEEKSLESHRAKVVTQRSEIGEKQDTELQEKETPTQVYQKDKQDADRPLSKMNRAVNGETLKTGGDNKTLLHLGSSAPGKEKSETDKETSLVKQTLAKLQQQEQREEAQWTPTKLSSKNVSGQTDKCREETFKQESQPPEKNSGHSTSKGDRVAQSESKRRKAEEILKSQTPKGGDKKESSKSLVRQGSFTIEKPSPNIPIELIPHINKQTSSTPSSLALTSASRIRERSESLDPDSSMDTTLILKDTEAVMAFLEAKLREDNKTDEGPDTPSYNRDNSISPESDVDTASTISLVTGETERKSTQKRKSFTSLYKDRCSTGSPSKDVTKSSSSGAREKMEKKTKSRSTDVGSRADGRKFVQSSGRIRQPSVDLTDDDQTSSVPHSAISDIMSSDQETYSCKPHGRTPLTSADEHVHSKLEGSKVTKSKTSPVVSGSSSKSTTLPRPRPTRTSLLRRARLGEASDSELADADKASVASEVSTTSSTSKPPTGRRNISRIDLLAQPRRTRLGSLSARSDSEATISRSSASSRTAEAIIRSGARLVPSDKFSPRIRANSISRLSDSKVKSMTSAHGSASALKTTRLQSAGSAMPTSSSFKHRIKEQEDYIRDWTAHREEIARISQDLALIAREINDVAGEIDSVTSSGTAPSTTVSTAATTPGSAIDTREEVGDLHGEMHKLVDRVFDESLNFRKIPPLVHSKTPEGNNGRSGDPRPQAAEPPDHLTITRRRTWSRDEVMGDNLLLSSVFQFSKKIRQSIDKTAGKIRILFKDKDRNWDDIESKLRAESEVPIVKTSSMEISSILQELKRVEKQLQAINAMIDPDGTLEALNNMGFPSAMLPSPPKQKSSPVNNHHSPGQTPTLGQPEARALHPAAVSAAAEFENAESEADFSIHFNRFNPDGEEEDVTVQE

SEQ ID NO: 14033 - protein, 1486 aa, Homo sapiens
  Payload ID: 2728
  Gene Symbol: CEP170
  Gene Name: centrosomal protein 170kDa
  Uniprot ID: Q5SW79
  ENSP ID: ENSP00000355502
MSLTSWFLVSSGGTRHRLPREMIFVGRDDCELMLQSRSVDKQHAVINYDASTDEHLVKDLGSLNGTFVNDVRIPEQTYITLKLEDKLRFGYDTNLFTVVQGEMRVPEEALKHEKFTIQLQLSQKSSESELSKSASAKSIDSKVADAATEVQHKTTEALKSEEKAMDISAMPRGTPLYGQPSWWGDDEVDEKRAFKTNGKPEEKNHEAGTSGCGIDAKQVEEQSAAANEEVLFPFCREPSYFEIPTKEFQQPSQITESTIHEIPTKDTPSSHITGAGHASFTIEFDDSTPGKVTIRDHVTKFTSDQRHKSKKSSPGTQDLLGIQTGMMAPENKVADWLAQNNPPQMLWERTEEDSKSIKSDVPVYLKRLKGNKHDDGTQSDSENAGAHRRCSKRATLEEHLRRHHSEHKKLQKVQATEKHQDQAVVFGVDDNQDYNRPVINEKHKDLIKDWALSSAAAVMEERKPLTTSGFHHSEEGTSSSGSKRWVSQWASLAANHTRHDQEERIMEFSAPLPLENETEISESGMTVRSTGSATSLASQGERRRRTLPQLPNEEKSLESHRAKVVTQRSEIGEKQDTELQEKETPTQVYQKDKQDADRPLSKMNRAVNGETLKTGGDNKTLLHLGSSAPGKEKSETDKETSLVKQTLAKLQQQEQREEAQWTPTKLSSKNVSGQTDKCREETFKQESQPPEKNSGHSTSKGDRVAQSESKRRKAEEILKSQTPKGGDKKESSKSLVRQGSFTIEKPSPNIPIELIPHINKQTSSTPSSLALTSASRIRERSESLDPDSSMDTTLILKDTEAVMAFLEAKLREDNKTDEGPDTPSYNRDNSISPESDVDTASTISLVTGETERKSTQKRKSFTSLYKDRCSTGSPSKDVTKSSSSGAREKMEKKTKSRSTDVGSRADGRKFVQSSGRIRQPSVDLTDDDQTSSVPHSAISDIMSSDQETYSCKPHGRTPLTSADEHVHSKLEGSKVTKSKTSPVVSGSSSKSTTLPRPRPTRTSLLRRARLGEASDSELADADKASVASEVSTTSSTSKPPTGRRNISRIDLLAQPRRTRLGSLSARSDSEATISRSSASSRTAEAIIRSGARLVPSDKFSPRIRANSISRLSDSKVKSMTSAHGSASVNSRWRRFPTDYASTSEDEFGSNRNSPKHTRLRTSPALKTTRLQSAGSAMPTSSSFKHRIKEQEDYIRDWTAHREEIARISQDLALIAREINDVAGEIDSVTSSGTAPSTTVSTAATTPGSAIDTREELVDRVFDESLNFRKIPPLVHSKTPEGNNGRSGDPRPQAAEPPDHLTITRRRTWSRDEVMGDNLLLSSVFQFSKKIRQSIDKTAGKIRILFKDKDRNWDDIESKLRAESEVPIVKTSSMEISSILQELKRVEKQLQAINAMIDPDGTLEALNNMGFPSAMLPSPPKQKSSPVNNHHSPGQTPTLGQPEARALHPAAVSAAAEFENAESEADFSIHFNRFNPDGEEEDVTVQE

SEQ ID NO: 14034 - protein, 263 aa, Homo sapiens
  Payload ID: 2728
  Gene Symbol: CEP170
  Gene Name: centrosomal protein 170kDa
  ENSP ID: ENSP00000394002
TRLGSLSARSDSEATISRSSASSRTAEAIIRSGARLVPSDKFSPRIRANSISRLSDSKVKSMTSAHGSASALKTTRLQSAGSAMPTSSSFKHRIKEQEDYIRDWTAHREEIARISQDLALIAREINDVAGEIDSVTSSGTAPSTTLVDRVFDESLNFRKIPPLVHSKTPEGNNGRSGDPRPQAAEPPDHLTITRRRTWSRDEVMGDNLLLSSVFQFSKKIRQSIDKTAGKIRILFKDKDRNWDDIESKLRAESEVPIVKTSSM

SEQ ID NO: 14035 - protein, 320 aa, Homo sapiens
  Payload ID: 2728
  Gene Symbol: CEP170
  Gene Name: centrosomal protein 170kDa
  ENSP ID: ENSP00000427842
MPTSSSFKHRIKEQEDYIRDWTAHREEIARISQDLALIAREINDVAGEIDSVTSSGTAPSTTVSTAATTPGSAIDTREEVGDLHGEMHKLVDRVFDESLNFRKIPPLVHSKTPEGNNGRSGDPRPQAAEPPDHLTITRRRTWSRDEVMGDNLLLSSVFQFSKKIRQSIDKTAGKIRILFKDKDRNWDDIESKLRAESEVPIVKTSSMEISSILQELKRVEKQLQAINAMIDPDGTLEALNNMGFPSAMLPSPPKQKSSPVNNHHSPGQTPTLGQPEARALHPAAVSAAAEFENAESEADFSIHFNRFNPDGEEEDVTVQE

SEQ ID NO: 14036 - protein, 175 aa, Homo sapiens
  Payload ID: 2728
  Gene Symbol: CEP170
  Gene Name: centrosomal protein 170kDa
  ENSP ID: ENSP00000427843
MPTSSSFKHRIKEQEDYIRDWTAHREEIARISQDLALIAREINDVAGEIDSVTSSGTAPSTTLVDRVFDESLNFRKIPPLVHSKTPEGNNGRSGDPRPQAAEPPDHLTITRRRTWSRDEVMGDNLLLSSVFQFSKKIRQSIDKTAGKIRILFKDKDRNWDDIESKLRAESEVPIV

SEQ ID NO: 14037 - protein, 133 aa, Homo sapiens
  Payload ID: 2728
  Gene Symbol: CEP170
  Gene Name: centrosomal protein 170kDa
  ENSP ID: ENSP00000427944
MSLTSWFLVSSGGTRHRLPREMIFVGRDDCELMLQSRSVDKQHAVINYDASTDEHLVKDLGSLNGTFVNDVRIPEQTYITLKLEDKLRFGYDTNLFTVVQGEMRVPEEALKHEKFTIQLQLSQKSSESELSKS

SEQ ID NO: 14038 - protein, 111 aa, Homo sapiens
  Payload ID: 2728
  Gene Symbol: CEP170
  Gene Name: centrosomal protein 170kDa
  ENSP ID: ENSP00000428183
MSLTSWFLVSSGGTRHRLPREMIFVGRDDCELMLQSRSVDKQHAVINYDASTDEHLVKDLGSLNGTFVNDVRIPEQTYITLKLEDKLRFGYDTNLFTVVQGEMRVPEEALK

SEQ ID NO: 14039 - protein, 88 aa, Homo sapiens
  Payload ID: 2728
  Gene Symbol: CEP170
  Gene Name: centrosomal protein 170kDa
  ENSP ID: ENSP00000428400
MSLTSWFLVSSGGTRHRLPREMIFVGRDDCELMLQSRSVDKQHAVINYDASTDEHLVKDLGSLNGTFVNDVRIPEQTYITLKLEDKLR

SEQ ID NO: 14040 - protein, 119 aa, Homo sapiens
  Payload ID: 2728
  Gene Symbol: CEP170
  Gene Name: centrosomal protein 170kDa
  ENSP ID: ENSP00000428777
  MOD_RES (1)..(1): Any amino acid
XKHQDQAVTSSAHHRGGHGVPHGKLLKQKSEEPSVSIPFLQTALLRSSGSLGHRPSQEMDKMLKNQATSATSEKDNDDDQSDKGTYTIELENPNSEEVEARKMIDKVTASSFYKLLYQT

SEQ ID NO: 14041 - protein, 173 aa, Homo sapiens
  Payload ID: 2728
  Gene Symbol: CEP170
  Gene Name: centrosomal protein 170kDa
  ENSP ID: ENSP00000428996
  MOD_RES (1)..(1): Any amino acid
XDGTQSDSENAGAHRRCSKRATLEEHLRRHHSEHKKLQKVQATEKHQDQAVVFGVDDNQDYNRPVINEKHKDLIKDWALSSAAAVMEERKPLTTSGFHHSEEGTSSSGSKRWVSQWASLAANHTRHDQEERIMEFSAPLPLENGILFLSFILYPFFLLFLHFSLFLLLFSAFL

SEQ ID NO: 14042 - protein, 103 aa, Homo sapiens
  Payload ID: 2728
  Gene Symbol: CEP170
  Gene Name: centrosomal protein 170kDa
  ENSP ID: ENSP00000430112
MPTSSSFKHRIKEQEDYIRDWTAHREEIARISQDLALIAREINDVAGEIDSVTSSGTAPSTTLVDRVFDESLNFRKIPPLVHSKTPEGNNGRSGDPRPQAAEP

SEQ ID NO: 14043 - protein, 293 aa, Homo sapiens
  Payload ID: 2728
  Gene Symbol: CEP170
  Gene Name: centrosomal protein 170kDa
  ENSP ID: ENSP00000430142
MPTSSSFKHRIKEQEDYIRDWTAHREEIARISQDLALIAREINDVAGEIDSVTSSGTAPSTTLVDRVFDESLNFRKIPPLVHSKTPEGNNGRSGDPRPQAAEPPDHLTITRRRTWSRDEVMGDNLLLSSVFQFSKKIRQSIDKTAGKIRILFKDKDRNWDDIESKLRAESEVPIVKTSSMEISSILQELKRVEKQLQAINAMIDPDGTLEALNNMGFPSAMLPSPPKQKSSPVNNHHSPGQTPTLGQPEARALHPAAVSAAAEFENAESEADFSIHFNRFNPDGEEEDVTVQE

SEQ ID NO: 14044 - protein, 1486 aa, Homo sapiens; identical to SEQ ID NO: 14033
  Payload ID: 2728
  Gene Symbol: CEP170
  Gene Name: centrosomal protein 170kDa
  Uniprot ID: Q5SW79
  ENSP ID: ENSP00000482707

SEQ ID NO: 14045 - protein, 1584 aa, Homo sapiens; identical to SEQ ID NO: 14031
  Payload ID: 2728
  Gene Symbol: CEP170
  Gene Name: centrosomal protein 170kDa
  Uniprot ID: Q5SW79
  ENSP ID: ENSP00000483344

SEQ ID NO: 14046 - protein, 1460 aa, Homo sapiens; identical to SEQ ID NO: 14032
  Payload ID: 2728
  Gene Symbol: CEP170
  Gene Name: centrosomal protein 170kDa
  Uniprot ID: Q5SW79
  ENSP ID: ENSP00000484359

SEQ ID NO: 14047 - protein, 2062 aa, Homo sapiens
  Payload ID: 2729
  Gene Symbol: CEP192
  Gene Name: centrosomal protein 192kDa
  ENSP ID: ENSP00000317156
MDGCLDTETPTVSIQENVDVASLKPISDSGINFTDAIWSPTCERRTCECHESIEKNKDKTDLPQSVVYQNEEGRWVTDLAYYTSFNSKQNLNVSLSDEMNEDFRSGSEAFDLIAQDEEEFNKEHQFIQPSFGYFIRSPEKREPIALIRKSDVSRGNLEKEMAHLNHDLYSGDLNEQSQAQLSEGSITLQVEAVESTSQVDENDVTLTADKGKTEDTFFMSNKPQRYKDKLPDSGDSMLRISTIASAIAEASVNTDPSQLAAMIKALSNKTRDKTFQEDEKQKDYSHVRHFLPNDLEKSNGSNALDMEKYLKKTEVSRYESALENFSRASMSDTWDLSLPKEQTTQDIHPVDLSATSVSVRAPEENTAAIVYVENGESENQESFRTINSSNSVTNRENNSAVVDVKTCSIDNKLQDVGNDEKATSISTPSDSYSSVRNPRITSLCLLKDCEEIRDNRENQRQNECVSEISNSEKHVTFENHRIVSPKNSDLKNTSPEHGGRGSEDEQESFRPSTSPLSHSSPSEISGTSSSGCALESFGSAAQQQQPPCEQELSPLVCSPAGVSRLTYVSEPESSYPTTATDDALEDRKSDITSELSTTIIQGSPAALEERAMEKLREKVPFQNRGKGTLSSIIQNNSDTRKATETTSLSSKPEYVKPDFRWSKDPSSKSGNLLETSEVGWTSNPEELDPIRLALLGKSGLSCQVGSATSHPVSCQEPIDEDQRISPKDKSTAGREFSGQVSHQTTSENQCTPIPSSTVHSSVADMQNMPAAVHALLTQPSLSAAPFAQRYLGTLPSTGSTTLPQCHAGNATVCGFSGGLPYPAVAGEPVQNSVAVGICLGSNIGSGWMGTSSLCNPYSNTLNQNLLSTTKPFPVPSVGTNCGIEPWDSGVTSGLGSVRVPEELKLPHACCVGIASQTLLSVLNPTDRWLQVSIGVLSISVNGEKVDLSTYRCLVFKNKAIIRPHATEEIKVLFIPSSPGVFRCTFSVASWPCSTDAETIVQAEALASTVTLTAIAESPVIEVETEKKDVLDFGDLTYGGWKALPLKLINRTHATVPIRLIINANAVAWRCFTFSKESVRAPVEVAPCADVVTRLAGPSVVNHMMPASYDGQDPEFLMIWVLFHSPKKQISSSDILDSAEEFSAKVDIEVDSPNPTPVLRSVSLRARAGIARIHAPRDLQTMHFLAKVASSRKQHLPLKNAGNIEVYLDIKVPEQGSHFSVDPKNLLLKPGEEHEVIVSFTPKDPEACEERILKIFVQPFGPQYEVVLKGEVISSGSKPLSPGPCLDIPSILSNKQFLAWGGVPLGRTQLQKLALRNNSASTTQHLRLLIRGQDQDCFQLQNTFGSEQRLTSNCEIRIHPKEDIFISVLFAPTRLSCMLARLEIKQLGNRSQPGIKFTIPLSGYGGTSNLILEGVKKLSDSYMVTVNGLVPGKESKIVFSVRNTGSRAAFVKAVGFKDSQKKVLLDPKVLRIFPDKFVLKERTQENVTLIYNPSDRGINNKTATELSTVYLFGGDEISRQQYRRALLHKPEMIKQILPEHSVLQNINFVEAFQDELLVTEVYDLPQRPNDVQLFYGSMCKIILSVIGEFRDCISSREFLQPSSKASLESTSDLGASGKHGGNVSLDVLPVKGPQGSPLLSRAARPPLDQLASEEPWTVLPEHLILVAPSPCDMAKTGRFQIVNNSVRLLRFELCWPAHCLTVTPQHGCVAPESKLQILVSPNSSLSTKQSMFPWSGLIYIHCDDGQKKIVKVQIREDLTQVELLTRLTSKPFGILSPVSEPSVSHLVKPMTKPPSTKVEIRNKSITFPTTEPGETSESCLELENHGTTDVKWHLSSLAPPYVKGVDESGDVFRATYAAFRCSPISGLLESHGIQKVSITFLPRGRGDYAQFWDVECHPLKEPHMKHTLRFQLSGQSIEAENEPENACLSTDSLIKIDHLVKPRRQAVSEASARIPEQLDVTARGVYAPEDVYRFRPTSVGESRTLKVNLRNNSFITHSLKFLSPREPFYVKHSKYSLRAQHYINMPVQFKPKSAGKFEALLVIQTDEGKSIAIRLIGEALGKN

SEQ ID NO: 14048 - protein, 426 aa, Homo sapiens [sequence omitted]

SEQ ID NO: 14049 - protein, 1931 aa, Homo sapiens
  Payload ID: 2729
  Gene Symbol: CEP192
  Gene Name: centrosomal protein 192kDa
  ENSP ID: ENSP00000423147
KTVLHMDGCLDTETPTVSIQENVDVASLKPISDSGINFTDAIWSPTCERRTCECHESIEKNKDKTDLPQSVVYQNEEGRWVTDLAYYTSFNSKQNLNVSLSDEMNEDFRSGSEAFDLIAQDEEEFNKEHQFIQEENIDAHNTSVALGDTSWGATINYSLLRKSRSTSDLDKDDASYLRLSLGEFFAQRSEALGCLGGGNNVKRPSFGYFIRSPEKREPIALIRKSDVSRGNLEKEMAHLNHDLYSGDLNEQSQAQLSEGSITLQVEAVESTSQVDENDVTLTADKGKTEDTFFMSNKPQRYKDKLPDSGDSMLRISTIASAIAEASVNTDPSQLAAMIKALSNKTRDKTFQEDEKQKDYSHVRHFLPNDLEKSNGSNALDMEKYLKKTEVSRYESALENFSRASMSDTWDLSLPKEQTTQDIHPVDLSATSVSVRAPEENTAAIVYVENGESENQESFRTINSSNSVTNRENNSAVVDVKTCSIDNKLQDVGNDEKATSISTPSDSYSSVRNPRITSLCLLKDCEEIRDNRENQRQNECVSEISNSEKHVTFENHRIVSPKNSDLKNTSPEHGGRGSEDEQESFRPSTSPLSHSSPSEISGTSSSGCALESFGSAAQQQQPPCEQELSPLVCSPAGVSRLTYVSEPESSYPTTATDDALEDRKSDITSELSTTIIQGSPAALEERAMEKLREKVPFQNRGKGTLSSIIQNNSDTRKATETTSLSSKPEYVKPDFRWSKDPSSKSGNLLETSEVGWTSNPEELDPIRLALLGKSGLSCQVGSATSHPVSCQEPIDEDQRISPKDKSTAGREFSGQVSHQTTSENQCTPIPSSTVHSSVADMQNMPAAVHALLTQPSLSAAPFAQRYLGTLPSTGSTTLPQCHAGNATVCGFSGGLPYPAVAGEPVQNSVAVGICLGSNIGSGWMGTSSLCNPYSNTLNQNLLSTTKPFPVPSVGTNCGIEPWDSGVTSGLGSVRVPEELKLPHACCVGIASQTLLSVLNPTDRWLQVSIGVLSISVNGEKVDLSTYRCLVFKNKAIIRPHATEEIKVLFIPSSPGVFRCTFSVASWPCSTDAETIVQAEALASTVTLTAIAESPVIEVETEKKDVLDFGDLTYGGWKALPLKLINRTHATVPIRLIINANAVAWRCFTFSKESVRAPVEVAPCADVVTRLAGPSVVNHMMPASYDGQDPEFLMIWVLFHSPKKQISSSDILDSAEEFSAKVDIEVDSPNPTPVLRSVSLRARAGIARIHAPRDLQTMHFLAKVASSRKQHLPLKNAGNIEVYLDIKVPEQGSHFSVDPKNLLLKPGEEHEVIVSFTPKDPEACEERILKIFVQPFGPQYEVVLKGEVISSGSKPLSPGPCLDIPSILSNKQFLAWGGVPLGRTQLQKLALRNNSASTTQHLRLLIRGQDQDCFQLQNTFGSEQRLTSNCEIRIHPKEDIFISVLFAPTRLSCMLARLEIKQLGNRSQPGIKFTIPLSGYGGTSNLILEGVKKLSDSYMVTVNGLVPGKESKIVFSVRNTGSRAAFVKAVGFKDSQKKVLLDPKVLRIFPDKFVLKERTQENVTLIYNPSDRGINNKTATELSTVYLFGGDEISRQQYRRALLHKPEMIKQILPEHSVLQNINFVEAFQDELLVTEVYDLPQRPNDVQLFYGSMCKIILSVIGEFRDCISSREFLQPSSKASLESTSDLGASGKHGGNVSLDVLPVKGPQGSPLLSRAARPPLDQLASEEPWTVLPEHLILVAPSPCDMAKTGRFQIVNNSVRLLRFELCWPAHCLTVTPQHGCVAPESKLQILVSPNSSLSTKQSMFPWSGLIYIHCDDGQKKIVKVQIREDLTQVELLTRLTSKPFGILSPVSEPSVSHLVKPMTKPPSTKVEIRNKSITFPTTEPGETSESCLELENHGTTDVKWHLSSLAPPYVKRWSLTTLPRLVSIS

SEQ ID NO: 14050 - protein, 407 aa, Homo sapiens
  Payload ID: 2729
  Gene Symbol: CEP192
  Gene Name: centrosomal protein 192kDa
  ENSP ID: ENSP00000424671
  MOD_RES (1)..(1): Any amino acid
XNALSKQSALQMETAGPEEEPAGATESLQGQDLFNRASPLEQAQDSPIDFHLQSWMNNKEPKIVVLDAGKHFEDKTLKSDLSHTSLLENEKLILPTSLEDSSDDDIDDEMFYDDHLEAYFEQLAIPGMIYEDLEGPEPPEKGFKLPTNGLRQANENGSLNCKFQSENNSSLISLDSHSSETTHKESEESQVICLPGTSNSIGTGDSRRYTDGMLPFSSGTWGTEKEIENLKGIVPDLNSECASKDVLVKTLRAIDVKLNSDNFHDANANRGGFDLTDPVKQGAECPHQNKTVLHMDGCLDTETPTVSIQENVDVASLKPISDSGINFTDAIWSPTCERRTCECHESIEKNKDKTDLPQSVVYQNEEGRWVTDLAYYTSFNSKQNLNVSLSDEMNEDFRSGSIIWLFY

SEQ ID NO: 14051 - protein, 2537 aa, Homo sapiens
  Payload ID: 2729
  Gene Symbol: CEP192
  Gene Name: centrosomal protein 192kDa
  Uniprot ID: Q8TEP8
  ENSP ID: ENSP00000427550
MEDFRGIAEESFPSFLTNSLFGNSGILENVTLSSNLGLPVAVSTLARDRSSTDNRYPDIQASYLVEGRFSVPSGSSPGSQSDAEPRERLQLSFQDDDSISRKKSYVESQRLSNALSKQSALQMETAGPEEEPAGATESLQGQDLFNRASPLEQAQDSPIDFHLQSWMNNKEPKIVVLDAGKHFEDKTLKSDLSHTSLLENEKLILPTSLEDSSDDDIDDEMFYDDHLEAYFEQLAIPGMIYEDLEGPEPPEKGFKLPTNGLRQANENGSLNCKFQSENNSSLISLDSHSSETTHKESEESQVICLPGTSNSIGTGDSRRYTDGMLPFSSGTWGTEKEIENLKGIVPDLNSECASKDVLVKTLRAIDVKLNSDNFHDANANRGGFDLTDPVKQGAECPHQNKTVLHMDGCLDTETPTVSIQENVDVASLKPISDSGINFTDAIWSPTCERRTCECHESIEKNKDKTDLPQSVVYQNEEGRWVTDLAYYTSFNSKQNLNVSLSDEMNEDFRSGSEAFDLIAQDEEEFNKEHQFIQEENIDAHNTSVALGDTSWGATINYSLLRKSRSTSDLDKDDASYLRLSLGEFFAQRSEALGCLGGGNNVKRPSFGYFIRSPEKREPIALIRKSDVSRGNLEKEMAHLNHDLYSGDLNEQSQAQLSEGSITLQVEAVESTSQVDENDVTLTADKGKTEDTFFMSNKPQRYKDKLPDSGDSMLRISTIASAIAEASVNTDPSQLAAMIKALSNKTRDKTFQEDEKQKDYSHVRHFLPNDLEKSNGSNALDMEKYLKKTEVSRYESALENFSRASMSDTWDLSLPKEQTTQDIHPVDLSATSVSVRAPEENTAAIVYVENGESENQESFRTINSSNSVTNRENNSAVVDVKTCSIDNKLQDVGNDEKATSISTPSDSYSSVRNPRITSLCLLKDCEEIRDNRENQRQNECVSEISNSEKHVTFENHRIVSPKNSDLKNTSPEHGGRGSEDEQESFRPSTSPLSHSSPSEISGTSSSGCALESFGSAAQQQQPPCEQELSPLVCSPAGVSRLTYVSEPESSYPTTATDDALEDRKSDITSELSTTIIQGSPAALEERAMEKLREKVPFQNRGKGTLSSIIQNNSDTRKATETTSLSSKPEYVKPDFRWSKDPSSKSGNLLETSEVGWTSNPEELDPIRLALLGKSGLSCQVGSATSHPVSCQEPIDEDQRISPKDKSTAGREFSGQVSHQTTSENQCTPIPSSTVHSSVADMQNMPAAVHALLTQPSLSAAPFAQRYLGTLPSTGSTTLPQCHAGNATVCGFSGGLPYPAVAGEPVQNSVAVGICLGSNIGSGWMGTSSLCNPYSNTLNQNLLSTTKPFPVPSVGTNCGIEPWDSGVTSGLGSVRVPEELKLPHACCVGIASQTLLSVLNPTDRWLQVSIGVLSISVNGEKVDLSTYRCLVFKNKAIIRPHATEEIKVLFIPSSPGVFRCTFSVASWPCSTDAETIVQAEALASTVTLTAIAESPVIEVETEKKDVLDFGDLTYGGWKALPLKLINRTHATVPIRLIINANAVAWRCFTFSKESVRAPVEVAPCADVVTRLAGPSVVNHMMPASYDGQDPEFLMIWVLFHSPKKQISSSDILDSAEEFSAKVDIEVDSPNPTPVLRSVSLRARAGIARIHAPRDLQTMHFLAKVASSRKQHLPLKNAGNIEVYLDIKVPEQGSHFSVDPKNLLLKPGEEHEVIVSFTPKDPEACEERILKIFVQPFGPQYEVVLKGEVISSGSKPLSPGPCLDIPSILSNKQFLAWGGVPLGRTQLQKLALRNNSASTTQHLRLLIRGQDQDCFQLQNTFGSEQRLTSNCEIRIHPKEDIFISVLFAPTRLSCMLARLEIKQLGNRSQPGIKFTIPLSGYGGTSNLILEGVKKLSDSYMVTVNGLVPGKESKIVFSVRNTGSRAAFVKAVGFKDSQKKVLLDPKVLRIFPDKFVLKERTQENVTLIYNPSDRGINNKTATELSTVYLFGGDEISRQQYRRALLHKPEMIKQILPEHSVLQNINFVEAFQDELLVTEVYDLPQRPNDVQLFYGSMCKIILSVIGEFRDCISSREFLQPSSKASLESTSDLGASGKHGGNVSLDVLPVKGPQGSPLLSRAARPPLDQLASEEPWTVLPEHLILVAPSPCDMAKTGRFQIVNNSVRLLRFELCWPAHCLTVTPQHGCVAPESKLQILVSPNSSLSTKQSMFPWSGLIYIHCDDGQKKIVKVQIREDLTQVELLTRLTSKPFGILSPVSEPSVSHLVKPMTKPPSTKVEIRNKSITFPTTEPGETSESCLELENHGTTDVKWHLSSLAPPYVKGVDESGDVFRATYAAFRCSPISGLLESHGIQKVSITFLPRGRGDYAQFWDVECHPLKEPHMKHTLRFQLSGQSIEAENEPENACLSTDSLIKIDHLVKPRRQAVSEASARIPEQLDVTARGVYAPEDVYRFRPTSVGESRTLKVNLRNNSFITHSLKFLSPREPFYVKHSKYSLRAQHYINMPVQFKPKSAGKFEALLVIQTDEGKSIAIRLIGEALGKN

SEQ ID NO: 14052 - protein, 1237 aa, Homo sapiens
  Payload ID: 2729
  Gene Symbol: CEP192
  Gene Name: centrosomal protein 192kDa
  ENSP ID: ENSP00000466258
MEDFRGIAEESFPSFLTNSLFGNSGILENVTLSSNLGLPVAVSTLARDRSSTDNRYPDIQASYLVEGRFSVPSGSSPGSQSDAEPRERLQLSFQDDDSISRKKSYVESQRLSNALSKQSALQMETAGPEEEPAGATESLQGQDLFNRASPLEQAQDSPIDFHLQSWMNNKEPKIVVLDAGKHFEDKTLKSDLSHTSLLENEKLILPTSLEDSSDDDIDDEMFYDDHLEAYFEQLAIPGMIYEDLEGPEPPEKGFKLPTNGLRQANENGSLNCKFQSENNSSLISLDSHSSETTHKESEESQVICLPGTSNSIGTGDSRRYTDGEFFAQRSEALGCLGGGNNVKRPSFGYFIRSPEKREPIALIRKSDVSRGNLEKEMAHLNHDLYSGDLNEQSQAQLSEGSITLQVEAVESTSQVDENDVTLTADKGKTEDTFFMSNKPQRYKDKLPDSGDSMLRISTIASAIAEASVNTDPSQLAAMIKALSNKTRDKTFQEDEKQKDYSHVRHFLPNDLEKSNGSNALDMEKYLKKTEVSRYESALENFSRASMSDTWDLSLPKEQTTQDIHPVDLSATSVSVRAPEENTAAIVYVENGESENQESFRTINSSNSVTNRENNSAVVDVKTCSIDNKLQDVGNDEKATSISTPSDSYSSVRNPRITSLCLLKDCEEIRDNRENQRQNECVSEISNSEKHVTFENHRIVSPKNSDLKNTSPEHGGRGSEDEQESFRPSTSPLSHSSPSEISGTSSSGCALESFGSAAQQQQPPCEQELSPLVCSPAGVSRLTYVSEPESSYPTTATDDALEDRKSDITSELSTTIIQGSPAALEERAMEKLREKVPFQNRGKGTLSSIIQNNSDTRKATETTSLSSKPEYVKPDFRWSKDPSSKSGNLLETSEVGWTSNPEELDPIRLALLGKSGLSCQVGSATSHPVSCQEPIDEDQRISPKDKSTAGREFSGQVSHQTTSENQCTPIPSSTVHSSVADMQNMPAAVHALLTQPSLSAAPFAQRYLGTLPSTGSTTLPQCHAGNATVCGFSGGLPYPAVAGEPVQNSVAVGICLGSNIGSGWMGTSSLCNPYSNTLNQNLLSTTKPFPVPSVGTNCGIEPWDSGVTSGLGSVRVPEELKLPHACCVGIASQTLLSVLNPTDRWLQVSIGVLSISVNGEKVDLSTYRCLVFKNKAIIRPHATEEIKVLFIPSSPGVFRCTFSVASWPCSTDAETIVQAEALASTVTLTAIAESPVIE

SEQ ID NO: 14053 - protein, 2076 aa, Homo sapiens
  Payload ID: 2729
  Gene Symbol: CEP192
  Gene Name: centrosomal protein 192kDa
  ENSP ID: ENSP00000467038
  MOD_RES (1)..(1): Any amino acid
XGAECPHQNKTVLHMDGCLDTETPTVSIQENVDVASLKPISDSGINFTDAIWSPTCERRTCECHESIEKNKDKTDLPQSVVYQNEEGRWVTDLAYYTSFNSKQNLNVSLSDEMNEDFRSGSEAFDLIAQDEEEFNKEHQFIQPSFGYFIRSPEKREPIALIRKSDVSRGNLEKEMAHLNHDLYSGDLNEQSQAQLSEGSITLQVEAVESTSQVDENDVTLTADKGKTEDTFFMSNKPQRYKDKLPDSGDSMLRISTIASAIAEASVNTDPSQLAAMIKALSNKTRDKTFQEDEKQKDYSHVRHFLPNDLEKSNGSNALDMEKYLKKTEVSRYESALENFSRASMSDTWDLSLPKEQTTQDIHPVDLSATSVSVRAPEENTAAIVYVENGESENQESFRTINSSNSVTNRENNSAVVDVKTCSIDNKLQDVGNDEKATSISTPSDSYSSVRNPRITSLCLLKDCEEIRDNRENQRQNECVSEISNSEKHVTFENHRIVSPKNSDLKNTSPEHGGRGSEDEQESFRPSTSPLSHSSPSEISGTSSSGCALESFGSAAQQQQPPCEQELSPLVCSPAGVSRLTYVSEPESSYPTTATDDALEDRKSDITSELSTTIIQGSPAALEERAMEKLREKVPFQNRGKGTLSSIIQNNSDTRKATETTSLSSKPEYVKPDFRWSKDPSSKSGNLLETSEVGWTSNPEELDPIRLALLGKSGLSCQVGSATSHPVSCQEPIDEDQRISPKDKSTAGREFSGQVSHQTTSENQCTPIPSSTVHSSVADMQNMPAAVHALLTQPSLSAAPFAQRYLGTLPSTGSTTLPQCHAGNATVCGFSGGLPYPAVAGEPVQNSVAVGICLGSNIGSGWMGTSSLCNPYSNTLNQNLLSTTKPFPVPSVGTNCGIEPWDSGVTSGLGSVRVPEELKLPHACCVGIASQTLLSVLNPTDRWLQVSIGVLSISVNGEKVDLSTYRCLVFKNKAIIRPHATEEIKVLFIPSSPGVFRCTFSVASWPCSTDAETIVQAEALASTVTLTAIAESPVIEVETEKKDVLDFGDLTYGGWKALPLKLINRTHATVPIRLIINANAVAWRCFTFSKESVRAPVEVAPCADVVTRLAGPSVVNHMMPASYDGQDPEFLMIWVLFHSPKKQISSSDILDSAEEFSAKVDIEVDSPNPTPVLRSVSLRARAGIARIHAPRDLQTMHFLAKVASSRKQHLPLKNAGNIEVYLDIKVPEQGSHFSVDPKNLLLKPGEEHEVIVSFTPKDPEACEERILKIFVQPFGPQYEVVLKGEVISSGSKPLSPGPCLDIPSILSNKQFLAWGGVPLGRTQLQKLALRNNSASTTQHLRLLIRGQDQDCFQLQNTFGSEQRLTSNCEIRIHPKEDIFISVLFAPTRLSCMLARLEIKQLGNRSQPGIKFTIPLSGYGGTSNLILEGVKKLSDSYMVTVNGLVPGKESKIVFSVRNTGSRAAFVKAVGFKDSQKKVLLDPKVLRIFPDKFVLKERTQENVTLIYNPSDRGINNKTATELSTVYLFGGDEISRQQYRRALLHKPEMIKQILPEHSVLQNINFVEAFQDELLVTEVYDLPQRPNDVQLFYGSMCKIILSVIGEFRDCISSREFLQPSSKASLESTSDLGASGKHGGNVSLDVLPVKGPQGSPLLSRAARPPLDQLASEEPWTVLPEHLILVAPSPCDMAKTGRFQIVNNSVRLLRFELCWPAHCLTVTPQHGCVAPESKLQILVSPNSSLSTKQSMFPWSGLIYIHCDDGQKKIVKVQIREDLTQVELLTRLTSKPFGILSPVSEPSVSHLVKPMTKPPSTKVEIRNKSITFPTTEPGETSESCLELENHGTTDVKWHLSSLAPPYVKGVDESGDVFRATYAAFRCSPISGLLESHGIQKVSITFLPRGRGDYAQFWDVECHPLKEPHMKHTLRFQLSGQSIEAENEPENACLSTDSLIKIDHLVKPRRQAVSEASARIPEQLDVTARGVYAPEDVYRFRPTSVGESRTLKVNLRNNSFITHSLKFLSPREPFYVKHSKYSLRAQHYINMPVQFKPKSAGKFEALLVIQTDEGKSIAIRLIGEALGKN

SEQ ID NO: 14054 - protein, 900 aa, Homo sapiens
  Payload ID: 2729
  Gene Symbol: CEP192
  Gene Name: centrosomal protein 192kDa
  ENSP ID: ENSP00000467297
  MOD_RES (1)..(1): Any amino acid
XGVFRCTFSVASWPCSTDAETIVQAEALASTVTLTAIAESPVIEVETEKKDVLDFGDLTYGGWKALPLKLINRTHATVPIRLIINANAVAWRCFTFSKESVRAPVEVAPCADVVTRLAGPSVVNHMMPASYDGQDPEFLMIWVLFHSPKKQISSSDILDSAEEFSAKVDIEVDSPNPTPVLRSVSLRARAGIARIHAPRDLQTMHFLAKVASSRKQHLPLKNAGNIEVYLDIKVPEQGSHFSVDPKNLLLKPGEEHEVIVSFTPKDPEACEERILKIFVQPFGPQYEVVLKGEVISSGSKPLSPGPCLDIPSILSNKQFLAWGGVPLGRTQLQKLALRNNSASTTQHLRLLIRGQDQDCFQLQNTFGSEQRLTSNCEIRIHPKEDIFISVLFAPTRLSCMLARLEIKQLGNRSQPGIKFTIPLSGYGGTSNLILEGVKKLSDSYMVTVNGLVPGKESKIVFSVRNTGSRAAFVKAVGFKDSQKKVLLDPKVLRIFPDKFVLKERTQENVTLIYNPSDRGINNKTATELSTVYLFGGDEISRQQYRRALLHKPEMIKQILPEHSVLQNINFVEAFQDELLVTEVYDLPQRPNDVQLFYGSMCKIILSVIGEFRDCISSREFLQPSSKASLESTSDLGASGKHGGNVSLDVLPVKGPQGSPLLSRAARPPLDQLASEEPWTVLPEHLILVAPSPCDMAKTGRFQIVNNSVRLLRFELCWPAHCLTVTPQHGCVAPESKLQILVSPNSSLSTKQSMFPWSGLIYIHCDDGQKKIVKVQIREDLTQVELLTRLTSKPFGILSPVSEPSVSHLVKPMTKPPSTKVEIRNKSITFPTTEPGETSESCLELENHGTTDVKWHLSSLAPPYVKGVDESGDVFRATYAAFRCSPISGLLESHGIQKQAA

SEQ ID NO: 14055 - protein, 47 aa, Homo sapiens
  Payload ID: 2729
  Gene Symbol: CEP192
  Gene Name: centrosomal protein 192kDa
  ENSP ID: ENSP00000468047
NTGSRAAFVKAVGFKDSQKKVLLDPKVLRIFPDKFVLKERTQEGPVT

SEQ ID NO: 14056 - protein, 73 aa, Homo sapiens
  Payload ID: 2729
  Gene Symbol: CEP192
  Gene Name: centrosomal protein 192kDa
  ENSP ID: ENSP00000468242
  MOD_RES (1)..(1): Any amino acid
XPVPSVGTNCGIEPWDSGVTSGLGSVRVPEELKLPHACCVGIASQTLLSVLNPTDRWLQVSIGVLSISVNGEK

SEQ ID NO: 14057 - protein, 70 aa, Homo sapiens
  Payload ID: 2729
  Gene Symbol: CEP192
  Gene Name: centrosomal protein 192kDa
  ENSP ID: ENSP00000476907
MEDFRGIAEESFPSFLTNSLFGNSGILENVTLSSNLGLPVAVSTLARDRSSTDNRIWQHRFSKDIYELHF

SEQ ID NO: 14058 - protein, 128 aa, Homo sapiens
  Payload ID: 2730
  Gene Symbol: CEP19
  Gene Name: centrosomal protein 19kDa
  ENSP ID: ENSP00000382823
MSFLYSSKDCTRAAEQLKNNPRHKSYLEQVSLRQLEKLFSFLRGYLSGQSLAETMEQIQRETTIDPEEDLNKLDDKELAKRKSIMDELFEKNQKKKDDPNFVYDIEVEFPQDDQLQSCGWDTESADEF

SEQ ID NO: 14059 - protein, 167 aa, Homo sapiens
  Payload ID: 2730
  Gene Symbol: CEP19
  Gene Name: centrosomal protein 19kDa
  Uniprot ID: Q96LK0
  ENSP ID: ENSP00000387209
MYMGMMCTAKKCGIRFQPPAIILIYESEIKGKIRQRIMPVRNFSKFSDCTRAAEQLKNNPRHKSYLEQVSLRQLEKLFSFLRGYLSGQSLAETMEQIQRETTIDPEEDLNKLDDKELAKRKSIMDELFEKNQKKKDDPNFVYDIEVEFPQDDQLQSCGWDTESADEF

SEQ ID NO: 14060 - protein, 339 aa, Homo sapiens
  Payload ID: 2731
  Gene Symbol: CEP250
  Gene Name: centrosomal protein 250kDa
  ENSP ID: ENSP00000380658
METRSPGLNNMKPQSLQLVLEEQVLALQQQMAENQAASWRKLKNSQEAQQRQATLVRKLQAKVLQYRSWCQELEKRLEATGGPIPQRWENVEEPNLDELLVRLEEEQQRCESLAEVNTQLRLHMEKADVVNKALREDVEKLTVDWSRARDELMRKESQWQMEQEFFKGYLKGEHGRLLSLWREVVTFRRHFLEMKSATDRDLMELKAEHVRLSGSLLTCCLRLTVGAQSREPNGSGRMDGREPAQLLLLLAKTQELEKEAHERSQELIQLKSQGDLEKAELQDRVTELSALLTQSQKQNEDYEKMIKALRETVEILVHDPLLWKGVGRGLVGSLCFMDR

SEQ ID NO: 14061 - protein, 2442 aa, Homo sapiens
  Payload ID: 2731
  Gene Symbol: CEP250
  Gene Name: centrosomal protein 250kDa
  Uniprot ID: Q9BV73
  ENSP ID: ENSP00000380661
METRSPGLNNMKPQSLQLVLEEQVLALQQQMAENQAASWRKLKNSQEAQQRQATLVRKLQAKVLQYRSWCQELEKRLEATGGPIPQRWENVEEPNLDELLVRLEEEQQRCESLAEVNTQLRLHMEKADVVNKALREDVEKLTVDWSRARDELMRKESQWQMEQEFFKGYLKGEHGRLLSLWREVVTFRRHFLEMKSATDRDLMELKAEHVRLSGSLLTCCLRLTVGAQSREPNGSGRMDGREPAQLLLLLAKTQELEKEAHERSQELIQLKSQGDLEKAELQDRVTELSALLTQSQKQNEDYEKMIKALRETVEILETNHTELMEHEASLSRNAQEEKLSLQQVIKDITQVMVEEGDNIAQGSGHENSLELDSSIFSQFDYQDADKALTLVRSVLTRRRQAVQDLRQQLAGCQEAVNLLQQQHDQWEEEGKALRQRLQKLTGERDTLAGQTVDLQGEVDSLSKERELLQKAREELRQQLEVLEQEAWRLRRVNVELQLQGDSAQGQKEEQQEELHLAVRERERLQEMLMGLEAKQSESLSELITLREALESSHLEGELLRQEQTEVTAALARAEQSIAELSSSENTLKTEVADLRAAAVKLSALNEALALDKVGLNQQLLQLEEENQSVCSRMEAAEQARNALQVDLAEAEKRREALWEKNTHLEAQLQKAEEAGAELQADLRDIQEEKEEIQKKLSESRHQQEAATTQLEQLHQEAKRQEEVLARAVQEKEALVREKAALEVRLQAVERDRQDLAEQLQGLSSAKELLESSLFEAQQQNSVIEVTKGQLEVQIQTVTQAKEVIQGEVRCLKLELDTERSQAEQERDAAARQLAQAEQEGKTALEQQKAAHEKEVNQLREKWEKERSWHQQELAKALESLEREKMELEMRLKEQQTEMEAIQAQREEERTQAESALCQMQLETEKERVSLLETLLQTQKELADASQQLERLRQDMKVQKLKEQETTGILQTQLQEAQRELKEAARQHRDDLAALQEESSSLLQDKMDLQKQVEDLKSQLVAQDDSQRLVEQEVQEKLRETQEYNRIQKELEREKASLTLSLMEKEQRLLVLQEADSIRQQELSALRQDMQEAQGEQKELSAQMELLRQEVKEKEADFLAQEAQLLEELEASHITEQQLRASLWAQEAKAAQLQLRLRSTESQLEALAAEQQPGNQAQAQAQLASLYSALQQALGSVCESRPELSGGGDSAPSVWGLEPDQNGARSLFKRGPLLTALSAEAVASALHKLHQDLWKTQQTRDVLRDQVQKLEERLTDTEAEKSQVHTELQDLQRQLSQNQEEKSKWEGKQNSLESELMELHETMASLQSRLRRAELQRMEAQGERELLQAAKENLTAQVEHLQAAVVEARAQASAAGILEEDLRTARSALKLKNEEVESERERAQALQEQGELKVAQGKALQENLALLTQTLAEREEEVETLRGQIQELEKQREMQKAALELLSLDLKKRNQEVDLQQEQIQELEKCRSVLEHLPMAVQEREQKLTVQREQIRELEKDRETQRNVLEHQLLELEKKDQMIESQRGQVQDLKKQLVTLECLALELEENHHKMECQQKLIKELEGQRETQRVALTHLTLDLEERSQELQAQSSQIHDLESHSTVLARELQERDQEVKSQREQIEELQRQKEHLTQDLERRDQELMLQKERIQVLEDQRTRQTKILEEDLEQIKLSLRERGRELTTQRQLMQERAEEGKGPSKAQRGSLEHMKLILRDKEKEVECQQEHIHELQELKDQLEQQLQGLHRKVGETSLLLSQREQEIVVLQQQLQEAREQGELKEQSLQSQLDEAQRALAQRDQELEALQQEQQQAQGQEERVKEKADALQGALEQAHMTLKERHGELQDHKEQARRLEEELAVEGRRVQALEEVLGDLRAESREQEKALLALQQQCAEQAQEHEVETRALQDSWLQAQAVLKERDQELEALRAESQSSRHQEEAARARAEALQEALGKAHAALQGKEQHLLEQAELSRSLEASTATLQASLDACQAHSRQLEEALRIQEGEIQDQDLRYQEDVQQLQQALAQRDEELRHQQEREQLLEKSLAQRVQENMIQEKQNLGQEREEEEIRGLHQSVRELQLTLAQKEQEILELRETQQRNNLEALPHSHKTSPMEEQSLKLDSLEPRLQRELERLQAALRQTEAREIEWREKAQDLALSLAQTKASVSSLQEVAMFLQASVLERDSEQQRLQDELELTRRALEKERLHSPGATSTAELGSRGEQGVQLGEVSGVEAEPSPDGMEKQSWRQRLEHLQQAVARLEIDRSRLQRHNVQLRSTLEQVERERRKLKREAMRAAQAGSLEISKATASSPTQQDGRGQKNSDAKCVAELQKEVVLLQAQLTLERKQKQDYITRSAQTSRELAGLHHSLSHSLLAVAQAPEATVLEAETRRLDESLTQSLTSPGPVLLHPSPSTTQAASR

SEQ ID NO: 14062 - protein, 138 aa, Homo sapiens
  Payload ID: 2731
  Gene Symbol: CEP250
  Gene Name: centrosomal protein 250kDa
  ENSP ID: ENSP00000394346
ITEQQLRASLWAQEAKAAQLQLRLRSTESQLEALAAEQQPGNQAQAQAQLASLYSALQQALGSVCESRPELSGGGDSAPSVWGLEPDQNGARSLFKRGPLLTALSAEAVASALHKLHQDLWKTQQTRRNLSGKESRTP

SEQ ID NO: 14063 - protein, 877 aa, Homo sapiens
  Payload ID: 2731
  Gene Symbol: CEP250
  Gene Name: centrosomal protein 250kDa
  ENSP ID: ENSP00000395992
LEKDRETQRNVLEHQLLELEKKDQMIESQRGQVQDLKKQLVTLECLALELEENHHKMECQQKLIKELEGQRETQRVALTHLTLDLEERSQELQAQSSQIHDLESHSTVLARELQERDQEVKSQREQIEELQRQKEHLTQDLERRDQELMLQKERIQVLEDQRTRQTKILEEDLEQIKLSLRERGRELTTQRQLMQERAEEGKGPSKAQRGSLEHMKLILRDKEKEVECQQEHIHELQELKDQLEQQLQGLHRKVGETSLLLSQREQEIVVLQQQLQEAREQGELKEQSLQSQLDEAQRALAQRDQELEALQQEQQQAQGQEERVKEKADALQGALEQAHMTLKERHGELQDHKEQARRLEEELAVEGRRVQALEEVLGDLRAESREQEKALLALQQQCAEQAQEHEVETRALQDSWLQAQAVLKERDQELEALRAESQSSRHQEEAARARAEALQEALGKAHAALQGKEQHLLEQAELSRSLEASTATLQASLDACQAHSRQLEEALRIQEGEIQDQDLRYQEDVQQLQQALAQRDEELRHQQEREQLLEKSLAQRVQENMIQEKQNLGQEREEEEIRGLHQSVRELQLTLAQKEQEILELRETQQRNNLEALPHSHKTSPMEEQSLKLDSLEPRLQRELERLQAALRQTEAREIEWREKAQDLALSLAQTKASVSSLQEVAMFLQASVLERDSEQQRLQDELELTRRALEKERLHSPGATSTAELGSRGEQGVQLGEVSGVEAEPSPDGMEKQSWRQRLEHLQQAVARLEIDRSRLQRHNVQLRSTLEQVVLLQAQLTLERKQKQDYITRSAQTSRELAGLHHSLSHSLLAVAQAPEATVLEAETRRLDESLTQSLTSPGPVLLHPSPSTTQAASR

SEQ ID NO: 14064 - protein, 164 aa, Homo sapiens
  Payload ID: 2731
  Gene Symbol: CEP250
  Gene Name: centrosomal protein 250kDa
  ENSP ID: ENSP00000398747
METRSPGLNNMKPQSLQLVLEEQVLALQQQMAENQAASWRKLKNSQEAQQRQATLVRKLQAKVLQYRSWCQELEKRLEATGGPIPQRWENVEEPNLDELLVRLEEEQQRCESLAEVNTQLRLHMEKADVVNKALREDVEKLTVDWSRARDELMRKESQWQMEQE

SEQ ID NO: 14065 - protein, 210 aa, Homo sapiens
  Payload ID: 2731
  Gene Symbol: CEP250
  Gene Name: centrosomal protein 250kDa
  ENSP ID: ENSP00000400200
  MOD_RES (1)..(1): Any amino acid
XGGTAGGAAPGCPGEGASGCWEDESNVLENASIEPGICQEMLMGLEAKQSESLSELITLREALESSHLEGELLRQEQTEVTAALARAEQSIAELSSSENTLKTEVADLRAAAVKLSALNEALALDKVGLNQQLLQLEEENQSVCSRMEAAEQARNALQVDLAEAEKRREALWEKNTHLEAQLQKAEEAGAELQADLRDIQEEKEEIQKKL

SEQ ID NO: 14066 - protein, 684 aa, Homo sapiens
  Payload ID: 2731
  Gene Symbol: CEP250
  Gene Name: centrosomal protein 250kDa
  ENSP ID: ENSP00000413827
METRSPGLNNMKPQSLQLVLEEQVLALQQQMAENQAASWRKLKNSQEAQQRQATLVRKLQAKVLQYRSWCQELEKRLEATGGPIPQRWENVEEPNLDELLVRLEEEQQRCESLAEVNTQLRLHMEKADVVNKALREDVEKLTVDWSRARDELMRKESQWQMEQEFFKGYLKGEHGRLLSLWREVVTFRRHFLEMKSATDRDLMELKAEHVRLSGSLLTCCLRLTVGAQSREPNGSGRMDGREPAQLLLLLAKTQELEKEAHERSQELIQLKSQGDLEKAELQDRVTELSALLTQSQKQNEDYEKMIKALRETVEILTNHTELMEHEASLSRNAQEEKLSLQQVIKDITQVMVEEGDNIAQGSGHENSLELDSSIFSQFDYQDADKALTLVRSVLTRRRQAVQDLRQQLAGCQEAVNLLQQQHDQWEEEGKALRQRLQKLTGERDTLAGQTVDLQGEVDSLSKERELLQKAREELRQQLEVLEQEAWRLRRVNVELQLQGDSAQGQKEEQQEELHLAVRERERLQEMLMGLEAKQSESLSELITLREALESSHLEGELLRQEQTEVTAALARAEQSIAELSSSENTLKTEVADLRAAAVKLSALNEALALDKVGLNQQLLQLEEENQSVCSRMEAAEQARNALQVDLAEAEKRREALWEKNTHLEAQLQKAEEAGAELQADLRDI

SEQ ID NO: 14067 - protein, 114 aa, Homo sapiens
  Payload ID: 2731
  Gene Symbol: CEP250
  Gene Name: centrosomal protein 250kDa
  ENSP ID: ENSP00000414651
METRSPGLNNMKPQSLQLVLEEQVLALQQQMAENQAASWRKLKNSQEAQQRQATLVRKLQAKVLQYRSWCQELEKRLEATGGPIPQRWENVEEPNLDELLVRLEEEQQRCESLA

SEQ ID NO: 14068 - protein, 538 aa, Homo sapiens
  Payload ID: 2731
  Gene Symbol: CEP250
  Gene Name: centrosomal protein 250kDa
  ENSP ID: ENSP00000419137
METRSPGLNNMKPQSLQLVLEEQVLALQQQMAENQAASWRKLKNSQEAQQRQATLVRKLQAKVLQYRSWCQELEKRLEATGGPIPQRWENVEEPNLDELLVRLEEEQQRCESLAEVNTQLRLHMEKADVVNKALREDVEKLTVDWSRARDELMRKESQWQMEQEFFKGYLKGEHGRLLSLWREVVTFRRHFLEMKSATDRDLMELKAEHVRLSGSLLTCCLRLTVGAQSREPNGSGRMDGREPAQLLLLLAKTQELEKEAHERSQELIQLKSQGDLEKAELQDRVTELSALLTQSQKQNEDYEKMIKALRETVEILETNHTELMEHEASLSRNAQEEKLSLQQVIKDITQVMVEEGDNIAQGSGHENSLELDSSIFSQFDYQDADKALTLVRSVLTRRRQAVQDLRQQLAGCQEAVNLLQQQHDQWEEEGKALRQRLQKLTGERDTLAGQTVDLQGEVDSLSKERELLQKAREELRQQLEVLEQEAWRLRRVNVELQLQGDSAQGQKEEQQEELHLAVRERERLQSSQLQSCRVLKTP

SEQ ID NO: 14069 - protein, 34 aa, Homo sapiens
  Payload ID: 2731
  Gene Symbol: CEP250
  Gene Name: centrosomal protein 250kDa
  ENSP ID: ENSP00000482323
DGRGQKNSDAKCVAELQKEGRAHGKWHADSDTGH

SEQ ID NO: 14070 - protein, 2481 aa, Homo sapiens
  Payload ID: 2732
  Gene Symbol: CEP290
  Gene Name: centrosomal protein 290kDa
  ENSP ID: ENSP00000308021
MPPNINWKEIMKVDPDDLPRQEELADNLLISLSKVEVNELKSEKQENVIHLFRITQSLMKMKAQEVELALEEVEKAGEEQAKFENQLKTKVMKLENELEMAQQSAGGRDTRFLRNEICQLEKQLEQKDRELEDMEKELEKEKKVNEQLALRNEEAENENSKLRRENKRLKKKNEQLCQDIIDYQKQIDSQKETLLSRRGEDSDYRSQLSKKNYELIQYLDEIQTLTEANEKIEVQNQEMRKNLEESVQEMEKMTDEYNRMKAIVHQTDNVIDQLKKENDHYQLQVQELTDLLKSKNEEDDPIMVAVNAKVEEWKLILSSKDDEIIEYQQMLHNLREKLKNAQLDADKSNVMALQQGIQERDSQIKMLTEQVEQYTKEMEKNTCIIEDLKNELQRNKGASTLSQQTHMKIQSTLDILKEKTKEAERTAELAEADAREKDKELVEALKRLKDYESGVYGLEDAVVEIKNCKNQIKIRDREIEILTKEINKLELKISDFLDENEALRERVGLEPKTMIDLTEFRNSKHLKQQQYRAENQILLKEASIESLEEERLDLKKKIRQMAQERGKRSATSGLTTEDLNLTENISQGDRISERKLDLLSLKNMSEAQSKNEFLSRELIEKERDLERSRTVIAKFQNKLKELVEENKQLEEGMKEILQAIKEMQKDPDVKGGETSLIIPSLERLVNAIESKNAEGIFDASLHLKAQVDQLTGRNEELRQELRESRKEAINYSQQLAKANLKIDHLEKETSLLRQSEGSNVVFKGIDLPDGIAPSSASIINSQNEYLIHLLQELENKEKKLKNLEDSLEDYNRKFAVIRHQQSLLYKEYLSEKETWKTESKTIKEEKRKLEDQVQQDAIKVKEYNNLLNALQMDSDEMKKILAENSRKITVLQVNEKSLIRQYTTLVELERQLRKENEKQKNELLSMEAEVCEKIGCLQRFKEMAIFKIAALQKVVDNSVSLSELELANKQYNELTAKYRDILQKDNMLVQRTSNLEHLECENISLKEQVESINKELEITKEKLHTIEQAWEQETKLGNESSMDKAKKSITNSDIVSISKKITMLEMKELNERQRAEHCQKMYEHLRTSLKQMEERNFELETKFAELTKINLDAQKVEQMLRDELADSVSKAVSDADRQRILELEKNEMELKVEVSKLREISDIARRQVEILNAQQQSRDKEVESLRMQLLDYQAQSDEKSLIAKLHQHNVSLQLSEATALGKLESITSKLQKMEAYNLRLEQKLDEKEQALYYARLEGRNRAKHLRQTIQSLRRQFSGALPLAQQEKFSKTMIQLQNDKLKIMQEMKNSQQEHRNMENKTLEMELKLKGLEELISTLKDTKGAQKVINWHMKIEELRLQELKLNRELVKDKEEIKYLNNIISEYERTISSLEEEIVQQNKFHEERQMAWDQREVDLERQLDIFDRQQNEILNAAQKFEEATGSIPDPSLPLPNQLEIALRKIKENIRIILETRATCKSLEEKLKEKESALRLAEQNILSRDKVINELRLRLPATAEREKLIAELGRKEMEPKSHHTLKIAHQTIANMQARLNQKEEVLKKYQRLLEKAREEQREIVKKHEEDLHILHHRLELQADSSLNKFKQTAWDLMKQSPTPVPTNKHFIRLAEMEQTVAEQDDSLSSLLVKLKKVSQDLERQREITELKVKEFENIKLQLQENHEDEVKKVKAEVEDLKYLLDQSQKESQCLKSELQAQKEANSRAPTTTMRNLVERLKSQLALKEKQQKALSRALLELRAEMTAAAEERIISATSQKEAHLNVQQIVDRHTRELKTQVEDLNENLLKLKEALKTSKNRENSLTDNLNDLNNELQKKQKAYNKILREKEEIDQENDELKRQIKRLTSGLQGKPLTDNKQSLIEELQRKVKKLENQLEGKVEEVDLKPMKEKNAKEELIRWEEGKKWQAKIEGIRNKLKEKEGEVFTLTKQLNTLKDLFAKADKEKLTLQRKLKTTGMTVDQVLGIRALESEKELEELKKRNLDLENDILYMRAHQALPRDSVVEDLHLQNRYLQEKLHALEKQFSKDTYSKPSISGIESDDHCQREQELQKENLKLSSENIELKFQLEQANKDLPRLKNQVRDLKEMCEFLKKEKAEVQRKLGHVRGSGRSGKTIPELEKTIGLMKKVVEKVQRENEQLKKASGILTSEKMANIEQENEKLKAELEKLKAHLGHQLSMHYESKTKGTEKIIAENERLRKELKKETDAAEKLRIAKNNLEILNEKMTVQLEETGKRLQFAESRGPQLEGADSKSWKSIVVTRMYETKLKELETDIAKKNQSITDLKQLVKEATEREQKVNKYNEDLEQQIKILKHVPEGAETEQGLKRELQVLRLANHQLDKEKAELIHQIEANKDQSGAESTIPDADQLKEKIKDLETQLKMSDLEKQHLKEEIKKLKKELENFDPSFFEEIEDLKYNYKEEVKKNILLEEKVKKLSEQLGVELTSPVAASEEFEDEEESPVNFPIY

SEQ ID NO: 14071 - protein, 806 aa, Homo sapiens
  Payload ID: 2732
  Gene Symbol: CEP290
  Gene Name: centrosomal protein 290kDa
  ENSP ID: ENSP00000380938
MPPNINWKEIMKVDPDDLPRQEELADNLLISLSKVEVNELKSEKQENVIHLFRITQSLMKMKAQEVELALEEVEKAGEEQAKFENQLKTKVMKLENELEMAQQSAGGRDTRFLRNEICQLEKQLEQKDRELEDMEKELEKEKKVNEQLALRNEEAENENSKLRRENKRLKKKNEQLCQDIIDYQKQIDSQKETLLSRRGEDSDYRSQLSKKNYELIQYLDEIQTLTEANEKIEVQNQEMRKNLEESVQEMEKMTDEYNRMKAIVHQTDNVIDQLKKENDHYQLQVQELTDLLKSKNEEDDPIMVAVNAKVEEWKLILSSKDDEIIEYQQMLHNLREKLKNAQLDADKSNVMALQQGIQERDSQIKMLTEQVEQYTKEMEKNTCIIEDLKNELQRNKGASTLSQQTHMKIQSTLDILKEKTKEAERTAELAEADAREKDKELVEALKRLKDYESGVYGLEDAVVEIKNCKNQIKIRDREIEILTKEINKLELKISDFLDENEALRERVGLEPKTMIDLTEFRNSKHLKQQQYRAENQILLKEASIESLEEERLDLKKKIRQMAQERGKRSATSGLTTEDLNLTENISQGDRISERKLDLLSLKNMSEAQSKNEFLSRELIEKERDLERSRTVIAKFQNKLKELVEENKQLEEGMKEILQAIKEMQKDPDVKGGETSLIIPSLERLVNAIESKNAEGIFDASLHLKAQVDQLTGRNEELRQELRESRKEAINYSQQLAKANLKIDHLEKETSLLRQSEGSNVVFKGIDLPDGIAPSSASIINSQNEYLIHLLQELENKEKVKEFRRFS

SEQ ID NO: 14072 - protein, 1539 aa, Homo sapiens
  Payload ID: 2732
  Gene Symbol: CEP290
  Gene Name: centrosomal protein 290kDa
  Uniprot ID: O15078
  ENSP ID: ENSP00000446905
MAIFKIAALQKVVDNSVSLSELELANKQYNELTAKYRDILQKDNMLVQRTSNLEHLECENISLKEQVESINKELEITKEKLHTIEQAWEQETKLGNESSMDKAKKSITNSDIVSISKKITMLEMKELNERQRAEHCQKMYEHLRTSLKQMEERNFELETKFAELTKINLDAQKVEQMLRDELADSVSKAVSDADRQRILELEKNEMELKVEVSKLREISDIARRQVEILNAQQQSRDKEVESLRMQLLDYQAQSDEKSLIAKLHQHNVSLQLSEATALGKLESITSKLQKMEAYNLRLEQKLDEKEQALYYARLEGRNRAKHLRQTIQSLRRQFSGALPLAQQEKFSKTMIQLQNDKLKIMQEMKNSQQEHRNMENKTLEMELKLKGLEELISTLKDTKGAQKVINWHMKIEELRLQELKLNRELVKDKEEIKYLNNIISEYERTISSLEEEIVQQNKFHEERQMAWDQREVDLERQLDIFDRQQNEILNAAQKFEEATGSIPDPSLPLPNQLEIALRKIKENIRIILETRATCKSLEEKLKEKESALRLAEQNILSRDKVINELRLRLPATAEREKLIAELGRKEMEPKSHHTLKIAHQTIANMQARLNQKEEVLKKYQRLLEKAREEQREIVKKHEEDLHILHHRLELQADSSLNKFKQTAWDLMKQSPTPVPTNKHFIRLAEMEQTVAEQDDSLSSLLVKLKKVSQDLERQREITELKVKEFENIKLQLQENHEDEVKKVKAEVEDLKYLLDQSQKESQCLKSELQAQKEANSRAPTTTMRNLVERLKSQLALKEKQQKALSRALLELRAEMTAAAEERIISATSQKEAHLNVQQIVDRHTRELKTQVEDLNENLLKLKEALKTSKNRENSLTDNLNDLNNELQKKQKAYNKILREKEEIDQENDELKRQIKRLTSGLQGKPLTDNKQSLIEELQRKVKKLENQLEGKVEEVDLKPMKEKNAKEELIRWEEGKKWQAKIEGIRNKLKEKEGEVFTLTKQLNTLKDLFAKADKEKLTLQRKLKTTGMTVDQVLGIRALESEKELEELKKRNLDLENDILYMRAHQALPRDSVVEDLHLQNRYLQEKLHALEKQFSKDTYSKPSISGIESDDHCQREQELQKENLKLSSENIELKFQLEQANKDLPRLKNQVRDLKEMCEFLKKEKAEVQRKLGHVRGSGRSGKTIPELEKTIGLMKKVVEKVQRENEQLKKASGILTSEKMANIEQENEKLKAELEKLKAHLGHQLSMHYESKTKGTEKIIAENERLRKELKKETDAAEKLRIAKNNLEILNEKMTVQLEETGKRLQFAESRGPQLEGADSKSWKSIVVTRMYETKLKELETDIAKKNQSITDLKQLVKEATEREQKVNKYNEDLEQQIKILKHVPEGAETEQGLKRELQVLRLANHQLDKEKAELIHQIEANKDQSGAESTIPDADQLKEKIKDLETQLKMSDLEKQHLKEEIKKLKKELENFDPSFFEEIEDLKYNYKEEVKKNILLEEKVKKLSEQLGVELTSPVAASEEFEDEEESPVNFPIY

SEQ ID NO: 14073 - protein, 107 aa, Homo sapiens
  Payload ID: 2732
  Gene Symbol: CEP290
  Gene Name: centrosomal protein 290kDa
  ENSP ID: ENSP00000447527
VIHLFRITQSLMKMKAQEVELALEEVEKAGEEQAKFENQLKTKVMKLENELEMAQQSAGGRDTRFLRNEICQLEKQLEQKDRELEDMEKELEKEKKVNEQVKHFFFP

SEQ ID NO: 14074 - protein, 164 aa, Homo sapiens
  Payload ID: 2732
  Gene Symbol: CEP290
  Gene Name: centrosomal protein 290kDa
  ENSP ID: ENSP00000447623
MPPNINWKEIMKVDPDDLPRQEELADNLLISLSKVEVNELKSEKQENVIHLFRITQSLMKMKAQEVELALEEVEKAGEEQAKFENQLKTKVMKLENELEMAQQSAGGRDTRFLRNEICQLEKQLEQKDRELEDMEKELEKEKKVNEQNKRLKKKNEQLCQDIID

SEQ ID NO: 14075 - protein, 2479 aa, Homo sapiens
  Payload ID: 2732
  Gene Symbol: CEP290
  Gene Name: centrosomal protein 290kDa
  Uniprot ID: O15078
  ENSP ID: ENSP00000448012
MPPNINWKEIMKVDPDDLPRQEELADNLLISLSKVEVNELKSEKQENVIHLFRITQSLMKMKAQEVELALEEVEKAGEEQAKFENQLKTKVMKLENELEMAQQSAGGRDTRFLRNEICQLEKQLEQKDRELEDMEKELEKEKKVNEQLALRNEEAENENSKLRRENKRLKKKNEQLCQDIIDYQKQIDSQKETLLSRRGEDSDYRSQLSKKNYELIQYLDEIQTLTEANEKIEVQNQEMRKNLEESVQEMEKMTDEYNRMKAIVHQTDNVIDQLKKENDHYQLQVQELTDLLKSKNEEDDPIMVAVNAKVEEWKLILSSKDDEIIEYQQMLHNLREKLKNAQLDADKSNVMALQQGIQERDSQIKMLTEQVEQYTKEMEKNTCIIEDLKNELQRNKGASTLSQQTHMKIQSTLDILKEKTKEAERTAELAEADAREKDKELVEALKRLKDYESGVYGLEDAVVEIKNCKNQIKIRDREIEILTKEINKLELKISDFLDENEALRERVGLEPKTMIDLTEFRNSKHLKQQQYRAENQILLKEIESLEEERLDLKKKIRQMAQERGKRSATSGLTTEDLNLTENISQGDRISERKLDLLSLKNMSEAQSKNEFLSRELIEKERDLERSRTVIAKFQNKLKELVEENKQLEEGMKEILQAIKEMQKDPDVKGGETSLIIPSLERLVNAIESKNAEGIFDASLHLKAQVDQLTGRNEELRQELRESRKEAINYSQQLAKANLKIDHLEKETSLLRQSEGSNVVFKGIDLPDGIAPSSASIINSQNEYLIHLLQELENKEKKLKNLEDSLEDYNRKFAVIRHQQSLLYKEYLSEKETWKTESKTIKEEKRKLEDQVQQDAIKVKEYNNLLNALQMDSDEMKKILAENSRKITVLQVNEKSLIRQYTTLVELERQLRKENEKQKNELLSMEAEVCEKIGCLQRFKEMAIFKIAALQKVVDNSVSLSELELANKQYNELTAKYRDILQKDNMLVQRTSNLEHLECENISLKEQVESINKELEITKEKLHTIEQAWEQETKLGNESSMDKAKKSITNSDIVSISKKITMLEMKELNERQRAEHCQKMYEHLRTSLKQMEERNFELETKFAELTKINLDAQKVEQMLRDELADSVSKAVSDADRQRILELEKNEMELKVEVSKLREISDIARRQVEILNAQQQSRDKEVESLRMQLLDYQAQSDEKSLIAKLHQHNVSLQLSEATALGKLESITSKLQKMEAYNLRLEQKLDEKEQALYYARLEGRNRAKHLRQTIQSLRRQFSGALPLAQQEKFSKTMIQLQNDKLKIMQEMKNSQQEHRNMENKTLEMELKLKGLEELISTLKDTKGAQKVINWHMKIEELRLQELKLNRELVKDKEEIKYLNNIISEYERTISSLEEEIVQQNKFHEERQMAWDQREVDLERQLDIFDRQQNEILNAAQKFEEATGSIPDPSLPLPNQLEIALRKIKENIRIILETRATCKSLEEKLKEKESALRLAEQNILSRDKVINELRLRLPATAEREKLIAELGRKEMEPKSHHTLKIAHQTIANMQARLNQKEEVLKKYQRLLEKAREEQREIVKKHEEDLHILHHRLELQADSSLNKFKQTAWDLMKQSPTPVPTNKHFIRLAEMEQTVAEQDDSLSSLLVKLKKVSQDLERQREITELKVKEFENIKLQLQENHEDEVKKVKAEVEDLKYLLDQSQKESQCLKSELQAQKEANSRAPTTTMRNLVERLKSQLALKEKQQKALSRALLELRAEMTAAAEERIISATSQKEAHLNVQQIVDRHTRELKTQVEDLNENLLKLKEALKTSKNRENSLTDNLNDLNNELQKKQKAYNKILREKEEIDQENDELKRQIKRLTSGLQGKPLTDNKQSLIEELQRKVKKLENQLEGKVEEVDLKPMKEKNAKEELIRWEEGKKWQAKIEGIRNKLKEKEGEVFTLTKQLNTLKDLFAKADKEKLTLQRKLKTTGMTVDQVLGIRALESEKELEELKKRNLDLENDILYMRAHQALPRDSVVEDLHLQNRYLQEKLHALEKQFSKDTYSKPSISGIESDDHCQREQELQKENLKLSSENIELKFQLEQANKDLPRLKNQVRDLKEMCEFLKKEKAEVQRKLGHVRGSGRSGKTIPELEKTIGLMKKVVEKVQRENEQLKKASGILTSEKMANIEQENEKLKAELEKLKAHLGHQLSMHYESKTKGTEKIIAENERLRKELKKETDAAEKLRIAKNNLEILNEKMTVQLEETGKRLQFAESRGPQLEGADSKSWKSIVVTRMYETKLKELETDIAKKNQSITDLKQLVKEATEREQKVNKYNEDLEQQIKILKHVPEGAETEQGLKRELQVLRLANHQLDKEKAELIHQIEANKDQSGAESTIPDADQLKEKIKDLETQLKMSDLEKQHLKEEIKKLKKELENFDPSFFEEIEDLKYNYKEEVKKNILLEEKVKKLSEQLGVELTSPVAASEEFEDEEESPVNFPIY

SEQ ID NO: 14076 - protein, 613 aa, Homo sapiens
  Payload ID: 2732
  Gene Symbol: CEP290
  Gene Name: centrosomal protein 290kDa
  ENSP ID: ENSP00000448573
VEVNELKSEKQENVIHLFRITQSLMKMKAQEVELALEEVEKAGEEQAKFENQLKTKVMKLENELEMAQQSAGGRDTRFLRNEICQLEKQLEQKDRELEDMEKELEKEKKVNEQLALRNEEAENENSKLRRENKRLKKKNEQLCQDIIDYQKQIDSQKETLLSRRGEDSDYRSQLSKKNYELIQYLDEIQTLTEANEKIEVQNQEMRKNLEESVQEMEKMTDEYNRMKAIVHQTDNVIDQLKKENDHYQLQVQELTDLLKSKNEEDDPIMVAVNAKVEEWKLILSSKDDEIIEYQQMLHNLREKLKNAQLDADKSNVMALQQGIQERDSQIKMLTEQVEQYTKEMEKNTCIIEDLKNELQRNKGASTLSQQTHMKIQSTLDILKEKTKEAERTAELAEADAREKDKELVEALKRLKDYESGVYGLEDAVVEIKNCKNQIKIRDREIEILTKEINKLELKISDFLDENEALRERVGLEPKTMIDLTEFRNSKHLKQQQYRAENQILLKEIESLEEERLDLKKKIRQMAQERGKRSATSGLTTEDLNLTENISQGDRISERKLDLLSLKNMSEAQSKNEFLSRELIEKERDLERSRTVIAKFQNKCYRIKECRRNL

SEQ ID NO: 14077 - protein, 857 aa, Homo sapiens
  Payload ID: 2732
  Gene Symbol: CEP290
  Gene Name: centrosomal protein 290kDa
  ENSP ID: ENSP00000473863
DHYQLQVQELTDLLKSKNEEDDPIMVAVNAKVEEWKLILSSKDDEIIEYQQMLHNLREKLKNAQLDADKSNVMALQQGIQERDSQIKMLTEQVEQYTKEMEKNTCIIEDLKNELQRNKGASTLSQQTHMKIQSTLDILKEKTKEAERTAELAEADAREKDKELVEALKRLKDYESGVYGLEDAVVEIKNCKNQIKIRDREIEILTKEINKLELKISDFLDENEALRERVGLEPKTMIDLTEFRNSKHLKQQQYRAENQILLKEIESLEEERLDLKKKIRQMAQERGKRSATSGLTTEDLNLTENISQGDRISERKLDLLSLKNMSEAQSKNEIIAQEFLIKEAECRNADIELEHHRSQAEQNEFLSRELIEKERDLERSRTVIAKFQNKLKELVEENKQLEEGMKEILQAIKEMQKDPDVKGGETSLIIPSLERLVNAIESKNAEGIFDASLHLKAQVDQLTGRNEELRQELRESRKEAINYSQQLAKANLKIDHLEKETSLLRQSEGSNVVFKGIDLPDGIAPSSASIINSQNEYLIHLLQELENKEKKLKNLEDSLEDYNRKFAVIRHQQSLLYKEYLSEKETWKTESKTIKEEKRKLEDQVQQDAIKVKEYNNLLNALQMDSDEMKKILAENSRKITVLQVNEKSLIRQYTTLVELERQLRKENEKQKNELLSMEAEVCEKIGCLQRFKEMAIFKIAALQKVVDNSVSLSELELANKQYNELTAKYRDILQKDNMLVQRTSNLEHLECENISLKEQVESINKELEITKEKLHTIEQAWEQETKLGNESSMDKAKKSITNSDIVSISKKITMLEMKELNERQRAEHCQKMYEHLRTSLKQMEERNFELETKFAEV

SEQ ID NO: 14078 - protein, 2601 aa, Homo sapiens
  Payload ID: 2733
  Gene Symbol: CEP295
  Gene Name: centrosomal protein 295kDa
  Uniprot ID: Q9C0D2
  ENSP ID: ENSP00000316681
MKRKVVNTHKLRLSPNEEAFILKEDYERRRKLRLLQVREQERDIALQIREDIKQRRNQQFTRLAEELRAEWEESQTQKIQNLEKLYLASLRSMGEGHRQAKENEPDLDALAQRAAERKRKADLRHKEALKVQKNQKEILLKQKTWHIKARKEALLVEKERSAKITSLPPPPPTLFENIEVKRISAVKTNSSTYHHLHTFVNRETDTKRPDARLAAEEEAKRLEELQKQAAQERMERFEKAHVRGFQAMKKIHLAQNQEKLMKELKQLQQEDLARRRQTVAQMPPQLVELPYKRSEMKEDWQRELEFAFEDMYNADRKVKGNLILHLEPEPLPTVTNQIQDEELDLSMEQENLGAAEDLPVTEAEICSSETDVPLVMKTQQIPSKVLFKKLLNKIRSQKSLWTIKSMSEDESEMITTVSEIESKAPTVESGTIASKERTLSSGQEQVVESDTLTIESGPLASEDKPLSCGTNSGKEQEINETLPITTVAQSSVLLHPQEAAARIRMSARQKQIMEIEEQKQKQLELLEQIEQQKLRLETDCFRAQLEEEKRKKTQPTGVGIAPASCPVISDEDSHRQMIRNYQHQLLQQNRLHRQSVETARKQLLEYQTMLKGRCPSVSAPSLITDSVISVPSWKSERPTAISEHWDQGQRLKLSPNKYQPIQPIQTSKLEQDHFQVARQNHFPQRQVETTETLRASDILTNQALESQEHLRQFSQTETQQRDYKLVPKDSETLSRALSHDRQLISQDARKISETFGATTFQSLESQQLFSENSENISYHLTEPSSFVPLVPQHSFSSLPVKVESGKIQEPFSAMSKSTVSTSHSIISQMHDRPLLPSENITAQQGNMKALQEQLDLQKKVLQATQEAQEQLLLCKQKEVEQQTGLSVFLPLVTPDSSALLPSAKADLGRIQESSPTKNNIAVSSDHHVISQLQDKRLSLSQPILSQQNNFKFLQEQLNIQKDSLQARREAQEVLYVHKQSELDRRVCSEQAEPSFPFQVAQHTFTSLPSADTKSGKIQEQHSSKSEKGLVSCQSDIPISQDGSLSFLQQFLPLHDSLKLLQEQLTKQRDTLQARHEAQVELLLHRQRDLGDSKSGLVSSSSSPVVVQHSVASQASAKAEPRRIQELYLSEKENVGPSCHLIIPTFQDKSLSFPQHSLAQQENLTILQEQSQIQRVILGAKEGTQEFVHTESELEKRISSEQTGTSSSLSQVDESERFQECISIKSDSTIPLSHPKIPRCQERLLRVSQHMLPLQDNLEEHQAWLDTEKEAFHFSQKTQENTSSEQTGSSSFIPQLVQLSFTSLASAESGTILEPLFTESESKIFSSHLQIPQLQDRLLRISQLIQPQQDNLKALQEQLATQREAIILARQEAREELLLHQSEWEGRISPEQVDTSSLPLVPQHSFASLPLNESERNQEPCSINSDNIVSSGHSEIPTLPDGLLGLSHLVLPQQDNLIALEEHLHAQTDFLPSIEKTQKELVLSKPCKFEEKVSSEHFIQSHHGDLQALQQQLDTQKKAIRSIQEVQEELLLQRLSELEKRVSSEQVCSSSFVSQVPVADSERTQKSFPTKSNDTLPSSHREIPRLQDRLLSLSKPILPQQDNMTAQLDAQREVMYSYEKPQEELSLNKQRKLNKSESAEHTIPSLFLPKETEHSFIPLPFAEAKPKSTCELYSSQNEHAAPPSNPVIPGFQDRLLSFSQSVLTQQDNLGLQKQLDLQREVLHYSQKAQEKLLVQRQTALQQQIQKHEETLKDFFKDSQISKPTVENDLKTQKMGQLRDWFPNTQDLAGNDQENIRHADRNNSDDNHLASEDTSAKQSGEHLEKDLGRRSSKPPVAKVKCGLDLNQHELSAIQEVESPAIGRTSILGKPGIYEDRDPLRVSISREQSFFGSPLAHDPFSCLQLVGQENVCGDDYDEAVKLKESVVENHAVLSYAVEEEHAYLGPTVKPDDKAKTLSYEPLSSATVSTGSLLSYENTDLSLTDPESFSEHMDDSKQESTTSKEEETNIISSIVPSTQDIYQRQNSSDVHKSLLPAVDETTCGHTHFQQMIDKYINEANLIPEKTDLQELEHIFPNLHHQLFKPLEPHPDFDLSSSSSGISPDNRDFYQRSDSSSESHCATGLSKSTVYFTALRRTSMHSSLNTSPNQQPDTNLAHVGAHSFATENIIGGSEQCFEQLQPEYSSQEESQHADLPSIFSIEARDSSQGMKNQNYPSEEHTEILQNKKKIVHFQLSIGNLSSVYSSSDEANVFDQLNVQHSTPCGSNSSECSTKHQLESRKESMGFEELSKRGVVTMLQSQGLIEDNKNETCRVLDINPQVEETDSRLCVRTVEMGTSIQAPYSLTTQNEKYFENSAETDIPKITKKLSQLGESELFASSGSFSLQSSIPVWETETGHGIMEEPELTLISTTDTSIAEMDFANLTLEEKSENEAKCFFQVSEFLPLVSATEASDYPAVSELSIEKPRTASTETPRRLTPVPGSLQEAFIKRKKSFMERSHQRQKEIRNKIHVSENSQIKTVKEKPSISSSVSRLKGVNKVRASFPEDRKTTQALRHQRGLRLYNQLAEVKQQKEEKTKQEAYAQNRARAKEFHKKTLEKLRAKNTC

SEQ ID NO: 14079 - protein, 138 aa, Homo sapiens
  Payload ID: 2733
  Gene Symbol: CEP295
  Gene Name: centrosomal protein 295kDa
  ENSP ID: ENSP00000431853
MGQLRDWFPNTQDLAGNDQENIRHADRNNSDDNHLASEDTSAKQSGKPGIYEDRDPLRVSISREQSFFGSPLAHDPFSCLQLVGQENVCGDDYDEAVKLKESVVENHAVLSYAVEEEHAYLGPTVKPDDKSHFQSTWM

SEQ ID NO: 14080 - protein, 79 aa, Homo sapiens
  Payload ID: 2733
  Gene Symbol: CEP295
  Gene Name: centrosomal protein 295kDa
  ENSP ID: ENSP00000433198
MHSSLNTSPNQQPDTNLAHVGAHSFATENIIGGSEQCFEQLQPEYSSQEESQHADLPSIFSIEARDSSQGMKNQNYPSE

SEQ ID NO: 14081 - protein, 579 aa, Homo sapiens
  Payload ID: 2733
  Gene Symbol: CEP295
  Gene Name: centrosomal protein 295kDa
  ENSP ID: ENSP00000433650
MDDSKQESTTSKEEETNIISSIVPSTQDIYQRQNSSDVHKSLLPAVDETTCGHTHFQQMIDKYINEANLIPEKTDLQELEHIFPNLHHQLFKPLEPHPDFDLSSSSSGISPDNRDFYQRSDSSSESHCATGLSKSTVYFTALRRTSMHSSLNTSPNQQPDTNLAHVGAHSFATENIIGGSEQCFEQLQPEYSSQEESQHADLPSIFSIEARDSSQGMKNQNYPSEEHTEILQNKKKIVHFQLSIGNLSSVYSSSDEANVFDQLNVQHSTPCGSNSSECSTKHQLESRKESMGFEELSKRGVVTMLQSQGLIEDNKNETCRVLDINPQVEETDSRLCVRTVEMGTSIQAPYSLTTQNEKYFENSAETDIPKITKKLSQLGESELFASSGSFSLQSSIPVWETETGHGIMEEPELTLISTTDTSIAEMDFANLTLEEKSENEAKCFFQVSEFLPLVSATEASDYPAVSELSIEKPRTASTAETPRRLTPVPGSLQEAFIKRKKSFMERSHQRQKEIRNKIHVSENSQIKTVKEKPSISSSVSRLKGVNKVRASFPEDRKTTQALRHQRGLRLYNQLAEVKQ

SEQ ID NO: 14082 - protein, 248 aa, Homo sapiens
  Payload ID: 2733
  Gene Symbol: CEP295
  Gene Name: centrosomal protein 295kDa
  ENSP ID: ENSP00000433794
  MOD_RES (1)..(1): Any amino acid
XIESGPLASEDKPLSCGTNSGKEQEINETLPITTVAQSSVLLHPQEAAARIRMSARQKQIMEIEEQKQKQLELLEQIEQQKLRLETDCFRAQLEEEKRKKTQPTGVGCRKSHHYINHLVGIAPASCPVISDEDSHRQMIRNYQHQLLQQNRLHRQSVETARKQLLEYQTMLKGRCPSVSAPSLITDSVISVPSWKSERPTAISEHWDQGQRLKLSPNKYQPIQPIQTSKLEQDHFQVARQNHFPQRQV

SEQ ID NO: 14083 - protein, 781 aa, Homo sapiens
  Payload ID: 2733
  Gene Symbol: CEP295
  Gene Name: centrosomal protein 295kDa
  Uniprot ID: Q9C0D2
  ENSP ID: ENSP00000437323
MGQLRDWFPNTQDLAGNDQENIRHADRNNSDDNHLASEDTSAKQSGKPGIYEDRDPLRVSISREQSFFGSPLAHDPFSCLQLVGQENVCGDDYDEAVKLKESVVENHAVLSYAVEEEHAYLGPTVKPDDKAKTLSYEPLSSATVSTGSLLSYENTDLSLTDPESFSEHMDDSKQESTTSKEEETNIISSIVPSTQDIYQRQNSSDVHKSLLPAVDETTCGHTHFQQMIDKYINEANLIPEKTDLQELEHIFPNLHHQLFKPLEPHPDFDLSSSSSGISPDNRDFYQRSDSSSESHCATGLSKSTVYFTALRRTSMHSSLNTSPNQQPDTNLAHVGAHSFATENIIGGSEQCFEQLQPEYSSQEESQHADLPSIFSIEARDSSQGMKNQNYPSEEHTEILQNKKKIVHFQLSIGNLSSVYSSSDEANVFDQLNVQHSTPCGSNSSECSTKHQLESRKESMGFEELSKRGVVTMLQSQGLIEDNKNETCRVLDINPQVEETDSRLCVRTVEMGTSIQAPYSLTTQNEKYFENSAETDIPKITKKLSQLGESELFASSGSFSLQSSIPVWETETGHGIMEEPELTLISTTDTSIAEMDFANLTLEEKSENEAKCFFQVSEFLPLVSATEASDYPAVSELSIEKPRTASTETPRRLTPVPGSLQEAFIKRKKSFMERSHQRQKEIRNKIHVSENSQIKTVKEKPSISSSVSRLKGVNKVRASFPEDRKTTQALRHQRGLRLYNQLAEVKQQKEEKTKQEAYAQNRARAKEFHKKTLEKLRAKNTC

SEQ ID NO: 14084 - protein, 130 aa, Homo sapiens
  Payload ID: 2734
  Gene Symbol: CEP350
  Gene Name: centrosomal protein 350kDa
  ENSP ID: ENSP00000350016
MRSSKSKEVPLPNPRNSQSKDTVQDITTSWDALSQTKAALRHIENKLEVAPTSTAVCDSVMDTKKSSTSATRKISRKDGRYLDDSWVNAPISKSTKSRKEKSRSPLRATTLESNVKKNNRVEFREPLVSY

SEQ ID NO: 14085 - protein, 3117 aa, Homo sapiens
  Payload ID: 2734
  Gene Symbol: CEP350
  Gene Name: centrosomal protein 350kDa
  Uniprot ID: Q5VT06
  ENSP ID: ENSP00000356579
MRSSKSKEVPLPNPRNSQSKDTVQADITTSWDALSQTKAALRHIENKLEVAPTSTAVCDSVMDTKKSSTSATRKISRKDGRYLDDSWVNAPISKSTKSRKEKSRSPLRATTLESNVKKNNRVEFREPLVSYREIHGAPSNFSSSHLESKHVYCVDVNEEKTESGNWMIGSREERNIRSCDFESSQSSVINDTVVRFLNDRPAIDALQNSECLIRMGASMRTEEEMPNRTKGSENNLKLSVNNMAHDTDPKALRLTDSSPSSTSTSNSQRLDILKRRQHDVKLEKLKERIRKQWEHSEETNGRGQKLGHIDHPVMVVNVDNSVTAKVRKVATAPPAPAYKGFNPSETKIRTPDGKVWQEAEFQNMSRELYRDLALHFADDISIKEKPAEKSKEKKVVKPVRKVQKVAQLSSTECRTGSSHLISTSSWRDGQKLVKKILGPAPRMEPKEQRTASSDRGGRERTAKSGGHIGRAESDPRLDVLHRHLQRNSERSRSKSRSENNIKKLASSLPDNKQEENTALNKDFLPIEIRGILDDLQLDSTAHTAKQDTVELQNQKSSAPVHAPRSHSPVKRKPDKITANEDPPVISKRRHYDTDEVRQYIVRQQEERKRKQNEEKKAQKEATEQKNKRLQELYRKQKEAFTKVKNVPPSEPSATRRLQETYSKLLLEKTLLEEPSHQHVTQETQAKPGYQPSGESDKENKVQERPPSASSSSDMSLSEPPQPLARKDLMESTWMQPERLSPQVHHSQPQPFAGTAGSLLSHLLSLEHVGILHKDFESILPTRKNHNMASRPLTFTPQPYVTSPAAYTDALLKPSASQYKSKLDRIEALKATAASLSSRIESEAKKLAGASINYGSAWNTEYDVQQAPQEDGPWTKAVTPPVKDDNEDVFSARIQKMLGSCVSHATFDDDLPGVGNLSEFKKLPEMIRPQSAISSFRVRSPGPKPEGLLAQLCKRQTDSSSSDMQACSQDKAKISLGSSIDSVSEGPLLSEGSLSEEEGDQDGQPLLKVAEILKEKEFCPGERNSYEPIKEFQKEAEKFLPLFGHIGGTQSKGPWEELAKGSPHSVINIFTKSYQLYGKGFEDKLDRGTSTSRPLNATATPLSGVSYEDDFVSSPGTGTSTEKKSTLEPHSTLSPQEDHSNRKSAYDPSSVDVTSQHSSGAQSAASSRSSTSSKGKKGKKEKTEWLDSFTGNVQNSLLDEEKAERGSHQGKKSGTSSKLSVKDFEQTLDTDSTLEDLSGHSVSVSSDKGRSQKTPTSPLSPSSQKSLQFDVAGTSSERSKSSVMPPTITGFKPNAPLTDLNPAASRTTTENMAPIPGSKRFSPAGLHHRMAAELSYLNAIEESVRQLSDVERVRGISLAQQESVSLAQIIKAQQQRHERDLALLKLKAEQEALESQRQLEETRNKAAQVHAESLQQVVQSQREVTEVLQEATCKIAAQQSETARLTTDAARQICEMAELTRTHISDAVVASGAPLAILYDHQRQHLPDFVKQLRTRTETDRKSPSVSLSQSKEGTLDSKHQKYSASYDSYSESSGYKNHDRRSSSGSSRQESPSVPSCKENEKKLNGEKIESSIDEQVQTAADDSLRSDSVPSLPDEKDSTSIATEYSLKFDESMTEDEIEEQSFRSLLPSESHRRFNMEKRRGHHDDSDEEASPEKTTLSTAKELNMPFSGGQDSFSKFTMEMVRQYMKEEEMRAAHQSSLLRLREKALKEKTKAELAWLEHQKKHLRDKGEDDKMPPLRKKQRGLLLRLQQEKAEIKRLQEANKAARKERQLILKQQEEIEKIRQTTIKLQEKLKSAGESKLDSHSDDDTKDNKATSPGPTDLETRSPSPISISSSETSSIMQKLKKMRSRMDEKFLTKREQKLMQRRQHAEELLEWKRRLDAEEAEIRQMEKQALAAWDKELIKPKTPKKELEDQRTEQKEIASEEESPVPLYSHLNSESSIPEELGSPAVEYVPSESIGQEQPGSPDHSILTEEMICSQELESSTSPSKHSLPKSCTSVSKQESSKGSHRTGGQCHLPIKSHQHCYSWSDESLSMTQSETTSDQSDIEGRIRALKDELRKRKSVVNQLKKEQKKRQKERLKAQEASLIKQLESYDEFIKKTEAELSQDLETSPTAKPQIKTLSSASEKPKIKPLTPLHRSETAKNWKSLTESERSRGSLESIAEHVDASLSGSERSVSERSLSAYAKRVNEWDSRTEDFQTPSPVLRSSRKIREESGDSLENVPALHLLKELNATSRILDMSDGKVGESSKKSEIKEIEYTKLKKSKIEDAFSKEGKSDVLLKLVLEQGDSSEILSKKDLPLDSENVQKDLVGLAIENLHKSEEMLKERQSDQDMNHSPNIQSGKDIHEQKNTKEKDLSWSEHLFAPKEIPYSEDFEVSSFKKEISAELYKDDFEVSSLLSLRKDSQSCRDKPQPMRSSTSGATSFGSNEEISECLSEKSLSIHSNVHSDRLLELKSPTELMKSKERSDVEHEQQVTESPSLASVPTADELFDFHIGDRVLIGNVQPGILRFKGETSFAKGFWAGVELDKPEGNNNGTYDGIAYFECKEKHGIFAPPQKISHIPENFDDYVDINEDEDCYSDERYQCYNQEQNDTEGPKDREKDVSEYFYEKSLPSVNDIEASVNRSRSLKIETDNVQDISGVLEAHVHQQSSVDSQISSKENKDLISDATEKVSIAAEDDTLDNTFSEELEKQQQFTEEEDNLYAEASEKLCTPLLDLLTREKNQLEAQLKSSLNEEKKSKQQLEKISLLTDSLLKVFVKDTVNQLQQIKKTRDEKIQLSNQELLGDDQKKVTPQDLSQNVEEQSPSISGCFLSSELEDEKEEISSPDMCPRPESPVFGASGQEELAKRLAELELSREFLSALGDDQDWFDEDFGLSSSHKIQKNKAEETIVPLMAEPKRVTQQPCETLLAVPHTAEEVEILVHNAAEELWKWKELGHDLHSISIPTKLLGCASKGLDIESTSKRVYKQAVFDLTKEIFEEIFAEDPNLNQPVWMKPCRINSSYFRRVKNPNNLDEIKSFIASEVLKLFSLKKEPNHKTDWQKMMKFGRKKRDRVDHILVQELHEEEAQWVNYDEDELCVKMQLADGIFETLIKDTIDVLNQISEKQGRMLLV

SEQ ID NO: 14086 - protein, 581 aa, Homo sapiens
  Payload ID: 2734
  Gene Symbol: CEP350
  Gene Name: centrosomal protein 350kDa
  ENSP ID: ENSP00000401608
NNNGTYDGIAYFECKEKHGIFAPPQKISHIPENFDDYVDINEDEDCYSDERYQCYNQEQNDTEGPKDREKDVSEYFYEKSLPSVNDIEASVNRSRSLKIETDNVQDISGVLEAHVHQQSSVDSQISSKENKDLISDATEKVSIAAEDDTLDNTFSEELEKQQQFTEEEDNLYAEASEKLCTPLLDLLTREKNQLEAQLKSSLNEEKKSKQQLEKISLLTDSLLKVFVKDTVNQLQQIKKTRDEKIQLSNQELLGDDQKKVTPQDLSQNVEEQSPSISGCFLSSELEDEKEEISSPDMCPRPESPVFGASGQEELAKRLAELELSREFLSALGDDQDWFDEDFGLSSSHKIQKNKAEETIVPLMAEPKRVTQQPCETLLAVPHTAEEVEILVHNAAEELWKWKELGHDLHSISIPTKLLGCASKGLDIESTSKRVYKQAVFDLTKEIFEEIFAEDPNLNQPVWMKPCRINSSYFRRVKNPNNLDEIKSFIASEVLKLFSLKKEPNHKTDWQKMMKFGRKKRDRVDHILVQELHEEEAQWVNYDEDELCVKMQLADGIFETLIKDTIDVLNQISEKQGRMLLV

SEQ ID NO: 14087 - protein, 331 aa, Homo sapiens
  Payload ID: 2734
  Gene Symbol: CEP350
  Gene Name: centrosomal protein 350kDa
  ENSP ID: ENSP00000407044
  MOD_RES (1)..(1): Any amino acid
XESQRQLEETRNKAAQVHAESLQQVVQSQREVTEVLQEATCKIAAQQSETARLTTDAARQICEMAELTRTHISDAVVASGAPLAILYDHQRQHLPDFVKQLRTRTETDRKSPSVSLSQSKEGTLDSKHQKYSASYDSYSESSGYKNHDRRSSSGSSRQESPSVPSCKENEKKLNGEKIESSIDEQVQTAADDSLRSDSVPSLPDEKETGSCSVTQAGLELLASRDPPTLASQNAGITDSTSIATEYSLKFDESMTEDEIEEQSFRSLLPSESHRRFNMEKRRGHHDDSDEEASPEKTTLSTAKELNMPFSGGQDSFSKFTMEMVRQYMKEE

SEQ ID NO: 14088 - protein, 110 aa, Homo sapiens
  Payload ID: 2734
  Gene Symbol: CEP350
  Gene Name: centrosomal protein 350kDa
  ENSP ID: ENSP00000409395
SLPKSCTSVSKQESSKGSHRTGGQCHLPIKSHQHCYSWSDESLSMTQSETTSDQSDIEGRIRALKDELRKRKSVVNQLKKEQKKRQKERLKAQEASLIKQLEVRHRKKGV

SEQ ID NO: 14089 - protein, 1292 aa, Homo sapiens
  Payload ID: 2734
  Gene Symbol: CEP350
  Gene Name: centrosomal protein 350kDa
  ENSP ID: ENSP00000412460
  MOD_RES (1)..(1): Any amino acid
XFTSHHWASLSVCFPNLHPKFQLYIYNQLVRFLTKREQKLMQRRQHAEELLEWKRRLDAEEAEIRQMEKQALAAWDKELIKPKTPKKELEDQRTEQKEIASEEESPVPLYSHLNSESSIPEELGSPAVEYVPSESIGQEQPGSPDHSILTEEMICSQELESSTSPSKHSLPKSCTSVSKQESSKGSHRTGGQCHLPIKSHQHCYSWSDESLSMTQSETTSDQSDIEGRIRALKDELRKRKSVVNQLKKEQKKRQKERLKAQEASLIKQLESYDEFIKKTEAELSQDLETSPTAKPQIKTLSSASEKPKIKPLTPLHRSETAKNWKSLTESERSRGSLESIAEHVDASLSGSERSVSERSLSAYAKRVNEWDSRTEDFQTPSPVLRSSRKIREESGDSLENVPALHLLKELNATSRILDMSDGKVGESSKKSEIKEIEYTKLKKSKIEDAFSKEGKSDVLLKLVLEQGDSSEILSKKDLPLDSENVQKDLVGLAIENLHKSEEMLKERQSDQDMNHSPNIQSGKDIHEQKNTKEKDLSWSEHLFAPKEIPYSEDFEVSSFKKEISAELYKDDFEVSSLLSLRKDSQSCRDKPQPMRSSTSGATSFGSNEEISECLSEKSLSIHSNVHSDRLLELKSPTELMKSKERSDVEHEQQVTESPSLASVPTADELFDFHIGDRVLIGNVQPGILRFKGETSFAKGFWAGVELDKPEGNNNGTYDGIAYFECKEKHGIFAPPQKISHIPENFDDYVDINEDEDCYSDERYQCYNQEQNDTEGPKDREKDVSEYFYEKSLPSVNDIEASVNRSRSLKIETDNVQDISGVLEAHVHQQSSVDSQISSKENKDLISDATEKVSIAAEDDTLDNTFSEELEKQQQFTEEEDNLYAEASEKLCTPLLDLLTREKNQLEAQLKSSLNEEKKSKQQLEKISLLTDSLLKVFVKDTVNQLQQIKKTRDEKIQLSNQELLGDDQKKVTPQDLSQNVEEQSPSISGCFLSSELEDEKEEISSPDMCPRPESPVFGASGQEELAKRLAELELSREFLSALGDDQDWFDEDFGLSSSHKIQKNKAEETIVPLMAEPKRVTQQPCETLLAVPHTAEEVEILVHNAAEELWKWKELGHDLHSISIPTKLLGCASKGLDIESTSKRVYKQAVFDLTKEIFEEIFAEDPNLNQPVWMKPCRINSSYFRRVKNPNNLDEIKSFIASEVLKLFSLKKEPNHKTDWQKMMKFGRKKRDRVDHILVQELHEEEAQWVNYDEDELCVKMQLADGIFETLIKDTIDVLNQISEKQGRMLLV

SEQ ID NO: 14090 - protein, 57 aa, Homo sapiens
  Payload ID: 2734
  Gene Symbol: CEP350
  Gene Name: centrosomal protein 350kDa
  ENSP ID: ENSP00000432910
VHAESLQQVVQSQREVTEVLQEATCKIAAQQSETARLTTDAARQICEEKSICFTLSE

SEQ ID NO: 14091 - protein, 242 aa, Homo sapiens
  Payload ID: 2734
  Gene Symbol: CEP350
  Gene Name: centrosomal protein 350kDa
  ENSP ID: ENSP00000435808
MHRGSRGRRRHSQDEEQQIKRGAFTKSKELSKQGYCSRYNHIVGCTFSNQGCYGRYLDDSWVNAPISKSTKSRKEKSRSPLRATTLESNVKKNNRVEFREPLVSYREIHGAPSNFSSSHLESKHVYCVDVNEEKTESGNWMIGSREERNIRSCDFESSQSSVINDTVVRFLNDRPAIDALQNSECLIRMGASMRTEEEMPNRTKGSENNLKLSVNNMAHDTDPKALRLTDSSPSSTSTSNSQ

SEQ ID NO: 14092 - protein, 373 aa, Homo sapiens
  Payload ID: 2735
  Gene Symbol: CEP41
  Gene Name: centrosomal protein 41kDa
  Uniprot ID: Q9BYV8
  ENSP ID: ENSP00000223208
MSLRRHIGNPEYLMKRIPQNPRYQHIKSRLDTGNSMTKYTEKLEEIKKNYRYKKDELFKRLKVTTFAQLIIQVASLSDQTLEVTAEEIQRLEDNDSAASDPDAETTARTNGKGNPGEQSPSPEQFINNAGAGDSSRSTLQSVISGVGELDLDKGPVKKAEPHTKDKPYPDCPFLLLDVRDRDSYQQCHIVGAYSYPIATLSRTMNPYSNDILEYKNAHGKIIILYDDDERLASQAATTMCERGFENLFMLSGGLKVLAQKFPEGLITGSLPASCQQALPPGSARKRSSPKGPPLPAENKWRFTPEDLKKIEYYLEEEQGPADHPSRLNQANSSGRESKVPGARSAQNLPGGGPASHSNPRSLSSGHLQGKPWK

SEQ ID NO: 14093 - protein, 301 aa, Homo sapiens
  Payload ID: 2735
  Gene Symbol: CEP41
  Gene Name: centrosomal protein 41kDa
  Uniprot ID: Q9BYV8
  ENSP ID: ENSP00000342738
MSLRRHIGNPEYLMKRIPQNPRYQHIKSRLDTGNSMTKYTEKLEEIKKNYRYKKDELFKRLKVTTFAQLIIQVASLSDQTLEVTAEEIQRLEDNDSAASDPDAETTARTNGKGNPGEQSPSPEQFINNAGAGDSSRSTLQSVISGVGELDLDKGPVKKAEPHTKDKPYPDCPFLLLDVRDRDSYQQCHIVGAYSYPIATLSRTMNPYSNDILEYKNAHGKIIILYDDDERLASQAATTMCERGFENLFMLSGGRLNQANSSGRESKVPGARSAQNLPGGGPASHSNPRSLSSGHLQGKPWK

SEQ ID NO: 14094 - protein, 69 aa, Homo sapiens
  Payload ID: 2735
  Gene Symbol: CEP41
  Gene Name: centrosomal protein 41kDa
  ENSP ID: ENSP00000417463
MSLRRHIGNPEYLMKRIPQNPRYQHIKSRLDTGRTVPVFPPSLVSSATKTLSSFISTHLTPNCNCDPPF

SEQ ID NO: 14095 - protein, 161 aa, Homo sapiens
  Payload ID: 2735
  Gene Symbol: CEP41
  Gene Name: centrosomal protein 41kDa
  ENSP ID: ENSP00000417593
MTKYTEKLEEIKKNYRYKKDELFKRLKVTTFAQLIIQVASLSDQTLEVTAEEIQRLEDNDSAASDPDAETTARTNGKGNPGEQSPSPEQFINNAGAGDSSRSTLQSVISGVGELDLDKGPVKKAEPHTKDKPYPDCPFLLLDVRDRDSYQQCHIVGAYSYP

SEQ ID NO: 14096 - protein, 54 aa, Homo sapiens
  Payload ID: 2735
  Gene Symbol: CEP41
  Gene Name: centrosomal protein 41kDa
  Uniprot ID: Q9BYV8
  ENSP ID: ENSP00000417815
MSLRRHIGNPEYLMKRIPQNPRYQHIKSRLDTGACVYLTSSPALPDCAMNGLCF

SEQ ID NO: 14097 - protein, 140 aa, Homo sapiens
  Payload ID: 2735
  Gene Symbol: CEP41
  Gene Name: centrosomal protein 41kDa
  ENSP ID: ENSP00000418363
MTKYTEKLEEIKKNYRYKKDELFKRLKVTTFAQLIIQVASLSDQTLEVTAEEIQRLEDNDSAASDPDAETTARTNGKGNPGEQSPSPEQFINNAGAGDSSRSTLQSVISGVGELDLDKGPVKKAEPHTKDKPYPDCPFLL

SEQ ID NO: 14098 - protein, 65 aa, Homo sapiens
  Payload ID: 2735
  Gene Symbol: CEP41
  Gene Name: centrosomal protein 41kDa
  ENSP ID: ENSP00000418712
MKRIPQNPRYQHIKSRLDTGNSMTKYTEKLEEIKKNYRYKKDELFKRLKVTTFAQLIIQVASLSD

SEQ ID NO: 14099 - protein, 125 aa, Homo sapiens
  Payload ID: 2735
  Gene Symbol: CEP41
  Gene Name: centrosomal protein 41kDa
  ENSP ID: ENSP00000419078
MSLRRHIGNPEYLMKRIPQNPRYQHIKSRLDTGNSMTKYTEKLEEIKKNYRYKKDELFKRLKVTTFAQLIIQVASLSDQTLEVTAEEIQRLEDNDSAASDPDAETTARTNGKGNPVSSVVLGNWI

SEQ ID NO: 14100 - protein, 193 aa, Homo sapiens
  Payload ID: 2735
  Gene Symbol: CEP41
  Gene Name: centrosomal protein 41kDa
  ENSP ID: ENSP00000419192
MTKYTEKLEEIKKNYRYKKDELFKRLKVTTFAQLIIQVASLSDQTLEVTAEEIQRLEDNDSAASDPDAETTARTNGKGNPGEQSPSPEQFINNAGAGDSSRSTLQSVISGVGELDLDKGPVKKAEPHTKDKPYPDCPFLLLDVRDRDSYQQCHIVGAYSYPIATLSRTMNPYSNDILEYKNAHGKIIILYDDD

SEQ ID NO: 14101 - protein, 181 aa, Homo sapiens
  Payload ID: 2735
  Gene Symbol: CEP41
  Gene Name: centrosomal protein 41kDa
  ENSP ID: ENSP00000420670
MVTHKVHQYLMKRIPQNPRYQHIKSRLDTGNSMTKYTEKLEEIKKNYRYKKDELFKRLKVTTFAQLIIQVASLSDQTLEVTAEEIQRLEDNDSAASDPDAETTARTNGKGNPGEQSPSPEQFINNAGAGDSSRSTLQSVISGVGELDLDKGPVKKAEPHTKDKPYPDCPFLLLDVRDRDSY

SEQ ID NO: 14102 - protein, 285 aa, Homo sapiens
  Payload ID: 2735
  Gene Symbol: CEP41
  Gene Name: centrosomal protein 41kDa
  Uniprot ID: Q9BYV8
  ENSP ID: ENSP00000445888
MSLRRHIGNPEYLMKRIPQNPRYQHIKSRLDTDYRYKKDELFKRLKVTTFAQLIIQVASLSDQTLEVTAEEIQRLEDNDSAASDPDAETTARTNGKGNPGEQSPSPEQFINNAGAGDSSRSTLQSVISGVGELDLDKGPVKKAEPHTKDKPYPDCPFLLLDVRDRDSYQQCHIVGAYSYPIATLSRTMNPYSNDILEYKNAHGKIIILYDDDERLASQAATTMCERGFENLFMLSGGRLNQANSSGRESKVPGARSAQNLPGGGPASHSNPRSLSSGHLQGKPWK

SEQ ID NO: 14103 - protein, 54 aa, Homo sapiens; identical to SEQ ID NO: 14096
  Payload ID: 2735
  Gene Symbol: CEP41
  Gene Name: centrosomal protein 41kDa
  Uniprot ID: Q9BYV8
  ENSP ID: ENSP00000479252

SEQ ID NO: 14104 - protein, 390 aa, Homo sapiens
  Payload ID: 2736
  Gene Symbol: CEP44
  Gene Name: centrosomal protein 44kDa
  Uniprot ID: Q9C0F1
  ENSP ID: ENSP00000296519
MATGDLKRSLRNLEQVLRLLNYPEEVDCVGLIKGDPAASLPIISYSFTSYSPYVTELIMESNVELIAKNDLRFIDAVYKLLRDQFNYKPILTKKQFIQCGFAEWKIQIVCDILNCVMKKHKELSSLQKIPSQQRKKISSGKSEPPLGNEKISAEAVGVDISGRFMTSGKKKAVVIRHLYNEDNVDISEDTLSPITDVNEAVDVSDLNATEIKMPEVKVPEIKAEQQDVNVNPEITALQTMLAECQENLKKLTSIEKRLDCLEQKMKGKVMVDENTWTNLLSRVTLLETEMLLSKKNDEFIEFNEVSEDYASCSDMDLLNPHRKSEVERPASIPLSSGYSTASSDSTPRASTVNYCGLNEISEETTIQKMERMKKMFEETAELLKCPNHYL

SEQ ID NO: 14105 - protein, 390 aa, Homo sapiens; identical to SEQ ID NO: 14104
  Payload ID: 2736
  Gene Symbol: CEP44
  Gene Name: centrosomal protein 44kDa
  Uniprot ID: Q9C0F1
  ENSP ID: ENSP00000380009

SEQ ID NO: 14106 - protein, 399 aa, Homo sapiens
  Payload ID: 2736
  Gene Symbol: CEP44
  Gene Name: centrosomal protein 44kDa
  Uniprot ID: Q9C0F1
  ENSP ID: ENSP00000389427
MATGDLKRSLRNLEQVLRLLNYPEEVDCVGLIKGDPAASLPIISYSFTSYSPYVTELIMESNVELIAKNDLRFIDAVYKLLRDQFNYKPILTKKQFIQCGFAEWKIQIVCDILNCVMKKHKELSSLQKIPSQQRKKISSGKSEPPLGNEKISAEAVGVDISGRFMTSGKKKAVVIRHLYNEDNVDISEDTLSPITDVNEAVDVSDLNATEIKMPEVKVPEIKAEQQDVNVNPEITALQTMLAECQENLKKLTSIEKRLDCLEQKMKGKVMVDENTWTNLLSRVTLLETEMLLSKKNDEFIEFNEVSEDYASCSDMDLLNPHRKSEVERPASIPLSSGYSTASSDSTPRASTVNYCGLNEISENFPAWSATSSCSSLSWLLRGHTSYLSSQSFAWPLSCV

SEQ ID NO: 14107 - protein, 399 aa, Homo sapiens; identical to SEQ ID NO: 14106
  Payload ID: 2736
  Gene Symbol: CEP44
  Gene Name: centrosomal protein 44kDa
  Uniprot ID: Q9C0F1
  ENSP ID: ENSP00000408221

SEQ ID NO: 14108 - protein, 198 aa, Homo sapiens
  Payload ID: 2736
  Gene Symbol: CEP44
  Gene Name: centrosomal protein 44kDa
  ENSP ID: ENSP00000421128
MATGDLKRSLRNLEQVLRLLNYPEEVDCVGLIKGDPAASLPIISYSFTSYSPYVTELIMESNVELIAKNDLRFIDAVYKLLRDQFNYKPILTKKQFIQCGFAEWKIQIVCDILNCVMKKHKELSSLQKIPSQQRKKISSGKSEPPLGNEKISAEAVGVDISGRFMTSGKKKAVVIRHLYNEDNVDISEDTLSPITDVN

SEQ ID NO: 14109 - protein, 390 aa, Homo sapiens; identical to SEQ ID NO: 14104
  Payload ID: 2736
  Gene Symbol: CEP44
  Gene Name: centrosomal protein 44kDa
  Uniprot ID: Q9C0F1
  ENSP ID: ENSP00000423153

SEQ ID NO: 14110 - protein, 139 aa, Homo sapiens
  Payload ID: 2736
  Gene Symbol: CEP44
  Gene Name: centrosomal protein 44kDa
  ENSP ID: ENSP00000423922
MATGDLKRSLRNLEQVLRLLNYPEEVDCVGLIKGDPAASLPIISYSFTSYSPYVTELIMESNVELIAKNDLRFIDAVYKLLRDQFNYKPILTKKQFIQCGFAEWKIQIVCDILNCVMKKHKELSSLQKIPSQQRKKISS

SEQ ID NO: 14111 - protein, 112 aa, Homo sapiens
  Payload ID: 2736
  Gene Symbol: CEP44
  Gene Name: centrosomal protein 44kDa
  ENSP ID: ENSP00000423949
MATGDLKRSLRNLEQVLRLLNYPEEVDCVGLIKGDPAASLPIISYSFTSYSPYVTELIMESNVELIAKNDLRFIDAVYKLLRDQFNYKPILTKKQFIQCGFAEWKIQIVCDI

SEQ ID NO: 14112 - protein, 112 aa, Homo sapiens; identical to SEQ ID NO: 14111
  Payload ID: 2736
  Gene Symbol: CEP44
  Gene Name: centrosomal protein 44kDa
  ENSP ID: ENSP00000427337

SEQ ID NO: 14113 - protein, 464 aa, Homo sapiens
  Payload ID: 2737
  Gene Symbol: CEP55
  Gene Name: centrosomal protein 55kDa
  Uniprot ID: Q53EZ4
  ENSP ID: ENSP00000360540
MSSRSTKDLIKSKWGSKPSNSKSETTLEKLKGEIAHLKTSVDEITSGKGKLTDKERHRLLEKIRVLEAEKEKNAYQLTEKDKEIQRLRDQLKARYSTTTLLEQLEETTREGERREQVLKALSEEKDVLKQQLSAATSRIAELESKTNTLRLSQTVAPNCFNSSINNIHEMEIQLKDALEKNQQWLVYDQQREVYVKGLLAKIFELEKKTETAAHSLPQQTKKPESEGYLQEEKQKCYNDLLASAKKDLEVERQTITQLSFELSEFRRKYEETQKEVHNLNQLLYSQRRADVQHLEDDRHKTEKIQKLREENDIARGKLEEEKKRSEELLSQVQFLYTSLLKQQEEQTRVALLEQQMQACTLDFENEKLDRQHVQHQLHVILKELRKARNQITQLESLKQLHEFAITEPLVTFQGETENREKVAASPKSPTAALNESLVECPKCNIQYPATEHRDLLVHVEYCSK

SEQ ID NO: 14114 - protein, 208 aa, Homo sapiens
  Payload ID: 2737
  Gene Symbol: CEP55
  Gene Name: centrosomal protein 55kDa
  ENSP ID: ENSP00000389150
  MOD_RES (1)..(1): Any amino acid
XSSINNIHEMEIQLKDALEKNQQWLVYDQQREVYVKGLLAKIFELEKKTETAAHSLPQQTKKPESEGYLQEEKQKCYNDLLASAKKDLEVERQTITQLSFELSEFRRKYEETQKEVHNLNQLLYSQRRADVQHLEDDRHKTEKIQKLREENDIARGKLEEEKKRSEELLSQVQFLYTSLLKQQEEQTRVALLEQQVLIRVASKFNSAC

SEQ ID NO: 14115 - protein, 474 aa, Homo sapiens
  Payload ID: 2738
  Gene Symbol: CEP57
  Gene Name: centrosomal protein 57kDa
  Uniprot ID: Q86XR8
  ENSP ID: ENSP00000317487
MAAASVSAASGSHLSNSFAEPSRSNGSMVRHSSSPYVVYPSDKPFLNSDLRRSPSKPTLAYPESNSRAIFSALKNLQDKIRRLELERIQAEESVKTLSRETIEYKKVLDEQIQERENSKNEESKHNQELTSQLLAAENKCNLLEKQLEYMRNMIKHAEMERTSVLEKQVSLERERQHDQTHVQSQLEKLDLLEQEYNKLTTMQALAEKKMQELEAKLHEEEQERKRMQAKAAELQTGLETNRLIFEDKATPCVPNARRIKKKKSKPPEKSTSPSHAVVANVQLVLHLMKQHSKALCNDRVINSIPLAKQVSSRGGKSKKLSVTPPSSNGINEELSEVLQTLQDEFGQMSFDHQQLAKLIQESPTVELKDKLECELEALVGRMEAKANQITKVRKYQAQLEKQKLEKQKKELKATKKTLDEERNSSSRSGITGTTNKKDFMKLRPGEKRRKNLQLLKDMQSIQNSLQSSSLCWDY

SEQ ID NO: 14116 - protein, 500 aa, Homo sapiens
  Payload ID: 2738
  Gene Symbol: CEP57
  Gene Name: centrosomal protein 57kDa
  Uniprot ID: Q86XR8
  ENSP ID: ENSP00000317902
MAAASVSAASGSHLSNSFAEPSRSNGSMVRHSSSPYVVYPSDKPFLNSDLRRSPSKPTLAYPESNSRAIFSALKNLQDKIRRLELERIQAEESVKTLSRETIEYKKVLDEQIQERENSKNEESKHNQELTSQLLAAENKCNLLEKQLEYMRNMIKHAEMERTSVLEKQVSLERERQHDQTHVQSQLEKLDLLEQEYNKLTTMQALAEKKMQELEAKLHEEEQERKRMQAKAAELQTGLETNRLIFEDKATPCVPNARRIKKKKSKPPEKKSSRNYFGAQPHYRLCLGDMPFVAGKSTSPSHAVVANVQLVLHLMKQHSKALCNDRVINSIPLAKQVSSRGGKSKKLSVTPPSSNGINEELSEVLQTLQDEFGQMSFDHQQLAKLIQESPTVELKDKLECELEALVGRMEAKANQITKVRKYQAQLEKQKLEKQKKELKATKKTLDEERNSSSRSGITGTTNKKDFMKLRPGEKRRKNLQLLKDMQSIQNSLQSSSLCWDY

SEQ ID NO: 14117 - protein, 82 aa, Homo sapiens
  Payload ID: 2738
  Gene Symbol: CEP57
  Gene Name: centrosomal protein 57kDa
  ENSP ID: ENSP00000437422
MAAASVSAASGSHLSNSFAEPSRSNGSMVRHSSSPYVVYPSDKPFLNSDLRRSPSKPTLAYPESNSRASTFVFVFGSHIFCS

SEQ ID NO: 14118 - protein, 198 aa, Homo sapiens
  Payload ID: 2738
  Gene Symbol: CEP57
  Gene Name: centrosomal protein 57kDa
  ENSP ID: ENSP00000438065
MLTRIDNSFAEPSRSNGSMVRHSSSPYVVYPSDKPFLNSDLRRSPSKPTLAYPESNSRAIFSALKNLQDKIRRLELERIQAEESVKTLSRETIEYKKVLDEQIQERENSKNEESKHNQELTSQLLAAENKCNLLEKQLEYMRNMIKHAEMERTSVLEKQVSLERERQHDQTHVQSQLEKLDLLEQEYNKLTTMQALAE

SEQ ID NO: 14119 - protein, 254 aa, Homo sapiens
  Payload ID: 2738
  Gene Symbol: CEP57
  Gene Name: centrosomal protein 57kDa
  ENSP ID: ENSP00000440256
  MOD_RES (1)..(1): Any amino acid
XLEKLDLLEQEYNKLTTMQALAEKKMQELEAKLHEEEQERKRMQAKAAELQTGLETNRLIFEDKATPCVPNARRIKKKKSKPPEKSTSPSHAVVANVQLVLHLMKQHSKALCNDRVINSIPLAKQVSSRGGKSKKLSVTPPSSNGINEELSEVLQTLQDEFGQMSFDHQQLAKLIQESPTVELKDKLECELEALVGRMEAKANQITKVRKYQAQLEKQKLEKQKKELKATKKTLDEERNSSSRSGITGTTNKKD

SEQ ID NO: 14120 - protein, 71 aa, Homo sapiens
  Payload ID: 2738
  Gene Symbol: CEP57
  Gene Name: centrosomal protein 57kDa
  ENSP ID: ENSP00000440996
MAAASVSAASGSHLSNSFAEPSRSNGSMVRHSSSPYVVYPSDKPFLNSDLRRSPSKPTLAYPESNSRESSR

SEQ ID NO: 14121 - protein, 473 aa, Homo sapiens
  Payload ID: 2738
  Gene Symbol: CEP57
  Gene Name: centrosomal protein 57kDa
  ENSP ID: ENSP00000441392
MVRHSSSPYVVYPSDKPFLNSDLRRSPSKPTLAYPESNSRAIFSALKNLQDKIRRLELERIQAEESVKTLSRETIEYKKVLDEQIQERENSKNEESKHNQELTSQLLAAENKCNLLEKQLEYMRNMIKHAEMERTSVLEKQVSLERERQHDQTHVQSQLEKLDLLEQEYNKLTTMQALAEKKMQELEAKLHEEEQERKRMQAKAAELQTGLETNRLIFEDKATPCVPNARRIKKKKSKPPEKKSSRNYFGAQPHYRLCLGDMPFVAGKSTSPSHAVVANVQLVLHLMKQHSKALCNDRVINSIPLAKQVSSRGGKSKKLSVTPPSSNGINEELSEVLQTLQDEFGQMSFDHQQLAKLIQESPTVELKDKLECELEALVGRMEAKANQITKVRKYQAQLEKQKLEKQKKELKATKKTLDEERNSSSRSGITGTTNKKDFMKLRPGEKRRKNLQLLKDMQSIQNSLQSSSLCWDY

SEQ ID NO: 14122 - protein, 41 aa, Homo sapiens
  Payload ID: 2738
  Gene Symbol: CEP57
  Gene Name: centrosomal protein 57kDa
  ENSP ID: ENSP00000442481
MAAASVSAASGSHLSPYFLLLRIFKIRFDAWNLRGFRQKKV

SEQ ID NO: 14123 - protein, 491 aa, Homo sapiens
  Payload ID: 2738
  Gene Symbol: CEP57
  Gene Name: centrosomal protein 57kDa
  Uniprot ID: Q86XR8
  ENSP ID: ENSP00000443436
MLTRIDNSFAEPSRSNGSMVRHSSSPYVVYPSDKPFLNSDLRRSPSKPTLAYPESNSRAIFSALKNLQDKIRRLELERIQAEESVKTLSRETIEYKKVLDEQIQERENSKNEESKHNQELTSQLLAAENKCNLLEKQLEYMRNMIKHAEMERTSVLEKQVSLERERQHDQTHVQSQLEKLDLLEQEYNKLTTMQALAEKKMQELEAKLHEEEQERKRMQAKAAELQTGLETNRLIFEDKATPCVPNARRIKKKKSKPPEKKSSRNYFGAQPHYRLCLGDMPFVAGKSTSPSHAVVANVQLVLHLMKQHSKALCNDRVINSIPLAKQVSSRGGKSKKLSVTPPSSNGINEELSEVLQTLQDEFGQMSFDHQQLAKLIQESPTVELKDKLECELEALVGRMEAKANQITKVRKYQAQLEKQKLEKQKKELKATKKTLDEERNSSSRSGITGTTNKKDFMKLRPGEKRRKNLQLLKDMQSIQNSLQSSSLCWDY

SEQ ID NO: 14124 - protein, 52 aa, Homo sapiens
  Payload ID: 2738
  Gene Symbol: CEP57
  Gene Name: centrosomal protein 57kDa
  ENSP ID: ENSP00000443866
MAAASVSAASGSHLSTRGWALDYSSVVGHGICTVTQPVSFSRKKREKIVQQI

SEQ ID NO: 14125 - protein, 134 aa, Homo sapiens
  Payload ID: 2738
  Gene Symbol: CEP57
  Gene Name: centrosomal protein 57kDa
  ENSP ID: ENSP00000444749
THVQSQLEKLDLLEQEYNKLTTMQALAEKKMQELEAKLHEEEQERKRMQAKAAESTSPSHAVVANVQLVLHLMKQHSKALCNDRVINSIPLAKQVSSRGGKSKKLSVTPPSSNGINEELSEVLQTLQDEFGQMS

SEQ ID NO: 14126 - protein, 270 aa, Homo sapiens
  Payload ID: 2738
  Gene Symbol: CEP57
  Gene Name: centrosomal protein 57kDa
  Uniprot ID: Q86XR8
  ENSP ID: ENSP00000445706
MAAASVSAASGSHLSNSFAEPSRSNGSMVRHSSSPYVVYPSDKPFLNSDLRRSPSKPTLAYPESNSRAIFSALKNLQDKIRRLELERIQAEESVKTLSRETIEYKKVLDEQIQERENSKNEESKHNQELTSQLLAAENKCNLLEKQLEYMRNMIKHAEMERTSVLEKQVSLERERQHDQTHVQSQLEKLDLLEQEYNKLTTMQALAEKKMQELEAKLHEEEQERKRMQAKAAELQTGLETNRLIFEDKATPCVPNARRIKKKKSKPPEKV

SEQ ID NO: 14127 - protein, 205 aa, Homo sapiens
  Payload ID: 2738
  Gene Symbol: CEP57
  Gene Name: centrosomal protein 57kDa
  ENSP ID: ENSP00000445821
MVRHSSSPYVVYPSDKPFLNSDLRRSPSKPTLAYPESNSRAIFSALKNLQDKIRRLELERIQAEESVKTLSRETIEYKKVLDEQIQERENSKNEESKHNQELTSQLLAAENKCNLLEKQLEYMRNMIKHAEMERTSVLEKQVSLERERQHDQTHVQSQLEKLDLLEQEYNKLTTMQALAEKKMQELEAKLHEEEQERKRMQAKAA

SEQ ID NO: 14128 - protein, 460 aa, Homo sapiens
  Payload ID: 2739
  Gene Symbol: CEP57L1
  Gene Name: centrosomal protein 57kDa-like 1
  Uniprot ID: Q8IYX8
  ENSP ID: ENSP00000352841
MDSELMHSIVGSYHKPPERVFVPSFTQNEPSQNCHPANLEVTSPKILHSPNSQALILALKTLQEKIHRLELERTQAEDNLNILSREAAQYKKALENETNERNLAHQELIKQKKDISIQLSSAQSRCTLLEKQLEYTKRMVLNVEREKNMILEQQAQLQREKEQDQMKLYAKLEKLDVLEKECFRLTTTQKTAEDKIKHLEEKLKEEEHQRKLFQDKASELQTGLEISKIIMSSVSNLKHSKEKKKSSKKTKCIKRRPPWQICSKFGALPFVAEKMRQHRDPHILQKPFNVTETRCLPKPSRTTSWCKAIPPDSEKSISICDNLSELLMAMQDELDQMSMEHQELLKQMKETESHSVCDDIECELECLLKKMEIKGEQISKLKKHQDSVCKLQQKVQNSKMSEASGIQQEDSYPKGSKNIKNSPRKCLTDTNLFQKNSSFHPIRVHNLQMKLRRDDIMWEQ

SEQ ID NO: 14129 - protein, 391 aa, Homo sapiens
  Payload ID: 2739
  Gene Symbol: CEP57L1
  Gene Name: centrosomal protein 57kDa-like 1
  Uniprot ID: Q8IYX8
  ENSP ID: ENSP00000357964
MDSELMHSIVGSYHKPPERVFVPSFTQNEPSQNCHPANLEVTSPKILHSPNSQALILALKTLQEKIHRLELERTQAEDNLNILSREAAQYKKALENETNERNLAHQELIKQKKDISIQLSSAQSRCTLLEKQLEYTKRMVLNVEREKNMILEQQAQLQREKEQDQMKLYAKLEKLDVLEKECFRLTTTQKTAEDKIKHLEEKLKEEEHQRKLFQDKASELQTGLEISKIIMSSVSNLKHSKEKKKSSKKTKCIKRRPPWQICSKFGALPFVAEKMRQHRDPHILQKPFNVTETRCLPKPSRTTSWCKAIPPDSEKSISICDNLSELLMAMQDELDQMSMEHQELLKQMKETESHSVCDDIECELECLLKKMEIKGEQISKLKKHQDSVRRL

SEQ ID NO: 14130 - protein, 477 aa, Homo sapiens
  Payload ID: 2739
  Gene Symbol: CEP57L1
  Gene Name: centrosomal protein 57kDa-like 1
  ENSP ID: ENSP00000357966
MDSELMHSIVGSYHKPPERVFVPSFTQNEPSQNCHPANLEVTSPKILHSPNSQALILALKTLQEKIHRLELERTQAEDNLNILSREAAQYKKALENETNERNLAHQELIKQKKDISIQLSSAQSRCTLLEKQLEYTKRMVLNVEREKNMILEQQAQLQREKEQDQMKLYAKLEKLDVLEKECFRLTTTQKTAEDKIKHLEEKLKEEEHQRKLFQDKASELQTGLEISKIIMSSVSNLKHSKEKKKSSKKTKCIKRRPPWQICSKFGALPFVAEKSTSASCSVNASMQNFLQMRQHRDPHILQKPFNVTETRCLPKPSRTTSWCKAIPPDSEKSISICDNLSELLMAMQDELDQMSMEHQELLKQMKETESHSVCDDIECELECLLKKMEIKGEQISKLKKHQDSVCKLQQKVQNSKMSEASGIQQEDSYPKGSKNIKNSPRKCLTDTNLFQKNSSFHPIRVHNLQMKLRRDDIMWEQ

SEQ ID NO: 14131 - protein, 251 aa, Homo sapiens
  Payload ID: 2739
  Gene Symbol: CEP57L1
  Gene Name: centrosomal protein 57kDa-like 1
  ENSP ID: ENSP00000383936
MDSELMHSIVGSYHKPPERVFVPSFTQNEPSQNCHPANLEVTSPKILHSPNSQALILALKTLQEKIHRLELERTQAEDNLNILSREAAQYKKALENETNERNLAHQELIKQKKDISIQLSSAQSRCTLLEKQLEYTKRMVLNVEREKNMILEQQAQLQREKEQDQMKLYAKLEKLDVLEKECFRLTTTQKTAEDKIKHLEEKLKEEEHQRKLFQDKASELQTGLEISKIIMSSVSNLKHSKEKKKSSKVCI

SEQ ID NO: 14132 - protein, 195 aa, Homo sapiens
  Payload ID: 2739
  Gene Symbol: CEP57L1
  Gene Name: centrosomal protein 57kDa-like 1
  ENSP ID: ENSP00000427771
MDSELMHSIVGSYHKPPERVFVPSFTQNEPSQNCHPANLEVTSPKILHSPNSQALILALKTLQEKIHRLELERTQAEDNLNILSREAAQYKKALENETNERNLAHQELIKQKKDISIQLSSAQSRCTLLEKQLEYTKRMVLNVEREKNMILEQQAQLQREKEQDQMKLYAKLEKLDVLEKECFRLTTTQKTAEDK

SEQ ID NO: 14133 - protein, 460 aa, Homo sapiens; identical to SEQ ID NO: 14128
  Payload ID: 2739
  Gene Symbol: CEP57L1
  Gene Name: centrosomal protein 57kDa-like 1
  Uniprot ID: Q8IYX8
  ENSP ID: ENSP00000427844

SEQ ID NO: 14134 - protein, 407 aa, Homo sapiens
  Payload ID: 2739
  Gene Symbol: CEP57L1
  Gene Name: centrosomal protein 57kDa-like 1
  ENSP ID: ENSP00000428344
MDSELMHSIVGSYHKPPERVFVPSFTQNEPSQNCHPANLEVTSPKILHSPNSQALILALKTLQEKIHRLELERTQAEDNLNILSREAAQYKKALENETNERNLAHQELIKQKKDISIQLSSAQSRCTLLEKQLEYTKRMVLNVEREKNMILEQQAQLQREKEQDQMKLYAKLEKLDVLEKECFRLTTTQKTAEDKIKHLEEKLKEEEHQRKLFQDKASEKTKCIKRRPPWQICSKFGALPFVAEKPSRTTSWCKAIPPDSEKSISICDNLSELLMAMQDELDQMSMEHQELLKQMKETESHSVCDDIECELECLLKKMEIKGEQISKLKKHQDSVCKLQQKVQNSKMSEASGIQQEDSYPKGSKNIKNSPRKCLTDTNLFQKNSSFHPIRVHNLQMKLRRDDIMWEQ

SEQ ID NO: 14135 - protein, 113 aa, Homo sapiens
  Payload ID: 2739
  Gene Symbol: CEP57L1
  Gene Name: centrosomal protein 57kDa-like 1
  ENSP ID: ENSP00000428464
MDSELMHSIVGSYHKPPERVFVPSFTQNEPSQNCHPANLEVTSPKILHSPNSQALILALKTLQEKIHRLELERTQAEDNLNILSREAAQYKKALENETNERNLAHQELIKQKK

SEQ ID NO: 14136 - protein, 129 aa, Homo sapiens
  Payload ID: 2739
  Gene Symbol: CEP57L1
  Gene Name: centrosomal protein 57kDa-like 1
  ENSP ID: ENSP00000428668
MVLNVEREKNMILEQQAQLQREKEQDQMKLYAKLEKLDVLEKECFRLTTTQKTAEDKIKHLEEKLKEEEHQRKLFQDKASELQTGLEISKIIMSSVSNLKHSKEKKKSSKDKCVREQLLGHVISTFLVL

SEQ ID NO: 14137 - protein, 172 aa, Homo sapiens
  Payload ID: 2739
  Gene Symbol: CEP57L1
  Gene Name: centrosomal protein 57kDa-like 1
  ENSP ID: ENSP00000428682
LQTGLEISKIIMSSVSNLKHSKEKKKSSKKTKCIKRRPPWQICSKFGALPFVAEKMRQHRDPHILQKPFNVTETRCLPKPSRTTSWCKAIPPDSEKSISICDNLSELLMAMQDELDQMSMEHQELLKQMKETESHSVCDDIECELECLLKKMEIKGEQISKLKKHQDSVRRL

SEQ ID NO: 14138 - protein, 28 aa, Homo sapiens
  Payload ID: 2739
  Gene Symbol: CEP57L1
  Gene Name: centrosomal protein 57kDa-like 1
  ENSP ID: ENSP00000429402
MDSELMHSIVGSYHKPPERVFVPSFTQN

SEQ ID NO: 14139 - protein, 206 aa, Homo sapiens
  Payload ID: 2739
  Gene Symbol: CEP57L1
  Gene Name: centrosomal protein 57kDa-like 1
  ENSP ID: ENSP00000429812
MDSELMHSIVGSYHKPPERVFVPSFTQNEPSQNCHPANLEVTSPKILHSPNSQALILALKTLQEKIHRLELERTQAEDNLNILSREAAQYKKALENETNERNLAHQELIKQKKDISIQLSSAQSRCTLLEKQLEYTKRMVLNVEREKNMILEQQAQLQREKEQDQMKLYAKLEKLDVLEKECFRLTTTQKTAEDKIKHLEEKLKEE

SEQ ID NO: 14140 - protein, 166 aa, Homo sapiens
  Payload ID: 2739
  Gene Symbol: CEP57L1
  Gene Name: centrosomal protein 57kDa-like 1
  ENSP ID: ENSP00000429957
MVLNVEREKNMILEQQAQLQREKEQDQMKLYAKLEKLDVLEKECFRLTTTQKTAEDKIKHLEEKLKEEEHQRKLFQDKASELQTGLEISKIIMSSVSNLKHSKEKKKSSKKTKCIKRRPPWQICSKFGALPFVAEKVRGDKMKIVVQKNSCFVMRQHRDPHILQKP

SEQ ID NO: 14141 - protein, 360 aa, Homo sapiens
  Payload ID: 2739
  Gene Symbol: CEP57L1
  Gene Name: centrosomal protein 57kDa-like 1
  ENSP ID: ENSP00000430011
MDSELMHSIVGSYHKPPERVFVPSFTQNEPSQNCHPANLEVTSPKILHSPNSQEKQLEYTKRMVLNVEREKNMILEQQAQLQREKEQDQMKLYAKLEKLDVLEKECFRLTTTQKTAEDKIKHLEEKLKEEEHQRKLFQDKASELQTGLEISKIIMSSVSNLKHSKEKKKSSKKTKCIKRRPPWQICSKFGALPFVAEKPSRTTSWCKAIPPDSEKSISICDNLSELLMAMQDELDQMSMEHQELLKQMKETESHSVCDDIECELECLLKKMEIKGEQISKLKKHQDSVCKLQQKVQNSKMSEASGIQQEDSYPKGSKNIKNSPRKCLTDTNLFQKNSSFHPIRVHNLQMKLRRDDIMWEQ

SEQ ID NO: 14142 - protein, 102 aa, Homo sapiens
  Payload ID: 2739
  Gene Symbol: CEP57L1
  Gene Name: centrosomal protein 57kDa-like 1
  ENSP ID: ENSP00000430013
MVLNVEREKNMILEQQAQLQREKEQDQMKLYAKLEKLDVLEKECFRLTTTQKTAEDKIKHLEEKLKEEEHQRKLFQDKASELQTGLEISKIIMSSVSNLKHS

SEQ ID NO: 14143 - protein, 230 aa, Homo sapiens
  Payload ID: 2739
  Gene Symbol: CEP57L1
  Gene Name: centrosomal protein 57kDa-like 1
  ENSP ID: ENSP00000430265
MDSELMHSIVGSYHKPPERVFVPSFTQNEPSQNCHPANLEVTSPKILHSPNSQALILALKTLQEKIHRLELERTQAEDNLNILSREAAQYKKALENETNERNLAHQELIKQKKDISIQLSSAQSRCTLLEKQLEYTKRMVLNVEREKNMILEQQAQLQREKEQDQMKLYAKLEKLDVLEKECFRLTTTQKTAEDKIKHLEEKLKEEEHQRKLFQDKASELQTGLEISKII

SEQ ID NO: 14144 - protein, 53 aa, Homo sapiens
  Payload ID: 2739
  Gene Symbol: CEP57L1
  Gene Name: centrosomal protein 57kDa-like 1
  ENSP ID: ENSP00000430402
MDSELMHSIVGSYHKPPERVFVPSFTQNEPSQNCHPANLEVTSPKILHSPNSQ

SEQ ID NO: 14145 - protein, 463 aa, Homo sapiens
  Payload ID: 2739
  Gene Symbol: CEP57L1
  Gene Name: centrosomal protein 57kDa-like 1
  ENSP ID: ENSP00000430529
MKIMDSELMHSIVGSYHKPPERVFVPSFTQNEPSQNCHPANLEVTSPKILHSPNSQALILALKTLQEKIHRLELERTQAEDNLNILSREAAQYKKALENETNERNLAHQELIKQKKDISIQLSSAQSRCTLLEKQLEYTKRMVLNVEREKNMILEQQAQLQREKEQDQMKLYAKLEKLDVLEKECFRLTTTQKTAEDKIKHLEEKLKEEEHQRKLFQDKASELQTGLEISKIIMSSVSNLKHSKEKKKSSKKTKCIKRRPPWQICSKFGALPFVAEKMRQHRDPHILQKPFNVTETRCLPKPSRTTSWCKAIPPDSEKSISICDNLSELLMAMQDELDQMSMEHQELLKQMKETESHSVCDDIECELECLLKKMEIKGEQISKLKKHQDSVCKLQQKVQNSKMSEASGIQQEDSYPKGSKNIKNSPRKCLTDTNLFQKNSSFHPIRVHNLQMKLRRDDIMWEQ

SEQ ID NO: 14146 - protein, 235 aa, Homo sapiens
  Payload ID: 2739
  Gene Symbol: CEP57L1
  Gene Name: centrosomal protein 57kDa-like 1
  ENSP ID: ENSP00000430558
MDSELMHSIVGSYHKPPERVFVPSFTQNEPSQNCHPANLEVTSPKILHSPNSQALILALKTLQEKIHRLELERTQAEDNLNILSREAAQYKKALENETNERNLAHQELIKQKKEKQLEYTKRMVLNVEREKNMILEQQAQLQREKEQDQMKLYAKLEKLDVLEKECFRLTTTQKTAEDKIKHLEEKLKEEEHQRKLFQDKASELQTGLEISKIIMSSVSNLKHSKEKKKSSKVCI

SEQ ID NO: 14147 - protein, 79 aa, Homo sapiens
  Payload ID: 2739
  Gene Symbol: CEP57L1
  Gene Name: centrosomal protein 57kDa-like 1
  ENSP ID: ENSP00000430565
MVLNVEREKNMILEQQAQLQREKEQDQMKLYAKLEKLDVLEKECFRLTTTQKTAEDKIKHLEEKLKEEEHQRKLFQDKA

SEQ ID NO: 14148 - protein, 251 aa, Homo sapiens; identical to SEQ ID NO: 14131
  Payload ID: 2739
  Gene Symbol: CEP57L1
  Gene Name: centrosomal protein 57kDa-like 1
  ENSP ID: ENSP00000430911

SEQ ID NO: 14149 - protein, 112 aa, Homo sapiens
  Payload ID: 2739
  Gene Symbol: CEP57L1
  Gene Name: centrosomal protein 57kDa-like 1
  ENSP ID: ENSP00000431113
MDSELMHSIVGSYHKPPERVFVPSFTQNEPSQNCHPANLEVTSPKILHSPNSQALILALKTLQEKIHRLELERTQAEDNLNILSREAAQYKKALENETNERNLAHQELIKQK

SEQ ID NO: 14150 - protein, 495 aa, Homo sapiens
  Payload ID: 2740
  Gene Symbol: CEP63
  Gene Name: centrosomal protein 63kDa
  Uniprot ID: Q96MT8
  ENSP ID: ENSP00000328382
MEALLEGIQNRGHGGGFLTSCEAELQELMKQIDIMVAHKKSEWEGRTHALETCLKIREQELKSLRSQLDVTHKEVGMLHQQVEEHEKIKQEMTMEYKQELKKLHEELCILKRSYEKLQKKQMREFRGNTKNHREDRSEIERLTAKIEEFRQKSLDWEKQRLIYQQQVSSLEAQRKALAEQSEIIQAQLVNRKQKLESVELSSQSEIQHLSSKLERANDTICANELEIERLTMRVNDLVGTSMTVLQEQQQKEEKLRESEKLLEALQEEKRELKAALQSQENLIHEARIQKEKLQEKVKATNTQHAVEAISLESVSATCKQLSQELMEKYEELKRMEAHNNEYKAEIKKLKEQILQGEQSYSSALEGMKMEISHLTQELHQRDITIASTKGSSSDMEKRLRAEMQKAEDKAVEHKEILDQLESLKLENRHLSEMVMKLELGLHECSLPVSPLGSIATRFLEEEELRSHHILERLDAHIEELKRESEKTVRQFTALK

SEQ ID NO: 14151 - protein, 703 aa, Homo sapiens
  Payload ID: 2740
  Gene Symbol: CEP63
  Gene Name: centrosomal protein 63kDa
  Uniprot ID: Q96MT8
  ENSP ID: ENSP00000336524
MEALLEGIQNRGHGGGFLTSCEAELQELMKQIDIMVAHKKSEWEGRTHALETCLKIREQELKSLRSQLDVTHKEVGMLHQQVEEHEKIKQEMTMEYKQELKKLHEELCILKRSYEKLQKKQMREFRGNTKNHREDRSEIERLTAKIEEFRQKSLDWEKQRLIYQQQVSSLEAQRKALAEQSEIIQAQLVNRKQKLESVELSSQSEIQHLSSKLERANDTICANELEIERLTMRVNDLVGTSMTVLQEQQQKEEKLRESEKLLEALQEEKRELKAALQSQENLIHEARIQKEKLQEKVKATNTQHAVEAIRPREESLAEKKYTSQGQGDLDSVLSQLNFTHTSEDLLQAEVTCLEGSLESVSATCKQLSQELMEKYEELKRMEAHNNEYKAEIKKLKEQILQGEQSYSSALEGMKMEISHLTQELHQRDITIASTKGSSSDMEKRLRAEMQKAEDKAVEHKEILDQLESLKLENRHLSEMVMKLELGLHEAKEISLADLQENYIEALNKLVSENQQLQKDLMNTKSQLEISTQMCKKQNDRIFKPTHSRTTEFKNTEFKPTHGQHRHDGIKTEHYKTDLHSPRGQASDSINPMSRVLSPLSPQISPCSSTRSLTSYSLCKTHSLPSALDTNEANFSDTMSESMNDQEEFISSCSLPVSPLGSIATRFLEEEELRSHHILERLDAHIEELKRESEKTVRQFTALK

SEQ ID NO: 14152 - protein, 475 aa, Homo sapiens
  Payload ID: 2740
  Gene Symbol: CEP63
  Gene Name: centrosomal protein 63kDa
  Uniprot ID: Q96MT8
  ENSP ID: ENSP00000346432
MEALLEGIQNRGHGGGFLTSCEAELQELMKQIDIMVAHKKSEWEGRTHALETCLKIREQELKSLRSQLDVTHKEVGMLHQQVEEHEKIKQEMTMEYKQELKKLHEELCILKRSYEKLQKKQMREFRGNTKNHREDRSEIERLTAKIEEFRQKSLDWEKQRLIYQQQVSSLEAQRKALAEQSEIIQAQLVNRKQKLESVELSSQSEIQHLSSKLERANDTICANELEIERLTMRVNDLVGTSMTVLQEQQQKEEKLRESEKLLEALQEEKRELKAALQSQENLIHEARIQKEKLQEKVKATNTQHAVEAISLESVSATCKQLSQELMEKYEELKRMEAHNNEYKAEIKKLKEQILQGEQSYSSALEGMKMEISHLTQELHQRDITIASTKGSSSDMEKRLRAEMQKAEDKAVEHKEILDQLESLKLENRHLSEMVMKLELGLHERWGFTMLSSLVLNFGIQAIRQPQRPKVLELQV

SEQ ID NO: 14153 - protein, 541 aa, Homo sapiens
  Payload ID: 2740
  Gene Symbol: CEP63
  Gene Name: centrosomal protein 63kDa
  Uniprot ID: Q96MT8
  ENSP ID: ENSP00000372716
MEALLEGIQNRGHGGGFLTSCEAELQELMKQIDIMVAHKKSEWEGRTHALETCLKIREQELKSLRSQLDVTHKEVGMLHQQVEEHEKIKQEMTMEYKQELKKLHEELCILKRSYEKLQKKQMREFRGNTKNHREDRSEIERLTAKIEEFRQKSLDWEKQRLIYQQQVSSLEAQRKALAEQSEIIQAQLVNRKQKLESVELSSQSEIQHLSSKLERANDTICANELEIERLTMRVNDLVGTSMTVLQEQQQKEEKLRESEKLLEALQEEKRELKAALQSQENLIHEARIQKEKLQEKVKATNTQHAVEAIRPREESLAEKKYTSQGQGDLDSVLSQLNFTHTSEDLLQAEVTCLEGSLESVSATCKQLSQELMEKYEELKRMEAHNNEYKAEIKKLKEQILQGEQSYSSALEGMKMEISHLTQELHQRDITIASTKGSSSDMEKRLRAEMQKAEDKAVEHKEILDQLESLKLENRHLSEMVMKLELGLHECSLPVSPLGSIATRFLEEEELRSHHILERLDAHIEELKRESEKTVRQFTALK

SEQ ID NO: 14154 - protein, 155 aa, Homo sapiens
  Payload ID: 2740
  Gene Symbol: CEP63
  Gene Name: centrosomal protein 63kDa
  ENSP ID: ENSP00000422685
  MOD_RES (1)..(1): Any amino acid
XMLHQQVEEHEKIKQEMTMEYKQELKKLHEELCILKRSYEKLQKKQMREFRGNTKNHREDRSEIERLTAKIEEFRQKSLDWEKQRLIYQQQAQLVNRKQKLESVELSSQSEIQHLSSKLERANDTICANELEIERLTMRVNDLVGTSMTVLQEQQ

SEQ ID NO: 14155 - protein, 63 aa, Homo sapiens
  Payload ID: 2740
  Gene Symbol: CEP63
  Gene Name: centrosomal protein 63kDa
  ENSP ID: ENSP00000423225
MEALLEGIQNRGHGGGFLTSCEAELQELMKQIDIMVAHKKSEWEGRTHALETCLKIREQELKS

SEQ ID NO: 14156 - protein, 162 aa, Homo sapiens
  Payload ID: 2740
  Gene Symbol: CEP63
  Gene Name: centrosomal protein 63kDa
  ENSP ID: ENSP00000424626
MEALLEGIQNRGHGGGFLTSCEAELQELMKQIDIMVAHKKSEWEGRTHALETCLKIREQELKSLRSQLDVTHKEVGMLHQQVEEHEKIKQEMTMEYKQELKKLHEELCILKRSYEKLQKKQMREFRGNTKNHREDRSEIERLTAKIEEFRQKSLDWEKQRLI

SEQ ID NO: 14157 - protein, 703 aa, Homo sapiens; identical to SEQ ID NO: 14151
  Payload ID: 2740
  Gene Symbol: CEP63
  Gene Name: centrosomal protein 63kDa
  Uniprot ID: Q96MT8
  ENSP ID: ENSP00000426129

SEQ ID NO: 14158 - protein, 245 aa, Homo sapiens
  Payload ID: 2740
  Gene Symbol: CEP63
  Gene Name: centrosomal protein 63kDa
  ENSP ID: ENSP00000426866
  MOD_RES (1)..(1): Any amino acid
XEEKRELKAALQSQENLIHEARIQKEKLQEKVKATNTQHAVEAISLESVSATCKQLSQELMEKYEELKRMEAHNNEYKAEIKKLKEQILQGEQSYSSALEGMKMEISHLTQELHQRDITIASTKGSSSDMEKRLRAEMQKAEDKAVEHKEILDQLESLKLENRHLSEMVMKLELGLHEAKEISLADLQENYIEALNKLVSENQQLQKDLMNTKSQLEISTQMCKKQNDRIFKPTHSRTTEFKNTE

SEQ ID NO: 14159 - protein, 194 aa, Homo sapiens
  Payload ID: 2740
  Gene Symbol: CEP63
  Gene Name: centrosomal protein 63kDa
  ENSP ID: ENSP00000427526
DLDSVLSQLNFTHTSEDLLQAEVTCLEGSLESVSATCKQLSQELMEKYEELKRMEAHNNEYKAEIKKLKEQILQGEQSYSSALEGMKMEISHLTQELHQRDITIASTKGSSSDMEKRLRAEMQKAEDKAVEHKEILDQLESLKLENRHLSEMVMKLELGLHERWGFTMLSSLVLNFGIQAIRQPQRPKVLELQV

SEQ ID NO: 14160 - protein, 703 aa, Homo sapiens; identical to SEQ ID NO: 14151
  Payload ID: 2740
  Gene Symbol: CEP63
  Gene Name: centrosomal protein 63kDa
  Uniprot ID: Q96MT8
  ENSP ID: ENSP00000475903

SEQ ID NO: 14161 - protein, 475 aa, Homo sapiens; identical to SEQ ID NO: 14152
  Payload ID: 2740
  Gene Symbol: CEP63
  Gene Name: centrosomal protein 63kDa
  Uniprot ID: Q96MT8
  ENSP ID: ENSP00000482219

SEQ ID NO: 14162 - protein, 620 aa, Homo sapiens
  Payload ID: 2741
  Gene Symbol: CEP68
  Gene Name: centrosomal protein 68kDa
  Uniprot ID: Q76N32
  ENSP ID: ENSP00000260569
MALGEEKAEAEASEDTKAQSYGRGSCRERELDIPGPMSGEQPPRLEAEGGLISPVWGAEGIPAPTCWIGTDPGGPSRAHQPQASDANREPVAERSEPALSGLPPATMGSGDLLLSGESQVEKTKLSSSEEFPQTLSLPRTTTICSGHDADTEDDPSLADLPQALDLSQQPHSSGLSCLSQWKSVLSPGSAAQPSSCSISASSTGSSLQGHQERAEPRGGSLAKVSSSLEPVVPQEPSSVVGLGPRPQWSPQPVFSGGDASGLGRRRLSFQAEYWACVLPDSLPPSPDRHSPLWNPNKEYEDLLDYTYPLRPGPQLPKHLDSRVPADPVLQDSGVDLDSFSVSPASTLKSPTNVSPNCPPAEATALPFSGPREPSLKQWPSRVPQKQGGMGLASWSQLASTPRAPGSRDARWERREPALRGAKDRLTIGKHLDMGSPQLRTRDRGWPSPRPEREKRTSQSARRPTCTESRWKSEEEVESDDEYLALPARLTQTFCCQLEELICWLYNVADVTDHGTAARSNLTSLKSSLQLYRQFKKDIDEHQSLTESVLQKGEILLQCLLENTPVLEDVLGRIAKQSGELESHADRLYDSILASLDMLAGCTLIPDKKPMAAMEHPCEGV

SEQ ID NO: 14163 - protein, 757 aa, Homo sapiens
  Payload ID: 2741
  Gene Symbol: CEP68
  Gene Name: centrosomal protein 68kDa
  Uniprot ID: Q76N32
  ENSP ID: ENSP00000367229
MALGEEKAEAEASEDTKAQSYGRGSCRERELDIPGPMSGEQPPRLEAEGGLISPVWGAEGIPAPTCWIGTDPGGPSRAHQPQASDANREPVAERSEPALSGLPPATMGSGDLLLSGESQVEKTKLSSSEEFPQTLSLPRTTTICSGHDADTEDDPSLADLPQALDLSQQPHSSGLSCLSQWKSVLSPGSAAQPSSCSISASSTGSSLQGHQERAEPRGGSLAKVSSSLEPVVPQEPSSVVGLGPRPQWSPQPVFSGGDASGLGRRRLSFQAEYWACVLPDSLPPSPDRHSPLWNPNKEYEDLLDYTYPLRPGPQLPKHLDSRVPADPVLQDSGVDLDSFSVSPASTLKSPTNVSPNCPPAEATALPFSGPREPSLKQWPSRVPQKQGGMGLASWSQLASTPRAPGSRDARWERREPALRGAKDRLTIGKHLDMGSPQLRTRDRGWPSPRPEREKRTSQSARRPTCTESRWKSEEEVESDDEYLALPARLTQVSSLVSYLGSISTLVTLPTGDIKGQSPLEVSDSDGPASFPSSSSQSQLPPGAALQGSGDPEGQNPCFLRSFVRAHDSAGEGSLGSSQALGVSSGLLKTRPSLPARLDRWPFSDPDVEGQLPRKGGEQGKESLVQCVKTFCCQLEELICWLYNVADVTDHGTAARSNLTSLKSSLQLYRQFKKDIDEHQSLTESVLQKGEILLQCLLENTPVLEDVLGRIAKQSGELESHADRLYDSILASLDMLAGCTLIPDKKPMAAMEHPCEGV

SEQ ID NO: 14164 - protein, 294 aa, Homo sapiens
  Payload ID: 2741
  Gene Symbol: CEP68
  Gene Name: centrosomal protein 68kDa
  ENSP ID: ENSP00000443357
MGLASWSQLASTPRAPGSRDARWERREPALRGAKDRLTIGKHLDMGSPQLRTRDRGWPSPRPEREKRTSQSARRPTCTESRWKSEEEVESDDEYLALPARLTQVSSLVSYLGSISTLVTLPTGDIKGQSPLEVSDSDGPASFPSSSSQSQLPPGAALQGSGDPEGQNPCFLRSFVRAHDSAGEGSLGSSQALGVSSGLLKTRPSLPARLDRWPFSDPDVEGQLPRKGGEQGKESLVQCVKVMTLNVRKLCVQVSCLFPQSTNIIIKHVHVDQALFMCQALCCTLSYSVLTTFTR

SEQ ID NO: 14165 - protein, 597 aa, Homo sapiens
  Payload ID: 2742
  Gene Symbol: CEP70
  Gene Name: centrosomal protein 70kDa
  Uniprot ID: Q8NHQ1
  ENSP ID: ENSP00000264982
MFPVAPKPQDSSQPSDRLMTEKQQEEAEWESINVLLMMHGLKPLSLVKRTDLKDLIIFDKQSSQRMRQNLKLLVEETSCQQNMIQELIETNQQLRNELQLEQSRAANQEQRANDLEQIMESVKSKIGELEDESLSRACHQQNKIKDLQKEQKTLQVKCQHYKKKRTEQEETIASLQMEVCRLKKEEEDRIVTQNRVFAYLCKRVPHTVLDRQLLCLIDYYESKIRKIHTQRQYKEDESQSEEENDYRNLDASPTYKGLLMSLQNQLKESKSKIDALSSEKLNLQKDLETRPTQHELRLYKQQVKKLEKALKKNVKLQELINHKKAEDTEKKDEPSKYNQQQALIDQRYFQVLCSINSIIHNPRAPVIIYKQTKGGVQNFNKDLVQDCGFEHLVPVIEMWADQLTSLKDLYKSLKTLSAELVPWLNLKKQDENEGIKVEDLLFIVDTMLEEVENKEKDSNMPHFQTLQAIVSHFQKLFDVPSLNGVYPRMNEVYTRLGEMNNAVRNLQELLELDSSSSLCVLVSTVGKLCRLINEDVNEQVMQVLGPEDLQSIIYKLEEHEEFFPAFQAFTNDLLEILEIDDLDAIVPAVKKLKVLSY

SEQ ID NO: 14166 - protein, 554 aa, Homo sapiens
  Payload ID: 2742
  Gene Symbol: CEP70
  Gene Name: centrosomal protein 70kDa
  Uniprot ID: Q8NHQ1
  ENSP ID: ENSP00000417465
MFPVAPKPQDSSQPSDRLMTEKQQEEAEWESINVLLMMHGLKPLSLVKRTDLKDLIIFDKQSSQRMRQNLKLLVEETSCQQNMIQELIETNQQLRNELQLEQSRAANQEQRANDLEQIMESVKSKIGELEDESLSRACHQQNKIKDLQKEQKTLQVKCQHYKKKRTEQEETIASLQMEVCRLKKEEEDRIVTQNRVFAYLCKRVPHTVLDRQLLCLIDYYESKIRKIHTQRQYKEDESQSEEENDYRNLDASPTYKGLLMSLQNQLKESKSKIDALSSEKLNLQKDLETRPTQHELRLYKQQVKKLEKALKKNVKLQELINHKKAEDTEKKDEPSKYNQQQALIDQRYFQVLCSINSIIHNPRAPVIIYKQTKGGVQNFNKDLVQDCGFEHLVPVIEMWADQLTSLKDLYKSLKTLSAELVPWLNLKKQDENEGIKVEDLLFIVDTMLEEVENKEKDSNMPHFQTLQAIVSHFQKLFDVPSLNGVYPRMNEVYTRLGEMNNAVRNLQELLELDSSSSLCVLVSTVGKLCRLINEDVNEQVMQVLGPEDLQRYLF

SEQ ID NO: 14167 - protein, 259 aa, Homo sapiens
  Payload ID: 2742
  Gene Symbol: CEP70
  Gene Name: centrosomal protein 70kDa
  ENSP ID: ENSP00000417819
MTEQEEAEWESINVLLMMHGLKPLSLVKRTDLKDLIIFDKQSSQRMRQNLKLLVEETSCQQNMIQELIETNQQLRNELQLEQSRAANQEQRANDLEQIMESVKSKIGELEDESLSRACHQQNKIKDLQKEQKTLQVKCQHYKKKRTEQEETIASLQMEVCRLKKEEEDRIVTQNRVFAYLCKRVPHTVLDRQLLCLIDYYESKIRKIHTQRQYKEDESQSEEENDYRNLDASPTYKGLLMSLQNQLKESKSKIDALSSE

SEQ ID NO: 14168 - protein, 445 aa, Homo sapiens
  Payload ID: 2742
  Gene Symbol: CEP70
  Gene Name: centrosomal protein 70kDa
  ENSP ID: ENSP00000417821
MTEVKCQHYKKKRTEQEETIASLQMEVCRLKKEEEDRIVTQNRVFAYLCKRVPHTVLDRQLLCLIDYYESKIRKIHTQRQYKEDESQSEEENDYRNLDASPTYKGLLMSLQNQLKESKSKIDALSSEKLNLQKDLETRPTQHELRLYKQQVKKLEKALKKNVKLQELINHKKAEDTEKKDEPSKYNQQQALIDQRYFQVLCSINSIIHNPRAPVIIYKQTKGGVQNFNKDLVQDCGFEHLVPVIEMWADQLTSLKDLYKSLKTLSAELVPWLNLKKQDENEGIKVEDLLFIVDTMLEEVENKEKDSNMPHFQTLQAIVSHFQKLFDVPSLNGVYPRMNEVYTRLGEMNNAVRNLQELLELDSSSSLCVLVSTVGKLCRLINEDVNEQVMQVLGPEDLQSIIYKLEEHEEFFPAFQAFTNDLLEILEIDDLDAIVPAVKKLKVLSY

SEQ ID NO: 14169 - protein, 293 aa, Homo sapiens
  Payload ID: 2742
  Gene Symbol: CEP70
  Gene Name: centrosomal protein 70kDa
  ENSP ID: ENSP00000418131
MTEEEAEWESINVLLMMHGLKPLSLVKRTDLKDLIIFDKQSSQRMRQNLKLLVEETSCQQNMIQELIETNQQLRNELQLEQSRAANQEQRANDLEQIMESVKSKIGELEDESLSRACHQQNKIKDLQKEQKTLQVKCQHYKKKRTEQEETIASLQMEVCRLKKEEEDRIVTQNRVFAYLCKRVPHTVLDRQLLCLIDYYESKIRKIHTQRQYKEDESQSEEENDYRNLDASPTYKGLLMSLQNQLKESKSKIDALSSEKLNLQKDLETRPTQHELRLYKQQVKKLEKALKKNV

SEQ ID NO: 14170 - protein, 71 aa, Homo sapiens
  Payload ID: 2742
  Gene Symbol: CEP70
  Gene Name: centrosomal protein 70kDa
  ENSP ID: ENSP00000418552
LCRLINEDVNEQVMQVLGPEDLQSIIYKLEEHEEFFPAFQAFTNDLLEILEWLFAFRRGDEAWYENKGMSQ

SEQ ID NO: 14171 - protein, 23 aa, Homo sapiens
  Payload ID: 2742
  Gene Symbol: CEP70
  Gene Name: centrosomal protein 70kDa
  ENSP ID: ENSP00000418878
MFPVAPKPQDSSQPSDRLMTEKQ

SEQ ID NO: 14172 - protein, 597 aa, Homo sapiens; identical to SEQ ID NO: 14165
  Payload ID: 2742
  Gene Symbol: CEP70
  Gene Name: centrosomal protein 70kDa
  Uniprot ID: Q8NHQ1
  ENSP ID: ENSP00000419231

SEQ ID NO: 14173 - protein, 212 aa, Homo sapiens
  Payload ID: 2742
  Gene Symbol: CEP70
  Gene Name: centrosomal protein 70kDa
  Uniprot ID: Q8NHQ1
  ENSP ID: ENSP00000419743
MFPVAPKPQDSSQPSDRLMTEKQQEEAEWESINVLLMMHGLKPLSLVKRTDLKDLIIFDKQSSQRMRQNLKLLVEETSCQQNMIQELIETNQQLRNELQLEQSRAANQEQRANDLEQIMESVKSKIGELEDESLSRACHQQNKIKDLQKEQKTLQVKCQHYKKKRTEQEETIASLQMEVCRLKKEEEDRIVTQNRVFAYLCKRVPHTVLDRQ

SEQ ID NO: 14174 - protein, 116 aa, Homo sapiens
  Payload ID: 2742
  Gene Symbol: CEP70
  Gene Name: centrosomal protein 70kDa
  ENSP ID: ENSP00000419817
MFPVAPKPQDSSQPSDRLMTEKQQEEAEWESINVLLMMHGLKPLSLVKRTDLKDLIIFDKQSSQRMRQNLKLLVEETSCQQNMIQELIETNQQLRNELQLEQSRAANQEQRANDLE

SEQ ID NO: 14175 - protein, 579 aa, Homo sapiens
  Payload ID: 2742
  Gene Symbol: CEP70
  Gene Name: centrosomal protein 70kDa
  Uniprot ID: Q8NHQ1
  ENSP ID: ENSP00000419833
MTEKQQEEAEWESINVLLMMHGLKPLSLVKRTDLKDLIIFDKQSSQRMRQNLKLLVEETSCQQNMIQELIETNQQLRNELQLEQSRAANQEQRANDLEQIMESVKSKIGELEDESLSRACHQQNKIKDLQKEQKTLQVKCQHYKKKRTEQEETIASLQMEVCRLKKEEEDRIVTQNRVFAYLCKRVPHTVLDRQLLCLIDYYESKIRKIHTQRQYKEDESQSEEENDYRNLDASPTYKGLLMSLQNQLKESKSKIDALSSEKLNLQKDLETRPTQHELRLYKQQVKKLEKALKKNVKLQELINHKKAEDTEKKDEPSKYNQQQALIDQRYFQVLCSINSIIHNPRAPVIIYKQTKGGVQNFNKDLVQDCGFEHLVPVIEMWADQLTSLKDLYKSLKTLSAELVPWLNLKKQDENEGIKVEDLLFIVDTMLEEVENKEKDSNMPHFQTLQAIVSHFQKLFDVPSLNGVYPRMNEVYTRLGEMNNAVRNLQELLELDSSSSLCVLVSTVGKLCRLINEDVNEQVMQVLGPEDLQSIIYKLEEHEEFFPAFQAFTNDLLEILEIDDLDAIVPAVKKLKVLSY

SEQ ID NO: 14176 - protein, 647 aa, Homo sapiens
  Payload ID: 2743
  Gene Symbol: CEP72
  Gene Name: centrosomal protein 72kDa
  Uniprot ID: Q9P209
  ENSP ID: ENSP00000264935
MARAGPRLVLSEEAVRAKSGLGPHRDLAELQSLSIPGTYQEKITHLGHSLMSLTGLKSLDLSRNSLVSLEGIQYLTALESLNLYYNCISSLAEVFRLHALTELVDVDFRLNPVVKVEPDYRLFVVHLLPKLQQLDDRPVRASERKASRLHFASEDSLDSKESVPASLKEGRPHHPRAKCTEALAKQSLVMDADDEAVLNLIAECEWDLGRPPGSTSFSQKGREADSRGSQESRHLLSPQLVQYQCGDSGKQGRETRRSSCRGCCLEKMPWSQLCGELPPLYGAEPEASRAPRPHTYFTPHPDSMDTEDSASSQKLDLSGEMVPGPLPAPGKCRKRRMPVGRFQTFSDQEGLGCPERTHGSSVPKESLSRQDSSESRNGRTLSQPEASETEEQRSRGVTDTREPSPGSHSALPGKKTALQAALLETLLDLVDRSWGGCRSLHSNEAFLAQARHILSSVEEFTAAQDSSAMVGEDVGSLALESKSLQSRLAEQQQQHAREMSEVTAELHHTHKELDDLRQHLDKSLEENSRLKSLLLSMKKEVKSADTAATLNLQIAGLQTSVKRLCGEIVELKQHLEHYDKIQELTQMLQESHSSLVSTNEHLLQELSQVRAQHRAEVEQMHWSYQELKKTMALFPHSSASHGGCQAC

SEQ ID NO: 14177 - protein, 170 aa, Homo sapiens
  Payload ID: 2743
  Gene Symbol: CEP72
  Gene Name: centrosomal protein 72kDa
  ENSP ID: ENSP00000486426
MARAGPRLVLSEEAVRAKSGLGPHRDLAELQSLSIPGTYQEKITHLGHSLMSLTGLKSLDLSRNSLVSLEGIQYLTALESLNLYYNCISSLAEVFRLHALTELVDVDFRLNPVVKVEPDYRLFVVHLLPKLQQLDDRPVRASERKASRLHFASEDSLDSKESVPASLKEG

SEQ ID NO: 14178 - protein, 659 aa, Homo sapiens
  Payload ID: 2744
  Gene Symbol: CEP76
  Gene Name: centrosomal protein 76kDa
  Uniprot ID: Q8TAP6
  ENSP ID: ENSP00000262127
MSLPPEKASELKQLIHQQLSKMDVHGRIREILAETIREELAPDQQHLSTEDLIKALRRRGIIDDVMKELNFVTDSVEQELPSSPKQPICFDRQSTLKKTNIDPTRRYLYLQVLGGKAFLEHLQEPEPLPGQVCSTFTLCLHYRNQRFRSKPVPCACEPDFHDGFLLEVHRESLGDGTRMADSTTMLSISDPIHMVLIKTDIFGETTLVASYFLEWRSVLGSENGVTSLTVELMGVGTESKVSVGILNIKLEMYPPLNQTLSQEVVNTQLALERQKTAEKERLFLVYAKQWWREYLQIRPSHNSRLVKIFAQDENGINRPVCSYVKPLRAGRLLDTPRQAARFVNVLGYERAPVIGGGGKQEQWCTLLAFLCRNKGDCEDHANLLCSLLLGYGLEAFVCVGTKAKGVPHAWVMTCGTDGAITFWESLTGHRYIHKPTNPDEPPVAEQPKPLYPYRTIGCVFNHQMFLGNCQPSDAVETCVFDLNDESKWKPMSEEAIKSVCAPGATTSLPPFPPLCASTIDASVTSNEIEMQLRLLVSEHRKDLGLTTVWEDQLSYLLSPALASYEFERTTSISAGNEEFQDAIRRAVPDGHTFKGFPIHFVYRNARRAFATCLRSPFCEEIICCRGDQVRLAVRVRVFTYPESACAVWIMFACKYRSVL

SEQ ID NO: 14179 - protein, 584 aa, Homo sapiens
  Payload ID: 2744
  Gene Symbol: CEP76
  Gene Name: centrosomal protein 76kDa
  Uniprot ID: Q8TAP6
  ENSP ID: ENSP00000403074
MSLPPEKASELKQLIHQQLSKMDVHGRIREILAETIREELAPDQQHLSTEDLIKALRRRGIIDDVMKELNFVTDSVEQELPSSPKQPICFDRQSTLKKSDGTRMADSTTMLSISDPIHMVLIKTDIFGETTLVASYFLEWRSVLGSENGVTSLTVELMGVGTESKVSVGILNIKLEMYPPLNQTLSQEVVNTQLALERQKTAEKERLFLVYAKQWWREYLQIRPSHNSRLVKIFAQDENGINRPVCSYVKPLRAGRLLDTPRQAARFVNVLGYERAPVIGGGGKQEQWCTLLAFLCRNKGDCEDHANLLCSLLLGYGLEAFVCVGTKAKGVPHAWVMTCGTDGAITFWESLTGHRYIHKPTNPDEPPVAEQPKPLYPYRTIGCVFNHQMFLGNCQPSDAVETCVFDLNDESKWKPMSEEAIKSVCAPGATTSLPPFPPLCASTIDASVTSNEIEMQLRLLVSEHRKDLGLTTVWEDQLSYLLSPALASYEFERTTSISAGNEEFQDAIRRAVPDGHTFKGFPIHFVYRNARRAFATCLRSPFCEEIICCRGDQVRLAVRVRVFTYPESACAVWIMFACKYRSVL

SEQ ID NO: 14180 - protein, 74 aa, Homo sapiens
  Payload ID: 2744
  Gene Symbol: CEP76
  Gene Name: centrosomal protein 76kDa
  ENSP ID: ENSP00000464760
MSLPPEKASELKQLIHQQLSKMDVHGRIREILAETIREELAPDQQHLSTEDLIKALRRRGIIDDVMKELNFVTC

SEQ ID NO: 14181 - protein, 178 aa, Homo sapiens
  Payload ID: 2744
  Gene Symbol: CEP76
  Gene Name: centrosomal protein 76kDa
  ENSP ID: ENSP00000464911
NIKLEMYPPLNQTLSQEVVNTQDENGINRPVCSYVKPLRAGRLLDTPRQAARFVNVLGYERAPVIGGGGKQEQWCTLLAFLCRNKGDCEDHANLLCSLLLGYGLEAFVCVGTKAKGVPHAWVMTCGTDGAITFWESLTGHRYIHKPTNPDEPPVAEQPKPLYPYRTIGCVFNHQMFLG

SEQ ID NO: 14182 - protein, 74 aa, Homo sapiens; identical to SEQ ID NO: 14180
  Payload ID: 2744
  Gene Symbol: CEP76
  Gene Name: centrosomal protein 76kDa
  ENSP ID: ENSP00000466689

SEQ ID NO: 14183 - protein, 112 aa, Homo sapiens
  Payload ID: 2744
  Gene Symbol: CEP76
  Gene Name: centrosomal protein 76kDa
  ENSP ID: ENSP00000466833
MSLPPEKASELKQLIHQQLSKMDVHGRIREILAETIREELAPDQQHLSTEDLIKALRRRGIIDDVMKELNFVTDSVEQELPSSPKQPICFDRQSTLKKSFGWKSFLGTSART

SEQ ID NO: 14184 - protein, 191 aa, Homo sapiens
  Payload ID: 2744
  Gene Symbol: CEP76
  Gene Name: centrosomal protein 76kDa
  ENSP ID: ENSP00000467224
EPLPGQVCSTFTLCLHYRNQRFRSKPVPCACEPDFHDGFLLEVHRESLGDGTRMADSTTMLSISDPIHMVLIKTDIFGETTLVASYFLEWRSVLGSENGVTSLTVELMGVGTESKVSVGILNIKLEMYPPLNQTLSQEVVNTQLALERQKTAEKERLFLVYAKQWWREYLQIRPSHNSRLVKIFAQVCKLY

SEQ ID NO: 14185 - protein, 101 aa, Homo sapiens
  Payload ID: 2744
  Gene Symbol: CEP76
  Gene Name: centrosomal protein 76kDa
  ENSP ID: ENSP00000467361
  MOD_RES (1)..(1): Any amino acid
XWRSVLGSENGVTSLTVELMGTESKVSVGILNIKLEMYPPLNQTLSQEVVNTQLALERQKTAEKERLFLVYAKQWWREYLQIRPSHNSRLVKIFAQVCKLY

SEQ ID NO: 14186 - protein, 705 aa, Homo sapiens
  Payload ID: 2745
  Gene Symbol: CEP78
  Gene Name: centrosomal protein 78kDa
  ENSP ID: ENSP00000277082
MIDSVKLRRDSAADFFSHYEYLCALQNSVPLPAVRACLREGVLDFNADRLRGVDWAPLLSTLKINKDLPLVSIKSFFQPWLGDTGSDMNKFCRSRVPAIRYKDVTFQLCKALKGCLSISSVLKNLELNGLILRERDLTILAKGLNKSASLVHLSLANCPIGDGGLEIICQGIKSSITLKTVNFTGCNLTWQGADHMAKILKYQTMRRHEETWAESLRYRRPDLDCMAGLRRITLNCNTLIGDLGACAFADSLSEDLWLRALDLQQCGLTNEGAKALLEALETNTTLVVLDIRKNPLIDHSMMKAVIKKVLQNGRSAKSEYQWITSPSVKEPSKTAKQKRRTIILGSGHKGKATIRIGLATKKPVSSGRKHSLGKEYYAPAPLPPGVSGFLPWRTAERAKRHRGFPLIKTRDICNQLQQPGFPVTVTVESPSSSEVEEVDDSSESVHEVPEKTSIEQEALQEKLEECLKQLKEERVIRLKVDKRVSELEHENAQLRNINFSLSEALHAQSLTNMILDDEGVLGSIENSFQKFHAFLDLLKDAGLGQLATMAGIDQSDFQLLGHPQMTSTVSNPPKEEKKALEDEKPEPKQNALGQMQNIQFQKITGDARIPLPLDSFPVPVSTPEGLGTSSNNLGVPATEQRQESFEGFIARMCSPSPDATSGTGSQRKEEELSRNSRSSSEKKTKTGEYTKKHSDKQHPGKDLHS

SEQ ID NO: 14187 - protein, 722 aa, Homo sapiens
  Payload ID: 2745
  Gene Symbol: CEP78
  Gene Name: centrosomal protein 78kDa
  Uniprot ID: Q5JTW2
  ENSP ID: ENSP00000365782
MIDSVKLRRDSAADFFSHYEYLCALQNSVPLPAVRACLREGVLDFNADRLRGVDWAPLLSTLKINKDLPLVSIKSFFQPWLGDTGSDMNKFCRSRVPAIRYKDVTFQLCKALKGCLSISSVLKNLELNGLILRERDLTILAKGLNKSASLVHLSLANCPIGDGGLEIICQGIKSSITLKTVNFTGCNLTWQGADHMAKILKYQTMRRHEETWAESLRYRRPDLDCMAGLRRITLNCNTLIGDLGACAFADSLSEDLWLRALDLQQCGLTNEGAKALLEALETNTTLVVLDIRKNPLIDHSMMKAVIKKVLQNGRSAKSEYQWITSPSVKEPSKTAKQKRRTIILGSGHKGKATIRIVGLATKKPVSSGRKHSLGKEYYAPAPLPPGVSGFLPWRTAERAKRHRGFPLIKTRDICNQLQQPGFPVTVTVESPSSSEVEEVDDSSESVHEVPEKTSIEQEALQEKLEECLKQLKEERVIRLKVDKRVSELEHENAQLRNINFSLSEALHAQSLTNMILDDEGVLGSIENSFQKFHAFLDLLKDAGLGQLATMAGIDQSDFQLLGHPQMTSTVSNPPKEEKKALEDEKPEPKQNALGQMQNIQVSICMQSAYNEGTLMKFQKITGDARIPLPLDSFPVPVSTPEGLGTSSNNLGVPATEQRQESFEGFIARMCSPSPDATSGTGSQRKEEELSRNSRSSSEKKTKTGEYTKKHSDKQHPGKDLHS

SEQ ID NO: 14188 - protein, 705 aa, Homo sapiens
  Payload ID: 2745
  Gene Symbol: CEP78
  Gene Name: centrosomal protein 78kDa
  Uniprot ID: Q5JTW2
  ENSP ID: ENSP00000365783
MIDSVKLRRDSAADFFSHYEYLCALQNSVPLPAVRACLREGVLDFNADRLRGVDWAPLLSTLKINKDLPLVSIKSFFQPWLGDTGSDMNKFCRSRVPAIRYKDVTFQLCKALKGCLSISSVLKNLELNGLILRERDLTILAKGLNKSASLVHLSLANCPIGDGGLEIICQGIKSSITLKTVNFTGCNLTWQGADHMAKILKYQTMRRHEETWAESLRYRRPDLDCMAGLRRITLNCNTLIGDLGACAFADSLSEDLWLRALDLQQCGLTNEGAKALLEALETNTTLVVLDIRKNPLIDHSMMKAVIKKVLQNGRSAKSEYQWITSPSVKEPSKTAKQKRRTIILGSGHKGKATIRIGLATKKPVSSGRKHSLGKEYYAPAPLPPGVSGFLPWRTAERAKRHRGFPLIKTRDICNQLQQPGFPVTVTVESPSSSEVEEVDDSSESVHEVPEKTSIEQEALQEKLEECLKQLKEERVIRLKVDKRVSELEHENAQLRNINFSLSEALHAQSLTNMILDDEGVLGSIENSFQKFHAFLDLLKDAGLGQLATMAGIDQSDFQLLGHPQMTSTVSNPPKEEKKALEDEKPEPKQNALGQMQNIQVSICMQSAYNEGTLMKFQKITGDARIPLPLDSFPVPVSTPEGLGTSSNNLGVPATEQRQESFEGFIARMCSPSPDATSGTGSQRKEEELSRNSRSSSEKKTKTESH

SEQ ID NO: 14189 - protein, 706 aa, Homo sapiens
  Payload ID: 2745
  Gene Symbol: CEP78
  Gene Name: centrosomal protein 78kDa
  Uniprot ID: Q5JTW2
  ENSP ID: ENSP00000399286
MIDSVKLRRDSAADFFSHYEYLCALQNSVPLPAVRACLREGVLDFNADRLRGVDWAPLLSTLKINKDLPLVSIKSFFQPWLGDTGSDMNKFCRSRVPAIRYKDVTFQLCKALKGCLSISSVLKNLELNGLILRERDLTILAKGLNKSASLVHLSLANCPIGDGGLEIICQGIKSSITLKTVNFTGCNLTWQGADHMAKILKYQTMRRHEETWAESLRYRRPDLDCMAGLRRITLNCNTLIGDLGACAFADSLSEDLWLRALDLQQCGLTNEGAKALLEALETNTTLVVLDIRKNPLIDHSMMKAVIKKVLQNGRSAKSEYQWITSPSVKEPSKTAKQKRRTIILGSGHKGKATIRIVGLATKKPVSSGRKHSLGKEYYAPAPLPPGVSGFLPWRTAERAKRHRGFPLIKTRDICNQLQQPGFPVTVTVESPSSSEVEEVDDSSESVHEVPEKTSIEQEALQEKLEECLKQLKEERVIRLKVDKRVSELEHENAQLRNINFSLSEALHAQSLTNMILDDEGVLGSIENSFQKFHAFLDLLKDAGLGQLATMAGIDQSDFQLLGHPQMTSTVSNPPKEEKKALEDEKPEPKQNALGQMQNIQFQKITGDARIPLPLDSFPVPVSTPEGLGTSSNNLGVPATEQRQESFEGFIARMCSPSPDATSGTGSQRKEEELSRNSRSSSEKKTKTGEYTKKHSDKQHPGKDLHS

SEQ ID NO: 14190 - protein, 689 aa, Homo sapiens
  Payload ID: 2745
  Gene Symbol: CEP78
  Gene Name: centrosomal protein 78kDa
  Uniprot ID: Q5JTW2
  ENSP ID: ENSP00000411284
MIDSVKLRRDSAADFFSHYEYLCALQNSVPLPAVRACLREGVLDFNADRLRGVDWAPLLSTLKINKDLPLVSIKSFFQPWLGDTGSDMNKFCRSRVPAIRYKDVTFQLCKALKGCLSISSVLKNLELNGLILRERDLTILAKGLNKSASLVHLSLANCPIGDGGLEIICQGIKSSITLKTVNFTGCNLTWQGADHMAKILKYQTMRRHEETWAESLRYRRPDLDCMAGLRRITLNCNTLIGDLGACAFADSLSEDLWLRALDLQQCGLTNEGAKALLEALETNTTLVVLDIRKNPLIDHSMMKAVIKKVLQNGRSAKSEYQWITSPSVKEPSKTAKQKRRTIILGSGHKGKATIRIGLATKKPVSSGRKHSLGKEYYAPAPLPPGVSGFLPWRTAERAKRHRGFPLIKTRDICNQLQQPGFPVTVTVESPSSSEVEEVDDSSESVHEVPEKTSIEQEALQEKLEECLKQLKEERVIRLKVDKRVSELEHENAQLRNINFSLSEALHAQSLTNMILDDEGVLGSIENSFQKFHAFLDLLKDAGLGQLATMAGIDQSDFQLLGHPQMTSTVSNPPKEEKKALEDEKPEPKQNALGQMQNIQFQKITGDARIPLPLDSFPVPVSTPEGLGTSSNNLGVPATEQRQESFEGFIARMCSPSPDATSGTGSQRKEEELSRNSRSSSEKKTKTESH

SEQ ID NO: 14191 - protein, 701 aa, Homo sapiens
  Payload ID: 2746
  Gene Symbol: CEP83
  Gene Name: centrosomal protein 83kDa
  ENSP ID: ENSP00000344655
MVVSTFTDMDTFPNNFPPGGDSGLTGSQSEFQKMLIDERLRCEHHKANYQTLKAEHTRLQNEHVKLQNELKHLFNEKQTQQEKLQLLLEELRGELVEKTKDLEEMKLQILTPQKLELLRAQIQQELETPMRERFRNLDEEVEKYRAVYNKLRYEHTFLKSEFEHQKEEYARILDEGKIKYESEIARLEEDKEELRNQLLNVDLTKDSKRVEQLAREKVYLCQKLKGLEAEVAELKAEKENSEAQVENAQRIQVRQLAEMQATVRSLEAEKQSANLRAERLEKELQSSSEQNTFLINKLHKAEREINTLSSKVKELKHSNKLEITDIKLETARAKSELERERNKIQSELDGLQSDNEILKAAVEHHKVLLVEKDRELIRKVQAAKEEGYQKLVVLQDEKLELENRLADLEKMKVEHDVWRQSEKDQYEEKLRASQMAEEITRKELQSVRLKLQQQIVTIENAEKEKNENSDLKQQISSLQIQVTSLAQSENDLLNSNQMLKEMVERLKQECRNFRSQAEKAQLEAEKTLEEKQIQWLEEKHKLHERITDREEKYNQAKEKLQRAAIAQKKRKSLHENKLKRLQEKVEVLEAKKEELETENQVLNRQNVPFEDYTRLQKRLKDIQRRHNEFRSLILVPNMPPTASINPVSFQSSAMVPSMELPFPPHMQEEQHQRELSLLRKRLEELETTQRKQLEELGSSGE

SEQ ID NO: 14192 - protein, 472 aa, Homo sapiens [sequence omitted]

SEQ ID NO: 14193 - protein, 701 aa, Homo sapiens; identical to SEQ ID NO: 14191
  Payload ID: 2746
  Gene Symbol: CEP83
  Gene Name: centrosomal protein 83kDa
  ENSP ID: ENSP00000380911

SEQ ID NO: 14194 - protein, 165 aa, Homo sapiens
  Payload ID: 2746
  Gene Symbol: CEP83
  Gene Name: centrosomal protein 83kDa
  ENSP ID: ENSP00000447094
EEKHKLHERITDREEKYNQAKEKLQRAAIAQKKRKSLHENKLKRLQEKVEVLEAKKEELETENQVLNRQNVPFEDYTRLQKRLKDIQRRHNEFRSLILVPNMPPTASINPVSFQSSAMVPSMELPFPPHMQEEQHQRELSLLRKRLEELETTQRKQLEELGSSGE

SEQ ID NO: 14195 - protein, 2 aa, Homo sapiens
  Payload ID: 2746
  Gene Symbol: CEP83
  Gene Name: centrosomal protein 83kDa
  ENSP ID: ENSP00000447449
MV

SEQ ID NO: 14196 - protein, 568 aa, Homo sapiens
  Payload ID: 2746
  Gene Symbol: CEP83
  Gene Name: centrosomal protein 83kDa
  Uniprot ID: Q9Y592
  ENSP ID: ENSP00000447783
MLIDERLRCEHHKANYQTLKAEHTRLQNEHVKLQNELKHLFNEKQTQQEKLQLLLEELRGELVEKTKDLEEMKLQILTPQKLELLRAQIQQELETPMRERFRNLDEEVEKYRAVYNKLRYEHTFLKSEFEHQKEEYARILDEGKIKYESEIARLEEDKEELRNQLLNVDLTKDSKRVEQLAREKVYLCQKLKGLEAEVAELKAEKENSEAQVENAQRIQVRQLAEMQATVRSLEAEKQSANLRAERLEKELQSSSEQNTFLINKLHKAEREINTLSSKVKELKHSNKLEITDIKLETARAKSELERERNKIQSELDGLQSDNEILKAAVEHHKVLLVEKDRELIRKVQAAKEEGYQKLVVLQDEKLELENRLADLEKMKVEHDVWRQSEKDQYEEKLRASQMAEEITRKELQSVRLKLQQQIVTIENAEKEKNENSDLKQQISSLQIQVTSLAQSENDLLNSNQMLKEMVERLKQECRNFRSQAEKAQLEAEKTLEEKQIQWLEEKHKLHERITDREEKYNQAKEKLQRAAIAQKKLEQDLELGCPSVTDTYRESVFPPPPLKRDLLK

SEQ ID NO: 14197 - protein, 352 aa, Homo sapiens
  Payload ID: 2746
  Gene Symbol: CEP83
  Gene Name: centrosomal protein 83kDa
  ENSP ID: ENSP00000448913
MVVSTFTDMDTFPNNFPPGGDSGLTGSQSEFQKMLIDERLRCEHHKANYQTLKAEHTRLQNEHVKLQNELKHLFNEKQTQQEKLQLLLEELRGELVEKTKDLEEMKLQILTPQKLELLRAQIQQELETPMRERFRNLDEEVEKYRAVYNKLRYEHTFLKSEFEHQKEEYARILDEGKIKYESEIARLEEDKEELRNQLLNVDLTKDSKRVEQLAREKVYLCQKLKGLEAEVAELKAEKENSEAQVENAQRIQVRQLAEMQATVRSLEAEKQSANLRAERLEKELQSSSEQNTFLINKLHKAEREINTLSSKVKELKHSNKLEITDIKLETARAKSELERERNKIQSELDGNM

SEQ ID NO: 14198 - protein, 762 aa, Homo sapiens
  Payload ID: 2747
  Gene Symbol: CEP85
  Gene Name: centrosomal protein 85kDa
  Uniprot ID: Q6P2H3
  ENSP ID: ENSP00000252992
MAMQEKYPTEGISHVTSPSSDVIQKGSSLGTEWQTPVISEPFRSRFSRCSSVADSGDTAIGTSCSDIAEDFCSSSGSPPFQPIKSHVTIPTAHVMPSTLGTSPAKPNSTPVGPSSSKLPLSGLAESVGMTRNGDLGAMKHSPGLSRDLMYFSGATGENGIEQSWFPAVGHERQEEARKFDIPSMESTLNQSAMMETLYSDPHHRVRFHNPRTSTSKELYRVLPEAKKAPGSGAVFERNGPHSNSSGVLPLGLQPAPGLSKPLPSQVWQPSPDTWHPREQSCELSTCRQQLELIRLQMEQMQLQNGAICHHPAAFGPSLPILEPAQWISILNSNEHLLKEKELLIDKQRKHISQLEQKVRESELQVHSALLGRPAPFGDVCLLRLQELQRENTFLRAQFAQKTEALSREKIDLEKKLSASEVEVQLIRESLKVALQKHSEEVKKQEERVKGRDKHINNLKKKCQKESEQNREKQQRIETLERYLADLPTLEDHQKQSQQLKDSELKSTELQEKVTELESLLEETQAICREKEIQLESLRQREAEFSSAGHSLQDKQSVEETSGEGPEVEMESWQKRYDSLQKIVEKQQQKMDQLRSQVQSLEQEVAQEEGTSQALREEAQRRDSALQQLRTAVKELSVQNQDLIEKNLTLQEHLRQAQPGSPPSPDTAQLALELHQELASCLQDLQAVCSIVTQRAQGHDPNLSLLLGIHSAQHPETQLDLQKPDVIKRKLEEVQQLRRDIEDLRTTMSDRYAQDMGENCVTQ

SEQ ID NO: 14199 - protein, 435 aa, Homo sapiens
  Payload ID: 2747
  Gene Symbol: CEP85
  Gene Name: centrosomal protein 85kDa
  ENSP ID: ENSP00000391790
  MOD_RES (1)..(1): Any amino acid
XSILNSNEHLLKEKELLIDKQRKHISQLEQKVRESELQVHSALLGRPAPFGDVCLLRLQELQRENTFLRAQFAQKTEALSREKIDLEKKLSASEVEVQLIRESLKVALQKHSEEVKKQEERVKGRDKHINNLKKKCQKESEQNREKQQRIETLERYLADLPTLEDHQKQSQQLKDSELKSTELQEKVTELESLLEETQAICREKEIQLESLRQREAEFSSAGHSLQDKQSVEETSGEGPEVEMESWQKRYDSLQKIVEKQQQKMDQLRSQVQSLEQEVAQEEGTSQALREEAQRRDSALQQLRTAVKELSVQNQDLIEKNLTLQEHLRQAQPGSPPSPDTAQLALELHQELASCLQDLQAVCSIVTQRAQGHDPNLSLLLGIHSQHPETQLDLQKPDVIKRKLEEVQQLRRDIEDLRTTMSDRYAQDMGENCVTQ

SEQ ID NO: 14200 - protein, 711 aa, Homo sapiens
  Payload ID: 2747
  Gene Symbol: CEP85
  Gene Name: centrosomal protein 85kDa
  Uniprot ID: Q6P2H3
  ENSP ID: ENSP00000417002
MAMQEKYPTEGISHVTSPNFCSSSGSPPFQPIKSHVTIPTAHVMPSTLGTSPAKPNSTPVGPSSSKLPLSGLAESVGMTRNGDLGAMKHSPGLSRDLMYFSGATGENGIEQSWFPAVGHERQEEARKFDIPSMESTLNQSAMMETLYSDPHHRVRFHNPRTSTSKELYRVLPEAKKAPGSGAVFERNGPHSNSSGVLPLGLQPAPGLSKPLPSQVWQPSPDTWHPREQSCELSTCRQQLELIRLQMEQMQLQNGAICHHPAAFGPSLPILEPAQWISILNSNEHLLKEKELLIDKQRKHISQLEQKVRESELQVHSALLGRPAPFGDVCLLRLQELQRENTFLRAQFAQKTEALSREKIDLEKKLSASEVEVQLIRESLKVALQKHSEEVKKQEERVKGRDKHINNLKKKCQKESEQNREKQQRIETLERYLADLPTLEDHQKQSQQLKDSELKSTELQEKVTELESLLEETQAICREKEIQLESLRQREAEFSSAGHSLQDKQSVEETSGEGPEVEMESWQKRYDSLQKIVEKQQQKMDQLRSQVQSLEQEVAQEEGTSQALREEAQRRDSALQQLRTAVKELSVQNQDLIEKNLTLQEHLRQAQPGSPPSPDTAQLALELHQELASCLQDLQAVCSIVTQRAQGHDPNLSLLLGIHSAQHPETQLDLQKPDVIKRKLEEVQQLRRDIEDLRTTMSDRYAQDMGENCVTQ

SEQ ID NO: 14201 - protein, 761 aa, Homo sapiens
  Payload ID: 2747
  Gene Symbol: CEP85
  Gene Name: centrosomal protein 85kDa
  Uniprot ID: Q6P2H3
  ENSP ID: ENSP00000432354
MAMQEKYPTEGISHVTSPSSDVIQKGSSLGTEWQTPVISEPFRSRFSRCSSVADSGDTAIGTSCSDIAEDFCSSSGSPPFQPIKSHVTIPTAHVMPSTLGTSPAKPNSTPVGPSSSKLPLSGLAESVGMTRNGDLGAMKHSPGLSRDLMYFSGATGENGIEQSWFPAVGHERQEEARKFDIPSMESTLNQSAMMETLYSDPHHRVRFHNPRTSTSKELYRVLPEAKKAPGSGAVFERNGPHSNSSGVLPLGLQPAPGLSKPLPSQVWQPSPDTWHPREQSCELSTCRQQLELIRLQMEQMQLQNGAICHHPAAFGPSLPILEPAQWISILNSNEHLLKEKELLIDKQRKHISQLEQKVRESELQVHSALLGRPAPFGDVCLLRLQELQRENTFLRAQFAQKTEALSREKIDLEKKLSASEVEVQLIRESLKVALQKHSEEVKKQEERVKGRDKHINNLKKKCQKESEQNREKQQRIETLERYLADLPTLEDHQKQSQQLKDSELKSTELQEKVTELESLLEETQAICREKEIQLESLRQREAEFSSAGHSLQDKQSVEETSGEGPEVEMESWQKRYDSLQKIVEKQQQKMDQLRSQVQSLEQEVAQEEGTSQALREEAQRRDSALQQLRTAVKELSVQNQDLIEKNLTLQEHLRQAQPGSPPSPDTAQLALELHQELASCLQDLQAVCSIVTQRAQGHDPNLSLLLGIHSQHPETQLDLQKPDVIKRKLEEVQQLRRDIEDLRTTMSDRYAQDMGENCVTQ

SEQ ID NO: 14202 - protein, 394 aa, Homo sapiens
  Payload ID: 2748
  Gene Symbol: CEP85L
  Gene Name: centrosomal protein 85kDa-like
  Uniprot ID: Q5SZL2
  ENSP ID: ENSP00000353434
MPSNSSASISKLRESLTPDGSKWSTSLMQTLGNHSRGEQDSSLDMKDFRPLRKWSSLSKLTAPDNCGQGGTVCREESRNGLEKIGKAKALTSQLRTIGPSCLHDSMEMLRLEDKEINKKRSSTLDCKYKFESCSKEDFRASSSTLRRQPVDMTYSALPESKPIMTSSEAFEPPKYLMLGQQAVGGVPIQPSVRTQMWLTEQLRTNPLEGRNTEDSYSLAPWQQQQIEDFRQGSETPMQVLTGSSRQSYSPGYQDFSKWESMLKIKEGLLRQKEIVIDRQKQQITHLHERIRDNELRAQHAMLGHYVNCEDSYVASLQPQYENTSLQTPFSEESVSHSQQGEFEQKLASTEKEVLQLNEFLKQRLSLFSEEKKKLEEKVGFSNKVELGQQHFLSI

SEQ ID NO: 14203 - protein, 808 aa, Homo sapiens
  Payload ID: 2748
  Gene Symbol: CEP85L
  Gene Name: centrosomal protein 85kDa-like
  Uniprot ID: Q5SZL2
  ENSP ID: ENSP00000357474
MIWRNNWKSTTGRLNVKLQSDKLQHGCGPDYSSAWLPANESLWQATTVPSNHRNNHIRRHSIASDSGDTGIGTSCSDSVEDHSTSSGTLSFKPSQSLITLPTAHVMPSNSSASISKLRESLTPDGSKWSTSLMQTLGNHSRGEQDSSLDMKDFRPLRKWSSLSKLTAPDNCGQGGTVCREESRNGLEKIGKAKALTSQLRTIGPSCLHDSMEMLRLEDKEINKKRSSTLDCKYKFESCSKEDFRASSSTLRRQPVDMTYSALPESKPIMTSSEAFEPPKYLMLGQQAVGGVPIQPSVRTQMWLTEQLRTNPLEGRNTEDSYSLAPWQQQQIEDFRQGSETPMQVLTGSSRQSYSPGYQDFSKWESMLKIKEGLLRQKEIVIDRQKQQITHLHERIRDNELRAQHAMLGHYVNCEDSYVASLQPQYENTSLQTPFSEESVSHSQQGEFEQKLASTEKEVLQLNEFLKQRLSLFSEEKKKLEEKLKTRDRYISSLKKKCQKESEQNKEKQRRIETLEKYLADLPTLDDVQSQSLQLQILEEKNKNLQEALIDTEKKLEEIKKQCQDKETQLICQKKKEKELVTTVQSLQQKVERCLEDGIRLPMLDAKQLQNENDNLRQQNETASKIIDSQQDEIDRMILEIQSMQGKLSKEKLTTQKMMEELEKKERNVQRLTKALLENQRQTDETCSLLDQGQEPDQSRQQTVLSKRPLFDLTVIDQLFKEMSCCLFDLKALCSILNQRAQGKEPNLSLLLGIRSMNCSAEETENDHSTETLTKKLSDVCQLRRDIDELRTTISDRYAQDMGDNCITQ

SEQ ID NO: 14204 - protein, 805 aa, Homo sapiens
  Payload ID: 2748
  Gene Symbol: CEP85L
  Gene Name: centrosomal protein 85kDa-like
  Uniprot ID: Q5SZL2
  ENSP ID: ENSP00000357477
MWGRFLAPEASGRDSPGGARSFPAGPDYSSAWLPANESLWQATTVPSNHRNNHIRRHSIASDSGDTGIGTSCSDSVEDHSTSSGTLSFKPSQSLITLPTAHVMPSNSSASISKLRESLTPDGSKWSTSLMQTLGNHSRGEQDSSLDMKDFRPLRKWSSLSKLTAPDNCGQGGTVCREESRNGLEKIGKAKALTSQLRTIGPSCLHDSMEMLRLEDKEINKKRSSTLDCKYKFESCSKEDFRASSSTLRRQPVDMTYSALPESKPIMTSSEAFEPPKYLMLGQQAVGGVPIQPSVRTQMWLTEQLRTNPLEGRNTEDSYSLAPWQQQQIEDFRQGSETPMQVLTGSSRQSYSPGYQDFSKWESMLKIKEGLLRQKEIVIDRQKQQITHLHERIRDNELRAQHAMLGHYVNCEDSYVASLQPQYENTSLQTPFSEESVSHSQQGEFEQKLASTEKEVLQLNEFLKQRLSLFSEEKKKLEEKLKTRDRYISSLKKKCQKESEQNKEKQRRIETLEKYLADLPTLDDVQSQSLQLQILEEKNKNLQEALIDTEKKLEEIKKQCQDKETQLICQKKKEKELVTTVQSLQQKVERCLEDGIRLPMLDAKQLQNENDNLRQQNETASKIIDSQQDEIDRMILEIQSMQGKLSKEKLTTQKMMEELEKKERNVQRLTKALLENQRQTDETCSLLDQGQEPDQSRQQTVLSKRPLFDLTVIDQLFKEMSCCLFDLKALCSILNQRAQGKEPNLSLLLGIRSMNCSAEETENDHSTETLTKKLSDVCQLRRDIDELRTTISDRYAQDMGDNCITQ

SEQ ID NO: 14205 - protein, 499 aa, Homo sapiens
  Payload ID: 2748
  Gene Symbol: CEP85L
  Gene Name: centrosomal protein 85kDa-like
  Uniprot ID: Q5SZL2
  ENSP ID: ENSP00000376288
MIWRNNWKSTTGRLNVKLQSDKLQHGCGPDYSSAWLPANESLWQATTVPSNHRNNHIRRHSIASDSGDTGIGTSCSDSVEDHSTSSGTLSFKPSQSLITLPTAHVMPSNSSASISKLRESLTPDGSKWSTSLMQTLGNHSRGEQDSSLDMKDFRPLRKWSSLSKLTAPDNCGQGGTVCREESRNGLEKIGKAKALTSQLRTIGPSCLHDSMEMLRLEDKEINKKRSSTLDCKYKFESCSKEDFRASSSTLRRQPVDMTYSALPESKPIMTSSEAFEPPKYLMLGQQAVGGVPIQPSVRTQMWLTEQLRTNPLEGRNTEDSYSLAPWQQQQIEDFRQGSETPMQVLTGSSRQSYSPGYQDFSKWESMLKIKEGLLRQKEIVIDRQKQQITHLHERIRDNELRAQHAMLGHYVNCEDSYVASLQPQYENTSLQTPFSEESVSHSQQGEFEQKLASTEKEVLQLNEFLKQRLSLFSEEKKKLEEKVGFSNKVELGQQHFLSI

SEQ ID NO: 14206 - protein, 576 aa, Homo sapiens
  Payload ID: 2748
  Gene Symbol: CEP85L
  Gene Name: centrosomal protein 85kDa-like
  ENSP ID: ENSP00000392131
MIWRNNWKSTTGRLNVKLQSDKLQHGCGPDYSSAWLPANESLWQATTVPSNHRNNHIRRHSIASDSGDTGIGTSCSDSVEDHSTSSGTLSFKPSQSLITLPTAHVMPSNSSASISKLRESLTPDGSKWSTSLMQTLGNHSRGEQDSSLDMKDFRPLRKWSSLSKLTAPDNCGQGGTVCREESRNGLEKIGKAKALTSQLRTIGPSCLHDSMEMLRLEDKEINKKRSSTLDCKYKFESCSKEDFRASSSTLRRQPVDMTYSALPESKPIMTSSEAFEPPKYLMLGQQAVGGVPIQPSVRTQMWLTEQLRTNPLEGRNTEDSYSLAPWQQQQIEDFRQGSETPMQVLTGSSRQSYSPGYQDFSKWESMLKIKEGLLRQKEIVIDRQKQQITHLHERIRDNELRAQHAMLGHYVNCEDSYVASLQPQYENTSLQTPFSEESVSHSQQGEFEQKLASTEKEVLQLNEFLKQRLSLFSEEKKKLEEKLKTRDRYISSLKKKCQKESEQNKEKQRRIETLEKYLADLPTLDDVQSQSLQLQILEEKNKNLQEALIDTEKKLEEIKKQCQDKETQLICQKKKE

SEQ ID NO: 14207 - protein, 496 aa, Homo sapiens
  Payload ID: 2748
  Gene Symbol: CEP85L
  Gene Name: centrosomal protein 85kDa-like
  Uniprot ID: Q5SZL2
  ENSP ID: ENSP00000393317
MWGRFLAPEASGRDSPGGARSFPAGPDYSSAWLPANESLWQATTVPSNHRNNHIRRHSIASDSGDTGIGTSCSDSVEDHSTSSGTLSFKPSQSLITLPTAHVMPSNSSASISKLRESLTPDGSKWSTSLMQTLGNHSRGEQDSSLDMKDFRPLRKWSSLSKLTAPDNCGQGGTVCREESRNGLEKIGKAKALTSQLRTIGPSCLHDSMEMLRLEDKEINKKRSSTLDCKYKFESCSKEDFRASSSTLRRQPVDMTYSALPESKPIMTSSEAFEPPKYLMLGQQAVGGVPIQPSVRTQMWLTEQLRTNPLEGRNTEDSYSLAPWQQQQIEDFRQGSETPMQVLTGSSRQSYSPGYQDFSKWESMLKIKEGLLRQKEIVIDRQKQQITHLHERIRDNELRAQHAMLGHYVNCEDSYVASLQPQYENTSLQTPFSEESVSHSQQGEFEQKLASTEKEVLQLNEFLKQRLSLFSEEKKKLEEKVGFSNKVELGQQHFLSI

SEQ ID NO: 14208 - protein, 783 aa, Homo sapiens
  Payload ID: 2749
  Gene Symbol: CEP89
  Gene Name: centrosomal protein 89kDa
  Uniprot ID: Q96ST8
  ENSP ID: ENSP00000306105
MLLGFRRGRRSHFKHIIHGLLPAASVAPKAAVPRTPPPRSPNPSPERPRSALAAAILATTLTGRTVAIPQPRQRSRSESDVSSVEQDSFIEPYATTSQLRPRPNWQSEMGRRSSLPSFETLDYGDEEDIETQLSSSGKELGDVSAREDRGGHSDDLYAVPHRNQVPLLHEVNSEDDENISHQDGFPGSPPAPQRTQQKDGKHPVLNLKDEKPPLCEKPPPSPDITGRARQRYTEITREKFEALKEENMDLNNMNQSLTLELNTMKQAMKELQLKLKGMEKEKRKLKEAEKASSQEVAAPELLYLRKQAQELVDENDGLKMTVHRLNVELSRYQTKFRHLSKEESLNIEGLPSKGPIPPWLLDIKYLSPLLLAYEDMMKEKDELNATLKEEMRMFRMRVQEVVKENEELHQELNKSSAVTSEEWRQLQTQAKLVLEENKLLLEQLEIQQRKAKDSHQERLQEVSKLTKQLMLLEAKTHGQEKELAENREQLEILRAKCQELKTHSDGKIAVEVHKSIVNELKSQLQKEEEKERAEMEELMEKLTVLQAQKKSLLLEKNSLTEQNKALEAELERAQKINRKSQKKIEVLKKQVEKAMGNEMSAHQYLANLVGLAENITQERDSLMCLAKCLESEKDGVLNKVIKSNIRLGKLEEKVKGYKKQAALKLGDISHRLLEQQEDFAGKTAQYRQEMRHLHQVLKDKQEVLDQALQQNREMEGELEVIWESTFRENRRIRELLQDTLTRTGVQDNPRALVAPSLNGVSQADLLDGCDVCSYDLKSHAPTC

SEQ ID NO: 14209 - protein, 428 aa, Homo sapiens
  Payload ID: 2749
  Gene Symbol: CEP89
  Gene Name: centrosomal protein 89kDa
  ENSP ID: ENSP00000465141
MLLGFRRGRRSHFKHIIHGLLPAASVAPKAAVPRTPPPRSPNPSPERPRSALAAAILATTLTGRTVAIPQPRQRSRSESDVSSVEQDSFIEPYATTSQLRPRPNWQSEMGRRSSLPSFETLDYGDEEDIETQLSSSGKELGDVSAREDRGGHSDDLYAVPHRNQVPLLHEVNSEDDENISHQDGFPGSPPAPQRTQQKDGKHPVLNLKDEKPPLCEKPPPSPDITGRARQRYTEITREKFEALKEENMDLNNMNQSLTLELNTMKQAMKELQLKLKGMEKEKRKLKEAEKASSQEVAAPELLYLRKQAQELVDENDGLKMTVHRLNVELSRYQTKFRHLSKEESLNIEGLPSKGPIPPWLLDIKYLSPLLLAYEDMMKEKDELNATLKASASDSSKTGFRGKQVVAGAVGDSAKESQGQPPGAPPRSF

SEQ ID NO: 14210 - protein, 356 aa, Homo sapiens
  Payload ID: 2749
  Gene Symbol: CEP89
  Gene Name: centrosomal protein 89kDa
  ENSP ID: ENSP00000466442
MLLGFRRGRRSHFKHIIHGLLPAASVAPKAAVPRTPPPRSPNPSPERPRSALAAAILATTLTGRTVAIPQPRQRSRSESDVSSVEQDSFIEPYATTSQLRPRPNWQSEMGRRSSLPSFETLDYGDEEDIETQLSSSGKELGDVSAREDRGGHSDDLYAVPHRNQVPLLHEVNSEDDENISHQDGFPGSPPAPQRTQQKDGKHPVLNLKDEKPPLCEKPPPSPDITGRARQRYTEITREKFEALKEENMDLNNMNQSLTLELNTMKQAMKELQLKLKGMEKEKRKLKEAEKASSQEVAAPELLYLRKQAQELVDENDGLKMTVHRLNVELSRYQTKFRHLSKEEVTFPIVKISFSDF

SEQ ID NO: 14211 - protein, 173 aa, Homo sapiens
  Payload ID: 2749
  Gene Symbol: CEP89
  Gene Name: centrosomal protein 89kDa
  ENSP ID: ENSP00000467544
EQDSFIEPYATTSQLRPRPNWQSEMGRRSSLPSFETLDYGDEEDIETQLSSSGKELGDVSAREDRGGHSDDLYAVPHRNQVPLLHEVNSEDDENISHQDGFPGSPPAPQRTQQKDGKHPVLNLKDEKPPLCEKPPPSPGPTLLQDLWGVAFLVGNVCGASVPLPEFLSCVQEE

SEQ ID NO: 14212 - protein, 217 aa, Homo sapiens
  Payload ID: 2749
  Gene Symbol: CEP89
  Gene Name: centrosomal protein 89kDa
  ENSP ID: ENSP00000467839
  MOD_RES (1)..(1): Any amino acid
XAAVPRTPPPRSPNPSPERPRSALAAAILATTLTGRTVAIPQPRQRSRSESDVSSVEQDSFIEPYATTSQLRPRPNWQSEMGRRSSLPSFETLDYGDEEDIETQLSSSGKELGDVSAREDRGGHSDDLYAVPHRNQVPLLHEVNSEDDENISHQDGFPGSPPAPQRTQQKDGKHPVLNLKDEKPPLCEKPPPSPGICLLNYIMIEKLVLENIQINFI

SEQ ID NO: 14213 - protein, 80 aa, Homo sapiens
  Payload ID: 2749
  Gene Symbol: CEP89
  Gene Name: centrosomal protein 89kDa
  ENSP ID: ENSP00000481256
MLLGFRRGRRSHFKQGLALSPRLECSGAIIAHCILELLGSSDLPTPASRGAETTGARHYSRLIVQYFCGNRDLAMFLWWS

SEQ ID NO: 14214 - protein, 821 aa, Homo sapiens
  Payload ID: 2750
  Gene Symbol: CEP95
  Gene Name: centrosomal protein 95kDa
  Uniprot ID: Q96GE4
  ENSP ID: ENSP00000450461
MAGSDAEWVTIANNLLFKCHIHLRIHELQDCDANVFIALYQSILGEKVPDLIVIPRSQEDDAHNVQAVIDSLALDYLQVSLSHITGENIVKGDKESIKNLLEIFDGLLEYLTERISETSHEKSETEQYFKESDRGERLEEPESTKESKSSWKRVSFGRCSLSSEMLGPSWDGDEAESTGEIIRLGDTAHTFSLRSNGAQCPNEMLSKKALASPSSKSHEDMLYPPSVLSKSRTSFVEDTETLSVSGIPNARKLGEPIRAAIPLHPPYHPSEPRAPCPIGKEYLHSSHCSPAVNSTGEHTEFSGDLDDGLFLISKLPKGSKWEVYPAQVQGPRTRKPPKGKRNENRATASSCNSPFPQRPRKRLTEQELHDVSEKLSQRLSELDWMLKSALGDRIKEKTDHKEENTGNEEVEDGTEETLSQHSDGIVEYGPKKSRPGLSMRRKPPYRSHSLSPSPVNKHKQFHLERKRQRKPRETDVRQFQAQAFTEAFERELRRHKVQENIGPLRIHEKEEETEKIYRGEAVRKGTPECSQPWKIYSRKTTTQSLRGGLPKPNKAVPMKVSEHSLLPLMLEQFPFLYVSGPTLSKMWKQQIAQVEQLKKEACRENRSKKKLQDEIEEALRRHDLLTTLVKKEYEHNKRLQDFKDCIRRQRLTQSKIKENRQQIVRARKYYDDYRVQLCAKMMRMRTREEMIFKKLFEEGLNIQKQRLRDLRNYAKEKRDEQRRRHQDELDSMENYYKDQFSLLAEAISQEHQELKAREKSQAQTLHKVKRELRSKMEKEIQQLQDMITQNDDDVFFRELEAERFRSRLQLASFQYSKSPSL

SEQ ID NO: 14215 - protein, 756 aa, Homo sapiens
  Payload ID: 2750
  Gene Symbol: CEP95
  Gene Name: centrosomal protein 95kDa
  ENSP ID: ENSP00000450906
MAGSDAEWVTIANNLLFKCHIHLRIHELQDCDANVFIALYQSILGEKVPDLIVIPRSQEDDAHNVQAVIDSLALDYLQVSLSHITALYSVSRRKYSERRMLGPSWDGDEAESTGEIIRLGDTAHTFSLRSNGAQCPNEMLSKKALASPSSKSHEDMLYPPSVLSKSRTSFVEDTETLSVSGIPNARKLGEPIRAAIPLHPPYHPSEPRAPCPIGKEYLHSSHCSPAVNSTGEHTEFSGDLDDGLFLISKLPKGSKWEVYPAQVQGPRTRKPPKGKRNENRATASSCNSPFPQRPRKRLTEQELHDVSEKLSQRLSELDWMLKSALGDRIKEKTDHKEENTGNEEVEDGTEETLSQHSDGIVEYGPKKSRPGLSMRRKPPYRSHSLSPSPVNKHKQFHLERKRQRKPRETDVRQFQAQAFTEAFERELRRHKVQENIGPLRIHEKEEETVGKNIQRRSFVKELQNVVSPGRFTLEKPQRRVRGGLPKPNKAVPMKVSEHSLLPLMLEQFPFLYVSGPTLSKMWKQQIAQVEQLKKEACRENRSKKKLQDEIEEALRRHDLLTTLVKKEYEHNKRLQDFKDCIRRQRLTQSKIKENRQQIVRARKYYDDYRVQLCAKMMRMRTREEMIFKKLFEEGLNIQKQRLRDLRNYAKEKRDEQRRRHQDELDSMENYYKDQFSLLAEAISQEHQELKAREKSQAQTLHKVKRELRSKMEKEIQQLQDMITQNDDDVFFRELEAERFRSRLQLASFQYSKSPSL

SEQ ID NO: 14216 - protein, 99 aa, Homo sapiens
  Payload ID: 2750
  Gene Symbol: CEP95
  Gene Name: centrosomal protein 95kDa
  ENSP ID: ENSP00000452317
MAGSDAEWVTIANNLLFKCHIHLRIHELQDCDANVFIALYQSILGEKVPDLIVIPRSQEDDAHNVQAVIDSLALDYLQVSLSHITALYSVSRRKYSERR

SEQ ID NO: 14217 - protein, 135 aa, Homo sapiens
  Payload ID: 2750
  Gene Symbol: CEP95
  Gene Name: centrosomal protein 95kDa
  ENSP ID: ENSP00000461924
  MOD_RES (1)..(1): Any amino acid
XKLSQRLSELDWMLKSALGDRIKEKTDHKEENTGNEEVEDGTEETLSQHSDGIVEYGPKKSRPGLSMRRKPPYRSHSLSPSPVNKHKQFHLERKRQRKPRETDVRQFQAQEKIYRGEAVRKGTPECSQPWKIYSR

SEQ ID NO: 14218 - protein, 156 aa, Homo sapiens
  Payload ID: 2750
  Gene Symbol: CEP95
  Gene Name: centrosomal protein 95kDa
  ENSP ID: ENSP00000462189
MAGSDAEWVTIANNLLFKCHIHLRIHELQDCDANVFIALYQSILGEKVPDLIVIPRSQEDDAHNVQAVIDSLALDYLQVSLSHITGENIVKGDKESIKNLLEIFDGLLEYLTERISETSHEKSKFKNGNLVWFTFYDVSLLPFIFLCIFLHRKQIH

SEQ ID NO: 14219 - protein, 102 aa, Homo sapiens
  Payload ID: 2750
  Gene Symbol: CEP95
  Gene Name: centrosomal protein 95kDa
  ENSP ID: ENSP00000462307
IFKKLFEEGLNIQKQRLRDLRNYAKEKRDEQRRRHQDELDSMENYYKDQFSLLAEAISQEHQELKAREKSQAQVLPTEQSPRPEKTGTFPALRGDRKLSSAT

SEQ ID NO: 14220 - protein, 74 aa, Homo sapiens
  Payload ID: 2750
  Gene Symbol: CEP95
  Gene Name: centrosomal protein 95kDa
  ENSP ID: ENSP00000462639
  MOD_RES (1)..(1): Any amino acid
XCSLSSEMLGPSWDGDEAESTGEIIRLGDTAHTFSLRSNGLALSPRVECGGAISAHCNLCLSLSSGWDYKCSMS

SEQ ID NO: 14221 - protein, 157 aa, Homo sapiens
  Payload ID: 2750
  Gene Symbol: CEP95
  Gene Name: centrosomal protein 95kDa
  ENSP ID: ENSP00000462779
MAGSDAEWVTIANNLLFKCHIHLRIHELQDCDANVFIALYQSILGEKVPDLIVIPRSQEDDAHNVQAVIDSLALDYLQVSLSHITGENIVKGDKESIKNLLEIFDGLLEYLTERISETSHEKSAPCLLRCWAPLGMEMKQNPLVKSLDLETQHTPFL

SEQ ID NO: 14222 - protein, 71 aa, Homo sapiens
  Payload ID: 2750
  Gene Symbol: CEP95
  Gene Name: centrosomal protein 95kDa
  ENSP ID: ENSP00000463535
  MOD_RES (1)..(1): Any amino acid
XLDYLQVSLSHITGENIVKGDKESIKNLLEIFDGLLEYLTERISETSHEKSLIYTYLAIFPRADQVLQNAS

SEQ ID NO: 14223 - protein, 56 aa, Homo sapiens
  Payload ID: 2750
  Gene Symbol: CEP95
  Gene Name: centrosomal protein 95kDa
  ENSP ID: ENSP00000467102
MLGPSWDGDEAESTGEIIRLGDTAHTFSLRSNGAQCPNEMLSKKALASPSSKSHED

SEQ ID NO: 14224 - protein, 865 aa, Homo sapiens
  Payload ID: 2751
  Gene Symbol: CEP97
  Gene Name: centrosomal protein 97kDa
  Uniprot ID: Q8IW35
  ENSP ID: ENSP00000342510
MAVARVDAALPPGEGSVVNWSGQGLQKLGPNLPCEADIHTLILDKNQIIKLENLEKCKRLIQLSVANNRLVRMMGVAKLTLLRVLNLPHNSIGCVEGLKELVHLEWLNLAGNNLKAMEQINSCTALQHLDLSDNNISQIGDLSKLVSLKTLLLHGNIITSLRMAPAYLPRSLAILSLAENEIRDLNEISFLASLTELEQLSIMNNPCVMATPSIPGFDYRPYIVSWCLNLRVLDGYVISQKESLKAEWLYSQGKGRAYRPGQHIQLVQYLATVCPLTSTLGLQTAEDAKLEKILSKQRFHQRQLMNQSQNEELSPLVPVETRASLIPEHSSPVQDCQISQESEPVIQVNSWVGINSNDDQLFAVKNNFPASVHTTRYSRNDLHLEDIQTDEDKLNCSLLSSESTFMPVASGLSPLSPTVELRLQGINLGLEDDGVADESVKGLESQVLDKEEEQPLWAANENSVQMMRSEINTEVNEKAGLLPCPEPTIISAILKDDNHSLTFFPESTEQKQSDIKKPENTQPENKETISQATSEKLPMILTQRSVALGQDKVALQKLNDAATKLQACWRGFYARNYNPQAKDVRYEIRLRRMQEHIVCLTDEIRRLRKERDEERIKKFVQEEAFRFLWNQVRSLQVWQQTVDQRLSSWHTDVPPISSTLVPSKHPLFTQSQESSCDQNADWFIASDVAPQEKSLPEFPDSGFHSSLTEQVHSLQHSLDFEKSSTEGSESSIMGNSIDTVRYGKESDLGDVSEEHGEWNKESSNNEQDNSLLEQYLTSVQQLEDADERTNFDTETRDSKLHIACFPVQLDTLSDGASVDESHGISPPLQGEISQTQENSKLNAEVQGQQPECDSTFQLLHVGVTV

SEQ ID NO: 14225 - protein, 806 aa, Homo sapiens
  Payload ID: 2751
  Gene Symbol: CEP97
  Gene Name: centrosomal protein 97kDa
  ENSP ID: ENSP00000418185
MAVARVDAALPPGEGSVVNWSGQGLQKLGPNLPCEADIHTLILDKNQIIKLENLEKCKRLIQLSVANNRLVRMMGVAKLTLLRVLNLPHNSIGCVEGLKELVHLEWLNLAGNNLKAMEQINSCTALQHLDLSDNNISQIGDLSKLVSLKTLLLHGNIITSLRMAPAYLPRSLAILSLAENEIRDLNEISFLASLTELEQLSIMNNPCVMATPSIPGFDYRPYIVSWCLNLRVLDGYVISQKESLKAEWLYSQGKGRAYRPGQHIQLVQYLATVCPLTSTLGLQTAEDAKLEKILSKQRFHQRQLMNQSQNEELSPLVPVETRASLIPEHSSPVQDCQISQESESTFMPVASGLSPLSPTVELRLQGINLGLEDDGVADESVKGLESQVLDKEEEQPLWAANENSVQMMRSEINTEVNEKAGLLPCPEPTIISAILKDDNHSLTFFPESTEQKQSDIKKPENTQPENKETISQATSEKLPMILTQRSVALGQDKVALQKLNDAATKLQACWRGFYARNYNPQAKDVRYEIRLRRMQEHIVCLTDEIRRLRKERDEERIKKFVQEEAFRFLWNQVRSLQVWQQTVDQRLSSWHTDVPPISSTLVPSKHPLFTQSQESSCDQNADWFIASDVAPQEKSLPEFPDSGFHSSLTEQVHSLQHSLDFEKSSTEGSESSIMGNSIDTVRYGKESDLGDVSEEHGEWNKESSNNEQDNSLLEQYLTSVQQLEDADERTNFDTETRDSKLHIACFPVQLDTLSDGASVDESHGISPPLQGEISQTQENSKLNAEVQGQQPECDSTFQLLHVGVTV

SEQ ID NO: 14226 - protein, 175 aa, Homo sapiens
  Payload ID: 2751
  Gene Symbol: CEP97
  Gene Name: centrosomal protein 97kDa
  ENSP ID: ENSP00000418547
IGCVEGLKELVHLEWLNLAGNNLKTLLLHGNIITSLRMAPAYLPRSLAILSLAENEIRDLNEISFLASLTELEQLSIMNNPCVMATPSIPGFDYRPYIVSWCLNLRVLDGYVISQKESLKAEWLYSQGKGRAYRPGQHIQLVQYLATVCPLTSTLGLQTAEDAKLEKILSKQRGS

SEQ ID NO: 14227 - protein, 128 aa, Homo sapiens
  Payload ID: 2751
  Gene Symbol: CEP97
  Gene Name: centrosomal protein 97kDa
  ENSP ID: ENSP00000419009
MAVARVDAALPPGEGSVVNWSGQGLQKLGPNLPCEADIHTLILDKNQIIKLENLEKCKRLIQLSVANNRLVRMMGVAKLTLLRVLNLPHNSIGCVEGLKELVHLEWLNLAGNNLKCDAFLVIGHGTDQ

SEQ ID NO: 14228 - protein, 1221 aa, Homo sapiens
  Payload ID: 2752
  Gene Symbol: CSPP1
  Gene Name: centrosome and spindle pole associated protein 1
  Uniprot ID: Q1MSJ5
  ENSP ID: ENSP00000262210
MLFPLQVAAVTSSVRDDPLEHCVSPRTRARSPEICKMADNLDEFIEEQKARLAEDKAELESDPPYMEMKGKLSAKLSENSKILISMAKENIPPNSQQTRGSLGIDYGLSLPLGEDYERKKHKLKEELRQDYRRYLTQERLKLERNKEYNQFLRGKEESSEKFRQVEKSTEPKSQRNKKPIGQVKPDLTSQIQTSCENSEGPRKDVLTPSEAYEELLNQRRLEEDRYRQLDDEIELRNRRIIKKANEEVGISNLKHQRFASKAGIPDRRFHRFNEDRVFDRRYHRPDQDPEVSEEMDERFRYESDFDRRLSRVYTNDRMHRNKRGNMPPMEHDGDVIEQSNIRISSAENKSAPDNETSKSANQDTCSPFAGMLFGGEDRELIQRRKEKYRLELLEQMAEQQRNKRREKDLELRVAASGAQDPEKSPDRLKQFSVAPRHFEEMIPPERPRIAFQTPLPPLSAPSVPPIPSVHPVPSQNEDLRSGLSSALGEMVSPRIAPLPPPPLLPPLATNYRTPYDDAYYFYGSRNTFDPSLAYYGSGMMGVQPAAYVSAPVTHQLAQPVVNTVGQNELKITSDQVINSGLIFEDKPKPSKQSLQSYQEALQQQIREREERRKKEREEKEEYEAKLEAEMRTYNPWGKGGGGAPLRDAKGNLITDLNRMHRQNIDAYHNPDARTYEDKRAVVSLDPNLATSNAENLEDAANKSSGHMQTQSSPFARGNVFGEPPTELQIKQQELYKNFLRFQIEEKKQREEAERERLRIAEEKEERRLAEQRARIQQEYEEEQEKKREKEEEQRLKNEEHIRLAEERQKEAERKKKEEEEKYNLQLQHYCERDNLIGEETKHMRQPSPIVPALQNKIASKLQRPPSVDSIIRSFIHESSMSRAQSPPVPARKNQLRAEEEKKNVIMELSEMRKQLRSEERRLQERLLHMDSDDEIPIRKKERNPMDIFDMARHRLQAPVRRQSPKGLDAATFQNVHDFNELKDRDSETRVDLKFMYLDPPRDHHTLEIQQQALLREQQKRLNRIKMQEGAKVDLDAIPSAKVREQRMPRDDTSDFLKNSLLESDSAFIGAYGETYPAIEDDVLPPPSQLPSARERRRNKWKGLDIDSSRPNVAPDGLSLKSISSVNVDELRVRNEERMRRLNEFHNKPINTDDESSLVDPDDIMKHIGDDGSNSVATEPWLRPGTSETLKRFMAEQLNQEQQQIPGKPGTFTWQGLSTAHG

SEQ ID NO: 14229 - protein, 404 aa, Homo sapiens
  Payload ID: 2752
  Gene Symbol: CSPP1
  Gene Name: centrosome and spindle pole associated protein 1
  ENSP ID: ENSP00000428694
MADNLDEFIEEQKARLAEDKAELESDPPYMEMKGKLSAKLSENSKILISMAKENIPPNSQQTRGSLGIDYGLSLPLGEDYERKKHKLKEELRQDYRRYLTQGITQGKRKKNFLSTSETDPSTLGVSLPIGERLSAKERLKLERNKEYNQFLRGKEESSEKFRQVEKSTEPKSQRNKKPIGQVKPDLTSQIQTSCENSEGPRKDVLTPSEAYEELLNQRRLEEDRYRQLDDEIELRNRRIIKKANEEVGISNLKHQRFASKAGIPDRRFHRFNEDRVFDRRYHRPDQDPEVSEEMDERFRYESDFDRRLSRVYTNDRMHRNKRGNMPPMEHDGDVIEQSNIRISSAENKSAPDNETSKSANQDTCSPFAGMLFGGEDRELIQRRKEKYRLELLEQMAEQQRNKRR

SEQ ID NO: 14230 - protein, 66 aa, Homo sapiens
  Payload ID: 2752
  Gene Symbol: CSPP1
  Gene Name: centrosome and spindle pole associated protein 1
  ENSP ID: ENSP00000428793
MADNLDEFIEEQKARLAEDKAELESDPPYMEMKNLALLARQDCNGVISARHNLRLPGSSDSSASAS

SEQ ID NO: 14231 - protein, 154 aa, Homo sapiens
  Payload ID: 2752
  Gene Symbol: CSPP1
  Gene Name: centrosome and spindle pole associated protein 1
  ENSP ID: ENSP00000429546
MADNLDEFIEEQKARLAEDKAELESDPPYMEMKGKLSAKLSENSKILISMAKENIPPNSQQTRGSLGIDYGLSLPLGEDYERKKHKLKEELRQDYRRYLTQKNFLSTSETDPSTLGVSLPIGERLSAKERLKLERNKEYNQFLRGKEESSEKFR

SEQ ID NO: 14232 - protein, 876 aa, Homo sapiens
  Payload ID: 2752
  Gene Symbol: CSPP1
  Gene Name: centrosome and spindle pole associated protein 1
  Uniprot ID: Q1MSJ5
  ENSP ID: ENSP00000430092
MDERFRYESDFDRRLSRVYTNDRMHRNKRGNMPPMEHDGDVIEQSNIRISSAENKSAPDNETSKSANQDTCSPFAGMLFGGEDRELIQRRKEKYRLELLEQMAEQQRNKRREKDLELRVAASGAQDPEKSPDRLKQFSVAPRHFEEMIPPERPRIAFQTPLPPLSAPSVPPIPSVHPVPSQNEDLRSGLSSALGEMVSPRIAPLPPPPLLPPLATNYRTPYDDAYYFYGSRNTFDPSLAYYGSGMMGVQPAAYVSAPVTHQLAQPVVNTVGQNELKITSDQVINSGLIFEDKPKPSKQSLQSYQEALQQQIREREERRKKEREEKEEYEAKLEAEMRTYNPWGKGGGGAPLRDAKGNLISHMQTQSSPFARGNVFGEPPTELQIKQQELYKNFLRFQIEEKKQREEAERERLRIAEEKEERRLAEQRARIQQEYEEEQEKKREKEEEQRLKNEEHIRLAEERQKEAERKKKEEEEKYNLQLQHYCERDNLIGEETKHMRQPSPIVPALQNKIASKLQRPPSVDSIIRSFIHESSMSRAQSPPVPARKNQLRAEEEKKNVIMELSEMRKQLRSEERRLQERLLHMDSDDEIPIRKKERNPMDIFDMARHRLQAPVRRQSPKGLDAATFQNVHDFNELKDRDSETRVDLKFMYLDPPRDHHTLEIQQQALLREQQKRLNRIKMQEGAKVDLDAIPSAKVREQRMPRDDTSDFLKNSLLESDSAFIGAYGETYPAIEDDVLPPPSQLPSARERRRNKWKGLDIDSSRPNVAPDGLSLKSISSVNVDELRVRNEERMRRLNEFHNKPINTDDESSLVDPDDIMKHIGDDGSNSVATEPWLRPGTSETLKRFMAEQLNQEQQQIPGKPGTFTWQGLSTAHG

SEQ ID NO: 14233 - protein, 621 aa, Homo sapiens
  Payload ID: 2753
  Gene Symbol: CEP295NL
  Gene Name: CEP295 N-terminal like
  Uniprot ID: Q96MC4
  ENSP ID: ENSP00000312767
MCSGWSSSVIWRHTQFAVERCGFCGSSGPGAPLEPSTLGSKHLPWEAVSAGFADRNRNMDGAMWLSLCPDNEDLLWRKKHKLLQARGKGDLALQRRADAKLWKNYQLQRLAEELRRGYQEAQHLHVGGLDRLQSARLLGWGGGRARENEPDSQGPIQRRSARPPRAKEKHRAALSEERSCREELGQQHPRHSRPRKTAASPEKPQTTKATGRMNSHLAPPEKRKGRPEPSTKSGGGRCAIHPRRSKGADLERSNPLVAAVGEIGLVEEKEKGTARAGRRQLGKGAVCFVPALTSRSQGQSLEGKLRDLGQLWPADSSCRREAVSPASQCTLREKNKWQKELELAFEELFNINRKLKKHLCLYLALKPRMDQRPGEGHAFSEMQECGAGTPRGKKMADPEMLPAGEPRSPAEEEAQQAASKTDLKTFMGKAQNQKYQGTVKPTFRNGSQTLSPEAGIFINKEDSLLYSTESGQETPKLGTLAEGSLQLHLQDQADRVGSTASRQRQKAEMEQRRQKQLESLEQMEHPDMSLEIHYKAELEKERREQRRARLAHLKSSSTRAQERERGSELSTTSPSGTSLADDDRHSQMIRDQQQQILQQNRLHKQFLEEARKCLREFQNIC

SEQ ID NO: 14234 - protein, 32 aa, Homo sapiens
  Payload ID: 2753
  Gene Symbol: CEP295NL
  Gene Name: CEP295 N-terminal like
  ENSP ID: ENSP00000465968
MFKGPEKDIEFIYTAPSSAVCGVSLDVGGKKE

SEQ ID NO: 14235 - protein, 621 aa, Homo sapiens; identical to SEQ ID NO: 14233
  Payload ID: 2753
  Gene Symbol: CEP295NL
  Gene Name: CEP295 N-terminal like
  Uniprot ID: Q96MC4
  ENSP ID: ENSP00000483863

SEQ ID NO: 14236 - protein, 537 aa, Homo sapiens
  Payload ID: 2754
  Gene Symbol: CERK
  Gene Name: ceramide kinase
  Uniprot ID: Q8TCT0
  ENSP ID: ENSP00000216264
MGATGAAEPLQSVLWVKQQRCAVSLEPARALLRWWRSPGPGAGAPGADACSVPVSEIIAVEETDVHGKHQGSGKWQKMEKPYAFTVHCVKRARRHRWKWAQVTFWCPEEQLCHLWLQTLREMLEKLTSRPKHLLVFINPFGGKGQGKRIYERKVAPLFTLASITTDIIVTEHANQAKETLYEINIDKYDGIVCVGGDGMFSEVLHGLIGRTQRSAGVDQNHPRAVLVPSSLRIGIIPAGSTDCVCYSTVGTSDAETSALHIVVGDSLAMDVSSVHHNSTLLRYSVSLLGYGFYGDIIKDSEKKRWLGLARYDFSGLKTFLSHHCYEGTVSFLPAQHTVGSPRDRKPCRAGCFVCRQSKQQLEEEQKKALYGLEAAEDVEEWQVVCGKFLAINATNMSCACRRSPRGLSPAAHLGDGSSDLILIRKCSRFNFLRFLIRHTNQQDQFDFTFVEVYRVKKFQFTSKHMEDEDSDLKEGGKKRFGHICSSHPSCCCTVSNSSWNCDGEVLHSPAIEVRVHCQLVRLFARGIEENPKPDSHS

SEQ ID NO: 14237 - protein, 185 aa, Homo sapiens
  Payload ID: 2754
  Gene Symbol: CERK
  Gene Name: ceramide kinase
  ENSP ID: ENSP00000400859
MGATGAAEPLQSVLWVKQQRCAVSLEPARALLRWWRSPGPGAGAPGADACSVPVSEIIAVEETDVHGKHQGSGKWQKMEKPYAFTVHCVKRARRHRWKWAQVTFWCPEEQLCHLWLQTLREMLEKLTSRPKHLLVFINPFGGKGQGKRIYERKVAPLFTLASITTDIIASSVSAEMVCSARCCTV

SEQ ID NO: 14238 - protein, 558 aa, Homo sapiens
  Payload ID: 2755
  Gene Symbol: CERKL
  Gene Name: ceramide kinase-like
  Uniprot ID: Q49MI3
  ENSP ID: ENSP00000341159
MPWRRRRNRVSALEGGREEEAPPEAAAVPPALLTSPQQTEAAAERILLRGIFEIGRDSCDVVLSERALRWRPIQPERPAGDSKYDLLCKEEFIELKDIFSVKLKRRCSVKQQRSGTLLGITLFICLKKEQNKLKNSTLDLINLSEDHCDIWFRQFKKILAGFPNRPKSLKILLNPQSHKKEATQVYYEKVEPLLKLAGIKTDVTIMEYEGHALSLLKECELQGFDGGHRKPLFAIHWSVQRLFTGMQTLEPSVVCVGGDGSASEVAHALLLRAQKNAGMETDRILTPVRAQLPLGLIPAGSTNVLAHSLHGVPHVITATLHIIMGHVQLVDVCTFSTAGKLLRFGFSAMFGFGGRTLALAEKYRWMSPNQRRDFAVVKALAKLKAEDCEISFLPFNSSDDVQERRAQGSPKSDCNDQWQMIQGQFLNVSIMAIPCLCSVAPRGLAPNTRLNNGSMALIIARNTSRPEFIKHLKRYASVKNQFNFPFVETYTVEEVKVHPRNNTGGYNPEEEEDETASENCFPWNVDGDLMEVASEVHIRLHPRLISLYGGSMEEMIPK

SEQ ID NO: 14239 - protein, 217 aa, Homo sapiens
  Payload ID: 2755
  Gene Symbol: CERKL
  Gene Name: ceramide kinase-like
  Uniprot ID: Q49MI3
  ENSP ID: ENSP00000364106
MPWRRRRNRVSALEGGREEEAPPEAAAVPPALLTSPQQTEAAAERILLRGIFEIGRDSCDVVLSERALRWRPIQPERPAGDSKYDLLCKEEFIELKDIFSVKLKRRCSVKQQRSGTLLGITLFICLKKEQNKLKNSTLDLINLSEDHCDIWFRQFKKILAGFPNRPKSLKILLNPQSHKKEATQVYYEKVEPLLKLAGIKTDVTMLSVLVEMDLLAK

SEQ ID NO: 14240 - protein, 419 aa, Homo sapiens
  Payload ID: 2755
  Gene Symbol: CERKL
  Gene Name: ceramide kinase-like
  Uniprot ID: Q49MI3
  ENSP ID: ENSP00000364108
MPWRRRRNRVSALEGGREEEAPPEAAAVPPALLTSPQQTEAAAERILLRGIFEIGRDSCDVVLSERALRWRPIQPERPAGDSKYDLLCKEEFIELKDIFSVKLKRRCSVKQQRSGTLLGITLFICLKKEQNKLKNSTLDLINLSEDHCDIWFRQFKKILAGSTNVLAHSLHGVPHVITATLHIIMGHVQLVDVCTFSTAGKLLRFGFSAMFGFGGRTLALAEKYRWMSPNQRRDFAVVKALAKLKAEDCEISFLPFNSSDDVQERRAQGSPKSDCNDQWQMIQGQFLNVSIMAIPCLCSVAPRGLAPNTRLNNGSMALIIARNTSRPEFIKHLKRYASVKNQFNFPFVETYTVEEVKVHPRNNTGGYNPEEEEDETASENCFPWNVDGDLMEVASEVHIRLHPRLISLYGGSMEEMIPK

SEQ ID NO: 14241 - protein, 463 aa, Homo sapiens
  Payload ID: 2755
  Gene Symbol: CERKL
  Gene Name: ceramide kinase-like
  Uniprot ID: Q49MI3
  ENSP ID: ENSP00000364109
MPWRRRRNRVSALEGGREEEAPPEAAAVPPALLTSPQQTEAAAERILLRGIFEIGRDSCDVVLSERALRWRPIQPERPAGDSKYDLLCKEEFIELKDIFSVKLKRRCSVKQQRSGTLLGITLFICLKKEQNKLKNSTLDLINLSEDHCDIWFRQFKKILAGFPNRPKSLKILLNPQSHKKEATQVYYEKVEPLLKLAGIKTDVTRSTNVLAHSLHGVPHVITATLHIIMGHVQLVDVCTFSTAGKLLRFGFSAMFGFGGRTLALAEKYRWMSPNQRRDFAVVKALAKLKAEDCEISFLPFNSSDDVQERRAQGSPKSDCNDQWQMIQGQFLNVSIMAIPCLCSVAPRGLAPNTRLNNGSMALIIARNTSRPEFIKHLKRYASVKNQFNFPFVETYTVEEVKVHPRNNTGGYNPEEEEDETASENCFPWNVDGDLMEVASEVHIRLHPRLISLYGGSMEEMIPK

SEQ ID NO: 14242 - protein, 532 aa, Homo sapiens
  Payload ID: 2755
  Gene Symbol: CERKL
  Gene Name: ceramide kinase-like
  Uniprot ID: Q49MI3
  ENSP ID: ENSP00000386725
MPWRRRRNRVSALEGGREEEAPPEAAAVPPALLTSPQQTEAAAERILLRGIFEIGRDSCDVVLSERALRWRPIQPERPAGDSKYDLLCKEEFIELKDIFSVKLKRRCSVKQQRSGTLLGITLFICLKKEQNKLKNSTLDLINLSEDHCDIWFRQFKKILAGFPNRPKSLKILLNPQSHKKEATQVYYEKVEPLLKLAGIKTDVTIMEYEGHALSLLKECELQGFDGVVCVGGDGSASEVAHALLLRAQKNAGMETDRILTPVRAQLPLGLIPAGSTNVLAHSLHGVPHVITATLHIIMGHVQLVDVCTFSTAGKLLRFGFSAMFGFGGRTLALAEKYRWMSPNQRRDFAVVKALAKLKAEDCEISFLPFNSSDDVQERRAQGSPKSDCNDQWQMIQGQFLNVSIMAIPCLCSVAPRGLAPNTRLNNGSMALIIARNTSRPEFIKHLKRYASVKNQFNFPFVETYTVEEVKVHPRNNTGGYNPEEEEDETASENCFPWNVDGDLMEVASEVHIRLHPRLISLYGGSMEEMIPK

SEQ ID NO: 14243 - protein, 514 aa, Homo sapiens
  Payload ID: 2755
  Gene Symbol: CERKL
  Gene Name: ceramide kinase-like
  Uniprot ID: Q49MI3
  ENSP ID: ENSP00000387080
MPWRRRRNRVSALEGGREEEAPPEAAAVPPALLTSPQQTEAAAERILLRGIFEIGRDSCDVVLSERALRWRPIQPERPAGDSKYDLLCKEEFIELKDIFSVKLKRRCSVKQQRSGTLLGITLFICLKKEQNKLKNSTLDLINLSEDHCDIWFRQFKKILAVMEYEGHALSLLKECELQGFDGGHRKPLFAIHWSVQRLFTGMQTLEPSVVCVGGDGSASEVAHALLLRAQKNAGMETDRILTPVRAQLPLGLIPAGSTNVLAHSLHGVPHVITATLHIIMGHVQLVDVCTFSTAGKLLRFGFSAMFGFGGRTLALAEKYRWMSPNQRRDFAVVKALAKLKAEDCEISFLPFNSSDDVQERRAQGSPKSDCNDQWQMIQGQFLNVSIMAIPCLCSVAPRGLAPNTRLNNGSMALIIARNTSRPEFIKHLKRYASVKNQFNFPFVETYTVEEVKVHPRNNTGGYNPEEEEDETASENCFPWNVDGDLMEVASEVHIRLHPRLISLYGGSMEEMIPK

SEQ ID NO: 14244 - protein, 173 aa, Homo sapiens
  Payload ID: 2755
  Gene Symbol: CERKL
  Gene Name: ceramide kinase-like
  Uniprot ID: Q49MI3
  ENSP ID: ENSP00000409198
MPWRRRRNRVSALEGGREEEAPPEAAAVPPALLTSPQQTEAAAERILLRGIFEIGRDSCDVVLSERALRWRPIQPERPAGDSKYDLLCKEEFIELKDIFSVKLKRRCSVKQQRSGTLLGITLFICLKKEQNKLKNSTLDLINLSEDHCDIWFRQFKKILAVLSVLVEMDLLAK

SEQ ID NO: 14245 - protein, 173 aa, Homo sapiens; identical to SEQ ID NO: 14244
  Payload ID: 2755
  Gene Symbol: CERKL
  Gene Name: ceramide kinase-like
  Uniprot ID: Q49MI3
  ENSP ID: ENSP00000411466

SEQ ID NO: 14246 - protein, 337 aa, Homo sapiens
  Payload ID: 2756
  Gene Symbol: CERS1
  Gene Name: ceramide synthase 1
  Uniprot ID: P27544
  ENSP ID: ENSP00000389044
MAAAGPAAGPTGPEPMPSYAQLVQRGWGSALAAARGCTDCGWGLARRGLAEHAHLAPPELLLLALGALGWTALRSAATARLFRPLAKRCCLQPRDAAKMPESAWKFLFYLGSWSYSAYLLFGTDYPFFHDPPSVFYDWTPGMAVPRDIAAAYLLQGSFYGHSIYATLYMDTWRKDSVVMLLHHVVTLILIVSSYAFRYHNVGILVLFLHDISDVQLEFTKLNIYFKSRGGSYHRLHALAADLGCLSFGFSWFWFRLYWFPLKVLYATSHCSLRTVPDIPFYFFFNALLLLLTLMNLYWFLYIVAFAAKVLTGQVHELKDLREYDTAEAQSLKPSKAE

SEQ ID NO: 14247 - protein, 239 aa, Homo sapiens
  Payload ID: 2756
  Gene Symbol: CERS1
  Gene Name: ceramide synthase 1
  ENSP ID: ENSP00000437648
MPESAWKFLFYLGSWSYSAYLLFGTDYPFFHDPPSVFYDWTPGMAVPRDIAAAYLLQGSFYGHSIYATLYMDTWRKDSVVMLLHHVVTLILIVSSYAFRYHNVGILVLFLHDISDVQLEFTKLNIYFKSRGGSYHRLHALAADLGCLSFGFSWFWFRLYWFPLKVLYATSHCSLRTVPDIPFYFFFNALLLLLTLMNLYWFLYIVAFAAKVLTGQVHELKDLREYDTAEAQSLKPSKAE

SEQ ID NO: 14248 - protein, 216 aa, Homo sapiens
  Payload ID: 2756
  Gene Symbol: CERS1
  Gene Name: ceramide synthase 1
  ENSP ID: ENSP00000471428
  MOD_RES (1)..(1): Any amino acid
XAAAYLLQGSFYGHSIYATLYMDTWRKDSVVMLLHHVVTLILIVSSYAFRYHNVGILVLFLHDISDVQLEFTKLNIYFKSRGGSYHRLHALAADLGCLSFGFSWFWFRLYWFPLKVLYATSHCSLRTVPDIPFYFFFNALLLLLTLMNLYWFLYIVAFAAKVLTGQVHELKDLREYDTAEAQSLKPSKAEEAVAQSSVTFFGTGGARCRHLTHPGL

SEQ ID NO: 14249 - protein, 350 aa, Homo sapiens
  Payload ID: 2756
  Gene Symbol: CERS1
  Gene Name: ceramide synthase 1
  Uniprot ID: P27544
  ENSP ID: ENSP00000485308
MAAAGPAAGPTGPEPMPSYAQLVQRGWGSALAAARGCTDCGWGLARRGLAEHAHLAPPELLLLALGALGWTALRSAATARLFRPLAKRCCLQPRDAAKMPESAWKFLFYLGSWSYSAYLLFGTDYPFFHDPPSVFYDWTPGMAVPRDIAAAYLLQGSFYGHSIYATLYMDTWRKDSVVMLLHHVVTLILIVSSYAFRYHNVGILVLFLHDISDVQLEFTKLNIYFKSRGGSYHRLHALAADLGCLSFGFSWFWFRLYWFPLKVLYATSHCSLRTVPDIPFYFFFNALLLLLTLMNLYWFLYIVAFAAKVLTGQVHELKDLREYDTAEAQSLKPSKAEKPLRNGLVKDKRF

SEQ ID NO: 14250 - protein, 372 aa, Homo sapiens
  Payload ID: 2756
  Gene Symbol: CERS1
  Gene Name: ceramide synthase 1
  ENSP ID: ENSP00000485582
MPPPQQGPCGHHLLLLLALLLPSLPLTRAPVPPGPAAALLQALGLRDEPQGAPRLRPVPPVMWRLFRRRDPQETRSGSRRTSPGVTLQPCHVEELGVAGNIVRHIPDRGAPTRASEPASAAGHCPEWTVVFDLSAVEPAERPSRARLELRFAAAAAAAPEGGWELSVAQAGQGAGADPGPVLLRQLVPALGPPVRAELLGAAWARNASWPRSLRLALALRPRAPAACARLAEASLLLVTLDPRLCHPLARPRRDAEPVLGGGPGGACRARRLYVSFREVGWHRWVIAPRGFLANYCQGQCALPVALSGSGGPPALNHAVLRALMHAAAPGAADLPCCVPARLSPISVLFFDNSDNVVLRQYEDMVVDECGCR

SEQ ID NO: 14251 - protein, 380 aa, Homo sapiens
  Payload ID: 2757
  Gene Symbol: CERS2
  Gene Name: ceramide synthase 2
  Uniprot ID: Q96G23
  ENSP ID: ENSP00000271688
MLQTLYDYFWWERLWLPVNLTWADLEDRDGRVYAKASDLYITLPLALLFLIVRYFFELYVATPLAALLNIKEKTRLRAPPNATLEHFYLTSGKQPKQVEVELLSRQSGLSGRQVERWFRRRRNQDRPSLLKKFREASWRFTFYLIAFIAGMAVIVDKPWFYDMKKVWEGYPIQSTIPSQYWYYMIELSFYWSLLFSIASDVKRKDFKEQIIHHVATIILISFSWFANYIRAGTLIMALHDSSDYLLESAKMFNYAGWKNTCNNIFIVFAIVFIITRLVILPFWILHCTLVYPLELYPAFFGYYFFNSMMGVLQLLHIFWAYLILRMAHKFITGKLVEDERSDREETESSEGEEAAAGGGAKSRPLANGHPILNNNHRKND

SEQ ID NO: 14252 - protein, 249 aa, Homo sapiens
  Payload ID: 2757
  Gene Symbol: CERS2
  Gene Name: ceramide synthase 2
  ENSP ID: ENSP00000355020
MLQTLYDYFWWERLWLPVNLTWADLEDRDGRVYAKASDLYITLPLALLFLIVRYFFELYVATPLAALLNIKEKTRLRAPPNATLEHFYLTSGKQPKQVEVELLSRQSGLSGRQVERWFRRRRNQDRPSLLKKFREASWRFTFYLIAFIAGMAVIVDKPWFYDMKKVWEGYPIQSTIPSQYWYYMIELSFYWSLLFSIASDVKRKDFKEQIIHHVATIILISFSWFANYIRAGTLIMALHDSSDYLLEVR

SEQ ID NO: 14253 - protein, 304 aa, Homo sapiens
  Payload ID: 2757
  Gene Symbol: CERS2
  Gene Name: ceramide synthase 2
  ENSP ID: ENSP00000357945
MLQTLYDYFWWERLWLPVNLTWADLEDRDGRVYAKASDLYITLPLALLFLIVRYFFELYVATPLAALLNIKEKTRLRAPPNATLEHFYLTSGKQPKQVEVELLSRQSGLSGRQVERWFRRRRNQDRPSLLKKFREASWRFTFYLIAFIAGMAVIVDKPWFYDMKKVWEGYPIQSTIPSQYWYYMIELSFYWSLLFSIASDVKRKDFKEQIIHHVATIILISFSWFANYIRAGTLIMALHDSSDYLLESAKMFNYAGWKNTCNNIFIVFAIVFIITRLVILPFWILHCTLVYPLELYPAFFGYYF

SEQ ID NO: 14254 - protein, 380 aa, Homo sapiens; identical to SEQ ID NO: 14251
  Payload ID: 2757
  Gene Symbol: CERS2
  Gene Name: ceramide synthase 2
  Uniprot ID: Q96G23
  ENSP ID: ENSP00000357950

SEQ ID NO: 14255 - protein, 192 aa, Homo sapiens
  Payload ID: 2757
  Gene Symbol: CERS2
  Gene Name: ceramide synthase 2
  ENSP ID: ENSP00000393239
MLQTLYDYFWWERLWLPVNLTWADLEDRDGRVYAKASDLYITLPLALLFLIVRYFFELYVATPLAALLNIKEKTRLRAPPNATLEHFYLTSGKQPKQVEVELLSRQSGLSGRQVERWFRRRRNQDRPSLLKKFREASWRFTFYLIAFIAGMAVIVDKPWFYDMKKVWEGYPIQSTIPSQYWYYMIELSFYWS

SEQ ID NO: 14256 - protein, 128 aa, Homo sapiens
  Payload ID: 2757
  Gene Symbol: CERS2
  Gene Name: ceramide synthase 2
  ENSP ID: ENSP00000394012
MLQTLYDYFWWERLWLPVNLTWADLEDRDGRVYAKASDLYITLPLALLFLIVRYFFELYVATPLAALLNIKEKTRLRAPPNATLEHFYLTSGKQPKQVEVELLSRQSGLSGRQVERWFRRRRNQDRPS

SEQ ID NO: 14257 - protein, 222 aa, Homo sapiens
  Payload ID: 2757
  Gene Symbol: CERS2
  Gene Name: ceramide synthase 2
  ENSP ID: ENSP00000452810
MLQTLYDYFWWERLWLPVNLTWADLEDRDGRVYAKASDLYITLPLALLFLIVRYFFELYVATPLAALLNIKEKTRLRAPPNATLEHFYLTSGKQPKQVEVELLSRQSGLSGRQVERWFRRRRNQDRPSLLKKFREASWRFTFYLIAFIAGMAVIVDKPWFYDMKKVWEGYPIQSTIPSQYWYYMIELSFYWSLLFSIASDVKRKDFKEQIIHHVATIILISF

SEQ ID NO: 14258 - protein, 228 aa, Homo sapiens
  Payload ID: 2757
  Gene Symbol: CERS2
  Gene Name: ceramide synthase 2
  ENSP ID: ENSP00000453297
  MOD_RES (1)..(1): Any amino acid
XSLQKPWFYDMKKVWEGYPIQSTIPSQYWYYMIELSFYWSLLFSIASDVKRKDFKEQIIHHVATIILISFSWFANYIRAGTLIMALHDSSDYLLESAKMFNYAGWKNTCNNIFIVFAIVFIITRLVILPFWILHCTLVYPLELYPAFFGYYFFNSMMGVLQLLHIFWAYLILRMAHKFITGKLVEDERSDREETESSEGEEAAAGGGAKSRPLANGHPILNNNHRKND

SEQ ID NO: 14259 - protein, 377 aa, Homo sapiens
  Payload ID: 2757
  Gene Symbol: CERS2
  Gene Name: ceramide synthase 2
  ENSP ID: ENSP00000454160
MLQTLYDYFWWERLWLPVNLTWADLEDRDGRVYAKASDLYITLPLALLFLIVRYFFELYVATPLAALLNIKEKTRLRAPPNATLEHFYLTSGKQPKQSGLSGRQVERWFRRRRNQDRPSLLKKFREASWRFTFYLIAFIAGMAVIVDKPWFYDMKKVWEGYPIQSTIPSQYWYYMIELSFYWSLLFSIASDVKRKDFKEQIIHHVATIILISFSWFANYIRAGTLIMALHDSSDYLLESAKMFNYAGWKNTCNNIFIVFAIVFIITRLVILPFWILHCTLVYPLELYPAFFGYYFFNSMMGVLQLLHIFWAYLILRMAHKFITGKELGGVASPETSGQGSTIRKTQFLRKRQFKKGWEEGCPLKKTSSAFNGPTATE

SEQ ID NO: 14260 - protein, 383 aa, Homo sapiens
  Payload ID: 2758
  Gene Symbol: CERS3
  Gene Name: ceramide synthase 3
  Uniprot ID: Q8IU89
  ENSP ID: ENSP00000284382
MFWTFKEWFWLERFWLPPTIKWSDLEDHDGLVFVKPSHLYVTIPYAFLLLIIRRVFEKFVASPLAKSFGIKETVRKVTPNTVLENFFKHSTRQPLQTDIYGLAKKCNLTERQVERWFRSRRNQERPSRLKKFQEACWRFAFYLMITVAGIAFLYDKPWLYDLWEVWNGYPKQPLLPSQYWYYILEMSFYWSLLFRLGFDVKRKDFLAHIIHHLAAISLMSFSWCANYIRSGTLVMIVHDVADIWLESAKMFSYAGWTQTCNTLFFIFSTIFFISRLIVFPFWILYCTLILPMYHLEPFFSYIFLNLQLMILQVLHLYWGYYILKMLNRCIFMKSIQDVRSDDEDYEEEEEEEEEEATKGKEMDCLKNGLRAERHLIPNGQHGH

SEQ ID NO: 14261 - protein, 383 aa, Homo sapiens; identical to SEQ ID NO: 14260
  Payload ID: 2758
  Gene Symbol: CERS3
  Gene Name: ceramide synthase 3
  Uniprot ID: Q8IU89
  ENSP ID: ENSP00000377672

SEQ ID NO: 14262 - protein, 383 aa, Homo sapiens; identical to SEQ ID NO: 14260
  Payload ID: 2758
  Gene Symbol: CERS3
  Gene Name: ceramide synthase 3
  Uniprot ID: Q8IU89
  ENSP ID: ENSP00000437640

SEQ ID NO: 14263 - protein, 15 aa, Homo sapiens
  Payload ID: 2758
  Gene Symbol: CERS3
  Gene Name: ceramide synthase 3
  ENSP ID: ENSP00000453598
MFWTFKEWFWLERFW

SEQ ID NO: 14264 - protein, 162 aa, Homo sapiens
  Payload ID: 2758
  Gene Symbol: CERS3
  Gene Name: ceramide synthase 3
  ENSP ID: ENSP00000453816
MFWTFKEWFWLERFWLPPTIKWSDLEDHDGLVFVKPSHLYVTIPYAFLLLIIRRVFEKFVASPLAKSFGIKETVRKVTPNTVLENFFKHSTRQPLQTDIYGLAKKCNLTERQVERWFRSRRNQERPSRLKKFQEACWRFAFYLMITVAGIAFLYDKPWLYDL

SEQ ID NO: 14265 - protein, 394 aa, Homo sapiens
  Payload ID: 2759
  Gene Symbol: CERS4
  Gene Name: ceramide synthase 4
  Uniprot ID: Q9HA82
  ENSP ID: ENSP00000251363
MLSSFNEWFWQDRFWLPPNVTWTELEDRDGRVYPHPQDLLAALPLALVLLAMRLAFERFIGLPLSRWLGVRDQTRRQVKPNATLEKHFLTEGHRPKEPQLSLLAAQCGLTLQQTQRWFRRRRNQDRPQLTKKFCEASWRFLFYLSSFVGGLSVLYHESWLWAPVMCWDRYPNQTLKPSLYWWYLLELGFYLSLLIRLPFDVKRKDFKEQVIHHFVAVILMTFSYSANLLRIGSLVLLLHDSSDYLLEACKMVNYMQYQQVCDALFLIFSFVFFYTRLVLFPTQILYTTYYESISNRGPFFGYYFFNGLLMLLQLLHVFWSCLILRMLYSFMKKGQMEKDIRSDVEESDSSEEAAAAQEPLQLKNGAAGGPRPAPTDGPRSRVAGRLTNRHTTAT

SEQ ID NO: 14266 - protein, 343 aa, Homo sapiens
  Payload ID: 2759
  Gene Symbol: CERS4
  Gene Name: ceramide synthase 4
  ENSP ID: ENSP00000452753
MRLAFERFIGLPLSRWLGVRDQTRRQVKPNATLEKHFLTEGHRPKEPQLSLLAAQCGLTLQQTQRWFRRRRNQDRPQLTKKFCEASWRFLFYLSSFVGGLSVLYHESWLWAPVMCWDRYPNQTLKPSLYWWYLLELGFYLSLLIRLPFDVKRKDFKEQVIHHFVAVILMTFSYSANLLRIGSLVLLLHDSSDYLLEACKMVNYMQYQQVCDALFLIFSFVFFYTRLVLFPTQILYTTYYESISNRGPFFGYYFFNGLLMLLQLLHVFWSCLILRMLYSFMKKGQMEKDIRSDVEESDSSEEAAAAQEPLQLKNGAAGGPRPAPTDGPRSRVAGRLTNRHTTAT

SEQ ID NO: 14267 - protein, 136 aa, Homo sapiens
  Payload ID: 2759
  Gene Symbol: CERS4
  Gene Name: ceramide synthase 4
  ENSP ID: ENSP00000452910
MLSSFNEWFWQDRFWLPPNVTWTELEDRDGRVYPHPQDLLAALPLALVLLAMRLAFERFIGLPLSRWLGVRDQTRRQVKPNATLEKHFLTEGHRPKEPQLSLLAAQCGLTLQQTQRWFRRRRNQDRPQLTKKFCEA

SEQ ID NO: 14268 - protein, 31 aa, Homo sapiens
  Payload ID: 2759
  Gene Symbol: CERS4
  Gene Name: ceramide synthase 4
  ENSP ID: ENSP00000452920
MLSSFNEWFWQDRFWLPPNVTWTELEDRDGR

SEQ ID NO: 14269 - protein, 113 aa, Homo sapiens
  Payload ID: 2759
  Gene Symbol: CERS4
  Gene Name: ceramide synthase 4
  ENSP ID: ENSP00000453388
MLSSFNEWFWQDRFWLPPNVTWTELEDRDGRVYPHPQDLLAALPLALVLLAMRLAFERFIGLPLSRWLGVRDQTRRQVKPNATLEKHFLTEGHRPKEPQLSLLAAQCGLTLQQ

SEQ ID NO: 14270 - protein, 394 aa, Homo sapiens; identical to SEQ ID NO: 14265
  Payload ID: 2759
  Gene Symbol: CERS4
  Gene Name: ceramide synthase 4
  Uniprot ID: Q9HA82
  ENSP ID: ENSP00000453509

SEQ ID NO: 14271 - protein, 92 aa, Homo sapiens
  Payload ID: 2759
  Gene Symbol: CERS4
  Gene Name: ceramide synthase 4
  ENSP ID: ENSP00000453796
MLSSFNEWFWQDRFWLPPNVTWTELEDRDGRVYPHPQDLLAALPLALVLLAMRLAFERFIGLPLSRWLGVRDQTRRQVKPNATLEKHFLTEG

SEQ ID NO: 14272 - protein, 306 aa, Homo sapiens
  Payload ID: 2759
  Gene Symbol: CERS4
  Gene Name: ceramide synthase 4
  ENSP ID: ENSP00000453815
MLSSFNEWFWQDRFWLPPNVTWTELEDRDGRVYPHPQDLLAALPLALVLLAMRLAFERFIGLPLSRWLGVRDQTRRQVKPNATLEKHFLTEGHRPKEPQLSLLAAQCGLTLQQTQRWFRRRRNQDRPQLTKKFCEASWRFLFYLSSFVGGLSVLYHESWLWAPVMCWDRYPNQTLKPSLYWWYLLELGFYLSLLIRLPFDVKRKDFKEQVIHHFVAVILMTFSYSANLLRIGSLVLLLHDSSDYLLEMEKDIRSDVEESDSSEEAAAAQEPLQLKNGAAGGPRPAPTDGPRSRVAGRLTNRHTTAT

SEQ ID NO: 14273 - protein, 192 aa, Homo sapiens
  Payload ID: 2759
  Gene Symbol: CERS4
  Gene Name: ceramide synthase 4
  ENSP ID: ENSP00000454122
MLSSFNEWFWQDRFWLPPNVTWTELEDRDGRVYPHPQDLLAALPLALVLLAMRLAFERFIGLPLSRWLGVRDQTRRQVKPNATLEKHFLTEGHRPKEPQLSLLAAQCGLTLQQTQRWFRRRRNQDRPQLTKKFCEASWRFLFYLSSFVGGLSVLYHESWLWAPVMCWDRYPNQTLKPSLYWWYLLELGFYLS

SEQ ID NO: 14274 - protein, 392 aa, Homo sapiens
  Payload ID: 2760
  Gene Symbol: CERS5
  Gene Name: ceramide synthase 5
  Uniprot ID: Q8N5B7
  ENSP ID: ENSP00000325485
MATAAQGPLSLLWGWLWSERFWLPENVSWADLEGPADGYGYPRGRHILSVFPLAAGIFFVRLLFERFIAKPCALCIGIEDSGPYQAQPNAILEKVFISITKYPDKKRLEGLSKQLDWNVRKIQCWFRHRRNQDKPPTLTKFCESMWRFTFYLCIFCYGIRFLWSSPWFWDIRQCWHNYPFQPLSSGLYHYYIMELAFYWSLMFSQFTDIKRKDFLIMFVHHLVTIGLISFSYINNMVRVGTLIMCLHDVSDFLLEAAKLANYAKYQRLCDTLFVIFSAVFMVTRLGIYPFWILNTTLFESWEIIGPYASWWLLNGLLLTLQLLHVIWSYLIARIALKALIRGKVSKDDRSDVESSSEEEDVTTCTKSPCDSSSSNGANRVNGHMGGSYWAEE

SEQ ID NO: 14275 - protein, 195 aa, Homo sapiens
  Payload ID: 2760
  Gene Symbol: CERS5
  Gene Name: ceramide synthase 5
  ENSP ID: ENSP00000369536
MATAAQGPLSLLWGWLWSERFWLPENVSWADLEGPADGYGYPRGRHILSVFPLAAGIFFVRLLFERFIAKPCALCIGIEDSGPYQAQPNAILEKVFISITKYPDKKRLEGLSKQLDWNVRKIQCWFRHRRNQDKPPTLTKFCESIHLGSGTSDSAGITIHFSLFQVGFITIISWNWPSIGPLCFLSLQTLKERTS

SEQ ID NO: 14276 - protein, 334 aa, Homo sapiens
  Payload ID: 2760
  Gene Symbol: CERS5
  Gene Name: ceramide synthase 5
  Uniprot ID: Q8N5B7
  ENSP ID: ENSP00000389050
MMKPRPKRFIAKPCALCIGIEDSGPYQAQPNAILEKVFISITKYPDKKRLEGLSKQLDWNVRKIQCWFRHRRNQDKPPTLTKFCESMWRFTFYLCIFCYGIRFLWSSPWFWDIRQCWHNYPFQPLSSGLYHYYIMELAFYWSLMFSQFTDIKRKDFLIMFVHHLVTIGLISFSYINNMVRVGTLIMCLHDVSDFLLEAAKLANYAKYQRLCDTLFVIFSAVFMVTRLGIYPFWILNTTLFESWEIIGPYASWWLLNGLLLTLQLLHVIWSYLIARIALKALIRGKVSKDDRSDVESSSEEEDVTTCTKSPCDSSSSNGANRVNGHMGGSYWAEE

SEQ ID NO: 14277 - protein, 179 aa, Homo sapiens
  Payload ID: 2760
  Gene Symbol: CERS5
  Gene Name: ceramide synthase 5
  ENSP ID: ENSP00000407896
MATAAQGPLSLLWGWLWSERFWLPENVSWADLEGPADGYGYPRGRHILSVFPLAAGIFFVRLLFERILIRKGWRACQSSWIGMSEKSNAGFAIGGIRTSPQRLLNSVKACGDSHFIYVYSAMELDFSGRHLGSGTSDSAGITIHFSLFQVGFITIISWNWPSIGPLCFLSLQTLKERTS

SEQ ID NO: 14278 - protein, 195 aa, Homo sapiens; identical to SEQ ID NO: 14275
  Payload ID: 2760
  Gene Symbol: CERS5
  Gene Name: ceramide synthase 5
  ENSP ID: ENSP00000442918

SEQ ID NO: 14279 - protein, 77 aa, Homo sapiens
  Payload ID: 2760
  Gene Symbol: CERS5
  Gene Name: ceramide synthase 5
  ENSP ID: ENSP00000446931
MATAAQGPLSLLWGWLWSERFWLPENVSWADLEGPADGYGYPRGRHILSVFPLAAGIFFVRLLFERVCFVAQTGVQW

SEQ ID NO: 14280 - protein, 66 aa, Homo sapiens
  Payload ID: 2760
  Gene Symbol: CERS5
  Gene Name: ceramide synthase 5
  ENSP ID: ENSP00000446937
MATAAQGPLSLLWGWLWSERFWLPENVSWADLEGPADGYGYPRGRHILSVFPLAAGIFFVRLLFER

SEQ ID NO: 14281 - protein, 136 aa, Homo sapiens
  Payload ID: 2760
  Gene Symbol: CERS5
  Gene Name: ceramide synthase 5
  ENSP ID: ENSP00000447029
  MOD_RES (1)..(1): Any amino acid
XLCIFCYGIRFLWSDFLIMFVHHLVTIGLISFSYINNMVRVGTLIMCLHDVSDFLLEAAKLANYAKYQRLCDTLFVIFSAVFMVTRLGIYPFWILNTTLFESWEIIGPYASWWLLNGLLLTLQLLHVIWSYLIARI

SEQ ID NO: 14282 - protein, 111 aa, Homo sapiens
  Payload ID: 2760
  Gene Symbol: CERS5
  Gene Name: ceramide synthase 5
  ENSP ID: ENSP00000447266
  MOD_RES (1)..(1): Any amino acid
XLFVIFSAVFMVTRLGIYPFWILNTTLFESWEIIGPYASWWLLNGLLLTLQLLHVIWSYLIARIALKALIRGKVTCPGRIRPCTLHSFLTSFLFSMPGGSWTVSSLACIEG

SEQ ID NO: 14283 - protein, 73 aa, Homo sapiens
  Payload ID: 2760
  Gene Symbol: CERS5
  Gene Name: ceramide synthase 5
  ENSP ID: ENSP00000447410
MATAAQGPLSLLWGWLWSERFWLPENVSWADLEGPADGYGYPRGRHILSVFPLAAGIFFVRLLFERRDGVSLC

SEQ ID NO: 14284 - protein, 93 aa, Homo sapiens
  Payload ID: 2760
  Gene Symbol: CERS5
  Gene Name: ceramide synthase 5
  ENSP ID: ENSP00000448257
MATAAQGPLSLLWGWLWSERFWLPENVSWADLEGPADGYGYPRGRHILSVFPLAAGIFFVRLLFERWCFALVAQAGVQWCSHSSLQPLPPRFK

SEQ ID NO: 14285 - protein, 259 aa, Homo sapiens
  Payload ID: 2760
  Gene Symbol: CERS5
  Gene Name: ceramide synthase 5
  ENSP ID: ENSP00000448295
MATAAQGPLSLLWGWLWSERFWLPENVSWADLEGPADGYGYPRGRHILSVFPLAAGIFFVRLLFERFIAKPCALCIGIEDSGPYQAQPNAILEKVFISITKYPDKKRLEGLSKQLDWNVRKIQCWFRHRRNQDKPPTLTKFCESMWRFTFYLCIFCYGIRFLWSSPWFWDIRQCWHNYPFQDFLIMFVHHLVTIGLISFSYINNMVRVGTLIMCLHDVSDFLLEAAKLANYAKYQRLCDTLFVIFSAVFMVTRLGIYPF

SEQ ID NO: 14286 - protein, 93 aa, Homo sapiens
  Payload ID: 2760
  Gene Symbol: CERS5
  Gene Name: ceramide synthase 5
  ENSP ID: ENSP00000448755
MATAAQGPLSLLWGWLWSERFWLPENVSWADLEGPADGYGYPRGRHILSVFPLAAGIFFVRLLFERLECSGAISLQPSTPWFKRFSCLSLPSS

SEQ ID NO: 14287 - protein, 351 aa, Homo sapiens
  Payload ID: 2760
  Gene Symbol: CERS5
  Gene Name: ceramide synthase 5
  ENSP ID: ENSP00000448794
MATAAQGPLSLLWGWLWSERFWLPENVSWADLEGPADGYGYPRGRHILSVFPLAAGIFFVRLLFERFIAKPCALCIGIEDSGPYQAQPNAILEKVFISITKYPDKKRLEGLSKQLDWNVRKIQCWFRHRRNQDKPPTLTKFCESMWRFTFYLCIFCYGIRFLWSSPWFWDIRQCWHNYPFQPLSSGLYHYYIMELAFYWSLMFSQFTDIKRKDFLIMFVHHLVTIGLISFSYINNMVRVGTLIMCLHDVSDFLLEAAKLANYAKYQRLCDTLFVIFSAVFMVTRLGIYPFCFSVLFYSTFANRTQEPYCPAFTLACADLLWTLIGPLLPQTVFLARSDPDSEYPAWLASQD

SEQ ID NO: 14288 - protein, 78 aa, Homo sapiens
  Payload ID: 2760
  Gene Symbol: CERS5
  Gene Name: ceramide synthase 5
  ENSP ID: ENSP00000449311
  MOD_RES (1)..(1): Any amino acid
XYINNMVRVGTLIMCLHDVSDFLLEAAKLANYAKYQRLCDTLFVIFSAVFMVTRLGIYPFWYRRMIAVMWRAAQRKKM

SEQ ID NO: 14289 - protein, 77 aa, Homo sapiens
  Payload ID: 2760
  Gene Symbol: CERS5
  Gene Name: ceramide synthase 5
  ENSP ID: ENSP00000450072
MATAAQGPLSLLWGWLWSERFWLPENVSWADLEGPADGYGYPRGRHILSVFPLAAGIFFVRLLFERVQAILLPQPPK

SEQ ID NO: 14290 - protein, 384 aa, Homo sapiens
  Payload ID: 2761
  Gene Symbol: CERS6
  Gene Name: ceramide synthase 6
  Uniprot ID: Q6ZMG9
  ENSP ID: ENSP00000306579
MAGILAWFWNERFWLPHNVTWADLKNTEEATFPQAEDLYLAFPLAFCIFMVRLIFERFVAKPCAIALNIQANGPQIAPPNAILEKVFTAITKHPDEKRLEGLSKQLDWDVRSIQRWFRQRRNQEKPSTLTRFCESMWRFSFYLYVFTYGVRFLKKTPWLWNTRHCWYNYPYQPLTTDLHYYYILELSFYWSLMFSQFTDIKRKDFGIMFLHHLVSIFLITFSYVNNMARVGTLVLCLHDSADALLEAAKMANYAKFQKMCDLLFVMFAVVFITTRLGIFPLWVLNTTLFESWEIVGPYPSWWVFNLLLLLVQGLNCFWSYLIVKIACKAVSRGKVSKDDRSDIESSSDEEDSEPPGKNPHTATTTNGTSGTNGYLLTGSCSMDD

SEQ ID NO: 14291 - protein, 392 aa, Homo sapiens
  Payload ID: 2761
  Gene Symbol: CERS6
  Gene Name: ceramide synthase 6
  Uniprot ID: Q6ZMG9
  ENSP ID: ENSP00000376453
MAGILAWFWNERFWLPHNVTWADLKNTEEATFPQAEDLYLAFPLAFCIFMVRLIFERFVAKPCAIALNIQANGPQIAPPNAILEKVFTAITKHPDEKRLEGLSKQLDWDVRSIQRWFRQRRNQEKPSTLTRFCESMWRFSFYLYVFTYGVRFLKKTPWLWNTRHCWYNYPYQPLTTDLHYYYILELSFYWSLMFSQFTDIKRKDFGIMFLHHLVSIFLITFSYVNNMARVGTLVLCLHDSADALLEAAKMANYAKFQKMCDLLFVMFAVVFITTRLGIFPLWVLNTTLFESWEIVGPYPSWWVFNLLLLLVQGLNCFWSYLIVKIACKAVSRGKAGKWNPLHVSKDDRSDIESSSDEEDSEPPGKNPHTATTTNGTSGTNGYLLTGSCSMDD

SEQ ID NO: 14292 - protein, 214 aa, Homo sapiens
  Payload ID: 2762
  Gene Symbol: CPTP
  Gene Name: ceramide-1-phosphate transfer protein
  Uniprot ID: Q5TA50
  ENSP ID: ENSP00000343890
MDDSETGFNLKVVLVSFKQCLDEKEEVLLDPYIASWKGLVRFLNSLGTIFSFISKDVVSKLRIMERLRGGPQSEHYRSLQAMVAHELSNRLVDLERRSHHPESGCRTVLRLHRALHWLQLFLEGLRTSPEDARTSALCADSYNASLAAYHPWVVRRAVTVAFCTLPTREVFLEAMNVGPPEQAVQMLGEALPFIQRVYNVSQKLYAEHSLLDLP

SEQ ID NO: 14293 - protein, 117 aa, Homo sapiens
  Payload ID: 2762
  Gene Symbol: CPTP
  Gene Name: ceramide-1-phosphate transfer protein
  ENSP ID: ENSP00000462636
MDDSETGFNLKVVLVSFKQCLDEKEEVLLDPYIASWKGLVRFLNSLGTIFSFISKDVVSKLRIMERLRGGPQSEHYRSLQAMVAHELSNRLVDLERRSHHPESGCRTVLRLHRALHW

SEQ ID NO: 14294 - protein, 267 aa, Homo sapiens
  Payload ID: 2763
  Gene Symbol: CER1
  Gene Name: cerberus 1, DAN family BMP antagonist
  Uniprot ID: O95813
  ENSP ID: ENSP00000370297
MHLLLFQLLVLLPLGKTTRHQDGRQNQSSLSPVLLPRNQRELPTGNHEEAEEKPDLFVAVPHLVATSPAGEGQRQREKMLSRFGRFWKKPEREMHPSRDSDSEPFPPGTQSLIQPIDGMKMEKSPLREEAKKFWHHFMFRKTPASQGVILPIKSHEVHWETCRTVPFSQTITHEGCEKVVVQNNLCFGKCGSVHFPGAAQHSHTSCSHCLPAKFTTMHLPLNCTELSSVIKVVMLVEECQCKVKTEHEDGHILHAGSQDSFIPGVSA

SEQ ID NO: 14295 - protein, 262 aa, Homo sapiens
  Payload ID: 2764
  Gene Symbol: CDR1
  Gene Name: cerebellar degeneration-related protein 1, 34kDa
  Uniprot ID: P51861
  ENSP ID: ENSP00000359563
MAWLEDVDFLEDVPLLEDIPLLEDVPLLEDVPLLEDTSRLEDINLMEDMALLEDVDLLEDTDFLEDLDFSEAMDLREDKDFLEDMDSLEDMALLEDVDLLEDTDFLEDPDFLEAIDLREDKDFLEDMDSLEDLEAIGRCGFSGRHGFFGRRRFSGRPKLSGRLGLLGRRGFSGRLGGYWKTWIFWKTWIFWKTWIFRKTYIGWKTWIFSGRCGLTGRPGFGGRRRFFWKTLTDWKTWISFWKTLIDWKTWISFWKTLIDWKI

SEQ ID NO: 14296 - protein, 454 aa, Homo sapiens
  Payload ID: 2765
  Gene Symbol: CDR2
  Gene Name: cerebellar degeneration-related protein 2, 62kDa
  Uniprot ID: Q01850
  ENSP ID: ENSP00000268383
MLAENLVEEFEMKEDEPWYDHQDLQQDLQLAAELGKTLLDRNTELEDSVQQMYTTNQEQLQEIEYLTKQVELLRQMNEQHAKVYEQLDVTARELEETNQKLVADSKASQQKILSLTETIECLQTNIDHLQSQVEELKSSGQGRRSPGKCDQEKPAPSFACLKELYDLRQHFVYDHVFAEKITSLQGQPSPDEEENEHLKKTVTMLQAQLSLERQKRVTMEEEYGLVLKENSELEQQLGATGAYRARALELEAEVAEMRQMLQSEHPFVNGVEKLVPDSLYVPFKEPSQSLLEEMFLTVPESHRKPLKRSSSETILSSLAGSDIVKGHEETCIRRAKAVKQRGISLLHEVDTQYSALKVKYEELLKKCQEEQDSLSHKAVQTSRAAAKDLTGVNAQSEPVASGWELASVNPEPVSSPTTPPEYKALFKEIFSCIKKTKQEIDEQRTKYRSLSSHS

SEQ ID NO: 14297 - protein, 62 aa, Homo sapiens
  Payload ID: 2765
  Gene Symbol: CDR2
  Gene Name: cerebellar degeneration-related protein 2, 62kDa
  ENSP ID: ENSP00000454706
MNEQHAKVYEQLDVTARELEETNQKLVADSKASQQKILSLTETIECLQTNIDHLQSQVEELK

SEQ ID NO: 14298 - protein, 46 aa, Homo sapiens
  Payload ID: 2765
  Gene Symbol: CDR2
  Gene Name: cerebellar degeneration-related protein 2, 62kDa
  ENSP ID: ENSP00000455915
MLAENLVEEFEMKEDEPWYDHQDLQQVSDEASGTSTADERTTCKGL

SEQ ID NO: 14299 - protein, 116 aa, Homo sapiens
  Payload ID: 2765
  Gene Symbol: CDR2
  Gene Name: cerebellar degeneration-related protein 2, 62kDa
  ENSP ID: ENSP00000457289
MNEQHAKVYEQLDVTARELEETNQKLVADSKASQQKILSLTETIECLQTNIDHLQSQVEELKSSGQGRRSPGKCDQEKPAPSFACLKELYDLRQHFVYDHVFAEKITSLQGQPSPD

SEQ ID NO: 14300 - protein, 234 aa, Homo sapiens
  Payload ID: 2765
  Gene Symbol: CDR2
  Gene Name: cerebellar degeneration-related protein 2, 62kDa
  ENSP ID: ENSP00000457432
MYTTNQEQLQEIEYLTKQVELLRQMNEQHAKVYEQLDVTARELEETNQKLVADSKASQQKILSLTETIECLQTNIDHLQSQVEELKSSGQGRRSPGKCDQEKPAPSFACLKELYDLRQHFVYDHVFAEKITSLQGQPSPDEEENEHLKKTVTMLQAQLSLERQKRVTMEEEYGLVLKENSELEQQLGATGAYRARALELEAEVAEMRQMLQSEHPFVNGVEKLVPDSLYVPFKE

SEQ ID NO: 14301 - protein, 80 aa, Homo sapiens
  Payload ID: 2765
  Gene Symbol: CDR2
  Gene Name: cerebellar degeneration-related protein 2, 62kDa
  ENSP ID: ENSP00000457596
  MOD_RES (1)..(1): Any amino acid
XARELEETNQKLVADSKASQQKILSLTETIECLQTNIDHLQSQVEELKSSGQGRRSPGKCDQEKPAPSFACLKELYDLRQ

SEQ ID NO: 14302 - protein, 465 aa, Homo sapiens
  Payload ID: 2766
  Gene Symbol: CDR2L
  Gene Name: cerebellar degeneration-related protein 2-like
  Uniprot ID: Q86X02
  ENSP ID: ENSP00000336587
MRRAAGMEDFSAEEEESWYDQQDLEQDLHLAAELGKTLLERNKELEGSLQQMYSTNEEQVQEIEYLTKQLDTLRHVNEQHAKVYEQLDLTARDLELTNHRLVLESKAAQQKIHGLTETIERLQAQVEELQAQVEQLRGLEQLRVLREKRERRRTIHTFPCLKELCTSPRCKDAFRLHSSSLELGPRPLEQENERLQTLVGALRSQVSQERQRKERAEREYTAVLQEYSELERQLCEMEACRLRVQELEAELLELQQMKQAKTYLLGPDDHLAEALLAPLTQAPEADDPQPGRGDDLGAQDGVSSPAASPGHVVRKSCSDTALNAIVAKDPASRHAGNLTLHANSVRKRGMSILREVDEQYHALLEKYEELLSKCRQHGAGVRHAGVQTSRPISRDSSWRDLRGGEEGQGEVKAGEKSLSQHVEAVDKRLEQSQPEYKALFKEIFSRIQKTKADINATKVKTHSSK

SEQ ID NO: 14303 - protein, 193 aa, Homo sapiens
  Payload ID: 2767
  Gene Symbol: CBLN1
  Gene Name: cerebellin 1 precursor
  Uniprot ID: P23435
  ENSP ID: ENSP00000219197
MLGVLELLLLGAAWLAGPARGQNETEPIVLEGKCLVVCDSNPTSDPTGTALGISVRSGSAKVAFSAIRSTNHEPSEMSNRTMIIYFDQVLVNIGNNFDSERSTFIAPRKGIYSFNFHVVKVYNRQTIQVSLMLNGWPVISAFAGDQDVTREAASNGVLIQMEKGDRAYLKLERGNLMGGWKYSTFSGFLVFPL

SEQ ID NO: 14304 - protein, 193 aa, Homo sapiens; identical to SEQ ID NO: 14303
  Payload ID: 2767
  Gene Symbol: CBLN1
  Gene Name: cerebellin 1 precursor
  Uniprot ID: P23435
  ENSP ID: ENSP00000444651

SEQ ID NO: 14305 - protein, 140 aa, Homo sapiens
  Payload ID: 2767
  Gene Symbol: CBLN1
  Gene Name: cerebellin 1 precursor
  ENSP ID: ENSP00000455718
MLGVLELLLLGAAWLAGPARGQNETEPIVLEGKCLVVCDSNPTSDPTGTALGISVRSGSAKVAFSAIRSTNHEPSEMSNRTMIIYFDQVSVPSSRGVQIGLVKEGWMEDRCPVLSKGSAEARGRQSGTDSCPLPFVPVSL

SEQ ID NO: 14306 - protein, 224 aa, Homo sapiens
  Payload ID: 2768
  Gene Symbol: CBLN2
  Gene Name: cerebellin 2 precursor
  Uniprot ID: Q8IUK8
  ENSP ID: ENSP00000269503
MQAPGRGPLGLRLMMPGRRGALREPGGCGSCLGVALALLLLLLPACCPVRAQNDTEPIVLEGKCLVVCDSSPSADGAVTSSLGISVRSGSAKVAFSATRSTNHEPSEMSNRTMTIYFDQVLVNIGNHFDLASSIFVAPRKGIYSFSFHVVKVYNRQTIQVSLMQNGYPVISAFAGDQDVTREAASNGVLLLMEREDKVHLKLERGNLMGGWKYSTFSGFLVFPL

SEQ ID NO: 14307 - protein, 110 aa, Homo sapiens
  Payload ID: 2768
  Gene Symbol: CBLN2
  Gene Name: cerebellin 2 precursor
  ENSP ID: ENSP00000462632
MDWDKVLVNIGNHFDLASSIFVAPRKGIYSFSFHVVKVYNRQTIQVSLMQNGYPVISAFAGDQDVTREAASNGVLLLMEREDKVHLKLERGNLMGGWKYSTFSGFLVFPL

SEQ ID NO: 14308 - protein, 224 aa, Homo sapiens; identical to SEQ ID NO: 14306
  Payload ID: 2768
  Gene Symbol: CBLN2
  Gene Name: cerebellin 2 precursor
  Uniprot ID: Q8IUK8
  ENSP ID: ENSP00000463771

SEQ ID NO: 14309 - protein, 108 aa, Homo sapiens
  Payload ID: 2768
  Gene Symbol: CBLN2
  Gene Name: cerebellin 2 precursor
  ENSP ID: ENSP00000464490
MFQVLVNIGNHFDLASSIFVAPRKGIYSFSFHVVKVYNRQTIQVSLMQNGYPVISAFAGDQDVTREAASNGVLLLMEREDKVHLKLERGNLMGGWKYSTFSGFLVFPL

SEQ ID NO: 14310 - protein, 205 aa, Homo sapiens
  Payload ID: 2769
  Gene Symbol: CBLN3
  Gene Name: cerebellin 3 precursor
  Uniprot ID: Q6UW01
  ENSP ID: ENSP00000267406
MLGAKPHWLPGPLHSPGLPLVLVLLALGAGWAQEGSEPVLLEGECLVVCEPGRAAAGGPGGAALGEAPPGRVAFAAVRSHHHEPAGETGNGTSGAIYFDQVLVNEGGGFDRASGSFVAPVRGVYSFRFHVVKVYNRQTVQVSLMLNTWPVISAFANDPDVTREAATSSVLLPLDPGDRVSLRLRRGNLLGGWKYSSFSGFLIFPL

SEQ ID NO: 14311 - protein, 154 aa, Homo sapiens
  Payload ID: 2769
  Gene Symbol: CBLN3
  Gene Name: cerebellin 3 precursor
  ENSP ID: ENSP00000450935
MWGLSGQSFGRTLTPTLKMRSTWGCCSRTLFSASADTAKRSGDAGRAPQVLVNEGGGFDRASGSFVAPVRGVYSFRFHVVKVYNRQTVQVSLMLNTWPVISAFANDPDVTREAATSSVLLPLDPGDRVSLRLRRGNLLGGWKYSSFSGFLIFPL

SEQ ID NO: 14312 - protein, 201 aa, Homo sapiens
  Payload ID: 2770
  Gene Symbol: CBLN4
  Gene Name: cerebellin 4 precursor
  Uniprot ID: Q9NTU7
  ENSP ID: ENSP00000064571
MGSGRRALSAVPAVLLVLTLPGLPVWAQNDTEPIVLEGKCLVVCDSNPATDSKGSSSSPLGISVRAANSKVAFSAVRSTNHEPSEMSNKTRIIYFDQILVNVGNFFTLESVFVAPRKGIYSFSFHVIKVYQSQTIQVNLMLNGKPVISAFAGDKDVTREAATNGVLLYLDKEDKVYLKLEKGNLVGGWQYSTFSGFLVFPL

SEQ ID NO: 14313 - protein, 442 aa, Homo sapiens [sequence omitted]

SEQ ID NO: 14314 - protein, 228 aa, Homo sapiens
  Payload ID: 2771
  Gene Symbol: CRBN
  Gene Name: cereblon
  ENSP ID: ENSP00000392073
  MOD_RES (1)..(1): Any amino acid
XDQQDAAHNMGNHLPLLPAESEEEDEMEVEDQDSKEAKKPNIINFDTSLPTSHTYLGADMEEFHGRTLHDDDSCQVIPVLPQVMMILIPGQTLPLQLFHPQEVSMVRNLIQKDRTFAVLAYSNVQEREAQFGTTAEIYAYREEQDFGIEIVKVKAIGRQRFKVLELRTQSDGIQQAKVQILPECVLPSTMSAVQLESLNKCQIFPSKPVSREDQCSYKWWQKYQKVRN

SEQ ID NO: 14315 - protein, 394 aa, Homo sapiens
  Payload ID: 2771
  Gene Symbol: CRBN
  Gene Name: cereblon
  ENSP ID: ENSP00000411047
  MOD_RES (1)..(1): Any amino acid
XDQQDAAHNMGNHLPLLPAESEEEDEMEVEDQDSKEAKKPNIINFDTSLPTSHTYLGADMEEFHGRTLHDDDSCQVIPVLPQVMMILIPGQTLPLQLFHPQEVSMVRNLIQKDRTFAVLAYSNVQEREAQFGTTAEIYAYREEQDFGIEIVKVKAIGRQRFKVLELRTQSDGIQQAKVQILPECVLPSTMSAVQLESLNKCQIFPSKPVSREDQCSYKWWQKYQKRKFHCANLTSWPRWLYSLYDAETLMDRIKKQLREWDENLKDDSLPSNPIDFSYRVAACLPIDDVLRIQLLKIGSAIQRLRCELDIMNKCTSLCCKQCQETEITTKNEIFRYAWTVAQCKICASHIGWKFTATKKDMSPQKFWGLTRSALLPTIPDTEDEISPDKVILCL

SEQ ID NO: 14316 - protein, 441 aa, Homo sapiens
  Payload ID: 2771
  Gene Symbol: CRBN
  Gene Name: cereblon
  Uniprot ID: Q96SW2
  ENSP ID: ENSP00000412499
MAGEGDQQDAAHNMGNHLPLLPESEEEDEMEVEDQDSKEAKKPNIINFDTSLPTSHTYLGADMEEFHGRTLHDDDSCQVIPVLPQVMMILIPGQTLPLQLFHPQEVSMVRNLIQKDRTFAVLAYSNVQEREAQFGTTAEIYAYREEQDFGIEIVKVKAIGRQRFKVLELRTQSDGIQQAKVQILPECVLPSTMSAVQLESLNKCQIFPSKPVSREDQCSYKWWQKYQKRKFHCANLTSWPRWLYSLYDAETLMDRIKKQLREWDENLKDDSLPSNPIDFSYRVAACLPIDDVLRIQLLKIGSAIQRLRCELDIMNKCTSLCCKQCQETEITTKNEIFSLSLCGPMAAYVNPHGYVHETLTVYKACNLNLIGRPSTEHSWFPGYAWTVAQCKICASHIGWKFTATKKDMSPQKFWGLTRSALLPTIPDTEDEISPDKVILCL

SEQ ID NO: 14317 - protein, 444 aa, Homo sapiens
  Payload ID: 2772
  Gene Symbol: CCM2
  Gene Name: cerebral cavernous malformation 2
  Uniprot ID: Q9BSQ5
  ENSP ID: ENSP00000258781
MEEEGKKGKKPGIVSPFKRVFLKGEKSRDKKAHEKVTERRPLHTVVLSLPERVEPDRLLSDYIEKEVKYLGQLTSIPGYLNPSSRTEILHFIDNAKRAHQLPGHLTQEHDAVLSLSAYNVKLAWRDGEDIILRVPIHDIAAVSYVRDDAAHLVVLKTAQDPGISPSQSLCAESSRGLSAGSLSESAVGPVEACCLVILAAESKVAAEELCCLLGQVFQVVYTESTIDFLDRAIFDGASTPTHHLSLHSDDSSTKVDIKETYEVEASTFCFPESVDVGGASPHSKTISESELSASATELLQDYMLTLRTKLSSQEIQQFAALLHEYRNGASIHEFCINLRQLYGDSRKFLLLGLRPFIPEKDSQHFENFLETIGVKDGRGIITDSFGRHRRALSTTSSSTTNGNRATGSSDDRSAPSEGDEWDRMISDISSDIEALGCSMDQDSA

SEQ ID NO: 14318 - protein, 465 aa, Homo sapiens
  Payload ID: 2772
  Gene Symbol: CCM2
  Gene Name: cerebral cavernous malformation 2
  Uniprot ID: Q9BSQ5
  ENSP ID: ENSP00000370503
MHSSCRQRRNQNLSKEIPQTEFHTGYSMENEPGIVSPFKRVFLKGEKSRDKKAHEKVTERRPLHTVVLSLPERVEPDRLLSDYIEKEVKYLGQLTSIPGYLNPSSRTEILHFIDNAKRAHQLPGHLTQEHDAVLSLSAYNVKLAWRDGEDIILRVPIHDIAAVSYVRDDAAHLVVLKTAQDPGISPSQSLCAESSRGLSAGSLSESAVGPVEACCLVILAAESKVAAEELCCLLGQVFQVVYTESTIDFLDRAIFDGASTPTHHLSLHSDDSSTKVDIKETYEVEASTFCFPESVDVGGASPHSKTISESELSASATELLQDYMLTLRTKLSSQEIQQFAALLHEYRNGASIHEFCINLRQLYGDSRKFLLLGLRPFIPEKDSQHFENFLETIGVKDGRGIITDSFGRHRRALSTTSSSTTNGNRATGSSDDRSAPSEGDEWDRMISDISSDIEALGCSMDQDSA

SEQ ID NO: 14319 - protein, 438 aa, Homo sapiens
  Payload ID: 2772
  Gene Symbol: CCM2
  Gene Name: cerebral cavernous malformation 2
  ENSP ID: ENSP00000417180
MENEPGIVSPFKRVFLKGEKSRDKKAHEKVTERRPLHTVVLSLPERVEPDRLLSDYIEKEVKYLGQLTSIPGYLNPSSRTEILHFIDNAKRAHQLPGHLTQEHDAVLSLSAYNVKLAWRDGEDIILRVPIHDIAAVSYVRDDAAHLVVLKTAQDPGISPSQSLCAESSRGLSAGSLSESAVGPVEACCLVILAAESKVAAEELCCLLGQVFQVVYTESTIDFLDRAIFDGASTPTHHLSLHSDDSSTKVDIKETYEVEASTFCFPESVDVGGASPHSKTISESELSASATELLQDYMLTLRTKLSSQEIQQFAALLHEYRNGASIHEFCINLRQLYGDSRKFLLLGLRPFIPEKDSQHFENFLETIGVKDGRGIITDSFGRHRRALSTTSSSTTNGNRATGSSDDRSAPSEGDEWDRMISDISSDIEALGCSMDQDSA

SEQ ID NO: 14320 - protein, 271 aa, Homo sapiens
  Payload ID: 2772
  Gene Symbol: CCM2
  Gene Name: cerebral cavernous malformation 2
  ENSP ID: ENSP00000417251
MEEEGKKGKKPGIVSPFKRVFLKGEKSRDKKAHEKVTERRPLHTVVLSLPERVEPDRLLSDYIEKEVKYLGQLTSIPGYLNPSSRTEILHFIDNAKRAHQLPGHLTQEHDAVLSLSAYNVKLAWRDGEDIILRVPIHDIAAVSYVRDDAAHLVVLKTAQDPGISPSQSLCAESSRGLSAGSLSESAVGPVEACCLVILAAESKVAAEELCCLLGQVFQVVYTESTIDFLDRAIFDGASTPTHHLSLHSAASLNLWMWVVHHPTARPSVRAS

SEQ ID NO: 14321 - protein, 135 aa, Homo sapiens
  Payload ID: 2772
  Gene Symbol: CCM2
  Gene Name: cerebral cavernous malformation 2
  ENSP ID: ENSP00000418763
  MOD_RES (1)..(1): Any amino acid
XGLSAGSLSESAVGPVEACCLVILAAESKVAAEELCCLLGQVFQVVYTESTIDFLDRAIFDGASTPTHHLSLHSASHVTSSTVTSSFDCQLPLHFRTLAITLSPPKFSRVISLFQDDSSTKVDIKETYEVEASTL

SEQ ID NO: 14322 - protein, 347 aa, Homo sapiens
  Payload ID: 2772
  Gene Symbol: CCM2
  Gene Name: cerebral cavernous malformation 2
  ENSP ID: ENSP00000419474
MENEPGIVSPFKRVFLKGEKSRDKKAHEKVTERRPLHTVVLSLPERVEPDRLLSDYIEKEVKYLGQLTSIPGYLNPSSRTEILHFIDNAKRAHQLPGHLTQEHDAVLSLSAYNVKLAWRDGEDIILRVPIHDIAAVSYVRDDAAHLVVLKTDDSSTKVDIKETYEVEASTFCFPESVDVGGASPHSKTISESELSASATELLQDYMLTLRTKLSSQEIQQFAALLHEYRNGASIHEFCINLRQLYGDSRKFLLLGLRPFIPEKDSQHFENFLETIGVKDGRGIITDSFGRHRRALSTTSSSTTNGNRATGSSDDRSAPSEGDEWDRMISDISSDIEALGCSMDQDSA

SEQ ID NO: 14323 - protein, 353 aa, Homo sapiens
  Payload ID: 2772
  Gene Symbol: CCM2
  Gene Name: cerebral cavernous malformation 2
  Uniprot ID: Q9BSQ5
  ENSP ID: ENSP00000438035
MEEEGKKGKKPGIVSPFKRVFLKGEKSRDKKAHEKVTERRPLHTVVLSLPERVEPDRLLSDYIEKEVKYLGQLTSIPGYLNPSSRTEILHFIDNAKRAHQLPGHLTQEHDAVLSLSAYNVKLAWRDGEDIILRVPIHDIAAVSYVRDDAAHLVVLKTDDSSTKVDIKETYEVEASTFCFPESVDVGGASPHSKTISESELSASATELLQDYMLTLRTKLSSQEIQQFAALLHEYRNGASIHEFCINLRQLYGDSRKFLLLGLRPFIPEKDSQHFENFLETIGVKDGRGIITDSFGRHRRALSTTSSSTTNGNRATGSSDDRSAPSEGDEWDRMISDISSDIEALGCSMDQDSA

SEQ ID NO: 14324 - protein, 386 aa, Homo sapiens
  Payload ID: 2772
  Gene Symbol: CCM2
  Gene Name: cerebral cavernous malformation 2
  Uniprot ID: Q9BSQ5
  ENSP ID: ENSP00000444725
MEEEGKKGKKYLGQLTSIPGYLNPSSRTEILHFIDNAKRAHQLPGHLTQEHDAVLSLSAYNVKLAWRDGEDIILRVPIHDIAAVSYVRDDAAHLVVLKTAQDPGISPSQSLCAESSRGLSAGSLSESAVGPVEACCLVILAAESKVAAEELCCLLGQVFQVVYTESTIDFLDRAIFDGASTPTHHLSLHSDDSSTKVDIKETYEVEASTFCFPESVDVGGASPHSKTISESELSASATELLQDYMLTLRTKLSSQEIQQFAALLHEYRNGASIHEFCINLRQLYGDSRKFLLLGLRPFIPEKDSQHFENFLETIGVKDGRGIITDSFGRHRRALSTTSSSTTNGNRATGSSDDRSAPSEGDEWDRMISDISSDIEALGCSMDQDSA

SEQ ID NO: 14325 - protein, 433 aa, Homo sapiens
  Payload ID: 2773
  Gene Symbol: CCM2L
  Gene Name: cerebral cavernous malformation 2-like
  Uniprot ID: Q9NUG4
  ENSP ID: ENSP00000262659
MEYEVKKGKKGFVSPIRRLVFPKAGRRAACRSSVSRRPLHSMPLYPPDYLIDPQILLCDYLEKEVKFLGHLTWVTSSLNPSSRDELLQLLDTARQLKELPLKTTAEQDSILSLSARCLLLTWRDNEELILRIPTHEIAAASYLQDDALHLLVLKTGLGVDPVPAGVDASPGGAGRDPGPPGGAPEKRRVGTAERRHTICSLDWRMGWGGGAAEARAGGGGGGSLERQRAGARASGSWERRQTFSGSWERRHGGGGGGGGAGKPGGSWERRQAGSGGGGSWERRHPGPNPLDPQDPSPDAYCNLVILAVANRDAAEESCALICQVFQIIYGDQSIECVDRAGYHYTSTPERPWLCSRIMAPRTPLKHVTAARPHLLSMAPTAAAATTAVWAWSSYRITWSRCGVSWGPSRSSSLRCCCGSTGWGCPSRTIAQAC

SEQ ID NO: 14326 - protein, 324 aa, Homo sapiens
  Payload ID: 2773
  Gene Symbol: CCM2L
  Gene Name: cerebral cavernous malformation 2-like
  ENSP ID: ENSP00000392448
ERRHGGGGGGGGAGKPGGSWERRQAGSGGGGSWERRHPGPNPLDPQDPSPDAYCNLVILAVANRDAAEESCALICQVFQIIYGDQSIECVDRAGYHYTSTPERPWLCSRSESCHTDGTYAYDADFSCCSSFNGSQDTFEACYSGTSTPSFHGSHCSGSDHSSLGLEQLQDYMVTLRSKLGPLEIQQFAMLLREYRLGLPIQDYCTGLLKLYGDRRKFLLLGMRPFIPDQDIGYFEGFLEGVGIREGGILTDSFGRIKRSMSSTSASAVRSYDGAAQRPEAQAFHRLLADITHDIEALAPDDDDDDEDEPRGSRGGSDAAEDNYL

SEQ ID NO: 14327 - protein, 85 aa, Homo sapiens
  Payload ID: 2774
  Gene Symbol: CDNF
  Gene Name: cerebral dopamine neurotrophic factor
  Uniprot ID: Q49AH0
  ENSP ID: ENSP00000367703
MSVHMPAMKICEKLKKLDSQICELKYEKTLDLASVDLRKMRVAELKQILHSWGEECRACAEKTDYVNLIQELAPKYAATHPKTEL

SEQ ID NO: 14328 - protein, 187 aa, Homo sapiens
  Payload ID: 2774
  Gene Symbol: CDNF
  Gene Name: cerebral dopamine neurotrophic factor
  Uniprot ID: Q49AH0
  ENSP ID: ENSP00000419395
MWCASPVAVVAFCAGLLVSHPVLTQGQEAGGRPGADCEVCKEFLNRFYKSLIDRGVNFSLDTIEKELISFCLDTKGKENRLCYYLGATKDAATKILSEVTRPMSVHMPAMKICEKLKKLDSQICELKYEKTLDLASVDLRKMRVAELKQILHSWGEECRACAEKTDYVNLIQELAPKYAATHPKTEL

SEQ ID NO: 14329 - protein, 595 aa, Homo sapiens
  Payload ID: 2775
  Gene Symbol: CERCAM
  Gene Name: cerebral endothelial cell adhesion molecule
  Uniprot ID: Q5T4B2
  ENSP ID: ENSP00000361929
MRAARAAPLLQLLLLLGPWLEAAGVAESPLPAVVLAILARNAEHSLPHYLGALERLDYPRARMALWCATDHNVDNTTEMLQEWLAAVGDDYAAVVWRPEGEPRFYPDEEGPKHWTKERHQFLMELKQEALTFARNWGADYILFADTDNILTNNQTLRLLMGQGLPVVAPMLDSQTYYSNFWCGITPQGYYRRTAEYFPTKNRQRRGCFRVPMVHSTFLASLRAEGADQLAFYPPHPNYTWPFDDIIVFAYACQAAGVSVHVCNEHRYGYMNVPVKSHQGLEDERVNFIHLILEALVDGPRMQASAHVTRPSKRPSKIGFDEVFVISLARRPDRRERMLASLWEMEISGRVVDAVDGWMLNSSAIRNLGVDLLPGYQDPYSGRTLTKGEVGCFLSHYSIWEEVVARGLARVLVFEDDVRFESNFRGRLERLMEDVEAEKLSWDLIYLGRKQVNPEKETAVEGLPGLVVAGYSYWTLAYALRLAGARKLLASQPLRRMLPVDEFLPIMFDQHPNEQYKAHFWPRDLVAFSAQPLLAAPTHYAGDAEWLSDTETSSPWDDDSGRLISWSGSQKTLRSPRLDLTGSSGHSLQPQPRDEL

SEQ ID NO: 14330 - protein, 517 aa, Homo sapiens
  Payload ID: 2775
  Gene Symbol: CERCAM
  Gene Name: cerebral endothelial cell adhesion molecule
  Uniprot ID: Q5T4B2
  ENSP ID: ENSP00000361933
MLQEWLAAVGDDYAAVVWRPEGEPRFYPDEEGPKHWTKERHQFLMELKQEALTFARNWGADYILFADTDNILTNNQTLRLLMGQGLPVVAPMLDSQTYYSNFWCGITPQGYYRRTAEYFPTKNRQRRGCFRVPMVHSTFLASLRAEGADQLAFYPPHPNYTWPFDDIIVFAYACQAAGVSVHVCNEHRYGYMNVPVKSHQGLEDERVNFIHLILEALVDGPRMQASAHVTRPSKRPSKIGFDEVFVISLARRPDRRERMLASLWEMEISGRVVDAVDGWMLNSSAIRNLGVDLLPGYQDPYSGRTLTKGEVGCFLSHYSIWEEVVARGLARVLVFEDDVRFESNFRGRLERLMEDVEAEKLSWDLIYLGRKQVNPEKETAVEGLPGLVVAGYSYWTLAYALRLAGARKLLASQPLRRMLPVDEFLPIMFDQHPNEQYKAHFWPRDLVAFSAQPLLAAPTHYAGDAEWLSDTETSSPWDDDSGRLISWSGSQKTLRSPRLDLTGSSGHSLQPQPRDEL

SEQ ID NO: 14331 - protein, 64 aa, Homo sapiens
  Payload ID: 2775
  Gene Symbol: CERCAM
  Gene Name: cerebral endothelial cell adhesion molecule
  ENSP ID: ENSP00000402508
MLQEWLAAVGDDYAAVVWRPEGEPRFYPDEEGPKHWTKERHQFLMELKQEALTFARNWGADYIL

SEQ ID NO: 14332 - protein, 109 aa, Homo sapiens
  Payload ID: 2775
  Gene Symbol: CERCAM
  Gene Name: cerebral endothelial cell adhesion molecule
  ENSP ID: ENSP00000402928
MLQEWLAAVGDDYAAVVWRPEGEPRFYPDEEGPKHWTKERHQFLMELKQEALTFARNWGADYILFADTDNILTNNQTLRLLMGQGLPVVAPMLDSQTYYSNFWCGITPQ

SEQ ID NO: 14333 - protein, 79 aa, Homo sapiens
  Payload ID: 2775
  Gene Symbol: CERCAM
  Gene Name: cerebral endothelial cell adhesion molecule
  ENSP ID: ENSP00000403766
MLQEWLAAVGDDYAAVVWRPEGEPRFYPDEEGPKHWTKERHQFLMELKQEALTFARNWGADYILFADTDNILTNNQTLR

SEQ ID NO: 14334 - protein, 218 aa, Homo sapiens
  Payload ID: 2775
  Gene Symbol: CERCAM
  Gene Name: cerebral endothelial cell adhesion molecule
  ENSP ID: ENSP00000416676
MLQEWLAAVGDDYAAVVWRPEGEPRFYPDEEGPKHWTKERHQFLMELKQEALTFARNWGADYILFADTDNILTNNQTLRLLMGQGLPVVAPMLDSQTYYSNFWCGITPQGYYRRTAEYFPTKNRQRRGCFRVPMVHSTFLASLRAEGADQLAFYPPHPNYTWPFDDIIVFAYACQAAGVSVHVCNEHRYGYMNVPVKSHQGLEDERVNFIHLILEALG

SEQ ID NO: 14335 - protein, 155 aa, Homo sapiens
  Payload ID: 2775
  Gene Symbol: CERCAM
  Gene Name: cerebral endothelial cell adhesion molecule
  ENSP ID: ENSP00000478713
MTAKQCPGAGHYCPESRGGGCWQGLQILSDLATTLGMATLPSGPVFHREKPLRDGSHSLKVSQQRSRTPRPLYPAWPDSGPCGPQLVSSWADPRIPSLPKDSAEGPLCPFYLHLSTLPQLDVWVSPAPSSLAGAKYREVKQDPCRHVAQHTVGPQ

SEQ ID NO: 14336 - protein, 517 aa, Homo sapiens [sequence omitted]

SEQ ID NO: 14337 - protein, 414 aa, Homo sapiens
  Payload ID: 2776
  Gene Symbol: CLN3
  Gene Name: ceroid-lipofuscinosis, neuronal 3
  Uniprot ID: Q13286
  ENSP ID: ENSP00000329171
MGGCAGSRRRFSDSEGEETVPEPRLPLLDHQGAHWKNAVGFWLLGLCNNFSYVVMLSAAHDILSHKRTSGNQSHAVLLADILPTLVIKLLAPLGLHLLPYSPRVLVSGICAAGSFVLVAFSHSVGTSLCGVVFASISSGLGEVTFLSLTAFYPRAVISWWSSGTGGAGLLGALSYLGLTQAGLSPQQTLLSMLGIPALLLASYFLLLTSPEAQDPGGEEEAESAARQPLIRTEAPESKPGSSSSLSLRERWTVFKGLLWYIVPLVVVYFAEYFINQGLFELLFFWNTSLSHAQQYRWYQMLYQAGVFASRSSLRCCRIRFTWALALLQCLNLVFLLADVWFGFLPSIYLVFLIILYEGLLGGAAYVNTFHNIALETSDEHREFAMAATCISDTLGISLSGLLALPLHDFLCQLS

SEQ ID NO: 14338 - protein, 181 aa, Homo sapiens
  Payload ID: 2776
  Gene Symbol: CLN3
  Gene Name: ceroid-lipofuscinosis, neuronal 3
  ENSP ID: ENSP00000347660
MGGCAGSRRRFSDSEGEETVPEPRLPLLDHQGAHWKNAVGFWLLGLCNNFSYVVMLSAAHDILSHKRTSGNQSHVDPGPTPIPHNSSSRFDCNSVSTAAVLLADILPTLVIKLLAPLGLHLLPYSPRVLVSGICAAGSFVLVAFSHSVGTSLCAISCCSHLLRPRTLEGKKKQRAQPGSPS

SEQ ID NO: 14339 - protein, 339 aa, Homo sapiens
  Payload ID: 2776
  Gene Symbol: CLN3
  Gene Name: ceroid-lipofuscinosis, neuronal 3
  Uniprot ID: Q13286
  ENSP ID: ENSP00000350457
MGGCAGSRRRFSDSEGEETVPEPRLPLLDHQGAHWKNAVGFWLLGLCNNFSYVVMLSAAHDILSHKRTSGNQSHVDPGPTPIPHNSSSRFDCNSVSTAPPGSRQWDLCCWKLRPGCLFSFCGDQPVCYFLLLTSPEAQDPGGEEEAESAARQPLIRTEAPESKPGSSSSLSLRERWTVFKGLLWYIVPLVVVYFAEYFINQGLFELLFFWNTSLSHAQQYRWYQMLYQAGVFASRSSLRCCRIRFTWALALLQCLNLVFLLADVWFGFLPSIYLVFLIILYEGLLGGAAYVNTFHNIALETSDEHREFAMAATCISDTLGISLSGLLALPLHDFLCQLS

SEQ ID NO: 14340 - protein, 384 aa, Homo sapiens
  Payload ID: 2776
  Gene Symbol: CLN3
  Gene Name: ceroid-lipofuscinosis, neuronal 3
  ENSP ID: ENSP00000350523
MLSAAHDILSHKRTSGNQSHVDPGPTPIPHNSSSRFDCNSVSTAAVLLADILPTLVIKLLAPLGLHLLPYSPRVLVSGICAAGSFVLVAFSHSVGTSLCGVVFASISSGLGEVTFLSLTAFYPRAVISWWSSGTGGAGLLGALSYLGLTQAGLSPQQTLLSMLGIPALLLASYFLLLTSPEAQDPGGEEEAESAARQPLIRTEAPESKPGSSSSLSLRERWTVFKGLLWYIVPLVVVYFAEYFINQGLFELLFFWNTSLSHAQQYRWYQMLYQAGVFASRSSLRCCRIRFTWALALLQCLNLVFLLADVWFGFLPSIYLVFLIILYEGLLGGAAYVNTFHNIALETSDEHREFAMAATCISDTLGISLSGLLALPLHDFLCQLS

SEQ ID NO: 14341 - protein, 336 aa, Homo sapiens
  Payload ID: 2776
  Gene Symbol: CLN3
  Gene Name: ceroid-lipofuscinosis, neuronal 3
  ENSP ID: ENSP00000353073
MLSAAHDILSHKRTSGNQSHVDPGPTPIPHNSSSRFDCNSVSTAAVLLADILPTLVIKLLAPLGLHLLPYSPRVLVSGICAAGSFVLVAFSHSVGTSLCGVVFASISSGLGEVTFLSLTAFYPSYFLLLTSPEAQDPGGEEEAESAARQPLIRTEAPESKPGSSSSLSLRERWTVFKGLLWYIVPLVVVYFAEYFINQGLFELLFFWNTSLSHAQQYRWYQMLYQAGVFASRSSLRCCRIRFTWALALLQCLNLVFLLADVWFGFLPSIYLVFLIILYEGLLGGAAYVNTFHNIALETSDEHREFAMAATCISDTLGISLSGLLALPLHDFLCQLS

SEQ ID NO: 14342 - protein, 438 aa, Homo sapiens
  Payload ID: 2776
  Gene Symbol: CLN3
  Gene Name: ceroid-lipofuscinosis, neuronal 3
  Uniprot ID: Q13286
  ENSP ID: ENSP00000353116
MGGCAGSRRRFSDSEGEETVPEPRLPLLDHQGAHWKNAVGFWLLGLCNNFSYVVMLSAAHDILSHKRTSGNQSHVDPGPTPIPHNSSSRFDCNSVSTAAVLLADILPTLVIKLLAPLGLHLLPYSPRVLVSGICAAGSFVLVAFSHSVGTSLCGVVFASISSGLGEVTFLSLTAFYPRAVISWWSSGTGGAGLLGALSYLGLTQAGLSPQQTLLSMLGIPALLLASYFLLLTSPEAQDPGGEEEAESAARQPLIRTEAPESKPGSSSSLSLRERWTVFKGLLWYIVPLVVVYFAEYFINQGLFELLFFWNTSLSHAQQYRWYQMLYQAGVFASRSSLRCCRIRFTWALALLQCLNLVFLLADVWFGFLPSIYLVFLIILYEGLLGGAAYVNTFHNIALETSDEHREFAMAATCISDTLGISLSGLLALPLHDFLCQLS

SEQ ID NO: 14343 - protein, 338 aa, Homo sapiens
  Payload ID: 2776
  Gene Symbol: CLN3
  Gene Name: ceroid-lipofuscinosis, neuronal 3
  ENSP ID: ENSP00000379014
MWTQAQRRSPTTAHHDLTATLSLRLPRVLVSGICAAGSFVLVAFSHSVGTSLCGVVFASISSGLGEVTFLSLTAFYPRAVISWWSSGTGGAGLLGALSYLGLTQAGLSPQQTLLSMLGIPALLLASYFLLLTSPEAQDPGGEEEAESAARQPLIRTEAPESKPGSSSSLSLRERWTVFKGLLWYIVPLVVVYFAEYFINQGLFELLFFWNTSLSHAQQYRWYQMLYQAGVFASRSSLRCCRIRFTWALALLQCLNLVFLLADVWFGFLPSIYLVFLIILYEGLLGGAAYVNTFHNIALETSDEHREFAMAATCISDTLGISLSGLLALPLHDFLCQLS

SEQ ID NO: 14344 - protein, 438 aa, Homo sapiens; identical to SEQ ID NO: 14342
  Payload ID: 2776
  Gene Symbol: CLN3
  Gene Name: ceroid-lipofuscinosis, neuronal 3
  Uniprot ID: Q13286
  ENSP ID: ENSP00000454229

SEQ ID NO: 14345 - protein, 135 aa, Homo sapiens
  Payload ID: 2776
  Gene Symbol: CLN3
  Gene Name: ceroid-lipofuscinosis, neuronal 3
  ENSP ID: ENSP00000454466
  MOD_RES (1)..(1): Any amino acid
XLLFFWNTSLSHAQQYRWYQMLYQAGVFASRSSLRCCRIRFTWALALLQCLNLVFLLADVWFGFLPSIYLVFLIILYEGLLGGAAYVNTFHNIALETSDEHREFAMAATCISDTLGISLSGLLALPLHDFLCQLS

SEQ ID NO: 14346 - protein, 253 aa, Homo sapiens
  Payload ID: 2776
  Gene Symbol: CLN3
  Gene Name: ceroid-lipofuscinosis, neuronal 3
  Uniprot ID: Q13286
  ENSP ID: ENSP00000454680
MGGCAGSRRRFSDSEGEETVPEPRLPLLDHQGAHWKNAVGFWLLGLCNNFSYVVMLSAAHDILSHKRTSGNQSHVDPGPTPIPHNSSSRFDCNSVSTAAVLLADILPTLVIKLLAPLGLHLLPYSPRVLVSGICAAGSFVLVAFSHSVGTSLCGSSSSLSLRERWTVFKGLLWYIVPLVVVYFAEYFINQGLFELLFFWNTSLSHAQQYRWYQMLYQAGVFASRSSLRCCRIRFTWALALLQMESRSVAQAGM

SEQ ID NO: 14347 - protein, 175 aa, Homo sapiens
  Payload ID: 2776
  Gene Symbol: CLN3
  Gene Name: ceroid-lipofuscinosis, neuronal 3
  ENSP ID: ENSP00000454899
MGGCAGSRRRFSDSEGEYSRPPSWNDHLWLAAHLRGMRADSAPGGHARSGRAPESRWGSCPLLALPGEETVPEPRLPLLDHQGAHWKNAVGFWLLGLCNNFSYVVMLSAAHDILSHKRTSGNQSHVDPGPTPIPHNSSSRFDCNSVSTAAVLLADILPTLVIKLLAPLGLHLLPY

SEQ ID NO: 14348 - protein, 181 aa, Homo sapiens; identical to SEQ ID NO: 14338
  Payload ID: 2776
  Gene Symbol: CLN3
  Gene Name: ceroid-lipofuscinosis, neuronal 3
  ENSP ID: ENSP00000455342

SEQ ID NO: 14349 - protein, 74 aa, Homo sapiens
  Payload ID: 2776
  Gene Symbol: CLN3
  Gene Name: ceroid-lipofuscinosis, neuronal 3
  ENSP ID: ENSP00000455365
MGGCAGSRRRFSDSEGEETVPEPRLPLLDHQGAHWKNAVGFWLLGLCNNFSYVVMLSAAHDILSHKRTSGNQSH

SEQ ID NO: 14350 - protein, 341 aa, Homo sapiens
  Payload ID: 2776
  Gene Symbol: CLN3
  Gene Name: ceroid-lipofuscinosis, neuronal 3
  ENSP ID: ENSP00000455387
MGGCAGSRRRFSDSEGEETVPEPRLPLLDHQGAHWKNAVGFWLLGLCNNFSYVVMLSAAHDILSHKRTSGNQSHVDPGPTPIPHNSSSRFDCNSVSTAAVLLADILPTLVIKLLAPLGLHLLPYSPRVLVSGICAAGSFVLVAFSHSVGTSLCGVVFASISSGLGEVTFLSLTAFYPRAVISWWSSGTGGAGLLGALSYLGLTQAGLSPQQTLLSMLGIPALLLASYFLLLTSPEAQDPGGEEEAESAARQPLIRTEAPESKPGSSSSLSLRERWTVFKGLLWYIVPLVVVYFAEYFINQGLTSDEHREFAMAATCISDTLGISLSGLLALPLHDFLCQLS

SEQ ID NO: 14351 - protein, 132 aa, Homo sapiens
  Payload ID: 2776
  Gene Symbol: CLN3
  Gene Name: ceroid-lipofuscinosis, neuronal 3
  ENSP ID: ENSP00000455549
MWTQAQRRSPTTAHHDLTATLSLRLLCSWRTSSPHSSSNCWLLLAFTCCPTAPGFSSVGFVLLEASSWLPFLILWGPACVVWSSLASHQALGRSPSSPSLPSTPAISCCSHLLRPRTLEGKKKQRAQPGSPS

SEQ ID NO: 14352 - protein, 184 aa, Homo sapiens
  Payload ID: 2776
  Gene Symbol: CLN3
  Gene Name: ceroid-lipofuscinosis, neuronal 3
  ENSP ID: ENSP00000455603
MLSAAHDILSHKRTSGNQSHVDPGPTPIPHNSSSRFDCNSVSTAPPGSRQWDLCCWKLRPGCLFSFCGDQPVCYFLLLTSPEAQDPGGEEEAESAARQPLIRTEAPESKPGSSSSLSLRERWTVFKGLLWYIVPLVVVYFAEYFINQGLFELLFFWNTSLSHAQQYRWYQMLYQAGVFASRSSL

SEQ ID NO: 14353 - protein, 181 aa, Homo sapiens; identical to SEQ ID NO: 14338
  Payload ID: 2776
  Gene Symbol: CLN3
  Gene Name: ceroid-lipofuscinosis, neuronal 3
  ENSP ID: ENSP00000456013

SEQ ID NO: 14354 - protein, 421 aa, Homo sapiens
  Payload ID: 2776
  Gene Symbol: CLN3
  Gene Name: ceroid-lipofuscinosis, neuronal 3
  Uniprot ID: Q13286
  ENSP ID: ENSP00000456117
MGGCAGSRRRFSDSEGEETVPEPRLPLLDHQGAHWKNAVGFWLLGLCNNFSYVVMLSAAHDILSHKRTSGNQSHVDPGPTPIPHNSSSRFDCNSVSTAAVLLADILPTLVIKLLAPLGLHLLPYSPRVLVSGICAAGSFVLVAFSHSVGTSLCGVVFASISSGLGEVTFLSLTAFYPRAVISWWSSGTGGAGLLGALSYLGLTQAGLSPQQTLLSMLGIPALLLASYFLLLTSPEAQDPGGEEEAESAARQPLIRTEAPESKPGSSSSLSLRERWTVFKVRMMAGFELLFFWNTSLSHAQQYRWYQMLYQAGVFASRSSLRCCRIRFTWALALLQCLNLVFLLADVWFGFLPSIYLVFLIILYEGLLGGAAYVNTFHNIALETSDEHREFAMAATCISDTLGISLSGLLALPLHDFLCQLS

SEQ ID NO: 14355 - protein, 176 aa, Homo sapiens
  Payload ID: 2776
  Gene Symbol: CLN3
  Gene Name: ceroid-lipofuscinosis, neuronal 3
  ENSP ID: ENSP00000456122
MGGCAGSRRRFSDSEGEETVPEPRLPLLDHQGAHWKNAVGFCPRVLVSGICAAGSFVLVAFSHSVGTSLCGVVFASISSGLGEVTFLSLTAFYPRAVISWWSSGTGGAGLLGALSYLGLTQAGLSPQQTLLSMLGIPALLLASYFLLLTSPEAQDPGGEEEAESAARQPLIRTEAP

SEQ ID NO: 14356 - protein, 82 aa, Homo sapiens
  Payload ID: 2776
  Gene Symbol: CLN3
  Gene Name: ceroid-lipofuscinosis, neuronal 3
  ENSP ID: ENSP00000456414
MGGCAGSRRRFSDSEGEETVPEPRLPLLDHQGAHWKNAVGFWLLGLCNNFSYVVMLSAAHDILSHKRTSGNQSHLFLVAHIS

SEQ ID NO: 14357 - protein, 105 aa, Homo sapiens
  Payload ID: 2776
  Gene Symbol: CLN3
  Gene Name: ceroid-lipofuscinosis, neuronal 3
  ENSP ID: ENSP00000456693
MGGCAGSRRRFSDSEGEETVPEPRLPLLDHQGAHWKNAVGFWLCSWRTSSPHSSSNCWLLLAFTCCPTAPGFSSVGFVLLEASSWLPFLILWGPACVLFLVAHIS

SEQ ID NO: 14358 - protein, 120 aa, Homo sapiens
  Payload ID: 2776
  Gene Symbol: CLN3
  Gene Name: ceroid-lipofuscinosis, neuronal 3
  ENSP ID: ENSP00000457615
MWTQAQRRSPTTAHHDLTATLSLRLPRVLVSGICAAGSFVLVAFSHSVGTSLCGVVFASISSGLGEVTFLSLTAFYPRAVISWWSSGTGGAGLLGALSYLGLTQAGLSPQQTLLSMLGIP

SEQ ID NO: 14359 - protein, 167 aa, Homo sapiens
  Payload ID: 2776
  Gene Symbol: CLN3
  Gene Name: ceroid-lipofuscinosis, neuronal 3
  ENSP ID: ENSP00000458015
MGGCAGSRRRFSDSEGEETVPEPRLPLLDHQGAHWKNAVGFWLLGLCNNFSYVVMLSAAHDILSHKRTSGNQSHPPGSRQWDLCCWKLRPGCLFSFCGDQPVCYFLLLTSPEAQDPGGEEEAESAARQPLIRTEAPESKPGSSSSLSLRERWTVFKGLLWYIVPLVV

SEQ ID NO: 14360 - protein, 82 aa, Homo sapiens; identical to SEQ ID NO: 14356
  Payload ID: 2776
  Gene Symbol: CLN3
  Gene Name: ceroid-lipofuscinosis, neuronal 3
  ENSP ID: ENSP00000486178

SEQ ID NO: 14361 - protein, 341 aa, Homo sapiens; identical to SEQ ID NO: 14350
  Payload ID: 2776
  Gene Symbol: CLN3
  Gene Name: ceroid-lipofuscinosis, neuronal 3
  ENSP ID: ENSP00000486616

SEQ ID NO: 14362 - protein, 407 aa, Homo sapiens
  Payload ID: 2777
  Gene Symbol: CLN5
  Gene Name: ceroid-lipofuscinosis, neuronal 5
  ENSP ID: ENSP00000366673
MRRNLRLGPSSGADAQGQGAPRPGLAAPRMLLPPASQASRGSGSTGCSLMAQEVDTAQGAEMRRGAGAARGRASWCWALALLWLAVVPGWSRVSGIPSRRHWPVPYKRFDFRPKPDPYCQAKYTFCPTGSPIPVMEGDDDIEVFRLQAPVWEFKYGDLLGHLKIMHDAIGFRSTLTGKNYTMEWYELFQLGNCTFPHLRPEMDAPFWCNQGAACFFEGIDDVHWKENGTLVQVATISGNMFNQMAKWVKQDNETGIYYETWNVKASPEKGAETWFDSYDCSKFVLRTFNKLAEFGAEFKNIETNYTRIFLYSGEPTYLGNETSVFGPTGNKTLGLAIKRFYYPFKPHLPTKEFLLSLLQIFDAVIVHKQFYLFYNFEYWFLPMKFPFIKITYEEIPLPIRNKTLSGL

SEQ ID NO: 14363 - protein, 358 aa, Homo sapiens
  Payload ID: 2777
  Gene Symbol: CLN5
  Gene Name: ceroid-lipofuscinosis, neuronal 5
  Uniprot ID: O75503
  ENSP ID: ENSP00000479547
MAQEVDTAQGAEMRRGAGAARGRASWCWALALLWLAVVPGWSRVSGIPSRRHWPVPYKRFDFRPKPDPYCQAKYTFCPTGSPIPVMEGDDDIEVFRLQAPVWEFKYGDLLGHLKIMHDAIGFRSTLTGKNYTMEWYELFQLGNCTFPHLRPEMDAPFWCNQGAACFFEGIDDVHWKENGTLVQVATISGNMFNQMAKWVKQDNETGIYYETWNVKASPEKGAETWFDSYDCSKFVLRTFNKLAEFGAEFKNIETNYTRIFLYSGEPTYLGNETSVFGPTGNKTLGLAIKRFYYPFKPHLPTKEFLLSLLQIFDAVIVHKQFYLFYNFEYWFLPMKFPFIKITYEEIPLPIRNKTLSGL

SEQ ID NO: 14364 - protein, 186 aa, Homo sapiens
  Payload ID: 2777
  Gene Symbol: CLN5
  Gene Name: ceroid-lipofuscinosis, neuronal 5
  ENSP ID: ENSP00000482959
  MOD_RES (1)..(1): Any amino acid
XTAQGAEMRRGAGAARGRASWCWALALLWLAVVPGWSRVSGIPSRRHWPVPYKRFDFRPKPDPYCQAKYTFCPTGSPIPVMEGDDDIEVFRLQAPVWEFKYGDLLGHLKIMHDAIGFRSTLTGKNYTMEWYELFQLGNCTFPHLRPEMDAPFWCNQGAACFFEGIDDVHWKENGTLVQVATISGKL

SEQ ID NO: 14365 - protein, 311 aa, Homo sapiens
  Payload ID: 2778
  Gene Symbol: CLN6
  Gene Name: ceroid-lipofuscinosis, neuronal 6, late infantile, variant
  Uniprot ID: Q9NWW5
  ENSP ID: ENSP00000249806
MEATRRRQHLGATGGPGAQLGASFLQARHGSVSADEAARTAPFHLDLWFYFTLQNWVLDFGRPIAMLVFPLEWFPLNKPSVGDYFHMAYNVITPFLLLKLIERSPRTLPRSITYVSIIIFIMGASIHLVGDSVNHRLLFSGYQHHLSVRENPIIKNLKPETLIDSFELLYYYDEYLGHCMWYIPFFLILFMYFSGCFTASKAESLIPGPALLLVAPSGLYYWYLVTEGQIFILFIFTFFAMLALVLHQKRKRLFLDSNGLFLFSSFALTLLLVALWVAWLWNDPVLRKKYPGVIYVPEPWAFYTLHVSSRH

SEQ ID NO: 14366 - protein, 343 aa, Homo sapiens
  Payload ID: 2778
  Gene Symbol: CLN6
  Gene Name: ceroid-lipofuscinosis, neuronal 6, late infantile, variant
  Uniprot ID: Q9NWW5
  ENSP ID: ENSP00000445770
MAAVAGKERRARGRPRPETLGAIPRREGGEAGLSRAFKPLAQAPLSCETSLRKLKFKGKKHGSVSADEAARTAPFHLDLWFYFTLQNWVLDFGRPIAMLVFPLEWFPLNKPSVGDYFHMAYNVITPFLLLKLIERSPRTLPRSITYVSIIIFIMGASIHLVGDSVNHRLLFSGYQHHLSVRENPIIKNLKPETLIDSFELLYYYDEYLGHCMWYIPFFLILFMYFSGCFTASKAESLIPGPALLLVAPSGLYYWYLVTEGQIFILFIFTFFAMLALVLHQKRKRLFLDSNGLFLFSSFALTLLLVALWVAWLWNDPVLRKKYPGVIYVPEPWAFYTLHVSSRH

SEQ ID NO: 14367 - protein, 105 aa, Homo sapiens
  Payload ID: 2778
  Gene Symbol: CLN6
  Gene Name: ceroid-lipofuscinosis, neuronal 6, late infantile, variant
  ENSP ID: ENSP00000454818
MEATRRRQHLGATGGPGAQLGASFLQARHGSVSADEAARTAPFHLDLWFYFTLQNWVLDFGRPIAMLVFPLEWFPLNKPSVGDYFHMAYNVITPFLLLKRLLYCL

SEQ ID NO: 14368 - protein, 158 aa, Homo sapiens
  Payload ID: 2778
  Gene Symbol: CLN6
  Gene Name: ceroid-lipofuscinosis, neuronal 6, late infantile, variant
  ENSP ID: ENSP00000457384
MEATRRRQHLGATGGPGAQLGASFLQARYIPFFLILFMYFSGCFTASKAESLIPGPALLLVAPSGLYYWYLVTEGQIFILFIFTFFAMLALVLHQKRKRLFLDSNGLFLFSSFALTLLLVALWVAWLWNDPVLRKKYPGVIYVPEPWAFYTLHVSSRH

SEQ ID NO: 14369 - protein, 248 aa, Homo sapiens
  Payload ID: 2778
  Gene Symbol: CLN6
  Gene Name: ceroid-lipofuscinosis, neuronal 6, late infantile, variant
  ENSP ID: ENSP00000457783
MEATRRRQHLGATGGPGAQLGASFLQARHGSVSADEAARTAPFHLDLWFYFTLQNWVLDFGRPIAMLVFPLEWFPLNKPSVGDYFHMAYNVITPFLLLKIDSFELLYYYDEYLGHCMWYIPFFLILFMYFSGCFTASKAESLIPGPALLLVAPSGLYYWYLVTEGQIFILFIFTFFAMLALVLHQKRKRLFLDSNGLFLFSSFALTLLLVALWVAWLWNDPVLRKKYPGVIYVPEPWAFYTLHVSSRH

SEQ ID NO: 14370 - protein, 213 aa, Homo sapiens
  Payload ID: 2778
  Gene Symbol: CLN6
  Gene Name: ceroid-lipofuscinosis, neuronal 6, late infantile, variant
  ENSP ID: ENSP00000457822
MEATRRRQHLGATGGPGAQLGASFLQARHGSVSADEAARTAPFHLDLWFYFTLQNWVLDFGRPIAMLVFPLEWFPLNKPSVGDYFHMAYNVITPFLLLKLIERSPRTLPRSITYVSIIIFIMGASIHLVGDSVNHRLLFSGYQHHLSVRENPIIKNLKPETLVRPPPAPCLSTPLSCSTIMMSTWVTACGTSPSSSSSSCTSAAALLPLKLRA

SEQ ID NO: 14371 - protein, 286 aa, Homo sapiens
  Payload ID: 2779
  Gene Symbol: CLN8
  Gene Name: ceroid-lipofuscinosis, neuronal 8
  Uniprot ID: Q9UBY8
  ENSP ID: ENSP00000328182
MNPASDGGTSESIFDLDYASWGIRSTLMVAGFVFYLGVFVVCHQLSSSLNATYRSLVAREKVFWDLAATRAVFGVQSTAAGLWALLGDPVLHADKARGQQNWCWFHITTATGFFCFENVAVHLSNLIFRTFDLFLVIHHLFAFLGFLGCLVNLQAGHYLAMTTLLLEMSTPFTCVSWMLLKAGWSESLFWKLNQWLMIHMFHCRMVLTYHMWWVCFWHWDGLVSSLYLPHLTLFLVGLALLTLIINPYWTHKKTQQLLNPVDWNFAQPEAKSRPEGNGQLLRKKRP

SEQ ID NO: 14372 - protein, 286 aa, Homo sapiens; identical to SEQ ID NO: 14371
  Payload ID: 2779
  Gene Symbol: CLN8
  Gene Name: ceroid-lipofuscinosis, neuronal 8
  Uniprot ID: Q9UBY8
  ENSP ID: ENSP00000482713

SEQ ID NO: 14373 - protein, 177 aa, Homo sapiens
  Payload ID: 2779
  Gene Symbol: CLN8
  Gene Name: ceroid-lipofuscinosis, neuronal 8
  ENSP ID: ENSP00000487905
MNPASDGGTSESIFDLDYASWGIRSTLMVAGFVFYLGVFVVCHQLSSSLNATYRSLVAREKVFWDLAATRAVFGVQSTAAGLWALLGDPVLHADKARGQQNWCWFHITTATGFFCFENVAVHLSNLIFRTFDLFLVIHHLFAFLGFLGCLVNLQAGHYLAMTTLLLEMSTPFTCVSW

SEQ ID NO: 14374 - protein, 171 aa, Homo sapiens
  Payload ID: 2779
  Gene Symbol: CLN8
  Gene Name: ceroid-lipofuscinosis, neuronal 8
  ENSP ID: ENSP00000488211
MNPASDGGTSESIFDLDYASWGIRSTLMVAGFVFYLGVFVVCHQLSSSLNATYRSLVAREKVFWDLAATRAVFGVQSTAAGLWALLGDPVLHADKARGQQNWCWFHITTATGFFCFENVAVHLSNLIFRTFDLFLVIHHLFAFLGFLGCLVNLQAGHYLAMTTLLLEMSTP

SEQ ID NO: 14375 - protein, 80 aa, Homo sapiens
  Payload ID: 2779
  Gene Symbol: CLN8
  Gene Name: ceroid-lipofuscinosis, neuronal 8
  ENSP ID: ENSP00000488606
MNPASDGGTSESIFDLDYASWGIRSTLMVAGFVFYLGVFVVCHQLSSSLNATYRSLVAREKVFWDLAATRAVFGVQSTAA

SEQ ID NO: 14376 - protein, 80 aa, Homo sapiens; identical to SEQ ID NO: 14375
  Payload ID: 2779
  Gene Symbol: CLN8
  Gene Name: ceroid-lipofuscinosis, neuronal 8
  ENSP ID: ENSP00000488898

SEQ ID NO: 14377 - protein, 1065 aa, Homo sapiens
  Payload ID: 2780
  Gene Symbol: CP
  Gene Name: ceruloplasmin (ferroxidase)
  Uniprot ID: P00450
  ENSP ID: ENSP00000264613
MKILILGIFLFLCSTPAWAKEKHYYIGIIETTWDYASDHGEKKLISVDTEHSNIYLQNGPDRIGRLYKKALYLQYTDETFRTTIEKPVWLGFLGPIIKAETGDKVYVHLKNLASRPYTFHSHGITYYKEHEGAIYPDNTTDFQRADDKVYPGEQYTYMLLATEEQSPGEGDGNCVTRIYHSHIDAPKDIASGLIGPLIICKKDSLDKEKEKHIDREFVVMFSVVDENFSWYLEDNIKTYCSEPEKVDKDNEDFQESNRMYSVNGYTFGSLPGLSMCAEDRVKWYLFGMGNEVDVHAAFFHGQALTNKNYRIDTINLFPATLFDAYMVAQNPGEWMLSCQNLNHLKAGLQAFFQVQECNKSSSKDNIRGKHVRHYYIAAEEIIWNYAPSGIDIFTKENLTAPGSDSAVFFEQGTTRIGGSYKKLVYREYTDASFTNRKERGPEEEHLGILGPVIWAEVGDTIRVTFHNKGAYPLSIEPIGVRFNKNNEGTYYSPNYNPQSRSVPPSASHVAPTETFTYEWTVPKEVGPTNADPVCLAKMYYSAVEPTKDIFTGLIGPMKICKKGSLHANGRQKDVDKEFYLFPTVFDENESLLLEDNIRMFTTAPDQVDKEDEDFQESNKMHSMNGFMYGNQPGLTMCKGDSVVWYLFSAGNEADVHGIYFSGNTYLWRGERRDTANLFPQTSLTLHMWPDTEGTFNVECLTTDHYTGGMKQKYTVNQCRRQSEDSTFYLGERTYYIAAVEVEWDYSPQREWEKELHHLQEQNVSNAFLDKGEFYIGSKYKKVVYRQYTDSTFRVPVERKAEEEHLGILGPQLHADVGDKVKIIFKNMATRPYSIHAHGVQTESSTVTPTLPGETLTYVWKIPERSGAGTEDSACIPWAYYSTVDQVKDLYSGLIGPLIVCRRPYLKVFNPRRKLEFALLFLVFDENESWYLDDNIKTYSDHPEKVNKDDEEFIESNKMHAINGRMFGNLQGLTMHVGDEVNWYLMGMGNEIDLHTVHFHGHSFQYKHRGVYSSDVFDIFPGTYQTLEMFPRTPGIWLLHCHVTDHIHAGMETTYTVLQNEDTKSG

SEQ ID NO: 14378 - protein, 946 aa, Homo sapiens
  Payload ID: 2780
  Gene Symbol: CP
  Gene Name: ceruloplasmin (ferroxidase)
  ENSP ID: ENSP00000418773
MKILILGIFLFLCSTPAWAKEKHYYIGIIETTWDYASDHGEKKLISVDTEHSNIYLQNGPDRIGRLYKKALYLQYTDETFRTTIEKPVWLGFLGPIIKAETGDKVYVHLKNLASRPYTFHSHGITYYKEHEGAIYPDNTTDFQRADDKVYPGEQYTYMLLATEEQSPGEGDGNCVTRIYHSHIDAPKDIASGLIGPLIICKKDSLDKEKEKHIDREFVVMFSVVDENFSWYLEDNIKTYCSEPEKVDKDNEDFQESNRMYSVNGYTFGSLPGLSMCAEDRVKWYLFGMGNEVDVHAAFFHGQALTNKNYRIDTINLFPATLFDAYMVAQNPGEWMLSCQNLNHLKAGLQAFFQVQECNKSSSKDNIRGKHVRHYYIAAEEIIWNYAPSGIDIFTKENLTAPGSDSAVFFEQGTTRIGGSYKKLVYREYTDASFTNRKERGPEEEHLGILGPVIWAEVGDTIRVTFHNKGAYPLSIEPIGVRFNKNNEGTYYSPNYNPQSRSVPPSASHVAPTETFTYEWTVPKEVGPTNADPVCLAKMYYSAVEPTKDIFTGLIGPMKICKKGSLHANGRQKDVDKEFYLFPTVFDENESLLLEDNIRMFTTAPDQVDKEDEDFQESNKMHWTFNVECLTTDHYTGGMKQKYTVNQCRRQSEDSTFYLGERTYYIAAVEVEWDYSPQREWEKELHHLQEQNVSNAFLDKGEFYIGSKYKKVVYRQYTDSTFRVPVERKAEEEHLGILGPQLHADVGDKVKIIFKNMATRPYSIHAHGVQTESSTVTPTLPGETLTYVWKIPERSGAGTEDSACIPWAYYSTVDQVKDLYSGLIGPLIVCRRPYLKVFNPRRKLEFALLFLVFDENESWYLDDNIKTYSDHPEKVNKDDEEFIESNKMHAINGRMFGNLQGLTMHVGDEVNWYLMGMGNEIDLHTVHFHGHSFQYKHLLRLTGEYGM

SEQ ID NO: 14379 - protein, 225 aa, Homo sapiens
  Payload ID: 2780
  Gene Symbol: CP
  Gene Name: ceruloplasmin (ferroxidase)
  ENSP ID: ENSP00000420367
GAGTEDSACIPWAYYSTVDQVKDLYSGLIGPLIVCRRPYLKVFNPRRKLEFALLFLVFDENESWYLDDNIKTYSDHPEKVNKDDEEFIESNKMHAINGRMFGNLQGLTMHVGDEVNWYLMGMGNEIDLHTVHFHGHSFQYKHRGVYSSDVFDIFPGTYQTLEMFPRTPGIWLLHCHVTDHIHAGMETTYTVLQNEASSETHRRIWNVIYPITVSVIILFQISTKE

SEQ ID NO: 14380 - protein, 852 aa, Homo sapiens
  Payload ID: 2780
  Gene Symbol: CP
  Gene Name: ceruloplasmin (ferroxidase)
  ENSP ID: ENSP00000420545
VVMFSVVDENFSWYLEDNIKTYCSEPEKVDKDNEDFQESNRMYSVNGYTFGSLPGLSMCAEDRVKWYLFGMGNEVDVHAAFFHGQALTNKNYRIDTINLFPATLFDAYMVAQNPGEWMLSCQNLNHLKAGLQAFFQVQECNKSSSKDNIRGKHVRHYYIAAEEIIWNYAPSGIDIFTKENLTAPGSDSAVFFEQGTTRIGGSYKKLVYREYTDASFTNRKERGPEEEHLGILGPVIWAEVGDTIRVTFHNKGAYPLSIEPIGVRFNKNNEGTYYSPNYNPQSRSVPPSASHVAPTETFTYEWTVPKEVGPTNADPVCLAKMYYSAVEPTKDIFTGLIGPMKICKKGSLHANGRQKDVDKEFYLFPTVFDENESLLLEDNIRMFTTAPDQVDKEDEDFQESNKMHSMNGFMYGNQPGLTMCKGDSVVWYLFSAGNEADVHGIYFSGNTYLWRGERRDTANLFPQTSLTLHMWPDTEGTFNVECLTTDHYTGGMKQKYTVNQCRRQSEDSTFYLGERTYYIAAVEVEWDYSPQREWEKELHHLQEQNVSNAFLDKGEFYIGSKYKKVVYRQYTDSTFRVPVERKAEEEHLGILGPQLHADVGDKVKIIFKNMATRPYSIHAHGVQTESSTVTPTLPGETLTYVWKIPERSGAGTEDSACIPWAYYSTVDQVKDLYSGLIGPLIVCRRPYLKVFNPRRKLEFALLFLVFDENESWYLDDNIKTYSDHPEKVNKDDEEFIESNKMHAINGRMFGNLQGLTMHVGDEVNWYLMGMGNEIDLHTVHFHGHSFQYKHRGVYSSDVFDIFPGTYQTLEMFPRTPGIWLLHCHVTDHIHAGMETTYTVLQNEGEYPDTKSG

SEQ ID NO: 14381 - protein, 178 aa, Homo sapiens
  Payload ID: 2780
  Gene Symbol: CP
  Gene Name: ceruloplasmin (ferroxidase)
  ENSP ID: ENSP00000426888
MKILILGIFLFLCSTPAWAKEKHYYIGIIETTWDYASDHGEKKLISVDTGFQNKWYSEDVTISRPNDQEEITAQILTKKLDNKEHSTLREHSNIYLQNGPDRIGRLYKKALYLQYTDETFRTTIEKPVWLGFLGPIIKAETGDKVYVHLKNLASRPYTFHSHGITYYKEHEGAIYPDN

SEQ ID NO: 14382 - protein, 354 aa, Homo sapiens
  Payload ID: 2781
  Gene Symbol: FIGF
  Gene Name: c-fos induced growth  factor (vascular endothelial growth  factor D)
  Uniprot ID: O43915
  ENSP ID: ENSP00000297904
MYREWVVVNVFMMLYVQLVQGSSNEHGPVKRSSQSTLERSEQQIRAASSLEELLRITHSEDWKLWRCRLRLKSFTSMDSRSASHRSTRFAATFYDIETLKVIDEEWQRTQCSPRETCVEVASELGKSTNTFFKPPCVNVFRCGGCCNEESLICMNTSTSYISKQLFEISVPLTSVPELVPVKVANHTGCKCLPTAPRHPYSIIRRSIQIPEEDRCSHSKKLCPIDMLWDSNKCKCVLQEENPLAGTEDHSHLQEPALCGPHMMFDEDRCECVCKTPCPKDLIQHPKNCSCFECKESLETCCQKHKLFHPDTCSCEDRCPFHTRPCASGKTACAKHCRFPKEKRAAQGPHSRKNP

SEQ ID NO: 14383 - protein, 167 aa, Homo sapiens
  Payload ID: 2782
  Gene Symbol: CGGBP1
  Gene Name: CGG triplet repeat binding protein 1
  Uniprot ID: Q9UFW8
  ENSP ID: ENSP00000381428
MERFVVTAPPARNRSKTALYVTPLDRVTEFGGELHEDGGKLFCTSCNVVLNHVRKSAISDHLKSKTHTKRKAEFEEQNVRKKQRPLTASLQCNSTAQTEKVSVIQDFVKMCLEANIPLEKADHPAVRAFLSRHVKNGGSIPKSDQLRRAYLPDGYENENQLLNSQDC

SEQ ID NO: 14384 - protein, 167 aa, Homo sapiens; identical to SEQ ID NO: 14383
  Payload ID: 2782
  Gene Symbol: CGGBP1
  Gene Name: CGG triplet repeat binding protein 1
  Uniprot ID: Q9UFW8
  ENSP ID: ENSP00000381429

SEQ ID NO: 14385 - protein, 167 aa, Homo sapiens; identical to SEQ ID NO: 14383
  Payload ID: 2782
  Gene Symbol: CGGBP1
  Gene Name: CGG triplet repeat binding protein 1
  Uniprot ID: Q9UFW8
  ENSP ID: ENSP00000418769

SEQ ID NO: 14386 - protein, 106 aa, Homo sapiens
  Payload ID: 2782
  Gene Symbol: CGGBP1
  Gene Name: CGG triplet repeat binding protein 1
  ENSP ID: ENSP00000419459
MERFVVTAPPARNRSKTALYVTPLDRVTEFGGELHEDGGKLFCTSCNVVLNHVRKSAISDHLKSKTHTKRKAEFEEQNVRKKQRPLTASLQCNSTAQTEKVSVIQD

SEQ ID NO: 14387 - protein, 167 aa, Homo sapiens; identical to SEQ ID NO: 14383
  Payload ID: 2782
  Gene Symbol: CGGBP1
  Gene Name: CGG triplet repeat binding protein 1
  Uniprot ID: Q9UFW8
  ENSP ID: ENSP00000420374

SEQ ID NO: 14388 - protein, 115 aa, Homo sapiens
  Payload ID: 2783
  Gene Symbol: CRCP
  Gene Name: CGRP receptor component
  Uniprot ID: O75575
  ENSP ID: ENSP00000340044
MEVKDANSALLSNYETLKYISKTPCRHQSPEIVREFLTALKSHKLTKAEKLQLLNHRPVTAVEIQLMVEESEERLTEEQIEALLHTVTSILPAEPEAEQKKNTNSNVAMDEEDPA

SEQ ID NO: 14389 - protein, 42 aa, Homo sapiens
  Payload ID: 2783
  Gene Symbol: CRCP
  Gene Name: CGRP receptor component
  ENSP ID: ENSP00000353589
MEVKDANSALLSNYEMESRSVTQAGVQWHHPGSLQPLPPGFK

SEQ ID NO: 14390 - protein, 148 aa, Homo sapiens
  Payload ID: 2783
  Gene Symbol: CRCP
  Gene Name: CGRP receptor component
  Uniprot ID: O75575
  ENSP ID: ENSP00000378736
MEVKDANSALLSNYEVFQLLTDLKEQRKESGKNKHSSGQQNLNTITYETLKYISKTPCRHQSPEIVREFLTALKSHKLTKAEKLQLLNHRPVTAVEIQLMVEESEERLTEEQIEALLHTVTSILPAEPEAEQKKNTNSNVAMDEEDPA

SEQ ID NO: 14391 - protein, 71 aa, Homo sapiens
  Payload ID: 2783
  Gene Symbol: CRCP
  Gene Name: CGRP receptor component
  Uniprot ID: O75575
  ENSP ID: ENSP00000381674
MEVAEKLQLLNHRPVTAVEIQLMVEESEERLTEEQIEALLHTVTSILPAEPEAEQKKNTNSNVAMDEEDPA

SEQ ID NO: 14392 - protein, 141 aa, Homo sapiens
  Payload ID: 2783
  Gene Symbol: CRCP
  Gene Name: CGRP receptor component
  Uniprot ID: O75575
  ENSP ID: ENSP00000388653
MQRGDPGEHLGARSWHLGAVGGGGDSCEVKDANSALLSNYETLKYISKTPCRHQSPEIVREFLTALKSHKLTKAEKLQLLNHRPVTAVEIQLMVEESEERLTEEQIEALLHTVTSILPAEPEAEQKKNTNSNVAMDEEDPA

SEQ ID NO: 14393 - protein, 46 aa, Homo sapiens
  Payload ID: 2784
  Gene Symbol:
  Gene Name: CH17-140K24.5
  ENSP ID: ENSP00000485209
MEIGWMHNRRQSNEEFLNKHKNWAQPFDCVGSHKVALQTEETEEQN

SEQ ID NO: 14394 - protein, 46 aa, Homo sapiens; identical to SEQ ID NO: 14393
  Payload ID: 2784
  Gene Symbol:
  Gene Name: CH17-140K24.5
  ENSP ID: ENSP00000485377

SEQ ID NO: 14395 - protein, 35 aa, Homo sapiens
  Payload ID: 2785
  Gene Symbol:
  Gene Name: CH17-140K24.8
  ENSP ID: ENSP00000485074
MEIRGALDLRKRLSTHRSITASVPSLPEVALTPVP

SEQ ID NO: 14396 - protein, 117 aa, Homo sapiens
  Payload ID: 2786
  Gene Symbol:
  Gene Name: CH17-212P11.5
  ENSP ID: ENSP00000479304
MDCTWRILLLVAAATGTHAEVQLVQSGAEVKKPGATVKISCKVSGYTFTDYYMHWVQQAPGKGLEWMGLVDPEDGETIYAEKFQGRVTITADTSTDTAYMELSSLRSEDTAVYYCAT

SEQ ID NO: 14397 - protein, 117 aa, Homo sapiens; identical to SEQ ID NO: 14396
  Payload ID: 2786
  Gene Symbol:
  Gene Name: CH17-212P11.5
  ENSP ID: ENSP00000487714

SEQ ID NO: 14398 - protein, 118 aa, Homo sapiens
  Payload ID: 2787
  Gene Symbol:
  Gene Name: CH17-212P11.6
  ENSP ID: ENSP00000487827
MAPHHGQDLELIFLVAAATGKVQLGQSEAEVKKPGASVKVSCKASGYTFTYCSLHWLQQAPGQGLERMRWITLYNGNTNYAKKFQGRVTITRDMSLRTAYIELSSLRSEDSAVYYWAR

SEQ ID NO: 14399 - protein, 118 aa, Homo sapiens
  Payload ID: 2787
  Gene Symbol:
  Gene Name: CH17-212P11.6
  ENSP ID: ENSP00000488306
MAPHHGQDLELIFLVAAATGKVQLGQSEAEVKKPGASVKVSCKASGYTFTCCSLHWLQQAPGQGLERMRWITLYNGNTNYAKKFQGRVTITRDMSLRTAYIELSSLRSEDSAVYYWAR

SEQ ID NO: 14400 - protein, 117 aa, Homo sapiens
  Payload ID: 2788
  Gene Symbol:
  Gene Name: CH17-224D4.1
  ENSP ID: ENSP00000488230
MEFWLSWVLLVAILKDVQCEVQLVESGGGLVQPGGSLRLSCSASGFTFSSYAMHWVRQAPGKGLEYVSAISSNGGSTYYADSVKGRFTISRDNSKNTLYLQMSSLRAEDTAVYYCVK

SEQ ID NO: 14401 - protein, 117 aa, Homo sapiens; identical to SEQ ID NO: 14400
  Payload ID: 2788
  Gene Symbol:
  Gene Name: CH17-224D4.1
  ENSP ID: ENSP00000488609

SEQ ID NO: 14402 - protein, 117 aa, Homo sapiens
  Payload ID: 2789
  Gene Symbol:
  Gene Name: CH17-224D4.2
  ENSP ID: ENSP00000488144
MGSTAILALLLAVLQGVCAEVQLVQSGAEVKKPGESLRISCKGSGYSFTSYWISWVRQMPGKGLEWMGRIDPSDSYTNYSPSFQGHVTISADKSISTAYLQWSSLKASDTAMYYCAR

SEQ ID NO: 14403 - protein, 117 aa, Homo sapiens; identical to SEQ ID NO: 14402
  Payload ID: 2789
  Gene Symbol:
  Gene Name: CH17-224D4.2
  ENSP ID: ENSP00000488587

SEQ ID NO: 14404 - protein, 117 aa, Homo sapiens
  Payload ID: 2790
  Gene Symbol:
  Gene Name: CH17-262H11.1
  ENSP ID: ENSP00000487727
MDWTWRILFLVAAATGAHSQVQLVQSGSELKKPGASVKVSCKASGYTFTSYAMNWVRQAPGQGLEWMGWINTNTGNPTYAQGFTGRFVFSLDTSVSTAYLQICSLKAEDTAVYYCAR

SEQ ID NO: 14405 - protein, 117 aa, Homo sapiens; identical to SEQ ID NO: 14404
  Payload ID: 2790
  Gene Symbol:
  Gene Name: CH17-262H11.1
  ENSP ID: ENSP00000488259

SEQ ID NO: 14406 - protein, 43 aa, Homo sapiens
  Payload ID: 2791
  Gene Symbol:
  Gene Name: CH17-270A2.2
  ENSP ID: ENSP00000487094
MSGPIDNAIDWNPDWRRLPRELKIRVRKLQKERITILLPKRPP

SEQ ID NO: 14407 - protein, 232 aa, Homo sapiens; identical to SEQ ID NO: 1177
  Payload ID: 2792
  Gene Symbol:
  Gene Name: CH17-5A7.1
  ENSP ID: ENSP00000481688

SEQ ID NO: 14408 - protein, 153 aa, Homo sapiens; identical to SEQ ID NO: 1173
  Payload ID: 2792
  Gene Symbol:
  Gene Name: CH17-5A7.1
  ENSP ID: ENSP00000484554

SEQ ID NO: 14409 - protein, 218 aa, Homo sapiens
  Payload ID: 2792
  Gene Symbol:
  Gene Name: CH17-5A7.1
  ENSP ID: ENSP00000487831
  MOD_RES (1)..(1): Any amino acid
XTDVQQRARRSNCRRQEGIKIVLEDIFTLWRQVETKVRAKIRKMKVTTKVNRHDKINGKRKTAKEHLRKLSMKEREHGEKERQVSEAEENGKLDMKEIHTYMEMFQRAQALRRRAEDYYRCKITPSARKPLCNRVSLLVFLAFGHSLPGQDMDTFFSLRLCAQALQREMAERKAAYKHHSPIPVGNCVAQKHLHPHPVGPPSNILSIRGSVFVIANGP

SEQ ID NO: 14410 - protein, 369 aa, Homo sapiens; identical to SEQ ID NO: 1174
  Payload ID: 2792
  Gene Symbol:
  Gene Name: CH17-5A7.1
  ENSP ID: ENSP00000487876

SEQ ID NO: 14411 - protein, 232 aa, Homo sapiens; identical to SEQ ID NO: 1177
  Payload ID: 2792
  Gene Symbol:
  Gene Name: CH17-5A7.1
  ENSP ID: ENSP00000487986

SEQ ID NO: 14412 - protein, 118 aa, Homo sapiens
  Payload ID: 2793
  Gene Symbol:
  Gene Name: CH17-60O17.5
  ENSP ID: ENSP00000480975
MKHLWFFLLLVAAPRWVLSQLQLQESGPGLVKPSQTLSLTCTVSGGSISSGDYYWSWIRQPPGKGLEWIGYIYYSGSTYYNPSLKSRVTISVDTSKNQFSLKLSSVTAADTAVYYCAR

SEQ ID NO: 14413 - protein, 116 aa, Homo sapiens
  Payload ID: 2793
  Gene Symbol:
  Gene Name: CH17-60O17.5
  ENSP ID: ENSP00000488126
MKHLWFFLLLVAAPRWVLSQLQLQESGPGLVKPSQTLSLTCTVSGGSISSGDYYWSWIRQPPGKGLEWIGYIYYSGSTYYNPSLKSRVTISVDTSKNQFSLKLSSVTAADTAVYYC

SEQ ID NO: 14414 - protein, 117 aa, Homo sapiens
  Payload ID: 2794
  Gene Symbol:
  Gene Name: CH17-60O17.7
  ENSP ID: ENSP00000488753
MEFGLSWVFLVALLRGVQCQVQLVESGGGVVQPGGSLRLSCAASGFTFSSYGMHWVRQAPGKGLEWVAFIRYDGSNKYYADSVKGRFTISRDNSKNTLYLQMNSLRAEDTAVYYCAK

SEQ ID NO: 14415 - protein, 783 aa, Homo sapiens
  Payload ID: 2795
  Gene Symbol:
  Gene Name: CH507-42P11.8
  ENSP ID: ENSP00000482829
MVIMSEFSADPAGQGQGQQKPLRVGFYDIERTLGKGNFAVVKLARHRVTKTQVAIKIIDKTRLDSSNLEKIYREVQLMKLLNHPHIIKLYQVMETKDMLYIVTEFAKNGEMFDYLTSNGHLSENEARKKFWQILSAVEYCHDHHIVHRDLKTENLLLDGNMDIKLADFGFGNFYKSGEPLSTWCGSPPYAAPEVFEGKEYEGPQLDIWSLGVVLYVLVCGSLPFDGPNLPTLRQRVLEGRFRIPFFMSQDCESLIRRMLVVDPARRITIAQIRQHRWMRAEPCLPGPACPAFSAHSYTSNLGDYDEQALGIMQTLGVDRQRTVESLQNSSYNHFAAIYYLLLERLKEYRNAQCARPGPARQPRPRSSDLSGLEVPQEGLSTDPFRPALLCPQPQTLVQSVLQAEMDCELQSSLQWPLFFPVDASCSGVFRPRPVSPSSLLDTAISEEARQGPGLEEEQDTQESLPSSTGRRHTLAEVSTRLSPLTAPCIVVSPSTTASPAEGTSSDSCLTFSASKSPAGLSGTPATQGLLGACSPVRLASPFLGSQSATPVLQAQGGLGGAVLLPVSFQEGRRASDTSLTQGLKAFRQQLRKTTRTKGFLGLNKIKGLARQVCQVPASRASRGGLSPFHAPAQSPGLHGGAAGSREGWSLLEEVLEQQRLLQLQHHPAAAPGCSQAPQPAPAPFVIAPCDGPGAAPLPSTLLTSGLPLLPPPLLQTGASPVASAAQLLDTHLHIGTGPTALPAVPPPRLARLAPGCEPLGLLQGDCEMEDLMPCSLGTFVLVQ

SEQ ID NO: 14416 - protein, 309 aa, Homo sapiens
  Payload ID: 2796
  Gene Symbol:
  Gene Name: CH507-9B2.1
  ENSP ID: ENSP00000483732
MRLGSPGLLFLLFSSLRADTQEKEVRAMVGSDVELSCACPEGSRFDLNDVYVYWQTSESKTVVTYHIPQNSSLENVDSRYRNRALMSPAGMLRGDFSLRLFNVTPQDEQKFHCLVLSQSLGFQEVLSVEVTLHVAANFSVPVVSAPHSPSQDELTFTCTSINGYPRPNVYWINKTDNSLLDQALQNDTVFLNMRGLYDVVSVLRIARTPSVNIGCCIENVLLQQNLTVGSQTGNDIGERDKITENPVSTGEKNAATWSILAVLCLLVVVAVAIGWVCRDRCLQHSYAGAWAVSPETELTESWNLLLLLS

SEQ ID NO: 14417 - protein, 192 aa, Homo sapiens
  Payload ID: 2796
  Gene Symbol:
  Gene Name: CH507-9B2.1
  ENSP ID: ENSP00000484302
MRLGSPGLLFLLFSSLRAANFSVPVVSAPHSPSQDELTFTCTSINGYPRPNVYWINKTDNSLLDQALQNDTVFLNMRGLYDVVSVLRIARTPSVNIGCCIENVLLQQNLTVGSQTGNDIGERDKITENPVSTGEKNAATWSILAVLCLLVVVAVAIGWVCRDRCLQHSYAGAWAVSPETELTESWNLLLLLS

SEQ ID NO: 14418 - protein, 302 aa, Homo sapiens
  Payload ID: 2796
  Gene Symbol:
  Gene Name: CH507-9B2.1
  ENSP ID: ENSP00000485129
MRLGSPGLLFLLFSSLRADTQEKEVRAMVGSDVELSCACPEGSRFDLNDVYVYWQTSESKTVVTYHIPQNSSLENVDSRYRNRALMSPAGMLRGDFSLRLFNVTPQDEQKFHCLVLSQSLGFQEVLSVEVTLHVAANFSVPVVSAPHSPSQDELTFTCTSINGYPRPNVYWINKTDNSLLDQALQNDTVFLNMRGLYDVVSVLRIARTPSVNIGCCIENVLLQQNLTVGSQTGNDIGERDKITENPVSTGEKNAATWSILAVLCLLVVVAVAIGWVCRDRCLQHSYAGAWAVSPETELTGHV

SEQ ID NO: 14419 - protein, 77 aa, Homo sapiens
  Payload ID: 2796
  Gene Symbol:
  Gene Name: CH507-9B2.1
  ENSP ID: ENSP00000485557
MRLGSPGLLFLLFSSLRAEQLLGKRGQPLPEPSPDVTGRHAAGRLLPALVQRHPPGRAEVSLPGVEPIPGIPGGFER

SEQ ID NO: 14420 - protein, 185 aa, Homo sapiens
  Payload ID: 2796
  Gene Symbol:
  Gene Name: CH507-9B2.1
  ENSP ID: ENSP00000485649
MRLGSPGLLFLLFSSLRAANFSVPVVSAPHSPSQDELTFTCTSINGYPRPNVYWINKTDNSLLDQALQNDTVFLNMRGLYDVVSVLRIARTPSVNIGCCIENVLLQQNLTVGSQTGNDIGERDKITENPVSTGEKNAATWSILAVLCLLVVVAVAIGWVCRDRCLQHSYAGAWAVSPETELTGHV

SEQ ID NO: 14421 - protein, 155 aa, Homo sapiens
  Payload ID: 2797
  Gene Symbol:
  Gene Name: CH507-9B2.2
  ENSP ID: ENSP00000485664
VEEWGPFDLVYGATPPLGHTCDRPPSWYLFQFHRLLQYARPKPGSPRPFFWMFVDNLVLNKEDLDVASRFLEMEPVTIPDVHGGSLQNAVRVWSNIPAIRSRHWALVSEEELSLLAQNKQSSKLAAKWPTKLVKNCFLPLREYFKYFSTELTSSL

SEQ ID NO: 14422 - protein, 15 aa, Homo sapiens
  Payload ID: 2798
  Gene Symbol:
  Gene Name: CH507-9B2.3
  ENSP ID: ENSP00000487345
MYHFLKQSCLLSSWD

SEQ ID NO: 14423 - protein, 279 aa, Homo sapiens
  Payload ID: 2799
  Gene Symbol:
  Gene Name: CH507-9B2.4
  ENSP ID: ENSP00000485630
  MOD_RES (1)..(1): Any amino acid
XEVVTSSLPELYVEKVLEFLASSFEVSRHLEFYLLWTHKLLMLHGQKLKSRAGTLLPVIQFLQKSIQRHLDDLSKLILVHLSRGGAEVQIFAPDVPQMHVIDHTKGQPSEGESRNVLTESARIARGKITDLANLSAANHDAAIFPGGFGAAKNLSTFAVDGKDCKVNKEVERVLKEFHQAGKPIGLCCIAPVLAAKVLRGVEVTVGHEQEEGGKWPYAGTAEAIKALGAKHCVKEVVEAHVDQKNKVVTTPAFMCETALHYIHDGIGAMVRKVLELTGK

SEQ ID NO: 14424 - protein, 919 aa, Homo sapiens
  Payload ID: 2800
  Gene Symbol:
  Gene Name: CH507-9B2.5
  ENSP ID: ENSP00000482107
MKFAYRFSNLLGTVYRRGNLNFTCNGNSVISPVGNRVTVFDLKNNKSDTLPLATRYNVKCVGLSPDGRLAIIVDEGGDALLVSLVCRSVLHHFHFKGSVHSVSFSPDGRKFVVTKGNIAQMYHAPGKKREFNAFVLDKTYFGPYDETTCIDWTDDSRCFVVGSKDMSTWVFGAERWDNLIYYALGGHKDAIVACFFESNSLDLYSLSQDGVLCMWQCDTPPEGLRLKPPAGWKADLLQREEEEEEEEDQEGDRETTIRGKATPAEEEKTGKVKYSRLAKYFFNKEGDFNNLTAAAFHKKSHLLVTGFASGIFHLHELPEFNLIHSLSISDQSIASVAINSSGDWIAFGCSGLGQLLVWEWQSESYVLKQQGHFNSMVALAYSPDGQYIVTGGDDGKVKVWNTLSGFCFVTFTEHSSGVTGVTFTATGYVVVTSSMDGTVRAFDLHRYRNFRTFTSPRPTQFSCVAVDASGEIVSAGAQDSFEIFVWSMQTGRLLDVLSGHEGPISGLCFNPMKSVLASASWDKTVRLWDMFDSWRTKETLALTSDALAVTFRPDGAELAVATLNSQITFWDPENAVQTGSIEGRHDLKTGRKELDKITAKHAAKGKAFTALCYSADGHSILAGGMSKFVCIYHVREQILMKRFEISCNLSLDAMEEFLNRRKMTEFGNLALIDQDAGQEDGVAIPLPGVRKGDMSSRHFKPEIRVTSLRFSPTGRCWAATTTEGLLIYSLDTRVLFDPFELDTSVTPGRVREALRQQDFTRAILMALRLNESKLVQEALEAVPRGEIEVVTSSLPELYVEKVLEFLASSFEVSRHLEFYLLWTHKLLMLHGQKLKSRAGTLLPVIQFLQKSIQRHLDDLSKLCSWNHYNMQYALAVSKQRGTKRSLDPLGSEEEAEASEDDSLHLLGGGGRDSEEEMLA

SEQ ID NO: 14425 - protein, 79 aa, Homo sapiens
  Payload ID: 2800
  Gene Symbol:
  Gene Name: CH507-9B2.5
  ENSP ID: ENSP00000488213
EFLNRRKMTEFGNLALIDQDAGQEDGVAIPLPGVRKGDMSSRHFKPEIRVTSLRFSPTVIRAALSRCSRDHRACGAEDA

SEQ ID NO: 14426 - protein, 203 aa, Homo sapiens
  Payload ID: 2801
  Gene Symbol:
  Gene Name: CH507-9B2.9
  ENSP ID: ENSP00000485615
TLYNVKAEIFPPSGMEYCRTGSLCSLEVLITRLSDLLEVDKDEALTESDEHFSTKLMYEVVDNSSNWAVCGKSCGVISMPVAARATHRVHMEVMPLFAGYLPLPDVRLFKYLPHHSAHSSQLDADSWIENDSLSVDKHGDDQPDSSSLKSRGSVHSACSSEHKGLPMPRLQALPAGQVFNSSSGTQVLVIPSQDDHVLEVSVT

SEQ ID NO: 14427 - protein, 219 aa, Homo sapiens
  Payload ID: 2802
  Gene Symbol: CHAC1
  Gene Name: ChaC glutathione-specific gamma-glutamylcyclotransferase 1
  Uniprot ID: Q9BUX1
  ENSP ID: ENSP00000395466
MGGAQLELPSGARPGVCVRRSFRAHAGDQPRRPPGPIPVPGTMKQESAAPNTPPTSQSPTPSAQFPRNDGDPQALWIFGYGSLVWRPDFAYSDSRVGFVRGYSRRFWQGDTFHRGSDKMPGRVVTLLEDHEGCTWGVAYQVQGEQNPGYLGPAPEEAIATQILACRGFSGHNLEYLLRLADFMQLCGPQAQDEHLAAIVDAVGTMLPCFCPTEQALALV

SEQ ID NO: 14428 - protein, 264 aa, Homo sapiens
  Payload ID: 2802
  Gene Symbol: CHAC1
  Gene Name: ChaC glutathione-specific gamma-glutamylcyclotransferase 1
  Uniprot ID: Q9BUX1
  ENSP ID: ENSP00000398105
MGGAQLELPSGARPGVCVRRSFRAHAGDQPRRPPGPIPVPGTMKQESAAPNTPPTSQSPTPSAQFPRNDGDPQALWIFGYGSLVWRPDFAYSDSRVGFVRGYSRRFWQGDTFHRGSDKMPGRVVTLLEDHEGCTWGVAYQVQGEQVSKALKYLNVREAVLGGYDTKEVTFYPQDAPDQPLKALAYVATPQNPGYLGPAPEEAIATQILACRGFSGHNLEYLLRLADFMQLCGPQAQDEHLAAIVDAVGTMLPCFCPTEQALALV

SEQ ID NO: 14429 - protein, 37 aa, Homo sapiens
  Payload ID: 2802
  Gene Symbol: CHAC1
  Gene Name: ChaC glutathione-specific gamma-glutamylcyclotransferase 1
  ENSP ID: ENSP00000452707
MQLCGPQAQDEHLAAIVDAVGTMLPCFCPTEQALALV

SEQ ID NO: 14430 - protein, 222 aa, Homo sapiens
  Payload ID: 2802
  Gene Symbol: CHAC1
  Gene Name: ChaC glutathione-specific gamma-glutamylcyclotransferase 1
  ENSP ID: ENSP00000481816
MKQESAAPNTPPTSQSPTPSAQFPRNDGDPQALWIFGYGSLVWRPDFAYSDSRVGFVRGYSRRFWQGDTFHRGSDKMPGRVVTLLEDHEGCTWGVAYQVQGEQVSKALKYLNVREAVLGGYDTKEVTFYPQDAPDQPLKALAYVATPQNPGYLGPAPEEAIATQILACRGFSGHNLEYLLRLADFMQLCGPQAQDEHLAAIVDAVGTMLPCFCPTEQALALV

SEQ ID NO: 14431 - protein, 264 aa, Homo sapiens; identical to SEQ ID NO: 14428
  Payload ID: 2802
  Gene Symbol: CHAC1
  Gene Name: ChaC glutathione-specific gamma-glutamylcyclotransferase 1
  Uniprot ID: Q9BUX1
  ENSP ID: ENSP00000484644

SEQ ID NO: 14432 - protein, 184 aa, Homo sapiens
  Payload ID: 2803
  Gene Symbol: CHAC2
  Gene Name: ChaC, cation transport regulator homolog 2 (E. coli)
  Uniprot ID: Q8WUX2
  ENSP ID: ENSP00000295304
MWVFGYGSLIWKVDFPYQDKLVGYITNYSRRFWQGSTDHRGVPGKPGRVVTLVEDPAGCVWGVAYRLPVGKEEEVKAYLDFREKGGYRTTTVIFYPKDPTTKPFSVLLYIGTCDNPDYLGPAPLEDIAEQIFNAAGPSGRNTEYLFELANSIRNLVPEEADEHLFALEKLVKERLEGKQNLNCI

SEQ ID NO: 14433 - protein, 535 aa, Homo sapiens
  Payload ID: 2804
  Gene Symbol: CCT2
  Gene Name: chaperonin containing TCP1, subunit 2 (beta)
  Uniprot ID: P78371
  ENSP ID: ENSP00000299300
MASLSLAPVNIFKAGADEERAETARLTSFIGAIAIGDLVKSTLGPKGMDKILLSSGRDASLMVTNDGATILKNIGVDNPAAKVLVDMSRVQDDEVGDGTTSVTVLAAELLREAESLIAKKIHPQTIIAGWREATKAAREALLSSAVDHGSDEVKFRQDLMNIAGTTLSSKLLTHHKDHFTKLAVEAVLRLKGSGNLEAIHIIKKLGGSLADSYLDEGFLLDKKIGVNQPKRIENAKILIANTGMDTDKIKIFGSRVRVDSTAKVAEIEHAEKEKMKEKVERILKHGINCFINRQLIYNYPEQLFGAAGVMAIEHADFAGVERLALVTGGEIASTFDHPELVKLGSCKLIEEVMIGEDKLIHFSGVALGEACTIVLRGATQQILDEAERSLHDALCVLAQTVKDSRTVYGGGCSEMLMAHAVTQLANRTPGKEAVAMESYAKALRMLPTIIADNAGYDSADLVAQLRAAHSEGNTTAGLDMREGTIGDMAILGITESFQVKRQVLLSAAEAAEVILRVDNIIKAAPRKRVPDHHPC

SEQ ID NO: 14434 - protein, 530 aa, Homo sapiens
  Payload ID: 2804
  Gene Symbol: CCT2
  Gene Name: chaperonin containing TCP1, subunit 2 (beta)
  ENSP ID: ENSP00000441847
MASLSLAPVNIFKAGADEERAETARLTSFIGAIAIGDLVKSTLGPKGMDKILLSSGRDASLMVTNDGATILKNIGVDNPAAKVLVDMSRVQDDEVGDGTTSVTVLAAELLREAESLIAKKIHPQTIIAGWREATKAAREALLSSAVDHGSDEVKFRQDLMNIAGTTLSSKLLTHHKDHFTKLAVEAVLRLKGSGNLEAIHIIKKLGGSLADSYLDEGFLLDKKIGVNQPKRIENAKILIANTGMDTDKIKIFGSRVRVDSTAKVAEIEHAEKEKMKEKVERILKHGINCFINRQLIYNYPEQLFGAAGVMAIEHADFAGVERLALVTGGEIASTFDHPELVKLGSCKLIEEVMIGEDKLIHFSGVALGEACTIVLRGATQQILDEAERSLHDALCVLAQTVKDSRTVYGGGCSEMLMAHAVTQLANRTPGKEAVAMESYAKALRMLPTIIADNAGYDSADLVAQLRAAHSEGNTTAGLGNVSLITTPVKHSHVLSIFGPVSSKVVFERYSIKEDCGICLSVPIISLSLDI

SEQ ID NO: 14435 - protein, 488 aa, Homo sapiens
  Payload ID: 2804
  Gene Symbol: CCT2
  Gene Name: chaperonin containing TCP1, subunit 2 (beta)
  Uniprot ID: P78371
  ENSP ID: ENSP00000445471
MDKILLSSGRDASLMVTNDGATILKNIGVDNPAAKVLVDMSRVQDDEVGDGTTSVTVLAAELLREAESLIAKKIHPQTIIAGWREATKAAREALLSSAVDHGSDEVKFRQDLMNIAGTTLSSKLLTHHKDHFTKLAVEAVLRLKGSGNLEAIHIIKKLGGSLADSYLDEGFLLDKKIGVNQPKRIENAKILIANTGMDTDKIKIFGSRVRVDSTAKVAEIEHAEKEKMKEKVERILKHGINCFINRQLIYNYPEQLFGAAGVMAIEHADFAGVERLALVTGGEIASTFDHPELVKLGSCKLIEEVMIGEDKLIHFSGVALGEACTIVLRGATQQILDEAERSLHDALCVLAQTVKDSRTVYGGGCSEMLMAHAVTQLANRTPGKEAVAMESYAKALRMLPTIIADNAGYDSADLVAQLRAAHSEGNTTAGLDMREGTIGDMAILGITESFQVKRQVLLSAAEAAEVILRVDNIIKAAPRKRVPDHHPC

SEQ ID NO: 14436 - protein, 416 aa, Homo sapiens
  Payload ID: 2804
  Gene Symbol: CCT2
  Gene Name: chaperonin containing TCP1, subunit 2 (beta)
  ENSP ID: ENSP00000450153
MASLSLAPVNIFKAGADEERAETARLTSFIGAIAIGDLVKSTLGPKGMDKILLSSGRDASLMVTNDGATILKNIGVDNPAAKVLVDMSRVQDDEVGDGTTSVTVLAAELLREAESLIAKKIHPQTIIAGWREATKAAREALLSSAVDHGSDEVKFRQDLMNIAGTTLSSKLLTHHKDHFTKLAVEAVLRLKGSGNLEAIHIIKKLGGSLADSYLDEGFLLDKKIGVNQPKRIENAKILIANTGMDTDKIKIFGSRVRVDSTAKVAEIEHAEKEKMKEKVERILKHGINCFINRQLIYNYPEQLFGAAGVMAIEHADFAGVERLALVTGGEIASTFDHPELVKLGSCKLIEEVMIGEDKLIHFSGVALGEACTIVLRGATQQILDEAERSLHDALCVLAQTVKDSRTVYGGVANHHS

SEQ ID NO: 14437 - protein, 545 aa, Homo sapiens
  Payload ID: 2805
  Gene Symbol: CCT3
  Gene Name: chaperonin containing TCP1, subunit 3 (gamma)
  Uniprot ID: P49368
  ENSP ID: ENSP00000295688
MMGHRPVLVLSQNTKRESGRKVQSGNINAAKTIADIIRTCLGPKSMMKMLLDPMGGIVMTNDGNAILREIQVQHPAAKSMIEISRTQDEEVGDGTTSVIILAGEMLSVAEHFLEQQMHPTVVISAYRKALDDMISTLKKISIPVDISDSDMMLNIINSSITTKAISRWSSLACNIALDAVKMVQFEENGRKEIDIKKYARVEKIPGGIIEDSCVLRGVMINKDVTHPRMRRYIKNPRIVLLDSSLEYKKGESQTDIEITREEDFTRILQMEEEYIQQLCEDIIQLKPDVVITEKGISDLAQHYLMRANITAIRRVRKTDNNRIARACGARIVSRPEELREDDVGTGAGLLEIKKIGDEYFTFITDCKDPKACTILLRGASKEILSEVERNLQDAMQVCRNVLLDPQLVPGGGASEMAVAHALTEKSKAMTGVEQWPYRAVAQALEVIPRTLIQNCGASTIRLLTSLRAKHTQENCETWGVNGETGTLVDMKELGIWEPLAVKLQTYKTAVETAVLLLRIDDIVSGHKKKGDDQSRQGGAPDAGQE

SEQ ID NO: 14438 - protein, 40 aa, Homo sapiens
  Payload ID: 2805
  Gene Symbol: CCT3
  Gene Name: chaperonin containing TCP1, subunit 3 (gamma)
  ENSP ID: ENSP00000357241
MMGHRPVLVLNYCRYHPNMFGTQVHDEDAFGPNGRHCDDQ

SEQ ID NO: 14439 - protein, 507 aa, Homo sapiens
  Payload ID: 2805
  Gene Symbol: CCT3
  Gene Name: chaperonin containing TCP1, subunit 3 (gamma)
  Uniprot ID: P49368
  ENSP ID: ENSP00000357242
MMGHRPVLVLSQNTKRESGRKVQSGNINAAKIQVQHPAAKSMIEISRTQDEEVGDGTTSVIILAGEMLSVAEHFLEQQMHPTVVISAYRKALDDMISTLKKISIPVDISDSDMMLNIINSSITTKAISRWSSLACNIALDAVKMVQFEENGRKEIDIKKYARVEKIPGGIIEDSCVLRGVMINKDVTHPRMRRYIKNPRIVLLDSSLEYKKGESQTDIEITREEDFTRILQMEEEYIQQLCEDIIQLKPDVVITEKGISDLAQHYLMRANITAIRRVRKTDNNRIARACGARIVSRPEELREDDVGTGAGLLEIKKIGDEYFTFITDCKDPKACTILLRGASKEILSEVERNLQDAMQVCRNVLLDPQLVPGGGASEMAVAHALTEKSKAMTGVEQWPYRAVAQALEVIPRTLIQNCGASTIRLLTSLRAKHTQENCETWGVNGETGTLVDMKELGIWEPLAVKLQTYKTAVETAVLLLRIDDIVSGHKKKGDDQSRQGGAPDAGQE

SEQ ID NO: 14440 - protein, 54 aa, Homo sapiens
  Payload ID: 2805
  Gene Symbol: CCT3
  Gene Name: chaperonin containing TCP1, subunit 3 (gamma)
  ENSP ID: ENSP00000357245
MMGHRPVLVLKTEFHHVDQAGLQLLMSSGDPPTSASQSAEITGVSHRARSLIFF

SEQ ID NO: 14441 - protein, 188 aa, Homo sapiens
  Payload ID: 2805
  Gene Symbol: CCT3
  Gene Name: chaperonin containing TCP1, subunit 3 (gamma)
  ENSP ID: ENSP00000388799
MYEGDLEGQSMNWTSEEGRGDIIRSGTNIDRAWQCQNTKRESGRKVQSGNINAAKIQVQHPAAKSMIEISRTQDEEVGDGTTSVIILAGEMLSVAEHFLEQQMHPTVVISAYRKALDDMISTLKKISIPVDISDSDMMLNIINSSITTKAISRWSSLACNIALDAVKMVQFEENGRKEIDIKKYARVE

SEQ ID NO: 14442 - protein, 276 aa, Homo sapiens
  Payload ID: 2805
  Gene Symbol: CCT3
  Gene Name: chaperonin containing TCP1, subunit 3 (gamma)
  ENSP ID: ENSP00000413308
MYEGDLEGQSMNWTSEEGRGDIIRSGTNIDRAWQCQNTKRESGRKVQSGNINAAKTIADIIRTCLGPKSMMKMLLDPMGGIVMTNDGNAILREIQVQHPAAKSMIEISRTQDEEVGDGTTSVIILAGEMLSVAEHFLEQQMHPTVVISAYRKALDDMISTLKKISIPVDISDSDMMLNIINSSITTKAISRWSSLACNIALDAVKMVQFEENGRKEIDIKKYARVEKIPGGIIEDSCVLRGVMINKDVTHPRMRRYIKNPRIVLLDSSLEYKKGES

SEQ ID NO: 14443 - protein, 161 aa, Homo sapiens
  Payload ID: 2805
  Gene Symbol: CCT3
  Gene Name: chaperonin containing TCP1, subunit 3 (gamma)
  ENSP ID: ENSP00000413431
MMGHRPVLVLSQNTKRESGRKVQSGNINAAKTIADIIRTCLGPKSMMKMLLDPMGGIVMTNDGNAILREIQVQHPAAKSMIEISRTQDEEVGDGTTSVIILESHSVTMLECGGAILAHCNLCLPAGEMLSVAEHFLEQQMHPTVVISAYRKALDDMISTLK

SEQ ID NO: 14444 - protein, 500 aa, Homo sapiens
  Payload ID: 2805
  Gene Symbol: CCT3
  Gene Name: chaperonin containing TCP1, subunit 3 (gamma)
  ENSP ID: ENSP00000431543
MMKMLLDPMGGIVMTNDGNAILREIQVQHPAAKSMIEISRTQDEEVGDGTTSVIILAGEMLSVAEHFLEQQMHPTVVISAYRKALDDMISTLKKISIPVDISDSDMMLNIINSSITTKAISRWSSLACNIALDAVKMVQFEENGRKEIDIKKYARVEKIPGGIIEDSCVLRGVMINKDVTHPRMRRYIKNPRIVLLDSSLEYKKGESQTDIEITREEDFTRILQMEEEYIQQLCEDIIQLKPDVVITEKGISDLAQHYLMRANITAIRRVRKTDNNRIARACGARIVSRPEELREDDVGTGAGLLEIKKIGDEYFTFITDCKDPKACTILLRGASKEILSEVERNLQDAMQVCRNVLLDPQLVPGGGASEMAVAHALTEKSKAMTGVEQWPYRAVAQALEVIPRTLIQNCGASTIRLLTSLRAKHTQENCETWGVNGETGTLVDMKELGIWEPLAVKLQTYKTAVETAVLLLRIDDIVSGHKKKGDDQSRQGGAPDAGQE

SEQ ID NO: 14445 - protein, 234 aa, Homo sapiens
  Payload ID: 2805
  Gene Symbol: CCT3
  Gene Name: chaperonin containing TCP1, subunit 3 (gamma)
  ENSP ID: ENSP00000434232
MMGHRPVLVLSQNTKRESGRKVQSGNINAAKTIADIIRTCLGPKSMMKMLLDPMGGIVMTNDGNAILREIQVQHPAAKSMIEISRTQDEEVGDGTTSVIILGEMLSVAEHFLEQQMHPTVVISAYRKALDDMISTLKKISIPVDISDSDMMLNIINSSITTKAISRWSSLACNIALDAVKMVQFEENGRKEIDIKKYARVEKIPGGIIEDSCVLRGVMINKDVTHPRMRRYIKN

SEQ ID NO: 14446 - protein, 144 aa, Homo sapiens
  Payload ID: 2805
  Gene Symbol: CCT3
  Gene Name: chaperonin containing TCP1, subunit 3 (gamma)
  ENSP ID: ENSP00000434481
MIEISRTQDEEVGDGTTSVIILAGEMLSVAEHFLEQQMHPTVVISAYRKALDDMISTLKKISIPVDISDSDMMLNIINSSITTKAISRWSSLACNIALDAVKMVQFEENGRKEIDIKKYARVEKIPGGIIEDSCVLRGVMINKD

SEQ ID NO: 14447 - protein, 154 aa, Homo sapiens
  Payload ID: 2805
  Gene Symbol: CCT3
  Gene Name: chaperonin containing TCP1, subunit 3 (gamma)
  ENSP ID: ENSP00000435026
MMGHRPVLVLSQNTKRESGRKVQSGNINAAKTIADIIRTCLGPKSMMKIQVQHPAAKSMIEISRTQDEEVGDGTTSVIILAGEMLSVAEHFLEQQMHPTVVISAYRKALDDMISTLKKISIPVDISDSDMMLNIINSSITTKAISRWSSLACNI

SEQ ID NO: 14448 - protein, 539 aa, Homo sapiens
  Payload ID: 2806
  Gene Symbol: CCT4
  Gene Name: chaperonin containing TCP1, subunit 4 (delta)
  Uniprot ID: P50991
  ENSP ID: ENSP00000377958
MPENVAPRSGATAGAAGGRGKGAYQDRDKPAQIRFSNISAAKAVADAIRTSLGPKGMDKMIQDGKGDVTITNDGATILKQMQVLHPAARMLVELSKAQDIEAGDGTTSVVIIAGSLLDSCTKLLQKGIHPTIISESFQKALEKGIEILTDMSRPVELSDRETLLNSATTSLNSKVVSQYSSLLSPMSVNAVMKVIDPATATSVDLRDIKIVKKLGGTIDDCELVEGLVLTQKVSNSGITRVEKAKIGLIQFCLSAPKTDMDNQIVVSDYAQMDRVLREERAYILNLVKQIKKTGCNVLLIQKSILRDALSDLALHFLNKMKIMVIKDIEREDIEFICKTIGTKPVAHIDQFTADMLGSAELAEEVNLNGSGKLLKITGCASPGKTVTIVVRGSNKLVIEEAERSIHDALCVIRCLVKKRALIAGGGAPEIELALRLTEYSRTLSGMESYCVRAFADAMEVIPSTLAENAGLNPISTVTELRNRHAQGEKTAGINVRKGGISNILEELVVQPLLVSVSALTLATETVRSILKIDDVVNTR

SEQ ID NO: 14449 - protein, 509 aa, Homo sapiens
  Payload ID: 2806
  Gene Symbol: CCT4
  Gene Name: chaperonin containing TCP1, subunit 4 (delta)
  Uniprot ID: P50991
  ENSP ID: ENSP00000443061
MPENVAPRSGATAGAAGGRGKGAYQDRDKPAQIRFSNISAAKAVADAIRTSLGPKGMDKMLVELSKAQDIEAGDGTTSVVIIAGSLLDSCTKLLQKGIHPTIISESFQKALEKGIEILTDMSRPVELSDRETLLNSATTSLNSKVVSQYSSLLSPMSVNAVMKVIDPATATSVDLRDIKIVKKLGGTIDDCELVEGLVLTQKVSNSGITRVEKAKIGLIQFCLSAPKTDMDNQIVVSDYAQMDRVLREERAYILNLVKQIKKTGCNVLLIQKSILRDALSDLALHFLNKMKIMVIKDIEREDIEFICKTIGTKPVAHIDQFTADMLGSAELAEEVNLNGSGKLLKITGCASPGKTVTIVVRGSNKLVIEEAERSIHDALCVIRCLVKKRALIAGGGAPEIELALRLTEYSRTLSGMESYCVRAFADAMEVIPSTLAENAGLNPISTVTELRNRHAQGEKTAGINVRKGGISNILEELVVQPLLVSVSALTLATETVRSILKIDDVVNTR

SEQ ID NO: 14450 - protein, 541 aa, Homo sapiens
  Payload ID: 2807
  Gene Symbol: CCT5
  Gene Name: chaperonin containing TCP1, subunit 5 (epsilon)
  Uniprot ID: P48643
  ENSP ID: ENSP00000280326
MASMGTLAFDEYGRPFLIIKDQDRKSRLMGLEALKSHIMAAKAVANTMRTSLGPNGLDKMMVDKDGDVTVTNDGATILSMMDVDHQIAKLMVELSKSQDDEIGDGTTGVVVLAGALLEEAEQLLDRGIHPIRIADGYEQAARVAIEHLDKISDSVLVDIKDTEPLIQTAKTTLGSKVVNSCHRQMAEIAVNAVLTVADMERRDVDFELIKVEGKVGGRLEDTKLIKGVIVDKDFSHPQMPKKVEDAKIAILTCPFEPPKPKTKHKLDVTSVEDYKALQKYEKEKFEEMIQQIKETGANLAICQWGFDDEANHLLLQNNLPAVRWVGGPEIELIAIATGGRIVPRFSELTAEKLGFAGLVQEISFGTTKDKMLVIEQCKNSRAVTIFIRGGNKMIIEEAKRSLHDALCVIRNLIRDNRVVYGGGAAEISCALAVSQEADKCPTLEQYAMRAFADALEVIPMALSENSGMNPIQTMTEVRARQVKEMNPALGIDCLHKGTNDMKQQHVIETLIGKKQQISLATQMVRMILKIDDIRKPGESEE

SEQ ID NO: 14451 - protein, 62 aa, Homo sapiens
  Payload ID: 2807
  Gene Symbol: CCT5
  Gene Name: chaperonin containing TCP1, subunit 5 (epsilon)
  ENSP ID: ENSP00000422744
  MOD_RES (1)..(1): Any amino acid
XAFDEYGRPFLIIKDQDRKSRLMGLEALKSHIMAAKAVANTMRTSLGPNDCQADGGTVQVSG

SEQ ID NO: 14452 - protein, 448 aa, Homo sapiens
  Payload ID: 2807
  Gene Symbol: CCT5
  Gene Name: chaperonin containing TCP1, subunit 5 (epsilon)
  Uniprot ID: P48643
  ENSP ID: ENSP00000423052
MAAKAVANTMRTSLGPNVLAGALLEEAEQLLDRGIHPIRIADGYEQAARVAIEHLDKISDSVLVDIKDTEPLIQTAKTTLGSKVVNSCHRQMAEIAVNAVLTVADMERRDVDFELIKVEGKVGGRLEDTKLIKGVIVDKDFSHPQMPKKVEDAKIAILTCPFEPPKPKTKHKLDVTSVEDYKALQKYEKEKFEEMIQQIKETGANLAICQWGFDDEANHLLLQNNLPAVRWVGGPEIELIAIATGGRIVPRFSELTAEKLGFAGLVQEISFGTTKDKMLVIEQCKNSRAVTIFIRGGNKMIIEEAKRSLHDALCVIRNLIRDNRVVYGGGAAEISCALAVSQEADKCPTLEQYAMRAFADALEVIPMALSENSGMNPIQTMTEVRARQVKEMNPALGIDCLHKGTNDMKQQHVIETLIGKKQQISLATQMVRMILKIDDIRKPGESEE

SEQ ID NO: 14453 - protein, 88 aa, Homo sapiens
  Payload ID: 2807
  Gene Symbol: CCT5
  Gene Name: chaperonin containing TCP1, subunit 5 (epsilon)
  ENSP ID: ENSP00000423087
VRKLLGPPEKGKCILASVAVSAGWGEVIPVVAPWRPWGPSPSMNMGALSSSSRIRTASPVLWDLRPSSLRMMKLEMEPQEWLSWLVPC

SEQ ID NO: 14454 - protein, 520 aa, Homo sapiens
  Payload ID: 2807
  Gene Symbol: CCT5
  Gene Name: chaperonin containing TCP1, subunit 5 (epsilon)
  ENSP ID: ENSP00000423318
MNSSLGPTIEKLSVSHIMAAKAVANTMRTSLGPNGLDKMMVDKDGDVTVTNDGATILSMMDVDHQIAKLMVELSKSQDDEIGDGTTGVVVLAGALLEEAEQLLDRGIHPIRIADGYEQAARVAIEHLDKISDSVLVDIKDTEPLIQTAKTTLGSKVVNSCHRQMAEIAVNAVLTVADMERRDVDFELIKVEGKVGGRLEDTKLIKGVIVDKDFSHPQMPKKVEDAKIAILTCPFEPPKPKTKHKLDVTSVEDYKALQKYEKEKFEEMIQQIKETGANLAICQWGFDDEANHLLLQNNLPAVRWVGGPEIELIAIATGGRIVPRFSELTAEKLGFAGLVQEISFGTTKDKMLVIEQCKNSRAVTIFIRGGNKMIIEEAKRSLHDALCVIRNLIRDNRVVYGGGAAEISCALAVSQEADKCPTLEQYAMRAFADALEVIPMALSENSGMNPIQTMTEVRARQVKEMNPALGIDCLHKGTNDMKQQHVIETLIGKKQQISLATQMVRMILKIDDIRKPGESEE

SEQ ID NO: 14455 - protein, 44 aa, Homo sapiens
  Payload ID: 2807
  Gene Symbol: CCT5
  Gene Name: chaperonin containing TCP1, subunit 5 (epsilon)
  ENSP ID: ENSP00000425751
MASMGTLAFDEYGRPFLIIKDQDRKSRLMGLEALKGQQLSPTDG

SEQ ID NO: 14456 - protein, 486 aa, Homo sapiens
  Payload ID: 2807
  Gene Symbol: CCT5
  Gene Name: chaperonin containing TCP1, subunit 5 (epsilon)
  ENSP ID: ENSP00000426923
MASMGTLAFDEYGRPFLIIKDQDRKSRLMGLEALKSHIMAAKAVANTMRTSLGPNVLAGALLEEAEQLLDRGIHPIRIADGYEQAARVAIEHLDKISDSVLVDIKDTEPLIQTAKTTLGSKVVNSCHRQMAEIAVNAVLTVADMERRDVDFELIKVEGKVGGRLEDTKLIKGVIVDKDFSHPQMPKKVEDAKIAILTCPFEPPKPKTKHKLDVTSVEDYKALQKYEKEKFEEMIQQIKETGANLAICQWGFDDEANHLLLQNNLPAVRWVGGPEIELIAIATGGRIVPRFSELTAEKLGFAGLVQEISFGTTKDKMLVIEQCKNSRAVTIFIRGGNKMIIEEAKRSLHDALCVIRNLIRDNRVVYGGGAAEISCALAVSQEADKCPTLEQYAMRAFADALEVIPMALSENSGMNPIQTMTEVRARQVKEMNPALGIDCLHKGTNDMKQQHVIETLIGKKQQISLATQMVRMILKIDDIRKPGESEE

SEQ ID NO: 14457 - protein, 503 aa, Homo sapiens
  Payload ID: 2807
  Gene Symbol: CCT5
  Gene Name: chaperonin containing TCP1, subunit 5 (epsilon)
  ENSP ID: ENSP00000427297
MAAKAVANTMRTSLGPNGLDKMMVDKDGDVTVTNDGATILSMMDVDHQIAKLMVELSKSQDDEIGDGTTGVVVLAGALLEEAEQLLDRGIHPIRIADGYEQAARVAIEHLDKISDSVLVDIKDTEPLIQTAKTTLGSKVVNSCHRQMAEIAVNAVLTVADMERRDVDFELIKVEGKVGGRLEDTKLIKGVIVDKDFSHPQMPKKVEDAKIAILTCPFEPPKPKTKHKLDVTSVEDYKALQKYEKEKFEEMIQQIKETGANLAICQWGFDDEANHLLLQNNLPAVRWVGGPEIELIAIATGGRIVPRFSELTAEKLGFAGLVQEISFGTTKDKMLVIEQCKNSRAVTIFIRGGNKMIIEEAKRSLHDALCVIRNLIRDNRVVYGGGAAEISCALAVSQEADKCPTLEQYAMRAFADALEVIPMALSENSGMNPIQTMTEVRARQVKEMNPALGIDCLHKGTNDMKQQHVIETLIGKKQQISLATQMVRMILKIDDIRKPGESEE

SEQ ID NO: 14458 - protein, 44 aa, Homo sapiens; identical to SEQ ID NO: 14455
  Payload ID: 2807
  Gene Symbol: CCT5
  Gene Name: chaperonin containing TCP1, subunit 5 (epsilon)
  ENSP ID: ENSP00000487128

SEQ ID NO: 14459 - protein, 531 aa, Homo sapiens
  Payload ID: 2808
  Gene Symbol: CCT6A
  Gene Name: chaperonin containing TCP1, subunit 6A (zeta 1)
  Uniprot ID: P40227
  ENSP ID: ENSP00000275603
MAAVKTLNPKAEVARAQAALAVNISAARGLQDVLRTNLGPKGTMKMLVSGAGDIKLTKDGNVLLHEMQIQHPTASLIAKVATAQDDITGDGTTSNVLIIGELLKQADLYISEGLHPRIITEGFEAAKEKALQFLEEVKVSREMDRETLIDVARTSLRTKVHAELADVLTEAVVDSILAIKKQDEPIDLFMIEIMEMKHKSETDTSLIRGLVLDHGARHPDMKKRVEDAYILTCNVSLEYEKTEVNSGFFYKSAEEREKLVKAERKFIEDRVKKIIELKRKVCGDSDKGFVVINQKGIDPFSLDALSKEGIVALRRAKRRNMERLTLACGGVALNSFDDLSPDCLGHAGLVYEYTLGEEKFTFIEKCNNPRSVTLLIKGPNKHTLTQIKDAVRDGLRAVKNAIDDGCVVPGAGAVEVAMAEALIKHKPSVKGRAQLGVQAFADALLIIPKVLAQNSGFDLQETLVKIQAEHSESGQLVGVDLNTGEPMVAAEVGVWDNYCVKKQLLHSCTVIATNILLVDEIMRAGMSSLKG

SEQ ID NO: 14460 - protein, 486 aa, Homo sapiens
  Payload ID: 2808
  Gene Symbol: CCT6A
  Gene Name: chaperonin containing TCP1, subunit 6A (zeta 1)
  Uniprot ID: P40227
  ENSP ID: ENSP00000352019
MAAVKTLNPKAEVARAQAALAVNISAARGLQDVLRTNLGPKGTMKMLVSGAGDIKLTKDGNVLLHEMGLHPRIITEGFEAAKEKALQFLEEVKVSREMDRETLIDVARTSLRTKVHAELADVLTEAVVDSILAIKKQDEPIDLFMIEIMEMKHKSETDTSLIRGLVLDHGARHPDMKKRVEDAYILTCNVSLEYEKTEVNSGFFYKSAEEREKLVKAERKFIEDRVKKIIELKRKVCGDSDKGFVVINQKGIDPFSLDALSKEGIVALRRAKRRNMERLTLACGGVALNSFDDLSPDCLGHAGLVYEYTLGEEKFTFIEKCNNPRSVTLLIKGPNKHTLTQIKDAVRDGLRAVKNAIDDGCVVPGAGAVEVAMAEALIKHKPSVKGRAQLGVQAFADALLIIPKVLAQNSGFDLQETLVKIQAEHSESGQLVGVDLNTGEPMVAAEVGVWDNYCVKKQLLHSCTVIATNILLVDEIMRAGMSSLKG

SEQ ID NO: 14461 - protein, 530 aa, Homo sapiens
  Payload ID: 2809
  Gene Symbol: CCT6B
  Gene Name: chaperonin containing TCP1, subunit 6B (zeta 2)
  Uniprot ID: Q92526
  ENSP ID: ENSP00000327191
MAAIKAVNSKAEVARARAALAVNICAARGLQDVLRTNLGPKGTMKMLVSGAGDIKLTKDGNVLLDEMQIQHPTASLIAKVATAQDDVTGDGTTSNVLIIGELLKQADLYISEGLHPRIIAEGFEAAKIKALEVLEEVKVTKEMKRKILLDVARTSLQTKVHAELADVLTEVVVDSVLAVRRPGYPIDLFMVEIMEMKHKLGTDTKLIQGLVLDHGARHPDMKKRVEDAFILICNVSLEYEKTEVNSGFFYKTAEEKEKLVKAERKFIEDRVQKIIDLKDKVCAQSNKGFVVINQKGIDPFSLDSLAKHGIVALRRAKRRNMERLSLACGGMAVNSFEDLTVDCLGHAGLVYEYTLGEEKFTFIEECVNPCSVTLLVKGPNKHTLTQVKDAIRDGLRAIKNAIEDGCMVPGAGAIEVAMAEALVTYKNSIKGRARLGVQAFADALLIIPKVLAQNAGYDPQETLVKVQAEHVESKQLVGVDLNTGEPMVAADAGVWDNYCVKKQLLHSCTVIATNILLVDEIMRAGMSSLK

SEQ ID NO: 14462 - protein, 493 aa, Homo sapiens
  Payload ID: 2809
  Gene Symbol: CCT6B
  Gene Name: chaperonin containing TCP1, subunit 6B (zeta 2)
  Uniprot ID: Q92526
  ENSP ID: ENSP00000398044
MAAIKAVNSKAEVARARAALAVNICAARGLQDVLRTNLGPKGTMKMLVSGAGDIKLTKDGNVLLDEMQIQHPTASLIAKVATAQDDVTGDGTTSNVLIIGELLKQADLYISEGLHPRIIAEGFEAAKIKALEVLEEVKVTKEMKRKILLDVARTSLQTKVHAELADVLTEVVVDSVLAVRRPGYPIDLFMVEIMEMKHKLGTDTKEVNSGFFYKTAEEKEKLVKAERKFIEDRVQKIIDLKDKVCAQSNKGFVVINQKGIDPFSLDSLAKHGIVALRRAKRRNMERLSLACGGMAVNSFEDLTVDCLGHAGLVYEYTLGEEKFTFIEECVNPCSVTLLVKGPNKHTLTQVKDAIRDGLRAIKNAIEDGCMVPGAGAIEVAMAEALVTYKNSIKGRARLGVQAFADALLIIPKVLAQNAGYDPQETLVKVQAEHVESKQLVGVDLNTGEPMVAADAGVWDNYCVKKQLLHSCTVIATNILLVDEIMRAGMSSLK

SEQ ID NO: 14463 - protein, 485 aa, Homo sapiens
  Payload ID: 2809
  Gene Symbol: CCT6B
  Gene Name: chaperonin containing TCP1, subunit 6B (zeta 2)
  Uniprot ID: Q92526
  ENSP ID: ENSP00000400917
MAAIKAVNSKAEVARARAALAVNICAARGLQDVLRTNLGPKGTMKMLVSGAGDIKLTKDGNVLLDEMGLHPRIIAEGFEAAKIKALEVLEEVKVTKEMKRKILLDVARTSLQTKVHAELADVLTEVVVDSVLAVRRPGYPIDLFMVEIMEMKHKLGTDTKLIQGLVLDHGARHPDMKKRVEDAFILICNVSLEYEKTEVNSGFFYKTAEEKEKLVKAERKFIEDRVQKIIDLKDKVCAQSNKGFVVINQKGIDPFSLDSLAKHGIVALRRAKRRNMERLSLACGGMAVNSFEDLTVDCLGHAGLVYEYTLGEEKFTFIEECVNPCSVTLLVKGPNKHTLTQVKDAIRDGLRAIKNAIEDGCMVPGAGAIEVAMAEALVTYKNSIKGRARLGVQAFADALLIIPKVLAQNAGYDPQETLVKVQAEHVESKQLVGVDLNTGEPMVAADAGVWDNYCVKKQLLHSCTVIATNILLVDEIMRAGMSSLK

SEQ ID NO: 14464 - protein, 128 aa, Homo sapiens
  Payload ID: 2809
  Gene Symbol: CCT6B
  Gene Name: chaperonin containing TCP1, subunit 6B (zeta 2)
  ENSP ID: ENSP00000462020
MKRKILLDVARTSLQTKVHAELADVLTEVVVDSVLAVRRPGYPIDLFMVEIMEMKHKLGTDTKLIQGLVLDHGARHPDMKKRVEDAFILICNVSLEYEKTEVNSGFFYKTAEEKEKLVKAERKFIEDR

SEQ ID NO: 14465 - protein, 543 aa, Homo sapiens
  Payload ID: 2810
  Gene Symbol: CCT7
  Gene Name: chaperonin containing TCP1, subunit 7 (eta)
  Uniprot ID: Q99832
  ENSP ID: ENSP00000258091
MMPTPVILLKEGTDSSQGIPQLVSNISACQVIAEAVRTTLGPRGMDKLIVDGRGKATISNDGATILKLLDVVHPAAKTLVDIAKSQDAEVGDGTTSVTLLAAEFLKQVKPYVEEGLHPQIIIRAFRTATQLAVNKIKEIAVTVKKADKVEQRKLLEKCAMTALSSKLISQQKAFFAKMVVDAVMMLDDLLQLKMIGIKKVQGGALEDSQLVAGVAFKKTFSYAGFEMQPKKYHNPKIALLNVELELKAEKDNAEIRVHTVEDYQAIVDAEWNILYDKLEKIHHSGAKVVLSKLPIGDVATQYFADRDMFCAGRVPEEDLKRTMMACGGSIQTSVNALSADVLGRCQVFEETQIGGERYNFFTGCPKAKTCTFILRGGAEQFMEETERSLHDAIMIVRRAIKNDSVVAGGGAIEMELSKYLRDYSRTIPGKQQLLIGAYAKALEIIPRQLCDNAGFDATNILNKLRARHAQGGTWYGVDINNEDIADNFEAFVWEPAMVRINALTAASEAACLIVSVDETIKNPRSTVDAPTAAGRGRGRGRPH

SEQ ID NO: 14466 - protein, 339 aa, Homo sapiens
  Payload ID: 2810
  Gene Symbol: CCT7
  Gene Name: chaperonin containing TCP1, subunit 7 (eta)
  Uniprot ID: Q99832
  ENSP ID: ENSP00000381456
MMDSQLVAGVAFKKTFSYAGFEMQPKKYHNPKIALLNVELELKAEKDNAEIRVHTVEDYQAIVDAEWNILYDKLEKIHHSGAKVVLSKLPIGDVATQYFADRDMFCAGRVPEEDLKRTMMACGGSIQTSVNALSADVLGRCQVFEETQIGGERYNFFTGCPKAKTCTFILRGGAEQFMEETERSLHDAIMIVRRAIKNDSVVAGGGAIEMELSKYLRDYSRTIPGKQQLLIGAYAKALEIIPRQLCDNAGFDATNILNKLRARHAQGGTWYGVDINNEDIADNFEAFVWEPAMVRINALTAASEAACLIVSVDETIKNPRSTVDAPTAAGRGRGRGRPH

SEQ ID NO: 14467 - protein, 83 aa, Homo sapiens
  Payload ID: 2810
  Gene Symbol: CCT7
  Gene Name: chaperonin containing TCP1, subunit 7 (eta)
  ENSP ID: ENSP00000386978
MMPTPVILLKEGTDSSQGIPQLVSNISACQVIAEAVRTTLGPRGMDKLIVDGRVSEAGETLCGGRFTPPDHHSSFPHSHPAGS

SEQ ID NO: 14468 - protein, 98 aa, Homo sapiens
  Payload ID: 2810
  Gene Symbol: CCT7
  Gene Name: chaperonin containing TCP1, subunit 7 (eta)
  ENSP ID: ENSP00000412996
MDKLIVDGRGKATISNDGATILKLLDVVHPAAKTLVDIAKSQDAEVGDGTTSVTLLAAEFLKQVKPYVEEGLHPQIIIRAFRTATQLAVNKIKEIAVT

SEQ ID NO: 14469 - protein, 499 aa, Homo sapiens
  Payload ID: 2810
  Gene Symbol: CCT7
  Gene Name: chaperonin containing TCP1, subunit 7 (eta)
  Uniprot ID: Q99832
  ENSP ID: ENSP00000437824
MDKLIVDGRGKATISNDGATILKLLDVVHPAAKTLVDIAKSQDAEVGDGTTSVTLLAAEFLKQVKPYVEEGLHPQIIIRAFRTATQLAVNKIKEIAVTVKKADKVEQRKLLEKCAMTALSSKLISQQKAFFAKMVVDAVMMLDDLLQLKMIGIKKVQGGALEDSQLVAGVAFKKTFSYAGFEMQPKKYHNPKIALLNVELELKAEKDNAEIRVHTVEDYQAIVDAEWNILYDKLEKIHHSGAKVVLSKLPIGDVATQYFADRDMFCAGRVPEEDLKRTMMACGGSIQTSVNALSADVLGRCQVFEETQIGGERYNFFTGCPKAKTCTFILRGGAEQFMEETERSLHDAIMIVRRAIKNDSVVAGGGAIEMELSKYLRDYSRTIPGKQQLLIGAYAKALEIIPRQLCDNAGFDATNILNKLRARHAQGGTWYGVDINNEDIADNFEAFVWEPAMVRINALTAASEAACLIVSVDETIKNPRSTVDAPTAAGRGRGRGRPH

SEQ ID NO: 14470 - protein, 456 aa, Homo sapiens
  Payload ID: 2810
  Gene Symbol: CCT7
  Gene Name: chaperonin containing TCP1, subunit 7 (eta)
  Uniprot ID: Q99832
  ENSP ID: ENSP00000442058
MMVGDGTTSVTLLAAEFLKQVKPYVEEGLHPQIIIRAFRTATQLAVNKIKEIAVTVKKADKVEQRKLLEKCAMTALSSKLISQQKAFFAKMVVDAVMMLDDLLQLKMIGIKKVQGGALEDSQLVAGVAFKKTFSYAGFEMQPKKYHNPKIALLNVELELKAEKDNAEIRVHTVEDYQAIVDAEWNILYDKLEKIHHSGAKVVLSKLPIGDVATQYFADRDMFCAGRVPEEDLKRTMMACGGSIQTSVNALSADVLGRCQVFEETQIGGERYNFFTGCPKAKTCTFILRGGAEQFMEETERSLHDAIMIVRRAIKNDSVVAGGGAIEMELSKYLRDYSRTIPGKQQLLIGAYAKALEIIPRQLCDNAGFDATNILNKLRARHAQGGTWYGVDINNEDIADNFEAFVWEPAMVRINALTAASEAACLIVSVDETIKNPRSTVDAPTAAGRGRGRGRPH

SEQ ID NO: 14471 - protein, 83 aa, Homo sapiens [sequence omitted]

SEQ ID NO: 14472 - protein, 548 aa, Homo sapiens
  Payload ID: 2811
  Gene Symbol: CCT8
  Gene Name: chaperonin containing TCP1, subunit 8 (theta)
  Uniprot ID: P50990
  ENSP ID: ENSP00000286788
MALHVPKAPGFAQMLKEGAKHFSGLEEAVYRNIQACKELAQTTRTAYGPNGMNKMVINHLEKLFVTNDAATILRELEVQHPAAKMIVMASHMQEQEVGDGTNFVLVFAGALLELAEELLRIGLSVSEVIEGYEIACRKAHEILPNLVCCSAKNLRDIDEVSSLLRTSIMSKQYGNEVFLAKLIAQACVSIFPDSGHFNVDNIRVCKILGSGISSSSVLHGMVFKKETEGDVTSVKDAKIAVYSCPFDGMITETKGTVLIKTAEELMNFSKGEENLMDAQVKAIADTGANVVVTGGKVADMALHYANKYNIMLVRLNSKWDLRRLCKTVGATALPRLTPPVLEEMGHCDSVYLSEVGDTQVVVFKHEKEDGAISTIVLRGSTDNLMDDIERAVDDGVNTFKVLTRDKRLVPGGGATEIELAKQITSYGETCPGLEQYAIKKFAEAFEAIPRALAENSGVKANEVISKLYAVHQEGNKNVGLDIEAEVPAVKDMLEAGILDTYLGKYWAIKLATNAAVTVLRVDQIIMAKPAGGPKPPSGKKDWDDDQND

SEQ ID NO: 14473 - protein, 107 aa, Homo sapiens
  Payload ID: 2811
  Gene Symbol: CCT8
  Gene Name: chaperonin containing TCP1, subunit 8 (theta)
  ENSP ID: ENSP00000407748
  MOD_RES (1)..(1): Any amino acid
XEAFEAIPRALAENSGVKANEVISKLYAVHQEGNKNVGLDIEAEVPAVKDMLEAGILDTYLGKYWAIKLATNAAVTVLRVDQIIMAKPAGGPKPPSGKKDWDDDQND

SEQ ID NO: 14474 - protein, 323 aa, Homo sapiens
  Payload ID: 2811
  Gene Symbol: CCT8
  Gene Name: chaperonin containing TCP1, subunit 8 (theta)
  ENSP ID: ENSP00000416832
  MOD_RES (1)..(1): Any amino acid
XGFAQMLKEGAKHFSGLEEAVYRNIQACKELAQTTRTAYGPNGMNKMVINHLEKLFVTNDAATILRELEVQHPAAKMIVMASHMQEQEVGDGTNFVLVFAGALLELAEELLRIGLSVSEVIEGYEIACRKAHEILPNLVCCSAKNLRDIDEVSSLLRTSIMSKQYGNEVFLAKLIAQACVSIFPDSGHFNVDNIRVCKILGTVLIKTAEELMNFSKGEENLMDAQVKAIADTGANVVVTGGKVADMALHYANKYNIMLVRLNSKWDLRRLCKTVGATALPRLTPPVLEEMGHCDSVYLSEVGDTQVVVFKHEKEDGAISTIVL

SEQ ID NO: 14475 - protein, 475 aa, Homo sapiens
  Payload ID: 2811
  Gene Symbol: CCT8
  Gene Name: chaperonin containing TCP1, subunit 8 (theta)
  Uniprot ID: P50990
  ENSP ID: ENSP00000442730
MDQMVQHPAAKMIVMASHMQEQEVGDGTNFVLVFAGALLELAEELLRIGLSVSEVIEGYEIACRKAHEILPNLVCCSAKNLRDIDEVSSLLRTSIMSKQYGNEVFLAKLIAQACVSIFPDSGHFNVDNIRVCKILGSGISSSSVLHGMVFKKETEGDVTSVKDAKIAVYSCPFDGMITETKGTVLIKTAEELMNFSKGEENLMDAQVKAIADTGANVVVTGGKVADMALHYANKYNIMLVRLNSKWDLRRLCKTVGATALPRLTPPVLEEMGHCDSVYLSEVGDTQVVVFKHEKEDGAISTIVLRGSTDNLMDDIERAVDDGVNTFKVLTRDKRLVPGGGATEIELAKQITSYGETCPGLEQYAIKKFAEAFEAIPRALAENSGVKANEVISKLYAVHQEGNKNVGLDIEAEVPAVKDMLEAGILDTYLGKYWAIKLATNAAVTVLRVDQIIMAKPAGGPKPPSGKKDWDDDQND

SEQ ID NO: 14476 - protein, 529 aa, Homo sapiens
  Payload ID: 2811
  Gene Symbol: CCT8
  Gene Name: chaperonin containing TCP1, subunit 8 (theta)
  Uniprot ID: P50990
  ENSP ID: ENSP00000486921
MHFSGLEEAVYRNIQACKELAQTTRTAYGPNGMNKMVINHLEKLFVTNDAATILRELEVQHPAAKMIVMASHMQEQEVGDGTNFVLVFAGALLELAEELLRIGLSVSEVIEGYEIACRKAHEILPNLVCCSAKNLRDIDEVSSLLRTSIMSKQYGNEVFLAKLIAQACVSIFPDSGHFNVDNIRVCKILGSGISSSSVLHGMVFKKETEGDVTSVKDAKIAVYSCPFDGMITETKGTVLIKTAEELMNFSKGEENLMDAQVKAIADTGANVVVTGGKVADMALHYANKYNIMLVRLNSKWDLRRLCKTVGATALPRLTPPVLEEMGHCDSVYLSEVGDTQVVVFKHEKEDGAISTIVLRGSTDNLMDDIERAVDDGVNTFKVLTRDKRLVPGGGATEIELAKQITSYGETCPGLEQYAIKKFAEAFEAIPRALAENSGVKANEVISKLYAVHQEGNKNVGLDIEAEVPAVKDMLEAGILDTYLGKYWAIKLATNAAVTVLRVDQIIMAKPAGGPKPPSGKKDWDDDQND

SEQ ID NO: 14477 - protein, 557 aa, Homo sapiens
  Payload ID: 2812
  Gene Symbol: CCT8L2
  Gene Name: chaperonin containing TCP1, subunit 8 (theta)-like 2
  Uniprot ID: Q96SF2
  ENSP ID: ENSP00000353048
MDSTVPSALELPQRLALNPRESPRSPEEEEPHLLSSLAAVQTLASVIRPCYGPHGRQKFLVTMKGETVCTGCATAILRALELEHPAAWLLREAGQTQAENSGDGTAFVVLLTEALLEQAEQLLKAGLPRPQLREAYATATAEVLATLPSLAIQSLGPLEDPSWALHSVMNTHTLSPMDHLTKLVAHACWAIKELDGSFKPERVGVCALPGGTLEDSCLLPGLAISGKLCGQMATVLSGARVALFACPFGPAHPNAPATARLSSPADLAQFSKGSDQLLEKQVGQLAAAGINVAVVLGEVDEETLTLADKYGIVVIQARSWMEIIYLSEVLDTPLLPRLLPPQRPGKCQRVYRQELGDGLAVVFEWECTGTPALTVVLRGATTQGLRSAEQAVYHGIDAYFQLCQDPRLIPGAGATEMALAKMLSDKGSRLEGPSGPAFLAFAWALKYLPKTLAENAGLAVSDVMAEMSGVHQGGNLLMGVGTEGIINVAQEGVWDTLIVKAQGFRAVAEVVLQLVTVDEIVVAKKSPTHQEIWNPDSKKTKKHPPPVETKKILGLNN

SEQ ID NO: 14478 - protein, 142 aa, Homo sapiens
  Payload ID: 2813
  Gene Symbol: CLC
  Gene Name: Charcot-Leyden crystal galectin
  Uniprot ID: Q05315
  ENSP ID: ENSP00000221804
MSLLPVPYTEAASLSTGSTVTIKGRPLACFLNEPYLQVDFHTEMKEESDIVFHFQVCFGRRVVMNSREYGAWKQQVESKNMPFQDGQEFELSISVLPDKYQVMVNGQSSYTFDHRIKPEAVKMVQVWRDISLTKFNVSYLKR

SEQ ID NO: 14479 - protein, 196 aa, Homo sapiens
  Payload ID: 2814
  Gene Symbol: CHMP1A
  Gene Name: charged multivesicular body protein 1A
  Uniprot ID: Q9HD42
  ENSP ID: ENSP00000380998
MDDTLFQLKFTAKQLEKLAKKAEKDSKAEQAKVKKALLQKNVECARVYAENAIRKKNEGVNWLRMASRVDAVASKVQTAVTMKGVTKNMAQVTKALDKALSTMDLQKVSSVMDRFEQQVQNLDVHTSVMEDSMSSATTLTTPQEQVDSLIMQIAEENGLEVLDQLSQLPEGASAVGESSVRSQEDQLSRRLAALRN

SEQ ID NO: 14480 - protein, 132 aa, Homo sapiens
  Payload ID: 2814
  Gene Symbol: CHMP1A
  Gene Name: charged multivesicular body protein 1A
  ENSP ID: ENSP00000442120
MASRVDAVASKVQTAVTMKGVTKNMAQVTKALDKALSTMDLQKVSSVMDRFEQQVQNLDVHTSVMEDSMSSATTLTTPQEQVDSLIMQIAEENGLEVLDQLSQLPEGASAVGESSVRSQEDQLSRRLAALRN

SEQ ID NO: 14481 - protein, 181 aa, Homo sapiens
  Payload ID: 2814
  Gene Symbol: CHMP1A
  Gene Name: charged multivesicular body protein 1A
  ENSP ID: ENSP00000447899
MDDTLFQLKFTAKQLEKLAKKAEKDSKAEQAKVKKALLQKNVECARVYAENAIRKKNEGVNWLRMASRVDAVASKVQTAVTMKGVTKNMAQVTKALDKALSTMDLQKVSSVMDRFEQQVQNLDVHTSVCGPYPWGCGLGTRSVCGQLIGRGGSQADVLSLHTCGCSLTSPSILCAGSLPGP

SEQ ID NO: 14482 - protein, 187 aa, Homo sapiens
  Payload ID: 2814
  Gene Symbol: CHMP1A
  Gene Name: charged multivesicular body protein 1A
  ENSP ID: ENSP00000449243
MDDTLFQLKFTAKQLEKLAKKAEKDSKAEQAKVKKALLQKNVECARVYAENAIRKKNEGVNWLRMASRVDAVASKVTKNMAQVTKALDKALSTMDLQKVSSVMDRFEQQVQNLDVHTSVMEDSMSSATTLTTPQEQVDSLIMQIAEENGLEVLDQLSQLPEGASAVGESSVRSQEDQLSRRLAALRN

SEQ ID NO: 14483 - protein, 199 aa, Homo sapiens
  Payload ID: 2815
  Gene Symbol: CHMP1B
  Gene Name: charged multivesicular body protein 1B
  Uniprot ID: Q7LBR1
  ENSP ID: ENSP00000432279
MSNMEKHLFNLKFAAKELSRSAKKCDKEEKAEKAKIKKAIQKGNMEVARIHAENAIRQKNQAVNFLRMSARVDAVAARVQTAVTMGKVTKSMAGVVKSMDATLKTMNLEKISALMDKFEHQFETLDVQTQQMEDTMSSTTTLTTPQNQVDMLLQEMADEAGLDLNMELPQGQTGSVGTSVASAEQDELSQRLARLRDQV

SEQ ID NO: 14484 - protein, 222 aa, Homo sapiens
  Payload ID: 2816
  Gene Symbol: CHMP2A
  Gene Name: charged multivesicular body protein 2A
  Uniprot ID: O43633
  ENSP ID: ENSP00000310440
MDLLFGRRKTPEELLRQNQRALNRAMRELDRERQKLETQEKKIIADIKKMAKQGQMDAVRIMAKDLVRTRRYVRKFVLMRANIQAVSLKIQTLKSNNSMAQAMKGVTKAMGTMNRQLKLPQIQKIMMEFERQAEIMDMKEEMMNDAIDDAMGDEEDEEESDAVVSQVLDELGLSLTDELSNLPSTGGSLSVAAGGKKAEAAASALADADADLEERLKNLRRD

SEQ ID NO: 14485 - protein, 222 aa, Homo sapiens; identical to SEQ ID NO: 14484
  Payload ID: 2816
  Gene Symbol: CHMP2A
  Gene Name: charged multivesicular body protein 2A
  Uniprot ID: O43633
  ENSP ID: ENSP00000469240

SEQ ID NO: 14486 - protein, 55 aa, Homo sapiens
  Payload ID: 2816
  Gene Symbol: CHMP2A
  Gene Name: charged multivesicular body protein 2A
  ENSP ID: ENSP00000469453
MDLLFGRRKTPEELLRQNQRALNRAMRELDRERQKLETQEKKIIADIKKMAKQGQ

SEQ ID NO: 14487 - protein, 159 aa, Homo sapiens
  Payload ID: 2816
  Gene Symbol: CHMP2A
  Gene Name: charged multivesicular body protein 2A
  ENSP ID: ENSP00000471961
MDLLFGRRKTPEELLRQNQRALNRAMRELDRERQKLETQEKKIIADIKKMAKQGQMDAVRIMAKDLVRTRRYVRKFVLMRANIQAVSLKIQTLKSNNSMAQAMKGVTKAMGTMNRQLKLPQIQKIMMEFERQAEIMDMKEEMMNDAIDDAMGDEEDEEE

SEQ ID NO: 14488 - protein, 227 aa, Homo sapiens
  Payload ID: 2816
  Gene Symbol: CHMP2A
  Gene Name: charged multivesicular body protein 2A
  ENSP ID: ENSP00000472097
  MOD_RES (1)..(1): Any amino acid
XEKKIIADIKKMAKQGQMDAVRIMAKDLVRTRRYVRKFVLMRANIQAVSLKIQTLKSNNSMAQAMKGVTKAMGTMNRQLKLPQIQKIMMEFERQAEIMDMKEEMMNDAIDDAMGDEEDEEESDAVVSQVLDELGLSLTDELSSECSKSWTPFPTQGPATAPSPPFPCITPLRCLTPPAQTPTFSADLPSTGGSLSVAAGGKKAEAAASALADADADLEERLKNLRRD

SEQ ID NO: 14489 - protein, 222 aa, Homo sapiens; identical to SEQ ID NO: 14484
  Payload ID: 2816
  Gene Symbol: CHMP2A
  Gene Name: charged multivesicular body protein 2A
  Uniprot ID: O43633
  ENSP ID: ENSP00000472680

SEQ ID NO: 14490 - protein, 213 aa, Homo sapiens
  Payload ID: 2817
  Gene Symbol: CHMP2B
  Gene Name: charged multivesicular body protein 2B
  Uniprot ID: Q9UQN3
  ENSP ID: ENSP00000263780
MASLFKKKTVDDVIKEQNRELRGTQRAIIRDRAALEKQEKQLELEIKKMAKIGNKEACKVLAKQLVHLRKQKTRTFAVSSKVTSMSTQTKVMNSQMKMAGAMSTTAKTMQAVNKKMDPQKTLQTMQNFQKENMKMEMTEEMINDTLDDIFDGSDDEEESQDIVNQVLDEIGIEISGKMAKAPSAARSLPSASTSKATISDEEIERQLKALGVD

SEQ ID NO: 14491 - protein, 183 aa, Homo sapiens
  Payload ID: 2817
  Gene Symbol: CHMP2B
  Gene Name: charged multivesicular body protein 2B
  ENSP ID: ENSP00000418920
MASLFKKKTVDDVIKEQNRELRGTQRAIIRDRAALEKQEKQLELEIKKMAKIGNKEACKVLAKQLVHLRKQKTRTFATMQAVNKKMDPQKTLQTMQNFQKENMKMEMTEEMINDTLDDIFDGSDDEEESQDIVNQVLDEIGIEISGKMAKAPSAARSLPSASTSKATISDEEIERQLKALGVD

SEQ ID NO: 14492 - protein, 172 aa, Homo sapiens
  Payload ID: 2817
  Gene Symbol: CHMP2B
  Gene Name: charged multivesicular body protein 2B
  Uniprot ID: Q9UQN3
  ENSP ID: ENSP00000419998
MELEIKKMAKIGNKEACKVLAKQLVHLRKQKTRTFAVSSKVTSMSTQTKVMNSQMKMAGAMSTTAKTMQAVNKKMDPQKTLQTMQNFQKENMKMEMTEEMINDTLDDIFDGSDDEEESQDIVNQVLDEIGIEISGKMAKAPSAARSLPSASTSKATISDEEIERQLKALGVD

SEQ ID NO: 14493 - protein, 179 aa, Homo sapiens
  Payload ID: 2817
  Gene Symbol: CHMP2B
  Gene Name: charged multivesicular body protein 2B
  ENSP ID: ENSP00000480032
MISAQRNHHLPDSSDSSTSAYRVARITDVIKEQNRELRGTQRAIIRDRAALEKQEKQLELEIKKMAKIGNKEACKVLAKQLVHLRKQKTRTFAVSSKVTSMSTQTKVMNSQMKMAGAMSTTAKTMQAVNKKMDPQKTLQTMQNFQKENMKMEMTEEMINDTLDDIFDGSDDEEESQDIV

SEQ ID NO: 14494 - protein, 222 aa, Homo sapiens
  Payload ID: 2818
  Gene Symbol: CHMP3
  Gene Name: charged multivesicular body protein 3
  Uniprot ID: Q9Y3E7
  ENSP ID: ENSP00000263856
MGLFGKTQEKPPKELVNEWSLKIRKEMRVVDRQIRDIQREEEKVKRSVKDAAKKGQKDVCIVLAKEMIRSRKAVSKLYASKAHMNSVLMGMKNQLAVLRVAGSLQKSTEVMKAMQSLVKIPEIQATMRELSKEMMKAGIIEEMLEDTFESMDDQEEMEEEAEMEIDRILFEITAGALGKAPSKVTDALPEPEPPGAMAASEDEEEEEEALEAMQSRLATLRS

SEQ ID NO: 14495 - protein, 156 aa, Homo sapiens
  Payload ID: 2818
  Gene Symbol: CHMP3
  Gene Name: charged multivesicular body protein 3
  Uniprot ID: Q9Y3E7
  ENSP ID: ENSP00000386590
MIRSRKAVSKLYASKAHMNSVLMGMKNQLAVLRVAGSLQKSTEVMKAMQSLVKIPEIQATMRELSKEMMKAGIIEEMLEDTFESMDDQEEMEEEAEMEIDRILFEITAGALGKAPSKVTDALPEPEPPGAMAASEDEEEEEEALEAMQSRLATLRS

SEQ ID NO: 14496 - protein, 182 aa, Homo sapiens
  Payload ID: 2818
  Gene Symbol: CHMP3
  Gene Name: charged multivesicular body protein 3
  Uniprot ID: Q9Y3E7
  ENSP ID: ENSP00000387045
MGLFGKTQEKPPKELVNEWSLKIRKEMRVVDRQIRDIQREEEKVKRSVKDAAKKGQKDVCIVLAKEMIRSRKAMQSLVKIPEIQATMRELSKEMMKAGIIEEMLEDTFESMDDQEEMEEEAEMEIDRILFEITAGALGKAPSKVTDALPEPEPPGAMAASEDEEEEEEALEAMQSRLATLRS

SEQ ID NO: 14497 - protein, 265 aa, Homo sapiens
  Payload ID: 2819
  Gene Symbol: CHMP4A
  Gene Name: charged multivesicular body protein 4A
  Uniprot ID: Q9BY43
  ENSP ID: ENSP00000324205
MSRRRPEDGLGKAGPCVMRHHPPRSKAEVWRTLRGGGGRGELAMSGLGRLFGKGKKEKGPTPEEAIQKLKETEKILIKKQEFLEQKIQQELQTAKKYGTKNKRAALQALRRKKRFEQQLAQTDGTLSTLEFQREAIENATTNAEVLRTMELAAQSMKKAYQDMDIDKVDELMTDITEQQEVAQQISDAISRPMGFGDDVDEDELLEELEELEQEELAQELLNVGDKEEEPSVKLPSVPSTHLPAGPAPKVDEDEEALKQLAEWVS

SEQ ID NO: 14498 - protein, 213 aa, Homo sapiens
  Payload ID: 2819
  Gene Symbol: CHMP4A
  Gene Name: charged multivesicular body protein 4A
  ENSP ID: ENSP00000432575
MHSSLGDRGRLHSQKKKKKLGKKEKGPTPEEAIQKLKETEKILIKKQEFLEQKIQQELQTAKKYGTKNKRAALQALRRKKRFEQQLAQTDGTLSTLEFQREAIENATTNAEVLRTMELAAQSMKKAYQDMDIDKVDELMTDITEQQEVAQQISDAISRPMGFGDDVDEDELLEELEELEQEELAQELLNVGDKEEEPSVKLPSVPSTHLPAGP

SEQ ID NO: 14499 - protein, 166 aa, Homo sapiens
  Payload ID: 2819
  Gene Symbol: CHMP4A
  Gene Name: charged multivesicular body protein 4A
  ENSP ID: ENSP00000436224
MSRRRPEDGLGKAGPCVMRHHPPRSKAEVWRTLRGGGGRGELAMSGLGRLFGKGKKEKGPTPEEAIQKLKETEKILIKKQEFLEQKIQQELQTAKKYGTKNKRAALQALRRKKRFEQQLAQTDGTLSTLEFQREAIENATTNAEVLRTMELAAQSMKKAYQDMWGH

SEQ ID NO: 14500 - protein, 61 aa, Homo sapiens
  Payload ID: 2819
  Gene Symbol: CHMP4A
  Gene Name: charged multivesicular body protein 4A
  ENSP ID: ENSP00000448869
  MOD_RES (1)..(1): Any amino acid
XLGRLFGKGKKEKGPTPEEAIQKLKETEKILIKKQEFLEQKIQQELQTAKKYGTKNKRVSA

SEQ ID NO: 14501 - protein, 117 aa, Homo sapiens
  Payload ID: 2819
  Gene Symbol: CHMP4A
  Gene Name: charged multivesicular body protein 4A
  ENSP ID: ENSP00000449757
MELAAQSMKKAYQDMDIDKVDELMTDITEQQEVAQQISDAISRPMGFGDDVDEDELLEELEELEQEELAQELLNVGDKEEEPSVKLPSVPSTHLPAGPAPKVDEDEEALKQLAEWVS

SEQ ID NO: 14502 - protein, 222 aa, Homo sapiens
  Payload ID: 2819
  Gene Symbol: CHMP4A
  Gene Name: charged multivesicular body protein 4A
  Uniprot ID: Q9BY43
  ENSP ID: ENSP00000476412
MSGLGRLFGKGKKEKGPTPEEAIQKLKETEKILIKKQEFLEQKIQQELQTAKKYGTKNKRAALQALRRKKRFEQQLAQTDGTLSTLEFQREAIENATTNAEVLRTMELAAQSMKKAYQDMDIDKVDELMTDITEQQEVAQQISDAISRPMGFGDDVDEDELLEELEELEQEELAQELLNVGDKEEEPSVKLPSVPSTHLPAGPAPKVDEDEEALKQLAEWVS

SEQ ID NO: 14503 - protein, 224 aa, Homo sapiens
  Payload ID: 2820
  Gene Symbol: CHMP4B
  Gene Name: charged multivesicular body protein 4B
  Uniprot ID: Q9H444
  ENSP ID: ENSP00000217402
MSVFGKLFGAGGGKAGKGGPTPQEAIQRLRDTEEMLSKKQEFLEKKIEQELTAAKKHGTKNKRAALQALKRKKRYEKQLAQIDGTLSTIEFQREALENANTNTEVLKNMGYAAKAMKAAHDNMDIDKVDELMQDIADQQELAEEISTAISKPVGFGEEFDEDELMAELEELEQEELDKNLLEISGPETVPLPNVPSIALPSKPAKKKEEEDDDMKELENWAGSM

SEQ ID NO: 14504 - protein, 233 aa, Homo sapiens
  Payload ID: 2821
  Gene Symbol: CHMP4C
  Gene Name: charged multivesicular body protein 4C
  Uniprot ID: Q96CF2
  ENSP ID: ENSP00000297265
MSKLGKFFKGGGSSKSRAAPSPQEALVRLRETEEMLGKKQEYLENRIQREIALAKKHGTQNKRAALQALKRKKRFEKQLTQIDGTLSTIEFQREALENSHTNTEVLRNMGFAAKAMKSVHENMDLNKIDDLMQEITEQQDIAQEISEAFSQRVGFGDDFDEDELMAELEELEQEELNKKMTNIRLPNVPSSSLPAQPNRKPGMSSTARRSRAASSQRAEEEDDDIKQLAAWAT

SEQ ID NO: 14505 - protein, 219 aa, Homo sapiens
  Payload ID: 2822
  Gene Symbol: CHMP5
  Gene Name: charged multivesicular body protein 5
  Uniprot ID: Q9NZZ3
  ENSP ID: ENSP00000223500
MNRLFGKAKPKAPPPSLTDCIGTVDSRAESIDKKISRLDAELVKYKDQIKKMREGPAKNMVKQKALRVLKQKRMYEQQRDNLAQQSFNMEQANYTIQSLKDTKTTVDAMKLGVKEMKKAYKQVKIDQIEDLQDQLEDMMEDANEIQEALSRSYGTPELDEDDLEAELDALGDELLADEDSSYLDEAASAPAIPEGVPTDTKNKDGVLVDEFGLPQIPAS

SEQ ID NO: 14506 - protein, 171 aa, Homo sapiens
  Payload ID: 2822
  Gene Symbol: CHMP5
  Gene Name: charged multivesicular body protein 5
  Uniprot ID: Q9NZZ3
  ENSP ID: ENSP00000442725
MNRLFGKAKPKAPPPSLTDCIGTVDSRAESIDKKISRLDAELVKYKDQIKKMREGPAKNMVKQKALRVLKQKRMYEQQRDNLAQQSFNMEQANYTIQSLKDTKTTVDAMKLGVKEMKKAYKQVKIDQIEDLQDQLEDMMEDANEIQEALSRSYGTPELDEDDLEAGWSSGG

SEQ ID NO: 14507 - protein, 201 aa, Homo sapiens
  Payload ID: 2823
  Gene Symbol: CHMP6
  Gene Name: charged multivesicular body protein 6
  Uniprot ID: Q96FZ7
  ENSP ID: ENSP00000317468
MGNLFGRKKQSRVTEQDKAILQLKQQRDKLRQYQKRIAQQLERERALARQLLRDGRKERAKLLLKKKRYQEQLLDRTENQISSLEAMVQSIEFTQIEMKVMEGLQFGNECLNKMHQVMSIEEVERILDETQEAVEYQRQIDELLAGSFTQEDEDAILEELSAITQEQIELPEVPSEPLPEKIPENVPVKARPRQAELVAAS

SEQ ID NO: 14508 - protein, 113 aa, Homo sapiens
  Payload ID: 2823
  Gene Symbol: CHMP6
  Gene Name: charged multivesicular body protein 6
  ENSP ID: ENSP00000460389
MVQSIEFTQIEMKVMEGLQFGNECLNKMHQVMSIEEVERILDETQEAVEYQRQIDELLAGSFTQEDEDAILEELSAITQEQIELPEVPSEPLPEKIPENVPVKARPRQAELVA

SEQ ID NO: 14509 - protein, 224 aa, Homo sapiens
  Payload ID: 2823
  Gene Symbol: CHMP6
  Gene Name: charged multivesicular body protein 6
  ENSP ID: ENSP00000461098
QLKQQRDKLRQYQKRIAQQLERERALARQLLRDGRKERAKLLLKKKRYQEQLLDRTENQISSLEAMVQSIEFTQIEMKVMEGLQFGNECLNKMHQVMSIEEVERILDETQEAVEYQRQIDELLAGSFTQEDEDAILEELSAITQEQIELPEVPSEPLPEKIPGISMFDSFEWLEFAGEKWILEGNKTECSQAFLGRGQALLPGCLAWGRACLALGLGLGFPGVR

SEQ ID NO: 14510 - protein, 173 aa, Homo sapiens
  Payload ID: 2823
  Gene Symbol: CHMP6
  Gene Name: charged multivesicular body protein 6
  ENSP ID: ENSP00000461238
RERALARQLLRDGRKERAKLLLKKKRYQEQLLDRTENQISSLEAMVQSIEFTQIEMKVMEGLQFGNECLNKMHQVMSIEEVERILDETQEAVEYQRQIDELLAGSFTQEDEDAILEELSAITQEQIELPEVPSEPLPEKIPALPQDGPQLRNCTETRKAKTPIETLSFWQEKL

SEQ ID NO: 14511 - protein, 453 aa, Homo sapiens
  Payload ID: 2824
  Gene Symbol: CHMP7
  Gene Name: charged multivesicular body protein 7
  Uniprot ID: Q8WUX9
  ENSP ID: ENSP00000324491
MWSPEREAEAPAGGDPAGLLPPEWEEDEERMSFLFSAFKRSREVNSTDWDSKMGFWAPLVLSHSRRQGVVRLRLRDLQEAFQRKGSVPLGLATVLQDLLRRGELQRESDFMASVDSSWISWGVGVFLLKPLKWTLSNMLGDNKVPAEEVLVAVELLKEKAEEVYRLYQNSPLSSHPVVALSELSTLCANSCPDERTFYLVLLQLQKEKRVTVLEQNGEKIVKFARGPRAKVSPVNDVDVGVYQLMQSEQLLSRKVESLSQEAERCKEEARRACRAGKKQLALRSLKAKQRTEKRIEALHAKLDTVQGILDRIYASQTDQMVFNAYQAGVGALKLSMKDVTVEKAESLVDQIQELCDTQDEVSQTLAGGVTNGLDFDSEELEKELDILLQDTTKEPLDLPDNPRNRHFTNSVPNPRISDAELEAELEKLSLSEGGLVPSSKSPKRQLEPTLKPL

SEQ ID NO: 14512 - protein, 453 aa, Homo sapiens; identical to SEQ ID NO: 14511
  Payload ID: 2824
  Gene Symbol: CHMP7
  Gene Name: charged multivesicular body protein 7
  Uniprot ID: Q8WUX9
  ENSP ID: ENSP00000380794

SEQ ID NO: 14513 - protein, 163 aa, Homo sapiens
  Payload ID: 2824
  Gene Symbol: CHMP7
  Gene Name: charged multivesicular body protein 7
  Uniprot ID: Q8WUX9
  ENSP ID: ENSP00000427948
MWSPEREAEAPAGGDPAGLLPPEWEEDEERMSFLFSAFKRSREVNSTDWDSKMGFWAPLVLSHSRRQGVVRLRLRDLQEAFQRKGSVPLGLATVLQDLLRKRLRRCIVCIRTRPSPPTPWWPCQSSAPSVLTPAQMRGPSTWCCCSCRRRRGSQSSSRTGRRL

SEQ ID NO: 14514 - protein, 157 aa, Homo sapiens
  Payload ID: 2824
  Gene Symbol: CHMP7
  Gene Name: charged multivesicular body protein 7
  ENSP ID: ENSP00000428233
MWSPEREAEAPAGGDPAGLLPPEWEEDEERMSFLFSAFKRSREVNSTDWDSKMGFWAPLVLSHSRRQGVVRLRLRDLQEAFQRKGSVPLGLATVLQDLLRRGELQRESDFMASVDSSWISWGVGVFLLKPLKWTLSNMLGDNKVPAEEVLVAVELLK

SEQ ID NO: 14515 - protein, 79 aa, Homo sapiens
  Payload ID: 2824
  Gene Symbol: CHMP7
  Gene Name: charged multivesicular body protein 7
  ENSP ID: ENSP00000430321
MWSPEREAEAPAGGDPAGLLPPEWEEDEERMSFLFSAFKRSRESRGAAAGVRLHGQCRQQLDLLGGWGLPAEASQVDSF

SEQ ID NO: 14516 - protein, 209 aa, Homo sapiens
  Payload ID: 2824
  Gene Symbol: CHMP7
  Gene Name: charged multivesicular body protein 7
  ENSP ID: ENSP00000430661
MWSPEREAEAPAGGDPAGLLPPEWEEDEERMSFLFSAFKRSREVNSTDWDSKMGFWAPLVLSHSRRQGVVRLRLRDLQEAFQRKGSVPLGLATVLQDLLRTFPLDWTLILPRMVSNSCTQAILPPQPPKVLRLQALSHCTWPTRLSEMAYSGNRFRSCLKQGTGETVVEEEKAEEVYRLYQNSPLSSHPVVALSELSTLCANSCPDERT

SEQ ID NO: 14517 - protein, 432 aa, Homo sapiens
  Payload ID: 2825
  Gene Symbol: CHEK1
  Gene Name: checkpoint kinase 1
  ENSP ID: ENSP00000278916
MAVPFVEDWDLVQTLGEGAYGEVQLAVNRVTEEAVAVKIVDMKRAVDCPENIKKEICINKMLNHENVVKFYGHRREGNIQYLFLEYCSGGELFDRIEPDIGMPEPDAQRFFHQLMAGVVYLHGIGITHRDIKPENLLLDERDNLKISDFGLATVFRYNNRERLLNKMCGTLPYVAPELLKRREFHAEPVDVWSCGIVLTAMLAGELPWDQPSDSCQEYSDWKEKKTYLNPWKKIDSAPLALLHKILVENPSARITIPDIKKDRWYNKPLKKGAKRPRVTSGGVSESPSGFSKHIQSNLDFSPVNSASSEENVKYSSSQPEPRTGLSLWDTSPSYIDKLVQGISFSQPTCPDHMLLNSQLLGTPGSSQVTISTTDRRNNKLIFKVNLLEMDDKILVDFRLSKGDGLEFKRHFLKIKGKLIDIVSSQKIWLPAT

SEQ ID NO: 14518 - protein, 476 aa, Homo sapiens
  Payload ID: 2825
  Gene Symbol: CHEK1
  Gene Name: checkpoint kinase 1
  Uniprot ID: O14757
  ENSP ID: ENSP00000388648
MAVPFVEDWDLVQTLGEGAYGEVQLAVNRVTEEAVAVKIVDMKRAVDCPENIKKEICINKMLNHENVVKFYGHRREGNIQYLFLEYCSGGELFDRIEPDIGMPEPDAQRFFHQLMAGVVYLHGIGITHRDIKPENLLLDERDNLKISDFGLATVFRYNNRERLLNKMCGTLPYVAPELLKRREFHAEPVDVWSCGIVLTAMLAGELPWDQPSDSCQEYSDWKEKKTYLNPWKKIDSAPLALLHKILVENPSARITIPDIKKDRWYNKPLKKGAKRPRVTSGGVSESPSGFSKHIQSNLDFSPVNSASSEENVKYSSSQPEPRTGLSLWDTSPSYIDKLVQGISFSQPTCPDHMLLNSQLLGTPGSSQNPWQRLVKRMTRFFTKLDADKSYQCLKETCEKLGYQWKKSCMNQVTISTTDRRNNKLIFKVNLLEMDDKILVDFRLSKGDGLEFKRHFLKIKGKLIDIVSSQKIWLPAT

SEQ ID NO: 14519 - protein, 492 aa, Homo sapiens
  Payload ID: 2825
  Gene Symbol: CHEK1
  Gene Name: checkpoint kinase 1
  ENSP ID: ENSP00000391090
MRSAVLKSLQPGSLPDCKAALGGSGNISTSPFWSRRHSEGQDTGTRAVLLYGAGARVCGSVTPSSFGGKSAAFGFLQWWAKDSPPRCSVESWQCPLWKTGTWCKPWEKVPMEKPDIGMPEPDAQRFFHQLMAGVVYLHGIGITHRDIKPENLLLDERDNLKISDFGLATVFRYNNRERLLNKMCGTLPYVAPELLKRREFHAEPVDVWSCGIVLTAMLAGELPWDQPSDSCQEYSDWKEKKTYLNPWKKIDSAPLALLHKILVENPSARITIPDIKKDRWYNKPLKKGAKRPRVTSGGVSESPSGFSKHIQSNLDFSPVNSASSEENVKYSSSQPEPRTGLSLWDTSPSYIDKLVQGISFSQPTCPDHMLLNSQLLGTPGSSQNPWQRLVKRMTRFFTKLDADKSYQCLKETCEKLGYQWKKSCMNQVTISTTDRRNNKLIFKVNLLEMDDKILVDFRLSKGDGLEFKRHFLKIKGKLIDIVSSQKIWLPAT

SEQ ID NO: 14520 - protein, 476 aa, Homo sapiens; identical to SEQ ID NO: 14518
  Payload ID: 2825
  Gene Symbol: CHEK1
  Gene Name: checkpoint kinase 1
  Uniprot ID: O14757
  ENSP ID: ENSP00000412504

SEQ ID NO: 14521 - protein, 204 aa, Homo sapiens
  Payload ID: 2825
  Gene Symbol: CHEK1
  Gene Name: checkpoint kinase 1
  ENSP ID: ENSP00000431525
MAVPFVEDWDLVQTLGEGAYGEVQLAVNRVTEEAVAVKIVDMKRAVDCPENIKKEICINKMLNHENVVKFYGHRREGNIQYLFLEYCSGGELFDRIEPDIGMPEPDAQRFFHQLMAGVVYLHGIGITHRDIKPENLLLDERDNLKISDFGLATVFRYNNRERLLNKMCGTLPYVAPELLKRREFHAEPVDVWSCGIVLTAMLAG

SEQ ID NO: 14522 - protein, 170 aa, Homo sapiens
  Payload ID: 2825
  Gene Symbol: CHEK1
  Gene Name: checkpoint kinase 1
  ENSP ID: ENSP00000431815
MAVPFVEDWDLVQTLGEGAYGEVQLAVNRVTEEAVAVKIVDMKRAVDCPENIKKEICINKMLNHENVVKFYGHRREGNIQYLFLEYCSGGELFDRIEPDIGMPEPDAQRFFHQLMAGVVYLHGIGITHRDIKPENLLLDERDNLKISDFGLATVFRYNNRERLLNKMCGT

SEQ ID NO: 14523 - protein, 127 aa, Homo sapiens
  Payload ID: 2825
  Gene Symbol: CHEK1
  Gene Name: checkpoint kinase 1
  ENSP ID: ENSP00000432470
MAVPFVEDWDLVQTLGEGAYGEVQLAVNRVTEEAVAVKIVDMKRAVDCPENIKKEICINKMLNHENVVKFYGHRREGNIQYLFLEYCSGGELFDRIEPDIGMPEPDAQRFFHQLMAGVVYLHGIGIT

SEQ ID NO: 14524 - protein, 476 aa, Homo sapiens; identical to SEQ ID NO: 14518
  Payload ID: 2825
  Gene Symbol: CHEK1
  Gene Name: checkpoint kinase 1
  Uniprot ID: O14757
  ENSP ID: ENSP00000432890

SEQ ID NO: 14525 - protein, 42 aa, Homo sapiens
  Payload ID: 2825
  Gene Symbol: CHEK1
  Gene Name: checkpoint kinase 1
  ENSP ID: ENSP00000433103
MAVPFVEDWDLVQTLGEGAYGEVQLAVNRVTEEAVAVKIVDM

SEQ ID NO: 14526 - protein, 117 aa, Homo sapiens
  Payload ID: 2825
  Gene Symbol: CHEK1
  Gene Name: checkpoint kinase 1
  ENSP ID: ENSP00000434141
MRSAVLKSLQPGSLPDCKAALGGSGNISTSPFWSRRHSEGQDTGTRAVLLYGAGARVCGSVTPSSFGGKSAAFGFLQWWAKDSPPRCSVESWQCPLWKTGTWCKPWEKVPMEKFNLL

SEQ ID NO: 14527 - protein, 192 aa, Homo sapiens
  Payload ID: 2825
  Gene Symbol: CHEK1
  Gene Name: checkpoint kinase 1
  ENSP ID: ENSP00000434646
MAVPFVEDWDLVQTLGEEPDIGMPEPDAQRFFHQLMAGVVYLHGIGITHRDIKPENLLLDERDNLKISDFGLATVFRYNNRERLLNKMCGTLPYVAPELLKRREFHAEPVDVWSCGIVLTAMLAGELPWDQPSDSCQEYSDWKEKKTYLNPWKKIDSAPLALLHKILVENPSARITIPDIKKDRWYNKPLKK

SEQ ID NO: 14528 - protein, 476 aa, Homo sapiens; identical to SEQ ID NO: 14518
  Payload ID: 2825
  Gene Symbol: CHEK1
  Gene Name: checkpoint kinase 1
  Uniprot ID: O14757
  ENSP ID: ENSP00000435371

SEQ ID NO: 14529 - protein, 382 aa, Homo sapiens
  Payload ID: 2825
  Gene Symbol: CHEK1
  Gene Name: checkpoint kinase 1
  Uniprot ID: O14757
  ENSP ID: ENSP00000442317
MEKPDIGMPEPDAQRFFHQLMAGVVYLHGIGITHRDIKPENLLLDERDNLKISDFGLATVFRYNNRERLLNKMCGTLPYVAPELLKRREFHAEPVDVWSCGIVLTAMLAGELPWDQPSDSCQEYSDWKEKKTYLNPWKKIDSAPLALLHKILVENPSARITIPDIKKDRWYNKPLKKGAKRPRVTSGGVSESPSGFSKHIQSNLDFSPVNSASSEENVKYSSSQPEPRTGLSLWDTSPSYIDKLVQGISFSQPTCPDHMLLNSQLLGTPGSSQNPWQRLVKRMTRFFTKLDADKSYQCLKETCEKLGYQWKKSCMNQVTISTTDRRNNKLIFKVNLLEMDDKILVDFRLSKGDGLEFKRHFLKIKGKLIDIVSSQKIWLPAT

SEQ ID NO: 14530 - protein, 110 aa, Homo sapiens
  Payload ID: 2825
  Gene Symbol: CHEK1
  Gene Name: checkpoint kinase 1
  ENSP ID: ENSP00000477588
MKRAVDCPENIKKEICINKMLNHENVVKFYGHRREGNIQYLFLEYCSGGELFDRIEPDIGMPEPDAQRFFHQLMAGVVYLHGIGITHRDIKPENLLLDERDNLKISDFGL

SEQ ID NO: 14531 - protein, 89 aa, Homo sapiens
  Payload ID: 2825
  Gene Symbol: CHEK1
  Gene Name: checkpoint kinase 1
  ENSP ID: ENSP00000481614
KSYQCLKETCEKLGYQWKKSCMNQVTISTTDRRNNKLIFKVNLLEMDDKILVDFRLSKGDGLEFKRHFLKIKGKLIDIVSSQKIWLPAT

SEQ ID NO: 14532 - protein, 442 aa, Homo sapiens
  Payload ID: 2825
  Gene Symbol: CHEK1
  Gene Name: checkpoint kinase 1
  Uniprot ID: O14757
  ENSP ID: ENSP00000481616
MAVPFVEDWDLVQTLGEGAYGEVQLAVNRVTEEAVAVKIVDMKRAVDCPENIKKEICINKMLNHENVVKFYGHRREGNIQYLFLEYCSGGELFDRIEPDIGMPEPDAQRFFHQLMAGVVYLHGIGITHRDIKPENLLLDERDNLKISDFGLATVFRYNNRERLLNKMCGTLPYVAPELLKRREFHAEPVDVWSCGIVLTAMLAGELPWDQPSDSCQEYSDWKEKKTYLNPWKKIDSAPLALLHKILVENPSARITIPDIKKDRWYNKPLKKGAKRPRVTSGGVSESPSGFSKHIQSNLDFSPVNSASSEENVKYSSSQPEPRTGLSLWDTSPSYIDKLVQGISFSQPTCPDHMLLNSQLLGTPGSSQNPWQRLVKRMTRFFTKLDADKSYQCLKETCEKLGYQWKKSCMNQGDGLEFKRHFLKIKGKLIDIVSSQKIWLPAT

SEQ ID NO: 14533 - protein, 514 aa, Homo sapiens
  Payload ID: 2826
  Gene Symbol: CHEK2
  Gene Name: checkpoint kinase 2
  Uniprot ID: O96017
  ENSP ID: ENSP00000329012
MSRESDVEAQQSHGSSACSQPHGSVTQSQGSSSQSQGISSSSTSTMPNSSQSSHSSSGTLSSLETVSTQELYSIPEDQEPEDQEPEEPTPAPWARLWALQDGFANLECVNDNYWFGRDKSCEYCFDEPLLKRTDKYRTYSKKHFRIFREVGPKNSYIAYIEDHSGNGTFVNTELVGKGKRRPLNNNSEIALSLSRNKVFVFFDLTVDDQSVYPKALRDEYIMSKTLGSGACGEVKLAFERKTCKKVAIKIISKRKFAIGSAREADPALNVETEIEILKKLNHPCIIKIKNFFDAEDYYIVLELMEGGELFDKVVGNKRLKEATCKLYFYQMLLAVQITDFGHSKILGETSLMRTLCGTPTYLAPEVLVSVGTAGYNRAVDCWSLGVILFICLSGYPPFSEHRTQVSLKDQITSGKYNFIPEVWAEVSEKALDLVKKLLVVDPKARFTTEEALRHPWLQDEDMKRKFQDLLSEENESTALPQVLAQPSTSRKRPREGEAEGAETTKRPAVCAAVL

SEQ ID NO: 14534 - protein, 543 aa, Homo sapiens
  Payload ID: 2826
  Gene Symbol: CHEK2
  Gene Name: checkpoint kinase 2
  Uniprot ID: O96017
  ENSP ID: ENSP00000329178
MSRESDVEAQQSHGSSACSQPHGSVTQSQGSSSQSQGISSSSTSTMPNSSQSSHSSSGTLSSLETVSTQELYSIPEDQEPEDQEPEEPTPAPWARLWALQDGFANLECVNDNYWFGRDKSCEYCFDEPLLKRTDKYRTYSKKHFRIFREVGPKNSYIAYIEDHSGNGTFVNTELVGKGKRRPLNNNSEIALSLSRNKVFVFFDLTVDDQSVYPKALRDEYIMSKTLGSGACGEVKLAFERKTCKKVAIKIISKRKFAIGSAREADPALNVETEIEILKKLNHPCIIKIKNFFDAEDYYIVLELMEGGELFDKVVGNKRLKEATCKLYFYQMLLAVQYLHENGIIHRDLKPENVLLSSQEEDCLIKITDFGHSKILGETSLMRTLCGTPTYLAPEVLVSVGTAGYNRAVDCWSLGVILFICLSGYPPFSEHRTQVSLKDQITSGKYNFIPEVWAEVSEKALDLVKKLLVVDPKARFTTEEALRHPWLQDEDMKRKFQDLLSEENESTALPQVLAQPSTSRKRPREGEAEGAETTKRPAVCAAVL

SEQ ID NO: 14535 - protein, 207 aa, Homo sapiens
  Payload ID: 2826
  Gene Symbol: CHEK2
  Gene Name: checkpoint kinase 2
  ENSP ID: ENSP00000372006
MSRESDVEAQQSHGSSACSQPHGSVTQSQGSSSQSQGISSSSTSTMPNSSQSSHSSSGTLSSLETVSTQELYSIPEDQEPEDQEPEEPTPAPWARLWALQDGFANLECVNDNYWFGRDKSCEYCFDEPLLKRTDKYRTYSKKHFRIFREVGPKNSYIAYIEDHSGNGTFVNTELVGKGKRRPLNNNSEIALSLSRNKEKILKIYSLS

SEQ ID NO: 14536 - protein, 586 aa, Homo sapiens
  Payload ID: 2826
  Gene Symbol: CHEK2
  Gene Name: checkpoint kinase 2
  Uniprot ID: O96017
  ENSP ID: ENSP00000372023
MSRESDVEAQQSHGSSACSQPHGSVTQSQGSSSQSQGISSSSTSTMPNSSQSSHSSSGTLSSLETVSTQELYSIPEDQEPEDQEPEEPTPAPWARLWALQDGFANLETESGHVTQSDLELLLSSDPPASASQSAGIRGVRHHPRPVCSLKCVNDNYWFGRDKSCEYCFDEPLLKRTDKYRTYSKKHFRIFREVGPKNSYIAYIEDHSGNGTFVNTELVGKGKRRPLNNNSEIALSLSRNKVFVFFDLTVDDQSVYPKALRDEYIMSKTLGSGACGEVKLAFERKTCKKVAIKIISKRKFAIGSAREADPALNVETEIEILKKLNHPCIIKIKNFFDAEDYYIVLELMEGGELFDKVVGNKRLKEATCKLYFYQMLLAVQYLHENGIIHRDLKPENVLLSSQEEDCLIKITDFGHSKILGETSLMRTLCGTPTYLAPEVLVSVGTAGYNRAVDCWSLGVILFICLSGYPPFSEHRTQVSLKDQITSGKYNFIPEVWAEVSEKALDLVKKLLVVDPKARFTTEEALRHPWLQDEDMKRKFQDLLSEENESTALPQVLAQPSTSRKRPREGEAEGAETTKRPAVCAAVL

SEQ ID NO: 14537 - protein, 172 aa, Homo sapiens
  Payload ID: 2826
  Gene Symbol: CHEK2
  Gene Name: checkpoint kinase 2
  ENSP ID: ENSP00000381099
MLRLLTSMVVMSRESDVEAQQSHGSSACSQPHGSVTQSQGSSSQSQGISSSSTSTMPNSSQSSHSSSGTLSSLETVSTQELYSIPEDQEPEDQEPEEPTPAPWARLWALQDGFANLECVNDNYWFGRDKSCEYCFDEPLLKRTDKYRTYSKKHFRIFREVGPKNSYIAYIED

SEQ ID NO: 14538 - protein, 514 aa, Homo sapiens; identical to SEQ ID NO: 14533
  Payload ID: 2826
  Gene Symbol: CHEK2
  Gene Name: checkpoint kinase 2
  Uniprot ID: O96017
  ENSP ID: ENSP00000384835

SEQ ID NO: 14539 - protein, 452 aa, Homo sapiens
  Payload ID: 2826
  Gene Symbol: CHEK2
  Gene Name: checkpoint kinase 2
  Uniprot ID: O96017
  ENSP ID: ENSP00000384919
MSRESDVEAQQSHGSSACSQPHGSVTQSQGSSSQSQGISSSSTSTMPNSSQSSHSSSGTLSSLETVSTQELYSIPEDQEPEDQEPEEPTPAPWARLWALQDGFANLVFVFFDLTVDDQSVYPKALRDEYIMSKTLGSGACGEVKLAFERKTCKKVAIKIISKRKFAIGSAREADPALNVETEIEILKKLNHPCIIKIKNFFDAEDYYIVLELMEGGELFDKVVGNKRLKEATCKLYFYQMLLAVQYLHENGIIHRDLKPENVLLSSQEEDCLIKITDFGHSKILGETSLMRTLCGTPTYLAPEVLVSVGTAGYNRAVDCWSLGVILFICLSGYPPFSEHRTQVSLKDQITSGKYNFIPEVWAEVSEKALDLVKKLLVVDPKARFTTEEALRHPWLQDEDMKRKFQDLLSEENESTALPQVLAQPSTSRKRPREGEAEGAETTKRPAVCAAVL

SEQ ID NO: 14540 - protein, 543 aa, Homo sapiens; identical to SEQ ID NO: 14534
  Payload ID: 2826
  Gene Symbol: CHEK2
  Gene Name: checkpoint kinase 2
  Uniprot ID: O96017
  ENSP ID: ENSP00000385747

SEQ ID NO: 14541 - protein, 543 aa, Homo sapiens; identical to SEQ ID NO: 14534
  Payload ID: 2826
  Gene Symbol: CHEK2
  Gene Name: checkpoint kinase 2
  Uniprot ID: O96017
  ENSP ID: ENSP00000386087

SEQ ID NO: 14542 - protein, 45 aa, Homo sapiens
  Payload ID: 2826
  Gene Symbol: CHEK2
  Gene Name: checkpoint kinase 2
  ENSP ID: ENSP00000387451
SSDPPASASQSAGIRGVRHHPRPVCSLIETGFHRVSQDGLHLLTS

SEQ ID NO: 14543 - protein, 121 aa, Homo sapiens
  Payload ID: 2826
  Gene Symbol: CHEK2
  Gene Name: checkpoint kinase 2
  ENSP ID: ENSP00000390244
MSKTLGSGACGEVKLAFERKTCKKVAIKIISKRKFAIGSAREADPALNVETEIEILKKLNHPCIIKIKNFFDAEDYYIVLELMEGGELFDKVVGNKRLKEATCKLYFYQMLLAVQYLHENG

SEQ ID NO: 14544 - protein, 144 aa, Homo sapiens
  Payload ID: 2826
  Gene Symbol: CHEK2
  Gene Name: checkpoint kinase 2
  ENSP ID: ENSP00000394430
  MOD_RES (1)..(1): Any amino acid
XIISKRKFAIGSAREADPALNVETEIEILKKLNHPCIIKIKNFFDAEDYYIVLELMEGGELFDKVVGNKRLKEATCKLYFYQMLLAVQDEDMKRKFQDLLSEENESTALPQVLAQPSTSRKRPREGEAEGAETTKRPAVCAAVL

SEQ ID NO: 14545 - protein, 57 aa, Homo sapiens
  Payload ID: 2826
  Gene Symbol: CHEK2
  Gene Name: checkpoint kinase 2
  ENSP ID: ENSP00000396903
FREVGPKNSYIAYIEDHSGNGTFVNTELVGKGKRRPLNNNSEIALSLSRNKVVPVER

SEQ ID NO: 14546 - protein, 298 aa, Homo sapiens
  Payload ID: 2826
  Gene Symbol: CHEK2
  Gene Name: checkpoint kinase 2
  ENSP ID: ENSP00000397478
MSRESDVEAQQSHGSSACSQPHGSVTQSQGSSSQSQGISSSSTSTMPNSSQSSHSSSGTLSSLETVSTQELYSIPEDQEPEDQEPEEPTPAPWARLWALQDGFANLECVNDNYWFGRDKSCEYCFDEPLLKRTDKYRTYSKKHFRIFREENLSCPYRIWFNGACGEVKLAFERKTCKKVAIKIISKRKFAIGSAREADPALNVETEIEILKKLNHPCIIKIKNFFDAEDYYIVLELMEGGELFDKVVGNKRLKEATCKLYFYQMLLAVQYLHENGIIHRDLKPENVLLSSQEEDCLIK

SEQ ID NO: 14547 - protein, 207 aa, Homo sapiens; identical to SEQ ID NO: 14535
  Payload ID: 2826
  Gene Symbol: CHEK2
  Gene Name: checkpoint kinase 2
  ENSP ID: ENSP00000402225

SEQ ID NO: 14548 - protein, 161 aa, Homo sapiens
  Payload ID: 2826
  Gene Symbol: CHEK2
  Gene Name: checkpoint kinase 2
  ENSP ID: ENSP00000403659
MSRESDVEAQQSHGSSACSQPHGSVTQSQGSSSQSQGISSSSTSTMPNSSQSSHSSSGTLSSLETVSTQELYSIPEDQEPEDQEPEEPTPAPWARLWALQDGFANLECVNDNYWFGRDKSCEYCFDEPLLKRTDKYRTYSKKHFRIFREENLSCPYRIWFK

SEQ ID NO: 14549 - protein, 289 aa, Homo sapiens
  Payload ID: 2826
  Gene Symbol: CHEK2
  Gene Name: checkpoint kinase 2
  Uniprot ID: O96017
  ENSP ID: ENSP00000404400
MSRESDVEAQQSHGSSACSQPHGSVTQSQGSSSQSQGISSSSTSTMPNSSQSSHSSSGTLSSLETVSTQELYSIPEDQEPEDQEPEEPTPAPWARLWALQDGFANLECVNDNYWFGRDKSCEYCFDEPLLKRTDKYRTYSKKHFRIFREVGPKNSYIAYIEDHSGNGTFVNTELVGKGKRRPLNNNSEIALSLSRNKVFVFFDLTVDDQSVYPKALRDEYIMSKTLGSGACGEVKLAFERKTCKKVAIKIISKRKFAIGSAREADPALNVETEIEILKKLNHDGRGRAV

SEQ ID NO: 14550 - protein, 165 aa, Homo sapiens
  Payload ID: 2826
  Gene Symbol: CHEK2
  Gene Name: checkpoint kinase 2
  Uniprot ID: O96017
  ENSP ID: ENSP00000404567
MSRESDVEAQQSHGSSACSQPHGSVTQSQGSSSQSQGISSSSTSTMPNSSQSSHSSSGTLSSLETVSTQELYSIPEDQEPEDQEPEEPTPAPWARLWALQDGFANLECVNDNYWFGRDKSCEYCFDEPLLKRTDKYRTYSKKHFRIFREENLSCPYRIWFNFCLF

SEQ ID NO: 14551 - protein, 295 aa, Homo sapiens
  Payload ID: 2826
  Gene Symbol: CHEK2
  Gene Name: checkpoint kinase 2
  ENSP ID: ENSP00000408065
MSRESDVEAQQSHGSSACSQPHGSVTQSQGSSSQSQGISSSSTSTMPNSSQSSHSSSGTLSSLETVSTQELYSIPEDQEPEDQEPEEPTPAPWARLWALQDGFANLETESGHVTQSDLELLLSSDPPASASQSAGIRECVNDNYWFGRDKSCEYCFDEPLLKRTDKYRTYSKKHFRIFREVGPKNSYIAYIEDHSGNGTFVNTELVGKGKRRPLNNNSEIALSLSRNKVFVFFDLTVDDQSVYPKALRDEYIMSKTLGSGACGEVKLAFERKTCKKVAIKIISKRKFAIGSAREA

SEQ ID NO: 14552 - protein, 203 aa, Homo sapiens
  Payload ID: 2826
  Gene Symbol: CHEK2
  Gene Name: checkpoint kinase 2
  Uniprot ID: O96017
  ENSP ID: ENSP00000412901
MSRESDVEAQQSHGSSACSQPHGSVTQSQGSSSQSQGISSSSTSTMPNSSQSSHSSSGTLSSLETVSTQELYSIPEDQEPEDQEPEEPTPAPWARLWALQDGFANLECVNDNYWFGRDKSCEYCFDEPLLKRTDKYRTYSKKHFRIFREVGPKNSYIAYIEDHSGNGTFVNTELVGKGKRRPLNNNSEIALSLSRNKVVPVER

SEQ ID NO: 14553 - protein, 276 aa, Homo sapiens
  Payload ID: 2826
  Gene Symbol: CHEK2
  Gene Name: checkpoint kinase 2
  ENSP ID: ENSP00000416721
  MOD_RES (1)..(1): Any amino acid
XIGSAREADPALNVETEIEILKKLNHPCIIKIKNFFDAEDYYIVLELMEGGELFDKVVGNKRLKEATCKLYFYQMLLAVQYLHENGIIHRDLKPENVLLSSQEEDCLIKITDFGHSKILGETSLMRTLCGTPTYLAPEVLVSVGTAGYNRAVDCWSLGVILFIWTQVSLKDQITSGKYNFIPEVWAEVSEKALDLVKKLLVVDPKARFTTEEALRHPWLQDEDMKRKFQDLLSEENESTALPQVLAQPSTSRKRPREGEAEGAETTKRPAVCAAVL

SEQ ID NO: 14554 - protein, 137 aa, Homo sapiens
  Payload ID: 2826
  Gene Symbol: CHEK2
  Gene Name: checkpoint kinase 2
  ENSP ID: ENSP00000483777
MERLLYGIGACGEVKLAFERKTCKKVAIKIISKRKFAIGSAREADPALNVETEIEILKKLNHPCIIKIKNFFDAEDYYIVLELMEGGELFDKVVGNKRLKEATCKLYFYQMLLAVQYLHENGIIHRDLKPENVLLSS

SEQ ID NO: 14555 - protein, 623 aa, Homo sapiens
  Payload ID: 2827
  Gene Symbol: CHFR
  Gene Name: checkpoint with forkhead and ring finger domains, E3 ubiquitin protein ligase
  Uniprot ID: Q96EP1
  ENSP ID: ENSP00000266880
MERPEEGKQSPPPQPWGRLLRLGAEEGEPHVLLRKREWTIGRRRGCDLSFPSNKLVSGDHCRIVVDEKSGQVTLEDTSTSGTVINKLKVVKKQTCPLQTGDVIYLVYRKNEPEHNVAYLYESLSEKQGMTQESFEMVPCCVAQAGLKLLGSSDPPTLASQSIVITGSGGGGISPKGSGPSVASDEVSSFASALPDRKTASFSSLEPQDQEDLEPVKKKMRGDGDLDLNGQLLVAQPRRNAQTVHEDVRAAAGKPDKMEETLTCIICQDLLHDCVSLQPCMHTFCAACYSGWMERSSLCPTCRCPVERICKNHILNNLVEAYLIQHPDKSRSEEDVQSMDARNKITQDMLQPKVRRSFSDEEGSSEDLLELSDVDSESSDISQPYVVCRQCPEYRRQAAQPPHCPAPEGEPGAPQALGDAPSTSVSLTTAVQDYVCPLQGSHALCTCCFQPMPDRRAEREQDPRVAPQQCAVCLQPFCHLYWGCTRTGCYGCLAPFCELNLGDKCLDGVLNNNSYESDILKNYLATRGLTWKNMLTESLVALQRGVFLLSDYRVTGDTVLCYCCGLRSFRELTYQYRQNIPASELPVAVTSRPDCYWGRNCRTQVKAHHAMKFNHICEQTRFKN

SEQ ID NO: 14556 - protein, 349 aa, Homo sapiens
  Payload ID: 2827
  Gene Symbol: CHFR
  Gene Name: checkpoint with forkhead and ring finger domains, E3 ubiquitin protein ligase
  ENSP ID: ENSP00000320557
MTQESFGSGGGGISPKGSGPSVASDEVSSFASALPDRKTASFSSLEPQDQEDLEPVKKKMRGDGDLDLNGQLLVAQPRRNAQTVHEDVRAAAGKPDKMEETLTCIICQDLLHDCVSLQPCMHTFCAACYSGWMERSSLCPTCRCPVERICKNHILNNLVEAYLIQHPDKSRSEEDVQSMDARNKITQDMLQPKVRRSFSDEEGSSEDLLELSDVDSESSDISQPYVVCRQCPEYRRQAAQPPHCPAPEGEPGAPQALGDAPSTSVSLTTAVQDYVCPLQGSHALCTCCFQPMPDRRAEREQDPRVAPQQCAVCLQPFCHLYWGCTRTGCYGCLAPFCVSGRQCFPATSL

SEQ ID NO: 14557 - protein, 664 aa, Homo sapiens
  Payload ID: 2827
  Gene Symbol: CHFR
  Gene Name: checkpoint with forkhead and ring finger domains, E3 ubiquitin protein ligase
  Uniprot ID: Q96EP1
  ENSP ID: ENSP00000392395
MERPEEGKQSPPPQPWGRLLRLGAEEGEPHVLLRKREWTIGRRRGCDLSFPSNKLVSGDHCRIVVDEKSGQVTLEDTSTSGTVINKLKVVKKQTCPLQTGDVIYLVYRKNEPEHNVAYLYESLSEKQGMTQESFEANKENVFHGTKDTSGAGAGRGADPRVPPSSPATQVCFEEPQPSTSTSDLFPTASASSTEPSPAGRERSSSCGSGGGGISPKGSGPSVASDEVSSFASALPDRKTASFSSLEPQDQEDLEPVKKKMRGDGDLDLNGQLLVAQPRRNAQTVHEDVRAAAGKPDKMEETLTCIICQDLLHDCVSLQPCMHTFCAACYSGWMERSSLCPTCRCPVERICKNHILNNLVEAYLIQHPDKSRSEEDVQSMDARNKITQDMLQPKVRRSFSDEEGSSEDLLELSDVDSESSDISQPYVVCRQCPEYRRQAAQPPHCPAPEGEPGAPQALGDAPSTSVSLTTAVQDYVCPLQGSHALCTCCFQPMPDRRAEREQDPRVAPQQCAVCLQPFCHLYWGCTRTGCYGCLAPFCELNLGDKCLDGVLNNNSYESDILKNYLATRGLTWKNMLTESLVALQRGVFLLSDYRVTGDTVLCYCCGLRSFRELTYQYRQNIPASELPVAVTSRPDCYWGRNCRTQVKAHHAMKFNHICEQTRFKN

SEQ ID NO: 14558 - protein, 652 aa, Homo sapiens
  Payload ID: 2827
  Gene Symbol: CHFR
  Gene Name: checkpoint with forkhead and ring finger domains, E3 ubiquitin protein ligase
  Uniprot ID: Q96EP1
  ENSP ID: ENSP00000398735
MERPEEGKQSPPPQPWGRLLRLGAEEGEPHVLLRKREWTIGRRRGCDLSFPSNKLVSGDHCRIVVDEKSGQVTLEDTSTSGTVINKLKVVKKQTCPLQTGDVIYLVYRKNEPEHNVAYLYESLSEKQGMTQESFDTSGAGAGRGADPRVPPSSPATQVCFEEPQPSTSTSDLFPTASASSTEPSPAGRERSSSCGSGGGGISPKGSGPSVASDEVSSFASALPDRKTASFSSLEPQDQEDLEPVKKKMRGDGDLDLNGQLLVAQPRRNAQTVHEDVRAAAGKPDKMEETLTCIICQDLLHDCVSLQPCMHTFCAACYSGWMERSSLCPTCRCPVERICKNHILNNLVEAYLIQHPDKSRSEEDVQSMDARNKITQDMLQPKVRRSFSDEEGSSEDLLELSDVDSESSDISQPYVVCRQCPEYRRQAAQPPHCPAPEGEPGAPQALGDAPSTSVSLTTAVQDYVCPLQGSHALCTCCFQPMPDRRAEREQDPRVAPQQCAVCLQPFCHLYWGCTRTGCYGCLAPFCELNLGDKCLDGVLNNNSYESDILKNYLATRGLTWKNMLTESLVALQRGVFLLSDYRVTGDTVLCYCCGLRSFRELTYQYRQNIPASELPVAVTSRPDCYWGRNCRTQVKAHHAMKFNHICEQTRFKN

SEQ ID NO: 14559 - protein, 572 aa, Homo sapiens
  Payload ID: 2827
  Gene Symbol: CHFR
  Gene Name: checkpoint with forkhead and ring finger domains, E3 ubiquitin protein ligase
  Uniprot ID: Q96EP1
  ENSP ID: ENSP00000416431
MERPEEGKQSPPPQPWGRLLRLGAEEGEPHVLLRKREWTIGRRRGCDLSFPSNKLVSGDHCRIVVDEKSGQVTLEDTSTSGTVINKLKVVKKQTCPLQTGDVIYLVYRKNEPEHRSGGGGISPKGSGPSVASDEVSSFASALPDRKTASFSSLEPQDQEDLEPVKKKMRGDGDLDLNGQLLVAQPRRNAQTVHEDVRAAAGKPDKMEETLTCIICQDLLHDCVSLQPCMHTFCAACYSGWMERSSLCPTCRCPVERICKNHILNNLVEAYLIQHPDKSRSEEDVQSMDARNKITQDMLQPKVRRSFSDEEGSSEDLLELSDVDSESSDISQPYVVCRQCPEYRRQAAQPPHCPAPEGEPGAPQALGDAPSTSVSLTTAVQDYVCPLQGSHALCTCCFQPMPDRRAEREQDPRVAPQQCAVCLQPFCHLYWGCTRTGCYGCLAPFCELNLGDKCLDGVLNNNSYESDILKNYLATRGLTWKNMLTESLVALQRGVFLLSDYRVTGDTVLCYCCGLRSFRELTYQYRQNIPASELPVAVTSRPDCYWGRNCRTQVKAHHAMKFNHICEQTRFKN

SEQ ID NO: 14560 - protein, 223 aa, Homo sapiens
  Payload ID: 2827
  Gene Symbol: CHFR
  Gene Name: checkpoint with forkhead and ring finger domains, E3 ubiquitin protein ligase
  ENSP ID: ENSP00000441837
MERPEEGKQSPPPQPWGRLLRLGAEEGEPHVLLRKREWTIGRRRGCDLSFPSNKLVSGDHCRIVVDEKSGQVTLEDTSTSGTVINKLKVVKKQTCPLQTGDVIYLVYRKNEPEHNVAYLYESLSEKQGMTQESFDTSGAGAGRGADPRVPPSSPATQVCFEEPQPSTSTSDLFPTASASSTEPSPAGRERSSSCGSGGGGISPKGSGPSVASDEVSSFASALP

SEQ ID NO: 14561 - protein, 25 aa, Homo sapiens
  Payload ID: 2827
  Gene Symbol: CHFR
  Gene Name: checkpoint with forkhead and ring finger domains, E3 ubiquitin protein ligase
  ENSP ID: ENSP00000443237
MTQESFASASSTEPSPAGRERSSSC

SEQ ID NO: 14562 - protein, 71 aa, Homo sapiens
  Payload ID: 2827
  Gene Symbol: CHFR
  Gene Name: checkpoint with forkhead and ring finger domains, E3 ubiquitin protein ligase
  ENSP ID: ENSP00000443761
MTQESFEANKENVFHGTKDTSGAGAGRGADPRVPPSSPATQVCFEEPQPSTSTSDLFPTASASSTEPSPAG

SEQ ID NO: 14563 - protein, 136 aa, Homo sapiens
  Payload ID: 2827
  Gene Symbol: CHFR
  Gene Name: checkpoint with forkhead and ring finger domains, E3 ubiquitin protein ligase
  ENSP ID: ENSP00000445371
MTQESFDTSGAGAGRGADPRVPPSSPATQVCFEEPQPSTSTSDLFPTASASSTEPSPAGRERSSSCGSGGGGISPKGSGPSVASDEVSSFASALPDRKTASFSSLEPQDQEDLEPVKKKMRGDGDLDLNGQLLVAQ

SEQ ID NO: 14564 - protein, 31 aa, Homo sapiens
  Payload ID: 2827
  Gene Symbol: CHFR
  Gene Name: checkpoint with forkhead and ring finger domains, E3 ubiquitin protein ligase
  ENSP ID: ENSP00000475247
MTQESFDTSGAGAGRGADPRVPPSSPATQVC

SEQ ID NO: 14565 - protein, 60 aa, Homo sapiens
  Payload ID: 2827
  Gene Symbol: CHFR
  Gene Name: checkpoint with forkhead and ring finger domains, E3 ubiquitin protein ligase
  ENSP ID: ENSP00000478791
LQPKVRRSFSDEEGSSEDLLELSDVDSESSDIRCGLPAAFLPPVLGLHPDRLLRLPGPVL

SEQ ID NO: 14566 - protein, 75 aa, Homo sapiens
  Payload ID: 2827
  Gene Symbol: CHFR
  Gene Name: checkpoint with forkhead and ring finger domains, E3 ubiquitin protein ligase
  ENSP ID: ENSP00000483699
  MOD_RES (1)..(1): Any amino acid
XAEREQDPRVAPQQCAVCLQPFCHLYWGCTRTGCYGCLAPFCESVMKRNMFILSVGQTVLSCDIIINRITWQPEV

SEQ ID NO: 14567 - protein, 373 aa, Homo sapiens
  Payload ID: 2828
  Gene Symbol: CMKLR1
  Gene Name: chemerin chemokine-like receptor 1
  Uniprot ID: Q99788
  ENSP ID: ENSP00000311733
MRMEDEDYNTSISYGDEYPDYLDSIVVLEDLSPLEARVTRIFLVVVYSIVCFLGILGNGLVIIIATFKMKKTVNMVWFLNLAVADFLFNVFLPIHITYAAMDYHWVFGTAMCKISNFLLIHNMFTSVFLLTIISSDRCISVLLPVWSQNHRSVRLAYMACMVIWVLAFFLSSPSLVFRDTANLHGKISCFNNFSLSTPGSSSWPTHSQMDPVGYSRHMVVTVTRFLCGFLVPVLIITACYLTIVCKLQRNRLAKTKKPFKIIVTIIITFFLCWCPYHTLNLLELHHTAMPGSVFSLGLPLATALAIANSCMNPILYVFMGQDFKKFKVALFSRLVNALSEDTGHSSYPSHRSFTKMSSMNERTSMNERETGML

SEQ ID NO: 14568 - protein, 373 aa, Homo sapiens; identical to SEQ ID NO: 14567
  Payload ID: 2828
  Gene Symbol: CMKLR1
  Gene Name: chemerin chemokine-like receptor 1
  Uniprot ID: Q99788
  ENSP ID: ENSP00000401293

SEQ ID NO: 14569 - protein, 371 aa, Homo sapiens
  Payload ID: 2828
  Gene Symbol: CMKLR1
  Gene Name: chemerin chemokine-like receptor 1
  Uniprot ID: Q99788
  ENSP ID: ENSP00000447579
MEDEDYNTSISYGDEYPDYLDSIVVLEDLSPLEARVTRIFLVVVYSIVCFLGILGNGLVIIIATFKMKKTVNMVWFLNLAVADFLFNVFLPIHITYAAMDYHWVFGTAMCKISNFLLIHNMFTSVFLLTIISSDRCISVLLPVWSQNHRSVRLAYMACMVIWVLAFFLSSPSLVFRDTANLHGKISCFNNFSLSTPGSSSWPTHSQMDPVGYSRHMVVTVTRFLCGFLVPVLIITACYLTIVCKLQRNRLAKTKKPFKIIVTIIITFFLCWCPYHTLNLLELHHTAMPGSVFSLGLPLATALAIANSCMNPILYVFMGQDFKKFKVALFSRLVNALSEDTGHSSYPSHRSFTKMSSMNERTSMNERETGML

SEQ ID NO: 14570 - protein, 143 aa, Homo sapiens
  Payload ID: 2828
  Gene Symbol: CMKLR1
  Gene Name: chemerin chemokine-like receptor 1
  ENSP ID: ENSP00000448362
MRMEDEDYNTSISYGDEYPDYLDSIVVLEDLSPLEARVTRIFLVVVYSIVCFLGILGNGLVIIIATFKMKKTVNMVWFLNLAVADFLFNVFLPIHITYAAMDYHWVFGTAMCKISNFLLIHNMFTSVFLLTIISSDRCISVLL

SEQ ID NO: 14571 - protein, 147 aa, Homo sapiens
  Payload ID: 2828
  Gene Symbol: CMKLR1
  Gene Name: chemerin chemokine-like receptor 1
  ENSP ID: ENSP00000448925
MRMEDEDYNTSISYGDEYPDYLDSIVVLEDLSPLEARVTRIFLVVVYSIVCFLGILGNGLVIIIATFKMKKTVNMVWFLNLAVADFLFNVFLPIHITYAAMDYHWVFGTAMCKISNFLLIHNMFTSVFLLTIISSDRCISVLLPVWS

SEQ ID NO: 14572 - protein, 373 aa, Homo sapiens; identical to SEQ ID NO: 14567
  Payload ID: 2828
  Gene Symbol: CMKLR1
  Gene Name: chemerin chemokine-like receptor 1
  Uniprot ID: Q99788
  ENSP ID: ENSP00000449716

SEQ ID NO: 14573 - protein, 114 aa, Homo sapiens
  Payload ID: 2829
  Gene Symbol: XCL1
  Gene Name: chemokine (C motif) ligand 1
  Uniprot ID: P47992
  ENSP ID: ENSP00000356792
MRLLILALLGICSLTAYIVEGVGSEVSDKRTCVSLTTQRLPVSRIKTYTITEGSLRAVIFITKRGLKVCADPQATWVRDVVRSMDRKSNTRNNMIQTKPTGTQQSTNTAVTLTG

SEQ ID NO: 14574 - protein, 114 aa, Homo sapiens
  Payload ID: 2830
  Gene Symbol: XCL2
  Gene Name: chemokine (C motif) ligand 2
  Uniprot ID: Q9UBD3
  ENSP ID: ENSP00000356793
MRLLILALLGICSLTAYIVEGVGSEVSHRRTCVSLTTQRLPVSRIKTYTITEGSLRAVIFITKRGLKVCADPQATWVRDVVRSMDRKSNTRNNMIQTKPTGTQQSTNTAVTLTG

SEQ ID NO: 14575 - protein, 333 aa, Homo sapiens
  Payload ID: 2831
  Gene Symbol: XCR1
  Gene Name: chemokine (C motif) receptor 1
  Uniprot ID: P46094
  ENSP ID: ENSP00000310405
MESSGNPESTTFFYYDLQSQPCENQAWVFATLATTVLYCLVFLLSLVGNSLVLWVLVKYESLESLTNIFILNLCLSDLVFACLLPVWISPYHWGWVLGDFLCKLLNMIFSISLYSSIFFLTIMTIHRYLSVVSPLSTLRVPTLRCRVLVTMAVWVASILSSILDTIFHKVLSSGCDYSELTWYLTSVYQHNLFFLLSLGIILFCYVEILRTLFRSRSKRRHRTVKLIFAIVVAYFLSWGPYNFTLFLQTLFRTQIIRSCEAKQQLEYALLICRNLAFSHCCFNPVLYVFVGVKFRTHLKHVLRQFWFCRLQAPSPASIPHSPGAFAYEGASFY

SEQ ID NO: 14576 - protein, 36 aa, Homo sapiens
  Payload ID: 2831
  Gene Symbol: XCR1
  Gene Name: chemokine (C motif) receptor 1
  ENSP ID: ENSP00000379277
MESSGNPESTTFFYYDLQSQPCENQAWVFATLATTV

SEQ ID NO: 14577 - protein, 96 aa, Homo sapiens
  Payload ID: 2832
  Gene Symbol: CCL1
  Gene Name: chemokine (C-C motif) ligand 1
  Uniprot ID: P22362
  ENSP ID: ENSP00000225842
MQIITTALVCLLLAGMWPEDVDSKSMQVPFSRCCFSFAEQEIPLRAILCYRNTSSICSNEGLIFKLKRGKEACALDTVGWVQRHRKMLRHCPSKRK

SEQ ID NO: 14578 - protein, 97 aa, Homo sapiens
  Payload ID: 2833
  Gene Symbol: CCL11
  Gene Name: chemokine (C-C motif) ligand 11
  Uniprot ID: P51671
  ENSP ID: ENSP00000302234
MKVSAALLWLLLIAAAFSPQGLAGPASVPTTCCFNLANRKIPLQRLESYRRITSGKCPQKAVIFKTKLAKDICADPKKKWVQDSMKYLDQKSPTPKP

SEQ ID NO: 14579 - protein, 98 aa, Homo sapiens
  Payload ID: 2834
  Gene Symbol: CCL13
  Gene Name: chemokine (C-C motif) ligand 13
  Uniprot ID: Q99616
  ENSP ID: ENSP00000225844
MKVSAVLLCLLLMTAAFNPQGLAQPDALNVPSTCCFTFSSKKISLQRLKSYVITTSRCPQKAVIFRTKLGKEICADPKEKWVQNYMKHLGRKAHTLKT

SEQ ID NO: 14580 - protein, 63 aa, Homo sapiens
  Payload ID: 2834
  Gene Symbol: CCL13
  Gene Name: chemokine (C-C motif) ligand 13
  ENSP ID: ENSP00000463667
  MOD_RES (1)..(1): Any amino acid
XVPSTCCFTFSSKKISLQRLKSYVITTSSFRTKLGKEICADPKEKWVQNYMKHLGRKAHTLKT

SEQ ID NO: 14581 - protein, 109 aa, Homo sapiens
  Payload ID: 2835
  Gene Symbol: CCL14
  Gene Name: chemokine (C-C motif) ligand 14
  Uniprot ID: Q16627
  ENSP ID: ENSP00000479097
MKISVAAIPFFLLITIALGTKTESSSQTGGKPKVVKIQLKLVGGPYHPSECCFTYTTYKIPRQRIMDYYETNSQCSKPGIVFITKRGHSVCTNPSDKWVQDYIKDMKEN

SEQ ID NO: 14582 - protein, 93 aa, Homo sapiens
  Payload ID: 2835
  Gene Symbol: CCL14
  Gene Name: chemokine (C-C motif) ligand 14
  Uniprot ID: Q16627
  ENSP ID: ENSP00000481023
MKISVAAIPFFLLITIALGTKTESSSRGPYHPSECCFTYTTYKIPRQRIMDYYETNSQCSKPGIVFITKRGHSVCTNPSDKWVQDYIKDMKEN

SEQ ID NO: 14583 - protein, 65 aa, Homo sapiens
  Payload ID: 2835
  Gene Symbol: CCL14
  Gene Name: chemokine (C-C motif) ligand 14
  ENSP ID: ENSP00000482426
MKISVAAIPFFLLITIALGTKTESSSRGPYHPSECCFTYTTYKIPRQRIMDYYETNSQCSKPGIV

SEQ ID NO: 14584 - protein, 115 aa, Homo sapiens
  Payload ID: 2835
  Gene Symbol: CCL14
  Gene Name: chemokine (C-C motif) ligand 14
  ENSP ID: ENSP00000483186
MRKAYSPLQVLRGCLLLPSLLHALSLQEQPMVWPLTRGPSSASDALSSGGPYHPSECCFTYTTYKIPRQRIMDYYETNSQCSKPGIVFITKRGHSVCTNPSDKWVQDYIKDMKEN

SEQ ID NO: 14585 - protein, 109 aa, Homo sapiens; identical to SEQ ID NO: 14581
  Payload ID: 2835
  Gene Symbol: CCL14
  Gene Name: chemokine (C-C motif) ligand 14
  Uniprot ID: Q16627
  ENSP ID: ENSP00000483302

SEQ ID NO: 14586 - protein, 65 aa, Homo sapiens; identical to SEQ ID NO: 14583
  Payload ID: 2835
  Gene Symbol: CCL14
  Gene Name: chemokine (C-C motif) ligand 14
  ENSP ID: ENSP00000484818

SEQ ID NO: 14587 - protein, 93 aa, Homo sapiens; identical to SEQ ID NO: 14582
  Payload ID: 2835
  Gene Symbol: CCL14
  Gene Name: chemokine (C-C motif) ligand 14
  Uniprot ID: Q16627
  ENSP ID: ENSP00000487948

SEQ ID NO: 14588 - protein, 115 aa, Homo sapiens; identical to SEQ ID NO: 14584
  Payload ID: 2835
  Gene Symbol: CCL14
  Gene Name: chemokine (C-C motif) ligand 14
  ENSP ID: ENSP00000488545

SEQ ID NO: 14589 - protein, 113 aa, Homo sapiens; identical to SEQ ID NO: 12738
  Payload ID: 2836
  Gene Symbol: CCL15
  Gene Name: chemokine (C-C motif) ligand 15
  Uniprot ID: Q16663
  ENSP ID: ENSP00000477788

SEQ ID NO: 14590 - protein, 113 aa, Homo sapiens; identical to SEQ ID NO: 12736
  Payload ID: 2836
  Gene Symbol: CCL15
  Gene Name: chemokine (C-C motif) ligand 15
  Uniprot ID: Q16663
  ENSP ID: ENSP00000484078

SEQ ID NO: 14591 - protein, 61 aa, Homo sapiens
  Payload ID: 2836
  Gene Symbol: CCL15
  Gene Name: chemokine (C-C motif) ligand 15
  ENSP ID: ENSP00000484262
  MOD_RES (1)..(1): Any amino acid
XCTSYISQSIPCSLMKSYFETSSECSKPGVIFLTKKGRQVCAKPSGPGVQDCMKKLKPYSI

SEQ ID NO: 14592 - protein, 61 aa, Homo sapiens; identical to SEQ ID NO: 14591
  Payload ID: 2836
  Gene Symbol: CCL15
  Gene Name: chemokine (C-C motif) ligand 15
  ENSP ID: ENSP00000488746
  MOD_RES (1)..(1): Any amino acid

SEQ ID NO: 14593 - protein, 120 aa, Homo sapiens
  Payload ID: 2837
  Gene Symbol: CCL16
  Gene Name: chemokine (C-C motif) ligand 16
  Uniprot ID: O15467
  ENSP ID: ENSP00000478024
MKVSEAALSLLVLILIITSASRSQPKVPEWVNTPSTCCLKYYEKVLPRRLVVGYRKALNCHLPAIIFVTKRNREVCTNPNDDWVQEYIKDPNLPLLPTRNLSTVKIITAKNGQPQLLNSQ

SEQ ID NO: 14594 - protein, 95 aa, Homo sapiens
  Payload ID: 2837
  Gene Symbol: CCL16
  Gene Name: chemokine (C-C motif) ligand 16
  ENSP ID: ENSP00000478592
  MOD_RES (1)..(1): Any amino acid
XVPEWVNTPSTCCLKYYEKVLPRRLVVGYRKALNCHLPAIIFVTKRNREVCTNPNDDWVQEYIKDPNLPLLPTRNLSTVKIITAKNGQPQLLNSQ

SEQ ID NO: 14595 - protein, 53 aa, Homo sapiens
  Payload ID: 2837
  Gene Symbol: CCL16
  Gene Name: chemokine (C-C motif) ligand 16
  ENSP ID: ENSP00000478934
MKVSEAALSLLVLILIITSASRSQPSWSAVSRSRLTTTSASRVQVILLPQPPE

SEQ ID NO: 14596 - protein, 120 aa, Homo sapiens; identical to SEQ ID NO: 14593
  Payload ID: 2837
  Gene Symbol: CCL16
  Gene Name: chemokine (C-C motif) ligand 16
  Uniprot ID: O15467
  ENSP ID: ENSP00000482168

SEQ ID NO: 14597 - protein, 53 aa, Homo sapiens; identical to SEQ ID NO: 14595
  Payload ID: 2837
  Gene Symbol: CCL16
  Gene Name: chemokine (C-C motif) ligand 16
  ENSP ID: ENSP00000487933

SEQ ID NO: 14598 - protein, 95 aa, Homo sapiens; identical to SEQ ID NO: 14594
  Payload ID: 2837
  Gene Symbol: CCL16
  Gene Name: chemokine (C-C motif) ligand 16
  ENSP ID: ENSP00000488847
  MOD_RES (1)..(1): Any amino acid

SEQ ID NO: 14599 - protein, 94 aa, Homo sapiens
  Payload ID: 2838
  Gene Symbol: CCL17
  Gene Name: chemokine (C-C motif) ligand 17
  Uniprot ID: Q92583
  ENSP ID: ENSP00000219244
MAPLKMLALVTLLLGASLQHIHAARGTNVGRECCLEYFKGAIPLRKLKTWYQTSEDCSRDAIVFVTVQGRAICSDPNNKRVKNAVKYLQSLERS

SEQ ID NO: 14600 - protein, 94 aa, Homo sapiens; identical to SEQ ID NO: 14599
  Payload ID: 2838
  Gene Symbol: CCL17
  Gene Name: chemokine (C-C motif) ligand 17
  Uniprot ID: Q92583
  ENSP ID: ENSP00000480147

SEQ ID NO: 14601 - protein, 89 aa, Homo sapiens
  Payload ID: 2839
  Gene Symbol: CCL18
  Gene Name: chemokine (C-C motif) ligand 18 (pulmonary and activation -regulated)
  Uniprot ID: P55774
  ENSP ID: ENSP00000479955
MKGLAAALLVLVCTMALCSCAQVGTNKELCCLVYTSWQIPQKFIVDYSETSPQCPKPGVILLTKRGRQICADPNKKWVQKYISDLKLNA

SEQ ID NO: 14602 - protein, 89 aa, Homo sapiens; identical to SEQ ID NO: 14601
  Payload ID: 2839
  Gene Symbol: CCL18
  Gene Name: chemokine (C-C motif) ligand 18 (pulmonary and activation -regulated)
  Uniprot ID: P55774
  ENSP ID: ENSP00000483144

SEQ ID NO: 14603 - protein, 89 aa, Homo sapiens; identical to SEQ ID NO: 14601
  Payload ID: 2839
  Gene Symbol: CCL18
  Gene Name: chemokine (C-C motif) ligand 18 (pulmonary and activation -regulated)
  Uniprot ID: P55774
  ENSP ID: ENSP00000483347

SEQ ID NO: 14604 - protein, 98 aa, Homo sapiens
  Payload ID: 2840
  Gene Symbol: CCL19
  Gene Name: chemokine (C-C motif) ligand 19
  Uniprot ID: Q99731
  ENSP ID: ENSP00000308815
MALLLALSLLVLWTSPAPTLSGTNDAEDCCLSVTQKPIPGYIVRNFHYLLIKDGCRVPAVVFTTLRGRQLCAPPDQPWVERIIQRLQRTSAKMKRRSS

SEQ ID NO: 14605 - protein, 104 aa, Homo sapiens
  Payload ID: 2840
  Gene Symbol: CCL19
  Gene Name: chemokine (C-C motif) ligand 19
  ENSP ID: ENSP00000368077
MALLLALSLLVLWTSPAPTLSGTNDAEDCCLSVTQKPIPGYIVRNFHYLLIKDGCRVPAVVFTTLRGRQLCAPPDQPWVERIIQRLQRTSAKASLALPGPVSSL

SEQ ID NO: 14606 - protein, 99 aa, Homo sapiens
  Payload ID: 2841
  Gene Symbol: CCL2
  Gene Name: chemokine (C-C motif) ligand 2
  Uniprot ID: P13500
  ENSP ID: ENSP00000225831
MKVSAALLCLLLIAATFIPQGLAQPDAINAPVTCCYNFTNRKISVQRLASYRRITSSKCPKEAVIFKTIVAKEICADPKQKWVQDSMDHLDKQTQTPKT

SEQ ID NO: 14607 - protein, 65 aa, Homo sapiens
  Payload ID: 2841
  Gene Symbol: CCL2
  Gene Name: chemokine (C-C motif) ligand 2
  ENSP ID: ENSP00000462156
MKVSAALLCLLLIAATFIPQGLAQPDAINAPVTCCYNFTNRKISVQRLASYRRITSSKCPKEAVM

SEQ ID NO: 14608 - protein, 96 aa, Homo sapiens
  Payload ID: 2842
  Gene Symbol: CCL20
  Gene Name: chemokine (C-C motif) ligand 20
  Uniprot ID: P78556
  ENSP ID: ENSP00000351671
MCCTKSLLLAALMSVLLLHLCGESEAASNFDCCLGYTDRILHPKFIVGFTRQLANEGCDINAIIFHTKKKLSVCANPKQTWVKYIVRLLSKKVKNM

SEQ ID NO: 14609 - protein, 95 aa, Homo sapiens
  Payload ID: 2842
  Gene Symbol: CCL20
  Gene Name: chemokine (C-C motif) ligand 20
  Uniprot ID: P78556
  ENSP ID: ENSP00000386273
MCCTKSLLLAALMSVLLLHLCGESEASNFDCCLGYTDRILHPKFIVGFTRQLANEGCDINAIIFHTKKKLSVCANPKQTWVKYIVRLLSKKVKNM

SEQ ID NO: 14610 - protein, 134 aa, Homo sapiens
  Payload ID: 2843
  Gene Symbol: CCL21
  Gene Name: chemokine (C-C motif) ligand 21
  Uniprot ID: O00585
  ENSP ID: ENSP00000259607
MAQSLALSLLILVLAFGIPRTQGSDGGAQDCCLKYSQRKIPAKVVRSYRKQEPSLGCSIPAILFLPRKRSQAELCADPKELWVQQLMQHLDKTPSPQKPAQGCRKDRGASKTGKKGKGSKGCKRTERSQTPKGP

SEQ ID NO: 14611 - protein, 124 aa, Homo sapiens
  Payload ID: 2843
  Gene Symbol: CCL21
  Gene Name: chemokine (C-C motif) ligand 21
  ENSP ID: ENSP00000368069
MAQSLALSLLILVLAFGIPRTQGSDGGAQDCCLKYSQRKIPAKVVRSYRKQEPSLGCSIPAILFLPRKRSQAELCADPKELWVQQLMQHLDKTPSPQKPAQGCRKDRGASKTGKKGKGSKGCKR

SEQ ID NO: 14612 - protein, 93 aa, Homo sapiens
  Payload ID: 2844
  Gene Symbol: CCL22
  Gene Name: chemokine (C-C motif) ligand 22
  Uniprot ID: O00626
  ENSP ID: ENSP00000219235
MDRLQTALLVVLVLLAVALQATEAGPYGANMEDSVCCRDYVRYRLPLRVVKHFYWTSDSCPRPGVVLLTFRDKEICADPRVPWVKMILNKLSQ

SEQ ID NO: 14613 - protein, 13 aa, Homo sapiens
  Payload ID: 2845
  Gene Symbol: CCL23
  Gene Name: chemokine (C-C motif) ligand 23
  ENSP ID: ENSP00000479076
FETNSECSKPGVM

SEQ ID NO: 14614 - protein, 137 aa, Homo sapiens
  Payload ID: 2845
  Gene Symbol: CCL23
  Gene Name: chemokine (C-C motif) ligand 23
  Uniprot ID: P55773
  ENSP ID: ENSP00000481357
MKVSVAALSCLMLVTALGSQARVTKDAETEFMMSKLPLENPVLLDMLWRRKIGPQMTLSHAAGFHATSADCCISYTPRSIPCSLLESYFETNSECSKPGVIFLTKKGRRFCANPSDKQVQVCMRMLKLDTRIKTRKN

SEQ ID NO: 14615 - protein, 137 aa, Homo sapiens
  Payload ID: 2845
  Gene Symbol: CCL23
  Gene Name: chemokine (C-C motif) ligand 23
  Uniprot ID: P55773
  ENSP ID: ENSP00000483546
MKVSVAALSCLMLVTALGSQARVTKDAETEFMMSKLPLENPVLLDMLWRRKIGPQMTLSHAAGFHATSADCCISYTPRSIPCSLLESYFETNSECSKPGVIFLTKKGRRFCANPSDKQVQVCVRMLKLDTRIKTRKN

SEQ ID NO: 14616 - protein, 120 aa, Homo sapiens
  Payload ID: 2845
  Gene Symbol: CCL23
  Gene Name: chemokine (C-C motif) ligand 23
  Uniprot ID: P55773
  ENSP ID: ENSP00000484748
MKVSVAALSCLMLVTALGSQARVTKDAETEFMMSKLPLENPVLLDRFHATSADCCISYTPRSIPCSLLESYFETNSECSKPGVIFLTKKGRRFCANPSDKQVQVCMRMLKLDTRIKTRKN

SEQ ID NO: 14617 - protein, 120 aa, Homo sapiens
  Payload ID: 2845
  Gene Symbol: CCL23
  Gene Name: chemokine (C-C motif) ligand 23
  Uniprot ID: P55773
  ENSP ID: ENSP00000488270
MKVSVAALSCLMLVTALGSQARVTKDAETEFMMSKLPLENPVLLDRFHATSADCCISYTPRSIPCSLLESYFETNSECSKPGVIFLTKKGRRFCANPSDKQVQVCVRMLKLDTRIKTRKN

SEQ ID NO: 14618 - protein, 13 aa, Homo sapiens
  Payload ID: 2845
  Gene Symbol: CCL23
  Gene Name: chemokine (C-C motif) ligand 23
  ENSP ID: ENSP00000488467
FETNSECSKPGVM

SEQ ID NO: 14619 - protein, 119 aa, Homo sapiens
  Payload ID: 2846
  Gene Symbol: CCL24
  Gene Name: chemokine (C-C motif) ligand 24
  Uniprot ID: O00175
  ENSP ID: ENSP00000222902
MAGLMTIVTSLLFLGVCAHHIIPTGSVVIPSPCCMFFVSKRIPENRVVSYQLSSRSTCLKAGVIFTTKKGQQFCGDPKQEWVQRYMKNLDAKQKKASPRARAVAVKGPVQRYPGNQTTC

SEQ ID NO: 14620 - protein, 119 aa, Homo sapiens; identical to SEQ ID NO: 14619
  Payload ID: 2846
  Gene Symbol: CCL24
  Gene Name: chemokine (C-C motif) ligand 24
  Uniprot ID: O00175
  ENSP ID: ENSP00000400533

SEQ ID NO: 14621 - protein, 149 aa, Homo sapiens
  Payload ID: 2847
  Gene Symbol: CCL25
  Gene Name: chemokine (C-C motif) ligand 25
  Uniprot ID: O15444
  ENSP ID: ENSP00000253451
MNLWLLACLVAGFLGAWAPAVHTQGVFEDCCLAYHYPIGWAVLRRAWTYRIQEVSGSCNLPAAIFYLPKRHRKVCGNPKSREVQRAMKLLDARNKVFAKLHHNTQTFQGPHAVKKLSSGNSKLSSSKFSNPISSSKRNVSLLISANSGL

SEQ ID NO: 14622 - protein, 150 aa, Homo sapiens
  Payload ID: 2847
  Gene Symbol: CCL25
  Gene Name: chemokine (C-C motif) ligand 25
  ENSP ID: ENSP00000324756
MNLWLLACLVAGFLGAWAPAVHTQGVFEDCCLAYHYPIGWAVLRRAWTYRIQEVSGSCNLPAAIFYLPKRHRKVCGNPKSREVQRAMKLLDARNKVFAKLHHNTQTFQAGPHAVKKLSSGNSKLSSSKFSNPISSSKRNVSLLISANSGK

SEQ ID NO: 14623 - protein, 150 aa, Homo sapiens
  Payload ID: 2847
  Gene Symbol: CCL25
  Gene Name: chemokine (C-C motif) ligand 25
  Uniprot ID: O15444
  ENSP ID: ENSP00000375086
MNLWLLACLVAGFLGAWAPAVHTQGVFEDCCLAYHYPIGWAVLRRAWTYRIQEVSGSCNLPAAIFYLPKRHRKVCGNPKSREVQRAMKLLDARNKVFAKLHHNTQTFQAGPHAVKKLSSGNSKLSSSKFSNPISSSKRNVSLLISANSGL

SEQ ID NO: 14624 - protein, 84 aa, Homo sapiens
  Payload ID: 2847
  Gene Symbol: CCL25
  Gene Name: chemokine (C-C motif) ligand 25
  ENSP ID: ENSP00000401882
MNLWLLACLVAGFLGAWAPAVHTQGVFEDCCLAYHYPIGWAVLRRAWTYRIQEVSGSCNLPAAIRPSCCKEVEFWKLQVIIVQV

SEQ ID NO: 14625 - protein, 94 aa, Homo sapiens
  Payload ID: 2848
  Gene Symbol: CCL26
  Gene Name: chemokine (C-C motif) ligand 26
  Uniprot ID: Q9Y258
  ENSP ID: ENSP00000005180
MMGLSLASAVLLASLLSLHLGTATRGSDISKTCCFQYSHKPLPWTWVRSYEFTSNSCSQRAVIFTTKRGKKVCTHPRKKWVQKYISLLKTPKQL

SEQ ID NO: 14626 - protein, 94 aa, Homo sapiens; identical to SEQ ID NO: 14625
  Payload ID: 2848
  Gene Symbol: CCL26
  Gene Name: chemokine (C-C motif) ligand 26
  Uniprot ID: Q9Y258
  ENSP ID: ENSP00000378365

SEQ ID NO: 14627 - protein, 112 aa, Homo sapiens
  Payload ID: 2849
  Gene Symbol: CCL27
  Gene Name: chemokine (C-C motif) ligand 27
  Uniprot ID: Q9Y4X3
  ENSP ID: ENSP00000259631
MKGPPTFCSLLLLSLLLSPDPTAAFLLPPSTACCTQLYRKPLSDKLLRKVIQVELQEADGDCHLQAFVLHLAQRSICIHPQNPSLSQWFEHQERKLHGTLPKLNFGMLRKMG

SEQ ID NO: 14628 - protein, 127 aa, Homo sapiens
  Payload ID: 2850
  Gene Symbol: CCL28
  Gene Name: chemokine (C-C motif) ligand 28
  Uniprot ID: Q9NRJ3
  ENSP ID: ENSP00000354416
MQQRGLAIVALAVCAALHASEAILPIASSCCTEVSHHISRRLLERVNMCRIQRADGDCDLAAVILHVKRRRICVSPHNHTVKQWMKVQAAKKNGKGNVCHRKKHHGKRNSNRAHQGKHETYGHKTPY

SEQ ID NO: 14629 - protein, 80 aa, Homo sapiens
  Payload ID: 2850
  Gene Symbol: CCL28
  Gene Name: chemokine (C-C motif) ligand 28
  ENSP ID: ENSP00000422369
MCRIQRADGDCDLAAVILHVKRRRICVSPHNHTVKQWMKVQAAKKNGKGNVCHRKKHHGKRNSNRAHQGKHETYGHKTPY

SEQ ID NO: 14630 - protein, 127 aa, Homo sapiens; identical to SEQ ID NO: 14628
  Payload ID: 2850
  Gene Symbol: CCL28
  Gene Name: chemokine (C-C motif) ligand 28
  Uniprot ID: Q9NRJ3
  ENSP ID: ENSP00000426424

SEQ ID NO: 14631 - protein, 92 aa, Homo sapiens
  Payload ID: 2851
  Gene Symbol: CCL3
  Gene Name: chemokine (C-C motif) ligand 3
  Uniprot ID: P10147
  ENSP ID: ENSP00000477908
MQVSTAALAVLLCTMALCNQFSASLAADTPTACCFSYTSRQIPQNFIADYFETSSQCSKPGVIFLTKRSRQVCADPSEEWVQKYVSDLELSA

SEQ ID NO: 14632 - protein, 92 aa, Homo sapiens; identical to SEQ ID NO: 14631
  Payload ID: 2851
  Gene Symbol: CCL3
  Gene Name: chemokine (C-C motif) ligand 3
  ENSP ID: ENSP00000480753

SEQ ID NO: 14633 - protein, 92 aa, Homo sapiens; identical to SEQ ID NO: 14631
  Payload ID: 2851
  Gene Symbol: CCL3
  Gene Name: chemokine (C-C motif) ligand 3
  Uniprot ID: P10147
  ENSP ID: ENSP00000483712

SEQ ID NO: 14634 - protein, 93 aa, Homo sapiens
  Payload ID: 2852
  Gene Symbol: CCL3L1
  Gene Name: chemokine (C-C motif) ligand 3-like 1
  Uniprot ID: P16619
  ENSP ID: ENSP00000484704
MQVSTAALAVLLCTMALCNQVLSAPLAADTPTACCFSYTSRQIPQNFIADYFETSSQCSKPSVIFLTKRGRQVCADPSEEWVQKYVSDLELSA

SEQ ID NO: 14635 - protein, 93 aa, Homo sapiens; identical to SEQ ID NO: 14634
  Payload ID: 2853
  Gene Symbol: CCL3L3
  Gene Name: chemokine (C-C motif) ligand 3-like 3
  Uniprot ID: P16619
  ENSP ID: ENSP00000480051

SEQ ID NO: 14636 - protein, 93 aa, Homo sapiens; identical to SEQ ID NO: 14634
  Payload ID: 2853
  Gene Symbol: CCL3L3
  Gene Name: chemokine (C-C motif) ligand 3-like 3
  Uniprot ID: P16619
  ENSP ID: ENSP00000480558

SEQ ID NO: 14637 - protein, 93 aa, Homo sapiens; identical to SEQ ID NO: 14634
  Payload ID: 2853
  Gene Symbol: CCL3L3
  Gene Name: chemokine (C-C motif) ligand 3-like 3
  Uniprot ID: P16619
  ENSP ID: ENSP00000482487

SEQ ID NO: 14638 - protein, 92 aa, Homo sapiens
  Payload ID: 2854
  Gene Symbol: CCL4
  Gene Name: chemokine (C-C motif) ligand 4
  ENSP ID: ENSP00000478708
MKLCVTVLSLLMLVAAFCSPALSAPMGSDPPTACCFSYTARKLPRNFVVDYYETSSLCSQPAVVFQTKRSKQVCADPSESWVQEYVYDLELN

SEQ ID NO: 14639 - protein, 52 aa, Homo sapiens
  Payload ID: 2854
  Gene Symbol: CCL4
  Gene Name: chemokine (C-C motif) ligand 4
  ENSP ID: ENSP00000479974
MKLCVTVLSLLMLVAAFCSPALSAPNSKPKEASKSVLIPVNPGSRSTCMTWN

SEQ ID NO: 14640 - protein, 92 aa, Homo sapiens; identical to SEQ ID NO: 14638
  Payload ID: 2854
  Gene Symbol: CCL4
  Gene Name: chemokine (C-C motif) ligand 4
  Uniprot ID: P13236
  ENSP ID: ENSP00000480345

SEQ ID NO: 14641 - protein, 52 aa, Homo sapiens; identical to SEQ ID NO: 14639
  Payload ID: 2854
  Gene Symbol: CCL4
  Gene Name: chemokine (C-C motif) ligand 4
  ENSP ID: ENSP00000480569

SEQ ID NO: 14642 - protein, 92 aa, Homo sapiens; identical to SEQ ID NO: 14638
  Payload ID: 2854
  Gene Symbol: CCL4
  Gene Name: chemokine (C-C motif) ligand 4
  Uniprot ID: P13236
  ENSP ID: ENSP00000482259

SEQ ID NO: 14643 - protein, 52 aa, Homo sapiens; identical to SEQ ID NO: 14639
  Payload ID: 2854
  Gene Symbol: CCL4
  Gene Name: chemokine (C-C motif) ligand 4
  ENSP ID: ENSP00000483068

SEQ ID NO: 14644 - protein, 92 aa, Homo sapiens
  Payload ID: 2855
  Gene Symbol: CCL4L2
  Gene Name: chemokine (C-C motif) ligand 4-like 2
  ENSP ID: ENSP00000478181
MKLCVTVLSLLVLVAAFCSLALSAPMGSDPPTACCFSYTARKLPRNFVVDYYETSSLCSQPAVPWDSNLGKQVCADPSESWVQEYVYDLELN

SEQ ID NO: 14645 - protein, 92 aa, Homo sapiens
  Payload ID: 2855
  Gene Symbol: CCL4L2
  Gene Name: chemokine (C-C motif) ligand 4-like 2
  Uniprot ID: Q8NHW4
  ENSP ID: ENSP00000478376
MKLCVTVLSLLVLVAAFCSLALSAPMGSDPPTACCFSYTARKLPRNFVVDYYETSSLCSQPAVVFQTKRGKQVCADPSESWVQEYVYDLELN

SEQ ID NO: 14646 - protein, 92 aa, Homo sapiens; identical to SEQ ID NO: 14645
  Payload ID: 2855
  Gene Symbol: CCL4L2
  Gene Name: chemokine (C-C motif) ligand 4-like 2
  Uniprot ID: Q8NHW4
  ENSP ID: ENSP00000479126

SEQ ID NO: 14647 - protein, 87 aa, Homo sapiens
  Payload ID: 2855
  Gene Symbol: CCL4L2
  Gene Name: chemokine (C-C motif) ligand 4-like 2
  Uniprot ID: Q8NHW4
  ENSP ID: ENSP00000479354
MKLCVTVLSLLVLVAAFCSLALSAPMGSDPPTACCFSYTARKLPRNFVVDYYETSSLCSQPAVVGKQVCADPSESWVQEYVYDLELN

SEQ ID NO: 14648 - protein, 103 aa, Homo sapiens
  Payload ID: 2855
  Gene Symbol: CCL4L2
  Gene Name: chemokine (C-C motif) ligand 4-like 2
  Uniprot ID: Q8NHW4
  ENSP ID: ENSP00000479774
MKLCVTVLSLLVLVAAFCSLALSAPMGSDPPTACCFSYTARKLPRNFVVDYYETSSLCSQPAVVYRESASSAAPGRIPSTRAAPHGPWSGRGRCLPQARDKAR

SEQ ID NO: 14649 - protein, 47 aa, Homo sapiens
  Payload ID: 2855
  Gene Symbol: CCL4L2
  Gene Name: chemokine (C-C motif) ligand 4-like 2
  Uniprot ID: Q8NHW4
  ENSP ID: ENSP00000479833
MKLCVTVLSLLVLVAAFCSLALSAPKASKSALTPVSPGSRSTCMTWN

SEQ ID NO: 14650 - protein, 64 aa, Homo sapiens
  Payload ID: 2855
  Gene Symbol: CCL4L2
  Gene Name: chemokine (C-C motif) ligand 4-like 2
  Uniprot ID: Q8NHW4
  ENSP ID: ENSP00000480089
MKLCVTVLSLLVLVAAFCSLALSAPMGSDPPTACCFSYTARKLPRNFVVDYYETSSLCSQPAVV

SEQ ID NO: 14651 - protein, 47 aa, Homo sapiens; identical to SEQ ID NO: 14649
  Payload ID: 2855
  Gene Symbol: CCL4L2
  Gene Name: chemokine (C-C motif) ligand 4-like 2
  Uniprot ID: Q8NHW4
  ENSP ID: ENSP00000481323

SEQ ID NO: 14652 - protein, 52 aa, Homo sapiens
  Payload ID: 2855
  Gene Symbol: CCL4L2
  Gene Name: chemokine (C-C motif) ligand 4-like 2
  Uniprot ID: Q8NHW4
  ENSP ID: ENSP00000481727
MKLCVTVLSLLVLVAAFCSLALSAPNSKPKEASKSALTPVSPGSRSTCMTWN

SEQ ID NO: 14653 - protein, 64 aa, Homo sapiens; identical to SEQ ID NO: 14650
  Payload ID: 2855
  Gene Symbol: CCL4L2
  Gene Name: chemokine (C-C motif) ligand 4-like 2
  Uniprot ID: Q8NHW4
  ENSP ID: ENSP00000481969

SEQ ID NO: 14654 - protein, 96 aa, Homo sapiens
  Payload ID: 2855
  Gene Symbol: CCL4L2
  Gene Name: chemokine (C-C motif) ligand 4-like 2
  Uniprot ID: Q8NHW4
  ENSP ID: ENSP00000482862
MKLCVTVLSLLVLVAAFCSLALSAPMGSDPPTACCFSYTARKLPRNFVVDYYETSSLCSQPAVVAAPGRIPSTRAAPHGPWSGRGRCLPQARDKAR

SEQ ID NO: 14655 - protein, 96 aa, Homo sapiens; identical to SEQ ID NO: 14654
  Payload ID: 2855
  Gene Symbol: CCL4L2
  Gene Name: chemokine (C-C motif) ligand 4-like 2
  Uniprot ID: Q8NHW4
  ENSP ID: ENSP00000483206

SEQ ID NO: 14656 - protein, 103 aa, Homo sapiens
  Payload ID: 2855
  Gene Symbol: CCL4L2
  Gene Name: chemokine (C-C motif) ligand 4-like 2
  Uniprot ID: Q8NHW4
  ENSP ID: ENSP00000483330
MKLCVTVLSLLVLVAAFCSLALSAPMGSDPPTACCFSYTARKLPRNFVVDYYETSSLCSQPAVVEWKLQGVCFQCCSGKDPIHQSCPTWTMVRQRKMPTTGKG

SEQ ID NO: 14657 - protein, 92 aa, Homo sapiens; identical to SEQ ID NO: 14645
  Payload ID: 2855
  Gene Symbol: CCL4L2
  Gene Name: chemokine (C-C motif) ligand 4-like 2
  Uniprot ID: Q8NHW4
  ENSP ID: ENSP00000483609

SEQ ID NO: 14658 - protein, 86 aa, Homo sapiens
  Payload ID: 2855
  Gene Symbol: CCL4L2
  Gene Name: chemokine (C-C motif) ligand 4-like 2
  ENSP ID: ENSP00000484148
MKLCVTVLSLLVLVAAFCSLALSAPMGSDPPTACCFSYTARKLPRNFVVDYYETSSLCSQPAVVAAPHGPWSGRGRCLPQARDKAR

SEQ ID NO: 14659 - protein, 92 aa, Homo sapiens; identical to SEQ ID NO: 14645
  Payload ID: 2855
  Gene Symbol: CCL4L2
  Gene Name: chemokine (C-C motif) ligand 4-like 2
  ENSP ID: ENSP00000484322

SEQ ID NO: 14660 - protein, 68 aa, Homo sapiens
  Payload ID: 2855
  Gene Symbol: CCL4L2
  Gene Name: chemokine (C-C motif) ligand 4-like 2
  Uniprot ID: Q8NHW4
  ENSP ID: ENSP00000484455
MKLCVTVLSLLVLVAAFCSLALSAPTKSSEWKLQGVCFQCCSGKDPIHQSCPTWTMVRQRKMPTTGKG

SEQ ID NO: 14661 - protein, 86 aa, Homo sapiens; identical to SEQ ID NO: 14658
  Payload ID: 2855
  Gene Symbol: CCL4L2
  Gene Name: chemokine (C-C motif) ligand 4-like 2
  Uniprot ID: Q8NHW4
  ENSP ID: ENSP00000484498

SEQ ID NO: 14662 - protein, 96 aa, Homo sapiens; identical to SEQ ID NO: 14654
  Payload ID: 2855
  Gene Symbol: CCL4L2
  Gene Name: chemokine (C-C motif) ligand 4-like 2
  ENSP ID: ENSP00000487651

SEQ ID NO: 14663 - protein, 64 aa, Homo sapiens; identical to SEQ ID NO: 14650
  Payload ID: 2855
  Gene Symbol: CCL4L2
  Gene Name: chemokine (C-C motif) ligand 4-like 2
  Uniprot ID: Q8NHW4
  ENSP ID: ENSP00000487715

SEQ ID NO: 14664 - protein, 103 aa, Homo sapiens; identical to SEQ ID NO: 14648
  Payload ID: 2855
  Gene Symbol: CCL4L2
  Gene Name: chemokine (C-C motif) ligand 4-like 2
  ENSP ID: ENSP00000487792

SEQ ID NO: 14665 - protein, 103 aa, Homo sapiens [sequence omitted]

SEQ ID NO: 14666 - protein, 87 aa, Homo sapiens; identical to SEQ ID NO: 14647
  Payload ID: 2855
  Gene Symbol: CCL4L2
  Gene Name: chemokine (C-C motif) ligand 4-like 2
  Uniprot ID: Q8NHW4
  ENSP ID: ENSP00000487859

SEQ ID NO: 14667 - protein, 68 aa, Homo sapiens [sequence omitted]

SEQ ID NO: 14668 - protein, 103 aa, Homo sapiens; identical to SEQ ID NO: 14648
  Payload ID: 2855
  Gene Symbol: CCL4L2
  Gene Name: chemokine (C-C motif) ligand 4-like 2
  Uniprot ID: Q8NHW4
  ENSP ID: ENSP00000487911

SEQ ID NO: 14669 - protein, 103 aa, Homo sapiens
  Payload ID: 2855
  Gene Symbol: CCL4L2
  Gene Name: chemokine (C-C motif) ligand 4-like 2
  ENSP ID: ENSP00000487961
MKLCVTVLSLLVLVAAFCSLALSAPMGSDPPTACCFSYTARKLPRNFVVDYYETSSLCSQPAVVYRESASSAARGRIPSTRAAPHGPWSGRGRCLPQARDKAR

SEQ ID NO: 14670 - protein, 64 aa, Homo sapiens; identical to SEQ ID NO: 14650
  Payload ID: 2855
  Gene Symbol: CCL4L2
  Gene Name: chemokine (C-C motif) ligand 4-like 2
  ENSP ID: ENSP00000488094

SEQ ID NO: 14671 - protein, 86 aa, Homo sapiens; identical to SEQ ID NO: 14658
  Payload ID: 2855
  Gene Symbol: CCL4L2
  Gene Name: chemokine (C-C motif) ligand 4-like 2
  Uniprot ID: Q8NHW4
  ENSP ID: ENSP00000488231

SEQ ID NO: 14672 - protein, 87 aa, Homo sapiens; identical to SEQ ID NO: 14647
  Payload ID: 2855
  Gene Symbol: CCL4L2
  Gene Name: chemokine (C-C motif) ligand 4-like 2
  Uniprot ID: Q8NHW4
  ENSP ID: ENSP00000488366

SEQ ID NO: 14673 - protein, 47 aa, Homo sapiens; identical to SEQ ID NO: 14649
  Payload ID: 2855
  Gene Symbol: CCL4L2
  Gene Name: chemokine (C-C motif) ligand 4-like 2
  ENSP ID: ENSP00000488369

SEQ ID NO: 14674 - protein, 68 aa, Homo sapiens; identical to SEQ ID NO: 14660
  Payload ID: 2855
  Gene Symbol: CCL4L2
  Gene Name: chemokine (C-C motif) ligand 4-like 2
  Uniprot ID: Q8NHW4
  ENSP ID: ENSP00000488430

SEQ ID NO: 14675 - protein, 103 aa, Homo sapiens; identical to SEQ ID NO: 14656
  Payload ID: 2855
  Gene Symbol: CCL4L2
  Gene Name: chemokine (C-C motif) ligand 4-like 2
  Uniprot ID: Q8NHW4
  ENSP ID: ENSP00000488439

SEQ ID NO: 14676 - protein, 86 aa, Homo sapiens; identical to SEQ ID NO: 14658
  Payload ID: 2855
  Gene Symbol: CCL4L2
  Gene Name: chemokine (C-C motif) ligand 4-like 2
  Uniprot ID: Q8NHW4
  ENSP ID: ENSP00000488541

SEQ ID NO: 14677 - protein, 47 aa, Homo sapiens; identical to SEQ ID NO: 14649
  Payload ID: 2855
  Gene Symbol: CCL4L2
  Gene Name: chemokine (C-C motif) ligand 4-like 2
  Uniprot ID: Q8NHW4
  ENSP ID: ENSP00000488687

SEQ ID NO: 14678 - protein, 96 aa, Homo sapiens [sequence omitted]

SEQ ID NO: 14679 - protein, 103 aa, Homo sapiens; identical to SEQ ID NO: 14656
  Payload ID: 2855
  Gene Symbol: CCL4L2
  Gene Name: chemokine (C-C motif) ligand 4-like 2
  ENSP ID: ENSP00000488719

SEQ ID NO: 14680 - protein, 64 aa, Homo sapiens; identical to SEQ ID NO: 14650
  Payload ID: 2855
  Gene Symbol: CCL4L2
  Gene Name: chemokine (C-C motif) ligand 4-like 2
  Uniprot ID: Q8NHW4
  ENSP ID: ENSP00000488736

SEQ ID NO: 14681 - protein, 64 aa, Homo sapiens; identical to SEQ ID NO: 14650
  Payload ID: 2855
  Gene Symbol: CCL4L2
  Gene Name: chemokine (C-C motif) ligand 4-like 2
  Uniprot ID: Q8NHW4
  ENSP ID: ENSP00000488758

SEQ ID NO: 14682 - protein, 64 aa, Homo sapiens; identical to SEQ ID NO: 14650
  Payload ID: 2855
  Gene Symbol: CCL4L2
  Gene Name: chemokine (C-C motif) ligand 4-like 2
  ENSP ID: ENSP00000488897

SEQ ID NO: 14683 - protein, 150 aa, Homo sapiens
  Payload ID: 2856
  Gene Symbol: CCL5
  Gene Name: chemokine (C-C motif) ligand 5
  ENSP ID: ENSP00000474141
  MOD_RES (1)..(1): Any amino acid
XAALAVILIATALCAPASASPYSSDTTPCCFAYIARPLPRAHIKEYFYTSGKCSNPAVVHRSRMPKREGQQVWQDFLYDSRLNKGKLCHPKEPPSVCQPREEMGSGVHQLFGDELGWRVLEPELTQICLFLLALVLAWEASPHYPTPPAP

SEQ ID NO: 14684 - protein, 91 aa, Homo sapiens
  Payload ID: 2856
  Gene Symbol: CCL5
  Gene Name: chemokine (C-C motif) ligand 5
  Uniprot ID: P13501
  ENSP ID: ENSP00000474412
MKVSAAALAVILIATALCAPASASPYSSDTTPCCFAYIARPLPRAHIKEYFYTSGKCSNPAVVFVTRKNRQVCANPEKKWVREYINSLEMS

SEQ ID NO: 14685 - protein, 91 aa, Homo sapiens; identical to SEQ ID NO: 14684
  Payload ID: 2856
  Gene Symbol: CCL5
  Gene Name: chemokine (C-C motif) ligand 5
  Uniprot ID: P13501
  ENSP ID: ENSP00000475057

SEQ ID NO: 14686 - protein, 91 aa, Homo sapiens; identical to SEQ ID NO: 14684
  Payload ID: 2856
  Gene Symbol: CCL5
  Gene Name: chemokine (C-C motif) ligand 5
  Uniprot ID: P13501
  ENSP ID: ENSP00000479894

SEQ ID NO: 14687 - protein, 91 aa, Homo sapiens; identical to SEQ ID NO: 14684
  Payload ID: 2856
  Gene Symbol: CCL5
  Gene Name: chemokine (C-C motif) ligand 5
  ENSP ID: ENSP00000484921

SEQ ID NO: 14688 - protein, 150 aa, Homo sapiens; identical to SEQ ID NO: 14683
  Payload ID: 2856
  Gene Symbol: CCL5
  Gene Name: chemokine (C-C motif) ligand 5
  ENSP ID: ENSP00000488072
  MOD_RES (1)..(1): Any amino acid

SEQ ID NO: 14689 - protein, 99 aa, Homo sapiens
  Payload ID: 2857
  Gene Symbol: CCL7
  Gene Name: chemokine (C-C motif) ligand 7
  Uniprot ID: P80098
  ENSP ID: ENSP00000367832
MKASAALLCLLLTAAAFSPQGLAQPVGINTSTTCCYRFINKKIPKQRLESYRRTTSSHCPREAVIFKTKLDKEICADPTQKWVQDFMKHLDKKTQTPKL

SEQ ID NO: 14690 - protein, 81 aa, Homo sapiens
  Payload ID: 2857
  Gene Symbol: CCL7
  Gene Name: chemokine (C-C motif) ligand 7
  ENSP ID: ENSP00000378124
MKASAALLCLLLTAAAFSPQGLAQPERPRTHPQWTFLLVVSLQLGLILQLPAATDLSIRKSLSRGWRATEGPPVATVPGKL

SEQ ID NO: 14691 - protein, 47 aa, Homo sapiens
  Payload ID: 2857
  Gene Symbol: CCL7
  Gene Name: chemokine (C-C motif) ligand 7
  ENSP ID: ENSP00000378126
MKASAALLCLLLTAAAFSPQGLAQPASRPNWTRRSVLTPHRSGSRTL

SEQ ID NO: 14692 - protein, 99 aa, Homo sapiens
  Payload ID: 2858
  Gene Symbol: CCL8
  Gene Name: chemokine (C-C motif) ligand 8
  Uniprot ID: P80075
  ENSP ID: ENSP00000378118
MKVSAALLCLLLMAATFSPQGLAQPDSVSIPITCCFNVINRKIPIQRLESYTRITNIQCPKEAVIFKTKRGKEVCADPKERWVRDSMKHLDQIFQNLKP

SEQ ID NO: 14693 - protein, 355 aa, Homo sapiens
  Payload ID: 2859
  Gene Symbol: CCR1
  Gene Name: chemokine (C-C motif) receptor 1
  Uniprot ID: P32246
  ENSP ID: ENSP00000296140
METPNTTEDYDTTTEFDYGDATPCQKVNERAFGAQLLPPLYSLVFVIGLVGNILVVLVLVQYKRLKNMTSIYLLNLAISDLLFLFTLPFWIDYKLKDDWVFGDAMCKILSGFYYTGLYSEIFFIILLTIDRYLAIVHAVFALRARTVTFGVITSIIIWALAILASMPGLYFSKTQWEFTHHTCSLHFPHESLREWKLFQALKLNLFGLVLPLLVMIICYTGIIKILLRRPNEKKSKAVRLIFVIMIIFFLFWTPYNLTILISVFQDFLFTHECEQSRHLDLAVQVTEVIAYTHCCVNPVIYAFVGERFRKYLRQLFHRRVAVHLVKWLPFLSVDRLERVSSTSPSTGEHELSAGF

SEQ ID NO: 14694 - protein, 362 aa, Homo sapiens
  Payload ID: 2860
  Gene Symbol: CCR10
  Gene Name: chemokine (C-C motif) receptor 10
  Uniprot ID: P46092
  ENSP ID: ENSP00000332504
MGTEATEQVSWGHYSGDEEDAYSAEPLPELCYKADVQAFSRAFQPSVSLTVAALGLAGNGLVLATHLAARRAARSPTSAHLLQLALADLLLALTLPFAAAGALQGWSLGSATCRTISGLYSASFHAGFLFLACISADRYVAIARALPAGPRPSTPGRAHLVSVIVWLLSLLLALPALLFSQDGQREGQRRCRLIFPEGLTQTVKGASAVAQVALGFALPLGVMVACYALLGRTLLAARGPERRRALRVVVALVAAFVVLQLPYSLALLLDTADLLAARERSCPASKRKDVALLVTSGLALARCGLNPVLYAFLGLRFRQDLRRLLRGGSCPSGPQPRRGCPRRPRLSSCSAPTETHSLSWDN

SEQ ID NO: 14695 - protein, 83 aa, Homo sapiens
  Payload ID: 2860
  Gene Symbol: CCR10
  Gene Name: chemokine (C-C motif) receptor 10
  ENSP ID: ENSP00000467331
MVACYALLGRTLLAARGPERRRALRVVVALVAAFVVLQLPYSLALLLDTADLLAARERSCPASKRKDVALLVTSGLALARCGL

SEQ ID NO: 14696 - protein, 140 aa, Homo sapiens
  Payload ID: 2860
  Gene Symbol: CCR10
  Gene Name: chemokine (C-C motif) receptor 10
  ENSP ID: ENSP00000468135
MVACYALLGRTLLAARGPERRRALRVVVALVAAFVVLQLPYSLALLLDTADLLAARERSCPASKRKDVALLVTSGLALARCGLNPVLYAFLGLRFRQDLRRLLRGGSCPSGPQPRRGCPRRPRLSSCSAPTETHSLSWDN

SEQ ID NO: 14697 - protein, 374 aa, Homo sapiens
  Payload ID: 2861
  Gene Symbol: CCR2
  Gene Name: chemokine (C-C motif) receptor 2
  Uniprot ID: P41597
  ENSP ID: ENSP00000292301
MLSTSRSRFIRNTNESGEEVTTFFDYDYGAPCHKFDVKQIGAQLLPPLYSLVFIFGFVGNMLVVLILINCKKLKCLTDIYLLNLAISDLLFLITLPLWAHSAANEWVFGNAMCKLFTGLYHIGYFGGIFFIILLTIDRYLAIVHAVFALKARTVTFGVVTSVITWLVAVFASVPGIIFTKCQKEDSVYVCGPYFPRGWNNFHTIMRNILGLVLPLLIMVICYSGILKTLLRCRNEKKRHRAVRVIFTIMIVYFLFWTPYNIVILLNTFQEFFGLSNCESTSQLDQATQVTETLGMTHCCINPIIYAFVGEKFRSLFHIALGCRIAPLQKPVCGGPGVRPGKNVKVTTQGLLDGRGKGKSIGRAPEASLQDKEGA

SEQ ID NO: 14698 - protein, 374 aa, Homo sapiens; identical to SEQ ID NO: 14697
  Payload ID: 2861
  Gene Symbol: CCR2
  Gene Name: chemokine (C-C motif) receptor 2
  Uniprot ID: P41597
  ENSP ID: ENSP00000383681

SEQ ID NO: 14699 - protein, 121 aa, Homo sapiens
  Payload ID: 2861
  Gene Symbol: CCR2
  Gene Name: chemokine (C-C motif) receptor 2
  ENSP ID: ENSP00000396736
MLSTSRSRFIRNTNESGEEVTTFFDYDYGAPCHKFDVKQIGAQLLPPLYSLVFIFGFVGNMLVVLILINCKKLKCLTDIYLLNLAISDLLFLITLPLWAHSAANEWVFGNAMCKLFTGLYH

SEQ ID NO: 14700 - protein, 360 aa, Homo sapiens
  Payload ID: 2861
  Gene Symbol: CCR2
  Gene Name: chemokine (C-C motif) receptor 2
  Uniprot ID: P41597
  ENSP ID: ENSP00000399285
MLSTSRSRFIRNTNESGEEVTTFFDYDYGAPCHKFDVKQIGAQLLPPLYSLVFIFGFVGNMLVVLILINCKKLKCLTDIYLLNLAISDLLFLITLPLWAHSAANEWVFGNAMCKLFTGLYHIGYFGGIFFIILLTIDRYLAIVHAVFALKARTVTFGVVTSVITWLVAVFASVPGIIFTKCQKEDSVYVCGPYFPRGWNNFHTIMRNILGLVLPLLIMVICYSGILKTLLRCRNEKKRHRAVRVIFTIMIVYFLFWTPYNIVILLNTFQEFFGLSNCESTSQLDQATQVTETLGMTHCCINPIIYAFVGEKFRRYLSVFFRKHITKRFCKQCPVFYRETVDGVTSTNTPSTGEQEVSAGL

SEQ ID NO: 14701 - protein, 355 aa, Homo sapiens
  Payload ID: 2862
  Gene Symbol: CCR3
  Gene Name: chemokine (C-C motif) receptor 3
  Uniprot ID: P51677
  ENSP ID: ENSP00000350003
MTTSLDTVETFGTTSYYDDVGLLCEKADTRALMAQFVPPLYSLVFTVGLLGNVVVVMILIKYRRLRIMTNIYLLNLAISDLLFLVTLPFWIHYVRGHNWVFGHGMCKLLSGFYHTGLYSEIFFIILLTIDRYLAIVHAVFALRARTVTFGVITSIVTWGLAVLAALPEFIFYETEELFEETLCSALYPEDTVYSWRHFHTLRMTIFCLVLPLLVMAICYTGIIKTLLRCPSKKKYKAIRLIFVIMAVFFIFWTPYNVAILLSSYQSILFGNDCERSKHLDLVMLVTEVIAYSHCCMNPVIYAFVGERFRKYLRHFFHRHLLMHLGRYIPFLPSEKLERTSSVSPSTAEPELSIVF

SEQ ID NO: 14702 - protein, 355 aa, Homo sapiens; identical to SEQ ID NO: 14701
  Payload ID: 2862
  Gene Symbol: CCR3
  Gene Name: chemokine (C-C motif) receptor 3
  Uniprot ID: P51677
  ENSP ID: ENSP00000379271

SEQ ID NO: 14703 - protein, 355 aa, Homo sapiens; identical to SEQ ID NO: 14701
  Payload ID: 2862
  Gene Symbol: CCR3
  Gene Name: chemokine (C-C motif) receptor 3
  Uniprot ID: P51677
  ENSP ID: ENSP00000379273

SEQ ID NO: 14704 - protein, 80 aa, Homo sapiens
  Payload ID: 2862
  Gene Symbol: CCR3
  Gene Name: chemokine (C-C motif) receptor 3
  ENSP ID: ENSP00000389336
MTTSLDTVETFGTTSYYDDVGLLCEKADTRALMAQFVPPLYSLVFTVGLLGNVVVVMILIKYRRLRIMTNIYLLNLAISD

SEQ ID NO: 14705 - protein, 21 aa, Homo sapiens
  Payload ID: 2862
  Gene Symbol: CCR3
  Gene Name: chemokine (C-C motif) receptor 3
  ENSP ID: ENSP00000401822
MTTSLDTVETFGTTSYYDDVG

SEQ ID NO: 14706 - protein, 376 aa, Homo sapiens
  Payload ID: 2862
  Gene Symbol: CCR3
  Gene Name: chemokine (C-C motif) receptor 3
  Uniprot ID: P51677
  ENSP ID: ENSP00000441600
MPFGIRMLLRAHKPGSSRRSEMTTSLDTVETFGTTSYYDDVGLLCEKADTRALMAQFVPPLYSLVFTVGLLGNVVVVMILIKYRRLRIMTNIYLLNLAISDLLFLVTLPFWIHYVRGHNWVFGHGMCKLLSGFYHTGLYSEIFFIILLTIDRYLAIVHAVFALRARTVTFGVITSIVTWGLAVLAALPEFIFYETEELFEETLCSALYPEDTVYSWRHFHTLRMTIFCLVLPLLVMAICYTGIIKTLLRCPSKKKYKAIRLIFVIMAVFFIFWTPYNVAILLSSYQSILFGNDCERSKHLDLVMLVTEVIAYSHCCMNPVIYAFVGERFRKYLRHFFHRHLLMHLGRYIPFLPSEKLERTSSVSPSTAEPELSIVF

SEQ ID NO: 14707 - protein, 360 aa, Homo sapiens
  Payload ID: 2863
  Gene Symbol: CCR4
  Gene Name: chemokine (C-C motif) receptor 4
  Uniprot ID: P51679
  ENSP ID: ENSP00000332659
MNPTDIADTTLDESIYSNYYLYESIPKPCTKEGIKAFGELFLPPLYSLVFVFGLLGNSVVVLVLFKYKRLRSMTDVYLLNLAISDLLFVFSLPFWGYYAADQWVFGLGLCKMISWMYLVGFYSGIFFVMLMSIDRYLAIVHAVFSLRARTLTYGVITSLATWSVAVFASLPGFLFSTCYTERNHTYCKTKYSLNSTTWKVLSSLEINILGLVIPLGIMLFCYSMIIRTLQHCKNEKKNKAVKMIFAVVVLFLGFWTPYNIVLFLETLVELEVLQDCTFERYLDYAIQATETLAFVHCCLNPIIYFFLGEKFRKYILQLFKTCRGLFVLCQYCGLLQIYSADTPSSSYTQSTMDHDLHDAL

SEQ ID NO: 14708 - protein, 352 aa, Homo sapiens [sequence omitted]

SEQ ID NO: 14709 - protein, 352 aa, Homo sapiens [sequence omitted]

SEQ ID NO: 14710 - protein, 374 aa, Homo sapiens
  Payload ID: 2865
  Gene Symbol: CCR6
  Gene Name: chemokine (C-C motif) receptor 6
  Uniprot ID: P51684
  ENSP ID: ENSP00000339393
MSGESMNFSDVFDSSEDYFVSVNTSYYSVDSEMLLCSLQEVRQFSRLFVPIAYSLICVFGLLGNILVVITFAFYKKARSMTDVYLLNMAIADILFVLTLPFWAVSHATGAWVFSNATCKLLKGIYAINFNCGMLLLTCISMDRYIAIVQATKSFRLRSRTLPRSKIICLVVWGLSVIISSSTFVFNQKYNTQGSDVCEPKYQTVSEPIRWKLLMLGLELLFGFFIPLMFMIFCYTFIVKTLVQAQNSKRHKAIRVIIAVVLVFLACQIPHNMVLLVTAANLGKMNRSCQSEKLIGYTKTVTEVLAFLHCCLNPVLYAFIGQKFRNYFLKILKDLWCVRRKYKSSGFSCAGRYSENISRQTSETADNDNASSFTM

SEQ ID NO: 14711 - protein, 374 aa, Homo sapiens; identical to SEQ ID NO: 14710
  Payload ID: 2865
  Gene Symbol: CCR6
  Gene Name: chemokine (C-C motif) receptor 6
  Uniprot ID: P51684
  ENSP ID: ENSP00000343952

SEQ ID NO: 14712 - protein, 374 aa, Homo sapiens; identical to SEQ ID NO: 14710
  Payload ID: 2865
  Gene Symbol: CCR6
  Gene Name: chemokine (C-C motif) receptor 6
  Uniprot ID: P51684
  ENSP ID: ENSP00000383715

SEQ ID NO: 14713 - protein, 378 aa, Homo sapiens
  Payload ID: 2866
  Gene Symbol: CCR7
  Gene Name: chemokine (C-C motif) receptor 7
  Uniprot ID: P32248
  ENSP ID: ENSP00000246657
MDLGKPMKSVLVVALLVIFQVCLCQDEVTDDYIGDNTTVDYTLFESLCSKKDVRNFKAWFLPIMYSIICFVGLLGNGLVVLTYIYFKRLKTMTDTYLLNLAVADILFLLTLPFWAYSAAKSWVFGVHFCKLIFAIYKMSFFSGMLLLLCISIDRYVAIVQAVSAHRHRARVLLISKLSCVGIWILATVLSIPELLYSDLQRSSSEQAMRCSLITEHVEAFITIQVAQMVIGFLVPLLAMSFCYLVIIRTLLQARNFERNKAIKVIIAVVVVFIVFQLPYNGVVLAQTVANFNITSSTCELSKQLNIAYDVTYSLACVRCCVNPFLYAFIGVKFRNDLFKLFKDLGCLSQEQLRQWSSCRHIRRSSMSVEAETTTTFSP

SEQ ID NO: 14714 - protein, 372 aa, Homo sapiens
  Payload ID: 2866
  Gene Symbol: CCR7
  Gene Name: chemokine (C-C motif) receptor 7
  ENSP ID: ENSP00000462631
MKSVLVVALLVIFQVCLCQDEVTDDYIGDNTTVDYTLFESLCSKKDVRNFKAWFLPIMYSIICFVGLLGNGLVVLTYIYFKRLKTMTDTYLLNLAVADILFLLTLPFWAYSAAKSWVFGVHFCKLIFAIYKMSFFSGMLLLLCISIDRYVAIVQAVSAHRHRARVLLISKLSCVGIWILATVLSIPELLYSDLQRSSSEQAMRCSLITEHVEAFITIQVAQMVIGFLVPLLAMSFCYLVIIRTLLQARNFERNKAIKVIIAVVVVFIVFQLPYNGVVLAQTVANFNITSSTCELSKQLNIAYDVTYSLACVRCCVNPFLYAFIGVKFRNDLFKLFKDLGCLSQEQLRQWSSCRHIRRSSMSVEAETTTTFSP

SEQ ID NO: 14715 - protein, 199 aa, Homo sapiens
  Payload ID: 2866
  Gene Symbol: CCR7
  Gene Name: chemokine (C-C motif) receptor 7
  ENSP ID: ENSP00000463075
MYSIICFVGLLGNGLVVLTYIYFKRLKTMTDTYLLNLAVADILFLLTLPFWAYSAAKSWVFGVHFCKLIFAIYKMSFFSGMLLLLCISIDRYVAIVQAVSAHRHRARVLLISKLSCVGIWILATVLSIPELLYSDLQRSSSEQAMRCSLITEHVEAFITIQVAQMVIGFLVPLLAMSFCYLVIIRTLLQARNFERNKAI

SEQ ID NO: 14716 - protein, 355 aa, Homo sapiens
  Payload ID: 2867
  Gene Symbol: CCR8
  Gene Name: chemokine (C-C motif) receptor 8
  Uniprot ID: P51685
  ENSP ID: ENSP00000326432
MDYTLDLSVTTVTDYYYPDIFSSPCDAELIQTNGKLLLAVFYCLLFVFSLLGNSLVILVLVVCKKLRSITDVYLLNLALSDLLFVFSFPFQTYYLLDQWVFGTVMCKVVSGFYYIGFYSSMFFITLMSVDRYLAVVHAVYALKVRTIRMGTTLCLAVWLTAIMATIPLLVFYQVASEDGVLQCYSFYNQQTLKWKIFTNFKMNILGLLIPFTIFMFCYIKILHQLKRCQNHNKTKAIRLVLIVVIASLLFWVPFNVVLFLTSLHSMHILDGCSISQQLTYATHVTEIISFTHCCVNPVIYAFVGEKFKKHLSEIFQKSCSQIFNYLGRQMPRESCEKSSSCQQHSSRSSSVDYIL

SEQ ID NO: 14717 - protein, 118 aa, Homo sapiens
  Payload ID: 2867
  Gene Symbol: CCR8
  Gene Name: chemokine (C-C motif) receptor 8
  ENSP ID: ENSP00000390104
MDYTLDLSVTTVTDYYYPDIFSSPCDAELIQTNDLLSAGPVGVWDCNVQSGVWLLLHWLLQQHVFHHPHECGQVPGCCPCRVCPKGEDDQDGHNAVPGSMANRHYGYHPIASVLPSGL

SEQ ID NO: 14718 - protein, 357 aa, Homo sapiens
  Payload ID: 2868
  Gene Symbol: CCR9
  Gene Name: chemokine (C-C motif) receptor 9
  Uniprot ID: P51686
  ENSP ID: ENSP00000348260
MADDYGSESTSSMEDYVNFNFTDFYCEKNNVRQFASHFLPPLYWLVFIVGALGNSLVILVYWYCTRVKTMTDMFLLNLAIADLLFLVTLPFWAIAAADQWKFQTFMCKVVNSMYKMNFYSCVLLIMCISVDRYIAIAQAMRAHTWREKRLLYSKMVCFTIWVLAAALCIPEILYSQIKEESGIAICTMVYPSDESTKLKSAVLTLKVILGFFLPFVVMACCYTIIIHTLIQAKKSSKHKALKVTITVLTVFVLSQFPYNCILLVQTIDAYAMFISNCAVSTNIDICFQVTQTIAFFHSCLNPVLYVFVGERFRRDLVKTLKNLGCISQAQWVSFTRREGSLKLSSMLLETTSGALSL

SEQ ID NO: 14719 - protein, 369 aa, Homo sapiens
  Payload ID: 2868
  Gene Symbol: CCR9
  Gene Name: chemokine (C-C motif) receptor 9
  Uniprot ID: P51686
  ENSP ID: ENSP00000350256
MTPTDFTSPIPNMADDYGSESTSSMEDYVNFNFTDFYCEKNNVRQFASHFLPPLYWLVFIVGALGNSLVILVYWYCTRVKTMTDMFLLNLAIADLLFLVTLPFWAIAAADQWKFQTFMCKVVNSMYKMNFYSCVLLIMCISVDRYIAIAQAMRAHTWREKRLLYSKMVCFTIWVLAAALCIPEILYSQIKEESGIAICTMVYPSDESTKLKSAVLTLKVILGFFLPFVVMACCYTIIIHTLIQAKKSSKHKALKVTITVLTVFVLSQFPYNCILLVQTIDAYAMFISNCAVSTNIDICFQVTQTIAFFHSCLNPVLYVFVGERFRRDLVKTLKNLGCISQAQWVSFTRREGSLKLSSMLLETTSGALSL

SEQ ID NO: 14720 - protein, 357 aa, Homo sapiens; identical to SEQ ID NO: 14718
  Payload ID: 2868
  Gene Symbol: CCR9
  Gene Name: chemokine (C-C motif) receptor 9
  Uniprot ID: P51686
  ENSP ID: ENSP00000379292

SEQ ID NO: 14721 - protein, 107 aa, Homo sapiens
  Payload ID: 2868
  Gene Symbol: CCR9
  Gene Name: chemokine (C-C motif) receptor 9
  ENSP ID: ENSP00000393267
MTPTDFTSPPGPAPDHLPSLAQESISFQDLSPGLTQALFLTWLMTMALNPHLPWKTTLTSTSLTSTVRKTMSGSLRAISSHPCTGSCSSWVPWATVLLSLSTGTAQE

SEQ ID NO: 14722 - protein, 356 aa, Homo sapiens
  Payload ID: 2869
  Gene Symbol: CCRL2
  Gene Name: chemokine (C-C motif) receptor-like 2
  Uniprot ID: O00421
  ENSP ID: ENSP00000349967
MIYTRFLKGSLKMANYTLAPEDEYDVLIEGELESDEAEQCDKYDAQALSAQLVPSLCSAVFVIGVLDNLLVVLILVKYKGLKRVENIYLLNLAVSNLCFLLTLPFWAHAGGDPMCKILIGLYFVGLYSETFFNCLLTVQRYLVFLHKGNFFSARRRVPCGIITSVLAWVTAILATLPEFVVYKPQMEDQKYKCAFSRTPFLPADETFWKHFLTLKMNISVLVLPLFIFTFLYVQMRKTLRFREQRYSLFKLVFAIMVVFLLMWAPYNIAFFLSTFKEHFSLSDCKSSYNLDKSVHITKLIATTHCCINPLLYAFLDGTFSKYLCRCFHLRSNTPLQPRGQSAQGTSREEPDHSTEV

SEQ ID NO: 14723 - protein, 344 aa, Homo sapiens
  Payload ID: 2869
  Gene Symbol: CCRL2
  Gene Name: chemokine (C-C motif) receptor-like 2
  Uniprot ID: O00421
  ENSP ID: ENSP00000381994
MANYTLAPEDEYDVLIEGELESDEAEQCDKYDAQALSAQLVPSLCSAVFVIGVLDNLLVVLILVKYKGLKRVENIYLLNLAVSNLCFLLTLPFWAHAGGDPMCKILIGLYFVGLYSETFFNCLLTVQRYLVFLHKGNFFSARRRVPCGIITSVLAWVTAILATLPEFVVYKPQMEDQKYKCAFSRTPFLPADETFWKHFLTLKMNISVLVLPLFIFTFLYVQMRKTLRFREQRYSLFKLVFAIMVVFLLMWAPYNIAFFLSTFKEHFSLSDCKSSYNLDKSVHITKLIATTHCCINPLLYAFLDGTFSKYLCRCFHLRSNTPLQPRGQSAQGTSREEPDHSTEV

SEQ ID NO: 14724 - protein, 344 aa, Homo sapiens; identical to SEQ ID NO: 14723
  Payload ID: 2869
  Gene Symbol: CCRL2
  Gene Name: chemokine (C-C motif) receptor-like 2
  Uniprot ID: O00421
  ENSP ID: ENSP00000383677

SEQ ID NO: 14725 - protein, 344 aa, Homo sapiens; identical to SEQ ID NO: 14723
  Payload ID: 2869
  Gene Symbol: CCRL2
  Gene Name: chemokine (C-C motif) receptor-like 2
  Uniprot ID: O00421
  ENSP ID: ENSP00000383678

SEQ ID NO: 14726 - protein, 217 aa, Homo sapiens
  Payload ID: 2869
  Gene Symbol: CCRL2
  Gene Name: chemokine (C-C motif) receptor-like 2
  ENSP ID: ENSP00000414957
MANYTLAPEDEYDVLIEGELESDEAEQCDKYDAQALSAQLVPSLCSAVFVIGVLDNLLVVLILVKYKGLKRVENIYLLNLAVSNLCFLLTLPFWAHAGGDPMCKILIGLYFVGLYSETFFNCLLTVQRYLVFLHKGNFFSARRRVPCGIITSVLAWVTAILATLPEFVVYKPQMEDQKYKCAFSRTPFLPADETFWKHFLTLKMNISVLVLPLFIFT

SEQ ID NO: 14727 - protein, 397 aa, Homo sapiens
  Payload ID: 2870
  Gene Symbol: CX3CL1
  Gene Name: chemokine (C-X3-C motif) ligand 1
  Uniprot ID: P78423
  ENSP ID: ENSP00000006053
MAPISLSWLLRLATFCHLTVLLAGQHHGVTKCNITCSKMTSKIPVALLIHYQQNQASCGKRAIILETRQHRLFCADPKEQWVKDAMQHLDRQAAALTRNGGTFEKQIGEVKPRTTPAAGGMDESVVLEPEATGESSSLEPTPSSQEAQRALGTSPELPTGVTGSSGTRLPPTPKAQDGGPVGTELFRVPPVSTAATWQSSAPHQPGPSLWAEAKTSEAPSTQDPSTQASTASSPAPEENAPSEGQRVWGQGQSPRPENSLEREEMGPVPAHTDAFQDWGPGSMAHVSVVPVSSEGTPSREPVASGSWTPKAEEPIHATMDPQRLGVLITPVPDAQAATRRQAVGLLAFLGLLFCLGVAMFTYQSLQGCPRKMAGEMAEGLRYIPRSCGSNSYVLVPV

SEQ ID NO: 14728 - protein, 403 aa, Homo sapiens
  Payload ID: 2870
  Gene Symbol: CX3CL1
  Gene Name: chemokine (C-X3-C motif) ligand 1
  ENSP ID: ENSP00000456830
MAPISLSWLLRLATFCHLTVLLAGTSLNSGQHHGVTKCNITCSKMTSKIPVALLIHYQQNQASCGKRAIILETRQHRLFCADPKEQWVKDAMQHLDRQAAALTRNGGTFEKQIGEVKPRTTPAAGGMDESVVLEPEATGESSSLEPTPSSQEAQRALGTSPELPTGVTGSSGTRLPPTPKAQDGGPVGTELFRVPPVSTAATWQSSAPHQPGPSLWAEAKTSEAPSTQDPSTQASTASSPAPEENAPSEGQRVWGQGQSPRPENSLEREEMGPVPAHTDAFQDWGPGSMAHVSVVPVSSEGTPSREPVASGSWTPKAEEPIHATMDPQRLGVLITPVPDAQAATRRQAVGLLAFLGLLFCLGVAMFTYQSLQGCPRKMAGEMAEGLRYIPRSCGSNSYVLVPV

SEQ ID NO: 14729 - protein, 55 aa, Homo sapiens
  Payload ID: 2870
  Gene Symbol: CX3CL1
  Gene Name: chemokine (C-X3-C motif) ligand 1
  ENSP ID: ENSP00000457996
MAPISLSWLLRLATFCHLTVLLAAWRRDSTGCSVPTRRSNGSRTRCSIWTARLLP

SEQ ID NO: 14730 - protein, 359 aa, Homo sapiens
  Payload ID: 2870
  Gene Symbol: CX3CL1
  Gene Name: chemokine (C-X3-C motif) ligand 1
  ENSP ID: ENSP00000464114
MTSKIPVALLIHYQQNQASCGKRAIILETRQHRLFCADPKEQWVKDAMQHLDRQAAALTRNGGTFEKQIGEVKPRTTPAAGGMDESVVLEPEATGESSSLEPTPSSQEAQRALGTSPELPTGVTGSSGTRLPPTPKAQDGGPVGTELFRVPPVSTAATWQSSAPHQPGPSLWAEAKTSEAPSTQDPSTQASTASSPAPEENAPSEGQRVWGQGQSPRPENSLEREEMGPVPAHTDAFQDWGPGSMAHVSVVPVSSEGTPSREPVASGSWTPKAEEPIHATMDPQRLGVLITPVPDAQAATRRQAVGLLAFLGLLFCLGVAMFTYQSLQGCPRKMAGEMAEGLRYIPRSCGSNSYVLVPV

SEQ ID NO: 14731 - protein, 387 aa, Homo sapiens
  Payload ID: 2871
  Gene Symbol: CX3CR1
  Gene Name: chemokine (C-X3-C motif) receptor 1
  Uniprot ID: P49238
  ENSP ID: ENSP00000351059
MREPLEAFKLADLDFRKSSLASGWRMASGAFTMDQFPESVTENFEYDDLAEACYIGDIVVFGTVFLSIFYSVIFAIGLVGNLLVVFALTNSKKPKSVTDIYLLNLALSDLLFVATLPFWTHYLINEKGLHNAMCKFTTAFFFIGFFGSIFFITVISIDRYLAIVLAANSMNNRTVQHGVTISLGVWAAAILVAAPQFMFTKQKENECLGDYPEVLQEIWPVLRNVETNFLGFLLPLLIMSYCYFRIIQTLFSCKNHKKAKAIKLILLVVIVFFLFWTPYNVMIFLETLKLYDFFPSCDMRKDLRLALSVTETVAFSHCCLNPLIYAFAGEKFRRYLYHLYGKCLAVLCGRSVHVDFSSSESQRSRHGSVLSSNFTYHTSDGDALLLL

SEQ ID NO: 14732 - protein, 355 aa, Homo sapiens
  Payload ID: 2871
  Gene Symbol: CX3CR1
  Gene Name: chemokine (C-X3-C motif) receptor 1
  Uniprot ID: P49238
  ENSP ID: ENSP00000382166
MDQFPESVTENFEYDDLAEACYIGDIVVFGTVFLSIFYSVIFAIGLVGNLLVVFALTNSKKPKSVTDIYLLNLALSDLLFVATLPFWTHYLINEKGLHNAMCKFTTAFFFIGFFGSIFFITVISIDRYLAIVLAANSMNNRTVQHGVTISLGVWAAAILVAAPQFMFTKQKENECLGDYPEVLQEIWPVLRNVETNFLGFLLPLLIMSYCYFRIIQTLFSCKNHKKAKAIKLILLVVIVFFLFWTPYNVMIFLETLKLYDFFPSCDMRKDLRLALSVTETVAFSHCCLNPLIYAFAGEKFRRYLYHLYGKCLAVLCGRSVHVDFSSSESQRSRHGSVLSSNFTYHTSDGDALLLL

SEQ ID NO: 14733 - protein, 166 aa, Homo sapiens
  Payload ID: 2871
  Gene Symbol: CX3CR1
  Gene Name: chemokine (C-X3-C motif) receptor 1
  ENSP ID: ENSP00000394960
MDQFPESVTENFEYDDLAEACYIGDIVVFGTVFLSIFYSVIFAIGLVGNLLVVFALTNSKKPKSVTDIYLLNLALSDLLFVATLPFWTHYLINEKGLHNAMCKFTTAFFFIGFFGSIFFITVISIDRYLAIVLAANSMNNRTVQHGVTISLGVWAAAILVAAPQFM

SEQ ID NO: 14734 - protein, 106 aa, Homo sapiens
  Payload ID: 2871
  Gene Symbol: CX3CR1
  Gene Name: chemokine (C-X3-C motif) receptor 1
  ENSP ID: ENSP00000408835
MDQFPESVTENFEYDDLAEACYIGDIVVFGTVFLSIFYSVIFAIGLVGNLLVVFALTNSKKPKSVTDIYLLNLALSDLLFVATLPFWTHYLINEKGLHNAMCKFTT

SEQ ID NO: 14735 - protein, 355 aa, Homo sapiens; identical to SEQ ID NO: 14732
  Payload ID: 2871
  Gene Symbol: CX3CR1
  Gene Name: chemokine (C-X3-C motif) receptor 1
  Uniprot ID: P49238
  ENSP ID: ENSP00000439140

SEQ ID NO: 14736 - protein, 355 aa, Homo sapiens; identical to SEQ ID NO: 14732
  Payload ID: 2871
  Gene Symbol: CX3CR1
  Gene Name: chemokine (C-X3-C motif) receptor 1
  Uniprot ID: P49238
  ENSP ID: ENSP00000444928

SEQ ID NO: 14737 - protein, 107 aa, Homo sapiens
  Payload ID: 2872
  Gene Symbol: CXCL1
  Gene Name: chemokine (C-X-C motif) ligand 1 (melanoma growth stimulating activity, alpha)
  Uniprot ID: P09341
  ENSP ID: ENSP00000379110
MARAALSAAPSNPRLLRVALLLLLLVAAGRRAAGASVATELRCQCLQTLQGIHPKNIQSVNVKSPGPHCAQTEVIATLKNGRKACLNPASPIVKKIIEKMLNSDKSN

SEQ ID NO: 14738 - protein, 98 aa, Homo sapiens
  Payload ID: 2873
  Gene Symbol: CXCL10
  Gene Name: chemokine (C-X-C motif) ligand 10
  Uniprot ID: P02778
  ENSP ID: ENSP00000305651
MNQTAILICCLIFLTLSGIQGVPLSRTVRCTCISISNQPVNPRSLEKLEIIPASQFCPRVEIIATMKKKGEKRCLNPESKAIKNLLKAVSKERSKRSP

SEQ ID NO: 14739 - protein, 94 aa, Homo sapiens
  Payload ID: 2874
  Gene Symbol: CXCL11
  Gene Name: chemokine (C-X-C motif) ligand 11
  Uniprot ID: O14625
  ENSP ID: ENSP00000306884
MSVKGMAIALAVILCATVVQGFPMFKRGRCLCIGPGVKAVKVADIEKASIMYPSNNCDKIEVIITLKENKGQRCLNPKSKQARLIIKKVERKNF

SEQ ID NO: 14740 - protein, 94 aa, Homo sapiens; identical to SEQ ID NO: 14739
  Payload ID: 2874
  Gene Symbol: CXCL11
  Gene Name: chemokine (C-X-C motif) ligand 11
  Uniprot ID: O14625
  ENSP ID: ENSP00000425819

SEQ ID NO: 14741 - protein, 89 aa, Homo sapiens
  Payload ID: 2875
  Gene Symbol: CXCL12
  Gene Name: chemokine (C-X-C motif) ligand 12
  Uniprot ID: P48061
  ENSP ID: ENSP00000339913
MNAKVVVVLVLVLTALCLSDGKPVSLSYRCPCRFFESHVARANVKHLKILNTPNCALQIVARLKNNNRQVCIDPKLKWIQEYLEKALNK

SEQ ID NO: 14742 - protein, 119 aa, Homo sapiens
  Payload ID: 2875
  Gene Symbol: CXCL12
  Gene Name: chemokine (C-X-C motif) ligand 12
  Uniprot ID: P48061
  ENSP ID: ENSP00000363548
MNAKVVVVLVLVLTALCLSDGKPVSLSYRCPCRFFESHVARANVKHLKILNTPNCALQIVARLKNNNRQVCIDPKLKWIQEYLEKALNKGRREEKVGKKEKIGKKKRQKKRKAAQKRKN

SEQ ID NO: 14743 - protein, 93 aa, Homo sapiens
  Payload ID: 2875
  Gene Symbol: CXCL12
  Gene Name: chemokine (C-X-C motif) ligand 12
  Uniprot ID: P48061
  ENSP ID: ENSP00000363551
MNAKVVVVLVLVLTALCLSDGKPVSLSYRCPCRFFESHVARANVKHLKILNTPNCALQIVARLKNNNRQVCIDPKLKWIQEYLEKALNKRFKM

SEQ ID NO: 14744 - protein, 103 aa, Homo sapiens
  Payload ID: 2875
  Gene Symbol: CXCL12
  Gene Name: chemokine (C-X-C motif) ligand 12
  Uniprot ID: P48061
  ENSP ID: ENSP00000379139
MNAKVVVVLVLVLTALCLSDGKPVSLSYRCPCRFFESHYCTCLIRVSFHGATPLTQGSWVLYSLSCAGGETGLREPGPMVSPRVESHQEGRLGVPGPVNLGKA

SEQ ID NO: 14745 - protein, 140 aa, Homo sapiens
  Payload ID: 2875
  Gene Symbol: CXCL12
  Gene Name: chemokine (C-X-C motif) ligand 12
  Uniprot ID: P48061
  ENSP ID: ENSP00000379140
MNAKVVVVLVLVLTALCLSDGKPVSLSYRCPCRFFESHVARANVKHLKILNTPNCALQIVARLKNNNRQVCIDPKLKWIQEYLEKALNNLISAAPAGKRVIAGARALHPSPPRACPTARALCEIRLWPPPEWSWPSPGDV

SEQ ID NO: 14746 - protein, 103 aa, Homo sapiens; identical to SEQ ID NO: 14744
  Payload ID: 2875
  Gene Symbol: CXCL12
  Gene Name: chemokine (C-X-C motif) ligand 12
  Uniprot ID: P48061
  ENSP ID: ENSP00000379141

SEQ ID NO: 14747 - protein, 109 aa, Homo sapiens
  Payload ID: 2876
  Gene Symbol: CXCL13
  Gene Name: chemokine (C-X-C motif) ligand 13
  Uniprot ID: O43927
  ENSP ID: ENSP00000286758
MKFISTSLLLMLLVSSLSPVQGVLEVYYTSLRCRCVQESSVFIPRRFIDRIQILPRGNGCPRKEIIVWKKNKSIVCVDPQAEWIQRMMEVLRKRSSSTLPVPVFKRKIP

SEQ ID NO: 14748 - protein, 111 aa, Homo sapiens
  Payload ID: 2877
  Gene Symbol: CXCL14
  Gene Name: chemokine (C-X-C motif) ligand 14
  Uniprot ID: O95715
  ENSP ID: ENSP00000337065
MSLLPRRAPPVSMRLLAAALLLLLLALYTARVDGSKCKCSRKGPKIRYSDVKKLEMKPKYPHCEEKMVIITTKSVSRYRGQEHCLHPKLQSTKRFIKWYNAWNEKRRVYEE

SEQ ID NO: 14749 - protein, 99 aa, Homo sapiens
  Payload ID: 2877
  Gene Symbol: CXCL14
  Gene Name: chemokine (C-X-C motif) ligand 14
  ENSP ID: ENSP00000423783
MRLLAAALLLLLLALYTARVDGSKCKCSRKGPKIRYSDVKKLEMKPKYPHCEEKMVIITTKSVSRYRGQEHCLHPKLQSTKRFIKWYNAWNEKRRVYEE

SEQ ID NO: 14750 - protein, 273 aa, Homo sapiens
  Payload ID: 2878
  Gene Symbol: CXCL16
  Gene Name: chemokine (C-X-C motif) ligand 16
  Uniprot ID: Q9H2A7
  ENSP ID: ENSP00000293778
MSGSQSEVAPSPQSPRSPEMGRDLRPGSRVLLLLLLLLLVYLTQPGNGNEGSVTGSCYCGKRISSDSPPSVQFMNRLRKHLRAYHRCLYYTRFQLLSWSVCGGNKDPWVQELMSCLDLKECGHAYSGIVAHQKHLLPTSPPISQASEGASSDIHTPAQMLLSTLQSTQRPTLPVGSLSSDKELTRPNETTIHTAGHSLAAGPEAGENQKQPEKNAGPTARTSATVPVLCLLAIIFILTAALSYVLCKRRRGQSPQSSPDLPVHYIPVAPDSNT

SEQ ID NO: 14751 - protein, 273 aa, Homo sapiens; identical to SEQ ID NO: 14750
  Payload ID: 2878
  Gene Symbol: CXCL16
  Gene Name: chemokine (C-X-C motif) ligand 16
  Uniprot ID: Q9H2A7
  ENSP ID: ENSP00000459592

SEQ ID NO: 14752 - protein, 93 aa, Homo sapiens
  Payload ID: 2878
  Gene Symbol: CXCL16
  Gene Name: chemokine (C-X-C motif) ligand 16
  ENSP ID: ENSP00000460145
MNRLRKHLRAYHRCLYYTRFQLLSWSVCGGNKDPWVQELMSCLDLKECGHAYSGIVAHQKHLLPTSPPISQASEGASSDIHTPAQMLLSTLQS

SEQ ID NO: 14753 - protein, 62 aa, Homo sapiens
  Payload ID: 2879
  Gene Symbol: CXCL17
  Gene Name: chemokine (C-X-C motif) ligand 17
  ENSP ID: ENSP00000345317
MKVLISSLLLLLPLMLMSMVSSSLNPGVARGHRDRGQASRRWLQEGGQECECKAMLLFQIGS

SEQ ID NO: 14754 - protein, 119 aa, Homo sapiens
  Payload ID: 2879
  Gene Symbol: CXCL17
  Gene Name: chemokine (C-X-C motif) ligand 17
  Uniprot ID: Q6UXB2
  ENSP ID: ENSP00000472467
MKVLISSLLLLLPLMLMSMVSSSLNPGVARGHRDRGQASRRWLQEGGQECECKDWFLRAPRRKFMTVSGLPKKQCPCDHFKGNVKKTRHQRHHRKPNKHSRACQQFLKQCQLRSFALPL

SEQ ID NO: 14755 - protein, 107 aa, Homo sapiens
  Payload ID: 2880
  Gene Symbol: CXCL2
  Gene Name: chemokine (C-X-C motif) ligand 2
  Uniprot ID: P19875
  ENSP ID: ENSP00000427279
MARATLSAAPSNPRLLRVALLLLLLVAASRRAAGAPLATELRCQCLQTLQGIHLKNIQSVKVKSPGPHCAQTEVIATLKNGQKACLNPASPMVKKIIEKMLKNGKSN

SEQ ID NO: 14756 - protein, 107 aa, Homo sapiens
  Payload ID: 2881
  Gene Symbol: CXCL3
  Gene Name: chemokine (C-X-C motif) ligand 3
  Uniprot ID: P19876
  ENSP ID: ENSP00000296026
MAHATLSAAPSNPRLLRVALLLLLLVAASRRAAGASVVTELRCQCLQTLQGIHLKNIQSVNVRSPGPHCAQTEVIATLKNGKKACLNPASPMVQKIIEKILNKGSTN

SEQ ID NO: 14757 - protein, 114 aa, Homo sapiens
  Payload ID: 2882
  Gene Symbol: CXCL5
  Gene Name: chemokine (C-X-C motif) ligand 5
  Uniprot ID: P42830
  ENSP ID: ENSP00000296027
MSLLSSRAARVPGPSSSLCALLVLLLLLTQPGPIASAGPAAAVLRELRCVCLQTTQGVHPKMISNLQVFAIGPQCSKVEVVASLKNGKEICLDPEAPFLKKVIQKILDGGNKEN

SEQ ID NO: 14758 - protein, 114 aa, Homo sapiens
  Payload ID: 2883
  Gene Symbol: CXCL6
  Gene Name: chemokine (C-X-C motif) ligand 6
  Uniprot ID: P80162
  ENSP ID: ENSP00000226317
MSLPSSRAARVPGPSGSLCALLALLLLLTPPGPLASAGPVSAVLTELRCTCLRVTLRVNPKTIGKLQVFPAGPQCSKVEVVASLKNGKQVCLDPEAPFLKKVIQKILDSGNKKN

SEQ ID NO: 14759 - protein, 113 aa, Homo sapiens
  Payload ID: 2883
  Gene Symbol: CXCL6
  Gene Name: chemokine (C-X-C motif) ligand 6
  ENSP ID: ENSP00000424819
MSLPSSRAARVPGPSGSLCALLALLLLLTPPGPLASAGPVSAVLTELRCTCLRVTLRVNPKTIGKLQVFPAGPQCSKVEVVASLKNGKQVCLDPEAPFLKKVIQKILDRYLSL

SEQ ID NO: 14760 - protein, 99 aa, Homo sapiens
  Payload ID: 2884
  Gene Symbol: CXCL8
  Gene Name: chemokine (C-X-C motif) ligand 8
  Uniprot ID: P10145
  ENSP ID: ENSP00000306512
MTSKLAVALLAAFLISAALCEGAVLPRSAKELRCQCIKTYSKPFHPKFIKELRVIESGPHCANTEIIVKLSDGRELCLDPKENWVQRVVEKFLKRAENS

SEQ ID NO: 14761 - protein, 95 aa, Homo sapiens
  Payload ID: 2884
  Gene Symbol: CXCL8
  Gene Name: chemokine (C-X-C motif) ligand 8
  ENSP ID: ENSP00000385908
MTSKLAVALLAAFLISAALCEGAVLPRSAKELRCQCIKTYSKPFHPKFIKELRVIESGPHCANTEIIVKLSDGRELCLDPKENWVQRVVEKFLKR

SEQ ID NO: 14762 - protein, 125 aa, Homo sapiens
  Payload ID: 2885
  Gene Symbol: CXCL9
  Gene Name: chemokine (C-X-C motif) ligand 9
  Uniprot ID: Q07325
  ENSP ID: ENSP00000354901
MKKSGVLFLLGIILLVLIGVQGTPVVRKGRCSCISTNQGTIHLQSLKDLKQFAPSPSCEKIEIIATLKNGVQTCLNPDSADVKELIKKWEKQVSQKKKQKNGKKHQKKKVLKVRKSQRSRQKKTT

SEQ ID NO: 14763 - protein, 350 aa, Homo sapiens
  Payload ID: 2886
  Gene Symbol: CXCR1
  Gene Name: chemokine (C-X-C motif) receptor 1
  Uniprot ID: P25024
  ENSP ID: ENSP00000295683
MSNITDPQMWDFDDLNFTGMPPADEDYSPCMLETETLNKYVVIIAYALVFLLSLLGNSLVMLVILYSRVGRSVTDVYLLNLALADLLFALTLPIWAASKVNGWIFGTFLCKVVSLLKEVNFYSGILLLACISVDRYLAIVHATRTLTQKRHLVKFVCLGCWGLSMNLSLPFFLFRQAYHPNNSSPVCYEVLGNDTAKWRMVLRILPHTFGFIVPLFVMLFCYGFTLRTLFKAHMGQKHRAMRVIFAVVLIFLLCWLPYNLVLLADTLMRTQVIQESCERRNNIGRALDATEILGFLHSCLNPIIYAFIGQNFRHGFLKILAMHGLVSKEFLARHRVTSYTSSSVNVSSNL

SEQ ID NO: 14764 - protein, 360 aa, Homo sapiens
  Payload ID: 2887
  Gene Symbol: CXCR2
  Gene Name: chemokine (C-X-C motif) receptor 2
  Uniprot ID: P25025
  ENSP ID: ENSP00000319635
MEDFNMESDSFEDFWKGEDLSNYSYSSTLPPFLLDAAPCEPESLEINKYFVVIIYALVFLLSLLGNSLVMLVILYSRVGRSVTDVYLLNLALADLLFALTLPIWAASKVNGWIFGTFLCKVVSLLKEVNFYSGILLLACISVDRYLAIVHATRTLTQKRYLVKFICLSIWGLSLLLALPVLLFRRTVYSSNVSPACYEDMGNNTANWRMLLRILPQSFGFIVPLLIMLFCYGFTLRTLFKAHMGQKHRAMRVIFAVVLIFLLCWLPYNLVLLADTLMRTQVIQETCERRNHIDRALDATEILGILHSCLNPLIYAFIGQKFRHGLLKILAIHGLISKDSLPKDSRPSFVGSSSGHTSTTL

SEQ ID NO: 14765 - protein, 138 aa, Homo sapiens
  Payload ID: 2887
  Gene Symbol: CXCR2
  Gene Name: chemokine (C-X-C motif) receptor 2
  ENSP ID: ENSP00000392348
MEDFNMESDSFEDFWKGEDLSNYSYSSTLPPFLLDAAPCEPESLEINKYFVVIIYALVFLLSLLGNSLVMLVILYSRVGRSVTDVYLLNLALADLLFALTLPIWAASKVNGWIFGTFLCKVVSLLKEVNFYSGILLLA

SEQ ID NO: 14766 - protein, 172 aa, Homo sapiens
  Payload ID: 2887
  Gene Symbol: CXCR2
  Gene Name: chemokine (C-X-C motif) receptor 2
  ENSP ID: ENSP00000392698
MEDFNMESDSFEDFWKGEDLSNYSYSSTLPPFLLDAAPCEPESLEINKYFVVIIYALVFLLSLLGNSLVMLVILYSRVGRSVTDVYLLNLALADLLFALTLPIWAASKVNGWIFGTFLCKVVSLLKEVNFYSGILLLACISVDRYLAIVHATRTLTQKRYLVKFICLSIWGL

SEQ ID NO: 14767 - protein, 15 aa, Homo sapiens
  Payload ID: 2887
  Gene Symbol: CXCR2
  Gene Name: chemokine (C-X-C motif) receptor 2
  ENSP ID: ENSP00000410506
MEDFNMESDSFEDFW

SEQ ID NO: 14768 - protein, 200 aa, Homo sapiens
  Payload ID: 2887
  Gene Symbol: CXCR2
  Gene Name: chemokine (C-X-C motif) receptor 2
  ENSP ID: ENSP00000413686
MEDFNMESDSFEDFWKGEDLSNYSYSSTLPPFLLDAAPCEPESLEINKYFVVIIYALVFLLSLLGNSLVMLVILYSRVGRSVTDVYLLNLALADLLFALTLPIWAASKVNGWIFGTFLCKVVSLLKEVNFYSGILLLACISVDRYLAIVHATRTLTQKRYLVKFICLSIWGLSLLLALPVLLFRRTVYSSNVSPACYEDM

SEQ ID NO: 14769 - protein, 135 aa, Homo sapiens
  Payload ID: 2887
  Gene Symbol: CXCR2
  Gene Name: chemokine (C-X-C motif) receptor 2
  ENSP ID: ENSP00000415148
MEDFNMESDSFEDFWKGEDLSNYSYSSTLPPFLLDAAPCEPESLEINKYFVVIIYALVFLLSLLGNSLVMLVILYSRVGRSVTDVYLLNLALADLLFALTLPIWAASKVNGWIFGTFLCKVVSLLKEVNFYSGIL

SEQ ID NO: 14770 - protein, 15 aa, Homo sapiens
  Payload ID: 2887
  Gene Symbol: CXCR2
  Gene Name: chemokine (C-X-C motif) receptor 2
  ENSP ID: ENSP00000416815
MEDFNMESDSFEDFW

SEQ ID NO: 14771 - protein, 415 aa, Homo sapiens
  Payload ID: 2888
  Gene Symbol: CXCR3
  Gene Name: chemokine (C-X-C motif) receptor 3
  Uniprot ID: P49682
  ENSP ID: ENSP00000362795
MELRKYGPGRLAGTVIGGAAQSKSQTKSDSITKEFLPGLYTAPSSPFPPSQVSDHQVLNDAEVAALLENFSSSYDYGENESDSCCTSPPCPQDFSLNFDRAFLPALYSLLFLLGLLGNGAVAAVLLSRRTALSSTDTFLLHLAVADTLLVLTLPLWAVDAAVQWVFGSGLCKVAGALFNINFYAGALLLACISFDRYLNIVHATQLYRRGPPARVTLTCLAVWGLCLLFALPDFIFLSAHHDERLNATHCQYNFPQVGRTALRVLQLVAGFLLPLLVMAYCYAHILAVLLVSRGQRRLRAMRLVVVVVVAFALCWTPYHLVVLVDILMDLGALARNCGRESRVDVAKSVTSGLGYMHCCLNPLLYAFVGVKFRERMWMLLLRLGCPNQRGLQRQPSSSRRDSSWSETSEASYSGL

SEQ ID NO: 14772 - protein, 368 aa, Homo sapiens
  Payload ID: 2888
  Gene Symbol: CXCR3
  Gene Name: chemokine (C-X-C motif) receptor 3
  Uniprot ID: P49682
  ENSP ID: ENSP00000362797
MVLEVSDHQVLNDAEVAALLENFSSSYDYGENESDSCCTSPPCPQDFSLNFDRAFLPALYSLLFLLGLLGNGAVAAVLLSRRTALSSTDTFLLHLAVADTLLVLTLPLWAVDAAVQWVFGSGLCKVAGALFNINFYAGALLLACISFDRYLNIVHATQLYRRGPPARVTLTCLAVWGLCLLFALPDFIFLSAHHDERLNATHCQYNFPQVGRTALRVLQLVAGFLLPLLVMAYCYAHILAVLLVSRGQRRLRAMRLVVVVVVAFALCWTPYHLVVLVDILMDLGALARNCGRESRVDVAKSVTSGLGYMHCCLNPLLYAFVGVKFRERMWMLLLRLGCPNQRGLQRQPSSSRRDSSWSETSEASYSGL

SEQ ID NO: 14773 - protein, 352 aa, Homo sapiens
  Payload ID: 2889
  Gene Symbol: CXCR4
  Gene Name: chemokine (C-X-C motif) receptor 4
  Uniprot ID: P61073
  ENSP ID: ENSP00000241393
MEGISIYTSDNYTEEMGSGDYDSMKEPCFREENANFNKIFLPTIYSIIFLTGIVGNGLVILVMGYQKKLRSMTDKYRLHLSVADLLFVITLPFWAVDAVANWYFGNFLCKAVHVIYTVNLYSSVLILAFISLDRYLAIVHATNSQRPRKLLAEKVVYVGVWIPALLLTIPDFIFANVSEADDRYICDRFYPNDLWVVVFQFQHIMVGLILPGIVILSCYCIIISKLSHSKGHQKRKALKTTVILILAFFACWLPYYIGISIDSFILLEIIKQGCEFENTVHKWISITEALAFFHCCLNPILYAFLGAKFKTSAQHALTSVSRGSSLKILSKGKRGGHSSVSTESESSSFHSS

SEQ ID NO: 14774 - protein, 356 aa, Homo sapiens
  Payload ID: 2889
  Gene Symbol: CXCR4
  Gene Name: chemokine (C-X-C motif) receptor 4
  Uniprot ID: P61073
  ENSP ID: ENSP00000386884
MSIPLPLLQIYTSDNYTEEMGSGDYDSMKEPCFREENANFNKIFLPTIYSIIFLTGIVGNGLVILVMGYQKKLRSMTDKYRLHLSVADLLFVITLPFWAVDAVANWYFGNFLCKAVHVIYTVNLYSSVLILAFISLDRYLAIVHATNSQRPRKLLAEKVVYVGVWIPALLLTIPDFIFANVSEADDRYICDRFYPNDLWVVVFQFQHIMVGLILPGIVILSCYCIIISKLSHSKGHQKRKALKTTVILILAFFACWLPYYIGISIDSFILLEIIKQGCEFENTVHKWISITEALAFFHCCLNPILYAFLGAKFKTSAQHALTSVSRGSSLKILSKGKRGGHSSVSTESESSSFHSS

SEQ ID NO: 14775 - protein, 372 aa, Homo sapiens
  Payload ID: 2890
  Gene Symbol: CXCR5
  Gene Name: chemokine (C-X-C motif) receptor 5
  Uniprot ID: P32302
  ENSP ID: ENSP00000292174
MNYPLTLEMDLENLEDLFWELDRLDNYNDTSLVENHLCPATEGPLMASFKAVFVPVAYSLIFLLGVIGNVLVLVILERHRQTRSSTETFLFHLAVADLLLVFILPFAVAEGSVGWVLGTFLCKTVIALHKVNFYCSSLLLACIAVDRYLAIVHAVHAYRHRRLLSIHITCGTIWLVGFLLALPEILFAKVSQGHHNNSLPRCTFSQENQAETHAWFTSRFLYHVAGFLLPMLVMGWCYVGVVHRLRQAQRRPQRQKAVRVAILVTSIFFLCWSPYHIVIFLDTLARLKAVDNTCKLNGSLPVAITMCEFLGLAHCCLNPMLYTFAGVKFRSDLSRLLTKLGCTGPASLCQLFPSWRRSSLSESENATSLTTF

SEQ ID NO: 14776 - protein, 342 aa, Homo sapiens
  Payload ID: 2891
  Gene Symbol: CXCR6
  Gene Name: chemokine (C-X-C motif) receptor 6
  Uniprot ID: O00574
  ENSP ID: ENSP00000304414
MAEHDYHEDYGFSSFNDSSQEEHQDFLQFSKVFLPCMYLVVFVCGLVGNSLVLVISIFYHKLQSLTDVFLVNLPLADLVFVCTLPFWAYAGIHEWVFGQVMCKSLLGIYTINFYTSMLILTCITVDRFIVVVKATKAYNQQAKRMTWGKVTSLLIWVISLLVSLPQIIYGNVFNLDKLICGYHDEAISTVVLATQMTLGFFLPLLTMIVCYSVIIKTLLHAGGFQKHRSLKIIFLVMAVFLLTQMPFNLMKFIRSTHWEYYAMTSFHYTIMVTEAIAYLRACLNPVLYAFVSLKFRKNFWKLVKDIGCLPYLGVSHQWKSSEDNSKTFSASHNVEATSMFQL

SEQ ID NO: 14777 - protein, 342 aa, Homo sapiens; identical to SEQ ID NO: 14776
  Payload ID: 2891
  Gene Symbol: CXCR6
  Gene Name: chemokine (C-X-C motif) receptor 6
  Uniprot ID: O00574
  ENSP ID: ENSP00000395704

SEQ ID NO: 14778 - protein, 342 aa, Homo sapiens; identical to SEQ ID NO: 14776
  Payload ID: 2891
  Gene Symbol: CXCR6
  Gene Name: chemokine (C-X-C motif) receptor 6
  Uniprot ID: O00574
  ENSP ID: ENSP00000396218

SEQ ID NO: 14779 - protein, 342 aa, Homo sapiens; identical to SEQ ID NO: 14776
  Payload ID: 2891
  Gene Symbol: CXCR6
  Gene Name: chemokine (C-X-C motif) receptor 6
  Uniprot ID: O00574
  ENSP ID: ENSP00000396886

SEQ ID NO: 14780 - protein, 152 aa, Homo sapiens
  Payload ID: 2892
  Gene Symbol: CKLF
  Gene Name: chemokine-like factor
  Uniprot ID: Q9UBR5
  ENSP ID: ENSP00000264001
MDNVQPKIKHRPFCFSVKGHVKMLRLALTVTSMTFFIIAQAPEPYIVITGFEVTVILFFILLYVLRLDRLMKWLFWPLLDIINSLVTTVFMLIVSVLALIPETTTLTVGGGVFALVTAVCCLADGALIYRKLLFNPSGPYQKKPVHEKKEVL

SEQ ID NO: 14781 - protein, 99 aa, Homo sapiens
  Payload ID: 2892
  Gene Symbol: CKLF
  Gene Name: chemokine-like factor
  Uniprot ID: Q9UBR5
  ENSP ID: ENSP00000264003
MDNVQPKIKHRPFCFSVKGHVKMLRLDIINSLVTTVFMLIVSVLALIPETTTLTVGGGVFALVTAVCCLADGALIYRKLLFNPSGPYQKKPVHEKKEVL

SEQ ID NO: 14782 - protein, 120 aa, Homo sapiens
  Payload ID: 2892
  Gene Symbol: CKLF
  Gene Name: chemokine-like factor
  Uniprot ID: Q9UBR5
  ENSP ID: ENSP00000290771
MDNVQPKIKHRPFCFSVKGHVKMLRLALTVTSMTFFIIAQAPEPYIVITGFEVTVILFFILLYVLRLDRLMKWLFWPLLVFALVTAVCCLADGALIYRKLLFNPSGPYQKKPVHEKKEVL

SEQ ID NO: 14783 - protein, 67 aa, Homo sapiens
  Payload ID: 2892
  Gene Symbol: CKLF
  Gene Name: chemokine-like factor
  Uniprot ID: Q9UBR5
  ENSP ID: ENSP00000355417
MDNVQPKIKHRPFCFSVKGHVKMLRLVFALVTAVCCLADGALIYRKLLFNPSGPYQKKPVHEKKEVL

SEQ ID NO: 14784 - protein, 113 aa, Homo sapiens
  Payload ID: 2892
  Gene Symbol: CKLF
  Gene Name: chemokine-like factor
  Uniprot ID: Q9UBR5
  ENSP ID: ENSP00000416678
MDNVQPKIKHRPFCFSVKGHVKMLRLALTVTSMTFFIIAQAPEPYIVITGFEVTVILFFILLYVLRLDRLMKWLFWPLLDIINSLVTTVFMLIVSVLALIPETTTLTVGGGLF

SEQ ID NO: 14785 - protein, 33 aa, Homo sapiens
  Payload ID: 2892
  Gene Symbol: CKLF
  Gene Name: chemokine-like factor
  ENSP ID: ENSP00000431270
MDNVQPKIKHRPFCFSVKGHVKMLRLHCLVVFM

SEQ ID NO: 14786 - protein, 126 aa, Homo sapiens
  Payload ID: 2893
  Gene Symbol: CBY1
  Gene Name: chibby homolog 1 (Drosophila)
  Uniprot ID: Q9Y3M2
  ENSP ID: ENSP00000216029
MPFFGNTFSPKKTPPRKSASLSNLHSLDRSTREVELGLEYGSPTMNLAGQSLKFENGQWIAETGVSGGVDRREVQRLRRRNQQLEEENNLLRLKVDILLDMLSESTAESHLMEKELDELRISRKRK

SEQ ID NO: 14787 - protein, 126 aa, Homo sapiens; identical to SEQ ID NO: 14786
  Payload ID: 2893
  Gene Symbol: CBY1
  Gene Name: chibby homolog 1 (Drosophila)
  Uniprot ID: Q9Y3M2
  ENSP ID: ENSP00000380026

SEQ ID NO: 14788 - protein, 101 aa, Homo sapiens
  Payload ID: 2893
  Gene Symbol: CBY1
  Gene Name: chibby homolog 1 (Drosophila)
  ENSP ID: ENSP00000412260
MPFFGNTFSPKKTPPRKSASLSNLHSLDRSTREVELGLEYGSPTMNLAGQSLKFENGQWIAETGVSGGVDRREVQRLRRRNQQLEEENNLLRLKVDILLDM

SEQ ID NO: 14789 - protein, 61 aa, Homo sapiens
  Payload ID: 2893
  Gene Symbol: CBY1
  Gene Name: chibby homolog 1 (Drosophila)
  ENSP ID: ENSP00000413934
MPFFGNTFSPKKTPPRKSASLSNLHSLDRSTREVELGLEYGSPTMNLAGQSLKFENGQWIA

SEQ ID NO: 14790 - protein, 169 aa, Homo sapiens
  Payload ID: 2893
  Gene Symbol: CBY1
  Gene Name: chibby homolog 1 (Drosophila)
  ENSP ID: ENSP00000478962
MDKCQKHDVECEKPDANEDSLCNSVHVQWPGEGSTGFAFIRPKMPFFGNTFSPKKTPPRKSASLSNLHSLDRSTREVELGLEYGSPTMNLAGQSLKFENGQWIAETGVSGGVDRREVQRLRRRNQQLEEENNLLRLKVDILLDMLSESTAESHLMEKELDELRISRKRK

SEQ ID NO: 14791 - protein, 242 aa, Homo sapiens
  Payload ID: 2894
  Gene Symbol: CBY3
  Gene Name: chibby homolog 3 (Drosophila)
  Uniprot ID: A6NI87
  ENSP ID: ENSP00000366173
MWASRDHLPEPDLGDAAPPGSPSSFWTSGLPRQERSTSRQRSRGSPSSTCVPYKVHALATFECSATSHASRLWQTLQQFWADHISRPFSPRRPPLRRMPSLSTFYLLDHNTRQAELGLAYGAPCMRLSNQAFVFRGGRWTTESQLARTRSPLLSRTAWGWKAQVQRSKSQVLLEENNYLKLQQELLIDMLTETMARMHLLEKQRNPEVIPTAAARAGQRKMRKRAGASAGVLMIQPCALDSQ

SEQ ID NO: 14792 - protein, 334 aa, Homo sapiens
  Payload ID: 2895
  Gene Symbol: CHN1
  Gene Name: chimerin 1
  Uniprot ID: P15882
  ENSP ID: ENSP00000295497
MPSKESWSGRKTNRAAVHKSKQEGRQQDLLIAALGMKLGSPKSSVTIWQPLKLFAYSQLTSLVRRATLKENEQIPKYEKIHNFKVHTFRGPHWCEYCANFMWGLIAQGVKCADCGLNVHKQCSKMVPNDCKPDLKHVKKVYSCDLTTLVKAHTTKRPMVVDMCIREIESRGLNSEGLYRVSGFSDLIEDVKMAFDRDGEKADISVNMYEDINIITGALKLYFRDLPIPLITYDAYPKFIESAKIMDPDEQLETLHEALKLLPPAHCETLRYLMAHLKRVTLHEKENLMNAENLGIVFGPTLMRSPELDAMAALNDIRYQRLVVELLIKNEDILF

SEQ ID NO: 14793 - protein, 194 aa, Homo sapiens
  Payload ID: 2895
  Gene Symbol: CHN1
  Gene Name: chimerin 1
  ENSP ID: ENSP00000386322
MWGLIAQGVKCAVLEARKSKIKLAAGSVSDCGLNVHKQCSKMVPNDCKPDLKHVKKVYSCDLTTLVKAHTTKRPMVVDMCIREIESRGLNSEGLYRVSGFSDLIEDVKMAFDRDGEKADISVNMYEDINIITGALKLYFRDLPIPLITYDAYPKFIESAKIMDPDEQLETLHEALKLLPPAHCETLRYLMAHLK

SEQ ID NO: 14794 - protein, 275 aa, Homo sapiens
  Payload ID: 2895
  Gene Symbol: CHN1
  Gene Name: chimerin 1
  ENSP ID: ENSP00000386469
MATMGLLMLLTLAASPHFLSICFHHVHTFRGPHWCEYCANFMWGLIAQGVKCADCGLNVHKQCSKMVPNDCKPDLKHVKKVYSCDLTTLVKAHTTKRPMVVDMCIREIESRGLNSEGLYRVSGFSDLIEDVKMAFDRDGEKADISVNMYEDINIITGALKLYFRDLPIPLITYDAYPKFIESAKIMDPDEQLETLHEALKLLPPAHCETLRYLMAHLKRVTLHEKENLMNAENLGIVFGPTLMRSPELDAMAALNDIRYQRLVVELLIKNEDILF

SEQ ID NO: 14795 - protein, 433 aa, Homo sapiens
  Payload ID: 2895
  Gene Symbol: CHN1
  Gene Name: chimerin 1
  Uniprot ID: P15882
  ENSP ID: ENSP00000386470
MALTLFDTDEYRPPVWKSYLYQLQQEAPHPRRITCTCEVENRPKYYGREFHGMISREAADQLLIVAEGSYLIRESQRQPGTYTLALRFGSQTRNFRLYYDGKHFVGEKRFESIHDLVTDGLITLYIETKAAEYIAKMTINPIYEHVGYTTLNREPAYKKHMPVLKETHDERDSTGQDGVSEKRVHTFRGPHWCEYCANFMWGLIAQGVKCADCGLNVHKQCSKMVPNDCKPDLKHVKKVYSCDLTTLVKAHTTKRPMVVDMCIREIESRGLNSEGLYRVSGFSDLIEDVKMAFDRDGEKADISVNMYEDINIITGALKLYFRDLPIPLITYDAYPKFIESAKIMDPDEQLETLHEALKLLPPAHCETLRYLMAHLKRVTLHEKENLMNAENLGIVFGPTLMRSPELDAMAALNDIRYQRLVVELLIKNEDILF

SEQ ID NO: 14796 - protein, 459 aa, Homo sapiens
  Payload ID: 2895
  Gene Symbol: CHN1
  Gene Name: chimerin 1
  Uniprot ID: P15882
  ENSP ID: ENSP00000386741
MALTLFDTDEYRPPVWKSYLYQLQQEAPHPRRITCTCEVENRPKYYGREFHGMISREAADQLLIVAEGSYLIRESQRQPGTYTLALRFGSQTRNFRLYYDGKHFVGEKRFESIHDLVTDGLITLYIETKAAEYIAKMTINPIYEHVGYTTLNREPAYKKHMPVLKETHDERDSTGQDGVSEKRLTSLVRRATLKENEQIPKYEKIHNFKVHTFRGPHWCEYCANFMWGLIAQGVKCADCGLNVHKQCSKMVPNDCKPDLKHVKKVYSCDLTTLVKAHTTKRPMVVDMCIREIESRGLNSEGLYRVSGFSDLIEDVKMAFDRDGEKADISVNMYEDINIITGALKLYFRDLPIPLITYDAYPKFIESAKIMDPDEQLETLHEALKLLPPAHCETLRYLMAHLKRVTLHEKENLMNAENLGIVFGPTLMRSPELDAMAALNDIRYQRLVVELLIKNEDILF

SEQ ID NO: 14797 - protein, 164 aa, Homo sapiens
  Payload ID: 2895
  Gene Symbol: CHN1
  Gene Name: chimerin 1
  ENSP ID: ENSP00000392603
MPSKESWSGRKTNRAAVHKSKQEGRQQDLLIAALGMKLGSPKSSVTIWQPLKLFAYSQLTSLVRRATLKENEQIPKYEKIHNFKVHTFRGPHWCEYCANFMWGLIAQGVKCAVLEARKSKIKLAAGSVSDCGLNVHKQCSKMVPNDCKPDLKHVKKVYSCDLTT

SEQ ID NO: 14798 - protein, 23 aa, Homo sapiens
  Payload ID: 2895
  Gene Symbol: CHN1
  Gene Name: chimerin 1
  ENSP ID: ENSP00000405270
MALTLFDTDEYRPPVWKSYCFMA

SEQ ID NO: 14799 - protein, 186 aa, Homo sapiens
  Payload ID: 2895
  Gene Symbol: CHN1
  Gene Name: chimerin 1
  ENSP ID: ENSP00000409798
MRGGRNRDRLTSLVRRATLKENEQIPKYEKIHNFKVHTFRGPHWCEYCANFMWGLIAQGVKCADCGLNVHKQCSKMVPNDCKPDLKHVKKVYSCDLTTLVKAHTTKRPMVVDMCIREIESRGLNSEGLYRVSGFSDLIEDVKMAFDRDGEKADISVNMYEDINIITGALKLYFRDLPIPLITYDAY

SEQ ID NO: 14800 - protein, 185 aa, Homo sapiens
  Payload ID: 2895
  Gene Symbol: CHN1
  Gene Name: chimerin 1
  ENSP ID: ENSP00000410496
MATMGLLMLLTLAASPHFLSICFHHVCVHTFRGPHWCEYCANFMWGLIAQGVKCADCGLNVHKQCSKMVPNDCKPDLKHVKKVYSCDLTTLVKAHTTKRPMVVDMCIREIESRGLNSEGLYRVSGFSDLIEDVKMAFDRDGEKADISVNMYEDINIITGALKLYFRDLPIPLITYDAYPKFIESA

SEQ ID NO: 14801 - protein, 173 aa, Homo sapiens
  Payload ID: 2895
  Gene Symbol: CHN1
  Gene Name: chimerin 1
  ENSP ID: ENSP00000411911
MWGLIAQGVKCADCGLNVHKQCSKMVPNDCKPDLKHVKKVYSCDLTTLVKAHTTKRPMVVDMCIREIESRGLNSEGLYRVSGFSDLIEDVKMAFDRDGEKADISVNMYEDINIITGALKLYFRDLPIPLITYDAYPKFIESAKIMDPDEQLETLHEALKLLPPAHCETLRYLM

SEQ ID NO: 14802 - protein, 22 aa, Homo sapiens
  Payload ID: 2895
  Gene Symbol: CHN1
  Gene Name: chimerin 1
  ENSP ID: ENSP00000416316
MALTLFDTDEYRPPVWKSYYIL

SEQ ID NO: 14803 - protein, 468 aa, Homo sapiens
  Payload ID: 2896
  Gene Symbol: CHN2
  Gene Name: chimerin 2
  Uniprot ID: P52757
  ENSP ID: ENSP00000222792
MAASSNSSLSGSSVSSDAEEYQPPIWKSYLYQLQQEAPRPKRIICPREVENRPKYYGREFHGIISREQADELLGGVEGAYILRESQRQPGCYTLALRFGNQTLNYRLFHDGKHFVGEKRFESIHDLVTDGLITLYIETKAAEYISKMTTNPIYEHIGYATLLREKVSRRLSRSKNEPRKTNVTHEEHTAVEKISSLVRRAALTHNDNHFNYEKTHNFKVHTFRGPHWCEYCANFMWGLIAQGVRCSDCGLNVHKQCSKHVPNDCQPDLKRIKKVYCCDLTTLVKAHNTQRPMVVDICIREIEARGLKSEGLYRVSGFTEHIEDVKMAFDRDGEKADISANVYPDINIITGALKLYFRDLPIPVITYDTYSKFIDAAKISNADERLEAVHEVLMLLPPAHYETLRYLMIHLKKVTMNEKDNFMNAENLGIVFGPTLMRPPEDSTLTTLHDMRYQKLIVQILIENEDVLF

SEQ ID NO: 14804 - protein, 260 aa, Homo sapiens
  Payload ID: 2896
  Gene Symbol: CHN2
  Gene Name: chimerin 2
  ENSP ID: ENSP00000386849
MFSEELWLENEKKCAVVRKSKQGRKRQELLAVAFGVKVGVKGGFLWPPLKLFACSQISSLVRRAALTHNDNHFNYEKTHNFKVHTFRGPHWCEYCANFMWGLIAQGVRCSDCGLNVHKQCSKHVPNDCQPDLKRIKKVYCCDLTTLVKAHNTQRPMVVDICIREIEAREISNADERLEAVHEVLMLLPPAHYETLRYLMIHLKKVTMNEKDNFMNAENLGIVFGPTLMRPPEDSTLTTLHDMRYQKLIVQILIENEDVLF

SEQ ID NO: 14805 - protein, 174 aa, Homo sapiens
  Payload ID: 2896
  Gene Symbol: CHN2
  Gene Name: chimerin 2
  ENSP ID: ENSP00000386968
MAASSNSSLSGSSVSSVYSEPRSPRELPKYAEEYQPPIWKSYLYQLQQEAPRPKRIICPREVENRPKYYGREFHGIISREQADELLGGVEGAYILRESQRQPGCYTLALRFGNQTLNYRLFHDGKHFVGEKRFESIHDLVTDGLITLYIETKAAEYISKMTTNPIYEHIGYATL

SEQ ID NO: 14806 - protein, 197 aa, Homo sapiens
  Payload ID: 2896
  Gene Symbol: CHN2
  Gene Name: chimerin 2
  ENSP ID: ENSP00000387425
MFSEELWLENEKKCAVVRKSKQGRKRQELLAVAFGVKVGVKGGFLWPPLKLFACSQISSLVRRAALTHNDNHFNYEKTHNFKVHTFRGPHWCEYCANFMWGLIAQGVRCSDCGLNVHKQCSKHVPNDCQPDLKRIKKVYCCDLTTLVKAHNTQRPMVVDICIREIEARGLKSEGLYRVSGFTEHIEDVKMAFDRGLL

SEQ ID NO: 14807 - protein, 274 aa, Homo sapiens
  Payload ID: 2896
  Gene Symbol: CHN2
  Gene Name: chimerin 2
  Uniprot ID: P52757
  ENSP ID: ENSP00000394284
MFSEELWLENEKKCAVVRKSKQGRKRQELLAVAFGVKVGVKGGFLWPPLKLFACSQISSLVRRAALTHNDNHFNYEKTHNFKVHTFRGPHWCEYCANFMWGLIAQGVRCSGLKSEGLYRVSGFTEHIEDVKMAFDRDGEKADISANVYPDINIITGALKLYFRDLPIPVITYDTYSKFIDAAKISNADERLEAVHEVLMLLPPAHYETLRYLMIHLKKVTMNEKDNFMNAENLGIVFGPTLMRPPEDSTLTTLHDMRYQKLIVQILIENEDVLF

SEQ ID NO: 14808 - protein, 180 aa, Homo sapiens
  Payload ID: 2896
  Gene Symbol: CHN2
  Gene Name: chimerin 2
  ENSP ID: ENSP00000396867
NPIYEHIGYATLLREKVSRRLSRSKNEPRKTNVTHEEHTAVEKVHTFRGPHWCEYCANFMWGLIAQGVRCSDCGLNVHKQCSKHVPNDCQPDLKRIKKVYCCDLTTLVKAHNTQRPMVVDICIREIEARGLKSEGLYRVSGFTEHIEDVKMAFDRDGEKADISANVYPDINIITGALKLY

SEQ ID NO: 14809 - protein, 91 aa, Homo sapiens
  Payload ID: 2896
  Gene Symbol: CHN2
  Gene Name: chimerin 2
  ENSP ID: ENSP00000398326
  MOD_RES (1)..(1): Any amino acid
XDVKMAFDRDGEKADISANVYPDINIITGALKLYFRDLPIPVITYDTYSKFIDAAKISNADERLEAVHEVLMLLPPAHYETLRYLMIHLKK

SEQ ID NO: 14810 - protein, 124 aa, Homo sapiens
  Payload ID: 2896
  Gene Symbol: CHN2
  Gene Name: chimerin 2
  ENSP ID: ENSP00000400282
MAASSNSSLSGSSVSSDAEEYQPPIWKSYLYQLQQEAPRPKRIICPREVENRPKYYETLRYLMIHLKKVTMNEKDNFMNAENLGIVFGPTLMRPPEDSTLTTLHDMRYQKLIVQILIENEDVLF

SEQ ID NO: 14811 - protein, 228 aa, Homo sapiens
  Payload ID: 2896
  Gene Symbol: CHN2
  Gene Name: chimerin 2
  ENSP ID: ENSP00000406337
MFSEELWLENEKKCAVVRKSKQGRKRQELLAVAFGVKVGVKGGFLWPPLKLFACSQISSLVRRAALTHNDNHFNYEKTHNFKVHTFRGPHWCEYCANFMWGLIAQGVRCSGLKSEGLYRVSGFTEHIEDVKMAFDREISNADERLEAVHEVLMLLPPAHYETLRYLMIHLKKVTMNEKDNFMNAENLGIVFGPTLMRPPEDSTLTTLHDMRYQKLIVQILIENEDVLF

SEQ ID NO: 14812 - protein, 187 aa, Homo sapiens
  Payload ID: 2896
  Gene Symbol: CHN2
  Gene Name: chimerin 2
  ENSP ID: ENSP00000409843
MTQTHRAKSASSCPNLLVPETWPHQVSASHAGRSKQPQGGILKINEEHRRGAIQDLLASPGFTFGKRVVFDSHCLKRQHTFADGLHSSCTSNAEEYQPPIWKSYLYQLQQEAPRPKRIICPREVENRPKYYGREFHGIISREQADELLGGVEGAYILRESQRQPGCYTLALRFGNQTLNYRLFHDGK

SEQ ID NO: 14813 - protein, 216 aa, Homo sapiens [sequence omitted]

SEQ ID NO: 14814 - protein, 189 aa, Homo sapiens
  Payload ID: 2896
  Gene Symbol: CHN2
  Gene Name: chimerin 2
  ENSP ID: ENSP00000440526
MAASSNSSLSGSSVSSDAEEYQPPIWKSYLYQLQQEAPRPKRIICPREVENRPKYYGREFHGIISREQADELLGGVEGAYILRESQRQPGCYTLALREISNADERLEAVHEVLMLLPPAHYETLRYLMIHLKKVTMNEKDNFMNAENLGIVFGPTLMRPPEDSTLTTLHDMRYQKLIVQILIENEDVLF

SEQ ID NO: 14815 - protein, 136 aa, Homo sapiens
  Payload ID: 2896
  Gene Symbol: CHN2
  Gene Name: chimerin 2
  ENSP ID: ENSP00000441183
  MOD_RES (1)..(1): Any amino acid
XRAKSASSCPNLLVPETWPHQVSASHAGRSKQPQGGILKINEEHRRGAIQMLKNTSLLYGNHTYISYSKRHLVPRESFVLGRWKTDQNIMEESFMGSSLGSRRMSFLEAWRVPTSLEKASGNQDATRWLSGLETRP

SEQ ID NO: 14816 - protein, 182 aa, Homo sapiens
  Payload ID: 2896
  Gene Symbol: CHN2
  Gene Name: chimerin 2
  ENSP ID: ENSP00000444063
MAASSNSSLSGSSVSSDAEEYQPPIWKSYLYQLQQEAPRPKRIICPREVENRPKYYGREFHGIISREQADELLGGVEGAYILRESQRQPGCYTLALRFGNQTLNYRLFHDGKHYETLRYLMIHLKKVTMNEKDNFMNAENLGIVFGPTLMRPPEDSTLTTLHDMRYQKLIVQILIENEDVLF

SEQ ID NO: 14817 - protein, 37 aa, Homo sapiens
  Payload ID: 2896
  Gene Symbol: CHN2
  Gene Name: chimerin 2
  ENSP ID: ENSP00000462650
MTQTHRAKSASSCPNLLVPETWPHQVSASHAGRSKQP

SEQ ID NO: 14818 - protein, 332 aa, Homo sapiens
  Payload ID: 2896
  Gene Symbol: CHN2
  Gene Name: chimerin 2
  Uniprot ID: P52757
  ENSP ID: ENSP00000486515
MFSEELWLENEKKCAVVRKSKQGRKRQELLAVAFGVKVGVKGGFLWPPLKLFACSQISSLVRRAALTHNDNHFNYEKTHNFKVHTFRGPHWCEYCANFMWGLIAQGVRCSDCGLNVHKQCSKHVPNDCQPDLKRIKKVYCCDLTTLVKAHNTQRPMVVDICIREIEARGLKSEGLYRVSGFTEHIEDVKMAFDRDGEKADISANVYPDINIITGALKLYFRDLPIPVITYDTYSKFIDAAKISNADERLEAVHEVLMLLPPAHYETLRYLMIHLKKVTMNEKDNFMNAENLGIVFGPTLMRPPEDSTLTTLHDMRYQKLIVQILIENEDVLF

SEQ ID NO: 14819 - protein, 447 aa, Homo sapiens
  Payload ID: 2897
  Gene Symbol: CHIT1
  Gene Name: chitinase 1 (chitotriosidase)
  Uniprot ID: Q13231
  ENSP ID: ENSP00000255427
MVRSVAWAGFMVLLMIPWGSAAKLVCYFTNWAQYRQGEARFLPKDLDPSLCTHLIYAFAGMTNHQLSTTEWNDETLYQEFNGLKKMFTDMVATANNRQTFVNSAIRFLRKYSFDGLDLDWEYPGSQGSPAVDKERFTTLVQDLANAFQQEAQTSGKERLLLSAAVPAGQTYVDAGYEVDKIAQNLDFVNLMAYDFHGSWEKVTGHNSPLYKRQEESGAAASLNVDAAVQQWLQKGTPASKLILGMPTYGRSFTLASSSDTRVGAPATGSGTPGPFTKEGGMLAYYEVCSWKGATKQRIQDQKVPYIFRDNQWVGFDDVESFKTKVSYLKQKGLGGAMVWALDLDDFAGFSCNQGRYPLIQTLRQELSLPYLPSGTPELEVPKPGQPSEPEHGPSPGQDTFCQGKADGLYPNPRERSSFYSCAAGRLFQQSCPTGLVFSNSCKCCTWN

SEQ ID NO: 14820 - protein, 466 aa, Homo sapiens
  Payload ID: 2897
  Gene Symbol: CHIT1
  Gene Name: chitinase 1 (chitotriosidase)
  Uniprot ID: Q13231
  ENSP ID: ENSP00000356198
MVRSVAWAGFMVLLMIPWGSAAKLVCYFTNWAQYRQGEARFLPKDLDPSLCTHLIYAFAGMTNHQLSTTEWNDETLYQEFNGLKKMNPKLKTLLAIGGWNFGTQKFTDMVATANNRQTFVNSAIRFLRKYSFDGLDLDWEYPGSQGSPAVDKERFTTLVQDLANAFQQEAQTSGKERLLLSAAVPAGQTYVDAGYEVDKIAQNLDFVNLMAYDFHGSWEKVTGHNSPLYKRQEESGAAASLNVDAAVQQWLQKGTPASKLILGMPTYGRSFTLASSSDTRVGAPATGSGTPGPFTKEGGMLAYYEVCSWKGATKQRIQDQKVPYIFRDNQWVGFDDVESFKTKVSYLKQKGLGGAMVWALDLDDFAGFSCNQGRYPLIQTLRQELSLPYLPSGTPELEVPKPGQPSEPEHGPSPGQDTFCQGKADGLYPNPRERSSFYSCAAGRLFQQSCPTGLVFSNSCKCCTWN

SEQ ID NO: 14821 - protein, 361 aa, Homo sapiens
  Payload ID: 2897
  Gene Symbol: CHIT1
  Gene Name: chitinase 1 (chitotriosidase)
  ENSP ID: ENSP00000421617
MVRSVAWAGFMVLLMIPWGSAAKLVCYFTNWAQYRQGEARFLPKDLDPSLCTHLIYAFAGMTNHQLSTTEWNDETLYQEFNGLKKMNPKLKTLLAIGGWNFGTQKFTDMVATANNRQTFVNSAIRFLRKYSFDGLDLDWEYPGSQGSPAVDKERFTTLVQDLANAFQQEAQTSGKERLLLSAAVPAGQTYVDAGYEVDKIAQNLDFVNLMAYDFHGSWEKVTGHNSPLYKRQEESGAAASLNVDAAVQQWLQKGTPASKLILGMPTYGRSFTLASSSDTRVGAPATGSGTPGPFTKEGGMLAYYEVCSWKGATKQRIQDQKVPYIFRDNQWVGFDDVESFKTKVMLTLRQGDCKMTDVQAA

SEQ ID NO: 14822 - protein, 387 aa, Homo sapiens
  Payload ID: 2897
  Gene Symbol: CHIT1
  Gene Name: chitinase 1 (chitotriosidase)
  Uniprot ID: Q13231
  ENSP ID: ENSP00000423778
MVRSVAWAGFMVLLMIPWGSAAKLVCYFTNWAQYRQGEARFLPKDLDPSLCTHLIYAFAGMTNHQLSTTEWNDETLYQEFNGLKKMNPKLKTLLAIGGWNFGTQKFTDMVATANNRQTFVNSAIRFLRKYSFDGLDLDWEYPGSQGSPAVDKERFTTLVQDLANAFQQEAQTSGKERLLLSAAVPAGQTYVDAGYEVDKIAQNLDFVNLMAYDFHGSWEKVTGHNSPLYKRQEESGAAASLNVDAAVQQWLQKGTPASKLILGMPTYGRSFTLASSSDTRVGAPATGSGTPGPFTKEGGMLAYYEVCSWKGATKQRIQDQKVPYIFRDNQWVGFDDVESFKTKVSYLKQKGLGGAMVWALDLDDFAGFSCNQGRYPLIQTLRQELNG

SEQ ID NO: 14823 - protein, 383 aa, Homo sapiens
  Payload ID: 2898
  Gene Symbol: CHI3L1
  Gene Name: chitinase 3-like 1 (cartilage glycoprotein-39)
  Uniprot ID: P36222
  ENSP ID: ENSP00000255409
MGVKASQTGFVVLVLLQCCSAYKLVCYYTSWSQYREGDGSCFPDALDRFLCTHIIYSFANISNDHIDTWEWNDVTLYGMLNTLKNRNPNLKTLLSVGGWNFGSQRFSKIASNTQSRRTFIKSVPPFLRTHGFDGLDLAWLYPGRRDKQHFTTLIKEMKAEFIKEAQPGKKQLLLSAALSAGKVTIDSSYDIAKISQHLDFISIMTYDFHGAWRGTTGHHSPLFRGQEDASPDRFSNTDYAVGYMLRLGAPASKLVMGIPTFGRSFTLASSETGVGAPISGPGIPGRFTKEAGTLAYYEICDFLRGATVHRILGQQVPYATKGNQWVGYDDQESVKSKVQYLKDRQLAGAMVWALDLDDFQGSFCGQDLRFPLTNAIKDALAAT

SEQ ID NO: 14824 - protein, 152 aa, Homo sapiens
  Payload ID: 2898
  Gene Symbol: CHI3L1
  Gene Name: chitinase 3-like 1 (cartilage glycoprotein-39)
  ENSP ID: ENSP00000385350
  MOD_RES (1)..(1): Any amino acid
XLLLSAALSAGKVTIDSSYDIAKISQHLDFISIMTYDFHGAWRGTTGHHSPLFRGQEDASPDRFSNTICDFLRGATVHRILGQQVPYATKGNQWVGYDDQESVKSKVQYLKDRQLAGAMVWALDLDDFQGSFCGQDLRFPLTNAIKDALAAT

SEQ ID NO: 14825 - protein, 380 aa, Homo sapiens
  Payload ID: 2899
  Gene Symbol: CHI3L2
  Gene Name: chitinase 3-like 2
  Uniprot ID: Q15782
  ENSP ID: ENSP00000358759
MGATTMDQKSLWAGSAYKLVCYFTNWSQDRQEPGKFTPENIDPFLCSHLIYSFASIENNKVIIKDKSEVMLYQTINSLKTKNPKLKILLSIGGYLFGSKGFHPMVDSSTSRLEFINSIILFLRNHNFDGLDVSWIYPDQKENTHFTVLIHELAEAFQKDFTKSTKERLLLTAGVSAGRQMIDNSYQVEKLAKDLDFINLLSFDFHGSWEKPLITGHNSPLSKGWQDRGPSSYYNVEYAVGYWIHKGMPSEKVVMGIPTYGHSFTLASAETTVGAPASGPGAAGPITESSGFLAYYEICQFLKGAKITRLQDQQVPYAVKGNQWVGYDDVKSMETKVQFLKNLNLGGAMIWSIDMDDFTGKSCNQGPYPLVQAVKRSLGSL

SEQ ID NO: 14826 - protein, 390 aa, Homo sapiens
  Payload ID: 2899
  Gene Symbol: CHI3L2
  Gene Name: chitinase 3-like 2
  Uniprot ID: Q15782
  ENSP ID: ENSP00000358763
MGATTMDQKSLWAGVVVLLLLQGGSAYKLVCYFTNWSQDRQEPGKFTPENIDPFLCSHLIYSFASIENNKVIIKDKSEVMLYQTINSLKTKNPKLKILLSIGGYLFGSKGFHPMVDSSTSRLEFINSIILFLRNHNFDGLDVSWIYPDQKENTHFTVLIHELAEAFQKDFTKSTKERLLLTAGVSAGRQMIDNSYQVEKLAKDLDFINLLSFDFHGSWEKPLITGHNSPLSKGWQDRGPSSYYNVEYAVGYWIHKGMPSEKVVMGIPTYGHSFTLASAETTVGAPASGPGAAGPITESSGFLAYYEICQFLKGAKITRLQDQQVPYAVKGNQWVGYDDVKSMETKVQFLKNLNLGGAMIWSIDMDDFTGKSCNQGPYPLVQAVKRSLGSL

SEQ ID NO: 14827 - protein, 201 aa, Homo sapiens
  Payload ID: 2899
  Gene Symbol: CHI3L2
  Gene Name: chitinase 3-like 2
  ENSP ID: ENSP00000431968
MGATTMDQKSLWAGVVVLLLLQGGSAYKLVCYFTNWSQDRQEPGKFTPENIDPFLCSHLIYSFASIENNKVIIKDKSEVMLYQTINSLKTKNPKLKILLSIGGYLFGSKGFHPMVDSSTSRLEFINSIILFLRNHNFDGLDVSWIYPDQKENTHFTVLIHELAEAFQKDFTKSTKERLLLTAGVSAGRQMIDNSYQVEKLA

SEQ ID NO: 14828 - protein, 145 aa, Homo sapiens
  Payload ID: 2899
  Gene Symbol: CHI3L2
  Gene Name: chitinase 3-like 2
  ENSP ID: ENSP00000431978
MLYQTINSLKTKFHPMVDSSTSRLEFINSIILFLRNHNFDGLDVSWIYPDQKENTHFTVLIHELAEAFQKDFTKSTKERLLLTAGVSAGRQMIDNSYQVEKLAKDLDFINLLSFDFHGSWEKPLITGHNSPLSKGWQDRGPSSYY

SEQ ID NO: 14829 - protein, 311 aa, Homo sapiens
  Payload ID: 2899
  Gene Symbol: CHI3L2
  Gene Name: chitinase 3-like 2
  Uniprot ID: Q15782
  ENSP ID: ENSP00000432049
MLYQTINSLKTKNPKLKILLSIGGYLFGSKGFHPMVDSSTSRLEFINSIILFLRNHNFDGLDVSWIYPDQKENTHFTVLIHELAEAFQKDFTKSTKERLLLTAGVSAGRQMIDNSYQVEKLAKDLDFINLLSFDFHGSWEKPLITGHNSPLSKGWQDRGPSSYYNVEYAVGYWIHKGMPSEKVVMGIPTYGHSFTLASAETTVGAPASGPGAAGPITESSGFLAYYEICQFLKGAKITRLQDQQVPYAVKGNQWVGYDDVKSMETKVQFLKNLNLGGAMIWSIDMDDFTGKSCNQGPYPLVQAVKRSLGSL

SEQ ID NO: 14830 - protein, 161 aa, Homo sapiens
  Payload ID: 2899
  Gene Symbol: CHI3L2
  Gene Name: chitinase 3-like 2
  ENSP ID: ENSP00000433176
  MOD_RES (1)..(1): Any amino acid
XFTNWSQDRQEPGKFTPENIDPFLCSHLIYSFASIENNKVIIKDKSEVMLYQTINSLKTKNPKLKILLSIGGYLFGSKGDLDFINLLSFDFHGSWEKPLITGHNSPLSKGWQDRGPSSYYNVEYAVGYWIHKGMPSEKVVMGIPTYGHSFTLASAETTVGA

SEQ ID NO: 14831 - protein, 183 aa, Homo sapiens
  Payload ID: 2899
  Gene Symbol: CHI3L2
  Gene Name: chitinase 3-like 2
  ENSP ID: ENSP00000435250
PDQKENTHFTVLIHELAEAFQKDFTKSTKERLLLTAGVSAGRQMIDNSYQVEKLAKDLDFINLLSFDFHGSWEKPLITGHNSPLSKGWQDRGPSSYYNVICQFLKGAKITRLQDQQVPYAVKGNQWVGYDDVKSMETKVQFLKNLNLGGAMIWSIDMDDFTGKSCNQGPYPLVQAVKRSLGSL

SEQ ID NO: 14832 - protein, 42 aa, Homo sapiens
  Payload ID: 2899
  Gene Symbol: CHI3L2
  Gene Name: chitinase 3-like 2
  ENSP ID: ENSP00000435935
YEICQFLKGAKITRLQDQQVPYAVKGNQWVGYDDVKSMETKD

SEQ ID NO: 14833 - protein, 122 aa, Homo sapiens
  Payload ID: 2899
  Gene Symbol: CHI3L2
  Gene Name: chitinase 3-like 2
  ENSP ID: ENSP00000436006
MLYQTINSLKTKNPKLKILLSIGGYLFGSKGFHPMVDSSTSRLEFINSIILFLRNHNFDGLDVSWIYPDQKENTHFTVLIHELAEAFQKDFTKSTKERLLLTAGVSAGRQMIDNSYQVEKLA

SEQ ID NO: 14834 - protein, 220 aa, Homo sapiens
  Payload ID: 2899
  Gene Symbol: CHI3L2
  Gene Name: chitinase 3-like 2
  ENSP ID: ENSP00000436077
MGATTMDQKSLWAGVVVLLLLQGGSAYKLVCYFTNWSQDRQEPGKFTPENIDPFLCSHLIYSFASIENNKVIIKDKSEVMLYQTINSLKTKNPKLKILLSIGGYLFGSKGFHPMVDSSTSRLEFINSIILFLRNHNFDGLDVSWIYPDQKENTHFTVLIHELAEAFQKDFTKSTKERLLLTAGVSAGRQMIDNSYQVEKLAKDLDFINLLSFDFHGSWEK

SEQ ID NO: 14835 - protein, 169 aa, Homo sapiens
  Payload ID: 2899
  Gene Symbol: CHI3L2
  Gene Name: chitinase 3-like 2
  ENSP ID: ENSP00000436272
MLYQTINSLKTKNPKLKILLSIGGYLFGSKGFHPMVDSSTSRLEFINSIILFLRNHNFDGLDVSWIYPDQKENTHFTVLIHELAEAFQKDFTKSTKERLLLTAGVSAGRQMIDNSYQVEKLAKDLDFINLLSFDFHGSWEKPLITGHNSPLSKGWQDRGPSSYYNVEYA

SEQ ID NO: 14836 - protein, 182 aa, Homo sapiens
  Payload ID: 2899
  Gene Symbol: CHI3L2
  Gene Name: chitinase 3-like 2
  ENSP ID: ENSP00000436380
MGATTMDQKSLWAGVVVLLLLQGGSAYKLVCYFTNWSQDRQEPGKFTPENIDPFLCSHLIYSFASIENNKVIIKDKSEVMLYQTINSLKTKNPKLKILLSIGGYLFGSKGFHPMVDSSTSRLEFINSIILFLRNHNFDGLDELAEAFQKDFTKSTKERLLLTAGVSAGRQMIDNSYQVEKLA

SEQ ID NO: 14837 - protein, 390 aa, Homo sapiens; identical to SEQ ID NO: 14826
  Payload ID: 2899
  Gene Symbol: CHI3L2
  Gene Name: chitinase 3-like 2
  Uniprot ID: Q15782
  ENSP ID: ENSP00000437082

SEQ ID NO: 14838 - protein, 311 aa, Homo sapiens; identical to SEQ ID NO: 14829
  Payload ID: 2899
  Gene Symbol: CHI3L2
  Gene Name: chitinase 3-like 2
  Uniprot ID: Q15782
  ENSP ID: ENSP00000437086

SEQ ID NO: 14839 - protein, 393 aa, Homo sapiens
  Payload ID: 2900
  Gene Symbol: CHID1
  Gene Name: chitinase domain containing 1
  Uniprot ID: Q9BWS9
  ENSP ID: ENSP00000325055
MRTLFNLLWLALACSPVHTTLSKSDAKKAASKTLLEKSQFSDKPVQDRGLVVTDLKAESVVLEHRSYCSAKARDRHFAGDVLGYVTPWNSHGYDVTKVFGSKFTQISPVWLQLKRRGREMFEVTGLHDVDQGWMRAVRKHAKGLHIVPRLLFEDWTYDDFRNVLDSEDEIEELSKTVVQVAKNQHFDGFVVEVWNQLLSQKRVGLIHMLTHLAEALHQARLLALLVIPPAITPGTDQLGMFTHKEFEQLAPVLDGFSLMTYDYSTAHQPGPNAPLSWVRACVQVLDPKSKWRSKILLGLNFYGMDYATSKDAREPVVGARYIQTLKDHRPRMVWDSQASEHFFEYKKSRSGRHVVFYPTLKSLQVRLELARELGVGVSIWELGQGLDYFYDLL

SEQ ID NO: 14840 - protein, 393 aa, Homo sapiens; identical to SEQ ID NO: 14839
  Payload ID: 2900
  Gene Symbol: CHID1
  Gene Name: chitinase domain containing 1
  Uniprot ID: Q9BWS9
  ENSP ID: ENSP00000388156

SEQ ID NO: 14841 - protein, 393 aa, Homo sapiens; identical to SEQ ID NO: 14839
  Payload ID: 2900
  Gene Symbol: CHID1
  Gene Name: chitinase domain containing 1
  Uniprot ID: Q9BWS9
  ENSP ID: ENSP00000391255

SEQ ID NO: 14842 - protein, 418 aa, Homo sapiens
  Payload ID: 2900
  Gene Symbol: CHID1
  Gene Name: chitinase domain containing 1
  Uniprot ID: Q9BWS9
  ENSP ID: ENSP00000398722
MRTLFNLLWLALACSPVHTTLSKSDAKKAASKTLLEKVKFCSCCPGWSAMARSWLTATSATQSQFSDKPVQDRGLVVTDLKAESVVLEHRSYCSAKARDRHFAGDVLGYVTPWNSHGYDVTKVFGSKFTQISPVWLQLKRRGREMFEVTGLHDVDQGWMRAVRKHAKGLHIVPRLLFEDWTYDDFRNVLDSEDEIEELSKTVVQVAKNQHFDGFVVEVWNQLLSQKRVGLIHMLTHLAEALHQARLLALLVIPPAITPGTDQLGMFTHKEFEQLAPVLDGFSLMTYDYSTAHQPGPNAPLSWVRACVQVLDPKSKWRSKILLGLNFYGMDYATSKDAREPVVGARYIQTLKDHRPRMVWDSQASEHFFEYKKSRSGRHVVFYPTLKSLQVRLELARELGVGVSIWELGQGLDYFYDLL

SEQ ID NO: 14843 - protein, 362 aa, Homo sapiens
  Payload ID: 2900
  Gene Symbol: CHID1
  Gene Name: chitinase domain containing 1
  Uniprot ID: Q9BWS9
  ENSP ID: ENSP00000416034
MRTLFNLLWLALACSPVHTTLSKSDAKKAASKTLLEKSQFSDKPVQDRGLVVTDLKAESVVLEHRSYCSAKARDRHFAGDVLGYVTPWNSHGYDVTKVFGSKFTQISPVWLQLKRRGREMFEVTGLHDVDQGWMRAVRKHAKGLHIVPRLLFEDWTYDDFRNVLDSEDEIEELSKTVVQVAKNQHFDGFVVEVWNQLLSQKRVTDQLGMFTHKEFEQLAPVLDGFSLMTYDYSTAHQPGPNAPLSWVRACVQVLDPKSKWRSKILLGLNFYGMDYATSKDAREPVVGARYIQTLKDHRPRMVWDSQASEHFFEYKKSRSGRHVVFYPTLKSLQVRLELARELGVGVSIWELGQGLDYFYDLL

SEQ ID NO: 14844 - protein, 108 aa, Homo sapiens
  Payload ID: 2900
  Gene Symbol: CHID1
  Gene Name: chitinase domain containing 1
  ENSP ID: ENSP00000431169
  MOD_RES (1)..(1): Any amino acid
XPKSKWRSKILLGLNFYGMDYATSKDAREPVVGARYIQTLKDHRPRMVWDSQASEHFFEYKKSRSGRHVVFYPTLKSLQVRLELARELGVGVSIWELGQGLDYFYDLL

SEQ ID NO: 14845 - protein, 84 aa, Homo sapiens
  Payload ID: 2900
  Gene Symbol: CHID1
  Gene Name: chitinase domain containing 1
  ENSP ID: ENSP00000431356
  MOD_RES (1)..(1): Any amino acid
XDAREPVVGARYIQTLKDHRPRMVWDSQASEHFFEYKKSRSGRHVVFYPTLKSLQVRLELARELGVGVSIWELGQGLDYFYDLL

SEQ ID NO: 14846 - protein, 26 aa, Homo sapiens
  Payload ID: 2900
  Gene Symbol: CHID1
  Gene Name: chitinase domain containing 1
  ENSP ID: ENSP00000431766
MRTLFNLLWLALACSPVHTTLSKSDA

SEQ ID NO: 14847 - protein, 84 aa, Homo sapiens
  Payload ID: 2900
  Gene Symbol: CHID1
  Gene Name: chitinase domain containing 1
  ENSP ID: ENSP00000432431
MRTLFNLLWLALACSPVHTTLSKSDAKKAASKTLLEKAGAQWRDLGSPQPLPPRFKRFSCFSLPSSWDYRVSFQISRCKTGVWW

SEQ ID NO: 14848 - protein, 162 aa, Homo sapiens
  Payload ID: 2900
  Gene Symbol: CHID1
  Gene Name: chitinase domain containing 1
  ENSP ID: ENSP00000432697
MRTLFNLLWLALACSPVHTTLSKSDAKKAASKTLLEKSQFSDKPVQDRGLVVTDLKAESVVLEHRSYCSAKARDRHFAGDVLGYVTPWNSHGYDVTKVFGSKFTQISPVWLQLKRRGREMFEVTGLHDVDQGSHPSCLTVLAPQAEKSGGCELSGSMPRACT

SEQ ID NO: 14849 - protein, 84 aa, Homo sapiens
  Payload ID: 2900
  Gene Symbol: CHID1
  Gene Name: chitinase domain containing 1
  ENSP ID: ENSP00000433570
MRTLFNLLWLALACSPVHTTLSKSDAKKAASKTLLEKSQFSDKPVQDRGLVVTDLKAESVVLEHRSYCSAKARDRHFAGDVLGY

SEQ ID NO: 14850 - protein, 69 aa, Homo sapiens
  Payload ID: 2900
  Gene Symbol: CHID1
  Gene Name: chitinase domain containing 1
  ENSP ID: ENSP00000433879
LKDHRPRMVWDSQASEHFFEYKKSRSGRHVVFYPTLKSLQVRLELARELGVGVSIWELGQGLDYFYDLL

SEQ ID NO: 14851 - protein, 224 aa, Homo sapiens
  Payload ID: 2900
  Gene Symbol: CHID1
  Gene Name: chitinase domain containing 1
  ENSP ID: ENSP00000434651
MRTLFNLLWLALACSPVHTTLSKSDAKKAASKTLLEKSQFSDKPVQDRGLVVTDLKAESVVLEHRSYCSAKARDRHFAGDVLGYVTPWNSHGYDVTKVFGSKFTQISPVWLQLKRRGREMFEARLLALLVIPPAITPGTDQLGMFTHKEFEQLAPVLDGFSLMTYDYSTAHQPGPNAPLSWVRACVQVLDPKSKWRSKILLGLNFYGMDYATSKDAREPVVGAR

SEQ ID NO: 14852 - protein, 72 aa, Homo sapiens
  Payload ID: 2900
  Gene Symbol: CHID1
  Gene Name: chitinase domain containing 1
  ENSP ID: ENSP00000435336
  MOD_RES (1)..(1): Any amino acid
XQLGMFTHKEFEQLAPVLDGFSLMTYDYSTAHQPGPNAPLSWVRACVQVLDPKSKWRSKILLGLNFYGTSRH

SEQ ID NO: 14853 - protein, 418 aa, Homo sapiens; identical to SEQ ID NO: 14842
  Payload ID: 2900
  Gene Symbol: CHID1
  Gene Name: chitinase domain containing 1
  Uniprot ID: Q9BWS9
  ENSP ID: ENSP00000435503

SEQ ID NO: 14854 - protein, 38 aa, Homo sapiens
  Payload ID: 2900
  Gene Symbol: CHID1
  Gene Name: chitinase domain containing 1
  ENSP ID: ENSP00000435607
MRTLFNLLWLALACSPVHTTLSKSDAKKAASKTLLEKV

SEQ ID NO: 14855 - protein, 119 aa, Homo sapiens
  Payload ID: 2900
  Gene Symbol: CHID1
  Gene Name: chitinase domain containing 1
  ENSP ID: ENSP00000435731
MRTLFNLLWLALACSPVHTTLSKSDAKKAASKTLLEKSQFSDKPVQDRGLVVTDLKAESVVLEHRSYCSAKARDRHFAGDVLGYVTPWNSHGYDVTKVFGSKFTQISPVWLQLKRRGRE

SEQ ID NO: 14856 - protein, 131 aa, Homo sapiens
  Payload ID: 2900
  Gene Symbol: CHID1
  Gene Name: chitinase domain containing 1
  ENSP ID: ENSP00000436017
MRTLFNLLWLALACSPVHTTLSKSDAKKAASKTLLEKSQFSDKPVQDRGLVVTDLKAESVVLEHRSYCSAKARDRHFAGDVLGYVTPWNSHGYDVTKVFGSKFTQISPVWLQLKRRGREMFEVTGLHDVDQ

SEQ ID NO: 14857 - protein, 115 aa, Homo sapiens
  Payload ID: 2900
  Gene Symbol: CHID1
  Gene Name: chitinase domain containing 1
  ENSP ID: ENSP00000436752
MRTLFNLLWLALACSPVHTTLSKSDAKKAASKTLLEKSQFSDKPVQDRGLVVTDLKAESVVLEHRSYCSAKARDRHFAGDVLGYVTPWNSHGYDVTKVFGSKFTQISPVWLQLKR

SEQ ID NO: 14858 - protein, 101 aa, Homo sapiens
  Payload ID: 2901
  Gene Symbol: CHIA
  Gene Name: chitinase, acidic
  ENSP ID: ENSP00000271312
MVSTPENRQTFITSVIKFLRQYEFDGLDFDWEYPGSRGSPPQDKHLFTVLVQMRKLKYREDLSNLPKITQLVGIITSSAVWPQSPLLLSITLGCPLLLRNA

SEQ ID NO: 14859 - protein, 315 aa, Homo sapiens
  Payload ID: 2901
  Gene Symbol: CHIA
  Gene Name: chitinase, acidic
  Uniprot ID: Q9BZP6
  ENSP ID: ENSP00000338970
MREAFEQEAKQINKPRLMVTAAVAAGISNIQSGYEIPQLSQYLDYIHVMTYDLHGSWEGYTGENSPLYKYPTDTGSNAYLNVDYVMNYWKDNGAPAEKLIVGFPTYGHNFILSNPSNTGIGAPTSGAGPAGPYAKESGIWAYYEICTFLKNGATQGWDAPQEVPYAYQGNVWVGYDNIKSFDIKAQWLKHNKFGGAMVWAIDLDDFTGTFCNQGKFPLISTLKKALGLQSASCTAPAQPIEPITAAPSGSGNGSGSSSSGGSSGGSGFCAVRANGLYPVANNRNAFWHCVNGVTYQQNCQAGLVFDTSCDCCNWA

SEQ ID NO: 14860 - protein, 476 aa, Homo sapiens [sequence omitted]

SEQ ID NO: 14861 - protein, 476 aa, Homo sapiens [sequence omitted]

SEQ ID NO: 14862 - protein, 420 aa, Homo sapiens
  Payload ID: 2901
  Gene Symbol: CHIA
  Gene Name: chitinase, acidic
  ENSP ID: ENSP00000387671
ETSSSVHEQVADSGAQAVAFQSGGESSIVWNSQLKTLLAIGGWNFGTAPFTAMVSTPENRQTFITSVIKFLRQYEFDGLDFDWEYPGSRGSPPQDKHLFTVLVQEMREAFEQEAKQINKPRLMVTAAVAAGISNIQSGYEIPQLSQYLDYIHVMTYDLHGSWEGYTGENSPLYKYPTDTGSNAYLNVDYVMNYWKDNGAPAEKLIVGFPTYGHNFILSNPSNTGIGAPTSGAGPAGPYAKESGIWAYYEICTFLKNGATQGWDAPQEVPYAYQGNVWVGYDNIKSFDIKAQWLKHNKFGGAMVWAIDLDDFTGTFCNQGKFPLISTLKKALGLQSASCTAPAQPIEPITAAPSGSGNGSGSSSSGGSSGGSGFCAVRANGLYPVANNRNAFWHCVNGVTYQQNCQAGLVFDTSCDCCNWA

SEQ ID NO: 14863 - protein, 315 aa, Homo sapiens; identical to SEQ ID NO: 14859
  Payload ID: 2901
  Gene Symbol: CHIA
  Gene Name: chitinase, acidic
  Uniprot ID: Q9BZP6
  ENSP ID: ENSP00000390476

SEQ ID NO: 14864 - protein, 368 aa, Homo sapiens
  Payload ID: 2901
  Gene Symbol: CHIA
  Gene Name: chitinase, acidic
  Uniprot ID: Q9BZP6
  ENSP ID: ENSP00000391132
MVSTPENRQTFITSVIKFLRQYEFDGLDFDWEYPGSRGSPPQDKHLFTVLVQEMREAFEQEAKQINKPRLMVTAAVAAGISNIQSGYEIPQLSQYLDYIHVMTYDLHGSWEGYTGENSPLYKYPTDTGSNAYLNVDYVMNYWKDNGAPAEKLIVGFPTYGHNFILSNPSNTGIGAPTSGAGPAGPYAKESGIWAYYEICTFLKNGATQGWDAPQEVPYAYQGNVWVGYDNIKSFDIKAQWLKHNKFGGAMVWAIDLDDFTGTFCNQGKFPLISTLKKALGLQSASCTAPAQPIEPITAAPSGSGNGSGSSSSGGSSGGSGFCAVRANGLYPVANNRNAFWHCVNGVTYQQNCQAGLVFDTSCDCCNWA

SEQ ID NO: 14865 - protein, 287 aa, Homo sapiens
  Payload ID: 2901
  Gene Symbol: CHIA
  Gene Name: chitinase, acidic
  ENSP ID: ENSP00000433309
MREAFEQEAKQINKPRLMVTAAVAAGISNIQSGYEIPQLSQYLDYIHVMTYDLHGSWEGYTGENSPLYKYPTDTGSNAYLNVDYVMNYWKDNGAPAEKLIVGFPTYGHNFILSNPSNTGIGAPTSGAGPAGPYAKESGIWAYYEICTFLKNGATQGWDAPQEVPYAYQGNVWVGYDNIKSFDIKAQWLKHNKFGGAMVWAIDLDDFTGTFCNQGKFPLISTLKKALGLQSASCTAPAQPIEPITAAPSGSGNGSGSSSSGGSSGGSGFCAVRANGLYPVANNRNAFW

SEQ ID NO: 14866 - protein, 315 aa, Homo sapiens; identical to SEQ ID NO: 14859
  Payload ID: 2901
  Gene Symbol: CHIA
  Gene Name: chitinase, acidic
  Uniprot ID: Q9BZP6
  ENSP ID: ENSP00000436946

SEQ ID NO: 14867 - protein, 77 aa, Homo sapiens
  Payload ID: 2902
  Gene Symbol: CTBS
  Gene Name: chitobiase, di-N-acetyl-
  ENSP ID: ENSP00000359659
MSRPQLRRWRLVSSPPSGVPGLALLALLALLALRLAAGTDCPCPEPELCRPIRHHPDFEVSAFLCSSRSGLQGTKRS

SEQ ID NO: 14868 - protein, 385 aa, Homo sapiens
  Payload ID: 2902
  Gene Symbol: CTBS
  Gene Name: chitobiase, di-N-acetyl-
  Uniprot ID: Q01459
  ENSP ID: ENSP00000359664
MSRPQLRRWRLVSSPPSGVPGLALLALLALLALRLAAGTDCPCPEPELCRPIRHHPDFEVFVFDVGQKTWKSYDWSQITTVATFGKYDSELMCYAHSKGARVVLKGDVSLKDIIDPAFRASWIAQKLNLAKTQYMDGINIDIEQEVNCLSPEYDALTALVKETTDSFHREIEGSQVTFDVAWSPKNIDRRCYNYTGIADACDFLFVMSYDEQSQIWSECIAAANAPYNQTLTGYNDYIKMSINPKKLVMGVPWYGYDYTCLNLSEDHVCTIAKVPFRGAPCSDAAGRQVPYKTIMKQINSSISGNLWDKDQRAPYYNYKDPAGHFHQVWYDNPQSISLKATYIQNYRLRGIGMWNANCLDYSGDAVAKQQTEEMWEVLKPKLLQR

SEQ ID NO: 14869 - protein, 77 aa, Homo sapiens; identical to SEQ ID NO: 14867
  Payload ID: 2902
  Gene Symbol: CTBS
  Gene Name: chitobiase, di-N-acetyl-
  ENSP ID: ENSP00000452177

SEQ ID NO: 14870 - protein, 60 aa, Homo sapiens
  Payload ID: 2903
  Gene Symbol: CHKB-CPT1B
  Gene Name: CHKB-CPT1B readthrough (NMD candidate)
  ENSP ID: ENSP00000457031
EDLLVEVSRYALASHFFWGLWSILQASMSTIEFGYLDYAQSRFQFYFQQKGQLTSVHSSS

SEQ ID NO: 14871 - protein, 914 aa, Homo sapiens
  Payload ID: 2904
  Gene Symbol: CLCA1
  Gene Name: chloride channel accessory 1
  Uniprot ID: A8K7I4
  ENSP ID: ENSP00000234701
MGPFKSSVFILILHLLEGALSNSLIQLNNNGYEGIVVAIDPNVPEDETLIQQIKDMVTQASLYLLEATGKRFYFKNVAILIPETWKTKADYVRPKLETYKNADVLVAESTPPGNDEPYTEQMGNCGEKGERIHLTPDFIAGKKLAEYGPQGRAFVHEWAHLRWGVFDEYNNDEKFYLSNGRIQAVRCSAGITGTNVVKKCQGGSCYTKRCTFNKVTGLYEKGCEFVLQSRQTEKASIMFAQHVDSIVEFCTEQNHNKEAPNKQNQKCNLRSTWEVIRDSEDFKKTTPMTTQPPNPTFSLLQIGQRIVCLVLDKSGSMATGNRLNRLNQAGQLFLLQTVELGSWVGMVTFDSAAHVQNELIQINSGSDRDTLAKRLPAAASGGTSICSGLRSAFTVIRKKYPTDGSEIVLLTDGEDNTISGCFNEVKQSGAIIHTVALGPSAAQELEELSKMTGGLQTYASDQVQNNGLIDAFGALSSGNGAVSQRSIQLESKGLTLQNSQWMNGTVIVDSTVGKDTLFLITWTMQPPQILLWDPSGQKQGGFVVDKNTKMAYLQIPGIAKVGTWKYSLQASSQTLTLTVTSRASNATLPPITVTSKTNKDTSKFPSPLVVYANIRQGASPILRASVTALIESVNGKTVTLELLDNGAGADATKDDGVYSRYFTTYDTNGRYSVKVRALGGVNAARRRVIPQQSGALYIPGWIENDEIQWNPPRPEINKDDVQHKQVCFSRTSSGGSFVASDVPNAPIPDLFPPGQITDLKAEIHGGSLINLTWTAPGDDYDHGTAHKYIIRISTSILDLRDKFNESLQVNTTALIPKEANSEEVFLFKPENITFENGTDLFIAIQAVDKVDLKSEISNIARVSLFIPPQTPPETPSPDETSAPCPNIHINSTIPGIHILKIMWKWIGELQLSIA

SEQ ID NO: 14872 - protein, 914 aa, Homo sapiens; identical to SEQ ID NO: 14871
  Payload ID: 2904
  Gene Symbol: CLCA1
  Gene Name: chloride channel accessory 1
  Uniprot ID: A8K7I4
  ENSP ID: ENSP00000378200

SEQ ID NO: 14873 - protein, 943 aa, Homo sapiens
  Payload ID: 2905
  Gene Symbol: CLCA2
  Gene Name: chloride channel accessory 2
  Uniprot ID: Q9UQC9
  ENSP ID: ENSP00000359596
MTQRSIAGPICNLKFVTLLVALSSELPFLGAGVQLQDNGYNGLLIAINPQVPENQNLISNIKEMITEASFYLFNATKRRVFFRNIKILIPATWKANNNSKIKQESYEKANVIVTDWYGAHGDDPYTLQYRGCGKEGKYIHFTPNFLLNDNLTAGYGSRGRVFVHEWAHLRWGVFDEYNNDKPFYINGQNQIKVTRCSSDITGIFVCEKGPCPQENCIISKLFKEGCTFIYNSTQNATASIMFMQSLSSVVEFCNASTHNQEAPNLQNQMCSLRSAWDVITDSADFHHSFPMNGTELPPPPTFSLVQAGDKVVCLVLDVSSKMAEADRLLQLQQAAEFYLMQIVEIHTFVGIASFDSKGEIRAQLHQINSNDDRKLLVSYLPTTVSAKTDISICSGLKKGFEVVEKLNGKAYGSVMILVTSGDDKLLGNCLPTVLSSGSTIHSIALGSSAAPNLEELSRLTGGLKFFVPDISNSNSMIDAFSRISSGTGDIFQQHIQLESTGENVKPHHQLKNTVTVDNTVGNDTMFLVTWQASGPPEIILFDPDGRKYYTNNFITNLTFRTASLWIPGTAKPGHWTYTLNNTHHSLQALKVTVTSRASNSAVPPATVEAFVERDSLHFPHPVMIYANVKQGFYPILNATVTATVEPETGDPVTLRLLDDGAGADVIKNDGIYSRYFFSFAANGRYSLKVHVNHSPSISTPAHSIPGSHAMYVPGYTANGNIQMNAPRKSVGRNEEERKWGFSRVSSGGSFSVLGVPAGPHPDVFPPCKIIDLEAVKVEEELTLSWTAPGEDFDQGQATSYEIRMSKSLQNIQDDFNNAILVNTSKRNPQQAGIREIFTFSPQISTNGPEHQPNGETHESHRIYVAIRAMDRNSLQSAVSNIAQAPLFIPPNSDPVPARDYLILKGVLTAMGLIGIICLIIVVTHHTLSRKKRADKKENGTKLL

SEQ ID NO: 14874 - protein, 919 aa, Homo sapiens
  Payload ID: 2906
  Gene Symbol: CLCA4
  Gene Name: chloride channel accessory 4
  Uniprot ID: Q14CN2
  ENSP ID: ENSP00000359594
MGLFRGFVFLLVLCLLHQSNTSFIKLNNNGFEDIVIVIDPSVPEDEKIIEQIEDMVTTASTYLFEATEKRFFFKNVSILIPENWKENPQYKRPKHENHKHADVIVAPPTLPGRDEPYTKQFTECGEKGEYIHFTPDLLLGKKQNEYGPPGKLFVHEWAHLRWGVFDEYNEDQPFYRAKSKKIEATRCSAGISGRNRVYKCQGGSCLSRACRIDSTTKLYGKDCQFFPDKVQTEKASIMFMQSIDSVVEFCNEKTHNQEAPSLQNIKCNFRSTWEVISNSEDFKNTIPMVTPPPPPVFSLLKISQRIVCLVLDKSGSMGGKDRLNRMNQAAKHFLLQTVENGSWVGMVHFDSTATIVNKLIQIKSSDERNTLMAGLPTYPLGGTSICSGIKYAFQVIGELHSQLDGSEVLLLTDGEDNTASSCIDEVKQSGAIVHFIALGRAADEAVIEMSKITGGSHFYVSDEAQNNGLIDAFGALTSGNTDLSQKSLQLESKGLTLNSNAWMNDTVIIDSTVGKDTFFLITWNSLPPSISLWDPSGTIMENFTVDATSKMAYLSIPGTAKVGTWAYNLQAKANPETLTITVTSRAANSSVPPITVNAKMNKDVNSFPSPMIVYAEILQGYVPVLGANVTAFIESQNGHTEVLELLDNGAGADSFKNDGVYSRYFTAYTENGRYSLKVRAHGGANTARLKLRPPLNRAAYIPGWVVNGEIEANPPRPEIDEDTQTTLEDFSRTASGGAFVVSQVPSLPLPDQYPPSQITDLDATVHEDKIILTWTAPGDNFDVGKVQRYIIRISASILDLRDSFDDALQVNTTDLSPKEANSKESFAFKPENISEENATHIFIAIKSIDKSNLTSKVSNIAQVTLFIPQANPDDIDPTPTPTPTPTPDKSHNSGVNISTLVLSVIGSVVIVNFILSTTI

SEQ ID NO: 14875 - protein, 430 aa, Homo sapiens
  Payload ID: 2907
  Gene Symbol: CLCC1
  Gene Name: chloride channel CLIC-like 1
  Uniprot ID: Q96S66
  ENSP ID: ENSP00000306552
MLCSLLLCECLLLVAGYAHDDDWIDPTDMLNYDAASGTMRKSQAKYGISGEKDVSPDLSCADEISECYHKLDSLTYKIDECEKKKREDYESQSNPVFRRYLNKILIEAGKLGLLAFAQHQAEVAKMEPLNNVCAKKMDWTGSIWEWFRSSWTYKDDPCQKYYELLLVNPIWLVPPTKALAVTFTTFVTEPLKHIGKGTGEFIKALMKEIPALLHLPVLIIMALAILSFCYGAGKSVHVLRHIGGPESEPPQALRPRDRRRQEEIDYRPDGGAGDADFHYRGQMGPTEQGPYAKTYEGRREILRERDVDLRFQTGNKSPEVLRAFDVPDAEAREHPTVVPSHKSPVLDTKPKETGGILGEGTPKESSTESSQSAKPVSGQDTSGNTEGSPAAEKAQLKSEAAGSPDQGSTYSPARGVAGPRGQDPVSSPCG

SEQ ID NO: 14876 - protein, 366 aa, Homo sapiens
  Payload ID: 2907
  Gene Symbol: CLCC1
  Gene Name: chloride channel CLIC-like 1
  Uniprot ID: Q96S66
  ENSP ID: ENSP00000337243
MLCSLLLCECLLLVAGYAHDDDWIDPTDMLNYDAASGTMRKSQAKYGISGEKDVSPDLSCADEISECYHKLDSLTYKIDECEKKKREDYESQSNPVFRRYLNKILIEAGKLGLALAVTFTTFVTEPLKHIGKGTGEFIKALMKEIPALLHLPVLIIMALAILSFCYGAGKSVHVLRHIGGPESEPPQALRPRDRRRQEEIDYRPDGGAGDADFHYRGQMGPTEQGPYAKTYEGRREILRERDVDLRFQTGNKSPEVLRAFDVPDAEAREHPTVVPSHKSPVLDTKPKETGGILGEGTPKESSTESSQSAKPVSGQDTSGNTEGSPAAEKAQLKSEAAGSPDQGSTYSPARGVAGPRGQDPVSSPCG

SEQ ID NO: 14877 - protein, 551 aa, Homo sapiens
  Payload ID: 2907
  Gene Symbol: CLCC1
  Gene Name: chloride channel CLIC-like 1
  Uniprot ID: Q96S66
  ENSP ID: ENSP00000349456
MLCSLLLCECLLLVAGYAHDDDWIDPTDMLNYDAASGTMRKSQAKYGISGEKDVSPDLSCADEISECYHKLDSLTYKIDECEKKKREDYESQSNPVFRRYLNKILIEAGKLGLPDENKGDMHYDAEIILKRETLLEIQKFLNGEDWKPGALDDALSDILINFKFHDFETWKWRFEDSFGVDPYNVLMVLLCLLCIVVLVATELWTYVRWYTQLRRVLIISFLFSLGWNWMYLYKLAFAQHQAEVAKMEPLNNVCAKKMDWTGSIWEWFRSSWTYKDDPCQKYYELLLVNPIWLVPPTKALAVTFTTFVTEPLKHIGKGTGEFIKALMKEIPALLHLPVLIIMALAILSFCYGAGKSVHVLRHIGGPESEPPQALRPRDRRRQEEIDYRPDGGAGDADFHYRGQMGPTEQGPYAKTYEGRREILRERDVDLRFQTGNKSPEVLRAFDVPDAEAREHPTVVPSHKSPVLDTKPKETGGILGEGTPKESSTESSQSAKPVSGQDTSGNTEGSPAAEKAQLKSEAAGSPDQGSTYSPARGVAGPRGQDPVSSPCG

SEQ ID NO: 14878 - protein, 366 aa, Homo sapiens; identical to SEQ ID NO: 14876
  Payload ID: 2907
  Gene Symbol: CLCC1
  Gene Name: chloride channel CLIC-like 1
  Uniprot ID: Q96S66
  ENSP ID: ENSP00000358985

SEQ ID NO: 14879 - protein, 430 aa, Homo sapiens; identical to SEQ ID NO: 14875
  Payload ID: 2907
  Gene Symbol: CLCC1
  Gene Name: chloride channel CLIC-like 1
  Uniprot ID: Q96S66
  ENSP ID: ENSP00000358986

SEQ ID NO: 14880 - protein, 501 aa, Homo sapiens
  Payload ID: 2907
  Gene Symbol: CLCC1
  Gene Name: chloride channel CLIC-like 1
  Uniprot ID: Q96S66
  ENSP ID: ENSP00000358987
MLCSLLLCECLLLVAGYAHDDDWIDPTDMLNYDAASGTMRKSQAKYGISGEKDVSPDLSCADEISECYHKLDSLTYKIDECEKKKREDYESQSNPVFRRYLNKILIEAGKLGLFHDFETWKWRFEDSFGVDPYNVLMVLLCLLCIVVLVATELWTYVRWYTQLRRVLIISFLFSLGWNWMYLYKLAFAQHQAEVAKMEPLNNVCAKKMDWTGSIWEWFRSSWTYKDDPCQKYYELLLVNPIWLVPPTKALAVTFTTFVTEPLKHIGKGTGEFIKALMKEIPALLHLPVLIIMALAILSFCYGAGKSVHVLRHIGGPESEPPQALRPRDRRRQEEIDYRPDGGAGDADFHYRGQMGPTEQGPYAKTYEGRREILRERDVDLRFQTGNKSPEVLRAFDVPDAEAREHPTVVPSHKSPVLDTKPKETGGILGEGTPKESSTESSQSAKPVSGQDTSGNTEGSPAAEKAQLKSEAAGSPDQGSTYSPARGVAGPRGQDPVSSPCG

SEQ ID NO: 14881 - protein, 262 aa, Homo sapiens
  Payload ID: 2907
  Gene Symbol: CLCC1
  Gene Name: chloride channel CLIC-like 1
  ENSP ID: ENSP00000358993
MLCSLLLCECLLLVAGYAHDDDWIDPTDMLNYDAASGTMRKSQAKYGISGEKDVSPDLSCADEISECYHKLDSLTYKIDECEKKKREDYESQSNPVFRRYLNKILIEAGKLGLPDENKGDMHYDAEIILKRETLLEIQKFLNGEDWKPGALDDALSDILINFKFHDFETWKWRFEDSFGVDPYNVLMVLLCLLCIVVLVATELWTYVRWYTQLRRVLIISCAQSEASRVKQVGNLFQAWAFAVCDPVLLQVPVCPILVFCYS

SEQ ID NO: 14882 - protein, 203 aa, Homo sapiens
  Payload ID: 2908
  Gene Symbol: CLNS1A
  Gene Name: chloride channel, nucleotide -sensitive, 1A
  ENSP ID: ENSP00000263309
MSFLKSFPPPGPAEGLLRQQPDTEAVLNGKGLGTGTLYIAESRLSWLDGSGLGFSLEYPTISLHALSRDRSDCLGEHLYVMVNAKFEVEAMFTAMCECQALHPDPEDEDSDDYDGEEYDVEAHEQGQGDIPTFYTYEEGLSHLTAEGQATLERLEGMLSQSVSSQYNMAGVRTEDSIRDYEDGMEVDTTPTVAGQFEDADVDH

SEQ ID NO: 14883 - protein, 49 aa, Homo sapiens
  Payload ID: 2908
  Gene Symbol: CLNS1A
  Gene Name: chloride channel, nucleotide -sensitive, 1A
  ENSP ID: ENSP00000432570
MSFLKSFPPPGPAEGLLRQQPDTEAVLNGKGLGTGTLYIAERRIKRTCC

SEQ ID NO: 14884 - protein, 179 aa, Homo sapiens
  Payload ID: 2908
  Gene Symbol: CLNS1A
  Gene Name: chloride channel, nucleotide -sensitive, 1A
  ENSP ID: ENSP00000433741
MSFLKSFPPPGPAEGLLRQQPDTEAVLNGKGLGTGTLYIAESRLSWLDGSGLGFSLEYPTISLHALSRDRSDCLGEHLYVMVNAKFEEESKEPVADEEEEDSDDDVEPITEFRFVPSDKSALEAMFTAMCECQALHPDPEDEDSDDYDGEEYDVEAHDGMEVDTTPTVAGQFEDADVDH

SEQ ID NO: 14885 - protein, 237 aa, Homo sapiens
  Payload ID: 2908
  Gene Symbol: CLNS1A
  Gene Name: chloride channel, nucleotide -sensitive, 1A
  Uniprot ID: P54105
  ENSP ID: ENSP00000433919
MSFLKSFPPPGPAEGLLRQQPDTEAVLNGKGLGTGTLYIAESRLSWLDGSGLGFSLEYPTISLHALSRDRSDCLGEHLYVMVNAKFEEESKEPVADEEEEDSDDDVEPITEFRFVPSDKSALEAMFTAMCECQALHPDPEDEDSDDYDGEEYDVEAHEQGQGDIPTFYTYEEGLSHLTAEGQATLERLEGMLSQSVSSQYNMAGVRTEDSIRDYEDGMEVDTTPTVAGQFEDADVDH

SEQ ID NO: 14886 - protein, 237 aa, Homo sapiens; identical to SEQ ID NO: 14885
  Payload ID: 2908
  Gene Symbol: CLNS1A
  Gene Name: chloride channel, nucleotide -sensitive, 1A
  Uniprot ID: P54105
  ENSP ID: ENSP00000434311

SEQ ID NO: 14887 - protein, 167 aa, Homo sapiens
  Payload ID: 2908
  Gene Symbol: CLNS1A
  Gene Name: chloride channel, nucleotide -sensitive, 1A
  ENSP ID: ENSP00000434963
MSFLKSFPPPGPAEGLLRQQPDTEAVLNGKGLGTGTLYIAESRLSWLDGSGLGFSLEYPTISLHALSRDRSDCLGEHLYVMVNAKFEEQGQGDIPTFYTYEEGLSHLTAEGQATLERLEGMLSQSVSSQYNMAGVRTEDSIRDYEDGMEVDTTPTVAGQFEDADVDH

SEQ ID NO: 14888 - protein, 23 aa, Homo sapiens
  Payload ID: 2908
  Gene Symbol: CLNS1A
  Gene Name: chloride channel, nucleotide -sensitive, 1A
  ENSP ID: ENSP00000436245
  MOD_RES (1)..(1): Any amino acid
XRTEDSIRDYEGIHTPTKARERF

SEQ ID NO: 14889 - protein, 22 aa, Homo sapiens
  Payload ID: 2908
  Gene Symbol: CLNS1A
  Gene Name: chloride channel, nucleotide -sensitive, 1A
  ENSP ID: ENSP00000475218
  MOD_RES (1)..(1): Any amino acid
XGMEVDTTPTVAGQFEDADVDH

SEQ ID NO: 14890 - protein, 988 aa, Homo sapiens
  Payload ID: 2909
  Gene Symbol: CLCN1
  Gene Name: chloride channel, voltage-sensitive 1
  Uniprot ID: P35523
  ENSP ID: ENSP00000339867
MEQSRSQQRGGEQSWWGSDPQYQYMPFEHCTSYGLPSENGGLQHRLRKDAGPRHNVHPTQIYGHHKEQFSDREQDIGMPKKTGSSSTVDSKDEDHYSKCQDCIHRLGQVVRRKLGEDGIFLVLLGLLMALVSWSMDYVSAKSLQAYKWSYAQMQPSLPLQFLVWVTFPLVLILFSALFCHLISPQAVGSGIPEMKTILRGVVLKEYLTMKAFVAKVVALTAGLGSGIPVGKEGPFVHIASICAAVLSKFMSVFCGVYEQPYYYSDILTVGCAVGVGCCFGTPLGGVLFSIEVTSTYFAVRNYWRGFFAATFSAFVFRVLAVWNKDAVTITALFRTNFRMDFPFDLKELPAFAAIGICCGLLGAVFVYLHRQVMLGVRKHKALSQFLAKHRLLYPGIVTFVIASFTFPPGMGQFMAGELMPREAISTLFDNNTWVKHAGDPESLGQSAVWIHPRVNVVIIIFLFFVMKFWMSIVATTMPIPCGGFMPVFVLGAAFGRLVGEIMAMLFPDGILFDDIIYKILPGGYAVIGAAALTGAVSHTVSTAVICFELTGQIAHILPMMVAVILANMVAQSLQPSLYDSIIQVKKLPYLPDLGWNQLSKYTIFVEDIMVRDVKFVSASYTYGELRTLLQTTTVKTLPLVDSKDSMILLGSVERSELQALLQRHLCPERRLRAAQEMARKLSELPYDGKARLAGEGLPGAPPGRPESFAFVDEDEDEDLSGKSELPPSLALHPSTTAPLSPEEPNGPLPGHKQQPEAPEPAGQRPSIFQSLLHCLLGRARPTKKKTTQDSTDLVDNMSPEEIEAWEQEQLSQPVCFDSCCIDQSPFQLVEQTTLHKTHTLFSLLGLHLAYVTSMGKLRGVLALEELQKAIEGHTKSGVQLRPPLASFRNTTSTRKSTGAPPSSAENWNLPEDRPGATGTGDVIAASPETPVPSPSPEPPLSLAPGKVEGELEELELVESPGLEEELADILQGPSLRSTDEEDEDELIL

SEQ ID NO: 14891 - protein, 76 aa, Homo sapiens
  Payload ID: 2909
  Gene Symbol: CLCN1
  Gene Name: chloride channel, voltage-sensitive 1
  ENSP ID: ENSP00000395949
  MOD_RES (1)..(1): Any amino acid
XISPQAVGSGIPEMKTILRGVVLKEYLTMKAFVAKVVALTAGLGSGIPVGKEPVPVLQMSTPLSPVAPHGDRAWAA

SEQ ID NO: 14892 - protein, 102 aa, Homo sapiens
  Payload ID: 2909
  Gene Symbol: CLCN1
  Gene Name: chloride channel, voltage-sensitive 1
  ENSP ID: ENSP00000400027
  MOD_RES (1)..(1): Any amino acid
XISPQAVGSGIPEMKTILRGVVLKEYLTMKAFVAKVVALTAGLGSGIPVGKEGPFVHIASICAAVLSKFMSVFCGVYEPVPVLQMSTPLSPVAPHGDRAWAA

SEQ ID NO: 14893 - protein, 898 aa, Homo sapiens
  Payload ID: 2910
  Gene Symbol: CLCN2
  Gene Name: chloride channel, voltage-sensitive 2
  Uniprot ID: P51788
  ENSP ID: ENSP00000265593
MAAAAAEEGMEPRALQYEQTLMYGRYTQDLGAFAKEEAARIRLGGPEPWKGPPSSRAAPELLEYGRSRCARCRVCSVRCHKFLVSRVGEDWIFLVLLGLLMALVSWVMDYAIAACLQAQQWMSRGLNTSILLQYLAWVTYPVVLITFSAGFTQILAPQAVGSGIPEMKTILRGVVLKEYLTLKTFIAKVIGLTCALGSGMPLGKEGPFVHIASMCAALLSKFLSLFGGIYENESRNTEMLAAACAVGVGCCFAAPIGGVLFSIEVTSTFFAVRNYWRGFFAATFSAFIFRVLAVWNRDEETITALFKTRFRLDFPFDLQELPAFAVIGIASGFGGALFVYLNRKIVQVMRKQKTINRFLMRKRLLFPALVTLLISTLTFPPGFGQFMAGQLSQKETLVTLFDNRTWVRQGLVEELEPPSTSQAWNPPRANVFLTLVIFILMKFWMSALATTIPVPCGAFMPVFVIGAAFGRLVGESMAAWFPDGIHTDSSTYRIVPGGYAVVGAAALAGAVTHTVSTAVIVFELTGQIAHILPVMIAVILANAVAQSLQPSLYDSIIRIKKLPYLPELGWGRHQQYRVRVEDIMVRDVPHVALSCTFRDLRLALHRTKGRMLALVESPESMILLGSIERSQVVALLGAQLSPARRRQHMQERRATQTSPLSDQEGPPTPEASVCFQVNTEDSAFPAARGETHKPLKPALKRGPSVTRNLGESPTGSAESAGIALRSLFCGSPPPEAASEKLESCEKRKLKRVRISLASDADLEGEMSPEEILEWEEQQLDEPVNFSDCKIDPAPFQLVERTSLHKTHTIFSLLGVDHAYVTSIGRLIGIVTLKELRKAIEGSVTAQGVKVRPPLASFRDSATSSSDTETTEVHALWGPHSRHGLPREGSPSDSDDKCQ

SEQ ID NO: 14894 - protein, 881 aa, Homo sapiens
  Payload ID: 2910
  Gene Symbol: CLCN2
  Gene Name: chloride channel, voltage-sensitive 2
  Uniprot ID: P51788
  ENSP ID: ENSP00000345056
MAAAAAEEGMEPRALQYEQTLMYGRYTQDLGAFAKEEAARIRLGGPEPWKGPPSSRAAPELLEYGRSRCARCRVCSVRCHKFLVSRVGEDWIFLVLLGLLMALVSWVMDYAIAACLQAQQWMSRGLNTSILLQYLAWVTYPVVLITFSAGFTQILAPQAVGSGIPEMKTILRGVVLKEYLTLKTFIAKVIGLTCALGSGMPLGKEGPFVHIASMCAALLSKFLSLFGGIYENESRNTEMLAAACAVGVGCCFAAPIGGVLFSIEVTSTFFAVRNYWRGFFAATFSAFIFRVLAVWNRDEETITALFKTRFRLDFPFDLQELPAFAVIGIASGFGGALFVYLNRKIVQVMRKQKTINRFLMRKRLLFPALVTLLISTLTFPPGFGQFMAGQLSQKETLVTLFDNRTWVRQGLVEELEPPSTSQAWNPPRANVFLTLVIFILMKFWMSALATTIPVPCGAFMPVFVIDGIHTDSSTYRIVPGGYAVVGAAALAGAVTHTVSTAVIVFELTGQIAHILPVMIAVILANAVAQSLQPSLYDSIIRIKKLPYLPELGWGRHQQYRVRVEDIMVRDVPHVALSCTFRDLRLALHRTKGRMLALVESPESMILLGSIERSQVVALLGAQLSPARRRQHMQERRATQTSPLSDQEGPPTPEASVCFQVNTEDSAFPAARGETHKPLKPALKRGPSVTRNLGESPTGSAESAGIALRSLFCGSPPPEAASEKLESCEKRKLKRVRISLASDADLEGEMSPEEILEWEEQQLDEPVNFSDCKIDPAPFQLVERTSLHKTHTIFSLLGVDHAYVTSIGRLIGIVTLKELRKAIEGSVTAQGVKVRPPLASFRDSATSSSDTETTEVHALWGPHSRHGLPREGSPSDSDDKCQ

SEQ ID NO: 14895 - protein, 869 aa, Homo sapiens
  Payload ID: 2910
  Gene Symbol: CLCN2
  Gene Name: chloride channel, voltage-sensitive 2
  Uniprot ID: P51788
  ENSP ID: ENSP00000391928
MAAAAAEEGMEPRALQYEQTLMYGRYTQDLGAFAKEEAARIRLGGPEPWKGPPSSRAAPELLEYGRSRCARCRVCSVRCHKFLVSRVGEDWIFLVLLGLLMALVSWVMDYAIAACLQAQQWMSRGLNTSILLQYLAWVTYPVVLITFSAGFTQILAPQAVGSGIPEMKTILRGVVLKEYLTLKTFIAKVIGLTCALGSGMPLGKEGPFVHIASMCAALLSKFLSLFGGIYENESRNTEMLAAACAVGVGCCFAAPIGGVLFSIEVTSTFFAVRNYWRGFFAATFSAFIFRVLAVWNRDEETITALFKTRFRLDFPFDLQELPAFAVIGIASGFGGALFVYLNRKIVQVMRKQKTINRFLMRKRLLFPALVTLLISTLTFPPGFGQFMAGQLSQKETLVTLFDNRTWVRQGLVEELEPPSTSQAWNPPRANVFLTLVIFILMKFWMSALATTIPVPCGAFMPVFVIGAAFGRLVGESMAAWFPDGIHTDSSTYRIVPGGYAVVGAAALAGAVTHTVSTAVIVFELTGQIAHILPVMIAVILANAVAQSLQPSLYDSIIRIKKLPYLPELGWGRHQQYRVRVEDIMVRDVPHVALSCTFRDLRLALHRTKGRMLALVESPESMILLGSIERSQVVALLGAQLSPARRRQHMQERRATQTSPLSDQEGPPTPEASVCFQVNTEDSAFPAARGETHKPLKPALKRGPSVTRNLGESPTGSAESAGIALRSLFCGSPPPEAASEKLESCEKRKLKRVRISLASDADLEGEMSPEEILEWEEQQLDEPVNFSDCKIDPAPFQLVERTSLHKLRKAIEGSVTAQGVKVRPPLASFRDSATSSSDTETTEVHALWGPHSRHGLPREGSPSDSDDKCQ

SEQ ID NO: 14896 - protein, 133 aa, Homo sapiens
  Payload ID: 2910
  Gene Symbol: CLCN2
  Gene Name: chloride channel, voltage-sensitive 2
  ENSP ID: ENSP00000396231
  MOD_RES (1)..(1): Any amino acid
XTINRFLMRKRLLFPALVTLLISTLTFPPGFGQFMAGQLSQKETLVTLFDNRTWVRQGLVEELEPPSTSQAWNPPRANVFLTLVIFILMKHLGVWWVKAWLPGSQMEFIRTAAPTGLCLGATLWSGQLRWQER

SEQ ID NO: 14897 - protein, 854 aa, Homo sapiens
  Payload ID: 2910
  Gene Symbol: CLCN2
  Gene Name: chloride channel, voltage-sensitive 2
  Uniprot ID: P51788
  ENSP ID: ENSP00000400425
MAAAAAEEGMEPRALQYEQTLMYGRYTQDLGAFAKEEAARIRLGGPEPWKGPPSSRAAPELLEYGRSRCARCRAQQWMSRGLNTSILLQYLAWVTYPVVLITFSAGFTQILAPQAVGSGIPEMKTILRGVVLKEYLTLKTFIAKVIGLTCALGSGMPLGKEGPFVHIASMCAALLSKFLSLFGGIYENESRNTEMLAAACAVGVGCCFAAPIGGVLFSIEVTSTFFAVRNYWRGFFAATFSAFIFRVLAVWNRDEETITALFKTRFRLDFPFDLQELPAFAVIGIASGFGGALFVYLNRKIVQVMRKQKTINRFLMRKRLLFPALVTLLISTLTFPPGFGQFMAGQLSQKETLVTLFDNRTWVRQGLVEELEPPSTSQAWNPPRANVFLTLVIFILMKFWMSALATTIPVPCGAFMPVFVIGAAFGRLVGESMAAWFPDGIHTDSSTYRIVPGGYAVVGAAALAGAVTHTVSTAVIVFELTGQIAHILPVMIAVILANAVAQSLQPSLYDSIIRIKKLPYLPELGWGRHQQYRVRVEDIMVRDVPHVALSCTFRDLRLALHRTKGRMLALVESPESMILLGSIERSQVVALLGAQLSPARRRQHMQERRATQTSPLSDQEGPPTPEASVCFQVNTEDSAFPAARGETHKPLKPALKRGPSVTRNLGESPTGSAESAGIALRSLFCGSPPPEAASEKLESCEKRKLKRVRISLASDADLEGEMSPEEILEWEEQQLDEPVNFSDCKIDPAPFQLVERTSLHKTHTIFSLLGVDHAYVTSIGRLIGIVTLKELRKAIEGSVTAQGVKVRPPLASFRDSATSSSDTETTEVHALWGPHSRHGLPREGSPSDSDDKCQ

SEQ ID NO: 14898 - protein, 866 aa, Homo sapiens
  Payload ID: 2911
  Gene Symbol: CLCN3
  Gene Name: chloride channel, voltage-sensitive 3
  Uniprot ID: P51790
  ENSP ID: ENSP00000261514
MESEQLFHRGYYRNSYNSITSASSDEELLDGAGVIMDFQTSEDDNLLDGDTAVGTHYTMTNGGSINSSTHLLDLLDEPIPGVGTYDDFHTIDWVREKCKDRERHRRINSKKKESAWEMTKSLYDAWSGWLVVTLTGLASGALAGLIDIAADWMTDLKEGICLSALWYNHEQCCWGSNETTFEERDKCPQWKTWAELIIGQAEGPGSYIMNYIMYIFWALSFAFLAVSLVKVFAPYACGSGIPEIKTILSGFIIRGYLGKWTLMIKTITLVLAVASGLSLGKEGPLVHVACCCGNIFSYLFPKYSTNEAKKREVLSAASAAGVSVAFGAPIGGVLFSLEEVSYYFPLKTLWRSFFAALVAAFVLRSINPFGNSRLVLFYVEYHTPWYLFELFPFILLGVFGGLWGAFFIRANIAWCRRRKSTKFGKYPVLEVIIVAAITAVIAFPNPYTRLNTSELIKELFTDCGPLESSSLCDYRNDMNASKIVDDIPDRPAGIGVYSAIWQLCLALIFKIIMTVFTFGIKVPSGLFIPSMAIGAIAGRIVGIAVEQLAYYHHDWFIFKEWCEVGADCITPGLYAMVGAAACLGGVTRMTVSLVVIVFELTGGLEYIVPLMAAVMTSKWVGDAFGREGIYEAHIRLNGYPFLDAKEEFTHTTLAADVMRPRRNDPPLAVLTQDNMTVDDIENMINETSYNGFPVIMSKESQRLVGFALRRDLTIAIESARKKQEGIVGSSRVCFAQHTPSLPAESPRPLKLRSILDMSPFTVTDHTPMEIVVDIFRKLGLRQCLVTHNGIVLGIITKKNILEHLEQLKQHVEPLAPPWHYNKKRYPPAYGPDGKPRPRFNNVQLNLTDEEREETEEEVYLLNSTTL

SEQ ID NO: 14899 - protein, 791 aa, Homo sapiens
  Payload ID: 2911
  Gene Symbol: CLCN3
  Gene Name: chloride channel, voltage-sensitive 3
  Uniprot ID: P51790
  ENSP ID: ENSP00000353857
MESEQLFHRGYYRNSYNSITSASSDEELLDGAGVIMDFQTSEDDNLLDGDTAVGTHYTMTNGGSINSSTHLLDLLDEPIPGVGTYDDFHTIDWVREKCKDRERHRRINSKKKESAWEMTKSLYDAWSGWLVVTLTGLASGALAGLIDIAADWMTDLKEGICLSALWYNHEQCCWGSNETTFEERDKCPQWKTWAELIIGQAEGPGSYIMNYIMYIFWALSFAFLAVSLVKVFAPYACGSGIPEIKTILSGFIIRGYLGKWTLMIKTITLVLAVASGLSLGKEGPLVHVACCCGNIFSYLFPKYSTNEAKKREVSYYFPLKTLWRSFFAALVAAFVLRSINPFGNSRLVLFYVEYHTPWYLFELFPFILLGVFGGLWGAFFIRANIAWCRRRKSTKFGKYPVLEVIIVAAITAVIAFPNPYTRLNTSELIKELFTDCGPLESSSLCDYRNDMNASKIVDDIPDRPAGIGVYSAIWQLCLALIFKIIMTVFTFGIKVPSGLFIPSMAIGAIAGRIVGIAVEQLAYYHHDWFIFKEWCEVGADCITPGLYAMVGAAACLGGVTRMTVSLVVIVFELTGGLEYIVPLMAAVMTSKWVGDAFGREGIYEAHIRLNGYPFLDAKEEFTHTTLAADVMRPRRNDPPLAVLTQDNMTVDDIENMINETSYNGFPVIMSKESQRLVGFALRRDLTIAIESARKKQEGIVGSSRVCFAQHTPSLPAESPRPLKLRSILDMSPFTVTDHTPMEIVVDIFRKLGLRQCLVTHNGRLLGIITKKDILRHMAQTANQDPASIMFN

SEQ ID NO: 14900 - protein, 245 aa, Homo sapiens
  Payload ID: 2911
  Gene Symbol: CLCN3
  Gene Name: chloride channel, voltage-sensitive 3
  ENSP ID: ENSP00000422678
  MOD_RES (1)..(1): Any amino acid
XAGVSVAFGAPIGGVLFSLEEVSYYFPLKTLWRSFFAALVAAFVLRSINPFGVFGGLWGAFFIRANIAWCRRRKSTKFGKYPVLEVIIVAAITAVIAFPNPYTRLNTSELIKELFTDCGPLESSSLCDYRNDMNASKIVDDIPDRPAGIGVYSAIWQLCLALIFKIIMTVFTFGIKVPSGLFIPSMAIGAIAGRIVGIAVEQLAYYHHDWFIFKEWCEVGADCITPGLYAMVGAAACLGGVTRMT

SEQ ID NO: 14901 - protein, 801 aa, Homo sapiens [sequence omitted]

SEQ ID NO: 14902 - protein, 818 aa, Homo sapiens
  Payload ID: 2911
  Gene Symbol: CLCN3
  Gene Name: chloride channel, voltage-sensitive 3
  Uniprot ID: P51790
  ENSP ID: ENSP00000424603
MESEQLFHRGYYRNSYNSITSASSDEELLDGAGVIMDFQTSEDDNLLDGDTAVGTHYTMTNGGSINSSTHLLDLLDEPIPGVGTYDDFHTIDWVREKCKDRERHRRINSKKKESAWEMTKSLYDAWSGWLVVTLTGLASGALAGLIDIAADWMTDLKEGICLSALWYNHEQCCWGSNETTFEERDKCPQWKTWAELIIGQAEGPGSYIMNYIMYIFWALSFAFLAVSLVKVFAPYACGSGIPEIKTILSGFIIRGYLGKWTLMIKTITLVLAVASGLSLGKEGPLVHVACCCGNIFSYLFPKYSTNEAKKREVLSAASAAGVSVAFGAPIGGVLFSLEEVSYYFPLKTLWRSFFAALVAAFVLRSINPFGNSRLVLFYVEYHTPWYLFELFPFILLGVFGGLWGAFFIRANIAWCRRRKSTKFGKYPVLEVIIVAAITAVIAFPNPYTRLNTSELIKELFTDCGPLESSSLCDYRNDMNASKIVDDIPDRPAGIGVYSAIWQLCLALIFKIIMTVFTFGIKVPSGLFIPSMAIGAIAGRIVGIAVEQLAYYHHDWFIFKEWCEVGADCITPGLYAMVGAAACLGGVTRMTVSLVVIVFELTGGLEYIVPLMAAVMTSKWVGDAFGREGIYEAHIRLNGYPFLDAKEEFTHTTLAADVMRPRRNDPPLAVLTQDNMTVDDIENMINETSYNGFPVIMSKESQRLVGFALRRDLTIAIESARKKQEGIVGSSRVCFAQHTPSLPAESPRPLKLRSILDMSPFTVTDHTPMEIVVDIFRKLGLRQCLVTHNGRLLGIITKKDILRHMAQTANQDPASIMFN

SEQ ID NO: 14903 - protein, 173 aa, Homo sapiens
  Payload ID: 2911
  Gene Symbol: CLCN3
  Gene Name: chloride channel, voltage-sensitive 3
  ENSP ID: ENSP00000425160
MESEQLFHRGYYRNSYNSITSASSDEELLDGAGVIMDFQTSEDDNLLDGDTAVGTHYTMTNGGSINSSTHLLDLLDEPIPGVGTYDDFHTIDWVREKCKDRERHRRINSKKKESAWEMTKSLYDAWSGWLVVTLTGLASGALAGLIDIAADWMTDLKEGICLSALWYNHEQCC

SEQ ID NO: 14904 - protein, 725 aa, Homo sapiens
  Payload ID: 2911
  Gene Symbol: CLCN3
  Gene Name: chloride channel, voltage-sensitive 3
  ENSP ID: ENSP00000425323
MDASSDPYLPYDGGGDSIPLRELHKRGTHYTMTNGGSINSSTHLLDLLDEPIPGVGTYDDFHTIDWVREKCKDRERHRRINSKKKESAWEMTKSLYDAWSGWLVVTLTGLASGALAGLIDIAADWMTDLKEGICLSALWYNHEQCCWGSNETTFEERDKCPQWKTWAELIIGQAEGPGSYIMNYIMYIFWALSFAFLAVSLVKVFAPYACGSGIPEIKTILSGFIIRGYLGKWTLMIKTITLVLAVASGLSLGKEGPLVHVACCCGNIFSYLFPKYSTNEAKKREVLSAASAAGVSVAFGAPIGGVLFSLEEVSYYFPLKTLWRSFFAALVAAFVLRSINPFGNSRLVLFYVEYHTPWYLFELFPFILLGVFGGLWGAFFIRANIAWCRRRKSTKFGKYPVLEVIIVAAITAVIAFPNPYTRLNTSELIKELFTDCGPLESSSLCDYRNDMNASKIVDDIPDRPAGIGVYSAIWQLCLALIFKIIMTVFTFGIKVPSGLFIPSMAIGAIAGRIVGIAVEQLAYYHHDWFIFKEWCEVGADCITPGLYAMVGAAACLGGVTRMTVSLVVIVFELTGGLEYIVPLMAAVMTSKWVGDAFGREGIYEAHIRLNGYPFLDAKEEFTHTTLAADVMRPRRNDPPLAVLTQDNMTVDDIENMINETSYNGFPVIMSKESQRLVGFALRRDLTIAIESARKKQEGIVGSSRVCFAQHTPSLPAESPRPLKLR

SEQ ID NO: 14905 - protein, 138 aa, Homo sapiens
  Payload ID: 2911
  Gene Symbol: CLCN3
  Gene Name: chloride channel, voltage-sensitive 3
  ENSP ID: ENSP00000425823
MESEQLFHRGYYRNSYNSITSASSDEELLDGAGVIMDFQTSEDDNLLDGDTAVGTHYTMTNGGSINSSTHLLDLLDEPIPGVGTYDDFHTIDWVREKCKDRERHRRINSKKKESAWEMTKSLYDAWSGWLVVTLTGLA

SEQ ID NO: 14906 - protein, 791 aa, Homo sapiens
  Payload ID: 2911
  Gene Symbol: CLCN3
  Gene Name: chloride channel, voltage-sensitive 3
  ENSP ID: ENSP00000478336
MDASSDPYLPYDGGGDSIPLRELHKRGTHYTMTNGGSINSSTHLLDLLDEPIPGVGTYDDFHTIDWVREKCKDRERHRRINSKKKESAWEMTKSLYDAWSGWLVVTLTGLASGALAGLIDIAADWMTDLKEGICLSALWYNHEQCCWGSNETTFEERDKCPQWKTWAELIIGQAEGPGSYIMNYIMYIFWALSFAFLAVSLVKVFAPYACGSGIPEIKTILSGFIIRGYLGKWTLMIKTITLVLAVASGLSLGKEGPLVHVACCCGNIFSYLFPKYSTNEAKKREVLSAASAAGVSVAFGAPIGGVLFSLEEVSYYFPLKTLWRSFFAALVAAFVLRSINPFGNSRLVLFYVEYHTPWYLFELFPFILLGVFGGLWGAFFIRANIAWCRRRKSTKFGKYPVLEVIIVAAITAVIAFPNPYTRLNTSELIKELFTDCGPLESSSLCDYRNDMNASKIVDDIPDRPAGIGVYSAIWQLCLALIFKIIMTVFTFGIKVPSGLFIPSMAIGAIAGRIVGIAVEQLAYYHHDWFIFKEWCEVGADCITPGLYAMVGAAACLGGVTRMTVSLVVIVFELTGGLEYIVPLMAAVMTSKWVGDAFGREGIYEAHIRLNGYPFLDAKEEFTHTTLAADVMRPRRNDPPLAVLTQDNMTVDDIENMINETSYNGFPVIMSKESQRLVGFALRRDLTIAIESARKKQEGIVGSSRVCFAQHTPSLPAESPRPLKLRSILDMSPFTVTDHTPMEIVVDIFRKLGLRQCLVTHNGRLLGIITKKDILRHMAQTANQDPASIMFN

SEQ ID NO: 14907 - protein, 729 aa, Homo sapiens
  Payload ID: 2912
  Gene Symbol: CLCN4
  Gene Name: chloride channel, voltage-sensitive 4
  ENSP ID: ENSP00000370209
MVNAGAMSGSGNLMDFLDEPFPDVGTYEDFHTIDWLREKSRDTDRHRKITSKSKESIWEFIKSLLDAWSGWVVMLLIGLLAGTLAGVIDLAVDWMTDLKEGVCLSAFWYSHEQCCWTSNETTFEDRDKCPLWQKWSELLVNQSEGASAYILNYLMYILWALLFAFLAVSLVRVFAPYACGSGIPEIKTILSGFIIRGYLGKWTLLIKTVTLVLVVSSGLSLGKEGPLVHVACCCGNFFSSLFSKYSKNEGKRREVLSAAAAAGVSVAFGAPIGGVLFSLEEVSYYFPLKTLWRSFFAALVAAFTLRSINPFGNSRLVLFYVEYHTPWRRKTTRLGKYPVLEVIVVTAITAIIAYPNPYTRQSTSELISELFNDCGALESSQLCDYINDPNMTRPVDDIPDRPAGVGVYTAMWQLALALIFKIVVTIFTFGMKIPSGLFIPSMAVGAIAGRMVGIGVEQLAYHHHDWIIFRNWCRPGADCVTPGLYAMVGAAACLGGVTRMTVSLVVIMFELTGGLEYIVPLMAAAVTSKWVADAFGKEGIYEAHIHLNGYPFLDVKDEFTHRTLATDVMRPRRGEPPLSVLTQDSMTVEDVETLIKETDYNGFPVVVSRDSERLIGFAQRRELILAIKNARQRQEGIVSNSIMYFTEEPPELPANSPHPLKLRRILNLSPFTVTDHTPMETVVDIFRKLGLRQCLVTRSGRLLGIITKKDVLRHMAQMANQDPESIMFN

SEQ ID NO: 14908 - protein, 760 aa, Homo sapiens
  Payload ID: 2912
  Gene Symbol: CLCN4
  Gene Name: chloride channel, voltage-sensitive 4
  Uniprot ID: P51793
  ENSP ID: ENSP00000370213
MVNAGAMSGSGNLMDFLDEPFPDVGTYEDFHTIDWLREKSRDTDRHRKITSKSKESIWEFIKSLLDAWSGWVVMLLIGLLAGTLAGVIDLAVDWMTDLKEGVCLSAFWYSHEQCCWTSNETTFEDRDKCPLWQKWSELLVNQSEGASAYILNYLMYILWALLFAFLAVSLVRVFAPYACGSGIPEIKTILSGFIIRGYLGKWTLLIKTVTLVLVVSSGLSLGKEGPLVHVACCCGNFFSSLFSKYSKNEGKRREVLSAAAAAGVSVAFGAPIGGVLFSLEEVSYYFPLKTLWRSFFAALVAAFTLRSINPFGNSRLVLFYVEYHTPWYMAELFPFILLGVFGGLWGTLFIRCNIAWCRRRKTTRLGKYPVLEVIVVTAITAIIAYPNPYTRQSTSELISELFNDCGALESSQLCDYINDPNMTRPVDDIPDRPAGVGVYTAMWQLALALIFKIVVTIFTFGMKIPSGLFIPSMAVGAIAGRMVGIGVEQLAYHHHDWIIFRNWCRPGADCVTPGLYAMVGAAACLGGVTRMTVSLVVIMFELTGGLEYIVPLMAAAVTSKWVADAFGKEGIYEAHIHLNGYPFLDVKDEFTHRTLATDVMRPRRGEPPLSVLTQDSMTVEDVETLIKETDYNGFPVVVSRDSERLIGFAQRRELILAIKNARQRQEGIVSNSIMYFTEEPPELPANSPHPLKLRRILNLSPFTVTDHTPMETVVDIFRKLGLRQCLVTRSGRLLGIITKKDVLRHMAQMANQDPESIMFN

SEQ ID NO: 14909 - protein, 152 aa, Homo sapiens
  Payload ID: 2912
  Gene Symbol: CLCN4
  Gene Name: chloride channel, voltage-sensitive 4
  ENSP ID: ENSP00000403064
MVNAGAMSGSGNLMDFLDEPFPDVGTYEDFHTIDWLREKSRDTDRHRKITSKSKESIWEFIKSLLDAWSGWVVMLLIGLLAGTLAGVIDLAVDWMTDLKEGVCLSAFWYSHEQCCWTSNETTFEDRDKCPLWQKWSELLVNQSEVLSAAAAA

SEQ ID NO: 14910 - protein, 666 aa, Homo sapiens
  Payload ID: 2912
  Gene Symbol: CLCN4
  Gene Name: chloride channel, voltage-sensitive 4
  Uniprot ID: P51793
  ENSP ID: ENSP00000405754
MTDLKEGVCLSAFWYSHEQCCWTSNETTFEDRDKCPLWQKWSELLVNQSEGASAYILNYLMYILWALLFAFLAVSLVRVFAPYACGSGIPEIKTILSGFIIRGYLGKWTLLIKTVTLVLVVSSGLSLGKEGPLVHVACCCGNFFSSLFSKYSKNEGKRREVLSAAAAAGVSVAFGAPIGGVLFSLEEVSYYFPLKTLWRSFFAALVAAFTLRSINPFGNSRLVLFYVEYHTPWYMAELFPFILLGVFGGLWGTLFIRCNIAWCRRRKTTRLGKYPVLEVIVVTAITAIIAYPNPYTRQSTSELISELFNDCGALESSQLCDYINDPNMTRPVDDIPDRPAGVGVYTAMWQLALALIFKIVVTIFTFGMKIPSGLFIPSMAVGAIAGRMVGIGVEQLAYHHHDWIIFRNWCRPGADCVTPGLYAMVGAAACLGGVTRMTVSLVVIMFELTGGLEYIVPLMAAAVTSKWVADAFGKEGIYEAHIHLNGYPFLDVKDEFTHRTLATDVMRPRRGEPPLSVLTQDSMTVEDVETLIKETDYNGFPVVVSRDSERLIGFAQRRELILAIKNARQRQEGIVSNSIMYFTEEPPELPANSPHPLKLRRILNLSPFTVTDHTPMETVVDIFRKLGLRQCLVTRSGRLLGIITKKDVLRHMAQMANQDPESIMFN

SEQ ID NO: 14911 - protein, 746 aa, Homo sapiens
  Payload ID: 2913
  Gene Symbol: CLCN5
  Gene Name: chloride channel, voltage-sensitive 5
  Uniprot ID: P51795
  ENSP ID: ENSP00000304257
MDFLEEPIPGVGTYDDFNTIDWVREKSRDRDRHREITNKSKESTWALIHSVSDAFSGWLLMLLIGLLSGSLAGLIDISAHWMTDLKEGICTGGFWFNHEHCCWNSEHVTFEERDKCPEWNSWSQLIISTDEGAFAYIVNYFMYVLWALLFAFLAVSLVKVFAPYACGSGIPEIKTILSGFIIRGYLGKWTLVIKTITLVLAVSSGLSLGKEGPLVHVACCCGNILCHCFNKYRKNEAKRREVLSAAAAAGVSVAFGAPIGGVLFSLEEVSYYFPLKTLWRSFFAALVAAFTLRSINPFGNSRLVLFYVEFHTPWHLFELVPFILLGIFGGLWGALFIRTNIAWCRKRKTTQLGKYPVIEVLVVTAITAILAFPNEYTRMSTSELISELFNDCGLLDSSKLCDYENRFNTSKGGELPDRPAGVGVYSAMWQLALTLILKIVITIFTFGMKIPSGLFIPSMAVGAIAGRLLGVGMEQLAYYHQEWTVFNSWCSQGADCITPGLYAMVGAAACLGGVTRMTVSLVVIMFELTGGLEYIVPLMAAAMTSKWVADALGREGIYDAHIRLNGYPFLEAKEEFAHKTLAMDVMKPRRNDPLLTVLTQDSMTVEDVETIISETTYSGFPVVVSRESQRLVGFVLRRDLIISIENARKKQDGVVSTSIIYFTEHSPPLPPYTPPTLKLRNILDLSPFTVTDLTPMEIVVDIFRKLGLRQCLVTHNGRLLGIITKKDVLKHIAQMANQDPDSILFN

SEQ ID NO: 14912 - protein, 816 aa, Homo sapiens
  Payload ID: 2913
  Gene Symbol: CLCN5
  Gene Name: chloride channel, voltage-sensitive 5
  Uniprot ID: P51795
  ENSP ID: ENSP00000365256
MAMWQGAMDNRGFQQGSFSSFQNSSSDEDLMDIPATAMDFSMRDDVPPLDREVGEDKSYNGGGIGSSNRIMDFLEEPIPGVGTYDDFNTIDWVREKSRDRDRHREITNKSKESTWALIHSVSDAFSGWLLMLLIGLLSGSLAGLIDISAHWMTDLKEGICTGGFWFNHEHCCWNSEHVTFEERDKCPEWNSWSQLIISTDEGAFAYIVNYFMYVLWALLFAFLAVSLVKVFAPYACGSGIPEIKTILSGFIIRGYLGKWTLVIKTITLVLAVSSGLSLGKEGPLVHVACCCGNILCHCFNKYRKNEAKRREVLSAAAAAGVSVAFGAPIGGVLFSLEEVSYYFPLKTLWRSFFAALVAAFTLRSINPFGNSRLVLFYVEFHTPWHLFELVPFILLGIFGGLWGALFIRTNIAWCRKRKTTQLGKYPVIEVLVVTAITAILAFPNEYTRMSTSELISELFNDCGLLDSSKLCDYENRFNTSKGGELPDRPAGVGVYSAMWQLALTLILKIVITIFTFGMKIPSGLFIPSMAVGAIAGRLLGVGMEQLAYYHQEWTVFNSWCSQGADCITPGLYAMVGAAACLGGVTRMTVSLVVIMFELTGGLEYIVPLMAAAMTSKWVADALGREGIYDAHIRLNGYPFLEAKEEFAHKTLAMDVMKPRRNDPLLTVLTQDSMTVEDVETIISETTYSGFPVVVSRESQRLVGFVLRRDLIISIENARKKQDGVVSTSIIYFTEHSPPLPPYTPPTLKLRNILDLSPFTVTDLTPMEIVVDIFRKLGLRQCLVTHNGRLLGIITKKDVLKHIAQMANQDPDSILFN

SEQ ID NO: 14913 - protein, 816 aa, Homo sapiens; identical to SEQ ID NO: 14912
  Payload ID: 2913
  Gene Symbol: CLCN5
  Gene Name: chloride channel, voltage-sensitive 5
  Uniprot ID: P51795
  ENSP ID: ENSP00000365259

SEQ ID NO: 14914 - protein, 746 aa, Homo sapiens; identical to SEQ ID NO: 14911
  Payload ID: 2913
  Gene Symbol: CLCN5
  Gene Name: chloride channel, voltage-sensitive 5
  Uniprot ID: P51795
  ENSP ID: ENSP00000365276

SEQ ID NO: 14915 - protein, 64 aa, Homo sapiens
  Payload ID: 2913
  Gene Symbol: CLCN5
  Gene Name: chloride channel, voltage-sensitive 5
  ENSP ID: ENSP00000476732
MAMWQGAMDNRGFQQGSFSSFQNSSSDEDLMDIPATAMDFSMRDDVPPLDREVGGIIIGDDNLS

SEQ ID NO: 14916 - protein, 869 aa, Homo sapiens
  Payload ID: 2914
  Gene Symbol: CLCN6
  Gene Name: chloride channel, voltage-sensitive 6
  Uniprot ID: P51797
  ENSP ID: ENSP00000234488
MAGCRGSLCCCCRWCCCCGERETRTPEELTILGETQEEEDEILPRKDYESLDYDRCINDPYLEVLETMDNKKGRRYEAVKWMVVFAIGVCTGLVGLFVDFFVRLFTQLKFGVVQTSVEECSQKGCLALSLLELLGFNLTFVFLASLLVLIEPVAAGSGIPEVKCYLNGVKVPGIVRLRTLLCKVLGVLFSVAGGLFVEKEGPMIHSGSVVGAGLPQFQSISLRKIQFNFPYFRSDRDKRDFVSAGAAAGVAAAFGAPIGGTLFSLEEGSSFWNQGLTWKVLFCSMSATFTLNFFRSGIQFGSWGSFQLPGLLNFGEFKCSDSDKKCHLWTAMDLGFFVVMGVIGGLLGATFNCLNKRLAKYRMRNVHPKPKLVRVLESLLVSLVTTVVVFVASMVLGECRQMSSSSQIGNDSFQLQVTEDVNSSIKTFFCPNDTYNDMATLFFNPQESAILQLFHQDGTFSPVTLALFFVLYFLLACWTYGISVPSGLFVPSLLCGAAFGRLVANVLKSYIGLGHIYSGTFALIGAAAFLGGVVRMTISLTVILIESTNEITYGLPIMVTLMVAKWTGDFFNKGIYDIHVGLRGVPLLEWETEVEMDKLRASDIMEPNLTYVYPHTRIQSLVSILRTTVHHAFPVVTENRGNEKEFMKGNQLISNNIKFKKSSILTRAGEQRKRSQSMKSYPSSELRNMCDEHIASEEPAEKEDLLQQMLERRYTPYPNLYPDQSPSEDWTMEERFRPLTFHGLILRSQLVTLLVRGVCYSESQSSASQPRLSYAEMAEDYPRYPDIHDLDLTLLNPRMIVDVTPYMNPSPFTVSPNTHVSQVFNLFRTMGLRHLPVVNAVGEIVGIITRHNLTYEFLQARLRQHYQTI

SEQ ID NO: 14917 - protein, 847 aa, Homo sapiens
  Payload ID: 2914
  Gene Symbol: CLCN6
  Gene Name: chloride channel, voltage-sensitive 6
  Uniprot ID: P51797
  ENSP ID: ENSP00000308367
MAGCRGSLCCCCRWCCCCGERETRTPEELTILGETQEEEDEILPRKDYEKGRRYEAVKWMVVFAIGVCTGLVGLFVDFFVRLFTQLKFGVVQTSVEECSQKGCLALSLLELLGFNLTFVFLASLLVLIEPVAAGSGIPEVKCYLNGVKVPGIVRLRTLLCKVLGVLFSVAGGLFVEKEGPMIHSGSVVGAGLPQFQSISLRKIQFNFPYFRSDRDKRDFVSAGAAAGVAAAFGAPIGGTLFSLEEGSSFWNQGLTWKVLFCSMSATFTLNFFRSGIQFGSWGSFQLPGLLNFGEFKCSDSDKKCHLWTAMDLGFFVVMGVIGGLLGATFNCLNKRLAKYRMRNVHPKPKLVRVLESLLVSLVTTVVVFVASMVLGECRQMSSSSQIGNDSFQLQVTEDVNSSIKTFFCPNDTYNDMATLFFNPQESAILQLFHQDGTFSPVTLALFFVLYFLLACWTYGISVPSGLFVPSLLCGAAFGRLVANVLKSYIGLGHIYSGTFALIGAAAFLGGVVRMTISLTVILIESTNEITYGLPIMVTLMVAKWTGDFFNKGIYDIHVGLRGVPLLEWETEVEMDKLRASDIMEPNLTYVYPHTRIQSLVSILRTTVHHAFPVVTENRGNEKEFMKGNQLISNNIKFKKSSILTRAGEQRKRSQSMKSYPSSELRNMCDEHIASEEPAEKEDLLQQMLERRYTPYPNLYPDQSPSEDWTMEERFRPLTFHGLILRSQLVTLLVRGVCYSESQSSASQPRLSYAEMAEDYPRYPDIHDLDLTLLNPRMIVDVTPYMNPSPFTVSPNTHVSQVFNLFRTMGLRHLPVVNAVGEIVGIITRHNLTYEFLQARLRQHYQTI

SEQ ID NO: 14918 - protein, 953 aa, Homo sapiens
  Payload ID: 2914
  Gene Symbol: CLCN6
  Gene Name: chloride channel, voltage-sensitive 6
  Uniprot ID: P51797
  ENSP ID: ENSP00000365679
MAGCRGSLCCCCRWCCCCGERETRTPEELTILGETQEEEDEILPRKDYESLDYDRCINDPYLEVLETMDNKKGRRYEAVKWMVVFAIGVCTGLVGLFVDFFVRLFTQLKFGVVQTSVEECSQKGCLALSLLELLGFNLTFVFLASLLVLIEPVAAGSGIPEVKCYLNGVKVPGIVRLRTLLCKVLGVLFSVAGGLFVEKEGPMIHSGSVVGAGLPQFQSISLRKIQFNFPYFRSDRDKRDFVSAGAAAGVAAAFGAPIGGTLFSLEEGSSFWNQGLTWKVLFCSMSATFTLNFFRSGIQFGSWGSFQLPGLLNFGEFKCSDSDKKCHLWTAMDLGFFVVMGVIGGLLGATFNCLNKRLAKYRMRNVHPKPKLVRVLESLLVSLVTTVVVFVASMVLGECRQMSSSSQIGNDSFQLQVTEDVNSSIKTFFCPNDTYNDMATLFFNPQESAILQLFHQDGTFSPVTLALFFVLYFLLACWTYGISVPSGLFVPSLLCGAAFGRLVANVLKSYIGLGHIYSGTFALIGAAAFLGGVVRMTISLTVILIESTNEITYGLPIMVTLMVAKWTGDFFNKGIYDIHVGLRGVPLLEWETEVEMDKLRASDIMEPNLTYVYPHTRIQSLVSILRTTVHHAFPVVTENRGNEKEFMKGNQLISNNIKFKKSSILTRAGEQRKRSQSMKSYPSSELRNMCDEHIASEEPAEKEDLLQQMLERRYTPYPNLYPDQSPSEDWTMEERFRPLTFHGLILRSQLVTLLVRGVCYSESQSSASQPRLSYAEMAEDYPRYPDIHDLDLTLLNPRMIVDVTPYMNPSPFTVSPNTHVSQVFNLFRTMGLRHLPVVNAVGEVSEAPALPPPLREDPLARCCLCTQASHQKRRHPTRRGECGPTLALNPARLPCTRDPFPCLPADGTSVPLAVLSSQSRASTRLCLPPEMLLFTPYHWCSLVLHLRRDLRIR

SEQ ID NO: 14919 - protein, 122 aa, Homo sapiens
  Payload ID: 2914
  Gene Symbol: CLCN6
  Gene Name: chloride channel, voltage-sensitive 6
  ENSP ID: ENSP00000365680
MAGCRGSLCCCCRWCCCCGERETRTPEELTILGETQEEEDEILPRKDYESLDYDRCINDPYLEVLETMDNKKGRRYEAVKWMVVFAIGVCTGLVGLFVDFFVRLFTQLKFGVVQTYKFQMKM

SEQ ID NO: 14920 - protein, 901 aa, Homo sapiens
  Payload ID: 2915
  Gene Symbol: CLCN7
  Gene Name: chloride channel, voltage-sensitive 7
  ENSP ID: ENSP00000262318
MANVSKKVSWSGRDRDDEEAAPLLRRTARPGGGTPLLNGAGPGAARQDMDPPHPFPKEIPHNEKLLSLKYESLDYDNSENQLFLEEERRINHTAFRTVEIKRWVICALIGILTGLVACFIDIVVENLAGLKYRVIKGNIDKFTEKGGLSFSLLLWATLNAAFVLVGSVIVAFIEPVAAGSGIPQIKCFLNGVKIPHVVRLKTLVIKVSGVILSVVGGLAVGKEGPMIHSGSVIAAGISQGRSTSLKRDFKIFEYFRRDTEKRDFVSAGAAAGVSAAFGAPVGGVLFSLEEGASFWNQFLTWRIFFASMISTFTLNFVLSIYHGNMWDLSSPGLINFGRFDSEKMAYTIHEIPVFIAMGVVGGVLGAVFNALNYWLTMFRIRYIHRPCLQVIEAVLVAAVTATVAFVLIYSSRDCQPLQGGSMSYPLQLFCADGEYNSMAAAFFNTPEKSVVSLFHDPPGSYNPLTLGLFTLVYFFLACWTYGLTVSAGVFIPSLLIGAAWGRLFGISLSYLTGAAIWADPGKYALMGAAAQLGGIVRMTLSLTVIMMEATSNVTYGFPIMLVLMTAKIVGDVFIEGLYDMHIQLQSVPFLHWEAPVTSHSLTAREVMSTPVTCLRRREKVGVIVDVLSDTASNHNGFPVVEHADDTQPARLQGLILRSQLIVLLKHKVFVERSNLGLVQRRLRLKDFRDAYPRFPPIQSIHVSQDERECTMDLSEFMNPSPYTVPQACVAPTGVQAVPGPGPAAPGGGGQPQSGCRVGDQEGPRQVPPGKERLGGALAGPDVRPSPAHNGHWRWHPGPSAFPPGVTGFSAQTMLPSSGNGEHPAAGRAGGRRGTDPLAGLTLLWAVVSPLGASLRRPSLHSPRLGFFTSRDQLCVCDLPTGLSASWEPAAGPAPACLCPCA

SEQ ID NO: 14921 - protein, 805 aa, Homo sapiens
  Payload ID: 2915
  Gene Symbol: CLCN7
  Gene Name: chloride channel, voltage-sensitive 7
  Uniprot ID: P51798
  ENSP ID: ENSP00000372193
MANVSKKVSWSGRDRDDEEAAPLLRRTARPGGGTPLLNGAGPGAARQSPRSALFRVGHMSSVELDDELLDPDMDPPHPFPKEIPHNEKLLSLKYESLDYDNSENQLFLEEERRINHTAFRTVEIKRWVICALIGILTGLVACFIDIVVENLAGLKYRVIKGNIDKFTEKGGLSFSLLLWATLNAAFVLVGSVIVAFIEPVAAGSGIPQIKCFLNGVKIPHVVRLKTLVIKVSGVILSVVGGLAVGKEGPMIHSGSVIAAGISQGRSTSLKRDFKIFEYFRRDTEKRDFVSAGAAAGVSAAFGAPVGGVLFSLEEGASFWNQFLTWRIFFASMISTFTLNFVLSIYHGNMWDLSSPGLINFGRFDSEKMAYTIHEIPVFIAMGVVGGVLGAVFNALNYWLTMFRIRYIHRPCLQVIEAVLVAAVTATVAFVLIYSSRDCQPLQGGSMSYPLQLFCADGEYNSMAAAFFNTPEKSVVSLFHDPPGSYNPLTLGLFTLVYFFLACWTYGLTVSAGVFIPSLLIGAAWGRLFGISLSYLTGAAIWADPGKYALMGAAAQLGGIVRMTLSLTVIMMEATSNVTYGFPIMLVLMTAKIVGDVFIEGLYDMHIQLQSVPFLHWEAPVTSHSLTAREVMSTPVTCLRRREKVGVIVDVLSDTASNHNGFPVVEHADDTQPARLQGLILRSQLIVLLKHKVFVERSNLGLVQRRLRLKDFRDAYPRFPPIQSIHVSQDERECTMDLSEFMNPSPYTVPQEASLPRVFKLFRALGLRHLVVVDNRNQVVGLVTRKDLARYRLGKRGLEELSLAQT

SEQ ID NO: 14922 - protein, 781 aa, Homo sapiens
  Payload ID: 2915
  Gene Symbol: CLCN7
  Gene Name: chloride channel, voltage-sensitive 7
  Uniprot ID: P51798
  ENSP ID: ENSP00000410907
MANVSKKVSWSGRDRDDEEAAPLLRRTARPGGGTPLLNGAGPGAARQDMDPPHPFPKEIPHNEKLLSLKYESLDYDNSENQLFLEEERRINHTAFRTVEIKRWVICALIGILTGLVACFIDIVVENLAGLKYRVIKGNIDKFTEKGGLSFSLLLWATLNAAFVLVGSVIVAFIEPVAAGSGIPQIKCFLNGVKIPHVVRLKTLVIKVSGVILSVVGGLAVGKEGPMIHSGSVIAAGISQGRSTSLKRDFKIFEYFRRDTEKRDFVSAGAAAGVSAAFGAPVGGVLFSLEEGASFWNQFLTWRIFFASMISTFTLNFVLSIYHGNMWDLSSPGLINFGRFDSEKMAYTIHEIPVFIAMGVVGGVLGAVFNALNYWLTMFRIRYIHRPCLQVIEAVLVAAVTATVAFVLIYSSRDCQPLQGGSMSYPLQLFCADGEYNSMAAAFFNTPEKSVVSLFHDPPGSYNPLTLGLFTLVYFFLACWTYGLTVSAGVFIPSLLIGAAWGRLFGISLSYLTGAAIWADPGKYALMGAAAQLGGIVRMTLSLTVIMMEATSNVTYGFPIMLVLMTAKIVGDVFIEGLYDMHIQLQSVPFLHWEAPVTSHSLTAREVMSTPVTCLRRREKVGVIVDVLSDTASNHNGFPVVEHADDTQPARLQGLILRSQLIVLLKHKVFVERSNLGLVQRRLRLKDFRDAYPRFPPIQSIHVSQDERECTMDLSEFMNPSPYTVPQEASLPRVFKLFRALGLRHLVVVDNRNQVVGLVTRKDLARYRLGKRGLEELSLAQT

SEQ ID NO: 14923 - protein, 118 aa, Homo sapiens
  Payload ID: 2915
  Gene Symbol: CLCN7
  Gene Name: chloride channel, voltage-sensitive 7
  ENSP ID: ENSP00000454845
MSPCSVRLSSVKSPRSALFRVGHMSSVELDDELLDPDMDPPHPFPKEIPHNEKLLSLKYESLDYDNSENQLFLEEERRINHTAFRTVEIKRWVICALIGILTGLVACFIDIVVENLAG

SEQ ID NO: 14924 - protein, 216 aa, Homo sapiens
  Payload ID: 2915
  Gene Symbol: CLCN7
  Gene Name: chloride channel, voltage-sensitive 7
  ENSP ID: ENSP00000461009
MSSVELDDELLDPDMDPPHPFPKEIPHNEKLLSLKYESLDYDNSENQLFLEEERRINHTAFRTVEIKRWVICALIGILTGLVACFIDIVVENLAGLKYRVIKGNIDKFTEKGGLSFSLLLWATLNAAFVLVGSVIVAFIEPVAAGSGIPQIKCFLNGVKIPHVVRLKTLVIKVSGVILSVVGGLAVGKEGPMIHSGSVIAAGISQGRSTSLKRDFK

SEQ ID NO: 14925 - protein, 687 aa, Homo sapiens
  Payload ID: 2916
  Gene Symbol: CLCNKA
  Gene Name: chloride channel, voltage-sensitive Ka
  Uniprot ID: P51800
  ENSP ID: ENSP00000332771
MEELVGLREGFSGDPVTLQELWGPCPHIRRAIQGGLEWLKQKVFRLGEDWYFLMTLGVLMALVSYAMNFAIGCVVRAHQWLYREIGDSHLLRYLSWTVYPVALVSFSSGFSQSITPSSGGSGIPELKTMLAGVILEDYLDIKNFGAKVVGLSCTLATGSTLFLGKVGPFVHLSVMIAAYLGRVRTTTIGEPENKSKQNEMLVAAAAVGVATVFAAPFSGVLFSIEVMSSHFSVRDYWRGFFAATCGAFIFRLLAVFNSEQETITSLYKTSFRVDVPFDLPEIFFFVALGGICGVLSCAYLFCQRTFLSFIKTNRYSSKLLATSKPVYSALATLLLASITYPPGVGHFLASRLSMKQHLDSLFDNHSWALMTQNSSPPWPEELDPQHLWWEWYHPRFTIFGTLAFFLVMKFWMLILATTIPMPAGYFMPIFILGAAIGRLLGEALAVAFPEGIVTGGVTNPIMPGGYALAGAAAFSGAVTHTISTALLAFELTGQIVHALPVLMAVLAANAIAQSCQPSFYDGTIIVKKLPYLPRILGRNIGSHHVRVEHFMNHSITTLAKDTPLEEVVKVVTSTDVTEYPLVESTESQILVGIVQRAQLVQALQAEPPSRAPGHQQCLQDILARGCPTEPVTLTLFSETTLHQAQNLFKLLNLQSLFVTSRGRAVGCVSWVEMKKAISNLTNPPAPK

SEQ ID NO: 14926 - protein, 686 aa, Homo sapiens
  Payload ID: 2916
  Gene Symbol: CLCNKA
  Gene Name: chloride channel, voltage-sensitive Ka
  Uniprot ID: P51800
  ENSP ID: ENSP00000364844
MEELVGLREGFSGDPVTLQELWGPCPHIRRAIQGGLEWLKQKVFRLGEDWYFLMTLGVLMALVSYAMNFAIGCVVRAHQWLYREIGDSHLLRYLSWTVYPVALVSFSSGFSQSITPSSGGSGIPELKTMLAGVILEDYLDIKNFGAKVVGLSCTLATGSTLFLGKVGPFVHLSVMIAAYLGRVRTTTIGEPENKSKQNEMLVAAAAVGVATVFAAPFSGVLFSIEVMSSHFSVRDYWRGFFAATCGAFIFRLLAVFNSEQETITSLYKTSFRVDVPFDLPEIFFFVALGGICGVLSCAYLFCQRTFLSFIKTNRYSSKLLATSKPVYSALATLLLASITYPPGVGHFLASRLSMKQHLDSLFDNHSWALMTQNSSPPWPEELDPQHLWWEWYHPRFTIFGTLAFFLVMKFWMLILATTIPMPAGYFMPIFILGAAIGRLLGEALAVAFPEGIVTGGVTNPIMPGGYALAGAAAFSGAVTHTISTALLAFELTGQIVHALPVLMAVLAANAIAQSCQPSFYDGTIIVKKLPYLPRILGRNIGSHHVRVEHFMNHSITTLAKDTPLEEVVKVVTSTDVTEYPLVESTESQILVGIVQRAQLVQALQAEPPSRAPGHQCLQDILARGCPTEPVTLTLFSETTLHQAQNLFKLLNLQSLFVTSRGRAVGCVSWVEMKKAISNLTNPPAPK

SEQ ID NO: 14927 - protein, 644 aa, Homo sapiens
  Payload ID: 2916
  Gene Symbol: CLCNKA
  Gene Name: chloride channel, voltage-sensitive Ka
  Uniprot ID: P51800
  ENSP ID: ENSP00000414445
MEELVGLREGFSGDPVTLQELWGPCPHIRRAIQGGLEWLKQKVFRLGEDWYFLMTLGVLMALVSYAMNFAIGCVVRGSGIPELKTMLAGVILEDYLDIKNFGAKVVGLSCTLATGSTLFLGKVGPFVHLSVMIAAYLGRVRTTTIGEPENKSKQNEMLVAAAAVGVATVFAAPFSGVLFSIEVMSSHFSVRDYWRGFFAATCGAFIFRLLAVFNSEQETITSLYKTSFRVDVPFDLPEIFFFVALGGICGVLSCAYLFCQRTFLSFIKTNRYSSKLLATSKPVYSALATLLLASITYPPGVGHFLASRLSMKQHLDSLFDNHSWALMTQNSSPPWPEELDPQHLWWEWYHPRFTIFGTLAFFLVMKFWMLILATTIPMPAGYFMPIFILGAAIGRLLGEALAVAFPEGIVTGGVTNPIMPGGYALAGAAAFSGAVTHTISTALLAFELTGQIVHALPVLMAVLAANAIAQSCQPSFYDGTIIVKKLPYLPRILGRNIGSHHVRVEHFMNHSITTLAKDTPLEEVVKVVTSTDVTEYPLVESTESQILVGIVQRAQLVQALQAEPPSRAPGHQQCLQDILARGCPTEPVTLTLFSETTLHQAQNLFKLLNLQSLFVTSRGRAVGCVSWVEMKKAISNLTNPPAPK

SEQ ID NO: 14928 - protein, 517 aa, Homo sapiens
  Payload ID: 2917
  Gene Symbol: CLCNKB
  Gene Name: chloride channel, voltage-sensitive Kb
  Uniprot ID: P51801
  ENSP ID: ENSP00000364819
MPCPPLLSVPVRAAGEQDRWVREEVTWGGGPTVTGGWGWRAHLRSVSPPGVLFSIEVMSSHFSVWDYWRGFFAATCGAFMFRLLAVFNSEQETITSLYKTSFRVDVPFDLPEIFFFVALGGLCGILGSAYLFCQRIFFGFIRNNRFSSKLLATSKPVYSALATLVLASITYPPSAGRFLASRLSMKQHLDSLFDNHSWALMTQNSSPPWPEELDPQHLWWEWYHPRFTIFGTLAFFLVMKFWMLILATTIPMPAGYFMPIFVYGAAIGRLFGETLSFIFPEGIVAGGITNPIMPGGYALAGAAAFSGAVTHTISTALLAFEVTGQIVHALPVLMAVLAANAIAQSCQPSFYDGTVIVKKLPYLPRILGRNIGSHRVRVEHFMNHSITTLAKDMPLEEVVKVVTSTDVAKYPLVESTESQILVGIVRRAQLVQALKAEPPSWAPGHQCLQDILAAGCPTEPVTLKLSPETSLHEAHNLFELLNLHSLFVTSRGRAVGCVSWVEMKKAISNLTNPPAPK

SEQ ID NO: 14929 - protein, 687 aa, Homo sapiens
  Payload ID: 2917
  Gene Symbol: CLCNKB
  Gene Name: chloride channel, voltage-sensitive Kb
  Uniprot ID: P51801
  ENSP ID: ENSP00000364831
MEEFVGLREGSSGNPVTLQELWGPCPRIRRGIRGGLEWLKQKLFRLGEDWYFLMTLGVLMALVSCAMDLAVESVVRAHQWLYREIGDSHLLRYLSWTVYPVALVSFSSGFSQSITPSSGGSGIPEVKTMLAGVVLEDYLDIKNFGAKVVGLSCTLACGSTLFLGKVGPFVHLSVMMAAYLGRVRTTTIGEPENKSKQNEMLVAAAAVGVATVFAAPFSGVLFSIEVMSSHFSVWDYWRGFFAATCGAFMFRLLAVFNSEQETITSLYKTSFRVDVPFDLPEIFFFVALGGLCGILGSAYLFCQRIFFGFIRNNRFSSKLLATSKPVYSALATLVLASITYPPSAGRFLASRLSMKQHLDSLFDNHSWALMTQNSSPPWPEELDPQHLWWEWYHPRFTIFGTLAFFLVMKFWMLILATTIPMPAGYFMPIFVYGAAIGRLFGETLSFIFPEGIVAGGITNPIMPGGYALAGAAAFSGAVTHTISTALLAFEVTGQIVHALPVLMAVLAANAIAQSCQPSFYDGTVIVKKLPYLPRILGRNIGSHRVRVEHFMNHSITTLAKDMPLEEVVKVVTSTDVAKYPLVESTESQILVGIVRRAQLVQALKAEPPSWAPGHQQCLQDILAAGCPTEPVTLKLSPETSLHEAHNLFELLNLHSLFVTSRGRAVGCVSWVEMKKAISNLTNPPAPK

SEQ ID NO: 14930 - protein, 146 aa, Homo sapiens
  Payload ID: 2917
  Gene Symbol: CLCNKB
  Gene Name: chloride channel, voltage-sensitive Kb
  ENSP ID: ENSP00000389344
AQSCQPSFYDGTVIVKKLPYLPRILGRNIGSHRVRVEHFMNHSITTLAKDMPLEEVVKVVTSTDVAKYPLVESTESQILVGIVRRAQLVQALKAEPPSWAPGHQCLQDILAAGCPTEPVTLKLSPETSLHEAQMPSGVVWFPVRGS

SEQ ID NO: 14931 - protein, 463 aa, Homo sapiens
  Payload ID: 2917
  Gene Symbol: CLCNKB
  Gene Name: chloride channel, voltage-sensitive Kb
  ENSP ID: ENSP00000483866
MEEFVGLREGSSGNPVTLQELWGPCPRIRRGIRGGLEWLKQKLFRLGEDWYFLMTLGVLMALVSCAMDLAVESVVRAHQWLYREIGDSHLLRYLSWTVYPVALVSFSSGFSQSITPSSGGSGIPEVKTMLAGVVLEDYLDIKNFGAKVVGLSCTLACGSTLFLGKVGPFVHLSVMMAAYLGRVRTTTIGEPENKSNKPVYSALATLVLASITYPPSAGRFLASRLSMKQHLDSLFDNHSWALMTQNSSPPWPEELDPQHLWWEWYHPRFTIFGTLAFFLVMKFWMLILATTIPMPAGYFMPIFVYGAAIGRLFGETLSFIFPEGIVAGGITNPIMPGGYALAGAAAFSGAVTHTISTALLAFEVTGQIVHALPVLMAVLAANAIAQSCQPSFYDGTVIVKKLPYLPRILGRNIGSHRVRVEHFMNHSITTLAITLMNDEIGVHCHQGQAQMPSGVVWFPVRGS

SEQ ID NO: 14932 - protein, 241 aa, Homo sapiens
  Payload ID: 2918
  Gene Symbol: CLIC1
  Gene Name: chloride intracellular channel 1
  Uniprot ID: O00299
  ENSP ID: ENSP00000364934
MAEEQPQVELFVKAGSDGAKIGNCPFSQRLFMVLWLKGVTFNVTTVDTKRRTETVQKLCPGGQLPFLLYGTEVHTDTNKIEEFLEAVLCPPRYPKLAALNPESNTAGLDIFAKFSAYIKNSNPALNDNLEKGLLKALKVLDNYLTSPLPEEVDETSAEDEGVSQRKFLDGNELTLADCNLLPKLHIVQVVCKKYRGFTIPEAFRGVHRYLSNAYAREEFASTCPDDEEIELAYEQVAKALK

SEQ ID NO: 14933 - protein, 241 aa, Homo sapiens; identical to SEQ ID NO: 14932
  Payload ID: 2918
  Gene Symbol: CLIC1
  Gene Name: chloride intracellular channel 1
  Uniprot ID: O00299
  ENSP ID: ENSP00000364935

SEQ ID NO: 14934 - protein, 241 aa, Homo sapiens; identical to SEQ ID NO: 14932
  Payload ID: 2918
  Gene Symbol: CLIC1
  Gene Name: chloride intracellular channel 1
  Uniprot ID: O00299
  ENSP ID: ENSP00000364940

SEQ ID NO: 14935 - protein, 241 aa, Homo sapiens; identical to SEQ ID NO: 14932
  Payload ID: 2918
  Gene Symbol: CLIC1
  Gene Name: chloride intracellular channel 1
  Uniprot ID: O00299
  ENSP ID: ENSP00000372896

SEQ ID NO: 14936 - protein, 241 aa, Homo sapiens; identical to SEQ ID NO: 14932
  Payload ID: 2918
  Gene Symbol: CLIC1
  Gene Name: chloride intracellular channel 1
  Uniprot ID: O00299
  ENSP ID: ENSP00000372897

SEQ ID NO: 14937 - protein, 241 aa, Homo sapiens; identical to SEQ ID NO: 14932
  Payload ID: 2918
  Gene Symbol: CLIC1
  Gene Name: chloride intracellular channel 1
  Uniprot ID: O00299
  ENSP ID: ENSP00000379229

SEQ ID NO: 14938 - protein, 241 aa, Homo sapiens; identical to SEQ ID NO: 14932
  Payload ID: 2918
  Gene Symbol: CLIC1
  Gene Name: chloride intracellular channel 1
  Uniprot ID: O00299
  ENSP ID: ENSP00000382926

SEQ ID NO: 14939 - protein, 241 aa, Homo sapiens; identical to SEQ ID NO: 14932
  Payload ID: 2918
  Gene Symbol: CLIC1
  Gene Name: chloride intracellular channel 1
  Uniprot ID: O00299
  ENSP ID: ENSP00000382931

SEQ ID NO: 14940 - protein, 241 aa, Homo sapiens; identical to SEQ ID NO: 14932
  Payload ID: 2918
  Gene Symbol: CLIC1
  Gene Name: chloride intracellular channel 1
  Uniprot ID: O00299
  ENSP ID: ENSP00000391395

SEQ ID NO: 14941 - protein, 241 aa, Homo sapiens; identical to SEQ ID NO: 14932
  Payload ID: 2918
  Gene Symbol: CLIC1
  Gene Name: chloride intracellular channel 1
  Uniprot ID: O00299
  ENSP ID: ENSP00000398056

SEQ ID NO: 14942 - protein, 241 aa, Homo sapiens; identical to SEQ ID NO: 14932
  Payload ID: 2918
  Gene Symbol: CLIC1
  Gene Name: chloride intracellular channel 1
  Uniprot ID: O00299
  ENSP ID: ENSP00000400280

SEQ ID NO: 14943 - protein, 241 aa, Homo sapiens; identical to SEQ ID NO: 14932
  Payload ID: 2918
  Gene Symbol: CLIC1
  Gene Name: chloride intracellular channel 1
  Uniprot ID: O00299
  ENSP ID: ENSP00000400532

SEQ ID NO: 14944 - protein, 241 aa, Homo sapiens; identical to SEQ ID NO: 14932
  Payload ID: 2918
  Gene Symbol: CLIC1
  Gene Name: chloride intracellular channel 1
  Uniprot ID: O00299
  ENSP ID: ENSP00000401292

SEQ ID NO: 14945 - protein, 241 aa, Homo sapiens; identical to SEQ ID NO: 14932
  Payload ID: 2918
  Gene Symbol: CLIC1
  Gene Name: chloride intracellular channel 1
  Uniprot ID: O00299
  ENSP ID: ENSP00000404037

SEQ ID NO: 14946 - protein, 241 aa, Homo sapiens; identical to SEQ ID NO: 14932
  Payload ID: 2918
  Gene Symbol: CLIC1
  Gene Name: chloride intracellular channel 1
  Uniprot ID: O00299
  ENSP ID: ENSP00000404589

SEQ ID NO: 14947 - protein, 241 aa, Homo sapiens; identical to SEQ ID NO: 14932
  Payload ID: 2918
  Gene Symbol: CLIC1
  Gene Name: chloride intracellular channel 1
  Uniprot ID: O00299
  ENSP ID: ENSP00000406088

SEQ ID NO: 14948 - protein, 241 aa, Homo sapiens; identical to SEQ ID NO: 14932
  Payload ID: 2918
  Gene Symbol: CLIC1
  Gene Name: chloride intracellular channel 1
  Uniprot ID: O00299
  ENSP ID: ENSP00000406335

SEQ ID NO: 14949 - protein, 241 aa, Homo sapiens; identical to SEQ ID NO: 14932
  Payload ID: 2918
  Gene Symbol: CLIC1
  Gene Name: chloride intracellular channel 1
  Uniprot ID: O00299
  ENSP ID: ENSP00000406968

SEQ ID NO: 14950 - protein, 241 aa, Homo sapiens; identical to SEQ ID NO: 14932
  Payload ID: 2918
  Gene Symbol: CLIC1
  Gene Name: chloride intracellular channel 1
  Uniprot ID: O00299
  ENSP ID: ENSP00000407429

SEQ ID NO: 14951 - protein, 241 aa, Homo sapiens; identical to SEQ ID NO: 14932
  Payload ID: 2918
  Gene Symbol: CLIC1
  Gene Name: chloride intracellular channel 1
  Uniprot ID: O00299
  ENSP ID: ENSP00000407791

SEQ ID NO: 14952 - protein, 241 aa, Homo sapiens; identical to SEQ ID NO: 14932
  Payload ID: 2918
  Gene Symbol: CLIC1
  Gene Name: chloride intracellular channel 1
  Uniprot ID: O00299
  ENSP ID: ENSP00000408094

SEQ ID NO: 14953 - protein, 241 aa, Homo sapiens; identical to SEQ ID NO: 14932
  Payload ID: 2918
  Gene Symbol: CLIC1
  Gene Name: chloride intracellular channel 1
  Uniprot ID: O00299
  ENSP ID: ENSP00000408357

SEQ ID NO: 14954 - protein, 241 aa, Homo sapiens; identical to SEQ ID NO: 14932
  Payload ID: 2918
  Gene Symbol: CLIC1
  Gene Name: chloride intracellular channel 1
  Uniprot ID: O00299
  ENSP ID: ENSP00000409247

SEQ ID NO: 14955 - protein, 241 aa, Homo sapiens; identical to SEQ ID NO: 14932
  Payload ID: 2918
  Gene Symbol: CLIC1
  Gene Name: chloride intracellular channel 1
  Uniprot ID: O00299
  ENSP ID: ENSP00000409979

SEQ ID NO: 14956 - protein, 241 aa, Homo sapiens; identical to SEQ ID NO: 14932
  Payload ID: 2918
  Gene Symbol: CLIC1
  Gene Name: chloride intracellular channel 1
  Uniprot ID: O00299
  ENSP ID: ENSP00000410965

SEQ ID NO: 14957 - protein, 241 aa, Homo sapiens; identical to SEQ ID NO: 14932
  Payload ID: 2918
  Gene Symbol: CLIC1
  Gene Name: chloride intracellular channel 1
  Uniprot ID: O00299
  ENSP ID: ENSP00000412217

SEQ ID NO: 14958 - protein, 241 aa, Homo sapiens; identical to SEQ ID NO: 14932
  Payload ID: 2918
  Gene Symbol: CLIC1
  Gene Name: chloride intracellular channel 1
  Uniprot ID: O00299
  ENSP ID: ENSP00000413330

SEQ ID NO: 14959 - protein, 241 aa, Homo sapiens; identical to SEQ ID NO: 14932
  Payload ID: 2918
  Gene Symbol: CLIC1
  Gene Name: chloride intracellular channel 1
  Uniprot ID: O00299
  ENSP ID: ENSP00000416211

SEQ ID NO: 14960 - protein, 241 aa, Homo sapiens; identical to SEQ ID NO: 14932
  Payload ID: 2918
  Gene Symbol: CLIC1
  Gene Name: chloride intracellular channel 1
  Uniprot ID: O00299
  ENSP ID: ENSP00000477623

SEQ ID NO: 14961 - protein, 241 aa, Homo sapiens; identical to SEQ ID NO: 14932
  Payload ID: 2918
  Gene Symbol: CLIC1
  Gene Name: chloride intracellular channel 1
  Uniprot ID: O00299
  ENSP ID: ENSP00000478930

SEQ ID NO: 14962 - protein, 241 aa, Homo sapiens; identical to SEQ ID NO: 14932
  Payload ID: 2918
  Gene Symbol: CLIC1
  Gene Name: chloride intracellular channel 1
  Uniprot ID: O00299
  ENSP ID: ENSP00000479501

SEQ ID NO: 14963 - protein, 241 aa, Homo sapiens; identical to SEQ ID NO: 14932
  Payload ID: 2918
  Gene Symbol: CLIC1
  Gene Name: chloride intracellular channel 1
  Uniprot ID: O00299
  ENSP ID: ENSP00000479808

SEQ ID NO: 14964 - protein, 241 aa, Homo sapiens; identical to SEQ ID NO: 14932
  Payload ID: 2918
  Gene Symbol: CLIC1
  Gene Name: chloride intracellular channel 1
  Uniprot ID: O00299
  ENSP ID: ENSP00000480256

SEQ ID NO: 14965 - protein, 241 aa, Homo sapiens; identical to SEQ ID NO: 14932
  Payload ID: 2918
  Gene Symbol: CLIC1
  Gene Name: chloride intracellular channel 1
  Uniprot ID: O00299
  ENSP ID: ENSP00000482255

SEQ ID NO: 14966 - protein, 241 aa, Homo sapiens; identical to SEQ ID NO: 14932
  Payload ID: 2918
  Gene Symbol: CLIC1
  Gene Name: chloride intracellular channel 1
  Uniprot ID: O00299
  ENSP ID: ENSP00000484581

SEQ ID NO: 14967 - protein, 133 aa, Homo sapiens
  Payload ID: 2919
  Gene Symbol: CLIC2
  Gene Name: chloride intracellular channel 2
  ENSP ID: ENSP00000318558
MSGLRPGTQVDPEIELFVKAGSDGESIGNCPFCQRLFMILWLKGVKFNVTTVDMTRYPHLSPKYKESFDVGCNLFAKFSAYIKNTQKEANKNFEKSLLKEFKRLDDYLNTPLLDEIDPDSAEEPPVSRRLFLD

SEQ ID NO: 14968 - protein, 247 aa, Homo sapiens
  Payload ID: 2919
  Gene Symbol: CLIC2
  Gene Name: chloride intracellular channel 2
  Uniprot ID: O15247
  ENSP ID: ENSP00000358460
MSGLRPGTQVDPEIELFVKAGSDGESIGNCPFCQRLFMILWLKGVKFNVTTVDMTRKPEELKDLAPGTNPPFLVYNKELKTDFIKIEEFLEQTLAPPRYPHLSPKYKESFDVGCNLFAKFSAYIKNTQKEANKNFEKSLLKEFKRLDDYLNTPLLDEIDPDSAEEPPVSRRLFLDGDQLTLADCSLLPKLNIIKVAAKKYRDFDIPAEFSGVWRYLHNAYAREEFTHTCPEDKEIENTYANVAKQKS

SEQ ID NO: 14969 - protein, 236 aa, Homo sapiens
  Payload ID: 2920
  Gene Symbol: CLIC3
  Gene Name: chloride intracellular channel 3
  Uniprot ID: O95833
  ENSP ID: ENSP00000419378
MAETKLQLFVKASEDGESVGHCPSCQRLFMVLLLKGVPFTLTTVDTRRSPDVLKDFAPGSQLPILLYDSDAKTDTLQIEDFLEETLGPPDFPSLAPRYRESNTAGNDVFHKFSAFIKNPVPAQDEALYQQLLRALARLDSYLRAPLEHELAGEPQLRESRRRFLDGDRLTLADCSLLPKLHIVDTVCAHFRQAPIPAELRGVRRYLDSAMQEKEFKYTCPHSAEILAAYRPAVHPR

SEQ ID NO: 14970 - protein, 253 aa, Homo sapiens
  Payload ID: 2921
  Gene Symbol: CLIC4
  Gene Name: chloride intracellular channel 4
  Uniprot ID: Q9Y696
  ENSP ID: ENSP00000363500
MALSMPLNGLKEEDKEPLIELFVKAGSDGESIGNCPFSQRLFMILWLKGVVFSVTTVDLKRKPADLQNLAPGTHPPFITFNSEVKTDVNKIEEFLEEVLCPPKYLKLSPKHPESNTAGMDIFAKFSAYIKNSRPEANEALERGLLKTLQKLDEYLNSPLPDEIDENSMEDIKFSTRKFLDGNEMTLADCNLLPKLHIVKVVAKKYRNFDIPKEMTGIWRYLTNAYSRDEFTNTCPSDKEVEIAYSDVAKRLTK

SEQ ID NO: 14971 - protein, 253 aa, Homo sapiens; identical to SEQ ID NO: 14970
  Payload ID: 2921
  Gene Symbol: CLIC4
  Gene Name: chloride intracellular channel 4
  Uniprot ID: Q9Y696
  ENSP ID: ENSP00000436538

SEQ ID NO: 14972 - protein, 410 aa, Homo sapiens
  Payload ID: 2922
  Gene Symbol: CLIC5
  Gene Name: chloride intracellular channel 5
  Uniprot ID: Q9NZA1
  ENSP ID: ENSP00000185206
MNDEDYSTIYDTIQNERTYEVPDQPEENESPHYDDVHEYLRPENDLYATQLNTHEYDFVSVYTIKGEETSLASVQSEDRGYLLPDEIYSELQEAHPGEPQEDRGISMEGLYSSTQDQQLCAAELQENGSVMKEDLPSPSSFTIQHSKAFSTTKYSCYSDAEGLEEKEGAHMNPEIYLFVKAGIDGESIGNCPFSQRLFMILWLKGVVFNVTTVDLKRKPADLHNLAPGTHPPFLTFNGDVKTDVNKIEEFLEETLTPEKYPKLAAKHRESNTAGIDIFSKFSAYIKNTKQQNNAALERGLTKALKKLDDYLNTPLPEEIDANTCGEDKGSRRKFLDGDELTLADCNLLPKLHVVKIVAKKYRNYDIPAEMTGLWRYLKNAYARDEFTNTCAADSEIELAYADVAKRLSRS

SEQ ID NO: 14973 - protein, 251 aa, Homo sapiens
  Payload ID: 2922
  Gene Symbol: CLIC5
  Gene Name: chloride intracellular channel 5
  Uniprot ID: Q9NZA1
  ENSP ID: ENSP00000344165
MTDSATANGDDRDPEIELFVKAGIDGESIGNCPFSQRLFMILWLKGVVFNVTTVDLKRKPADLHNLAPGTHPPFLTFNGDVKTDVNKIEEFLEETLTPEKYPKLAAKHRESNTAGIDIFSKFSAYIKNTKQQNNAALERGLTKALKKLDDYLNTPLPEEIDANTCGEDKGSRRKFLDGDELTLADCNLLPKLHVVKIVAKKYRNYDIPAEMTGLWRYLKNAYARDEFTNTCAADSEIELAYADVAKRLSRS

SEQ ID NO: 14974 - protein, 205 aa, Homo sapiens
  Payload ID: 2922
  Gene Symbol: CLIC5
  Gene Name: chloride intracellular channel 5
  Uniprot ID: Q9NZA1
  ENSP ID: ENSP00000439195
MTDSATANGDDRDPEIELFVKAGIDGESIGNCPFSQRLFMILWLKGVVFNVTTVDLKRKPADLHNLAPGTHPPFLTFNGDVKTDVNKIEEFLEETLTPEKYPKLAAKHRESNTAGIDIFSKFSAYIKNTKQQNNAALERGLTKALKKLDDYLNTPLPEEIDANTCGEDKGSRRKFLDGDELTLADCNLLPKLHVVKEQVPLKGMI

SEQ ID NO: 14975 - protein, 686 aa, Homo sapiens
  Payload ID: 2923
  Gene Symbol: CLIC6
  Gene Name: chloride intracellular channel 6
  Uniprot ID: Q96NY7
  ENSP ID: ENSP00000290332
MAEAAEPEGVAPGPQGPPEVPAPLAERPGEPGAAGGEAEGPEGSEGAEEAPRGAAAVKEAGGGGPDRGPEAEARGTRGAHGETEAEEGAPEGAEVPQGGEETSGAQQVEGASPGRGAQGEPRGEAQREPEDSAAPERQEEAEQRPEVPEGSASGEAGDSVDAEGPLGDNIEAEGPAGDSVEAEGRVGDSVDAEGPAGDSVDAEGPLGDNIQAEGPAGDSVDAEGRVGDSVDAEGPAGDSVDAEGRVGDSVEAGDPAGDGVEAGVPAGDSVEAEGPAGDSMDAEGPAGRARRVSGEPQQSGDGSLSPQAEAIEVAAGESAGRSPGELAWDAAEEAEVPGVKGSEEAAPGDARADAGEDRVGDGPQQEPGEDEERRERSPEGPREEEAAGGEEESPDSSPHGEASRGAAEPEAQLSNHLAEEGPAEGSGEAARVNGRREDGEASEPRALGQEHDITLFVKAGYDGESIGNCPFSQRLFMILWLKGVIFNVTTVDLKRKPADLQNLAPGTNPPFMTFDGEVKTDVNKIEEFLEEKLAPPRYPKLGTQHPESNSAGNDVFAKFSAFIKNTKKDANEIHEKNLLKALRKLDNYLNSPLPDEIDAYSTEDVTVSGRKFLDGDELTLADCNLLPKLHIIKIVAKKYRDFEFPSEMTGIWRYLNNAYARDEFTNTCPADQEIEHAYSDVAKRMK

SEQ ID NO: 14976 - protein, 704 aa, Homo sapiens
  Payload ID: 2923
  Gene Symbol: CLIC6
  Gene Name: chloride intracellular channel 6
  Uniprot ID: Q96NY7
  ENSP ID: ENSP00000353959
MAEAAEPEGVAPGPQGPPEVPAPLAERPGEPGAAGGEAEGPEGSEGAEEAPRGAAAVKEAGGGGPDRGPEAEARGTRGAHGETEAEEGAPEGAEVPQGGEETSGAQQVEGASPGRGAQGEPRGEAQREPEDSAAPERQEEAEQRPEVPEGSASGEAGDSVDAEGPLGDNIEAEGPAGDSVEAEGRVGDSVDAEGPAGDSVDAEGPLGDNIQAEGPAGDSVDAEGRVGDSVDAEGPAGDSVDAEGRVGDSVEAGDPAGDGVEAGVPAGDSVEAEGPAGDSMDAEGPAGRARRVSGEPQQSGDGSLSPQAEAIEVAAGESAGRSPGELAWDAAEEAEVPGVKGSEEAAPGDARADAGEDRVGDGPQQEPGEDEERRERSPEGPREEEAAGGEEESPDSSPHGEASRGAAEPEAQLSNHLAEEGPAEGSGEAARVNGRREDGEASEPRALGQEHDITLFVKVKLTALGCSRIAIKKYLRAGYDGESIGNCPFSQRLFMILWLKGVIFNVTTVDLKRKPADLQNLAPGTNPPFMTFDGEVKTDVNKIEEFLEEKLAPPRYPKLGTQHPESNSAGNDVFAKFSAFIKNTKKDANEIHEKNLLKALRKLDNYLNSPLPDEIDAYSTEDVTVSGRKFLDGDELTLADCNLLPKLHIIKIVAKKYRDFEFPSEMTGIWRYLNNAYARDEFTNTCPADQEIEHAYSDVAKRMK

SEQ ID NO: 14977 - protein, 115 aa, Homo sapiens
  Payload ID: 2924
  Gene Symbol: CCK
  Gene Name: cholecystokinin
  Uniprot ID: P06307
  ENSP ID: ENSP00000335657
MNSGVCLCVLMAVLAAGALTQPVPPADPAGSGLQRAEEAPRRQLRVSQRTDGESRAHLGALLARYIQQARKAPSGRMSIVKNLQNLDPSHRISDRDYMGWMDFGRRSAEEYEYPS

SEQ ID NO: 14978 - protein, 115 aa, Homo sapiens; identical to SEQ ID NO: 14977
  Payload ID: 2924
  Gene Symbol: CCK
  Gene Name: cholecystokinin
  Uniprot ID: P06307
  ENSP ID: ENSP00000379472

SEQ ID NO: 14979 - protein, 115 aa, Homo sapiens; identical to SEQ ID NO: 14977
  Payload ID: 2924
  Gene Symbol: CCK
  Gene Name: cholecystokinin
  Uniprot ID: P06307
  ENSP ID: ENSP00000409124

SEQ ID NO: 14980 - protein, 428 aa, Homo sapiens
  Payload ID: 2925
  Gene Symbol: CCKAR
  Gene Name: cholecystokinin A receptor
  Uniprot ID: P32238
  ENSP ID: ENSP00000295589
MDVVDSLLVNGSNITPPCELGLENETLFCLDQPRPSKEWQPAVQILLYSLIFLLSVLGNTLVITVLIRNKRMRTVTNIFLLSLAVSDLMLCLFCMPFNLIPNLLKDFIFGSAVCKTTTYFMGTSVSVSTFNLVAISLERYGAICKPLQSRVWQTKSHALKVIAATWCLSFTIMTPYPIYSNLVPFTKNNNQTANMCRFLLPNDVMQQSWHTFLLLILFLIPGIVMMVAYGLISLELYQGIKFEASQKKSAKERKPSTTSSGKYEDSDGCYLQKTRPPRKLELRQLSTGSSSRANRIRSNSSAANLMAKKRVIRMLIVIVVLFFLCWMPIFSANAWRAYDTASAERRLSGTPISFILLLSYTSSCVNPIIYCFMNKRFRLGFMATFPCCPNPGPPGARGEVGEEEEGGTTGASLSRFSYSHMSASVPPQ

SEQ ID NO: 14981 - protein, 447 aa, Homo sapiens
  Payload ID: 2926
  Gene Symbol: CCKBR
  Gene Name: cholecystokinin B receptor
  Uniprot ID: P32239
  ENSP ID: ENSP00000335544
MELLKLNRSVQGTGPGPGASLCRPGAPLLNSSSVGNLSCEPPRIRGAGTRELELAIRITLYAVIFLMSVGGNMLIIVVLGLSRRLRTVTNAFLLSLAVSDLLLAVACMPFTLLPNLMGTFIFGTVICKAVSYLMGVSVSVSTLSLVAIALERYSAICRPLQARVWQTRSHAARVIVATWLLSGLLMVPYPVYTVVQPVGPRVLQCVHRWPSARVRQTWSVLLLLLLFFIPGVVMAVAYGLISRELYLGLRFDGDSDSDSQSRVRNQGGLPGAVHQNGRCRPETGAVGEDSDGCYVQLPRSRPALELTALTAPGPGSGSRPTQAKLLAKKRVVRMLLVIVVLFFLCWLPVYSANTWRAFDGPGAHRALSGAPISFIHLLSYASACVNPLVYCFMHRRFRQACLETCARCCPRPPRARPRALPDEDPPTPSIASLSRLSYTTISTLGPG

SEQ ID NO: 14982 - protein, 363 aa, Homo sapiens
  Payload ID: 2926
  Gene Symbol: CCKBR
  Gene Name: cholecystokinin B receptor
  ENSP ID: ENSP00000432079
MELLKLNRSVQGTGPGPGASLCRPGAPLLNSSSVGNLSCEPPRIRGAGTRGVSVSVSTLSLVAIALERYSAICRPLQARVWQTRSHAARVIVATWLLSGLLMVPYPVYTVVQPVGPRVLQCVHRWPSARVRQTWSVLLLLLLFFIPGVVMAVAYGLISRELYLGLRFDGDSDSDSQSRVRNQGGLPGAVHQNGRCRPETGAVGEDSDGCYVQLPRSRPALELTALTAPGPGSGSRPTQAKLLAKKRVVRMLLVIVVLFFLCWLPVYSANTWRAFDGPGAHRALSGAPISFIHLLSYASACVNPLVYCFMHRRFRQACLETCARCCPRPPRARPRALPDEDPPTPSIASLSRLSYTTISTLGPG

SEQ ID NO: 14983 - protein, 516 aa, Homo sapiens
  Payload ID: 2926
  Gene Symbol: CCKBR
  Gene Name: cholecystokinin B receptor
  Uniprot ID: P32239
  ENSP ID: ENSP00000435534
MELLKLNRSVQGTGPGPGASLCRPGAPLLNSSSVGNLSCEPPRIRGAGTRELELAIRITLYAVIFLMSVGGNMLIIVVLGLSRRLRTVTNAFLLSLAVSDLLLAVACMPFTLLPNLMGTFIFGTVICKAVSYLMGVSVSVSTLSLVAIALERYSAICRPLQARVWQTRSHAARVIVATWLLSGLLMVPYPVYTVVQPVGPRVLQCVHRWPSARVRQTWSVLLLLLLFFIPGVVMAVAYGLISRELYLGLRFDGDSDSDSQSRVRNQGGLPGGAGPREQNLGEAELWRATGPAGVGGTEMKVRVRRKLEMELSWERRSGGDWAGDWGDSPFSLTAHPLCSGAVHQNGRCRPETGAVGEDSDGCYVQLPRSRPALELTALTAPGPGSGSRPTQAKLLAKKRVVRMLLVIVVLFFLCWLPVYSANTWRAFDGPGAHRALSGAPISFIHLLSYASACVNPLVYCFMHRRFRQACLETCARCCPRPPRARPRALPDEDPPTPSIASLSRLSYTTISTLGPG

SEQ ID NO: 14984 - protein, 87 aa, Homo sapiens
  Payload ID: 2926
  Gene Symbol: CCKBR
  Gene Name: cholecystokinin B receptor
  ENSP ID: ENSP00000435675
MELLKLNRSVQGTGPGPGASLCRPGAPLLNSSSVGNLSCEPPRIRGAGTRDRTNTDLLNTRRRTELSQSSESPGLMPVFLIPRKMMR

SEQ ID NO: 14985 - protein, 136 aa, Homo sapiens
  Payload ID: 2926
  Gene Symbol: CCKBR
  Gene Name: cholecystokinin B receptor
  ENSP ID: ENSP00000437001
MELLKLNRSVQGTGPGPGASLCRPGAPLLNSSSVGNLSCEPPRIRGAGTRELELAIRITLYAVIFLMSVGGNMLIIVVLGLSRRLRTVTNAFLLSLAVSDLLLAVACMPFTLLPNLMGTFIFGTVICKAVSYLMGG

SEQ ID NO: 14986 - protein, 272 aa, Homo sapiens
  Payload ID: 2927
  Gene Symbol: CH25H
  Gene Name: cholesterol 25-hydroxylase
  Uniprot ID: O95992
  ENSP ID: ENSP00000360918
MSCHNCSDPQVLCSSGQLFLQPLWDHLRSWEALLQSPFFPVIFSITTYVGFCLPFVVLDILCSWVPALRRYKIHPDFSPSAQQLLPCLGQTLYQHVMFVFPVTLLHWARSPALLPHEAPELLLLLHHILFCLLLFDMEFFVWHLLHHKVPWLYRTFHKVHHQNSSSFALATQYMSVWELFSLGFFDMMNVTLLGCHPLTTLTFHVVNIWLSVEDHSGYNFPWSTHRLVPFGWYGGVVHHDLHHSHFNCNFAPYFTHWDKILGTLRTASVPAR

SEQ ID NO: 14987 - protein, 493 aa, Homo sapiens [sequence omitted]

SEQ ID NO: 14988 - protein, 433 aa, Homo sapiens
  Payload ID: 2928
  Gene Symbol: CETP
  Gene Name: cholesteryl ester transfer protein, plasma
  Uniprot ID: P11597
  ENSP ID: ENSP00000369106
MLAATVLTLALLGNAHACSKGTSHEAGIVCRITKPALLVLNHETAKVIQTAFQRASYPDITGEKAMMLLGQVKYGLHNIQISHLSIASSQVELVEAKSIDVSIQNVSVVFKGTLKYGYTTAWWLGIDQSIDFEIDSAIDLQINTQLTCDSGRVRTDAPDCYLSFHKLLLHLQGEREPGWIKQLFTNFISFTLKLVLKGQICKEINVISNIMADFVQTRAASILSDGDIGVDISLTGDPVITASYLESHHKAVLETWGFNTNQEIFQEVVGGFPSQAQVTVHCLKMPKISCQNKGVVVNSSVMVKFLFPRPDQQHSVAYTFEEDIVTTVQASYSKKKLFLSLLDFQITPKTVSNLTESSSESVQSFLQSMITAVGIPEVMSRLEVVFTALMNSKGVSLFDIINPEIITRDGFLLLQMDFGFPEHLLVDFLQSLS

SEQ ID NO: 14989 - protein, 428 aa, Homo sapiens
  Payload ID: 2928
  Gene Symbol: CETP
  Gene Name: cholesteryl ester transfer protein, plasma
  ENSP ID: ENSP00000456276
MMLLGQVKYGLHNIQISHLSIASSQVELVEAKSIDVSIQNVSVVFKGTLKYGYTTAWWLGIDQSIDFEIDSAIDLQINTQLTCDSGRVRTDAPDCYLSFHKLLLHLQGEREPGWIKQLFTNFISFTLKLVLKGQICKEINVISNIMADFVQTRAASILSDGDIGVDISLTGDPVITASYLESHHKGHFIYKNVSEDLPLPTFSPTLLGDSRMLYFWFSERVFHSLAKVAFQDGRLMLSLMGDEFKAVLETWGFNTNQEIFQEVVGGFPSQAQVTVHCLKMPKISCQNKGVVVNSSVMVKFLFPRPDQQHSVAYTFEEDIVTTVQASYSKKKLFLSLLDFQITPKTVSNLTESSSESVQSFLQSMITAVGIPEVMSRLEVVFTALMNSKGVSLFDIINPEIITRDGFLLLQMDFGFPEHLLVDFLQSLS

SEQ ID NO: 14990 - protein, 594 aa, Homo sapiens
  Payload ID: 2929
  Gene Symbol: CHDH
  Gene Name: choline dehydrogenase
  Uniprot ID: Q8NE62
  ENSP ID: ENSP00000319851
MWCLLRGLGRPGALARGALGQQQSLGARALASAGSESRDEYSYVVVGAGSAGCVLAGRLTEDPAERVLLLEAGPKDVLAGSKRLSWKIHMPAALVANLCDDRYNWCYHTEVQRGLDGRVLYWPRGRVWGGSSSLNAMVYVRGHAEDYERWQRQGARGWDYAHCLPYFRKAQGHELGASRYRGADGPLRVSRGKTNHPLHCAFLEATQQAGYPLTEDMNGFQQEGFGWMDMTIHEGKRWSAACAYLHPALSRTNLKAEAETLVSRVLFEGTRAVGVEYVKNGQSHRAYASKEVILSGGAINSPQLLMLSGIGNADDLKKLGIPVVCHLPGVGQNLQDHLEIYIQQACTRPITLHSAQKPLRKVCIGLEWLWKFTGEGATAHLETGGFIRSQPGVPHPDIQFHFLPSQVIDHGRVPTQQEAYQVHVGPMRGTSVGWLKLRSANPQDHPVIQPNYLSTETDIEDFRLCVKLTREIFAQEALAPFRGKELQPGSHIQSDKEIDAFVRAKADSAYHPSCTCKMGQPSDPTAVVDPQTRVLGVENLRVVDASIMPSMVSGNLNAPTIMIAEKAADIIKGQPALWDKDVPVYKPRTLATQR

SEQ ID NO: 14991 - protein, 155 aa, Homo sapiens
  Payload ID: 2929
  Gene Symbol: CHDH
  Gene Name: choline dehydrogenase
  ENSP ID: ENSP00000418273
MWCLLRGLGRPGALARGALGQQQSLGARALASAGSESRDEYSYVVVGAGSAGCVLAGRLTEDPAERVLLLEAGPKDVLAGSKRLSWKIHMPAALVANLCDDRYNWCYHTEVQRGLDGRVLYWPRGRVWGGSSSLNAMVYVRGHAEDYERWQRQGA

SEQ ID NO: 14992 - protein, 126 aa, Homo sapiens
  Payload ID: 2929
  Gene Symbol: CHDH
  Gene Name: choline dehydrogenase
  ENSP ID: ENSP00000419863
MWCLLRGLGRPGALARGALGQQQSLGARALASAGSESRDEYSYVVVGAGSAGCVLAGRLTEDPAERVLLLEAGPKDVLAGSKRLSWKIHMPAALVANLCDDRYNWCYHTEVQRGLDGRVLYWPRGR

SEQ ID NO: 14993 - protein, 457 aa, Homo sapiens
  Payload ID: 2930
  Gene Symbol: CHKA
  Gene Name: choline kinase alpha
  Uniprot ID: P35790
  ENSP ID: ENSP00000265689
MKTKFCTGGEAEPSPLGLLLSCGSGSAAPAPGVGQQRDAASDLESKQLGGQQPPLALPPPPPLPLPLPLPQPPPPQPPADEQPEPRTRRRAYLWCKEFLPGAWRGLREDEFHISVIRGGLSNMLFQCSLPDTTATLGDEPRKVLLRLYGAILQMRSCNKEGSEQAQKENEFQGAEAMVLESVMFAILAERSLGPKLYGIFPQGRLEQFIPSRRLDTEELSLPDISAEIAEKMATFHGMKMPFNKEPKWLFGTMEKYLKEVLRIKFTEESRIKKLHKLLSYNLPLELENLRSLLESTPSPVVFCHNDCQEGNILLLEGRENSEKQKLMLIDFEYSSYNYRGFDIGNHFCEWMYDYSYEKYPFFRANIRKYPTKKQQLHFISSYLPAFQNDFENLSTEEKSIIKEEMLLEVNRFALASHFLWGLWSIVQAKISSIEFGYMDYAQARFDAYFHQKRKLGV

SEQ ID NO: 14994 - protein, 439 aa, Homo sapiens
  Payload ID: 2930
  Gene Symbol: CHKA
  Gene Name: choline kinase alpha
  Uniprot ID: P35790
  ENSP ID: ENSP00000348454
MKTKFCTGGEAEPSPLGLLLSCGSGSAAPAPGVGQQRDAASDLESKQLGGQQPPLALPPPPPLPLPLPLPQPPPPQPPADEQPEPRTRRRAYLWCKEFLPGAWRGLREDEFHISVIRGGLSNMLFQCSLPDTTATLGDEPRKVLLRLYGAILQMGAEAMVLESVMFAILAERSLGPKLYGIFPQGRLEQFIPSRRLDTEELSLPDISAEIAEKMATFHGMKMPFNKEPKWLFGTMEKYLKEVLRIKFTEESRIKKLHKLLSYNLPLELENLRSLLESTPSPVVFCHNDCQEGNILLLEGRENSEKQKLMLIDFEYSSYNYRGFDIGNHFCEWMYDYSYEKYPFFRANIRKYPTKKQQLHFISSYLPAFQNDFENLSTEEKSIIKEEMLLEVNRFALASHFLWGLWSIVQAKISSIEFGYMDYAQARFDAYFHQKRKLGV

SEQ ID NO: 14995 - protein, 164 aa, Homo sapiens
  Payload ID: 2930
  Gene Symbol: CHKA
  Gene Name: choline kinase alpha
  ENSP ID: ENSP00000432631
IDFEYSSYNYRGFDIGNHFCEWMYDYSYEKYPFFRANIRKYPTKKQQLHFISSYLPAFQNDFENLSTEEKSIIKEEMLLEVNRFALASHFLWGLWSIVQAKISSIEFGYMYPNVVTWWHQDSVAQPRKPGEKPLSLMLWLPLEVALTSRPADLASPASEKCLQS

SEQ ID NO: 14996 - protein, 156 aa, Homo sapiens
  Payload ID: 2930
  Gene Symbol: CHKA
  Gene Name: choline kinase alpha
  ENSP ID: ENSP00000435032
MLFQCSLPDTTATLGDEPRKVLLRLYGAILQMRSCNKEGSEQAQKENEFQGAEAMVLESVMFAILAERSLGPKLYGIFPQGRLEQFIPSRRLDTEELSLPDISAEIAEKMATFHGMKMPFNKEPKWLFGTMEKYLKEVLRIKFTEESRIKKLHKLL

SEQ ID NO: 14997 - protein, 395 aa, Homo sapiens
  Payload ID: 2931
  Gene Symbol: CHKB
  Gene Name: choline kinase beta
  Uniprot ID: Q9Y259
  ENSP ID: ENSP00000384400
MAAEATAVAGSGAVGGCLAKDGLQQSKCPDTTPKRRRASSLSRDAERRAYQWCREYLGGAWRRVQPEELRVYPVSGGLSNLLFRCSLPDHLPSVGEEPREVLLRLYGAILQGVDSLVLESVMFAILAERSLGPQLYGVFPEGRLEQYIPSRPLKTQELREPVLSAAIATKMAQFHGMEMPFTKEPHWLFGTMERYLKQIQDLPPTGLPEMNLLEMYSLKDEMGNLRKLLESTPSPVVFCHNDIQEGNILLLSEPENADSLMLVDFEYSSYNYRGFDIGNHFCEWVYDYTHEEWPFYKARPTDYPTQEQQLHFIRHYLAEAKKGETLSQEEQRKLEEDLLVEVSRYALASHFFWGLWSILQASMSTIEFGYLDYAQSRFQFYFQQKGQLTSVHSSS

SEQ ID NO: 14998 - protein, 748 aa, Homo sapiens
  Payload ID: 2932
  Gene Symbol: CHAT
  Gene Name: choline O-acetyltransferase
  Uniprot ID: P28329
  ENSP ID: ENSP00000337103
MGLRTAKKRGLGGGGKWKREEGGGTRGRREVRPACFLQSGGRGDPGDVGGPAGNPGCSPHPRAATRPPPLPAHTPAHTPEWCGAASAEAAEPRRAGPHLCIPAPGLTKTPILEKVPRKMAAKTPSSEESGLPKLPVPPLQQTLATYLQCMRHLVSEEQFRKSQAIVQQFGAPGGLGETLQQKLLERQEKTANWVSEYWLNDMYLNNRLALPVNSSPAVIFARQHFPGTDDQLRFAASLISGVLSYKALLDSHSIPTDCAKGQLSGQPLCMKQYYGLFSSYRLPGHTQDTLVAQNSSIMPEPEHVIVACCNQFFVLDVVINFRRLSEGDLFTQLRKIVKMASNEDERLPPIGLLTSDGRSEWAEARTVLVKDSTNRDSLDMIERCICLVCLDAPGGVELSDTHRALQLLHGGGYSKNGANRWYDKSLQFVVGRDGTCGVVCEHSPFDGIVLVQCTEHLLKHVTQSSRKLIRADSVSELPAPRRLRWKCSPEIQGHLASSAEKLQRIVKNLDFIVYKFDNYGKTFIKKQKCSPDAFIQVALQLAFYRLHRRLVPTYESASIRRFQEGRVDNIRSATPEALAFVRAVTDHKAAVPASEKLLLLKDAIRAQTAYTVMAITGMAIDNHLLALRELARAMCKELPEMFMDETYLMSNRFVLSTSQVPTTTEMFCCYGPVVPNGYGACYNPQPETILFCISSFHSCKETSSSKFAKAVEESLIDMRDLCSLLPPTESKPLATKEKATRPSQGHQP

SEQ ID NO: 14999 - protein, 630 aa, Homo sapiens
  Payload ID: 2932
  Gene Symbol: CHAT
  Gene Name: choline O-acetyltransferase
  Uniprot ID: P28329
  ENSP ID: ENSP00000343486
MAAKTPSSEESGLPKLPVPPLQQTLATYLQCMRHLVSEEQFRKSQAIVQQFGAPGGLGETLQQKLLERQEKTANWVSEYWLNDMYLNNRLALPVNSSPAVIFARQHFPGTDDQLRFAASLISGVLSYKALLDSHSIPTDCAKGQLSGQPLCMKQYYGLFSSYRLPGHTQDTLVAQNSSIMPEPEHVIVACCNQFFVLDVVINFRRLSEGDLFTQLRKIVKMASNEDERLPPIGLLTSDGRSEWAEARTVLVKDSTNRDSLDMIERCICLVCLDAPGGVELSDTHRALQLLHGGGYSKNGANRWYDKSLQFVVGRDGTCGVVCEHSPFDGIVLVQCTEHLLKHVTQSSRKLIRADSVSELPAPRRLRWKCSPEIQGHLASSAEKLQRIVKNLDFIVYKFDNYGKTFIKKQKCSPDAFIQVALQLAFYRLHRRLVPTYESASIRRFQEGRVDNIRSATPEALAFVRAVTDHKAAVPASEKLLLLKDAIRAQTAYTVMAITGMAIDNHLLALRELARAMCKELPEMFMDETYLMSNRFVLSTSQVPTTTEMFCCYGPVVPNGYGACYNPQPETILFCISSFHSCKETSSSKFAKAVEESLIDMRDLCSLLPPTESKPLATKEKATRPSQGHQP

SEQ ID NO: 15000 - protein, 630 aa, Homo sapiens; identical to SEQ ID NO: 14999
  Payload ID: 2932
  Gene Symbol: CHAT
  Gene Name: choline O-acetyltransferase
  Uniprot ID: P28329
  ENSP ID: ENSP00000345878

SEQ ID NO: 15001 - protein, 630 aa, Homo sapiens; identical to SEQ ID NO: 14999
  Payload ID: 2932
  Gene Symbol: CHAT
  Gene Name: choline O-acetyltransferase
  Uniprot ID: P28329
  ENSP ID: ENSP00000378926

SEQ ID NO: 15002 - protein, 666 aa, Homo sapiens
  Payload ID: 2932
  Gene Symbol: CHAT
  Gene Name: choline O-acetyltransferase
  Uniprot ID: P28329
  ENSP ID: ENSP00000378929
MWPECRDEALSTVGPHLCIPAPGLTKTPILEKVPRKMAAKTPSSEESGLPKLPVPPLQQTLATYLQCMRHLVSEEQFRKSQAIVQQFGAPGGLGETLQQKLLERQEKTANWVSEYWLNDMYLNNRLALPVNSSPAVIFARQHFPGTDDQLRFAASLISGVLSYKALLDSHSIPTDCAKGQLSGQPLCMKQYYGLFSSYRLPGHTQDTLVAQNSSIMPEPEHVIVACCNQFFVLDVVINFRRLSEGDLFTQLRKIVKMASNEDERLPPIGLLTSDGRSEWAEARTVLVKDSTNRDSLDMIERCICLVCLDAPGGVELSDTHRALQLLHGGGYSKNGANRWYDKSLQFVVGRDGTCGVVCEHSPFDGIVLVQCTEHLLKHVTQSSRKLIRADSVSELPAPRRLRWKCSPEIQGHLASSAEKLQRIVKNLDFIVYKFDNYGKTFIKKQKCSPDAFIQVALQLAFYRLHRRLVPTYESASIRRFQEGRVDNIRSATPEALAFVRAVTDHKAAVPASEKLLLLKDAIRAQTAYTVMAITGMAIDNHLLALRELARAMCKELPEMFMDETYLMSNRFVLSTSQVPTTTEMFCCYGPVVPNGYGACYNPQPETILFCISSFHSCKETSSSKFAKAVEESLIDMRDLCSLLPPTESKPLATKEKATRPSQGHQP

SEQ ID NO: 15003 - protein, 112 aa, Homo sapiens
  Payload ID: 2932
  Gene Symbol: CHAT
  Gene Name: choline O-acetyltransferase
  ENSP ID: ENSP00000473443
MGLRTAKKRGLGGGGKWKREEGGGTRGRREVRPACFLQSGGRGDPGDVGGPAGNPGCSPHPRAATRPPPLPAHTPAHTPEWCGAASAEAAEPRRAVREFTLLHTRDVAGMQR

SEQ ID NO: 15004 - protein, 406 aa, Homo sapiens
  Payload ID: 2933
  Gene Symbol: CHPT1
  Gene Name: choline phosphotransferase 1
  Uniprot ID: Q8WUD6
  ENSP ID: ENSP00000229266
MAAGAGAGSAPRWLRALSEPLSAAQLRRLEEHRYSAAGVSLLEPPLQLYWTWLLQWIPLWMAPNSITLLGLAVNVVTTLVLISYCPTATEEAPYWTYLLCALGLFIYQSLDAIDGKQARRTNSCSPLGELFDHGCDSLSTVFMAVGASIAARLGTYPDWFFFCSFIGMFVFYCAHWQTYVSGMLRFGKVDVTEIQIALVIVFVLSAFGGATMWDYTIPILEIKLKILPVLGFLGGVIFSCSNYFHVILHGGVGKNGSTIAGTSVLSPGLHIGLIIILAIMIYKKSATDVFEKHPCLYILMFGCVFAKVSQKLVVAHMTKSELYLQDTVFLGPGLLFLDQYFNNFIDEYVVLWMAMVISSFDMVIYFSALCLQISRHLHLNIFKTACHQAPEQVQVLSSKSHQNNMD

SEQ ID NO: 15005 - protein, 398 aa, Homo sapiens
  Payload ID: 2933
  Gene Symbol: CHPT1
  Gene Name: choline phosphotransferase 1
  ENSP ID: ENSP00000446994
MAAGAGAGSAPRWLRALSEPLSAAQLRRLEEHRYSAAGVSLLEPPLQLYWTWLLQWIPLWMAPNSITLLGLAVNVVTTLVLISYCPTATEEAPYWTYLLCALGLFIYQSLDAIDGKQARRTNSCSPLGELFDHGCDSLSTVFMAVGASIAARLGTYPDWFFFCSFIGMFVFYCAHWQTYVSGMLRFGKVDVTEIQIALVIVFVLSAFGGATMWDYTIPILEIKLKILPVLGFLGGVIFSCSNYFHVILHGGVGKNGSTIAGTSVLSPGLHIGLIIILAIMIYKKSATDVFEKHPCLYILMFGCVFAKVSQKLVVAHMTKSELYLQDTVFLGPGLLFLDQYFNNFIDEYVVLWMAMVISSFDMVIYFSALCLQISRHLHLNIFKTACHQAPEQVHKHID

SEQ ID NO: 15006 - protein, 218 aa, Homo sapiens
  Payload ID: 2933
  Gene Symbol: CHPT1
  Gene Name: choline phosphotransferase 1
  Uniprot ID: Q8WUD6
  ENSP ID: ENSP00000447887
MAAGAGAGSAPRWLRALSEPLSAAQLRRLEEHRYSAAGVSLLEPPLQLYWTWLLQWIPLWMAPNSITLLGLAVNVVTTLVLISYCPTATEEAPYWTYLLCALGLFIYQSLDAIDGKQARRTNSCSPLGELFDHGCDSLSTVFMAVGASIAARLGTYPDWFFFCSFIGMFVFYCAHWQTYVSGMLRFGKVDVTEIQIALVIVFVLSAFGGATMWDYTFS

SEQ ID NO: 15007 - protein, 94 aa, Homo sapiens
  Payload ID: 2933
  Gene Symbol: CHPT1
  Gene Name: choline phosphotransferase 1
  ENSP ID: ENSP00000447920
  MOD_RES (1)..(1): Any amino acid
XAARLGTYPDWFFFCSFIGMFVFYCAHWQTYVSGMLRFGKVDVTEIQIALVIVFVLSAFGGATMWDYTVKIPILRNVFIFCLLGDLSSFIKVGS

SEQ ID NO: 15008 - protein, 38 aa, Homo sapiens
  Payload ID: 2933
  Gene Symbol: CHPT1
  Gene Name: choline phosphotransferase 1
  ENSP ID: ENSP00000448369
  MOD_RES (1)..(1): Any amino acid
XFSALCLQISRHLHLNIFKTACHQAPEQGLAVAQAGVQ

SEQ ID NO: 15009 - protein, 398 aa, Homo sapiens; identical to SEQ ID NO: 15005
  Payload ID: 2933
  Gene Symbol: CHPT1
  Gene Name: choline phosphotransferase 1
  ENSP ID: ENSP00000448766

SEQ ID NO: 15010 - protein, 184 aa, Homo sapiens
  Payload ID: 2933
  Gene Symbol: CHPT1
  Gene Name: choline phosphotransferase 1
  ENSP ID: ENSP00000448831
  MOD_RES (1)..(1): Any amino acid
XAAGVSLLEPPLQLYWTWLLQWIPLWMAPNSITLLGLAVNVVTTLVLISYCPTATEEAPYWTYLLCALGLFIYQSLDAIDGKQARRTNSCSPLGELFDHGCDSLSTVFMAVGASIAARLGTYPDWFFFCSFIGMFVFYCAHWQTYVSGMLRFGKVDVTEIQIALVIVFVLSAFGGATMWDYTFS

SEQ ID NO: 15011 - protein, 416 aa, Homo sapiens
  Payload ID: 2934
  Gene Symbol: CEPT1
  Gene Name: choline/ethanolamine phosphotransferase 1
  Uniprot ID: Q9Y6K0
  ENSP ID: ENSP00000349696
MSGHRSTRKRCGDSHPESPVGFGHMSTTGCVLNKLFQLPTPPLSRHQLKRLEEHRYQSAGRSLLEPLMQGYWEWLVRRVPSWIAPNLITIIGLSINICTTILLVFYCPTATEQAPLWAYIACACGLFIYQSLDAIDGKQARRTNSSSPLGELFDHGCDSLSTVFVVLGTCIAVQLGTNPDWMFFCCFAGTFMFYCAHWQTYVSGTLRFGIIDVTEVQIFIIIMHLLAVIGGPPFWQSMIPVLNIQMKIFPALCTVAGTIFSCTNYFRVIFTGGVGKNGSTIAGTSVLSPFLHIGSVITLAAMIYKKSAVQLFEKHPCLYILTFGFVSAKITNKLVVAHMTKSEMHLHDTAFIGPALLFLDQYFNSFIDEYIVLWIALVFSFFDLIRYCVSVCNQIASHLHIHVFRIKVSTAHSNHH

SEQ ID NO: 15012 - protein, 416 aa, Homo sapiens; identical to SEQ ID NO: 15011
  Payload ID: 2934
  Gene Symbol: CEPT1
  Gene Name: choline/ethanolamine phosphotransferase 1
  Uniprot ID: Q9Y6K0
  ENSP ID: ENSP00000441980

SEQ ID NO: 15013 - protein, 280 aa, Homo sapiens [sequence omitted]

SEQ ID NO: 15014 - protein, 460 aa, Homo sapiens
  Payload ID: 2935
  Gene Symbol: CHRM1
  Gene Name: cholinergic receptor, muscarinic 1
  Uniprot ID: P11229
  ENSP ID: ENSP00000306490
MNTSAPPAVSPNITVLAPGKGPWQVAFIGITTGLLSLATVTGNLLVLISFKVNTELKTVNNYFLLSLACADLIIGTFSMNLYTTYLLMGHWALGTLACDLWLALDYVASNASVMNLLLISFDRYFSVTRPLSYRAKRTPRRAALMIGLAWLVSFVLWAPAILFWQYLVGERTVLAGQCYIQFLSQPIITFGTAMAAFYLPVTVMCTLYWRIYRETENRARELAALQGSETPGKGGGSSSSSERSQPGAEGSPETPPGRCCRCCRAPRLLQAYSWKEEEEEDEGSMESLTSSEGEEPGSEVVIKMPMVDPEAQAPTKQPPRSSPNTVKRPTKKGRDRAGKGQKPRGKEQLAKRKTFSLVKEKKAARTLSAILLAFILTWTPYNIMVLVSTFCKDCVPETLWELGYWLCYVNSTINPMCYALCNKAFRDTFRLLLLCRWDKRRWRKIPKRPGSVHRTPSRQC

SEQ ID NO: 15015 - protein, 454 aa, Homo sapiens
  Payload ID: 2935
  Gene Symbol: CHRM1
  Gene Name: cholinergic receptor, muscarinic 1
  Uniprot ID: P11229
  ENSP ID: ENSP00000441188
MNTSAPPAVSPNITVLAPGKGPWQVAFIGITTGLLSLATVTGNLLVLISFKVNTELKTVNNYFLLSLACADLIIGTFSMNLYTTYLLMGHWALGTLACDLWLALDYVASNASVMNLLLISFDRYFSVTRPLSYRAKRTPRRAALMIGLAWLVSFVLWAPAILFWQYLVGERTVLAGQCYIQFLSQPIITFGTAMAAFYLPVTVMCTLYWRIYRETENRARELAALQGSETPGKGGGSSSSSERSQPGAEGSPETPPGRCCRCCRAPRLLQAYSWKEEEEEDEGSMESLTSSEGEEPGSEVVIKMPMVDPEAQAPTKQPPRSSPNTVKRPTKKGRDRAGKGQKPRGKEQLAKRKTFSLVKEKKAARTLSAILLAFILTWTPYNIMVLVSTFCKDCVPETLWELGYWLCYVNSTINPMCYALCNKAFRDTFRLLLLCRWDKRRWRKIPKRPGSVHR

SEQ ID NO: 15016 - protein, 134 aa, Homo sapiens
  Payload ID: 2935
  Gene Symbol: CHRM1
  Gene Name: cholinergic receptor, muscarinic 1
  ENSP ID: ENSP00000444482
MNTSAPPAVSPNITVLAPGKGPWQVAFIGITTGLLSLATVTGNLLVLISFKVNTELKTVNNYFLLSLACADLIIGTFSMNLYTTYLLMGHWALGTLACDLWLALDYVASNASVMNLLLISFDRYFSVTRPLSYR

SEQ ID NO: 15017 - protein, 466 aa, Homo sapiens
  Payload ID: 2936
  Gene Symbol: CHRM2
  Gene Name: cholinergic receptor, muscarinic 2
  Uniprot ID: P08172
  ENSP ID: ENSP00000319984
MNNSTNSSNNSLALTSPYKTFEVVFIVLVAGSLSLVTIIGNILVMVSIKVNRHLQTVNNYFLFSLACADLIIGVFSMNLYTLYTVIGYWPLGPVVCDLWLALDYVVSNASVMNLLIISFDRYFCVTKPLTYPVKRTTKMAGMMIAAAWVLSFILWAPAILFWQFIVGVRTVEDGECYIQFFSNAAVTFGTAIAAFYLPVIIMTVLYWHISRASKSRIKKDKKEPVANQDPVSPSLVQGRIVKPNNNNMPSSDDGLEHNKIQNGKAPRDPVTENCVQGEEKESSNDSTSVSAVASNMRDDEITQDENTVSTSLGHSKDENSKQTCIRIGTKTPKSDSCTPTNTTVEVVGSSGQNGDEKQNIVARKIVKMTKQPAKKKPPPSREKKVTRTILAILLAFIITWAPYNVMVLINTFCAPCIPNTVWTIGYWLCYINSTINPACYALCNATFKKTFKHLLMCHYKNIGATR

SEQ ID NO: 15018 - protein, 466 aa, Homo sapiens; identical to SEQ ID NO: 15017
  Payload ID: 2936
  Gene Symbol: CHRM2
  Gene Name: cholinergic receptor, muscarinic 2
  Uniprot ID: P08172
  ENSP ID: ENSP00000384401

SEQ ID NO: 15019 - protein, 466 aa, Homo sapiens; identical to SEQ ID NO: 15017
  Payload ID: 2936
  Gene Symbol: CHRM2
  Gene Name: cholinergic receptor, muscarinic 2
  Uniprot ID: P08172
  ENSP ID: ENSP00000399745

SEQ ID NO: 15020 - protein, 466 aa, Homo sapiens; identical to SEQ ID NO: 15017
  Payload ID: 2936
  Gene Symbol: CHRM2
  Gene Name: cholinergic receptor, muscarinic 2
  Uniprot ID: P08172
  ENSP ID: ENSP00000415386

SEQ ID NO: 15021 - protein, 590 aa, Homo sapiens
  Payload ID: 2937
  Gene Symbol: CHRM3
  Gene Name: cholinergic receptor, muscarinic 3
  Uniprot ID: P20309
  ENSP ID: ENSP00000255380
MTLHNNSTTSPLFPNISSSWIHSPSDAGLPPGTVTHFGSYNVSRAAGNFSSPDGTTDDPLGGHTVWQVVFIAFLTGILALVTIIGNILVIVSFKVNKQLKTVNNYFLLSLACADLIIGVISMNLFTTYIIMNRWALGNLACDLWLAIDYVASNASVMNLLVISFDRYFSITRPLTYRAKRTTKRAGVMIGLAWVISFVLWAPAILFWQYFVGKRTVPPGECFIQFLSEPTITFGTAIAAFYMPVTIMTILYWRIYKETEKRTKELAGLQASGTEAETENFVHPTGSSRSCSSYELQQQSMKRSNRRKYGRCHFWFTTKSWKPSSEQMDQDHSSSDSWNNNDAAASLENSASSDEEDIGSETRAIYSIVLKLPGHSTILNSTKLPSSDNLQVPEEELGMVDLERKADKLQAQKSVDDGGSFPKSFSKLPIQLESAVDTAKTSDVNSSVGKSTATLPLSFKEATLAKRFALKTRSQITKRKRMSLVKEKKAAQTLSAILLAFIITWTPYNIMVLVNTFCDSCIPKTFWNLGYWLCYINSTVNPVCYALCNKTFRTTFKMLLLCQCDKKKRRKQQYQQRQSVIFHKRAPEQAL

SEQ ID NO: 15022 - protein, 109 aa, Homo sapiens
  Payload ID: 2937
  Gene Symbol: CHRM3
  Gene Name: cholinergic receptor, muscarinic 3
  ENSP ID: ENSP00000404764
MTLHNNSTTSPLFPNISSSWIHSPSDAGLPPGTVTHFGSYNVSRAAGNFSSPDGTTDDPLGGHTVWQVVFIAFLTGILALVTIIGNILVIVSFKVNKQLKTVNNYFLLS

SEQ ID NO: 15023 - protein, 590 aa, Homo sapiens; identical to SEQ ID NO: 15021
  Payload ID: 2937
  Gene Symbol: CHRM3
  Gene Name: cholinergic receptor, muscarinic 3
  Uniprot ID: P20309
  ENSP ID: ENSP00000482377

SEQ ID NO: 15024 - protein, 479 aa, Homo sapiens
  Payload ID: 2938
  Gene Symbol: CHRM4
  Gene Name: cholinergic receptor, muscarinic 4
  Uniprot ID: P08173
  ENSP ID: ENSP00000409378
MANFTPVNGSSGNQSVRLVTSSSHNRYETVEMVFIATVTGSLSLVTVVGNILVMLSIKVNRQLQTVNNYFLFSLACADLIIGAFSMNLYTVYIIKGYWPLGAVVCDLWLALDYVVSNASVMNLLIISFDRYFCVTKPLTYPARRTTKMAGLMIAAAWVLSFVLWAPAILFWQFVVGKRTVPDNQCFIQFLSNPAVTFGTAIAAFYLPVVIMTVLYIHISLASRSRVHKHRPEGPKEKKAKTLAFLKSPLMKQSVKKPPPGEAAREELRNGKLEEAPPPALPPPPRPVADKDTSNESSSGSATQNTKERPATELSTTEATTPAMPAPPLQPRALNPASRWSKIQIVTKQTGNECVTAIEIVPATPAGMRPAANVARKFASIARNQVRKKRQMAARERKVTRTIFAILLAFILTWTPYNVMVLVNTFCQSCIPDTVWSIGYWLCYVNSTINPACYALCNATFKKTFRHLLLCQYRNIGTAR

SEQ ID NO: 15025 - protein, 532 aa, Homo sapiens
  Payload ID: 2939
  Gene Symbol: CHRM5
  Gene Name: cholinergic receptor, muscarinic 5
  Uniprot ID: P08912
  ENSP ID: ENSP00000372750
MEGDSYHNATTVNGTPVNHQPLERHRLWEVITIAAVTAVVSLITIVGNVLVMISFKVNSQLKTVNNYYLLSLACADLIIGIFSMNLYTTYILMGRWALGSLACDLWLALDYVASNASVMNLLVISFDRYFSITRPLTYRAKRTPKRAGIMIGLAWLISFILWAPAILCWQYLVGKRTVPLDECQIQFLSEPTITFGTAIAAFYIPVSVMTILYCRIYRETEKRTKDLADLQGSDSVTKAEKRKPAHRALFRSCLRCPRPTLAQRERNQASWSSSRRSTSTTGKPSQATGPSANWAKAEQLTTCSSYPSSEDEDKPATDPVLQVVYKSQGKESPGEEFSAEETEETFVKAETEKSDYDTPNYLLSPAAAHRPKSQKCVAYKFRLVVKADGNQETNNGCHKVKIMPCPFPVAKEPSTKGLNPNPSHQMTKRKRVVLVKERKAAQTLSAILLAFIITWTPYNIMVLVSTFCDKCVPVTLWHLGYWLCYVNSTVNPICYALCNRTFRKTFKMLLLCRWKKKKVEEKLYWQGNSKLP

SEQ ID NO: 15026 - protein, 22 aa, Homo sapiens
  Payload ID: 2939
  Gene Symbol: CHRM5
  Gene Name: cholinergic receptor, muscarinic 5
  ENSP ID: ENSP00000452742
MEGDSYHNATTVNGTPVNHQPL

SEQ ID NO: 15027 - protein, 532 aa, Homo sapiens; identical to SEQ ID NO: 15025
  Payload ID: 2939
  Gene Symbol: CHRM5
  Gene Name: cholinergic receptor, muscarinic 5
  Uniprot ID: P08912
  ENSP ID: ENSP00000453745

SEQ ID NO: 15028 - protein, 502 aa, Homo sapiens
  Payload ID: 2940
  Gene Symbol: CHRNA7
  Gene Name: Cholinergic receptor, nicotinic alpha 7
  ENSP ID: ENSP00000488147
MRCSPGGVWLALAASLLHVSLQGEFQRKLYKELVKNYNPLERPVANDSQPLTVYFSLSLLQIMDVDEKNQVLTTNIWLQMSWTDHYLQWNVSEYPGVKTVRFPDGQIWKPDILLYNSADERFDATFHTNVLVNSSGHCQYLPPGIFKSSCYIDVRWFPFDVQHCKLKFGSWSYGGWSLDLQMQEADISGYIPNGEWDLVGIPGKRSERFYECCKEPYPDVTFTVTMRRRTLYYGLNLLIPCVLISALALLVFLLPADSGEKISLGITVLLSLTVFMLLVAEIMPATSDSVPLIAQYFASTMIIVGLSVVVTVIVLQYHHHDPDGGKMPKWTRVILLNWCAWFLRMKRPGEDKVRPACQHKQRRCSLASVEMSAVAPPPASNGNLLYIGFRGLDGVHCVPTPDSGVVCGRMACSPTHDEHLLHGGQPPEGDPDLAKILEEVRYIANRFRCQDESEAVCSEWKFAACVVDRLCLMAFSVFTIICTIGILMSAPNFVEAVSKDFA

SEQ ID NO: 15029 - protein, 482 aa, Homo sapiens
  Payload ID: 2941
  Gene Symbol: CHRNA1
  Gene Name: cholinergic receptor, nicotinic, alpha 1 (muscle)
  Uniprot ID: P02708
  ENSP ID: ENSP00000261007
MEPWPLLLLFSLCSAGLVLGSEHETRLVAKLFKDYSSVVRPVEDHRQVVEVTVGLQLIQLINVDEVNQIVTTNVRLKQGDMVDLPRPSCVTLGVPLFSHLQNEQWVDYNLKWNPDDYGGVKKIHIPSEKIWRPDLVLYNNADGDFAIVKFTKVLLQYTGHITWTPPAIFKSYCEIIVTHFPFDEQNCSMKLGTWTYDGSVVAINPESDQPDLSNFMESGEWVIKESRGWKHSVTYSCCPDTPYLDITYHFVMQRLPLYFIVNVIIPCLLFSFLTGLVFYLPTDSGEKMTLSISVLLSLTVFLLVIVELIPSTSSAVPLIGKYMLFTMVFVIASIIITVIVINTHHRSPSTHVMPNWVRKVFIDTIPNIMFFSTMKRPSREKQDKKIFTEDIDISDISGKPGPPPMGFHSPLIKHPEVKSAIEGIKYIAETMKSDQESNNAAAEWKYVAMVMDHILLGVFMLVCIIGTLAVFAGRLIELNQQG

SEQ ID NO: 15030 - protein, 457 aa, Homo sapiens
  Payload ID: 2941
  Gene Symbol: CHRNA1
  Gene Name: cholinergic receptor, nicotinic, alpha 1 (muscle)
  Uniprot ID: P02708
  ENSP ID: ENSP00000261008
MEPWPLLLLFSLCSAGLVLGSEHETRLVAKLFKDYSSVVRPVEDHRQVVEVTVGLQLIQLINVDEVNQIVTTNVRLKQQWVDYNLKWNPDDYGGVKKIHIPSEKIWRPDLVLYNNADGDFAIVKFTKVLLQYTGHITWTPPAIFKSYCEIIVTHFPFDEQNCSMKLGTWTYDGSVVAINPESDQPDLSNFMESGEWVIKESRGWKHSVTYSCCPDTPYLDITYHFVMQRLPLYFIVNVIIPCLLFSFLTGLVFYLPTDSGEKMTLSISVLLSLTVFLLVIVELIPSTSSAVPLIGKYMLFTMVFVIASIIITVIVINTHHRSPSTHVMPNWVRKVFIDTIPNIMFFSTMKRPSREKQDKKIFTEDIDISDISGKPGPPPMGFHSPLIKHPEVKSAIEGIKYIAETMKSDQESNNAAAEWKYVAMVMDHILLGVFMLVCIIGTLAVFAGRLIELNQQG

SEQ ID NO: 15031 - protein, 377 aa, Homo sapiens
  Payload ID: 2941
  Gene Symbol: CHRNA1
  Gene Name: cholinergic receptor, nicotinic, alpha 1 (muscle)
  ENSP ID: ENSP00000386611
MEPWPLLLLFSLCSAGLVLGSEHETRLVAKLFKDYSSVVRPVEDHRQVVEVTVGLQLIQLINVDEVNQIVTTNVRLKQQWVDYNLKWNPDDYGGVKKIHIPSEKIWRPDLVLYNNADGDFAIVKFTKVLLQYTGHITWTPPAIFKSYCEIIVTHFPFDEQNCSMKLGTWTYDGSVVAINPESDQPDLSNFMESGEWVIKESRGWKHSVTYSCCPDTPYLDITYHFVMQRLPLYFIVNVIIPCLLFSFLTGLVFYLPTDSGEKMTLSISVLLSLTVFLLVIVELIPSTSSAVPLIGKYMLFTMVFVIASIIITVIVINTHHRSPSTHVMPNWVRKAAAEWKYVAMVMDHILLGVFMLVCIIGTLAVFAGRLIELNQQG

SEQ ID NO: 15032 - protein, 269 aa, Homo sapiens
  Payload ID: 2941
  Gene Symbol: CHRNA1
  Gene Name: cholinergic receptor, nicotinic, alpha 1 (muscle)
  ENSP ID: ENSP00000386684
MEPWPLLLLFSLCSAGLVLGSEHETRLVAKLFKDYSSVVRPVEDHRQVVEVTVGLQLIQLINVDEVNQIVTTNVRLKQQWVDYNLKWNPDDYGGVKKIHIPSEKIWRPDLVLYNNADGDFAIVKFTKVLLQYTGHITWTPPAIFKSYCEIIVTHFPFDEQNCSMKLGTWTYDGSVVAINPESDQPDLSNFMESGEWVIKESRGWKHSVTYSCCPDTPYLDITYHFVMQRLPLYFIVNVIIPCLLFSFLTGLVFYLPTDSGGCGCHDCCC

SEQ ID NO: 15033 - protein, 375 aa, Homo sapiens
  Payload ID: 2941
  Gene Symbol: CHRNA1
  Gene Name: cholinergic receptor, nicotinic, alpha 1 (muscle)
  ENSP ID: ENSP00000387026
MEPWPLLLLFSLCSAGLVLGSEHETRLVAKLFKDYSSVVRPVEDHRQVVEVTVGLQLIQLINVDEVNQIVTTNVRLKQNCSMKLGTWTYDGSVVAINPESDQPDLSNFMESGEWVIKESRGWKHSVTYSCCPDTPYLDITYHFVMQRLPLYFIVNVIIPCLLFSFLTGLVFYLPTDSGEKMTLSISVLLSLTVFLLVIVELIPSTSSAVPLIGKYMLFTMVFVIASIIITVIVINTHHRSPSTHVMPNWVRKVFIDTIPNIMFFSTMKRPSREKQDKKIFTEDIDISDISGKPGPPPMGFHSPLIKHPEVKSAIEGIKYIAETMKSDQESNNAAAEWKYVAMVMDHILLGVFMLVCIIGTLAVFAGRLIELNQQG

SEQ ID NO: 15034 - protein, 81 aa, Homo sapiens
  Payload ID: 2941
  Gene Symbol: CHRNA1
  Gene Name: cholinergic receptor, nicotinic, alpha 1 (muscle)
  ENSP ID: ENSP00000395805
MEPWPLLLLFSLCSAGLVLGSEHETRLVAKLFKDYSSVVRPVEDHRQVVEVTVGLQLIQLINVDEVNQIVTTNVRLKQCRW

SEQ ID NO: 15035 - protein, 450 aa, Homo sapiens
  Payload ID: 2942
  Gene Symbol: CHRNA10
  Gene Name: cholinergic receptor, nicotinic, alpha 10 (neuronal)
  Uniprot ID: Q9GZZ6
  ENSP ID: ENSP00000250699
MGLRSHHLSLGLLLLFLLPAECLGAEGRLALKLFRDLFANYTSALRPVADTDQTLNVTLEVTLSQIIDMDERNQVLTLYLWIRQEWTDAYLRWDPNAYGGLDAIRIPSSLVWRPDIVLYNKADAQPPGSASTNVVLRHDGAVRWDAPAITRSSCRVDVAAFPFDAQHCGLTFGSWTHGGHQLDVRPRGAAASLADFVENVEWRVLGMPARRRVLTYGCCSEPYPDVTFTLLLRRRAAAYVCNLLLPCVLISLLAPLAFHLPADSGEKVSLGVTVLLALTVFQLLLAESMPPAESVPLIGKYYMATMTMVTFSTALTILIMNLHYCGPSVRPVPAWARALLLGHLARGLCVRERGEPCGQSRPPELSPSPQSPEGGAGPPAGPCHEPRCLCRQEALLHHVATIANTFRSHRAAQRCHEDWKRLARVMDRFFLAIFFSMALVMSLLVLVQAL

SEQ ID NO: 15036 - protein, 96 aa, Homo sapiens
  Payload ID: 2942
  Gene Symbol: CHRNA10
  Gene Name: cholinergic receptor, nicotinic, alpha 10 (neuronal)
  ENSP ID: ENSP00000432757
MGLRSHHLSLGLLLLFLLPAECLGAEGRLALKLFRDLFANYTSALRPVADTDQTLNVTLEVTLSQIIDMVRCGGGTAVESYLSQCQEMKGMNGTRC

SEQ ID NO: 15037 - protein, 123 aa, Homo sapiens
  Payload ID: 2942
  Gene Symbol: CHRNA10
  Gene Name: cholinergic receptor, nicotinic, alpha 10 (neuronal)
  ENSP ID: ENSP00000437107
MCGRAALQPAWRTSWRTWSGACWACRRGGACSPTAAAPSPTPTSPSRCCCAAAPPPTCATCCCPACSSRCLRRSPSTCLPTQARRCRWASPCCWRSPSSSCCWPRACHRPRACRSSGSTTWPL

SEQ ID NO: 15038 - protein, 514 aa, Homo sapiens
  Payload ID: 2943
  Gene Symbol: CHRNA2
  Gene Name: cholinergic receptor, nicotinic, alpha 2 (neuronal)
  Uniprot ID: Q15822
  ENSP ID: ENSP00000240132
MGPSCPVFLSFTKLSLWWLLLTPAGGEEAKRPPPRAPGDPLSSPSPTALPQGGSHTETEDRLFKHLFRGYNRWARPVPNTSDVDEKNQMMTTNVWLKQEWSDYKLRWNPTDFGNITSLRVPSEMIWIPDIVLYNNADGEFAVTHMTKAHLFSTGTVHWVPPAIYKSSCSIDVTFFPFDQQNCKMKFGSWTYDKAKIDLEQMEQTVDLKDYWESGEWAIVNATGTYNSKKYDCCAEIYPDVTYAFVIRRLPLFYTINLIIPCLLISCLTVLVFYLPSDCGEKITLCISVLLSLTVFLLLITEIIPSTSLVIPLIGEYLLFTMIFVTLSIVITVFVLNVHHRSPSTHTMPHWVRGALLGCVPRWLLMNRPPPPVELCHPLRLKLSPSYHWLESNVDAEEREVVVEEEDRWACAGHVAPSVGTLCSHGHLHSGASGPKAEALLQEGELLLSPHMQKALEGVHYIADHLRSEDADSSVKEDWKYVAMVIDRIFLWLFIIVCFLGTIGLFLPPFLAGMI

SEQ ID NO: 15039 - protein, 529 aa, Homo sapiens
  Payload ID: 2943
  Gene Symbol: CHRNA2
  Gene Name: cholinergic receptor, nicotinic, alpha 2 (neuronal)
  Uniprot ID: Q15822
  ENSP ID: ENSP00000385026
MGPSCPVFLSFTKLSLWWLLLTPAGGEEAKRPPPRAPGDPLSSPSPTALPQGGSHTETEDRLFKHLFRGYNRWARPVPNTSDVVIVRFGLSIAQLIDVDEKNQMMTTNVWLKQEWSDYKLRWNPTDFGNITSLRVPSEMIWIPDIVLYNNADGEFAVTHMTKAHLFSTGTVHWVPPAIYKSSCSIDVTFFPFDQQNCKMKFGSWTYDKAKIDLEQMEQTVDLKDYWESGEWAIVNATGTYNSKKYDCCAEIYPDVTYAFVIRRLPLFYTINLIIPCLLISCLTVLVFYLPSDCGEKITLCISVLLSLTVFLLLITEIIPSTSLVIPLIGEYLLFTMIFVTLSIVITVFVLNVHHRSPSTHTMPHWVRGALLGCVPRWLLMNRPPPPVELCHPLRLKLSPSYHWLESNVDAEEREVVVEEEDRWACAGHVAPSVGTLCSHGHLHSGASGPKAEALLQEGELLLSPHMQKALEGVHYIADHLRSEDADSSVKEDWKYVAMVIDRIFLWLFIIVCFLGTIGLFLPPFLAGMI

SEQ ID NO: 15040 - protein, 507 aa, Homo sapiens
  Payload ID: 2943
  Gene Symbol: CHRNA2
  Gene Name: cholinergic receptor, nicotinic, alpha 2 (neuronal)
  Uniprot ID: Q15822
  ENSP ID: ENSP00000429616
MAGGEEAKRPPPRAPGDPLSSPSPTALPQGGSHTETEDRLFKHLFRGYNRWARPVPNTSDVVIVRFGLSIAQLIDVDEKNQMMTTNVWLKQEWSDYKLRWNPTDFGNITSLRVPSEMIWIPDIVLYNNADGEFAVTHMTKAHLFSTGTVHWVPPAIYKSSCSIDVTFFPFDQQNCKMKFGSWTYDKAKIDLEQMEQTVDLKDYWESGEWAIVNATGTYNSKKYDCCAEIYPDVTYAFVIRRLPLFYTINLIIPCLLISCLTVLVFYLPSDCGEKITLCISVLLSLTVFLLLITEIIPSTSLVIPLIGEYLLFTMIFVTLSIVITVFVLNVHHRSPSTHTMPHWVRGALLGCVPRWLLMNRPPPPVELCHPLRLKLSPSYHWLESNVDAEEREVVVEEEDRWACAGHVAPSVGTLCSHGHLHSGASGPKAEALLQEGELLLSPHMQKALEGVHYIADHLRSEDADSSVKEDWKYVAMVIDRIFLWLFIIVCFLGTIGLFLPPFLAGMI

SEQ ID NO: 15041 - protein, 50 aa, Homo sapiens
  Payload ID: 2943
  Gene Symbol: CHRNA2
  Gene Name: cholinergic receptor, nicotinic, alpha 2 (neuronal)
  ENSP ID: ENSP00000429953
MGPSCPVFLSFTKLSLWWLLLTPAGGEEAKRPPPRAPGDPLSSPSPTALP

SEQ ID NO: 15042 - protein, 108 aa, Homo sapiens
  Payload ID: 2943
  Gene Symbol: CHRNA2
  Gene Name: cholinergic receptor, nicotinic, alpha 2 (neuronal)
  ENSP ID: ENSP00000430422
MGPSCPVFLSFTKLSLWWLLLTPAGGEEAKRPPPRAPGDPLSSPSPTALPQGGSHTETEDRLFKHLFRGYNRWARPVPNTSDVVIVRFGLSIAQLIDVDEKNQMMTTN

SEQ ID NO: 15043 - protein, 154 aa, Homo sapiens
  Payload ID: 2943
  Gene Symbol: CHRNA2
  Gene Name: cholinergic receptor, nicotinic, alpha 2 (neuronal)
  ENSP ID: ENSP00000430612
MGPSCPVFLSFTKLSLWWLLLTPAGGEEAKRPPPRAPGDPLSSPSPTALPQGGSHTETEDRLFKHLFRGYNRWARPVPNTSDVVIVRFGLSIAQLIDVDEKNQMMTTNVWLKQEWSDYKLRWNPTDFGNITSLRVPSEMIWIPDIVLYNNRTAR

SEQ ID NO: 15044 - protein, 81 aa, Homo sapiens
  Payload ID: 2943
  Gene Symbol: CHRNA2
  Gene Name: cholinergic receptor, nicotinic, alpha 2 (neuronal)
  ENSP ID: ENSP00000430856
MGPSCPVFLSFTKLSLWWLLLTPAGGEEAKRPPPRAPGDPLSSPSPTALPQGGSHTETEDRLFKHLFRGYNRWARPVPNTS

SEQ ID NO: 15045 - protein, 19 aa, Homo sapiens
  Payload ID: 2943
  Gene Symbol: CHRNA2
  Gene Name: cholinergic receptor, nicotinic, alpha 2 (neuronal)
  ENSP ID: ENSP00000430994
MGPSCPVFLSFTKLSLWWL

SEQ ID NO: 15046 - protein, 489 aa, Homo sapiens
  Payload ID: 2944
  Gene Symbol: CHRNA3
  Gene Name: cholinergic receptor, nicotinic, alpha 3 (neuronal)
  Uniprot ID: P32297
  ENSP ID: ENSP00000267951
MGSGPLSLPLALSPPRLLLLLLLSLLPVARASEAEHRLFERLFEDYNEIIRPVANVSDPVIIHFEVSMSQLVKVDEVNQIMETNLWLKQIWNDYKLKWNPSDYGGAEFMRVPAQKIWKPDIVLYNNAVGDFQVDDKTKALLKYTGEVTWIPPAIFKSSCKIDVTYFPFDYQNCTMKFGSWSYDKAKIDLVLIGSSMNLKDYWESGEWAIIKAPGYKHDIKYNCCEEIYPDITYSLYIRRLPLFYTINLIIPCLLISFLTVLVFYLPSDCGEKVTLCISVLLSLTVFLLVITETIPSTSLVIPLIGEYLLFTMIFVTLSIVITVFVLNVHYRTPTTHTMPSWVKTVFLNLLPRVMFMTRPTSNEGNAQKPRPLYGAELSNLNCFSRAESKGCKEGYPCQDGMCGYCHHRRIKISNFSANLTRSSSSESVDAVLSLSALSPEIKEAIQSVKYIAENMKAQNEAKEEQKAQEIQQLKRKEKSTETSDQEPGL

SEQ ID NO: 15047 - protein, 505 aa, Homo sapiens
  Payload ID: 2944
  Gene Symbol: CHRNA3
  Gene Name: cholinergic receptor, nicotinic, alpha 3 (neuronal)
  Uniprot ID: P32297
  ENSP ID: ENSP00000315602
MGSGPLSLPLALSPPRLLLLLLLSLLPVARASEAEHRLFERLFEDYNEIIRPVANVSDPVIIHFEVSMSQLVKVDEVNQIMETNLWLKQIWNDYKLKWNPSDYGGAEFMRVPAQKIWKPDIVLYNNAVGDFQVDDKTKALLKYTGEVTWIPPAIFKSSCKIDVTYFPFDYQNCTMKFGSWSYDKAKIDLVLIGSSMNLKDYWESGEWAIIKAPGYKHDIKYNCCEEIYPDITYSLYIRRLPLFYTINLIIPCLLISFLTVLVFYLPSDCGEKVTLCISVLLSLTVFLLVITETIPSTSLVIPLIGEYLLFTMIFVTLSIVITVFVLNVHYRTPTTHTMPSWVKTVFLNLLPRVMFMTRPTSNEGNAQKPRPLYGAELSNLNCFSRAESKGCKEGYPCQDGMCGYCHHRRIKISNFSANLTRSSSSESVDAVLSLSALSPEIKEAIQSVKYIAENMKAQNEAKEIQDDWKYVAMVIDRIFLWVFTLVCILGTAGLFLQPLMAREDA

SEQ ID NO: 15048 - protein, 505 aa, Homo sapiens; identical to SEQ ID NO: 15047
  Payload ID: 2944
  Gene Symbol: CHRNA3
  Gene Name: cholinergic receptor, nicotinic, alpha 3 (neuronal)
  Uniprot ID: P32297
  ENSP ID: ENSP00000452896

SEQ ID NO: 15049 - protein, 17 aa, Homo sapiens
  Payload ID: 2944
  Gene Symbol: CHRNA3
  Gene Name: cholinergic receptor, nicotinic, alpha 3 (neuronal)
  ENSP ID: ENSP00000453993
MSQLVKVDEVNQIMETN

SEQ ID NO: 15050 - protein, 627 aa, Homo sapiens
  Payload ID: 2945
  Gene Symbol: CHRNA4
  Gene Name: cholinergic receptor, nicotinic, alpha 4 (neuronal)
  Uniprot ID: P43681
  ENSP ID: ENSP00000359285
MELGGPGAPRLLPPLLLLLGTGLLRASSHVETRAHAEERLLKKLFSGYNKWSRPVANISDVVLVRFGLSIAQLIDVDEKNQMMTTNVWVKQEWHDYKLRWDPADYENVTSIRIPSELIWRPDIVLYNNADGDFAVTHLTKAHLFHDGRVQWTPPAIYKSSCSIDVTFFPFDQQNCTMKFGSWTYDKAKIDLVNMHSRVDQLDFWESGEWVIVDAVGTYNTRKYECCAEIYPDITYAFVIRRLPLFYTINLIIPCLLISCLTVLVFYLPSECGEKITLCISVLLSLTVFLLLITEIIPSTSLVIPLIGEYLLFTMIFVTLSIVITVFVLNVHHRSPRTHTMPTWVRRVFLDIVPRLLLMKRPSVVKDNCRRLIESMHKMASAPRFWPEPEGEPPATSGTQSLHPPSPSFCVPLDVPAEPGPSCKSPSDQLPPQQPLEAEKASPHPSPGPCRPPHGTQAPGLAKARSLSVQHMSSPGEAVEGGVRCRSRSIQYCVPRDDAAPEADGQAAGALASRNTHSAELPPPDQPSPCKCTCKKEPSSVSPSATVKTRSTKAPPPHLPLSPALTRAVEGVQYIADHLKAEDTDFSVKEDWKYVAMVIDRIFLWMFIIVCLLGTVGLFLPPWLAGMI

SEQ ID NO: 15051 - protein, 137 aa, Homo sapiens
  Payload ID: 2945
  Gene Symbol: CHRNA4
  Gene Name: cholinergic receptor, nicotinic, alpha 4 (neuronal)
  ENSP ID: ENSP00000429513
  MOD_RES (1)..(1): Any amino acid
XSSHVETRAHAEERLLKKLFSGYNKWSRPVANISDVVLVRFGLSIAQLIDVDEKNQMMTTNVWVKQEWHDYKLRWDPADYENVTSIRIPSELIWRPDIVLYNNCRRALLGRSAFRHQTPSWPFWENSVDCRVPWRGC

SEQ ID NO: 15052 - protein, 556 aa, Homo sapiens
  Payload ID: 2945
  Gene Symbol: CHRNA4
  Gene Name: cholinergic receptor, nicotinic, alpha 4 (neuronal)
  Uniprot ID: P43681
  ENSP ID: ENSP00000483388
MRMSPPSASPPSSSGGRTSSSTTTAGEPFWAGVLFAIRPHPGLSGRIVWTAGCPGEGADGDFAVTHLTKAHLFHDGRVQWTPPAIYKSSCSIDVTFFPFDQQNCTMKFGSWTYDKAKIDLVNMHSRVDQLDFWESGEWVIVDAVGTYNTRKYECCAEIYPDITYAFVIRRLPLFYTINLIIPCLLISCLTVLVFYLPSECGEKITLCISVLLSLTVFLLLITEIIPSTSLVIPLIGEYLLFTMIFVTLSIVITVFVLNVHHRSPRTHTMPTWVRRVFLDIVPRLLLMKRPSVVKDNCRRLIESMHKMASAPRFWPEPEGEPPATSGTQSLHPPSPSFCVPLDVPAEPGPSCKSPSDQLPPQQPLEAEKASPHPSPGPCRPPHGTQAPGLAKARSLSVQHMSSPGEAVEGGVRCRSRSIQYCVPRDDAAPEADGQAAGALASRNTHSAELPPPDQPSPCKCTCKKEPSSVSPSATVKTRSTKAPPPHLPLSPALTRAVEGVQYIADHLKAEDTDFSVKEDWKYVAMVIDRIFLWMFIIVCLLGTVGLFLPPWLAGMI

SEQ ID NO: 15053 - protein, 111 aa, Homo sapiens
  Payload ID: 2945
  Gene Symbol: CHRNA4
  Gene Name: cholinergic receptor, nicotinic, alpha 4 (neuronal)
  ENSP ID: ENSP00000486914
MELGGPGAPRLLPPLLLLLGTGLLRASSHVETRAHAEERLLKKLFSGYNKWSRPVANISDVVLVRFGLSIAQLIDVDEKNQMMTTNVWVKQPPPAPPHPGVARLQAALGPS

SEQ ID NO: 15054 - protein, 468 aa, Homo sapiens
  Payload ID: 2946
  Gene Symbol: CHRNA5
  Gene Name: cholinergic receptor, nicotinic, alpha 5 (neuronal)
  Uniprot ID: P30532
  ENSP ID: ENSP00000299565
MAARGSGPRALRLLLLVQLVAGRCGLAGAAGGAQRGLSEPSSIAKHEDSLLKDLFQDYERWVRPVEHLNDKIKIKFGLAISQLVDVDEKNQLMTTNVWLKQEWIDVKLRWNPDDYGGIKVIRVPSDSVWTPDIVLFDNADGRFEGTSTKTVIRYNGTVTWTPPANYKSSCTIDVTFFPFDLQNCSMKFGSWTYDGSQVDIILEDQDVDKRDFFDNGEWEIVSATGSKGNRTDSCCWYPYVTYSFVIKRLPLFYTLFLIIPCIGLSFLTVLVFYLPSNEGEKICLCTSVLVSLTVFLLVIEEIIPSSSKVIPLIGEYLVFTMIFVTLSIMVTVFAINIHHRSSSTHNAMAPLVRKIFLHTLPKLLCMRSHVDRYFTQKEETESGSGPKSSRNTLEAALDSIRYITRHIMKENDVREVVEDWKFIAQVLDRMFLWTFLFVSIVGSLGLFVPVIYKWANILIPVHIGNANK

SEQ ID NO: 15055 - protein, 182 aa, Homo sapiens
  Payload ID: 2946
  Gene Symbol: CHRNA5
  Gene Name: cholinergic receptor, nicotinic, alpha 5 (neuronal)
  ENSP ID: ENSP00000378281
  MOD_RES (1)..(1): Any amino acid
XRPVEHLNDKIKIKFGLAISQLVDVDEKNQLMTTNVWLKQEWIDVKLRWNPDDYGGIKVIRVPSDSVWTPDIVLFDNADGRFEGTSTKTVIRYNGTVTWTPPANYKSSCTIDVTFFPFDLQNCSMKFGSWTYDGSQVDIILEDQDVDKRDFFDNGEWEIVSATGSKGNRTDSCCWLLKIGNS

SEQ ID NO: 15056 - protein, 56 aa, Homo sapiens
  Payload ID: 2946
  Gene Symbol: CHRNA5
  Gene Name: cholinergic receptor, nicotinic, alpha 5 (neuronal)
  ENSP ID: ENSP00000452641
  MOD_RES (1)..(1): Any amino acid
XTLSIMVTVFAINIHHRSSSTHNAMAPLVRKIFLHTLPKLLCMRSHVDRLLKIGNS

SEQ ID NO: 15057 - protein, 160 aa, Homo sapiens
  Payload ID: 2946
  Gene Symbol: CHRNA5
  Gene Name: cholinergic receptor, nicotinic, alpha 5 (neuronal)
  ENSP ID: ENSP00000453519
MAARGSGPRALRLLLLVQLVAGRCGLAGAAGGAQRGLSEPSSIAKHEDSLLKDLFQDYERWVRPVEHLNDKIKIKFGLAISQLVDVDEKNQLMTTNVWLKQEWIDVKLRWNPDDYGGIKVIRVPSDSVWTPDIVLFDNADGRFEGTSTKTVIRLLKIGNS

SEQ ID NO: 15058 - protein, 494 aa, Homo sapiens
  Payload ID: 2947
  Gene Symbol: CHRNA6
  Gene Name: cholinergic receptor, nicotinic, alpha 6 (neuronal)
  Uniprot ID: Q15825
  ENSP ID: ENSP00000276410
MLTSKGQGFLHGGLCLWLCVFTPFFKGCVGCATEERLFHKLFSHYNQFIRPVENVSDPVTVHFEVAITQLANVDEVNQIMETNLWLRHIWNDYKLRWDPMEYDGIETLRVPADKIWKPDIVLYNNAVGDFQVEGKTKALLKYNGMITWTPPAIFKSSCPMDITFFPFDHQNCSLKFGSWTYDKAEIDLLIIGSKVDMNDFWENSEWEIIDASGYKHDIKYNCCEEIYTDITYSFYIRRLPMFYTINLIIPCLFISFLTVLVFYLPSDCGEKVTLCISVLLSLTVFLLVITETIPSTSLVVPLVGEYLLFTMIFVTLSIVVTVFVLNIHYRTPTTHTMPRWVKTVFLKLLPQVLLMRWPLDKTRGTGSDAVPRGLARRPAKGKLASHGEPRHLKECFHCHKSNELATSKRRLSHQPLQWVVENSEHSPEVEDVINSVQFIAENMKSHNETKEVEDDWKYVAMVVDRVFLWVFIIVCVFGTAGLFLQPLLGNTGKS

SEQ ID NO: 15059 - protein, 479 aa, Homo sapiens
  Payload ID: 2947
  Gene Symbol: CHRNA6
  Gene Name: cholinergic receptor, nicotinic, alpha 6 (neuronal)
  Uniprot ID: Q15825
  ENSP ID: ENSP00000433871
MLTSKGQGFLHGGLCLWLCVFTPFFKGCVGCATEERLFHKLFSHYNQFIRPVENVSDPVTVHFEVAITQLANVIWNDYKLRWDPMEYDGIETLRVPADKIWKPDIVLYNNAVGDFQVEGKTKALLKYNGMITWTPPAIFKSSCPMDITFFPFDHQNCSLKFGSWTYDKAEIDLLIIGSKVDMNDFWENSEWEIIDASGYKHDIKYNCCEEIYTDITYSFYIRRLPMFYTINLIIPCLFISFLTVLVFYLPSDCGEKVTLCISVLLSLTVFLLVITETIPSTSLVVPLVGEYLLFTMIFVTLSIVVTVFVLNIHYRTPTTHTMPRWVKTVFLKLLPQVLLMRWPLDKTRGTGSDAVPRGLARRPAKGKLASHGEPRHLKECFHCHKSNELATSKRRLSHQPLQWVVENSEHSPEVEDVINSVQFIAENMKSHNETKEVEDDWKYVAMVVDRVFLWVFIIVCVFGTAGLFLQPLLGNTGKS

SEQ ID NO: 15060 - protein, 111 aa, Homo sapiens
  Payload ID: 2947
  Gene Symbol: CHRNA6
  Gene Name: cholinergic receptor, nicotinic, alpha 6 (neuronal)
  ENSP ID: ENSP00000434659
METNLWLRHIWNDYKLRWDPMEYDGIETLRVPADKIWKPDIVLYNNAVGDFQVEGKTKALLKYNGMITWTPPAIFKSSCPMDITFFPFDHQNCSLKFGSWTYDKAEIDLLI

SEQ ID NO: 15061 - protein, 502 aa, Homo sapiens; identical to SEQ ID NO: 15028
  Payload ID: 2948
  Gene Symbol: CHRNA7
  Gene Name: cholinergic receptor, nicotinic, alpha 7 (neuronal)
  Uniprot ID: P36544
  ENSP ID: ENSP00000303727

SEQ ID NO: 15062 - protein, 102 aa, Homo sapiens
  Payload ID: 2948
  Gene Symbol: CHRNA7
  Gene Name: cholinergic receptor, nicotinic, alpha 7 (neuronal)
  ENSP ID: ENSP00000399087
MRCSPGGVWLALAASLLHVSLQGEFQRKLYKELVKNYNPLERPVANDSQPLTVYFSLSLLQIMDVDEKNQVLTTNIWLQMAYSRVPATSMYAGFPLMCSTAN

SEQ ID NO: 15063 - protein, 502 aa, Homo sapiens; identical to SEQ ID NO: 15028
  Payload ID: 2948
  Gene Symbol: CHRNA7
  Gene Name: cholinergic receptor, nicotinic, alpha 7 (neuronal)
  ENSP ID: ENSP00000405989

SEQ ID NO: 15064 - protein, 531 aa, Homo sapiens
  Payload ID: 2948
  Gene Symbol: CHRNA7
  Gene Name: cholinergic receptor, nicotinic, alpha 7 (neuronal)
  Uniprot ID: P36544
  ENSP ID: ENSP00000407546
MRCSPGGVWLALAASLLHGKATASPPSTPPWDPGHIPGASVRPAPGPVSLQGEFQRKLYKELVKNYNPLERPVANDSQPLTVYFSLSLLQIMDVDEKNQVLTTNIWLQMSWTDHYLQWNVSEYPGVKTVRFPDGQIWKPDILLYNSADERFDATFHTNVLVNSSGHCQYLPPGIFKSSCYIDVRWFPFDVQHCKLKFGSWSYGGWSLDLQMQEADISGYIPNGEWDLVGIPGKRSERFYECCKEPYPDVTFTVTMRRRTLYYGLNLLIPCVLISALALLVFLLPADSGEKISLGITVLLSLTVFMLLVAEIMPATSDSVPLIAQYFASTMIIVGLSVVVTVIVLQYHHHDPDGGKMPKWTRVILLNWCAWFLRMKRPGEDKVRPACQHKQRRCSLASVEMSAVAPPPASNGNLLYIGFRGLDGVHCVPTPDSGVVCGRMACSPTHDEHLLHGGQPPEGDPDLAKILEEVRYIANRFRCQDESEAVCSEWKFAACVVDRLCLMAFSVFTIICTIGILMSAPNFVEAVSKDFA

SEQ ID NO: 15065 - protein, 479 aa, Homo sapiens
  Payload ID: 2949
  Gene Symbol: CHRNA9
  Gene Name: cholinergic receptor, nicotinic, alpha 9 (neuronal)
  Uniprot ID: Q9UGM1
  ENSP ID: ENSP00000312663
MNWSHSCISFCWIYFAASRLRAAETADGKYAQKLFNDLFEDYSNALRPVEDTDKVLNVTLQITLSQIKDMDERNQILTAYLWIRQIWHDAYLTWDRDQYDGLDSIRIPSDLVWRPDIVLYNKADDESSEPVNTNVVLRYDGLITWDAPAITKSSCVVDVTYFPFDNQQCNLTFGSWTYNGNQVDIFNALDSGDLSDFIEDVEWEVHGMPAVKNVISYGCCSEPYPDVTFTLLLKRRSSFYIVNLLIPCVLISFLAPLSFYLPAASGEKVSLGVTILLAMTVFQLMVAEIMPASENVPLIGKYYIATMALITASTALTIMVMNIHFCGAEARPVPHWARVVILKYMSRVLFVYDVGESCLSPHHSRERDHLTKVYSKLPESNLKAARNKDLSRKKDMNKRLKNDLGCQGKNPQEAESYCAQYKVLTRNIEYIAKCLKDHKATNSKGSEWKKVAKVIDRFFMWIFFIMVFVMTILIIARAD

SEQ ID NO: 15066 - protein, 501 aa, Homo sapiens
  Payload ID: 2950
  Gene Symbol: CHRNB1
  Gene Name: cholinergic receptor, nicotinic, beta 1 (muscle)
  Uniprot ID: P11230
  ENSP ID: ENSP00000304290
MTPGALLMLLGALGAPLAPGVRGSEAEGRLREKLFSGYDSSVRPAREVGDRVRVSVGLILAQLISLNEKDEEMSTKVYLDLEWTDYRLSWDPAEHDGIDSLRITAESVWLPDVVLLNNNDGNFDVALDISVVVSSDGSVRWQPPGIYRSSCSIQVTYFPFDWQNCTMVFSSYSYDSSEVSLQTGLGPDGQGHQEIHIHEGTFIENGQWEIIHKPSRLIQPPGDPRGGREGQRQEVIFYLIIRRKPLFYLVNVIAPCILITLLAIFVFYLPPDAGEKMGLSIFALLTLTVFLLLLADKVPETSLSVPIIIKYLMFTMVLVTFSVILSVVVLNLHHRSPHTHQMPLWVRQIFIHKLPLYLRLKRPKPERDLMPEPPHCSSPGSGWGRGTDEYFIRKPPSDFLFPKPNRFQPELSAPDLRRFIDGPNRAVALLPELREVVSSISYIARQLQEQEDHDALKEDWQFVAMVVDRLFLWTFIIFTSVGTLVIFLDATYHLPPPDPFP

SEQ ID NO: 15067 - protein, 429 aa, Homo sapiens
  Payload ID: 2950
  Gene Symbol: CHRNB1
  Gene Name: cholinergic receptor, nicotinic, beta 1 (muscle)
  Uniprot ID: P11230
  ENSP ID: ENSP00000439209
MSTKVYLDLEWTDYRLSWDPAEHDGIDSLRITAESVWLPDVVLLNNNDGNFDVALDISVVVSSDGSVRWQPPGIYRSSCSIQVTYFPFDWQNCTMVFSSYSYDSSEVSLQTGLGPDGQGHQEIHIHEGTFIENGQWEIIHKPSRLIQPPGDPRGGREGQRQEVIFYLIIRRKPLFYLVNVIAPCILITLLAIFVFYLPPDAGEKMGLSIFALLTLTVFLLLLADKVPETSLSVPIIIKYLMFTMVLVTFSVILSVVVLNLHHRSPHTHQMPLWVRQIFIHKLPLYLRLKRPKPERDLMPEPPHCSSPGSGWGRGTDEYFIRKPPSDFLFPKPNRFQPELSAPDLRRFIDGPNRAVALLPELREVVSSISYIARQLQEQEDHDALKEDWQFVAMVVDRLFLWTFIIFTSVGTLVIFLDATYHLPPPDPFP

SEQ ID NO: 15068 - protein, 380 aa, Homo sapiens
  Payload ID: 2950
  Gene Symbol: CHRNB1
  Gene Name: cholinergic receptor, nicotinic, beta 1 (muscle)
  ENSP ID: ENSP00000459092
MSTKVYLDLEWTDYRLSWDPAEHDGIDSLRITAESVWLPDVVLLNNNDGNFDVALDISVVVSSDGSVRWQPPGIYRSSCSIQVTYFPFDWQNCTMVFSSYSYDSSEVSLQTGLGPDGQGHQEIHIHEGTFIENGQWEIIHKPSRLIQPPGDPRGGREGQRQEVIFYLIIRRKPLFYLVNVIAPCILITLLAIFVFYLPPDAVILSVVVLNLHHRSPHTHQMPLWVRQIFIHKLPLYLRLKRPKPERDLMPEPPHCSSPGSGWGRGTDEYFIRKPPSDFLFPKPNRFQPELSAPDLRRFIDGPNRAVALLPELREVVSSISYIARQLQEQEDHDALKEDWQFVAMVVDRLFLWTFIIFTSVGTLVIFLDATYHLPPPDPFP

SEQ ID NO: 15069 - protein, 316 aa, Homo sapiens
  Payload ID: 2950
  Gene Symbol: CHRNB1
  Gene Name: cholinergic receptor, nicotinic, beta 1 (muscle)
  ENSP ID: ENSP00000460648
  MOD_RES (1)..(1): Any amino acid
XPAREVGDRVRVSVGLILAQLISLNEKDEEMSTKVYLDLEWTDYRLSWDPAEHDGIDSLRITAESVWLPDVVLLNNNDGNFDVALDISVVVSSDGSVRWQPPGIYRSSCSIQVTYFPFDWQNCTMVFSSYSYDSSEVSLQTGLGPDGQGHQEIHIHEGTFIGEKMGLSIFALLTLTVFLLLLADKVPETSLSVPIIIKYLMFTMVLVTFSVILSVVVLNLHHRSPHTHQMPLWVRQIFIHKLPLYLRLKRPKPERDLMPEPPHCSSPGSGWGRGTDEYFIRKPPSDFLFPKPNRFQPELSAPDLRRFIDGPNRAVA

SEQ ID NO: 15070 - protein, 158 aa, Homo sapiens
  Payload ID: 2950
  Gene Symbol: CHRNB1
  Gene Name: cholinergic receptor, nicotinic, beta 1 (muscle)
  ENSP ID: ENSP00000461402
MTPGALLMLLGALGAPLAPGVRGSEAEGRLREKLFSGYDSSVRPAREVGDRVRVSVGLILAQLISLNEKDEEMSTKVYLDLAVLECGGSSHPPASGGTSTSAEITAEWTDYRLSWDPAEHDGIDSLRITAESVWLPDVVLLNNNDGNFDVALDISVVV

SEQ ID NO: 15071 - protein, 37 aa, Homo sapiens
  Payload ID: 2950
  Gene Symbol: CHRNB1
  Gene Name: cholinergic receptor, nicotinic, beta 1 (muscle)
  ENSP ID: ENSP00000461751
MVVDRLFLWTFIIFTSVGTLVIFLDATYHLPPPDPFP

SEQ ID NO: 15072 - protein, 502 aa, Homo sapiens
  Payload ID: 2951
  Gene Symbol: CHRNB2
  Gene Name: cholinergic receptor, nicotinic, beta 2 (neuronal)
  Uniprot ID: P17787
  ENSP ID: ENSP00000357461
MARRCGPVALLLGFGLLRLCSGVWGTDTEERLVEHLLDPSRYNKLIRPATNGSELVTVQLMVSLAQLISVHEREQIMTTNVWLTQEWEDYRLTWKPEEFDNMKKVRLPSKHIWLPDVVLYNNADGMYEVSFYSNAVVSYDGSIFWLPPAIYKSACKIEVKHFPFDQQNCTMKFRSWTYDRTEIDLVLKSEVASLDDFTPSGEWDIVALPGRRNENPDDSTYVDITYDFIIRRKPLFYTINLIIPCVLITSLAILVFYLPSDCGEKMTLCISVLLALTVFLLLISKIVPPTSLDVPLVGKYLMFTMVLVTFSIVTSVCVLNVHHRSPTTHTMAPWVKVVFLEKLPALLFMQQPRHHCARQRLRLRRRQREREGAGALFFREAPGADSCTCFVNRASVQGLAGAFGAEPAPVAGPGRSGEPCGCGLREAVDGVRFIADHMRSEDDDQSVSEDWKYVAMVIDRLFLWIFVFVCVFGTIGMFLQPLFQNYTTTTFLHSDHSAPSSK

SEQ ID NO: 15073 - protein, 458 aa, Homo sapiens
  Payload ID: 2952
  Gene Symbol: CHRNB3
  Gene Name: cholinergic receptor, nicotinic, beta 3 (neuronal)
  Uniprot ID: Q05901
  ENSP ID: ENSP00000289957
MLPDFMLVLIVLGIPSSATTGFNSIAENEDALLRHLFQGYQKWVRPVLHSNDTIKVYFGLKISQLVDVDEKNQLMTTNVWLKQEWTDHKLRWNPDDYGGIHSIKVPSESLWLPDIVLFENADGRFEGSLMTKVIVKSNGTVVWTPPASYKSSCTMDVTFFPFDRQNCSMKFGSWTYDGTMVDLILINENVDRKDFFDNGEWEILNAKGMKGNRRDGVYSYPFITYSFVLRRLPLFYTLFLIIPCLGLSFLTVLVFYLPSDEGEKLSLSTSVLVSLTVFLLVIEEIIPSSSKVIPLIGEYLLFIMIFVTLSIIVTVFVINVHHRSSSTYHPMAPWVKRLFLQKLPKLLCMKDHVDRYSSPEKEESQPVVKGKVLEKKKQKQLSDGEKVLVAFLEKAADSIRYISRHVKKEHFISQVVQDWKFVAQVLDRIFLWLFLIVSVTGSVLIFTPALKMWLHSYH

SEQ ID NO: 15074 - protein, 9 aa, Homo sapiens
  Payload ID: 2952
  Gene Symbol: CHRNB3
  Gene Name: cholinergic receptor, nicotinic, beta 3 (neuronal)
  ENSP ID: ENSP00000433913
MTTNVWLKQ

SEQ ID NO: 15075 - protein, 498 aa, Homo sapiens
  Payload ID: 2953
  Gene Symbol: CHRNB4
  Gene Name: cholinergic receptor, nicotinic, beta 4 (neuronal)
  Uniprot ID: P30926
  ENSP ID: ENSP00000261751
MRRAPSLVLFFLVALCGRGNCRVANAEEKLMDDLLNKTRYNNLIRPATSSSQLISIKLQLSLAQLISVNEREQIMTTNVWLKQEWTDYRLTWNSSRYEGVNILRIPAKRIWLPDIVLYNNADGTYEVSVYTNLIVRSNGSVLWLPPAIYKSACKIEVKYFPFDQQNCTLKFRSWTYDHTEIDMVLMTPTASMDDFTPSGEWDIVALPGRRTVNPQDPSYVDVTYDFIIKRKPLFYTINLIIPCVLTTLLAILVFYLPSDCGEKMTLCISVLLALTFFLLLISKIVPPTSLDVPLIGKYLMFTMVLVTFSIVTSVCVLNVHHRSPSTHTMAPWVKRCFLHKLPTFLFMKRPGPDSSPARAFPPSKSCVTKPEATATSTSPSNFYGNSMYFVNPASAASKSPAGSTPVAIPRDFWLRSSGRFRQDVQEALEGVSFIAQHMKNDDEDQSVVEDWKYVAMVVDRLFLWVFMFVCVLGTVGLFLPPLFQTHAASEGPYAAQRD

SEQ ID NO: 15076 - protein, 231 aa, Homo sapiens
  Payload ID: 2953
  Gene Symbol: CHRNB4
  Gene Name: cholinergic receptor, nicotinic, beta 4 (neuronal)
  Uniprot ID: P30926
  ENSP ID: ENSP00000416386
MRRAPSLVLFFLVALCGRGNCRVANAEEKLMDDLLNKTRYNNLIRPATSSSQLISIKLQLSLAQLISVNEREQIMTTNVWLKQEWTDYRLTWNSSRYEGVNILRIPAKRIWLPDIVLYNKSLRTGSTWLWWWTGCSCGCSCLCASWALWGSSYRPSSRPMQLLRGPTLPSVTEGPLGCGVRGCEWPGGHFAASFWVVADEALSKYVSIGHQPHQTSHSRGTGKDGGLGCPL

SEQ ID NO: 15077 - protein, 66 aa, Homo sapiens
  Payload ID: 2953
  Gene Symbol: CHRNB4
  Gene Name: cholinergic receptor, nicotinic, beta 4 (neuronal)
  ENSP ID: ENSP00000457404
MGGSLLAPAPDHIVLWNCRVANAEEKLMDDLLNKTRYNNLIRPATSSSQLISIKLQLSLAQLISVG

SEQ ID NO: 15078 - protein, 517 aa, Homo sapiens
  Payload ID: 2954
  Gene Symbol: CHRND
  Gene Name: cholinergic receptor, nicotinic, delta (muscle)
  Uniprot ID: Q07001
  ENSP ID: ENSP00000258385
MEGPVLTLGLLAALAVCGSWGLNEEERLIRHLFQEKGYNKELRPVAHKEESVDVALALTLSNLISLKEVEETLTTNVWIEHGWTDNRLKWNAEEFGNISVLRLPPDMVWLPEIVLENNNDGSFQISYSCNVLVYHYGFVYWLPPAIFRSSCPISVTYFPFDWQNCSLKFSSLKYTAKEITLSLKQDAKENRTYPVEWIIIDPEGFTENGEWEIVHRPARVNVDPRAPLDSPSRQDITFYLIIRRKPLFYIINILVPCVLISFMVNLVFYLPADSGEKTSVAISVLLAQSVFLLLISKRLPATSMAIPLIGKFLLFGMVLVTMVVVICVIVLNIHFRTPSTHVLSEGVKKLFLETLPELLHMSRPAEDGPSPGALVRRSSSLGYISKAEEYFLLKSRSDLMFEKQSERHGLARRLTTARRPPASSEQAQQELFNELKPAVDGANFIVNHMRDQNNYNEEKDSWNRVARTVDRLCLFVVTPVMVVGTAWIFLQGVYNQPPPQPFPGDPYSYNVQDKRFI

SEQ ID NO: 15079 - protein, 171 aa, Homo sapiens
  Payload ID: 2954
  Gene Symbol: CHRND
  Gene Name: cholinergic receptor, nicotinic, delta (muscle)
  ENSP ID: ENSP00000398143
MEGPVLTLGLLAALAVCGSWGLNEEERLIRHLFQEKGYNKELRPVAHKEESVDVALALTLSNLISLKEVEETLTTNVWIEHGWTDNRLKWNAEEFGNISVLRLPPDMVWLPEIVLENNNDGSFQISYSCNVLVYHYGFVYWLPPAIFRSSCPISVTYFPFDWQNCSLKFRW

SEQ ID NO: 15080 - protein, 172 aa, Homo sapiens
  Payload ID: 2954
  Gene Symbol: CHRND
  Gene Name: cholinergic receptor, nicotinic, delta (muscle)
  ENSP ID: ENSP00000404950
MEGPVLTLGLLAALAVCGSWGLNEEERLIRHLFQEKGYNKELRPVAHKEESVDVALALTLSNLISLGWTDNRLKWNAEEFGNISVLRLPPDMVWLPEIVLENNNDGSFQISYSCNVLVYHYGFVYWLPPAIFRSSCPISVTYFPFDWQNCSLKFSSLKYTAKEITLSLKQDA

SEQ ID NO: 15081 - protein, 235 aa, Homo sapiens
  Payload ID: 2954
  Gene Symbol: CHRND
  Gene Name: cholinergic receptor, nicotinic, delta (muscle)
  ENSP ID: ENSP00000408819
MEGPVLTLGLLAALAVCGSWGLNEEERLIRHLFQEKGYNKELRPVAHKEESVDVALALTLSNLISLKEVEETLTTNVWIEHGWTDNRLKWNAEEFGNISVLRLPPDMVWLPEIVLENNNDGSFQISYSCNVLVYHYGFVYWLPPAIFRSSCPISVTYFPFDWQNCSLKFRERGVGDSPPAGQGQRGPQSPSGQPQPPGHHLLPHHPPQAPLLHHQHPGALRAHLLHGQPGLLPTG

SEQ ID NO: 15082 - protein, 108 aa, Homo sapiens
  Payload ID: 2954
  Gene Symbol: CHRND
  Gene Name: cholinergic receptor, nicotinic, delta (muscle)
  ENSP ID: ENSP00000410801
MEGPVLTLGLLAALAVCGSWGLNEEERLIRHLFQEKGYNKELRPVAHKEESVDVALALTLSNLISLKEVEETLTTNVWIEHGWTDNRLKWNAEEFGNISVLRLPPDMQ

SEQ ID NO: 15083 - protein, 502 aa, Homo sapiens
  Payload ID: 2954
  Gene Symbol: CHRND
  Gene Name: cholinergic receptor, nicotinic, delta (muscle)
  Uniprot ID: Q07001
  ENSP ID: ENSP00000438380
MEGPVLTLGLLAALAVCGSWGLNEEERLIRHLFQEKGYNKELRPVAHKEESVDVALALTLSNLISLGWTDNRLKWNAEEFGNISVLRLPPDMVWLPEIVLENNNDGSFQISYSCNVLVYHYGFVYWLPPAIFRSSCPISVTYFPFDWQNCSLKFSSLKYTAKEITLSLKQDAKENRTYPVEWIIIDPEGFTENGEWEIVHRPARVNVDPRAPLDSPSRQDITFYLIIRRKPLFYIINILVPCVLISFMVNLVFYLPADSGEKTSVAISVLLAQSVFLLLISKRLPATSMAIPLIGKFLLFGMVLVTMVVVICVIVLNIHFRTPSTHVLSEGVKKLFLETLPELLHMSRPAEDGPSPGALVRRSSSLGYISKAEEYFLLKSRSDLMFEKQSERHGLARRLTTARRPPASSEQAQQELFNELKPAVDGANFIVNHMRDQNNYNEEKDSWNRVARTVDRLCLFVVTPVMVVGTAWIFLQGVYNQPPPQPFPGDPYSYNVQDKRFI

SEQ ID NO: 15084 - protein, 493 aa, Homo sapiens
  Payload ID: 2955
  Gene Symbol: CHRNE
  Gene Name: cholinergic receptor, nicotinic, epsilon (muscle)
  Uniprot ID: Q04844
  ENSP ID: ENSP00000293780
MARAPLGVLLLLGLLGRGVGKNEELRLYHHLFNNYDPGSRPVREPEDTVTISLKVTLTNLISLNEKEETLTTSVWIGIDWQDYRLNYSKDDFGGIETLRVPSELVWLPEIVLENNIDGQFGVAYDANVLVYEGGSVTWLPPAIYRSVCAVEVTYFPFDWQNCSLIFRSQTYNAEEVEFTFAVDNDGKTINKIDIDTEAYTENGEWAIDFCPGVIRRHHGGATDGPGETDVIYSLIIRRKPLFYVINIIVPCVLISGLVLLAYFLPAQAGGQKCTVSINVLLAQTVFLFLIAQKIPETSLSVPLLGRFLIFVMVVATLIVMNCVIVLNVSQRTPTTHAMSPRLRHVLLELLPRLLGSPPPPEAPRAASPPRRASSVGLLLRAEELILKKPRSELVFEGQRHRQGTWTAAFCQSLGAAAPEVRCCVDAVNFVAESTRDQEATGEEVSDWVRMGNALDNICFWAALVLFSVGSSLIFLGAYFNRVPDLPYAPCIQP

SEQ ID NO: 15085 - protein, 465 aa, Homo sapiens
  Payload ID: 2956
  Gene Symbol: CHRNG
  Gene Name: cholinergic receptor, nicotinic, gamma (muscle)
  Uniprot ID: P07510
  ENSP ID: ENSP00000374143
MHGGQGPLLLLLLLAVCLGAQGRNQEERLLADLMQNYDPNLRPAERDSDVVNVSLKLTLTNLISLNEREEALTTNVWIEMQWCDYRLRWDPRDYEGLWVLRVPSTMVWRPDIVLENKSQTYSTNEIDLQLSQEDGQTIEWIFIDPEAFTENGEWAIQHRPAKMLLDPAAPAQEAGHQKVVFYLLIQRKPLFYVINIIAPCVLISSVAILIHFLPAKAGGQKCTVAINVLLAQTVFLFLVAKKVPETSQAVPLISKYLTFLLVVTILIVVNAVVVLNVSLRSPHTHSMARGVRKVFLRLLPQLLRMHVRPLAPAAVQDTQSRLQNGSSGWSITTGEEVALCLPRSELLFQQWQRQGLVAAALEKLEKGPELGLSQFCGSLKQAAPAIQACVEACNLIACARHQQSHFDNGNEEWFLVGRVLDRVCFLAMLSLFICGTAGIFLMAHYNRVPALPFPGDPRPYLPSPD

SEQ ID NO: 15086 - protein, 517 aa, Homo sapiens
  Payload ID: 2956
  Gene Symbol: CHRNG
  Gene Name: cholinergic receptor, nicotinic, gamma (muscle)
  Uniprot ID: P07510
  ENSP ID: ENSP00000374145
MHGGQGPLLLLLLLAVCLGAQGRNQEERLLADLMQNYDPNLRPAERDSDVVNVSLKLTLTNLISLNEREEALTTNVWIEMQWCDYRLRWDPRDYEGLWVLRVPSTMVWRPDIVLENNVDGVFEVALYCNVLVSPDGCIYWLPPAIFRSACSISVTYFPFDWQNCSLIFQSQTYSTNEIDLQLSQEDGQTIEWIFIDPEAFTENGEWAIQHRPAKMLLDPAAPAQEAGHQKVVFYLLIQRKPLFYVINIIAPCVLISSVAILIHFLPAKAGGQKCTVAINVLLAQTVFLFLVAKKVPETSQAVPLISKYLTFLLVVTILIVVNAVVVLNVSLRSPHTHSMARGVRKVFLRLLPQLLRMHVRPLAPAAVQDTQSRLQNGSSGWSITTGEEVALCLPRSELLFQQWQRQGLVAAALEKLEKGPELGLSQFCGSLKQAAPAIQACVEACNLIACARHQQSHFDNGNEEWFLVGRVLDRVCFLAMLSLFICGTAGIFLMAHYNRVPALPFPGDPRPYLPSPD

SEQ ID NO: 15087 - protein, 359 aa, Homo sapiens
  Payload ID: 2957
  Gene Symbol: CHAD
  Gene Name: chondroadherin
  Uniprot ID: O15335
  ENSP ID: ENSP00000258969
MVRPMLLLSLGLLAGLLPALAACPQNCHCHSDLQHVICDKVGLQKIPKVSEKTKLLNLQRNNFPVLAANSFRAMPNLVSLHLQHCQIREVAAGAFRGLKQLIYLYLSHNDIRVLRAGAFDDLTELTYLYLDHNKVTELPRGLLSPLVNLFILQLNNNKIRELRAGAFQGAKDLRWLYLSENALSSLQPGALDDVENLAKFHVDRNQLSSYPSAALSKLRVVEELKLSHNPLKSIPDNAFQSFGRYLETLWLDNTNLEKFSDGAFLGVTTLKHVHLENNRLNQLPSNFPFDSLETLALTNNPWKCTCQLRGLRRWLEAKASRPDATCASPAKFKGQHIRDTDAFRSCKFPTKRSKKAGRH

SEQ ID NO: 15088 - protein, 359 aa, Homo sapiens; identical to SEQ ID NO: 15087
  Payload ID: 2957
  Gene Symbol: CHAD
  Gene Name: chondroadherin
  Uniprot ID: O15335
  ENSP ID: ENSP00000423812

SEQ ID NO: 15089 - protein, 42 aa, Homo sapiens
  Payload ID: 2957
  Gene Symbol: CHAD
  Gene Name: chondroadherin
  ENSP ID: ENSP00000425672
  MOD_RES (1)..(1): Any amino acid
XASRPDATCASPAKFKGQHIRDTDAFRSCKFPTKRSKKAGRH

SEQ ID NO: 15090 - protein, 762 aa, Homo sapiens
  Payload ID: 2958
  Gene Symbol: CHADL
  Gene Name: chondroadherin-like
  Uniprot ID: Q6NUI6
  ENSP ID: ENSP00000216241
MEGPRSSTHVPLVLPLLVLLLLAPARQAAAQRCPQACICDNSRRHVACRYQNLTEVPDAIPELTQRLDLQGNLLKVIPAAAFQGVPHLTHLDLRHCEVELVAEGAFRGLGRLLLLNLASNHLRELPQEALDGLGSLRRLELEGNALEELRPGTFGALGALATLNLAHNALVYLPAMAFQGLLRVRWLRLSHNALSVLAPEALAGLPALRRLSLHHNELQALPGPVLSQARGLARLELGHNPLTYAGEEDGLALPGLRELLLDGGALQALGPRAFAHCPRLHTLDLRGNQLDTLPPLQGPGQLRRLRLQGNPLWCGCQARPLLEWLARARVRSDGACQGPRRLRGEALDALRPWDLRCPGDAAQEEEELEERAVAGPRAPPRGPPRGPGEERAVAPCPRACVCVPESRHSSCEGCGLQAVPRGFPSDTQLLDLRRNHFPSVPRAAFPGLGHLVSLHLQHCGIAELEAGALAGLGRLIYLYLSDNQLAGLSAAALEGAPRLGYLYLERNRFLQVPGAALRALPSLFSLHLQDNAVDRLAPGDLGRTRALRWVYLSGNRITEVSLGALGPARELEKLHLDRNQLREVPTGALEGLPALLELQLSGNPLRALRDGAFQPVGRSLQHLFLNSSGLEQICPGAFSGLGPGLQSLHLQKNQLRALPALPSLSQLELIDLSSNPFHCDCQLLPLHRWLTGLNLRVGATCATPPNARGQRVKAAAAVFEDCPGWAARKAKRTPASRPSARRTPIKGRQCGADKVGKEKGRL

SEQ ID NO: 15091 - protein, 684 aa, Homo sapiens
  Payload ID: 2958
  Gene Symbol: CHADL
  Gene Name: chondroadherin-like
  ENSP ID: ENSP00000392046
  MOD_RES (1)..(1): Any amino acid
XPRSSTHVPLVLPLLVLLLLAPARQAAAQRCPQACICDNSRRHVACRYQNLTEVPDAIPELTQRLDLQGNLLKVIPAAAFQGVPHLTHLDLRHCEVELVAEGAFRGLGRLLLLNLASNHLRELPQEALDGLGSLRRLELEGNALEELRPGTFGALGALATLNLAHNALVYLPAMAFQGLLRVRWLRLSHNALSVLAPEALAGLPALRRLSLHHNELQALPGPVLSQARGLARLELGHNPLTYAGEEDGLALPGLRELLLDGGALQALGPRAFAHCPRLHTLDLRGNQLDTLPPLQGPGQLRRLRLQGNPLWCGCQARPLLEWLARARVRSDGACQGPRRLRGEALDALRPWDLRCPGDAAQEEEELEERAVAGPRAPPRGPPRGPGEERAVAPCPRACVCVPESRHSSCEGCGLQAVPRGFPSDTQLLDLRRNHFPSVPRAAFPGLGHLVSLHLQHCGIAELEAGALAGLGRLIYLYLSDNQLAGLSAAALEGAPRLGYLYLERNRFLQVPGAALRALPSLFSLHLQDNAVDRLAPGDLGRTRALRWVYLSGNRITEVSLGALGPARELEKLHLDRNQLREVPTGALEGLPALLELQLSGNPLRALRDGAFQPVGRSLQHLFLNSSGLEQICPGAFSGLGPGLQSLHLQKNQLRALPALPSARRTPIKGRQCGADKVGKEKGRL

SEQ ID NO: 15092 - protein, 252 aa, Homo sapiens
  Payload ID: 2958
  Gene Symbol: CHADL
  Gene Name: chondroadherin-like
  ENSP ID: ENSP00000412359
SSRRHGGVSLWARWCKGGFRAAQWPQDNAVDRLAPGDLGRTRALRWVYLSGNRITEVSLGALGPARELEKLHLDRNQLREVPTGALEGLPALLELQLSGNPLRALRDGAFQPVGRSLQHLFLNSSGLEQICPGAFSGLGPGLQSLHLQKNQLRALPALPSLSQLELIDLSSNPFHCDCQLLPLHRWLTGLNLRVGATCATPPNARGQRVKAAAAVFEDCPGWAARKAKRTPASRPSARRTPIKGRQCGADKV

SEQ ID NO: 15093 - protein, 775 aa, Homo sapiens
  Payload ID: 2959
  Gene Symbol: CHPF
  Gene Name: chondroitin polymerizing factor
  Uniprot ID: Q8IZ52
  ENSP ID: ENSP00000243776
MRASLLLSVLRPAGPVAVGISLGFTLSLLSVTWVEEPCGPGPPQPGDSELPPRGNTNAARRPNSVQPGAEREKPGAGEGAGENWEPRVLPYHPAQPGQAAKKAVRTRYISTELGIRQRLLVAVLTSQTTLPTLGVAVNRTLGHRLERVVFLTGARGRRAPPGMAVVTLGEERPIGHLHLALRHLLEQHGDDFDWFFLVPDTTYTEAHGLARLTGHLSLASAAHLYLGRPQDFIGGEPTPGRYCHGGFGVLLSRMLLQQLRPHLEGCRNDIVSARPDEWLGRCILDATGVGCTGDHEGVHYSHLELSPGEPVQEGDPHFRSALTAHPVRDPVHMYQLHKAFARAELERTYQEIQELQWEIQNTSHLAVDGDQAAAWPVGIPAPSRPASRFEVLRWDYFTEQHAFSCADGSPRCPLRGADRADVADVLGTALEELNRRYHPALRLQKQQLVNGYRRFDPARGMEYTLDLQLEALTPQGGRRPLTRRVQLLRPLSRVEILPVPYVTEASRLTVLLPLAAAERDLAPGFLEAFATAALEPGDAAAALTLLLLYEPRQAQRVAHADVFAPVKAHVAELERRFPGARVPWLSVQTAAPSPLRLMDLLSKKHPLDTLFLLAGPDTVLTPDFLNRCRMHAISGWQAFFPMHFQAFHPAVAPPQGPGPPELGRDTGRFDRQAASEACFYNSDYVAARGRLAAASEQEEELLESLDVYELFLHFSSLHVLRAVEPALLQRYRAQTCSARLSEDLYHRCLQSVLEGLGSRTQLAMLLFEQEQGNST

SEQ ID NO: 15094 - protein, 298 aa, Homo sapiens
  Payload ID: 2959
  Gene Symbol: CHPF
  Gene Name: chondroitin polymerizing factor
  ENSP ID: ENSP00000362998
MRASLLLSVLRPAGPVAVGISLGFTLSLLSVTWVEEPCGPGPPQPGDSELPPRGNTNAARRPNSVQPGAEREKPGAGEGAGENWEPRVLPYHPAQPGQAAKKAVRTRYISTELGIRQRLLVAVLTSQTTLPTLGVAVNRTLGHRLERVVFLTGARGRRAPPGMAVVTLGEERPIGHLHLALRHLLEQHGDDFDWFFLVPDTTYTEAHGLARLTGHLSLASAAHLYLGRPQDFIGGEPTPGRYCHGGFGVLLSRMLLQQLRPHLEGCRNDIVSARPDEWLGRCILDATGVGCTGDHEVG

SEQ ID NO: 15095 - protein, 613 aa, Homo sapiens
  Payload ID: 2959
  Gene Symbol: CHPF
  Gene Name: chondroitin polymerizing factor
  Uniprot ID: Q8IZ52
  ENSP ID: ENSP00000445571
MAVVTLGEERPIGHLHLALRHLLEQHGDDFDWFFLVPDTTYTEAHGLARLTGHLSLASAAHLYLGRPQDFIGGEPTPGRYCHGGFGVLLSRMLLQQLRPHLEGCRNDIVSARPDEWLGRCILDATGVGCTGDHEGVHYSHLELSPGEPVQEGDPHFRSALTAHPVRDPVHMYQLHKAFARAELERTYQEIQELQWEIQNTSHLAVDGDQAAAWPVGIPAPSRPASRFEVLRWDYFTEQHAFSCADGSPRCPLRGADRADVADVLGTALEELNRRYHPALRLQKQQLVNGYRRFDPARGMEYTLDLQLEALTPQGGRRPLTRRVQLLRPLSRVEILPVPYVTEASRLTVLLPLAAAERDLAPGFLEAFATAALEPGDAAAALTLLLLYEPRQAQRVAHADVFAPVKAHVAELERRFPGARVPWLSVQTAAPSPLRLMDLLSKKHPLDTLFLLAGPDTVLTPDFLNRCRMHAISGWQAFFPMHFQAFHPAVAPPQGPGPPELGRDTGRFDRQAASEACFYNSDYVAARGRLAAASEQEEELLESLDVYELFLHFSSLHVLRAVEPALLQRYRAQTCSARLSEDLYHRCLQSVLEGLGSRTQLAMLLFEQEQGNST

SEQ ID NO: 15096 - protein, 772 aa, Homo sapiens
  Payload ID: 2960
  Gene Symbol: CHPF2
  Gene Name: chondroitin polymerizing  factor 2
  Uniprot ID: Q9P2E5
  ENSP ID: ENSP00000035307
MRLSSLLALLRPALPLILGLSLGCSLSLLRVSWIQGEGEDPCVEAVGERGGPQNPDSRARLDQSDEDFKPRIVPYYRDPNKPYKKVLRTRYIQTELGSRERLLVAVLTSRATLSTLAVAVNRTVAHHFPRLLYFTGQRGARAPAGMQVVSHGDERPAWLMSETLRHLHTHFGADYDWFFIMQDDTYVQAPRLAALAGHLSINQDLYLGRAEEFIGAGEQARYCHGGFGYLLSRSLLLRLRPHLDGCRGDILSARPDEWLGRCLIDSLGVGCVSQHQGQQYRSFELAKNRDPEKEGSSAFLSAFAVHPVSEGTLMYRLHKRFSALELERAYSEIEQLQAQIRNLTVLTPEGEAGLSWPVGLPAPFTPHSRFEVLGWDYFTEQHTFSCADGAPKCPLQGASRADVGDALETALEQLNRRYQPRLRFQKQRLLNGYRRFDPARGMEYTLDLLLECVTQRGHRRALARRVSLLRPLSRVEILPMPYVTEATRVQLVLPLLVAEAAAAPAFLEAFAANVLEPREHALLTLLLVYGPREGGRGAPDPFLGVKAAAAELERRYPGTRLAWLAVRAEAPSQVRLMDVVSKKHPVDTLFFLTTVWTRPGPEVLNRCRMNAISGWQAFFPVHFQEFNPALSPQRSPPGPPGAGPDPPSPPGADPSRGAPIGGRFDRQASAEGCFYNADYLAARARLAGELAGQEEEEALEGLEVMDVFLRFSGLHLFRAVEPGLVQKFSLRDCSPRLSEELYHRCRLSNLEGLGGRAQLAMALFEQEQANST

SEQ ID NO: 15097 - protein, 764 aa, Homo sapiens
  Payload ID: 2960
  Gene Symbol: CHPF2
  Gene Name: chondroitin polymerizing  factor 2
  ENSP ID: ENSP00000418914
MLSLARPPLPPTGLRTSLSLLRVSWIQGEGEDPCVEAVGERGGPQNPDSRARLDQSDEDFKPRIVPYYRDPNKPYKKVLRTRYIQTELGSRERLLVAVLTSRATLSTLAVAVNRTVAHHFPRLLYFTGQRGARAPAGMQVVSHGDERPAWLMSETLRHLHTHFGADYDWFFIMQDDTYVQAPRLAALAGHLSINQDLYLGRAEEFIGAGEQARYCHGGFGYLLSRSLLLRLRPHLDGCRGDILSARPDEWLGRCLIDSLGVGCVSQHQGQQYRSFELAKNRDPEKEGSSAFLSAFAVHPVSEGTLMYRLHKRFSALELERAYSEIEQLQAQIRNLTVLTPEGEAGLSWPVGLPAPFTPHSRFEVLGWDYFTEQHTFSCADGAPKCPLQGASRADVGDALETALEQLNRRYQPRLRFQKQRLLNGYRRFDPARGMEYTLDLLLECVTQRGHRRALARRVSLLRPLSRVEILPMPYVTEATRVQLVLPLLVAEAAAAPAFLEAFAANVLEPREHALLTLLLVYGPREGGRGAPDPFLGVKAAAAELERRYPGTRLAWLAVRAEAPSQVRLMDVVSKKHPVDTLFFLTTVWTRPGPEVLNRCRMNAISGWQAFFPVHFQEFNPALSPQRSPPGPPGAGPDPPSPPGADPSRGAPIGGRFDRQASAEGCFYNADYLAARARLAGELAGQEEEEALEGLEVMDVFLRFSGLHLFRAVEPGLVQKFSLRDCSPRLSEELYHRCRLSNLEGLGGRAQLAMALFEQEQANST

SEQ ID NO: 15098 - protein, 90 aa, Homo sapiens
  Payload ID: 2960
  Gene Symbol: CHPF2
  Gene Name: chondroitin polymerizing  factor 2
  ENSP ID: ENSP00000419769
MLSLARPPLPPTGLRTRTRYIQTELGSRERLLVAVLTSRATLSTLAVAVNRTVAHHFPRLLYFTGQRGARAPAGMQVVSHGDERPAWLMS

SEQ ID NO: 15099 - protein, 123 aa, Homo sapiens
  Payload ID: 2960
  Gene Symbol: CHPF2
  Gene Name: chondroitin polymerizing  factor 2
  ENSP ID: ENSP00000420204
CHGGFGYLLSRSLLLRLRPHLDGCRGDILSARPDEWLGRCLIDSLGVGCVSQHQGQQYRSFELAKNRDPEKEGSSAFLSAFAVHPVSEGTLMYRLHKRFSALELERAYSEIEQLQNCPKKAQG

SEQ ID NO: 15100 - protein, 532 aa, Homo sapiens
  Payload ID: 2961
  Gene Symbol: CSGALNACT1
  Gene Name: chondroitin sulfate N-acetylgalactosaminyltransferase 1
  Uniprot ID: Q8TDX6
  ENSP ID: ENSP00000330805
MMMVRRGLLAWISRVVVLLVLLCCAISVLYMLACTPKGDEEQLALPRANSPTGKEGYQAVLQEWEEQHRNYVSSLKRQIAQLKEELQERSEQLRNGQYQASDAAGLGLDRSPPEKTQADLLAFLHSQVDKAEVNAGVKLATEYAAVPFDSFTLQKVYQLETGLTRHPEEKPVRKDKRDELVEAIESALETLNSPAENSPNHRPYTASDFIEGIYRTERDKGTLYELTFKGDHKHEFKRLILFRPFGPIMKVKNEKLNMANTLINVIVPLAKRVDKFRQFMQNFREMCIEQDGRVHLTVVYFGKEEINEVKGILENTSKAANFRNFTFIQLNGEFSRGKGLDVGARFWKGSNVLLFFCDVDIYFTSEFLNTCRLNTQPGKKVFYPVLFSQYNPGIIYGHHDAVPPLEQQLVIKKETGFWRDFGFGMTCQYRSDFINIGGFDLDIKGWGGEDVHLYRKYLHSNLIVVRTPVRGLFHLWHEKRCMDELTPEQYKMCMQSKAMNEASHGQLGMLVFRHEIEAHLRKQKQKTSSKKT

SEQ ID NO: 15101 - protein, 297 aa, Homo sapiens
  Payload ID: 2961
  Gene Symbol: CSGALNACT1
  Gene Name: chondroitin sulfate N-acetylgalactosaminyltransferase 1
  Uniprot ID: Q8TDX6
  ENSP ID: ENSP00000381084
MMMVRRGLLAWISRVVVLLVLLCCAISVLYMLACTPKGDEEQLALPRANSPTGKEGYQAVLQEWEEQHRNYVSSLKRQIAQLKEELQERSEQLRNGQYQASDAAGLGLDRSPPEKTQADLLAFLHSQVDKAEVNAGVKLATEYAAVPFDSFTLQKVYQLETGLTRHPEEKPVRKDKRDELVEAIESALETLNSPAENSPNHRPYTASDFIEGIYRTERDKGTLYELTFKGDHKHEFKRLILFRPFGPIMKVKNEKLNMANTLINVIVPLAKRVDKFRQFMQNFRPADEVFRCVPLSP

SEQ ID NO: 15102 - protein, 532 aa, Homo sapiens; identical to SEQ ID NO: 15100
  Payload ID: 2961
  Gene Symbol: CSGALNACT1
  Gene Name: chondroitin sulfate N-acetylgalactosaminyltransferase 1
  Uniprot ID: Q8TDX6
  ENSP ID: ENSP00000411816

SEQ ID NO: 15103 - protein, 14 aa, Homo sapiens
  Payload ID: 2961
  Gene Symbol: CSGALNACT1
  Gene Name: chondroitin sulfate N-acetylgalactosaminyltransferase 1
  ENSP ID: ENSP00000427740
MMMVRRGLLAWISR

SEQ ID NO: 15104 - protein, 104 aa, Homo sapiens
  Payload ID: 2961
  Gene Symbol: CSGALNACT1
  Gene Name: chondroitin sulfate N-acetylgalactosaminyltransferase 1
  ENSP ID: ENSP00000428089
MMMVRRGLLAWISRVVVLLVLLCCAISVLYMLACTPKGDEEQLALPRANSPTGKEGYQAVLQEWEEQHRNYVSSLKRQIAQLKEELQERSEQLRNGQYQASDAA

SEQ ID NO: 15105 - protein, 297 aa, Homo sapiens; identical to SEQ ID NO: 15101
  Payload ID: 2961
  Gene Symbol: CSGALNACT1
  Gene Name: chondroitin sulfate N-acetylgalactosaminyltransferase 1
  Uniprot ID: Q8TDX6
  ENSP ID: ENSP00000428216

SEQ ID NO: 15106 - protein, 53 aa, Homo sapiens
  Payload ID: 2961
  Gene Symbol: CSGALNACT1
  Gene Name: chondroitin sulfate N-acetylgalactosaminyltransferase 1
  ENSP ID: ENSP00000428774
MMMVRRGLLAWISRVVVLLVLLCCAISVLYMLACTPKGDEEQLALPRANSPTG

SEQ ID NO: 15107 - protein, 96 aa, Homo sapiens
  Payload ID: 2961
  Gene Symbol: CSGALNACT1
  Gene Name: chondroitin sulfate N-acetylgalactosaminyltransferase 1
  ENSP ID: ENSP00000429130
MMMVRRGLLAWISRVVVLLVLLCCAISVLYMLACTPKGDEEQLALPRANSPTGKEGYQAVLQEWEEQHRNYVSSLKRQIAQLKEELQERSEQLRNG

SEQ ID NO: 15108 - protein, 532 aa, Homo sapiens; identical to SEQ ID NO: 15100
  Payload ID: 2961
  Gene Symbol: CSGALNACT1
  Gene Name: chondroitin sulfate N-acetylgalactosaminyltransferase 1
  Uniprot ID: Q8TDX6
  ENSP ID: ENSP00000429809

SEQ ID NO: 15109 - protein, 542 aa, Homo sapiens
  Payload ID: 2962
  Gene Symbol: CSGALNACT2
  Gene Name: chondroitin sulfate N-acetylgalactosaminyltransferase 2
  Uniprot ID: Q8N6G5
  ENSP ID: ENSP00000363590
MPRRGLILHTRTHWLLLGLALLCSLVLFMYLLECAPQTDGNASLPGVVGENYGKEYYQALLQEQEEHYQTRATSLKRQIAQLKQELQEMSEKMRSLQERRNVGANGIGYQSNKEQAPSDLLEFLHSQIDKAEVSIGAKLPSEYGVIPFESFTLMKVFQLEMGLTRHPEEKPVRKDKRDELVEVIEAGLEVINNPDEDDEQEDEEGPLGEKLIFNENDFVEGYYRTERDKGTQYELFFKKADLTEYRHVTLFRPFGPLMKVKSEMIDITRSIINIIVPLAERTEAFVQFMQNFRDVCIHQDKKIHLTVVYFGKEGLSKVKSILESVTSESNFHNYTLVSLNEEFNRGRGLNVGARAWDKGEVLMFFCDVDIYFSAEFLNSCRLNAEPGKKVFYPVVFSLYNPAIVYANQEVPPPVEQQLVHKKDSGFWRDFGFGMTCQYRSDFLTIGGFDMEVKGWGGEDVHLYRKYLHGDLIVIRTPVPGLFHLWHEKRCADELTPEQYRMCIQSKAMNEASHSHLGMLVFREEIETHLHKQAYRTNSEAVG

SEQ ID NO: 15110 - protein, 2322 aa, Homo sapiens
  Payload ID: 2963
  Gene Symbol: CSPG4
  Gene Name: chondroitin sulfate proteoglycan 4
  Uniprot ID: Q6UVK1
  ENSP ID: ENSP00000312506
MQSGPRPPLPAPGLALALTLTMLARLASAASFFGENHLEVPVATALTDIDLQLQFSTSQPEALLLLAAGPADHLLLQLYSGRLQVRLVLGQEELRLQTPAETLLSDSIPHTVVLTVVEGWATLSVDGFLNASSAVPGAPLEVPYGLFVGGTGTLGLPYLRGTSRPLRGCLHAATLNGRSLLRPLTPDVHEGCAEEFSASDDVALGFSGPHSLAAFPAWGTQDEGTLEFTLTTQSRQAPLAFQAGGRRGDFIYVDIFEGHLRAVVEKGQGTVLLHNSVPVADGQPHEVSVHINAHRLEISVDQYPTHTSNRGVLSYLEPRGSLLLGGLDAEASRHLQEHRLGLTPEATNASLLGCMEDLSVNGQRRGLREALLTRNMAAGCRLEEEEYEDDAYGHYEAFSTLAPEAWPAMELPEPCVPEPGLPPVFANFTQLLTISPLVVAEGGTAWLEWRHVQPTLDLMEAELRKSQVLFSVTRGARHGELELDIPGAQARKMFTLLDVVNRKARFIHDGSEDTSDQLVLEVSVTARVPMPSCLRRGQTYLLPIQVNPVNDPPHIIFPHGSLMVILEHTQKPLGPEVFQAYDPDSACEGLTFQVLGTSSGLPVERRDQPGEPATEFSCRELEAGSLVYVHRGGPAQDLTFRVSDGLQASPPATLKVVAIRPAIQIHRSTGLRLAQGSAMPILPANLSVETNAVGQDVSVLFRVTGALQFGELQKQGAGGVEGAEWWATQAFHQRDVEQGRVRYLSTDPQHHAYDTVENLALEVQVGQEILSNLSFPVTIQRATVWMLRLEPLHTQNTQQETLTTAHLEATLEEAGPSPPTFHYEVVQAPRKGNLQLQGTRLSDGQGFTQDDIQAGRVTYGATARASEAVEDTFRFRVTAPPYFSPLYTFPIHIGGDPDAPVLTNVLLVVPEGGEGVLSADHLFVKSLNSASYLYEVMERPRHGRLAWRGTQDKTTMVTSFTNEDLLRGRLVYQHDDSETTEDDIPFVATRQGESSGDMAWEEVRGVFRVAIQPVNDHAPVQTISRIFHVARGGRRLLTTDDVAFSDADSGFADAQLVLTRKDLLFGSIVAVDEPTRPIYRFTQEDLRKRRVLFVHSGADRGWIQLQVSDGQHQATALLEVQASEPYLRVANGSSLVVPQGGQGTIDTAVLHLDTNLDIRSGDEVHYHVTAGPRWGQLVRAGQPATAFSQQDLLDGAVLYSHNGSLSPRDTMAFSVEAGPVHTDATLQVTIALEGPLAPLKLVRHKKIYVFQGEAAEIRRDQLEAAQEAVPPADIVFSVKSPPSAGYLVMVSRGALADEPPSLDPVQSFSQEAVDTGRVLYLHSRPEAWSDAFSLDVASGLGAPLEGVLVELEVLPAAIPLEAQNFSVPEGGSLTLAPPLLRVSGPYFPTLLGLSLQVLEPPQHGALQKEDGPQARTLSAFSWRMVEEQLIRYVHDGSETLTDSFVLMANASEMDRQSHPVAFTVTVLPVNDQPPILTTNTGLQMWEGATAPIPAEALRSTDGDSGSEDLVYTIEQPSNGRVVLRGAPGTEVRSFTQAQLDGGLVLFSHRGTLDGGFRFRLSDGEHTSPGHFFRVTAQKQVLLSLKGSQTLTVCPGSVQPLSSQTLRASSSAGTDPQLLLYRVVRGPQLGRLFHAQQDSTGEALVNFTQAEVYAGNILYEHEMPPEPFWEAHDTLELQLSSPPARDVAATLAVAVSFEAACPQRPSHLWKNKGLWVPEGQRARITVAALDASNLLASVPSPQRSEHDVLFQVTQFPSRGQLLVSEEPLHAGQPHFLQSQLAAGQLVYAHGGGGTQQDGFHFRAHLQGPAGASVAGPQTSEAFAITVRDVNERPPQPQASVPLRLTRGSRAPISRAQLSVVDPDSAPGEIEYEVQRAPHNGFLSLVGGGLGPVTRFTQADVDSGRLAFVANGSSVAGIFQLSMSDGASPPLPMSLAVDILPSAIEVQLRAPLEVPQALGRSSLSQQQLRVVSDREEPEAAYRLIQGPQYGHLLVGGRPTSAFSQFQIDQGEVVFAFTNFSSSHDHFRVLALARGVNASAVVNVTVRALLHVWAGGPWPQGATLRLDPTVLDAGELANRTGSVPRFRLLEGPRHGRVVRVPRARTEPGGSQLVEQFTQQDLEDGRLGLEVGRPEGRAPGPAGDSLTLELWAQGVPPAVASLDFATEPYNAARPYSVALLSVPEAARTEAGKPESSTPTGEPGPMASSPEPAVAKGGFLSFLEANMFSVIIPMCLVLLLLALILPLLFYLRKRNKTGKHDVQVLTAKPRNGLAGDTETFRKVEPGQAIPLTAVPGQGPPPGGQPDPELLQFCRTPNPALKNGQYWV

SEQ ID NO: 15111 - protein, 539 aa, Homo sapiens
  Payload ID: 2964
  Gene Symbol: CSPG5
  Gene Name: chondroitin sulfate proteoglycan 5 (neuroglycan C)
  Uniprot ID: O95196
  ENSP ID: ENSP00000264723
MGRAGGGGPGRGPPPLLLFLGAALVLASGAVPAREAGSAVEAEELVKGSPAWEPPANDTREEAGPPAAGEDEASWTAPGGELAGPEEVLQESAAVTGTAWLEADSPGLGGVTAEAGSGDAQALPATLQAPHEVLGQSIMPPAIPEATEASGPPSPTPGDKLSPASELPKESPLEVWLNLGGSTPDPQGPELTYPFQGTLEPQPASDIIDIDYFEGLDGEGRGADLGSFPGSPGTSENHPDTEGETPSWSLLDLYDDFTPFDESDFYPTTSFYDDLDEEEEEEEDDKDAVGGGDLEDENELLVPTGKPGLGPGTGQPTSRWHAVPPQHTLGSVPGSSIALRPRPGEPGRDLASSENGTECRSGFVRHNGSCRSVCDLFPSYCHNGGQCYLVENIGAFCRCNTQDYIWHKGMRCESIITDFQVMCVAVGSAALVLLLLFMMTVFFAKKLYLLKTENTKLRRTNKFRTPSELHNDNFSLSTIAEGSHPNDDPSAPHKIQEVLKSCLKEEESFNIQNSMSPKLEGGKGDQADLDVNCLQNNLT

SEQ ID NO: 15112 - protein, 566 aa, Homo sapiens
  Payload ID: 2964
  Gene Symbol: CSPG5
  Gene Name: chondroitin sulfate proteoglycan 5 (neuroglycan C)
  Uniprot ID: O95196
  ENSP ID: ENSP00000373244
MGRAGGGGPGRGPPPLLLFLGAALVLASGAVPAREAGSAVEAEELVKGSPAWEPPANDTREEAGPPAAGEDEASWTAPGGELAGPEEVLQESAAVTGTAWLEADSPGLGGVTAEAGSGDAQALPATLQAPHEVLGQSIMPPAIPEATEASGPPSPTPGDKLSPASELPKESPLEVWLNLGGSTPDPQGPELTYPFQGTLEPQPASDIIDIDYFEGLDGEGRGADLGSFPGSPGTSENHPDTEGETPSWSLLDLYDDFTPFDESDFYPTTSFYDDLDEEEEEEEDDKDAVGGGDLEDENELLVPTGKPGLGPGTGQPTSRWHAVPPQHTLGSVPGSSIALRPRPGEPGRDLASSENGTECRSGFVRHNGSCRSVCDLFPSYCHNGGQCYLVENIGAFCRCNTQDYIWHKGMRCESIITDFQVMCVAVGSAALVLLLLFMMTVFFAKKLYLLKTENTKLRRTNKFRTPSELHNDNFSLSTIAEGSHPNVRKLCNTPRTSSPHARALAHYDNVICQDDPSAPHKIQEVLKSCLKEEESFNIQNSMSPKLEGGKGDQADLDVNCLQNNLT

SEQ ID NO: 15113 - protein, 401 aa, Homo sapiens
  Payload ID: 2964
  Gene Symbol: CSPG5
  Gene Name: chondroitin sulfate proteoglycan 5 (neuroglycan C)
  Uniprot ID: O95196
  ENSP ID: ENSP00000392096
MPPAIPEATEASGPPSPTPGDKLSPASELPKESPLEVWLNLGGSTPDPQGPELTYPFQGTLEPQPASDIIDIDYFEGLDGEGRGADLGSFPGSPGTSENHPDTEGETPSWSLLDLYDDFTPFDESDFYPTTSFYDDLDEEEEEEEDDKDAVGGGDLEDENELLVPTGKPGLGPGTGQPTSRWHAVPPQHTLGSVPGSSIALRPRPGEPGRDLASSENGTECRSGFVRHNGSCRSVCDLFPSYCHNGGQCYLVENIGAFCRCNTQDYIWHKGMRCESIITDFQVMCVAVGSAALVLLLLFMMTVFFAKKLYLLKTENTKLRRTNKFRTPSELHNDNFSLSTIAEGSHPNDDPSAPHKIQEVLKSCLKEEESFNIQNSMSPKLEGGKGDQADLDVNCLQNNLT

SEQ ID NO: 15114 - protein, 477 aa, Homo sapiens
  Payload ID: 2964
  Gene Symbol: CSPG5
  Gene Name: chondroitin sulfate proteoglycan 5 (neuroglycan C)
  ENSP ID: ENSP00000478923
MGRAGGGGPGRGPPPLLLFLGAALVLASGAVPAREAGSAVEAEELVKGSPAWEPPANDTREEAGPPAAGEDEASWTAPGGELAGPEEVLQESAAVTGTAWLEADSPGLGGVTAEAGSGDAQALPATLQAPHEVLGQSIMPPAIPEATEASGPPSPTPGDKLSPASELPKESPLEVWLNLGGSTPDPQGPELTYPFQGTLEPQPASDIIDIDYFEGLDGEGRGADLGSFPGSPGTSENHPDTEGETPSWSLLDLYDDFTPFDESDFYPTTSFYDDLDEEEEEEEDDKDAVGGGDLEDENELLVPTGKPGLGPGTGQPTSRWHAVPPQHTLGSVPGSSIALRPRPGEPGRDLASSENGTECRSGFVRHNGSCRSVCDLFPSYCHNGGQCYLVENIGAFCRCNTQDYIWHKGMRCESIITDFQVMCVAVGSAALVLLLLFMMTVFFAKKLYLLKTENTKLRRTKMILVLPTKSRRFSSPA

SEQ ID NO: 15115 - protein, 802 aa, Homo sapiens
  Payload ID: 2965
  Gene Symbol: CHSY1
  Gene Name: chondroitin sulfate synthase 1
  Uniprot ID: Q86X52
  ENSP ID: ENSP00000254190
MAARGRRAWLSVLLGLVLGFVLASRLVLPRASELKRAGPRRRASPEGCRSGQAAASQAGGARGDARGAQLWPPGSDPDGGPRDRNFLFVGVMTAQKYLQTRAVAAYRTWSKTIPGKVQFFSSEGSDTSVPIPVVPLRGVDDSYPPQKKSFMMLKYMHDHYLDKYEWFMRADDDVYIKGDRLENFLRSLNSSEPLFLGQTGLGTTEEMGKLALEPGENFCMGGPGVIMSREVLRRMVPHIGKCLREMYTTHEDVEVGRCVRRFAGVQCVWSYEMQQLFYENYEQNKKGYIRDLHNSKIHQAITLHPNKNPPYQYRLHSYMLSRKISELRHRTIQLHREIVLMSKYSNTEIHKEDLQLGIPPSFMRFQPRQREEILEWEFLTGKYLYSAVDGQPPRRGMDSAQREALDDIVMQVMEMINANAKTRGRIIDFKEIQYGYRRVNPMYGAEYILDLLLLYKKHKGKKMTVPVRRHAYLQQTFSKIQFVEHEELDAQELAKRINQESGSLSFLSNSLKKLVPFQLPGSKSEHKEPKDKKINILIPLSGRFDMFVRFMGNFEKTCLIPNQNVKLVVLLFNSDSNPDKAKQVELMRDYRIKYPKADMQILPVSGEFSRALALEVGSSQFNNESLLFFCDVDLVFTTEFLQRCRANTVLGQQIYFPIIFSQYDPKIVYSGKVPSDNHFAFTQKTGFWRNYGFGITCIYKGDLVRVGGFDVSIQGWGLEDVDLFNKVVQAGLKTFRSQEVGVVHVHHPVFCDPNLDPKQYKMCLGSKASTYGSTQQLAEMWLEKNDPSYSKSSNNNGSVRTA

SEQ ID NO: 15116 - protein, 882 aa, Homo sapiens
  Payload ID: 2966
  Gene Symbol: CHSY3
  Gene Name: chondroitin sulfate synthase 3
  Uniprot ID: Q70JA7
  ENSP ID: ENSP00000302629
MAVRSRRPWMSVALGLVLGFTAASWLIAPRVAELSERKRRGSSLCSYYGRSAAGPRAGAQQPLPQPQSRPRQEQSPPPARQDLQGPPLPEAAPGITSFRSSPWQQPPPLQQRRRGREPEGATGLPGAPAAEGEPEEEDGGAAGQRRDGRPGSSHNGSGDGGAAAPSARPRDFLYVGVMTAQKYLGSRALAAQRTWARFIPGRVEFFSSQQPPNAGQPPPPLPVIALPGVDDSYPPQKKSFMMIKYMHDHYLDKYEWFMRADDDVYIKGDKLEEFLRSLNSSKPLYLGQTGLGNIEELGKLGLEPGENFCMGGPGMIFSREVLRRMVPHIGECLREMYTTHEDVEVGRCVRRFGGTQCVWSYEMQQLFHENYEHNRKGYIQDLHNSKIHAAITLHPNKRPAYQYRLHNYMLSRKISELRYRTIQLHRESALMSKLSNTEVSKEDQQLGVIPSFNHFQPRERNEVIEWEFLTGKLLYSAAENQPPRQSLSSILRTALDDTVLQVMEMINENAKSRGRLIDFKEIQYGYRRVNPMHGVEYILDLLLLYKRHKGRKLTVPVRRHAYLQQLFSKPFFRETEELDVNSLVESINSETQSFSFISNSLKILSSFQGAKEMGGHNEKKVHILVPLIGRYDIFLRFMENFENMCLIPKQNVKLVIILFSRDSGQDSSKHIELIKGYQNKYPKAEMTLIPMKGEFSRGLGLEMASAQFDNDTLLLFCDVDLIFREDFLQRCRDNTIQGQQVYYPIIFSQYDPKVTNGGNPPTDDYFIFSKKTGFWRDYGYGITCIYKSDLLGAGGFDTSIQGWGLEDVDLYNKVILSGLRPFRSQEVGVVHIFHPVHCDPNLDPKQYKMCLGSKASTFASTMQLAELWLEKHLGVRYNRTLS

SEQ ID NO: 15117 - protein, 273 aa, Homo sapiens
  Payload ID: 2967
  Gene Symbol: CHODL
  Gene Name: chondrolectin
  Uniprot ID: Q9H9P2
  ENSP ID: ENSP00000299295
MSRVVSLLLGAALLCGHGAFCRRVVSGQKVCFADFKHPCYKMAYFHELSSRVSFQEARLACESEGGVLLSLENEAEQKLIESMLQNLTKPGTGISDGDFWIGLWRNGDGQTSGACPDLYQWSDGSNSQYRNWYTDEPSCGSEKCVVMYHQPTANPGLGGPYLYQWNDDRCNMKHNYICKYEPEINPTAPVEKPYLTNQPGDTHQNVVVTEAGIIPNLIYVVIPTIPLLLLILVAFGTCCFQMLHKSKGRTKTSPNQSTLWISKSTRKESGMEV

SEQ ID NO: 15118 - protein, 236 aa, Homo sapiens
  Payload ID: 2967
  Gene Symbol: CHODL
  Gene Name: chondrolectin
  ENSP ID: ENSP00000339975
MAYFHELSSRVSFQEARLACESEGGVLLSLENEAEQKLIESMLQNLTKPGTGISDGDFWIGLWRNGDGQTSGACPDLYQWSDGSNSQYRNWYTDEPSCGSEKCVVMYHQPTANPGLGGPYLYQWNDDRCNMKHNYICKYEPEINPTAPVEKPYLTNQPGDTHQNVVVTEAVKEEQKLVQTSLHCGFQRVPEKKVAWKYNNSLTWFQNFVILDLYKEWHQNNSLEWLEITKDLQDEL

SEQ ID NO: 15119 - protein, 232 aa, Homo sapiens
  Payload ID: 2967
  Gene Symbol: CHODL
  Gene Name: chondrolectin
  Uniprot ID: Q9H9P2
  ENSP ID: ENSP00000382992
MAYFHELSSRVSFQEARLACESEGGVLLSLENEAEQKLIESMLQNLTKPGTGISDGDFWIGLWRNGDGQTSGACPDLYQWSDGSNSQYRNWYTDEPSCGSEKCVVMYHQPTANPGLGGPYLYQWNDDRCNMKHNYICKYEPEINPTAPVEKPYLTNQPGDTHQNVVVTEAGIIPNLIYVVIPTIPLLLLILVAFGTCCFQMLHKSKGRTKTSPNQSTLWISKSTRKESGMEV

SEQ ID NO: 15120 - protein, 232 aa, Homo sapiens; identical to SEQ ID NO: 15119
  Payload ID: 2967
  Gene Symbol: CHODL
  Gene Name: chondrolectin
  Uniprot ID: Q9H9P2
  ENSP ID: ENSP00000382993

SEQ ID NO: 15121 - protein, 236 aa, Homo sapiens; identical to SEQ ID NO: 15118
  Payload ID: 2967
  Gene Symbol: CHODL
  Gene Name: chondrolectin
  ENSP ID: ENSP00000382996

SEQ ID NO: 15122 - protein, 236 aa, Homo sapiens; identical to SEQ ID NO: 15118
  Payload ID: 2967
  Gene Symbol: CHODL
  Gene Name: chondrolectin
  ENSP ID: ENSP00000383001

SEQ ID NO: 15123 - protein, 254 aa, Homo sapiens
  Payload ID: 2967
  Gene Symbol: CHODL
  Gene Name: chondrolectin
  Uniprot ID: Q9H9P2
  ENSP ID: ENSP00000443566
MTAGSAHSQKVCFADFKHPCYKMAYFHELSSRVSFQEARLACESEGGVLLSLENEAEQKLIESMLQNLTKPGTGISDGDFWIGLWRNGDGQTSGACPDLYQWSDGSNSQYRNWYTDEPSCGSEKCVVMYHQPTANPGLGGPYLYQWNDDRCNMKHNYICKYEPEINPTAPVEKPYLTNQPGDTHQNVVVTEAGIIPNLIYVVIPTIPLLLLILVAFGTCCFQMLHKSKGRTKTSPNQSTLWISKSTRKESGMEV

SEQ ID NO: 15124 - protein, 27 aa, Homo sapiens
  Payload ID: 2968
  Gene Symbol: CSAG1
  Gene Name: chondrosarcoma associated gene 1
  ENSP ID: ENSP00000354898
MSATTVSSLLACLHCPGGSSGRPGGLE

SEQ ID NO: 15125 - protein, 78 aa, Homo sapiens
  Payload ID: 2968
  Gene Symbol: CSAG1
  Gene Name: chondrosarcoma associated gene 1
  ENSP ID: ENSP00000359310
MSATTACWPAFTVLGEARGDQVDWSRLYRDTGLVKMSRKPRASSPFSNNHPSTPKRFPRQPRREKGPVKEVPGTKGSP

SEQ ID NO: 15126 - protein, 73 aa, Homo sapiens
  Payload ID: 2968
  Gene Symbol: CSAG1
  Gene Name: chondrosarcoma associated gene 1
  Uniprot ID: Q6PB30
  ENSP ID: ENSP00000359314
MSATTACWPAFTVLGEARGDQVDWSRLYRDTGLVKMSRKPRASSPFSNNHPSTPKRRGRGKHPLIPGPEALSK

SEQ ID NO: 15127 - protein, 78 aa, Homo sapiens; identical to SEQ ID NO: 15125
  Payload ID: 2968
  Gene Symbol: CSAG1
  Gene Name: chondrosarcoma associated gene 1
  ENSP ID: ENSP00000396520

SEQ ID NO: 15128 - protein, 955 aa, Homo sapiens
  Payload ID: 2969
  Gene Symbol: CHRD
  Gene Name: chordin
  Uniprot ID: Q9H2X0
  ENSP ID: ENSP00000204604
MPSLPAPPAPLLLLGLLLLGSRPARGAGPEPPVLPIRSEKEPLPVRGAAGCTFGGKVYALDETWHPDLGEPFGVMRCVLCACEAPQWGRRTRGPGRVSCKNIKPECPTPACGQPRQLPGHCCQTCPQERSSSERQPSGLSFEYPRDPEHRSYSDRGEPGAEERARGDGHTDFVALLTGPRSQAVARARVSLLRSSLRFSISYRRLDRPTRIRFSDSNGSVLFEHPAAPTQDGLVCGVWRAVPRLSLRLLRAEQLHVALVTLTHPSGEVWGPLIRHRALAAETFSAILTLEGPPQQGVGGITLLTLSDTEDSLHFLLLFRGLLEPRSGGLTQVPLRLQILHQGQLLRELQANVSAQEPGFAEVLPNLTVQEMDWLVLGELQMALEWAGRPGLRISGHIAARKSCDVLQSVLCGADALIPVQTGAAGSASLTLLGNGSLIYQVQVVGTSSEVVAMTLETKPQRRDQRTVLCHMAGLQPGGHTAVGICPGLGARGAHMLLQNELFLNVGTKDFPDGELRGHVAALPYCGHSARHDTLPVPLAGALVLPPVKSQAAGHAWLSLDTHCHLHYEVLLAGLGGSEQGTVTAHLLGPPGTPGPRRLLKGFYGSEAQGVVKDLEPELLRHLAKGMASLMITTKGSPRGELRGQVHIANQCEVGGLRLEAAGAEGVRALGAPDTASAAPPVVPGLPALAPAKPGGPGRPRDPNTCFFEGQQRPHGARWAPNYDPLCSLCTCQRRTVICDPVVCPPPSCPHPVQAPDQCCPVCPEKQDVRDLPGLPRSRDPGEGCYFDGDRSWRAAGTRWHPVVPPFGLIKCAVCTCKGGTGEVHCEKVQCPRLACAQPVRVNPTDCCKQCPVGSGAHPQLGDPMQADGPRGCRFAGQWFPESQSWHPSVPPFGEMSCITCRCGAGVPHCERDDCSLPLSCGSGKESRCCSRCTAHRRPAPETRTDPELEKEAEGS

SEQ ID NO: 15129 - protein, 915 aa, Homo sapiens
  Payload ID: 2969
  Gene Symbol: CHRD
  Gene Name: chordin
  Uniprot ID: Q9H2X0
  ENSP ID: ENSP00000334036
MPSLPAPPAPLLLLGLLLLGSRPARGAGPEPPVLPIRSEKEPLPVRGAAGCTFGGKVYALDETWHPDLGEPFGVMRCVLCACEAPQWGRRTRGPGRVSCKNIKPECPTPACGQPRQLPGHCCQTCPQERSSSERQPSGLSFEYPRDPEHRSYSDRGEPGAEERARGDGHTDFVALLTGPRSQAVARARVSLLRSSLRFSISYRRLDRPTRIRFSDSNGSVLFEHPAAPTQDGLVCGVWRAVPRLSLRLLRAEQLHVALVTLTHPSGEVWGPLIRHRALAAETFSAILTLEGPPQQGVGGITLLTLSDTEDSLHFLLLFRGLLEPRSGGLTQVPLRLQILHQGQLLRELQANVSAQEPGFAEVLPNLTVQEMDWLVLGELQMALEWAGRPGLRISGHIAARKSCDVLQSVLCGADALIPVQTGAAGSASLTLLGNGSLIYQAVGICPGLGARGAHMLLQNELFLNVGTKDFPDGELRGHVAALPYCGHSARHDTLPVPLAGALVLPPVKSQAAGHAWLSLDTHCHLHYEVLLAGLGGSEQGTVTAHLLGPPGTPGPRRLLKGFYGSEAQGVVKDLEPELLRHLAKGMASLMITTKGSPRGELRGQVHIANQCEVGGLRLEAAGAEGVRALGAPDTASAAPPVVPGLPALAPAKPGGPGRPRDPNTCFFEGQQRPHGARWAPNYDPLCSLCTCQRRTVICDPVVCPPPSCPHPVQAPDQCCPVCPEKQDVRDLPGLPRSRDPGEGCYFDGDRSWRAAGTRWHPVVPPFGLIKCAVCTCKGGTGEVHCEKVQCPRLACAQPVRVNPTDCCKQCPVGSGAHPQLGDPMQADGPRGCRFAGQWFPESQSWHPSVPPFGEMSCITCRCGAGVPHCERDDCSLPLSCGSGKESRCCSRCTAHRRPAPETRTDPELEKEAEGS

SEQ ID NO: 15130 - protein, 86 aa, Homo sapiens
  Payload ID: 2969
  Gene Symbol: CHRD
  Gene Name: chordin
  Uniprot ID: Q9H2X0
  ENSP ID: ENSP00000348930
MPSLPAPPAPLLLLGLLLLGSRPARGAGPEPPVLPIRSEKEPLPVRGAAGCTFGGKVYALDETWHPDLGEPFGVMRCVLCACEAGP

SEQ ID NO: 15131 - protein, 350 aa, Homo sapiens
  Payload ID: 2969
  Gene Symbol: CHRD
  Gene Name: chordin
  Uniprot ID: Q9H2X0
  ENSP ID: ENSP00000392794
MPSLPAPPAPLLLLGLLLLGSRPARGAGPEPPVLPIRSEKEPLPVRGAAGCTFGGKVYALDETWHPDLGEPFGVMRCVLCACEAPQWGRRTRGPGRVSCKNIKPECPTPACGQPRQLPGHCCQTCPQERSSSERQPSGLSFEYPRDPEHRSYSDRGEPGAEERARGDGHTDFVALLTGPRSQAVARARVSLLRSSLRFSISYRRLDRPTRIRFSDSNGSVLFEHPAAPTQDGLVCGVWRAVPRLSLRLLRAEQLHVALVTLTHPSGEVWGPLIRHRALAAETFSAILTLEGPPQQGVGGITLLTLSDTEDSLHFLLLFRGLLEPRSGDSTPGAATARTSGQCLSPGTRLC

SEQ ID NO: 15132 - protein, 94 aa, Homo sapiens
  Payload ID: 2969
  Gene Symbol: CHRD
  Gene Name: chordin
  Uniprot ID: Q9H2X0
  ENSP ID: ENSP00000408624
MPSLPAPPAPLLLLGLLLLGSRPARGAGPEPPVLPIRSEKEPLPVRGAAGCTFGGKVYALDETWHPDLGEPFGVMRCVLCACEATGTLRPREMK

SEQ ID NO: 15133 - protein, 954 aa, Homo sapiens
  Payload ID: 2969
  Gene Symbol: CHRD
  Gene Name: chordin
  ENSP ID: ENSP00000408972
MPSLPAPPAPLLLLGLLLLGSRPARGAGPEPPVLPIRSEKEPLPVRGAAGCTFGGKVYALDETWHPDLGEPFGVMRCVLCACEAPQWGRRTRGPGRVSCKNIKPECPTPACGQPRQLPGHCCQTCPQERSSSERQPSGLSFEYPRDPEHRSYSDRGEPGAEERARGDGHTDFVALLTGPRSQAVARARVSLLRSSLRFSISYRRLDRPTRIRFSDSNGSVLFEHPAAPTQDGLVCGVWRAVPRLSLRLLRAEQLHVALVTLTHPSGEVWGPLIRHRALAAETFSAILTLEGPPQQGVGGITLLTLSDTEDSLHFLLLFRGLLEPRSGGLTQVPLRLQILHQGQLLRELQANVSAQEPGFAEVLPNLTVQEMDWLVLGELQMALEWAGRPGLRISGHIAARKSCDVLQSVLCGADALIPVQTGAAGSASLTLLGNGSLIYQVQVVGTSSEVVAMTLETKPQRRDQRTVLCHMAGLQPGGHTAVGICPGLGARGAHMLLQNELFLNVGTKDFPDGELRGHVAALPYCGHSARHDTLPVPLAGALVLPPVKSQAAGHAWLSLDTHCHLHYEVLLAGLGGSEQGTVTAHLLGPPGTPGPRRLLKGFYGSEAQGVVKDLEPELLRHLAKGMASLMITTKGSPRGELRGQVHIANQCEVGGLRLEAAGAEGVRALGAPDTASAAPPVVPGLPALAPAKPGGPGRPRDPNTCFFEGQQRPHGARWAPNYDPLCSLCTCQRRTVICDPVVCPPPSCPHPVQAPDQCCPVCPEKQDVRDLPGLPRSRDPGEGCYFDGDRSWRAAGTRWHPVVPPFGLIKCAVCTCKGGTGEVHCEKVQCPRLACAQPVRVNPTDCCKQCPVGSGAHPQLGDPMQADGPRGCRFAGQWFPESQSWHPSVPPFGEMSCITCRCGAGVPHCERDDCSLPLSCGSGKESRCCSRCTAHRRPPETRTDPELEKEAEGS

SEQ ID NO: 15134 - protein, 458 aa, Homo sapiens
  Payload ID: 2970
  Gene Symbol: CHRDL1
  Gene Name: chordin-like 1
  Uniprot ID: Q9BU40
  ENSP ID: ENSP00000361112
MRKKWKMGGMKYIFSLLFFLLLEGGKTEQVKHSETYCMFQDKKYRVGERWHPYLEPYGLVYCVNCICSENGNVLCSRVRCPNVHCLSPVHIPHLCCPRCPEDSLPPVNNKVTSKSCEYNGTTYQHGELFVAEGLFQNRQPNQCTQCSCSEGNVYCGLKTCPKLTCAFPVSVPDSCCRVCRGDGELSWEHSDGDIFRQPANREARHSYHRSHYDPPPSRQAGGLSRFPGARSHRGALMDSQQASGTIVQIVINNKHKHGQVCVSNGKTYSHGESWHPNLRAFGIVECVLCTCNVTKQECKKIHCPNRYPCKYPQKIDGKCCKVCPGKKAKEELPGQSFDNKGYFCGEETMPVYESVFMEDGETTRKIALETERPPQVEVHVWTIRKGILQHFHIEKISKRMFEELPHFKLVTRTTLSQWKIFTEGEAQISQMCSSRVCRTELEDLVKVLYLERSEKGHC

SEQ ID NO: 15135 - protein, 450 aa, Homo sapiens
  Payload ID: 2970
  Gene Symbol: CHRDL1
  Gene Name: chordin-like 1
  Uniprot ID: Q9BU40
  ENSP ID: ENSP00000361115
MGGMKYIFSLLFFLLLEGGKTEQVKHSETYCMFQDKKYRVGERWHPYLEPYGLVYCVNCICSENGNVLCSRVRCPNVHCLSPVHIPHLCCPRCPDSLPPVNNKVTSKSCEYNGTTYQHGELFVAEGLFQNRQPNQCTQCSCSEGNVYCGLKTCPKLTCAFPVSVPDSCCRVCRGDGELSWEHSDGDIFRQPANREARHSYHRSHYDPPPSRQAGGLSRFPGARSHRGALMDSQQASGTIVQIVINNKHKHGQVCVSNGKTYSHGESWHPNLRAFGIVECVLCTCNVTKQECKKIHCPNRYPCKYPQKIDGKCCKVCPGKKAKELPGQSFDNKGYFCGEETMPVYESVFMEDGETTRKIALETERPPQVEVHVWTIRKGILQHFHIEKISKRMFEELPHFKLVTRTTLSQWKIFTEGEAQISQMCSSRVCRTELEDLVKVLYLERSEKGHC

SEQ ID NO: 15136 - protein, 456 aa, Homo sapiens
  Payload ID: 2970
  Gene Symbol: CHRDL1
  Gene Name: chordin-like 1
  Uniprot ID: Q9BU40
  ENSP ID: ENSP00000378276
MRKKWKMGGMKYIFSLLFFLLLEGGKTEQVKHSETYCMFQDKKYRVGERWHPYLEPYGLVYCVNCICSENGNVLCSRVRCPNVHCLSPVHIPHLCCPRCPDSLPPVNNKVTSKSCEYNGTTYQHGELFVAEGLFQNRQPNQCTQCSCSEGNVYCGLKTCPKLTCAFPVSVPDSCCRVCRGDGELSWEHSDGDIFRQPANREARHSYHRSHYDPPPSRQAGGLSRFPGARSHRGALMDSQQASGTIVQIVINNKHKHGQVCVSNGKTYSHGESWHPNLRAFGIVECVLCTCNVTKQECKKIHCPNRYPCKYPQKIDGKCCKVCPGKKAKELPGQSFDNKGYFCGEETMPVYESVFMEDGETTRKIALETERPPQVEVHVWTIRKGILQHFHIEKISKRMFEELPHFKLVTRTTLSQWKIFTEGEAQISQMCSSRVCRTELEDLVKVLYLERSEKGHC

SEQ ID NO: 15137 - protein, 457 aa, Homo sapiens
  Payload ID: 2970
  Gene Symbol: CHRDL1
  Gene Name: chordin-like 1
  Uniprot ID: Q9BU40
  ENSP ID: ENSP00000399739
MRKKWKMGGMKYIFSLLFFLLLEGGKTEQVKHSETYCMFQDKKYRVGERWHPYLEPYGLVYCVNCICSENGNVLCSRVRCPNVHCLSPVHIPHLCCPRCPDSLPPVNNKVTSKSCEYNGTTYQHGELFVAEGLFQNRQPNQCTQCSCSEGNVYCGLKTCPKLTCAFPVSVPDSCCRVCRGDGELSWEHSDGDIFRQPANREARHSYHRSHYDPPPSRQAGGLSRFPGARSHRGALMDSQQASGTIVQIVINNKHKHGQVCVSNGKTYSHGESWHPNLRAFGIVECVLCTCNVTKQECKKIHCPNRYPCKYPQKIDGKCCKVCPGKKAKEELPGQSFDNKGYFCGEETMPVYESVFMEDGETTRKIALETERPPQVEVHVWTIRKGILQHFHIEKISKRMFEELPHFKLVTRTTLSQWKIFTEGEAQISQMCSSRVCRTELEDLVKVLYLERSEKGHC

SEQ ID NO: 15138 - protein, 378 aa, Homo sapiens
  Payload ID: 2970
  Gene Symbol: CHRDL1
  Gene Name: chordin-like 1
  Uniprot ID: Q9BU40
  ENSP ID: ENSP00000418443
MRKKWKMGGMKYIFSLLFFLLLEGGKTEQVKHSETYCMFQDKKYRVGERWHPYLEPYGLVYCVNCICSENGNVLCSRVRCPNVHCLSPVHIPHLCCPRCPGDGELSWEHSDGDIFRQPANREARHSYHRSHYDPPPSRQAGGLSRFPGARSHRGALMDSQQASGTIVQIVINNKHKHGQVCVSNGKTYSHGESWHPNLRAFGIVECVLCTCNVTKQECKKIHCPNRYPCKYPQKIDGKCCKVCPGKKAKEELPGQSFDNKGYFCGEETMPVYESVFMEDGETTRKIALETERPPQVEVHVWTIRKGILQHFHIEKISKRMFEELPHFKLVTRTTLSQWKIFTEGEAQISQMCSSRVCRTELEDLVKVLYLERSEKGHC

SEQ ID NO: 15139 - protein, 451 aa, Homo sapiens
  Payload ID: 2971
  Gene Symbol: CHRDL2
  Gene Name: chordin-like 2
  Uniprot ID: Q6WN34
  ENSP ID: ENSP00000263671
MVPEVRVLSSLLGLALLWFPLDSHARARPDMFCLFHGKRYSPGESWHPYLEPQGLMYCLRCTCSEGAHVSCYRLHCPPVHCPQPVTEPQQCCPKCVEPHTPSGLRAPPKSCQHNGTMYQHGEIFSAHELFPSRLPNQCVLCSCTEGQIYCGLTTCPEPGCPAPLPLPDSCCQACKDEASEQSDEEDSVQSLHGVRHPQDPCSSDAGRKRGPGTPAPTGLSAPLSFIPRHFRPKGAGSTTVKIVLKEKHKKACVHGGKTYSHGEVWHPAFRAFGPLPCILCTCEDGRQDCQRVTCPTEYPCRHPEKVAGKCCKICPEDKADPGHSEISSTRCPKAPGRVLVHTSVSPSPDNLRRFALEHEASDLVEIYLWKLVKDEETEAQRGEVPGPRPHSQNLPLDSDQESQEARLPERGTALPTARWPPRRSLERLPSPDPGAEGHGQSRQSDQDITKT

SEQ ID NO: 15140 - protein, 142 aa, Homo sapiens
  Payload ID: 2971
  Gene Symbol: CHRDL2
  Gene Name: chordin-like 2
  ENSP ID: ENSP00000365502
MALVGLPGPDMFCLFHGKRYSPGESWHPYLEPQGLMYCLRCTCSENLTLPLDSGPHQSPASTTGPCTNTERSSVPMSCSPPACPTSVSSAAAQRARSTAASQPAPNQAAQHPSRCQTPAARPAKMRQVSNRMKRTVCSRSMG

SEQ ID NO: 15141 - protein, 429 aa, Homo sapiens
  Payload ID: 2971
  Gene Symbol: CHRDL2
  Gene Name: chordin-like 2
  Uniprot ID: Q6WN34
  ENSP ID: ENSP00000365510
MVPEVRVLSSLLGLALLWFPLDSHARARPDMFCLFHGKRYSPGESWHPYLEPQGLMYCLRCTCSEGAHVSCYRLHCPPVHCPQPVTEPQQCCPKCVEPHTPSGLRAPPKSCQHNGTMYQHGEIFSAHELFPSRLPNQCVLCSCTEGQIYCGLTTCPEPGCPAPLPLPDSCCQACKDEASEQSDEEDSVQSLHGVRHPQDPCSSDAGRKRGPGTPAPTGLSAPLSFIPRHFRPKGAGSTTVKIVLKEKHKKACVHGGKTYSHGEVWHPAFRAFGPLPCILCTCEDGRQDCQRVTCPTEYPCRHPEKVAGKCCKICPEDKADPGHSEISSTRCPKAPGRVLVHTSVSPSPDNLRRFALEHEASDLVEIYLWKLVKGIFHLTQIKKVRKQDFQKEAQHFRLLAGPHEGHWNVFLAQTLELKVTASPDKVTKT

SEQ ID NO: 15142 - protein, 308 aa, Homo sapiens
  Payload ID: 2971
  Gene Symbol: CHRDL2
  Gene Name: chordin-like 2
  ENSP ID: ENSP00000431380
MVPEVRVLSSLLGLALLWFPLDSHARARPDMFCLFHGKRYSPGESWHPYLEPQGLMYCLRCTCSEGAHVSCYRLHCPPVHCPQPVTEPQQCCPKCVEPHTPSGLRAPPKSCQHNGTMYQHGEIFSAHELFPSRLPNQCVLCSCTEGQIYCGLTTCPEPGCPAPLPLPDSCCQACKDEASEQSDEEDSVQSLHGVRHPQDPCSSDAGRKRGPGTPAPTGLSAPLSFIPRHFRPKGAGSTTVKIVLKEKHKKEDKADPGHSEISSTRCPKAPGRVLVHTSVSPSPDNLRRFALEHEASDLVEIYLWKLVK

SEQ ID NO: 15143 - protein, 142 aa, Homo sapiens
  Payload ID: 2971
  Gene Symbol: CHRDL2
  Gene Name: chordin-like 2
  Uniprot ID: Q6WN34
  ENSP ID: ENSP00000432055
MALVGLPGPDMFCLFHGKRYSPGESWHPYLEPQGLMYCLRCTCSEGAHVSCYRLHCPPVHCPQPVTEPQQCCPKCVEPHTPSGLRAPPKSCQHNGTMYQHGEIFSAHELFPSRLPNQCVLCSCTMRQVSNRMKRTVCSRSMG

SEQ ID NO: 15144 - protein, 91 aa, Homo sapiens
  Payload ID: 2971
  Gene Symbol: CHRDL2
  Gene Name: chordin-like 2
  ENSP ID: ENSP00000432345
  MOD_RES (1)..(1): Any amino acid
XGDRSRISKENRQKKTGFTVEATGRQGRGMTGNLPLDSDQESQEARLPERGTALPTARWPPRRSLERLPSPDPGAEGHGQSRQSDQDITKT

SEQ ID NO: 15145 - protein, 177 aa, Homo sapiens
  Payload ID: 2971
  Gene Symbol: CHRDL2
  Gene Name: chordin-like 2
  ENSP ID: ENSP00000434257
  MOD_RES (1)..(1): Any amino acid
XSSDAGRKRGPGTPAPTGLSAPLSFIPRHFRPKGAGSTTVKIVLKEKHKKACVHGGKTYSHGEVWHPAFRAFGPLPCILCTCEDGRQDCQRVTCPTEYPCRHPEKVAGKCCKICPEDKADPGHSEISSTRCPKAPGRVLVHTSVSPSPDNLRRFALEHEASDLVEIYLWKLVTGTSS

SEQ ID NO: 15146 - protein, 93 aa, Homo sapiens
  Payload ID: 2971
  Gene Symbol: CHRDL2
  Gene Name: chordin-like 2
  Uniprot ID: Q6WN34
  ENSP ID: ENSP00000434589
MALVGLPGPDMFCLFHGKRYSPGESWHPYLEPQGLMYCLRCTCSENLTLPLDSGPHQSPASTTGPCTNTERSSVPMSCSPPACPTSVSSAAAQ

SEQ ID NO: 15147 - protein, 281 aa, Homo sapiens [sequence omitted]

SEQ ID NO: 15148 - protein, 165 aa, Homo sapiens
  Payload ID: 2972
  Gene Symbol: CGB
  Gene Name: chorionic gonadotropin, beta polypeptide
  Uniprot ID: P01233
  ENSP ID: ENSP00000349954
MEMFQGLLLLLLLSMGGTWASKEPLRPRCRPINATLAVEKEGCPVCITVNTTICAGYCPTMTRVLQGVLPALPQVVCNYRDVRFESIRLPGCPRGVNPVVSYAVALSCQCALCRRSTTDCGGPKDHPLTCDDPRFQDSSSSKAPPPSLPSPSRLPGPSDTPILPQ

SEQ ID NO: 15149 - protein, 155 aa, Homo sapiens
  Payload ID: 2973
  Gene Symbol: CGB1
  Gene Name: chorionic gonadotropin, beta polypeptide 1
  Uniprot ID: A6NKQ9
  ENSP ID: ENSP00000301407
MSKRLLLLLLLSMGGTWASKEPLRPRCRPINATLAVEKEGCPVCITVNTTICAGYCPTMTRVLQGVLPALPQVVCNYRDVRFESIRLPGCPRGVNPVVSYAVALSCQCALCRRSTTDCGGPKDHPLTCDDPRFQDSSSSKAPPPSLPSPSRLPGP

SEQ ID NO: 15150 - protein, 129 aa, Homo sapiens
  Payload ID: 2973
  Gene Symbol: CGB1
  Gene Name: chorionic gonadotropin, beta polypeptide 1
  ENSP ID: ENSP00000472896
MGGTWASKEPLRPRCRPINATLAVEKEGCPVCITVNTTICAGYCPTMTRVLQGVLPALPQVVCNYRDVRFESIRLPGCPRGVNPVVSYAVALSCQCALCRRSTTDCGGPKDHPLTCDDPRFQDSSSSKA

SEQ ID NO: 15151 - protein, 163 aa, Homo sapiens
  Payload ID: 2974
  Gene Symbol: CGB2
  Gene Name: chorionic gonadotropin, beta polypeptide 2
  ENSP ID: ENSP00000352295
MSKGLLLLLLLSMGGTWASKEPLRPRCRPINATLAVEKEGCPVCITVNTTICAGYCPTMTRVLQGVLPALPQVVCNYRDVRFESIRLPGCPRGVNPVVSYAVALSCQCALCRRSTTDCGGPKDHPLTCDDPRFQASSSSKAPPPSLPSPSRLPGPSDTPILPQ

SEQ ID NO: 15152 - protein, 129 aa, Homo sapiens
  Payload ID: 2974
  Gene Symbol: CGB2
  Gene Name: chorionic gonadotropin, beta polypeptide 2
  ENSP ID: ENSP00000471177
MGGTWASKEPLRPRCRPINATLAVEKEGCPVCITVNTTICAGYCPTMTRVLQGVLPALPQVVCNYRDVRFESIRLPGCPRGVNPVVSYAVALSCQCALCRRSTTDCGGPKDHPLTCDDPRFQASSSSKA

SEQ ID NO: 15153 - protein, 165 aa, Homo sapiens; identical to SEQ ID NO: 15148
  Payload ID: 2975
  Gene Symbol: CGB5
  Gene Name: chorionic gonadotropin, beta polypeptide 5
  Uniprot ID: P01233
  ENSP ID: ENSP00000301408

SEQ ID NO: 15154 - protein, 165 aa, Homo sapiens
  Payload ID: 2976
  Gene Symbol: CGB7
  Gene Name: chorionic gonadotropin, beta polypeptide 7
  Uniprot ID: P01233
  ENSP ID: ENSP00000366493
MEMFQGLLLLLLLSMGGTWASREMLRPRCRPINATLAVEKEGCPVCITVNTTICAGYCPTMTRVLQGVLPALPQVVCNYRDVRFESIRLPGCPRGVNPVVSYAVALSCQCALCRRSTTDCGGPKDHPLTCDDPRFQASSSSKAPPPSLPSPSRLPGPSDTPILPQ

SEQ ID NO: 15155 - protein, 165 aa, Homo sapiens; identical to SEQ ID NO: 15154
  Payload ID: 2976
  Gene Symbol: CGB7
  Gene Name: chorionic gonadotropin, beta polypeptide 7
  Uniprot ID: P01233
  ENSP ID: ENSP00000469076

SEQ ID NO: 15156 - protein, 165 aa, Homo sapiens; identical to SEQ ID NO: 15154
  Payload ID: 2976
  Gene Symbol: CGB7
  Gene Name: chorionic gonadotropin, beta polypeptide 7
  Uniprot ID: P01233
  ENSP ID: ENSP00000470813

SEQ ID NO: 15157 - protein, 165 aa, Homo sapiens; identical to SEQ ID NO: 15148
  Payload ID: 2977
  Gene Symbol: CGB8
  Gene Name: chorionic gonadotropin, beta polypeptide 8
  Uniprot ID: P01233
  ENSP ID: ENSP00000403649

SEQ ID NO: 15158 - protein, 217 aa, Homo sapiens
  Payload ID: 2978
  Gene Symbol: CSH1
  Gene Name: chorionic somatomammotropin hormone 1 (placental lactogen)
  Uniprot ID: P0DML2
  ENSP ID: ENSP00000316416
MAPGSRTSLLLAFALLCLPWLQEAGAVQTVPLSRLFDHAMLQAHRAHQLAIDTYQEFEETYIPKDQKYSFLHDSQTSFCFSDSIPTPSNMEETQQKSNLELLRISLLLIESWLEPVRFLRSMFANNLVYDTSDSDDYHLLKDLEEGIQTLMGRLEDGSRRTGQILKQTYSKFDTNSHNHDALLKNYGLLYCFRKDMDKVETFLRMVQCRSVEGSCGF

SEQ ID NO: 15159 - protein, 256 aa, Homo sapiens
  Payload ID: 2978
  Gene Symbol: CSH1
  Gene Name: chorionic somatomammotropin hormone 1 (placental lactogen)
  ENSP ID: ENSP00000333268
MAPGSRTSLLLAFALLCLPWLQEAGAVQTVPLSRLFDHAMLQAHRAHQLAIDTYQEFEETYIPKDQKYSFLHDSQTSFCFSDSIPTPSNMEETQQKSNLELLRISLLLIESWLEPVRFLRSMFANNLVYDTSDSDDYHLLKDLEEGIQTLMGVRVAPGVTNPGTPLASRAGGEKYCCPLFSSKALTQENSPYSSFRLVNPPGLSLHPEGEGGKWINERGREQCPSAWPLLLFLHFAEAGRRQPPDWADPQADLQQV

SEQ ID NO: 15160 - protein, 122 aa, Homo sapiens
  Payload ID: 2978
  Gene Symbol: CSH1
  Gene Name: chorionic somatomammotropin hormone 1 (placental lactogen)
  ENSP ID: ENSP00000402517
MAPGSRTSLLLAFALLCLPWLQEAGAVQTVPLSRLFDHAMLQAHRAHQLAIDTYQEFRLEDGSRRTGQILKQTYSKFDTNSHNHDALLKNYGLLYCFRKDMDKVETFLRMVQCRSVEGSCGF

SEQ ID NO: 15161 - protein, 128 aa, Homo sapiens
  Payload ID: 2978
  Gene Symbol: CSH1
  Gene Name: chorionic somatomammotropin hormone 1 (placental lactogen)
  ENSP ID: ENSP00000478652
MEETQQKSNLELLRISLLLIESWLEPVRFLRSMFANNLVYDTSDSDDYHLLKDLEEGIQTLMGRLEDGSRRTGQILKQTYSKFDTNSHNHDALLKNYGLLYCFRKDMDKVETFLRMVQCRSVEGSCGF

SEQ ID NO: 15162 - protein, 122 aa, Homo sapiens
  Payload ID: 2979
  Gene Symbol: CSH2
  Gene Name: chorionic somatomammotropin hormone 2
  Uniprot ID: P0DML3
  ENSP ID: ENSP00000308396
MAAGSRTSLLLAFALLCLPWLQEAGAVQTVPLSRLFDHAMLQAHRAHQLAIDTYQEFRLEDGSRRTGQILKQTYSKFDTNSHNHDALLKNYGLLYCFRKDMDKVETFLRMVQCRSVEGSCGF

SEQ ID NO: 15163 - protein, 167 aa, Homo sapiens
  Payload ID: 2979
  Gene Symbol: CSH2
  Gene Name: chorionic somatomammotropin hormone 2
  Uniprot ID: P0DML3
  ENSP ID: ENSP00000338816
MAAGSRTSLLLAFALLCLPWLQEAGAVQTVPLSRLFDHAMLQAHRAHQLAIDTYQEFEETYIPKDQKYSFLHDSQTSFCFSDSIPTPSNMEETQQKSNLELLRISLLLIESWLEPVRFLRSMFANNLVYDTSDSDDYHLLKDLEEGIQTLMGVRVAPGVANPGTPLA

SEQ ID NO: 15164 - protein, 217 aa, Homo sapiens
  Payload ID: 2979
  Gene Symbol: CSH2
  Gene Name: chorionic somatomammotropin hormone 2
  Uniprot ID: P0DML3
  ENSP ID: ENSP00000376623
MAAGSRTSLLLAFALLCLPWLQEAGAVQTVPLSRLFDHAMLQAHRAHQLAIDTYQEFEETYIPKDQKYSFLHDSQTSFCFSDSIPTPSNMEETQQKSNLELLRISLLLIESWLEPVRFLRSMFANNLVYDTSDSDDYHLLKDLEEGIQTLMGRLEDGSRRTGQILKQTYSKFDTNSHNHDALLKNYGLLYCFRKDMDKVETFLRMVQCRSVEGSCGF

SEQ ID NO: 15165 - protein, 160 aa, Homo sapiens
  Payload ID: 2979
  Gene Symbol: CSH2
  Gene Name: chorionic somatomammotropin hormone 2
  ENSP ID: ENSP00000453452
MAAGSRTSLLLAFALLCLPWLQEADSIPTPSNMEETQQKSNLELLRISLLLIESWLEPVRFLRSMFANNLVYDTSDSDDYHLLKDLEEGIQTLMGRLEDGSRRTGQILKQTYSKFDTNSHNHDALLKNYGLLYCFRKDMDKVETFLRMVQCRSVEGSCGF

SEQ ID NO: 15166 - protein, 128 aa, Homo sapiens; identical to SEQ ID NO: 15161
  Payload ID: 2979
  Gene Symbol: CSH2
  Gene Name: chorionic somatomammotropin hormone 2
  ENSP ID: ENSP00000478842

SEQ ID NO: 15167 - protein, 222 aa, Homo sapiens
  Payload ID: 2979
  Gene Symbol: CSH2
  Gene Name: chorionic somatomammotropin hormone 2
  ENSP ID: ENSP00000480793
MAAGSRTSLLLAFALLCLPWLQEAGAVQTVPLSRLFDHAMLQAHRAHQLAIDTYQEFVSSWGMETYIPKDQKYSFLHDSQTSFCFSDSIPTPSNMEETQQKSNLELLRISLLLIESWLEPVRFLRSMFANNLVYDTSDSDDYHLLKDLEEGIQTLMGRLEDGSRRTGQILKQTYSKFDTNSHNHDALLKNYGLLYCFRKDMDKVETFLRMVQCRSVEGSCGF

SEQ ID NO: 15168 - protein, 160 aa, Homo sapiens
  Payload ID: 2980
  Gene Symbol: CSHL1
  Gene Name: chorionic somatomammotropin hormone-like 1
  ENSP ID: ENSP00000259003
MAAGSRTSLLLAFALLCLPWLQEADSIPTSSNMEETQQKSNLELLHISLLLIESRLEPVRFLRSTFTNNLVYDTSDSDDYHLLKDLEEGIQMLMGRLEDGSHLTGQTLKQTYSKFDTNSHNHDALLKNYGLLHCFRKDMDKVETFLRMVQCRSVEGSCGF

SEQ ID NO: 15169 - protein, 222 aa, Homo sapiens
  Payload ID: 2980
  Gene Symbol: CSHL1
  Gene Name: chorionic somatomammotropin hormone-like 1
  Uniprot ID: Q14406
  ENSP ID: ENSP00000309524
MAAGSRTSLLLAFALLCLPWLQEAGAVQTVPLSRLFKEAMLQAHRAHQLAIDTYQEFISSWGMEAYITKEQKYSFLHDSQTSFCFSDSIPTSSNMEETQQKSNLELLHISLLLIESRLEPVRFLRSTFTNNLVYDTSDSDDYHLLKDLEEGIQMLMGRLEDGSHLTGQTLKQTYSKFDTNSHNHDALLKNYGLLHCFRKDMDKVETFLRMVQCRSVEGSCGF

SEQ ID NO: 15170 - protein, 128 aa, Homo sapiens
  Payload ID: 2980
  Gene Symbol: CSHL1
  Gene Name: chorionic somatomammotropin hormone-like 1
  Uniprot ID: Q14406
  ENSP ID: ENSP00000316360
MEETQQKSNLELLHISLLLIESRLEPVRFLRSTFTNNLVYDTSDSDDYHLLKDLEEGIQMLMGRLEDGSHLTGQTLKQTYSKFDTNSHNHDALLKNYGLLHCFRKDMDKVETFLRMVQCRSVEGSCGF

SEQ ID NO: 15171 - protein, 217 aa, Homo sapiens [sequence omitted]

SEQ ID NO: 15172 - protein, 139 aa, Homo sapiens
  Payload ID: 2980
  Gene Symbol: CSHL1
  Gene Name: chorionic somatomammotropin hormone-like 1
  Uniprot ID: Q14406
  ENSP ID: ENSP00000402632
MAADSIPTSSNMEETQQKSNLELLHISLLLIESRLEPVRFLRSTFTNNLVYDTSDSDDYHLLKDLEEGIQMLMGRLEDGSHLTGQTLKQTYSKFDTNSHNHDALLKNYGLLHCFRKDMDKVETFLRMVQCRSVEGSCGF

SEQ ID NO: 15173 - protein, 167 aa, Homo sapiens
  Payload ID: 2980
  Gene Symbol: CSHL1
  Gene Name: chorionic somatomammotropin hormone-like 1
  ENSP ID: ENSP00000413501
MEETQQKSNLELLHISLLLIESRLEPVRFLRSTFTNNLVYDTSDSDDYHLLKDLEEGIQMLMGVRVAPGVPNPGSPLASRAGGEKHCCPLFSSQALTQENSPYSSFPLVNPPGLSLHPEGEGGKWINERGREQCPSAWSLLLLLHFAEAGRRQPPDWADPQADLQQV

SEQ ID NO: 15174 - protein, 178 aa, Homo sapiens
  Payload ID: 2980
  Gene Symbol: CSHL1
  Gene Name: chorionic somatomammotropin hormone-like 1
  ENSP ID: ENSP00000452900
MAADSIPTSSNMEETQQKSNLELLHISLLLIESRLEPVRFLRSTFTNNLVYDTSDSDDYHLLKDLEEGIQMLMGVRVAPGVPNPGSPLASRAGGEKHCCPLFSSQALTQENSPYSSFPLVNPPGLSLHPEGEGGKWINERGREQCPSAWSLLLLLHFAEAGRRQPPDWADPQADLQQV

SEQ ID NO: 15175 - protein, 217 aa, Homo sapiens
  Payload ID: 2980
  Gene Symbol: CSHL1
  Gene Name: chorionic somatomammotropin hormone-like 1
  ENSP ID: ENSP00000483369
FSPGSRTSLLLAFALLCLPWLQEAGAVQTVPLSRLFKEAMLQAHRAHQLAIDTYQEVEEAYITKEQKYSFLHDSQTSFCFSDSIPTSSNMEETQQKSNLELLHISLLLIESRLEPVRFLRSTFTNNLVYDTSDSDDYHLLKDLEEGIQMLMGRLEDGSHLTGQTLKQTYSKFDTNSHNHDALLKNYGLLHCFRKDMDKVETFLRMVQCRSVEGSCGF

SEQ ID NO: 15176 - protein, 653 aa, Homo sapiens
  Payload ID: 2981
  Gene Symbol: CHM
  Gene Name: choroideremia (Rab escort protein 1)
  Uniprot ID: P24386
  ENSP ID: ENSP00000350386
MADTLPSEFDVIVIGTGLPESIIAAACSRSGRRVLHVDSRSYYGGNWASFSFSGLLSWLKEYQENSDIVSDSPVWQDQILENEEAIALSRKDKTIQHVEVFCYASQDLHEDVEEAGALQKNHALVTSANSTEAADSAFLPTEDESLSTMSCEMLTEQTPSSDPENALEVNGAEVTGEKENHCDDKTCVPSTSAEDMSENVPIAEDTTEQPKKNRITYSQIIKEGRRFNIDLVSKLLYSRGLLIDLLIKSNVSRYAEFKNITRILAFREGRVEQVPCSRADVFNSKQLTMVEKRMLMKFLTFCMEYEKYPDEYKGYEEITFYEYLKTQKLTPNLQYIVMHSIAMTSETASSTIDGLKATKNFLHCLGRYGNTPFLFPLYGQGELPQCFCRMCAVFGGIYCLRHSVQCLVVDKESRKCKAIIDQFGQRIISEHFLVEDSYFPENMCSRVQYRQISRAVLITDRSVLKTDSDQQISILTVPAEEPGTFAVRVIELCSSTMTCMKGTYLVHLTCTSSKTAREDLESVVQKLFVPYTEMEIENEQVEKPRILWALYFNMRDSSDISRSCYNDLPSNVYVCSGPDCGLGNDNAVKQAETLFQEICPNEDFCPPPPNPEDIILDGDSLQPEASESSAIPEANSETFKESTNLGNLEESSE

SEQ ID NO: 15177 - protein, 110 aa, Homo sapiens
  Payload ID: 2981
  Gene Symbol: CHM
  Gene Name: choroideremia (Rab escort protein 1)
  Uniprot ID: P24386
  ENSP ID: ENSP00000484306
MADTLPSEFDVIVIGTGLPESIIAAACSRSGRRVLHVDSRSYYGGNWASFSFSGLLSWLKEYQENSDIVSDSPVWQDQILENEEAIALSRKDKTIQHVEVFCYARSTLLL

SEQ ID NO: 15178 - protein, 656 aa, Homo sapiens
  Payload ID: 2982
  Gene Symbol: CHML
  Gene Name: choroideremia-like (Rab escort protein 2)
  Uniprot ID: P26374
  ENSP ID: ENSP00000355511
MADNLPTEFDVVIIGTGLPESILAAACSRSGQRVLHIDSRSYYGGNWASFSFSGLLSWLKEYQQNNDIGEESTVVWQDLIHETEEAITLRKKDETIQHTEAFCYASQDMEDNVEEIGALQKNPSLGVSNTFTEVLDSALPEESQLSYFNSDEMPAKHTQKSDTEISLEVTDVEESVEKEKYCGDKTCMHTVSDKDGDKDESKSTVEDKADEPIRNRITYSQIVKEGRRFNIDLVSKLLYSQGLLIDLLIKSDVSRYVEFKNVTRILAFREGKVEQVPCSRADVFNSKELTMVEKRMLMKFLTFCLEYEQHPDEYQAFRQCSFSEYLKTKKLTPNLQHFVLHSIAMTSESSCTTIDGLNATKNFLQCLGRFGNTPFLFPLYGQGEIPQGFCRMCAVFGGIYCLRHKVQCFVVDKESGRCKAIIDHFGQRINAKYFIVEDSYLSEETCSNVQYKQISRAVLITDQSILKTDLDQQTSILIVPPAEPGACAVRVTELCSSTMTCMKDTYLVHLTCSSSKTAREDLESVVKKLFTPYTETEINEEELTKPRLLWALYFNMRDSSGISRSSYNGLPSNVYVCSGPDCGLGNEHAVKQAETLFQEIFPTEEFCPPPPNPEDIIFDGDDKQPEAPGTNNVVMAKLESSEESKNLESPEKHLQN

SEQ ID NO: 15179 - protein, 412 aa, Homo sapiens
  Payload ID: 2983
  Gene Symbol: CHRFAM7A
  Gene Name: CHRNA7 (cholinergic receptor, nicotinic, alpha 7, exons 5-10) and FAM7A (family with sequence similarity 7A, exons A-E) fusion
  Uniprot ID: Q494W8
  ENSP ID: ENSP00000299847
MQKYCIYQHFQFQLLIQHLWIAANCDIADERFDATFHTNVLVNSSGHCQYLPPGIFKSSCYIDVRWFPFDVQHCKLKFGSWSYGGWSLDLQMQEADISGYIPNGEWDLVGIPGKRSERFYECCKEPYPDVTFTVTMRRRTLYYGLNLLIPCVLISALALLVFLLPADSGEKISLGITVLLSLTVFMLLVAEIMPATSDSVPLIAQYFASTMIIVGLSVVVTVIVLQYHHHDPDGGKMPKWTRVILLNWCAWFLRMKRPGEDKVRPACQHKQRRCSLASVEMSAVAPPPASNGNLLYIGFRGLDGVHCVPTPDSGVVCGRMACSPTHDEHLLHGGQPPEGDPDLAKILEEVRYIANRFRCQDESEAVCSEWKFAACVVDRLCLMAFSVFTIICTIGILMSAPNFVEAVSKDFA

SEQ ID NO: 15180 - protein, 321 aa, Homo sapiens
  Payload ID: 2983
  Gene Symbol: CHRFAM7A
  Gene Name: CHRNA7 (cholinergic receptor, nicotinic, alpha 7, exons 5-10) and FAM7A (family with sequence similarity 7A, exons A-E) fusion
  ENSP ID: ENSP00000380927
MQEADISGYIPNGEWDLVGIPGKRSERFYECCKEPYPDVTFTVTMRRRTLYYGLNLLIPCVLISALALLVFLLPADSGEKISLGITVLLSLTVFMLLVAEIMPATSDSVPLIAQYFASTMIIVGLSVVVTVIVLQYHHHDPDGGKMPKWTRVILLNWCAWFLRMKRPGEDKVRPACQHKQRRCSLASVEMSAVAPPPASNGNLLYIGFRGLDGVHCVPTPDSGVVCGRMACSPTHDEHLLHGGQPPEGDPDLAKILEEVRYIANRFRCQDESEAVCSEWKFAACVVDRLCLMAFSVFTIICTIGILMSAPNFVEAVSKDFA

SEQ ID NO: 15181 - protein, 321 aa, Homo sapiens; identical to SEQ ID NO: 15180
  Payload ID: 2983
  Gene Symbol: CHRFAM7A
  Gene Name: CHRNA7 (cholinergic receptor, nicotinic, alpha 7, exons 5-10) and FAM7A (family with sequence similarity 7A, exons A-E) fusion
  ENSP ID: ENSP00000385389

SEQ ID NO: 15182 - protein, 104 aa, Homo sapiens
  Payload ID: 2983
  Gene Symbol: CHRFAM7A
  Gene Name: CHRNA7 (cholinergic receptor, nicotinic, alpha 7, exons 5-10) and FAM7A (family with sequence similarity 7A, exons A-E) fusion
  ENSP ID: ENSP00000455401
MQKYCIYQHFQFQLLIQHLWIAANCDIADERFDATFHTNVLVNSSGHCQYLPPGIFKSSCYIDVRWFPFDVQHCKLKFGSWSYGGWSLDLQMQEADISGYIPNG

SEQ ID NO: 15183 - protein, 412 aa, Homo sapiens
  Payload ID: 2983
  Gene Symbol: CHRFAM7A
  Gene Name: CHRNA7 (cholinergic receptor, nicotinic, alpha 7, exons 5-10) and FAM7A (family with sequence similarity 7A, exons A-E) fusion
  ENSP ID: ENSP00000478921
MQKYCIYQHFQFQLLIQHLWIAANCDIADERFDATFHTNVLVNSSGHCQYLPPGIFKSSCYIDVRWFPFDVQHCKLKFGSWSYGGWSLDLQMQEADISGYIPNGEWDLVGIPGKRSERFYECCKEPYPDVTFTVTMRRRTLYYGLNLLIPCVLISALALLVFLLPADSGEKISLGITVLLSLTVFMLLVAEIMPATSDSVPLIAQYFASTMIIVGLSVVVTVIVLQYHHHDPDGGKMPKWTRVILLNWCAWFLRMKRPGEDKVRPACQHKQRRCSLASVEMSAVAPPPASNGNLLYIGFRGLDGVHCVPTPDSGVVCGRMACSPTHDEHLLHGGQPPEGDPDLAKILEEVRYIANRFRCQDESEAVCSEWKFAACVVDRLCLMAFSVFTIICTIGILMLAPNFVEAVSKDFA

SEQ ID NO: 15184 - protein, 321 aa, Homo sapiens
  Payload ID: 2983
  Gene Symbol: CHRFAM7A
  Gene Name: CHRNA7 (cholinergic receptor, nicotinic, alpha 7, exons 5-10) and FAM7A (family with sequence similarity 7A, exons A-E) fusion
  ENSP ID: ENSP00000480968
MQEADISGYIPNGEWDLVGIPGKRSERFYECCKEPYPDVTFTVTMRRRTLYYGLNLLIPCVLISALALLVFLLPADSGEKISLGITVLLSLTVFMLLVAEIMPATSDSVPLIAQYFASTMIIVGLSVVVTVIVLQYHHHDPDGGKMPKWTRVILLNWCAWFLRMKRPGEDKVRPACQHKQRRCSLASVEMSAVAPPPASNGNLLYIGFRGLDGVHCVPTPDSGVVCGRMACSPTHDEHLLHGGQPPEGDPDLAKILEEVRYIANRFRCQDESEAVCSEWKFAACVVDRLCLMAFSVFTIICTIGILMLAPNFVEAVSKDFA

SEQ ID NO: 15185 - protein, 321 aa, Homo sapiens; identical to SEQ ID NO: 15184
  Payload ID: 2983
  Gene Symbol: CHRFAM7A
  Gene Name: CHRNA7 (cholinergic receptor, nicotinic, alpha 7, exons 5-10) and FAM7A (family with sequence similarity 7A, exons A-E) fusion
  ENSP ID: ENSP00000482305

SEQ ID NO: 15186 - protein, 131 aa, Homo sapiens
  Payload ID: 2984
  Gene Symbol: CHRAC1
  Gene Name: chromatin accessibility complex 1
  Uniprot ID: Q9NRG0
  ENSP ID: ENSP00000220913
MADVVVGKDKGGEQRLISLPLSRIRVIMKSSPEVSSINQEALVLTAKATELFVQCLATYSYRHGSGKEKKVLTYSDLANTAQQSETFQFLADILPKKILASKYLKMLKEEKREEDEENDNDNESDHDEADS

SEQ ID NO: 15187 - protein, 56 aa, Homo sapiens
  Payload ID: 2984
  Gene Symbol: CHRAC1
  Gene Name: chromatin accessibility complex 1
  ENSP ID: ENSP00000428697
MADVVVGKDKGGEQRLISLPLSRIRVIMKSSPEVSSINQEALVLTAKATIYYQRRF

SEQ ID NO: 15188 - protein, 97 aa, Homo sapiens
  Payload ID: 2984
  Gene Symbol: CHRAC1
  Gene Name: chromatin accessibility complex 1
  ENSP ID: ENSP00000430003
  MOD_RES (1)..(1): Any amino acid
XCPPAVSLALPFGKPELFVQCLATYSYRHGSGKEKKVLTYSDLANTAQQSETFQFLADILPKKILASKYLKMLKEEKREEDEENDNDNESDHDEADS

SEQ ID NO: 15189 - protein, 80 aa, Homo sapiens
  Payload ID: 2984
  Gene Symbol: CHRAC1
  Gene Name: chromatin accessibility complex 1
  ENSP ID: ENSP00000430484
FVAFLRSARPFLPCAPSPRPPHCPPAVSLALPFGKPELFVQCLATYSYRHGSGKEKKVLTYSDLANTAQQSETFQFLAGT

SEQ ID NO: 15190 - protein, 956 aa, Homo sapiens
  Payload ID: 2985
  Gene Symbol: CHAF1A
  Gene Name: chromatin assembly  factor 1, subunit A (p150)
  Uniprot ID: Q13111
  ENSP ID: ENSP00000301280
MLEELECGAPGARGAATAMDCKDRPAFPVKKLIQARLPFKRLNLVPKGKADDMSDDQGTSVQSKSPDLEASLDTLENNCHVGSDIDFRPKLVNGKGPLDNFLRNRIETSIGQSTVIIDLTEDSNEQPDSLVDHNKLNSEASPSREAINGQREDTGDQQGLLKAIQNDKLAFPGETLSDIPCKTEEEGVGCGGAGRRGDSQECSPRSCPELTSGPRMCPRKEQDSWSEAGGILFKGKVPMVVLQDILAVRPPQIKSLPATPQGKNMTPESEVLESFPEEDSVLSHSSLSSPSSTSSPEGPPAPPKQHSSTSPFPTSTPLRRITKKFVKGSTEKNKLRLQRDQERLGKQLKLRAEREEKEKLKEEAKRAKEEAKKKKEEEKELKEKERREKREKDEKEKAEKQRLKEERRKERQEALEAKLEEKRKKEEEKRLREEEKRIKAEKAEITRFFQKPKTPQAPKTLAGSCGKFAPFEIKEHMVLAPRRRTAFHPDLCSQLDQLLQQQSGEFSFLKDLKGRQPLRSGPTHVSTRNADIFNSDVVIVERGKGDGVPERRKFGRMKLLQFCENHRPAYWGTWNKKTALIRARDPWAQDTKLLDYEVDSDEEWEEEEPGESLSHSEGDDDDDMGEDEDEDDGFFVPHGYLSEDEGVTEECADPENHKVRQKLKAKEWDEFLAKGKRFRVLQPVKIGCVWAADRDCAGDDLKVLQQFAACFLETLPAQEEQTPKASKRERRDEQILAQLLPLLHGNVNGSKVIIREFQEHCRRGLLSNHTGSPRSPSTTYLHTPTPSEDAAIPSKSRLKRLISENSVYEKRPDFRMCWYVHPQVLQSFQQEHLPVPCQWSYVTSVPSAPKEDSGSVPSTGPSQGTPISLKRKSAGSMCITQFMKKRRHDGQIGAEDMDGFQADTEEEEEEEGDCMIVDVPDAAEVQAPCGAASGAGGGVGVDTGKATLTASPLGAS

SEQ ID NO: 15191 - protein, 151 aa, Homo sapiens
  Payload ID: 2985
  Gene Symbol: CHAF1A
  Gene Name: chromatin assembly  factor 1, subunit A (p150)
  ENSP ID: ENSP00000465142
MLEELECGAPGARGAATARLPFKRLNLVPKGKADDMSDDQGTSVQSKSPDLEASLDTLENNCHVGSDIDFRPKLVNGKGPLDNFLRNRIETSIGQSTVIIDLTEDSNEQPDSLVDHNKLNSEASPSREAINGQREDTGDQQGLLKAIQNDK

SEQ ID NO: 15192 - protein, 47 aa, Homo sapiens
  Payload ID: 2985
  Gene Symbol: CHAF1A
  Gene Name: chromatin assembly  factor 1, subunit A (p150)
  ENSP ID: ENSP00000466475
EDMDGFQADTEEEEEEEGDCMIVDVPDAAAMRSLFQSLSDSPSCHLL

SEQ ID NO: 15193 - protein, 17 aa, Homo sapiens
  Payload ID: 2985
  Gene Symbol: CHAF1A
  Gene Name: chromatin assembly  factor 1, subunit A (p150)
  ENSP ID: ENSP00000466888
KFVKGSTEKNKLRLQRG

SEQ ID NO: 15194 - protein, 291 aa, Homo sapiens
  Payload ID: 2985
  Gene Symbol: CHAF1A
  Gene Name: chromatin assembly  factor 1, subunit A (p150)
  ENSP ID: ENSP00000467296
MCPRKEQDSWSEAGGILFKGKVPMVVLQDILAVRPPQIKSLPATPQGKNMTPESEVLESFPEEDSVLSHSSLSSPSSTSSPEGPPAPPKQHSSTSPFPTSTPLRRDQERLGKQLKLRAEREEKEKLKEEAKRAKEEAKKKKEEEKELKEKERREKREKDEKEKAEKQRLKEERRKERQEALEAKLEEKRKKEEEKRLREEEKRIKAEKAEITRFFQKPKTPQAPKTLAGSCGKFAPFEIKEHMVLAPRRRTAFHPDLCSQLDQLLQQQSGEFSFLKDLKGRQPLRSGPTHV

SEQ ID NO: 15195 - protein, 559 aa, Homo sapiens
  Payload ID: 2986
  Gene Symbol: CHAF1B
  Gene Name: chromatin assembly  factor 1, subunit B (p60)
  Uniprot ID: Q13112
  ENSP ID: ENSP00000315700
MKVITCEIAWHNKEPVYSLDFQHGTAGRIHRLASAGVDTNVRIWKVEKGPDGKAIVEFLSNLARHTKAVNVVRFSPTGEILASGGDDAVILLWKVNDNKEPEQIAFQDEDEAQLNKENWTVVKTLRGHLEDVYDICWATDGNLMASASVDNTAIIWDVSKGQKISIFNEHKSYVQGVTWDPLGQYVATLSCDRVLRVYSIQKKRVAFNVSKMLSGIGAEGEARSYRMFHDDSMKSFFRRLSFTPDGSLLLTPAGCVESGENVMNTTYVFSRKNLKRPIAHLPCPGKATLAVRCCPVYFELRPVVETGVELMSLPYRLVFAVASEDSVLLYDTQQSFPFGYVSNIHYHTLSDISWSSDGAFLAISSTDGYCSFVTFEKDELGIPLKEKPVLNMRTPDTAKKTKSQTHRGSSPGPRPVEGTPASRTQDPSSPGTTPPQARQAPAPTVIRDPPSITPAVKSPLPGPSEEKTLQPSSQNTKAHPSRRVTLNTLQAWSKTTPRRINLTPLKTDTPPSSVPTSVISTPSTEEIQSETPGDAQGSPPELKRPRLDENKGGTESLDP

SEQ ID NO: 15196 - protein, 546 aa, Homo sapiens
  Payload ID: 2987
  Gene Symbol: CDT1
  Gene Name: chromatin licensing and DNA replication  factor 1
  Uniprot ID: Q9H211
  ENSP ID: ENSP00000301019
MEQRRVTDFFARRRPGPPRIAPPKLACRTPSPARPALRAPASATSGSRKRARPPAAPGRDQARPPARRRLRLSVDEVSSPSTPEAPDIPACPSPGQKIKKSTPAAGQPPHLTSAQDQDTISELASCLQRARELGARVRALKASAQDAGESCTPEAEGRPEEPCGEKAPAYQRFHALAQPGLPGLVLPYKYQVLAEMFRSMDTIVGMLHNRSETPTFAKVQRGVQDMMRRRFEECNVGQIKTVYPASYRFRQERSVPTFKDGTRRSDYQLTIEPLLEQEADGAAPQLTASRLLQRRQIFSQKLVEHVKEHHKAFLASLSPAMVVPEDQLTRWHPRFNVDEVPDIEPAALPQPPATEKLTTAQEVLARARNLISPRMEKALSQLALRSAAPSSPGSPRPALPATPPATPPAASPSALKGVSQDLLERIRAKEAQKQLAQMTRCPEQEQRLQRLERLPELARVLRSVFVSERKPALSMEVACARMVGSCCTIMSPGEMEKHLLLLSELLPDWLSLHRIRTDTYVKLDKAADLAHITARLAHQTRAEEGL

SEQ ID NO: 15197 - protein, 190 aa, Homo sapiens
  Payload ID: 2987
  Gene Symbol: CDT1
  Gene Name: chromatin licensing and DNA replication  factor 1
  ENSP ID: ENSP00000456926
  MOD_RES (1)..(1): Any amino acid
XASYRFRQERSVPTFKDGTRRSDYQLTIEPLLEQEADGAAPQLTASRLLQRRQIFSQKLVEHVKEHHKAFLASLSPAMVVPEDQLTRWHPRFNVDEVPDIEPAALPQPPATEKLTTAQEMEKALSQLALRSAAPSSPGSPRPALPATPPATPPAASPSALKGVSQDLLERIRAKEAQKQLAQMTRCPEQE

SEQ ID NO: 15198 - protein, 101 aa, Homo sapiens
  Payload ID: 2988
  Gene Symbol: CHTOP
  Gene Name: chromatin target of PRMT1
  ENSP ID: ENSP00000357675
MQQQQQLASARNRRLAQQMENRPSVQAALKLKQKSLKQRLGKSNIQARLGRPIGALARGAIGGRGLPIIQRGLPRGGLRGGRATRTLLRGGMSLRGQCCVP

SEQ ID NO: 15199 - protein, 223 aa, Homo sapiens
  Payload ID: 2988
  Gene Symbol: CHTOP
  Gene Name: chromatin target of PRMT1
  ENSP ID: ENSP00000357676
MLKNKQPTPVNIRASMQQQQQLASARNRRLAQQMENRPSVQAALKLKQSLKQRLGKSNIQARLGRPIGALARGAIGGRGLPIIQRGLPRGGLRGGRATRTLLRGGMSLRGQNLLRGGRAVAPRMGLRRGGVRGRGGPGRGGLGRGAMGRGGIGGRGRGMIGRGRGGFGGRGRGRGRGRGALARPVLTKEQLDNQLDAYMSKTKGHLDAELDAYMAQTDPETND

SEQ ID NO: 15200 - protein, 249 aa, Homo sapiens
  Payload ID: 2988
  Gene Symbol: CHTOP
  Gene Name: chromatin target of PRMT1
  Uniprot ID: Q9Y3Y2
  ENSP ID: ENSP00000357679
MAAQSAPKVVLKSTTKMSLNERFTNMLKNKQPTPVNIRASMQQQQQLASARNRRLAQQMENRPSVQAALKLKQKSLKQRLGKSNIQARLGRPIGALARGAIGGRGLPIIQRGLPRGGLRGGRATRTLLRGGMSLRGQNLLRGGRAVAPRMGLRRGGVRGRGGPGRGGLGRGAMGRGGIGGRGRGMIGRGRGGFGGRGRGRGRGRGALARPVLTKEQLDNQLDAYMSKTKGHLDAELDAYMAQTDPETND

SEQ ID NO: 15201 - protein, 248 aa, Homo sapiens
  Payload ID: 2988
  Gene Symbol: CHTOP
  Gene Name: chromatin target of PRMT1
  Uniprot ID: Q9Y3Y2
  ENSP ID: ENSP00000357683
MAAQSAPKVVLKSTTKMSLNERFTNMLKNKQPTPVNIRASMQQQQQLASARNRRLAQQMENRPSVQAALKLKQSLKQRLGKSNIQARLGRPIGALARGAIGGRGLPIIQRGLPRGGLRGGRATRTLLRGGMSLRGQNLLRGGRAVAPRMGLRRGGVRGRGGPGRGGLGRGAMGRGGIGGRGRGMIGRGRGGFGGRGRGRGRGRGALARPVLTKEQLDNQLDAYMSKTKGHLDAELDAYMAQTDPETND

SEQ ID NO: 15202 - protein, 202 aa, Homo sapiens
  Payload ID: 2988
  Gene Symbol: CHTOP
  Gene Name: chromatin target of PRMT1
  Uniprot ID: Q9Y3Y2
  ENSP ID: ENSP00000385228
MAAQSAPKVVLKSTTKMSLNERFTNMLKNKQPTPVNIRASMQQQQQLASARNRRLAQQMENRPSVQAALKLKQSLKQRLGKSNIQARLGRPIGALARGAIGGRGLPIIQRGLPRGGLRGGRATRTLLRGGMSLRGRGMIGRGRGGFGGRGRGRGRGRGALARPVLTKEQLDNQLDAYMSKTKGHLDAELDAYMAQTDPETND

SEQ ID NO: 15203 - protein, 76 aa, Homo sapiens
  Payload ID: 2988
  Gene Symbol: CHTOP
  Gene Name: chromatin target of PRMT1
  ENSP ID: ENSP00000484038
MAAQSAPKVVLKSTTKMSLNERFTNMLKNKQPTPVNIRASMQQQQQLASARNRRLAQQMENRPSVQAALKLKQVGV

SEQ ID NO: 15204 - protein, 185 aa, Homo sapiens
  Payload ID: 2989
  Gene Symbol: CBX1
  Gene Name: chromobox homolog 1
  Uniprot ID: P83916
  ENSP ID: ENSP00000225603
MGKKQNKKKVEEVLEEEEEEYVVEKVLDRRVVKGKVEYLLKWKGFSDEDNTWEPEENLDCPDLIAEFLQSQKTAHETDKSEGGKRKADSDSEDKGEESKPKKKKEESEKPRGFARGLEPERIIGATDSSGELMFLMKWKNSDEADLVPAKEANVKCPQVVISFYEERLTWHSYPSEDDDKKDDKN

SEQ ID NO: 15205 - protein, 185 aa, Homo sapiens; identical to SEQ ID NO: 15204
  Payload ID: 2989
  Gene Symbol: CBX1
  Gene Name: chromobox homolog 1
  Uniprot ID: P83916
  ENSP ID: ENSP00000377060

SEQ ID NO: 15206 - protein, 168 aa, Homo sapiens
  Payload ID: 2989
  Gene Symbol: CBX1
  Gene Name: chromobox homolog 1
  ENSP ID: ENSP00000385413
MGKKQNKKKVEEVLEEEEEEYVVEKVLDRRVVKGKVEYLLKWKGFSDEDNTWEPEENLDCPDLIAEFLQSQKTAHETDKSEGGKRKADSDSEDKGEESKPKKKKEEVRIESEKPRGFARGLEPERIIGATDSSGELMFLMKWKNSDEADLVPAKEANVKCPQVVISFY

SEQ ID NO: 15207 - protein, 110 aa, Homo sapiens
  Payload ID: 2989
  Gene Symbol: CBX1
  Gene Name: chromobox homolog 1
  ENSP ID: ENSP00000393179
MGKKQNKKKVEEVLEEEEEEYVVEKVLDRRVVKGKVEYLLKWKGFSDEDNTWEPEENLDCPDLIAEFLQSQKTAHETDKSEGGKRKADSDSEDKGEESKPKKKKEESEKP

SEQ ID NO: 15208 - protein, 173 aa, Homo sapiens
  Payload ID: 2989
  Gene Symbol: CBX1
  Gene Name: chromobox homolog 1
  ENSP ID: ENSP00000462242
MGKKQNKKKVEEVLEEEEEEYVVEKVLDRRVVKGKVEYLLKWKGFSDEDNTWEPEENLDCPDLIAEFLQSQKTAHETDKSEGGKRKADSDSEDKGEESKPKKKKEESEKPRGFARGLEPERIIGATDSSGELMFLMKWKNSDEADLVPAKEANVKCPQVVISFYEERLTWHSY

SEQ ID NO: 15209 - protein, 138 aa, Homo sapiens
  Payload ID: 2989
  Gene Symbol: CBX1
  Gene Name: chromobox homolog 1
  ENSP ID: ENSP00000465985
MGKKQNKKKVEEVLEEEEEEYVVEKVLDRRVVKGKVEYLLKWKGFSDEDNTWEPEENLDCPDLIAEFLQSQKTAHETDKSEGGKRKADSDSEDKGEESKPKKKKEESEKPRGFARGLEPERIIGATDSSGELMFLMKW

SEQ ID NO: 15210 - protein, 211 aa, Homo sapiens
  Payload ID: 2990
  Gene Symbol: CBX2
  Gene Name: chromobox homolog 2
  Uniprot ID: Q14781
  ENSP ID: ENSP00000269399
MEELSSVGEQVFAAECILSKRLRKGKLEYLVKWRGWSSKHNSWEPEENILDPRLLLAFQKKEHEKEVQNRKRGKRPRGRPRKLTAMSSCSRRSKLKVGGCAGYADPTSQHPLGVGGRQREGLGPSGRGWHFCQQSVPLLGKQEPPFFLSLSFCCQGPQPAESSSPPLPGASCFSLSCTPLCWVAGSNCCRQALFPPRGSLGDGKEQEACVQ

SEQ ID NO: 15211 - protein, 532 aa, Homo sapiens
  Payload ID: 2990
  Gene Symbol: CBX2
  Gene Name: chromobox homolog 2
  Uniprot ID: Q14781
  ENSP ID: ENSP00000308750
MEELSSVGEQVFAAECILSKRLRKGKLEYLVKWRGWSSKHNSWEPEENILDPRLLLAFQKKEHEKEVQNRKRGKRPRGRPRKLTAMSSCSRRSKLKEPDAPSKSKSSSSSSSSTSSSSSSDEEDDSDLDAKRGPRGRETHPVPQKKAQILVAKPELKDPIRKKRGRKPLPPEQKATRRPVSLAKVLKTARKDLGAPASKLPPPLSAPVAGLAALKAHAKEACGGPSAMATPENLASLMKGMASSPGRGGISWQSSIVHYMNRMTQSQAQAASRLALKAQATNKCGLGLDLKVRTQKGELGMSPPGSKIPKAPSGGAVEQKVGNTGGPPHTHGASRVPAGCPGPQPAPTQELSLQVLDLQSVKNGMPGVGLLARHATATKGVPATNPAPGKGTGSGLIGASGATMPTDTSKSEKLASRAVAPPTPASKRDCVKGSATPSGQESRTAPGEARKAATLPEMSAGEESSSSDSDPDSASPPSTGQNPSVSVQTSQDWKPTRSLIEHVFVTDVTANLITVTVKESPTSVGFFNLRHY

SEQ ID NO: 15212 - protein, 183 aa, Homo sapiens
  Payload ID: 2991
  Gene Symbol: CBX3
  Gene Name: chromobox homolog 3
  Uniprot ID: Q13185
  ENSP ID: ENSP00000336687
MASNKTTLQKMGKKQNGKSKKVEEAEPEEFVVEKVLDRRVVNGKVEYFLKWKGFTDADNTWEPEENLDCPELIEAFLNSQKAGKEKDGTKRKSLSDSESDDSKSKKKRDAADKPRGFARGLDPERIIGATDSSGELMFLMKWKDSDEADLVLAKEANMKCPQIVIAFYEERLTWHSCPEDEAQ

SEQ ID NO: 15213 - protein, 183 aa, Homo sapiens; identical to SEQ ID NO: 15212
  Payload ID: 2991
  Gene Symbol: CBX3
  Gene Name: chromobox homolog 3
  Uniprot ID: Q13185
  ENSP ID: ENSP00000379670

SEQ ID NO: 15214 - protein, 101 aa, Homo sapiens
  Payload ID: 2991
  Gene Symbol: CBX3
  Gene Name: chromobox homolog 3
  ENSP ID: ENSP00000387348
MASNKTTLQKMGKKQNGKSKKVEEAEPEEFVVEKVLDRRVVNGKVEYFLKWKGFTEKLAKKKMVQKENLYLTVNLMTANQRRKEMLLTNQEDLPEVLILKE

SEQ ID NO: 15215 - protein, 62 aa, Homo sapiens
  Payload ID: 2991
  Gene Symbol: CBX3
  Gene Name: chromobox homolog 3
  ENSP ID: ENSP00000408672
MASNKTTLQKMGKKQNGKSKKVEEAEPEEFVVEKVLDRRVVNGKVEYFLKWKGFTDADNTWE

SEQ ID NO: 15216 - protein, 107 aa, Homo sapiens
  Payload ID: 2991
  Gene Symbol: CBX3
  Gene Name: chromobox homolog 3
  ENSP ID: ENSP00000473748
QKMGKKQNGKSKKVEEAEPEEFVVEKVLDRRVVNGKVEYFLKWKGFTDADNTWEPEENLDCPELIEAFLNSQKAGKEKDGTKRKSLSDSESDDSKSKKKRDAMRKRD

SEQ ID NO: 15217 - protein, 560 aa, Homo sapiens
  Payload ID: 2992
  Gene Symbol: CBX4
  Gene Name: chromobox homolog 4
  Uniprot ID: O00257
  ENSP ID: ENSP00000269397
MELPAVGEHVFAVESIEKKRIRKGRVEYLVKWRGWSPKYNTWEPEENILDPRLLIAFQNRERQEQLMGYRKRGPKPKPLVVQVPTFARRSNVLTGLQDSSTDNRAKLDLGAQGKGQGHQYELNSKKHHQYQPHSKERAGKPPPPGKSGKYYYQLNSKKHHPYQPDPKMYDLQYQGGHKEAPSPTCPDLGAKSHPPDKWAQGAGAKGYLGAVKPLAGAAGAPGKGSEKGPPNGMMPAPKEAVTGNGIGGKMKIVKNKNKNGRIVIVMSKYMENGMQAVKIKSGEVAEGEARSPSHKKRAADERHPPADRTFKKAAGAEEKKVEAPPKRREEEVSGVSDPQPQDAGSRKLSPTKEAFGEQPLQLTTKPDLLAWDPARNTHPPSHHPHPHPHHHHHHHHHHHHAVGLNLSHVRKRCLSETHGEREPCKKRLTARSISTPTCLGGSPAAERPADLPPAAALPQPEVILLDSDLDEPIDLRCVKTRSEAGEPPSSLQVKPETPASAAVAVAAAAAPTTTAEKPPAEAQDEPAESLSEFKPFFGNIIITDVTANCLTVTFKEYVTV

SEQ ID NO: 15218 - protein, 60 aa, Homo sapiens
  Payload ID: 2992
  Gene Symbol: CBX4
  Gene Name: chromobox homolog 4
  ENSP ID: ENSP00000415348
MELPAVGEHVFAVESIEKKRIRKGRVEYLVKWRGWSPKYNTWEPEENILDPRLLIAFQNS

SEQ ID NO: 15219 - protein, 90 aa, Homo sapiens
  Payload ID: 2992
  Gene Symbol: CBX4
  Gene Name: chromobox homolog 4
  ENSP ID: ENSP00000461198
  MOD_RES (1)..(1): Any amino acid
XENILDPRLLIAFQNRERQEQLMGYRKRGPKPKPLVVQTSHLLPPMRQLRTWWGLGRSRNSRHAVGLSPPSSHPCTRSLRCLPLPVVPMS

SEQ ID NO: 15220 - protein, 191 aa, Homo sapiens
  Payload ID: 2993
  Gene Symbol: CBX5
  Gene Name: chromobox homolog 5
  Uniprot ID: P45973
  ENSP ID: ENSP00000209875
MGKKTKRTADSSSSEDEEEYVVEKVLDRRVVKGQVEYLLKWKGFSEEHNTWEPEKNLDCPELISEFMKKYKKMKEGENNKPREKSESNKRKSNFSNSADDIKSKKKREQSNDIARGFERGLEPEKIIGATDSCGDLMFLMKWKDTDEADLVLAKEANVKCPQIVIAFYEERLTWHAYPEDAENKEKETAKS

SEQ ID NO: 15221 - protein, 191 aa, Homo sapiens; identical to SEQ ID NO: 15220
  Payload ID: 2993
  Gene Symbol: CBX5
  Gene Name: chromobox homolog 5
  Uniprot ID: P45973
  ENSP ID: ENSP00000401009

SEQ ID NO: 15222 - protein, 191 aa, Homo sapiens; identical to SEQ ID NO: 15220
  Payload ID: 2993
  Gene Symbol: CBX5
  Gene Name: chromobox homolog 5
  Uniprot ID: P45973
  ENSP ID: ENSP00000449207

SEQ ID NO: 15223 - protein, 91 aa, Homo sapiens
  Payload ID: 2993
  Gene Symbol: CBX5
  Gene Name: chromobox homolog 5
  ENSP ID: ENSP00000450190
MGKKTKRTADSSSSEDEEEYVVEKVLDRRVVKGQVEYLLKWKGFSEEHNTWEPEKNLDCPELISEFMKKYKKMKEGENNKPREKSESNKRK

SEQ ID NO: 15224 - protein, 394 aa, Homo sapiens
  Payload ID: 2994
  Gene Symbol: CBX6
  Gene Name: chromobox homolog 6
  ENSP ID: ENSP00000216083
MELSAVGERVFAAESIIKRRIRKGRIEYLVKWKGWAIKYSTWEPEENILDSRLIAAFEQKERERELYGPKKRGPKPKTFLLKPSASASSPKLHSSAAVHRLKKDIRRCHRMSRRPLPRPDPQGGSPGLRPPISPFSETVRIINRKVKPREPKRNRIILNLKVIDKGAGGGGAGQGAGALARPKVPSRNRVIGKSKKFSESVLRTQIRHMKFGAFALYKPPPAPLVAPSPGKAEASAPGPGLLLAAPAAPYDARSSGSSGCPSPTPQSSDPDDTPPKLLPETVSPSAPSWREPEVLDLSLPPESAATSKRAPPEVTAAAGPAPPTAPEPAGASSEPEAGDWRPEMSPCSNVVVTDVTSNLLTVTIKEFCNPEDFEKVAAGVAGAAGGGGSIGASK

SEQ ID NO: 15225 - protein, 412 aa, Homo sapiens
  Payload ID: 2994
  Gene Symbol: CBX6
  Gene Name: chromobox homolog 6
  Uniprot ID: O95503
  ENSP ID: ENSP00000384490
MELSAVGERVFAAESIIKRRIRKGRIEYLVKWKGWAIKYSTWEPEENILDSRLIAAFEQKERERELYGPKKRGPKPKTFLLKARAQAEALRISDVHFSVKPSASASSPKLHSSAAVHRLKKDIRRCHRMSRRPLPRPDPQGGSPGLRPPISPFSETVRIINRKVKPREPKRNRIILNLKVIDKGAGGGGAGQGAGALARPKVPSRNRVIGKSKKFSESVLRTQIRHMKFGAFALYKPPPAPLVAPSPGKAEASAPGPGLLLAAPAAPYDARSSGSSGCPSPTPQSSDPDDTPPKLLPETVSPSAPSWREPEVLDLSLPPESAATSKRAPPEVTAAAGPAPPTAPEPAGASSEPEAGDWRPEMSPCSNVVVTDVTSNLLTVTIKEFCNPEDFEKVAAGVAGAAGGGGSIGASK

SEQ ID NO: 15226 - protein, 251 aa, Homo sapiens
  Payload ID: 2995
  Gene Symbol: CBX7
  Gene Name: chromobox homolog 7
  Uniprot ID: O95931
  ENSP ID: ENSP00000216133
MELSAIGEQVFAVESIRKKRVRKGKVEYLVKWKGWPPKYSTWEPEEHILDPRLVMAYEEKEERDRASGYRKRGPKPKRLLLQRLYSMDLRSSHKAKGKEKLCFSLTCPLGSGSPEGVVKAGAPELVDKGPLVPTLPFPLRKPRKAHKYLRLSRKKFPPRGPNLESHSHRRELFLQEPPAPDVLQAAGEWEPAAQPPEEEADADLAEGPPPWTPALPSSEVTVTDITANSITVTFREAQAAEGFFRDRSGKF

SEQ ID NO: 15227 - protein, 158 aa, Homo sapiens
  Payload ID: 2995
  Gene Symbol: CBX7
  Gene Name: chromobox homolog 7
  ENSP ID: ENSP00000384035
MELSAIGEQVFAVESIRKKRVRKGKVEYLVKWKGWPPKYSTWEPEEHILDPRLVMAYEEKEERDRASGYRKRGPKPKRLLLQEPPAPDVLQAAGEWEPAAQPPEEEADADLAEGPPPWTPALPSSEVTVTDITANSITVTFREAQAAEGFFRDRSGKF

SEQ ID NO: 15228 - protein, 121 aa, Homo sapiens
  Payload ID: 2995
  Gene Symbol: CBX7
  Gene Name: chromobox homolog 7
  ENSP ID: ENSP00000410896
MELSAIGEQVFAVESIRKKRVRKGKVEYLVKWKGWPPKEERDRASGYRKRGPKPKRLLLQRLYSMDLRSSHKAKGKEKLCFSLTCPLGSGSPEGVVKAGAPELVDKGPLVPTLPFPLRKPR

SEQ ID NO: 15229 - protein, 389 aa, Homo sapiens
  Payload ID: 2996
  Gene Symbol: CBX8
  Gene Name: chromobox homolog 8
  Uniprot ID: Q9HC52
  ENSP ID: ENSP00000269385
MELSAVGERVFAAEALLKRRIRKGRMEYLVKWKGWSQKYSTWEPEENILDARLLAAFEEREREMELYGPKKRGPKPKTFLLKAQAKAKAKTYEFRSDSARGIRIPYPGRSPQDLASTSRAREGLRNMGLSPPASSTSTSSTCRAEAPRDRDRDRDRDRERDRERERERERERERERERERGTSRVDDKPSSPGDSSKKRGPKPRKELPDPSQRPLGEPSAGLGEYLKGRKLDDTPSGAGKFPAGHSVIQLARRQDSDLVQCGVTSPSSAEATGKLAVDTFPARVIKHRAAFLEAKGQGALDPNGTRVRHGSGPPSSGGGLYRDMGAQGGRPSLIARIPVARILGDPEEESWSPSLTNLEKVVVTDVTSNFLTVTIKESNTDQGFFKEKR

SEQ ID NO: 15230 - protein, 242 aa, Homo sapiens
  Payload ID: 2996
  Gene Symbol: CBX8
  Gene Name: chromobox homolog 8
  ENSP ID: ENSP00000405058
MSAAHVGKSGGQEGRMEYLVKWKGWSQKYSTWEPEENILDARLLAAFEEREREMELYGPKKRGPKPKTFLLKAQAKAKAKTYEFRSDSARGIRIPYPGRSPQDLASTSRAREGLRNMGLSPPASSTSTSSTCRAEAPRDRDRDRDRDRERDRERERERERERERERERERGTSRVDDKPSSPGDSSKKRGPKPRKELPDPSQRPLGEPSAGLGEYLKGRKLDDTPSGAGKFPAGHSVIQLAR

SEQ ID NO: 15231 - protein, 175 aa, Homo sapiens
  Payload ID: 2996
  Gene Symbol: CBX8
  Gene Name: chromobox homolog 8
  ENSP ID: ENSP00000408753
MEYLVKWKGWSQKYSTWEPEENILDARLLAAFEEREREMELYGPKKRGPKPKTFLLKAQAKAKAKTYEFRSDSARGIRIPYPGRSPQDLASTSRAREGLRNMGLSPPASSTSTSSTCRAEAPRDRDRDRDRDRERDRERERERERERERERERERGTSRVDDKPSSPGDSSKKRG

SEQ ID NO: 15232 - protein, 1710 aa, Homo sapiens
  Payload ID: 2997
  Gene Symbol: CHD1
  Gene Name: chromodomain helicase DNA binding protein 1
  Uniprot ID: O14646
  ENSP ID: ENSP00000284049
MNGHSDEESVRNSSGESSQSDDDSGSASGSGSGSSSGSSSDGSSSQSGSSDSDSGSESGSQSESESDTSRENKVQAKPPKVDGAEFWKSSPSILAVQRSAILKKQQQQQQQQQHQASSNSGSEEDSSSSEDSDDSSSEVKRKKHKDEDWQMSGSGSPSQSGSDSESEEEREKSSCDETESDYEPKNKVKSRKPQNRSKSKNGKKILGQKKRQIDSSEEDDDEEDYDNDKRSSRRQATVNVSYKEDEEMKTDSDDLLEVCGEDVPQPEEEEFETIERFMDCRIGRKGATGATTTIYAVEADGDPNAGFEKNKEPGEIQYLIKWKGWSHIHNTWETEETLKQQNVRGMKKLDNYKKKDQETKRWLKNASPEDVEYYNCQQELTDDLHKQYQIVERIIAHSNQKSAAGYPDYYCKWQGLPYSECSWEDGALISKKFQACIDEYFSRNQSKTTPFKDCKVLKQRPRFVALKKQPSYIGGHEGLELRDYQLNGLNWLAHSWCKGNSCILADEMGLGKTIQTISFLNYLFHEHQLYGPFLLVVPLSTLTSWQREIQTWASQMNAVVYLGDINSRNMIRTHEWTHHQTKRLKFNILLTTYEILLKDKAFLGGLNWAFIGVDEAHRLKNDDSLLYKTLIDFKSNHRLLITGTPLQNSLKELWSLLHFIMPEKFSSWEDFEEEHGKGREYGYASLHKELEPFLLRRVKKDVEKSLPAKVEQILRMEMSALQKQYYKWILTRNYKALSKGSKGSTSGFLNIMMELKKCCNHCYLIKPPDNNEFYNKQEALQHLIRSSGKLILLDKLLIRLRERGNRVLIFSQMVRMLDILAEYLKYRQFPFQRLDGSIKGELRKQALDHFNAEGSEDFCFLLSTRAGGLGINLASADTVVIFDSDWNPQNDLQAQARAHRIGQKKQVNIYRLVTKGSVEEDILERAKKKMVLDHLVIQRMDTTGKTVLHTGSAPSSSTPFNKEELSAILKFGAEELFKEPEGEEQEPQEMDIDEILKRAETHENEPGPLTVGDELLSQFKVANFSNMDEDDIELEPERNSKNWEEIIPEDQRRRLEEEERQKELEEIYMLPRMRNCAKQISFNGSEGRRSRSRRYSGSDSDSISEGKRPKKRGRPRTIPRENIKGFSDAEIRRFIKSYKKFGGPLERLDAIARDAELVDKSETDLRRLGELVHNGCIKALKDSSSGTERTGGRLGKVKGPTFRISGVQVNAKLVISHEEELIPLHKSIPSDPEERKQYTIPCHTKAAHFDIDWGKEDDSNLLIGIYEYGYGSWEMIKMDPDLSLTHKILPDDPDKKPQAKQLQTRADYLIKLLSRDLAKKEALSGAGSSKRRKARAKKNKAMKSIKVKEEIKSDSSPLPSEKSDEDDDKLSESKSDGRERSKKSSVSDAPVHITASGEPVPISEESEELDQKTFSICKERMRPVKAALKQLDRPEKGLSEREQLEHTRQCLIKIGDHITECLKEYTNPEQIKQWRKNLWIFVSKFTEFDARKLHKLYKHAIKKRQESQQNSDQNSNLNPHVIRNPDVERLKENTNHDDSSRDSYSSDRHLTQYHDHHKDRHQGDSYKKSDSRKRPYSSFSNGKDHRDWDHYKQDSRYYSDREKHRKLDDHRSRDHRSNLEGSLKDRSHSDHRSHSDHRLHSDHRSSSEYTHHKSSRDYRYHSDWQMDHRASSSGPRSPLDQRSPYGSRSPFEHSVEHKSTPEHTWSSRKT

SEQ ID NO: 15233 - protein, 113 aa, Homo sapiens
  Payload ID: 2997
  Gene Symbol: CHD1
  Gene Name: chromodomain helicase DNA binding protein 1
  ENSP ID: ENSP00000422225
ESKSDGRERSKKSSVSDAPVHITASGEPVPISEESEELDQKTFSICKERMRPVKAALKQLDRPEKGLSEREQLEHTRQCLIKIGDHITECLKEYTNPEQIKQWRNKTVIKTAT

SEQ ID NO: 15234 - protein, 22 aa, Homo sapiens
  Payload ID: 2997
  Gene Symbol: CHD1
  Gene Name: chromodomain helicase DNA binding protein 1
  ENSP ID: ENSP00000422589
ISEESEELDQKTFSIKPVDFCI

SEQ ID NO: 15235 - protein, 272 aa, Homo sapiens
  Payload ID: 2997
  Gene Symbol: CHD1
  Gene Name: chromodomain helicase DNA binding protein 1
  ENSP ID: ENSP00000479403
  MOD_RES (1)..(1): Any amino acid
XPDKKPQAKQLQTRADYLIKLLSRDLAKKEALSGAGSSKRRKARAKKNKAMKSIKVKEEIKSDSSPLPSEKSDEDDDKDEISSVKHPNKKIKTERDSEEKPEPDVYIKKEPEEKREAKEKENKKELKREIKEKEDKKDIKEKDFKEKRENKVKEAIQKEKDIKEEKLSESKSDGRERSKKSSVSDAPVHITASGEPVPISEESEELDQKTFSICKERMRPVKAALKQLDRPEKGLSEREQLEHTRQCLIKIGDHITECLKEYTNPEQIKQWR

SEQ ID NO: 15236 - protein, 1710 aa, Homo sapiens; identical to SEQ ID NO: 15232
  Payload ID: 2997
  Gene Symbol: CHD1
  Gene Name: chromodomain helicase DNA binding protein 1
  Uniprot ID: O14646
  ENSP ID: ENSP00000483667

SEQ ID NO: 15237 - protein, 616 aa, Homo sapiens
  Payload ID: 2998
  Gene Symbol: CHD1L
  Gene Name: chromodomain helicase DNA binding protein 1-like
  ENSP ID: ENSP00000355100
MSALQKKYYKAILMKDLDAFENETAKKVKLQNILSQLRKCVDHPYLFDGVEPEPFEVGDHLTEASGKLHLLDKLLAFLYSGGHRVLLFSQMTQMLDILQDYMDYRGYSYERVDGSVRGEERHLAIKNFGQQPIFVFLLSTRAGGVGMNLTAADTVIFVDSDFNPQNDLQAAARAHRIGQNKSVKVIRLIGRDTVEEIVYRKAASKLQLTNMIIEGGHFTLGAQKPAADADLQLSEILKFGLDKLLASEGSTMDEIDLESILGETKDGQWVSDALPAAEGGSRDQEEGKNHMYLFEGKDYSKEPSKEDRKSFEQLVNLQKTLLEKASQEGRSLRNKGSVLIPGLVEGSTKRKRVLSPEELEDRQKKRQEAAAKRRRLIEEKKRQKEEAEHKKKMAWWESNNYQSFCLPSEESEPEDLENGEESSAELDYQDPDATSLKYVSGDVTHPQAGAEDALIVHCVDDSGHWGRGGLFTALEKRSAEPRKIYELAGKMKDLSLGGVLLFPVDDKESRNKGQDLLALIVAQHRDRSNVLSGIKMAALEEGLKKIFLAAKKKKASVHLPRIGHATKGFNWYGTERLIRKHLAARGIPTYIYYFPRSKSAVLHSQSSSSSSRQLVP

SEQ ID NO: 15238 - protein, 897 aa, Homo sapiens
  Payload ID: 2998
  Gene Symbol: CHD1L
  Gene Name: chromodomain helicase DNA binding protein 1-like
  Uniprot ID: Q86WJ1
  ENSP ID: ENSP00000358262
MERAGATSRGGQAPGFLLRLHTEGRAEAARVQEQDLRQWGLTGIHLRSYQLEGVNWLAQRFHCQNGCILGDEMGLGKTCQTIALFIYLAGRLNDEGPFLILCPLSVLSNWKEEMQRFAPGLSCVTYAGDKEERACLQQDLKQESRFHVLLTTYEICLKDASFLKSFPWSVLVVDEAHRLKNQSSLLHKTLSEFSVVFSLLLTGTPIQNSLQELYSLLSFVEPDLFSKEEVGDFIQRYQDIEKESESASELHKLLQPFLLRRVKAEVATELPKKTEVVIYHGMSALQKKYYKAILMKDLDAFENETAKKVKLQNILSQLRKCVDHPYLFDGVEPEPFEVGDHLTEASGKLHLLDKLLAFLYSGGHRVLLFSQMTQMLDILQDYMDYRGYSYERVDGSVRGEERHLAIKNFGQQPIFVFLLSTRAGGVGMNLTAADTVIFVDSDFNPQNDLQAAARAHRIGQNKSVKVIRLIGRDTVEEIVYRKAASKLQLTNMIIEGGHFTLGAQKPAADADLQLSEILKFGLDKLLASEGSTMDEIDLESILGETKDGQWVSDALPAAEGGSRDQEEGKNHMYLFEGKDYSKEPSKEDRKSFEQLVNLQKTLLEKASQEGRSLRNKGSVLIPGLVEGSTKRKRVLSPEELEDRQKKRQEAAAKRRRLIEEKKRQKEEAEHKKKMAWWESNNYQSFCLPSEESEPEDLENGEESSAELDYQDPDATSLKYVSGDVTHPQAGAEDALIVHCVDDSGHWGRGGLFTALEKRSAEPRKIYELAGKMKDLSLGGVLLFPVDDKESRNKGQDLLALIVAQHRDRSNVLSGIKMAALEEGLKKIFLAAKKKKASVHLPRIGHATKGFNWYGTERLIRKHLAARGIPTYIYYFPRSKSAVLHSQSSSSSSRQLVP

SEQ ID NO: 15239 - protein, 693 aa, Homo sapiens
  Payload ID: 2998
  Gene Symbol: CHD1L
  Gene Name: chromodomain helicase DNA binding protein 1-like
  Uniprot ID: Q86WJ1
  ENSP ID: ENSP00000358263
MERAGATSRGGQAPGFLLRLHTEGRAEAARVQEQDLRQWGLTASELHKLLQPFLLRRVKAEVATELPKKTEVVIYHGMSALQKKYYKAILMKDLDAFENETAKKVKLQNILSQLRKCVDHPYLFDGVEPEPFEVGDHLTEASGKLHLLDKLLAFLYSGGHRVLLFSQMTQMLDILQDYMDYRGYSYERVDGSVRGEERHLAIKNFGQQPIFVFLLSTRAGGVGMNLTAADTVIFVDSDFNPQNDLQAAARAHRIGQNKSVKVIRLIGRDTVEEIVYRKAASKLQLTNMIIEGGHFTLGAQKPAADADLQLSEILKFGLDKLLASEGSTMDEIDLESILGETKDGQWVSDALPAAEGGSRDQEEGKNHMYLFEGKDYSKEPSKEDRKSFEQLVNLQKTLLEKASQEGRSLRNKGSVLIPGLVEGSTKRKRVLSPEELEDRQKKRQEAAAKRRRLIEEKKRQKEEAEHKKKMAWWESNNYQSFCLPSEESEPEDLENGEESSAELDYQDPDATSLKYVSGDVTHPQAGAEDALIVHCVDDSGHWGRGGLFTALEKRSAEPRKIYELAGKMKDLSLGGVLLFPVDDKESRNKGQDLLALIVAQHRDRSNVLSGIKMAALEEGLKKIFLAAKKKKASVHLPRIGHATKGFNWYGTERLIRKHLAARGIPTYIYYFPRSKSAVLHSQSSSSSSRQLVP

SEQ ID NO: 15240 - protein, 797 aa, Homo sapiens
  Payload ID: 2998
  Gene Symbol: CHD1L
  Gene Name: chromodomain helicase DNA binding protein 1-like
  ENSP ID: ENSP00000389031
MAVSWEMRWAWGRPARFAPGLSCVTYAGDKEERACLQQDLKQESRFHVLLTTYEICLKDASFLKSFPWSVLVVDEAHRLKNQSSLLHKTLSEFSVVFSLLLTGTPIQNSLQELYSLLSFVEPDLFSKEEVGDFIQRYQDIEKESESASELHKLLQPFLLRRVKAEVATELPKKTEVVIYHGMSALQKKYYKAILMKDLDAFENETAKKVKLQNILSQLRKCVDHPYLFDGVEPEPFEVGDHLTEASGKLHLLDKLLAFLYSGGHRVLLFSQMTQMLDILQDYMDYRGYSYERVDGSVRGEERHLAIKNFGQQPIFVFLLSTRAGGVGMNLTAADTVIFVDSDFNPQNDLQAAARAHRIGQNKSVKVIRLIGRDTVEEIVYRKAASKLQLTNMIIEGGHFTLGAQKPAADADLQLSEILKFGLDKLLASEGSTMDEIDLESILGETKDGQWVSDALPAAEGGSRDQEEGKNHMYLFEGKDYSKEPSKEDRKSFEQLVNLQKTLLEKASQEGRSLRNKGSVLIPGLVEGSTKRKRVLSPEELEDRQKKRQEAAAKRRRLIEEKKRQKEEAEHKKKMAWWESNNYQSFCLPSEESEPEDLENGEESSAELDYQDPDATSLKYVSGDVTHPQAGAEDALIVHCVDDSGHWGRGGLFTALEKRSAEPRKIYELAGKMKDLSLGGVLLFPVDDKESRNKGQDLLALIVAQHRDRSNVLSGIKMAALEEGLKKIFLAAKKKKASVHLPRIGHATKGFNWYGTERLIRKHLAARGIPTYIYYFPRSKSAVLHSQSSSSSSRQLVP

SEQ ID NO: 15241 - protein, 377 aa, Homo sapiens
  Payload ID: 2998
  Gene Symbol: CHD1L
  Gene Name: chromodomain helicase DNA binding protein 1-like
  ENSP ID: ENSP00000477985
MERAGATSRGGQAPGFLLRLHTEGRAEAARVQEQDLRQWGLTGIHLRSYQLEGVNWLAQRFHCQNGCILGDEMGLGKTCQTIALFIYLAGRLNDEGPFLILCPLSVLSNWKEEMQRFAPGLSCVTYAGDKEERACLQQDLKQESRFHVLLTTYEICLKDASFLKSFPWSVLVVDEAHRLKNQSSLLHKTLSEFSVVFSLLLTGTPIQNSLQELYSLLSFVEPDLFSKEEVGDFIQRYQDIEKESESASELHKLLQPFLLRRVKAEVATELPKKTEVVIYHGMSALQKKYYKAILMKDLDAFENETAKKVKLQNILSQLRKCVDHPYLFDGVEPEPFEVGDHLTEASGKLHLLDKLLAFLYSGWSWHELNSSRYCDFC

SEQ ID NO: 15242 - protein, 82 aa, Homo sapiens
  Payload ID: 2998
  Gene Symbol: CHD1L
  Gene Name: chromodomain helicase DNA binding protein 1-like
  ENSP ID: ENSP00000480553
MERAGATSRGGQAPGFLLRLHTEGRAEAARVQEQDLRQWGLTGIHLRSYQLEGVNWLAQRFHCQNGCILGDEMGLGKTCQED

SEQ ID NO: 15243 - protein, 56 aa, Homo sapiens
  Payload ID: 2998
  Gene Symbol: CHD1L
  Gene Name: chromodomain helicase DNA binding protein 1-like
  ENSP ID: ENSP00000482764
MERAGATSRGGQAPGFLLRLHTEGRAEAARVQEQDLRQWGLTDSLGVFLLWMKLTG

SEQ ID NO: 15244 - protein, 1828 aa, Homo sapiens
  Payload ID: 2999
  Gene Symbol: CHD2
  Gene Name: chromodomain helicase DNA binding protein 2
  Uniprot ID: O14647
  ENSP ID: ENSP00000377747
MMRNKDKSQEEDSSLHSNASSHSASEEASGSDSGSQSESEQGSDPGSGHGSESNSSSESSESQSESESESAGSKSQPVLPEAKEKPASKKERIADVKKMWEEYPDVYGVRRSNRSRQEPSRFNIKEEASSGSESGSPKRRGQRQLKKQEKWKQEPSEDEQEQGTSAESEPEQKKVKARRPVPRRTVPKPRVKKQPKTQRGKRKKQDSSDEDDDDDEAPKRQTRRRAAKNVSYKEDDDFETDSDDLIEMTGEGVDEQQDNSETIEKVLDSRLGKKGATGASTTVYAIEANGDPSGDFDTEKDEGEIQYLIKWKGWSYIHSTWESEESLQQQKVKGLKKLENFKKKEDEIKQWLGKVSPEDVEYFNCQQELASELNKQYQIVERVIAVKTSKSTLGQTDFPAHSRKPAPSNEPEYLCKWMGLPYSECSWEDEALIGKKFQNCIDSFHSRNNSKTIPTRECKALKQRPRFVALKKQPAYLGGENLELRDYQLEGLNWLAHSWCKNNSVILADEMGLGKTIQTISFLSYLFHQHQLYGPFLIVVPLSTLTSWQREFEIWAPEINVVVYIGDLMSRNTIREYEWIHSQTKRLKFNALITTYEILLKDKTVLGSINWAFLGVDEAHRLKNDDSLLYKTLIDFKSNHRLLITGTPLQNSLKELWSLLHFIMPEKFEFWEDFEEDHGKGRENGYQSLHKVLEPFLLRRVKKDVEKSLPAKVEQILRVEMSALQKQYYKWILTRNYKALAKGTRGSTSGFLNIVMELKKCCNHCYLIKPPEENERENGQEILLSLIRSSGKLILLDKLLTRLRERGNRVLIFSQMVRMLDILAEYLTIKHYPFQRLDGSIKGEIRKQALDHFNADGSEDFCFLLSTRAGGLGINLASADTVVIFDSDWNPQNDLQAQARAHRIGQKKQVNIYRLVTKGTVEEEIIERAKKKMVLDHLVIQRMDTTGRTILENNSGRSNSNPFNKEELTAILKFGAEDLFKELEGEESEPQEMDIDEILRLAETRENEVSTSATDELLSQFKVANFATMEDEEELEERPHKDWDEIIPEEQRKKVEEEERQKELEEIYMLPRIRSSTKKAQTNDSDSDTESKRQAQRSSASESETEDSDDDKKPKRRGRPRSVRKDLVEGFTDAEIRRFIKAYKKFGLPLERLECIARDAELVDKSVADLKRLGELIHNSCVSAMQEYEEQLKENASEGKGPGKRRGPTIKISGVQVNVKSIIQHEEEFEMLHKSIPVDPEEKKKYCLTCRVKAAHFDVEWGVEDDSRLLLGIYEHGYGNWELIKTDPELKLTDKILPVETDKKPQGKQLQTRADYLLKLLRKGLEKKGAVTGGEEAKLKKRKPRVKKENKVPRLKEEHGIELSSPRHSDNPSEEGEVKDDGLEKSPMKKKQKKKENKENKEKQMSSRKDKEGDKERKKSKDKKEKPKSGDAKSSSKSKRSQGPVHITAGSEPVPIGEDEDDDLDQETFSICKERMRPVKKALKQLDKPDKGLNVQEQLEHTRNCLLKIGDRIAECLKAYSDQEHIKLWRRNLWIFVSKFTEFDARKLHKLYKMAHKKRSQEEEEQKKKDDVTGGKKPFRPEASGSSRDSLISQSHTSHNLHPQKPHLPASHGPQMHGHPRDNYNHPNKRHFSNADRGDWQRERKFNYGGGNNNPPWGSDRHHQYEQHWYKDHHYGDRRHMDAHRSGSYRPNNMSRKRPYDQYSSDRDHRGHRDYYDRHHHDSKRRRSDEFRPQNYHQQDFRRMSDHRPAMGYHGQGPSDHYRSFHTDKLGEYKQPLPPLHPAVSDPRSPPSQKSPHDSKSPLDHRSPLERSLEQKNNPDYNWNVRKT

SEQ ID NO: 15245 - protein, 501 aa, Homo sapiens
  Payload ID: 2999
  Gene Symbol: CHD2
  Gene Name: chromodomain helicase DNA binding protein 2
  Uniprot ID: O14647
  ENSP ID: ENSP00000406581
MMRNKDKSQEEDSSLHSNASSHSASEEASGSDSGSQSESEQGSDPGSGHGSESNSSSESSESQSESESESAGSKSQPVLPEAKEKPASKKERIADVKKMWEEYPDVYGVRRSNRSRQEPSRFNIKEEASSGSESGSPKRRGQRQLKKQEKWKQEPSEDEQEQGTSAESEPEQKKVKARRPVPRRTVPKPRVKKQPKTQRGKRKKQDSSDEDDDDDEAPKRQTRRRAAKNVSYKEDDDFETDSDDLIEMTGEGVDEQQDNSETIEKVLDSRLGKKGATGASTTVYAIEANGDPSGDFDTEKDEGEIQYLIKWKGWSYIHSTWESEESLQQQKVKGLKKLENFKKKEDEIKQWLGKVSPEDVEYFNCQQELASELNKQYQIVERVIAVKTSKSTLGQTDFPAHSRKPAPSNEPEYLCKWMGLPYSECSWEDEALIGKKFQNCIDSFHSRNNSKTIPTRECKALKQRPRFVALKKQPAYLGGENLELRDYQLEGLNWLAHSWCK

SEQ ID NO: 15246 - protein, 35 aa, Homo sapiens
  Payload ID: 2999
  Gene Symbol: CHD2
  Gene Name: chromodomain helicase DNA binding protein 2
  ENSP ID: ENSP00000485681
GVEDDSRLLLGIYEHGYGNWELIKTDPELKLTDKL

SEQ ID NO: 15247 - protein, 57 aa, Homo sapiens
  Payload ID: 2999
  Gene Symbol: CHD2
  Gene Name: chromodomain helicase DNA binding protein 2
  ENSP ID: ENSP00000485890
MWEEYPDVYGVRRSNRSRQEPSRFNIKEEASSGSESGSPKRRGQRQLKKQEKWKQEP

SEQ ID NO: 15248 - protein, 34 aa, Homo sapiens
  Payload ID: 2999
  Gene Symbol: CHD2
  Gene Name: chromodomain helicase DNA binding protein 2
  ENSP ID: ENSP00000485982
  MOD_RES (1)..(1): Any amino acid
XSQEEEEQKKKDDVTGEASFACLPWPTDAWTPKR

SEQ ID NO: 15249 - protein, 77 aa, Homo sapiens
  Payload ID: 2999
  Gene Symbol: CHD2
  Gene Name: chromodomain helicase DNA binding protein 2
  ENSP ID: ENSP00000486007
  MOD_RES (1)..(1): Any amino acid
XVDPEEKKKYCLTCRVKAAHFDVEWGVEDDSRLLLGIYEHGYGNWELIKTDPELKLTDKLQGFPAPGRRKSTTAGML

SEQ ID NO: 15250 - protein, 113 aa, Homo sapiens
  Payload ID: 2999
  Gene Symbol: CHD2
  Gene Name: chromodomain helicase DNA binding protein 2
  ENSP ID: ENSP00000486391
PPEENERENGQEILLRLDGSIKGEIRKQALDHFNADGSEDFCFLLSTRAGGLGINLASADTVVIFDSDWNPQNDLQAQARAHRIGQKKQVNIYRLVTKGTVEEEIIERAKKKM

SEQ ID NO: 15251 - protein, 121 aa, Homo sapiens
  Payload ID: 2999
  Gene Symbol: CHD2
  Gene Name: chromodomain helicase DNA binding protein 2
  ENSP ID: ENSP00000486417
  MOD_RES (1)..(1): Any amino acid
XIKWKGWSYIHSTWESEESLQQQKVKGLKKLENFKKKEDEIKQWLGKVSPEDVEYFNCQQELASELNKQYQIVERVIAHSRKPAPSNEPEYLCKWMGLPYSECSWEDEALIGKKFQNCIDS

SEQ ID NO: 15252 - protein, 514 aa, Homo sapiens
  Payload ID: 2999
  Gene Symbol: CHD2
  Gene Name: chromodomain helicase DNA binding protein 2
  ENSP ID: ENSP00000486487
MAHKQREDYLNLSPCVFTWYRTFSQLAFDGEKLSHSASEEASGSDSGSQSESEQGSDPGSGHGSESNSSSESSESQSESESESAGSKSQPVLPEAKEKPASKKERIADVKKMWEEYPDVYGVRRSNRSRQEPSRFNIKEEASSGSESGSPKRRGQRQLKKQEKWKQEPSEDEQEQGTSAESEPEQKKVKARRPVPRRTVPKPRVKKQPKTQRGKRKKQDSSDEDDDDDEAPKRQTRRRAAKNVSYKEDDDFETDSDDLIEMTGEGVDEQQDNSETIEKVLDSRLGKKGATGASTTVYAIEANGDPSGDFDTEKDEGEIQYLIKWKGWSYIHSTWESEESLQQQKVKGLKKLENFKKKEDEIKQWLGKVSPEDVEYFNCQQELASELNKQYQIVERVIAVKTSKSTLGQTDFPAHSRKPAPSNEPEYLCKWMGLPYSECSWEDEALIGKKFQNCIDSFHSRNNSKTIPTRECKALKQRPRFVALKKQPAYLGGENLELRDYQLEGLNWLAHSWCK

SEQ ID NO: 15253 - protein, 1739 aa, Homo sapiens
  Payload ID: 2999
  Gene Symbol: CHD2
  Gene Name: chromodomain helicase DNA binding protein 2
  Uniprot ID: O14647
  ENSP ID: ENSP00000486629
MMRNKDKSQEEDSSLHSNASSHSASEEASGSDSGSQSESEQGSDPGSGHGSESNSSSESSESQSESESESAGSKSQPVLPEAKEKPASKKERIADVKKMWEEYPDVYGVRRSNRSRQEPSRFNIKEEASSGSESGSPKRRGQRQLKKQEKWKQEPSEDEQEQGTSAESEPEQKKVKARRPVPRRTVPKPRVKKQPKTQRGKRKKQDSSDEDDDDDEAPKRQTRRRAAKNVSYKEDDDFETDSDDLIEMTGEGVDEQQDNSETIEKVLDSRLGKKGATGASTTVYAIEANGDPSGDFDTEKDEGEIQYLIKWKGWSYIHSTWESEESLQQQKVKGLKKLENFKKKEDEIKQWLGKVSPEDVEYFNCQQELASELNKQYQIVERVIAVKTSKSTLGQTDFPAHSRKPAPSNEPEYLCKWMGLPYSECSWEDEALIGKKFQNCIDSFHSRNNSKTIPTRECKALKQRPRFVALKKQPAYLGGENLELRDYQLEGLNWLAHSWCKNNSVILADEMGLGKTIQTISFLSYLFHQHQLYGPFLIVVPLSTLTSWQREFEIWAPEINVVVYIGDLMSRNTIREYEWIHSQTKRLKFNALITTYEILLKDKTVLGSINWAFLGVDEAHRLKNDDSLLYKTLIDFKSNHRLLITGTPLQNSLKELWSLLHFIMPEKFEFWEDFEEDHGKGRENGYQSLHKVLEPFLLRRVKKDVEKSLPAKVEQILRVEMSALQKQYYKWILTRNYKALAKGTRGSTSGFLNIVMELKKCCNHCYLIKPPEENERENGQEILLSLIRSSGKLILLDKLLTRLRERGNRVLIFSQMVRMLDILAEYLTIKHYPFQRLDGSIKGEIRKQALDHFNADGSEDFCFLLSTRAGGLGINLASADTVVIFDSDWNPQNDLQAQARAHRIGQKKQVNIYRLVTKGTVEEEIIERAKKKMVLDHLVIQRMDTTGRTILENNSGRSNSNPFNKEELTAILKFGAEDLFKELEGEESEPQEMDIDEILRLAETRENEVSTSATDELLSQFKVANFATMEDEEELEERPHKDWDEIIPEEQRKKVEEEERQKELEEIYMLPRIRSSTKKAQTNDSDSDTESKRQAQRSSASESETEDSDDDKKPKRRGRPRSVRKDLVEGFTDAEIRRFIKAYKKFGLPLERLECIARDAELVDKSVADLKRLGELIHNSCVSAMQEYEEQLKENASEGKGPGKRRGPTIKISGVQVNVKSIIQHEEEFEMLHKSIPVDPEEKKKYCLTCRVKAAHFDVEWGVEDDSRLLLGIYEHGYGNWELIKTDPELKLTDKILPVETDKKPQGKQLQTRADYLLKLLRKGLEKKGAVTGGEEAKLKKRKPRVKKENKVPRLKEEHGIELSSPRHSDNPSEEGEVKDDGLEKSPMKKKQKKKENKENKEKQMSSRKDKEGDKERKKSKDKKEKPKSGDAKSSSKSKRSQGPVHITAGSEPVPIGEDEDDDLDQETFSICKERMRPVKKALKQLDKPDKGLNVQEQLEHTRNCLLKIGDRIAECLKAYSDQEHIKLWRRNLWIFVSKFTEFDARKLHKLYKMAHKKRSQEEEEQKKKDDVTGGKKPFRPEASGSSRDSLISQSHTSHNLHPQKPHLPASHGPQMHGHPRDNYNHPNKRHFSNADRGDWQRERKFNYGGGNNNPPWGSDRHHQYEQHWYKDHHYGDRRHMDAHRSGSYRPNNMSRKRPYDQYSSDRDHRGHRDYYDRYAKGCETPGANLCQELFLGRK

SEQ ID NO: 15254 - protein, 45 aa, Homo sapiens
  Payload ID: 2999
  Gene Symbol: CHD2
  Gene Name: chromodomain helicase DNA binding protein 2
  ENSP ID: ENSP00000486926
MMRNKDKSQEEDSSLHSNASRYELSTFFLFVFFFGGETSAYNCLP

SEQ ID NO: 15255 - protein, 71 aa, Homo sapiens
  Payload ID: 2999
  Gene Symbol: CHD2
  Gene Name: chromodomain helicase DNA binding protein 2
  ENSP ID: ENSP00000486931
  MOD_RES (1)..(1): Any amino acid
XTLGQTDFPAHSRKPAPSNEPEYLCKWMGLPYSECSWEDEALIGKKFQNCIDSFHSRNNSKTIPTRECKVW

SEQ ID NO: 15256 - protein, 31 aa, Homo sapiens
  Payload ID: 2999
  Gene Symbol: CHD2
  Gene Name: chromodomain helicase DNA binding protein 2
  ENSP ID: ENSP00000487299
MMRNKDKSQEEDSSLHSNASRVVWNALSSEA

SEQ ID NO: 15257 - protein, 425 aa, Homo sapiens
  Payload ID: 2999
  Gene Symbol: CHD2
  Gene Name: chromodomain helicase DNA binding protein 2
  ENSP ID: ENSP00000487577
MMRNKDKSQEEDSSLHSNASSHSASEEASGSDSGSQSESEQGSDPGSGHGSESNSSSESSESQSESESESAGSKSQPVLPEAKEKPASKKERIADVKKMWEEYPDVYGVRRSNRSRQEPSRFNIKEEASSGSESGSPKRRGQRQLKKQTVPKPRVKKQPKTQRGKRKKQDSSDEDDDDDEAPKRQTRRRAAKNVSYKEDDDFETDSDDLIEMTGEGVDEQQDNSETIEKVLDSRLGKKGATGASTTVYAIEANGDPSGDFDTEKDEGEIQYLIKWKGWSYIHSTWESEESLQQQKVKGLKKLENFKKKEDEIKQWLGKVSPEDVEYFNCQQELASELNKQYQIVERVIAVKTSKSTLGQTDFPAHSRKPAPSNEPEYLCKWMGLPYSECSWEDEALIGKKFQNCIDSFHSRNNSKTIPTRECKVW

SEQ ID NO: 15258 - protein, 2000 aa, Homo sapiens
  Payload ID: 3000
  Gene Symbol: CHD3
  Gene Name: chromodomain helicase DNA binding protein 3
  Uniprot ID: Q12873
  ENSP ID: ENSP00000332628
MKAADTVILWARSKNDQLRISFPPGLCWGDRMPDKDDIRLLPSALGVKKRKRGPKKQKENKPGKPRKRKKRDSEEEFGSERDEYREKSESGGSEYGTGPGRKRRRKHREKKEKKTKRRKKGEGDGGQKQVEQKSSATLLLTWGLEDVEHVFSEEDYHTLTNYKAFSQFMRPLIAKKNPKIPMSKMMTILGAKWREFSANNPFKGSAAAVAAAAAAAAAAVAEQVSAAVSSATPIAPSGPPALPPPPAADIQPPPIRRAKTKEGKGPGHKRRSKSPRVPDGRKKLRGKKMAPLKIKLGLLGGKRKKGGSYVFQSDEGPEPEAEESDLDSGSVHSASGRPDGPVRTKKLKRGRPGRKKKKVLGCPAVAGEEEVDGYETDHQDYCEVCQQGGEIILCDTCPRAYHLVCLDPELDRAPEGKWSCPHCEKEGVQWEAKEEEEEYEEEGEEEGEKEEEDDHMEYCRVCKDGGELLCCDACISSYHIHCLNPPLPDIPNGEWLCPRCTCPVLKGRVQKILHWRWGEPPVAVPAPQQADGNPDVPPPRPLQGRSEREFFVKWVGLSYWHCSWAKELQLEIFHLVMYRNYQRKNDMDEPPPLDYGSGEDDGKSDKRKVKDPHYAEMEEKYYRFGIKPEWMTVHRIINHSVDKKGNYHYLVKWRDLPYDQSTWEEDEMNIPEYEEHKQSYWRHRELIMGEDPAQPRKYKKKKKELQGDGPPSSPTNDPTVKYETQPRFITATGGTLHMYQLEGLNWLRFSWAQGTDTILADEMGLGKTIQTIVFLYSLYKEGHTKGPFLVSAPLSTIINWEREFQMWAPKFYVVTYTGDKDSRAIIRENEFSFEDNAIKGGKKAFKMKREAQVKFHVLLTSYELITIDQAALGSIRWACLVVDEAHRLKNNQSKFFRVLNGYKIDHKLLLTGTPLQNNLEELFHLLNFLTPERFNNLEGFLEEFADISKEDQIKKLHDLLGPHMLRRLKADVFKNMPAKTELIVRVELSPMQKKYYKYILTRNFEALNSRGGGNQVSLLNIMMDLKKCCNHPYLFPVAAMESPKLPSGAYEGGALIKSSGKLMLLQKMLRKLKEQGHRVLIFSQMTKMLDLLEDFLDYEGYKYERIDGGITGALRQEAIDRFNAPGAQQFCFLLSTRAGGLGINLATADTVIIFDSDWNPHNDIQAFSRAHRIGQANKVMIYRFVTRASVEERITQVAKRKMMLTHLVVRPGLGSKAGSMSKQELDDILKFGTEELFKDENEGENKEEDSSVIHYDNEAIARLLDRNQDATEDTDVQNMNEYLSSFKVAQYVVREEDKIEEIEREIIKQEENVDPDYWEKLLRHHYEQQQEDLARNLGKGKRVRKQVNYNDAAQEDQDNQSEYSVGSEEEDEDFDERPEGRRQSKRQLRNEKDKPLPPLLARVGGNIEVLGFNTRQRKAFLNAVMRWGMPPQDAFTTQWLVRDLRGKTEKEFKAYVSLFMRHLCEPGADGSETFADGVPREGLSRQQVLTRIGVMSLVKKKVQEFEHINGRWSMPELMPDPSADSKRSSRASSPTKTSPTTPEASATNSPCTSKPATPAPSEKGEGIRTPLEKEEAENQEEKPEKNSRIGEKMETEADAPSPAPSLGERLEPRKIPLEDEVPGVPGEMEPEPGYRGDREKSATESTPGERGEEKPLDGQEHRERPEGETGDLGKREDVKGDRELRPGPRDEPRSNGRREEKTEKPRFMFNIADGGFTELHTLWQNEERAAISSGKLNEIWHRRHDYWLLAGIVLHGYARWQDIQNDAQFAIINEPFKTEANKGNFLEMKNKFLARRFKLLEQALVIEEQLRRAAYLNLSQEPAHPAMALHARFAEAECLAESHQHLSKESLAGNKPANAVLHKVLNQLEELLSDMKADVTRLPATLSRIPPIAARLQMSERSILSRLASKGTEPHPTPAYPPGPYATPPGYGAAFSAAPVGALAAAGANYSQMPAGSFITAATNGPPVLVKKEKEMVGALVSDGLDRKEPRAGEVICIDD

SEQ ID NO: 15259 - protein, 1966 aa, Homo sapiens
  Payload ID: 3000
  Gene Symbol: CHD3
  Gene Name: chromodomain helicase DNA binding protein 3
  Uniprot ID: Q12873
  ENSP ID: ENSP00000350907
MKAADTVILWARSKNDQLRISFPPGLCWGDRMPDKDDIRLLPSALGVKKRKRGPKKQKENKPGKPRKRKKRDSEEEFGSERDEYREKSESGGSEYGTGPGRKRRRKHREKKEKKTKRRKKGEGDGGQKQVEQKSSATLLLTWGLEDVEHVFSEEDYHTLTNYKAFSQFMRPLIAKKNPKIPMSKMMTILGAKWREFSANNPFKGSAAAVAAAAAAAAAAVAEQVSAAVSSATPIAPSGPPALPPPPAADIQPPPIRRAKTKEGKGPGHKRRSKSPRVPDGRKKLRGKKMAPLKIKLGLLGGKRKKGGSYVFQSDEGPEPEAEESDLDSGSVHSASGRPDGPVRTKKLKRGRPGRKKKKVLGCPAVAGEEEVDGYETDHQDYCEVCQQGGEIILCDTCPRAYHLVCLDPELDRAPEGKWSCPHCEKEGVQWEAKEEEEEYEEEGEEEGEKEEEDDHMEYCRVCKDGGELLCCDACISSYHIHCLNPPLPDIPNGEWLCPRCTCPVLKGRVQKILHWRWGEPPVAVPAPQQADGNPDVPPPRPLQGRSEREFFVKWVGLSYWHCSWAKELQLEIFHLVMYRNYQRKNDMDEPPPLDYGSGEDDGKSDKRKVKDPHYAEMEEKYYRFGIKPEWMTVHRIINHSVDKKGNYHYLVKWRDLPYDQSTWEEDEMNIPEYEEHKQSYWRHRELIMGEDPAQPRKYKKKKKELQGDGPPSSPTNDPTVKYETQPRFITATGGTLHMYQLEGLNWLRFSWAQGTDTILADEMGLGKTIQTIVFLYSLYKEGHTKGPFLVSAPLSTIINWEREFQMWAPKFYVVTYTGDKDSRAIIRENEFSFEDNAIKGGKKAFKMKREAQVKFHVLLTSYELITIDQAALGSIRWACLVVDEAHRLKNNQSKFFRVLNGYKIDHKLLLTGTPLQNNLEELFHLLNFLTPERFNNLEGFLEEFADISKEDQIKKLHDLLGPHMLRRLKADVFKNMPAKTELIVRVELSPMQKKYYKYILTRNFEALNSRGGGNQVSLLNIMMDLKKCCNHPYLFPVAAMESPKLPSGAYEGGALIKSSGKLMLLQKMLRKLKEQGHRVLIFSQMTKMLDLLEDFLDYEGYKYERIDGGITGALRQEAIDRFNAPGAQQFCFLLSTRAGGLGINLATADTVIIFDSDWNPHNDIQAFSRAHRIGQANKVMIYRFVTRASVEERITQVAKRKMMLTHLVVRPGLGSKAGSMSKQELDDILKFGTEELFKDENEGENKEEDSSVIHYDNEAIARLLDRNQDATEDTDVQNMNEYLSSFKVAQYVVREEDKIEEIEREIIKQEENVDPDYWEKLLRHHYEQQQEDLARNLGKGKRVRKQVNYNDAAQEDQDNQSEYSVGSEEEDEDFDERPEGRRQSKRQLRNEKDKPLPPLLARVGGNIEVLGFNTRQRKAFLNAVMRWGMPPQDAFTTQWLVRDLRGKTEKEFKAYVSLFMRHLCEPGADGSETFADGVPREGLSRQQVLTRIGVMSLVKKKVQEFEHINGRWSMPELMPDPSADSKRSSRASSPTKTSPTTPEASATNSPCTSKPATPAPSEKGEGIRTPLEKEEAENQEEKPEKNSRIGEKMETEADAPSPAPSLGERLEPRKIPLEDEVPGVPGEMEPEPGYRGDREKSEDVKGDRELRPGPRDEPRSNGRREEKTEKPRFMFNIADGGFTELHTLWQNEERAAISSGKLNEIWHRRHDYWLLAGIVLHGYARWQDIQNDAQFAIINEPFKTEANKGNFLEMKNKFLARRFKLLEQALVIEEQLRRAAYLNLSQEPAHPAMALHARFAEAECLAESHQHLSKESLAGNKPANAVLHKVLNQLEELLSDMKADVTRLPATLSRIPPIAARLQMSERSILSRLASKGTEPHPTPAYPPGPYATPPGYGAAFSAAPVGALAAAGANYSQMPAGSFITAATNGPPVLVKKEKEMVGALVSDGLDRKEPRAGEVICIDD

SEQ ID NO: 15260 - protein, 2059 aa, Homo sapiens
  Payload ID: 3000
  Gene Symbol: CHD3
  Gene Name: chromodomain helicase DNA binding protein 3
  Uniprot ID: Q12873
  ENSP ID: ENSP00000369716
MASPLRDEEEEEEEMVVSEEEEEEEEEGDEEEEEEVEAADEDDEEDDDEGVLGRGPGHDRGRDRHSPPGCHLFPPPPPPPPPLPPPPPPPPPDKDDIRLLPSALGVKKRKRGPKKQKENKPGKPRKRKKRDSEEEFGSERDEYREKSESGGSEYGTGPGRKRRRKHREKKEKKTKRRKKGEGDGGQKQVEQKSSATLLLTWGLEDVEHVFSEEDYHTLTNYKAFSQFMRPLIAKKNPKIPMSKMMTILGAKWREFSANNPFKGSAAAVAAAAAAAAAAVAEQVSAAVSSATPIAPSGPPALPPPPAADIQPPPIRRAKTKEGKGPGHKRRSKSPRVPDGRKKLRGKKMAPLKIKLGLLGGKRKKGGSYVFQSDEGPEPEAEESDLDSGSVHSASGRPDGPVRTKKLKRGRPGRKKKKVLGCPAVAGEEEVDGYETDHQDYCEVCQQGGEIILCDTCPRAYHLVCLDPELDRAPEGKWSCPHCEKEGVQWEAKEEEEEYEEEGEEEGEKEEEDDHMEYCRVCKDGGELLCCDACISSYHIHCLNPPLPDIPNGEWLCPRCTCPVLKGRVQKILHWRWGEPPVAVPAPQQADGNPDVPPPRPLQGRSEREFFVKWVGLSYWHCSWAKELQLEIFHLVMYRNYQRKNDMDEPPPLDYGSGEDDGKSDKRKVKDPHYAEMEEKYYRFGIKPEWMTVHRIINHSVDKKGNYHYLVKWRDLPYDQSTWEEDEMNIPEYEEHKQSYWRHRELIMGEDPAQPRKYKKKKKELQGDGPPSSPTNDPTVKYETQPRFITATGGTLHMYQLEGLNWLRFSWAQGTDTILADEMGLGKTIQTIVFLYSLYKEGHTKGPFLVSAPLSTIINWEREFQMWAPKFYVVTYTGDKDSRAIIRENEFSFEDNAIKGGKKAFKMKREAQVKFHVLLTSYELITIDQAALGSIRWACLVVDEAHRLKNNQSKFFRVLNGYKIDHKLLLTGTPLQNNLEELFHLLNFLTPERFNNLEGFLEEFADISKEDQIKKLHDLLGPHMLRRLKADVFKNMPAKTELIVRVELSPMQKKYYKYILTRNFEALNSRGGGNQVSLLNIMMDLKKCCNHPYLFPVAAMESPKLPSGAYEGGALIKSSGKLMLLQKMLRKLKEQGHRVLIFSQMTKMLDLLEDFLDYEGYKYERIDGGITGALRQEAIDRFNAPGAQQFCFLLSTRAGGLGINLATADTVIIFDSDWNPHNDIQAFSRAHRIGQANKVMIYRFVTRASVEERITQVAKRKMMLTHLVVRPGLGSKAGSMSKQELDDILKFGTEELFKDENEGENKEEDSSVIHYDNEAIARLLDRNQDATEDTDVQNMNEYLSSFKVAQYVVREEDKIEEIEREIIKQEENVDPDYWEKLLRHHYEQQQEDLARNLGKGKRVRKQVNYNDAAQEDQDNQSEYSVGSEEEDEDFDERPEGRRQSKRQLRNEKDKPLPPLLARVGGNIEVLGFNTRQRKAFLNAVMRWGMPPQDAFTTQWLVRDLRGKTEKEFKAYVSLFMRHLCEPGADGSETFADGVPREGLSRQQVLTRIGVMSLVKKKVQEFEHINGRWSMPELMPDPSADSKRSSRASSPTKTSPTTPEASATNSPCTSKPATPAPSEKGEGIRTPLEKEEAENQEEKPEKNSRIGEKMETEADAPSPAPSLGERLEPRKIPLEDEVPGVPGEMEPEPGYRGDREKSATESTPGERGEEKPLDGQEHRERPEGETGDLGKREDVKGDRELRPGPRDEPRSNGRREEKTEKPRFMFNIADGGFTELHTLWQNEERAAISSGKLNEIWHRRHDYWLLAGIVLHGYARWQDIQNDAQFAIINEPFKTEANKGNFLEMKNKFLARRFKLLEQALVIEEQLRRAAYLNLSQEPAHPAMALHARFAEAECLAESHQHLSKESLAGNKPANAVLHKVLNQLEELLSDMKADVTRLPATLSRIPPIAARLQMSERSILSRLASKGTEPHPTPAYPPGPYATPPGYGAAFSAAPVGALAAAGANYSQMPAGSFITAATNGPPVLVKKEKEMVGALVSDGLDRKEPRAGEVICIDD

SEQ ID NO: 15261 - protein, 383 aa, Homo sapiens
  Payload ID: 3000
  Gene Symbol: CHD3
  Gene Name: chromodomain helicase DNA binding protein 3
  ENSP ID: ENSP00000395252
KRAEDVKGDRELRPGPRDEPRSNGRREEKTEKPRFMFNIADGGFTELHTLWQNEERAAISSGKLNEIWHRRHDYWLLAGIVLHGYARWQDIQNDAQFAIINEPFKTEANKGNFLEMKNKFLARRFKLLEQALVIEEQLRRAAYLNLSQEPAHPAMALHARFAEAECLAESHQHLSKESLAGNKPANAVLHKGKGRGGPARGRAHNAASEPAGGVAERHEGGRDPPASHAVPNTPHRSPPSDVRAQHPQPAGQQGHGASPHTGLPAGSLRYTSGVRGGLQRRTRRGPGRRRRQLQPDACRVLHHSRHQRPSSACEEGEGNGGGIGVRRAGSEGAPSRGGDLYRRLTGSQACPSPRPRPRGRPPAQALGPAASPPPSPPLGPSLG

SEQ ID NO: 15262 - protein, 525 aa, Homo sapiens
  Payload ID: 3000
  Gene Symbol: CHD3
  Gene Name: chromodomain helicase DNA binding protein 3
  ENSP ID: ENSP00000405861
  MOD_RES (1)..(1): Any amino acid
XQKQVEQKSSATLLLTWGLEDVEHVFSEEDYHTLTNYKAFSQFMRPLIAKKNPKIPMSKMMTILGAKWREFSANNPFKGSAAAVAAAAAAAAAAVAEQVSAAVSSATPIAPSGPPALPPPPAADIQPPPIRRAKTKEGKGPGHKRRSKSPRVPDGRKKLRGKKMAPLKIKLGLLGGKRKKGGSSDEGPEPEAEESDLDSGSVHSASGRPDGPVRTKKLKRGRPGRKKKKVLGCPAVAGEEEVDGYETDHQDYCEVCQQGGEIILCDTCPRAYHLVCLDPELDRAPEGKWSCPHCEKEGVQWEAKEEEEEYEEEGEEEGEKEEEDDHMEYCRVCKDGGELLCCDACISSYHIHCLNPPLPDIPNGEWLCPRCTCPVLKGRVQKILHWRWGEPPVAVPAPQQADGNPDVPPPRPLQGRSEREFFVKWVGLSYWHCSWAKELQLEIFHLVMYRNYQRKNDMDEPPPLDYGSGEDDGKSDKRKVKDPHYAEMEEKYYRFGIKPEWMTVHRIINHSVDKKGNYHYLVKWR

SEQ ID NO: 15263 - protein, 277 aa, Homo sapiens
  Payload ID: 3000
  Gene Symbol: CHD3
  Gene Name: chromodomain helicase DNA binding protein 3
  ENSP ID: ENSP00000411959
FNIADGGFTELHTLWQNEERAAISSGKLNEIWHRRHDYWLLAGIVLHGYARWQDIQNDAQFAIINEPFKTEANKGNFLEMKNKFLARRFKLLEQALVIEEQLRRAAYLNLSQEPAHPAMALHARFAEAECLAESHQHLSKESLAGNKPANAVLHKGLPAGSLRYTSGVRGGLQRRTRRGPGRRRRQLQPDACRVLHHSRHQRPSSACEEGEGNGGGIGVRRAGSEGAPSRGGDLYRRLTGSQACPSPRPRPRGRPPAQALGPAASPPPSPPLGPSLG

SEQ ID NO: 15264 - protein, 110 aa, Homo sapiens
  Payload ID: 3000
  Gene Symbol: CHD3
  Gene Name: chromodomain helicase DNA binding protein 3
  ENSP ID: ENSP00000458861
  MOD_RES (1)..(1): Any amino acid
XSPRVPDGRKKLRGKKMAPLKIKLGLLGGKRKKGGSYVFQSDEGPEPEAEESDLDSGSVHSASGRPDGPVRTKKLKRGRPGRKKKKVAGEEEVDGYETDHQDYCEVCQQG

SEQ ID NO: 15265 - protein, 249 aa, Homo sapiens
  Payload ID: 3000
  Gene Symbol: CHD3
  Gene Name: chromodomain helicase DNA binding protein 3
  ENSP ID: ENSP00000459321
RELRPGPRDEPRSNGRREEKTEKPRFMFNIADGGFTELHTLWQNEERAAISSGKLNEIWHRRHDYWLLAGIVLHGYARWQDIQNDAQFAIINEPFKTEANKGNFLEMKNKFLARRFKLLEQALVIEEQLRRAAYLNLSQEPAHPAMALHARFAEAECLAESHQHLSKESLAGNKPANAVLHKAGGVAERHEGGRDPPASHAVPNTPHRSPPSDVRAQHPQPAGQQGHGASPHTGLPAGSLRYTSGVRGG

SEQ ID NO: 15266 - protein, 63 aa, Homo sapiens
  Payload ID: 3000
  Gene Symbol: CHD3
  Gene Name: chromodomain helicase DNA binding protein 3
  ENSP ID: ENSP00000467547
SVIHYDNEAIARLLDRNQDATEDTDVQNMNEYLSSFKVAQYVVREEDKVRLDFREKRRHRQYW

SEQ ID NO: 15267 - protein, 1912 aa, Homo sapiens
  Payload ID: 3001
  Gene Symbol: CHD4
  Gene Name: chromodomain helicase DNA binding protein 4
  Uniprot ID: Q14839
  ENSP ID: ENSP00000349508
MASGLGSPSPCSAGSEEEDMDALLNNSLPPPHPENEEDPEEDLSETETPKLKKKKKPKKPRDPKIPKSKRQKKERMLLCRQLGDSSGEGPEFVEEEEEVALRSDSEGSDYTPGKKKKKKLGPKKEKKSKSKRKEEEEEEDDDDDSKEPKSSAQLLEDWGMEDIDHVFSEEDYRTLTNYKAFSQFVRPLIAAKNPKIAVSKMMMVLGAKWREFSTNNPFKGSSGASVAAAAAAAVAVVESMVTATEVAPPPPPVEVPIRKAKTKEGKGPNARRKPKGSPRVPDAKKPKPKKVAPLKIKLGGFGSKRKRSSSEDDDLDVESDFDDASINSYSVSDGSTSRSSRSRKKLRTTKKKKKGEEEVTAVDGYETDHQDYCEVCQQGGEIILCDTCPRAYHMVCLDPDMEKAPEGKWSCPHCEKEGIQWEAKEDNSEGEEILEEVGGDLEEEDDHHMEFCRVCKDGGELLCCDTCPSSYHIHCLNPPLPEIPNGEWLCPRCTCPALKGKVQKILIWKWGQPPSPTPVPRPPDADPNTPSPKPLEGRPERQFFVKWQGMSYWHCSWVSELQLELHCQVMFRNYQRKNDMDEPPSGDFGGDEEKSRKRKNKDPKFAEMEERFYRYGIKPEWMMIHRILNHSVDKKGHVHYLIKWRDLPYDQASWESEDVEIQDYDLFKQSYWNHRELMRGEEGRPGKKLKKVKLRKLERPPETPTVDPTVKYERQPEYLDATGGTLHPYQMEGLNWLRFSWAQGTDTILADEMGLGKTVQTAVFLYSLYKEGHSKGPFLVSAPLSTIINWEREFEMWAPDMYVVTYVGDKDSRAIIRENEFSFEDNAIRGGKKASRMKKEASVKFHVLLTSYELITIDMAILGSIDWACLIVDEAHRLKNNQSKFFRVLNGYSLQHKLLLTGTPLQNNLEELFHLLNFLTPERFHNLEGFLEEFADIAKEDQIKKLHDMLGPHMLRRLKADVFKNMPSKTELIVRVELSPMQKKYYKYILTRNFEALNARGGGNQVSLLNVVMDLKKCCNHPYLFPVAAMEAPKMPNGMYDGSALIRASGKLLLLQKMLKNLKEGGHRVLIFSQMTKMLDLLEDFLEHEGYKYERIDGGITGNMRQEAIDRFNAPGAQQFCFLLSTRAGGLGINLATADTVIIYDSDWNPHNDIQAFSRAHRIGQNKKVMIYRFVTRASVEERITQVAKKKMMLTHLVVRPGLGSKTGSMSKQELDDILKFGTEELFKDEATDGGGDNKEGEDSSVIHYDDKAIERLLDRNQDETEDTELQGMNEYLSSFKVAQYVVREEEMGEEEEVEREIIKQEESVDPDYWEKLLRHHYEQQQEDLARNLGKGKRIRKQVNYNDGSQEDRDWQDDQSDNQSDYSVASEEGDEDFDERSEAPRRPSRKGLRNDKDKPLPPLLARVGGNIEVLGFNARQRKAFLNAIMRYGMPPQDAFTTQWLVRDLRGKSEKEFKAYVSLFMRHLCEPGADGAETFADGVPREGLSRQHVLTRIGVMSLIRKKVQEFEHVNGRWSMPELAEVEENKKMSQPGSPSPKTPTPSTPGDTQPNTPAPVPPAEDGIKIEENSLKEEESIEGEKEVKSTAPETAIECTQAPAPASEDEKVVVEPPEGEEKVEKAEVKERTEEPMETEPKGAADVEKVEEKSAIDLTPIVVEDKEEKKEEEEKKEVMLQNGETPKDLNDEKQKKNIKQRFMFNIADGGFTELHSLWQNEERAATVTKKTYEIWHRRHDYWLLAGIINHGYARWQDIQNDPRYAILNEPFKGEMNRGNFLEIKNKFLARRFKLLEQALVIEEQLRRAAYLNMSEDPSHPSMALNTRFAEVECLAESHQHLSKESMAGNKPANAVLHKVLKQLEELLSDMKADVTRLPATIARIPPVAVRLQMSERNILSRLANRAPEPTPQQVAQQQ

SEQ ID NO: 15268 - protein, 354 aa, Homo sapiens
  Payload ID: 3001
  Gene Symbol: CHD4
  Gene Name: chromodomain helicase DNA binding protein 4
  ENSP ID: ENSP00000437506
MASGLGSPSPCSAGSEEEDMDALLNNSLPPPHPENEEDPEEDLSETETPKLKKKKKPKKPRDPKIPKSKRQKKERMLLCRQLGDSSGEGPEFVEEEEEVALRSDSEGSDYTPGKKKKKKLGPKKEKKSKSKRKEEEEEEDDDDDSKEPKSSAQLLEDWGMEDIDHVFSEEDYRTLTNYKAFSQFVRPLIAAKNPKIAVSKMMMVLGAKWREFSTNNPFKGSSGASVAAAAAAAVAVVESMVTATEVAPPPPPVEVPIRKAKTKEGKGPNARRKPKGSPRVPDAKKPKPKKVAPLKIKLGGFGSKRKRSSSEDDDLDVESDFDDASINSYSVSDGSTSRSSRSRKKLRTTKKKKK

SEQ ID NO: 15269 - protein, 1937 aa, Homo sapiens
  Payload ID: 3001
  Gene Symbol: CHD4
  Gene Name: chromodomain helicase DNA binding protein 4
  ENSP ID: ENSP00000440392
MASGLGSPSPCSAGSEEEDMDALLNNSLPPPHPEDPEEDLSETETPKLKKKKKPKKPRDPKIPKSKRQKKERMLLCRQLGDSSGEGPEFVEEEEEVALRSDSEGSDYTPGKKKKKKLGPKKEKKSKSKRKEEEEEEDDDDDSKEPKSSAQLLEDWGMEDIDHVFSEEDYRTLTNYKAFSQFVRPLIAAKNPKIAVSKMMMVLGAKWREFSTNNPFKGSSGASVAAAAAAAVAVVESMVTATEVAPPPPPVEVPIRKAKTKEGKGPNARRKPKGSPRVPDAKKPKPKKVAPLKIKLGGFGSKRKRSSSEDDDLDVESDFDDASINSYSVSDGSTSRSSRSRKKLRTTKKKKKGEEEVTAVDGYETDHQDYCEVCQQGGEIILCDTCPRAYHMVCLDPDMEKAPEGKWSCPHCEKEGIQWEAKEDNSEGEEILEEVGGDLEEEDDHHMEFCRVCKDGGELLCCDTCPSSYHIHCLNPPLPEIPNGEWLCPRCTCPALKGKVQKILIWKWGQPPSPTPVPRPPDADPNTPSPKPLEGRPERQFFVKWQGMSYWHCSWVSELQLELHCQVMFRNYQRKNDMDEPPSGDFGGDEEKSRKRKNKDPKFAEMEERFYRYGIKPEWMMIHRILNHSVDKKGHVHYLIKWRDLPYDQASWESEDVEIQDYDLFKQSYWNHRELMRGEEGRPGKKLKKVKLRKLERPPETPTVDPTVKYERQPEYLDATGGTLHPYQMEGLNWLRFSWAQGTDTILADEMGLGKTVQTAVFLYSLYKEGHSKGPFLVSAPLSTIINWEREFEMWAPDMYVVTYVGDKDSRAIIRENEFSFEDNAIRGGKKASRMKKEASVKFHVLLTSYELITIDMAILGSIDWACLIVDEAHRLKNNQSKFFRVLNGYSLQHKLLLTGTPLQNNLEELFHLLNFLTPERFHNLEGFLEEFADIAKEDQIKKLHDMLGPHMLRRLKADVFKNMPSKTELIVRVELSPMQKKYYKYILTRNFEALNARGGGNQVSLLNVVMDLKKCCNHPYLFPVAAMEAPKMPNGMYDGSALIRASGKLLLLQKMLKNLKEGGHRVLIFSQMTKMLDLLEDFLEHEGYKYERIDGGITGNMRQEAIDRFNAPGAQQFCFLLSTRAGGLGINLATADTVIIYDSDWNPHNDIQAFSRAHRIGQNKKVMIYRFVTRASVEERITQVAKKKMMLTHLVVRPGLGSKTGSMSKQELDDILKFGTEELFKDEATDGGGDNKEGEDSSVIHYDDKAIERLLDRNQDETEDTELQGMNEYLSSFKVAQYVVREEEMGEEEEVEREIIKQEESVDPDYWEKLLRHHYEQQQEDLARNLGKGKRIRKQVNYNDGSQEDRGVCGRPRPPPMGRSTRAVGPAHLPSLPPDWQDDQSDNQSDYSVASEEGDEDFDERSEAPRRPSRKGLRNDKDKPLPPLLARVGGNIEVLGFNARQRKAFLNAIMRYGMPPQDAFTTQWLVRDLRGKSEKEFKAYVSLFMRHLCEPGADGAETFADGVPREGLSRQHVLTRIGVMSLIRKKVQEFEHVNGRWSMPELAEVEENKKMSQPGSPSPKTPTPSTPGDTQPNTPAPVPPAEDGIKIEENSLKEEESIEGEKEVKSTAPETAIECTQAPAPASEDEKVVVEPPEGEEKVEKAEVKERTEEPMETEPKGAADVEKVEEKSAIDLTPIVVEDKEEKKEEEEKKEVMLQNGETPKDLNDEKQKKNIKQRFMFNIADGGFTELHSLWQNEERAATVTKKTYEIWHRRHDYWLLAGIINHGYARWQDIQNDPRYAILNEPFKGEMNRGNFLEIKNKFLARRFKLLEQALVIEEQLRRAAYLNMSEDPSHPSMALNTRFAEVECLAESHQHLSKESMAGNKPANAVLHKVLKQLEELLSDMKADVTRLPATIARIPPVAVRLQMSERNILSRLANRAPEPTPQQVAQQQ

SEQ ID NO: 15270 - protein, 1905 aa, Homo sapiens
  Payload ID: 3001
  Gene Symbol: CHD4
  Gene Name: chromodomain helicase DNA binding protein 4
  ENSP ID: ENSP00000440542
MASGLGSPSPCSAGSEEEDMDALLNNSLPPPHPENEEDPEEDLSETETPKLKKKKKPKKPRDPKIPKSKRQKKELGDSSGEGPEFVEEEEEVALRSDSEGSDYTPGKKKKKKLGPKKEKKSKSKRKEEEEEEDDDDDSKEPKSSAQLLEDWGMEDIDHVFSEEDYRTLTNYKAFSQFVRPLIAAKNPKIAVSKMMMVLGAKWREFSTNNPFKGSSGASVAAAAAAAVAVVESMVTATEVAPPPPPVEVPIRKAKTKEGKGPNARRKPKGSPRVPDAKKPKPKKVAPLKIKLGGFGSKRKRSSSEDDDLDVESDFDDASINSYSVSDGSTSRSSRSRKKLRTTKKKKKGEEEVTAVDGYETDHQDYCEVCQQGGEIILCDTCPRAYHMVCLDPDMEKAPEGKWSCPHCEKEGIQWEAKEDNSEGEEILEEVGGDLEEEDDHHMEFCRVCKDGGELLCCDTCPSSYHIHCLNPPLPEIPNGEWLCPRCTCPALKGKVQKILIWKWGQPPSPTPVPRPPDADPNTPSPKPLEGRPERQFFVKWQGMSYWHCSWVSELQLELHCQVMFRNYQRKNDMDEPPSGDFGGDEEKSRKRKNKDPKFAEMEERFYRYGIKPEWMMIHRILNHSVDKKGHVHYLIKWRDLPYDQASWESEDVEIQDYDLFKQSYWNHRELMRGEEGRPGKKLKKVKLRKLERPPETPTVDPTVKYERQPEYLDATGGTLHPYQMEGLNWLRFSWAQGTDTILADEMGLGKTVQTAVFLYSLYKEGHSKGPFLVSAPLSTIINWEREFEMWAPDMYVVTYVGDKDSRAIIRENEFSFEDNAIRGGKKASRMKKEASVKFHVLLTSYELITIDMAILGSIDWACLIVDEAHRLKNNQSKFFRVLNGYSLQHKLLLTGTPLQNNLEELFHLLNFLTPERFHNLEGFLEEFADIAKEDQIKKLHDMLGPHMLRRLKADVFKNMPSKTELIVRVELSPMQKKYYKYILTRNFEALNARGGGNQVSLLNVVMDLKKCCNHPYLFPVAAMEAPKMPNGMYDGSALIRASGKLLLLQKMLKNLKEGGHRVLIFSQMTKMLDLLEDFLEHEGYKYERIDGGITGNMRQEAIDRFNAPGAQQFCFLLSTRAGGLGINLATADTVIIYDSDWNPHNDIQAFSRAHRIGQNKKVMIYRFVTRASVEERITQVAKKKMMLTHLVVRPGLGSKTGSMSKQELDDILKFGTEELFKDEATDGGGDNKEGEDSSVIHYDDKAIERLLDRNQDETEDTELQGMNEYLSSFKVAQYVVREEEMGEEEEVEREIIKQEESVDPDYWEKLLRHHYEQQQEDLARNLGKGKRIRKQVNYNDGSQEDRDWQDDQSDNQSDYSVASEEGDEDFDERSEAPRRPSRKGLRNDKDKPLPPLLARVGGNIEVLGFNARQRKAFLNAIMRYGMPPQDAFTTQWLVRDLRGKSEKEFKAYVSLFMRHLCEPGADGAETFADGVPREGLSRQHVLTRIGVMSLIRKKVQEFEHVNGRWSMPELAEVEENKKMSQPGSPSPKTPTPSTPGDTQPNTPAPVPPAEDGIKIEENSLKEEESIEGEKEVKSTAPETAIECTQAPAPASEDEKVVVEPPEGEEKVEKAEVKERTEEPMETEPKGAADVEKVEEKSAIDLTPIVVEDKEEKKEEEEKKEVMLQNGETPKDLNDEKQKKNIKQRFMFNIADGGFTELHSLWQNEERAATVTKKTYEIWHRRHDYWLLAGIINHGYARWQDIQNDPRYAILNEPFKGEMNRGNFLEIKNKFLARRFKLLEQALVIEEQLRRAAYLNMSEDPSHPSMALNTRFAEVECLAESHQHLSKESMAGNKPANAVLHKVLKQLEELLSDMKADVTRLPATIARIPPVAVRLQMSERNILSRLANRAPEPTPQQVAQQQ

SEQ ID NO: 15271 - protein, 125 aa, Homo sapiens
  Payload ID: 3001
  Gene Symbol: CHD4
  Gene Name: chromodomain helicase DNA binding protein 4
  ENSP ID: ENSP00000444614
MASGLGSPSPCSAGSEEEDMDALLNNSLPPPHPENEEDPEEDLSETETPKLKKKKKPKKPRDPKIPKSKRQKKELGDSSGEGPEFVEEEEEVALRSDSEGSDYTPGKKKKKKLGPKKEKKSKSKR

SEQ ID NO: 15272 - protein, 1954 aa, Homo sapiens
  Payload ID: 3002
  Gene Symbol: CHD5
  Gene Name: chromodomain helicase DNA binding protein 5
  Uniprot ID: Q8TDI0
  ENSP ID: ENSP00000262450
MRGPVGTEEELPRLFAEEMENEDEMSEEEDGGLEAFDDFFPVEPVSLPKKKKPKKLKENKCKGKRKKKEGSNDELSENEEDLEEKSESEGSDYSPNKKKKKKLKDKKEKKAKRKKKDEDEDDNDDGCLKEPKSSGQLMAEWGLDDVDYLFSEEDYHTLTNYKAFSQFLRPLIAKKNPKIPMSKMMTVLGAKWREFSANNPFKGSSAAAAAAAVAAAVETVTISPPLAVSPPQVPQPVPIRKAKTKEGKGPGVRKKIKGSKDGKKKGKGKKTAGLKFRFGGISNKRKKGSSSEEDEREESDFDSASIHSASVRSECSAALGKKSKRRRKKKRIDDGDGYETDHQDYCEVCQQGGEIILCDTCPRAYHLVCLDPELEKAPEGKWSCPHCEKEGIQWEPKDDDDEEEEGGCEEEEDDHMEFCRVCKDGGELLCCDACPSSYHLHCLNPPLPEIPNGEWLCPRCTCPPLKGKVQRILHWRWTEPPAPFMVGLPGPDVEPSLPPPKPLEGIPEREFFVKWAGLSYWHCSWVKELQLELYHTVMYRNYQRKNDMDEPPPFDYGSGDEDGKSEKRKNKDPLYAKMEERFYRYGIKPEWMMIHRILNHSFDKKGDVHYLIKWKDLPYDQCTWEIDDIDIPYYDNLKQAYWGHRELMLGEDTRLPKRLLKKGKKLRDDKQEKPPDTPIVDPTVKFDKQPWYIDSTGGTLHPYQLEGLNWLRFSWAQGTDTILADEMGLGKTVQTIVFLYSLYKEGHSKGPYLVSAPLSTIINWEREFEMWAPDFYVVTYTGDKESRSVIRENEFSFEDNAIRSGKKVFRMKKEVQIKFHVLLTSYELITIDQAILGSIEWACLVVDEAHRLKNNQSKFFRVLNSYKIDYKLLLTGTPLQNNLEELFHLLNFLTPERFNNLEGFLEEFADISKEDQIKKLHDLLGPHMLRRLKADVFKNMPAKTELIVRVELSQMQKKYYKFILTRNFEALNSKGGGNQVSLLNIMMDLKKCCNHPYLFPVAAVEAPVLPNGSYDGSSLVKSSGKLMLLQKMLKKLRDEGHRVLIFSQMTKMLDLLEDFLEYEGYKYERIDGGITGGLRQEAIDRFNAPGAQQFCFLLSTRAGGLGINLATADTVIIYDSDWNPHNDIQAFSRAHRIGQNKKVMIYRFVTRASVEERITQVAKRKMMLTHLVVRPGLGSKSGSMTKQELDDILKFGTEELFKDDVEGMMSQGQRPVTPIPDVQSSKGGNLAASAKKKHGSTPPGDNKDVEDSSVIHYDDAAISKLLDRNQDATDDTELQNMNEYLSSFKVAQYVVREEDGVEEVEREIIKQEENVDPDYWEKLLRHHYEQQQEDLARNLGKGKRIRKQVNYNDASQEDQEWQDELSDNQSEYSIGSEDEDEDFEERPEGQSGRRQSRRQLKSDRDKPLPPLLARVGGNIEVLGFNARQRKAFLNAIMRWGMPPQDAFNSHWLVRDLRGKSEKEFRAYVSLFMRHLCEPGADGAETFADGVPREGLSRQHVLTRIGVMSLVRKKVQEFEHVNGKYSTPDLIPEGPEGKKSGEVISSDPNTPVPASPAHLLPAPLGLPDKMEAQLGYMDEKDPGAQKPRQPLEVQALPAALDRVESEDKHESPASKERAREERPEETEKAPPSPEQLPREEVLPEKEKILDKLELSLIHSRGDSSELRPDDTKAEEKEPIETQQNGDKEEDDEGKKEDKKGKFKFMFNIADGGFTELHTLWQNEERAAVSSGKIYDIWHRRHDYWLLAGIVTHGYARWQDIQNDPRYMILNEPFKSEVHKGNYLEMKNKFLARRFKLLEQALVIEEQLRRAAYLNMTQDPNHPAMALNARLAEVECLAESHQHLSKESLAGNKPANAVLHKVLNQLEELLSDMKADVTRLPSMLSRIPPVAARLQMSERSILSRLTNRAGDPTIQQGAFGSSQMYSNNFGPNFRGPGPGGIVNYNQMPLGPYVTDI

SEQ ID NO: 15273 - protein, 110 aa, Homo sapiens
  Payload ID: 3002
  Gene Symbol: CHD5
  Gene Name: chromodomain helicase DNA binding protein 5
  ENSP ID: ENSP00000367238
MLDLLEDFLEYEGYKYERIDGGITGGLRQEAIDRFNAPGAQQFCFLLSTRAGGLGINLATADTVIIYDSDWNPHNDIQVCAAAAHHPPRGPLIPGLRPSAAPTASARTRR

SEQ ID NO: 15274 - protein, 1225 aa, Homo sapiens
  Payload ID: 3002
  Gene Symbol: CHD5
  Gene Name: chromodomain helicase DNA binding protein 5
  ENSP ID: ENSP00000433676
MRGPVGTEEELPRLFAEEMENEDEMSEEEDGGLEAFDDFFPVEPVSLPKKKKPKKLKENKCKGKRKKKEGSNDELSENEEDLEEKSESEGSDYSPNKKKKKKLKDKKEKKAKRKKKDEDEDDNDDGCLKEPKSSGQLMAEWGLDDVDYLFSEEDYHTLTNYKAFSQFLRPLIAKKNPKIPMSKMMTVLGAKWREFSANNPFKGSSAAAAAAAVAAAVETVTISPPLAVSPPQVPQPVPIRKAKTKEGKGPGVRKKIKGSKDGKKKGKGKKTAGLKFRFGGISNKRKKGSSSEEDEREESDFDSASIHSASVRSECSAALGKKSKRRRKKKRIDDGDGYETDHQDYCEVCQQGGEIILCDTCPRAYHLVCLDPELEKAPEGKWSCPHCEKEGIQWEPKDDDDEEEEGGCEEEEDDHMEFCRVCKDGGELLCCDACPSSYHLHCLNPPLPEIPNGEWLCPRCTCPPLKGKVQRILHWRWTEPPAPFMVGLPGPDVEPSLPPPKPLEGIPEREFFVKWAGLSYWHCSWVKELQLELYHTVMYRNYQRKNDMDEPPPFDYGSGDEDGKSEKRKNKDPLYAKMEERFYRYGIKPEWMMIHRILNHSFDKKGDVHYLIKWKDLPYDQCTWEIDDIDIPYYDNLKQAYWGHRELMLGEDTRLPKRLLKKGKKLRDDKQEKPPDTPIVDPTVKFDKQPWYIDSTGGTLHPYQLEGLNWLRFSWAQGTDTILADEMGLGKTVQTIVFLYSLYKEGHSKGPYLVSAPLSTIINWEREFEMWAPDFYVVTYTGDKESRSVIRENEFSFEDNAIRSGKKVFRMKKEVQIKFHVLLTSYELITIDQAILGSIEWACLVVDEAHRLKNNQSKFFRVLNSYKIDYKLLLTGTPLQNNLEELFHLLNFLTPERFNNLEGFLEEFADISKEDQIKKLHDLLGPHMLRRLKADVFKNMPAKTELIVRVELSQMQKKYYKFILTRNFEALNSKGGGNQVSLLNIMMDLKKCCNHPYLFPVAAVEAPVLPNGSYDGSSLVKSSGKLMLLQKMLKKLRDEGHRVLIFSQMTKMLDLLEDFLEYEGYKYERIDGGITGGLRQEAIDRFNAPGAQQFCFLLSTRAGGLGINLATADTVIIYDSDWNPHNDIQAFSRAHRIGQTKWKPSWATWMRKTPGHRSQGSPWKSRPFQPPWIEWRVRTSTRAQPARREPERSGQRRRRRPRPPRSSCRERRCFLRRRRSWTSWS

SEQ ID NO: 15275 - protein, 90 aa, Homo sapiens
  Payload ID: 3002
  Gene Symbol: CHD5
  Gene Name: chromodomain helicase DNA binding protein 5
  ENSP ID: ENSP00000466440
  MOD_RES (1)..(1): Any amino acid
XQLEELLSDMKADVTRLPSMLSRIPPVAARLQMSERSILSRLTNRAGDPTIQQISSRPRDFPVLQRSFPAEPRLPGHLPDPHGREKLPPF

SEQ ID NO: 15276 - protein, 1060 aa, Homo sapiens
  Payload ID: 3002
  Gene Symbol: CHD5
  Gene Name: chromodomain helicase DNA binding protein 5
  ENSP ID: ENSP00000466706
  MOD_RES (1)..(1): Any amino acid
XYDQCTWEIDDIDIPYYDNLKQAYWGHRELMLGEDTRLPKRLLKKGKKLRDDKQEKPPDTPIVDPTVKFDKQPWYIDSTGGTLHPYQLEGLNWLRFSWAQGTDTILADEMGLGKTVQTIVFLYSLYKEGHSKGPYLVSAPLSTIINWEREFEMWAPDFYVVTYTGDKESRSVIRENEFSFEDNAIRSGKKVFRMKKEVQIKFHVLLTSYELITIDQAILGSIEWACLVVDEAHRLKNNQSKFFRVLNSYKIDYKLLLTGTPLQNNLEELFHLLNFLTPERFNNLEGFLEEFADISKEDQIKKLHDLLGPHMLRRLKADVFKNMPAKTELIVRVELSQMQKKYYKFILTRNFEALNSKGGGNQVSLLNIMMDLKKCCNHPYLFPVAAVEAPVLPNGSYDGSSLVKSSGKLMLLQKMLKKLRDEGHRVLIFSQMTKMLDLLEDFLEYEGYKYERIDGGITGGLRQEAIDRFNAPGAQQFCFLLSTRAGGLGINLATADTVIIYDSDWNPHNDIQAFSRAHRIGQNKKVMIYRFVTRASVEERITQVAKRKMMLTHLVVRPGLGSKSGSMTKQELDDILKFGTEELFKDDVEGMMSQGQRPVTPIPDVQSSKGGNLAASAKKKHGSTPPGDNKDVEDSSVIHYDDAAISKLLDRNQDATDDTELQNMNEYLSSFKVAQYVVREEDGVEEVEREIIKQEENVDPDYWEKLLRHHYEQQQEDLARNLGKGKRIRKQVNYNDASQEDQEWQDELSDNQSEYSIGSEDEDEDFEERPEGQSGRRQSRRQLKSDRDKPLPPLLARVGGNIEVLGFNARQRKAFLNAIMRWGMPPQDAFNSHWLVRDLRGKSEKEFRAYVSLFMRHLCEPGADGAETFADGVPREGLSRQHVLTRIGVMSLVRKKVQEFEHVNGKYSTPDLIPEGPEGKKSGEVISSDPNTPVPASPAHLLPAPLGLPDKMEAQLGYMDEKDPGAQKPRQPLEVQALPAALDRVESEDKHESPASKERAREERPEETEKAPPSPEQLPRASCSVTQAGVQWRHLGSWEPLSPRLKRPSHLSFLNRGGAS

SEQ ID NO: 15277 - protein, 127 aa, Homo sapiens
  Payload ID: 3002
  Gene Symbol: CHD5
  Gene Name: chromodomain helicase DNA binding protein 5
  ENSP ID: ENSP00000468624
  MOD_RES (1)..(1): Any amino acid
XLAASAKKKHGSTPPGDNKDVEDSSVIHYDDAAISKLLDRNQDATDDTELQNMNEYLSSFKVAQYVVREEDGVLSPKSSLWVSPGGLSVSSSAPHPPCRPGGGGAGNHQAGGERGPRLLGEAAAAPL

SEQ ID NO: 15278 - protein, 488 aa, Homo sapiens
  Payload ID: 3003
  Gene Symbol: CHD6
  Gene Name: chromodomain helicase DNA binding protein 6
  ENSP ID: ENSP00000308684
MEELEKDPRIAQKIKRFRNKQAQMKHIFTEPDEDLFNPDYVEVDRILEVAHTKDAETGEEVTHYLVKWCSLPYEESTWELEEDVDPAKVKEFESLQVLPEIKHVERPASDSWQKLEKSREYKNSNQLREYQLEGMNWLLFNWYNRKNCILADEMGLGKTIQSITFLSEIFLRGIHGPFLIIAPLSTITNWEREFRTWTEMNAIVYHGSQISRQMIQQYEMVYRDAQGNPLSGVFKFHVVITTFEMILADCPELKKIHWGRWKDILTHGRFKWHLNEKDMEMICRALLVYCVKHYKGDEKIKSFIWELITPTKDGQAQTLQNHSGLSAPVPRGRKGKKTKNQLLIPELKDADWLATCNPEVVLHDDGYKKHLKQHCNKVLLRVRMLYYLKAEILGEAAEKAFEGSPARELDVPLPDIDYMEIPVDWWDAEADKSLLIGVFKHGYERYNAMRADPALCFLEKVGMPDEKSLSAEQGVTDGTSDIPERQHR

SEQ ID NO: 15279 - protein, 373 aa, Homo sapiens
  Payload ID: 3003
  Gene Symbol: CHD6
  Gene Name: chromodomain helicase DNA binding protein 6
  Uniprot ID: Q8TD26
  ENSP ID: ENSP00000362319
MCQSHMIGFCTSSVNEETETQGDQISCPNPTTLVFRTQISSLPSLQLSNLKVLNHSPMSDASVNFDYKSPSPFDCSTDQEEKIEDVASHCLPQKDLYTAEEEAATLFPRKMTSHNGMEDSGGGGTGVKKKRKKKEPGDQEGAAKGSKDREPKPKRKREPKEPKEPRKAKEPKKAKEHKEPKQKDGAKKARKPREASGTKEAKEKRSCTDSAARTKSRKASKEQGPTPVEKKKKGKRKSETTVESLELDQGLTNPSLRSPEESTESTDSQKRRSGRQVKRRKYNEDLDFKVVDDDGETIAVLGAGRTSALSASTLAWQAEEPPEDDANIIEKILASKTVQEVHPGEPPFDLELFYVKYRNLYVYLKYSLYLGFI

SEQ ID NO: 15280 - protein, 2715 aa, Homo sapiens
  Payload ID: 3003
  Gene Symbol: CHD6
  Gene Name: chromodomain helicase DNA binding protein 6
  Uniprot ID: Q8TD26
  ENSP ID: ENSP00000362330
MKMKIQKKEKQLSNLKVLNHSPMSDASVNFDYKSPSPFDCSTDQEEKIEDVASHCLPQKDLYTAEEEAATLFPRKMTSHNGMEDSGGGGTGVKKKRKKKEPGDQEGAAKGSKDREPKPKRKREPKEPKEPRKAKEPKKAKEHKEPKQKDGAKKARKPREASGTKEAKEKRSCTDSAARTKSRKASKEQGPTPVEKKKKGKRKSETTVESLELDQGLTNPSLRSPEESTESTDSQKRRSGRQVKRRKYNEDLDFKVVDDDGETIAVLGAGRTSALSASTLAWQAEEPPEDDANIIEKILASKTVQEVHPGEPPFDLELFYVKYRNFSYLHCKWATMEELEKDPRIAQKIKRFRNKQAQMKHIFTEPDEDLFNPDYVEVDRILEVAHTKDAETGEEVTHYLVKWCSLPYEESTWELEEDVDPAKVKEFESLQVLPEIKHVERPASDSWQKLEKSREYKNSNQLREYQLEGMNWLLFNWYNRKNCILADEMGLGKTIQSITFLSEIFLRGIHGPFLIIAPLSTITNWEREFRTWTEMNAIVYHGSQISRQMIQQYEMVYRDAQGNPLSGVFKFHVVITTFEMILADCPELKKIHWSCVIIDEAHRLKNRNCKLLEGLKLMALEHKVLLTGTPLQNSVEELFSLLNFLEPSQFPSETAFLEEFGDLKTEEQVKKLQSILKPMMLRRLKDDVEKNLAPKQETIIEVELTNIQKKYYRAILEKNFSFLTKGANQHNMPNLINTMMELRKCCNHPYLINGAEEKILEDFRKTHSPDAPDFQLQAMIQAAGKLVLIDKLLPKLIAGGHKVLIFSQMVRCLDILEDYLIQRRYTYERIDGRVRGNLRQAAIDRFCKPDSDRFVFLLCTRAGGLGINLTAADTCIIFDSDWNPQNDLQAQARCHRIGQSKAVKVYRLITRNSYEREMFDKASLKLGLDKAVLQDINRKGGTNGVQQLSKMEVEDLLRKGAYGALMDEEDEGSKFCEEDIDQILQRRTHTITIQSEGKGSTFAKASFVASGNRTDISLDDPNFWQKWAKIAELDTEAKNEKESLVIDRPRVRKQTKHYNSFEEDELMEFSELDSDSDERPTRSRRLNDKARRYLRAECFRVEKNLLIFGWGRWKDILTHGRFKWHLNEKDMEMICRALLVYCVKHYKGDEKIKSFIWELITPTKDGQAQTLQNHSGLSAPVPRGRKGKKTKNQLLIPELKDADWLATCNPEVVLHDDGYKKHLKQHCNKVLLRVRMLYYLKAEILGEAAEKAFEGSPARELDVPLPDIDYMEIPVDWWDAEADKSLLIGVFKHGYERYNAMRADPALCFLEKVGMPDEKSLSAEQGVTDGTSDIPERGNTDKEDNAEDKVDGLQKQTESSSDGGDGVFSEKKDDSRAAQDGSDPDKSPWPVSSALTARLRRLVTVYQRCNRKELCRPEILGPGNQGYWVQEEMFRRTSEMDLINKEAQKRWTRREQADFYRTVSSFGVVYDQEKKTFDWTQFRIISRLDKKSDESLEQYFYSFVAMCRNVCRLPTWKDGGPPDTTIYVEPITEERAARTLYRIELLRKVREQVLKCPQLHERLQLCRPSLYLPVWWECGKHDRDLLIGTAKHGLNRTDCYIMNDPQLSFLDAYRNYAQHKRSGTQAPGNLCCLYQTNSKLYESLTYSQMSRTSESLENEPENLVRVESRDDHLSLPDVTCENFISKVQDVISINHDESLLPESLESMMYGKKVLSQEPSSFQESPSTNTESRKDVITISISKDGNCQSGGPEAEIASGPTFMGSLEAGGVAQANIKNGKHLLMSISKEGELCCSEAGQRPENIGQLEAKCLASPSLNPGNESGFVDMCSLSVCDSKRNLSSDQQLIDLLENKSLESKLILSQNHSDEEEEEEENEEENLAMAVGMGERPEVLHLTEPTTNISREKNQGFQDETKKGSLEVANQTPGLQRAFPAPAACQCHCKHMERWMHGLENDEFEIEKPKAYIPDLFKSKTNTIAMEGEPTAIPSQPFKVKHELLKEPWKESAEGQNVFPTYPLEGSELKSEDMDFENKDDYDRDGNCHSQDYPGKYSEEESKSSTSGITGDIGDELQEARAPTIAQLLQEKTLYSFSEWPKDRVIINRLDNICHVVLKGKWPSSQQYEPSGTLPTPVLTSSAGSRTSLSEPEAAEHSFSNGAALAAQIHKESFLAPVFTKDEQKHRRPYEFEVERDAKARGLEQFSATHGHTPIILNGWHGESAMDLSCSSEGSPGATSPFPVSASTPKIGAISSLQGALGMDLSGILQAGLIHPVTGQIVNGSLRRDDAATRRRRGRRKHVEGGMDLIFLKEQTLQAGILEVHEDPGQATLSTTHPEGPGPATSAPEPATAASSQAEKSIPSKSLLDWLRQQADYSLEVPGFGANFSDKPKQRRPRCKEPGKLDVSSLSGEERVPAIPKEPGLRGFLPENKFNHTLAEPILRDTGPRRRGRRPRSELLKAPSIVADSPSGMGPLFMNGLIAGMDLVGLQNMRNMPGIPLTGLVGFPAGFATMPTGEEVKSTLSMLPMMLPGMAAVPQMFGVGGLLSPPMATTCTSTAPASLSSTTKSGTAVTEKTAEDKPSSHDVKTDTLAEDKPGPGPFSDQSEPAITTSSPVAFNPFLIPGVSPGLIYPSMFLSPGMGMALPAMQQARHSEIVGLESQKRKKKKTKGDNPNSHPEPAPSCEREPSGDENCAEPSAPLPAEREHGAQAGEGALKDSNNDTN

SEQ ID NO: 15281 - protein, 149 aa, Homo sapiens
  Payload ID: 3003
  Gene Symbol: CHD6
  Gene Name: chromodomain helicase DNA binding protein 6
  ENSP ID: ENSP00000392503
MKMKIQKKEKQLSNLKVLNHSPMSDASVNFDYKSPSPFDCSTDQEEKIEDVASHCLPQKDLYTAEEEAATLFPRKMTSHNGMEDSGGGGTGVKKKRKKKEPGDQEGAAKGSKDREPKPKRKREPKEPKEPRKAKEPKKAKEHKEPKQKD

SEQ ID NO: 15282 - protein, 525 aa, Homo sapiens
  Payload ID: 3003
  Gene Symbol: CHD6
  Gene Name: chromodomain helicase DNA binding protein 6
  ENSP ID: ENSP00000404637
  MOD_RES (1)..(1): Any amino acid
XASKTVQEVHPGEPPFDLELFYVKYRNFSYLHCKWATMEELEKDPRIAQKIKRFRNKQAQMKHIFTEPDEDLFNPDYVEVDRILEVAHTKDAETGEEVTHYLVKWCSLPYEESTWELEEDVDPAKVKEFESLQVLPEIKHVERPASDSWQKLEKSREYKNSNQLREYQLEGMNWLLFNWYNRKNCILADEMGLGKTIQSITFLSEIFLRGIHGPFLIIAPLSTITNWEREFRTWTEMNAIVYHGSQISRQMIQQYEMVYRDAQGNPLSGVFKFHVVITTFEMILADCPELKKIHWGRWKDILTHGRFKWHLNEKDMEMICRALLVYCVKHYKGDEKIKSFIWELITPTKDGQAQTLQNHSGLSAPVPRGRKGKKTKNQLLIPELKDADWLATCNPEVVLHDDGYKKHLKQHCNKVLLRVRMLYYLKAEILGEAAEKAFEGSPARELDVPLPDIDYMEIPVDWWDAEADKSLLIGVFKHGYERYNAMRADPALCFLEKVGMPDEKSLSAEQGVTDGTSDIPERQHR

SEQ ID NO: 15283 - protein, 2997 aa, Homo sapiens
  Payload ID: 3004
  Gene Symbol: CHD7
  Gene Name: chromodomain helicase DNA binding protein 7
  Uniprot ID: Q9P2D1
  ENSP ID: ENSP00000392028
MADPGMMSLFGEDGNIFSEGLEGLGECGYPENPVNPMGQQMPIDQGFASLQPSLHHPSTNQNQTKLTHFDHYNQYEQQKMHLMDQPNRMMSNTPGNGLASPHSQYHTPPVPQVPHGGSGGGQMGVYPGMQNERHGQSFVDSSSMWGPRAVQVPDQIRAPYQQQQPQPQPPQPAPSGPPAQGHPQHMQQMGSYMARGDFSMQQHGQPQQRMSQFSQGQEGLNQGNPFIATSGPGHLSHVPQQSPSMAPSLRHSVQQFHHHPSTALHGESVAHSPRFSPNPPQQGAVRPQTLNFSSRSQTVPSPTINNSGQYSRYPYSNLNQGLVNNTGMNQNLGLTNNTPMNQSVPRYPNAVGFPSNSGQGLMHQQPIHPSGSLNQMNTQTMHPSQPQGTYASPPPMSPMKAMSNPAGTPPPQVRPGSAGIPMEVGSYPNMPHPQPSHQPPGAMGIGQRNMGPRNMQQSRPFIGMSSAPRELTGHMRPNGCPGVGLGDPQAIQERLIPGQQHPGQQPSFQQLPTCPPLQPHPGLHHQSSPPHPHHQPWAQLHPSPQNTPQKVPVHQHSPSEPFLEKPVPDMTQVSGPNAQLVKSDDYLPSIEQQPQQKKKKKKNNHIVAEDPSKGFGKDDFPGGVDNQELNRNSLDGSQEEKKKKKRSKAKKDPKEPKEPKEKKEPKEPKTPKAPKIPKEPKEKKAKTATPKPKSSKKSSNKKPDSEASALKKKVNKGKTEGSENSDLDKTPPPSPPPEEDEDPGVQKRRSSRQVKRKRYTEDLEFKISDEEADDADAAGRDSPSNTSQSEQQESVDAEGPVVEKIMSSRSVKKQKESGEEVEIEEFYVKYKNFSYLHCQWASIEDLEKDKRIQQKIKRFKAKQGQNKFLSEIEDELFNPDYVEVDRIMDFARSTDDRGEPVTHYLVKWCSLPYEDSTWERRQDIDQAKIEEFEKLMSREPETERVERPPADDWKKSESSREYKNNNKLREYQLEGVNWLLFNWYNMRNCILADEMGLGKTIQSITFLYEIYLKGIHGPFLVIAPLSTIPNWEREFRTWTELNVVVYHGSQASRRTIQLYEMYFKDPQGRVIKGSYKFHAIITTFEMILTDCPELRNIPWRCVVIDEAHRLKNRNCKLLEGLKMMDLEHKVLLTGTPLQNTVEELFSLLHFLEPSRFPSETTFMQEFGDLKTEEQVQKLQAILKPMMLRRLKEDVEKNLAPKEETIIEVELTNIQKKYYRAILEKNFTFLSKGGGQANVPNLLNTMMELRKCCNHPYLINGAEEKILEEFKETHNAESPDFQLQAMIQAAGKLVLIDKLLPKLKAGGHRVLIFSQMVRCLDILEDYLIQRRYPYERIDGRVRGNLRQAAIDRFSKPDSDRFVFLLCTRAGGLGINLTAADTCIIFDSDWNPQNDLQAQARCHRIGQSKSVKIYRLITRNSYEREMFDKASLKLGLDKAVLQSMSGRENATNGVQQLSKKEIEDLLRKGAYGALMDEEDEGSKFCEEDIDQILLRRTHTITIESEGKGSTFAKASFVASGNRTDISLDDPNFWQKWAKKAELDIDALNGRNNLVIDTPRVRKQTRLYSAVKEDELMEFSDLESDSEEKPCAKPRRPQDKSQGYARSECFRVEKNLLVYGWGRWTDILSHGRYKRQLTEQDVETICRTILVYCLNHYKGDENIKSFIWDLITPTADGQTRALVNHSGLSAPVPRGRKGKKVKAQSTQPVVQDADWLASCNPDALFQEDSYKKHLKHHCNKVLLRVRMLYYLRQEVIGDQADKILEGADSSEADVWIPEPFHAEVPADWWDKEADKSLLIGVFKHGYEKYNSMRADPALCFLERVGMPDAKAIAAEQRGTDMLADGGDGGEFDREDEDPEYKPTRTPFKDEIDEFANSPSEDKEESMEIHATGKHSESNAELGQLYWPNTSTLTTRLRRLITAYQRSYKRQQMRQEALMKTDRRRRRPREEVRALEAEREAIISEKRQKWTRREEADFYRVVSTFGVIFDPVKQQFDWNQFRAFARLDKKSDESLEKYFSCFVAMCRRVCRMPVKPDDEPPDLSSIIEPITEERASRTLYRIELLRKIREQVLHHPQLGERLKLCQPSLDLPEWWECGRHDRDLLVGAAKHGVSRTDYHILNDPELSFLDAHKNFAQNRGAGNTSSLNPLAVGFVQTPPVISSAHIQDERVLEQAEGKVEEPENPAAKEKCEGKEEEEETDGSGKESKQECEAEASSVKNELKGVEVGADTGSKSISEKGSEEDEEEKLEDDDKSEESSQPEAGAVSRGKNFDEESNASMSTARDETRDGFYMEDGDPSVAQLLHERTFAFSFWPKDRVMINRLDNICEAVLKGKWPVNRRQMFDFQGLIPGYTPTTVDSPLQKRSFAELSMVGQASISGSEDITTSPQLSKEDALNLSVPRQRRRRRRKIEIEAERAAKRRNLMEMVAQLRESQVVSENGQEKVVDLSKASREATSSTSNFSSLSSKFILPNVSTPVSDAFKTQMELLQAGLSRTPTRHLLNGSLVDGEPPMKRRRGRRKNVEGLDLLFMSHKRTSLSAEDAEVTKAFEEDIETPPTRNIPSPGQLDPDTRIPVINLEDGTRLVGEDAPKNKDLVEWLKLHPTYTVDMPSYVPKNADVLFSSFQKPKQKRHRCRNPNKLDINTLTGEERVPVVNKRNGKKMGGAMAPPMKDLPRWLEENPEFAVAPDWTDIVKQSGFVPESMFDRLLTGPVVRGEGASRRGRRPKSEIARAAAAAAAVASTSGINPLLVNSLFAGMDLTSLQNLQNLQSLQLAGLMGFPPGLATAATAGGDAKNPAAVLPLMLPGMAGLPNVFGLGGLLNNPLSAATGNTTTASSQGEPEDSTSKGEEKGNENEDENKDSEKSTDAVSAADSANGSVGAATAPAGLPSNPLAFNPFLLSTMAPGLFYPSMFLPPGLGGLTLPGFPALAGLQNAVGSSEEKAADKAEGGPFKDGETLEGSDAEESLDKTAESSLLEDEIAQGEELDSLDGGDEIENNENDE

SEQ ID NO: 15284 - protein, 19 aa, Homo sapiens
  Payload ID: 3004
  Gene Symbol: CHD7
  Gene Name: chromodomain helicase DNA binding protein 7
  ENSP ID: ENSP00000432627
  MOD_RES (1)..(1): Any amino acid
XSSMWGPRAVQACPRHQGN

SEQ ID NO: 15285 - protein, 39 aa, Homo sapiens
  Payload ID: 3004
  Gene Symbol: CHD7
  Gene Name: chromodomain helicase DNA binding protein 7
  ENSP ID: ENSP00000433336
HQPWAQLHPSPQNTPQKVPVHQHSPSEPFLEKPVPDMTQ

SEQ ID NO: 15286 - protein, 1138 aa, Homo sapiens
  Payload ID: 3004
  Gene Symbol: CHD7
  Gene Name: chromodomain helicase DNA binding protein 7
  Uniprot ID: Q9P2D1
  ENSP ID: ENSP00000436027
MADPGMMSLFGEDGNIFSEGLEGLGECGYPENPVNPMGQQMPIDQGFASLQPSLHHPSTNQNQTKLTHFDHYNQYEQQKMHLMDQPNRMMSNTPGNGLASPHSQYHTPPVPQVPHGGSGGGQMGVYPGMQNERHGQSFVDSSSMWGPRAVQVPDQIRAPYQQQQPQPQPPQPAPSGPPAQGHPQHMQQMGSYMARGDFSMQQHGQPQQRMSQFSQGQEGLNQGNPFIATSGPGHLSHVPQQSPSMAPSLRHSVQQFHHHPSTALHGESVAHSPRFSPNPPQQGAVRPQTLNFSSRSQTVPSPTINNSGQYSRYPYSNLNQGLVNNTGMNQNLGLTNNTPMNQSVPRYPNAVGFPSNSGQGLMHQQPIHPSGSLNQMNTQTMHPSQPQGTYASPPPMSPMKAMSNPAGTPPPQVRPGSAGIPMEVGSYPNMPHPQPSHQPPGAMGIGQRNMGPRNMQQSRPFIGMSSAPRELTGHMRPNGCPGVGLGDPQAIQERLIPGQQHPGQQPSFQQLPTCPPLQPHPGLHHQSSPPHPHHQPWAQLHPSPQNTPQKVPVHQHSPSEPFLEKPVPDMTQVSGPNAQLVKSDDYLPSIEQQPQQKKKKKKNNHIVAEDPSKGFGKDDFPGGVDNQELNRNSLDGSQEEKKKKKRSKAKKDPKEPKEPKEKKEPKEPKTPKAPKIPKEPKEKKAKTATPKPKSSKKSSNKKPDSEASALKKKVNKGKTEGSENSDLDKTPPPSPPPEEDEDPGVQKRRSSRQVKRKRYTEDLEFKISDEEADDADAAGRDSPSNTSQSEQQESVDAEGPVVEKIMSSRSVKKQKESGEEVEIEEFYVKYKNFSYLHCQWASIEDLEKDKRIQQKIKRFKAKQGQNKFLSEIEDELFNPDYVEVDRIMDFARSTDDRGEPVTHYLVKWCSLPYEDSTWERRQDIDQAKIEEFEKLMSREPETERVERPPADDWKKSESSREYKNNNKLREYQLEGVNWLLFNWYNMRNCILADEMGLGKTIQSITFLYEIYLKGIHGPFLVIAPLSTIPNWEREFRTWTELNVVVYHGSQASRRTIQLYEMYFKDPQGRVIKGSYKFHAIITTFEMILTDCPELRNIPWRCVVIDEAHRLKNRNCKLLEGLKMMDLVSDHIGDCTEPE

SEQ ID NO: 15287 - protein, 32 aa, Homo sapiens
  Payload ID: 3004
  Gene Symbol: CHD7
  Gene Name: chromodomain helicase DNA binding protein 7
  ENSP ID: ENSP00000436492
MADPGMMSLFGEDGNIFSEGLEGLGECGYPEN

SEQ ID NO: 15288 - protein, 948 aa, Homo sapiens
  Payload ID: 3004
  Gene Symbol: CHD7
  Gene Name: chromodomain helicase DNA binding protein 7
  Uniprot ID: Q9P2D1
  ENSP ID: ENSP00000437061
MADPGMMSLFGEDGNIFSEGLEGLGECGYPENPVNPMGQQMPIDQGFASLQPSLHHPSTNQNQTKLTHFDHYNQYEQQKMHLMDQPNRMMSNTPGNGLASPHSQYHTPPVPQVPHGGSGGGQMGVYPGMQNERHGQSFVDSSSMWGPRAVQVPDQIRAPYQQQQPQPQPPQPAPSGPPAQGHPQHMQQMGSYMARGDFSMQQHGQPQQRMSQFSQGQEGLNQGNPFIATSGPGHLSHVPQQSPSMAPSLRHSVQQFHHHPSTALHGESVAHSPRFSPNPPQQGAVRPQTLNFSSRSQTVPSPTINNSGQYSRYPYSNLNQGLVNNTGMNQNLGLTNNTPMNQSVPRYPNAVGFPSNSGQGLMHQQPIHPSGSLNQMNTQTMHPSQPQGTYASPPPMSPMKAMSNPAGTPPPQVRPGSAGIPMEVGSYPNMPHPQPSHQPPGAMGIGQRNMGPRNMQQSRPFIGMSSAPRELTGHMRPNGCPGVGLGDPQAIQERLIPGQQHPGQQPSFQQLPTCPPLQPHPGLHHQSSPPHPHHQPWAQLHPSPQNTPQKVPVHQHSPSEPFLEKPVPDMTQKPKQKRHRCRNPNKLDINTLTGEERVPVVNKRNGKKMGGAMAPPMKDLPRWLEENPEFAVAPDWTDIVKQSGFVPESMFDRLLTGPVVRGEGASRRGRRPKSEIARAAAAAAAVASTSGINPLLVNSLFAGMDLTSLQNLQNLQSLQLAGLMGFPPGLATAATAGGDAKNPAAVLPLMLPGMAGLPNVFGLGGLLNNPLSAATGNTTTASSQGEPEDSTSKGEEKGNENEDENKDSEKSTDAVSAADSANGSVGAATAPAGLPSNPLAFNPFLLSTMAPGLFYPSMFLPPGLGGLTLPGFPALAGLQNAVGSSEEKAADKAEGGPFKDGETLEGSDAEESLDKTAESSLLEDEIAQGEELDSLDGGDEIENNENDE

SEQ ID NO: 15289 - protein, 2581 aa, Homo sapiens
  Payload ID: 3005
  Gene Symbol: CHD8
  Gene Name: chromodomain helicase DNA binding protein 8
  Uniprot ID: Q9HCK8
  ENSP ID: ENSP00000382863
MADPIMDLFDDPNLFGLDSLTDDSFNQVTQDPIEEALGLPSSLDSLDQMNQDGGGGDVGNSSASELVPPPEETAPTELSKESTAPAPESITLHDYTTQPASQEQPAQPVLQTSTPTSGLLQVSKSQEILSQGNPFMGVSATAVSSSSAGGQPPQSAPKIVILKAPPSSSVTGAHVAQIQAQGITSTAQPLVAGTANGGKVTFTKVLTGTPLRPGVSIVSGNTVLAAKVPGNQAAVQRIVQPSRPVKQLVLQPVKGSAPAGNPGATGPPLKPAVTLTSTPTQGESKRITLVLQQPQSGGPQGHRHVVLGSLPGKIVLQGNQLAALTQAKNAQGQPAKVVTIQLQVQQPQQKIQIVPQPPSSQPQPQQPPSTQPVTLSSVQQAQIMGPGQSPGQRLSVPVKVVLQPQAGSSQGASSGLSVVKVLSASEVAALSSPASSAPHSGGKTGMEENRRLEHQKKQEKANRIVAEAIARARARGEQNIPRVLNEDELPSVRPEEEGEKKRRKKSAGERLKEEKPKKSKTSGASKTKGKSKLNTITPVVGKKRKRNTSSDNSDVEVMPAQSPREDEESSIQKRRSNRQVKRKKYTEDLDIKITDDEEEEEVDVTGPIKPEPILPEPVQEPDGETLPSMQFFVENPSEEDAAIVDKVLSMRIVKKELPSGQYTEAEEFFVKYKNYSYLHCEWATISQLEKDKRIHQKLKRFKTKMAQMRHFFHEDEEPFNPDYVEVDRILDESHSIDKDNGEPVIYYLVKWCSLPYEDSTWELKEDVDEGKIREFKRIQSRHPELKRVNRPQASAWKKLELSHEYKNRNQLREYQLEGVNWLLFNWYNRQNCILADEMGLGKTIQSIAFLQEVYNVGIHGPFLVIAPLSTITNWEREFNTWTEMNTIVYHGSLASRQMIQQYEMYCKDSRGRLIPGAYKFDALITTFEMILSDCPELREIEWRCVIIDEAHRLKNRNCKLLDSLKHMDLEHKVLLTGTPLQNTVEELFSLLHFLEPSQFPSESEFLKDFGDLKTEEQVQKLQAILKPMMLRRLKEDVEKNLAPKQETIIEVELTNIQKKYYRAILEKNFSFLSKGAGHTNMPNLLNTMMELRKCCNHPYLINGAEEKILTEFREACHIIPHDFHLQAMVRSAGKLVLIDKLLPKLKAGGHKVLIFSQMVRCLDILEDYLIQRRYLYERIDGRVRGNLRQAAIDRFSKPDSDRFVFLLCTRAGGLGINLTAADTCIIFDSDWNPQNDLQAQARCHRIGQSKAVKVYRLITRNSYEREMFDKASLKLGLDKAVLQSMSGRDGNITGIQQFSKKEIEDLLRKGAYAAIMEEDDEGSKFCEEDIDQILLRRTTTITIESEGKGSTFAKASFVASENRTDISLDDPNFWQKWAKKADLDMDLLNSKNNLVIDTPRVRKQTRHFSTLKDDDLVEFSDLESEDDERPRSRRHDRHHAYGRTDCFRVEKHLLVYGWGRWRDILSHGRFKRRMTERDVETICRAILVYCLLHYRGDENIKGFIWDLISPAENGKTKELQNHSGLSIPVPRGRKGKKVKSQSTFDIHKADWIRKYNPDTLFQDESYKKHLKHQCNKVLLRVRMLYYLRQEVIGDQAEKVLGGAIASEIDIWFPVVDQLEVPTTWWDSEADKSLLIGVFKHGYEKYNTMRADPALCFLEKAGRPDDKAIAAEHRVLDNFSDIVEGVDFDKDCEDPEYKPLQGPPKDQDDEGDPLMMMDEEISVIDGDEAQVTQQPGHLFWPPGSALTARLRRLVTAYQRSYKREQMKIEAAERGDRRRRRCEAAFKLKEIARREKQQRWTRREQTDFYRVVSTFGVEYDPDTMQFHWDRFRTFARLDKKTDESLTKYFHGFVAMCRQVCRLPPAAGDEPPDPNLFIEPITEERASRTLYRIELLRRLREQVLCHPLLEDRLALCQPPGPELPKWWEPVRHDGELLRGAARHGVSQTDCNIMQDPDFSFLAARMNYMQNHQAGAPAPSLSRCSTPLLHQQYTSRTASPLPLRPDAPVEKSPEETATQVPSLESLTLKLEHEVVARSRPTPQDYEMRVSPSDTTPLVSRSVPPVKLEDEDDSDSELDLSKLSPSSSSSSSSSSSSSSTDESEDEKEEKLTDQSRSKLYDEESLLSLTMSQDGFPNEDGEQMTPELLLLQERQRASEWPKDRVLINRIDLVCQAVLSGKWPSSRRSQEMVTGGILGPGNHLLDSPSLTPGEYGDSPVPTPRSSSAASMAEEEASAVSTAAAQFTKLRRGMDEKEFTVQIKDEEGLKLTFQKHKLMANGVMGDGHPLFHKKKGNRKKLVELEVECMEEPNHLDVDLETRIPVINKVDGTLLVGEDAPRRAELEMWLQGHPEFAVDPRFLAYMEDRRKQKWQRCKKNNKAELNCLGMEPVQTANSRNGKKGHHTETVFNRVLPGPIAPESSKKRARRMRPDLSKMMALMQGGSTGSLSLHNTFQHSSSGLQSVSSLGHSSATSASLPFMPFVMGGAPSSPHVDSSTMLHHHHHHPHPHHHHHHHPGLRAPGYPSSPVTTASGTTLRLPPLQPEEDDDEDEEDDDDLSQGYDSSERDFSLIDDPMMPANSDSSEDADD

SEQ ID NO: 15290 - protein, 2302 aa, Homo sapiens
  Payload ID: 3005
  Gene Symbol: CHD8
  Gene Name: chromodomain helicase DNA binding protein 8
  Uniprot ID: Q9HCK8
  ENSP ID: ENSP00000406288
MKGESKRITLVLQQPQSGGPQGHRHVVLGSLPGKIVLQGNQLAALTQAKNAQGQPAKVVTIQLQVQQPQQKIQIVPQPPSSQPQPQQPPSTQPVTLSSVQQAQIMGPGQSPGQRLSVPVKVVLQPQAGSSQGASSGLSVVKVLSASEVAALSSPASSAPHSGGKTGMEENRRLEHQKKQEKANRIVAEAIARARARGEQNIPRVLNEDELPSVRPEEEGEKKRRKKSAGERLKEEKPKKSKTSGASKTKGKSKLNTITPVVGKKRKRNTSSDNSDVEVMPAQSPREDEESSIQKRRSNRQVKRKKYTEDLDIKITDDEEEEEVDVTGPIKPEPILPEPVQEPDGETLPSMQFFVENPSEEDAAIVDKVLSMRIVKKELPSGQYTEAEEFFVKYKNYSYLHCEWATISQLEKDKRIHQKLKRFKTKMAQMRHFFHEDEEPFNPDYVEVDRILDESHSIDKDNGEPVIYYLVKWCSLPYEDSTWELKEDVDEGKIREFKRIQSRHPELKRVNRPQASAWKKLELSHEYKNRNQLREYQLEGVNWLLFNWYNRQNCILADEMGLGKTIQSIAFLQEVYNVGIHGPFLVIAPLSTITNWEREFNTWTEMNTIVYHGSLASRQMIQQYEMYCKDSRGRLIPGAYKFDALITTFEMILSDCPELREIEWRCVIIDEAHRLKNRNCKLLDSLKHMDLEHKVLLTGTPLQNTVEELFSLLHFLEPSQFPSESEFLKDFGDLKTEEQVQKLQAILKPMMLRRLKEDVEKNLAPKQETIIEVELTNIQKKYYRAILEKNFSFLSKGAGHTNMPNLLNTMMELRKCCNHPYLINGAEEKILTEFREACHIIPHDFHLQAMVRSAGKLVLIDKLLPKLKAGGHKVLIFSQMVRCLDILEDYLIQRRYLYERIDGRVRGNLRQAAIDRFSKPDSDRFVFLLCTRAGGLGINLTAADTCIIFDSDWNPQNDLQAQARCHRIGQSKAVKVYRLITRNSYEREMFDKASLKLGLDKAVLQSMSGRDGNITGIQQFSKKEIEDLLRKGAYAAIMEEDDEGSKFCEEDIDQILLRRTTTITIESEGKGSTFAKASFVASENRTDISLDDPNFWQKWAKKADLDMDLLNSKNNLVIDTPRVRKQTRHFSTLKDDDLVEFSDLESEDDERPRSRRHDRHHAYGRTDCFRVEKHLLVYGWGRWRDILSHGRFKRRMTERDVETICRAILVYCLLHYRGDENIKGFIWDLISPAENGKTKELQNHSGLSIPVPRGRKGKKVKSQSTFDIHKADWIRKYNPDTLFQDESYKKHLKHQCNKVLLRVRMLYYLRQEVIGDQAEKVLGGAIASEIDIWFPVVDQLEVPTTWWDSEADKSLLIGVFKHGYEKYNTMRADPALCFLEKAGRPDDKAIAAEHRVLDNFSDIVEGVDFDKDCEDPEYKPLQGPPKDQDDEGDPLMMMDEEISVIDGDEAQVTQQPGHLFWPPGSALTARLRRLVTAYQRSYKREQMKIEAAERGDRRRRRCEAAFKLKEIARREKQQRWTRREQTDFYRVVSTFGVEYDPDTMQFHWDRFRTFARLDKKTDESLTKYFHGFVAMCRQVCRLPPAAGDEPPDPNLFIEPITEERASRTLYRIELLRRLREQVLCHPLLEDRLALCQPPGPELPKWWEPVRHDGELLRGAARHGVSQTDCNIMQDPDFSFLAARMNYMQNHQAGAPAPSLSRCSTPLLHQQYTSRTASPLPLRPDAPVEKSPEETATQVPSLESLTLKLEHEVVARSRPTPQDYEMRVSPSDTTPLVSRSVPPVKLEDEDDSDSELDLSKLSPSSSSSSSSSSSSSSTDESEDEKEEKLTDQSRSKLYDEESLLSLTMSQDGFPNEDGEQMTPELLLLQERQRASEWPKDRVLINRIDLVCQAVLSGKWPSSRRSQEMVTGGILGPGNHLLDSPSLTPGEYGDSPVPTPRSSSAASMAEEEASAVSTAAAQFTKLRRGMDEKEFTVQIKDEEGLKLTFQKHKLMANGVMGDGHPLFHKKKGNRKKLVELEVECMEEPNHLDVDLETRIPVINKVDGTLLVGEDAPRRAELEMWLQGHPEFAVDPRFLAYMEDRRKQKWQRCKKNNKAELNCLGMEPVQTANSRNGKKGHHTETVFNRVLPGPIAPESSKKRARRMRPDLSKMMALMQGGSTGSLSLHNTFQHSSSGLQSVSSLGHSSATSASLPFMPFVMGGAPSSPHVDSSTMLHHHHHHPHPHHHHHHHPGLRAPGYPSSPVTTASGTTLRLPPLQPEEDDDEDEEDDDDLSQGYDSSERDFSLIDDPMMPANSDSSEDADD

SEQ ID NO: 15291 - protein, 98 aa, Homo sapiens
  Payload ID: 3005
  Gene Symbol: CHD8
  Gene Name: chromodomain helicase DNA binding protein 8
  ENSP ID: ENSP00000450860
MYLISILGSPVTRNLPPLLYGPYWHQPRQYEQGESKRITLVLQQPQSGGPQGHRHVVLGSLPGKIVLQGNQLAALTQAKNAQGQPAKVVTIQLQVQQP

SEQ ID NO: 15292 - protein, 151 aa, Homo sapiens
  Payload ID: 3005
  Gene Symbol: CHD8
  Gene Name: chromodomain helicase DNA binding protein 8
  ENSP ID: ENSP00000450957
MKVTQDPIEEALGLPSSLDSLDQMNQDGGGGDVGNSSASELVPPPEETAPTELSKESTAPAPESITLHDYTTQPASQEQPAQPVLQTSTPTSGLLQVSKSQEILSQGNPFMGVSATAVSSSSAGGQPPQSAPKIVILKAPPSSSVTGAHVA

SEQ ID NO: 15293 - protein, 226 aa, Homo sapiens
  Payload ID: 3005
  Gene Symbol: CHD8
  Gene Name: chromodomain helicase DNA binding protein 8
  ENSP ID: ENSP00000451071
IDLVCQAVLSGKWPSSRRSQEMVTGGILGPGNHLLDSPSLTPGEYGDSPVPTPRSSSAASMAEEEASAVSTAAAQFTKLRRGMDEKEFTVQIKDEEGLKLTFQKHKLMANGVMGDGHPLFHKKKGNRKKLVEYMEDRRKQKWQRCKKNNKAELNCLGMEPVQTANSRNGKKGHHTETVFNRVLPGPIAPESSKKRARRMRPDLSKMMALMQGGSTGSLSLHNTFQH

SEQ ID NO: 15294 - protein, 873 aa, Homo sapiens
  Payload ID: 3005
  Gene Symbol: CHD8
  Gene Name: chromodomain helicase DNA binding protein 8
  ENSP ID: ENSP00000451442
  MOD_RES (1)..(1): Any amino acid
XKRIQSRHPELKRVNRPQASAWKKLELSHEYKNRNQLREYQLEGVNWLLFNWYNRQNCILADEMGLGKTIQSIAFLQEVYNVGIHGPFLVIAPLSTITNWEREFNTWTEMNTIVYHGSLASRQMIQQYEMYCKDSRGRLIPGAYKFDALITTFEMILSDCPELREIEWRCVIIDEAHRLKNRNCKLLDSLKHMDLEHKVLLTGTPLQNTVEELFSLLHFLEPSQFPSESEFLKDFGDLKTEEQVQKLQAILKPMMLRRLKEDVEKNLAPKQETIIEVELTNIQKKYYRAILEKNFSFLSKGAGHTNMPNLLNTMMELRKCCNHPYLINGAEEKILTEFREACHIIPHDFHLQAMVRSAGKLVLIDKLLPKLKAGGHKVLIFSQMVRCLDILEDYLIQRRYLYERIDGRVRGNLRQAAIDRFSKPDSDRFVFLLCTRAGGLGINLTAADTCIIFDSDWNPQNDLQAQARCHRIGQSKAVKVYRLITRNSYEREMFDKASLKLGLDKAVLQSMSGRDGNITGIQQFSKKEIEDLLRKGAYAAIMEEDDEGSKFCEEDIDQILLRRTTTITIESEGKGSTFAKASFVASENRTDISLDDPNFWQKWAKKADLDMDLLNSKNNLVIDTPRVRKQTRHFSTLKDDDLVEFSDLESEDDERPRSRRHDRHHAYGRTDCFRVEKHLLVYGWGRWRDILSHGRFKRRMTERDVETICRAILVYCLLHYRGDENIKGFIWDLISPAENGKTKELQNHSVFDVSPFPGLSIPVPRGRKGKKVKSQSTFDIHKADWIRKYNPDTLFQDESYKKHLKHQCNKVLLRVRMLYYLRQEVIGDQAEKVLGGAIASEIDIWFPVVDQLEVPTTWWDSEADKSLLIGVFK

SEQ ID NO: 15295 - protein, 2581 aa, Homo sapiens; identical to SEQ ID NO: 15289
  Payload ID: 3005
  Gene Symbol: CHD8
  Gene Name: chromodomain helicase DNA binding protein 8
  Uniprot ID: Q9HCK8
  ENSP ID: ENSP00000451601

SEQ ID NO: 15296 - protein, 2897 aa, Homo sapiens
  Payload ID: 3006
  Gene Symbol: CHD9
  Gene Name: chromodomain helicase DNA binding protein 9
  Uniprot ID: Q3L8U1
  ENSP ID: ENSP00000381522
MTDPMMDFFDDANLFGETLEGLSDDAFVQPGPVSLVDELNLGAEFEPLHIDSLNHVQGTPTHQKMTDFEQLNQFDSIKFHHVNQSFGSPAEHVLSPHSQFNCSPIHPQNQPNGLFPDVSDGSPMWGHQTATTISNQNGSPFHQQGHSHSMHQNKSFVAHHDFALFQANEQQTQCTSLRSQQNRNNLNPGQNSLSQSKNFMNVSGPHRVNVNHPPQMTNASNSQQSISMQQFSQTSNPSAHFHKCSSHQEGNFNGPSPNMTSCSVSNSQQFSSHYSFSSNHISPNSLLQSSAVLASNHTNQTLSDFTGSNSFSPHRGIKQESTQHILNPNTSLNSNNFQILHSSHPQGNYSNSKLSPVHMNFPDPVDSGTQMGHFNDHVETNGFSSLEENLLHQVESQTEPFTGLDPEDLLQEGLLPHFDESTFGQDNSSHILDHDLDRQFTSHLVTRPSDMAQTQLQSQARSWHSSFSNHQHLHDRNHLCLQRQPPSSKKSDGSGTYTKLQNTQVRVMSEKKQRKKVESESKQEKANRIISEAIAKAKERGERNIPRVMSPENFPTASVEGKEEKKGRRMKSKPKDKDSKKTKTCSKLKEKTKIGKLIITLGKKQKRKNESSDEISDAEQMPQHTLKDQDSQKRRSNRQIKRKKYAEDIEGKQSEEEVKGSMKIKKNSAPLPGEQPLQLFVENPSEEDAAIVDKILSSRTVKKEISPGVMIDTEEFFVKYKNYSYLHCEWATEEQLLKDKRIQQKIKRFKLRQAQRAHFFADMEEEPFNPDYVEVDRVLEVSFCEDKDTGEPVIYYLVKWCSLPYEDSTWELKEDVDLAKIEEFEQLQASRPDTRRLDRPPSNIWKKIDQSRDYKNGNQLREYQLEGLNWLLFNWYNRRNCILADEMGLGKTIQSITFLYEILLTGIRGPFLIIAPLSTIANWEREFRTWTDINVVVYHGSLISRQMIQQYEMYFRDSQGRIIRGAYRFQAIITTFEMILGGCGELNAIEWRCVIIDEAHRLKNKNCKLLEGLKLMNLEHKVLLTGTPLQNTVEELFSLLHFLEPLRFPSESTFMQEFGDLKTEEQVQKLQAILKPMMLRRLKEDVEKKLAPKEETIIEVELTNIQKKYYRAILEKNFSFLSKGAGQTNVPNLVNTMMELRKCCNHPYLIKGAEEKILGEFRDTYNPAASDFHLQAMIQSAGKLVLIDKLLPKMKAGGHKVLIFSQMVRCLDILEDYLIHKRYLYERIDGRVRGNLRQAAIDRFSKPDSDRFVFLLCTRAGGLGINLTAADTCIIFDSDWNPQNDLQAQARCHRIGQNKAVKVYRLVTRNSYEREMFDRASLKLGLDKAVLQSMSGRESNVGGIQQLSKKEIEDLLRRGAYGAIMEEEDEGSKFCEEDIDQILLRRTKTITIESEGRGSTFAKASFVASGNRTDISLDDPNFWQKWAKKAEIDIEAISGRNSLVIDTPRIRKQTRPFSATKDELAELSEAESEGDEKPKLRRPCDRSNGYGRTECFRVEKNLLVYGWGRWREILSHGRFKRQLNEHDVEIICRALLAYCLVHYRGDEKIKGFIWDLITPTEDGQTRELQNHLGLSAPVPRGRKGKKVKTQTSSFDIQKAEWLRKYNPEQLLQDEGYKKHIKHHCNKVLLRVRMLYYLKQEVIGNECQKVFDGVDASDIDVWVPEPDHSEVPAEWWDFDADKSLLIGVFKHGYEKYNTIRADPALCFLERVGKPDEKAVAAEQRANDYMDGDVEDPEYKPAPAIFKDDIEDDVSSPGDLVIADGDGQLMEGDKVYWPTQSALTTRLRRLITAYQRTNKNRQIQQIQPTFSVPTSVMQPIYEEATLNPKMAAKIERQQRWTRREEADFYRVVSTFGVVFDPDRGQFDWTKFRAMARLHKKTDDSLEKYLYAFMSMCRRVCRLPSKEELVDPNIFIQPITEERASRTLYRIELLRKVREQALRHPQLFERLKLCHPNPDLPVWWECGPHDRDLLIGAAKHGVSRTDYHILRDPELSFMAAQRNYSQSKMAHSRTSTPLLQQYQVALSASPLTSLPRLLDAKGIILEEMKVKSENLKEEPQSSEEESMSSVETRTLIKSEPVSPKNGVLPQATGDQKSGGKCETDRRMVAARTEPLTPNPASKKPRVHKRGSESSSDSDSDSERSSCSSRSSSSSSSSSCSHSRSGSSSSSSSSCSSASSSSSSSTSSSSSSSSSSSEESDSDEEEAQKRESTTHMKAYDEESVASLSTTQDETQDSFQMNNGTPESAYILQGGYMLAASYWPKDRVMINRLDSICQTVLKGKWPSARRSYDANTVASFYTTKLLDSPGAATEYSDPSVPTPPGAGVKEEHDQSTQMSKVKKHVREKEFTVKIKDEGGLKLTFQKQGLAQKRPFDGEDGALGQQQYLTRLRELQSASETSLVNFPKSIPVSGTSIQPTLGANGVILDNQPIVKKRRGRRKNVEGVDIFFFNRNKPPNHVSLGLTSSQISTGINPALSYTQPQGIPDTESPVPVINLKDGTRLAGDDAPKRKDLEKWLKEHPGYVEDLGAFIPRMQLHEGRPKQKRHRCRNPNKLDVNSLTGEERVQLINRRNARKVGGAFAPPLKDLCRFLKENSEYGVAPEWGDVVKQSGFLPESMYERILTGPVVREEVSRRGRRPKSGIAKATAAAAAASATSVSGNPLLANGLLPGVDLTTLQALQQNLQNLQSLQVTAGLMGMPTGLPSGGEAKNMAAMFPMLLSGMAGLPNLLGMGGLLTKPTESGTEDKKGSDSKESEGKTERTESQSSENGGENSVSSSPSTSSTAALNTAAAANPLALNPLLLSNILYPGMLLTPGLNLHIPTLSQSNTFDVQNKNSDLGSSKSVEVKEEDSRIKDQEDKGGTEPSPLNENSTDEGSEKADASSGSDSTSSSSEDSDSSNED

SEQ ID NO: 15297 - protein, 2897 aa, Homo sapiens; identical to SEQ ID NO: 15296
  Payload ID: 3006
  Gene Symbol: CHD9
  Gene Name: chromodomain helicase DNA binding protein 9
  Uniprot ID: Q3L8U1
  ENSP ID: ENSP00000396345

SEQ ID NO: 15298 - protein, 2881 aa, Homo sapiens
  Payload ID: 3006
  Gene Symbol: CHD9
  Gene Name: chromodomain helicase DNA binding protein 9
  Uniprot ID: Q3L8U1
  ENSP ID: ENSP00000455307
MTDPMMDFFDDANLFGETLEGLSDDAFVQPGPVSLVDELNLGAEFEPLHIDSLNHVQGTPTHQKMTDFEQLNQFDSIKFHHVNQSFGSPAEHVLSPHSQFNCSPIHPQNQPNGLFPDVSDGSPMWGHQTATTISNQNGSPFHQQGHSHSMHQNKSFVAHHDFALFQANEQQTQCTSLRSQQNRNNLNPGQNSLSQSKNFMNVSGPHRVNVNHPPQMTNASNSQQSISMQQFSQTSNPSAHFHKCSSHQEGNFNGPSPNMTSCSVSNSQQFSSHYSFSSNHISPNSLLQSSAVLASNHTNQTLSDFTGSNSFSPHRGIKQESTQHILNPNTSLNSNNFQILHSSHPQGNYSNSKLSPVHMNFPDPVDSGTQMGHFNDHVETNGFSSLEENLLHQVESQTEPFTGLDPEDLLQEGLLPHFDESTFGQDNSSHILDHDLDRQFTSHLVTRPSDMAQTQLQSQARSWHSSFSNHQHLHDRNHLCLQRQPPSSKKSDGSGTYTKLQNTQVRVMSEKKQRKKVESESKQEKANRIISEAIAKAKERGERNIPRVMSPENFPTASVEGKEEKKGRRMKSKPKDKDSKKTKTCSKLKEKTKIGKLIITLGKKQKRKNESSDEISDAEQMPQHTLKDQDSQKRRSNRQIKRKKYAEDIEGKQSEEEVKGSMKIKKNSAPLPGEQPLQLFVENPSEEDAAIVDKILSSRTVKKEISPGVMIDTEEFFVKYKNYSYLHCEWATEEQLLKDKRIQQKIKRFKLRQAQRAHFFADMEEEPFNPDYVEVDRVLEVSFCEDKDTGEPVIYYLVKWCSLPYEDSTWELKEDVDLAKIEEFEQLQASRPDTRRLDRPPSNIWKKIDQSRDYKNGNQLREYQLEGLNWLLFNWYNRRNCILADEMGLGKTIQSITFLYEILLTGIRGPFLIIAPLSTIANWEREFRTWTDINVVVYHGSLISRQMIQQYEMYFRDSQGRIIRGAYRFQAIITTFEMILGGCGELNAIEWRCVIIDEAHRLKNKNCKLLEGLKLMNLEHKVLLTGTPLQNTVEELFSLLHFLEPLRFPSESTFMQEFGDLKTEEQVQKLQAILKPMMLRRLKEDVEKKLAPKEETIIEVELTNIQKKYYRAILEKNFSFLSKGAGQTNVPNLVNTMMELRKCCNHPYLIKGAEEKILGEFRDTYNPAASDFHLQAMIQSAGKLVLIDKLLPKMKAGGHKVLIFSQMVRCLDILEDYLIHKRYLYERIDGRVRGNLRQAAIDRFSKPDSDRFVFLLCTRAGGLGINLTAADTCIIFDSDWNPQNDLQAQARCHRIGQNKAVKVYRLVTRNSYEREMFDRASLKLGLDKAVLQSMSGRESNVGGIQQLSKKEIEDLLRRGAYGAIMEEEDEGSKFCEEDIDQILLRRTKTITIESEGRGSTFAKASFVASGNRTDISLDDPNFWQKWAKKAEIDIEAISGRNSLVIDTPRIRKQTRPFSATKDELAELSEAESEGDEKPKLRRPCDRSNGYGRTECFRVEKNLLVYGWGRWREILSHGRFKRQLNEHDVEIICRALLAYCLVHYRGDEKIKGFIWDLITPTEDGQTRELQNHLGLSAPVPRGRKGKKVKTQTSSFDIQKAEWLRKYNPEQLLQDEGYKKHIKHHCNKVLLRVRMLYYLKQEVIGNECQKVFDGVDASDIDVWVPEPDHSEVPAEWWDFDADKSLLIGVFKHGYEKYNTIRADPALCFLERVGKPDEKAVAAEQRANDYMDGDVEDPEYKPAPAIFKDDIEDDVSSPGDLVIADGDGQLMEGDKVYWPTQSALTTRLRRLITAYQRTNKNRQIQQIQPTFSVPTSVMQPIYEEATLNPKMAAKIERQQRWTRREEADFYRVVSTFGVVFDPDRGQFDWTKFRAMARLHKKTDDSLEKYLYAFMSMCRRVCRLPSKEELVDPNIFIQPITEERASRTLYRIELLRKVREQALRHPQLFERLKLCHPNPDLPVWWECGPHDRDLLIGAAKHGVSRTDYHILRDPELSFMAAQRNYSQSKMAHSRTSTPLLQQYQVALSASPLTSLPRLLDAKGIILEEMKVKSENLKEEPQSSEEESMSSVETRTLIKSEPVSPKNGVLPQATGDQKSGGKCETDRRMVAARTEPLTPNPASKKPRVHKRGSESSSDSDSDSERSSCSSRSSSSSSSSSCSHSRSGSSSSSSSSCSSASSSSSSSTSSSSSSSSSSSEESDSDEEEAQKRESTTHMKAYDEESVASLSTTQDETQDSFQMNNGTPESAYILQGGYMLAASYWPKDRVMINRLDSICQTVLKGKWPSARRSYDANTVASFYTTKLLDSPGAATEYSDPSVPTPPGAGVKEEHDQSTQMSKEGGLKLTFQKQGLAQKRPFDGEDGALGQQQYLTRLRELQSASETSLVNFPKSIPVSGTSIQPTLGANGVILDNQPIVKKRRGRRKNVEGVDIFFFNRNKPPNHVSLGLTSSQISTGINPALSYTQPQGIPDTESPVPVINLKDGTRLAGDDAPKRKDLEKWLKEHPGYVEDLGAFIPRMQLHEGRPKQKRHRCRNPNKLDVNSLTGEERVQLINRRNARKVGGAFAPPLKDLCRFLKENSEYGVAPEWGDVVKQSGFLPESMYERILTGPVVREEVSRRGRRPKSGIAKATAAAAAASATSVSGNPLLANGLLPGVDLTTLQALQQNLQNLQSLQVTAGLMGMPTGLPSGGEAKNMAAMFPMLLSGMAGLPNLLGMGGLLTKPTESGTEDKKGSDSKESEGKTERTESQSSENGGENSVSSSPSTSSTAALNTAAAANPLALNPLLLSNILYPGMLLTPGLNLHIPTLSQSNTFDVQNKNSDLGSSKSVEVKEEDSRIKDQEDKGGTEPSPLNENSTDEGSEKADASSGSDSTSSSSEDSDSSNED

SEQ ID NO: 15299 - protein, 125 aa, Homo sapiens
  Payload ID: 3006
  Gene Symbol: CHD9
  Gene Name: chromodomain helicase DNA binding protein 9
  ENSP ID: ENSP00000456415
MSEKKQRKKVESESKQEKANRIISEAIAKAKERGERNIPRVMSPENFPTASVEGKEEKKGRRMKSKPKDKDSKKTKTCSKLKEKTKIGKLIITLGKKQKRKNESSDEISDAEQMPQHTLKDQDSQ

SEQ ID NO: 15300 - protein, 632 aa, Homo sapiens
  Payload ID: 3006
  Gene Symbol: CHD9
  Gene Name: chromodomain helicase DNA binding protein 9
  ENSP ID: ENSP00000456793
MTDPMMDFFDDANLFGETLEGLSDDAFVQPGPVSLVDELNLGAEFEPLHIDSLNHVQGTPTHQKMTDFEQLNQFDSIKFHHVNQSFGSPAEHVLSPHSQFNCSPIHPQNQPNGLFPDVSDGSPMWGHQTATTISNQNGSPFHQQGHSHSMHQNKSFVAHHDFALFQANEQQTQCTSLRSQQNRNNLNPGQNSLSQSKNFMNVSGPHRVNVNHPPQMTNASNSQQSISMQQFSQTSNPSAHFHKCSSHQEGNFNGPSPNMTSCSVSNSQQFSSHYSFSSNHISPNSLLQSSAVLASNHTNQTLSDFTGSNSFSPHRGIKQESTQHILNPNTSLNSNNFQILHSSHPQGNYSNSKLSPVHMNFPDPVDSGTQMGHFNDHVETNGFSSLEENLLHQVESQTEPFTGLDPEDLLQEGLLPHFDESTFGQDNSSHILDHDLDRQFTSHLVTRPSDMAQTQLQSQARSWHSSFSNHQHLHDRNHLCLQRQPPSSKKSDGSGTYTKLQNTQVRVMSEKKQRKKVESESKQEKANRIISEAIAKAKERGERNIPRVMSPENFPTASVEGKEEKKGRRMKSKPKDKDSKKTKTCSKLKEKTKIGKLIITLGKKQKRKNESSDEISDAEQMPQHTLKDQDSQ

SEQ ID NO: 15301 - protein, 1098 aa, Homo sapiens
  Payload ID: 3006
  Gene Symbol: CHD9
  Gene Name: chromodomain helicase DNA binding protein 9
  ENSP ID: ENSP00000457355
MSSVKRPRGRPPSSKKSDGSGTYTKLQNTQVRVMSEKKQRKKVESESKQEKANRIISEAIAKAKERGERNIPRVMSPENFPTASVEGKEEKKGRRMKSKPKDKDSKKTKTCSKLKEKTKIGKLIITLGKKQKRKNESSDEISDAEQMPQHTLKDQDSQKRRSNRQIKRKKYAEDIEGKQSEEEVKGSMKIKKNSAPLPGEQPLQLFVENPSEEDAAIVDKILSSRTVKKEISPGVMIDTEEFFVKYKNYSYLHCEWATEEQLLKDKRIQQKIKRFKLRQAQRAHFFADMEEEPFNPDYVEVDRVLEVSFCEDKDTGEPVIYYLVKWCSLPYEDSTWELKEDVDLAKIEEFEQLQASRPDTRRLDRPPSNIWKKIDQSRDYKNGNQLREYQLEGLNWLLFNWYNRRNCILADEMGLGKTIQSITFLYEILLTGIRGPFLIIAPLSTIANWEREFRTWTDINVVVYHGSLISRQMIQQYEMYFRDSQGRIIRGAYRFQAIITTFEMILGGCGELNAIEWRCVIIDEAHRLKNKNCKLLEGLKLMNLEHKVLLTGTPLQNTVEELFSLLHFLEPLRFPSESTFMQEFGDLKTEEQVQKLQAILKPMMLRRLKEDVEKKLAPKEETIIEVELTNIQKKYYRAILEKNFSFLSKGAGQTNVPNLVNTMMELRKCCNHPYLIKGAEEKILGEFRDTYNPAASDFHLQAMIQSAGKLVLIDKLLPKMKAGGHKVLIFSQMVRCLDILEDYLIHKRYLYERIDGRVRGNLRQAAIDRFSKPDSDRFVFLLCTRAGGLGINLTAADTCIIFDSDWNPQNDLQAQARCHRIGQNKAVKVYRLVTRNSYEREMFDRASLKLGLDKAVLQSMSGRESNVGGIQQLSKKEIEDLLRRGAYGAIMEEEDEGSKFCEEDIDQILLRRTKTITIESEGRGSTFAKASFVASGNRTDISLDDPNFWQKWAKKAEIDIEAISGRNSLVIDTPRIRKQTRPFSATKDELAELSEAESEGDEKPKLRRPCDRSNGYGRTECFRVEKNLLVYGWGRWREILSHGRFKRQLNEHDVEIICRALLAYCLVHYRGDEKIKGFIWDLITPTEDGQTRELQNHL

SEQ ID NO: 15302 - protein, 2881 aa, Homo sapiens; identical to SEQ ID NO: 15298
  Payload ID: 3006
  Gene Symbol: CHD9
  Gene Name: chromodomain helicase DNA binding protein 9
  Uniprot ID: Q3L8U1
  ENSP ID: ENSP00000457466

SEQ ID NO: 15303 - protein, 53 aa, Homo sapiens
  Payload ID: 3006
  Gene Symbol: CHD9
  Gene Name: chromodomain helicase DNA binding protein 9
  ENSP ID: ENSP00000457929
MTDPMMDFFDDANLFGETLEGLSDDAFVQPGPVSLVDELNLGAEFEPLHIDSL

SEQ ID NO: 15304 - protein, 91 aa, Homo sapiens
  Payload ID: 3006
  Gene Symbol: CHD9
  Gene Name: chromodomain helicase DNA binding protein 9
  ENSP ID: ENSP00000460155
MTDPMMDFFDDANLFGETLEEENLLHQVESQTEPFTGLDPEDLLQEGLLPHFDESTFGQDNSSHILDHDLDRQFTSHLVTRPSDMAQTQLQ

SEQ ID NO: 15305 - protein, 113 aa, Homo sapiens
  Payload ID: 3006
  Gene Symbol: CHD9
  Gene Name: chromodomain helicase DNA binding protein 9
  ENSP ID: ENSP00000462008
  MOD_RES (1)..(1): Any amino acid
XPALSYTQPQGIPDTESPVPVINLKDGTRLAGDDAPKRKDLEKWLKEHPGYVEDLGAFIPRMQLHEGRPKQKRHRCRNPNKLDVNSLTGEERVQLINRRNARKIRKLRLKEIY

SEQ ID NO: 15306 - protein, 122 aa, Homo sapiens
  Payload ID: 3006
  Gene Symbol: CHD9
  Gene Name: chromodomain helicase DNA binding protein 9
  ENSP ID: ENSP00000462685
  MOD_RES (1)..(1): Any amino acid
XPNHVSLGLTSSQISTGINPALSYTQPQGIPDTESPVPVINLKDGTRLAGDDAPKRKDLEKWLKEHPGYVEDLGAFIPRMQLHEGRPKQKRHRCRNPNKLDVNSLTGEERVQLINRRNARKA

SEQ ID NO: 15307 - protein, 963 aa, Homo sapiens
  Payload ID: 3006
  Gene Symbol: CHD9
  Gene Name: chromodomain helicase DNA binding protein 9
  ENSP ID: ENSP00000478361
MLYYLKQEVIGNECQKVFDGVDASDIDVWVPEPDHSEVPAEWWDFDADKSLLIGVFKHGYEKYNTIRADPALCFLERVGKPDEKAVAAEQRANDYMDGDVEDPEYKPAPAIFKDDIEDDVSSPGDLVIADGDGQLMEGDKVYWPTQSALTTRLRRLITAYQRTNKNRQIQQIQPTFSVPTSVMQPIYEEATLNPKMAAKIERQQRWTRREEADFYRVVSTFGVVFDPDRGQFDWTKFRAMARLHKKTDDSLEKYLYAFMSMCRRVCRLPSKEESTTHMKAYDEESVASLSTTQDETQDSFQMNNGTPESAYILQGGYMLAASYWPKDRVMINRLDSICQTVLKGKWPSARRSYDANTVASFYTTKLLDSPGAATEYSDPSVPTPPGAGVKEEHDQSTQMSKVKKHVREKEFTVKIKDEGGLKLTFQKQGLAQKRPFDGEDGALGQQQYLTRLRELQSASETSLVNFPKSIPVSGTSIQPTLGANGVILDNQPIVKKRRGRRKNVEGVDIFFFNRNKPPNHVSLGLTSSQISTGINPALSYTQPQGIPDTESPVPVINLKDGTRLAGDDAPKRKDLEKWLKEHPGYVEDLGAFIPRMQLHEGRPKQKRHRCRNPNKLDVNSLTGEERVQLINRRNARKVGGAFAPPLKDLCRFLKENSEYGVAPEWGDVVKQSGFLPESMYERILTGPVVREEVSRRGRRPKSGIAKATAAAAAASATSVSGNPLLANGLLPGVDLTTLQALQQNLQNLQSLQVTAGLMGMPTGLPSGGEAKNMAAMFPMLLSGMAGLPNLLGMGGLLTKPTESGTEDKKGSDSKESEGKTERTESQSSENGGENSVSSSPSTSSTAALNTAAAANPLALNPLLLSNILYPGMLLTPGLNLHIPTLSQSNTFDVQNKNSDLGSSKSVEVKEEDSRIKDQEDKGGTEPSPLNENSTDEGSEKADASSGSDSTSSSSEDSDSSNED

SEQ ID NO: 15308 - protein, 963 aa, Homo sapiens; identical to SEQ ID NO: 15307
  Payload ID: 3006
  Gene Symbol: CHD9
  Gene Name: chromodomain helicase DNA binding protein 9
  ENSP ID: ENSP00000482842

SEQ ID NO: 15309 - protein, 598 aa, Homo sapiens
  Payload ID: 3007
  Gene Symbol: CDYL
  Gene Name: chromodomain protein, Y-like
  Uniprot ID: Q9Y232
  ENSP ID: ENSP00000330512
MTFQASHRSAWGKSRKKNWQYEGPTQKLFLKRNNVSAPDGPSDPSISVSSEQSGAQQPPALQVERIVDKRKNKKGKTEYLVRWKGYDSEDDTWEPEQHLVNCEEYIHDFNRRHTEKQKESTLTRTNRTSPNNARKQISRSTNSNFSKTSPKALVIGKDHESKNSQLFAASQKFRKNTAPSLSSRKNMDLAKSGIKILVPKSPVKSRTAVDGFQSESPEKLDPVEQGQEDTVAPEVAAEKPVGALLGPGAERARMGSRPRIHPLVPQVPGPVTAAMATGLAVNGKGTSPFMDALTANGTTNIQTSVTGVTASKRKFIDDRRDQPFDKRLRFSVRQTESAYRYRDIVVRKQDGFTHILLSTKSSENNSLNPEVMREVQSALSTAAADDSKLVLLSAVGSVFCCGLDFIYFIRRLTDDRKRESTKMAEAIRNFVNTFIQFKKPIIVAVNGPAIGLGASILPLCDVVWANEKAWFQTPYTTFGQSPDGCSTVMFPKIMGGASANEMLLSGRKLTAQEACGKGLVSQVFWPGTFTQEVMVRIKELASCNPVVLEESKALVRCNMKMELEQANERECEVLKKIWGSAQGMDSMLKYLQRKIDEF

SEQ ID NO: 15310 - protein, 412 aa, Homo sapiens
  Payload ID: 3007
  Gene Symbol: CDYL
  Gene Name: chromodomain protein, Y-like
  Uniprot ID: Q9Y232
  ENSP ID: ENSP00000340908
MDLAKSGIKILVPKSPVKSRTAVDGFQSESPEKLDPVEQGQEDTVAPEVAAEKPVGALLGPGAERARMGSRPRIHPLVPQVPGPVTAAMATGLAVNGKGTSPFMDALTANGTTNIQTSVTGVTASKRKFIDDRRDQPFDKRLRFSVRQTESAYRYRDIVVRKQDGFTHILLSTKSSENNSLNPEVMREVQSALSTAAADDSKLVLLSAVGSVFCCGLDFIYFIRRLTDDRKRESTKMAEAIRNFVNTFIQFKKPIIVAVNGPAIGLGASILPLCDVVWANEKAWFQTPYTTFGQSPDGCSTVMFPKIMGGASANEMLLSGRKLTAQEACGKGLVSQVFWPGTFTQEVMVRIKELASCNPVVLEESKALVRCNMKMELEQANERECEVLKKIWGSAQGMDSMLKYLQRKIDEF

SEQ ID NO: 15311 - protein, 544 aa, Homo sapiens
  Payload ID: 3007
  Gene Symbol: CDYL
  Gene Name: chromodomain protein, Y-like
  Uniprot ID: Q9Y232
  ENSP ID: ENSP00000380718
MASEELYEVERIVDKRKNKKGKTEYLVRWKGYDSEDDTWEPEQHLVNCEEYIHDFNRRHTEKQKESTLTRTNRTSPNNARKQISRSTNSNFSKTSPKALVIGKDHESKNSQLFAASQKFRKNTAPSLSSRKNMDLAKSGIKILVPKSPVKSRTAVDGFQSESPEKLDPVEQGQEDTVAPEVAAEKPVGALLGPGAERARMGSRPRIHPLVPQVPGPVTAAMATGLAVNGKGTSPFMDALTANGTTNIQTSVTGVTASKRKFIDDRRDQPFDKRLRFSVRQTESAYRYRDIVVRKQDGFTHILLSTKSSENNSLNPEVMREVQSALSTAAADDSKLVLLSAVGSVFCCGLDFIYFIRRLTDDRKRESTKMAEAIRNFVNTFIQFKKPIIVAVNGPAIGLGASILPLCDVVWANEKAWFQTPYTTFGQSPDGCSTVMFPKIMGGASANEMLLSGRKLTAQEACGKGLVSQVFWPGTFTQEVMVRIKELASCNPVVLEESKALVRCNMKMELEQANERECEVLKKIWGSAQGMDSMLKYLQRKIDEF

SEQ ID NO: 15312 - protein, 412 aa, Homo sapiens; identical to SEQ ID NO: 15310
  Payload ID: 3007
  Gene Symbol: CDYL
  Gene Name: chromodomain protein, Y-like
  Uniprot ID: Q9Y232
  ENSP ID: ENSP00000394076

SEQ ID NO: 15313 - protein, 171 aa, Homo sapiens
  Payload ID: 3007
  Gene Symbol: CDYL
  Gene Name: chromodomain protein, Y-like
  ENSP ID: ENSP00000394740
MLAYNNGSRSGTSPFMDALTANGTTNIQTSVTGVTASKRKFIDDRRDQPFDKRLRFSVRQTESAYRYRDIVVRKQDGFTHILLSTKSSENNSLNPEVMREVQSALSTAAADDSKLVLLSAVGSVFCCGLDFIYFIRRLTDDRKRESTKMAEAIRNFVNTFIQFKKPIIVAV

SEQ ID NO: 15314 - protein, 507 aa, Homo sapiens
  Payload ID: 3008
  Gene Symbol: CDYL2
  Gene Name: chromodomain protein, Y-like 2
  ENSP ID: ENSP00000454546
MASGDLYEVERIVDKRKNKKGKWEYLIRWKGYGSTEDTWEPEHHLLHCEEFIDEFNGLHMSKDKRIKSGKQSSTSKLLRDSRGPSVEKLSHRPSDPGKSKGTSHKRKRINPPLAKPKKGYSGKPSSGGDRATKTVSYRTTPSGLQIMPLKKSQNGMENGDAGSEKDERHFGNGSHQPGLDLNDHVGEQDMGECDVNHATLAENGLGGSALTNGGLNLHSPVKRKLEAEKDYVFDKRLRYSVRQNESNCRFRDIVVRKEEGFTHILLSSQTSDNNALTPEIMKEVRRALCNAATDDSKLLLLSAVGSVFCSGLDYSYLIGRLSSDRRKESTRIAEAIRDFVKAFIQFKKPIVVAINGPALGLGASILPLCDIVWASEKAWFQTPYATIRLTPAGCSSYTFPQILGVALANEMLFCGRKLTAQEACSRGLVSQVFWPTTFSQEVMLRVKEMASCSAVVLEESKCLVRSFLKSVLEDVNEKECLMLKQLWSSSKGLDSLFSYLQDKIYEV

SEQ ID NO: 15315 - protein, 507 aa, Homo sapiens; identical to SEQ ID NO: 15314
  Payload ID: 3008
  Gene Symbol: CDYL2
  Gene Name: chromodomain protein, Y-like 2
  ENSP ID: ENSP00000455111

SEQ ID NO: 15316 - protein, 507 aa, Homo sapiens; identical to SEQ ID NO: 15314
  Payload ID: 3008
  Gene Symbol: CDYL2
  Gene Name: chromodomain protein, Y-like 2
  ENSP ID: ENSP00000456934

SEQ ID NO: 15317 - protein, 506 aa, Homo sapiens
  Payload ID: 3008
  Gene Symbol: CDYL2
  Gene Name: chromodomain protein, Y-like 2
  Uniprot ID: Q8N8U2
  ENSP ID: ENSP00000476295
MASGDLYEVERIVDKRKNKKGKWEYLIRWKGYGSTEDTWEPEHHLLHCEEFIDEFNGLHMSKDKRIKSGKQSSTSKLLRDSRGPSVEKLSHRPSDPGKSKGTSHKRKRINPPLAKPKKGYSGKPSSGGDRATKTVSYRTTPSGLQIMPLKKSQNGMENGDAGSEKDERHFGNGSHQPGLDLNDHVGEQDMGECDVNHATLAENGLGSALTNGGLNLHSPVKRKLEAEKDYVFDKRLRYSVRQNESNCRFRDIVVRKEEGFTHILLSSQTSDNNALTPEIMKEVRRALCNAATDDSKLLLLSAVGSVFCSGLDYSYLIGRLSSDRRKESTRIAEAIRDFVKAFIQFKKPIVVAINGPALGLGASILPLCDIVWASEKAWFQTPYATIRLTPAGCSSYTFPQILGVALANEMLFCGRKLTAQEACSRGLVSQVFWPTTFSQEVMLRVKEMASCSAVVLEESKCLVRSFLKSVLEDVNEKECLMLKQLWSSSKGLDSLFSYLQDKIYEV

SEQ ID NO: 15318 - protein, 554 aa, Homo sapiens
  Payload ID: 3009
  Gene Symbol: CDY1
  Gene Name: chromodomain protein, Y-linked, 1
  Uniprot ID: Q9Y6F8
  ENSP ID: ENSP00000302968
MASQEFEVEAIVDKRQDKNGNTQYLVRWKGYDKQDDTWEPEQHLMNCEKCVHDFNRRQTEKQKKLTWTTTSRIFSNNARRRTSRSTKANYSKNSPKTPVTDKHHRSKNRKLFAASKNVRRKAASILSDTKNMEIINSTIETLAPDSPFDHKTVSGFQKLEKLDPIAADQQDTVVFKVTEGKLLRDPLSRPGAEQTGIQNKTQIHPLMSQMSGSVTASMATGSATRKGIVVLIDPLAANGTTDMHTSVPRVKGGQRNITDDSRDQPFIKKMHFTIRLTESASTYRDIVVKKEDGFTQIVLSTRSTEKNALNTEVIKEIVNALNSAAADDSKLVLFSAAGSVFCCGLDFGYFVKHLRNNRNTASLEMVDTIKNFVNTFIQFKKPIVVSVNGPAIGLGASILPLCDLVWANEKAWFQTPYTTFGQSPDGCSSITFPKMMGKASANEMLIAGRKLTAREACAKGLVSQVFLTGTFTQEVMIQIKELASYNPIVLEECKALVRCNIKLELEQANERECEVLRKIWSSAQGIESMLKIPLLGYKAAFPPRKTQNDQRWCP

SEQ ID NO: 15319 - protein, 540 aa, Homo sapiens
  Payload ID: 3009
  Gene Symbol: CDY1
  Gene Name: chromodomain protein, Y-linked, 1
  Uniprot ID: Q9Y6F8
  ENSP ID: ENSP00000354799
MASQEFEVEAIVDKRQDKNGNTQYLVRWKGYDKQDDTWEPEQHLMNCEKCVHDFNRRQTEKQKKLTWTTTSRIFSNNARRRTSRSTKANYSKNSPKTPVTDKHHRSKNRKLFAASKNVRRKAASILSDTKNMEIINSTIETLAPDSPFDHKTVSGFQKLEKLDPIAADQQDTVVFKVTEGKLLRDPLSRPGAEQTGIQNKTQIHPLMSQMSGSVTASMATGSATRKGIVVLIDPLAANGTTDMHTSVPRVKGGQRNITDDSRDQPFIKKMHFTIRLTESASTYRDIVVKKEDGFTQIVLSTRSTEKNALNTEVIKEIVNALNSAAADDSKLVLFSAAGSVFCCGLDFGYFVKHLRNNRNTASLEMVDTIKNFVNTFIQFKKPIVVSVNGPAIGLGASILPLCDLVWANEKAWFQTPYTTFGQSPDGCSSITFPKMMGKASANEMLIAGRKLTAREACAKGLVSQVFLTGTFTQEVMIQIKELASYNPIVLEECKALVRCNIKLELEQANERECEVLRKIWSSAQGIESMLKYVENKIDEF

SEQ ID NO: 15320 - protein, 554 aa, Homo sapiens; identical to SEQ ID NO: 15318
  Payload ID: 3010
  Gene Symbol: CDY1B
  Gene Name: chromodomain protein, Y-linked, 1B
  Uniprot ID: Q9Y6F8
  ENSP ID: ENSP00000303178

SEQ ID NO: 15321 - protein, 540 aa, Homo sapiens; identical to SEQ ID NO: 15319
  Payload ID: 3010
  Gene Symbol: CDY1B
  Gene Name: chromodomain protein, Y-linked, 1B
  Uniprot ID: Q9Y6F8
  ENSP ID: ENSP00000371844

SEQ ID NO: 15322 - protein, 541 aa, Homo sapiens
  Payload ID: 3011
  Gene Symbol: CDY2A
  Gene Name: chromodomain protein, Y-linked, 2A
  Uniprot ID: Q9Y6F7
  ENSP ID: ENSP00000250838
MASQEFEVEAIVDKRQDKNGNTQYLVRWKGYDKQDDTWEPEQHLMNCEKCVHDFNRRQTEKQKKLTWTTTSRIFSNNARRRTSRSTKANYSKNSPKTPVTDKHHRSKNCKLFAASKNVRRKAASTLSDTKNMEIINSTIETLAPDSPFDHKKTVSGFQKLEKLDPIAADQQDTVVFKVTEGKLLRDPLSHPGAEQTGIQNKTQMHPLMSQMSGSVTASMATGSATRKGIVVLIDPLAANGTTDMHTSVPRVKGGQRNITDDSRGQPFIKKMHFTIRLTESAITYRDIVVKKEDGFTQIVLSTRSTEKNALNTEVIKEMVNALNSAAADDSKLVLFSAAGSVFCCGLDFGYFVRHLRNDRNTASLEMVDTIKNFVNTFIQFKKPIVVSVNGPAIGLGASILPLCDLVWANEKAWFQTPYTTFGQSPDGCSSITFPKMMGKASANEMLIAGRKLTAREACAKGLVSQVFLTGTFTQEVMIQIKELASYNAIVLEECKALVRCNIKLELEQANERECEVLRKIWSSAQGIESMLKYVENKIDEF

SEQ ID NO: 15323 - protein, 555 aa, Homo sapiens
  Payload ID: 3011
  Gene Symbol: CDY2A
  Gene Name: chromodomain protein, Y-linked, 2A
  ENSP ID: ENSP00000402280
MASQEFEVEAIVDKRQDKNGNTQYLVRWKGYDKQDDTWEPEQHLMNCEKCVHDFNRRQTEKQKKLTWTTTSRIFSNNARRRTSRSTKANYSKNSPKTPVTDKHHRSKNCKLFAASKNVRRKAASTLSDTKNMEIINSTIETLAPDSPFDHKKTVSGFQKLEKLDPIAADQQDTVVFKVTEGKLLRDPLSHPGAEQTGIQNKTQMHPLMSQMSGSVTASMATGSATRKGIVVLIDPLAANGTTDMHTSVPRVKGGQRNITDDSRGQPFIKKMHFTIRLTESAITYRDIVVKKEDGFTQIVLSTRSTEKNALNTEVIKEMVNALNSAAADDSKLVLFSAAGSVFCCGLDFGYFVRHLRNDRNTASLEMVDTIKNFVNTFIQFKKPIVVSVNGPAIGLGASILPLCDLVWANEKAWFQTPYTTFGQSPDGCSSITFPKMMGKASANEMLIAGRKLTAREACAKGLVSQVFLTGTFTQEVMIQIKELASYNAIVLEECKALVRCNIKLELEQANERECEVLRKIWSSAQGIESMLKIPLLGYKAAFPPRKTQNDQRWCP

SEQ ID NO: 15324 - protein, 541 aa, Homo sapiens; identical to SEQ ID NO: 15322
  Payload ID: 3012
  Gene Symbol: CDY2B
  Gene Name: chromodomain protein, Y-linked, 2B
  Uniprot ID: Q9Y6F7
  ENSP ID: ENSP00000372319

SEQ ID NO: 15325 - protein, 555 aa, Homo sapiens; identical to SEQ ID NO: 15323
  Payload ID: 3012
  Gene Symbol: CDY2B
  Gene Name: chromodomain protein, Y-linked, 2B
  ENSP ID: ENSP00000441273

SEQ ID NO: 15326 - protein, 457 aa, Homo sapiens
  Payload ID: 3013
  Gene Symbol: CHGA
  Gene Name: chromogranin A
  Uniprot ID: P10645
  ENSP ID: ENSP00000216492
MRSAAVLALLLCAGQVTALPVNSPMNKGDTEVMKCIVEVISDTLSKPSPMPVSQECFETLRGDERILSILRHQNLLKELQDLALQGAKERAHQQKKHSGFEDELSEVLENQSSQAELKEAVEEPSSKDVMEKREDSKEAEKSGEATDGARPQALPEPMQESKAEGNNQAPGEEEEEEEEATNTHPPASLPSQKYPGPQAEGDSEGLSQGLVDREKGLSAEPGWQAKREEEEEEEEEAEAGEEAVPEEEGPTVVLNPHPSLGYKEIRKGESRSEALAVDGAGKPGAEEAQDPEGKGEQEHSQQKEEEEEMAVVPQGLFRGGKSGELEQEEERLSKEWEDSKRWSKMDQLAKELTAEKRLEGQEEEEDNRDSSMKLSFRARAYGFRGPGPQLRRGWRPSSREDSLEAGLPLQVRGYPEEKKEEEGSANRRPEDQELESLSAIEAELEKVAHQLQALRRG

SEQ ID NO: 15327 - protein, 306 aa, Homo sapiens
  Payload ID: 3013
  Gene Symbol: CHGA
  Gene Name: chromogranin A
  ENSP ID: ENSP00000334023
MRSAAVLALLLCAGQVTALPVNSPMNKGDTEVMKCIVEVISDTLSKPSPMPVSQECFETLRGDERILSILRHQNLLKELQDLALQGAKERAHQQKKHSGFEDELSEVLENQSSQAELKGRSEALAVDGAGKPGAEEAQDPEGKGEQEHSQQKEEEEEMAVVPQGLFRGGKSGELEQEEERLSKEWEDSKRWSKMDQLAKELTAEKRLEGQEEEEDNRDSSMKLSFRARAYGFRGPGPQLRRGWRPSSREDSLEAGLPLQVRGYPEEKKEEEGSANRRPEDQELESLSAIEAELEKVAHQLQALRRG

SEQ ID NO: 15328 - protein, 38 aa, Homo sapiens
  Payload ID: 3013
  Gene Symbol: CHGA
  Gene Name: chromogranin A
  ENSP ID: ENSP00000450801
MRSAAVLALLLCAGQVTALPVNSPMNKGDTEMNGSFPF

SEQ ID NO: 15329 - protein, 457 aa, Homo sapiens; identical to SEQ ID NO: 15326
  Payload ID: 3013
  Gene Symbol: CHGA
  Gene Name: chromogranin A
  Uniprot ID: P10645
  ENSP ID: ENSP00000478198

SEQ ID NO: 15330 - protein, 38 aa, Homo sapiens; identical to SEQ ID NO: 15328
  Payload ID: 3013
  Gene Symbol: CHGA
  Gene Name: chromogranin A
  ENSP ID: ENSP00000486340

SEQ ID NO: 15331 - protein, 306 aa, Homo sapiens; identical to SEQ ID NO: 15327
  Payload ID: 3013
  Gene Symbol: CHGA
  Gene Name: chromogranin A
  ENSP ID: ENSP00000486710

SEQ ID NO: 15332 - protein, 677 aa, Homo sapiens
  Payload ID: 3014
  Gene Symbol: CHGB
  Gene Name: chromogranin B
  Uniprot ID: P05060
  ENSP ID: ENSP00000368244
MQPTLLLSLLGAVGLAAVNSMPVDNRNHNEGMVTRCIIEVLSNALSKSSAPPITPECRQVLKTSRKDVKDKETTENENTKFEVRLLRDPADASEAHESSSRGEAGAPGEEDIQGPTKADTEKWAEGGGHSRERADEPQWSLYPSDSQVSEEVKTRHSEKSQREDEEEEEGENYQKGERGEDSSEEKHLEEPGETQNAFLNERKQASAIKKEELVARSETHAAGHSQEKTHSREKSSQESGEETGSQENHPQESKGQPRSQEESEEGEEDATSEVDKRRTRPRHHHGRSRPDRSSQGGSLPSEEKGHPQEESEESNVSMASLGEKRDHHSTHYRASEEEPEYGEEIKGYPGVQAPEDLEWERYRGRGSEEYRAPRPQSEESWDEEDKRNYPSLELDKMAHGYGEESEEERGLEPGKGRHHRGRGGEPRAYFMSDTREEKRFLGEGHHRVQENQMDKARRHPQGAWKELDRNYLNYGEEGAPGKWQQQGDLQDTKENREEARFQDKQYSSHHTAEKRKRLGELFNPYYDPLQWKSSHFERRDNMNDNFLEGEEENELTLNEKNFFPEYNYDWWEKKPFSEDVNWGYEKRNLARVPKLDLKRQYDRVAQLDQLLHYRKKSAEFPDFYDSEEPVSTHQEAENEKDRADQTVLTEDEKKELENLAAMDLELQKIAEKFSQRG

SEQ ID NO: 15333 - protein, 289 aa, Homo sapiens
  Payload ID: 3014
  Gene Symbol: CHGB
  Gene Name: chromogranin B
  ENSP ID: ENSP00000416643
MPVDNRNHNEGMVTRCIIEVLSNALSKSSAPPITPECRQVLKTSRKDVKDKETTENENTKFEVRLLRDPADASEAHESSSRGEAGAPGEEDIQGPTKADTEKWAEGGGHSRERADEPQWSLYPSDSQVSEEVKTRHSEKSQREDEEEEEGENYQKGERGEDSSEEKHLEEPGETQNAFLNERKQASAIKKEELVARSETHAAGHSQEKTHSREKSSQESGEETGSQENHPQESKGQPRSQEESEEGEEDATSEVDKRRTRPRHHHGRSRPDRSSQGGSLPSEEKGHPQE

SEQ ID NO: 15334 - protein, 147 aa, Homo sapiens
  Payload ID: 3015
  Gene Symbol: C1orf100
  Gene Name: chromosome 1 open reading frame 100
  Uniprot ID: Q5SVJ3
  ENSP ID: ENSP00000311218
MTAIRLREFIERRPVIPPSIFIAHQGRDVQGYYPGQLARLHFDHSAKRAPRPLIDLTIPPKTKYHYQPQLDQQTLIRYICLRRHSKPAEPWYKETTYRRDYSLPFYEIDWNQKLATVSLNPRPLNSLPELYCCEERSSFERNAFKLK

SEQ ID NO: 15335 - protein, 115 aa, Homo sapiens
  Payload ID: 3015
  Gene Symbol: C1orf100
  Gene Name: chromosome 1 open reading frame 100
  Uniprot ID: Q5SVJ3
  ENSP ID: ENSP00000355495
MTAIRLREFIERRPVIPPSIFIAHQGRDVQGYYPGQLARLHFDHSAKRAPRHSKPAEPWYKETTYRRDYSLPFYEIDWNQKLATVSLNPRPLNSLPELYCCEERSSFERNAFKLK

SEQ ID NO: 15336 - protein, 800 aa, Homo sapiens
  Payload ID: 3016
  Gene Symbol: C1orf101
  Gene Name: chromosome 1 open reading frame 101
  Uniprot ID: Q5SY80
  ENSP ID: ENSP00000355489
MATLGQKPVIHTVLKRKVYSSNEKMRRGTWRIVVPMTKDDALKEIRGNQVTFQDCFIADFLILLTFPLLTIPEIPGYLPISSPRGSQLMASWDACVVASAVLVTDMETFHTTDSFKSWTRIRVPPDILSDDERRSVAHVILSRDGIVFLINGVLYIKSFRGFIRLGGIVNLPDGGITGISSRKWCWVNYLLKAKGRRSTFAVWTENEIYLGSILLKFARLVTTTELKNILSLSVTATLTIDRVEYTGHPLEIAVFLNYCTVCNVTKKIFLVIYNEDTKQWVSQDFTLDAPIDSVTMPHFTFSALPGLLLWNKHSIYYCYHNFTFTGILQTPAGHGNLSMLSNDSIIHEVFIDYYGDILVKMENNVIFYSKINTRDAVKLHLWTNYTTRAFIFLSTSGQTYFLYALDDGTIQIQDYPLHLEAQSIAFTTKDKCPYMAFHNNVAHVFYFLDKGEALTVWTQIVYPENTGLYVIVESYGPKILQESHEISFEAAFGYCTKTLTLTFYQNVDYERISDYFETQDKHTGLVLVQFRPSEYSKACPIAQKVFQIAVGCDDKKFIAIKGFSKKGCHHHDFSYVIEKSYLRHQPSKNLRVRYIWGEYGCPLRLDFTEKFQPVVQLFDDNGYVKDVEANFIVWEIHGRDDYSFNNTMAQSGCLHEAQTWKSMIELNKHLPLEEVWGPENYKHCFSYAIGKPGDLNQPYEIINSSNGNHIFWPMGHSGMYVFRVKILDPNYSFCNLTAMFAIETFGLIPSPSVYLVASFLFVLMLLFFTILVLSYFRYMRIYRRYIYEPLHKPQRKRKKN

SEQ ID NO: 15337 - protein, 832 aa, Homo sapiens
  Payload ID: 3016
  Gene Symbol: C1orf101
  Gene Name: chromosome 1 open reading frame 101
  Uniprot ID: Q5SY80
  ENSP ID: ENSP00000355491
MSAREVAVLLLWLSCYGSALWRYSTNSPNYRIFSTRSTIKLEYEGTLFTEWSVPETCFVLNKSSPTTELRCSSPGVHAIKPIVTGPDEEERYLFVESSHTCFLWYYRVRHFFNNFTQLITVWAYDPESADPDELLGNAEEPSINSIVLSTQMATLGQKPVIHTVLKRKVYSSNEKMRRGTWRIVVPMTKDDALKEIRGNQVTFQDCFIADFLILLTFPLLTIPEIPGYLPISSPRGSQLMASWDACVVASAVLVTDMETFHTTDSFKSWTRIRVPPDILSDDERRSVAHVILSRDGIVFLINGVLYIKSFRGFIRLGGIVNLPDGGITGISSRKWCWVNYLLKAKGRRSTFAVWTENEIYLGSILLKFARLVTTTELKNILSLSVTATLTIDRVEYTGHPLEIAVFLNYCTVCNVTKKIFLVIYNEDTKQWVSQDFTLDAPIDSVTMPHFTFSALPGLLLWNKHSIYYCYHNFTFTGILQTPAGHGNLSMLSNDSIIHEVFIDYYGDILVKMENNVIFYSKINTRDAVKLHLWTNYTTRAFIFLSTSGQTYFLYALDDGTIQIQDYPLHLEAQSIAFTTKDKCPYMAFHNNVAHVFYFLDKGEALTVWTQIVYPENTGLYVIVESYGPKILQESHEISFEAAFGYCTKTLTLTFYQNVDYERISDYFETQDKHTGLVLVQFRPSEYSKACPIAQKVFQIAVGCDDKKFIAIKGFSKKGCHHHDFSYVIEKSYLRHQPSKNLRVRYIWGEYGCPLRLDFTEKFQPVVQLFDDNGYVKDVEANFIVWEIHGRDDYSFNNTMAQSGCLHEAQTWKSMIELNKHLPLEEVWGPEFL

SEQ ID NO: 15338 - protein, 951 aa, Homo sapiens
  Payload ID: 3016
  Gene Symbol: C1orf101
  Gene Name: chromosome 1 open reading frame 101
  Uniprot ID: Q5SY80
  ENSP ID: ENSP00000355492
MSAREVAVLLLWLSCYGSALWRYSTNSPNYRIFSTRSTIKLEYEGTLFTEWSVPETCFVLNKSSPTTELRCSSPGVHAIKPIVTGPDEEERYLFVESSHTCFLWYYRVRHFFNNFTQLITVWAYDPESADPDELLGNAEEPSINSIVLSTQMATLGQKPVIHTVLKRKVYSSNEKMRRGTWRIVVPMTKDDALKEIRGNQVTFQDCFIADFLILLTFPLLTIPEIPGYLPISSPRGSQLMASWDACVVASAVLVTDMETFHTTDSFKSWTRIRVPPDILSDDERRSVAHVILSRDGIVFLINGVLYIKSFRGFIRLGGIVNLPDGGITGISSRKWCWVNYLLKAKGRRSTFAVWTENEIYLGSILLKFARLVTTTELKNILSLSVTATLTIDRVEYTGHPLEIAVFLNYCTVCNVTKKIFLVIYNEDTKQWVSQDFTLDAPIDSVTMPHFTFSALPGLLLWNKHSIYYCYHNFTFTGILQTPAGHGNLSMLSNDSIIHEVFIDYYGDILVKMENNVIFYSKINTRDAVKLHLWTNYTTRAFIFLSTSGQTYFLYALDDGTIQIQDYPLHLEAQSIAFTTKDKCPYMAFHNNVAHVFYFLDKGEALTVWTQIVYPENTGLYVIVESYGPKILQESHEISFEAAFGYCTKTLTLTFYQNVDYERISDYFETQDKHTGLVLVQFRPSEYSKACPIAQKVFQIAVGCDDKKFIAIKGFSKKGCHHHDFSYVIEKSYLRHQPSKNLRVRYIWGEYGCPLRLDFTEKFQPVVQLFDDNGYVKDVEANFIVWEIHGRDDYSFNNTMAQSGCLHEAQTWKSMIELNKHLPLEEVWGPENYKHCFSYAIGKPGDLNQPYEIINSSNGNHIFWPMGHSGMYVFRVKILDPNYSFCNLTAMFAIETFGLIPSPSVYLVASFLFVLMLLFFTILVLSYFRYMRIYRRYIYEPLHKPQRKRKKN

SEQ ID NO: 15339 - protein, 871 aa, Homo sapiens
  Payload ID: 3016
  Gene Symbol: C1orf101
  Gene Name: chromosome 1 open reading frame 101
  ENSP ID: ENSP00000395796
RRRSRRHVSPGSGRAAAVAELLWLRPLEIKLEYEGTLFTEWSVPETCFVLNKSSPTTELRCSSPGVHAIKPIVTGPDEEERYLFVESSHTCFLWYYRVRTWRIVVPMTKDDALKEIRGNQVTFQDCFIADFLILLTFPLLTIPEIPGYLPISSPRGSQLMASWDACVVASAVLVTDMETFHTTDSFKSWTRIRVPPDILSDDERRSVAHVILSRDGIVFLINGVLYIKSFRGFIRLGGIVNLPDGGITGISSRKWCWVNYLLKAKGRRSTFAVWTENEIYLGSILLKFARLVTTTELKNILSLSVTATLTIDRVEYTGHPLEIAVFLNYCTVCNVTKKIFLVIYNEDTKQWVSQDFTLDAPIDSVTMPHFTFSALPGLLLWNKHSIYYCYHNFTFTGILQTPAGHGNLSMLSNDSIIHEVFIDYYGDILVKMENNVIFYSKINTRDAVKLHLWTNYTTRAFIFLSTSGQTYFLYALDDGTIQIQDYPLHLEAQSIAFTTKDKCPYMAFHNNVAHVFYFLDKGEALTVWTQIVYPENTGLYVIVESYGPKILQESHEISFEAAFGYCTKTLTLTFYQNVDYERISDYFETQDKHTGLVLVQFRPSEYSKACPIAQKVFQIAVGCDDKKFIAIKGFSKKGCHHHDFSYVIEKSYLRHQPSKNLRVRYIWGEYGCPLRLDFTEKFQPVVQLFDDNGYVKDVEANFIVWEIHGRDDYSFNNTMAQSGCLHEAQTWKSMIELNKHLPLEEVWGPENYKHCFSYAIGKPGDLNQPYEIINSSNGNHIFWPMGHSGMYVFRVKILDPNYSFCNLTAMFAIETFGLIPSPSVYLVASFLFVLMLLFFTILVLSYFRYMRIYRRYIYEPLHKPQRKRKKN

SEQ ID NO: 15340 - protein, 173 aa, Homo sapiens
  Payload ID: 3017
  Gene Symbol: C1orf105
  Gene Name: chromosome 1 open reading frame 105
  ENSP ID: ENSP00000356698
MEEMRPAGHGVSNVCVAFKVACHSCLPRLFNALIPSPDRNGAALLGGQASADSKSEARRNQCDSMLLRNQQLCSTCQEMKMVQPRTMKIPDDPKASFENCMSYRMSLHQPKFQTTPEPFHDDIPTESIHYRLPILGPRTAVFHGLLTEAYKTLKERQRSSLPRKEPIGKTTRQ

SEQ ID NO: 15341 - protein, 183 aa, Homo sapiens
  Payload ID: 3017
  Gene Symbol: C1orf105
  Gene Name: chromosome 1 open reading frame 105
  Uniprot ID: O95561
  ENSP ID: ENSP00000356700
MEKRELKASVPKFDKIPWLSEASLVNKPLVLSLPRRYPHTSATFLTSSKKNMNLPILFQVPDVLSKARRNQCDSMLLRNQQLCSTCQEMKMVQPRTMKIPDDPKASFENCMSYRMSLHQPKFQTTPEPFHDDIPTESIHYRLPILGPRTAVFHGLLTEAYKTLKERQRSSLPRKEPIGKTTRQ

SEQ ID NO: 15342 - protein, 125 aa, Homo sapiens
  Payload ID: 3017
  Gene Symbol: C1orf105
  Gene Name: chromosome 1 open reading frame 105
  ENSP ID: ENSP00000431442
VLSLPRRYPHTSATFLTSSKKNMNLPILFQVPDVLSKARRNQCDSMLLRNQQLCSTCQEMKMVQPRTMKIPDDPKASFENCMSYRMSLHQPKFQTTPEPFHDDIPTGSVHNIWLKTFHGDGVQTK

SEQ ID NO: 15343 - protein, 37 aa, Homo sapiens
  Payload ID: 3017
  Gene Symbol: C1orf105
  Gene Name: chromosome 1 open reading frame 105
  ENSP ID: ENSP00000435216
MEKRELKIYSKHTEQYLSYSLNPCASSPQRGMPQYQN

SEQ ID NO: 15344 - protein, 663 aa, Homo sapiens
  Payload ID: 3018
  Gene Symbol: C1orf106
  Gene Name: chromosome 1 open reading frame 106
  Uniprot ID: Q3KP66
  ENSP ID: ENSP00000356311
MLQMPKLNEIPPGRAGRREARGEGRWPGQTGPEAARLEWRAQGQAGGARAPWDSWGSSRLPTQPGPGWSRCPPSLLCALSFQKSTMESKDEVSDTDSGIILQSGPDSPVSPMKELTHAVHKQQRALEARLEACLEELRRLCLREAELTGTLPAEYPLKPGEKAPKVRRRIGAAYKLDDWALHREDPLSSLERQLALQLQITEAARRLCLEENLSRQARRQRKHSMLQEEKKLQELQRCLVERRRNSEPPPAAALPLGRELSASDDSSLSDGLLLEEEESQVPKPPPESPAPPSRPLPPQTLEGLQPTGPEAGSPERAPVQNSPWKETSLDHPYEKPRKSSEPWSESSSPATTPQDGPSASSLWLLEPASYHVVPIRGVPGQWQGRTSAPATPEIQGRRGQSQSLRVDSFRAGPEGRGRSAFPRRRPTHYTVTVPDSCFPATKPPLPHAACHSCSEDSGSDVSSISHPTSPGSSSPDISFLQPLSPPKTHRHRGAWVPAGSRELVAHHPKLLLPPGYFPAGRYVVVAESPLPPGEWELRRAAPGPAYEEEGTPLRYQRLVPSRSRIVRTPSLKDSPAGRGLSKAAVSEELKWWHERARLRSTRPHSLDRQGAFRVRSLPLGREGFGRALGPRAQVPTVCVLRRSPDGAPVQVFVPEKGEIISQV

SEQ ID NO: 15345 - protein, 578 aa, Homo sapiens
  Payload ID: 3018
  Gene Symbol: C1orf106
  Gene Name: chromosome 1 open reading frame 106
  Uniprot ID: Q3KP66
  ENSP ID: ENSP00000392105
MESKDEVSDTDSGIILQSGPDSPVSPMKELTHAVHKQQRALEARLEACLEELRRLCLREAELTGTLPAEYPLKPGEKAPKVRRRIGAAYKLDDWALHREDPLSSLERQLALQLQITEAARRLCLEENLSRQARRQRKHSMLQEEKKLQELQRCLVERRRNSEPPPAAALPLGRELSASDDSSLSDGLLLEEEESQVPKPPPESPAPPSRPLPPQTLEGLQPTGPEAGSPERAPVQNSPWKETSLDHPYEKPRKSSEPWSESSSPATTPQDGPSASSLWLLEPASYHVVPIRGVPGQWQGRTSAPATPEIQGRRGQSQSLRVDSFRAGPEGRGRSAFPRRRPTHYTVTVPDSCFPATKPPLPHAACHSCSEDSGSDVSSISHPTSPGSSSPDISFLQPLSPPKTHRHRGAWVPAGSRELVAHHPKLLLPPGYFPAGRYVVVAESPLPPGEWELRRAAPGPAYEEEGTPLRYQRLVPSRSRIVRTPSLKDSPAGRGLSKAAVSEELKWWHERARLRSTRPHSLDRQGAFRVRSLPLGREGFGRALGPRAQVPTVCVLRRSPDGAPVQVFVPEKGEIISQV

SEQ ID NO: 15346 - protein, 123 aa, Homo sapiens
  Payload ID: 3018
  Gene Symbol: C1orf106
  Gene Name: chromosome 1 open reading frame 106
  ENSP ID: ENSP00000397255
MESKDEVSDTDSGIILQSGPDSPVSPMKELTHAVHKQQRALEARLEACLEELRRLCLREAELTGTLPAEYPLKPGEKAPKVRRRIGAAYKLDDWALHREDPLSSLERQLALQLQITEAARRLC

SEQ ID NO: 15347 - protein, 40 aa, Homo sapiens
  Payload ID: 3018
  Gene Symbol: C1orf106
  Gene Name: chromosome 1 open reading frame 106
  ENSP ID: ENSP00000431682
MESKDEVSDTDSGIILQSGPDSPVSPMKELTHAVHKQQRA

SEQ ID NO: 15348 - protein, 203 aa, Homo sapiens
  Payload ID: 3019
  Gene Symbol: C1orf109
  Gene Name: chromosome 1 open reading frame 109
  Uniprot ID: Q9NX04
  ENSP ID: ENSP00000350704
MTQDRPLLAVQEALKKCFPVVEEQQGLWQSALRDCQPLLSSLSNLAEQLQAAQNLRFEDVPALRAFPDLKERLRRKQLVAGDIVLDKLGERLAILLKVRDMVSSHVERVFQIYEQHADTVGIDAVLQPSAVSPSVADMLEWLQDIERHYRKSYLKRKYLLSSIQWGDLANIQALPKAWDRISKDEHQDLVQDILLNVSFFLEE

SEQ ID NO: 15349 - protein, 142 aa, Homo sapiens
  Payload ID: 3019
  Gene Symbol: C1orf109
  Gene Name: chromosome 1 open reading frame 109
  ENSP ID: ENSP00000476341
MTQDRPLLAVQEALKKCFPVVEEQQGLWQSALRDCQPLLSSLSNLAEQLQAAQNLRFEDVPALRAFPDLKERLRRKQLVAGDIVLDKLGERLAILLKVRDMVSSHVERVFQIYEQHADTVGIDAVLQPSAVSPSVADMLEWL

SEQ ID NO: 15350 - protein, 113 aa, Homo sapiens
  Payload ID: 3019
  Gene Symbol: C1orf109
  Gene Name: chromosome 1 open reading frame 109
  ENSP ID: ENSP00000476779
MTQDRPLLAVQEALKKCFPVVEEQQGLWQSALRDCQPLLSSLSNLAEQLQAAQNLRFEDVPALRAFPDLKERLRRKQLVAGDIVLDKLGERLAILLKVRDMVSSHVERVFQIY

SEQ ID NO: 15351 - protein, 151 aa, Homo sapiens
  Payload ID: 3019
  Gene Symbol: C1orf109
  Gene Name: chromosome 1 open reading frame 109
  ENSP ID: ENSP00000476934
MTQDRPLLAVQEALKKCFPVVEEQQGLWQSALRDCQPLLSSLSNLAEQLQAAQNLRFEDVPALRAFPDLKERLRRKQLVAGDIVLDKLGERLAILLKVRDMVSSHVERVFQIYEQHADTVGIDAVLQPSAVSPSVADMLEWLQDIERHYRK

SEQ ID NO: 15352 - protein, 191 aa, Homo sapiens
  Payload ID: 3019
  Gene Symbol: C1orf109
  Gene Name: chromosome 1 open reading frame 109
  ENSP ID: ENSP00000477011
MTQDRPLLAVQEALKKCFPVVEEQQGLWQSALRDCQPLLSSLSNLAEQLQAAQNLRFEDVPALRAFPDLKERLRRKQLVAGDIVLDKLGERLAILLKVRDMVSSHVERVFQIYEQHADTVGIDAVLQPSAVSPSVADMLEWLQDIERHYRKSYLKRKYLLSSIQWGDLANIQALPKAWDRISKDEHQDLVQ

SEQ ID NO: 15353 - protein, 91 aa, Homo sapiens
  Payload ID: 3019
  Gene Symbol: C1orf109
  Gene Name: chromosome 1 open reading frame 109
  ENSP ID: ENSP00000477078
MTQDRPLLAVQEALKKCFPVVEEQQGLWQSALRDCQPLLSSLSNLAEQLQAAQNLRFEDVPALRAFPDLKERLRRKQLVAGDIVLDKLGER

SEQ ID NO: 15354 - protein, 203 aa, Homo sapiens; identical to SEQ ID NO: 15348
  Payload ID: 3019
  Gene Symbol: C1orf109
  Gene Name: chromosome 1 open reading frame 109
  Uniprot ID: Q9NX04
  ENSP ID: ENSP00000477159

SEQ ID NO: 15355 - protein, 113 aa, Homo sapiens
  Payload ID: 3019
  Gene Symbol: C1orf109
  Gene Name: chromosome 1 open reading frame 109
  Uniprot ID: Q9NX04
  ENSP ID: ENSP00000477273
MTQDRPLLAVQEALKKCFPVVEEQQGLWQSALRDCQPLLSSLSNLAEQLQAAQNLRFEDVPALRAFPDLKERLRQPSSSRCETWSAAMWSECFRSMSNTQTQLALMLSCSLQQ

SEQ ID NO: 15356 - protein, 37 aa, Homo sapiens
  Payload ID: 3019
  Gene Symbol: C1orf109
  Gene Name: chromosome 1 open reading frame 109
  ENSP ID: ENSP00000479011
MTQDRPLLAVQEALKKCFPVVEEQQGLWQSALRDCQP

SEQ ID NO: 15357 - protein, 261 aa, Homo sapiens
  Payload ID: 3020
  Gene Symbol: C1orf111
  Gene Name: chromosome 1 open reading frame 111
  Uniprot ID: Q5T0L3
  ENSP ID: ENSP00000356912
MENFSLLSISGPPISSSALSAFPDIMFSRATSLPDIAKTAVPTEASSPAQALPPQYQSIIVRQGIQNTALSPDCSLGDTQHGEKLRRNCTIYRPWFSPYSYFVCADKESQLEAYDFPEVQQDEGKWDNCLSEDMAENICSSSSSPENTCPREATKKSRHGLDSITSQDILMASRWHPAQQNGYKCVACCRMYPTLDFLKSHIKRGFREGFSCKVYYRKLKALWSKEQKARLGDRLSSGSCQAFNSPAEHLRQIGGEAYLCL

SEQ ID NO: 15358 - protein, 40 aa, Homo sapiens
  Payload ID: 3020
  Gene Symbol: C1orf111
  Gene Name: chromosome 1 open reading frame 111
  ENSP ID: ENSP00000476996
MENFSLLSISGPPISSSALSAFPDIMFSRATSLPGKLWCH

SEQ ID NO: 15359 - protein, 243 aa, Homo sapiens
  Payload ID: 3020
  Gene Symbol: C1orf111
  Gene Name: chromosome 1 open reading frame 111
  ENSP ID: ENSP00000484851
MENFSLLSISGPPISSSALSAFPDIMFSRATSLPDIAKTAVPTEASSPAQALPPQYQSIIVRQGIQNTALSPDCSLGDTQHGEKLRRNCTIYRPWFSPYSYFVCADKESQLEAYDFPEVQQDEGKWDNCLSEDMAENICSSSSSPENTCPREATKKSRHGLDSITSQDILMASRWHPAQQNGYKCVACCRMYPTLDFLKSHIKRGFREGFSCKVYYRKLKALWSKAEGPAGRQALLRQLPGLQ

SEQ ID NO: 15360 - protein, 853 aa, Homo sapiens
  Payload ID: 3021
  Gene Symbol: C1orf112
  Gene Name: chromosome 1 open reading frame 112
  Uniprot ID: Q9NSG2
  ENSP ID: ENSP00000286031
MFLPHMNHLTLEQTFFSQVLPKTVKLFDDMMYELTSQARGLSSQNLEIQTTLRNILQTMVQLLGALTGCVQHICATQESIILENIQSLPSSVLHIIKSTFVHCKNSESVYSGCLHLVSDLLQALFKEAYSLQKQLMELLDMVCMDPLVDDNDDILNMVIVIHSLLDICSVISSMDHAFHANTWKFIIKQSLKHQSIIKSQLKHKDIITSLCEDILFSFHSCLQLAEQMTQSDAQDNADYRLFQKTLKLCRFFANSLLHYAKEFLPFLSDSCCTLHQLYLQIHSKFPPSLYATRISKAHQEEIAGAFLVTLDPLISQLLTFQPFMQVVLDSKLDLPCELQFPQCLLLVVVMDKLPSQPKEVQTLWCTDSQVSETTTRISLLKAVFYSFEQCSGELSLPVHLQGLKSKGKAEVAVTLYQHVCVHLCTFITSFHPSLFAELDAALLNAVLSANMITSLLAMDAWCFLARYGTAELCAHHVTIVAHLIKSCPGECYQLINLSILLKRLFFFMAPPHQLEFIQKFSPKEAENLPLWQHISFQALPPELREQTVHEVTTVGTAECRKWLSRSRTLGELESLNTVLSALLAVCNSAGEALDTGKQTAIIEVVSQLWAFLNIKQVADQPYVQQTFSLLLPLLGFFIQTLDPKLILQAVTLQTSLLKLELPDYVRLAMLDFVSSLGKLFIPEAIQDRILPNLSCMFALLLADRSWLLEQHTLEAFTQFAEGTNHEEIVPQCLSSEETKNKVVSFLEKTGFVDETEAAKVERVKQEKGIFWEPFANVTVEEAKRSSLQPYAKRARQEFPWEEEYRSALHTIAGALEATESLLQKGPAPAWLSMEMEALQERMDKLKRYIHTLG

SEQ ID NO: 15361 - protein, 853 aa, Homo sapiens; identical to SEQ ID NO: 15360
  Payload ID: 3021
  Gene Symbol: C1orf112
  Gene Name: chromosome 1 open reading frame 112
  Uniprot ID: Q9NSG2
  ENSP ID: ENSP00000352276

SEQ ID NO: 15362 - protein, 530 aa, Homo sapiens
  Payload ID: 3021
  Gene Symbol: C1orf112
  Gene Name: chromosome 1 open reading frame 112
  Uniprot ID: Q9NSG2
  ENSP ID: ENSP00000389257
MQVVLDSKLDLPCELQFPQCLLLVVVMDKLPSQPKEVQTLWCTDSQVSETTTRISLLKAVFYSFEQCSGELSLPVHLQGLKSKGKAEVAVTLYQHVCVHLCTFITSFHPSLFAELDAALLNAVLSANMITSLLAMDAWCFLARYGTAELCAHHVTIVAHLIKSCPGECYQLINLSILLKRLFFFMAPPHQLEFIQKFSPKEAENLPLWQHISFQALPPELREQTVHEVTTVGTAECRKWLSRSRTLGELESLNTVLSALLAVCNSAGEALDTGKQTAIIEVVSQLWAFLNIKQVADQPYVQQTFSLLLPLLGFFIQTLDPKLILQAVTLQTSLLKLELPDYVRLAMLDFVSSLGKLFIPEAIQDRILPNLSCMFALLLADRSWLLEQHTLEAFTQFAEGTNHEEIVPQCLSSEETKNKVVSFLEKTGFVDETEAAKVERVKQEKGIFWEPFANVTVEEAKRSSLQPYAKRARQEFPWEEEYRSALHTIAGALEATESLLQKGPAPAWLSMEMEALQERMDKLKRYIHTLG

SEQ ID NO: 15363 - protein, 142 aa, Homo sapiens
  Payload ID: 3022
  Gene Symbol: C1orf115
  Gene Name: chromosome 1 open reading frame 115
  Uniprot ID: Q9H7X2
  ENSP ID: ENSP00000294889
MTVGARLRSKAESSLLRRGPRGRGRTEGDEEAAAILEHLEYADEAEAAAESGTSAADERGPGTRGARRVHFALLPERYEPLEEPAPSEQPRKRYRRKLKKYGKNVGKVIIKGCRYVVIGLQGFAAAYSAPFAVATSVVSFVR

SEQ ID NO: 15364 - protein, 601 aa, Homo sapiens
  Payload ID: 3023
  Gene Symbol: C1orf116
  Gene Name: chromosome 1 open reading frame 116
  Uniprot ID: Q9BW04
  ENSP ID: ENSP00000352447
MPERELWPAGTGSEPVTRVGSCDSMMSSTSTRSGSSDSSYDFLSTEEKECLLFLEETIGSLDTEADSGLSTDESEPATTPRGFRALPITQPTPRGGPEETITQQGRTPRTVTESSSSHPPEPQGLGLRSGSYSLPRNIHIARSQNFRKSTTQASSHNPGEPGRLAPEPEKEQVSQSSQPRQAPASPQEAALDLDVVLIPPPEAFRDTQPEQCREASLPEGPGQQGHTPQLHTPSSSQEREQTPSEAMSQKAKETVSTRYTQPQPPPAGLPQNARAEDAPLSSGEDPNSRLAPLTTPKPRKLPPNIVLKSSRSSFHSDPQHWLSRHTEAAPGDSGLISCSLQEQRKARKEALEKLGLPQDQDEPGLHLSKPTSSIRPKETRAQHLSPAPGLAQPAAPAQASAAIPAAGKALAQAPAPAPGPAQGPLPMKSPAPGNVAASKSMPISIPKAPRANSALTPPKPESGLTLQESNTPGLRQMNFKSNTLERSGVGLSSYLSTEKDASPKTSTSLGKGSFLDKISPSVLRNSRPRPASLGTGKDFAGIQVGKLADLEQEQSSKRLSYQGQSRDKLPRPPCVSVKISPKGVPNEHRREALKKLGLLKE

SEQ ID NO: 15365 - protein, 355 aa, Homo sapiens
  Payload ID: 3023
  Gene Symbol: C1orf116
  Gene Name: chromosome 1 open reading frame 116
  Uniprot ID: Q9BW04
  ENSP ID: ENSP00000436862
MSQKAKETVSTRYTQPQPPPAGLPQNARAEDAPLSSGEDPNSRLAPLTTPKPRKLPPNIVLKSSRSSFHSDPQHWLSRHTEAAPGDSGLISCSLQEQRKARKEALEKLGLPQDQDEPGLHLSKPTSSIRPKETRAQHLSPAPGLAQPAAPAQASAAIPAAGKALAQAPAPAPGPAQGPLPMKSPAPGNVAASKSMPISIPKAPRANSALTPPKPESGLTLQESNTPGLRQMNFKSNTLERSGVGLSSYLSTEKDASPKTSTSLGKGSFLDKISPSVLRNSRPRPASLGTGKDFAGIQVGKLADLEQEQSSKRLSYQGQSRDKLPRPPCVSVKISPKGVPNEHRREALKKLGLLKE

SEQ ID NO: 15366 - protein, 110 aa, Homo sapiens
  Payload ID: 3024
  Gene Symbol: C1orf122
  Gene Name: chromosome 1 open reading frame 122
  Uniprot ID: Q6ZSJ8
  ENSP ID: ENSP00000362133
MEWGPGSDWSRGEAAGVDRGKAGLGLGGRPPPQPPREERAQQLLDAVEQRQRQLLDTIAACEEMLRQLGRRRPEPAGGGNVSAKPGAPPQPAVSARGGFPKDAGDGAAEP

SEQ ID NO: 15367 - protein, 47 aa, Homo sapiens
  Payload ID: 3024
  Gene Symbol: C1orf122
  Gene Name: chromosome 1 open reading frame 122
  Uniprot ID: Q6ZSJ8
  ENSP ID: ENSP00000362134
MLRQLGRRRPEPAGGGNVSAKPGAPPQPAVSARGGFPKDAGDGAAEP

SEQ ID NO: 15368 - protein, 47 aa, Homo sapiens; identical to SEQ ID NO: 15367
  Payload ID: 3024
  Gene Symbol: C1orf122
  Gene Name: chromosome 1 open reading frame 122
  Uniprot ID: Q6ZSJ8
  ENSP ID: ENSP00000434520

SEQ ID NO: 15369 - protein, 160 aa, Homo sapiens
  Payload ID: 3025
  Gene Symbol: C1orf123
  Gene Name: chromosome 1 open reading frame 123
  Uniprot ID: Q9NWV4
  ENSP ID: ENSP00000294360
MGKIALQLKATLENITNLRPVGEDFRWYLKMKCGNCGEISDKWQYIRLMDSVALKGGRGSASMVQKCKLCARENSIEILSSTIKPYNAEDNENFKTIVEFECRGLEPVDFQPQAGFAAEGVESGTAFSDINLQEKDWTDYDEKAQESVGIYEVTHQFVKC

SEQ ID NO: 15370 - protein, 823 aa, Homo sapiens
  Payload ID: 3026
  Gene Symbol: C1orf127
  Gene Name: chromosome 1 open reading frame 127
  ENSP ID: ENSP00000366203
MWGSPALAWAVWLACVQPTVFPWSLSFRSDTDKPSSAAEVLTEASSCWTDTVECFSDYMTLWIPRSHVEGLRRWLARTLHLPGTWRSPDHLDSSLAKCGYFLHLASDGDFLFRVQYSACFVQKEKANYRLEIRIFQKGVMGLERSDRYIMKCPMLRSRLGQESVHCGPMFIQVSRPLPLWRDNRQTPWLLSLRGELVASLEDASLMGLYVDMNATTVTVQSPRQGLLQRWEVLNTSAELLPLWLVSGHHAYSLEAACPPVSFQPESEVLVHIPKQRLGLVKRGSYIEETLSLRFLRVHQSNIFMVTENKDFVVVSIPAAGVLQVQRCQEVGGTPGTQAFYRVDLSLEFAEMAAPVLWTVESFFQCVGSGTESPASTAALRTTPSPPSPGPETPPAGVPPAASSQVWAAGPAAQEWLSRDLLHRPSDALAKKGLGPFLQTAKPARRGQTSASILPRVVQAQRGPQPPPGEAGIPGHPTPPATLPSEPVEGVQASPWRPRPVLPTHPALTLPVSSDASSPSPPAPRPERPESLLVSGPSVTLTEGLGTVRPEQDPAKSPGSPLLLRGLSSGDVAAPEPIMGEPGQASEEFQPLARPWRATLAAEELVSHRSPGEPQETCSGTEVERPRQTGPGLPREGARGHMDLSSSEPSQDIEGPGLSILPARDATFSTPSVRQPDPSAWLSSGPELTGMPRVRLAAPLAVLPMEPLPPEPVRPAALLTPEASSVGGPDQARYLESAPGWPVGQEEWGVAHTSSPPSTQTLSLWAPTGVLLPSLVELEYPFQAGRGASLQQELTEPTLALSAESHRPPELQDSVEGLSERPSR

SEQ ID NO: 15371 - protein, 658 aa, Homo sapiens
  Payload ID: 3026
  Gene Symbol: C1orf127
  Gene Name: chromosome 1 open reading frame 127
  ENSP ID: ENSP00000387816
  MOD_RES (1)..(1): Any amino acid
XIMKCPMLRSRLGQESVHCGPMFIQVSRPLPLWRDNRQTPWLLSLRGELVASLEDASLMGLYVDMNATTVTVQSPRQGLLQRWEVSGGQQALPGVSFQPESEVLVHIPKQRLGLVKRGSYIEETLSLRFLRVHQSNIFMVTENKDFVVVSIPAAGVLQVQRCQEVGGTPGTQAFYRVDLSLEFAEMAAPVLWTVESFFQCVGSGTESPASTAALRTTPSPPSPGPETPPAGVPPAASSQVWAAGPAAQEWLSRDLLHRPSDALAKKGLGPFLQTAKPARRGQTSASILPRVVQAQRGPQPPPGEAGIPGHPTPPATLPSEPVEGVQASPWRPRPVLPTHPALTLPVSSDASSPSPPAPRPERPESLLVSGPSVTLTEGLGTVRPEQDPAKSPGSPLLLRGLSSGDVAAPEPIMGEPGQASEEFQPLARPWRATLAAEELVSHRSPGEPQETCSGTEVERPRQTGPGLPREGARGHMDLSSSEPSQDIEGPGLSILPARDATFSTPSVRQPDPSAWLSSGPELTGMPRVRLAAPLAVLPMEPLPPEPVRPAALLTPEASSVGGPDQARYLESAPGWPVGQEEWGVAHTSSPPSTQTLSLWAPTGVLLPSLVELEYPFQAGRGASLQQELTEPTLALSAESHRPPELQDSVEGLSERPSR

SEQ ID NO: 15372 - protein, 775 aa, Homo sapiens
  Payload ID: 3026
  Gene Symbol: C1orf127
  Gene Name: chromosome 1 open reading frame 127
  ENSP ID: ENSP00000429704
  MOD_RES (1)..(1): Any amino acid
XSLSFRSDTDKPSSAAEVLTEASSCWTDTVECFSDYMTLWIPRSHVEGLRRWLARTLHLPGTWRSPDHLDSSLAKCGYFLHLASDGDFLFRVQYSACFVQKEKANYRLEIRIFQKGVMGLERSDRYIMKCPMLRSRLGQESVHCGPMFIQVSRPLPLWRDNRQTPWLLSLRGELVASLEDASLMGLYVDMNATTVTVQSPRQGLLQRWEVLNTSAELLPLWLVSGHHAYSLEAACPPVSFQPESEVLVHIPKQRLGLVKRGSYIEETLSLRFLRVHQSNIFMVTENKDFVVVSIPAAGVLQVQRCQEVGGTPGTQAFYRVDLSLEFAEMAAPVLWTVESFFQCVGSGTESPASTAALRTTPSPPSPGPETPPAGVPPAASSQKGLGPFLQTAKPARRGQTSASILPRVVQAQRGPQPPPGEAGIPGHPTPPATLPSEPVEGVQASPWRPRPVLPTHPALTLPVSSDASSPSPPAPRPERPESLLVSGPSVTLTEGLGTVRPEQDPAKSPGSPLLLRGLSSGDVAAPEPIMGEPGQASEEFQPLARPWRATLAAEELVSHRSPGEPQETCSGTEVERPRQTGPGLPREGARGHMDLSSSEPSQDIEGPGLSILPARDATFSTPSVRQPDPSAWLSSGPELTGMPRVRLAAPLAVLPMEPLPPEPVRPAALLTPEASSVGGPDQARYLESAPGWPVGQEEWGVAHTSSPPSTQTLSLWAPTGVLLPSLVELEYPFQAGRGASLQQELTEPTLALSAESHRPPELQDSVEGLSERPSR

SEQ ID NO: 15373 - protein, 69 aa, Homo sapiens
  Payload ID: 3026
  Gene Symbol: C1orf127
  Gene Name: chromosome 1 open reading frame 127
  ENSP ID: ENSP00000467607
  MOD_RES (1)..(1): Any amino acid
XPSTQTLSLWAPTGVLLPSLVELEYPFQAGRGASLQQELTEPTLALSAESHRPPELQDSVEGLSERPSR

SEQ ID NO: 15374 - protein, 249 aa, Homo sapiens
  Payload ID: 3027
  Gene Symbol: C1orf131
  Gene Name: chromosome 1 open reading frame 131
  ENSP ID: ENSP00000321341
MRVDSSADPTMSQEQGPGSSTPPSSPTLLDALLQNLYDFGGTEGETEQKKIIKKRENKKRDVMASAALAAEPSPLPGSLIRGQRKSASSFFKELREERHCAPSGTPTGPEILAAAVPPSSLKNNREQVEVVEFHSNKKRKLTPDHNKNTKQANPSVLERDVDTQEFNLEKARLEVHRFGITGYGKGKERILEQERAIMLGAKPPKKSYVNYKVLQEQIKEKKAAKEEEKRLAQETDIFKKKKRKGQEDR

SEQ ID NO: 15375 - protein, 293 aa, Homo sapiens
  Payload ID: 3027
  Gene Symbol: C1orf131
  Gene Name: chromosome 1 open reading frame 131
  Uniprot ID: Q8NDD1
  ENSP ID: ENSP00000355609
MRVDSSADPTMSQEQGPGSSTPPSSPTLLDALLQNLYDFGGTEGETEQKKIIKKRENKKRDVMASAALAAEPSPLPGSLIRGQRKSASSFFKELREERHCAPSGTPTGPEILAAAVPPSSLKNNREQVEVVEFHSNKKRKLTPDHNKNTKQANPSVLERDVDTQEFNLEKARLEVHRFGITGYGKGKERILEQERAIMLGAKPPKKSYVNYKVLQEQIKEKKAAKEEEKRLAQETDIFKKKKRKGQEDRKSKKKSAPSILSNGRIGQVGKFKNGTLILSPVDIKKINSSRVAK

SEQ ID NO: 15376 - protein, 292 aa, Homo sapiens
  Payload ID: 3027
  Gene Symbol: C1orf131
  Gene Name: chromosome 1 open reading frame 131
  Uniprot ID: Q8NDD1
  ENSP ID: ENSP00000355611
MRVDSSADPTMSQEQGPGSSTPPSSPTLLDALLQNLYDFGGTEGETEQKKIIKKRENKKRDVMASAALAAEPSPLPGSLIRGQRKSASSFFKELREERHCAPSGTPTGPEILAAAVPPSSLKNNREQVEVVEFHSNKKRKLTPDHNKNTKANPSVLERDVDTQEFNLEKARLEVHRFGITGYGKGKERILEQERAIMLGAKPPKKSYVNYKVLQEQIKEKKAAKEEEKRLAQETDIFKKKKRKGQEDRKSKKKSAPSILSNGRIGQVGKFKNGTLILSPVDIKKINSSRVAK

SEQ ID NO: 15377 - protein, 256 aa, Homo sapiens
  Payload ID: 3027
  Gene Symbol: C1orf131
  Gene Name: chromosome 1 open reading frame 131
  ENSP ID: ENSP00000401677
GSSTPPSSPTLLDALLQNLYDFGGTEGETEQKKIIKKRENKKRDVMASAALAAEPSPLPGSLIRGQRKSASSFFKELREERHCAPSGTPTGPEILAAAVPPSSLKNNREQVEVVEFHSNKKRKLTPDHNKNTKARLEVHRFGITGYGKGKERILEQERAIMLGAKPPKKSYVNYKVLQEQIKEKKAAKEEEKRLAQETDIFKKKKRKGQEDRKSKKKSAPSILSNGRIGQVGKFKNGTLILSPVDIKKINSSRVAK

SEQ ID NO: 15378 - protein, 400 aa, Homo sapiens
  Payload ID: 3028
  Gene Symbol: C1orf141
  Gene Name: chromosome 1 open reading frame 141
  Uniprot ID: Q5JVX7
  ENSP ID: ENSP00000360045
MAEKILEKLDVLDKQAEIILARRTKINRLQSEGRKTTMAIPLTFDFQLEFEEALATSASKAISKIKEDKSCSITKSKMHVSFKCEPEPRKSNFEKSNLRPFFIQTNVKNKESESTAQIEKKPRKPLDSVGLLEGDRNKRKKSPQMNDFNIKENKSVRNYQLSKYRSVRKKSLLPLCFEDELKNPHAKIVNVSPTKTVTSHMEQKDTNPIIFHDTEYVRMLLLTKNRFSSHPLENENIYPHKRTNFILERNCEILKSIIGNQSISLFKPQKTMPTVQRKDIQIPMSFKAGHTTVDDKLKKKTNKQTLENRSWNTLYNFSQNFSSLTKQFVGYLDKAVIHEMSAQTGKFERMFSAGKPTSIPTSSALPVKCYSKPFKYIYELNNVTPLDNLLNLSNEILNAS

SEQ ID NO: 15379 - protein, 400 aa, Homo sapiens; identical to SEQ ID NO: 15378
  Payload ID: 3028
  Gene Symbol: C1orf141
  Gene Name: chromosome 1 open reading frame 141
  Uniprot ID: Q5JVX7
  ENSP ID: ENSP00000360046

SEQ ID NO: 15380 - protein, 287 aa, Homo sapiens
  Payload ID: 3028
  Gene Symbol: C1orf141
  Gene Name: chromosome 1 open reading frame 141
  ENSP ID: ENSP00000415519
MAEKILEKLDVLDKQAEIILARRTKINRLQSEGRKTTMAIPLTFDFQLEFEEALATSASKAISKIKEDKSCSITKSKMHVSFKCEPEPRKSNFEKSNLRPFFIQTNVKNKESESTEPVEEHLKSRSIRPYLYLKDTTEMENAGPLNVLYSQHRQACRRSLGSTDFSPMFNIQSNAHKKEKDSTLFTAQIEKKPRKPLDSVGLLEGDRNKRKKSPQMNDFNIKENKSVRNYQLSKYRSVRKKSLLPLCFEDELKNPHAKIVNVSPTKTVTSHMEQKDTNPIIFHDTEY

SEQ ID NO: 15381 - protein, 217 aa, Homo sapiens
  Payload ID: 3028
  Gene Symbol: C1orf141
  Gene Name: chromosome 1 open reading frame 141
  ENSP ID: ENSP00000432856
MAEKILEKLDVLDKQAEIILARRTKINRLQSEGRKTTMAIPLTFDFQLEFEEALATSASKAISKIKEDKSCSITKSKMHVSFKCEPEPRKSNFEKSNLRPFFIQTNVKNKESESTEPVEEHLKSRSIRPYLYLKDTTEMENAGPLNVLYSQHRQACRRSLGSTDFSPMFNIQSNAHKKEKDSTLFTAQIEKKPRKPLDSVGLLEGDRNKRNKRTQIP

SEQ ID NO: 15382 - protein, 118 aa, Homo sapiens
  Payload ID: 3028
  Gene Symbol: C1orf141
  Gene Name: chromosome 1 open reading frame 141
  ENSP ID: ENSP00000444018
MAEKILEKLDVLDKQAEIILARRTKINRLQSEGRKTTMAIPLTFDFQLEFEEALATSASKAISKIKEDKSCSITKSKMHVSFKCEPEPRKSNFEKSNLRPFFIQTNVKNKESESTVIF

SEQ ID NO: 15383 - protein, 195 aa, Homo sapiens
  Payload ID: 3028
  Gene Symbol: C1orf141
  Gene Name: chromosome 1 open reading frame 141
  ENSP ID: ENSP00000474902
MAEKILEKLDVLDKQAEIILARRTKINRLQSEGRKTTMAIPLTFDFQLEFEEALATSASKAISKIKEDKSCSITKSKMHVSFKCEPEPRKSNFEKSNLRPFFIQTNVKNKESESTEPVEEHLKSRSIRPYLYLKDTTEMENAGPLNVLYSQHRQACRRSLGSTDFSPMFNIQSNAHKKEKDSTLFTAQIEKKPRK

SEQ ID NO: 15384 - protein, 80 aa, Homo sapiens
  Payload ID: 3028
  Gene Symbol: C1orf141
  Gene Name: chromosome 1 open reading frame 141
  Uniprot ID: Q5JVX7
  ENSP ID: ENSP00000481294
MAEKILEKLDVLDKQAEIILARRTKINRLQSEGRKTTMAIPLTFDFQLEFEEALATSASKAISKIKEDKSCSITKSKISN

SEQ ID NO: 15385 - protein, 113 aa, Homo sapiens
  Payload ID: 3029
  Gene Symbol: C1orf145
  Gene Name: chromosome 1 open reading frame 145
  Uniprot ID: Q96MR7
  ENSP ID: ENSP00000295012
MYTASSSAETLRTVRRRSVPSSSMPYLALAHNRVSSLNHAASVDGWGTSHRNVADSFSRTSRSCSRFLKGTAGSARREDCYFEAYMGSWFLDPRIYQNLCILKFYGQPCGTQA

SEQ ID NO: 15386 - protein, 158 aa, Homo sapiens
  Payload ID: 3029
  Gene Symbol: C1orf145
  Gene Name: chromosome 1 open reading frame 145
  Uniprot ID: Q96MR7
  ENSP ID: ENSP00000338823
MYTASSSAETLRTVRRRSVPSSSMPYLALAHNRVSSLNHAASVDGWGTSHRNVADSFSRTSRSCSRFLKGTAGSARREDWNGHLQPWIPRPDRRGWETADRKGERTQVHGLRRSLGPRAPHPGAHRALRPAQSCRSGPRGWTPCRCRGRGPTACRRGS

SEQ ID NO: 15387 - protein, 95 aa, Homo sapiens
  Payload ID: 3029
  Gene Symbol: C1orf145
  Gene Name: chromosome 1 open reading frame 145
  ENSP ID: ENSP00000435112
  MOD_RES (1)..(1): Any amino acid
XSSAETLRTVRRRSVPSSSMPYLALAHNRVSSLNHAASVDGWGTSHRNVADSFSRTSRSCSRFLKGTAGSARREDWRKEGFHSLLNVRREGIFHP

SEQ ID NO: 15388 - protein, 121 aa, Homo sapiens
  Payload ID: 3030
  Gene Symbol: C1orf146
  Gene Name: chromosome 1 open reading frame 146
  ENSP ID: ENSP00000359399
MDTKECLLSTEEIFLAKIEKFINIHQNSFLVLSAALHGPEEWKLMFRIQQRFLGCNLRILPVHNTVNAINLMCTIAKTTSKPYIDSICYRMITAKAYIIEQSPVWKTLQKIKLNSDSVNPN

SEQ ID NO: 15389 - protein, 180 aa, Homo sapiens
  Payload ID: 3030
  Gene Symbol: C1orf146
  Gene Name: chromosome 1 open reading frame 146
  Uniprot ID: Q5VVC0
  ENSP ID: ENSP00000359401
MAESGKEKIKWTTTIIISSSLKSYEVATALENRSHKVRYSDSVENGSIIFSLSGVAFLLMDTKECLLSTEEIFLAKIEKFINIHQNSFLVLSAALHGPEEWKLMFRIQQRFLGCNLRILPVHNTVNAINLMCTIAKTTSKPYIDSICYRMITAKAYIIEQSPVWKTLQKIKLNSDSVNPN

SEQ ID NO: 15390 - protein, 156 aa, Homo sapiens
  Payload ID: 3031
  Gene Symbol: C1orf158
  Gene Name: chromosome 1 open reading frame 158
  ENSP ID: ENSP00000365383
MFLTAVNPQPLSTPSWQIETKYSTKVLTGNWMEERRKGLPYKHLITHHQEPPHRYLISTYDDHYNRHGYNPGLPPLRTWNGQKLLWLPEKSDFPLLAPPTNYGLYEQLKQRQLTPKAGLKQSTYTSSYPRPPLCAMSWREHAVPVPPHRLHPLPHF

SEQ ID NO: 15391 - protein, 194 aa, Homo sapiens
  Payload ID: 3031
  Gene Symbol: C1orf158
  Gene Name: chromosome 1 open reading frame 158
  Uniprot ID: Q8N1D5
  ENSP ID: ENSP00000477802
MFLTAVNPQPLSTPSWQIETKYSTKVLTGNWMEERRKFTRDTDKTPQSIYRKEYIPFPDHRPDQISRWYGKRKVEGLPYKHLITHHQEPPHRYLISTYDDHYNRHGYNPGLPPLRTWNGQKLLWLPEKSDFPLLAPPTNYGLYEQLKQRQLTPKAGLKQSTYTSSYPRPPLCAMSWREHAVPVPPHRLHPLPHF

SEQ ID NO: 15392 - protein, 198 aa, Homo sapiens
  Payload ID: 3032
  Gene Symbol: C1orf159
  Gene Name: chromosome 1 open reading frame 159
  Uniprot ID: Q96HA4
  ENSP ID: ENSP00000368623
MALRHLALLAGLLVGVASKSMENTAQLPECCVDVVGVNASCPGASLCGPGCYRRWNADGSASCVRCGNGTLPAYNGSECRSFAGPGAPFPMNRSSGTPGRPHPGAPRVAASLFLGTFFISSGLILSVAGFFYLKRSSKLPRACYRRNKAPALQPGEAAAMIPPPQSSVRKPRYVRRERPLDRATDPAAFPGEARISNV

SEQ ID NO: 15393 - protein, 344 aa, Homo sapiens
  Payload ID: 3032
  Gene Symbol: C1orf159
  Gene Name: chromosome 1 open reading frame 159
  ENSP ID: ENSP00000368624
MALRHLALLAGLLVGVASKSMENTAQLPECCVDVVGVNASCPGASLCGPGCYRRWNADGSASCVRCGNGTLPAYNGSECRSFAGPGAPFPMNRSSGTPGRPHPGAPRVAASLFLGTFFISSGLILSVAGFFYLKRSSKLPRACYRRNKAPALQPGEAAAMIPPPQSSGNSSCRIPLWGFPSLGQSQGALWVCPQTGLPGSGSRPPLPGSPGDPPTRQGQGRIWLVPPALDLSWIWPAPPARPPLIPVTSMLFPVPETWGLQERRTHHDRADPQYLLLLEVQLHPRTDAAGLRQALLSSHRFSGAGSGGPKSQPVRKPRYVRRERPLDRATDPAAFPGEARISNV

SEQ ID NO: 15394 - protein, 189 aa, Homo sapiens
  Payload ID: 3032
  Gene Symbol: C1orf159
  Gene Name: chromosome 1 open reading frame 159
  Uniprot ID: Q96HA4
  ENSP ID: ENSP00000368629
MALRHLALLAGLLVGVASKSMENTAQLPECCVDVVGVNASCPGASLCGPGCYRRWNADGSASCVRCGNGTLPAYNGSECRSFAGPGAPFPMNRSSGTPGRPHPGAPRVAASLFLGTFFISSGLILSVAGFFYLKRSSKLPRACYRRNKAPALQPGEAAAMIPPPQSSDVGSAGKEDPPRQGRPPIPAPP

SEQ ID NO: 15395 - protein, 380 aa, Homo sapiens
  Payload ID: 3032
  Gene Symbol: C1orf159
  Gene Name: chromosome 1 open reading frame 159
  Uniprot ID: Q96HA4
  ENSP ID: ENSP00000368644
MALRHLALLAGLLVGVASKSMENTVTRNSTAVINTQAEGTLSPPGLSSLPVVREWALTHTAQLPECCVDVVGVNASCPGASLCGPGCYRRWNADGSASCVRCGNGTLPAYNGSECRSFAGPGAPFPMNRSSGTPGRPHPGAPRVAASLFLGTFFISSGLILSVAGFFYLKRSSKLPRACYRRNKAPALQPGEAAAMIPPPQSSGNSSCRIPLWGFPSLGQSQGALWVCPQTGLPGSGSRPPLPGSPGDPPTRQGQGRIWLVPPALDLSWIWPAPPARPPLIPVTSMLFPVPETWGLQERRTHHDRADPQYLLLLEVQLHPRTDAAGLRQALLSSHRFSGAGSGGPKSQPVRKPRYVRRERPLDRATDPAAFPGEARISNV

SEQ ID NO: 15396 - protein, 223 aa, Homo sapiens
  Payload ID: 3032
  Gene Symbol: C1orf159
  Gene Name: chromosome 1 open reading frame 159
  ENSP ID: ENSP00000390635
MALRHLALLAGLLVGVASKSMENTAQLPECCVDVVGVNASCPGASLCGPGCYRRWNADGSASCVRCGNGTLPAYNGSECRSFAGPGAPFPMNRSSGTPGRPHPGAPRVAASLFLGTFFISSGLILSVAGFFYLKRSSKLPRACYRRNKAPALQPGEAAAMIPPPQSSAPPEDRRSRPPPGPPEQPSLQWCWVRRTQESARTEAALRQAGAAPGQGHGSRCLPG

SEQ ID NO: 15397 - protein, 64 aa, Homo sapiens
  Payload ID: 3032
  Gene Symbol: C1orf159
  Gene Name: chromosome 1 open reading frame 159
  ENSP ID: ENSP00000395935
MALRHLALLAGLLVGVASKSMENTDTDVPAPEVLTRSTAGVRGACASQRGALRCLLGPAARVLC

SEQ ID NO: 15398 - protein, 198 aa, Homo sapiens; identical to SEQ ID NO: 15392
  Payload ID: 3032
  Gene Symbol: C1orf159
  Gene Name: chromosome 1 open reading frame 159
  Uniprot ID: Q96HA4
  ENSP ID: ENSP00000400736

SEQ ID NO: 15399 - protein, 57 aa, Homo sapiens
  Payload ID: 3032
  Gene Symbol: C1orf159
  Gene Name: chromosome 1 open reading frame 159
  ENSP ID: ENSP00000416740
MALRHLALLAGLLVGVASKSMENTAQLPECCVDVVGVNASCPGASLCGPGCYRRWNA

SEQ ID NO: 15400 - protein, 86 aa, Homo sapiens
  Payload ID: 3032
  Gene Symbol: C1orf159
  Gene Name: chromosome 1 open reading frame 159
  ENSP ID: ENSP00000462517
MALRHLALLAGLLVGVASKSMENTAQLPECCVDVVGVNASCPGASLCGPGCYRRWNADGSASCVRCGNGTLPAYNGSECRSFAGPG

SEQ ID NO: 15401 - protein, 98 aa, Homo sapiens
  Payload ID: 3032
  Gene Symbol: C1orf159
  Gene Name: chromosome 1 open reading frame 159
  ENSP ID: ENSP00000462798
MALRHLALLAGLLVGVASKSMENTDTDVPAPEVLTRSTAGVRGACASQRGALRCLLGERLLRNGWVRRGPHGEASWPAMGAPLPAVTAQRAAHRYRGV

SEQ ID NO: 15402 - protein, 111 aa, Homo sapiens
  Payload ID: 3032
  Gene Symbol: C1orf159
  Gene Name: chromosome 1 open reading frame 159
  ENSP ID: ENSP00000463144
MALRHLALLAGLLVGVASKSMENTDTDVPAPEVLTRSTAGVRGACASQRGALRCLLGPAARVLCGCGGRQRQLPRRKSVWSRLLQALERGRERQLRPLWERNPPSLQRLRV

SEQ ID NO: 15403 - protein, 103 aa, Homo sapiens
  Payload ID: 3032
  Gene Symbol: C1orf159
  Gene Name: chromosome 1 open reading frame 159
  ENSP ID: ENSP00000464273
MALRHLALLAGLLVGVASKSMENTAQLPECCVDVVGVNASCPGASLCGPGCYRRWNADGSASCVRCGNGTLPAYNGSECRSFAGPGAPFPMNRSSGTPGRPHP

SEQ ID NO: 15404 - protein, 14 aa, Homo sapiens
  Payload ID: 3032
  Gene Symbol: C1orf159
  Gene Name: chromosome 1 open reading frame 159
  ENSP ID: ENSP00000464657
MALRHLALLAGLLV

SEQ ID NO: 15405 - protein, 155 aa, Homo sapiens
  Payload ID: 3033
  Gene Symbol: C1orf162
  Gene Name: chromosome 1 open reading frame 162
  Uniprot ID: Q8NEQ5
  ENSP ID: ENSP00000344218
MGGNGSTCKPDTERQGTLSTAAPTTSPAPCLSNHHNKKHLILAFCAGVLLTLLLIAFIFLIIKSYRKYRRERLPISPGPLLRWVPLLSGTMADHSKPQAPDPHSDPPAKLSSIPGESLTYASTTFKLSEEKSNHLAENHSADFDPIVYAQIKVTN

SEQ ID NO: 15406 - protein, 130 aa, Homo sapiens
  Payload ID: 3033
  Gene Symbol: C1orf162
  Gene Name: chromosome 1 open reading frame 162
  Uniprot ID: Q8NEQ5
  ENSP ID: ENSP00000358732
MGGNGSTCKPDTERQGTLSTAAPTTSPAPCLSNHHNKKHLILAFCAGVLLTLLLIAFIFLIIKSYRKYHSKPQAPDPHSDPPAKLSSIPGESLTYASTTFKLSEEKSNHLAENHSADFDPIVYAQIKVTN

SEQ ID NO: 15407 - protein, 828 aa, Homo sapiens
  Payload ID: 3034
  Gene Symbol: C1orf167
  Gene Name: chromosome 1 open reading frame 167
  ENSP ID: ENSP00000317749
  MOD_RES (1)..(1): Any amino acid
XERETLRKATRATQRTGSFPQAWHSTAAGVAWVAPLSPQHQRAWLCRCFGAWQQFVQRGSRYRDHLADRRTGTLRKCLEQWVRMKQLRESDGAKVTQLSLCRQKAGREAVYTAGPGACGLGAVGQAQGQQEQGRGSLQDACWTLALCWALLLWKMRLFQRQWANSFFQGLQQRMLQRSLRWWHLRALGPDATSSCTKTPSALEPLSSSTLQDSLEKVPRAPTLPDTLQGSLLWAAGQRQQGQCLLLWQARAQQFQGTARWYQHTRQRRIFLSWSRWATAQWAWRELASHRAWDRTCRAVLGLWRQRLLQSRLVEWWAQERGWRLARDALCHWHSCWQGQQFLHEKCQTWVQVHLQGLQKVVFRSWQQAAAHQRCTVTRPEQLLLQSYFQAWCEVVRDTGVLRAQHQAFQDGLRRRALGAVFATWREAQEVAAGAQEQRVAQASLARWRSCGQQGQEDGQQKKARAPQAFPAWPVAPGMHHEAQQQAGESAGAQAAQCWTWCWALWVHESCRGQVSRAHASWKPRAWVLEASVQSAVRGGVQRAILTQLRPAELRRFLRTVQLRVRLGLPGAGKTRSCWTQATELVPPAPSLQCSLGGRRKPRGTAWAQRCREHSLCPAFQLWPQWPGQSSWVPGLPLWTRDQGPRAHSSPEPRACKAQSKAHKRRLRILEKQAQAHGSALLLALKGHDALGHQEEVPAAPVPRGTASRAAGFPAGQVPGSGMAALGGCPRGRAAGADPAQGVAPEMGLADVVAADPATASGSAVTAAGRWAFKKWHQRLAARSPRRGAASSPRPWSKPGPKGPESGQEAARAPRGWGLGAEHGAQLQL

SEQ ID NO: 15408 - protein, 616 aa, Homo sapiens
  Payload ID: 3034
  Gene Symbol: C1orf167
  Gene Name: chromosome 1 open reading frame 167
  ENSP ID: ENSP00000398213
  MOD_RES (1)..(1): Any amino acid
XRAPTLPDTLQGSLLWAAGQRQQGQCLLLWQARAQQFQGTARWYQHTRQRRIFLSWSRWATAQWAWRELASHRAWDRTCRAVLGLWRQRLLQSRLVEWWAQERGWRLARDALCHWHSCWQGQQFLHEKCQTWVQVHLQGLQKVVFRSWQQAAAHQRCTVTRPEQLLLQSYFQAWCEVVRDTGVLRAQHQAFQDGLRRRALGAVFATWREAQEVAAGAQEQRVAQASLARWRSCGQQGQEDGQQKKARAPQAFPAWPVAPGMHHEAQQQAGESAGAQAAQCWTWCWALWVHESCRGQVSRAHASWKPRAWVLEASVQSAVRGGVQRAILTQLRPAELRRFLRTVQLRVRLGLPGAGKTRSCWTQATELVPPAPSLQCSLGGRRKPRGTAWAQRCREHSLCPAFQLWPQWPGQSSWVPGLPLWTRDQGPRAHSSPEPRACKAQSKAHKRRLRARSCRILEKQAQAHGSALLLALKGHDALGHQEEVPAAPVPRGTASRAAGFPAGQVPGSGMAALGGCPRGRAAGADPAQGVAPEMGLADVVAADPATASGSAVTAAGRWAFKKWHQRLAARSPRRGAASSPRPWSKPGPKGPESGQEAARAPRGWGLGAEHGAQLQL

SEQ ID NO: 15409 - protein, 532 aa, Homo sapiens
  Payload ID: 3034
  Gene Symbol: C1orf167
  Gene Name: chromosome 1 open reading frame 167
  ENSP ID: ENSP00000399272
  MOD_RES (1)..(1): Any amino acid
XAAGQQPNGPGESWLPTGPGIGPAGLCWACGVSGCCSHGWWSGGPRSGAGGWHEMPYATGTPVGRQFLHEKCQTWVQVHLQGLQKVVFRSWQQAAAHQRCTVTRPEQLLLQSYFQAWCEVVRDTGVLRAQHQAFQDGLRRRALGAVFATWREAQEVAAGAQEQRVAQASLARWRSCGQQGQEDGQQKKARAPQAFPAWPVAPGMHHEAQQQAGESAGAQAAQCWTWCWALWVHESCRGQVSRAHASWKPRAWVLEASVQSAVRGGVQRAILTQLRPAELRRFLRTVQLRVRLGLPGAGKTRSCWTQATELVPPAPSLQCSLGGRRKPRGTAWAQRCREHSLCPAFQLWPQWPGQSSWVPGLPLWTRDQGPRAHSSPEPRACKAQSKAHKRRLRRKYLQRRCLEALLHGLRGSQQARCLAVAWQHWVDAQGAEQLVRTLLREWHLRWAWQTWWQRILRLRVAQQLQQQEDGPLRSGTNAWQPGAQGEELPVAQDPGASQAPRAPRVDRKPPEHRGVGGLGQSMGPSCSCDLFS

SEQ ID NO: 15410 - protein, 1468 aa, Homo sapiens
  Payload ID: 3034
  Gene Symbol: C1orf167
  Gene Name: chromosome 1 open reading frame 167
  Uniprot ID: Q5SNV9
  ENSP ID: ENSP00000414909
MTRMSCPWGSYQWEPGACPAAPRGIGGGDMAGGIPDVRGLQEAALGAGRSQEEARLVEEAQTPVMLPQDSGQRVEEVPGDLMAKRMSLILHVQKLPWDHVPCLRRTRQNLYQDVGGHAHGSGLGGAKRGAARSALRRPLPPATCRPAGIVSGPSPRLDSNPTGAHLIKQTRPLTVEWTKDTPVPEPMELRSDASHKENVSPKPAALPKPGKRLKQRRFRRSLGIGLSGRHDQWVPGCQVERGGPAATPSPGAVLDQEPCRVQTNLASPGPRLGLALKDTTGQLVNSSFWQQSNLQSLARRRQGKAREFAIQQSNLSINETSSPHLCPEPGGSSGPHKLPWGPLLSQEPLARPSSCLRQSGLPAPGTPSGDFRPTEAFAPLDGHTQPGLRSWGGLGSWRSRLVGEPLTLEDLAVPSQNQTQAPSRAAVHQLLASVHCLAQEAARLRCQAPQEPPAWGVSPKQKGEEGAPRERVHREEERTAFHLSDTVPASSASKNKAQNITAPESEAICWQLLSRCFRSWRHLVKRQREPAAAAVALGRWQLLRKCLQALWLREAQLEAAWGQYTKVLLVRSFREVSGLQVGPGGRVKQCPGSLREEEIAQRLLSHPRQRTDSRHERVQILQALQLAVFFLWCQQKKRARQERETLRKATRATQRTGSFPQAWHSTAAGVAWVAPLSPQHQRAWLCRCFGAWQQFVQRGSRYRDHLADRRTGTLRKCLEQWVRMKQLRESDGAKVTQLSLCRQKAGREAVYTAGPGACGLGAVGQAQGQQEQGRGSLQDACWTLALCWALLLWKMRLFQRQWANSFFQGLQQRMLQRSLRWWHLRALGPDATSSCTKTPSALEPLSSSTLQDSLEKVPRAPTLPDTLQGSLLWAAGQRQQGQCLLLWQARAQQFQGTARWYQHTRQRRIFLSWSRWATAQWAWRELASHRAWDRTCRAVLGLWRQRLLQSRLVEWWAQERGWRLARDALCHWHSCWQGQQFLHEKCQTWVQVHLQGLQKVVFRSWQQAAAHQRCTVTRPEQLLLQSYFQAWCEVVRDTGVLRAQHQAFQDGLRRRALGAVFATWREAQEVAAGAQEQRVAQASLARWRSCGQQGQEDGQQKKARAPQAFPAWPVAPGMHHEAQQQAGESAGAQAAQCWTWCWALWVHESCRGQVSRAHASWKPRAWVLEASVQSAVRGGVQRAILTQLRPAELRRFLRTVQLRVRLGLPGAGKTRSCWTQATELVPPAPSLQCSLGGRRKPRGTAWAQRCREHSLCPAFQLWPQWPGQSSWVPGLPLWTRDQGPRAHSSPEPRACKAQSKAHKRRLRILEKQAQAHGSALLLALKGHDALGHQEEVPAAPVPRGTASRAAGFPAGQVPGSGMAALGGCPRGRAAGADPAQGVAPEMGLADVVAADPATASGSAVTAAGRWAFKKWHQRLAARSPRRGAASSPRPWSKPGPKGPESGQEAARAPRGWGLGAEHGAQLQL

SEQ ID NO: 15411 - protein, 728 aa, Homo sapiens
  Payload ID: 3035
  Gene Symbol: C1orf168
  Gene Name: chromosome 1 open reading frame 168
  Uniprot ID: Q5VWT5
  ENSP ID: ENSP00000345972
MEGEGVRNFKELRAKFQNLDAPPLPGPIKFPAGVSPKGDIGGTQSTQILANGKPLSSNHKQRTPYCSSSESQPLQPQKIKLAQKSEIPKCSNSPGPLGKSTVCSATSSQKASLLLEVTQSNVEIITKEKVMVANSFRNKLWNWEKVSSQKSEMSSALLLANYGSKAIHLEGQKGMGLTPEEPRKKLETKGAQTLPSQKHVVAPKILHNVSEDPSFVISQHIRKSWENPPPERSPASSPCQPIYECELASQAPEKQPDVRHHHLPKTKPLPSIDSLGPPPPKPSRPPIVNLQAFQRQPAAVPKTQGEVTVEEGSLSPERLFNAEFEEPHNYEATISYLRHSGNSINLCTAKEIADPTYEVGIEELQKPGKNFPYPEPSAKHEDKKMKEKQPCELKPKNTEKEPYSNHVFKVDACEGTPEKIQMTNVHTGRRNMLAGKQEAMIDIIQTNPCPEGPKLARHSQGHCGHLEVLESTKETPDLGVSKTSSISEEIYDDVEYSRKEVPKLNYSSSLASSSEENRELYEDVYKTKNNYPKIDLDGKEALKRLQQFFKKEKDRFKIKKTKSKENLSAFSILLPDLELKSQEVIIYDDVDLSEKESKDEDKLKMWKPKFLTPKEKKEKNGAEESESFSPRNFFKTKKQNLEKNRMKREEKLFRERFKYDKEIIVINTAVACSNNSRNGIFDLPISPGEELEVIDTTEQNLVICRNSKGKYGYVLIEHLDFKHQSWSP

SEQ ID NO: 15412 - protein, 243 aa, Homo sapiens
  Payload ID: 3036
  Gene Symbol: C1orf174
  Gene Name: chromosome 1 open reading frame 174
  Uniprot ID: Q8IYL3
  ENSP ID: ENSP00000355306
MRSRKLTGAVRSSARLKARSCSAARLASAQEVAGSTSAKTACLTSSSHKATDTRTSKKFKCDKGHLVKSELQKLVPKNDSASLPKVTPETPCENEFAEGSALLPGSEAGVSVQQGAASLPLGGCRVVSDSRLAKTRDGLSVPKHSAGSGAEESNSSSTVQKQNEPGLQTEDVQKPPLQMDNSVFLDDDSNQPMPVSRFFGNVELMQDLPPASSSCPSMSRREFRKMHFRAKDDDDDDDDDAEM

SEQ ID NO: 15413 - protein, 199 aa, Homo sapiens
  Payload ID: 3037
  Gene Symbol: C1orf185
  Gene Name: chromosome 1 open reading frame 185
  Uniprot ID: Q5T7R7
  ENSP ID: ENSP00000360824
MASPKGFFNYLTYFLAAGAVTLGIGFFALASALWFLICKRREIFQNSKFKAIDERCRQRPSMAKIKSHSQCVFISRNFHTGRFQLQEEQRKKEAAHIKAIKDHSKDEPQLATKNIICDPSETSSTTNRSSVTLSLSTLPSDSYYSQSIEAADDWFSDDSLVKRNSPMPSLGEPLMEKVFSYLSTISLEEGTESVLNDTL

SEQ ID NO: 15414 - protein, 138 aa, Homo sapiens
  Payload ID: 3037
  Gene Symbol: C1orf185
  Gene Name: chromosome 1 open reading frame 185
  ENSP ID: ENSP00000473351
MAKIKSHSQCVFISRNFHTGRFQLQEEQRKKEAAHIKAIKDHSKDEPQLATKNIICDPSETSSTTNRSSVTLSLSTLPSDSYYSQSIEAADDWFSDDSLVKRNSPMPSLGEPLMEKVFSYLSTISLEEGTESVLNDTL

SEQ ID NO: 15415 - protein, 195 aa, Homo sapiens [sequence omitted]

SEQ ID NO: 15416 - protein, 172 aa, Homo sapiens
  Payload ID: 3038
  Gene Symbol: C1orf186
  Gene Name: chromosome 1 open reading frame 186
  Uniprot ID: Q6ZWK4
  ENSP ID: ENSP00000356093
MLTEVMEVWHGLVIAVVSLFLQACFLTAINYLLSRHMAHKSEQILKAASLQVPRPSPGHHHPPAVKEMKETQTERDIPMSDSLYRHDSDTPSDSLDSSCSSPPACQATEDVDYTQVVFSDPGELKNDSPLDYENIKEITDYVNVNPERHKPSFWYFVNPALSEPAEYDQVAM

SEQ ID NO: 15417 - protein, 172 aa, Homo sapiens; identical to SEQ ID NO: 15416
  Payload ID: 3038
  Gene Symbol: C1orf186
  Gene Name: chromosome 1 open reading frame 186
  Uniprot ID: Q6ZWK4
  ENSP ID: ENSP00000463990

SEQ ID NO: 15418 - protein, 124 aa, Homo sapiens
  Payload ID: 3038
  Gene Symbol: C1orf186
  Gene Name: chromosome 1 open reading frame 186
  ENSP ID: ENSP00000474759
MLTEVMEVWHGLVIAVVSLFLQACFLTAINYLLSRHMDDSDTPSDSLDSSCSSPPACQATEDVDYTQVVFSDPGELKNDSPLDYENIKEITDYVNVNPERHKPSFWYFVNPALSEPAEYDQVAM

SEQ ID NO: 15419 - protein, 172 aa, Homo sapiens; identical to SEQ ID NO: 15416
  Payload ID: 3038
  Gene Symbol: C1orf186
  Gene Name: chromosome 1 open reading frame 186
  Uniprot ID: Q6ZWK4
  ENSP ID: ENSP00000474994

SEQ ID NO: 15420 - protein, 101 aa, Homo sapiens
  Payload ID: 3039
  Gene Symbol: C1orf189
  Gene Name: chromosome 1 open reading frame 189
  Uniprot ID: Q5VU69
  ENSP ID: ENSP00000357511
MSVEKMTKVEESFQKAMGLKKTVDRWRNSHTHCLWQMALGQRRNPYATLRMQDTMVQELALAKKQLLMVRQAALHQLFEKEHQQYQQELNQMGKAFYVERF

SEQ ID NO: 15421 - protein, 130 aa, Homo sapiens
  Payload ID: 3040
  Gene Symbol: C1orf194
  Gene Name: chromosome 1 open reading frame 194
  ENSP ID: ENSP00000358961
MPPTRDPFQQPTLDNDDSYLGELRASKIPKDDLDFRLAALYNHHTGTFKNKSEILLNQKTTQDTYRTKIQFPGEFLTPPTPPITFLANIRHWINPKKESIHSIQGSIVSPHTAATNGGYSRKKDGGFFST

SEQ ID NO: 15422 - protein, 169 aa, Homo sapiens
  Payload ID: 3040
  Gene Symbol: C1orf194
  Gene Name: chromosome 1 open reading frame 194
  Uniprot ID: Q5T5A4
  ENSP ID: ENSP00000358964
MPPTRDPFQQPTLDNDDSYLGELRASKKLPYKNPTHLAQQQEPWSRLNSTPTITSMRRDAYYFDPEIPKDDLDFRLAALYNHHTGTFKNKSEILLNQKTTQDTYRTKIQFPGEFLTPPTPPITFLANIRHWINPKKESIHSIQGSIVSPHTAATNGGYSRKKDGGFFST

SEQ ID NO: 15423 - protein, 157 aa, Homo sapiens
  Payload ID: 3040
  Gene Symbol: C1orf194
  Gene Name: chromosome 1 open reading frame 194
  Uniprot ID: Q5T5A4
  ENSP ID: ENSP00000358965
MERSPSRRRRLEEAPKLPYKNPTHLAQQQEPWSRLNSTPTITSMRRDAYYFDPEIPKDDLDFRLAALYNHHTGTFKNKSEILLNQKTTQDTYRTKIQFPGEFLTPPTPPITFLANIRHWINPKKESIHSIQGSIVSPHTAATNGGYSRKKDGGFFST

SEQ ID NO: 15424 - protein, 36 aa, Homo sapiens
  Payload ID: 3040
  Gene Symbol: C1orf194
  Gene Name: chromosome 1 open reading frame 194
  ENSP ID: ENSP00000435090
MERSPSRRRRLEEAPNQDPIPWRIFNPSHSTHHFPG

SEQ ID NO: 15425 - protein, 48 aa, Homo sapiens
  Payload ID: 3040
  Gene Symbol: C1orf194
  Gene Name: chromosome 1 open reading frame 194
  ENSP ID: ENSP00000435947
MPPTRDPFQQPTLDNDDSYLGELRASKNQDPIPWRIFNPSHSTHHFPG

SEQ ID NO: 15426 - protein, 327 aa, Homo sapiens
  Payload ID: 3041
  Gene Symbol: C1orf198
  Gene Name: chromosome 1 open reading frame 198
  Uniprot ID: Q9H425
  ENSP ID: ENSP00000355623
MASMAAAIAASRSAVMSGNRPLDDRERKRFTYFSSLSPMARKIMQDKEKIREKYGPEWARLPPAQQDEIIDRCLVGPRAPAPRDPGDSEELTRFPGLRGPTGQKVVRFGDEDLTWQDEHSAPFSWETKSQMEFSISALSIQEPSNGTAASEPRPLSKASQGSQALKSSQGSRSSSLDALGPTRKEEEASFWKINAERSRGEGPEAEFQSLTPSQIKSMEKGEKVLPPCYRQEPAPKDREAKVERPSTLRQEQRPLPNVSTERERPQPVQAFSSALHEAAPSQLEGKLPSPDVRQDDGEDTLFSEPKFAQVSSSNVVLKTGFDFLDNW

SEQ ID NO: 15427 - protein, 110 aa, Homo sapiens
  Payload ID: 3041
  Gene Symbol: C1orf198
  Gene Name: chromosome 1 open reading frame 198
  ENSP ID: ENSP00000411384
MEKGEKVLPPCYRQEPAPKDREAKVERPSTLRQEQRPLPNVSTERERPQPVQAFSSALHEAAPSQLEGKLPSPDVRQDDGEDTLFSEPKFAQVSSSNVVLKTGFDFLDNW

SEQ ID NO: 15428 - protein, 289 aa, Homo sapiens
  Payload ID: 3041
  Gene Symbol: C1orf198
  Gene Name: chromosome 1 open reading frame 198
  Uniprot ID: Q9H425
  ENSP ID: ENSP00000428172
MARKIMQDKEKIREKYGPEWARLPPAQQDEIIDRCLVGPRAPAPRDPGDSEELTRFPGLRGPTGQKVVRFGDEDLTWQDEHSAPFSWETKSQMEFSISALSIQEPSNGTAASEPRPLSKASQGSQALKSSQGSRSSSLDALGPTRKEEEASFWKINAERSRGEGPEAEFQSLTPSQIKSMEKGEKVLPPCYRQEPAPKDREAKVERPSTLRQEQRPLPNVSTERERPQPVQAFSSALHEAAPSQLEGKLPSPDVRQDDGEDTLFSEPKFAQVSSSNVVLKTGFDFLDNW

SEQ ID NO: 15429 - protein, 160 aa, Homo sapiens
  Payload ID: 3041
  Gene Symbol: C1orf198
  Gene Name: chromosome 1 open reading frame 198
  ENSP ID: ENSP00000429503
MQDKEKIREKYGPEWARLPPAQQDEIIDRCLVGPRAPAPRDPGDSEELTRFPGLRGPTGQKVVRFGDEDLTWQDEHSAPFSWETKSQMEFSISALSIQEPSNGTAASEPRPLSKASQGSQALKSSQGSRSSSLDALGPTRKEEEASFWKINAERSRGEGP

SEQ ID NO: 15430 - protein, 197 aa, Homo sapiens
  Payload ID: 3041
  Gene Symbol: C1orf198
  Gene Name: chromosome 1 open reading frame 198
  Uniprot ID: Q9H425
  ENSP ID: ENSP00000430967
MEFSISALSIQEPSNGTAASEPRPLSKASQGSQALKSSQGSRSSSLDALGPTRKEEEASFWKINAERSRGEGPEAEFQSLTPSQIKSMEKGEKVLPPCYRQEPAPKDREAKVERPSTLRQEQRPLPNVSTERERPQPVQAFSSALHEAAPSQLEGKLPSPDVRQDDGEDTLFSEPKFAQVSSSNVVLKTGFDFLDNW

SEQ ID NO: 15431 - protein, 235 aa, Homo sapiens
  Payload ID: 3042
  Gene Symbol: C1orf204
  Gene Name: chromosome 1 open reading frame 204
  Uniprot ID: Q5VU13
  ENSP ID: ENSP00000357082
MGMLAPGPLQGRRPRKGHKGQEDAVAPGCKASGRGSRVTHLLGYPTQNVSRSLRRKYAPPPCGGPEDVALAPCTAAAACEAGPSPVYVKVKSAEPADCAEGPVQCKNGLLVSSPHCEEPCAHSCAHPGLPPHLVHKLPLSYLQTQDTDAASRRINAPLAAGWSWLRLWLVTLASGVDFPQVSAWMRALPSPDCPGLRTTGEQMQKLLLKENKVKTRKSKRRSGEGSHLTTSILEQ

SEQ ID NO: 15432 - protein, 235 aa, Homo sapiens; identical to SEQ ID NO: 15431
  Payload ID: 3042
  Gene Symbol: C1orf204
  Gene Name: chromosome 1 open reading frame 204
  Uniprot ID: Q5VU13
  ENSP ID: ENSP00000480481

SEQ ID NO: 15433 - protein, 121 aa, Homo sapiens
  Payload ID: 3043
  Gene Symbol: C1orf21
  Gene Name: chromosome 1 open reading frame 21
  Uniprot ID: Q9H246
  ENSP ID: ENSP00000235307
MGCASAKHVATVQNEEEAQKGKNYQNGDVFGDEYRIKPVEEVKYMKNGAEEEQKIAARNQENLEKSASSNVRLKTNKEVPGLVHQPRANMHISESQQEFFRMLDEKIEKGRDYCSEEEDIT

SEQ ID NO: 15434 - protein, 113 aa, Homo sapiens
  Payload ID: 3044
  Gene Symbol: C1orf210
  Gene Name: chromosome 1 open reading frame 210
  Uniprot ID: Q8IVY1
  ENSP ID: ENSP00000429399
MNETNKTLVGPSELPTASAVAPGPGTGARAWPVLVGFVLGAVVLSLLIALAAKCHLCRRYHASYRHRPLPETGRGGRPQVAEDEDDDGFIEDNYIQPGTGELGTEGSRDHFSL

SEQ ID NO: 15435 - protein, 113 aa, Homo sapiens; identical to SEQ ID NO: 15434
  Payload ID: 3044
  Gene Symbol: C1orf210
  Gene Name: chromosome 1 open reading frame 210
  Uniprot ID: Q8IVY1
  ENSP ID: ENSP00000430918

SEQ ID NO: 15436 - protein, 229 aa, Homo sapiens
  Payload ID: 3045
  Gene Symbol: C1orf216
  Gene Name: chromosome 1 open reading frame 216
  Uniprot ID: Q8TAB5
  ENSP ID: ENSP00000425166
MFAIQPGLAEGGQFLGDPPPGLCQPELQPDSNSNFMASAKDANENWHGMPGRVEPILRRSSSESPSDNQAFQAPGSPEEGVRSPPEGAEIPGAEPEKMGGAGTVCSPLEDNGYASSSLSIDSRSSSPEPACGTPRGPGPPDPLLPSVAQAVQHLQVQERYKEQEKEKHHVHLVMYRRLALLQWIRGLQHQLIDQQARLQESFDTILDNRKELIRCLQQRAAPSRPQDQA

SEQ ID NO: 15437 - protein, 171 aa, Homo sapiens
  Payload ID: 3046
  Gene Symbol: C1orf226
  Gene Name: chromosome 1 open reading frame 226
  ENSP ID: ENSP00000398035
MFENLNTALTPKLQASRSFPHLSKPVAPGSAPLGSGEPGGPGLWVGSSQHLKNLGKAMGAKVNDFLRRKEPSSLGSVGVTEINKTAGAQLASGTDAAPEAWLEDERSVLQETFPRLDPPPPITRKRTPRALKTTQDMLISSQPVLSSLEYGTEPSPGQAQDSAPTAQPDVP

SEQ ID NO: 15438 - protein, 315 aa, Homo sapiens
  Payload ID: 3046
  Gene Symbol: C1orf226
  Gene Name: chromosome 1 open reading frame 226
  Uniprot ID: A1L170
  ENSP ID: ENSP00000413150
MLVLVAQAGGDTLKVTGHYVKCVFLLFVSHLLSEPLSRTVDHGMFENLNTALTPKLQASRSFPHLSKPVAPGSAPLGSGEPGGPGLWVGSSQHLKNLGKAMGAKVNDFLRRKEPSSLGSVGVTEINKTAGAQLASGTDAAPEAWLEDERSVLQETFPRLDPPPPITRKRTPRALKTTQDMLISSQPVLSSLEYGTEPSPGQAQDSAPTAQPDVPADASQPEATMEREERGKVLPNGEVSLSVPDLIHKDSQDESKLKMTECRRASSPSLIERNGFKLSLSPISLAESWEDGSPPPQARTSSLDNEGPHPDLLSFE

SEQ ID NO: 15439 - protein, 272 aa, Homo sapiens
  Payload ID: 3046
  Gene Symbol: C1orf226
  Gene Name: chromosome 1 open reading frame 226
  Uniprot ID: A1L170
  ENSP ID: ENSP00000437071
MFENLNTALTPKLQASRSFPHLSKPVAPGSAPLGSGEPGGPGLWVGSSQHLKNLGKAMGAKVNDFLRRKEPSSLGSVGVTEINKTAGAQLASGTDAAPEAWLEDERSVLQETFPRLDPPPPITRKRTPRALKTTQDMLISSQPVLSSLEYGTEPSPGQAQDSAPTAQPDVPADASQPEATMEREERGKVLPNGEVSLSVPDLIHKDSQDESKLKMTECRRASSPSLIERNGFKLSLSPISLAESWEDGSPPPQARTSSLDNEGPHPDLLSFE

SEQ ID NO: 15440 - protein, 115 aa, Homo sapiens
  Payload ID: 3047
  Gene Symbol: C1orf228
  Gene Name: chromosome 1 open reading frame 228
  ENSP ID: ENSP00000417206
MTSIKEQAAISRLLSFLQEWDNAGKVARSHILDKFIETNQGKTAPELEQEFSQGASLFLVRLTTSLRITYMTDSCLEKLLRSIGIFLSAVSSNRYLIEFLEVGGVLTLLEILGLE

SEQ ID NO: 15441 - protein, 81 aa, Homo sapiens
  Payload ID: 3047
  Gene Symbol: C1orf228
  Gene Name: chromosome 1 open reading frame 228
  ENSP ID: ENSP00000417538
MTSIKEQAAISRLLSFLQEWDNAGKVARSHILDKFIETNQGKTAPELEQEFSQGASLFLVRLTTSLRITYMTDSCLEKLLR

SEQ ID NO: 15442 - protein, 209 aa, Homo sapiens
  Payload ID: 3047
  Gene Symbol: C1orf228
  Gene Name: chromosome 1 open reading frame 228
  ENSP ID: ENSP00000417998
MTSIKEQAAISRLLSFLQEWDNAGKVARSHILDKFIETNQGKTAPELEQEFSQGASLFLVRLTTSLRITYMTDSCLEKLLRSIGIFLSAVSSNRYLIEFLEVGGVLTLLEILGLEKIKEEAKKESVKLLQVIANSGRTYKELICESYGVRSIAEFLAKSKSEETQEEVQVLLDSLVHGNPKYQNQVYKGLIALLPCESPKAQQLSLQTL

SEQ ID NO: 15443 - protein, 164 aa, Homo sapiens
  Payload ID: 3047
  Gene Symbol: C1orf228
  Gene Name: chromosome 1 open reading frame 228
  ENSP ID: ENSP00000420050
  MOD_RES (1)..(1): Any amino acid
XTGAGVFPGSQFVPGVRSIAEFLAKSKSEETQEEVQVLLDSLVHGNPKYQNQVYKGLIALLPCESPKAQQLSLQTLRTAQPIIGTTHPSIVDCVLKVLGTMHLEVQYEAIELIKDLVGYDVRQALLKGLVALLIPSVKEISKLQAKILSAHPQPADVFAAGRGR

SEQ ID NO: 15444 - protein, 59 aa, Homo sapiens
  Payload ID: 3047
  Gene Symbol: C1orf228
  Gene Name: chromosome 1 open reading frame 228
  ENSP ID: ENSP00000420358
MTSIKEQAAISRLLSFLQEWDNAGKVARSHILDKFIETNQGKTAPELEQEFSQGASLFL

SEQ ID NO: 15445 - protein, 220 aa, Homo sapiens
  Payload ID: 3047
  Gene Symbol: C1orf228
  Gene Name: chromosome 1 open reading frame 228
  ENSP ID: ENSP00000420664
MTSIKEQAAISRLLSFLQEWDNAGKVARSHILDKFIETNQGKTAPELEQEFSQGASLFLVRLTTSLRITYMTDSCLEKLLRSIGIFLSAVSSNRYLIEFLEVGGVLTLLEILGLEKIKEEAKKESVKLLQVIANSGRTYKELICESYGVRSIAEFLAKSKSEETQEEVQVLLDSLVHGNPKYQNQVYKGLIALLPCESPKAQQLSLQTLRTAQPIIGTTH

SEQ ID NO: 15446 - protein, 440 aa, Homo sapiens
  Payload ID: 3047
  Gene Symbol: C1orf228
  Gene Name: chromosome 1 open reading frame 228
  Uniprot ID: Q6PIY5
  ENSP ID: ENSP00000420716
MTSIKEQAAISRLLSFLQEWDNAGKVARSHILDKFIETNQGKTAPELEQEFSQGASLFLVRLTTSLRITYMTDSCLEKLLRSIGIFLSAVSSNRYLIEFLEVGGVLTLLEILGLEKIKEEAKKESVKLLQVIANSGRTYKELICESYGVRSIAEFLAKSKSEETQEEVQVLLDSLVHGNPKYQNQVYKGLIALLPCESPKAQQLSLQTLRTAQPIIGTTHPSIVDCVLKVLGTMHLEVQYEAIELIKDLVGYDVRQALLKGLVALLIPSVKEISKLQAKILSDPSVLQLTPSLPMFLQQAAAAKAIGVLARNDMSIAEELLYLRVVRGLMAAMGNTDHSNSQRLASLTLECFVQMFPLVAEHVRKCMGEELYQLFLSNAEDLYMKIDSIQADILAANTVNVTKALCLHGSSYSMNTLYGSRDSAQMAYLTHFEEDVESKE

SEQ ID NO: 15447 - protein, 440 aa, Homo sapiens; identical to SEQ ID NO: 15446
  Payload ID: 3047
  Gene Symbol: C1orf228
  Gene Name: chromosome 1 open reading frame 228
  Uniprot ID: Q6PIY5
  ENSP ID: ENSP00000440524

SEQ ID NO: 15448 - protein, 226 aa, Homo sapiens
  Payload ID: 3048
  Gene Symbol: C1orf233
  Gene Name: chromosome 1 open reading frame 233
  Uniprot ID: F2Z333
  ENSP ID: ENSP00000389111
MRAPPLLLLLAACAPPPCAAAAPTPPGWEPTPDAPWCPYKVLPEGPEAGGGRLCFRSPARGFRCQAPGCVLHAPAGRSLRASVLRNRSVLLQWRLAPAAARRVRAFALNCSWRGAYTRFPCERVLLGASCRDYLLPDVHDSVLYRLCLQPLPLRAGPAAAAPETPEPAECVEFTAEPAGMQDIVVAMTAVGGSICVMLVVICLLVAYITENLMRPALARPGLRRHP

SEQ ID NO: 15449 - protein, 121 aa, Homo sapiens
  Payload ID: 3049
  Gene Symbol: C1orf234
  Gene Name: chromosome 1 open reading frame 234
  Uniprot ID: H3BTG2
  ENSP ID: ENSP00000457161
MSLHGILASAGTIGAVAAWLMSYKPALFGFLFLLLLLSNWLVKYEHKLTLPEPQQDEILQRLLFSEMKMKVLENQMFIIWNKMNHHGRSSRHRNFPMKKHRMRRHESICPTLSDCTSSSPS

SEQ ID NO: 15450 - protein, 121 aa, Homo sapiens
  Payload ID: 3049
  Gene Symbol: C1orf234
  Gene Name: chromosome 1 open reading frame 234
  ENSP ID: ENSP00000487118
RSLHGILASAGTIGAVAAWLMSYKPALFGFLFLLLLLSNWLVKYEHKLTLPEPQQDEILQRLLFSEMKMKVLENQMFIIWNKMNHHGRSSRHRNFPMKKHRMRRHESICPTLSDCTSSSPS

SEQ ID NO: 15451 - protein, 147 aa, Homo sapiens
  Payload ID: 3049
  Gene Symbol: C1orf234
  Gene Name: chromosome 1 open reading frame 234
  ENSP ID: ENSP00000487236
  MOD_RES (1)..(1): Any amino acid
XSAGTIGAVAAWLMSYKPALFGFLFLLLLLSNWLVKYEHKLTLPEPQQEEEKPKTSENDSKNSKAVNTKEVNRTHACFALQDEILQRLLFSEMKMKVLENQMFIIWNKMNHHGRSSRHRNFPMKKHRMRRHESICPTLSDCTSSSPS

SEQ ID NO: 15452 - protein, 454 aa, Homo sapiens
  Payload ID: 3050
  Gene Symbol: C1orf27
  Gene Name: chromosome 1 open reading frame 27
  Uniprot ID: Q5SWX8
  ENSP ID: ENSP00000287859
MGRTYIVEETVGQYLSNINLQGKAFVSGLLIGQCSSQKDYVILATRTPPKEEQSENLKHPKAKLDNLDEEWATEHACQVSRMLPGGLLVLGVFIITTLELANDFQNALRRLMFAVEKSINRKRLWNFTEEEVSERVTLHICASTKKIFCRTYDIHDPKSSARPADWKYQSGLSSSWLSLECTVHINIHIPLSATSVSYTLEKNTKNGLTRWAKEIENGVYLINGQVKDEDCDLLEGQKKSSRGNTQATSHSFDVRVLTQLLLNSDHRSTATVQICSGSVNLKGAVKCRAYIHSSKPKVKDAVQAVKRDILNTVADRCEMLFEDLLLNEIPEKKDSEKEFHVLPYRVFVPLPGSTVMLCDYKFDDESAEEIRDHFMEMLDHTIQIEDLEIAEETNTACMSSSMNSQASLDNTDDEQPKQPIKTTMLLKIQQNIGVIAAFTVAVLAAGISFHYFSD

SEQ ID NO: 15453 - protein, 431 aa, Homo sapiens
  Payload ID: 3050
  Gene Symbol: C1orf27
  Gene Name: chromosome 1 open reading frame 27
  Uniprot ID: Q5SWX8
  ENSP ID: ENSP00000356440
MGRTYIVEETVGQYLSNINLQGKAFVSGLLIGQCSSQKDYVILATRTPPKEEQSENLKHPKAKLDNLDEEWATEHACQVSRMLPGGLLVLGVFIITTLELANDFQNALRRLMFAVEKSINRKRLWNFTEEEVSERVTLHICASTKKIFCRTYDIHDPKSSARPADWKYQSGLSSSWLSLECTVHINIHIPLSATSVSYTLEKNTKNGLTRWAKEIENGVYLINGQVKDEDCDLLEGQLLNSDHRSTATVQICSGSVNLKGAVKCRAYIHSSKPKVKDAVQAVKRDILNTVADRCEMLFEDLLLNEIPEKKDSEKEFHVLPYRVFVPLPGSTVMLCDYKFDDESAEEIRDHFMEMLDHTIQIEDLEIAEETNTACMSSSMNSQASLDNTDDEQPKQPIKTTMLLKIQQNIGVIAAFTVAVLAAGISFHYFSD

SEQ ID NO: 15454 - protein, 422 aa, Homo sapiens
  Payload ID: 3050
  Gene Symbol: C1orf27
  Gene Name: chromosome 1 open reading frame 27
  Uniprot ID: Q5SWX8
  ENSP ID: ENSP00000395084
MGRTYIVEETVGQYLSNINLQGKAFVSGLLIGQCSSQKDYVILATRTPPKEEQSENLKHPKAKLDNLDEEWATEHACQLMFAVEKSINRKRLWNFTEEEVSERVTLHICASTKKIFCRTYDIHDPKSSARPADWKYQSGLSSSWLSLECTVHINIHIPLSATSVSYTLEKNTKNGLTRWAKEIENGVYLINGQVKDEDCDLLEGQKKSSRGNTQATSHSFDVRVLTQLLLNSDHRSTATVQICSGSVNLKGAVKCRAYIHSSKPKVKDAVQAVKRDILNTVADRCEMLFEDLLLNEIPEKKDSEKEFHVLPYRVFVPLPGSTVMLCDYKFDDESAEEIRDHFMEMLDHTIQIEDLEIAEETNTACMSSSMNSQASLDNTDDEQPKQPIKTTMLLKIQQNIGVIAAFTVAVLAAGISFHYFSD

SEQ ID NO: 15455 - protein, 263 aa, Homo sapiens
  Payload ID: 3051
  Gene Symbol: C1orf35
  Gene Name: chromosome 1 open reading frame 35
  Uniprot ID: Q9BU76
  ENSP ID: ENSP00000272139
MFGSSRGGVRGGQDQFNWEDVKTDKQRENYLGNSLMAPVGRWQKGRDLTWYAKGRAPCAGPSREEELAAVREAEREALLAALGYKNVKKQPTGLSKEDFAEVCKREGGDPEEKGVDRLLGLGSASGSVGRVAMSREDKEAAKLGLSVFTHHRVESGGPGTSAASARRKPRAEDQTESSCESHRKSKKEKKKKKKRKHKKEKKKKDKEHRRPAEATSSPTSPERPRHHHHDSDSNSPCCKRRKRGHSGDRRSPSRRWHDRGSEA

SEQ ID NO: 15456 - protein, 219 aa, Homo sapiens
  Payload ID: 3052
  Gene Symbol: C1orf43
  Gene Name: chromosome 1 open reading frame 43
  Uniprot ID: Q9BWL3
  ENSP ID: ENSP00000271925
MASGSNWLSGVNVVLVMAYGSLDLKEEIDIRLSRVQDIKYEPQLLADDDARLLQLETQGNQSCYNYLYRMKALDAIRTSEIPFHSEGRHPRSLMGKNFRSYLLDLRNTSTPFKGVRKALIDTLLDGYETARYGTGVFGQNEYLRYQEALSELATAVKARIGSSQRHHQSAAKDLTQSPEVSPTTIQVTYLPSSQKSKRAKHFLELKSFKDNYNTLESTL

SEQ ID NO: 15457 - protein, 201 aa, Homo sapiens
  Payload ID: 3052
  Gene Symbol: C1orf43
  Gene Name: chromosome 1 open reading frame 43
  Uniprot ID: Q9BWL3
  ENSP ID: ENSP00000354496
MASGSNWLSGVNVVLVMAYGSLDLKEEIDIRLSRVQDIKYEPQLLADDDARLLQLETQGNQKIPFHSEGRHPRSLMGKNFRSYLLDLRNTSTPFKGVRKALIDTLLDGYETARYGTGVFGQNEYLRYQEALSELATAVKARIGSSQRHHQSAAKDLTQSPEVSPTTIQVTYLPSSQKSKRAKHFLELKSFKDNYNTLESTL

SEQ ID NO: 15458 - protein, 155 aa, Homo sapiens
  Payload ID: 3052
  Gene Symbol: C1orf43
  Gene Name: chromosome 1 open reading frame 43
  ENSP ID: ENSP00000357502
MASGSNWLSGVNVVLVMAYGSLDLKEEIDIRLSRVQDIKYEPQLLADDDARLLQLETQGNQSCYNYLYRMKALDAIRTSEIPFHSEGRHPRSLMGKNFRSYLLDLRNTSTPFKGVRKALIDTLLDGYETARYGTGVFGQNEYLRYQEALSELATA

SEQ ID NO: 15459 - protein, 189 aa, Homo sapiens
  Payload ID: 3052
  Gene Symbol: C1orf43
  Gene Name: chromosome 1 open reading frame 43
  Uniprot ID: Q9BWL3
  ENSP ID: ENSP00000357504
MASGSNWLSGVNVVLVMAYGSLVFVLLFIFVKRQIMRFAMKSRRGPHVPVGHNAPKDLKEEIDIRLSRVQDIKYEPQLLADDDARLLQLETQGNQSCYNYLYRMKALDAIRTSEIPFHSEGRHPRSLMGKNFRSYLLDLRNTSTPFKGVRKALIDTLLDGYETARYGTGVFGQNEYLRYQEALSELATA

SEQ ID NO: 15460 - protein, 235 aa, Homo sapiens
  Payload ID: 3052
  Gene Symbol: C1orf43
  Gene Name: chromosome 1 open reading frame 43
  ENSP ID: ENSP00000357505
MASGSNWLSGVNVVLVMAYGSLVFVLLFIFVKRQIMRFAMKSRRGPHVPVGHNAPKDLKEEIDIRLSRVQDIKYEPQLLADDDARLLQLETQGNQKIPFHSEGRHPRSLMGKNFRSYLLDLRNTSTPFKGVRKALIDTLLDGYETARYGTGVFGQNEYLRYQEALSELATAVKARIGSSQRHHQSAAKDLTQSPEVSPTTIQVTYLPSSQKSKRAKHFLELKSFKDNYNTLESTL

SEQ ID NO: 15461 - protein, 253 aa, Homo sapiens
  Payload ID: 3052
  Gene Symbol: C1orf43
  Gene Name: chromosome 1 open reading frame 43
  Uniprot ID: Q9BWL3
  ENSP ID: ENSP00000357507
MASGSNWLSGVNVVLVMAYGSLVFVLLFIFVKRQIMRFAMKSRRGPHVPVGHNAPKDLKEEIDIRLSRVQDIKYEPQLLADDDARLLQLETQGNQSCYNYLYRMKALDAIRTSEIPFHSEGRHPRSLMGKNFRSYLLDLRNTSTPFKGVRKALIDTLLDGYETARYGTGVFGQNEYLRYQEALSELATAVKARIGSSQRHHQSAAKDLTQSPEVSPTTIQVTYLPSSQKSKRAKHFLELKSFKDNYNTLESTL

SEQ ID NO: 15462 - protein, 199 aa, Homo sapiens
  Payload ID: 3053
  Gene Symbol: C1orf50
  Gene Name: chromosome 1 open reading frame 50
  Uniprot ID: Q9BV19
  ENSP ID: ENSP00000361603
MEDAAAPGRTEGVLERQGAPPAAGQGGALVELTPTPGGLALVSPYHTHRAGDPLDLVALAEQVQKADEFIRANATNKLTVIAEQIQHLQEQARKVLEDAHRDANLHHVACNIVKKPGNIYYLYKRESGQQYFSIISPKEWGTSCPHDFLGAYKLQHDLSWTPYEDIEKQDAKISMMDTLLSQSVALPPCTEPNFQGLTH

SEQ ID NO: 15463 - protein, 42 aa, Homo sapiens
  Payload ID: 3053
  Gene Symbol: C1orf50
  Gene Name: chromosome 1 open reading frame 50
  ENSP ID: ENSP00000473339
MEDAAAPGRTEGVLERQGAPPAAGQGGTGRCSQRCQPAPCSL

SEQ ID NO: 15464 - protein, 109 aa, Homo sapiens
  Payload ID: 3053
  Gene Symbol: C1orf50
  Gene Name: chromosome 1 open reading frame 50
  ENSP ID: ENSP00000473874
MEDAAAPGRTEGVLERQGAPPAAGQGGMRGGSQQGEVSSREAAGLGAPREADGGSSRLVFLGVCRRSPGGAHPDPRRPGPGEPLPHPPGRGPLRPRGARRAGAEVFSHL

SEQ ID NO: 15465 - protein, 167 aa, Homo sapiens
  Payload ID: 3054
  Gene Symbol: C1orf52
  Gene Name: chromosome 1 open reading frame 52
  Uniprot ID: Q8N6N3
  ENSP ID: ENSP00000345092
MAAEEKDPLSYFAAYGSSSSGSSDEEDNIEPEETSRRTPDPAKSAGGCRNKAEKRLPGPDELFRSVTRPAFLYNPLNKQIDWERHVVKAPEEPPKEFKIWKSNYVPPPETYTTEKKPPPPELDMAIKWSNIYEDNGDDAPQNAKKARLLPEGEETLESALEDLEIQN

SEQ ID NO: 15466 - protein, 182 aa, Homo sapiens
  Payload ID: 3054
  Gene Symbol: C1orf52
  Gene Name: chromosome 1 open reading frame 52
  Uniprot ID: Q8N6N3
  ENSP ID: ENSP00000419417
MAAEEKDPLSYFAAYGSSSSGSSDEEDNIEPEETSRRTPDPAKSAGGCRNKAEKRLPGPDELFRSVTRPAFLYNPLNKQIDWERHVVKAPEEPPKEFKIWKSNYVPPPETYTTEKKPPPPELDMAIKWSNIYEDNGDDAPQNAKKARLLPEGEETLESDDEKDEHTSKKRKVEPGEPAKKKK

SEQ ID NO: 15467 - protein, 145 aa, Homo sapiens
  Payload ID: 3055
  Gene Symbol: C1orf53
  Gene Name: chromosome 1 open reading frame 53
  Uniprot ID: Q5VUE5
  ENSP ID: ENSP00000356363
MAARQIWARTGAALCRQPSAAPPPAPLWVRAGFRQQLSLTLCPANEGNCGGSAPSTPGRPERAARPSVSEELTAAERQIAELHAAACAAGQLNYVDPATGYVVLTQIAHLQRGECCGSACRHCPYGQVNVKDPSKKKQFNSYFYV

SEQ ID NO: 15468 - protein, 82 aa, Homo sapiens
  Payload ID: 3055
  Gene Symbol: C1orf53
  Gene Name: chromosome 1 open reading frame 53
  ENSP ID: ENSP00000396800
  MOD_RES (1)..(1): Any amino acid
XANEGNCGGSAPSTPGRPERAARPSAGQLNYVDPATGYVVLTQIAHLQRGECCGSACRHCPYGQVNVKDPSKKKQFNSYFYV

SEQ ID NO: 15469 - protein, 121 aa, Homo sapiens
  Payload ID: 3056
  Gene Symbol: C1orf54
  Gene Name: chromosome 1 open reading frame 54
  ENSP ID: ENSP00000358094
MDVLFVAIFAVPLILGQEYEDEERLGEDEYYQVVYYYTVTPSYDDFSADFTIDYSIFESEDRLNRLDKDITEAIETTISLETARADHPKPVTVKPVTTEPVEEGCYDSLDGSLARGNWKIK

SEQ ID NO: 15470 - protein, 131 aa, Homo sapiens
  Payload ID: 3056
  Gene Symbol: C1orf54
  Gene Name: chromosome 1 open reading frame 54
  Uniprot ID: Q8WWF1
  ENSP ID: ENSP00000358095
MDVLFVAIFAVPLILGQEYEDEERLGEDEYYQVVYYYTVTPSYDDFSADFTIDYSIFESEDRLNRLDKDITEAIETTISLETARADHPKPVTVKPVTTEPSPDLNDAVSSLRSPIPLLLSCAFVQVGMYFM

SEQ ID NO: 15471 - protein, 131 aa, Homo sapiens; identical to SEQ ID NO: 15470
  Payload ID: 3056
  Gene Symbol: C1orf54
  Gene Name: chromosome 1 open reading frame 54
  Uniprot ID: Q8WWF1
  ENSP ID: ENSP00000358098

SEQ ID NO: 15472 - protein, 341 aa, Homo sapiens
  Payload ID: 3057
  Gene Symbol: C1orf56
  Gene Name: chromosome 1 open reading frame 56
  Uniprot ID: Q9BUN1
  ENSP ID: ENSP00000357922
MVPAAGALLWVLLLNLGPRAAGAQGLTQTPTEMQRVSLRFGGPMTRSYRSTARTGLPRKTRIILEDENDAMADADRLAGPAAAELLAATVSTGFSRSSAINEEDGSSEEGVVINAGKDSTSRELPSATPNTAGSSSTRFIANSQEPEIRLTSSLPRSPGRSTEDLPGSQATLSQWSTPGSTPSRWPSPSPTAMPSPEDLRLVLMPWGPWHCHCKSGTMSRSRSGKLHGLSGRLRVGALSQLRTEHKPCTYQQCPCNRLREECPLDTSLCTDTNCASQSTTSTRTTTTPFPTIHLRSSPSLPPASPCPALAFWKRVRIGLEDIWNSLSSVFTEMQPIDRNQR

SEQ ID NO: 15473 - protein, 140 aa, Homo sapiens
  Payload ID: 3058
  Gene Symbol: C1orf61
  Gene Name: chromosome 1 open reading frame 61
  ENSP ID: ENSP00000310651
GPPEQSLLLTEAWSWASKKKQPHLFSGVIVGGHLWLLGFSPGAGGFCTTLPPSFLRVDDRATSSTTDSSRAPSSPRPPGSTSHCGISTRCTERCLCVLPLRTSQVPDVMAPQHDQEPKRRMYFIWLGWIPSDKPSQLTER

SEQ ID NO: 15474 - protein, 169 aa, Homo sapiens
  Payload ID: 3058
  Gene Symbol: C1orf61
  Gene Name: chromosome 1 open reading frame 61
  ENSP ID: ENSP00000350661
PPEQSLLLTEAWSWASKKKQPHLFSGVIVGGHLWLLGFSPGAGGFCTTLPPSFLRVDDRATSSTTDSSRAPSSPRPPGSTSHCGISTRCTERCLCVLPLRTSQVPDVMAPQHDQEKFHDLAYSCLGKSFSMSNQDLYGYSTSSLALGLAWLSWETKKKNVLHLVGLDSL

SEQ ID NO: 15475 - protein, 188 aa, Homo sapiens
  Payload ID: 3058
  Gene Symbol: C1orf61
  Gene Name: chromosome 1 open reading frame 61
  ENSP ID: ENSP00000357225
  MOD_RES (1)..(1): Any amino acid
XAQRGPGKAGLTGGRERLERGARAARTDQHQRIQEEERDLTGSGDISPPQHPSRHSFSPGAGGFCTTLPPSFLRVDDRATSSTTDSSRAPSSPRPPGSTSHCGISTRCTERCLCVLPLRTSQVPDVMAPQHDQEKFHDLAYSCLGKSFSMSNQDLYGYSTSSLALGLAWLSWETKKKNVLHLVGLDSL

SEQ ID NO: 15476 - protein, 156 aa, Homo sapiens
  Payload ID: 3058
  Gene Symbol: C1orf61
  Gene Name: chromosome 1 open reading frame 61
  Uniprot ID: Q13536
  ENSP ID: ENSP00000357226
MFLTEDLITFNLRNFLLFQLWESSFSPGAGGFCTTLPPSFLRVDDRATSSTTDSSRAPSSPRPPGSTSHCGISTRCTERCLCVLPLRTSQVPDVMAPQHDQEKFHDLAYSCLGKSFSMSNQDLYGYSTSSLALGLAWLSWETKKKNVLHLVGLDSL

SEQ ID NO: 15477 - protein, 66 aa, Homo sapiens
  Payload ID: 3058
  Gene Symbol: C1orf61
  Gene Name: chromosome 1 open reading frame 61
  ENSP ID: ENSP00000383776
  MOD_RES (1)..(1): Any amino acid
XQPQGPPEQSLLLTEAWSWASKKKQPHLFSGVIVGGHLWLLGPKRRMYFIWLGWIPSDKPSQLTER

SEQ ID NO: 15478 - protein, 156 aa, Homo sapiens; identical to SEQ ID NO: 15476
  Payload ID: 3058
  Gene Symbol: C1orf61
  Gene Name: chromosome 1 open reading frame 61
  Uniprot ID: Q13536
  ENSP ID: ENSP00000479346

SEQ ID NO: 15479 - protein, 169 aa, Homo sapiens
  Payload ID: 3059
  Gene Symbol: C1orf64
  Gene Name: chromosome 1 open reading frame 64
  Uniprot ID: Q8NEQ6
  ENSP ID: ENSP00000332162
MAPSEDPRDWRANLKGTIRETGLETSSGGKLAGHQKTVPTAHLTFVIDCTHGKQLSLAATASPPQAPSPNRGLVTPPMKTYIVFCGENWPHLTRVTPMGGGCLAQARATLPLCRGSVASASFPVSPLCPQEVPEAKGKPVKAAPVRSSTWGTVKDSLKALSSCVCGQAD

SEQ ID NO: 15480 - protein, 250 aa, Homo sapiens
  Payload ID: 3060
  Gene Symbol: C1orf68
  Gene Name: chromosome 1 open reading frame 68
  Uniprot ID: Q5T750
  ENSP ID: ENSP00000357764
MCDQQKQPQFPPSCVKGSGLGAGQGSNGASVKCPVPCQTQTVCVTGPAPCPTQTYVKYQVPCQTQTYVKCPAPCQRTYVKYPTPCQTYVKCPAPCQTTYVKCPTPCQTYVKCPAPCQMTYIKSPAPCQTQTCYVQGASPCQSYYVQAPASGSTSQYCVTDPCSAPCSTSYCCLAPRTFGVSPLRRWIQRPQNCNTGSSGCCENSGSSGCCGSGGCGCSCGCGSSGCCCLGIIPMRSRGPACCDHEDDCCC

SEQ ID NO: 15481 - protein, 269 aa, Homo sapiens
  Payload ID: 3061
  Gene Symbol: C1orf74
  Gene Name: chromosome 1 open reading frame 74
  Uniprot ID: Q96LT6
  ENSP ID: ENSP00000294811
MLLLDLMSSPSPQLLVAAAQQTLGMGKRRSPPQAICLHLAGEVLAVARGLKPAVLYDCNCAGASELQSYLEELKGLGFLTFGLHILEIGENSLIVSPEHVCQHLEQVLLGTIAFVDVSSCQRHPSVCSLDQLQDLKALVAEIITHLQGLQRDLSLAVSYSRLHSSDWNLCTVFGILLGYPVPYTFHLNQGDDNCLALTPLRVFTARISWLLGQPPILLYSFSVPESLFPGLRDILNTWEKDLRTRFRTQNDFADLSISSEIVTLPAVAL

SEQ ID NO: 15482 - protein, 546 aa, Homo sapiens
  Payload ID: 3062
  Gene Symbol: C1orf87
  Gene Name: chromosome 1 open reading frame 87
  Uniprot ID: Q8N0U7
  ENSP ID: ENSP00000360244
MSSAWKTPRGSDAMPEIMVKIIGSKHFQYLVEKPKIKENDSLKTETQTMHQKPMTDNARQMSRDTPVPINFTDQQTTDNPDDVKEKKHPENNQKSENNQKLLTGANSSRFLDGNIPSQANVHCSSVPTGDQSLSYVHGIPRRKLRDWSLEQMVRGSSDQPEDIGQSPSGTTNEDAFLLALVRRELKSRPLSSNLLEKLQKELKILDPISSGFLLQSQLSRLFLKHEVPLQLPTVKILCQRFSKRGSPEMVNYEKLLWFLNSAASDYPQQNKAAADLRKTESHGTHSQSTPPQHSSSQPEVNRSLLEILKMALRTTNGRLNIDNLNLSFRKEDRSFSGCLPLPKVRAICGKHGLYLTLSLLETLLNHQDLGYQNEIKWQNFVEMLTRASSDLLSDLPTGKNEKKAPAPPMEPEVPEMSQSKTEHMKTPEEELQPESSPAETSACKDPLKPLKIRPVSQPFVNPAVKNKAEECETWIDRFRKLENALYLCDLSNTGVLEKERARRLIHNYNLIYNLSLSPQKIDQALRRFRSGENMLLEPALRYLKEL

SEQ ID NO: 15483 - protein, 317 aa, Homo sapiens
  Payload ID: 3062
  Gene Symbol: C1orf87
  Gene Name: chromosome 1 open reading frame 87
  ENSP ID: ENSP00000389432
MSSAWKTPRGSDAMPEIMVKIIGSKHFQYLVEKPKIKENDSLKTETQTMHQKPMTDNARQMSRDTPVPINFTDQQTTDNPDDVKEKKHPENNQKSENNQKLLTGANSSRFLDGNVRAICGKHGLYLTLSLLETLLNHQDLGYQNEIKWQNFVEMLTRASSDLLSDLPTGKNEKKAPAPPMEPEVPEMSQSKTEHMKTPEEELQPESSPAETSACKDPLKPLKIRPVSQPFVNPAVKNKAEECETWIDRFRKLENALYLCDLSNTGVLEKERARRLIHNYNLIYNLSLSPQKIDQALRRFRSGENMLLEPALRYLKEL

SEQ ID NO: 15484 - protein, 408 aa, Homo sapiens
  Payload ID: 3063
  Gene Symbol: C1orf94
  Gene Name: chromosome 1 open reading frame 94
  Uniprot ID: Q6P1W5
  ENSP ID: ENSP00000362472
MPVISSRQDCDSATSTVTDILCAAEVKSSKGTEDRGRILGDSNLQVSKLLSQFPLKSTETSKVPDNKNVLDKTRVTKDFLQDNLFSGPGPKEPTGLSPFLLLPPRPPPARPDKLPELPAQKRQLPVFAKICSKPKADPAVERHHLMEWSPGTKEPKKGQGSLFLSQWPQSQKDACGEEGCCDAVGTASLTLPPKKPTCPAEKNLLYEFLGATKNPSGQPRLRNKVEVDGPELKFNAPVTVADKNNPKYTGNVFTPHFPTAMTSATLNQPLWLNLNYPPPPVFTNHSTFLQYQGLYPQQAARMPYQQALHPQLGCYSQQVMPYNPQQMGQQIFRSSYTPLLSYIPFVQPNYPYPQRTPPKMSANPRDPPLMAGDGPQYLFPQGYGFGSTSGGPLMHSPYFSSSGNGINF

SEQ ID NO: 15485 - protein, 598 aa, Homo sapiens
  Payload ID: 3063
  Gene Symbol: C1orf94
  Gene Name: chromosome 1 open reading frame 94
  Uniprot ID: Q6P1W5
  ENSP ID: ENSP00000435634
MRGGGGCVLALGGQRGFQKERRRMASGNGLPSSSALVAKGPCALGPFPRYIWIHQDTPQDSLDKTCHEIWKRVQGLPEASQPWTSMEQLSVPVVGTLRGNELSFQEEALELSSGKDEISLLVEQEFLSLTKEHSILVEESSGELEVPGSSPEGTRELAPCILAPPLVAGSNERPRASIIVGDKLLKQKVAMPVISSRQDCDSATSTVTDILCAAEVKSSKGTEDRGRILGDSNLQVSKLLSQFPLKSTETSKVPDNKNVLDKTRVTKDFLQDNLFSGPGPKEPTGLSPFLLLPPRPPPARPDKLPELPAQKRQLPVFAKICSKPKADPAVERHHLMEWSPGTKEPKKGQGSLFLSQWPQSQKDACGEEGCCDAVGTASLTLPPKKPTCPAEKNLLYEFLGATKNPSGQPRLRNKVEVDGPELKFNAPVTVADKNNPKYTGNVFTPHFPTAMTSATLNQPLWLNLNYPPPPVFTNHSTFLQYQGLYPQQAARMPYQQALHPQLGCYSQQVMPYNPQQMGQQIFRSSYTPLLSYIPFVQPNYPYPQRTPPKMSANPRDPPLMAGDGPQYLFPQGYGFGSTSGGPLMHSPYFSSSGNGINF

SEQ ID NO: 15486 - protein, 141 aa, Homo sapiens
  Payload ID: 3064
  Gene Symbol: C1orf95
  Gene Name: chromosome 1 open reading frame 95
  Uniprot ID: Q69YW2
  ENSP ID: ENSP00000355752
MEPSHKDAETAAAAAAVAAADPRGASSSSGVVVQVREKKGPLRAAIPYMPFPVAVICLFLNTFVPGLGTFVSAFTVLCGARTDLPDRHVCCVFWLNIAAALIQILTAIVMVGWIMSIFWGMDMVILAISQGYKEQGIPQQL

SEQ ID NO: 15487 - protein, 141 aa, Homo sapiens [sequence omitted]

SEQ ID NO: 15488 - protein, 212 aa, Homo sapiens
  Payload ID: 3065
  Gene Symbol: C10orf10
  Gene Name: chromosome 10 open reading frame 10
  Uniprot ID: Q9NTK1
  ENSP ID: ENSP00000298295
MRSRLLLSVAHLPTIRETTEEMLLGGPGQEPPPSPSLDDYVRSISRLAQPTSVLDKATAQGQPRPPHRPAQACRKGRPAVSLRDITARFSGQQPTLPMADTVDPLDWLFGESQEKQPSQRDLPRRTGPSAGLWGPHRQMDSSKPMGAPRGRLCEARMPGHSLARPPQDGQQSSDLRSWTFGQSAQAMASRHRPRPSSVLRTLYSHLPVIHEL

SEQ ID NO: 15489 - protein, 84 aa, Homo sapiens
  Payload ID: 3065
  Gene Symbol: C10orf10
  Gene Name: chromosome 10 open reading frame 10
  ENSP ID: ENSP00000414494
MRSRLLLSVAHLPTIRETTEEMLLGGPGQEPPPSPSLDDYVRSISRLAQPTSVLDKATAQGQPRPPHRPAQACRKGRPAVSLRD

SEQ ID NO: 15490 - protein, 133 aa, Homo sapiens
  Payload ID: 3066
  Gene Symbol: C10orf105
  Gene Name: chromosome 10 open reading frame 105
  Uniprot ID: Q8TEF2
  ENSP ID: ENSP00000381766
MSTEGPSLASSPAISPLAFLSAPVTPGTLAEATDPLPMLIALACIFLLLATCLLFMTLCKPAALDPSRRRAHECMPHHPGSPSEPQLRLWKRLGSLRLSLHSFRHGRPTVPRQPLPGPEDNRSHCDYMESTKM

SEQ ID NO: 15491 - protein, 133 aa, Homo sapiens; identical to SEQ ID NO: 15490
  Payload ID: 3066
  Gene Symbol: C10orf105
  Gene Name: chromosome 10 open reading frame 105
  Uniprot ID: Q8TEF2
  ENSP ID: ENSP00000403151

SEQ ID NO: 15492 - protein, 208 aa, Homo sapiens
  Payload ID: 3067
  Gene Symbol: C10orf107
  Gene Name: chromosome 10 open reading frame 107
  Uniprot ID: Q8IVU9
  ENSP ID: ENSP00000328698
MDFSIIQYSKFMTLLAMSLQNLKTLHMSLEESIKWLGEVMAEIGPTHSQKSEDWNIFDVKQANAIIDYLKISLFQHYKLYEFMFYSAREEIVIGTEQVIEVVKSACGPFPNPLEEGISFDIYSTFIEPPTILDTEMKRLDQEQGPEESQPETDTSDMDPLVGFTIEDVKSVLDQVTDDILIGIQTEINEKLQIQEEAFNARIEKLKKA

SEQ ID NO: 15493 - protein, 69 aa, Homo sapiens
  Payload ID: 3067
  Gene Symbol: C10orf107
  Gene Name: chromosome 10 open reading frame 107
  ENSP ID: ENSP00000374290
MSLEESIKWLGEVMAEIGPTHSQKSEDWNIFDVKQANAIIDYLKISLFQHYKLYEFMFYSAREEIVIGT

SEQ ID NO: 15494 - protein, 198 aa, Homo sapiens
  Payload ID: 3068
  Gene Symbol: C10orf11
  Gene Name: chromosome 10 open reading frame 11
  Uniprot ID: Q9H2I8
  ENSP ID: ENSP00000361577
MEKYLSLSGNHSSNKRSLEGLSAFRSLEELILDNNQLGDDLVLPGLPRLHTLTLNKNRITDLENLLDHLAEVTPALEYLSLLGNVACPNELVSLEKDEEDYKRYRCFVLYKLPNLKFLDAQKVTRQEREEALVRGVFMKVVKPKASSEDVASSPERHYTPLPSASRELTSHQGVLGKCRYVYYGKNSEGNRFIRDDQL

SEQ ID NO: 15495 - protein, 55 aa, Homo sapiens
  Payload ID: 3068
  Gene Symbol: C10orf11
  Gene Name: chromosome 10 open reading frame 11
  ENSP ID: ENSP00000472558
MASSEDVASSPERHYTPLPSASRELTSHQGVLGKCRYVYYGKNSEGNRFIRDDQL

SEQ ID NO: 15496 - protein, 226 aa, Homo sapiens
  Payload ID: 3068
  Gene Symbol: C10orf11
  Gene Name: chromosome 10 open reading frame 11
  ENSP ID: ENSP00000480240
MAGLVVRGTQVSYIGQDCREIPEHLGRDCGHFAKRLDLSFNLLRSLEGLSAFRSLEELILDNNQLGDDLVLPGLPRLHTLTLNKNRITDLENLLDHLAEVTPALEYLSLLGNVACPNELVSLEKDEEDYKRYRCFVLYKLPNLKFLDAQKVTRQEREEALVRGVFMKVVKPKASSEDVASSPERHYTPLPSASRELTSHQGVLGKCRYVYYGKNSEGNRFIRDDQL

SEQ ID NO: 15497 - protein, 131 aa, Homo sapiens [sequence omitted]

SEQ ID NO: 15498 - protein, 155 aa, Homo sapiens
  Payload ID: 3069
  Gene Symbol: C10orf113
  Gene Name: chromosome 10 open reading frame 113
  Uniprot ID: Q5VZT2
  ENSP ID: ENSP00000433646
MAKSERRIYSMESMAPEISEDIGCPLAYMRESVCALLINQSFFSCVAEMYIPDMNRPGKAERRAEKGLRPPRKLVGETRRLQSWPTLARWLRRVSFSLYKPPIQAAPEPDPGNWAKSPRLSLGPEGITKGKHGFKFQGIKEKFNVSKKVLKMTFL

SEQ ID NO: 15499 - protein, 79 aa, Homo sapiens
  Payload ID: 3069
  Gene Symbol: C10orf113
  Gene Name: chromosome 10 open reading frame 113
  Uniprot ID: Q5VZT2
  ENSP ID: ENSP00000434089
MAKSERRIYSMESMAPEISEDIGCPLAYMRESVCALLINQSFFSCVAEMYIPDMNRLEERTAALYPIGLVRQNGEPRRA

SEQ ID NO: 15500 - protein, 1247 aa, Homo sapiens
  Payload ID: 3070
  Gene Symbol: C10orf12
  Gene Name: chromosome 10 open reading frame 12
  Uniprot ID: Q8N655
  ENSP ID: ENSP00000286067
MQSSALVESLITVKMAAENSEEGNTCIIPQRNLFKALSEEAWNSGFMGNSSRTADKENTLQCPKTPLRQDLEANEQDARPKQENHLHSLGRNKVGYHLHPSDKGQFDHSKDGWLGPGPMPAVHKAANGHSRTKMISTSIKTARKSKRASGLRINDYDNQCDVVYISQPITECHFENQKSILSSRKTARKSTRGYFFNGDCCELPTVRTLARNLHSQEKASCSALASEAVFTPKQTLTIPAPRHTVDVQLPREDNPEEPSKEITSHEEGGGDVSPRKEPQEPEVCPTKIKPNLSSSPRSEETTASSLVWPLPAHLPEEDLPEGGSTVSAPTASGMSSPEHNQPPVALLDTEEMSVPQDCHLLPSTESFSGGVSEDVISRPHSPPEIVSREESPQCSENQSSPMGLEPPMSLGKAEDNQSISAEVESGDTQELNVDPLLKESSTFTDENPSETEESEAAGGIGKLEGEDGDVKCLSEKDTYDTSIDSLEENLDKKKKGKKFPEASDRCLRSQLSDSSSADRCLRNQSSDSSSACLEIKVPKNPSAKRSKKEGHPGGTTPKGLLPDSFHTETLEDTEKPSVNERPSEKDAEQEGEGGGIITRQTLKNMLDKEVKELRGEIFPSRDPITTAGQPLPGERLEIYVQSKMDEKNAHIPSESIACKRDPEQAKEEPGHIPTQHVEEAVNEVDNENTQQKDDESDAPCSSLGLSSSGSGDAARAPKSVPRPKRLTSSTYNLRHAHSLGSLDASKVTSEKEAAQVNPIMPKENGASESGDPLDEDDVDTVVDEQPKFMEWCAEEENQELIANFNAQYMKVQKGWIQLEKEGQPTPRARNKSDKLKEIWKSKKRSRKCRSSLESQKCSPVQMLFMTNFKLSNVCKWFLETTETRSLVIVKKLNTRLPGDVPPVKHPLQKYAPSSLYPSSLQAERLKKHLKKFPGATPAKNNWKMQKLWAKFRENPDQVEPEDGSDVSPGPNSEDSIEEVKEDRNSHPPANLPTPASTRILRKYSNIRGKLRAQQRLIKNEKMECPDALAVESKPSRKSVCINPLMSPKLALQVDADGFPVKPKSTEGMKGRKGKQVSEILPKAEVQSKRKRTEGSSPPDSKNKGPTVKASKEKHADGATKTPAAKRPAARDRSSQPPKKTSLKENKVKIPKKSAGKSCPPSRKEKENTNKRPSQSIASETLTKPAKQKGAGESSSRPQKATNRKQSSGKTRARPSTKTPESSAAQRKRKLKAKLDCSHSKRRRLDAK

SEQ ID NO: 15501 - protein, 335 aa, Homo sapiens
  Payload ID: 3071
  Gene Symbol: C10orf120
  Gene Name: chromosome 10 open reading frame 120
  Uniprot ID: Q5SQS8
  ENSP ID: ENSP00000331012
MIREWKNDCQRIEKQRASDTMVQERKNEKPVRIFNTNSSFQDQAPTCCQEDLSSASPLRIWSKFYRSDPRIALGKYSPLEKEILRLGGIHTIAARRLLAYKQEEECRMLKELQLLSPDYKQAMEYKKKHSSPCAICVPLEKIWTAKVIAPLEAFKMPQREQVNVSKHIERMRLARALGNHQPLPYIERFTRSSFLSGVGLGPMAKNKARRKEDNYDTHNCDDANQDKKEEAEGKNTKRREIKMNVVFKSKEPKKCLTYHGNDRKSFLPAKKPERSIAGLTNRNLFCISEFPGDLMLMNQDFISRRDHFSDLVKTYSLEEESIWKERMRKATPYHY

SEQ ID NO: 15502 - protein, 159 aa, Homo sapiens
  Payload ID: 3071
  Gene Symbol: C10orf120
  Gene Name: chromosome 10 open reading frame 120
  ENSP ID: ENSP00000410278
  MOD_RES (1)..(1): Any amino acid
XCQRIEKQRASDTMVQERKNEKPVRIFNTNSSFQDQAPTCCQEDLSSASPLRIWSKFYRSDPRIALGKYSPLEKEILRLGGIHTIAARRLLAYKQEEECRMLKELQLLSPDYKQAMEYKKKHSSPCAICVPLEKIWTAKVIAPLEAFKMPQREQNSLVT

SEQ ID NO: 15503 - protein, 159 aa, Homo sapiens
  Payload ID: 3072
  Gene Symbol: C10orf128
  Gene Name: chromosome 10 open reading frame 128
  Uniprot ID: Q5T292
  ENSP ID: ENSP00000363263
MNLGVSMLRILFLLDVGGAQVLATGKTPGAEIDFKYALIGTAVGVAISAGFLALKICMIRRHLFDDDSSDLKSTPGGLSDTIPLKKRAPRAHVLRDGPALGPLHLLFSVIGMLFARKLQASTLFSFKSLLQCHHCIMEGLFKAKPQFLQKVSCKSDHLS

SEQ ID NO: 15504 - protein, 140 aa, Homo sapiens
  Payload ID: 3072
  Gene Symbol: C10orf128
  Gene Name: chromosome 10 open reading frame 128
  ENSP ID: ENSP00000363266
MLRILFLLDVGGAQVLATGKTPGAEIDFKYALIGTAVGVAISAGFLALKICMIRRHLFDDDSSDLKSTPGGLSDTIPLKKRAPRKLQASTLFSFKSLLQCHHCIMEGLFKAKPQFLQKHLARSVQIHQLQKVKSFPKYAY

SEQ ID NO: 15505 - protein, 129 aa, Homo sapiens
  Payload ID: 3072
  Gene Symbol: C10orf128
  Gene Name: chromosome 10 open reading frame 128
  Uniprot ID: Q5T292
  ENSP ID: ENSP00000363268
MNLGVSMLRILFLLDVGGAQVLATGKTPGAEIDFKYALIGTAVGVAISAGFLALKICMIRRHLFDDDSSDLKSTPGGLSDTIPLKKRAPRKLQASTLFSFKSLLQCHHCIMEGLFKAKPQFLQKRCTGD

SEQ ID NO: 15506 - protein, 115 aa, Homo sapiens
  Payload ID: 3072
  Gene Symbol: C10orf128
  Gene Name: chromosome 10 open reading frame 128
  ENSP ID: ENSP00000395067
RILFLLDVGGAQVLATGKTPGAEIDFKYALIGTAVGVAISAGFLALKICMIRRHLFDDDSSDLKSTPGGLSGETTISPKASGQICANSPTTESEKFPKICLLTSRNDFSFCHQSG

SEQ ID NO: 15507 - protein, 105 aa, Homo sapiens
  Payload ID: 3072
  Gene Symbol: C10orf128
  Gene Name: chromosome 10 open reading frame 128
  Uniprot ID: Q5T292
  ENSP ID: ENSP00000417246
MNLGVSMLRILFLLDVGGAQVLATGKTPGAEIDFKYALIGTAVGVAISAGFLALKICMIRRHLFDDDSSDLKSTPGGLSDTIPLKKRAPRRNHNFSKRDAQVIEL

SEQ ID NO: 15508 - protein, 143 aa, Homo sapiens
  Payload ID: 3072
  Gene Symbol: C10orf128
  Gene Name: chromosome 10 open reading frame 128
  ENSP ID: ENSP00000432859
MGQVACHPKKRGQPLLRPRARAAWTTGVVQEGRMRDVGGAQVLATGKTPGAEIDFKYALIGTAVGVAISAGFLALKICMIRRHLFDDDSSDLKSTPGGLSGEGCGARAWLCPTQRGTEGHSVMLATARMNPQAQSPTGCKGRQ

SEQ ID NO: 15509 - protein, 176 aa, Homo sapiens
  Payload ID: 3073
  Gene Symbol: C10orf131
  Gene Name: chromosome 10 open reading frame 131
  Uniprot ID: A6NCD4
  ENSP ID: ENSP00000411850
MGVQMSEEMDNITAEEIIDKHLQKDLDAEENQNVAKTLRGKVREKLKISKINKGEKSSTEQLIDSEIHQRSKLSPQTEVSLDESLSFFILSGEEGSALGKSSEQRPVNRSYPKCFSLGVNLQNVAESEEEEFMKEFILTDILKVKAADYEDDQEQIKKQKANIFVPSSSPGNILSQ

SEQ ID NO: 15510 - protein, 61 aa, Homo sapiens
  Payload ID: 3073
  Gene Symbol: C10orf131
  Gene Name: chromosome 10 open reading frame 131
  ENSP ID: ENSP00000473537
MGVQMSEEMDNITAEEIIDKHLQKDLDAEENQNVAKTLRGKVREKLKISKINKGEKSSTEQ

SEQ ID NO: 15511 - protein, 176 aa, Homo sapiens [sequence omitted]

SEQ ID NO: 15512 - protein, 130 aa, Homo sapiens
  Payload ID: 3074
  Gene Symbol: C10orf142
  Gene Name: chromosome 10 open reading frame 142
  Uniprot ID: B7Z368
  ENSP ID: ENSP00000479444
MRMYSSDAHERPPSPSLGTTPPHPLPPTGSPRPRQDSAAGNSEEREPRGLRRASGVGSSCKRPTVCMGRQQGLPFCTVCGYRCSSPERTRGRCAVGKVRVAGGGGAPGGGAGMRCCGCRERNINKELELF

SEQ ID NO: 15513 - protein, 270 aa, Homo sapiens
  Payload ID: 3074
  Gene Symbol: C10orf142
  Gene Name: chromosome 10 open reading frame 142
  ENSP ID: ENSP00000488153
MRMYSSDAHERPPSPSLGTTPPHPLPPTGSPRPRQDSAAGNSEEREPRGLRRASGVGSCKRPTVCMGRQQGLPFCTVCGYRCSSPERTRGRCAVGKVRVAGGGGAPGGGAGMRCCGCRERSRGRNPSLPPNCEGAPRGGRAGSPGGRNRGAWSLRVAGSRGVLGGERPQPALPAHCEVAHRLCSRPSLSPGLQAVSIFARWILYGFIYSESGSTNEHSERKRVFGGVERFPSRCPPEGPLKGDLKPSFQLGHPFFFFLSFRNINKELELF

SEQ ID NO: 15514 - protein, 684 aa, Homo sapiens
  Payload ID: 3075
  Gene Symbol: C10orf2
  Gene Name: chromosome 10 open reading frame 2
  Uniprot ID: Q96RR1
  ENSP ID: ENSP00000309595
MWVLLRSGYPLRILLPLRGEWMGRRGLPRNLAPGPPRRRYRKETLQALDMPVLPVTATEIRQYLRGHGIPFQDGHSCLRALSPFAESSQLKGQTGVTTSFSLFIDKTTGHFLCMTSLAEGSWEDFQASVEGRGDGAREGFLLSKAPEFEDSEEVRRIWNRAIPLWELPDQEEVQLADTMFGLTKVTDDTLKRFSVRYLRPARSLVFPWFSPGGSGLRGLKLLEAKCQGDGVSYEETTIPRPSAYHNLFGLPLISRRDAEVVLTSRELDSLALNQSTGLPTLTLPRGTTCLPPALLPYLEQFRRIVFWLGDDLRSWEAAKLFARKLNPKRCFLVRPGDQQPRPLEALNGGFNLSRILRTALPAWHKSIVSFRQLREEVLGELSNVEQAAGLRWSRFPDLNRILKGHRKGELTVFTGPTGSGKTTFISEYALDLCSQGVNTLWGSFEISNVRLARVMLTQFAEGRLEDQLDKYDHWADRFEDLPLYFMTFHGQQSIRTVIDTMQHAVYVYDICHVIIDNLQFMMGHEQLSTDRIAAQDYIIGVFRKFATDNNCHVTLVIHPRKEDDDKELQTASIFGSAKASQEADNVLILQDRKLVTGPGKRYLQVSKNRFDGDVGVFPLEFNKNSLTFSIPPKNKARLKKIKDDTGPVAKKPSSGKKGATTQNSEICSGQAPTPDQPDTSKRSK

SEQ ID NO: 15515 - protein, 582 aa, Homo sapiens
  Payload ID: 3075
  Gene Symbol: C10orf2
  Gene Name: chromosome 10 open reading frame 2
  Uniprot ID: Q96RR1
  ENSP ID: ENSP00000359248
MWVLLRSGYPLRILLPLRGEWMGRRGLPRNLAPGPPRRRYRKETLQALDMPVLPVTATEIRQYLRGHGIPFQDGHSCLRALSPFAESSQLKGQTGVTTSFSLFIDKTTGHFLCMTSLAEGSWEDFQASVEGRGDGAREGFLLSKAPEFEDSEEVRRIWNRAIPLWELPDQEEVQLADTMFGLTKVTDDTLKRFSVRYLRPARSLVFPWFSPGGSGLRGLKLLEAKCQGDGVSYEETTIPRPSAYHNLFGLPLISRRDAEVVLTSRELDSLALNQSTGLPTLTLPRGTTCLPPALLPYLEQFRRIVFWLGDDLRSWEAAKLFARKLNPKRCFLVRPGDQQPRPLEALNGGFNLSRILRTALPAWHKSIVSFRQLREEVLGELSNVEQAAGLRWSRFPDLNRILKGHRKGELTVFTGPTGSGKTTFISEYALDLCSQGVNTLWGSFEISNVRLARVMLTQFAEGRLEDQLDKYDHWADRFEDLPLYFMTFHGQQSIRTVIDTMQHAVYVYDICHVIIDNLQFMMGHEQLSTDRIAAQDYIIGVFRKFATDNNCHVTLVIHPRKEDDDKELQTASIFGSAKVSGL

SEQ ID NO: 15516 - protein, 121 aa, Homo sapiens
  Payload ID: 3076
  Gene Symbol: C10orf35
  Gene Name: chromosome 10 open reading frame 35
  Uniprot ID: Q96D05
  ENSP ID: ENSP00000362376
MVRILANGEIVQDDDPRVRTTTQPPRGSIPRQSFFNRGHGAPPGGPGPRQQQAGARLGAAQSPFNDLNRQLVNMGFPQWHLGNHAVEPVTSILLLFLLMMLGVRGLLLVGLVYLVSHLSQR

SEQ ID NO: 15517 - protein, 103 aa, Homo sapiens
  Payload ID: 3076
  Gene Symbol: C10orf35
  Gene Name: chromosome 10 open reading frame 35
  ENSP ID: ENSP00000398621
MSPVLSGIHSIYSAWVTSVNITDCKPPSISGAAHQGPTAPGRMVRILANGEIVQDDDPRVRTTTQPPRGSIPRQSFFNRGHGAPPGGPGPRQQQAGARLGAAQ

SEQ ID NO: 15518 - protein, 93 aa, Homo sapiens
  Payload ID: 3077
  Gene Symbol: C10orf53
  Gene Name: chromosome 10 open reading frame 53
  Uniprot ID: Q8N6V4
  ENSP ID: ENSP00000363225
MPKNAVVILRYGPYSAAGLPVEHHTFRLQGLQAVLAIDGHEVILEKIEDWNVVELMVNEEVIFHCNIKDLEFGGDGKLDPLCEKARIAVLNAY

SEQ ID NO: 15519 - protein, 157 aa, Homo sapiens
  Payload ID: 3077
  Gene Symbol: C10orf53
  Gene Name: chromosome 10 open reading frame 53
  Uniprot ID: Q8N6V4
  ENSP ID: ENSP00000363226
MPKNAVVILRYGPYSAAGLPVEHHTFRLQGLQAVLAIDGHEVILEKIEDWNVVELMVNEEVIFHCNIKDLEFGKLTPSSDKRTTSSSRLTFHQLSSPCRMKVSPLQQFPQKTQDLTCTVLAQIGSCIHFQTNLCDLGWPGLDHMLISGLEKRGTQPY

SEQ ID NO: 15520 - protein, 93 aa, Homo sapiens
  Payload ID: 3077
  Gene Symbol: C10orf53
  Gene Name: chromosome 10 open reading frame 53
  Uniprot ID: Q8N6V4
  ENSP ID: ENSP00000363227
MPKNAVVILRYGPYSAAGLPVEHHTFRLQGLQAVLAIDGHEVILEKIEDWNVVELMVNEEVIFHCNIKDLEFGKPFGDASSQQFASSEESLNF

SEQ ID NO: 15521 - protein, 157 aa, Homo sapiens; identical to SEQ ID NO: 15519
  Payload ID: 3077
  Gene Symbol: C10orf53
  Gene Name: chromosome 10 open reading frame 53
  Uniprot ID: Q8N6V4
  ENSP ID: ENSP00000437726

SEQ ID NO: 15522 - protein, 311 aa, Homo sapiens
  Payload ID: 3078
  Gene Symbol: C10orf54
  Gene Name: chromosome 10 open reading frame 54
  Uniprot ID: Q9H7M9
  ENSP ID: ENSP00000378409
MGVPTALEAGSWRWGSLLFALFLAASLGPVAAFKVATPYSLYVCPEGQNVTLTCRLLGPVDKGHDVTFYKTWYRSSRGEVQTCSERRPIRNLTFQDLHLHHGGHQAANTSHDLAQRHGLESASDHHGNFSITMRNLTLLDSGLYCCLVVEIRHHHSEHRVHGAMELQVQTGKDAPSNCVVYPSSSQDSENITAAALATGACIVGILCLPLILLLVYKQRQAASNRRAQELVRMDSNIQGIENPGFEASPPAQGIPEAKVRHPLSYVAQRQPSESGRHLLSEPSTPLSPPGPGDVFFPSLDPVPDSPNFEVI

SEQ ID NO: 15523 - protein, 140 aa, Homo sapiens
  Payload ID: 3078
  Gene Symbol: C10orf54
  Gene Name: chromosome 10 open reading frame 54
  ENSP ID: ENSP00000473568
  MOD_RES (1)..(1): Any amino acid
XLPLPAPDHLPRISLALDDITAAALATGACIVGILCLPLILLLVYKQRQAASNRRAQELVRMDSNIQGIENPGFEASPPAQGIPEAKVRHPLSYVAQRQPSESGRHLLSEPSTPLSPPGPGDVFFPSLDPVPDSPNFEVI

SEQ ID NO: 15524 - protein, 151 aa, Homo sapiens
  Payload ID: 3079
  Gene Symbol: C10orf55
  Gene Name: chromosome 10 open reading frame 55
  Uniprot ID: Q5SWW7
  ENSP ID: ENSP00000409225
MFLHLDSHSSLERTKPTVVGVDTHMELDEVHCCPGRDSGGGFIKGPMLQGLQGEGKLAPIPKPTLPSPSRLTLFVSSSQMEDHGFPARRNGLTQASFIYQMPAGWGSPGGLFLPCQPVPTPVVLKPPLPPCPISWGESGPAVDGIRRTPAP

SEQ ID NO: 15525 - protein, 223 aa, Homo sapiens
  Payload ID: 3080
  Gene Symbol: C10orf62
  Gene Name: chromosome 10 open reading frame 62
  Uniprot ID: Q5T681
  ENSP ID: ENSP00000359674
MLWVQRKRRRKETSECPSDKDKSPESHKAKNESWIKSHFSRLSEEKLALDNNASASGNATQTESGSEEVSSTVHIETFTTRHGEVGSALHRESFTSRQKTSGPSVIQEIHQESGKAPSTDEATWAAVAACTKEIDTQGRHLAHSMLQRAIAYQHSGHLESKDINQEELRALEEVEMKLQKNFLTQRENTIAGANHTHTFYGHSHHSHHGHPSHQSHSLPNRRH

SEQ ID NO: 15526 - protein, 185 aa, Homo sapiens
  Payload ID: 3081
  Gene Symbol: C10orf67
  Gene Name: chromosome 10 open reading frame 67
  Uniprot ID: Q8IYJ2
  ENSP ID: ENSP00000321464
MMALVRDRRAHYVMSIVIRWVHCFSSSLRGTFGTRWEAMKAKATELRVCCARRKREAREFKPPQMRGSTRLNISDDLKIGFFSTDHATQTDSSEILSVKELSSSTQKLAQMMKSLQVDFGFLKQLLQLKFEDRLKEESLSLFTILHDRILEIEKHYQQNEDKMRKSFNQQLADAIAVIKGMYQPL

SEQ ID NO: 15527 - protein, 296 aa, Homo sapiens
  Payload ID: 3081
  Gene Symbol: C10orf67
  Gene Name: chromosome 10 open reading frame 67
  ENSP ID: ENSP00000365683
GRKIMEGLEASIEQFQFNPRLNISDDLKIGFFSTDHATQTDSSEILSVKELSSSTQKLAQMMKSLQVDFGFLKQLLQLKFEDRLKEESLSLFTILHDRILEIEKHYQQNEDKMRKSFNQQLADAIAVIKGMYQQFFEVEEENVSLQDASTVKTNILLRKLKEKEEVIKELKEELDQYKDFGFHKMESFAKETSSPKSNLEKENLEYKVENERLLQIISELEEEIQINLKENSGLEDELISMKEMAEKDHKTIQKLMDSRDRLREELHYEKSLVQDVINKQKEDKEMRKKYGSLSVK

SEQ ID NO: 15528 - protein, 1435 aa, Homo sapiens
  Payload ID: 3082
  Gene Symbol: C10orf71
  Gene Name: chromosome 10 open reading frame 71
  Uniprot ID: Q711Q0
  ENSP ID: ENSP00000363259
MMQGNKKCTDAFSDSSSIGSVLDDADREVSSLTDRAFRSLCISEDTSFHDSYLAVSPDITRQVFGTFHQRTVGHTQRKSGIWSQLPSQGTEHSGWAATFQQLPKYVQGEEKYPKTSPPPTPVQRRLEVPVSGLRSSNKPVSKVSTLIKSFDRTESQRCESRPTASKPPALKNPPKFAPLPENSVNFCFDSAFLTVRRVPAEVSNTHQNSYQPGRKHGEQESSKNPEMACHGSSSFLPAANDTATLCESKFPSPHHKPVTGEPGRGKGTFLHSENSAFESWNAHQPKLLERKDTAGTVPESKAPKHYGDTTLLREPCPPERTVSPCQVQASCSQEENRLAAGALSTSIPWGCRDPGAQVFAVEGKAPSSQPDSQEKPAQPPWRKPKTGKKGKESLQDTLEEKTQTNQRGPPLYTKHNPQEQFSENNALDLPVEPNEHYDPPFNISKLLTPIIPSKHALDSADSQPAERTPSPPGQLNGYQEKEPSECQSRDSYKSKAPSLLFNLKDVRKRVKSTYSSSPLLKVLDEKTRGKVDGKQEPVSNGVILPNGLEESPPNELSKERPADDPTASHINPQKDPTADPSEPSADSYLTLSTAPTIAKAPFYVNGEAAERSSYENKEVEGELEMGPAGSSWCPDSREHRPRKHLSLRLCNRDPEPGGATEKMKTHQLENGLSRSVSQETEPEREAGLQNTHLNQKFFPGPLSPEEEDVFYSDSQSDFMPSLKGKAKFSTSSSDQSFASFDDQQKMWFTENQREDRRKDVSAGDSQKDEKENVMRKDELQYCALSNGHACLENRSQGEALQRERESVSGGRTRKASAEEANFRGSWIGENKGTTFSQAKDLTPSPSSASNRHMLFTIKDNTLRATPVIKPIMLPLLRTMSLEDSLSSGHKEEELPRPEWGEDPGFCAPENQDILGTSTPTNTRGTRVKCMANEVMEDPGQGSSMARMEASQPAPKGNFPSMPLVGEGDRVKAPPDAAPGLVASNCKSGSADSGKLAAPWHIPTIALPEGDIEDQPPPWQPENCWEEQTPGFKSHFLSTPRAGPPGRRLVPSERANSPNPGSPGESSACSPAASNIWEESSQAPGGPELLPEEPNQASPWASSSPARVTRREDLTHALVWEGGSDPLLELSAEDLRTLSPRGSLLDVATSPAGTSGRLELPAQLERTASKPPAVPPKTEKALRRAKKLASKRRKTDQAQEKHGESQEGKPCPEDLEQTQQRPLCPRERPRHNFPVVRSLPPPVHRHSVSGFSEPVGRRPGGPQSLTPLPAYPATQKVLQDPQSGEYFVFDLPLQVKIKTFYDPETGKYVKVSIPSSEGASPEPPPPDALAAPYVLYPGFQPVPVTALMPLRCSSQLSAPTFLRQGPRASAARARTQSVHESGLQLDPGPHGDCTPHSAGQRPHGPPQSPGEEGVEAPGLGIISTDDLEDFATEGIS

SEQ ID NO: 15529 - protein, 198 aa, Homo sapiens
  Payload ID: 3083
  Gene Symbol: C10orf76
  Gene Name: chromosome 10 open reading frame 76
  ENSP ID: ENSP00000312408
MAQVEKRGGLLRKSSASKKPLKEKVVLMYDEIFMTEDPSKCSPRFWEELFLMKVNLEYLEGKLESLDGEELMKIKDNINCLFQHCIQALGEEHPIRVVNALQTLCALIRGVHQKNKSTSGFDIINMLMGFDKAELCMKVRHKLQMCLWMAASDSCSWTLSADKCTQRFGLRKIQMIEFGLAFRCFYFTDLLYLNKGKF

SEQ ID NO: 15530 - protein, 689 aa, Homo sapiens
  Payload ID: 3083
  Gene Symbol: C10orf76
  Gene Name: chromosome 10 open reading frame 76
  Uniprot ID: Q5T2E6
  ENSP ID: ENSP00000359050
MAQVEKRGGLLRKSSASKKPLKEKVVLMYDEIFMTEDPSKCSPRFWEELFLMKVNLEYLEGKLESLDGEELMKIKDNINCLFQHCIQALGEEHPIRVVNALQTLCALIRGVHQKNKSTSGFDIINMLMGFDKAELCMKNLMESLDSLLCAEGSESLKSLCLKLLLCLVTVTDNISQNTILEYVMINSIFEAILQILSHPPSRREHGYDAVVLLALLVNYRKYESVNPYIVKLSIVDDEATLNGMGLVIAQALSEYNRQYKDKEEEHQSGFFSALTNMVGSMFIADAHEKISVQTNEAILLALYEAVHLNRNFITVLAQSHPEMGLVTTPVSPAPTTPVTPLGTTPPSSDVISSVELPLDADVQTSNLLITFLKYSSIVMQDTKDEHRLHSGKLCLIILTCIAEDQYANAFLHDDNMNFRVNLHRMPMRHRKKAADKNLPCRPLVCAVLDLMVEFIVTHMMKEFPMDLYIRCIQVVHKLLCYQKKCRVRLHYTWRELWSALINLLKFLMSNETVLLAKHNIFTLALMIVNLFNMFITYGDTFLPTPSSYDELYYEIIRMHQSFDNLYSMVLRLSTNAGQWKEAASKVTHALVNIRAIINHFNPKIESYAAVNHISQLSEEQVLEVVRANYDTLTLKLQDGLDQYERYSEQHKEAAFFKELVRSISTNVRRNLAFHTLSQEVLLKEFSTIS

SEQ ID NO: 15531 - protein, 94 aa, Homo sapiens
  Payload ID: 3083
  Gene Symbol: C10orf76
  Gene Name: chromosome 10 open reading frame 76
  ENSP ID: ENSP00000413473
SVELPLDADVQTSNLLITFLKYSSIVMQDTKDEHRLHSGKLCLIILTCIAEPMRHRKKAADKNLPCRPLVCAVLDLMVEFIVTHMMKEFPMDLY

SEQ ID NO: 15532 - protein, 154 aa, Homo sapiens
  Payload ID: 3084
  Gene Symbol: C10orf82
  Gene Name: chromosome 10 open reading frame 82
  Uniprot ID: Q8WW14
  ENSP ID: ENSP00000358212
MEPSKTFMRNLPITPGYSGFVPFLSCQGMSKEDDMNHCVKTFQEKTQRYKEQLRELCCAVATAPKLKPVNSEETVLQALHQYNLQYHPLILECKYVKKPLQEPPIPGWAGYLPRAKVTEFGCGTRYTVMAKNCYKDFLEITERAKKAHLKPYEE

SEQ ID NO: 15533 - protein, 234 aa, Homo sapiens
  Payload ID: 3084
  Gene Symbol: C10orf82
  Gene Name: chromosome 10 open reading frame 82
  ENSP ID: ENSP00000465712
MEPSKTFMRNLPITPGYSGFVPFLSCQGMSKEDDMNHCVKTFQEKTQRYKEQLRELCCAVATAPKLKPVNSEETVLQALHQYNLQYHPLILECKYVKKPLQEPPIPGWAGYLPRAKVTEFGCGTRYTVMAKNCYKDFLEITERAKKAHLKPYEEIYGVSSTKTSAPSPKVLQHEELLPKYPDFSIPDGSCPALGRPLREDPKTPLTCGCAQRPSIPCSGKMYLEPLSSAKYAEG

SEQ ID NO: 15534 - protein, 445 aa, Homo sapiens
  Payload ID: 3085
  Gene Symbol: C10orf88
  Gene Name: chromosome 10 open reading frame 88
  Uniprot ID: Q9H8K7
  ENSP ID: ENSP00000419126
METRTEDGGLTRRPTLASSWDVAGGALTHSLLLTRAGLGPGDFDWEELLAPPAPGQDLVILKRNHNNKDENPCFLYLRCGPDGGEEIASIGILSSARNMEVYLGEEYCGTSRGKNVCTVLDDSEHEKIILYKKNLKLESSTHACKIKLLSFGERQCVFISKVVVHMRSVFANSSTSSPALGSRIDLDKVQTIMESMGSKLSPGAQQLMDMVRCQQRNCIPIGEQLQSVLGNSGYKHMIGLQSSSTLGTLNKSSSTPFPFRTGLTSGNVTENLQTYIDKSTQLPGGENSTKLDECKVMPQNHSFLENDLKNAMASFLPKKVSDNSNIPNSELLPFLQNLCSQVNHLHVGNKTECQENITKHGERILGVGMEEQSICSYLEKILSKNMELMEKKLMDYIDQRIHELQEHIDDKIALLLDLLQNPNSPPTGIPLRHYDSGERLSNGER

SEQ ID NO: 15535 - protein, 699 aa, Homo sapiens
  Payload ID: 3086
  Gene Symbol: C10orf90
  Gene Name: chromosome 10 open reading frame 90
  Uniprot ID: Q96M02
  ENSP ID: ENSP00000284694
MLKLSGEGLRDSYHSRRDQIALKNLQSDVTEAKSDFTKETLASQNTKMISSIVISQMIDENKSRENRASLPLPCAIAQSRAHHAKQSLANRSGVNIHRAFALLPGRLGIPAPSDERGPEAELPPKEERPCGGPRRGFASITITARRVGPPARALVWGTAGDSLCPKCRAEDTLFQAPPALANGAHPGRHQRSFACTEFSRNSSVVRLKVPEAHTGLCERRKYWVTHADDKETSFSPDTPLSGKSPLVFSSCVHLRVSQQCPDSIYYVDKSLSVPIEPPQIASPKMHRSVLSLNLNCSSHRLTADGVDGLVNREPISEALKQELLEGDQDLVGQRWNPGLQESHLKETPSLRRVHLGTGACPWSGSFPLENTELANVGANQVTVRKGEKDHTTHCHASDHANQLSIHIPGWSYRAVHTKVFSGSSKRQQGEVCMTVSAPPVEQKPTRHFLPIGDSSPSDDCLSRDLSEPTERRHQSFLKPRILFPGFLCPLQDVCASLQEDNGVQIESKFPKGDYTCCDLVVKIKECKKSEDPTTPEPSPAAPSPAPRDGAGSPGLSEDCSESQQTPARSLTLQEALEVRKPQFISRSQERLKKLEHMVQQRKAQRKEDLRQKQSLLPIRTSKKQFTIPHPLSDNLFKPKERCISEKEMHMRSKRIYDNLPEVKKKKEEQRKRVILQSNRLRAEVFKKQLLDQLLQRNAV

SEQ ID NO: 15536 - protein, 660 aa, Homo sapiens
  Payload ID: 3086
  Gene Symbol: C10orf90
  Gene Name: chromosome 10 open reading frame 90
  ENSP ID: ENSP00000349318
MISSIVISQMIDENKSRENRASLPLPCAIAQSRAHHAKQSLANRSGVNIHRAFALLPGRLGIPAPSDERGPEAELPPKEERPCGGPRRGFASITITARRVGPPARALVWGTAGDSLCPKCRAEDTLFQAPPALANGAHPGRHQRSFACTEFSRNSSVVRLKVPEAHTGLCERRKYWVTHADDKETSFSPDTPLSGKSPLVFSSCVHLRVSQQCPDSIYYVDKSLSVPIEPPQIASPKMHRSVLSLNLNCSSHRLTADGVDGLVNREPISEALKQELLEGDQDLVGQRWNPGLQESHLKETPSLRRVHLGTGACPWSGSFPLENTELANVGANQVTVRKGEKDHTTHCHASDHANQLSIHIPGWSYRAVHTKVFSGSSKRQQGEVCMTVSAPPVEQKPTRHFLPIGDSSPSDDCLSRDLSEPTERRHQSFLKPRILFPGFLCPLQDVCASLQEDNGVQIESKFPKGDYTCCDLVVKIKECKKSEDPTTPEPSPAAPSPAPRDGAGSPGLSEDCSESQQTPARSLTLQEALEVRKPQFISRSQERLKKLEHMVQQRKAQRKEDLRQKQSLLPIRTSKKQFTIPHPLSDNLFKPKERCISEKEMHMRSKRIYDNLPEVKKKKEEQRKRVILQSNRLRAEVFKKVMASSPAGVMCVVHRCRIST

SEQ ID NO: 15537 - protein, 662 aa, Homo sapiens
  Payload ID: 3086
  Gene Symbol: C10orf90
  Gene Name: chromosome 10 open reading frame 90
  ENSP ID: ENSP00000405995
MLKLSGEGLRDSYHSRRDQIALKNLQSDVTEAKSDFTKETLASQNTKMISSIVISQMIDENKSRENRASLPLPCAIAQSRAHHAKQSLANRSGVNIHRAFALLPGRLGIPAPSDERGPEAELPPKEERPCGGPRRGFASITITARRVGPPARALVWGTAGDSLCPKCRAEDTLFQAPPALANGAHPGRHQRSFACTEFSRNSSVVRLKVPEAHTGLCERRKYWVTHADDKETSFSPDTPLSGKSPLVFSSCVHLRVSQQCPDSIYYVDKSLSVPIEPPQIASPKMHRSVLSLNLNCSSHRLTADGVDGLVNREPISEALKQELLEGDQDLVGQRWNPGLQESHLKETPSLRRVHLGTGACPWSGSFPLENTELANVGANQVTVRKGEKDHTTHCHASDHANQLSIHIPGWSYRAVHTKVFSGSSKRQQGEVCMTVSAPPVEQKPTRHFLPIGDSSPSDDCLSRDLSEPTERRHQSFLKPRILFPGFLCPLQDVCASLQEDNGVQIESKFPKGDYTCCDLVVKIKECKKSEDPTTPEPSPAAPSPAPRDGAGSPGLSEDCSESQQTPARSLTLQEALEVRKPQFISRSQERLKKLEHMVQQRKAQRKEDLRQKQSLLPIRTSKKQFTIPHPLSDNLFKPKERCISEKEMHMRSKRIYDNLPEV

SEQ ID NO: 15538 - protein, 242 aa, Homo sapiens
  Payload ID: 3086
  Gene Symbol: C10orf90
  Gene Name: chromosome 10 open reading frame 90
  ENSP ID: ENSP00000411609
  MOD_RES (1)..(1): Any amino acid
XWSGSFPLENTELANVGANQVTVRKGEKDHTTHCHASDHANQLSIHIPGWSYRAGDYTCCDLVVKIKECKKSEDPTTPEPSPAAPSPAPRDGAGSPGLSEDCSESQQTPARSLTLQEALEVRKPQFISRSQERLKKLEHMVQQRKAQRKEDLRQKQSLLPIRTSKKQFTIPHPLSDNLFKPKERCISEKEMHMRSKRIYDNLPEVKKKKEEQRKRVILQSNRLRAEVFKKQLLDQLLQRNAV

SEQ ID NO: 15539 - protein, 209 aa, Homo sapiens
  Payload ID: 3086
  Gene Symbol: C10orf90
  Gene Name: chromosome 10 open reading frame 90
  ENSP ID: ENSP00000474558
MISSIVISQMIDENKSRENRASLPLPCAIAQSRAHHAKQSLANRSGVNIHRAFALLPGRLGIPAPSDERGPEAELPPKEERPCGGPRRGFASITITARRVGPPARALVWGTAGDSLCPKCRAEDTLFQAPPALANGAHPGRHQRSFACTEFSRNSSVVRLKVPEAHTGLCERRKYWVTHADDKETSFSPDTPLSGKSPLVFSSCVHLRV

SEQ ID NO: 15540 - protein, 39 aa, Homo sapiens
  Payload ID: 3086
  Gene Symbol: C10orf90
  Gene Name: chromosome 10 open reading frame 90
  ENSP ID: ENSP00000474615
MLKLSGEGLRDSYHSRRDQIALKNLQSDVTEAKSDFTKV

SEQ ID NO: 15541 - protein, 103 aa, Homo sapiens
  Payload ID: 3086
  Gene Symbol: C10orf90
  Gene Name: chromosome 10 open reading frame 90
  ENSP ID: ENSP00000474753
MVQQRKAQRKEDLRQKQSLLPIRTSKKQFTIPHPLSDNLFKPKERCISEKEMHMRSKRIYDNLPEVKKKKEEQRKRVILQSNRLRAEVFKKQLLDQLLQRNAV

SEQ ID NO: 15542 - protein, 81 aa, Homo sapiens
  Payload ID: 3087
  Gene Symbol: C10orf99
  Gene Name: chromosome 10 open reading frame 99
  Uniprot ID: Q6UWK7
  ENSP ID: ENSP00000361199
MRLLVLSSLLCILLLCFSIFSTEGKRRPAKAWSGRRTRLCCHRVPSPNSTNLKGHHVRLCKPCKLEPEPRLWVVPGALPQV

SEQ ID NO: 15543 - protein, 150 aa, Homo sapiens
  Payload ID: 3088
  Gene Symbol: C11orf1
  Gene Name: chromosome 11 open reading frame 1
  Uniprot ID: Q9H5F2
  ENSP ID: ENSP00000260276
MAASQCLCCSKFLFQRQNLACFLTNPHCGSLVNADGHGEVWTDWNNMSKFFQYGWRCTTNENTYSNRTLMGNWNQERYDLRNIVQPKPLPSQFGHYFETTYDTSYNNKMPLSTHRFKREPHWFPGHQPELDPPRYKCTEKSTYMNSYSKP

SEQ ID NO: 15544 - protein, 190 aa, Homo sapiens
  Payload ID: 3088
  Gene Symbol: C11orf1
  Gene Name: chromosome 11 open reading frame 1
  ENSP ID: ENSP00000431180
MVIWVILSLLGELGKPGLLTSLKNMEQPSKDFCDSHKKSSKSSTYSASSYSSSGKRQNLACFLTNPHCGSLVNADGHGEVWTDWNNMSKFFQYGWRCTTNENTYSNRTLMGNWNQERYDLRNIVQPKPLPSQFGHYFETTYDTSYNNKMPLSTHRFKREPHWFPGHQPELDPPRYKCTEKSTYMNSYSKP

SEQ ID NO: 15545 - protein, 142 aa, Homo sapiens
  Payload ID: 3088
  Gene Symbol: C11orf1
  Gene Name: chromosome 11 open reading frame 1
  ENSP ID: ENSP00000432128
MEQPSKDFCDSHKKSSKSSTYSASSYSSSGKRQNLACFLTNPHCGSLVNADGHGEVWTDWNNMSKFFQYGWRCTTNENTYSNRTLMGNWNQERYDLRNIVQPKPLPSQFGHYFETTYDTSYNNKMPLSTHRFKREPHWFPGH

SEQ ID NO: 15546 - protein, 104 aa, Homo sapiens
  Payload ID: 3088
  Gene Symbol: C11orf1
  Gene Name: chromosome 11 open reading frame 1
  ENSP ID: ENSP00000433224
MSKFFQYGWRCTTNENTYSNRTLMGNWNQERYDLRNIVQPKPLPSQFGHYFETTYDTSYNNKMPLSTHRFKREPHWFPGHQPELDPPRYKCTEKSTYMNSYSKP

SEQ ID NO: 15547 - protein, 121 aa, Homo sapiens
  Payload ID: 3088
  Gene Symbol: C11orf1
  Gene Name: chromosome 11 open reading frame 1
  ENSP ID: ENSP00000435864
MAASQCLCCSKFLFQRQNLACFLTNPHCGSLVNADGHGEVWTDWNNMSKFFQYGWRCTTNENTYSNRTLMGNWNQERYDLRNIVQPKPLPSQDLSESLTGSQDINLNWILPDTNAQKSQLT

SEQ ID NO: 15548 - protein, 467 aa, Homo sapiens
  Payload ID: 3089
  Gene Symbol: C11orf16
  Gene Name: chromosome 11 open reading frame 16
  Uniprot ID: Q9NQ32
  ENSP ID: ENSP00000318999
MESSTGPRMPLLKYCSVATSLKAPGWDGAAPPWDLSFTYPFALQAPWLTGHKPLARHASSCPCLHVADPAWQGPGWLGRAGDAANTWVLARREADGFYYRAQIKATPELERQGVLLVEFEAPLVAGPKLPAQQQRVVLEEDVIPLSPSVGYSLRPGDKVLALWEPGQQQYGPGTVLLGLEMRDPQRASKEKEITVHFWNGKAAKVPLGGVQSVSLTIWKKAVERLHKSFTREHPRPLHWAPCCSLLGPITGRITNELPPDAPFLCPLCHHHACCQLLCQGCLCGCPPCGTTWWPLTRTSEVMARELPELEPTAQLLPLEGPKEEKVAMHAPLAVSSSSSSSCEQDGVENDLEMGPPQRLMVNSAVNTDPIFLEMPLRQSGLCQPEWRYWKRNGPEPCLGKPGTRYSNICKEEKDHKQQRAQTAVVGTTKELVSKATHMKPPRTPPGEAEHRKRSQSLAICQWNKNSR

SEQ ID NO: 15549 - protein, 404 aa, Homo sapiens
  Payload ID: 3089
  Gene Symbol: C11orf16
  Gene Name: chromosome 11 open reading frame 16
  Uniprot ID: Q9NQ32
  ENSP ID: ENSP00000436818
MESSTGPRMPLLKYCSVATSLKAPGWDGAAPPWDLSFTYPFALQAPWLTGHKPLARHASSCPCLHVADPAWQGPGWLGRAGDAANTWVLARREADGFYYRAQIKATPELERQGVLLVEFEAPLVAGPKLPAQQQRVVLEEDVIPLSPSVGYSLRPGDKVLALWEPGQQQYGPGTVLLGLEMRDPQRASKEKEITVHFWNGKAAKVPLGGVQSVSLTIWKKAVERLHKSFTREHPRPLHWAPCCSLLGPITGRITNELPPDAPFLCPLCHHHACCQLLCQGCLCGCPPCGTTWWPLTRTSEVMARELPELEPTAQLLPLEGPKEEKVAMHAPLAVSSSSSSSCEQDGVENDLEMGPPQRLMVNSAVNTDPIFLEMPLRQSGLCQPEWRYWKRNGPEPCLGKPGKE

SEQ ID NO: 15550 - protein, 128 aa, Homo sapiens
  Payload ID: 3089
  Gene Symbol: C11orf16
  Gene Name: chromosome 11 open reading frame 16
  ENSP ID: ENSP00000437069
MESSTGPRMPLLKYCSVATSLKAPGWDGAAPPWDLSFTYPFALQAPWLTGHKPLARHASSCPCLHVADPAWQGPGWLGRAGDAANTWVLARREADGFYYRAQIKATPEGSAEGSSVATIAPCLHEPHR

SEQ ID NO: 15551 - protein, 132 aa, Homo sapiens
  Payload ID: 3090
  Gene Symbol: C11orf21
  Gene Name: chromosome 11 open reading frame 21
  Uniprot ID: Q9P2W6
  ENSP ID: ENSP00000370545
MGRTWCGMWRRRRPGRRSAVPRWPHLSSQSGVEPPDRWTGTPGWPSRDQEAPGSMMPPAAAQPSAHGALVPPATAHEPVDHPALHWLACCCCLSLPGQLPLAIRLGWDLDLEAGPSSGKLCPRARRWQPLPS

SEQ ID NO: 15552 - protein, 178 aa, Homo sapiens
  Payload ID: 3090
  Gene Symbol: C11orf21
  Gene Name: chromosome 11 open reading frame 21
  ENSP ID: ENSP00000406541
MASFLVWPLRTALRGGKSWAGPGVGCGGDGARGGGELSLSNLDLPGAGEAGLEHHPLLGHLFISAVPRWPHLSSQSGVEPPDRWTGTPGWPSRDQEAPGSMMPPAAAQPSAHGALVPPATAHEPVDHPALHWLACCCCLSLPGQLPLAIRLGWDLDLEAGPSSGKLCPRARRWQPLPS

SEQ ID NO: 15553 - protein, 449 aa, Homo sapiens
  Payload ID: 3091
  Gene Symbol: C11orf24
  Gene Name: chromosome 11 open reading frame 24
  Uniprot ID: Q96F05
  ENSP ID: ENSP00000307264
MWTALVLIWIFSLSLSESHAASNDPRNFVPNKMWKGLVKRNASVETVDNKTSEDVTMAAASPVTLTKGTSAAHLNSMEVTTEDTSRTDVSEPATSGGAADGVTSIAPTAVASSTTAASITTAASSMTVASSAPTTAASSTTVASIAPTTAASSMTAASSTPMTLALPAPTSTSTGRTPSTTATGHPSLSTALAQVPKSSALPRTATLATLATRAQTVATTANTSSPMSTRPSPSKHMPSDTAASPVPPMRPQAQGPISQVSVDQPVVNTTNKSTPMPSNTTPEPAPTPTVVTTTKAQAREPTASPVPVPHTSPIPEMEAMSPTTQPSPMPYTQRAAGPGTSQAPEQVETEATPGTDSTGPTPRSSGGTKMPATDSCQPSTQGQYMVVTTEPLTQAVVDKTLLLVVLLLGVTLFITVLVLFALQAYESYKKKDYTQVDYLINGMYADSEM

SEQ ID NO: 15554 - protein, 114 aa, Homo sapiens
  Payload ID: 3091
  Gene Symbol: C11orf24
  Gene Name: chromosome 11 open reading frame 24
  ENSP ID: ENSP00000434144
MWTALVLIWIFSLSLSESHAASNDPRNFVPNKMWKGLVKRNASVETVDNKTSEDVTMAAASPVTLTKGTSAAHLNSMEVTTEDTSRTDAYESYKKKDYTQVDYLINGMYADSEM

SEQ ID NO: 15555 - protein, 25 aa, Homo sapiens
  Payload ID: 3091
  Gene Symbol: C11orf24
  Gene Name: chromosome 11 open reading frame 24
  ENSP ID: ENSP00000436765
MWTALVLIWIFSLSLSESHAASNDP

SEQ ID NO: 15556 - protein, 1322 aa, Homo sapiens
  Payload ID: 3092
  Gene Symbol: C11orf30
  Gene Name: chromosome 11 open reading frame 30
  Uniprot ID: Q7Z589
  ENSP ID: ENSP00000334130
MPVVWPTLLDLSRDECKRILRKLELEAYAGVISALRAQGDLTKEKKDLLGELSKVLSISTERHRAEVRRAVNDERLTTIAHNMSGPNSSSEWSIEGRRLVPLMPRLVPQTAFTVTANAVANAAIQHNASLPVPAETGSKEVVCYSYTSTTSTPTSTPVPSGSIATVKSPRPASPASNVVVLPSGSTVYVKSVSCSDEDEKPRKRRRTNSSSSSPVVLKEVPKAVVPVSKTITVPVSGSPKMSNIMQSIANSLPPHMSPVKITFTKPSTQTTNTTTQKVIIVTTSPSSTFVPNILSKSHNYAAVTKLVPTSVIASTTQKPPVVITASQSSLVSNSSSGSSSSTPSPIPNTVAVTAVVSSTPSVVMSTVAQGVSTSAIKMASTRLPSPKSLVSAPTQILAQFPKQHQQSPKQQLYQVQQQTQQQVAQPSPVSHQQQPQQSPLPPGIKPTIQIKQESGVKIITQQVQPSKILPKPVTATLPTSSNSPIMVVSSNGAIMTTKLVTTPTGTQATYTRPTVSPSIGRMAATPGAATYVKTTSGSIITVVPKSLATLGGKIISSNIVSGTTTKITTIPMTSKPNVIVVQKTTGKGTTIQGLPGKNVVTTLLNAGGEKTIQTVPTGAKPAILTATRPITKMIVTQPKGIGSTVQPAAKIIPTKIVYGQQGKTQVLIKPKPVTFQATVVSEQTRQLVTETLQQASRVAEAGNSSIQEGKEEPQNYTDSSSSSTESSQSSQDSQPVVHVIASRRQDWSEHEIAMETSPTIIYQDVSSESQSATSTIKALLELQQTTVKEKLESKPRQPTIDLSQMAVPIQMTQEKRHSPESPSIAVVESELVAEYITTERTDEGTEVAFPLLVSHRSQPQQPSQPQRTLLQHVAQSQTATQTSVVVKSIPASSPGAITHIMQQALSSHTAFTKHSEELGTEEGEVEEMDTLDPQTGLFYRSALTQSQSAKQQKLSQPPLEQTQLQVKTLQCFQTKQKQTIHLQADQLQHKLPQMPQLSIRHQKLTPLQQEQAQPKPDVQHTQHPMVAKDRQLPTLMAQPPQTVVQVLAVKTTQQLPKLQQAPNQPKIYVQPQTPQSQMSLPASSEKQTASQVEQPIITQGSSVTKITFEGRQPPTVTKITGGSSVPKLTSPVTSISPIQASEKTAVSDILKMSLMEAQIDTNVEHMIVDPPKKALATSMLTGEAGSLPSTHMVVAGMANSTPQQQKCRESCSSPSTVGSSLTTRKIDPPAVPATGQFMRIQNVGQKKAEESPAEIIIQAIPQYAIPCHSSSNVVVEPSGLLELNNFTSQQLDDEETAMEQDIDSSTEDGTEPSPSQSSAERS

SEQ ID NO: 15557 - protein, 1224 aa, Homo sapiens
  Payload ID: 3092
  Gene Symbol: C11orf30
  Gene Name: chromosome 11 open reading frame 30
  ENSP ID: ENSP00000431166
MPVVWPTLLDLSRDECKRILRKLELEAYAGVISALRAQGDLTKEKKDLLGELSKVLSISTERHRAEVRRAVNDERLTTIAHNMSGPNSSSEWSIEGRRLVPLMPRLVPQTAFTVTANAVANAAIQHNASLPVPAETGSKEVVVCYSYTSTTSTPTSTPVPSGSIATVKSPRPASPASNVVVLPSGSTVYVKSVSCSDEDEKPRKRRRTNSSSSSPVVLKEVPKAVVPVSKTITVPVSGSPKMSNIMQSIANSLPPHMSPVKITFTKPSTQTTNTTTQKVIIVTTSPSSTFVPNILSKSHNYAAVTKLVPTSVIASTTQKPPVVITASQSSLVSNSSSGSSSSTPSPIPNTVAVTAVVSSTPSVVMSTVAQGVKIITQQVQPSKILPKPVTATLPTSSNSPIMVVSSNGAIMTTKLVTTPTGTQATYTRPTVSPSIGRMAATPGAATYVKTTSGSIITVVPKSLATLGGKIISSNIVSGTTTKITTIPMTSKPNVIVVQKTTGKGTTIQGLPGKNVVTTLLNAGGEKTIQTVPTGAKPAILTATRPITKMIVTQPKGIGSTVQPAAKIIPTKIVYGQQGKTQVLIKPKPVTFQATVVSEQTRQLVTETLQQASRVAEAGNSSIQEGKEEPQNYTDSSSSSTESSQSSQDSQPVVHVIASRRQDWSEHEIAMETSPTIIYQDVSSESQSATSTIKALLELQQTTVKEKLESKPRQPTIDLSQMAVPIQMTQEKRHSPESPSIAVVESELVAEYITTVSHRSQPQQPSQPQRTLLQHVAQSQTATQTSVVVKSIPASSPGAITHIMQQALSSHTAFTKHSEELGTEEGEVEEMDTLDPQTGLFYRSALTQSQSAKQQKLSQPPLEQTQLQVKTLQCFQTKQKQTIHLQADQLQHKLPQMPQLSIRHQKLTPLQQEQAQPKPDVQHTQHPMVAKDRQLPTLMAQPPQTVVQVLAVKTTQQLPKLQQAPNQPKIYVQPQTPQSQMSLPASSEKQTASQVEQPIITQGSSVTKITFEGRQPPTVTKITGGSSVPKLTSPVTSISPIQASEKTAVSDILKMSLMEAQIDTNVEHMIVDPPKKALATSMLTGEAGSLPSTHMVVAGMANSTPQQQKCRESCSSPSTVGSSLTTRKIDPPAVPATGQFMRIQNVGQKKAEESPAEIIIQAIPQYAIPCHSSSNVVVEPSGLLELNNFTSQQLDDEETAMEQDIDSSTEDGTEPSPSQSSAERS

SEQ ID NO: 15558 - protein, 1323 aa, Homo sapiens
  Payload ID: 3092
  Gene Symbol: C11orf30
  Gene Name: chromosome 11 open reading frame 30
  Uniprot ID: Q7Z589
  ENSP ID: ENSP00000432010
MPVVWPTLLDLSRDECKRILRKLELEAYAGVISALRAQGDLTKEKKDLLGELSKVLSISTERHRAEVRRAVNDERLTTIAHNMSGPNSSSEWSIEGRRLVPLMPRLVPQTAFTVTANAVANAAIQHNASLPVPAETGSKEVVVCYSYTSTTSTPTSTPVPSGSIATVKSPRPASPASNVVVLPSGSTVYVKSVSCSDEDEKPRKRRRTNSSSSSPVVLKEVPKAVVPVSKTITVPVSGSPKMSNIMQSIANSLPPHMSPVKITFTKPSTQTTNTTTQKVIIVTTSPSSTFVPNILSKSHNYAAVTKLVPTSVIASTTQKPPVVITASQSSLVSNSSSGSSSSTPSPIPNTVAVTAVVSSTPSVVMSTVAQGVSTSAIKMASTRLPSPKSLVSAPTQILAQFPKQHQQSPKQQLYQVQQQTQQQVAQPSPVSHQQQPQQSPLPPGIKPTIQIKQESGVKIITQQVQPSKILPKPVTATLPTSSNSPIMVVSSNGAIMTTKLVTTPTGTQATYTRPTVSPSIGRMAATPGAATYVKTTSGSIITVVPKSLATLGGKIISSNIVSGTTTKITTIPMTSKPNVIVVQKTTGKGTTIQGLPGKNVVTTLLNAGGEKTIQTVPTGAKPAILTATRPITKMIVTQPKGIGSTVQPAAKIIPTKIVYGQQGKTQVLIKPKPVTFQATVVSEQTRQLVTETLQQASRVAEAGNSSIQEGKEEPQNYTDSSSSSTESSQSSQDSQPVVHVIASRRQDWSEHEIAMETSPTIIYQDVSSESQSATSTIKALLELQQTTVKEKLESKPRQPTIDLSQMAVPIQMTQEKRHSPESPSIAVVESELVAEYITTERTDEGTEVAFPLLVSHRSQPQQPSQPQRTLLQHVAQSQTATQTSVVVKSIPASSPGAITHIMQQALSSHTAFTKHSEELGTEEGEVEEMDTLDPQTGLFYRSALTQSQSAKQQKLSQPPLEQTQLQVKTLQCFQTKQKQTIHLQADQLQHKLPQMPQLSIRHQKLTPLQQEQAQPKPDVQHTQHPMVAKDRQLPTLMAQPPQTVVQVLAVKTTQQLPKLQQAPNQPKIYVQPQTPQSQMSLPASSEKQTASQVEQPIITQGSSVTKITFEGRQPPTVTKITGGSSVPKLTSPVTSISPIQASEKTAVSDILKMSLMEAQIDTNVEHMIVDPPKKALATSMLTGEAGSLPSTHMVVAGMANSTPQQQKCRESCSSPSTVGSSLTTRKIDPPAVPATGQFMRIQNVGQKKAEESPAEIIIQAIPQYAIPCHSSSNVVVEPSGLLELNNFTSQQLDDEETAMEQDIDSSTEDGTEPSPSQSSAERS

SEQ ID NO: 15559 - protein, 217 aa, Homo sapiens
  Payload ID: 3092
  Gene Symbol: C11orf30
  Gene Name: chromosome 11 open reading frame 30
  ENSP ID: ENSP00000432234
GEKTIQTVPTGAKPAILTATRPITKMIVTQPKGIGSTVQPAAKIIPTKIVYGQQGKTQVLIKPKPVTFQATVVSEQTRQLVTETLQQASRVAEAGNSSIQEGKEEPQNYTDSSSSSTESSQSSQVSHRSQPQQPSQPQRTLLQHVAQSQTATQTSVVVKSIPASSPGAITHIMQQALSSHTAFTKHSEELGTEEGEVEEMDTLDPQTGLFYRSALTQ

SEQ ID NO: 15560 - protein, 1322 aa, Homo sapiens; identical to SEQ ID NO: 15556
  Payload ID: 3092
  Gene Symbol: C11orf30
  Gene Name: chromosome 11 open reading frame 30
  Uniprot ID: Q7Z589
  ENSP ID: ENSP00000432327

SEQ ID NO: 15561 - protein, 1337 aa, Homo sapiens
  Payload ID: 3092
  Gene Symbol: C11orf30
  Gene Name: chromosome 11 open reading frame 30
  Uniprot ID: Q7Z589
  ENSP ID: ENSP00000433205
MPVVWPTLLDLSRDECKRILRKLELEAYAGVISALRAQGDLTKEKKDLLGELSKVLSISTERHRAEVRRAVNDERLTTIAHKMNLSLYLGERPSYSMSGPNSSSEWSIEGRRLVPLMPRLVPQTAFTVTANAVANAAIQHNASLPVPAETGSKEVVVCYSYTSTTSTPTSTPVPSGSIATVKSPRPASPASNVVVLPSGSTVYVKSVSCSDEDEKPRKRRRTNSSSSSPVVLKEVPKAVVPVSKTITVPVSGSPKMSNIMQSIANSLPPHMSPVKITFTKPSTQTTNTTTQKVIIVTTSPSSTFVPNILSKSHNYAAVTKLVPTSVIASTTQKPPVVITASQSSLVSNSSSGSSSSTPSPIPNTVAVTAVVSSTPSVVMSTVAQGVSTSAIKMASTRLPSPKSLVSAPTQILAQFPKQHQQSPKQQLYQVQQQTQQQVAQPSPVSHQQQPQQSPLPPGIKPTIQIKQESGVKIITQQVQPSKILPKPVTATLPTSSNSPIMVVSSNGAIMTTKLVTTPTGTQATYTRPTVSPSIGRMAATPGAATYVKTTSGSIITVVPKSLATLGGKIISSNIVSGTTTKITTIPMTSKPNVIVVQKTTGKGTTIQGLPGKNVVTTLLNAGGEKTIQTVPTGAKPAILTATRPITKMIVTQPKGIGSTVQPAAKIIPTKIVYGQQGKTQVLIKPKPVTFQATVVSEQTRQLVTETLQQASRVAEAGNSSIQEGKEEPQNYTDSSSSSTESSQSSQDSQPVVHVIASRRQDWSEHEIAMETSPTIIYQDVSSESQSATSTIKALLELQQTTVKEKLESKPRQPTIDLSQMAVPIQMTQEKRHSPESPSIAVVESELVAEYITTERTDEGTEVAFPLLVSHRSQPQQPSQPQRTLLQHVAQSQTATQTSVVVKSIPASSPGAITHIMQQALSSHTAFTKHSEELGTEEGEVEEMDTLDPQTGLFYRSALTQSQSAKQQKLSQPPLEQTQLQVKTLQCFQTKQKQTIHLQADQLQHKLPQMPQLSIRHQKLTPLQQEQAQPKPDVQHTQHPMVAKDRQLPTLMAQPPQTVVQVLAVKTTQQLPKLQQAPNQPKIYVQPQTPQSQMSLPASSEKQTASQVEQPIITQGSSVTKITFEGRQPPTVTKITGGSSVPKLTSPVTSISPIQASEKTAVSDILKMSLMEAQIDTNVEHMIVDPPKKALATSMLTGEAGSLPSTHMVVAGMANSTPQQQKCRESCSSPSTVGSSLTTRKIDPPAVPATGQFMRIQNVGQKKAEESPAEIIIQAIPQYAIPCHSSSNVVVEPSGLLELNNFTSQQLDDEETAMEQDIDSSTEDGTEPSPSQSSAERS

SEQ ID NO: 15562 - protein, 1231 aa, Homo sapiens
  Payload ID: 3092
  Gene Symbol: C11orf30
  Gene Name: chromosome 11 open reading frame 30
  Uniprot ID: Q7Z589
  ENSP ID: ENSP00000433634
MPVVWPTLLDLSRDECKRILRKLELEAYAGVISALRAQGDLTKEKKDLLGELSKVLSISTERHRAEVRRAVNDERLTTIAHKMNLSLYLGERPSYSMSGPNSSSEWSIEGRRLVPLMPRLVPQTAFTVTANAVANAAIQHNASLPVPAETGSKEVVCYSYTSTTSTPTSTPVPSGSIATVKSPRPASPASNVVVLPSGSTVYVKSVSCSDEDEKPRKRRRTNSSSSSPVVLKEVPKAVVPVSKTITVPVSGSPKMSNIMQSIANSLPPHMSPVKITFTKPSTQTTNTTTQKVIIVTTSPSSTFVPNILSKSHNYAAVTKLVPTSVIASTTQKPPVVITASQSSLVSNSSSGSSSSTPSPIPNTVAVTAVVSSTPSVVMSTVAQGVSTSAIKMASTRLPSPKSLVSAPTQILAQFPKQHQQSPKQQLYQVQQQTQQQVAQPSPVSHQQQPQQSPLPPGIKPTIQIKQESGVKIITQQVQPSKILPKPVTATLPTSSNSPIMVVSSNGAIMTTKLVTTPTGTQATYTRPTVSPSIGRMAATPGAATYVKTTSGSIITVVPKSLATLGGKIISSNIVSGTTTKITTIPMTSKPNVIVVQKTTGKGTTIQGLPGKNVVTTLLNAGGEKTIQTVPTGAKPAILTATRPITKMIVTQPKGIGSTVQPAAKIIPTKIVYGQQGKTQVLIKPKPVTFQATVVSEQTRQLVTETLQQASRVAEAGNSSIQEGKEEPQNYTDSSSSSTESSQSSQDAVVISGEISSPPLFSVSHRSQPQQPSQPQRTLLQHVAQSQTATQTSVVVKSIPASSPGAITHIMQQALSSHTAFTKHSEELGTEEGEVEEMDTLDPQTGLFYRSALTQSQSAKQQKLSQPPLEQTQLQVKTLQCFQTKQKQTIHLQADQLQHKLPQMPQLSIRHQKLTPLQQEQAQPKPDVQHTQHPMVAKDRQLPTLMAQPPQTVVQVLAVKTTQQLPKLQQAPNQPKIYVQPQTPQSQMSLPASSEKQTASQVEQPIITQGSSVTKITFEGRQPPTVTKITGGSSVPKLTSPVTSISPIQASEKTAVSDILKMSLMEAQIDTNVEHMIVDPPKKALATSMLTGEAGSLPSTHMVVAGMANSTPQQQKCRESCSSPSTVGSSLTTRKIDPPAVPATGQFMRIQNVGQKKAEESPAEIIIQAIPQYAIPCHSSSNVVVEPSGLLELNNFTSQQLDDEETAMEQDIDSSTEDGTEPSPSQSSAERS

SEQ ID NO: 15563 - protein, 107 aa, Homo sapiens
  Payload ID: 3092
  Gene Symbol: C11orf30
  Gene Name: chromosome 11 open reading frame 30
  ENSP ID: ENSP00000433670
ITQQVQPSKILPKPVTATLPTSSNSPIMVVSSNGAIMTTKLVTTPTGTQATYTRPTVSPSIGRMAATPGAATYVKTTSGSIITVVPKSLATLGGKIISSNIVSGRYI

SEQ ID NO: 15564 - protein, 109 aa, Homo sapiens
  Payload ID: 3092
  Gene Symbol: C11orf30
  Gene Name: chromosome 11 open reading frame 30
  ENSP ID: ENSP00000434566
MPVVWPTLLDLSRDECKRILRKLGVKIITQQVQPSKILPKPVTATLPTSSNSPIMVVSSNGAIMTTKLVTTPTGTQATYTRPTVSPSIGRMAATPGAATYVKTTSGSII

SEQ ID NO: 15565 - protein, 82 aa, Homo sapiens
  Payload ID: 3092
  Gene Symbol: C11orf30
  Gene Name: chromosome 11 open reading frame 30
  Uniprot ID: Q7Z589
  ENSP ID: ENSP00000434665
MPVVWPTLLDLSRDECKRILRKLELEAYAGVISALRAQGDLTKEKKDLLGELSKVLSISTERHRAEVRRAVNDERLTTIAHK

SEQ ID NO: 15566 - protein, 159 aa, Homo sapiens
  Payload ID: 3092
  Gene Symbol: C11orf30
  Gene Name: chromosome 11 open reading frame 30
  ENSP ID: ENSP00000436307
  MOD_RES (1)..(1): Any amino acid
XKTAVSDILKMSLMEAQIDTNVEHMIVDPPKKALATSMLTGEAGSLPSTHMVVAGMANSTPQQQKCRESCSSPSTVGSSLTTRKIDPPAVPATGQFMRIQNVGQKKAEESPAEIIIQVKTKELLSPGYPLEVVFYLPLSLQGYSSVCYSLSLQLQCGGG

SEQ ID NO: 15567 - protein, 295 aa, Homo sapiens
  Payload ID: 3092
  Gene Symbol: C11orf30
  Gene Name: chromosome 11 open reading frame 30
  ENSP ID: ENSP00000436528
QPSQPQRTLLQHVAQSQTATQTSVVVKSIPASSPGAITHIMQQALSSHTAFTKHSEELGTEEGEVEEMDTLDPQTGLFYRSALTQSQSAKQQKLSQPPLEQTQLQVKTLQCFQTKQKQTIHLQADQLQHKLPQMPQLSIRHQKLTPLQQEQAQPKPDVQHTQHPMVAKDRQLPTLMAQPPQTVVQVLAVKTTQQLPKLQQAPNQPKIYVQPQTPQSQMSLPASSEKQTASQAIPQYAIPCHSSSNVVVEPSGLLELNNFTSQQLDDEETAMEQDIDSSTEDGTEPSPSQSSAERS

SEQ ID NO: 15568 - protein, 1323 aa, Homo sapiens
  Payload ID: 3092
  Gene Symbol: C11orf30
  Gene Name: chromosome 11 open reading frame 30
  Uniprot ID: Q7Z589
  ENSP ID: ENSP00000436968
MPVVWPTLLDLSRDECKRILRKLELEAYAGVISALRAQGDLTKEKKDLLGELSKVLSISTERHRAEVRRAVNDERLTTIAHKMNLSLYLGERPSYSMSGPNSSSEWSIEGRRLVPLMPRLVPQTAFTVTANAVANAAIQHNASLPVPAETGSKEVVVCYSYTSTTSTPTSTPVPSGSIATVKSPRPASPASNVVVLPSGSTVYVKSVSCSDEDEKPRKRRRTNSSSSSPVVLKEVPKAVVPVSKTITVPVSGSPKMSNIMQSIANSLPPHMSPVKITFTKPSTQTTNTTTQKVIIVTTSPSSTFVPNILSKSHNYAAVTKLVPTSVIASTTQKPPVVITASQSSLVSNSSSGSSSSTPSPIPNTVAVTAVVSSTPSVVMSTVAQGVSTSAIKMASTRLPSPKSLVSAPTQILAQFPKQHQQSPKQQLYQVQQQTQQQVAQPSPVSHQQQPQQSPLPPGIKPTIQIKQESGVKIITQQVQPSKILPKPVTATLPTSSNSPIMVVSSNGAIMTTKLVTTPTGTQATYTRPTVSPSIGRMAATPGAATYVKTTSGSIITVVPKSLATLGGKIISSNIVSGTTTKITTIPMTSKPNVIVVQKTTGKGTTIQGLPGKNVVTTLLNAGGEKTIQTVPTGAKPAILTATRPITKMIVTQPKGIGSTVQPAAKIIPTKIVYGQQGKTQVLIKPKPVTFQATVVSEQTRQLVTETLQQASRVAEAGNSSIQEGKEEPQNYTDSSSSSTESSQSSQDSQPVVHVIASRRQDWSEHEIAMETSPTIIYQDVSSESQSATSTIKALLELQQTTVKEKLESKPRQPTIDLSQMAVPIQMTQEKRHSPESPSIAVVESELVAEYITTVSHRSQPQQPSQPQRTLLQHVAQSQTATQTSVVVKSIPASSPGAITHIMQQALSSHTAFTKHSEELGTEEGEVEEMDTLDPQTGLFYRSALTQSQSAKQQKLSQPPLEQTQLQVKTLQCFQTKQKQTIHLQADQLQHKLPQMPQLSIRHQKLTPLQQEQAQPKPDVQHTQHPMVAKDRQLPTLMAQPPQTVVQVLAVKTTQQLPKLQQAPNQPKIYVQPQTPQSQMSLPASSEKQTASQVEQPIITQGSSVTKITFEGRQPPTVTKITGGSSVPKLTSPVTSISPIQASEKTAVSDILKMSLMEAQIDTNVEHMIVDPPKKALATSMLTGEAGSLPSTHMVVAGMANSTPQQQKCRESCSSPSTVGSSLTTRKIDPPAVPATGQFMRIQNVGQKKAEESPAEIIIQAIPQYAIPCHSSSNVVVEPSGLLELNNFTSQQLDDEETAMEQDIDSSTEDGTEPSPSQSSAERS

SEQ ID NO: 15569 - protein, 122 aa, Homo sapiens
  Payload ID: 3093
  Gene Symbol: C11orf31
  Gene Name: chromosome 11 open reading frame 31
  Uniprot ID: Q8IZQ5
  ENSP ID: ENSP00000373509
  MOD_RES (44)..(44): Selenocysteine
MAPRGRKRKAEAAVVAVAEKREKLANGGEGMEEATVVIEHCTSXRVYGRNAAALSQALRLEAPELPVKVNPTKPRRGSFEVTLLRPDGSSAELWTGIKKGPPRKLKFPEPQEVVEELKKYLS

SEQ ID NO: 15570 - protein, 122 aa, Homo sapiens; identical to SEQ ID NO: 15569
  Payload ID: 3093
  Gene Symbol: C11orf31
  Gene Name: chromosome 11 open reading frame 31
  Uniprot ID: Q8IZQ5
  ENSP ID: ENSP00000434511
  MOD_RES (44)..(44): Selenocysteine

SEQ ID NO: 15571 - protein, 94 aa, Homo sapiens
  Payload ID: 3093
  Gene Symbol: C11orf31
  Gene Name: chromosome 11 open reading frame 31
  ENSP ID: ENSP00000434875
  MOD_RES (1)..(1): Any amino acid
  MOD_RES (16)..(16): Selenocysteine
XGMEEATVVIEHCTSXRVYGRNAAALSQALRLEAPELPVKVNPTKPRRGSFEVTLLRPDGSSAELWTGIKKGPPRKLKFPEPQEVVEELKKYLS

SEQ ID NO: 15572 - protein, 121 aa, Homo sapiens
  Payload ID: 3093
  Gene Symbol: C11orf31
  Gene Name: chromosome 11 open reading frame 31
  ENSP ID: ENSP00000481984
MAPRGRKRKAEAAVVAVAEKREKLANGGEGMEEATVVIEHCTSRVYGRNAAALSQALRLEAPELPVKVNPTKPRRGSFEVTLLRPDGSSAELWTGIKKGPPRKLKFPEPQEVVEELKKYLS

SEQ ID NO: 15573 - protein, 217 aa, Homo sapiens
  Payload ID: 3094
  Gene Symbol: C11orf40
  Gene Name: chromosome 11 open reading frame 40
  Uniprot ID: Q8WZ69
  ENSP ID: ENSP00000302918
MALVQALVPREREPKLSILQMDRGDPQHSSHWCPEREKVKLLTLKPRETSKNILINFYRAFNLDKDVFIHQANHPLTVPSSVVMGDNGHTLAEDDKRPCFRVLPCYLERVSSGISISWISAPLPVGAMKHQLLCDLMDLITLSFWLAGQCMSLKATNMQHCKCSIATSDWAIELDRTDYKTLPSEYSILALLQVFAGKNCMDRVLLHVDVNYLKSLP

SEQ ID NO: 15574 - protein, 333 aa, Homo sapiens
  Payload ID: 3095
  Gene Symbol: C11orf42
  Gene Name: chromosome 11 open reading frame 42
  Uniprot ID: Q8N5U0
  ENSP ID: ENSP00000321021
MLVGTPNLLTLDEADATWTLIKDKVIEEHFGPNAVAVPFLSDAACYDLLGVLVKQSRPAHTRLALPGRQGRRALKPVGPLPSLLEQAGSEGAFAHCTREYSPNGRAERAYEETRMLDGQPCKIRLHMGDLRKKVAFLLLPPGQVSLQQTLPWLRSTHSIYVIYQVFSCSWLQLGLTSTAREPQLLRLLRSLPVAFSCLKFSLQSKGVLGPQKPLTKDPLPHGANWVRPNLSIMPPLAPTSAPADTTEAADVPPPVPAPPTPPPQEGPEDKPTRFSYKGRNPFWRGPQILSENWLFSPRSPPPGAQGGGPRDPDGHSMSLPLLQGLSSEFDSDD

SEQ ID NO: 15575 - protein, 145 aa, Homo sapiens
  Payload ID: 3096
  Gene Symbol: C11orf45
  Gene Name: chromosome 11 open reading frame 45
  Uniprot ID: Q8TAV5
  ENSP ID: ENSP00000307879
MLTRLVLSAHLSSTTSPPWTHAAISWELDNVLMPSPRIWPQVTPTGRSASVRSEGNTSSLWNFSAGQDVHAIVTRTCESVLSSAVYTHGCGCVRSATNITCQSSGQQRQAARQEEENSICKAHDSREGRLGYPLSAHQPGSGGPN

SEQ ID NO: 15576 - protein, 145 aa, Homo sapiens; identical to SEQ ID NO: 15575
  Payload ID: 3096
  Gene Symbol: C11orf45
  Gene Name: chromosome 11 open reading frame 45
  Uniprot ID: Q8TAV5
  ENSP ID: ENSP00000431922

SEQ ID NO: 15577 - protein, 331 aa, Homo sapiens
  Payload ID: 3097
  Gene Symbol: C11orf49
  Gene Name: chromosome 11 open reading frame 49
  Uniprot ID: Q9H6J7
  ENSP ID: ENSP00000278460
MLSPERLALPDYEYLAQRHVLTYMEDAVCQLLENREDISQYGIARFFTEYFNSVCQGTHILFREFSFVQATPHNRVSFLRAFWRCFRTVGKNGDLLTMKEYHCLLQLLCPDFPLELTQKAARIVLMDDAMDCLMSFSDFLFAFQIQFYYSEFLDSVAAIYEDLLSGKNPNTVIVPTSSSGQHRQRPALGGAGTLEGVEASLFYQCLENLCDRHKYSCPPPALVKEALSNVQRLTFYGFLMALSKHRGINQALGALPDKGDLMHDPAMDEELERLLAQVPGLVNSVTASPEASCLPSRTPPRVGSPWRPLHHSRKVDGESDGSTEETDESET

SEQ ID NO: 15578 - protein, 337 aa, Homo sapiens
  Payload ID: 3097
  Gene Symbol: C11orf49
  Gene Name: chromosome 11 open reading frame 49
  Uniprot ID: Q9H6J7
  ENSP ID: ENSP00000367878
MLSPERLALPDYEYLAQRHVLTYMEDAVCQLLENREDISQYGIARFFTEYFNSVCQGTHILFREFSFVQATPHNRVSFLRAFWRCFRTVGKNGDLLTMKEYHCLLQLLCPDFPLELTQKAARIVLMDDAMDCLMSFSDFLFAFQIQFYYSEFLDSVAAIYEDLLSGKNPNTVIVPTSSSGQHRQRPALGGAGTLEGVEASLFYQCLENLCDRHKYSCPPPALVKEALSNVQRLTFYGFLMALSKHRGINQALGALPDKGDLMHDPAMDEELERLLLPFFRLAQVPGLVNSVTASPEASCLPSRTPPRVGSPWRPLHHSRKVDGESDGSTEETDESET

SEQ ID NO: 15579 - protein, 326 aa, Homo sapiens
  Payload ID: 3097
  Gene Symbol: C11orf49
  Gene Name: chromosome 11 open reading frame 49
  Uniprot ID: Q9H6J7
  ENSP ID: ENSP00000367881
MLSPERLALPDYEYLAQRHVLTYMEDAVCQLLENREDISQYGIARFFTEYFNSVCQGTHILFREFSFVQATPHNRVSFLRAFWRCFRTVGKNGDLLTMKEYHCLLQLLCPDFPLELTQKAARIVLMDDAMDCLMSFSDFLFAFQIQFYYSEFLDSVAAIYEDLLSGKNPNTVIVPTSSSGQHRQRPALGGAGTLEGVEASLFYQCLENLCDRHKYSCPPPALVKEALSNVQRLTFYGFLMALSKHRGINQALGALPDKGDLMHDPAMDEELERLVVRSKLHRTSRQHRAKEPGAFGFQRREKQEALERVSSASVPTPYHYRWEPRE

SEQ ID NO: 15580 - protein, 274 aa, Homo sapiens
  Payload ID: 3097
  Gene Symbol: C11orf49
  Gene Name: chromosome 11 open reading frame 49
  Uniprot ID: Q9H6J7
  ENSP ID: ENSP00000378844
MLSPERLALPDYEYLAQRHVLTYMEDAVCQLLENREDISQYGIARFFTEYFNSVCQGTHILFREFSFVQATPHNRVSFLRAFWRCFRTVGKNGDLLTMKEYHCLLQLLCPDFPLELTQKAARIVLMDDAMDCLMSFSDFLFAFQIQFYYSEFLDSVAAIYEDLLSGKNPNTVIVPTSSSGQHRQRPALGGAGTLEGVEASLFYQCLENLCDRHKYSCPPPALVKEALSNVQRLTFYGFLMALSKHRGINQALGALPDKGDLMHDPAMDEELERL

SEQ ID NO: 15581 - protein, 49 aa, Homo sapiens
  Payload ID: 3097
  Gene Symbol: C11orf49
  Gene Name: chromosome 11 open reading frame 49
  ENSP ID: ENSP00000432186
MLSPERLALPDYEYLAQRHVLTYMEDAVCQLLENREDISQYGIARFFTE

SEQ ID NO: 15582 - protein, 61 aa, Homo sapiens
  Payload ID: 3097
  Gene Symbol: C11orf49
  Gene Name: chromosome 11 open reading frame 49
  ENSP ID: ENSP00000432535
MLSPERLALPDYEYLVLTVYAREHTFSFENSASSKPPPTIGYHFYGPSGDASELWAKMAIC

SEQ ID NO: 15583 - protein, 68 aa, Homo sapiens
  Payload ID: 3097
  Gene Symbol: C11orf49
  Gene Name: chromosome 11 open reading frame 49
  ENSP ID: ENSP00000433494
  MOD_RES (1)..(1): Any amino acid
XHNRVSFLRAFWRCFRTVGKNGDLLTMKEYHCLLQLLCPDFPLELTQKAARFSLSPSGLCSWTMPWTA

SEQ ID NO: 15584 - protein, 193 aa, Homo sapiens
  Payload ID: 3097
  Gene Symbol: C11orf49
  Gene Name: chromosome 11 open reading frame 49
  ENSP ID: ENSP00000433707
RVSFLRAFWRCFRTVGKNGDLLTMKEYHCLLQLLCPDFPLELTQKAARIVLMDDAMDCLMSFSDFLFAFQIQFYYSEFLDSVAAIYEDLLSGKNPNTVIVPTSSSGQHRQRPALGGAGTLEGVEASLFYQCLENLCDRHKYSCPPPALVKEALSNVQRLTFYGFLMALSKHRGINQALAATRKEKPISNWVTA

SEQ ID NO: 15585 - protein, 84 aa, Homo sapiens
  Payload ID: 3097
  Gene Symbol: C11orf49
  Gene Name: chromosome 11 open reading frame 49
  ENSP ID: ENSP00000434380
MLSPERLALPDYEYLGMLETITLLNVRYMKGHTSSALLVKWRGCQNRSAPWFSCPKVLQIDTSATCPHLHGGCSVPAARKQGRY

SEQ ID NO: 15586 - protein, 49 aa, Homo sapiens; identical to SEQ ID NO: 15581
  Payload ID: 3097
  Gene Symbol: C11orf49
  Gene Name: chromosome 11 open reading frame 49
  ENSP ID: ENSP00000436097

SEQ ID NO: 15587 - protein, 49 aa, Homo sapiens; identical to SEQ ID NO: 15581
  Payload ID: 3097
  Gene Symbol: C11orf49
  Gene Name: chromosome 11 open reading frame 49
  ENSP ID: ENSP00000436571

SEQ ID NO: 15588 - protein, 102 aa, Homo sapiens
  Payload ID: 3097
  Gene Symbol: C11orf49
  Gene Name: chromosome 11 open reading frame 49
  ENSP ID: ENSP00000436595
MLSPERLALPDYEYLAQRHVLTYMEDAVCQLLENREDISQYGIARFFTEYFNSVCQGTHILFREFSFVQATPHNRVSFLRAFWRCFRTVGKNGDFYIQGKPN

SEQ ID NO: 15589 - protein, 49 aa, Homo sapiens; identical to SEQ ID NO: 15581
  Payload ID: 3097
  Gene Symbol: C11orf49
  Gene Name: chromosome 11 open reading frame 49
  ENSP ID: ENSP00000437259

SEQ ID NO: 15590 - protein, 123 aa, Homo sapiens
  Payload ID: 3098
  Gene Symbol: C11orf52
  Gene Name: chromosome 11 open reading frame 52
  Uniprot ID: Q96A22
  ENSP ID: ENSP00000278601
MGNRVCCGGSWSCPSTFQKKKKTGSQTRRTLKPQPQQLQQNLPKGHETTGHTYERVLQQQGSQERSPGLMSEDSNLHYADIQVCSRPHAREVKHVHLENATEYATLRFPQATPRYDSKNGTLV

SEQ ID NO: 15591 - protein, 44 aa, Homo sapiens
  Payload ID: 3098
  Gene Symbol: C11orf52
  Gene Name: chromosome 11 open reading frame 52
  ENSP ID: ENSP00000436268
MGNRVCCGGSWSCPSTFQKKKKTGSQTRRTLKPQPQQLQQNLPK

SEQ ID NO: 15592 - protein, 236 aa, Homo sapiens
  Payload ID: 3099
  Gene Symbol: C11orf53
  Gene Name: chromosome 11 open reading frame 53
  Uniprot ID: Q8IXP5
  ENSP ID: ENSP00000280325
MPGSPVTSGYYGVRRSFLSDSDFHNSKQFSNDVYTSSVGKPFPCESSAGQSHAALLEPYFPQEPYGDYRPPALTPNAGSLFSASPLPPLLPPPFPGDPAHFLFRDSWEQTLPDGLSQPDPVSADALLTLPPSTSCLSQLESGSIAQHRGSSWGSSLAGAQSYSLHALEDLHHTPGYPTPPPYPFTPFMTVSNDLPPKVGPLSPDEEADTGSLHDPSPWVKEDGSIAWGSYECRRAY

SEQ ID NO: 15593 - protein, 315 aa, Homo sapiens
  Payload ID: 3100
  Gene Symbol: C11orf54
  Gene Name: chromosome 11 open reading frame 54
  Uniprot ID: Q9H0W9
  ENSP ID: ENSP00000331209
MACAEFSFHVPSLEELAGVMQKGLKDNFADVQVSVVDCPDLTKEPFTFPVKGICGKTRIAEVGGVPYLLPLVNQKKVYDLNKIAKEIKLPGAFILGAGAGPFQTLGFNSEFMPVIQTESEHKPPVNGSYFAHVNPADGGCLLEKYSEKCHDFQCALLANLFASEGQPGKVIEVKAKRRTGPLNFVTCMRETLEKHYGNKPIGMGGTFIIQKGKVKSHIMPAEFSSCPLNSDEEVNKWLHFYEMKAPLVCLPVFVSRDPGFDLRLEHTHFFSRHGEGGHYHYDTTPDIVEYLGYFLPAEFLYRIDQPKETHSIGRD

SEQ ID NO: 15594 - protein, 315 aa, Homo sapiens; identical to SEQ ID NO: 15593
  Payload ID: 3100
  Gene Symbol: C11orf54
  Gene Name: chromosome 11 open reading frame 54
  Uniprot ID: Q9H0W9
  ENSP ID: ENSP00000346403

SEQ ID NO: 15595 - protein, 265 aa, Homo sapiens
  Payload ID: 3100
  Gene Symbol: C11orf54
  Gene Name: chromosome 11 open reading frame 54
  Uniprot ID: Q9H0W9
  ENSP ID: ENSP00000433721
MACAEFSFHVPSLEELAGVMQKGLKDNFADVQVSVVDCPDLTKEPFTFPVKGICGKTRIAEVGGVPYLLPLVNQKKVYDLNKIAKEIKLPGAFILGAGAGPFQTLGFNSEFMPVIQTESEHKPPVNGSYFAHVNPADGGCLLEKYSEKCHDFQCALLANLFASEGQPGKPAEFSSCPLNSDEEVNKWLHFYEMKAPLVCLPVFVSRDPGFDLRLEHTHFFSRHGEGGHYHYDTTPDIVEYLGYFLPAEFLYRIDQPKETHSIGRD

SEQ ID NO: 15596 - protein, 187 aa, Homo sapiens
  Payload ID: 3100
  Gene Symbol: C11orf54
  Gene Name: chromosome 11 open reading frame 54
  ENSP ID: ENSP00000433723
MPVIQTESEHKPPVNGSYFAHVNPADGGCLLEKYSEKCHDFQCALLANLFASEGQPGKVIEVKAKRRTGPLNFVTCMRETLEKHYGNKPIGMGGTFIIQKGKVKSHIMPAEFSSCPLNSDEEVNKWLHFYEMKAPLVCLPVFVSRDPGFDLRLEHTHFFSRHGEGGHYHYDTTPDIVEYLGYFLPAE

SEQ ID NO: 15597 - protein, 95 aa, Homo sapiens
  Payload ID: 3100
  Gene Symbol: C11orf54
  Gene Name: chromosome 11 open reading frame 54
  ENSP ID: ENSP00000434065
MACAEFSFHVPSLEELAGVMQKGLKDNFADVQVSVVDCPDLTKEPFTFPVKGICGKTRIAEVGGVPYLLPLVNQKKVYDLNKIAKEIKLPGAFIL

SEQ ID NO: 15598 - protein, 76 aa, Homo sapiens
  Payload ID: 3100
  Gene Symbol: C11orf54
  Gene Name: chromosome 11 open reading frame 54
  ENSP ID: ENSP00000434291
MACAEFSFHVPSLEELAGVMQKGLKDNFADVQVSVVDCPDLTKEPFTFPVKGICGKTRIAEVGGVPYLLPLVNQKK

SEQ ID NO: 15599 - protein, 239 aa, Homo sapiens
  Payload ID: 3100
  Gene Symbol: C11orf54
  Gene Name: chromosome 11 open reading frame 54
  ENSP ID: ENSP00000434382
MQKGLKDNFADVQVSVVDCPDLTKEPFTFPVKGICGKTRIAEVGGVPYLLPLVNQKKVYDLNKIAKEIKLPGAFILGAGAGPFQTLGFNSEFMPVIQTESEHKPPVNGSYFAHVNPADGGCLLEKYSEKCHDFQCALLANLFASEGQPGKVIEVKAKRRTGPLNFVTCMRETLEKHYGNKPIGMGGTFIIQKGKVKSHIMPAEFSSCPLNSDEEVNKWLHFYEMKAPLVCLPVFVSRDP

SEQ ID NO: 15600 - protein, 185 aa, Homo sapiens
  Payload ID: 3100
  Gene Symbol: C11orf54
  Gene Name: chromosome 11 open reading frame 54
  ENSP ID: ENSP00000434627
MACAEFSFHVPSLEELAGVMQKGLKDNFADVQVSVVDCPDLTKEPFTFPVKGICGKTRIAEVGGVPYLLPLVNQKKVYDLNKIAKEIKLPGAFILGAGAGPFQTLGFNSEVIEVKAKRRTGPLNFVTCMRETLEKHYGNKPIGMGGTFIIQKGKVKSHIMPAEFSSCPLNSDEEVNKWLHFYEMK

SEQ ID NO: 15601 - protein, 315 aa, Homo sapiens; identical to SEQ ID NO: 15593
  Payload ID: 3100
  Gene Symbol: C11orf54
  Gene Name: chromosome 11 open reading frame 54
  Uniprot ID: Q9H0W9
  ENSP ID: ENSP00000435113

SEQ ID NO: 15602 - protein, 100 aa, Homo sapiens
  Payload ID: 3100
  Gene Symbol: C11orf54
  Gene Name: chromosome 11 open reading frame 54
  ENSP ID: ENSP00000435204
MACAEFSFHVPSLEELAGVMQKGLKDNFADVQVSVVDCPDLTKEPFTFPVKGICGKTRIAEVGGVPYLLPLVNQKKVYDLNKIAKEIKLPGAFILGAGAG

SEQ ID NO: 15603 - protein, 149 aa, Homo sapiens
  Payload ID: 3100
  Gene Symbol: C11orf54
  Gene Name: chromosome 11 open reading frame 54
  ENSP ID: ENSP00000435231
MACAEFSFHVPSLEELAGVMQKGLKDNFADVQVSVVDCPDLTKEPFTFPVKGICGKTRIAEVGGVPYLLPLVNQKKVYDLNKIAKEIKLPGAFILGAGAGPFQTLGFNSEFMPVIQTESEHKPPVNGSYFAHVNPADGGCLLEKYSEKC

SEQ ID NO: 15604 - protein, 171 aa, Homo sapiens
  Payload ID: 3100
  Gene Symbol: C11orf54
  Gene Name: chromosome 11 open reading frame 54
  ENSP ID: ENSP00000435729
MACAEFSFHVPSLEELAGVMQKGLKDNFADVQVSVVDCPDLTKEPFTFPVKGICGKTRIAEVGGVPYLLPLVNQKKVYDLNKIAKEIKLPGAFILGAGAGPFQTLGFNSEFMPVIQTESEHKPPVNGSYFAHVNPADGGCLLEKYSEKCHDFQCALLANLFASEGQPGKVI

SEQ ID NO: 15605 - protein, 296 aa, Homo sapiens
  Payload ID: 3100
  Gene Symbol: C11orf54
  Gene Name: chromosome 11 open reading frame 54
  Uniprot ID: Q9H0W9
  ENSP ID: ENSP00000442094
MQKGLKDNFADVQVSVVDCPDLTKEPFTFPVKGICGKTRIAEVGGVPYLLPLVNQKKVYDLNKIAKEIKLPGAFILGAGAGPFQTLGFNSEFMPVIQTESEHKPPVNGSYFAHVNPADGGCLLEKYSEKCHDFQCALLANLFASEGQPGKVIEVKAKRRTGPLNFVTCMRETLEKHYGNKPIGMGGTFIIQKGKVKSHIMPAEFSSCPLNSDEEVNKWLHFYEMKAPLVCLPVFVSRDPGFDLRLEHTHFFSRHGEGGHYHYDTTPDIVEYLGYFLPAEFLYRIDQPKETHSIGRD

SEQ ID NO: 15606 - protein, 256 aa, Homo sapiens
  Payload ID: 3100
  Gene Symbol: C11orf54
  Gene Name: chromosome 11 open reading frame 54
  ENSP ID: ENSP00000477694
MACAEFSFHVPSLEELAGVMQKGLKDNFADVQVSVVDCPDLTKEPFTFPVKGICGKTRIAEVGGVPYLLPLVNQKKVYDLNKIAKEIKLPGAFILGAGAGPFQTLGFNSEVIEVKAKRRTGPLNFVTCMRETLEKHYGNKPIGMGGTFIIQKGKVKSHIMPAEFSSCPLNSDEEVNKWLHFYEMKAPLVCLPVFVSRDPGFDLRLEHTHFFSRHGEGGHYHYDTTPDIVEYLGYFLPAEFLYRIDQPKETHSIGRD

SEQ ID NO: 15607 - protein, 292 aa, Homo sapiens
  Payload ID: 3101
  Gene Symbol: C11orf57
  Gene Name: chromosome 11 open reading frame 57
  Uniprot ID: Q6ZUT1
  ENSP ID: ENSP00000339076
MSRIPLGKVLLRNVIRHTDAHNKIQEESDMWKIRELEKQMEDAYRGTKRKMLPSSSSRMRSDGFDEESQRYYWRPKNEISGTLEDDFLKAKSWNKKFYDYEANMPDRWGHSGYKELYPEEFETDSDQQDITNGKKTSPQVKSSTHESRKHKKSKKSHKKKQKKRSHKKQKKSKKEATDITADSSSEFSEETGASGTRKGKQPHKRKKKSRKKSLKKPALFLEAESNTSHSDDSASSSSEESEERDTKKTKRKKREKKAHTSVANNEIQERTNKRTNWKVATDERSAESSEDD

SEQ ID NO: 15608 - protein, 293 aa, Homo sapiens
  Payload ID: 3101
  Gene Symbol: C11orf57
  Gene Name: chromosome 11 open reading frame 57
  Uniprot ID: Q6ZUT1
  ENSP ID: ENSP00000376767
MSRIPLGKVLLRNVIRHTDAHNKIQEESDMWKIRELEKQMEDAYRGTKRKMLPSSSSRMRSDGFDEESQRYYWRPKNEISGTLEDDFLKAKSWNKKFYDYEANMPDRWGHSGYKELYPEEFETDSSDQQDITNGKKTSPQVKSSTHESRKHKKSKKSHKKKQKKRSHKKQKKSKKEATDITADSSSEFSEETGASGTRKGKQPHKRKKKSRKKSLKKPALFLEAESNTSHSDDSASSSSEESEERDTKKTKRKKREKKAHTSVANNEIQERTNKRTNWKVATDERSAESSEDD

SEQ ID NO: 15609 - protein, 292 aa, Homo sapiens; identical to SEQ ID NO: 15607
  Payload ID: 3101
  Gene Symbol: C11orf57
  Gene Name: chromosome 11 open reading frame 57
  Uniprot ID: Q6ZUT1
  ENSP ID: ENSP00000402208

SEQ ID NO: 15610 - protein, 264 aa, Homo sapiens
  Payload ID: 3101
  Gene Symbol: C11orf57
  Gene Name: chromosome 11 open reading frame 57
  Uniprot ID: Q6ZUT1
  ENSP ID: ENSP00000432188
MWKIRELEKQMEDAYRGTKRKMLPSSSSRMRSDGFDEESQRYYWRPKNEISGTLEDDFLKAKSWNKKFYDYEANMPDRWGHSGYKELYPEEFETDSSDQQDITNGKKTSPQVKSSTHESRKHKKSKKSHKKKQKKRSHKKQKKSKKEATDITADSSSEFSEETGASGTRKGKQPHKRKKKSRKKSLKKPALFLEAESNTSHSDDSASSSSEESEERDTKKTKRKKREKKAHTSVANNEIQERTNKRTNWKVATDERSAESSEDD

SEQ ID NO: 15611 - protein, 63 aa, Homo sapiens
  Payload ID: 3101
  Gene Symbol: C11orf57
  Gene Name: chromosome 11 open reading frame 57
  ENSP ID: ENSP00000432677
MSRIPLGKVLLRNVIRHTDAHNKVGDSGGIRYVENKRTGKTDGRCLPGDQKENATQQFKPDAQ

SEQ ID NO: 15612 - protein, 113 aa, Homo sapiens
  Payload ID: 3101
  Gene Symbol: C11orf57
  Gene Name: chromosome 11 open reading frame 57
  ENSP ID: ENSP00000434054
MSSGTQMLTISRMRSDGFDEESQRYYWRPKNEISGTLEDDFLKAKSWNKKFYDYEANMPDRWGHSGYKELYPEEFETDSSDQQDITNGKKTSPQVKSSTHESRKHKKSKKSHK

SEQ ID NO: 15613 - protein, 215 aa, Homo sapiens
  Payload ID: 3101
  Gene Symbol: C11orf57
  Gene Name: chromosome 11 open reading frame 57
  ENSP ID: ENSP00000435408
MWKIRELEKQMEDAYRGTKRKMLPSSSSRMRSDGFDEESQRYYWRPKNEISGTLEDDFLKAKSWNKKFYDYEANMPDRWGHSGYKELYPEEFETDSSDQQDITNGKKTSPQVKSSTHESRKHKKSKKSHKKKQKKRSHKKQKKSKKEATDITADSSSEFSEETGASGTRKGKQPHKRKKKSRKKSLKKPALFLEAESNTSHSDDSASSSSEESEE

SEQ ID NO: 15614 - protein, 91 aa, Homo sapiens
  Payload ID: 3101
  Gene Symbol: C11orf57
  Gene Name: chromosome 11 open reading frame 57
  ENSP ID: ENSP00000436169
MSRIPLGKVLLRNVIRHTDAHNKIQEESDMWKIRELEKQMEDAYRGTKRKMLPSSSSRMRSDGFDEESQRYYWRPKNEISGTLEDDFLKAK

SEQ ID NO: 15615 - protein, 183 aa, Homo sapiens
  Payload ID: 3102
  Gene Symbol: C11orf58
  Gene Name: chromosome 11 open reading frame 58
  Uniprot ID: O00193
  ENSP ID: ENSP00000228136
MSAARESHPHGVKRSASPDDDLGSSNWEAADLGNEERKQKFLRLMGAGKKEHTGRLVIGDHKSTSHFRTGEEDKKINEELESQYQQSMDSKLSGRYRRHCGLGFSEVEDHDGEGDVAGDDDDDDDDSPDPESPDDSESDSESEKEESAEELQAAEHPDEVEDPKNKKDAKSNYKMMFVKSSGS

SEQ ID NO: 15616 - protein, 157 aa, Homo sapiens
  Payload ID: 3102
  Gene Symbol: C11orf58
  Gene Name: chromosome 11 open reading frame 58
  ENSP ID: ENSP00000431237
MSAARESHPHGVKRSASPDDDLGSSNWEAADLGNEERKQKFLRLMGAGKKEHTGRLVIGDHKSTSHFRTGEEDKKINEELESQYQQSMDSKLSGRYRRHCGLGFSERRSFAMLPRLVSKLLGSSDLSAFQSAGTTGVSHHVRPGHIFNRREQQHAHK

SEQ ID NO: 15617 - protein, 90 aa, Homo sapiens
  Payload ID: 3102
  Gene Symbol: C11orf58
  Gene Name: chromosome 11 open reading frame 58
  ENSP ID: ENSP00000432207
MSAARESHPHGVKRSASPDDDKEHTGRLVIGDHKSTSHFRTGEEDKKINEELESQYQQSMDSKLSGRYRRHCGLGFSEVEDHDGEGDVAG

SEQ ID NO: 15618 - protein, 86 aa, Homo sapiens
  Payload ID: 3102
  Gene Symbol: C11orf58
  Gene Name: chromosome 11 open reading frame 58
  ENSP ID: ENSP00000432534
MSAARESHPHGVKRSASPDDDLGSSNWEAADLGNEERKQKFLRLMGAGKGKKTRKLMKNWSLNISKVWTVNYQEDIGDIVDLASVR

SEQ ID NO: 15619 - protein, 778 aa, Homo sapiens
  Payload ID: 3103
  Gene Symbol: C11orf63
  Gene Name: chromosome 11 open reading frame 63
  Uniprot ID: Q6NUN7
  ENSP ID: ENSP00000227349
MSKRKLIPKLSIQSPVLHTNLNVQSTHPPLKKEDLHRISKDSLESDSESLTQEIMCHSEFDDRIRGNGMEPDSLDEEESPRWGSLHEMEEEASGKAAQMAREQNHHTWDQGANNRQQPIEDKYSDLRYDPNWKSKKEEGQLLSVEALPESTDSSLENLPLAPLYPSQETSMELSGGKGEQKESPQSAASLLGSEFLSPNYEHGARRSKPFSELSDSDLEEKSSSLSPYVKSSSSHNEVFLPGSRGPRRRKSKQHFVEKNKLTLGLPTPKTDSYLQLHNKKRGESHPEQISYPVRVTDKTSIQNAKEMENAAIDPEDKWHQRAQQLKNYQEHWSQYESTKSSNVPRGQPSDMVNDHQPSRRPAKLKIRKQCKHQNGLKSSTTEEVTASQGNQNNPPRQQQNQNKPLDTSTKPESIVIMHASNNDVQASRALRSHNLKETSNTFAPPKQAFDKVLSKNSTGCDSGLNVNKERGHKDQEEKRFSYQQLHTLSDMDLNNLNELSKRHVLLSQKGSQFVYHINTHGSTKNKKQLKQPYTETKYRNLEMLWKFHSSSDSQTVRASPDSWLTQIMEQHQQALVQLTDVQPSEGALSSVTLPPILSRVESESQLSSERSQRNQVKISRSNSEGYLFQLEKGKKHKKRSSSKNTKLKGYQKRDVKLGGLGPDFESIRDKTQKLIQQKEYAKQVKEYNMKTLSILSKPQTEKTQKKSAIPRQKALEYAKTIPKPKPSNLTHQASKEQKNPTYAGKEESLPEISLLEILQNRHEREKQAVAAFKVLHIV

SEQ ID NO: 15620 - protein, 307 aa, Homo sapiens
  Payload ID: 3103
  Gene Symbol: C11orf63
  Gene Name: chromosome 11 open reading frame 63
  Uniprot ID: Q6NUN7
  ENSP ID: ENSP00000307695
MSKRKLIPKLSIQSPVLHTNLNVQSTHPPLKKEDLHRISKDSLESDSESLTQEIMCHSEFDDRIRGNGMEPDSLDEEESPRWGSLHEMEEEASGKAAQMAREQNHHTWDQGANNRQQPIEDKYSDLRYDPNWKSKKEEGQLLSVEALPESTDSSLENLPLAPLYPSQETSMELSGGKGEQKESPQSAASLLGSEFLSPNYEHGARRSKPFSELSDSDLEEKSSSLSPYVKSSSSHNEVFLPGSRGPRRRKSKQHFVEKNKLTLGLPTPKTDSYLQLHNKKRGESHPEQVILRVNSLPRDGFKTFWSQ

SEQ ID NO: 15621 - protein, 778 aa, Homo sapiens; identical to SEQ ID NO: 15619
  Payload ID: 3103
  Gene Symbol: C11orf63
  Gene Name: chromosome 11 open reading frame 63
  Uniprot ID: Q6NUN7
  ENSP ID: ENSP00000431669

SEQ ID NO: 15622 - protein, 313 aa, Homo sapiens
  Payload ID: 3104
  Gene Symbol: C11orf65
  Gene Name: chromosome 11 open reading frame 65
  Uniprot ID: Q8NCR3
  ENSP ID: ENSP00000376799
MPWKEESEFTKQDKAARVIQQAWKSFLNVAIFQHFKSLIDLRRQGEPRQIVKYINPKEAELLDAAAGIHVRFRLGGVKFPPDIYYKIFTHRPIEDLCANSPRNYAKLPAKHTSHNKNDHLQEEDHSGWYHRIENNGWRPVSDTFWLSTDGMVVEDKKESEFHFSKLKRRQDLEKKRKLRKIEWMRQMYYSGSLEAKSTHHETLGLIHTATKGLIRAFEDGGIDSVMEWEVDEVLNWTNTLNFDEYIASWKEIATSNSSANFKGFRFNQAQKNIYNYGGDISKMQMGIPDDTYYENVYQEPNVTRLTPDSTYGL

SEQ ID NO: 15623 - protein, 313 aa, Homo sapiens; identical to SEQ ID NO: 15622
  Payload ID: 3104
  Gene Symbol: C11orf65
  Gene Name: chromosome 11 open reading frame 65
  Uniprot ID: Q8NCR3
  ENSP ID: ENSP00000431706

SEQ ID NO: 15624 - protein, 105 aa, Homo sapiens
  Payload ID: 3104
  Gene Symbol: C11orf65
  Gene Name: chromosome 11 open reading frame 65
  ENSP ID: ENSP00000432827
  MOD_RES (1)..(1): Any amino acid
XQDLEKKRKLRKIEWMRQMYYSGSLEAKSTHHETLGLIHTATKGLIRAFEDGGIDSVMEWEVDEVLNWTNTLNFDEDTKKMEKSLVLENNAFLLYKSSSFVYLHY

SEQ ID NO: 15625 - protein, 246 aa, Homo sapiens
  Payload ID: 3104
  Gene Symbol: C11orf65
  Gene Name: chromosome 11 open reading frame 65
  Uniprot ID: Q8NCR3
  ENSP ID: ENSP00000433395
MPWKEESEFTKQDKAARVIQQAWKSFLVKFPPDIYYKIFTHRPIEDLCANSPRNYAKLPAKHTSHNKNDHLQEEDHSGWYHRIENNGWRPVSDTFWLSTDGMVVEDKKESEFHFSKLKRRQDLEKKRKLRKIEWMRQMYYSGSLEAKSTHHETLGLIHTATKGLIRAFEDGGIDSVMEWEVDEVLNWTNTLNFDEYIASWKEIATSNSSANFKGIFFRILFSIKMEYEEFLSSPTPANVNTILPQW

SEQ ID NO: 15626 - protein, 190 aa, Homo sapiens
  Payload ID: 3104
  Gene Symbol: C11orf65
  Gene Name: chromosome 11 open reading frame 65
  ENSP ID: ENSP00000434500
MPWKEESEFTKQDKAARVIQQAWKSFLNVAIFQHFKSLIDLRRQGEPRQIVKYINPKEVKFPPDIYYKIFTHRPIEDLCANSPRNYAKLPAKHTSHNKNDHLQEEDHSGWYHRIENNGWRPVSDTFWLSTDGMVVEDKKESEFHFSKLKRRQDLEKKRKLRKIEWMRQMYYSGSLEAKSTHHETLGLIHT

SEQ ID NO: 15627 - protein, 313 aa, Homo sapiens; identical to SEQ ID NO: 15622
  Payload ID: 3104
  Gene Symbol: C11orf65
  Gene Name: chromosome 11 open reading frame 65
  Uniprot ID: Q8NCR3
  ENSP ID: ENSP00000436400

SEQ ID NO: 15628 - protein, 313 aa, Homo sapiens; identical to SEQ ID NO: 15622
  Payload ID: 3104
  Gene Symbol: C11orf65
  Gene Name: chromosome 11 open reading frame 65
  Uniprot ID: Q8NCR3
  ENSP ID: ENSP00000483537

SEQ ID NO: 15629 - protein, 293 aa, Homo sapiens
  Payload ID: 3105
  Gene Symbol: C11orf68
  Gene Name: chromosome 11 open reading frame 68
  Uniprot ID: Q9H3H3
  ENSP ID: ENSP00000398350
MAAAAAAAVAGVGRGGGGAEPRQERSRARGWAGVERSEGRSRMEPGEELEEEGSPGGREDGFTAEHLAAEAMAADMDPWLVFDARTTPATELDAWLAKYPPSQVTRYGDPGSPNSEPVGWIAVYGQGYSPNSGDVQGLQAAWEALQTSGRPITPGTLRQLAITHHVLSGKWLMHLAPGFKLDHAWAGIARAVVEGQLQVAKVSPRAKEGGRQVICVYTDDFTDRLGVLEADSAIRAAGIKCLLTYKPDVYTYLGIYRANRWHLCPTLYESRFQLGGSARGSRVLDRANNVELT

SEQ ID NO: 15630 - protein, 292 aa, Homo sapiens
  Payload ID: 3105
  Gene Symbol: C11orf68
  Gene Name: chromosome 11 open reading frame 68
  Uniprot ID: Q9H3H3
  ENSP ID: ENSP00000409681
MAAAAAAAVAGVGRGGGGAEPRQERSRARGWAGVERSEGRRMEPGEELEEEGSPGGREDGFTAEHLAAEAMAADMDPWLVFDARTTPATELDAWLAKYPPSQVTRYGDPGSPNSEPVGWIAVYGQGYSPNSGDVQGLQAAWEALQTSGRPITPGTLRQLAITHHVLSGKWLMHLAPGFKLDHAWAGIARAVVEGQLQVAKVSPRAKEGGRQVICVYTDDFTDRLGVLEADSAIRAAGIKCLLTYKPDVYTYLGIYRANRWHLCPTLYESRFQLGGSARGSRVLDRANNVELT

SEQ ID NO: 15631 - protein, 251 aa, Homo sapiens
  Payload ID: 3105
  Gene Symbol: C11orf68
  Gene Name: chromosome 11 open reading frame 68
  Uniprot ID: Q9H3H3
  ENSP ID: ENSP00000433914
MEPGEELEEEGSPGGREDGFTAEHLAAEAMAADMDPWLVFDARTTPATELDAWLAKYPPSQVTRYGDPGSPNSEPVGWIAVYGQGYSPNSGDVQGLQAAWEALQTSGRPITPGTLRQLAITHHVLSGKWLMHLAPGFKLDHAWAGIARAVVEGQLQVAKVSPRAKEGGRQVICVYTDDFTDRLGVLEADSAIRAAGIKCLLTYKPDVYTYLGIYRANRWHLCPTLYESRFQLGGSARGSRVLDRANNVELT

SEQ ID NO: 15632 - protein, 267 aa, Homo sapiens
  Payload ID: 3106
  Gene Symbol: C11orf70
  Gene Name: chromosome 11 open reading frame 70
  Uniprot ID: Q9BRQ4
  ENSP ID: ENSP00000414390
MATGELGDLGGYYFRFLPQKTFQSLSSKEITSRLRQWSMLGRIKAQAFGFDQTFQSYRKDDFVMAFFKDPNVIPNLKLLSDSSGQWIILGTEVKKIEAINVPCTQLSMSFFHRLYDEDIVRDSGHIVKCLDSFCDPFLISDELRRVLLVEDSEKYEIFSQPDREEFLFCLFKHLCLGGALCQYEDVISPYLETTKLIYKDLVSVRKNPQTKKIQITSSVFKVSAYDSAGMCYPSAKNHEQTFSYFIVDPIRRHLHVLYHCYGVGDMS

SEQ ID NO: 15633 - protein, 95 aa, Homo sapiens
  Payload ID: 3106
  Gene Symbol: C11orf70
  Gene Name: chromosome 11 open reading frame 70
  ENSP ID: ENSP00000432322
  MOD_RES (1)..(1): Any amino acid
XFFHRLYDEDIVRDSGHIVKCLDSFCDPFLISDELRRVLLVEDSEKYEIFSQPDREEFLFCLFKHLCLGGALCQYEDVISPYLETTKLIYKDLVR

SEQ ID NO: 15634 - protein, 241 aa, Homo sapiens
  Payload ID: 3106
  Gene Symbol: C11orf70
  Gene Name: chromosome 11 open reading frame 70
  ENSP ID: ENSP00000433074
MATGELGDLGGYYFRFLPQKTFQSLSSKEITSRLRQWSMLGRIKAQAFGFDQTFQSYRKDDFVMAFFKDPNVIPNLKLLSDSSGQWIILGTEVKKIEAINVPCTQLSMSFFHRLYDEDIVRDSGHIVKCLDSFCDPFLISDELRRVLLVEDSEKYEIFSQPDREEFLFCLFKHLCLGGALCQYEDVISPYLETTKLIYKDLVSVRKNPQTKKIQITSSVFKVSAYVSVRELLQPKNLITFY

SEQ ID NO: 15635 - protein, 99 aa, Homo sapiens
  Payload ID: 3106
  Gene Symbol: C11orf70
  Gene Name: chromosome 11 open reading frame 70
  Uniprot ID: Q9BRQ4
  ENSP ID: ENSP00000435482
MATGELGDLGGYYFRFLPQKTFQSLSSKEITSRLRQWSMLGRIKAQAFGFDQTFQSYRKDDFVMAFFKDPNVIPNLKLLSDSSGQWIILGFASGRLRKI

SEQ ID NO: 15636 - protein, 147 aa, Homo sapiens
  Payload ID: 3107
  Gene Symbol: C11orf71
  Gene Name: chromosome 11 open reading frame 71
  Uniprot ID: Q6IPW1
  ENSP ID: ENSP00000325508
MALNNVSLSSGDQRSRVAYRSSHGDLRPRASALAMVSGDGFLVSRPEAIHLGPRQAVRPSVRAESRRVDGGGRSPREPDGRGRSRQARFSPYPIPAVEPDLLRSVLQQRLIALGVTTWTLKLSESATPDLRWCSTCSHSNIFEILVI

SEQ ID NO: 15637 - protein, 123 aa, Homo sapiens
  Payload ID: 3107
  Gene Symbol: C11orf71
  Gene Name: chromosome 11 open reading frame 71
  Uniprot ID: Q6IPW1
  ENSP ID: ENSP00000488810
MALNNVSLSSGDQRSRVAYRSSHGDLRPRASALAMVSGDGFLVSRPEAIHLGPRQAVRPSVRAESRRVDGGGRSPREPDGRGRSRQARFSPYPIPAVEPDLLRSVLQQRLIALGGVIAARISV

SEQ ID NO: 15638 - protein, 197 aa, Homo sapiens
  Payload ID: 3108
  Gene Symbol: C11orf73
  Gene Name: chromosome 11 open reading frame 73
  Uniprot ID: Q53FT3
  ENSP ID: ENSP00000278483
MFGCLVAGRLVQTAAQQVAEDKFVFDLPDYESINHVVVFMLGTIPFPEGMGGSVYFSYPDSNGMPVWQLLGFVTNGKPSAIFKISGLKSGEGSQHPFGAMNIVRTPSVAQIGISVELLDSMAQQTPVGNAAVSSVDSFTQFTQKMLDNFYNFASSFAVSQAQMTPSPSEMFIPANVVLKWYENFQRRLAQNPLFWKT

SEQ ID NO: 15639 - protein, 194 aa, Homo sapiens
  Payload ID: 3108
  Gene Symbol: C11orf73
  Gene Name: chromosome 11 open reading frame 73
  ENSP ID: ENSP00000432699
MFGCLVAGRLVQTAAQQVAEDKFVFDLPDYESINHVVVFMLGTIPFPEGMGGSVYFSYPDSNGMPVWQLLGFVTNGKPSAIFKISGLKSGEGSQHPFGAMNIVRTPSVAQIGISVELLDSMAQQTPVGNAAVSSVDSFTQFTQKMLDNFYNFASSFAVSQAQMTPSPSEMFIPANVVLKWYEAFSVSNIKAFYN

SEQ ID NO: 15640 - protein, 92 aa, Homo sapiens
  Payload ID: 3108
  Gene Symbol: C11orf73
  Gene Name: chromosome 11 open reading frame 73
  ENSP ID: ENSP00000433815
MFGCLVAGRLVQTAAQQVAEDKFVFDLPDYESINHVVVFMLGTIPFPEGMGGSVYFSYPDSNGMPVWQLLGFVTNGKPSAIFKISGLKSGNY

SEQ ID NO: 15641 - protein, 131 aa, Homo sapiens [sequence omitted]

SEQ ID NO: 15642 - protein, 147 aa, Homo sapiens
  Payload ID: 3109
  Gene Symbol: C11orf74
  Gene Name: chromosome 11 open reading frame 74
  Uniprot ID: Q86VG3
  ENSP ID: ENSP00000299442
MSAHMSGLEIMDEDQLIKDVLDKFLNCHEQTYDEEFLNTFTHLSQDLLLLPGEVEQDVSTSIPSCIPFVAQPPTCEVKPKPSVKRMDKQTEEILGDEVQLFSLDEEFDYDNVMLTSKFSPAEIENIKELCKQQKRKDTSPDLEKSCD

SEQ ID NO: 15643 - protein, 221 aa, Homo sapiens
  Payload ID: 3109
  Gene Symbol: C11orf74
  Gene Name: chromosome 11 open reading frame 74
  Uniprot ID: Q86VG3
  ENSP ID: ENSP00000334848
MSAHMSGLEIMDEDQLIKDVLDKFLNCHEQTYDEEFLNTFTHLSQEDHVSKRGVFGTDSSENIFTSAKVTHKNEADDYHLRNKTIFLRTSSQCLEEQVDNFLDLEDLDMDEEIKPQMSEDLLLLPGEVEQDVSTSIPSCIPFVAQPPTCEVKPKPSVKRMDKQTEEILGDEVQLFSLDEEFDYDNVMLTSKFSPAEIENIKELCKQQKRKDTSPDLEKSCD

SEQ ID NO: 15644 - protein, 221 aa, Homo sapiens; identical to SEQ ID NO: 15643
  Payload ID: 3109
  Gene Symbol: C11orf74
  Gene Name: chromosome 11 open reading frame 74
  Uniprot ID: Q86VG3
  ENSP ID: ENSP00000403937

SEQ ID NO: 15645 - protein, 221 aa, Homo sapiens; identical to SEQ ID NO: 15643
  Payload ID: 3109
  Gene Symbol: C11orf74
  Gene Name: chromosome 11 open reading frame 74
  Uniprot ID: Q86VG3
  ENSP ID: ENSP00000431374

SEQ ID NO: 15646 - protein, 83 aa, Homo sapiens
  Payload ID: 3109
  Gene Symbol: C11orf74
  Gene Name: chromosome 11 open reading frame 74
  ENSP ID: ENSP00000432685
MSAHMSGLEIMDEDQLIKDVLDKFLNCHEQTYDEEFLNTFTHLSQEDHVSKRGVFGTDSSENIFTSAKVTHKNEADDYHLRNK

SEQ ID NO: 15647 - protein, 147 aa, Homo sapiens; identical to SEQ ID NO: 15642
  Payload ID: 3109
  Gene Symbol: C11orf74
  Gene Name: chromosome 11 open reading frame 74
  Uniprot ID: Q86VG3
  ENSP ID: ENSP00000433152

SEQ ID NO: 15648 - protein, 180 aa, Homo sapiens
  Payload ID: 3109
  Gene Symbol: C11orf74
  Gene Name: chromosome 11 open reading frame 74
  ENSP ID: ENSP00000433407
MSAHMSGLEIMDEDQLIKDVLDKFLNCHEQTYDEEFLNTFTHLSQEDHVSKRGVFGTDSSENIFTSAKVTHKNEADDYHLRNKTIFLRTSSQCLEEQVDNFLDLEDLDMDEEIKPQMSEDLLLLPGEVEQDVSTSIPSCIPFVAQPPTCEVKPKPSVKRMDKQTEEILGDEVQLFSLDEE

SEQ ID NO: 15649 - protein, 109 aa, Homo sapiens
  Payload ID: 3109
  Gene Symbol: C11orf74
  Gene Name: chromosome 11 open reading frame 74
  ENSP ID: ENSP00000435190
MSAHMSGLEIMDEDQLIKDVLDKFLNCHEQTYDEEFLNTFTHLSQEDHVSKRGVFGTDSSENIFTSAKVTHKNEADDYHLRNKTIFLRTSSQCLEEQICCCFQEKWSRM

SEQ ID NO: 15650 - protein, 90 aa, Homo sapiens
  Payload ID: 3109
  Gene Symbol: C11orf74
  Gene Name: chromosome 11 open reading frame 74
  ENSP ID: ENSP00000435676
MSAHMSGLEIMDEDQLIKDVLDKFLNCHEQTYDEEFLNTFTHLSQDLLLLPGEVEQDVSTSIPSCIPFVAQPPTCEVKPKPSVKRMDKQT

SEQ ID NO: 15651 - protein, 221 aa, Homo sapiens; identical to SEQ ID NO: 15643
  Payload ID: 3109
  Gene Symbol: C11orf74
  Gene Name: chromosome 11 open reading frame 74
  Uniprot ID: Q86VG3
  ENSP ID: ENSP00000483671

SEQ ID NO: 15652 - protein, 572 aa, Homo sapiens
  Payload ID: 3110
  Gene Symbol: C11orf80
  Gene Name: chromosome 11 open reading frame 80
  ENSP ID: ENSP00000354227
WSLTLLPRPECSGAVSAHCNLHLPGSSDSHASVPRVAGITDAHHHAWLIMVASAGSLFGGMVLKKFLKEIQSILPGISAKLTWTSEEGSYSQDMTGVTPFQMIFEVDEKPRTLMTDCLVIKHFLRKIIMVHPKVRFHFSVKVNGILSTEIFGVENEPTLNLGNGIALLVDSQHYVSRPNFGTIESHCSRIHPVLGHPVMLFIPEDVAGMDLLGELILTPAAALCPSPKVSSNQLNRISSVSIFLYGPLGLPLILSTWEQPMTTFFKDTSSLVDWKKYHLCMIPNLDLNLDRDLVLPDVSYQVESSEEDQSQTMDPQGQTLLLFLFVDFHSAFPVQQMEIWGVYTLLTTHLNAILVESHSVVQGSIQFTVDKVLEQHHQAAKAQQKLQASLSVAVNSIMSILTGSTRSSFRKMCLQTLQAADTQEFRTKLHKVFREITQHQFLHHCSCEVKQQLTLEKKDSAQGTEDAPDNSSLELLADTSGQAENKRLKRGSPRIEEMRALRSARAPSPSEAAPRRPEATAAPLTPRGREHREAHGRALAPGRASLGSRLEDVLWLQEVSNLSEWLSPSPGP

SEQ ID NO: 15653 - protein, 460 aa, Homo sapiens
  Payload ID: 3110
  Gene Symbol: C11orf80
  Gene Name: chromosome 11 open reading frame 80
  ENSP ID: ENSP00000431578
MTDCLVIKHFLRKIIMVHPKVRFHFSVKVNGILSTEIFGVENEPTLNLGNGIALLVDSQHYVSRPNFGTIESHCSRIHPVLGHPVMLFIPEDVAGMDLLGELILTPAAALCPSPKVSSNQLNRISSQLHIFLYGPLGLPLILSTWEQPMTTFFKDTSSLVDWKKYHLCMIPNLDLNLDRDLVLPDVSYQVESSEEDQSQTMDPQGQTLLLFLFVDFHSAFPVQQMEIWGVYTLLTTHLNAILVESHSVVQGSIQFTVDKVLEQHHQAAKAQQKLQASLSVAVNSIMSILTGSTRSSFRKMCLQTLQAADTQEFRTKLHKVFREITQHQFLHHCSCEVKQQLTLEKKDSAQGTEDAPDNSSLELLADTSGQAENKRLKRGSPRIEEMRALRSARAPSPSEAAPRRPEATAAPLTPRGREHREAHGRALAPGRASLGSRLEDVLWLQEVSNLSEWLSPSPGP

SEQ ID NO: 15654 - protein, 677 aa, Homo sapiens
  Payload ID: 3110
  Gene Symbol: C11orf80
  Gene Name: chromosome 11 open reading frame 80
  Uniprot ID: Q8N6T0
  ENSP ID: ENSP00000432039
MGSRCRAWAWTRAWALAEFQARAEEGAAAAAAAAGGYPSTGRCRCSLRGMEGTAVAVFEILRFLIIHWKCDIDVSKGALLEGQLVISIEGLNSKHQANALHCVTTRWSLTLLPRPECSGAVSAHCNLHLPGSSDSHASVPRVAGITDAHHHAWLIMVASAGSLFGGMVLKKFLKEIQSILPGISAKLTWTSEEGSYSQDMTGVTPFQMIFEVDEKPRTLMTDCLVIKHFLRKIIMVHPKVRFHFSVKVNGILSTEIFGVENEPTLNLGNGIALLVDSQHYVRPNFGTIESHCSRIHPVLGHPVMLFIPEDVAGMDLLGELILTPAAALCPSPKVSSNQLNRISSVSIFLYGPLGLPLILSTWEQPMTTFFKDTSSLVDWKKYHLCMIPNLDLNLDRDLVLPDVSYQVESSEEDQSQTMDPQGQTLLLFLFVDFHSAFPVQQMEIWGVYTLLTTHLNAILVESHSVVQGSIQFTVDKVLEQHHQAAKAQQKLQASLSVAVNSIMSILTGSTRSSFRKMCLQTLQAADTQEFRTKLHKVFREITQHQFLHHCSCEVKQQLTLEKKDSAQGTEDAPDNSSLELLADTSGQAENKRLKRGSPRIEEMRALRSARAPSPSEAAPRRPEATAAPLTPRGREHREAHGRALAPGRASLGSRLEDVLWLQEVSNLSEWLSPSPGP

SEQ ID NO: 15655 - protein, 108 aa, Homo sapiens
  Payload ID: 3110
  Gene Symbol: C11orf80
  Gene Name: chromosome 11 open reading frame 80
  ENSP ID: ENSP00000432775
  MOD_RES (1)..(1): Any amino acid
XIQSILPGISAKLTWTSEEGSYSQDMTGVTPFQMIFEVDEKPRTLMTDCLVIKHFLRKIIMVHPKVRFHFSVKVNGILSTEIFGVENEPTLNLGNGIALLVDSQHYVR

SEQ ID NO: 15656 - protein, 210 aa, Homo sapiens
  Payload ID: 3110
  Gene Symbol: C11orf80
  Gene Name: chromosome 11 open reading frame 80
  ENSP ID: ENSP00000433032
  MOD_RES (1)..(1): Any amino acid
XVYTLLTTHLNAILVESHSVVQGSIQFTVDKVLEQHHQAAKAQQKLQASLSVAVNSIMSILTGSTRSSFRKMCLQTLQAADTQEFRTKLHKVFREITQHQFLHHCSCEVKQLTLEKKDSAQGTEDAPDNSSLELLAVLKQPSQPTAAGVQQLSHSVTSRDARYQRASRKQEAQEGQPPHRGDASSALCQGPEPVRGRPAPPGSHRGPPHS

SEQ ID NO: 15657 - protein, 150 aa, Homo sapiens
  Payload ID: 3110
  Gene Symbol: C11orf80
  Gene Name: chromosome 11 open reading frame 80
  ENSP ID: ENSP00000433869
  MOD_RES (1)..(1): Any amino acid
XIQSILPGISAKLTWTSEEGSYSQDMTGVTPFQMIFEVDEKPRTLMTDCLVIKHFLRKIIMVHPKVRFHFSVKVNGILSTEIFGRPNFGTIESHCSRIHPVLGHPVMLFIPEDVAGMDLLGELILTPAAALCPSPKVSSNQLNRISSVSI

SEQ ID NO: 15658 - protein, 485 aa, Homo sapiens
  Payload ID: 3110
  Gene Symbol: C11orf80
  Gene Name: chromosome 11 open reading frame 80
  ENSP ID: ENSP00000434648
MVASAGSLFGGMVLKKFLKEIQSILPGISAKLTWTSEEGSYSQDMTGVTPFQMIFEVDEKPRTLMTDCLVIKHFLRKIIMVHPKVRFHFSVKVNGILSTEIFGVENEPTLNLGNGIALLVDSQHYVRPNFGTIESHCSRIHPVLGHPVMLFIPEDVAGMDLLGELILTPAAALCPSPKVSSNQLNRISSVSIFLYGPLGLPLILSTWEQPMTTFFKDTSSLVDWKKYHLCMIPNLDLNLDRDLVLPDVSYQVESSEEDQSQTMDPQGQTLLLFLFVDFHSAFPVQQMEIWGVYTLLTTHLNAILVESHSVVQGSIQFTVDKVLEQHHQAAKAADTQEFRTKLHKVFREITQHQFLHHCSCEVKQQLTLEKKDSAQGTEDAPDNSSLELLADTSGQAENKRLKRGSPRIEEMRALRSARAPSPSEAAPRRPEATAAPLTPRGREHREAHGRALAPGRASLGSRLEDVLWLQEVSNLSEWLSPSPGP

SEQ ID NO: 15659 - protein, 459 aa, Homo sapiens
  Payload ID: 3110
  Gene Symbol: C11orf80
  Gene Name: chromosome 11 open reading frame 80
  ENSP ID: ENSP00000434804
MTDCLVIKHFLRKIIMVHPKVRFHFSVKVNGILSTEIFGVENEPTLNLGNGIALLVDSQHYVRPNFGTIESHCSRIHPVLGHPVMLFIPEDVAGMDLLGELILTPAAALCPSPKVSSNQLNRISSQLHIFLYGPLGLPLILSTWEQPMTTFFKDTSSLVDWKKYHLCMIPNLDLNLDRDLVLPDVSYQVESSEEDQSQTMDPQGQTLLLFLFVDFHSAFPVQQMEIWGVYTLLTTHLNAILVESHSVVQGSIQFTVDKVLEQHHQAAKAQQKLQASLSVAVNSIMSILTGSTRSSFRKMCLQTLQAADTQEFRTKLHKVFREITQHQFLHHCSCEVKQQLTLEKKDSAQGTEDAPDNSSLELLADTSGQAENKRLKRGSPRIEEMRALRSARAPSPSEAAPRRPEATAAPLTPRGREHREAHGRALAPGRASLGSRLEDVLWLQEVSNLSEWLSPSPGP

SEQ ID NO: 15660 - protein, 129 aa, Homo sapiens
  Payload ID: 3110
  Gene Symbol: C11orf80
  Gene Name: chromosome 11 open reading frame 80
  ENSP ID: ENSP00000434960
MTDCLVIKHFLRKIIMVHPKVRFHFSVKVNGILSTEIFGVENEPTLNLGNGIALLVDSQHYVSRPNFGTIESHCSRIHPVLGHPVMLFIPEDVAGMDLLGELILTPAAALCPSPKVSSNQLNRISSVSI

SEQ ID NO: 15661 - protein, 47 aa, Homo sapiens
  Payload ID: 3110
  Gene Symbol: C11orf80
  Gene Name: chromosome 11 open reading frame 80
  ENSP ID: ENSP00000435512
MVLKKFLKEIQSILPGISAKLTWTSEEGSYSQDMTGVTPFQMIFEAG

SEQ ID NO: 15662 - protein, 67 aa, Homo sapiens
  Payload ID: 3110
  Gene Symbol: C11orf80
  Gene Name: chromosome 11 open reading frame 80
  ENSP ID: ENSP00000437143
MVLKKFLKEIQSILPGISAKLTWTSEEGSYSQDMTGVTPFQMIFEVRFHFSVKVNGILSTEIFGVEN

SEQ ID NO: 15663 - protein, 15 aa, Homo sapiens
  Payload ID: 3110
  Gene Symbol: C11orf80
  Gene Name: chromosome 11 open reading frame 80
  ENSP ID: ENSP00000437319
MVASAGSLFGGMVLK

SEQ ID NO: 15664 - protein, 511 aa, Homo sapiens
  Payload ID: 3110
  Gene Symbol: C11orf80
  Gene Name: chromosome 11 open reading frame 80
  ENSP ID: ENSP00000444319
MVLKKFLKEIQSILPGISAKLTWTSEEGSYSQDMTGVTPFQMIFEVDEKPRTLMTDCLVIKHFLRKIIMVHPKVRFHFSVKVNGILSTEIFGVENEPTLNLGNGIALLVDSQHYVSRPNFGTIESHCSRIHPVLGHPVMLFIPEDVAGMDLLGELILTPAAALCPSPKVSSNQLNRISSVSIFLYGPLGLPLILSTWEQPMTTFFKDTSSLVDWKKYHLCMIPNLDLNLDRDLVLPDVSYQVESSEEDQSQTMDPQGQTLLLFLFVDFHSAFPVQQMEIWGVYTLLTTHLNAILVESHSVVQGSIQFTVDKVLEQHHQAAKAQQKLQASLSVAVNSIMSILTGSTRSSFRKMCLQTLQAADTQEFRTKLHKVFREITQHQFLHHCSCEVKQLTLEKKDSAQGTEDAPDNSSLELLADTSGQAENKRLKRGSPRIEEMRALRSARAPSPSEAAPRRPEATAAPLTPRGREHREAHGRALAPGRASLGSRLEDVLWLQEVSNLSEWLSPSPGP

SEQ ID NO: 15665 - protein, 381 aa, Homo sapiens
  Payload ID: 3111
  Gene Symbol: C11orf84
  Gene Name: chromosome 11 open reading frame 84
  Uniprot ID: Q9BUA3
  ENSP ID: ENSP00000294244
MALKAEGAALDCFEVTLKCEEGEDEEEAMVVAVIPRPEPMLRVTQQEKTPPPRPSPLEAGSDGCEEPKQQVSWEQEFLVGSSPGGSGRALCMVCGAEIRAPSADTARSHILEQHPHTLDLSPSEKSNILEAWSEGVALLQDVRAEQPSPPNSDSGQDAHPDPDANPDAARMPAEIVVLLDSEDNPSLPKRSRPRGLRPLELPAVPATEPGNKKPRGQRWKEPPGEEPVRKKRGRPMTKNLDPDPEPPSPDSPTETFAAPAEVRHFTDGSFPAGFVLQLFSHTQLRGPDSKDSPKDREVAEGGLPRAESPSPAPPPGLRGTLDLQVIRVRMEEPPAVSLLQDWSRHPQGTKRVGAGDTSDWPTVLSESSTTVAGKPEKGNGV

SEQ ID NO: 15666 - protein, 29 aa, Homo sapiens
  Payload ID: 3111
  Gene Symbol: C11orf84
  Gene Name: chromosome 11 open reading frame 84
  ENSP ID: ENSP00000443715
  MOD_RES (1)..(1): Any amino acid
XKDREVAEGGLPRAESPSPGLTPSRRSQF

SEQ ID NO: 15667 - protein, 112 aa, Homo sapiens
  Payload ID: 3111
  Gene Symbol: C11orf84
  Gene Name: chromosome 11 open reading frame 84
  ENSP ID: ENSP00000445256
EPVRKKRGRPMTKNLDPDPEPPSPDSPTETFAAPAEVRHFTDGSFPAGFVLQLFSHTQLRGPDSKDSPKDREVAEGGLPRAESPSPGSPHFKSWGTLCANSIYLEWYIGWRQ

SEQ ID NO: 15668 - protein, 216 aa, Homo sapiens
  Payload ID: 3112
  Gene Symbol: C11orf85
  Gene Name: chromosome 11 open reading frame 85
  Uniprot ID: Q3KP22
  ENSP ID: ENSP00000301896
MSLKPFTYPFPETRFLHAGPNVYKFKIRYGKSIRGEEIENKEVITQELEDSVRVVLGNLDNLQPFATEHFIVFPYKSKWERVSHLKFKHGEIILIPYPFVFTLYVEMKWFHENLSPGKPISDSPLGLVPVEKKAVGAVMRKRKHMDEPSSPSRPGLDRIGKEKPNKDCRRLWPLISLMSRNKILSGDTACQGELSHPCSTTHLHLRSEQPPASLGF

SEQ ID NO: 15669 - protein, 216 aa, Homo sapiens; identical to SEQ ID NO: 15668
  Payload ID: 3112
  Gene Symbol: C11orf85
  Gene Name: chromosome 11 open reading frame 85
  Uniprot ID: Q3KP22
  ENSP ID: ENSP00000395273

SEQ ID NO: 15670 - protein, 114 aa, Homo sapiens
  Payload ID: 3112
  Gene Symbol: C11orf85
  Gene Name: chromosome 11 open reading frame 85
  ENSP ID: ENSP00000432213
MSLKPFTYPFPETRFLHAGPNVYKFKIRYGKSIRGEEIENKEVITQELEVGKEAYDFWKSYSLRMHPHSGFNYFLQTESQPPLDNLASSCYISFAKELYVFPWEFKACILSQFS

SEQ ID NO: 15671 - protein, 176 aa, Homo sapiens
  Payload ID: 3112
  Gene Symbol: C11orf85
  Gene Name: chromosome 11 open reading frame 85
  ENSP ID: ENSP00000434568
MSLKPFTYPFPETRFLHAGPNVYKFKIRYGKSIRGEEIENKEVITQELEVPVEKKAVGAVMRKRKHMDEPSSPSRPGLDRAKIGTSSQGPSKKKPPVETRRNRERKTQQGLQETLASDITDVQKQDSEWGHSLPGRIVPPLQHNSPPPKERAATGFFGFLSSLFPFRYFFRKSSHS

SEQ ID NO: 15672 - protein, 59 aa, Homo sapiens
  Payload ID: 3112
  Gene Symbol: C11orf85
  Gene Name: chromosome 11 open reading frame 85
  ENSP ID: ENSP00000435480
  MOD_RES (1)..(1): Any amino acid
XIGKEKPNKDCRRLWPLISLMSRNKILSGDTACQGELSHPCSTTHLHLRSEQPPASLGF

SEQ ID NO: 15673 - protein, 115 aa, Homo sapiens
  Payload ID: 3113
  Gene Symbol: C11orf86
  Gene Name: chromosome 11 open reading frame 86
  Uniprot ID: A6NJI1
  ENSP ID: ENSP00000311479
MGTGLRSQSLREPRPSYGKLQEPWGRPQEGQLRRALSLRQGQEKSRSQGLERGTEGPDATAQERVPGSLGDTEQLIQAQRRGSRWWLRRYQQVRRRWESFVAIFPSVTLSQPASP

SEQ ID NO: 15674 - protein, 197 aa, Homo sapiens
  Payload ID: 3114
  Gene Symbol: C11orf87
  Gene Name: chromosome 11 open reading frame 87
  Uniprot ID: Q6NUJ2
  ENSP ID: ENSP00000331581
MSARAPKELRLALPPCLLNRTFASPNASGSGNTGARGPGAVGSGTCITQVGQQLFQSFSSTLVLIVLVTLIFCLIVLSLSTFHIHKRRMKKRKMQRAQEEYERDHCSGSRGGGGLPRPGRQAPTHAKETRLERQPRDSPFCAPSNASSLSSSSPGLPCQGPCAPPPPPPASSPQGAHAASSCLDTAGEGLLQTVVLS

SEQ ID NO: 15675 - protein, 196 aa, Homo sapiens
  Payload ID: 3115
  Gene Symbol: C11orf88
  Gene Name: chromosome 11 open reading frame 88
  Uniprot ID: Q6PI97
  ENSP ID: ENSP00000333845
METGPSEEPSGRKESQEMCPPGLLVFAGSSEQDANLAKQFWISASMYPPSESQLVLRRDSSQRLPVARPRRSRGSENSHSSQSFHLASNKNRDIFAEALKIQESEEKVKYLQKTRSHSVTQNEVQWHDHGSLQPQLSRIQAKTREEILQLLRKQREERISKELISLPYKPKAKEHKAKKVVSESDKEDQEEVKTLD

SEQ ID NO: 15676 - protein, 169 aa, Homo sapiens
  Payload ID: 3115
  Gene Symbol: C11orf88
  Gene Name: chromosome 11 open reading frame 88
  Uniprot ID: Q6PI97
  ENSP ID: ENSP00000364768
METGPSEEPSGRKESQEMCPPGLLVFAGSSEQDANLAKQFWISASMYPPSESQLVLRRDSSQRLPVARPRRSRGSENSHSSQSFHLASNKNRDIFAEALKIQESEEKVKYLQKAKTREEILQLLRKQREERISKELISLPYKPKAKEHKAKKVVSESDKEDQEEVKTLD

SEQ ID NO: 15677 - protein, 178 aa, Homo sapiens
  Payload ID: 3115
  Gene Symbol: C11orf88
  Gene Name: chromosome 11 open reading frame 88
  ENSP ID: ENSP00000432911
METGPSEEPSGRKESQEMCPPGLLVFAGSSEQDANLAKQFWISASMYPPSESQLVLRRDSSQRLPVARPRRSRGSENSHSSQSFHLASNKNRDIFAEALKIQESEEKVKYLQKTRSHSVTQNEVQWHDHGSLQPQLSRIQAKTREEILQLLRKQREERISKELISLPYKPKAKEHKAK

SEQ ID NO: 15678 - protein, 29 aa, Homo sapiens
  Payload ID: 3115
  Gene Symbol: C11orf88
  Gene Name: chromosome 11 open reading frame 88
  ENSP ID: ENSP00000435029
NRDIFAEALKIQESEEKVKYLQKITGTIV

SEQ ID NO: 15679 - protein, 193 aa, Homo sapiens
  Payload ID: 3116
  Gene Symbol: C11orf91
  Gene Name: chromosome 11 open reading frame 91
  Uniprot ID: Q3C1V1
  ENSP ID: ENSP00000368296
MPKGRRGSHSPTMSQRSAPPLYFPSLYDRGISSSPLSDFNIWKKLFVPLKAGGAPVGGAAGARSLSQALPAPAPPPPPPPGLGPSSERPWPSPWPSGLASIPYEPLRFFYSPPPGPEVVASPLVPCPSTPRLASASHPEELCELEIRIKELELLTITGDGFDSQSYTFLKALKDEKLQGLKTKQPGKKSASLS

SEQ ID NO: 15680 - protein, 70 aa, Homo sapiens
  Payload ID: 3116
  Gene Symbol: C11orf91
  Gene Name: chromosome 11 open reading frame 91
  ENSP ID: ENSP00000433460
  MOD_RES (1)..(1): Any amino acid
XPEVVASPLVPCPSTPRLASASHPEELCELEIRIKELELLTITGDGFDSQSFLGLWTTCADAGRIPQPTS

SEQ ID NO: 15681 - protein, 98 aa, Homo sapiens
  Payload ID: 3117
  Gene Symbol: C11orf94
  Gene Name: chromosome 11 open reading frame 94
  Uniprot ID: C9JXX5
  ENSP ID: ENSP00000401498
MVLAMLGALHPRAGLSLFLHLILAVALLRSQPLRSQRSVPEAFSAPLELSQPLSGLVDDYGILPKHPRPRGPRPLLSRAQQRKRDGPDLAEYYYDAHL

SEQ ID NO: 15682 - protein, 276 aa, Homo sapiens
  Payload ID: 3118
  Gene Symbol: C11orf95
  Gene Name: chromosome 11 open reading frame 95
  ENSP ID: ENSP00000478462
  MOD_RES (1)..(1): Any amino acid
XNSWDAHLGLGACGEAEGLGVQGAEEEEEEEEEEEEEGAGVPACPPKGPGKAPAGGGCRRQRRGGPVAPRARRLRLSASRRAGGSRGLGARRLERRLKESLQNWFRAECLMDYDPRGNRLAWGGQPEALSELTQSPPGDDLAPQDLTGKSRDSASAAGAPSSQDLSPPDVKEEAGWVPERPGPAEEEEELEEGEGERAGVPGRSPRGRAHRRHPQERWRLEYLMELDGGRRGLVCGVCGGALASLKMSTIERHIRRRHPGSTRLGGPVQALIAREW

SEQ ID NO: 15683 - protein, 678 aa, Homo sapiens
  Payload ID: 3118
  Gene Symbol: C11orf95
  Gene Name: chromosome 11 open reading frame 95
  Uniprot ID: C9JLR9
  ENSP ID: ENSP00000482180
MEPGGDHRSRSSGGRGGPGPAVASARGRRLPPAGSSGSAEPEEDEGGQDLQLEGGALGSWGSAPLPSSRARGPASSGRKYSDHCEARASRPGKSRIPGRDHRRYYHDHWRLEYLMDFNPARHGMVCMVCGSSLATLKLSTIKRHIRQKHPYSLHWSPREKEVISNSWDAHLGLGACGEAEGLGVQGAEEEEEEEEEEEEEGAGVPACPPKGPGKAPAGGGCRRQRRGGPVAPRARRLRLSASRRAGGSRGLGARRLERRLKESLQNWFRAECLMDYDPRGNRLVCMACGRALPSLHLDDIRAHVLEVHPGSLGLSGPQRSALLQAWGGQPEALSELTQSPPGDDLAPQDLTGKSRDSASAAGAPSSQDLSPPDVKEEAGWVPERPGPAEEEEELEEGEGERAGVPGRSPRGRAHRRHPQERWRLEYLMELDGGRRGLVCGVCGGALASLKMSTIERHIRRRHPGSTRLGGPVQALIAREWSEKAAHLLALGPPRPESPQGPIPPGTAAASDEGGGDEEEEPEEEEEEWGDVPLSPGAPLERPAEEEEDEEDGQEPGGLALPPPPPPPPPPPPRSREQRRNYQPRWRGEYLMDYDGSRRGLVCMVCGGALATLKVSTIKRHILQVHPFSMDFTPEERQTILEAYEEAALRCYGHEGFGPPAPAPRDGGADLKSGAVCRA

SEQ ID NO: 15684 - protein, 47 aa, Homo sapiens
  Payload ID: 3118
  Gene Symbol: C11orf95
  Gene Name: chromosome 11 open reading frame 95
  ENSP ID: ENSP00000482857
MEPGGDHRSRSSGGRGGPGPAVASARGRRLPPAGSSGSAEPEEDEGD

SEQ ID NO: 15685 - protein, 202 aa, Homo sapiens
  Payload ID: 3118
  Gene Symbol: C11orf95
  Gene Name: chromosome 11 open reading frame 95
  ENSP ID: ENSP00000483097
  MOD_RES (1)..(1): Any amino acid
XVISNSWDAHLGLGACGEAEGLGVQGAEEEEEEEEEEEEEGAGVPACPPKGPGDVPLSPGAPLERPAEEEEDEEDGQEPGGLALPPPPPPPPPPPPRSREQRRNYQPRWRGEYLMDYDGSRRGLVCMVCGGALATLKVSTIKRHILQVHPFSMDFTPEERQTILEAYEEAALRCYGHEGFGPPAPAPRDGGADLKSGAVCRA

SEQ ID NO: 15686 - protein, 435 aa, Homo sapiens
  Payload ID: 3119
  Gene Symbol: C11orf96
  Gene Name: chromosome 11 open reading frame 96
  Uniprot ID: Q7Z7L8
  ENSP ID: ENSP00000340667
MGNKQPQKVTVPTGTALQGVVLIVSTLHQPGGWICGKDPCCSLRPLSNSVQNALACKSKQDYQAGILFKTRAFISRDCGSDAAEDSASKGETYTLTLEHKGAGEGDLRPRGQPGWCRLGDPRRDSARPVAAIEGPCPGAARASRVLRGRGFSRNPRGRGLPSGAGWRGAGGAGEGAVTFPERRGDVRRKGAGRARFKWHSLSSELRAVWAAAGYISREPGRRGADGDSSGGERLGARRNSAPRAPCPPTGPPARPPSRGAPARAREGRRHPAADLDPPPGEPPAAASRGAPAQRPPSESPGAPPPGPADAGGAMAAKPGELMGICSSYQAVMPHFVCLADEFPQPVRPAKLPKGRGRLRRPRQSRFKTQPVTFDEIQEVEEEGVSPMEEEKAKKSFLQSLECLRRSTQSLSLQREQLSSCKLRNSLDSSDSDSAL

SEQ ID NO: 15687 - protein, 417 aa, Homo sapiens [sequence omitted]

SEQ ID NO: 15688 - protein, 122 aa, Homo sapiens
  Payload ID: 3119
  Gene Symbol: C11orf96
  Gene Name: chromosome 11 open reading frame 96
  ENSP ID: ENSP00000479976
MAAKPGELMGICSSYQAVMPHFVCLADEFPQPVRPAKLPKGRGRLRRPRQSRFKTQPVTFDEIQEVEEEGVSPMEEEKAKKSFLQSLECLRRSTQSLSLQREQLSSCKLRNSLDSSDSDSAL

SEQ ID NO: 15689 - protein, 122 aa, Homo sapiens
  Payload ID: 3120
  Gene Symbol: C11orf98
  Gene Name: chromosome 11 open reading frame 98
  Uniprot ID: E9PRG8
  ENSP ID: ENSP00000432316
MGAPGGKINRPRTELKKKLFKRRRVLNRERRLRHRVVGAVIDQGLITRHHLKKRASSARANITLSGKKRRKLLQQIRLAQKEKTAMEGEAGTEVGEGNPGFIWDNTSFFPLLSGSPFKASQD

SEQ ID NO: 15690 - protein, 123 aa, Homo sapiens
  Payload ID: 3120
  Gene Symbol: C11orf98
  Gene Name: chromosome 11 open reading frame 98
  ENSP ID: ENSP00000432523
MGAPGGKINRPRTELKKKLFKRRRVLNRERRLRHRVVGAVIDQGLITRHHLKKRASSARANITLSGKKRRKLLQQIRLAQKEKTAMEVEAPSKPARTSEPQLKRQKKTKAPQDVEMKDLEDES

SEQ ID NO: 15691 - protein, 376 aa, Homo sapiens
  Payload ID: 3121
  Gene Symbol: C12orf10
  Gene Name: chromosome 12 open reading frame 10
  Uniprot ID: Q9HB07
  ENSP ID: ENSP00000267103
MGHQFLRGLLTLLLPPPPLYTRHRMLGPESVPPPKRSRSKLMAPPRIGTHNGTFHCDEALACALLRLLPEYRDAEIVRTRDPEKLASCDIVVDVGGEYDPRRHRYDHHQRSFTETMSSLSPGKPWQTKLSSAGLIYLHFGHKLLAQLLGTSEEDSMVGTLYDKMYENFVEEVDAVDNGISQWAEGEPRYALTTTLSARVARLNPTWNHPDQDTEAGFKRAMDLVQEEFLQRLDFYQHSWLPARALVEEALAQRFQVDPSGEIVELAKGACPWKEHLYHLESGLSPPVAIFFVIYTDQAGQWRIQCVPKEPHSFQSRLPLPEPWRGLRDEALDQVSGIPGCIFVHASGFTGGHHTREGALSMARATLAQRSYLPQIS

SEQ ID NO: 15692 - protein, 213 aa, Homo sapiens
  Payload ID: 3121
  Gene Symbol: C12orf10
  Gene Name: chromosome 12 open reading frame 10
  ENSP ID: ENSP00000448433
MYENFVEEVDAVDNGISQWAEGEPRYALTTTLSARVARLNPTWNHPDQDTEAGFKRAMDLVQEEFLQRLDFYQHSWLPARALVEEALAQRFQVDPSGEIVELAKGACPWKEHLYHLESGLSPPVAIFFVIYTDQAGQWRIQCVPKEPHSFQSRLPLPEPWRGLRDEALDQVSGIPGCIFVHASGFTGGHHTREGALSMARATLAQRSYLPQIS

SEQ ID NO: 15693 - protein, 301 aa, Homo sapiens
  Payload ID: 3121
  Gene Symbol: C12orf10
  Gene Name: chromosome 12 open reading frame 10
  ENSP ID: ENSP00000450270
MLGPESVPPPKRSRSKLMAPPRIGTHNGTFHCDEALACALLRLLPEYRDAEIVRTRDPEKLASCDIVVDVGGEYDPRRHRYDHHQRSFTETMSSLSPGKPWQTKLSSAGLIYLHFGHKLLAQLLGTSEEDSMVGTLYDKAGFKRAMDLVQEEFLQRLDFYQHSWLPARALVEEALAQRFQVDPSGEIVELAKGACPWKEHLYHLESGLSPPVAIFFVIYTDQAGQWRIQCVPKEPHSFQSRLPLPEPWRGLRDEALDQVSGIPGCIFVHASGFTGGHHTREGALSMARATLAQRSYLPQIS

SEQ ID NO: 15694 - protein, 130 aa, Homo sapiens
  Payload ID: 3121
  Gene Symbol: C12orf10
  Gene Name: chromosome 12 open reading frame 10
  ENSP ID: ENSP00000455319
  MOD_RES (1)..(1): Any amino acid
XMVGTLYDKVDPSGEIVELAKGACPWKEHLYHLESGLSPPVAIFFVIYTDQAGQWRIQCVPKEPHSFQSRLPLPEPWRGLRDEALDQVSGIPGCIFVHASGFTGGHHTREGALSMARATLAQRSYLPQIS

SEQ ID NO: 15695 - protein, 325 aa, Homo sapiens
  Payload ID: 3122
  Gene Symbol: C12orf29
  Gene Name: chromosome 12 open reading frame 29
  Uniprot ID: Q8N999
  ENSP ID: ENSP00000349358
MKRLGSVQRKMPCVFVTEVKEEPSSKREHQPFKVLATETVSHKALDADIYSAIPTEKVDGTCCYVTTYKDQPYLWARLDRKPNKQAEKRFKNFLHSKENPKEFFWNVEEDFKPAPECWIPAKETEQINGNPVPDENGHIPGWVPVEKNNKQYCWHSSVVNYEFEIALVLKHHPDDSGLLEISAVPLSDLLEQTLELIGTNINGNPYGLGSKKHPLHLLIPHGAFQIRNLPSLKHNDLVSWFEDCKEGKIEGIVWHCSDGCLIKVHRHHLGLCWPIPDTYMNSRPVIINMNLNKCDSAFDIKCLFNHFLKIDNQKFVRLKDIIFDV

SEQ ID NO: 15696 - protein, 38 aa, Homo sapiens
  Payload ID: 3122
  Gene Symbol: C12orf29
  Gene Name: chromosome 12 open reading frame 29
  Uniprot ID: Q8N999
  ENSP ID: ENSP00000402018
MKRLGSVQRKMPCVFVTEVKEEPSSKREHQISHTFGLD

SEQ ID NO: 15697 - protein, 38 aa, Homo sapiens; identical to SEQ ID NO: 15696
  Payload ID: 3122
  Gene Symbol: C12orf29
  Gene Name: chromosome 12 open reading frame 29
  Uniprot ID: Q8N999
  ENSP ID: ENSP00000447327

SEQ ID NO: 15698 - protein, 38 aa, Homo sapiens; identical to SEQ ID NO: 15696
  Payload ID: 3122
  Gene Symbol: C12orf29
  Gene Name: chromosome 12 open reading frame 29
  Uniprot ID: Q8N999
  ENSP ID: ENSP00000448194

SEQ ID NO: 15699 - protein, 50 aa, Homo sapiens
  Payload ID: 3122
  Gene Symbol: C12orf29
  Gene Name: chromosome 12 open reading frame 29
  ENSP ID: ENSP00000448332
MKRLGSVQRKMPCVFVTEVKEEPSSKREHQVSTFWGNPLISHLKFWQLKL

SEQ ID NO: 15700 - protein, 552 aa, Homo sapiens
  Payload ID: 3123
  Gene Symbol: C12orf4
  Gene Name: chromosome 12 open reading frame 4
  Uniprot ID: Q9NQ89
  ENSP ID: ENSP00000261250
MKKNRERFCNREREFVYKFKVGSQCLELRVPLKFPVQENASHLHGRLMLLHSLPCFIEKDLKEALTQFIEEESLSDYDRDAEASLAAVKSGEVDLHQLASTWAKAYAETTLEHARPEEPSWDEDFADVYHDLIHSPASETLLNLEHNYFVSISELIGERDVELKKLRERQGIEMEKVMQELGKSLTDQDVNSLAAQHFESQQDLENKWSNELKQSTAIQKQEYQEWVIKLHQDLKNPNNSSLSEEIKVQPSQFRESVEAIGRIYEEQRKLEESFTIHLGAQLKTMHNLRLLRADMLDFCKHKRNHRSGVKLHRLQTALSLYSTSLCGLVLLVDNRINSYSGIKRDFATVCQECTDFHFPRIEEQLEVVQQVVLYARTQRRSKLKESLDSGNQNGGNDDKTKNAERNYLNVLPGEFYITRHSNLSEIHVAFHLCVDDHVKSGNITARDPAIMGLRNILKVCCTHDITTISIPLLLVHDMSEEMTIPWCLRRAELVFKCVKGFMMEMASWDGGISRTVQFLVPQSISEEMFYQLSNMLPQIFRVSSTLTLTSKH

SEQ ID NO: 15701 - protein, 77 aa, Homo sapiens
  Payload ID: 3123
  Gene Symbol: C12orf4
  Gene Name: chromosome 12 open reading frame 4
  ENSP ID: ENSP00000439471
MEKVMQELGKSLTDQDVNSLAAQHFESQQDLENKWSNELKQSTAIQKQEYQEWVIKLHQDLKNPNNSSLRSPVEDHA

SEQ ID NO: 15702 - protein, 552 aa, Homo sapiens; identical to SEQ ID NO: 15700
  Payload ID: 3123
  Gene Symbol: C12orf4
  Gene Name: chromosome 12 open reading frame 4
  Uniprot ID: Q9NQ89
  ENSP ID: ENSP00000439996

SEQ ID NO: 15703 - protein, 204 aa, Homo sapiens
  Payload ID: 3123
  Gene Symbol: C12orf4
  Gene Name: chromosome 12 open reading frame 4
  ENSP ID: ENSP00000440820
MEKVMQELGKSLTDQDVNSLAAQHFESQQDLENKWSNELKQSTAIQKQEYQEWVIKLHQDLKNPNNSSLSEEIKVQPSQFRESVEAIGRIYEEQRKLEESFTIHLGAQLKTMHNLRLLRADMLDFCKHKRNHRSGVKLHRLQTALSLYSTSLCGLVLLVDNRINSYSGIKRDFATVCQECTDFHFPRIEEQLEVVQQVVLYART

SEQ ID NO: 15704 - protein, 144 aa, Homo sapiens
  Payload ID: 3123
  Gene Symbol: C12orf4
  Gene Name: chromosome 12 open reading frame 4
  ENSP ID: ENSP00000442806
MLLHSLPCFIEKDLKEALTQFIEEESLSDYDRDAEASLAAVKSGEVDLHQLASTWAKAYAETTLEHARPEEPSWDEDFADVYHDLIHSPASETLLNLEHNYFVSISELIGERDVELKKLRERQGIEMEKVMQELGKSLTDQDVN

SEQ ID NO: 15705 - protein, 47 aa, Homo sapiens
  Payload ID: 3123
  Gene Symbol: C12orf4
  Gene Name: chromosome 12 open reading frame 4
  ENSP ID: ENSP00000444594
LYARTQRRSKLKESLDSGNQNGGNDDKTKNAERNYLNVLPGTTENTS

SEQ ID NO: 15706 - protein, 652 aa, Homo sapiens
  Payload ID: 3124
  Gene Symbol: C12orf40
  Gene Name: chromosome 12 open reading frame 40
  Uniprot ID: Q86WS4
  ENSP ID: ENSP00000317671
MNWVGGSRSRVLIKQERRKQKEYFEKHRLKSKMKSLGVLSPVKNSAVSLDILNLYMVNQISCKKKIPETVRKPTHVNMNRDIKMPLRKHNLELTMSPHCVPSKLCLDDTETNVNCQRLSSKEDLGPVQSQGMDSYSMLHPQFSKIENCSFTPSSFSVELPSNRHISKLNFTSGIAPTPQKLAYEKKQNDQRSTVNCSDSLLSKLNKSQDVFSPSHKTTRFGTLFERLNSLGNRNLLTKSPAVIMDEDCRSTDEIRQSDYITEKHSIQHIWGKNGKEVSNFLEDVNQSTPNLLSENCDSFVSQNMINVLNIDEQRIKKTFNKCDYDSMGDTCVVTSSDKNHVTDRCIRNIFTVPELTFSNSTLNKTSYPEKCQPNKKYQREYNKNERNDLSTSFENDYYPSSSERKEKFENDYQEKTPQKSIQKYPANSMGNIPSEELHSKQSWDFGLDEILMEEGGIYSLKSKRISTKKISLDSAQSSRSTSYSPRPTDSCFSSSSDLPSEDEDQISQQIEDSNRMTIKTKEKMNNFYVERMAKLSGDRIVKNDDKIHKQNENFYQFSVKNNTDQFPQLQCNSAHILQNKTNDNCVLQAARCDAGIQTESESVMEEKLDVAIQCDLISKCTCRSDVSLCNLERCSGNIKADTTGGQEIHKNN

SEQ ID NO: 15707 - protein, 477 aa, Homo sapiens
  Payload ID: 3124
  Gene Symbol: C12orf40
  Gene Name: chromosome 12 open reading frame 40
  Uniprot ID: Q86WS4
  ENSP ID: ENSP00000383897
MNWVGGSRSRVLIKQERRKQKEYFEKHRLKSKMKSLGVLSPVKNSAVSLDILNLYMVNQISCKKKIPETVRKPTHVNMNRDIKMPLRKHNLELTMSPHCVPSKLCLDDTETNVNCQRLSSKEDLGPVQSQGMDSYSMLHPQFSKIENCSFTPSSFSVELPSNRHISKLNFTSGIAPTPQKLAYEKKQNDQRSTVNCSDSLLSKLNKSQDVFSPSHKTTRFGTLFERLNSLGNRNLLTKSPAVIMDEDCRSTDEIRQSDYITEKHSIQHIWGKNGKEVSNFLEDVNQSTPNLLSENCDSFVSQNMINVLNIDEQRIKKTFNKCDYDSMGDTCVVTSSDKNHVTDRCIRNIFTVPELTFSNSTLNKTSYPEKCQPNKKYQREYNKNERNDLSTSFENDYYPSSSERKEKFENDYQEKTPQKSIQKYPANSMGNIPSEELHSKQSWDFGLDEILMEEGGIYSLKSKRISTKKICQYNCIS

SEQ ID NO: 15708 - protein, 394 aa, Homo sapiens
  Payload ID: 3124
  Gene Symbol: C12orf40
  Gene Name: chromosome 12 open reading frame 40
  Uniprot ID: Q86WS4
  ENSP ID: ENSP00000473371
MNRDIKMPLRKHNLELTMSPHCVPSKLCLDDTETNVNCQRLSSKEDLGPVQSQGMDSYSMLHPQFSKIENCSFTPSSFSVELPSNRHISKLNFTSGIAPTPQKLAYEKKQNDQRSTVNCSDSLLSKLNKSQDVFSPSHKTTRFGTLFERLNSLGNRNLLTKSPAVIMDEDCRSTDEIRQSDYITEKHSIQHIWGKNGKEVSNFLEDVNQSTPNLLSENCDSFVSQNMINVLNIDEQRIKKTFNKCDYDSMGDTCVVTSSDKNHVTDRCIRNIFTVPELTFSNSTLNKTSYPEKCQPNKKYQREYNKNERNDLSTSFENDYYPSSSERKEKFENDYQEKTPQKSIQKYPANSIWCTKCSEFKVIFTLIHYVLMLNLFLKSLRTAFQAFLNNDLQL

SEQ ID NO: 15709 - protein, 360 aa, Homo sapiens
  Payload ID: 3125
  Gene Symbol: C12orf42
  Gene Name: chromosome 12 open reading frame 42
  Uniprot ID: Q96LP6
  ENSP ID: ENSP00000367353
MSTVICMKQREEEFLLTIRPFANRMQKSPCYIPIVSSATLWDRSTPSAKHIPCYERTSVPCSRFINHMKNFSESPKFRSLHFLNFPVFPERTQNSMACKRLLHTCQYIVPRCSVSTVSFDEESYEEFRSSPAPSSETDEAPLIFTARGETEERARGAPKQAWNSSFLEQLVKKPNWAHSVNPVHLEAQGIHISRHTRPKGQPLSSPKKNSGSAARPSTAIGLCRRSQTPGALQSTGPSNTELEPEERMAVPAGAQAHPDDIQSRLLGASGNPVGKGAVAMAPEMLPKHPHTPRDRRPQADTSLHGNLAGAPLPLLAGASTHFPSKRLIKVCSSAPPRPTRRFHTVCSQALSRPVVNAHLH

SEQ ID NO: 15710 - protein, 107 aa, Homo sapiens
  Payload ID: 3125
  Gene Symbol: C12orf42
  Gene Name: chromosome 12 open reading frame 42
  Uniprot ID: Q96LP6
  ENSP ID: ENSP00000446908
MSTVICMKQREEEFLLTIRPFANRMQKSPCYIPIVSSATLWDRSTPSAKHIPCYERTSVPCSRFINHMKNFSESPKFRSLHFLNFPGSHHGQATQKLQGAMVLHLEE

SEQ ID NO: 15711 - protein, 207 aa, Homo sapiens
  Payload ID: 3125
  Gene Symbol: C12orf42
  Gene Name: chromosome 12 open reading frame 42
  ENSP ID: ENSP00000447795
MSTVICMKQREEEFLLTIRPFANRMQKSPCYIPIVSSATLWDRSTPSAKHIPCYERTSVPCSRFINHMKNFSESPKFRSLHFLNFPVFPERTQNSMACKRLLHTCQYIVPRCSVSTVSFDEESYEEFRSSPAPSSETDEAPLIFTARGETEERARGAPKQAWNSSFLEQLVKKPNWAHSVNPVHLEAQGIHISRHTRPKGQPLSSPK

SEQ ID NO: 15712 - protein, 360 aa, Homo sapiens; identical to SEQ ID NO: 15709
  Payload ID: 3125
  Gene Symbol: C12orf42
  Gene Name: chromosome 12 open reading frame 42
  Uniprot ID: Q96LP6
  ENSP ID: ENSP00000447908

SEQ ID NO: 15713 - protein, 293 aa, Homo sapiens
  Payload ID: 3125
  Gene Symbol: C12orf42
  Gene Name: chromosome 12 open reading frame 42
  ENSP ID: ENSP00000449362
MKNFSESPKFRSLHFLNFPVFPERTQNSMACKRLLHTCQYIVPRCSVSTVSFDEESYEEFRSSPAPSSETDEAPLIFTARGETEERARGAPKQAWNSSFLEQLVKKPNWAHSVNPVHLEAQGIHISRHTRPKGQPLSSPKKNSGSAARPSTAIGLCRRSQTPGALQSTGPSNTELEPEERMAVPAGAQAHPDDIQSRLLGASGNPVGKGAVAMAPEMLPKHPHTPRDRRPQADTSLHGNLAGAPLPLLAGASTHFPSKRLIKVCSSAPPRPTRRFHTVCSQALSRPVVNAHLH

SEQ ID NO: 15714 - protein, 90 aa, Homo sapiens
  Payload ID: 3125
  Gene Symbol: C12orf42
  Gene Name: chromosome 12 open reading frame 42
  ENSP ID: ENSP00000449447
MSTVICMKQREEEFLLTIRPFANRMQKSPCYIPIVSSATLWDRSTPSAKHIPCYERTSVPCSRFINHMKNFSESPKFRSLHFLNFPGPFH

SEQ ID NO: 15715 - protein, 262 aa, Homo sapiens
  Payload ID: 3126
  Gene Symbol: C12orf43
  Gene Name: chromosome 12 open reading frame 43
  Uniprot ID: Q96C57
  ENSP ID: ENSP00000288757
MAAPSGTVSDSESSNSSSDAEELERCREAAMPAWGLEQRPHVAGKPRAGAANSQLSTSQPSLRHKVNEHEQDGNELQTTPEFRAHVAKKLGALLDSFITISEAAKEPAKAKVQKVALEDDGFRLFFTSVPGGREKEESPQPRRKRQPSSSSEDSDEEWRRCREAAVSASDILQESAIHSPGTVEKEAKKKRKLKKKAKKVASVDSAVAATTPTSMATVQKQKSGELNGDQVSLGTKKKKKAKKASETSPFPPAKSATAIPAN

SEQ ID NO: 15716 - protein, 221 aa, Homo sapiens
  Payload ID: 3126
  Gene Symbol: C12orf43
  Gene Name: chromosome 12 open reading frame 43
  ENSP ID: ENSP00000409788
MFCQNPGAANSQLSTSQPSLRHKVNEHEQDGNELQTTPEFRAHVAKKLGALLDSFITISEAAKEPAKAKVQKVALEDDGFRLFFTSVPGGREKEESPQPRRKRQPSSSSSEDSDEEWRRCREAAVSASDILQESAIHSPGTVEKEAKKKRKLKKKAKKVASVDSAVAATTPTSMATVQKQKSGELNGDQVSLGTKKKKKAKKASETSPFPPAKSATAIPAN

SEQ ID NO: 15717 - protein, 252 aa, Homo sapiens
  Payload ID: 3126
  Gene Symbol: C12orf43
  Gene Name: chromosome 12 open reading frame 43
  ENSP ID: ENSP00000437803
MAAPSGTVSDSESSNSSSDAEELERCREAAMPAWGLEQRPHVAGKPRAGAANSQLSTSQPSLRHKVNEHEQDGNELQTTPEFRAHVAKKLGALLDSFITISEAAKEPAKAKVQKVALEDDGREKEESPQPRRKRQPSSSSSEDSDEEWRRCREAAVSASDILQESAIHSPGTVEKEAKKKRKLKKKAKKVASVDSAVAATTPTSMATVQKQKSGELNGDQVSLGTKKKKKAKKASETSPFPPAKSATAIPAN

SEQ ID NO: 15718 - protein, 188 aa, Homo sapiens
  Payload ID: 3126
  Gene Symbol: C12orf43
  Gene Name: chromosome 12 open reading frame 43
  ENSP ID: ENSP00000438856
MDGAANSQLSTSQPSLRHKVNEHEQDGNELQTTPEFRAHVAKKLGALLDSFITISEAAKEPAKAKVQKVALEDDGFRLFFTSVPGGREKEESPQPRRKRQPSSSSSEDSDEEWRRCREAAVSASDILQESAIHSPGTVEKEAKKKRKLKKKAKKVASVDSAVAATTPTSMATVQKQKSGELNGDQVSL

SEQ ID NO: 15719 - protein, 195 aa, Homo sapiens
  Payload ID: 3126
  Gene Symbol: C12orf43
  Gene Name: chromosome 12 open reading frame 43
  ENSP ID: ENSP00000442041
SSSDAEELERCREAAMPAWGLEQRPHVAGKPRAGAANSQLSTSQPSLSFITISEAAKEPAKAKVQKVALEDDGFRLFFTSVPGGREKEESPQPRRKRQPSSSSSEDSDEEWRRCREAAVSASDILQESAIHSPGTVEKEAKKKRKLKKKAKKVASVDSAVAATTPTSMATVQKQKSGELNGDQVSLGTKKKKKAK

SEQ ID NO: 15720 - protein, 293 aa, Homo sapiens
  Payload ID: 3126
  Gene Symbol: C12orf43
  Gene Name: chromosome 12 open reading frame 43
  ENSP ID: ENSP00000442224
MAAPSGTVSDSESSNSSSDAEELERCREAAMPAWGLEQRPHVAGKPRAGAANSQLSTSQPSLRYYALWVQVSLIQQILIPCVCQMLGFTPGISRHKVNEHEQDGNELQTTPEFRAHVAKKLGALLDSFITISEAAKEPAKAKVQKVALEDDGFRLFFTSVPGGREKEESPQPRRKRQPSSSSEDSDEEWRRCREAAVSASDILQESAIHSPGTVEKEAKKKRKLKKKAKKVASVDSAVAATTPTSMATVQKQKSGELNGDQVSLGTKKKKKAKKASETSPFPPAKSATAIPAN

SEQ ID NO: 15721 - protein, 66 aa, Homo sapiens
  Payload ID: 3126
  Gene Symbol: C12orf43
  Gene Name: chromosome 12 open reading frame 43
  ENSP ID: ENSP00000443642
MAAPSGTVSDSESSNSSSDAEELERCREAAMPAWGLEQRPHVAGKPRAVEMGFHHVDQDGLDLLTS

SEQ ID NO: 15722 - protein, 67 aa, Homo sapiens
  Payload ID: 3127
  Gene Symbol: C12orf45
  Gene Name: chromosome 12 open reading frame 45
  ENSP ID: ENSP00000280749
MEVHGKPKASPSCSSPTRDSSGVPVSKELLTAGSDGRGGIWDRLLINSQPKSRKTSTLQTVRIERSP

SEQ ID NO: 15723 - protein, 185 aa, Homo sapiens
  Payload ID: 3127
  Gene Symbol: C12orf45
  Gene Name: chromosome 12 open reading frame 45
  Uniprot ID: Q8N5I9
  ENSP ID: ENSP00000447057
MEVHGKPKASPSCSSPTRDSSGVPVSKELLTAGSDGRGGIWDRLLINSQPKSRKTSTLQTVRIERSPLLDQVQTFLPQMARANEKLRKEMAAAPPGRFNIENIDGPHSKVIQMDVALFEMNQSDSKEVDSSEESSQDSSENSSESEDEDDSIPSEVTIDNIKLPNSEGGKGKIEVLDSPASKKKK

SEQ ID NO: 15724 - protein, 187 aa, Homo sapiens
  Payload ID: 3127
  Gene Symbol: C12orf45
  Gene Name: chromosome 12 open reading frame 45
  ENSP ID: ENSP00000477543
MEVHGKPKASPSCSSPTRDSSGVPVSKELLTAGSDGRGGIWDRLLINSQPKSRKTSTLQTVRIERSPLLDQVQTFLPQMARANEKLRKEMAAAPPGRFNIENIDGPHSKVIQMDVALFEMNQSDSKEVDSSEESSQDSSENSSESEDEDDSIPSEVTIDNIKLPNSEGGKGKIEVLDSPASKKEIVK

SEQ ID NO: 15725 - protein, 205 aa, Homo sapiens
  Payload ID: 3128
  Gene Symbol: C12orf49
  Gene Name: chromosome 12 open reading frame 49
  Uniprot ID: Q9H741
  ENSP ID: ENSP00000261318
MVNLAAMVWRRLLRKRWVLALVFGLSLVYFLSSTFKQEERAVRDRNLLQVHDHNQPIPWKVQFNLGNSSRPSNQCRNSIQGKHLITDELGYVCERKDLLVNGCCNVNVPSTKQYCCDGCWPNGCCSAYEYCVSCCLQPNKQLLLERFLNRAAVAFQNLFMAVEDHFELCLAKCRTSSQSVQHENTYRDPIAKYCYGESPPELFPA

SEQ ID NO: 15726 - protein, 47 aa, Homo sapiens
  Payload ID: 3128
  Gene Symbol: C12orf49
  Gene Name: chromosome 12 open reading frame 49
  ENSP ID: ENSP00000446478
MVNLAAMVWRRLLRKRWVLALVFGLSLVYFLSSTFKQATFARGRICW

SEQ ID NO: 15727 - protein, 43 aa, Homo sapiens
  Payload ID: 3128
  Gene Symbol: C12orf49
  Gene Name: chromosome 12 open reading frame 49
  ENSP ID: ENSP00000447722
  MOD_RES (1)..(1): Any amino acid
XFGLSLVYFLSSTFKQSVQHENTYRDPIAKYCYGESPPELFPA

SEQ ID NO: 15728 - protein, 46 aa, Homo sapiens
  Payload ID: 3128
  Gene Symbol: C12orf49
  Gene Name: chromosome 12 open reading frame 49
  ENSP ID: ENSP00000449151
MAVEDHFELCLAKCRTSSQSVQHENTYRDPIAKYCYGESPPELFPA

SEQ ID NO: 15729 - protein, 414 aa, Homo sapiens
  Payload ID: 3129
  Gene Symbol: C12orf50
  Gene Name: chromosome 12 open reading frame 50
  Uniprot ID: Q8NA57
  ENSP ID: ENSP00000298699
MEMQQNCSISCFWETQPLGCVKISCIFYHSKPRNINGLFLPPSSNITLQKEIQEGIPLQSQSQEPLKPQENISRPIHHPLVLKTNFEEEEEVDEQNDASSLWTKTPEEIEEKRAIKEMCYKSGEYYRFHTPPDILSSKSMTPTAEKQLEKPLENGSELQEGDSLTVPTKLSQYERQGEIKTSLHGKPKTDIAAFENGGGDCYVPQRVIFLGVDESEALTEEKEITISKCSNTKDNKDSPHPKHSLTTRLVPTTHVLNATENISMKCREDPSSMNDVQPVKKPHFKGVKKRKWIYDEPQNFPNSGMQRAVQAPRPQNKMSYHRNNKNRNAENASYIHVQRDAVRTVALNAPSRSRPTHGSYNKVHANREPKPNLSPDKYTSTSYNDSAWRKRIPFSKTYSKSEKIYPEPRRNGSK

SEQ ID NO: 15730 - protein, 375 aa, Homo sapiens
  Payload ID: 3129
  Gene Symbol: C12orf50
  Gene Name: chromosome 12 open reading frame 50
  ENSP ID: ENSP00000448344
MEMQQNCSISCFWETQPLGCVKISCIFYHSKPRNINGLFLPPSSNITLQKEIQEGIPLQSQSQEPLKPQENISRPIHHPLVLKTNFEEEEEVDEQNDASSLWTKTPEEIEEKRAIKEMCYKSGEYYRFHTPPDILSSKSMTPTAEKQLEKPLENGSELQEGDSLTVPTKLSQYERQGEIKTSLHGKPKTDIAAFENGGGDCYVPQRVIFLGVDESEALTEEKEITISKCSNTKVNDVQPVKKPHFKGVKKRKWIYDEPQNFPNSGMQRAVQAPRPQNKMSYHRNNKNRNAENASYIHVQRDAVRTVALNAPSRSRPTHGSYNKVHANREPKPNLSPDKYTSTSYNDSAWRKRIPFSKTYSKSEKIYPEPRRNGSK

SEQ ID NO: 15731 - protein, 96 aa, Homo sapiens
  Payload ID: 3129
  Gene Symbol: C12orf50
  Gene Name: chromosome 12 open reading frame 50
  ENSP ID: ENSP00000448855
MEMQQNCSISCFWETQPLGCVKISCIFYHSKPRNINGLFLPPSSNITLQKEIQEGIPLQSQSQEPLKPQENISRPIHHPLVLKTNFEEEEEVDEQN

SEQ ID NO: 15732 - protein, 127 aa, Homo sapiens
  Payload ID: 3130
  Gene Symbol: C12orf54
  Gene Name: chromosome 12 open reading frame 54
  Uniprot ID: Q6X4T0
  ENSP ID: ENSP00000316898
MAQHPCQDQEQKVEMTSKQQRSTSIEETMRPQEKQVTITETLWDQVLTVFKDIQKELQEDARIRGMSNCSMTPMTSAPRTGSIRPPDSLMTPKLRRLQFSSGEQPSGGRIHNLKTQLFSQSAYYPGP

SEQ ID NO: 15733 - protein, 101 aa, Homo sapiens
  Payload ID: 3130
  Gene Symbol: C12orf54
  Gene Name: chromosome 12 open reading frame 54
  ENSP ID: ENSP00000369859
MAQHPCQDQEQKVEMTSKQQRSTSIEETMRPQEKQVTITETLWDQVLTVFKDIQKESTTDLSVQAAKARRCLTVPLRKCDNTNRKLYLLELVSARILYVVV

SEQ ID NO: 15734 - protein, 127 aa, Homo sapiens; identical to SEQ ID NO: 15732
  Payload ID: 3130
  Gene Symbol: C12orf54
  Gene Name: chromosome 12 open reading frame 54
  Uniprot ID: Q6X4T0
  ENSP ID: ENSP00000447109

SEQ ID NO: 15735 - protein, 71 aa, Homo sapiens
  Payload ID: 3130
  Gene Symbol: C12orf54
  Gene Name: chromosome 12 open reading frame 54
  ENSP ID: ENSP00000450103
LQEDARIRGMSNCSMTPMTSAPRTGSIRPPDSLMTPKLRRLQFSSGEQPSGGRIHNLKTQLFSQSAYYPGP

SEQ ID NO: 15736 - protein, 462 aa, Homo sapiens
  Payload ID: 3131
  Gene Symbol: C12orf56
  Gene Name: chromosome 12 open reading frame 56
  Uniprot ID: Q8IXR9
  ENSP ID: ENSP00000329698
MASPLPSGFPARRNSRLDVFLRRHLPPEVYDAVRAYEPCIVVSNSENHILKYVVLSDRLVYLTENPPKSIRRVVALRDVVAIDLIDDYPEFLSSPDREISQHIRIIYSSTVLKKECKKSNSVRKFLFPFHHTKANNKKVKEEKNGLAFWRSKESRSLKESPLRSEEKIKHFSQLKSELFLKDNSLRRILSLLMELKVAAQKNFILKRLFWKTSDLFYFIVNKLHEYLPESRDKNALQNQSQRVDELVACIEIIQTLVLMFRETETESSRLNTLAAKKGALFNLLVILISEPQIPKSCPVFDIQLVADSALVRMSFDAELQKLILEYTNTATALLYEILLVFQQGNLGLGSTKFAISWIMSFLQSCPPIITFVASIVKQVVRGLSASFQLLSPCQAVLLYQQFYILKSCLRHSRTLAEYIRNNYREEFRYFIHMPALQKRLPLCYPITQPTIQLFHEVLKLVE

SEQ ID NO: 15737 - protein, 184 aa, Homo sapiens
  Payload ID: 3131
  Gene Symbol: C12orf56
  Gene Name: chromosome 12 open reading frame 56
  ENSP ID: ENSP00000443341
NSRLDVFLRRHLPPEVYDAVRAYEPCIVVSNSENHILKYVVLSDRLVYLTENPPKSIRRVVALRDVVAIDLIDDYPEFLSSPDREISQHIRIIYSSTVLKKECKKSNSVRKFLFPFHHTKANNKKVKEEKNGLAFWRSKESRSLKESPLRKLLFYKIPSMLVSSVLLLEVKSHIGLRRKLSTSV

SEQ ID NO: 15738 - protein, 622 aa, Homo sapiens
  Payload ID: 3131
  Gene Symbol: C12orf56
  Gene Name: chromosome 12 open reading frame 56
  Uniprot ID: Q8IXR9
  ENSP ID: ENSP00000446101
MASPLPSGFPARRNSRLDVFLRRHLPPEVYDAVRAYEPCIVVSNSENHILKYVVLSDRLVYLTENPPKSIRRVVALRDVVAIDLIDDYPEFLSSPDREISQHIRIIYSSTVLKKECKKSNSVRKFLFPFHHTKANNKKVKEEKNGLAFWRSKESRSLKESPLRDQQESSTPSKDSTLCPRPGLKKLSLHGQGAFRPLPSPSRRSSQSAPTTGKAVSEPSCTTNTKEPQGLPDHNSISEIPFKCNGNGNEFYLGNSLLDSPSQSNSNLEKKESELHLYVISTTSSIFLHLKSSWNNYIIKATLLQDPFYASEFSPAIGSQKPYRSEEKIKHFSQLKSELFLKDNSLRRILSLLMELKVAAQKNFILKRLFWKTSDLFYFIVNKLHEYLPESRDKNALQNQSQRVDELVACIEIIQTLVLMFRETETESSRLNTLAAKKGALFNLLVILISEPQIPKSCPVFDIQLVADSALVRMSFDAELQKLILEYTNTATALLYEILLVFQQGNLGLGSTKFAISWIMSFLQSCPPIITFVASIVKQVVRGLSASFQLLSPCQAVLLYQQFYILKSCLRHSRTLAEYIRNNYREEFRYFIHMPALQKRLPLCYPITQPTIQLFHEVLKLVE

SEQ ID NO: 15739 - protein, 126 aa, Homo sapiens
  Payload ID: 3132
  Gene Symbol: C12orf57
  Gene Name: chromosome 12 open reading frame 57
  Uniprot ID: Q99622
  ENSP ID: ENSP00000229281
MASASTQPAALSAEQAKVVLAEVIQAFSAPENAVRMDEARDNACNDMGKMLQFVLPVATQIQQEVIKAYGFSCDGEGVLKFARLVKSYEAQDPEIASLSGKLKALFLPPMTLPPHGPAAGGSVAAS

SEQ ID NO: 15740 - protein, 126 aa, Homo sapiens; identical to SEQ ID NO: 15739
  Payload ID: 3132
  Gene Symbol: C12orf57
  Gene Name: chromosome 12 open reading frame 57
  Uniprot ID: Q99622
  ENSP ID: ENSP00000440602

SEQ ID NO: 15741 - protein, 97 aa, Homo sapiens
  Payload ID: 3132
  Gene Symbol: C12orf57
  Gene Name: chromosome 12 open reading frame 57
  ENSP ID: ENSP00000440937
MASASTQPAALSAEQAKVVLAEVIQAFSAPENAVRMDEARDNACNDMGVLKFARLVKSYEAQDPEIASLSGKLKALFLPPMTLPPHGPAAGGSVAAS

SEQ ID NO: 15742 - protein, 103 aa, Homo sapiens
  Payload ID: 3132
  Gene Symbol: C12orf57
  Gene Name: chromosome 12 open reading frame 57
  ENSP ID: ENSP00000475422
MASASTQPAALSAEQAKVVLAEVIQAFSAPENAVRMDEARDNACNDMGKMLQFVLPVATQIQQEVIKAYGFSCDGEGGSDAGRRVRRGKAGVGSGEGAGSVGP

SEQ ID NO: 15743 - protein, 91 aa, Homo sapiens
  Payload ID: 3132
  Gene Symbol: C12orf57
  Gene Name: chromosome 12 open reading frame 57
  ENSP ID: ENSP00000475635
MDEARDNACNDMGKMLQFVLPVATQIQQEVIKAYGFSCDGEGVLKFARLVKSYEAQDPEIASLSGKLKALFLPPMTLPPHGPAAGGSVAAS

SEQ ID NO: 15744 - protein, 245 aa, Homo sapiens
  Payload ID: 3133
  Gene Symbol: C12orf60
  Gene Name: chromosome 12 open reading frame 60
  Uniprot ID: Q5U649
  ENSP ID: ENSP00000331691
MSSESEKDKERLIQAAKMFFFHVQDLASVINTLTELFSRSMNTQILLMAVKNNSYIKDFFEQMLKIFKEMQSVVDARHDKIQKESLCSKVAMAMCSVVQKSTNVEELHQSAKEVFKSAHTPVIISVLNSSNILGSLESSLSHLMKFPIMNLQLSDFYTEDTKEQSDVTTSERTRSPPGSSKTTMIDTLKKLQDVLKTEDSKNPTKSAADLLEQIVKAMGPILEILQKAIKTMEMNISVFKKASDK

SEQ ID NO: 15745 - protein, 166 aa, Homo sapiens
  Payload ID: 3134
  Gene Symbol: C12orf65
  Gene Name: chromosome 12 open reading frame 65
  Uniprot ID: Q9H3J6
  ENSP ID: ENSP00000253233
MSTVGLFHFPTPLTRICPAPWGLRLWEKLTLLSPGIAVTPVQMAGKKDYPALLSLDENELEEQFVKGHGPGGQATNKTSNCVVLKHIPSGIVVKCHQTRSVDQNRKLARKILQEKVDVFYNGENSPVHKEKREAAKKKQERKKRAKETLEKKKLLKELWESSKKVH

SEQ ID NO: 15746 - protein, 166 aa, Homo sapiens; identical to SEQ ID NO: 15745
  Payload ID: 3134
  Gene Symbol: C12orf65
  Gene Name: chromosome 12 open reading frame 65
  Uniprot ID: Q9H3J6
  ENSP ID: ENSP00000390647

SEQ ID NO: 15747 - protein, 166 aa, Homo sapiens; identical to SEQ ID NO: 15745
  Payload ID: 3134
  Gene Symbol: C12orf65
  Gene Name: chromosome 12 open reading frame 65
  Uniprot ID: Q9H3J6
  ENSP ID: ENSP00000391513

SEQ ID NO: 15748 - protein, 96 aa, Homo sapiens
  Payload ID: 3134
  Gene Symbol: C12orf65
  Gene Name: chromosome 12 open reading frame 65
  ENSP ID: ENSP00000441796
MSTVGLFHFPTPLTRICPAPWGLRLWEKLTLLSPGIAVTPVQMAGKKDYPALLSLDENELEEQFVKGHGPGGQATNKTSNCVVLKHIPSGIVVKVD

SEQ ID NO: 15749 - protein, 36 aa, Homo sapiens
  Payload ID: 3134
  Gene Symbol: C12orf65
  Gene Name: chromosome 12 open reading frame 65
  ENSP ID: ENSP00000443072
MSTVGLFHFPTPLTRICPAPWGLRLWEKLTLLSPGI

SEQ ID NO: 15750 - protein, 138 aa, Homo sapiens
  Payload ID: 3134
  Gene Symbol: C12orf65
  Gene Name: chromosome 12 open reading frame 65
  ENSP ID: ENSP00000444843
MSTVGLFHFPTPLTRICPAPWGLRLWEKLTLLSPGIAVTPVQMAGKKDYPALLSLDENELEEQFVKGHGPGGQATNKTSNCVVLKHIPSGIVVKCHQTRSVDQNRKLARKILQEKVDVFYNGENSPVHKEKREAAKKK

SEQ ID NO: 15751 - protein, 468 aa, Homo sapiens
  Payload ID: 3135
  Gene Symbol: C12orf66
  Gene Name: chromosome 12 open reading frame 66
  ENSP ID: ENSP00000311486
MGESIPLAAPVPVEQAVLETFFSHLGIFSYDKAKDNVEKEREANKSAGGSWLSLLAALAHLAAAEKVYHSLTYLGQKLGGQSFFSRKDSIRTIYTSLHNELKKVVTGRGALGGTAPHVEELLSHLSEQLCFFVQARMEIADFYEKMYTLSTQKFINAEELVGLLDAIMKKYSSRFHHPILSPLESSFQLEVDVLCHLLKAQAQVSEWKFLPSLVNLHSAHTKLQTWGQIFEKQRETKKHLFGGQSQKAVQPPHLFLWLMKLKNMLLAKFSFYFHEALSRQTTASEMKTLTAKANPDFFGKISSFIRKYDAANVSLIFDNRGSESFQGHGYHHPHSYREAPKGVDQYPAVVSLPSDRPVMHWPNVIMIMTDRTSDLNSLEKVVHFYDDKVQSTYFLTRPEPHFTIVIIFESKKSERDSHFISFLNEVSLALKNPKVFASLKPGAKGSCYQCNYFVAFCLNYSKLLLQRK

SEQ ID NO: 15752 - protein, 445 aa, Homo sapiens
  Payload ID: 3135
  Gene Symbol: C12orf66
  Gene Name: chromosome 12 open reading frame 66
  Uniprot ID: Q96MD2
  ENSP ID: ENSP00000381132
MGESIPLAAPVPVEQAVLETFFSHLGIFSYDKAKDNVEKEREANKSAGGSWLSLLAALAHLAAAEKVYHSLTYLGQKLGGQSFFSRKDSIRTIYTSLHNELKKVVTGRGALGGTAPHVEELLSHLSEQLCFFVQARMEIADFYEKMYTLSTQKFINAEELVGLLDAIMKKYSSRFHHPILSPLESSFQLEVDVLCHLLKAQAQVSEWKFLPSLVNLHSAHTKLQTWGQIFEKQRETKKHLFGGQSQKAVQPPHLFLWLMKLKNMLLAKFSFYFHEALSRQTTASEMKTLTAKANPDFFGKISSFIRKYDAANVSLIFDNRGSESFQGHGYHHPHSYREAPKGVDQYPAVVSLPSDRPVMHWPNVIMIMTDRTSDLNSLEKVVHFYDDKVQSTYFLTRPEPHFTIVIIFESKKSERDSHFISFLNEVSLALKNPKVFASLKPGAKG

SEQ ID NO: 15753 - protein, 392 aa, Homo sapiens
  Payload ID: 3135
  Gene Symbol: C12orf66
  Gene Name: chromosome 12 open reading frame 66
  ENSP ID: ENSP00000445481
MGESIPLAAPVPVEQAVLETFFSHLGGQSFFSRKDSIRTIYTSLHNELKKVVTGRGALGGTAPHVEELLSHLSEQLCFFVQARMEIADFYEKMYTLSTQKFINAEELVGLLDAIMKKYSSRFHHPILSPLESSFQLEVDVLCHLLKAQAQVSEWKFLPSLVNLHSAHTKLQTWGQIFEKQRETKKHLFGGQSQKAVQPPHLFLWLMKLKNMLLAKFSFYFHEALSRQTTASEMKTLTAKANPDFFGKISSFIRKYDAANVSLIFDNRGSESFQGHGYHHPHSYREAPKGVDQYPAVVSLPSDRPVMHWPNVIMIMTDRTSDLNSLEKVVHFYDDKVQSTYFLTRPEPHFTIVIIFESKKSERDSHFISFLNEVSLALKNPKVFASLKPGAKG

SEQ ID NO: 15754 - protein, 269 aa, Homo sapiens
  Payload ID: 3136
  Gene Symbol: C12orf71
  Gene Name: chromosome 12 open reading frame 71
  Uniprot ID: A8MTZ7
  ENSP ID: ENSP00000413728
MAYSSSNSDIEDDSSKSNSNLSLSVGYFPCEDTPCEDTTSWEDAPSKGPSIHFLPPVQGAWGTERIGRRMKRQDQIQDEPEQFCKLSIFLAWDVDIGSDNTDSRANRLLNGDNLWIDKLPKERTKLSVGKLNNLVQEFQIFLENLKDDDAVFPETAQQDFQLSSGSPPEMVQMISQATASQRTSAPEISSILSEQPEKDDTPSHTQAQCCLNFGWAFSWLRQRILPSLLRRDHPVNATKSPHRSAPTKRLFHRGKRIQPQETLELGHPI

SEQ ID NO: 15755 - protein, 71 aa, Homo sapiens
  Payload ID: 3137
  Gene Symbol: C12orf73
  Gene Name: chromosome 12 open reading frame 73
  Uniprot ID: Q69YU5
  ENSP ID: ENSP00000367330
MPAGVPMSTYLKMFAASLLAMCAGAEVVHRYYRPDLTIPEIPPKRGELKTELLGLKERKHKPQVSQQEELK

SEQ ID NO: 15756 - protein, 71 aa, Homo sapiens; identical to SEQ ID NO: 15755
  Payload ID: 3137
  Gene Symbol: C12orf73
  Gene Name: chromosome 12 open reading frame 73
  Uniprot ID: Q69YU5
  ENSP ID: ENSP00000446981

SEQ ID NO: 15757 - protein, 53 aa, Homo sapiens
  Payload ID: 3137
  Gene Symbol: C12orf73
  Gene Name: chromosome 12 open reading frame 73
  ENSP ID: ENSP00000447403
MPAGVPMSTYLKMFAASLLAMCAGAEVVHRYYRPDLMRNRLRRVKLISQSHIA

SEQ ID NO: 15758 - protein, 59 aa, Homo sapiens
  Payload ID: 3137
  Gene Symbol: C12orf73
  Gene Name: chromosome 12 open reading frame 73
  ENSP ID: ENSP00000447452
MPAGVPMSTYLKMFAASLLAMCAGAEVVHRYYRPDLQNWITSLSVGELEGLGRVEQRRP

SEQ ID NO: 15759 - protein, 46 aa, Homo sapiens
  Payload ID: 3137
  Gene Symbol: C12orf73
  Gene Name: chromosome 12 open reading frame 73
  ENSP ID: ENSP00000447827
MPAGVPMSTYLKMFAASLLAMCAGAEVVHRYYRPDLVSAGGLLFYF

SEQ ID NO: 15760 - protein, 71 aa, Homo sapiens; identical to SEQ ID NO: 15755
  Payload ID: 3137
  Gene Symbol: C12orf73
  Gene Name: chromosome 12 open reading frame 73
  Uniprot ID: Q69YU5
  ENSP ID: ENSP00000448771

SEQ ID NO: 15761 - protein, 59 aa, Homo sapiens; identical to SEQ ID NO: 15758
  Payload ID: 3137
  Gene Symbol: C12orf73
  Gene Name: chromosome 12 open reading frame 73
  ENSP ID: ENSP00000448863

SEQ ID NO: 15762 - protein, 71 aa, Homo sapiens; identical to SEQ ID NO: 15755
  Payload ID: 3137
  Gene Symbol: C12orf73
  Gene Name: chromosome 12 open reading frame 73
  Uniprot ID: Q69YU5
  ENSP ID: ENSP00000449839

SEQ ID NO: 15763 - protein, 53 aa, Homo sapiens; identical to SEQ ID NO: 15757
  Payload ID: 3137
  Gene Symbol: C12orf73
  Gene Name: chromosome 12 open reading frame 73
  ENSP ID: ENSP00000449951

SEQ ID NO: 15764 - protein, 37 aa, Homo sapiens
  Payload ID: 3137
  Gene Symbol: C12orf73
  Gene Name: chromosome 12 open reading frame 73
  ENSP ID: ENSP00000450253
MPAGVPMSTYLKMFAASLLAMCAGAEVVHRYYRPDLV

SEQ ID NO: 15765 - protein, 190 aa, Homo sapiens
  Payload ID: 3138
  Gene Symbol: C12orf74
  Gene Name: chromosome 12 open reading frame 74
  Uniprot ID: Q32Q52
  ENSP ID: ENSP00000380933
MEKTESFCPEVPPQDCGASPRPSLRSLPKNQGSLLQFDRQAPGRISTSPTLRRLRTRGCGTRQDAWQVTTWGSWGAPVGFPCYLSKSLPGSPKDSSHLLSPLRLHSRLTSEPERALNAADSLEPQTRPTDKYLPPELQPVNEGSLHQASLRQQEGHFLPSPTLRHPSPQGEELHPSRCVCIYFLRCYDIC

SEQ ID NO: 15766 - protein, 173 aa, Homo sapiens
  Payload ID: 3138
  Gene Symbol: C12orf74
  Gene Name: chromosome 12 open reading frame 74
  Uniprot ID: Q32Q52
  ENSP ID: ENSP00000446043
MEKTESFCPEVPPQDCGASPRPSLRSLPKNQGSLLQFDRQAPGRISTSPTLRRLRTRGCGTRQDAWQVTTWGSWGAPVGFPCYLSKSLPGSPKDSSHLLSPLRLHSRLTSEPERALNAADSLEPQTRPTDKYLPPELQPVNEGSLHQASLRQQEGHFLPSPTLRHPSPQVTQL

SEQ ID NO: 15767 - protein, 46 aa, Homo sapiens
  Payload ID: 3139
  Gene Symbol: C12orf75
  Gene Name: chromosome 12 open reading frame 75
  ENSP ID: ENSP00000447440
MGCGNSTATSAGAGQETMEEYMLAYHLKLSIWCPVKQRRFGKIRRK

SEQ ID NO: 15768 - protein, 63 aa, Homo sapiens
  Payload ID: 3139
  Gene Symbol: C12orf75
  Gene Name: chromosome 12 open reading frame 75
  Uniprot ID: Q8TAD7
  ENSP ID: ENSP00000448536
MGCGNSTATSAGAGQGPAGAAKDVTEESVTEDDKRRNYGGVYVGLPSEAVNMVSSQTKTVRKN

SEQ ID NO: 15769 - protein, 48 aa, Homo sapiens
  Payload ID: 3139
  Gene Symbol: C12orf75
  Gene Name: chromosome 12 open reading frame 75
  ENSP ID: ENSP00000449096
MGCGNSTATSAGAGQGPAGAAKDVPFSSTTWVRLCHCLMDQLYSNSRR

SEQ ID NO: 15770 - protein, 89 aa, Homo sapiens
  Payload ID: 3139
  Gene Symbol: C12orf75
  Gene Name: chromosome 12 open reading frame 75
  ENSP ID: ENSP00000450095
MGCGNSTATSAGAGQGPAGAAKDVTEESVTEDDKRRNYGGVYVGLPSEAVNMVSSQTKTVRKKENNIMTQESRACSSVWKEFGSVGRCN

SEQ ID NO: 15771 - protein, 51 aa, Homo sapiens
  Payload ID: 3139
  Gene Symbol: C12orf75
  Gene Name: chromosome 12 open reading frame 75
  ENSP ID: ENSP00000479631
MGCGNSTATSAGAGQGPAGAAKDVNYGGVYVGLPSEAVNMVSSQTKTVRKN

SEQ ID NO: 15772 - protein, 135 aa, Homo sapiens
  Payload ID: 3140
  Gene Symbol: C12orf76
  Gene Name: chromosome 12 open reading frame 76
  Uniprot ID: Q8N812
  ENSP ID: ENSP00000308368
MFQNLQGTFEKEIGKIIPFTIAFKRAEAVEPDGCVQSWRCCLPCDLGQASRFIHTTVCSAIRWRSCKGERNFAERHILPAELEEQSNHAGMGPILPAMPSVDGNHFQHPAGDCHPYGILCLQAHSASVTARQVLQ

SEQ ID NO: 15773 - protein, 76 aa, Homo sapiens
  Payload ID: 3140
  Gene Symbol: C12orf76
  Gene Name: chromosome 12 open reading frame 76
  ENSP ID: ENSP00000446788
MLRPALPWLYLGLCSLLVGEAEAPSPVDPLERSRPYAVLRGQNLESLSPRLECNGAISARCNLRVWGSSDSPASAP

SEQ ID NO: 15774 - protein, 49 aa, Homo sapiens
  Payload ID: 3140
  Gene Symbol: C12orf76
  Gene Name: chromosome 12 open reading frame 76
  ENSP ID: ENSP00000447351
MLRPALPWLYLGLCSLLVGEAEAPSPVDPLERSRPYAVLRGQNLDQTLH

SEQ ID NO: 15775 - protein, 61 aa, Homo sapiens
  Payload ID: 3140
  Gene Symbol: C12orf76
  Gene Name: chromosome 12 open reading frame 76
  ENSP ID: ENSP00000447574
MLRPALPWLYLGLCSLLVGEAEAPSPVDPLERSRPYAVLRGQNLETTGERICLQLFAQHLT

SEQ ID NO: 15776 - protein, 76 aa, Homo sapiens; identical to SEQ ID NO: 15773
  Payload ID: 3140
  Gene Symbol: C12orf76
  Gene Name: chromosome 12 open reading frame 76
  ENSP ID: ENSP00000448915

SEQ ID NO: 15777 - protein, 107 aa, Homo sapiens
  Payload ID: 3140
  Gene Symbol: C12orf76
  Gene Name: chromosome 12 open reading frame 76
  ENSP ID: ENSP00000449939
MLERENESHGSKSCSRARIGTEVACRACLPPHCAMPPIDAFLCLPFSFALVSGKLYQWKEPVISSVHSKVKRTAEVKEEIVEKEMKKLVHSVFNMADYTFPLQVNTW

SEQ ID NO: 15778 - protein, 72 aa, Homo sapiens
  Payload ID: 3140
  Gene Symbol: C12orf76
  Gene Name: chromosome 12 open reading frame 76
  ENSP ID: ENSP00000450232
MLRPALPWLYLGLCSLLVGEAEAPSPVDPLERSRPYAVLRGQNLVLMGTIFSILLVTVILMAFCVYKPIRRR

SEQ ID NO: 15779 - protein, 135 aa, Homo sapiens [sequence omitted]

SEQ ID NO: 15780 - protein, 140 aa, Homo sapiens
  Payload ID: 3141
  Gene Symbol: C14orf1
  Gene Name: chromosome 14 open reading frame 1
  Uniprot ID: Q9UKR5
  ENSP ID: ENSP00000256319
MSRFLNVLRSWLVMVSIIAMGNTLQSFRDHTFLYEKLYTGKPNLVNGLQARTFGIWTLLSSVIRCLCAIDIHNKTLYHITLWTFLLALGHFLSELFVYGTAAPTIGVLAPLMVASFSILGMLVGLRYLEVEPVSRQKKRN

SEQ ID NO: 15781 - protein, 296 aa, Homo sapiens
  Payload ID: 3142
  Gene Symbol: C14orf105
  Gene Name: chromosome 14 open reading frame 105
  Uniprot ID: Q9NVL8
  ENSP ID: ENSP00000216445
MGLSHSKTHLRVIKVAPLQNKEVETPSAGRVDFAFNQNLEEKTSYSLARLQDQNKALEGQLPPLQENWYGRYSTASRDMYFDIPLEHRETSIIKRHPPQRLQKLEPIDLPRVITSGRLLSQREARTMHKAKQVLEKKMQTPMYTSENRQYLHKMQVLEMIRKRQEAQMELKKSLHGEARINKQSPRDHKAKKTLQSTPRNDDHDLLTMLPDEILNRGPGNSKNTEFLKHQAVNNYCPWKIGKMETWLHEQEAQGQLLWDSSSSDSDEQGKDEKKPRALVRTRTERIPLFDEFFDQE

SEQ ID NO: 15782 - protein, 336 aa, Homo sapiens
  Payload ID: 3142
  Gene Symbol: C14orf105
  Gene Name: chromosome 14 open reading frame 105
  ENSP ID: ENSP00000392368
MGLSHSKTHLRVIKVAPLQNKEVETPSAGRVDFAFNQNLEEKTSYSLARLQDQNKALEGQLPPLQENWYGRYSTASRDMYFDIPLEHRETSIIKRHPPQRLQKLEPIDLPRVITSGRLLSQREARTMHKAKVLEKKMQTPMYTSENRQYLHKMQVLEMIRKRQEAQMELKKSLHGEARINKQSPRDHKAKKTLQSTPRNDDHDLLTMLPDEILNRGPDRVSLLLPRLECNGMISAHRKLRLPSSNDSPASASRVAGITGNSKNTEFLKHQAVNNYCPWKIGKMETWLHEQEAQGQLLWDSSSSDSDEQGKDEKKPRALVRTRTERIPLFDEFFDQE

SEQ ID NO: 15783 - protein, 104 aa, Homo sapiens
  Payload ID: 3142
  Gene Symbol: C14orf105
  Gene Name: chromosome 14 open reading frame 105
  ENSP ID: ENSP00000431623
MGLSHSKTHLRVIKVAPLQNKEVETPSAGRVDFAFNQNLEEKTSYSLARLQDQNKALEGQLPPLQENWYGRYSTASRDMYFDIPLEHRETSIIKRHPPQRLQVR

SEQ ID NO: 15784 - protein, 74 aa, Homo sapiens
  Payload ID: 3142
  Gene Symbol: C14orf105
  Gene Name: chromosome 14 open reading frame 105
  ENSP ID: ENSP00000431919
MGLSHSKTHLRVIKVAPLQNKEVETPSAGRVDFAFNQNLEEKTSYSLARLQDQNKALEGQLPPLQENCIQRHVF

SEQ ID NO: 15785 - protein, 295 aa, Homo sapiens
  Payload ID: 3142
  Gene Symbol: C14orf105
  Gene Name: chromosome 14 open reading frame 105
  ENSP ID: ENSP00000434003
MGLSHSKTHLRVIKVAPLQNKEVETPSAGRVDFAFNQNLEEKTSYSLARLQDQNKALEGQLPPLQENWYGRYSTASRDMYFDIPLEHRETSIIKRHPPQRLQKLEPIDLPRVITSGRLLSQREARTMHKAKVLEKKMQTPMYTSENRQYLHKMQVLEMIRKRQEAQMELKKSLHGEARINKQSPRDHKAKKTLQSTPRNDDHDLLTMLPDEILNRGPGNSKNTEFLKHQAVNNYCPWKIGKMETWLHEQEAQGQLLWDSSSSDSDEQGKDEKKPRALVRTRTERIPLFDEFFDQE

SEQ ID NO: 15786 - protein, 136 aa, Homo sapiens
  Payload ID: 3142
  Gene Symbol: C14orf105
  Gene Name: chromosome 14 open reading frame 105
  ENSP ID: ENSP00000436475
  MOD_RES (1)..(1): Any amino acid
XVLEMIRKRQEAQMELKKSLHGEARINKQSPRDHKAKKTLQSTPRNDDHDLLTMLPDEILNRGPDRVSLLLPRLECNGMISAHRKLRLPSSNDSPASASRVAGITGACHHAQLTFVFVVETRFHHVGQAGLELLTS

SEQ ID NO: 15787 - protein, 104 aa, Homo sapiens; identical to SEQ ID NO: 15783
  Payload ID: 3142
  Gene Symbol: C14orf105
  Gene Name: chromosome 14 open reading frame 105
  ENSP ID: ENSP00000436517

SEQ ID NO: 15788 - protein, 74 aa, Homo sapiens; identical to SEQ ID NO: 15784
  Payload ID: 3142
  Gene Symbol: C14orf105
  Gene Name: chromosome 14 open reading frame 105
  ENSP ID: ENSP00000436589

SEQ ID NO: 15789 - protein, 104 aa, Homo sapiens; identical to SEQ ID NO: 15783
  Payload ID: 3142
  Gene Symbol: C14orf105
  Gene Name: chromosome 14 open reading frame 105
  ENSP ID: ENSP00000436784

SEQ ID NO: 15790 - protein, 140 aa, Homo sapiens
  Payload ID: 3143
  Gene Symbol: C14orf119
  Gene Name: chromosome 14 open reading frame 119
  Uniprot ID: Q9NWQ9
  ENSP ID: ENSP00000322238
MPLESSSSMPLSFPSLLPSVPHNTNPSPPLMSYITSQEMKCILHWFANWSGPQRERFLEDLVAKAVPEKLQPLLDSLEQLSVSGADRPPSIFECQLHLWDQWFRGWAEQERNEFVRQLEFSEPDFVAKFYQAVAATAGKD

SEQ ID NO: 15791 - protein, 140 aa, Homo sapiens; identical to SEQ ID NO: 15790
  Payload ID: 3143
  Gene Symbol: C14orf119
  Gene Name: chromosome 14 open reading frame 119
  Uniprot ID: Q9NWQ9
  ENSP ID: ENSP00000450861

SEQ ID NO: 15792 - protein, 100 aa, Homo sapiens
  Payload ID: 3144
  Gene Symbol: C14orf142
  Gene Name: chromosome 14 open reading frame 142
  Uniprot ID: Q9BXV9
  ENSP ID: ENSP00000306320
MELLGEYVGQEGKPQKLRVSCEAPGDGDPFQGLLSGVAQMKDMVTELFDPLVQGEVQHRVAAAPDEDLDGDDEDDAEDENNIDNRTNFDGPSAKRPKTPS

SEQ ID NO: 15793 - protein, 79 aa, Homo sapiens
  Payload ID: 3144
  Gene Symbol: C14orf142
  Gene Name: chromosome 14 open reading frame 142
  ENSP ID: ENSP00000451114
  MOD_RES (1)..(1): Any amino acid
XLGEYVGQEGKPQKLRVSCEAPGDGDPFQGLLSGVAQMKDMVMMKMMQKMKITLITELTSMDHLQNGQKHRLNNSLHDI

SEQ ID NO: 15794 - protein, 100 aa, Homo sapiens; identical to SEQ ID NO: 15792
  Payload ID: 3144
  Gene Symbol: C14orf142
  Gene Name: chromosome 14 open reading frame 142
  Uniprot ID: Q9BXV9
  ENSP ID: ENSP00000478863

SEQ ID NO: 15795 - protein, 79 aa, Homo sapiens; identical to SEQ ID NO: 15793
  Payload ID: 3144
  Gene Symbol: C14orf142
  Gene Name: chromosome 14 open reading frame 142
  ENSP ID: ENSP00000487326
  MOD_RES (1)..(1): Any amino acid

SEQ ID NO: 15796 - protein, 621 aa, Homo sapiens
  Payload ID: 3145
  Gene Symbol: C14orf159
  Gene Name: chromosome 14 open reading frame 159
  Uniprot ID: Q7Z3D6
  ENSP ID: ENSP00000256324
MPFTLHLRSRLPSAIRSLILQKKPNIRNTSSMAGELRPASLVVLPRSLAPAFERFCQVNTGPLPLLGQSEPEKWMLPPQGAISETRMGHPQFWKYEFGACTGSLASLEQYSEQLKDMVAFFLGCSFSLEEALEKAGLPRRDPAGHSQAGAYKTTVPCVTHAGFCCPLVVTMRPIPKDKLEGLVRACCSLGGEQGQPVHMGDPELLGIKELSKPAYGDAMVCPPGEVPVFWPSPLTSLGAVSSCETPLAFASIPGCTVMTDLKDAKAPPGCLTPERIPEVHHISQDPLHYSIASVSASQKIRELESMIGIDPGNRGIGHLLCKDELLKASLSLSHARSVLITTGFPTHFNHEPPEETDGPPGAVALVAFLQALEKEVAIIVDQRAWNLHQKIVEDAVEQGVLKTQIPILTYQGGSVEAAQAFLCKNGDPQTPRFDHLVAIERAGRAADGNYYNARKMNIKHLVDPIDDLFLAAKKIPGISSTGVGDGGNELGMGKVKEAVRRHIRHGDVIACDVEADFAVIAGVSNWGGYALACALYILYSCAVHSQYLRKAVGPSRAPGDQAWTQALPSVIKEEKMLGILVQHKVRSGVSGIVGMEVDGLPFHNTHAEMIQKLVDVTTAQV

SEQ ID NO: 15797 - protein, 159 aa, Homo sapiens
  Payload ID: 3145
  Gene Symbol: C14orf159
  Gene Name: chromosome 14 open reading frame 159
  Uniprot ID: Q7Z3D6
  ENSP ID: ENSP00000298858
MPFTLHLRSRLPSAIRSLILQKKPNIRNTSSMAGELRPASLVVLPRSLAPAFERFCQVNTGPLPLLGQSEPEKWMLPPQGAISETSLRDLHSAWHRTSLMTVAQERAALPTVLTPSPITWRLSWLRSLRSWRKSSPGEIPLALPSVHSIAQARNPPVQD

SEQ ID NO: 15798 - protein, 621 aa, Homo sapiens; identical to SEQ ID NO: 15796
  Payload ID: 3145
  Gene Symbol: C14orf159
  Gene Name: chromosome 14 open reading frame 159
  Uniprot ID: Q7Z3D6
  ENSP ID: ENSP00000404196

SEQ ID NO: 15799 - protein, 616 aa, Homo sapiens
  Payload ID: 3145
  Gene Symbol: C14orf159
  Gene Name: chromosome 14 open reading frame 159
  Uniprot ID: Q7Z3D6
  ENSP ID: ENSP00000404343
MPFTLHLRSRLPSAIRSLILQKKPNIRNTSSMAGELRPASLVVLPRSLAPAFERFCQVNTGPLPLLGQSEPEKWMLPPQGAISETRMGHPQFWKYEFGACTGSLASLEQYSEQLKDMVAFFLGCSFSLEEALEKAGLPRRDPAGHSQTTVPCVTHAGFCCPLVVTMRPIPKDKLEGLVRACCSLGGEQGQPVHMGDPELLGIKELSKPAYGDAMVCPPGEVPVFWPSPLTSLGAVSSCETPLAFASIPGCTVMTDLKDAKAPPGCLTPERIPEVHHISQDPLHYSIASVSASQKIRELESMIGIDPGNRGIGHLLCKDELLKASLSLSHARSVLITTGFPTHFNHEPPEETDGPPGAVALVAFLQALEKEVAIIVDQRAWNLHQKIVEDAVEQGVLKTQIPILTYQGGSVEAAQAFLCKNGDPQTPRFDHLVAIERAGRAADGNYYNARKMNIKHLVDPIDDLFLAAKKIPGISSTGVGDGGNELGMGKVKEAVRRHIRHGDVIACDVEADFAVIAGVSNWGGYALACALYILYSCAVHSQYLRKAVGPSRAPGDQAWTQALPSVIKEEKMLGILVQHKVRSGVSGIVGMEVDGLPFHNTHAEMIQKLVDVTTAQV

SEQ ID NO: 15800 - protein, 616 aa, Homo sapiens; identical to SEQ ID NO: 15799
  Payload ID: 3145
  Gene Symbol: C14orf159
  Gene Name: chromosome 14 open reading frame 159
  Uniprot ID: Q7Z3D6
  ENSP ID: ENSP00000427953

SEQ ID NO: 15801 - protein, 85 aa, Homo sapiens
  Payload ID: 3145
  Gene Symbol: C14orf159
  Gene Name: chromosome 14 open reading frame 159
  ENSP ID: ENSP00000427971
MPFTLHLRSRLPSAIRSLILQKKPNIRNTSSMAGELRPASLVVLPRSLAPAFERFCQVNTGPLPLLGQSEPEKWMLPPQGAISET

SEQ ID NO: 15802 - protein, 83 aa, Homo sapiens
  Payload ID: 3145
  Gene Symbol: C14orf159
  Gene Name: chromosome 14 open reading frame 159
  ENSP ID: ENSP00000428122
MPFTLHLRSRLPSAIRSLILQKKPNIRNTSSMAGELRPASLVVLPRSLAPAFERFCQVNTGPLPLLGQSEPEKWMLPPQGAIS

SEQ ID NO: 15803 - protein, 621 aa, Homo sapiens; identical to SEQ ID NO: 15796
  Payload ID: 3145
  Gene Symbol: C14orf159
  Gene Name: chromosome 14 open reading frame 159
  Uniprot ID: Q7Z3D6
  ENSP ID: ENSP00000428263

SEQ ID NO: 15804 - protein, 201 aa, Homo sapiens
  Payload ID: 3145
  Gene Symbol: C14orf159
  Gene Name: chromosome 14 open reading frame 159
  ENSP ID: ENSP00000428296
MPFTLHLRSRLPSAIRSLILQKKPNIRNTSSMAGELRPASLVVLPRSLAPAFERFCQVNTGPLPLLGQSEPEKWMLPPQGAISETRMGHPQFWKYEFGACTGSLASLEQYSEQLKDMVAFFLGCSFSLEEALEKAGLPRRDPAGHSQAGAYKTTVPCVTHAGFCCPLVVTMRPIPKDKLEGLVRACCSLGGEQGQPVHMGD

SEQ ID NO: 15805 - protein, 564 aa, Homo sapiens
  Payload ID: 3145
  Gene Symbol: C14orf159
  Gene Name: chromosome 14 open reading frame 159
  ENSP ID: ENSP00000428444
  MOD_RES (1)..(1): Any amino acid
XSLILQKKPNIRNTSSMAGELRPASLVVLPRSLAPAFERFCQVNTGPLPLLGQSEPEKWMLPPQGAISETRMGHPQFWKYEFGACTGSLASLEQYSEQLKDMVAFFLGCSFSLEEALEKAGLPRRDPAGHSQAGAYKTTVPCVTHAGFCCPLVVTMRPIPKDKLEGLVRACCSLGGEQGQPVHMGDPELLGIKELSKPAYGDAMVCPPGEVPVFWPSPLTSLGAVSSCETPLAFASIPGCTVMTDLKDAKAPPGCLTPERIPEVHHISQDPLHYSIASVSASQKIRELESMIGIDPGNRGIGHLLCKDELLKASLSLSHARSVLITTGFPTHFNHEPPEETDGPPGAVALVAFLQALEKEVAIIVDQRAWNLHQKIVEDAVEQGVLKTQIPILTYQGGSVEAAQAFLCKNGDPQTPRFDHLVAIERAGRAADGNYYNARKMNIKHLVDPIDDLFLAAKKIPGISSTGVGDGGNELGMGKVKEAVRRHIRHGDVIACDVEADFAVIAGVSNWGGYALACALYILYSCAVHSQYLRKAVGPSRAPGDQAWTQALPSVIKESKGRKL

SEQ ID NO: 15806 - protein, 276 aa, Homo sapiens
  Payload ID: 3145
  Gene Symbol: C14orf159
  Gene Name: chromosome 14 open reading frame 159
  ENSP ID: ENSP00000428462
  MOD_RES (1)..(1): Any amino acid
XPILTYQGGSVEAAQAFLCKNGDPQTPRFDHLVAIERAGRAADGNYYNARKMNIKHLVDPIDDLFLAAKKIPGISSTGVGDGGNELGMGKVKEAVRRHIRHGDVIACDVEADFAVIAGVSNWGGYALACALYILYSCAVHSQYLRKAVGPSRAPGDQAWTQALPSVIKSGWGRCQGVPEPGLMVAAGGLCQGELPQPEQKEVKAKTELGPPDAMWRHVGLSVFPRVAGRQMEPFLPLPHSPARSRQPALPCLLQDETMIIPAPSCSTGSLSTMFPP

SEQ ID NO: 15807 - protein, 431 aa, Homo sapiens
  Payload ID: 3145
  Gene Symbol: C14orf159
  Gene Name: chromosome 14 open reading frame 159
  ENSP ID: ENSP00000428652
MPFTLHLRSRLPSAIRSLILQKKPNIRNTSSMAGELRPASLVVLPRSLAPAFERFCQVNTGPLPLLGQSEPEKWMLPPQGAISETRMGHPQFWKYEFGACTGSLASLEQYSEQLKDMVAFFLGCSFSLEEALEKAGLPRRDPAGHSQAGAYKTTVPCVTHAGFCCPLVVTMRPIPKDKLEGLVRACCSLGGEQGQPVHMGDPELLGIKELSKPAYGDAMVCPPGEVPVFWPSPLTSLGAVSSCETPLAFASIPGCTVMTDLKDAKAPPGCLTPERIPEVHHISQDPLHYSIASVSASQKIRELESMIGIDPGNRGIGHLLCKDELLKASLSLSHARSVLITTGFPTHFNHEPPEETDGPPGAVALVAFLQALEKEVAIIVDQRAWNLHQKIVEDAVEQGVLKTQIPILTYQGGSVEAAQAFLCKNGDPQTP

SEQ ID NO: 15808 - protein, 506 aa, Homo sapiens
  Payload ID: 3145
  Gene Symbol: C14orf159
  Gene Name: chromosome 14 open reading frame 159
  ENSP ID: ENSP00000428760
  MOD_RES (1)..(1): Any amino acid
XCTGSLASLEQYSEQLKDMVAFFLGCSFSLEEALEKAGLPRRDPAGHSQAGAYKTTVPCVTHAGFCCPLVVTMRPIPKDKLEGLVRACCSLGGEQGQPVHMGDPELLGIKELSKPAYGDAMVCPPGEVPVFWPSPLTSLGAVSSCETPLAFASIPGCTVMTDLKDAKAPPGCLTPERIPEVHHISQDPLHYSIASVSASQKIRELESMIGIDPVLITTGFPTHFNHEPPEETDGPPGAVALVAFLQALEKEVAIIVDQRAWNLHQKIVEDAVEQGVLKTQIPILTYQGGSVEAAQAFLCKNGDPQTPRFDHLVAIERAGRAADGNYYNARKMNIKHLVDPIDDLFLAAKKIPGISSTGVGDGGNELGMGKVKEAVRRHIRHGDVIACDVEADFAVIAGEHSDGRPVRPATQGVSNWGGYALACALYILYSCAVHSQYLRKAVGPSRAPGDQAWTQALPSVIKVTNPSQPLAWKQLLPWMSSRPEVPSRKPRAGTLLPLKSQRQSQP

SEQ ID NO: 15809 - protein, 616 aa, Homo sapiens; identical to SEQ ID NO: 15799
  Payload ID: 3145
  Gene Symbol: C14orf159
  Gene Name: chromosome 14 open reading frame 159
  Uniprot ID: Q7Z3D6
  ENSP ID: ENSP00000428974

SEQ ID NO: 15810 - protein, 25 aa, Homo sapiens
  Payload ID: 3145
  Gene Symbol: C14orf159
  Gene Name: chromosome 14 open reading frame 159
  ENSP ID: ENSP00000428997
MPFTLHLRSRLPSAIRSLILQKKPN

SEQ ID NO: 15811 - protein, 37 aa, Homo sapiens
  Payload ID: 3145
  Gene Symbol: C14orf159
  Gene Name: chromosome 14 open reading frame 159
  ENSP ID: ENSP00000429052
MPFTLHLRSRLPSAIRSLILQKKPNIRNTSSMAGGFH

SEQ ID NO: 15812 - protein, 52 aa, Homo sapiens
  Payload ID: 3145
  Gene Symbol: C14orf159
  Gene Name: chromosome 14 open reading frame 159
  ENSP ID: ENSP00000429097
MPFTLHLRSRLPSAIRSLILQKKPNIRNTSSMAGELRPASLVVLPRSLAPAF

SEQ ID NO: 15813 - protein, 159 aa, Homo sapiens; identical to SEQ ID NO: 15797
  Payload ID: 3145
  Gene Symbol: C14orf159
  Gene Name: chromosome 14 open reading frame 159
  Uniprot ID: Q7Z3D6
  ENSP ID: ENSP00000429098

SEQ ID NO: 15814 - protein, 109 aa, Homo sapiens
  Payload ID: 3145
  Gene Symbol: C14orf159
  Gene Name: chromosome 14 open reading frame 159
  ENSP ID: ENSP00000429189
MPFTLHLRSRLPSAIRSLILQKKPNIRNTSSMAGELRPASLVVLPRSLAPAFERFCQVNTGPLPLLGQSEPEKWMLPPQGAISETRMGHPQFWKYEFGACTGSLASLEQ

SEQ ID NO: 15815 - protein, 125 aa, Homo sapiens
  Payload ID: 3145
  Gene Symbol: C14orf159
  Gene Name: chromosome 14 open reading frame 159
  ENSP ID: ENSP00000429392
MPFTLHLRSRLPSAIRSLILQKKPNIRNTSSMAGELRPASLVVLPRSLAPAFERFCQVNTGPLPLLGQSEPEKWMLPPQGAISETRMGHPQFWKYEFGACTGSLASLEQYSEQLKDMVAFFLGCS

SEQ ID NO: 15816 - protein, 564 aa, Homo sapiens
  Payload ID: 3145
  Gene Symbol: C14orf159
  Gene Name: chromosome 14 open reading frame 159
  Uniprot ID: Q7Z3D6
  ENSP ID: ENSP00000429453
MPFTLHLRSRLPSAIRSLILQKKPNIRNTSSMAGELRPASLVVLPRSLAPAFERFCQVNTGPLPLLGQSEPEKWMLPPQGAISETRMGHPQFWKYEFGACTGSLASLEQYSEQLKDMVAFFLGCSFSLEEALEKAGLPRRDPAGHSQTTVPCVTHAGFCCPLVVTMRPIPKDKLEGLVRACCSLGELLGIKELSKPAYGDAMVCPPGEVPVFWPSPLTSLGAVSSCETPLAFASIPGCTVMTDLKDAKAPPGCLTPERIPEVHHISQDPLHYSIASVSASQKIRELESMIGIDPGNRGIGHLLCKDELLKASLSLSHARSVLITTGFPTHFNHEPPEETDGPPGAVALVAFLQALEKEVAIIVDQRAWNLHQKIVEDAVEQGVLKTQIPILTYQGGSVEAAQAFLCKNGDPQTPRFDHLVAIERAGRAADGNYYNARKMNIKHLVDPIDDLFLAAKKIPGISSTGVSNWGGYALACALYILYSCAVHSQYLRKAVGPSRAPGDQAWTQALPSVIKEEKMLGILVQHKVRSGVSGIVGMEVDGLPFHNTHAEMIQKLVDVTTAQV

SEQ ID NO: 15817 - protein, 152 aa, Homo sapiens
  Payload ID: 3145
  Gene Symbol: C14orf159
  Gene Name: chromosome 14 open reading frame 159
  ENSP ID: ENSP00000429459
MPFTLHLRSRLPSAIRSLILQKKPNIRNTSSMAGELRPASLVVLPRSLAPAFERFCQVNTGPLPLLGQSEPEKWMLPPQGAISETRMGHPQFWKYEFGACTGSLASLEQYSEQLKDMVAFFLGCSFSLEEALEKAGLPRRDPAGHSQAGAYK

SEQ ID NO: 15818 - protein, 616 aa, Homo sapiens; identical to SEQ ID NO: 15799
  Payload ID: 3145
  Gene Symbol: C14orf159
  Gene Name: chromosome 14 open reading frame 159
  Uniprot ID: Q7Z3D6
  ENSP ID: ENSP00000429655

SEQ ID NO: 15819 - protein, 64 aa, Homo sapiens
  Payload ID: 3145
  Gene Symbol: C14orf159
  Gene Name: chromosome 14 open reading frame 159
  ENSP ID: ENSP00000429806
MPFTLHLRSRLPSAIRSLILQKKPNIRNTSSMAGELRPASLVVLPRSLAPAFERFCQVNTGPLP

SEQ ID NO: 15820 - protein, 86 aa, Homo sapiens
  Payload ID: 3145
  Gene Symbol: C14orf159
  Gene Name: chromosome 14 open reading frame 159
  ENSP ID: ENSP00000429949
MPFTLHLRSRLPSAIRSLILQKKPNIRNTSSMAGELRPASLVVLPRSLAPAFERFCQVNTGPLPLLGQSEPEKWMLPPQGAISETR

SEQ ID NO: 15821 - protein, 104 aa, Homo sapiens
  Payload ID: 3145
  Gene Symbol: C14orf159
  Gene Name: chromosome 14 open reading frame 159
  ENSP ID: ENSP00000429967
MPFTLHLRSRLPSAIRSLILQKKPNIRNTSSMAGELRPASLVVLPRSLAPAFERFCQVNTGPLPLLGQSEPEKWMLPPQGAISETRQQCLVLPMLASAALWWSR

SEQ ID NO: 15822 - protein, 152 aa, Homo sapiens; identical to SEQ ID NO: 15817
  Payload ID: 3145
  Gene Symbol: C14orf159
  Gene Name: chromosome 14 open reading frame 159
  ENSP ID: ENSP00000430022

SEQ ID NO: 15823 - protein, 581 aa, Homo sapiens
  Payload ID: 3145
  Gene Symbol: C14orf159
  Gene Name: chromosome 14 open reading frame 159
  Uniprot ID: Q7Z3D6
  ENSP ID: ENSP00000430137
MPFTLHLRSRLPSAIRSLILQKKPNIRNTSSMAGELRPASLVVLPRSLAPAFERFCQVNTGPLPLLGQSEPEKWMLPPQGAISETRMGHPQFWKYEFGACTGSLASLEQYSEQLKDMVAFFLGCSFSLEEALEKAGLPRRDPAGHSQAGAYKTTVPCVTHAGFCCPLVVTMRPIPKDKLEGLVRACCSLGGEQGQPVHMGDPELLGIKELSKPAYGDAMVCPPGEVPVFWPSPLTSLGAVSSCETPLAFASIPGCTVMTDLKDAKAPPGCLTPERIPEVHHISQDPLHYSIASVSASQKIRELESMIGIDPGNRGIGHLLCKDELLKASLSLSHARSVLITTGFPTHFNHEPPEETDGPPGAVALVAFLQALEKEVAIIVDQRAWNLHQKIVEDAVEQGVLKTQIPILTYQGGSVEAAQAFLCKNGDPQTPRFDHLVAIERAGRAADGNYYNARKMNIKHLVDPIDDLFLAAKKIPGISSTGVSNWGGYALACALYILYSCAVHSQYLRKAVGPSRAPGDQAWTQALPSVIKEEKMLGILVQHKVRSGVSGIVGMEVDGLPFHNTHAEMIQKLVDVTTAQV

SEQ ID NO: 15824 - protein, 94 aa, Homo sapiens
  Payload ID: 3145
  Gene Symbol: C14orf159
  Gene Name: chromosome 14 open reading frame 159
  ENSP ID: ENSP00000430318
MPFTLHLRSRLPSAIRSLILQKKPNIRNTSSMAGELRPASLVVLPRSLAPAFERFCQVNTGPLPLLGQSEPEKWMLPPQGAISETRNELPSPLF

SEQ ID NO: 15825 - protein, 202 aa, Homo sapiens
  Payload ID: 3145
  Gene Symbol: C14orf159
  Gene Name: chromosome 14 open reading frame 159
  ENSP ID: ENSP00000430666
MPFTLHLRSRLPSAIRSLILQKKPNIRNTSSMAGELRPASLVVLPRSLAPAFERFCQVNTGPLPLLGQSEPEKWMLPPQGAISETRMGHPQFWKYEFGACTGSLASLEQYSEQLKDMVAFFLGCSFSLEEALEKAGLPRRDPAGHSQAGAYKTTVPCVTHAGFCCPLVVTMRPIPKDKLEGLVRACCSLGGEQGQPVHMGDP

SEQ ID NO: 15826 - protein, 581 aa, Homo sapiens; identical to SEQ ID NO: 15823
  Payload ID: 3145
  Gene Symbol: C14orf159
  Gene Name: chromosome 14 open reading frame 159
  Uniprot ID: Q7Z3D6
  ENSP ID: ENSP00000435459

SEQ ID NO: 15827 - protein, 244 aa, Homo sapiens
  Payload ID: 3146
  Gene Symbol: C14orf166
  Gene Name: chromosome 14 open reading frame 166
  Uniprot ID: Q9Y224
  ENSP ID: ENSP00000261700
MFRRKLTALDYHNPAGFNCKDETEFRNFIVWLEDQKIRHYKIEDRGNLRNIHSSDWPKFFEKYLRDVNCPFKIQDRQEAIDWLLGLAVRLEYGDNAEKYKDLVPDNSKTADNATKNAEPLINLDVNNPDFKAGVMALANLLQIQRHDDYLVMLKAIRILVQERLTQDAVAKANQTKEGLPVALDKHILGFDTGDAVLNEAAQILRLLHIEELRELQTKINEAIVAVQAIIADPKTDHRLGKVGR

SEQ ID NO: 15828 - protein, 129 aa, Homo sapiens
  Payload ID: 3146
  Gene Symbol: C14orf166
  Gene Name: chromosome 14 open reading frame 166
  ENSP ID: ENSP00000451153
LRDVNCPFKIQDRQEAIDWLLGLAVRLEYGDNAEKYKDLVPDNSKTADNATKNAEPLINLDVNNPDFKAGVMALANLLQIQRHDDYLVMLKAIRILVQERLTQDAVAKANQTKEMQFLMKLLKFCDCCT

SEQ ID NO: 15829 - protein, 193 aa, Homo sapiens
  Payload ID: 3146
  Gene Symbol: C14orf166
  Gene Name: chromosome 14 open reading frame 166
  ENSP ID: ENSP00000451715
MFRRKLTALDYHNPAGFNCKDETEFRNFIVWLEDQKIRHYKIEDRGNLRNIHSSDWPKFFEKYLRDVNCPFKIQDRQEAIDWLLGLAVRLEYGDNAEKYKDLVPDNSKTADNATKNAEPLINLDVNNPDFKAGVMALANLLQIQRHDDYLVMLKAIRILVQERLTQDAVAKANQTKEEMQFLMKLLKFCDCCT

SEQ ID NO: 15830 - protein, 68 aa, Homo sapiens
  Payload ID: 3146
  Gene Symbol: C14orf166
  Gene Name: chromosome 14 open reading frame 166
  ENSP ID: ENSP00000451751
MFRRKLTALDYHNPAGFNCKDETEFRNFIVWLEDQKIRHYKIEDRGNLRNIHSSDWPKFFEKLKNTRI

SEQ ID NO: 15831 - protein, 641 aa, Homo sapiens
  Payload ID: 3147
  Gene Symbol: C14orf169
  Gene Name: chromosome 14 open reading frame 169
  Uniprot ID: Q9H6W3
  ENSP ID: ENSP00000477507
MDGLQASAGPLRRGRPKRRRKPQPHSGSVLALPLRSRKIRKQLRSVVSRMAALRTQTLPSENSEESRVESTADDLGDALPGGAAVAAVPDAARREPYGHLGPAELLEASPAARSLQTPSARLVPASAPPARLVEVPAAPVRVVETSALLCTAQHLAAVQSSGAPATASGPQVDNTGGEPAWDSPLRRVLAELNRIPSSRRRAARLFEWLIAPMPPDHFYRRLWEREAVLVRRQDHTYYQGLFSTADLDSMLRNEEVQFGQHLDAARYINGRRETLNPPGRALPAAAWSLYQAGCSLRLLCPQAFSTTVWQFLAVLQEQFGSMAGSNVYLTPPNSQGFAPHYDDIEAFVLQLEGRKLWRVYRPRVPTEELALTSSPNFSQDDLGEPVLQTVLEPGDLLYFPRGFIHQAECQDGVHSLHLTLSTYQRNTWGDFLEAILPLAVQAAMEENVEFRRGLPRDFMDYMGAQHSDSKDPRRTAFMEKVRVLVARLGHFAPVDAVADQRAKDFIHDSLPPVLTDRERALSVYGLPIRWEAGEPVNVGAQLTTETEVHMLQDGIARLVGEGGHLFLYYTVENSRVYHLEEPKCLEIYPQQADAMELLLGSYPEFVRVGDLPCDSVEDQLSLATTLYDKGLLLTKMPLALN

SEQ ID NO: 15832 - protein, 125 aa, Homo sapiens
  Payload ID: 3148
  Gene Symbol: C14orf177
  Gene Name: chromosome 14 open reading frame 177
  Uniprot ID: Q52M58
  ENSP ID: ENSP00000321360
MHRKEPGARLEATRGAARPHKQGTKPMITRPSVSQLGEGKCPSSQHLQSLRHNKQHALTLTKARCCGECSTCFCTEEKSECQRHEETSPGSCNHQIMSASTISAFCATPRFKQLFKGTVEQMSQM

SEQ ID NO: 15833 - protein, 75 aa, Homo sapiens
  Payload ID: 3148
  Gene Symbol: C14orf177
  Gene Name: chromosome 14 open reading frame 177
  ENSP ID: ENSP00000440687
MHRKEPGARLEATRGAARPHKQGTKPMITRPSVSQLGEGKCPSSQHLQSLRHNKQHALTLTKARCCGECSTCFCT

SEQ ID NO: 15834 - protein, 122 aa, Homo sapiens
  Payload ID: 3149
  Gene Symbol: C14orf178
  Gene Name: chromosome 14 open reading frame 178
  Uniprot ID: Q8N769
  ENSP ID: ENSP00000348145
MGREMKKTGTPRPFRIEDPNQQPTWHDQPEMGSHYFAQAGLELLGSSNPPASASQSAGITGVSHCARPGEHDLNHTVFQVKDSTFLRHLESDRPEFKSCLPPHFTEPSVSLSTSEGCEDAMG

SEQ ID NO: 15835 - protein, 92 aa, Homo sapiens
  Payload ID: 3149
  Gene Symbol: C14orf178
  Gene Name: chromosome 14 open reading frame 178
  ENSP ID: ENSP00000407405
MGSHYFAQAGLELLGSSNPPASASQSAGITGVSHCARPGEHDLNHTVFQVKDSTFLRHLESDRPEFKSCLPPHFTEPSVSLSTSEGCEDAMG

SEQ ID NO: 15836 - protein, 24 aa, Homo sapiens
  Payload ID: 3149
  Gene Symbol: C14orf178
  Gene Name: chromosome 14 open reading frame 178
  Uniprot ID: Q8N769
  ENSP ID: ENSP00000451236
MGREMKKTGTPRPFRIEDPNQQPT

SEQ ID NO: 15837 - protein, 37 aa, Homo sapiens
  Payload ID: 3149
  Gene Symbol: C14orf178
  Gene Name: chromosome 14 open reading frame 178
  Uniprot ID: Q8N769
  ENSP ID: ENSP00000451531
MGREMKKTGTPRPFRIEDPNQQPTWHDQPGTESVFWL

SEQ ID NO: 15838 - protein, 177 aa, Homo sapiens
  Payload ID: 3150
  Gene Symbol: C14orf180
  Gene Name: chromosome 14 open reading frame 180
  ENSP ID: ENSP00000333041
MRTAAGAVSPDSRPETRRQTRKNEEAAWGPRVCRAEREDNRKCPPSILKRSRPEHHRPEAKPQRTSRRVWFREPPAVTVHYIADKNATATVRAVCVRPARAGPGPILRPGQARGNGTGGPAGPAPRPCPAPAARGPHLLARPPAALTGRTGRTGRASRRAQALRGLRDSLSPGPAAW

SEQ ID NO: 15839 - protein, 160 aa, Homo sapiens
  Payload ID: 3150
  Gene Symbol: C14orf180
  Gene Name: chromosome 14 open reading frame 180
  Uniprot ID: Q8N912
  ENSP ID: ENSP00000386487
MRTAAGAVSPDSRPETRRQTRKNEEAAWGPRVCRAEREDNRKCPPSILKRSRPEHHRPEAKPQRTSRRVWFREPPAVTVHYIADKNATATVRVPGRPRPHGGSLLLQLCVCVLLVLALGLYCGRAKPVATALEDLRARLLGLVLHLRHVALTCWRGLLRL

SEQ ID NO: 15840 - protein, 160 aa, Homo sapiens; identical to SEQ ID NO: 15839
  Payload ID: 3150
  Gene Symbol: C14orf180
  Gene Name: chromosome 14 open reading frame 180
  Uniprot ID: Q8N912
  ENSP ID: ENSP00000452502

SEQ ID NO: 15841 - protein, 160 aa, Homo sapiens; identical to SEQ ID NO: 15839
  Payload ID: 3150
  Gene Symbol: C14orf180
  Gene Name: chromosome 14 open reading frame 180
  Uniprot ID: Q8N912
  ENSP ID: ENSP00000480567

SEQ ID NO: 15842 - protein, 177 aa, Homo sapiens; identical to SEQ ID NO: 15838
  Payload ID: 3150
  Gene Symbol: C14orf180
  Gene Name: chromosome 14 open reading frame 180
  ENSP ID: ENSP00000481876

SEQ ID NO: 15843 - protein, 160 aa, Homo sapiens; identical to SEQ ID NO: 15839
  Payload ID: 3150
  Gene Symbol: C14orf180
  Gene Name: chromosome 14 open reading frame 180
  Uniprot ID: Q8N912
  ENSP ID: ENSP00000487058

SEQ ID NO: 15844 - protein, 58 aa, Homo sapiens
  Payload ID: 3151
  Gene Symbol: C14orf2
  Gene Name: chromosome 14 open reading frame 2
  Uniprot ID: P56378
  ENSP ID: ENSP00000286953
MLQSIIKNIWIPMKPYYTKVYQEIWIGMGLMGFIVYKIRAADKRSKALKASAPAPGHH

SEQ ID NO: 15845 - protein, 75 aa, Homo sapiens
  Payload ID: 3151
  Gene Symbol: C14orf2
  Gene Name: chromosome 14 open reading frame 2
  Uniprot ID: P56378
  ENSP ID: ENSP00000401770
MKLYGTRGSDISHFQCQMLQSIIKNIWIPMKPYYTKVYQEIWIGMGLMGFIVYKIRAADKRSKALKASAPAPGHH

SEQ ID NO: 15846 - protein, 58 aa, Homo sapiens; identical to SEQ ID NO: 15844
  Payload ID: 3151
  Gene Symbol: C14orf2
  Gene Name: chromosome 14 open reading frame 2
  Uniprot ID: P56378
  ENSP ID: ENSP00000450894

SEQ ID NO: 15847 - protein, 99 aa, Homo sapiens
  Payload ID: 3151
  Gene Symbol: C14orf2
  Gene Name: chromosome 14 open reading frame 2
  ENSP ID: ENSP00000451500
MLQSIIKNIWIPMKPYYTKVYQEIWIGMGLMGFIVYKIRAAEMGFCHVTQAGLELLGSSSPPILASQSAGINKREPQHLAQLGNFEQDFNIRIIKEVRL

SEQ ID NO: 15848 - protein, 58 aa, Homo sapiens; identical to SEQ ID NO: 15844
  Payload ID: 3151
  Gene Symbol: C14orf2
  Gene Name: chromosome 14 open reading frame 2
  Uniprot ID: P56378
  ENSP ID: ENSP00000452133

SEQ ID NO: 15849 - protein, 99 aa, Homo sapiens; identical to SEQ ID NO: 15847
  Payload ID: 3151
  Gene Symbol: C14orf2
  Gene Name: chromosome 14 open reading frame 2
  ENSP ID: ENSP00000452186

SEQ ID NO: 15850 - protein, 77 aa, Homo sapiens
  Payload ID: 3151
  Gene Symbol: C14orf2
  Gene Name: chromosome 14 open reading frame 2
  ENSP ID: ENSP00000452462
MLQSIIKNIWIPMKPYYTKVYQEIWIGMGLMGFIVYKIRAADKRSKALKGKIFASENGWEWKTASCLFRTRYIVVLN

SEQ ID NO: 15851 - protein, 310 aa, Homo sapiens
  Payload ID: 3152
  Gene Symbol: C14orf28
  Gene Name: chromosome 14 open reading frame 28
  Uniprot ID: Q4W4Y0
  ENSP ID: ENSP00000326846
MKTLFEEIKASIKNNYNQDRSFCRPVLPWGGVFTIKAGRKAVSCTPLYVEIRLKNTCTIDGFLMLLYVILNENENFPRELSLHFGREFVDCFLYLMDTYSFTTVKLLWIWDKMEKQQYKSEVHKASLIIDLFGNEHDNFTKNLENLMSTIQESYCSNWRCPTRVQEDQQRTININPPQEIPHGNLIRLAVNELFCSKIELCEEHGCGGLREFSQRIFCHGAPPFVVLNMQHWKSEDLAYVPYYLDLSDHKYLLEGATLFNKEEHHYSAAFQIGGHWMHYDGLRNVNLILLNKPPEFLLLSSLVYIRATEK

SEQ ID NO: 15852 - protein, 280 aa, Homo sapiens
  Payload ID: 3152
  Gene Symbol: C14orf28
  Gene Name: chromosome 14 open reading frame 28
  ENSP ID: ENSP00000451791
MKTLFEEIKASIKNNYNQDRSFCRPVLPWGGVFTIKAGRKAVSCTPLYVEIRLKNTCTIDGFLMLLYVILNENENFPRELSLHFGREFVDCFLYLMDTYSFTTVKLLWIWDKMEKQQYKSEVHKASLIIDLFGNEHDNFTKNLENLMSTIQESYCSNWRCPTRVQEDQQRTINIKCGGLREFSQRIFCHGAPPFVVLNMQHWKSEDLAYVPYYLDLSDHKYLLEGATLFNKEEHHYSAAFQIGGHWMHYDGLRNVNLILLNKPPEFLLLSSLVYIRATEK

SEQ ID NO: 15853 - protein, 774 aa, Homo sapiens
  Payload ID: 3153
  Gene Symbol: C14orf37
  Gene Name: chromosome 14 open reading frame 37
  Uniprot ID: Q86TY3
  ENSP ID: ENSP00000267485
MRGPIVLHICLAFCSLLLFSVATQCLAFPKIERRREIAHVHAEKGQSDKMNTDDLENSSVTSKQTPQLVVSEDPMMMSAVPSATSLNKAFSINKETQPGQAGLMQTERPGVSTPTESGVPSAEEVFGSSQPERISPESGLAKAMLTIAITATPSLTVDEKEELLTSTNFQPIVEEITETTKGFLKYMDNQSFATESQEGVGLGHSPSSYVNTKEMLTTNPKTEKFEADTDHRTTSFPGAESTAGSEPGSLTPDKEKPSQMTADNTQAAATKQPLETSEYTLSVEPETDSLLGAPEVTVSVSTAVPAASALSDEWDDTKLESVSRIRTPKLGDNEETQVRTEMSQTAQVSHEGMEGGQPWTEAAQVALGLPEGETHTGTALLIAHGNERSPAFTDQSSFTPTSLMEDMKVSIVNLLQSTGDFTESTKENDALFFLETTVSVSVYESEADQLLGNTMKDIITQEMTTAVQEPDATLSMVTQEQVATLELIRDSGKTEEEKEDPSPVSDVPGVTQLSRRWEPLATTISTTVVPLSFEVTPTVEEQMDTVTGPNEEFTPVLGSPVTPPGIMVGEPSISPALPALEASSERRTVVPSITRVNTAASYGLDQLESEEGQEDEDEEDEEDEDEEEEDEEEDEEDKDADSLDEGLDGDTELPGFTLPGITSQEPGLEEGNMDLLEGATYQVPDALEWEQQNQGLVRSWMEKLKDKAGYMSGMLVPVGVGIAGALFILGALYSIKVMNRRRRNGFKRHKRKQREFNSMQDRVMLLADSSEDEF

SEQ ID NO: 15854 - protein, 97 aa, Homo sapiens
  Payload ID: 3153
  Gene Symbol: C14orf37
  Gene Name: chromosome 14 open reading frame 37
  ENSP ID: ENSP00000477692
  MOD_RES (1)..(1): Any amino acid
XVVPLSFEVTPTVEEQMDTVTGPNEEFTPVLGSPVTPPGIMVGEPSISPALPALEASSERRTVVPSITRVNTAASYGLDQLESEGIHALKGIFSRTG

SEQ ID NO: 15855 - protein, 587 aa, Homo sapiens
  Payload ID: 3154
  Gene Symbol: C14orf39
  Gene Name: chromosome 14 open reading frame 39
  Uniprot ID: Q8N1H7
  ENSP ID: ENSP00000324920
MNDSLFVSLDRLLLEFVFQYEQDISTKEEMIQRINKCCEDIKENKVTICRIHETINATDEEIDHYCKHSEEIKDNCRNWKPTCDVFRKHEDYMQDQFTVYQGTVEKDKEMYHDYICQYKEVLKQYQLKYSETPFSREYYEKKREHEEIQSRVLACTEQLKMNETIFMKFRVPAPFPSLTKWTLNIVNLRCETQDILKHASNLTKSSSELKKEVDEMEIEINYLNQQISRHNETKALSETLEEKNKNTENRKELKERIFGKDEHVLTLNKTQSSQLFLPYESQKLVRPIKMHSSEPRVADIKEESSAKQSKLANIDFRQKENDTQIFNDSAVDNHSKCSHITTITSSQKFMQVRLLTPQKQSNSNQWSEKGDKDAEYGDKGTVRQVRESKCTSQAIYTEHFGKSVENDSDEVEERAENFPRTSEIPIFLGTPKAVKAPESLEKIKFPKTPPFEINRNRNAVPEVQTEKESPGLSFLMSYTSRSPGLNLFDSSVFDTEISSDQFNEHYSARNLNPLSSEQEIGNLLEKPEGEDGFTFSFPSDTSTHTFGAGKDDFSFPFSFGQGQNSIPSSSLKGFSSSSQNTTQFTFF

SEQ ID NO: 15856 - protein, 37 aa, Homo sapiens
  Payload ID: 3154
  Gene Symbol: C14orf39
  Gene Name: chromosome 14 open reading frame 39
  ENSP ID: ENSP00000450476
MNDSLFVSLDRLLLEFVFQYEQDISTKEEMIQRINNI

SEQ ID NO: 15857 - protein, 88 aa, Homo sapiens
  Payload ID: 3154
  Gene Symbol: C14orf39
  Gene Name: chromosome 14 open reading frame 39
  ENSP ID: ENSP00000451441
MNDSLFVSLDRLLLEFVFQYEQDISTKEEMIQRINKCCEDIKENKVTICRIHETINATDEEIDHYCKHSEEIKDNCRNWKPTCDVFRK

SEQ ID NO: 15858 - protein, 114 aa, Homo sapiens
  Payload ID: 3154
  Gene Symbol: C14orf39
  Gene Name: chromosome 14 open reading frame 39
  ENSP ID: ENSP00000451665
MIQRINKCCEDIKENKVTICRIHETINATDEEIDHYCKHSEEIKDNCRNWKPTCDVFRKHEDYMQDQFTVYQGTVEKDKEMYHDYICQYKEVLKQYQLKYSETPFSREYYEKKR

SEQ ID NO: 15859 - protein, 72 aa, Homo sapiens
  Payload ID: 3154
  Gene Symbol: C14orf39
  Gene Name: chromosome 14 open reading frame 39
  ENSP ID: ENSP00000451937
  MOD_RES (1)..(1): Any amino acid
XNLFDSSVFDTEISSDQFNEHYSARNLNPLSSEQEIEKTKCFRNEGKKGHHELENLGRIHRRGKIELGLYSL

SEQ ID NO: 15860 - protein, 197 aa, Homo sapiens
  Payload ID: 3155
  Gene Symbol: C14orf79
  Gene Name: chromosome 14 open reading frame 79
  ENSP ID: ENSP00000374614
MQGRRELGGEPLSDLQEEAASASLRVAPERLSDDSLEWRRTCPDLLLSDGKASISMPREGGSTCTARCPDPGEHSSTWGEFEGFRESSAKSGQFSQSLELLEGPTEPQPPRTTSAPKECSSHQPCQGGPWVTGTSAVPPSEPILSYENILKCAFQEITVQQAAEDVSTIDHFLEISSEEKPGVERVHKLWDTLSTEH

SEQ ID NO: 15861 - protein, 219 aa, Homo sapiens
  Payload ID: 3155
  Gene Symbol: C14orf79
  Gene Name: chromosome 14 open reading frame 79
  ENSP ID: ENSP00000447512
  MOD_RES (1)..(1): Any amino acid
XTPLPGNGAAQAGGNGWLQVSLALVPRGPAEAATKPILSYENILKCAFQEITVQQAAEDVSTIDHFLEISSEEKPGVERVHKLCNESRKLWRALQSIHTTSTSQRLWSESRCQENFFLVLGIDAAQKNLSGGQGHIMEDCDLKEPEGLLTVSSFCLQHCKALIQTKLSGPPGSKQGRLMTCSRFLKTPSCGGGQHITIPRKRMFTPRKLKLTLFNSDVC

SEQ ID NO: 15862 - protein, 185 aa, Homo sapiens
  Payload ID: 3155
  Gene Symbol: C14orf79
  Gene Name: chromosome 14 open reading frame 79
  ENSP ID: ENSP00000447892
MQGRRELGGEPLSDLQEEAASASLRVAPERLSDDSLEWRRTCPDLLLSDGKASISMPREGGSTCTARCPDPGEHSSTWGEFEGFRESSAKSGQFSQSLELLEGPTEPQPPRTTSAPKECSSHQPCQGGPWVTGTSAVPPSEPILSYENILKCAFQEITVQQAAEDVSTIDHFLEISSEEKPGVER

SEQ ID NO: 15863 - protein, 83 aa, Homo sapiens
  Payload ID: 3155
  Gene Symbol: C14orf79
  Gene Name: chromosome 14 open reading frame 79
  ENSP ID: ENSP00000448642
MEDCDLKEPEGLLTVSSFCLQHCKALIQTKLSGPPGSKQGRLMTCSRFLKTPSCGGGQHITIPRKRMFTPRKLKLTLFNSDVC

SEQ ID NO: 15864 - protein, 325 aa, Homo sapiens
  Payload ID: 3155
  Gene Symbol: C14orf79
  Gene Name: chromosome 14 open reading frame 79
  Uniprot ID: Q96F83
  ENSP ID: ENSP00000450114
MQGRRELGGEPLSDLQEEAASASLRVAPERLSDDSLEWRRTCPDLLLSDGKASISMPREGGSTCTARCPDPGEHSSTWGEFEGFRESSAKSGQFSQSLELLEGPTEPQPPRTTSAPKECSSHQPCQGGPWVTGTSAVPPSEPILSYENILKCAFQEITVQQAAEDVSTIDHFLEISSEEKPGVERVHKLCNESRKLWRALQSIHTTSTSQRLWSESRCQENFFLVLGIDAAQKNLSGGQGHIMEDCDLKEPEGLLTVSSFCLQHCKALIQTKLSGPPGSKQGRLMTCSRFLKTPSCGGGQHITIPRKRMFTPRKLKLTLFNSDVC

SEQ ID NO: 15865 - protein, 83 aa, Homo sapiens; identical to SEQ ID NO: 15863
  Payload ID: 3155
  Gene Symbol: C14orf79
  Gene Name: chromosome 14 open reading frame 79
  ENSP ID: ENSP00000450135

SEQ ID NO: 15866 - protein, 354 aa, Homo sapiens
  Payload ID: 3156
  Gene Symbol: C14orf80
  Gene Name: chromosome 14 open reading frame 80
  Uniprot ID: Q86SX3
  ENSP ID: ENSP00000333010
MSGQRGDWVQTSALWQLLFRVLSPLPAGNALASLALEVQARLVKSALCSQGYPRLALAQLPEDGSQGSRELLLALSWLLARGPVPEQMLAQARVPLGDEMTVCQCEALASPGPPAPHMEAEGPVDVRHVQWLMGKLRFRWRQLVSSQQEQCALLSKLLRTLERENQRLEAVLAWRRSELVFWRWMDTVLGTCAPEVPAAASQPTFLPWVPERGGGELDLVVRELQALEEELREAAERRRAAWEAKAGGCGRGPEWSAARRASREAVEKELGALQQCWERDGGPAQPHGPHRLVRREDGAAGDRDLRAAVVIRTLRSQEACLEAVLRRLQGQCRQELARLVGARPGLIWIPPPGR

SEQ ID NO: 15867 - protein, 248 aa, Homo sapiens
  Payload ID: 3156
  Gene Symbol: C14orf80
  Gene Name: chromosome 14 open reading frame 80
  Uniprot ID: Q86SX3
  ENSP ID: ENSP00000333959
MLAQARVPLGDEMTVCQIHLYTRGCHSDQSLSHLSVTEAEMLRDPEGGQQLLRTLERENQRLEAVLAWRRSELVFWRWMDTVLGTCAPEVPAAASQPTFLPWVPERGGGELDLVVRELQALEEELREAAERRRAAWEAKAGGCGRGPEWSAARRASREAVEKELGALQQCWERDGGPAQPHGPHRLVRREDGAAGDRDLRAAVVIRTLRSQEACLEAVLRRLQGQCRQELARLVGARPGLIWIPPPGR

SEQ ID NO: 15868 - protein, 393 aa, Homo sapiens
  Payload ID: 3156
  Gene Symbol: C14orf80
  Gene Name: chromosome 14 open reading frame 80
  Uniprot ID: Q86SX3
  ENSP ID: ENSP00000346568
MGRRRQRVDPAAGARAGALPEAIAALSRSLPSGPSPEIFRRAKFDRPEATSALWQLLFRVLSPLPAGNALASLALEVQARLVKSALCSQGYPRLALAQLPEDGSQGSRELLLALSWLLARGPVPEQMLAQARVPLGDEMTVCQCEALASPGPPAPHMEAEGPVDVRHVQWLMGKLRFRWRQLVSSQQEQCALLSKLLRTLERENQRLEAVLAWRRSELVFWRWMDTVLGTCAPEVPAAASQPTFLPWVPERGGGELDLVVRELQALEEELREAAERRRAAWEAKAGGCGRGPEWSAARRASREAVEKELGALQQCWERDGGPAQPHGPHRLVRREDGAAGDRDLRAAVVIRTLRSQEACLEAVLRRLQGQCRQELARLVGARPGLIWIPPPGR

SEQ ID NO: 15869 - protein, 426 aa, Homo sapiens
  Payload ID: 3156
  Gene Symbol: C14orf80
  Gene Name: chromosome 14 open reading frame 80
  Uniprot ID: Q86SX3
  ENSP ID: ENSP00000376307
MGRRRQRVDPAAGARAGALPEAIAALSRSLPSGPSPEIFRRAKFDRPEATSALWQLLFRVLSPLPAGNALASLALEVQARLVKSALCSQGYPRLALAQLPEDGSQGSRELLLALSWLLARGPVPEQMLAQARVPLGDEMTVCQCEALASPGPPAPHMEAEGPVDVRHVQWLMGKLRFRWRQLVSSQQEQCALLSKIHLYTRGCHSDQSLSHLSVTEAEMLRDPEGGQQLLRTLERENQRLEAVLAWRRSELVFWRWMDTVLGTCAPEVPAAASQPTFLPWVPERGGGELDLVVRELQALEEELREAAERRRAAWEAKAGGCGRGPEWSAARRASREAVEKELGALQQCWERDGGPAQPHGPHRLVRREDGAAGDRDLRAAVVIRTLRSQEACLEAVLRRLQGQCRQELARLVGARPGLIWIPPPGR

SEQ ID NO: 15870 - protein, 495 aa, Homo sapiens
  Payload ID: 3156
  Gene Symbol: C14orf80
  Gene Name: chromosome 14 open reading frame 80
  Uniprot ID: Q86SX3
  ENSP ID: ENSP00000376308
MGRRRQRVDPAAGARAGALPEAIAALSRSLPSGPSPEIFRRAKFDRPEATSALWQLLFRVLSPLPAGNALASLALEVQARLVKSALCSQGYPRLALAQLPEDGSQGSRELLLALSWLLARGPVPEQMLAQARVPLGDEMTVCQCEALASPGPPAPHMEAEGPVDVRHVQWLMGKLRFRWRQLVSSQQEQCALLSKIHLYTRGCHSDQSLSHLSVTEAEMLRDPEGGQQVSGAGAAQNLDLAYPKCLHSFCTPGMGPRTFWNDLWLVCEQPGLLPGDWAAPLDPGGASACSLLSPFRALLRTLERENQRLEAVLAWRRSELVFWRWMDTVLGTCAPEVPAAASQPTFLPWVPERGGGELDLVVRELQALEEELREAAERRRAAWEAKAGGCGRGPEWSAARRASREAVEKELGALQQCWERDGGPAQPHGPHRLVRREDGAAGDRDLRAAVVIRTLRSQEACLEAVLRRLQGQCRQELARLVGARPGLIWIPPPGR

SEQ ID NO: 15871 - protein, 352 aa, Homo sapiens
  Payload ID: 3156
  Gene Symbol: C14orf80
  Gene Name: chromosome 14 open reading frame 80
  Uniprot ID: Q86SX3
  ENSP ID: ENSP00000376312
MSGQRGDWTSALWQLLFRVLSPLPAGNALASLALEVQARLVKSALCSQGYPRLALAQLPEDGSQGSRELLLALSWLLARGPVPEQMLAQARVPLGDEMTVCQCEALASPGPPAPHMEAEGPVDVRHVQWLMGKLRFRWRQLVSSQQEQCALLSKLLRTLERENQRLEAVLAWRRSELVFWRWMDTVLGTCAPEVPAAASQPTFLPWVPERGGGELDLVVRELQALEEELREAAERRRAAWEAKAGGCGRGPEWSAARRASREAVEKELGALQQCWERDGGPAQPHGPHRLVRREDGAAGDRDLRAAVVIRTLRSQEACLEAVLRRLQGQCRQELARLVGARPGLIWIPPPGR

SEQ ID NO: 15872 - protein, 80 aa, Homo sapiens
  Payload ID: 3156
  Gene Symbol: C14orf80
  Gene Name: chromosome 14 open reading frame 80
  ENSP ID: ENSP00000391365
MSGQRGDWTSALWQLLFRVLSPLPAGNALASLALEVQARLVKSALCSQGYPRLALAQLPEDGSQGSRELLLALSWLLARG

SEQ ID NO: 15873 - protein, 248 aa, Homo sapiens; identical to SEQ ID NO: 15867
  Payload ID: 3156
  Gene Symbol: C14orf80
  Gene Name: chromosome 14 open reading frame 80
  Uniprot ID: Q86SX3
  ENSP ID: ENSP00000391436

SEQ ID NO: 15874 - protein, 110 aa, Homo sapiens
  Payload ID: 3156
  Gene Symbol: C14orf80
  Gene Name: chromosome 14 open reading frame 80
  ENSP ID: ENSP00000398161
MSGQRGDWTSALWQLLFRVLSPLPAGNALASLALEVQARLVKSALCSQGYPRLALAQLPEDGSQGSRELLLALSWLLARGPVPEQMLAQARVPLGDEMTVCQCEALASPG

SEQ ID NO: 15875 - protein, 216 aa, Homo sapiens
  Payload ID: 3156
  Gene Symbol: C14orf80
  Gene Name: chromosome 14 open reading frame 80
  ENSP ID: ENSP00000399624
MSGQRGDWTSALWQLLFRVLSPLPAGNALASLALEVQARLVKSALCSQGYPRLALAQLPEDGSQGSRELLLALSWLLARGPVPEQMLAQARVPLGDEMTVCQCEALASPGPPAPHMEAEGPVDVRHVQWLMGKLRFRWRQLVSSQQEQCALLSKIHLYTRGCHSDQSLSHLSVTEAEMLRDPEGGQQLLRTLERENQRLEAVLAWRRSELVFWRWM

SEQ ID NO: 15876 - protein, 157 aa, Homo sapiens
  Payload ID: 3156
  Gene Symbol: C14orf80
  Gene Name: chromosome 14 open reading frame 80
  ENSP ID: ENSP00000400014
MLAQARVPLGDEMTVCQCEALASPGPPAPHMEAEGPVDVRHVQWLMGKLRFRWRQLVSSQQEQCALLSKIHLYTRGCHSDQSLSHLSVTEAEMLRDPEGGQQLLRTLERENQRLEAVLAWRRSELVFWRWMDTVLGTCAPEVPAAASQPTFLPWVPE

SEQ ID NO: 15877 - protein, 302 aa, Homo sapiens
  Payload ID: 3156
  Gene Symbol: C14orf80
  Gene Name: chromosome 14 open reading frame 80
  ENSP ID: ENSP00000400604
MSGQRGDWTSALWQLLFRVLSPLPAGNALASLALEVQARLVKSALCSQGYPRLALAQLPEDGSQGSRELLLALSWLLARGPVPEQMLAQARVPLGDEMTVCQCEALASPGPPAPHMEAEGPVDVRHVQWLMGKLRFRWRQLVSSQQEQCALLSKIHLYTRGCHSDQSLSHLSVTEAEMLRDPEGGQQLLRTLERENQRLEAVLAWRRSELVFWRWMDTVLGTCAPEVPAAASQPTFLPWVPERGGGELDLVVRELQALEEELREAAERRRAAWEAKAGGCGRGPEWSAARRASREAVEKELG

SEQ ID NO: 15878 - protein, 54 aa, Homo sapiens
  Payload ID: 3156
  Gene Symbol: C14orf80
  Gene Name: chromosome 14 open reading frame 80
  ENSP ID: ENSP00000401319
MLAQARVPLGDEMTVCQCEALASPGPPAPHMEAEGPVDVRHVQWLMGKLRFRWR

SEQ ID NO: 15879 - protein, 119 aa, Homo sapiens
  Payload ID: 3156
  Gene Symbol: C14orf80
  Gene Name: chromosome 14 open reading frame 80
  ENSP ID: ENSP00000450003
MGRRRQRVDPAAGARAGALPEAIAALSRSLPSGPSPEIFRRAKFDRPEATSALWQLLFRVLSPLPAGNALATRGWHWHNYLRMARRAVGSCCWLCPGSWPEDLCPSRCWPRPECLWVTR

SEQ ID NO: 15880 - protein, 538 aa, Homo sapiens
  Payload ID: 3157
  Gene Symbol: C14orf93
  Gene Name: chromosome 14 open reading frame 93
  Uniprot ID: Q9H972
  ENSP ID: ENSP00000299088
MSFSATILFSPPSGSEARCCCCACKSETNGGNTGSQGGNPPPSTPITVTGHGLAVQSSEQLLHVIYQRVDKAVGLAEAALGLARANNELLKRLQEEVGDLRQGKVSIPDEDGESRAHSSPPEEPGPLKESPGEAFKALSAVEEECDSVGSGVQVVIEELRQLGAASVGPGPLGFPATQRDMRLPGCTLAASEAAPLLNPLVDDYVASEGAVQRVLVPAYAKQLSPATQLAIQRATPETGPENGTKLPPPRPEDMLNAAAALDSALEESGPGSTGELRHSLGLTVSPCRTRGSGQKNSRRKRDLVLSKLVHNVHNHITNDKRFNGSESIKSSWNISVVKFLLEKLKQELVTSPHNYTDKELKGACVAYFLTKRREYRNSLNPFKGLKEKEEKKLRSRRYRLFANRSSIMRHFGPEDQRLWNDVTEELMSDEEDSLNEPGVWVARPPRFRAQRLTELCYHLDANSKHGTKANRVYGPPSDRLPSAEAQLLPPELYNPNFQEEEDEGGDENAPGSPSFDQPHKTCCPDLNSFIEIKVEKDE

SEQ ID NO: 15881 - protein, 498 aa, Homo sapiens
  Payload ID: 3157
  Gene Symbol: C14orf93
  Gene Name: chromosome 14 open reading frame 93
  Uniprot ID: Q9H972
  ENSP ID: ENSP00000341353
MSFSATILFSPPSGSEARCCCCACKSETNGGNTGSQGGNPPPSTPITVTGHGLAVQSSEQLLHVIYQRVDKAVGLAEAALGLARANNELLKRLQEEVGDLRQGKVSIPDEDGESRAHSSPPEEPGPLKESPGEAFKALSAVEEECDSVGSGVQVVIEELRQLGAASVGPGPLGFPATQRDMRLPGCTLAASEAAPLLNPLVDDYVASEGAVQRVLVPAYAKQLSPATQLAIQRATPETGPENGTKLPPPRPEDMLNAAAALDSALEESGPGSTGELRHSLGLTVSPCRTRGSGQKNSRRKRDLVLSKLVHNVHNHITNDKRFNGSESIKSSWNISVVKFLLEKLKQELVTSPHNYTDKELKGACVAYFLTKRREYRNSLNPFKGLKEKEEKKLRSRRYRLFANRSSIMRHFGPEDQRLWNDVTEELMSDEEDSLNEPDRLPSAEAQLLPPELYNPNFQEEEDEGGDENAPGSPSFDQPHKTCCPDLNSFIEIKVEKDE

SEQ ID NO: 15882 - protein, 126 aa, Homo sapiens
  Payload ID: 3157
  Gene Symbol: C14orf93
  Gene Name: chromosome 14 open reading frame 93
  ENSP ID: ENSP00000380532
MRLPGCTLAASEAAPLLNPLVDDYVASEGAVQRVLVPAYAKQLSPATQLAIQRATPETGPENGTKLPPPRPEDMLNAAAALDSALEESGPGSTGELRHSLGLTVSPCRTRGSGQKNSRRKRDLVLS

SEQ ID NO: 15883 - protein, 358 aa, Homo sapiens
  Payload ID: 3157
  Gene Symbol: C14orf93
  Gene Name: chromosome 14 open reading frame 93
  ENSP ID: ENSP00000380533
MRLPGCTLAASEAAPLLNPLVDDYVASEGAVQRVLVPAYAKQLSPATQLAIQRATPETGPENGTKLPPPRPEDMLNAAAALDSALEESGPGSTGELRHSLGLTVSPCRTRGSGQKNSRRKRDLVLSKLVHNVHNHITNDKRFNGSESIKSSWNISVVKFLLEKLKQELVTSPHNYTDKELKGACVAYFLTKRREYRNSLNPFKGLKEKEEKKLRSRRYRLFANRSSIMRHFGPEDQRLWNDVTEELMSDEEDSLNEPGVWVARPPRFRAQRLTELCYHLDANSKHGTKANRVYGPPSDRLPSAEAQLLPPELYNPNFQEEEDEGGDENAPGSPSFDQPHKTCCPDLNSFIEIKVEKDE

SEQ ID NO: 15884 - protein, 538 aa, Homo sapiens; identical to SEQ ID NO: 15880
  Payload ID: 3157
  Gene Symbol: C14orf93
  Gene Name: chromosome 14 open reading frame 93
  Uniprot ID: Q9H972
  ENSP ID: ENSP00000380535

SEQ ID NO: 15885 - protein, 208 aa, Homo sapiens
  Payload ID: 3157
  Gene Symbol: C14orf93
  Gene Name: chromosome 14 open reading frame 93
  ENSP ID: ENSP00000380536
MSFSATILFSPPSGSEARCCCCACKSETNGGNTGSQGGNPPPSTPITVTGHGLAVQSSEQLLHVIYQRVDKAVGLAEAALGLARANNELLKRLQEEVGDLRQGKVSIPDEDGESRAHSSPPEEPGPLKESPGEAFKALSAVEEECDSVGSGVQVVIEELRQLGAASVGPGPLGFPATQRDMRLPGCTLAASEAAPLLNPLVDDYVASE

SEQ ID NO: 15886 - protein, 538 aa, Homo sapiens; identical to SEQ ID NO: 15880
  Payload ID: 3157
  Gene Symbol: C14orf93
  Gene Name: chromosome 14 open reading frame 93
  Uniprot ID: Q9H972
  ENSP ID: ENSP00000380538

SEQ ID NO: 15887 - protein, 199 aa, Homo sapiens
  Payload ID: 3157
  Gene Symbol: C14orf93
  Gene Name: chromosome 14 open reading frame 93
  ENSP ID: ENSP00000450771
MSFSATILFSPPSGSEARCCCCACKSETNGGNTGSQGGNPPPSTPITVTGHGLAVQSSEQLLHVIYQRVDKAVGLAEAALGLARANNELLKRLQEEVGDLRQGKVSIPDEDGESRAHSSPPEEPGPLKESPGEAFKALSAVEEECDSVGSGVQVVIEELRQLGAASVGPGPLGFPATQRDMRLPGCTLAASEAAPLLNP

SEQ ID NO: 15888 - protein, 78 aa, Homo sapiens
  Payload ID: 3157
  Gene Symbol: C14orf93
  Gene Name: chromosome 14 open reading frame 93
  ENSP ID: ENSP00000450866
MSFSATILFSPPSGSEARCCCCACKSETNGGNTGSQGGNPPPSTPITVTGHGLAVQSSEQLLHVIYQRVDKAVGLAEA

SEQ ID NO: 15889 - protein, 106 aa, Homo sapiens
  Payload ID: 3157
  Gene Symbol: C14orf93
  Gene Name: chromosome 14 open reading frame 93
  ENSP ID: ENSP00000451111
MSFSATILFSPPSGSEARCCCCACKSETNGGNTGSQGGNPPPSTPITVTGHGLAVQSSEQLLHVIYQRVDKAVGLAEAALGLARANNELLKRLQEEVGDLRQGKVS

SEQ ID NO: 15890 - protein, 9 aa, Homo sapiens
  Payload ID: 3157
  Gene Symbol: C14orf93
  Gene Name: chromosome 14 open reading frame 93
  ENSP ID: ENSP00000451155
MSFSATILF

SEQ ID NO: 15891 - protein, 83 aa, Homo sapiens
  Payload ID: 3157
  Gene Symbol: C14orf93
  Gene Name: chromosome 14 open reading frame 93
  ENSP ID: ENSP00000451456
MSFSATILFSPPSGSEARCCCCACKSETNGGNTGSQGGNPPPSTPITVTGHGLAVQSSEQLLHVIYQRVDKAVGLAEAALGLA

SEQ ID NO: 15892 - protein, 11 aa, Homo sapiens
  Payload ID: 3157
  Gene Symbol: C14orf93
  Gene Name: chromosome 14 open reading frame 93
  ENSP ID: ENSP00000451762
MSFSATILFSP

SEQ ID NO: 15893 - protein, 49 aa, Homo sapiens
  Payload ID: 3157
  Gene Symbol: C14orf93
  Gene Name: chromosome 14 open reading frame 93
  ENSP ID: ENSP00000451879
MSFSATILFSPPSGSEARCCCCACKSETNGGNTGSQGGNPPPSTPITVT

SEQ ID NO: 15894 - protein, 136 aa, Homo sapiens
  Payload ID: 3157
  Gene Symbol: C14orf93
  Gene Name: chromosome 14 open reading frame 93
  ENSP ID: ENSP00000452036
MSFSATILFSPPSGSEARCCCCACKSETNGGNTGSQGGNPPPSTPITVTGHGLAVQSSEQLLHVIYQRVDKAVGLAEAALGLARANNELLKRLQEEVGDLRQGKVSIPDEDGESRAHSSPPEEPGPLKESPGEAFK

SEQ ID NO: 15895 - protein, 9 aa, Homo sapiens
  Payload ID: 3157
  Gene Symbol: C14orf93
  Gene Name: chromosome 14 open reading frame 93
  ENSP ID: ENSP00000452088
MSFSATILF

SEQ ID NO: 15896 - protein, 1047 aa, Homo sapiens
  Payload ID: 3158
  Gene Symbol: C15orf39
  Gene Name: chromosome 15 open reading frame 39
  Uniprot ID: Q6ZRI6
  ENSP ID: ENSP00000353854
MAEKRPLRTLGPVMYGKLPRLETDSGLEHSLPHSVGNQDPCTYKGSYFSCPMAGTPKAESEQLASWTPYPPLYSTGMAGPPLQADNLLTNCLFYRSPAEGPEKMQDSSPVELLPFSPQAHSYPGPPLAAPKPVYRNPLCYGLSTCLGEGAVKRPLDVDWTLATGPLLPSADPPCSLAPAPSKGQTLDGTFLRGVPAEGSSKDSSGSFSPCQPFLEKYQTIHSTGFLASRYTGPYPRNSKQAMSEGPSSPWTQLAQPLGPPCQDTGPTHYPPPHHPPPHPPQALPCPPACRHPEKQGSYSPALPLQPLGGHKGTGYQAGGLGSPYLRQQAAQAPYIPPLGLDAYPYPSAPLPAPSPGLKLEPPLTPRCPLDFAPQTLSFPYARDDLSLYGASPGLGGTPPSQNNVRAVPQPGAFQRACQPLPASQPCSEPVRPAQEAEEKTWLPSCRKEKLQPRLSEHSGPPIVIRDSPVPCTPPALPPCARECQSLPQKEGARPPSSPPMPVIDNVFSLAPYRDYLDVPAPEATTEPDSATAEPDSAPATSEGQDKGCRGTLPAQEGPSGSKPLRGSLKEEVALDLSVRKPTAEASPVKASRSVEHAKPTAAMDVPDVGNMVSDLPGLKKIDTEAPGLPGVPVTTDAMPRTNFHSSVAFMFRKFKILRPAPLPAAVVPSTPTSAPAPTQPAPTPTSGPIGLRILAQQPLSVTCFSLALPSPPAVAVASPAPAPAPSPAPARAQAPASARDPAPAPAPVAGPAPASTSAPGDSLEQHFTGLHASLCDAISGSVAHSPPEKLREWLETAGPWGQAAWQDCQGVQGLLAKLLSQLQRFDRTHRCPFPHVVRAGAIFVPIHLVKERLFPRLPPASVDHVLQEHRVELRPTTLSEERALRELALPGCTSRMLKLLALRQLPDIYPDLLGLQWRDCVRRQLGDFDTEAGAVSSSEPTVARGEPESLALAQKSPAPKVRKPGRKPPTPGPEKAEAAAGEESCGASPTPATSASPPGPTLKARFRSLLETAWLNGLALPTWGHKSSRPDQPSPCPQLLDSQSHHL

SEQ ID NO: 15897 - protein, 1047 aa, Homo sapiens; identical to SEQ ID NO: 15896
  Payload ID: 3158
  Gene Symbol: C15orf39
  Gene Name: chromosome 15 open reading frame 39
  Uniprot ID: Q6ZRI6
  ENSP ID: ENSP00000378438

SEQ ID NO: 15898 - protein, 807 aa, Homo sapiens
  Payload ID: 3158
  Gene Symbol: C15orf39
  Gene Name: chromosome 15 open reading frame 39
  ENSP ID: ENSP00000454405
  MOD_RES (1)..(1): Any amino acid
XVYRNPLCYGLSTCLGEGAVKRPLDVDWTLATGPLLPSADPPCSLAPAPSKGQTLDGTFLRGVPAEGSSKDSSGSFSPCQPFLEKYQTIHSTGFLASRYTGPYPRNSKQAMSEGPSSPWTQLAQPLGPPCQDTGPTHYPPPHHPPPHPPQALPCPPACRHPEKQGSYSPALPLQPLGGHKGTGYQAGGLGSPYLRQQAAQAPYIPPLGLDAYPYPSAPLPAPSPGLKLEPPLTPRCPLDFAPQTLSFPYARDDLSLYGASPGLGGTPPSQNNVRAVPQPGAFQRACQPLPASQPCSEPVRPAQEAEEKTWLPSCRKEKLQPRLSEHSGPPIVIRDSPVPCTPPALPPCARECQSLPQKEGARPPSSPPMPVIDNVFSLAPYRDYLDVPAPEATTEPDSATAEPDSAPATSEGQDKGCRGTLPAQEGPSGSKPLRGSLKEEVALDLSVRKPTAEASPVKASRSVEHAKPTAAMDVPDVGNMVSDLPGLKKIDTEAPGLPGVPVTTDAMPRTNFHSSVAFMFRKFKILRPAPLPAAVVPSTPTSAPAPTQPAPTPTSGPIGLRILAQQPLSVTCFSLALPSPPAVAVASPAPAPAPSPAPARAQAPASARDPAPAPAPVAGPAPASTSAPGDSLEQHFTGLHASLCDAISGSVAHSPPEKLREWLETAGPWGQAAWQDCQGVQGLLAKLLSQLQRFDRTHRCPFPHVVRAGAIFVPIHLVKERLFPRLPPASVDHVLQEHRVELRPTTLSEERALRELALPGCTSRMLKLLALRQLPDIYPDLLGLQWRDCVRRQLGEHGAAPVATGAV

SEQ ID NO: 15899 - protein, 21 aa, Homo sapiens
  Payload ID: 3158
  Gene Symbol: C15orf39
  Gene Name: chromosome 15 open reading frame 39
  ENSP ID: ENSP00000454677
MAEKRPLRTLGPVMYGKLPRL

SEQ ID NO: 15900 - protein, 27 aa, Homo sapiens
  Payload ID: 3158
  Gene Symbol: C15orf39
  Gene Name: chromosome 15 open reading frame 39
  ENSP ID: ENSP00000456381
MAEKRPLRTLGPVMYGKLPRLETDSGL

SEQ ID NO: 15901 - protein, 29 aa, Homo sapiens
  Payload ID: 3158
  Gene Symbol: C15orf39
  Gene Name: chromosome 15 open reading frame 39
  ENSP ID: ENSP00000457045
MAEKRPLRTLGPVMYGKLPRLETDSGLEH

SEQ ID NO: 15902 - protein, 938 aa, Homo sapiens
  Payload ID: 3158
  Gene Symbol: C15orf39
  Gene Name: chromosome 15 open reading frame 39
  Uniprot ID: Q6ZRI6
  ENSP ID: ENSP00000458025
MAEKRPLRTLGPVMYGKLPRLETDSGLEHSLPHSVGNQDPCTYKGSYFSCPMAGTPKAESEQLASWTPYPPLYSTGMAGPPLQADNLLTNCLFYRSPAEGPEKMQDSSPVELLPFSPQAHSYPGPPLAAPKPVYRNPLCYGLSTCLGEGAVKRPLDVDWTLATGPLLPSADPPCSLAPAPSKGQTLDGTFLRGVPAEGSSKDSSGSFSPCQPFLEKYQTIHSTGFLASRYTGPYPRNSKQAMSEGPSSPWTQLAQPLGPPCQDTGPTHYPPPHHPPPHPPQALPCPPACRHPEKQGSYSPALPLQPLGGHKGTGYQAGGLGSPYLRQQAAQAPYIPPLGLDAYPYPSAPLPAPSPGLKLEPPLTPRCPLDFAPQTLSFPYARDDLSLYGASPGLGGTPPSQNNVRAVPQPGAFQRACQPLPASQPCSEPVRPAQEAEEKTWLPSCRKEKLQPRLSEHSGPPIVIRDSPVPCTPPALPPCARECQSLPQKEGARPPSSPPMPVIDNVFSLAPYRDYLDVPAPEATTEPDSATAEPDSAPATSEGQDKGCRGTLPAQEGPSGSKPLRGSLKEEVALDLSVRKPTAEASPVKASRSVEHAKPTAAMDVPDVGNMVSDLPGLKKIDTEAPGLPGVPVTTDAMPRTNFHSSVAFMFRKFKILRPAPLPAAVVPSTPTSAPAPTQPAPTPTSGPIGLRILAQQPLSVTCFSLALPSPPAVAVASPAPAPAPSPAPARAQAPASARDPAPAPAPVAGPAPASTSAPGDSLEQHFTGLHASLCDAISGSVAHSPPEKLREWLETAGPWGQAAWQDCQGVQGLLAKLLSQLQRFDRTHRCPFPHVVRAGAIFVPIHLVKERLFPRLPPASVDHVLQEHRVELRPTTLSEERALRELALPGCTSRMLKLLALRQLPDIYPDLLGLQWRDCVRRQLGEHGAAPVATGAV

SEQ ID NO: 15903 - protein, 153 aa, Homo sapiens
  Payload ID: 3159
  Gene Symbol: C15orf40
  Gene Name: chromosome 15 open reading frame 40
  Uniprot ID: Q8WUR7
  ENSP ID: ENSP00000307071
MLRLRSGLRHLRATPNTRGSARLLCAEMPKKAGATTKGKSQSKEPERPLPPLGPVAVDPKGCVTIAIHAKPGSKQNAVTDLTAEAVNVAIAAPPSEGEANAELCRYLSKVLELRKSDVVLDKGGKSREKVVKLLASTTPEEILEKLKKEAKKT

SEQ ID NO: 15904 - protein, 167 aa, Homo sapiens
  Payload ID: 3159
  Gene Symbol: C15orf40
  Gene Name: chromosome 15 open reading frame 40
  Uniprot ID: Q8WUR7
  ENSP ID: ENSP00000403987
MLRLRSGLRHLRATPNTRGSARLLCAEMPKKAGATTKGKSQSKEPERPLPPLGPVAVDPKGCVTIAIHAKPGSKQNAVTDLTAEAVNVAIAAPPSEGEANAELCRYLSKVLELRKSDVVLDKTGSCYIAQAGLELLASSDLPASASQSAGITGVSHHTQPALLLISL

SEQ ID NO: 15905 - protein, 95 aa, Homo sapiens
  Payload ID: 3159
  Gene Symbol: C15orf40
  Gene Name: chromosome 15 open reading frame 40
  ENSP ID: ENSP00000423436
LRLRSGLRHLRATPNTRGSARLLCAEMPKKAGATTKGKSQSKEPERPLPPLGPVAVDPKGCVTIAIHAKPGSKQNAVTALLFHSSTIGGDSGGRF

SEQ ID NO: 15906 - protein, 36 aa, Homo sapiens
  Payload ID: 3159
  Gene Symbol: C15orf40
  Gene Name: chromosome 15 open reading frame 40
  ENSP ID: ENSP00000424167
  MOD_RES (1)..(1): Any amino acid
XARLLCAEMPKKAGATTKASSRVKARARNQRDHFLP

SEQ ID NO: 15907 - protein, 85 aa, Homo sapiens
  Payload ID: 3159
  Gene Symbol: C15orf40
  Gene Name: chromosome 15 open reading frame 40
  ENSP ID: ENSP00000426639
NAELCRYLSKVLELRKSDVVLDKGLSLCHPGWSTAAQPRVTAALTSLAQTILPPQPPKLLELQVHATHTRLIFVFFEETGSRHVA

SEQ ID NO: 15908 - protein, 149 aa, Homo sapiens
  Payload ID: 3159
  Gene Symbol: C15orf40
  Gene Name: chromosome 15 open reading frame 40
  Uniprot ID: Q8WUR7
  ENSP ID: ENSP00000441077
MLRLRSGLRHLRATPNTRGSARLLCAEMPKKAGATTKGKSQSKEPERPLPPLGPVAVDPKGCVTIAIHAKPGSKQNAVTDLTAEAVNVAIAAPPSEGEANAELCRYLSKVLELRKSDVVLDKLCYSIPQQLEETQEGVSGIPDTPCHFL

SEQ ID NO: 15909 - protein, 34 aa, Homo sapiens
  Payload ID: 3159
  Gene Symbol: C15orf40
  Gene Name: chromosome 15 open reading frame 40
  ENSP ID: ENSP00000454276
  MOD_RES (1)..(1): Any amino acid
XLLCAEMPKKAGATTKASSRVKARARNQRDHFLP

SEQ ID NO: 15910 - protein, 146 aa, Homo sapiens
  Payload ID: 3159
  Gene Symbol: C15orf40
  Gene Name: chromosome 15 open reading frame 40
  ENSP ID: ENSP00000454502
  MOD_RES (1)..(1): Any amino acid
XRHLRATPNTRGSARLLCAEMPKKAGATTKGKSQSKEPERPLPPLGPVAVDPKGCVTIAIHAKPGSKQNAVTDLTAEAVNVAIAAPPSEGEANAELCRYLSKVLELRKSDVVLDKKLRDLLKIVPCKLATRTQILGLLVECSFSRL

SEQ ID NO: 15911 - protein, 68 aa, Homo sapiens
  Payload ID: 3159
  Gene Symbol: C15orf40
  Gene Name: chromosome 15 open reading frame 40
  ENSP ID: ENSP00000456006
MLRLRSGLRHLRATPNTRGSARLLCAEMPKKAGATTKGGKSREKVVKLLASTTPEEILEKLKKEAKKT

SEQ ID NO: 15912 - protein, 183 aa, Homo sapiens
  Payload ID: 3160
  Gene Symbol: C15orf41
  Gene Name: chromosome 15 open reading frame 41
  Uniprot ID: Q9Y2V0
  ENSP ID: ENSP00000342433
MARLILERFLQEHEETPPSKSIINSMLRDPSQIPDGVLANQVYQCIVNDCCYGPLVDCIKHAIGHEHEVLLRDLLLEKNLSFLDEDQLRAKGYDKTPDFILQVPVAVEGHIIHWIESKASFGDECSHHAYLHDQFWSYWNRFGPGLVIYWYGFIQELDCNRERGILLKACFPTNIVTLCHSIA

SEQ ID NO: 15913 - protein, 281 aa, Homo sapiens
  Payload ID: 3160
  Gene Symbol: C15orf41
  Gene Name: chromosome 15 open reading frame 41
  Uniprot ID: Q9Y2V0
  ENSP ID: ENSP00000401362
MILTKAQYDEIAQCLVSVPPTRQSLRKLKQRFPSQSQATLLSIFSQEYQKHIKRTHAKHHTSEAIESYYQRYLNGVVKNGAAPVLLDLANEVDYAPSLMARLILERFLQEHEETPPSKSIINSMLRDPSQIPDGVLANQVYQCIVNDCCYGPLVDCIKHAIGHEHEVLLRDLLLEKNLSFLDEDQLRAKGYDKTPDFILQVPVAVEGHIIHWIESKASFGDECSHHAYLHDQFWSYWNRFGPGLVIYWYGFIQELDCNRERGILLKACFPTNIVTLCHSIA

SEQ ID NO: 15914 - protein, 105 aa, Homo sapiens
  Payload ID: 3160
  Gene Symbol: C15orf41
  Gene Name: chromosome 15 open reading frame 41
  ENSP ID: ENSP00000454334
MSVAENEDQLRAKGYDKTPDFILQVPVAVEGHIIHWIESKASFGDECSHHAYLHDQFWSYWNRFGPGLVIYWYGFIQELDCNRERGILLKACFPTNIVTLCHSIA

SEQ ID NO: 15915 - protein, 122 aa, Homo sapiens
  Payload ID: 3160
  Gene Symbol: C15orf41
  Gene Name: chromosome 15 open reading frame 41
  ENSP ID: ENSP00000454831
MARLILERFLQEHEETPPSKSIINSMLRDPSQIPDGVLANQVYQCIVNDCCYGPLVDCIKHAIGHEHEVLLRDLLLEKNLSFLDEDQLRAKGYDKTPDFILQVPVAVEGHIIHWIESKASFG

SEQ ID NO: 15916 - protein, 281 aa, Homo sapiens; identical to SEQ ID NO: 15913
  Payload ID: 3160
  Gene Symbol: C15orf41
  Gene Name: chromosome 15 open reading frame 41
  Uniprot ID: Q9Y2V0
  ENSP ID: ENSP00000455397

SEQ ID NO: 15917 - protein, 66 aa, Homo sapiens
  Payload ID: 3160
  Gene Symbol: C15orf41
  Gene Name: chromosome 15 open reading frame 41
  ENSP ID: ENSP00000456240
MIWARLSHLLVWIYPGAGLQPGKGHPAQSLFPHEHCHLMPQHSLTLKILEEKLGGKETQHCITIVE

SEQ ID NO: 15918 - protein, 287 aa, Homo sapiens
  Payload ID: 3160
  Gene Symbol: C15orf41
  Gene Name: chromosome 15 open reading frame 41
  ENSP ID: ENSP00000456477
MILTKAQYDEIAQCLVSVPPTRQSLRKLKQRFPSQSQATLLSIFSQEYQKHIKRTHAKHHTSEAIESYYQRYLNGVVKNGAAPVLLDLANEVDYAPSLMARLILERFLQEHEETPPSKSIINSMLRDPSQIPDGVLANQVYQCIVNDCCYGPLVDCIKHAIGHEHEVLLRDLLLEKNLSFLDEDQLRAKGYDKTPDFILQVPVVMLCPLAVEGHIIHWIESKASFGDECSHHAYLHDQFWSYWNRFGPGLVIYWYGFIQELDCNRERGILLKACFPTNIVTLCHSIA

SEQ ID NO: 15919 - protein, 183 aa, Homo sapiens; identical to SEQ ID NO: 15912
  Payload ID: 3160
  Gene Symbol: C15orf41
  Gene Name: chromosome 15 open reading frame 41
  Uniprot ID: Q9Y2V0
  ENSP ID: ENSP00000456736

SEQ ID NO: 15920 - protein, 101 aa, Homo sapiens
  Payload ID: 3160
  Gene Symbol: C15orf41
  Gene Name: chromosome 15 open reading frame 41
  ENSP ID: ENSP00000457227
MILTKAQYDEIAQCLVSVPPTRQSLRKLKQRFPRYLNGVVKNGAAPVLLDLANEVDYAPSLMARLILERFLQEHEETPPSKSIINSMLRDPSQIPDGVLAN

SEQ ID NO: 15921 - protein, 183 aa, Homo sapiens; identical to SEQ ID NO: 15912
  Payload ID: 3160
  Gene Symbol: C15orf41
  Gene Name: chromosome 15 open reading frame 41
  Uniprot ID: Q9Y2V0
  ENSP ID: ENSP00000457854

SEQ ID NO: 15922 - protein, 220 aa, Homo sapiens
  Payload ID: 3161
  Gene Symbol: C15orf43
  Gene Name: chromosome 15 open reading frame 43
  Uniprot ID: Q8NHR7
  ENSP ID: ENSP00000340644
MFQGQRGWFCGSVSQDLRQFWVAEGGTISDPRAADFLFSCDASHPDTLRIYQSLDYIEDNATVFHAYYLSAVANAKIKNSVALGHFILPPACLQKEIRRKIGSFIWEQDQHFLIEKHDEVTPNEIKTLRENSELATEHKKELSKSPEKHFIRTPVVEKQMYFPLQNYPVNNMVTGYISIDAMKKFLGELHDFIPGTSGYLAYHVQNEINMSAIKNKLKRK

SEQ ID NO: 15923 - protein, 43 aa, Homo sapiens
  Payload ID: 3161
  Gene Symbol: C15orf43
  Gene Name: chromosome 15 open reading frame 43
  ENSP ID: ENSP00000452951
  MOD_RES (1)..(1): Any amino acid
XGWFCGSVSQDLRQFWGRKLSGSSGLGGEGSILLSLMLWVQGA

SEQ ID NO: 15924 - protein, 48 aa, Homo sapiens
  Payload ID: 3161
  Gene Symbol: C15orf43
  Gene Name: chromosome 15 open reading frame 43
  ENSP ID: ENSP00000454013
MFQGQRGWFCGSVSQDLRQFWGRKLSGSSGLGGEGSILLSLMLWVQGA

SEQ ID NO: 15925 - protein, 83 aa, Homo sapiens
  Payload ID: 3162
  Gene Symbol: C15orf48
  Gene Name: chromosome 15 open reading frame 48
  Uniprot ID: Q9C002
  ENSP ID: ENSP00000341610
MSFFQLLMKRKELIPLVVFMTVAAGGASSFAVYSLWKTDVILDRKKNPEPWETVDPTVPQKLITINQQWKPIEELQNVQRVTK

SEQ ID NO: 15926 - protein, 83 aa, Homo sapiens; identical to SEQ ID NO: 15925
  Payload ID: 3162
  Gene Symbol: C15orf48
  Gene Name: chromosome 15 open reading frame 48
  Uniprot ID: Q9C002
  ENSP ID: ENSP00000379887

SEQ ID NO: 15927 - protein, 132 aa, Homo sapiens
  Payload ID: 3162
  Gene Symbol: C15orf48
  Gene Name: chromosome 15 open reading frame 48
  ENSP ID: ENSP00000452967
MSFFQLLMKRKELIPLVVFMTVAAGGASSFAVYSLWKTDVILDRKKNPEPWETVDPTVPQKVSAPAYCKLGAFLLQNPCPLARKPWNFPRSLRQLQATGRSQMVRKGMNLKEEEPALPTLSGAPPKGTGKLH

SEQ ID NO: 15928 - protein, 324 aa, Homo sapiens
  Payload ID: 3163
  Gene Symbol: C15orf52
  Gene Name: chromosome 15 open reading frame 52
  Uniprot ID: Q6ZUT6
  ENSP ID: ENSP00000380670
MRHREGSWEPWSRPVGEPPEAGWDYAQWKQEREQIDLARLARHRDAQGDWRRPWDLDKAKSTLQDCSQLRGEGPARAGSRRGPRSHQKLQPPPLLPDGKGRGGQASRPSVAPATGSKARGKERLTGRARRWDMKEDKEELEGQEGSQSTRETPSEEEQAQKQSGMEQGRLGSAPAASPALASPEGPKGESVASTASSVPCSPQEPDLAPLDLSLGGAGIPGPRESGCVLGLRPGAQESPVSWPEGSKQQPLGWSNHQAELEVQTCPEPQRGAGLPEPGEDRSGKSGAQQGLAPRSRPTRGGSQRSRGTAGVRRRTGRPGPAGRC

SEQ ID NO: 15929 - protein, 34 aa, Homo sapiens
  Payload ID: 3163
  Gene Symbol: C15orf52
  Gene Name: chromosome 15 open reading frame 52
  ENSP ID: ENSP00000452677
MKEDKEELEGQEGSQSTRETPSEEEQAQKQSGME

SEQ ID NO: 15930 - protein, 173 aa, Homo sapiens
  Payload ID: 3163
  Gene Symbol: C15orf52
  Gene Name: chromosome 15 open reading frame 52
  ENSP ID: ENSP00000453500
MSRQEKDAELDRRIVALRKKNQALLRRYQEIQEDRRQAEQGGMAVTTPALLQPDGLTVTISQVPGEKRVVSRNWARGTCGPRVTNEMLEDEDAEDHGGTFCLGELVELAVTMENKAEGKRIVSEKPTRARNQGIEGSPGGRVTRSPPTQVAISSDSARKGSWEPWSRPVGEPP

SEQ ID NO: 15931 - protein, 534 aa, Homo sapiens
  Payload ID: 3163
  Gene Symbol: C15orf52
  Gene Name: chromosome 15 open reading frame 52
  Uniprot ID: Q6ZUT6
  ENSP ID: ENSP00000453969
MISCAEQRSRQGEAGRGPAPVAPAFLPLWLPRGCSGILSVPAVAMHSAGTPRAESPMSRQEKDAELDRRIVALRKKNQALLRRYQEIQEDRRQAEQGGMAVTTPALLQPDGLTVTISQVPGEKRVVSRNWARGTCGPRVTNEMLEDEDAEDHGGTFCLGELVELAVTMENKAEGKRIVSEKPTRARNQGIEGSPGGRVTRSPPTQVAISSDSARKGSWEPWSRPVGEPPEAGWDYAQWKQEREQIDLARLARHRDAQGDWRRPWDLDKAKSTLQDCSQLRGEGPARAGSRRGPRSHQKLQPPPLLPDGKGRGGQASRPSVAPATGSKARGKERLTGRARRWDMKEDKEELEGQEGSQSTRETPSEEEQAQKQSGMEQGRLGSAPAASPALASPEGPKGESVASTASSVPCSPQEPDLAPLDLSLGGAGIPGPRESGCVLGLRPGAQESPVSWPEGSKQQPLGWSNHQAELEVQTCPEPQRGAGLPEPGEDRSGKSGAQQGLAPRSRPTRGGSQRSRGTAGVRRRTGRPGPAGRC

SEQ ID NO: 15932 - protein, 179 aa, Homo sapiens
  Payload ID: 3164
  Gene Symbol: C15orf53
  Gene Name: chromosome 15 open reading frame 53
  Uniprot ID: Q8NAA6
  ENSP ID: ENSP00000325144
MELQGAQEDLGISLSSPRRNHETRPGSKAKGRSSICLQASVWMAGGKLRLRASEHLTQGHQQELRDWNLGEDASLLFSKSPFGAGKLIQAPAHVFRQCWVQGNAWISCITKFDSKRSPEVASSPSYLTVPRRSPLPVFLRPSDRCVCGGCYLGKSTRRRACQSLLSDPLGVTFPTQTRP

SEQ ID NO: 15933 - protein, 185 aa, Homo sapiens
  Payload ID: 3165
  Gene Symbol: C15orf57
  Gene Name: chromosome 15 open reading frame 57
  Uniprot ID: Q9BV29
  ENSP ID: ENSP00000350695
MKMFESADSTATRSGQDLWAEICSCLPNPEQEDGANNAFSDSFVDSCPEGEGQREVADFAVQPAVKPWAPLQDSEVYLASLEKKLRRIKGLNQEVTSKDMLRTLAQAKKECWDRFLQEKLASEFFVDGLDSDESTLEHFKRWLQPDKVAVSTEEVQYLIPPESQVEKPVAEDEPAAGDKPAAAEQ

SEQ ID NO: 15934 - protein, 185 aa, Homo sapiens; identical to SEQ ID NO: 15933
  Payload ID: 3165
  Gene Symbol: C15orf57
  Gene Name: chromosome 15 open reading frame 57
  Uniprot ID: Q9BV29
  ENSP ID: ENSP00000397515

SEQ ID NO: 15935 - protein, 134 aa, Homo sapiens
  Payload ID: 3165
  Gene Symbol: C15orf57
  Gene Name: chromosome 15 open reading frame 57
  Uniprot ID: Q9BV29
  ENSP ID: ENSP00000452657
MKMFESADSTATRSGQDLWAEICSCLPNPEQEDGANNAFSDSFVDSCPEGEGQREVADFAVQPAVKPWAPLQDSEVYLASLEKKLRRIKGLNQEVTSKDMLRTLAQAKKECWDRFLQEKLASEFFVDGLDSDER

SEQ ID NO: 15936 - protein, 194 aa, Homo sapiens
  Payload ID: 3165
  Gene Symbol: C15orf57
  Gene Name: chromosome 15 open reading frame 57
  Uniprot ID: Q9BV29
  ENSP ID: ENSP00000452773
MRGSGLRFQMKMFESADSTATRSGQDLWAEICSCLPNPEQEDGANNAFSDSFVDSCPEGEGQREVADFAVQPAVKPWAPLQDSEVYLASLEKKLRRIKGLNQEVTSKDMLRTLAQAKKECWDRFLQEKLASEFFVDGLDSDESTLEHFKRWLQPDKVAVSTEEVQYLIPPESQVEKPVAEDEPAAGDKPAAAEQ

SEQ ID NO: 15937 - protein, 173 aa, Homo sapiens
  Payload ID: 3165
  Gene Symbol: C15orf57
  Gene Name: chromosome 15 open reading frame 57
  ENSP ID: ENSP00000453221
MKMFESADSTATRSGQDLWAEICSCLPNPEQEDGANNAFSDSFVDSCPEGEGQREVADFAVQPAVKPWAPLQDSEVYLASLEKKLRRIKGLNQEVTSKDMLRTLAQAKKECWDRFLQEKLASEFFVDGLDSDERPCNSRTPGSSSFSEDGAWDSHQCAEQRWRRTFPAQQSSW

SEQ ID NO: 15938 - protein, 185 aa, Homo sapiens; identical to SEQ ID NO: 15933
  Payload ID: 3165
  Gene Symbol: C15orf57
  Gene Name: chromosome 15 open reading frame 57
  Uniprot ID: Q9BV29
  ENSP ID: ENSP00000453226

SEQ ID NO: 15939 - protein, 84 aa, Homo sapiens
  Payload ID: 3165
  Gene Symbol: C15orf57
  Gene Name: chromosome 15 open reading frame 57
  ENSP ID: ENSP00000453274
MLRTLAQAKKECWDRFLQEKLASEFFVDGLDSDESTLEHFKRWLQPDKVAVSTEEVQYLIPPESQVEKPVAEDEPAAGDKPAAA

SEQ ID NO: 15940 - protein, 149 aa, Homo sapiens
  Payload ID: 3165
  Gene Symbol: C15orf57
  Gene Name: chromosome 15 open reading frame 57
  ENSP ID: ENSP00000453429
MKMFESADSTATRSGQDLWAEICSCLPNPEQEDGANNAFSDSFVDSCPEGEGQREVADFAVQPAVKPWAPLQDSEVYLASLEKKLRRIKGLNQEVTSKDMLRTLAQAKKECWDRFLQEKLASEFFVDGLDSDESFLRNGICAKGFGQAS

SEQ ID NO: 15941 - protein, 203 aa, Homo sapiens
  Payload ID: 3165
  Gene Symbol: C15orf57
  Gene Name: chromosome 15 open reading frame 57
  ENSP ID: ENSP00000453544
MKMFESADSTATRSGQDLWAEICSCLPNPEQEDGANNAFSDSFVDSCPEGEGQREVADFAVQPAVKPWAPLQDSEVYLASLEKKLRRIKGLNQEVTSKDMLRTLAQAKKECWDRFLQEKLASEFFVDGLDSDERPCNSRTPGSSSFSEDGAWDSHQCAEQRWRRTFPAQQSSWHGLGKIKSLNPRPHRYQVADHTAKPSDPDI

SEQ ID NO: 15942 - protein, 185 aa, Homo sapiens; identical to SEQ ID NO: 15933
  Payload ID: 3165
  Gene Symbol: C15orf57
  Gene Name: chromosome 15 open reading frame 57
  Uniprot ID: Q9BV29
  ENSP ID: ENSP00000453607

SEQ ID NO: 15943 - protein, 170 aa, Homo sapiens
  Payload ID: 3165
  Gene Symbol: C15orf57
  Gene Name: chromosome 15 open reading frame 57
  ENSP ID: ENSP00000453899
MKMFESADSTATRSGQDLWAEICSCLPNPEQEDGANNAFSDSFVDSCPEGEGQREVADFAVQPAVKPWAPLQDSEVYLASLEKKLRRIKGLNQEVTSKDMLRTLAQAKKECWDRFLQEKLASEFFVDGLDSDESTLEHFKRWLQPDKVAVSTEEVQYLIPPESQVEKPVA

SEQ ID NO: 15944 - protein, 134 aa, Homo sapiens; identical to SEQ ID NO: 15935
  Payload ID: 3165
  Gene Symbol: C15orf57
  Gene Name: chromosome 15 open reading frame 57
  Uniprot ID: Q9BV29
  ENSP ID: ENSP00000454049

SEQ ID NO: 15945 - protein, 173 aa, Homo sapiens; identical to SEQ ID NO: 15937
  Payload ID: 3165
  Gene Symbol: C15orf57
  Gene Name: chromosome 15 open reading frame 57
  ENSP ID: ENSP00000486892

SEQ ID NO: 15946 - protein, 293 aa, Homo sapiens
  Payload ID: 3166
  Gene Symbol: C15orf59
  Gene Name: chromosome 15 open reading frame 59
  Uniprot ID: Q2T9L4
  ENSP ID: ENSP00000369150
MNIRGAPDLGQPSDDPSSGGERERIRQRMKMVIGQLEGILRELKEVAKELREVVSQIDKLTSDFDFELEPDDWTTATVSSTSSSDKAGMGGPFDLGHLDFMTADILSDSWEFCSFLDVSTPSDSVDGPESTRPGAGPDYRLMNGGTPIPNGPRVETPDSSSEEAFGAGPTVKSQLPQRTPGTRERVRFSDKVLYHALCCDDEEGDGEQEVEEEEVGLPPEPAHTEAHAGPHKPSPAPYKSRRSPLTSRHSGSTLAPEQTRRVTRNSSTQTVSDKSTQTVLPYTATRQKARGKN

SEQ ID NO: 15947 - protein, 153 aa, Homo sapiens
  Payload ID: 3166
  Gene Symbol: C15orf59
  Gene Name: chromosome 15 open reading frame 59
  ENSP ID: ENSP00000452799
MKMVIGQLEGILRELKEVAKELREVVSQIDKLTSDFDFELEPDDWTTATVSSTSSSDKAGMGGPFDLGHLDFMTADILSDSWEFCSFLDVSTPSDSVDGPESTRPGAGPDYRLMNGGTPIPNGPRVETPDSSSEEAFGAGPTVKSQLPQRTPG

SEQ ID NO: 15948 - protein, 293 aa, Homo sapiens; identical to SEQ ID NO: 15946
  Payload ID: 3166
  Gene Symbol: C15orf59
  Gene Name: chromosome 15 open reading frame 59
  Uniprot ID: Q2T9L4
  ENSP ID: ENSP00000457205

SEQ ID NO: 15949 - protein, 157 aa, Homo sapiens
  Payload ID: 3167
  Gene Symbol: C15orf61
  Gene Name: chromosome 15 open reading frame 61
  Uniprot ID: A6NNL5
  ENSP ID: ENSP00000342254
MEALRRAHEVALRLLLCRPWASRAAARPKPSASEVLTRHLLQRRLPHWTSFCVPYSAVRNDQFGLSHFNWPVQGANYHVLRTGCFPFIKYHCSKAPWQDLARQNRFFTALKVVNLGIPTLLYGLGSWLFARVTETVHTSYGPITVYFLNKEDEGAMY

SEQ ID NO: 15950 - protein, 60 aa, Homo sapiens
  Payload ID: 3167
  Gene Symbol: C15orf61
  Gene Name: chromosome 15 open reading frame 61
  ENSP ID: ENSP00000453824
MFTVTRCLFSFGLMTEEGGIPTLLYGLGSWLFARVTETVHTSYGPITVYFLNKEDEGAMY

SEQ ID NO: 15951 - protein, 175 aa, Homo sapiens
  Payload ID: 3168
  Gene Symbol: C15orf62
  Gene Name: chromosome 15 open reading frame 62
  Uniprot ID: A8K5M9
  ENSP ID: ENSP00000341178
METWRKGSFRNASFFKQLSLGRPRRLRRQSSVLSQASTAGGDHEEYSNREVIRELQGRPDGRRLPLWGDEQPRATLLAPPKPPRLYRESSSCPNILEPPPAYTAAYSATLPSALSLSSALHQHSEKGLVDTPCFQRTPTPDLSDPFLSFKVDLGISLLEEVLQMLREQFPSEPSF

SEQ ID NO: 15952 - protein, 121 aa, Homo sapiens
  Payload ID: 3169
  Gene Symbol: C15orf65
  Gene Name: chromosome 15 open reading frame 65
  Uniprot ID: H3BRN8
  ENSP ID: ENSP00000456337
MTDRNRDKKSTSPSNSDTEMKSEQLPPCVNPGNPVFSCMLDPKTLQTATSLSKPQMIMYKTNSSHYGEFLPIPQFFPCNYTPKEQVFSSHIRATGFYQNNTLNTAPDRTRTLDFPNIQHTL

SEQ ID NO: 15953 - protein, 127 aa, Homo sapiens
  Payload ID: 3170
  Gene Symbol: C16orf13
  Gene Name: chromosome 16 open reading frame 13
  Uniprot ID: Q96S19
  ENSP ID: ENSP00000440475
MLVAAAAERNKDPILHVLRQYLDPAQRGVRVLEVASGSGQHAAHFARAFPLAEWQPSDVDQRCLDRGSSEQQDTCSNPGPCSSPTGNPEWGLRDTALLEDLGKASGLLLERMVDMPANNKCLIFRKN

SEQ ID NO: 15954 - protein, 205 aa, Homo sapiens
  Payload ID: 3170
  Gene Symbol: C16orf13
  Gene Name: chromosome 16 open reading frame 13
  Uniprot ID: Q96S19
  ENSP ID: ENSP00000440765
MLVAAAAERNKDPILHVLRQYLDPAQRGVRVLEVASGSGQHAAHFARAFPLAEWQPSDVDQRCLDSIAATTQAQGLTNVKAPLHLDVTWGWEHWGGILPQSLDLLLCINMAHVSPLRCTEGLFRAAGHLLKPRALLITYGEPRMGASGHSPPGGPGKGQWPAPGEDGGHASQQQMPDLPEKLSPSFTPAHLHPCRRLCEARTLPP

SEQ ID NO: 15955 - protein, 107 aa, Homo sapiens
  Payload ID: 3170
  Gene Symbol: C16orf13
  Gene Name: chromosome 16 open reading frame 13
  Uniprot ID: Q96S19
  ENSP ID: ENSP00000444140
MLVAAAAERNKDPILHVLRQYLDPAQRGVRVLEVASGSGQHAAHFARAFPLAEWQPSDVDQRCLDRNPEWGLRDTALLEDLGKASGLLLERMVDMPANNKCLIFRKN

SEQ ID NO: 15956 - protein, 185 aa, Homo sapiens
  Payload ID: 3170
  Gene Symbol: C16orf13
  Gene Name: chromosome 16 open reading frame 13
  Uniprot ID: Q96S19
  ENSP ID: ENSP00000444460
MLVAAAAERNKDPILHVLRQYLDPAQRGVRVLEVASGSGQHAAHFARAFPLAEWQPSDVDQRCLDSIAATTQAQGLTNVKAPLHLDVTWGWEHWGGILPQSLDLLLCINMAHVSPLRCTEEPRMGASGHSPPGGPGKGQWPAPGEDGGHASQQQMPDLPEKLSPSFTPAHLHPCRRLCEARTLPP

SEQ ID NO: 15957 - protein, 204 aa, Homo sapiens
  Payload ID: 3170
  Gene Symbol: C16orf13
  Gene Name: chromosome 16 open reading frame 13
  Uniprot ID: Q96S19
  ENSP ID: ENSP00000445926
MLVAAAAERNKDPILHVLRQYLDPAQRGVRVLEVASGSGQHAAHFARAFPLAEWQPSDVDQRCLDSIAATTQAQGLTNVKAPLHLDVTWGWEHWGGILPQSLDLLLCINMAHVSPLRCTEGLFRAAGHLLKPRALLITYGPYAINGKISPQSNVDFDLMLRCRNPEWGLRDTALLEDLGKASGLLLERMVDMPANNKCLIFRKN

SEQ ID NO: 15958 - protein, 176 aa, Homo sapiens
  Payload ID: 3170
  Gene Symbol: C16orf13
  Gene Name: chromosome 16 open reading frame 13
  ENSP ID: ENSP00000454359
LRQYLDPAQRGVRVLEVASGSGQHAAHFARAFPLAEWQPSDVDQRCLDSIAATTQAQGLTNVKAPLHLDVTWGWEHWGGILPQSLDLLLCINMAHVSPLRCTEGLFRAAGHLLKPRALLITYGGGGALSFSKPQPASLSQALWEIPRPWSSGLCPHAHSPMPSMGRSPPRATWTLT

SEQ ID NO: 15959 - protein, 174 aa, Homo sapiens
  Payload ID: 3170
  Gene Symbol: C16orf13
  Gene Name: chromosome 16 open reading frame 13
  ENSP ID: ENSP00000454764
MLVAAAAERNKDPILHVLRQYLDPAQRGVRVLEVASGSGQHAAHFARAFPLAEWQPSDVDQRCLDSIAATTQAQGLTNVKAPLHLDVTWGWEHWGGILPQSLDLLLCINMAHVSPLRCTEVCGEPSMGVCRGTTHPAWGQLGCQICPHHSRGALQSSRTPAQTQGPAHHLRALC

SEQ ID NO: 15960 - protein, 162 aa, Homo sapiens
  Payload ID: 3170
  Gene Symbol: C16orf13
  Gene Name: chromosome 16 open reading frame 13
  ENSP ID: ENSP00000454993
  MOD_RES (1)..(1): Any amino acid
XQYLDPAQRGVRVLEVASGSGQHAAHFARAFPLAEWQPSDVDQRCLDSIAATTQAQGLTNVKAPLHLDVTWGWEHWGGILPQSLDLLLCINMAHVSPLRCTEGLFRAAGHLLKPRALLITYGEPRMGASGHSPPGGPGKGQWPAPGEDGRWGSGGPGNLSRG

SEQ ID NO: 15961 - protein, 161 aa, Homo sapiens
  Payload ID: 3170
  Gene Symbol: C16orf13
  Gene Name: chromosome 16 open reading frame 13
  ENSP ID: ENSP00000455614
KDPILHVLRQYLDPAQRGVRVLEVASGSGQHAAHFARAFPLAEWQPSDVDQRCLDSIAATTQAQGLTNVKAPLHLDVTWGWEHWGGILPQSLDLLLCINMAHVSPLRCTEVCGEPSMGVCRGTTHPAWGQLGCQICPHHSRGTQNGGFGTQPSWRTWERPV

SEQ ID NO: 15962 - protein, 133 aa, Homo sapiens
  Payload ID: 3170
  Gene Symbol: C16orf13
  Gene Name: chromosome 16 open reading frame 13
  ENSP ID: ENSP00000456393
AAAERNKDPILHVLRQYLDPAQRGVRVLEVASGSGQHAAHFARAFPLAEWQPSDVDQRCLDRGSSEQQDTCSNPGPCSSPTGEGVPFHSPNPSLQVCPRLSGKYPDLGPVGCVPMPTALCHQWEDLPPEQRGL

SEQ ID NO: 15963 - protein, 103 aa, Homo sapiens
  Payload ID: 3170
  Gene Symbol: C16orf13
  Gene Name: chromosome 16 open reading frame 13
  ENSP ID: ENSP00000456569
MLVAAAAERNKDPILHVLRQYLDPAQRGVRVLEVASGSGQHAAHFARAFPLAEWQPSDVDQRCLDRGSSEQQDTCSNPGPCSSPTGPMPSMGRSPPRATWTLT

SEQ ID NO: 15964 - protein, 184 aa, Homo sapiens
  Payload ID: 3170
  Gene Symbol: C16orf13
  Gene Name: chromosome 16 open reading frame 13
  ENSP ID: ENSP00000482089
MLVAAAAERNKDPILHVLRQYLDPAQRGVRVLEVASGSGQHAAHFARAFPLAEWQPSDVDQRCLDSIAATTQAQGLTNVKAPLHLDVTWGWEHWGGILPQSLDLLLCINMAHVSPLRCTEPYAINGKISPQSNVDFDLMLRCRNPEWGLRDTALLEDLGKASGLLLERMVDMPANNKCLIFRKN

SEQ ID NO: 15965 - protein, 204 aa, Homo sapiens
  Payload ID: 3171
  Gene Symbol: C16orf45
  Gene Name: chromosome 16 open reading frame 45
  Uniprot ID: Q96MC5
  ENSP ID: ENSP00000300006
MELKQSLSTHLEAEKPLRRYGAVEETAWKTERLGRNQLDIISMAETTMMPEEIELEMAKIQRLREVLVRRESELRFMMDDIQLCKDIMDLKQELQNLVAIPEKEKTKLQKQREDELIQKIHKLVQKRDFLVDDAEVERLREQEEDKEMADFLRIKLKPLDKVTKSPASSRAEKKAEPPPSKPTVAKTGLALIKDCCGATQCNIM

SEQ ID NO: 15966 - protein, 187 aa, Homo sapiens
  Payload ID: 3171
  Gene Symbol: C16orf45
  Gene Name: chromosome 16 open reading frame 45
  Uniprot ID: Q96MC5
  ENSP ID: ENSP00000408976
MWGDLTETGCMGRRSAKKDQLDIISMAETTMMPEEIELEMAKIQRLREVLVRRESELRFMMDDIQLCKDIMDLKQELQNLVAIPEKEKTKLQKQREDELIQKIHKLVQKRDFLVDDAEVERLREQEEDKEMADFLRIKLKPLDKVTKSPASSRAEKKAEPPPSKPTVAKTGLALIKDCCGATQCNIM

SEQ ID NO: 15967 - protein, 88 aa, Homo sapiens
  Payload ID: 3171
  Gene Symbol: C16orf45
  Gene Name: chromosome 16 open reading frame 45
  ENSP ID: ENSP00000455130
MELKQSLSTHLEAEKPLRRYGAVEETAWKTERLGRNQLDIISMAETTMMPEEIELEMAKIQRLREVLVRRESELRFMLCNLAQISYLL

SEQ ID NO: 15968 - protein, 115 aa, Homo sapiens
  Payload ID: 3171
  Gene Symbol: C16orf45
  Gene Name: chromosome 16 open reading frame 45
  ENSP ID: ENSP00000456084
  MOD_RES (1)..(1): Any amino acid
XMDDIQLCKDIMDLKQELQNLVAIPEKEKTKLQKQREDELIQKIHKLVQKRDFLVDDAEVERLREQEEDKEMADFLRIKLKPLDKVTKSPANEEVAVNPLPFSSGGCKRLQAEAE

SEQ ID NO: 15969 - protein, 175 aa, Homo sapiens
  Payload ID: 3171
  Gene Symbol: C16orf45
  Gene Name: chromosome 16 open reading frame 45
  ENSP ID: ENSP00000456219
  MOD_RES (1)..(1): Any amino acid
XQLDIISMAETTMMPEEIELEMAKIQRLREVLVRRESELRFMMDDIQLCKDIMDLKQELQNLVAIPEKEKTKLQKQREDELIQKIHKLVQKRDFLVDDAEVERLREQEEDKEMADFLRIKLKPLDKVTKSPAICLRCVPGGGLDWHGSSVQKSQQGTGSSDVKARAVENGTQSRC

SEQ ID NO: 15970 - protein, 36 aa, Homo sapiens
  Payload ID: 3171
  Gene Symbol: C16orf45
  Gene Name: chromosome 16 open reading frame 45
  ENSP ID: ENSP00000457319
MELKQSLSTHLEAEKPLRRYGAVEETAWKTERLGRS

SEQ ID NO: 15971 - protein, 134 aa, Homo sapiens
  Payload ID: 3171
  Gene Symbol: C16orf45
  Gene Name: chromosome 16 open reading frame 45
  ENSP ID: ENSP00000457515
MPEEIELEMAKIQRLREVLVRRESELRFMMDDIQLCKDIMDLKQELQNLVAIPEKEKTKLQKQREDELIQKIHKLVQKRDFLVDDAEVERLREQEEDKEMADFLRIKLKPLDKVTKSPASLESLEKPEAYVSEY

SEQ ID NO: 15972 - protein, 151 aa, Homo sapiens
  Payload ID: 3171
  Gene Symbol: C16orf45
  Gene Name: chromosome 16 open reading frame 45
  ENSP ID: ENSP00000457867
MELKQSLSTHLEAEKPLRRYGAVEETAWKTERLGRNQLDIISMAETTMMPEEIELEMAKIQRLREVLVRRESELRFMMDDIQLCKDIMDLKQELQNLVAIPEKEKTKLQKQREDELIQKIHKLVQKRDFLVDDAEVERLRLPGREESRAPT

SEQ ID NO: 15973 - protein, 187 aa, Homo sapiens; identical to SEQ ID NO: 15966
  Payload ID: 3171
  Gene Symbol: C16orf45
  Gene Name: chromosome 16 open reading frame 45
  Uniprot ID: Q96MC5
  ENSP ID: ENSP00000477880

SEQ ID NO: 15974 - protein, 204 aa, Homo sapiens; identical to SEQ ID NO: 15965
  Payload ID: 3171
  Gene Symbol: C16orf45
  Gene Name: chromosome 16 open reading frame 45
  Uniprot ID: Q96MC5
  ENSP ID: ENSP00000483858

SEQ ID NO: 15975 - protein, 175 aa, Homo sapiens; identical to SEQ ID NO: 15969
  Payload ID: 3171
  Gene Symbol: C16orf45
  Gene Name: chromosome 16 open reading frame 45
  ENSP ID: ENSP00000487632
  MOD_RES (1)..(1): Any amino acid

SEQ ID NO: 15976 - protein, 88 aa, Homo sapiens; identical to SEQ ID NO: 15967
  Payload ID: 3171
  Gene Symbol: C16orf45
  Gene Name: chromosome 16 open reading frame 45
  ENSP ID: ENSP00000487963

SEQ ID NO: 15977 - protein, 115 aa, Homo sapiens; identical to SEQ ID NO: 15968
  Payload ID: 3171
  Gene Symbol: C16orf45
  Gene Name: chromosome 16 open reading frame 45
  ENSP ID: ENSP00000488214
  MOD_RES (1)..(1): Any amino acid

SEQ ID NO: 15978 - protein, 134 aa, Homo sapiens; identical to SEQ ID NO: 15971
  Payload ID: 3171
  Gene Symbol: C16orf45
  Gene Name: chromosome 16 open reading frame 45
  ENSP ID: ENSP00000488232

SEQ ID NO: 15979 - protein, 151 aa, Homo sapiens; identical to SEQ ID NO: 15972
  Payload ID: 3171
  Gene Symbol: C16orf45
  Gene Name: chromosome 16 open reading frame 45
  ENSP ID: ENSP00000488650

SEQ ID NO: 15980 - protein, 395 aa, Homo sapiens
  Payload ID: 3172
  Gene Symbol: C16orf46
  Gene Name: chromosome 16 open reading frame 46
  Uniprot ID: Q6P387
  ENSP ID: ENSP00000299578
MDLCQKNETDLENAENNEIQFTEETEPTYTCPDGKSEKNHVYCLLDVSDITLEQDEKAKEFIIGTGWEEAVQGWGRTSPAACIWPRKIPKKARVGEGACSDCLVCVNLSHWSLQTKPPTEGGPEKDQSSPSQTQAAPQGPSTASRAISDICFPTYFRAEKKSLQIKEFIWCNKDWAIPGTNRGKASGNPSGGAHRGLSIPGPLTSRALLVLPPLKASLSNALDVLGKKSKNSFLQSEEKVLDVEKDGCVAYAYGLKTADGKGEKRASELAKHPMVNDTPSSPSPAAQISLLTDPEQRCLHWSLLSEKNLACPPDPSNVRYLAALQLLQKRGVQSYKSKFKAKEPRSPVITRKHVLPKAKQENRPQMLETKVFPRPVLPSLTVSRVIIPVSTHRIL

SEQ ID NO: 15981 - protein, 388 aa, Homo sapiens
  Payload ID: 3172
  Gene Symbol: C16orf46
  Gene Name: chromosome 16 open reading frame 46
  Uniprot ID: Q6P387
  ENSP ID: ENSP00000367874
MDLCQKNETDLENAENNEIQFTEETEPTYTCPDGKSEKNHVYCLLDVSDITLEQDEKAKEFIIGTGWEEAVQGWGRTSPAACIWPRKIPKKARVGEGACSDCLVCVNLSHWSLQTKPPTEGGPEKDQSSPSQTQAAPQGPSTASRAISDICFPTYFRAEKKSLQIKEFIWCNKDWAIPGTNRGKASGNPSGGAHRGLSIPGPLTSRALLVLPPLKASLSNALDVLGKKSKNSFLQSEEKVLDVEKDGCVAYAYGLKTADGKGEKRASELAKHPMVNDTPSSPSPAAQISLLTDPEQRCLHWSLLSEKNLACPPDPSNVRYLAALQLLQKRGVQSYKSKFKAKEPRSPVITRKHVLPKAKQENRPQMLETKVFPRPVLPSLTHRKKKIK

SEQ ID NO: 15982 - protein, 67 aa, Homo sapiens
  Payload ID: 3172
  Gene Symbol: C16orf46
  Gene Name: chromosome 16 open reading frame 46
  ENSP ID: ENSP00000455877
MDLCQKNETDLENAENNEIQFTEETEPTYTCPDGKSEKNHVYCLLDVSDITLEQDEKAKEFIIGTGW

SEQ ID NO: 15983 - protein, 38 aa, Homo sapiens
  Payload ID: 3173
  Gene Symbol: C16orf52
  Gene Name: chromosome 16 open reading frame 52
  Uniprot ID: Q8NHV5
  ENSP ID: ENSP00000454543
MDKLTIISGCLFLAADIFAIASIANPDWINTGESAVSP

SEQ ID NO: 15984 - protein, 167 aa, Homo sapiens
  Payload ID: 3173
  Gene Symbol: C16orf52
  Gene Name: chromosome 16 open reading frame 52
  Uniprot ID: Q8NHV5
  ENSP ID: ENSP00000454926
MDKLTIISGCLFLAADIFAIASIANPDWINTGESAGALTVGLVRQCQTIHGRDRTCIPPRLPPEWVTTLFFIIMGIISLTVTCGLLVASHWRREATKYARWIAFTGMILFCMAALIFPIGFYINEVGGQPYKLPNNTVVGSSYVLFVLSIFFTIVGLLFAGKVCLPG

SEQ ID NO: 15985 - protein, 39 aa, Homo sapiens
  Payload ID: 3173
  Gene Symbol: C16orf52
  Gene Name: chromosome 16 open reading frame 52
  ENSP ID: ENSP00000455164
LTIISGCLFLAADIFAIASIANPDWINTGESAGSLCMLN

SEQ ID NO: 15986 - protein, 108 aa, Homo sapiens
  Payload ID: 3173
  Gene Symbol: C16orf52
  Gene Name: chromosome 16 open reading frame 52
  ENSP ID: ENSP00000455694
MDKLTIISGCLFLAADIFAIASIANPDWINTGESAGALTVGLVRQCQTIHGRDRTCIPPRLPPEWVTTLFFIIMGIISLTVTCGLLVASHWRREATKYARWIAFTGSK

SEQ ID NO: 15987 - protein, 114 aa, Homo sapiens
  Payload ID: 3173
  Gene Symbol: C16orf52
  Gene Name: chromosome 16 open reading frame 52
  ENSP ID: ENSP00000456262
MDKLTIISGCLFLAADIFAIASIANPDWINTGESAGALTVGLVRQCQTIHGRDRTCIPPRLPPEWVTTLFFIIMGIISLTVTCGLLVASHWRREATKYARWIAFTGKCVHSSHT

SEQ ID NO: 15988 - protein, 90 aa, Homo sapiens
  Payload ID: 3173
  Gene Symbol: C16orf52
  Gene Name: chromosome 16 open reading frame 52
  ENSP ID: ENSP00000456506
MGQSWELTAAERAMRIQGALTVGLVRQCQTIHGRDRTCIPPRLPPEWVTTLFFIIMGIISLTVTCGLLVASHWRREATKYARWIAFTGSK

SEQ ID NO: 15989 - protein, 224 aa, Homo sapiens
  Payload ID: 3174
  Gene Symbol: C16orf54
  Gene Name: chromosome 16 open reading frame 54
  Uniprot ID: Q6UWD8
  ENSP ID: ENSP00000327506
MPLTPEPPSGRVEGPPAWEAAPWPSLPCGPCIPIMLVLATLAALFILTTAVLAERLFRRALRPDPSHRAPTLVWRPGGELWIEPMGTARERSEDWYGSAVPLLTDRAPEPPTQVGTLEARATAPPAPSAPNSAPSNLGPQTVLEVPARSTFWGPQPWEGRPPATGLVSWAEPEQRPEASVQFGSPQARRQRPGSPDPEWGLQPRVTLEQISAFWKREGRTSVGF

SEQ ID NO: 15990 - protein, 468 aa, Homo sapiens
  Payload ID: 3175
  Gene Symbol: C16orf58
  Gene Name: chromosome 16 open reading frame 58
  Uniprot ID: Q96GQ5
  ENSP ID: ENSP00000317579
MADDAGLETPLCSEQFGSGEARGCRAAADGSLQWEVGGWRWWGLSRAFTVKPEGRDAGEVGASGAPSPPLSGLQAVFLPQGFPDSVSPDYLPYQLWDSVQAFASSLSGSLATQAVLLGIGVGNAKATVSAATATWLVKDSTGMLGRIVFAWWKGSKLDCNAKQWRLFADILNDVAMFLEIMAPVYPICFTMTVSTSNLAKCIVSVAGGATRAALTVHQARRNNMADVSAKDSSQETLVNLAGLLVSLLMLPLVSGCPGFSLGCFFFLTALHIYANYRAVRALVMETLNEGRLRLVLKHYLQRGEVLDPTAANRMEPLWTGFWPAPSLSLGVPLHRLVSSVFELQQLVEGHQESYLLCWDQSQNQVQVVLNQKAGPKTILRAATHGLMLGALQGDGPLPAELEELRNRVRAGPKKESWVVVKETHEVLDMLFPKFLKGLQDAGWKTEKHQLEVDEWRATWLLSPEKKVL

SEQ ID NO: 15991 - protein, 468 aa, Homo sapiens; identical to SEQ ID NO: 15990
  Payload ID: 3175
  Gene Symbol: C16orf58
  Gene Name: chromosome 16 open reading frame 58
  Uniprot ID: Q96GQ5
  ENSP ID: ENSP00000398074

SEQ ID NO: 15992 - protein, 423 aa, Homo sapiens
  Payload ID: 3175
  Gene Symbol: C16orf58
  Gene Name: chromosome 16 open reading frame 58
  ENSP ID: ENSP00000456050
MADDAGLETPLCSEQFGSGEARGCRAAADGSLQWEGFPDSVSPDYLPYQLWDSVQAFASSLSGSLATQAVLLGIGVGNAKATVSAATATWLVKDSTGMLGRIVFAWWKGSKLDCNAKQWRLFADILNDVAMFLEIMAPVYPICFTMTVSTSNLAKCIVSVAGGATRAALTVHQARRNNMADVSAKDSSQETLVNLAGLLVSLLMLPLVSGCPGFSLGCFFFLTALHIYANYRAVRALVMETLNEGRLRLVLKHYLQRGEVLDPTAANRMEPLWTGFWPAPSLSLGVPLHRLVSSVFELQQLVEGHQESYLLCWDQSQNQVQVVLNQKAGPKTILRAATHGLMLGALQGDGPLPAELEELRNRVRAGPKKESWVVVKETHEVLDMLFPKFLKGLQDAGWKTEKHQLEVDEWRATWLLSPEKKVL

SEQ ID NO: 15993 - protein, 140 aa, Homo sapiens
  Payload ID: 3175
  Gene Symbol: C16orf58
  Gene Name: chromosome 16 open reading frame 58
  ENSP ID: ENSP00000456602
MADDAGLETPLCSEQFGSGEARGCRAAADGSLQWEVGGWRWWGLSRAFTVKPEGRDAGEVGASGAPSPPLSGLQAVFLPQGFPDSVSPDYLPYQLWDSVQIQLACWAASSLPGGKVHRECCWWGHSGCPDRAPGSEEQHG

SEQ ID NO: 15994 - protein, 466 aa, Homo sapiens
  Payload ID: 3175
  Gene Symbol: C16orf58
  Gene Name: chromosome 16 open reading frame 58
  ENSP ID: ENSP00000456775
MADDAGLETPLCSEQFGSGEARGCRAAADGSLQWEVGGWRWWGLSRAFTVKPEGRDAGEVGASGAPSPPLSGLQAVFLPQGFPDSVSPDYLPYQLWDSVQAFASSLSGSLATQAVLLGIGVGNAKATVSAATATWLVKDSTGMLGRIVFAWWKGSKLDCNAKQWRLFADILNDVAMFLEIMAPVYPICFTMTVSTSNLAKCIVSVAGGATRAALTVHQARRNNMADVSAKDSSQETLVNLAGLLVSLLMLPLVSGCPGLGCFFFLTALHIYANYRAVRALVMETLNEGRLRLVLKHYLQRGEVLDPTAANRMEPLWTGFWPAPSLSLGVPLHRLVSSVFELQQLVEGHQESYLLCWDQSQNQVQVVLNQKAGPKTILRAATHGLMLGALQGDGPLPAELEELRNRVRAGPKKESWVVVKETHEVLDMLFPKFLKGLQDAGWKTEKHQLEVDEWRATWLLSPEKKVL

SEQ ID NO: 15995 - protein, 135 aa, Homo sapiens
  Payload ID: 3175
  Gene Symbol: C16orf58
  Gene Name: chromosome 16 open reading frame 58
  ENSP ID: ENSP00000457087
MADDAGLETPLCSEQFGSGEARGCRAAADGSLQWEVGGWRWWGLSRAFTVKPEGRDAGEVGASGAPSPPLSGLQAVFLPQGFPDSVSPDYLPYQLWDSVQIQLACWAASSLPGGKGANWTAMPSSGGFLRTSSMT

SEQ ID NO: 15996 - protein, 82 aa, Homo sapiens
  Payload ID: 3175
  Gene Symbol: C16orf58
  Gene Name: chromosome 16 open reading frame 58
  ENSP ID: ENSP00000459952
MLGRIVFAWWKGSKLDCNAKQWRLFADILNDVAMFLEIMAPVYPICFTMTVSTSNLAKCIVSVAGGATRAALTVHQARRNNM

SEQ ID NO: 15997 - protein, 433 aa, Homo sapiens
  Payload ID: 3176
  Gene Symbol: C16orf59
  Gene Name: chromosome 16 open reading frame 59
  Uniprot ID: Q7L2K0
  ENSP ID: ENSP00000355022
MLPAGCSRRLVAELQGALDACAQRQLQLEQSLRVCRRLLHAWEPTGTRALKPPPGPETNGEDPLPACTPSPQDLKELEFLTQALEKAVRVRRGITKAGERDKAPSLKSRSIVTSSGTTASAPPHSPGQAGGHASDTRPTKGLRQTTVPAKGHPERRLLSVGDGTRVGMGARTPRPGAGLRDQQMAPSAAPQAPEAFTLKEKGHLLRLPAAFRKAASQNSSLWAQLSSTQTSDSTDAAAAKTQFLQNMQTASGGPQPRLSAVEVEAEAGRLRKACSLLRLRMREELSAAPMDWMQEYRCLLTLEGLQAMVGQCLHRLQELRAAVAEQPPRPCPVGRPPGASPSCGGRAEPAWSPQLLVYSSTQELQTLAALKLRVAVLDQQIHLEKVLMAELLPLVSAAQPQGPPWLALCRAVHSLLCEGGARVLTILRDEPAV

SEQ ID NO: 15998 - protein, 405 aa, Homo sapiens
  Payload ID: 3176
  Gene Symbol: C16orf59
  Gene Name: chromosome 16 open reading frame 59
  ENSP ID: ENSP00000454787
MLPAGCSRRLVAELQGALDACAQRQLQLEQSLRVCRRLLHAWEPTGTRALKPPPGPETNGEDPLPACTPSPQDLKELEFLTQALEKAVRVRRGITKAGERDKAPSLKSRSIVTSSGTTASAPPHSPGQAGGHASDTRPTKGLRQTTVPAKGHPERRLLSVGDGTRVGMGARTPRPGAGLRDQQMAPSAAPQAPEAFTLKEKGHLLRLPAAFRKAASQNSSLWAQLSSTQTSDSTDAAAAKTQFLQNMQTASGGPQPRLSAVEVEAEAGRLRKACSLLRLRMREELSAAPMDWMQEYRCLLTLEGLQAMVGQCLHRLQELRAAVAEQPPRPCPVGRPPGASPSCGGRAEPAWSPQLLVYSSTQELQTLAALKLRVAVLDQQIHLEKVLLEEEVGVQQRSAALRTRG

SEQ ID NO: 15999 - protein, 99 aa, Homo sapiens
  Payload ID: 3176
  Gene Symbol: C16orf59
  Gene Name: chromosome 16 open reading frame 59
  ENSP ID: ENSP00000455315
MQTASGGPQPRLSAVEVEAEAGRLRKACSLLRLRMREELSAAPMDWMQEYRCLLTLEGLQAMVGQCLHRLQELRAAVAEQPPRPCPVGRPPGASPSCGG

SEQ ID NO: 16000 - protein, 266 aa, Homo sapiens
  Payload ID: 3176
  Gene Symbol: C16orf59
  Gene Name: chromosome 16 open reading frame 59
  Uniprot ID: Q7L2K0
  ENSP ID: ENSP00000456478
MGARTPRPGAGLRDQQMAPSAAPQAPEAFTLKEKGHLLRLPAAFRKAASQNSSLWAQLSSTQTSDSTDAAAAKTQFLQNMQTASGGPQPRLSAVEVEAEAGRLRKACSLLRLRMREELSAAPMDWMQEYRCLLTLEGLQAMVGQCLHRLQELRAAVAEQPPRPCPVGRPPGASPSCGGRAEPAWSPQLLVYSSTQELQTLAALKLRVAVLDQQIHLEKVLMAELLPLVSAAQPQGPPWLALCRAVHSLLCEGGARVLTILRDEPAV

SEQ ID NO: 16001 - protein, 285 aa, Homo sapiens
  Payload ID: 3176
  Gene Symbol: C16orf59
  Gene Name: chromosome 16 open reading frame 59
  ENSP ID: ENSP00000457153
MLPAGCSRREPTGTRALKPPPGPETNGEDPLPACTPSPQDLKELEFLTQALEKAVRVRRGITKAGERDKAPSLKSRSIVTSSGTTASAPPHSPGQAGGHASDTRPTKGLRQTTVPAKGHPERRLLSVGDGTRVGMGARTPRPGAGLRDQQMAPSAAPQAPEAFTLKEKGHLLRLPAAFRKAASQNSSLWAQLSSTQTSDSTDAAAAKTQFLQNMQTASGGPQPRLSAVEVEAEAGRLRKACSLLRLRMREELSAAPMDWMQEYRCLLTLEGLQAMVGQCLHRLQE

SEQ ID NO: 16002 - protein, 171 aa, Homo sapiens
  Payload ID: 3176
  Gene Symbol: C16orf59
  Gene Name: chromosome 16 open reading frame 59
  ENSP ID: ENSP00000457450
  MOD_RES (1)..(1): Any amino acid
XNLGPLSPLLARQPPPHRIPQAKLVAMLQTRDPPRASARPRCLPRATLSAGCCQWGMGPVLGWEPEPPGLGRASGTSKWPHPLLLRPQKPSHSRRRGTCCGCLRHSGKQLPRTRACGPSSVPHRPVIPRMPPLPKPSSSRTCRQLQAGPSPGSVLWRWRRRRGACGRPARC

SEQ ID NO: 16003 - protein, 405 aa, Homo sapiens; identical to SEQ ID NO: 15998
  Payload ID: 3176
  Gene Symbol: C16orf59
  Gene Name: chromosome 16 open reading frame 59
  ENSP ID: ENSP00000458565

SEQ ID NO: 16004 - protein, 1052 aa, Homo sapiens
  Payload ID: 3177
  Gene Symbol: C16orf62
  Gene Name: chromosome 16 open reading frame 62
  ENSP ID: ENSP00000251143
MAPAGVVTRAVRSGELPLTSMASAENEACAVRSVACPSQAWRLQKVLCGRCGAASCPSQTWRPRGAGSGGVRMGSRADGPRTSGHVTGKMAVFPWHSRNRNYKAEFASCRLEAVPLEFGDYHPLKPITVTESKTKKVNRKGSTSSTSSSSSSSVVDPLSSVLDGTDPLSMFAATADPAALAAAMDSSRRKRDRDDNSVVGSDFEPWTNKRGEILARYTTTEKLSINLFMGSEKGKAGTATLAMSEKVRTRLEELDDFEEGSQKELLNLTQQDYVNRIEELNQSLKDAWASDQKVKALKIVIQCSKLLSDTSVIQFYPSKFVLITDILDTFGKLVYERIFSMCVDSRSVLPDHFSPENANDTAKETCLNWFFKIASIRELIPRFYVEASILKCNKFLSKTGISECLPRLTCMIRGIGDPLVSVYARAYLCRVGMEVAPHLKETLNKNFFDFLLTFKQIHGDTVQNQLVVQGVELPSYLPLYPPAMDWIFQCISYHAPEALLTEMMERCKKLGNNALLLNSVMSAFRAEFIATRSMDFIGMIKECDESGFPKHLLFRSLGLNLALADPPESDRLQILNEAWKVITKLKNPQDYINCAEVWVEYTCKHFTKREVNTVLADVIKHMTPDRAFEDSYPQLQLIIKKVIAHFHDFSVLFSVEKFLPFLDMFQKESVRVEVCKCIMDAFIKHQQEPTKDPVILNALLHVCKTMHDSVNALTLEDEKRMLSYLINGFIKMVSFGRDFEQQLSFYVESRSMFCNLEPVLVQLIHSVNRLAMETRKVMKGNHSRKTAAFVRACVAYCFITIPSLAGIFTRLNLYLHSGQVALANQCLSQADAFFKAAISLVPEVPKMINIDGKMRPSESFLLEFLCNFFSTLLIVPDHPEHGVLFLVRELLNVIQDYTWEDNSDEKIRIYTCVLHLLSAMSQETYLYHIDKVDSNDSLYGGDSKFLAENNKLCETVMAQILEHLKTLAKDEALKRQSSLGLSFFNSILAHGDLRNNKLNQLSVNLWHLAQRHGCADTRTMVKTLEYIKKQSKQPDMTHLTELALRLPLQTRT

SEQ ID NO: 16005 - protein, 963 aa, Homo sapiens
  Payload ID: 3177
  Gene Symbol: C16orf62
  Gene Name: chromosome 16 open reading frame 62
  Uniprot ID: Q7Z3J2
  ENSP ID: ENSP00000395973
MAVFPWHSRNRNYKAEFASCRLEAVPLEFGDYHPLKPITVTESKTKKVNRKGSTSSTSSSSSSSVVDPLSSVLDGTDPLSMFAATADPAALAAAMDSSRRKRDRDDNSVVGSDFEPWTNKRGEILARYTTTEKLSINLFMGSEKGKAGTATLAMSEKVRTRLEELDDFEEGSQKELLNLTQQDYVNRIEELNQSLKDAWASDQKVKALKIVIQCSKLLSDTSVIQFYPSKFVLITDILDTFGKLVYERIFSMCVDSRSVLPDHFSPENANDTAKETCLNWFFKIASIRELIPRFYVEASILKCNKFLSKTGISECLPRLTCMIRGIGDPLVSVYARAYLCRVGMEVAPHLKETLNKNFFDFLLTFKQIHGDTVQNQLVVQGVELPSYLPLYPPAMDWIFQCISYHAPEALLTEMMERCKKLGNNALLLNSVMSAFRAEFIATRSMDFIGMIKECDESGFPKHLLFRSLGLNLALADPPESDRLQILNEAWKVITKLKNPQDYINCAEVWVEYTCKHFTKREVNTVLADVIKHMTPDRAFEDSYPQLQLIIKKVIAHFHDFSVLFSVEKFLPFLDMFQKESVRVEVCKCIMDAFIKHQQEPTKDPVILNALLHVCKTMHDSVNALTLEDEKRMLSYLINGFIKMVSFGRDFEQQLSFYVESRSMFCNLEPVLVQLIHSVNRLAMETRKVMKGNHSRKTAAFVRACVAYCFITIPSLAGIFTRLNLYLHSGQVALANQCLSQADAFFKAAISLVPEVPKMINIDGKMRPSESFLLEFLCNFFSTLLIVPDHPEHGVLFLVRELLNVIQDYTWEDNSDEKIRIYTCVLHLLSAMSQETYLYHIDKVDSNDSLYGGDSKFLAENNKLCETVMAQILEHLKTLAKDEALKRQSSLGLSFFNSILAHGDLRNNKLNQLSVNLWHLAQRHGCADTRTMVKTLEYIKKQSKQPDMTHLTELALRLPLQTRT

SEQ ID NO: 16006 - protein, 813 aa, Homo sapiens [sequence omitted]

SEQ ID NO: 16007 - protein, 1052 aa, Homo sapiens; identical to SEQ ID NO: 16004
  Payload ID: 3177
  Gene Symbol: C16orf62
  Gene Name: chromosome 16 open reading frame 62
  ENSP ID: ENSP00000400815

SEQ ID NO: 16008 - protein, 40 aa, Homo sapiens
  Payload ID: 3177
  Gene Symbol: C16orf62
  Gene Name: chromosome 16 open reading frame 62
  ENSP ID: ENSP00000438557
MAVFPWHSRNRNYKAEFASCRLEAVPLEFGDYHPLKPITL

SEQ ID NO: 16009 - protein, 273 aa, Homo sapiens
  Payload ID: 3177
  Gene Symbol: C16orf62
  Gene Name: chromosome 16 open reading frame 62
  ENSP ID: ENSP00000438852
MAPAGVVTRAVRSGELPLTSMASAENEACAVRSVACPSQAWRLQKVLCGRCGAASCPSQTWRPRGAGSGGVRMGSRADGPRTSGHVTGKMAVFPWHSRNRNYKAEFASCRLEAVPLEFGDYHPLKPITVTESKTKKVNRKGSTSSTSSSSSSSVVDPLSSVLDGTDPLSMFAATADPAALAAAMDSSRRKRDRDDNSVVGSDFEPWTNKRGEILARYTTTEKLSINLFMGSEKDGGYSEPRSRHRTPAWTTEQSWDCHIGNVREGADPAGGAG

SEQ ID NO: 16010 - protein, 959 aa, Homo sapiens
  Payload ID: 3177
  Gene Symbol: C16orf62
  Gene Name: chromosome 16 open reading frame 62
  ENSP ID: ENSP00000442468
MAPAGVVTRAVRSGELPLTSMASAENEACAVRSVACPSQAWRLQKVLCGRCGAASCPSQTWRPRGAGSGGVRMGSRADGPRTSGHVTGKMAVFPWHSRNRNYKAEFASCRLEAVPLEFGDYHPLKPITVTESKTKKVNRKGSTSSTSSSSSSSVVDPLSSVLDGTDPLSMFAATADPAALAAAMDSSRRKRDRDDNSVVGSDFEPWTNKRGEILARYTTTEKLSINLFMGSEKGKAGTATLAMSEKVRTRLEELDDFEEGSQKELLNLTQQDYVNRIEELNQSLKDAWASDQKVKALKIVIQCSKLLSDTSVIQFYPSKFVLITDILDTFGKLVYERIFSMCVDSRSVLPDHFSPENANDTAKETCLNWFFKIASIRELIPRFYVEASILKCNKFLSKTGISECLPRLTCMIRGIGDPLVSVYARAYLCRALLTEMMERCKKLGNNALLLNSVMSAFRAEFIATRSMDFIGMIKECDESGFPKHLLFRSLGLNLALADPPESDRLQILNEAWKVITKLKNPQDYINCAEVWVEYTCKHFTKREVNTVLADVIKHMTPDRAFEDSYPQLQLIIKKVIAHFHDFSVLFSVEKFLPFLDMFQKESVRVEVCKCIMDAFIKHQQEPTKDPVILNALLHVCKTMHDSVNALTLEDEKRMLSYLINGFIKMVSFGRDFEQQLSFYVESRSMFCNLEPVLVQLIHACVAYCFITIPSLAGIFTRLNLYLHSGQVALANQCLSQADAFFKAAISLVPEVPKMINIDGKMRPSESFLLEFLCNFFSTLLIVPDHPEHGVLFLVRELLNVIQDYTWEDNSDEKIRIYTCVLHLLSAMSQETYLYHIDKVDSNDSLYGGDSKFLAENNKLCETVMAQILEHLKTLAKDEALKRQSSLGLSFFNSILAHGDLRNNKLNQLSVNLWHLAQRHGCADTRTMVKTLEYIKKQSKQPDMTHLTELALRLPLQTRT

SEQ ID NO: 16011 - protein, 168 aa, Homo sapiens
  Payload ID: 3177
  Gene Symbol: C16orf62
  Gene Name: chromosome 16 open reading frame 62
  ENSP ID: ENSP00000455045
MAVFPWHSRNRNYKAEFASCRLEAVPLEFGDYHPLKPITVTESKTKKVNRKGSTSSTSSSSSSSVVDPLSSVLDGTDPLSMFAATADPAALAAAMDSSRRKRDRDDNSVVGSDFEPWTNKRGEILARYTTTEKLSIAKLGLPHWQCQRRCGPGWRSWMTLRRVPKRSC

SEQ ID NO: 16012 - protein, 95 aa, Homo sapiens
  Payload ID: 3177
  Gene Symbol: C16orf62
  Gene Name: chromosome 16 open reading frame 62
  ENSP ID: ENSP00000456425
MGLTPSPCLQPLLTPQPWQLPCSRRKRDRDDNSVVGSDFEPWTNKRGEILARYTTTEKLSINLFMGSEKGKAGTATLAMSEKVRTRLEELDDFEE

SEQ ID NO: 16013 - protein, 73 aa, Homo sapiens
  Payload ID: 3177
  Gene Symbol: C16orf62
  Gene Name: chromosome 16 open reading frame 62
  ENSP ID: ENSP00000457190
  MOD_RES (1)..(1): Any amino acid
XICLWDLKKGSQKELLNLTQQDYVNRIEELNQSLKDAWASDQKVKALKIVIQVSSSDPPPPPRISYVKFHCET

SEQ ID NO: 16014 - protein, 116 aa, Homo sapiens
  Payload ID: 3177
  Gene Symbol: C16orf62
  Gene Name: chromosome 16 open reading frame 62
  ENSP ID: ENSP00000457779
  MOD_RES (1)..(1): Any amino acid
XLAKDEALKRQSSLGLSFFNSILAHGDLRNNKLNQLSVNLWHLAQRHGCADTRTMGLDMLPGTVTAIFVLALMKPTLEMMERMLPWRAVEPGPNQAFLPRETELSGHRGLPGLGCL

SEQ ID NO: 16015 - protein, 712 aa, Homo sapiens
  Payload ID: 3177
  Gene Symbol: C16orf62
  Gene Name: chromosome 16 open reading frame 62
  ENSP ID: ENSP00000457973
MCVDSRSVLPDHFSPENANDTAKETCLNWFFKIASIRELIPRFYVEASILKCNKFLSKTGISECLPRLTCMIRGIGDPLVSVYARAYLCRVGMEVAPHLKETLNKNFFDFLLTFKQIHGDTVQNQLVVQGVELPSYLPLYPPAMDWIFQCISYHAPEALLTEMMERCKKLGNNALLLNSVMSAFRAEFIATRSMDFIGMIKECDESGFPKHLLFRSLGLNLALADPPESDRLQILNEAWKVITKLKNPQDYINCAEVWVEYTCKHFTKREVNTVLADVIKHMTPDRAFEDSYPQLQLIIKKVIAHFHDFSVLFSVEKFLPFLDMFQKESVRVEVCKCIMDAFIKHQQEPTKDPVILNALLHVCKTMHDSVNALTLEDEKRMLSYLINGFIKMVSFGRDFEQQLSFYVESRSMFCNLEPVLVQLIHSVNRLAMETRKVMKGNHSRKTAAFVRACVAYCFITIPSLAGIFTRLNLYLHSGQVALANQCLSQADAFFKAAISLVPEVPKMINIDGKMRPSESFLLEFLCNFFSTLLIVPDHPEHGVLFLVRELLNVIQDYTWEDNSDEKIRIYTCVLHLLSAMSQETYLYHIDKVDSNDSLYGGDSKFLAENNKLCETVMAQILEHLKTLAKDEALKRQSSLGLSFFNSILAHGDLRNNKLNQLSVNLWHLAQRHGCADTRTMVKTLEYIKKQSKQPDMTHLTELALRLPLQTRT

SEQ ID NO: 16016 - protein, 451 aa, Homo sapiens
  Payload ID: 3177
  Gene Symbol: C16orf62
  Gene Name: chromosome 16 open reading frame 62
  ENSP ID: ENSP00000458116
MAVFPWHSRNRNYKAEFASCRLEAVPLEFGDYHPLKPITVTESKTKKVNRKGSTSSTSSSSSSSVVDPLSSVLDGTDPLSMFAATADPAALAAAMDSSRRKRDRDDNSVVGSDFEPWTNKRGEILARYTTTEKLSINLFMGSEKGKAGTATLAMSEKVRTRLEELDDFEEGSQKELLNLTQQDYVNRIEELNQSLKDAWASDQKVKALKIVIQCSKLLSDTSVIQFYPSKFVLITDILDTFGKLVYERIFSMCVDSRSVLPDHFSPENANDTAKETCLNWFFKIASIRELIPRFYVEASILKCNKFLSKTGISECLPRLTCMIRGIGDPLVSVYARAYLCRVGMEVAPHLKETLNKNFFDFLLTFKQIHGDTVQNQLVVQGVELPSYLPLYPPAMDWIFQCISYHAPEVTARWLQCDAHLLYGDSPCPLCPLTLMGPFHNSYSNVSASQPL

SEQ ID NO: 16017 - protein, 95 aa, Homo sapiens
  Payload ID: 3177
  Gene Symbol: C16orf62
  Gene Name: chromosome 16 open reading frame 62
  ENSP ID: ENSP00000459108
MIRGIGDPLVSVYARAYLCRVGMEVAPHLKETLNKNFFDFLLTFKQIHGDTVQNQLVVQGVELPSYLPLYPPAMDWIFQCISYHAPEALLTEMME

SEQ ID NO: 16018 - protein, 422 aa, Homo sapiens
  Payload ID: 3178
  Gene Symbol: C16orf70
  Gene Name: chromosome 16 open reading frame 70
  Uniprot ID: Q9BSU1
  ENSP ID: ENSP00000219139
MLDLEVVPERSLGNEQWEFTLGMPLAQAVAILQKHCRIIKNVQVLYSEQSPLSHDLILNLTQDGIKLMFDAFNQRLKVIEVCDLTKVKLKYCGVHFNSQAIAPTIEQIDQSFGATHPGVYNSAEQLFHLNFRGLSFSFQLDSWTEAPKYEPNFAHGLASLQIPHGATVKRMYIYSGNSLQDTKAPMMPLSCFLGNVYAESVDVLRDGTGPAGLRLRLLAAGCGPGLLADAKMRVFERSVYFGDSCQDVLSMLGSPHKVFYKSEDKMKIHSPSPHKQVPSKCNDYFFNYFTLGVDILFDANTHKVKKFVLHTNYPGHYNFNIYHRCEFKIPLAIKKENADGQTETCTTYSKWDNIQELLGHPVEKPVVLHRSSSPNNTNPFGSTFCFGLQRMIFEVMQNNHIASVTLYGPPRPGSHLRTAELP

SEQ ID NO: 16019 - protein, 422 aa, Homo sapiens; identical to SEQ ID NO: 16018
  Payload ID: 3178
  Gene Symbol: C16orf70
  Gene Name: chromosome 16 open reading frame 70
  Uniprot ID: Q9BSU1
  ENSP ID: ENSP00000455182

SEQ ID NO: 16020 - protein, 165 aa, Homo sapiens
  Payload ID: 3178
  Gene Symbol: C16orf70
  Gene Name: chromosome 16 open reading frame 70
  ENSP ID: ENSP00000456154
MLDLEVVPERSLGNEQWEFTLGMPLAQAVAILQKHCRIIKNVQVLYSEQVIEVCDLTKVKLKYCGVHFNSQAIAPTIEQIDQSFGATHPGVYNSAEQLFHLNFRGLSFSFQLDSWTEAPKYEPNFAHGLASLQIPHGATVKRMYIYSGNSLQDTKAPMMPLSCFL

SEQ ID NO: 16021 - protein, 222 aa, Homo sapiens
  Payload ID: 3178
  Gene Symbol: C16orf70
  Gene Name: chromosome 16 open reading frame 70
  ENSP ID: ENSP00000456549
MLDLEVVPERSLGNEQWEFTLGMPLAQAVAILQKHCRIIKNVQVLYSEQVIEVCDLTKVKLKYCGVHFNSQAIAPTIEQIDQSFGATHPGVYNSAEQLFHLNFRGLSFSFQLDSWTEAPKYEPNFAHGLASLQIPHGATVKRMYIYSGNSLQDTKAPMMPLSCFLGNVYAESVDVLRDGTGPAGLRLRLLAAGCGPGLLADAKMRVFERSVYFGDSCQDVLS

SEQ ID NO: 16022 - protein, 320 aa, Homo sapiens
  Payload ID: 3178
  Gene Symbol: C16orf70
  Gene Name: chromosome 16 open reading frame 70
  ENSP ID: ENSP00000456688
MLDLEVVPERSLGNEQWEFTLGMPLAQAVAILQKHCRIIKNVQVLYSEQSPLSHDLILNLTQDGIKLMFDAFNQRLKVIEVCDLTKVKLKYCGVHFNSQAIAPTIEQIDQSFGATHPGVYNSAEQLFHLNFRGLSFSFQLDSWTEAPKYEPNFAHGLASLQIPHGATVKRMYIYSGNSLQDTKAPMMPLSCFLGNVYAESVDVLRDGTGPAGLRLRLLAAGCGPGLLADAKMRVFERSVYFGDSCQDVLSMLGSPHKVFYKSEDKMKIHSPSPHKQVPSKCNDYFFNYFTLGVDILFDANTHKVKKFVLHTNYPGHYNFN

SEQ ID NO: 16023 - protein, 98 aa, Homo sapiens
  Payload ID: 3178
  Gene Symbol: C16orf70
  Gene Name: chromosome 16 open reading frame 70
  ENSP ID: ENSP00000464242
  MOD_RES (1)..(1): Any amino acid
XSPNNTNPFGSTFCFGLQRMIFEVMQNNHIASVTLYGPPRYSSVHLWPAGASRGHRLQREAQSLSLDSWTQELSTNKEAGEVNPCPMHIGKTWGSFCD

SEQ ID NO: 16024 - protein, 520 aa, Homo sapiens
  Payload ID: 3179
  Gene Symbol: C16orf71
  Gene Name: chromosome 16 open reading frame 71
  Uniprot ID: Q8IYS4
  ENSP ID: ENSP00000299320
MASNDKGMAPSLGSPWASQMGPWDAILKAVKDQLPSLDSDSPLSDYGEEELFIFQRNQTSLIPDLSEELAEDPADGDKSRAWVAAAEESLPEPVLVPAELATEPGCRQNTRTKDASSQEGRDPGRPFESSGEVSALLGMAEEPPRWLEGDLGSLSFNTKGSQGPPWDPQAEATLSCHEGDPKAEPLSTASQESVNRRALRQERRKMIETDILQKVTRDACGPTSSDKGGVKEAPCHAAESAPRSKMPLVEPPEGPPVLSLQQLEAWDLDDILQSLAGQEDNQGNRAPGTVWWAADHRQVQDRMVPSAHNRLMEQLALLCTTQSKASACARKVPADTPQDTKEADSGSRCASRKQGSQAGPGPQLAQGMRLNAESPTIFIDLRQMELPDHLSPESSSHSSSDSEEEEEEEMAALGDAEGASPSSLGLRTCTGKSQLLQQLRAFQKGTAQPELPASKGPAGGRAQAPEDTAGSRTGRKQHMKLCAKGQSAQARLPRGRPRALGDVPEPGAAREALMPPLEQL

SEQ ID NO: 16025 - protein, 156 aa, Homo sapiens
  Payload ID: 3179
  Gene Symbol: C16orf71
  Gene Name: chromosome 16 open reading frame 71
  ENSP ID: ENSP00000467133
MASNDKGMAPSLGSPWASQMGPWDAILKAVKDQLPSLDSDSPLSDYGEEELFIFQRNQTSLIPDLSEELAEDPADGDKSRAWVAAAEESLPEPVLVPAELATEPGCRQNTRTKDASSQEGRDPGRPFESSGEVSALLGMAEEPPRWLEGDLGSLSF

SEQ ID NO: 16026 - protein, 537 aa, Homo sapiens
  Payload ID: 3179
  Gene Symbol: C16orf71
  Gene Name: chromosome 16 open reading frame 71
  ENSP ID: ENSP00000467565
MASNDKGMAPSLGSPWASQMGPWDAILKAVKDQLPSLDSDSPLSDYGEEELFIFQRNQTSLIPDLSEELAEDPADGDKSRAWVAAAEESLPEVCGTQKSIRLCVCDPVLVPAELATEPGCRQNTRTKDASSQEGRDPGRPFESSGEVSALLGMAEEPPRWLEGDLGSLSFNTKGSQGPPWDPQAEATLSCHEGDPKAEPLSTASQESVNRRALRQERRKMIETDILQKVTRDACGPTSSDKGGVKEAPCHAAESAPRSKMPLVEPPEGPPVLSLQQLEAWDLDDILQSLAGQEDNQGNRAPGTVWWAADHRQVQDRMVPSAHNRLMEQLALLCTTQSKASACARKVPADTPQDTKEADSGSRCASRKQGSQAGPGPQLAQGMRLNAESPTIFIDLRQMELPDHLSPERSGGSSHSSSDSEEEEEEEMAALGDAEGASPSSLGLRTCTGKSQLLQQLRAFQKGTAQPELPASKGPAGGRAQAPEDTAGSRTGRKQHMKLCAKGQSAQARLPRGRPRALGDVPEPGAAREALMPPLEQL

SEQ ID NO: 16027 - protein, 136 aa, Homo sapiens
  Payload ID: 3179
  Gene Symbol: C16orf71
  Gene Name: chromosome 16 open reading frame 71
  ENSP ID: ENSP00000477582
DILQKVTRDACGPTSSDKGGVKEAPCHAAESAPRSKMPLVEPPEGPPVLSLQQLEAWDLDDILQSLAGQEDNQGNRAPGTVWWAADHRQVQGLTLNTGAHVNPHKQHLPGPLRHRGLQAGHRQSCSPHKSSLLAPP

SEQ ID NO: 16028 - protein, 275 aa, Homo sapiens
  Payload ID: 3180
  Gene Symbol: C16orf72
  Gene Name: chromosome 16 open reading frame 72
  Uniprot ID: Q14CZ0
  ENSP ID: ENSP00000331720
MEERKEEGEAEIQEHGPEHWFSKWERQCLAEAEQDEQLPPELQEEAAAAAQPEHKQQKLWHLFQNSATAVAQLYKDRVCQQPGLSLWVPFQNAATAVTNLYKESVDTHQRSFDIGIQIGYQRRNKDVLAWVKKRRRTIRREDLISFLCGKVPPPRNSRAPPRLTVVSPNRATSTETSSSVETDLQPFREAIALHGLSGAMASISVRSSTPGSPTHVSSGSNASRRRNGLHDVDLNTFISEEMALHLDNGGTRKRTSAQCGDVITDSPTHKRNRMI

SEQ ID NO: 16029 - protein, 150 aa, Homo sapiens
  Payload ID: 3180
  Gene Symbol: C16orf72
  Gene Name: chromosome 16 open reading frame 72
  ENSP ID: ENSP00000484249
  MOD_RES (1)..(1): Any amino acid
XAQPEHKQQKLWHLFQNSATAVAQLYKDRVCQQPGLSLWVPFQNAATAVTNLYKESVDTHQRSFDIGIQIGYQRRNKDVLAWVKKRRRTIRREDLISFLCGKVPPPRNSRAPPRLTVVSPNRATSTETSSSVETDLQPFREAIALHGKAV

SEQ ID NO: 16030 - protein, 76 aa, Homo sapiens
  Payload ID: 3181
  Gene Symbol: C16orf74
  Gene Name: chromosome 16 open reading frame 74
  Uniprot ID: Q96GX8
  ENSP ID: ENSP00000284245
MGLKMSCLKGFQMCVSSSSSSHDEAPVLNDKHLDVPDIIITPPTPTGMMLPRDLGSTVWLDETGSCPDDGEIDPEA

SEQ ID NO: 16031 - protein, 29 aa, Homo sapiens
  Payload ID: 3181
  Gene Symbol: C16orf74
  Gene Name: chromosome 16 open reading frame 74
  ENSP ID: ENSP00000473306
MMLPRDLGSTVWLDETGSCPDDGEIDPEA

SEQ ID NO: 16032 - protein, 29 aa, Homo sapiens
  Payload ID: 3181
  Gene Symbol: C16orf74
  Gene Name: chromosome 16 open reading frame 74
  ENSP ID: ENSP00000473366
MMLPRDLGSTVWLDETGSCPDDGEIDPEA

SEQ ID NO: 16033 - protein, 76 aa, Homo sapiens
  Payload ID: 3181
  Gene Symbol: C16orf74
  Gene Name: chromosome 16 open reading frame 74
  ENSP ID: ENSP00000473398
MGLKMSCLKGFQMCVSSSSSSHDEAPVLNDKHLDVPDIIITPPTPTGMMLPRDLGSTGWTNQDANPRQLWNTNICQ

SEQ ID NO: 16034 - protein, 64 aa, Homo sapiens
  Payload ID: 3181
  Gene Symbol: C16orf74
  Gene Name: chromosome 16 open reading frame 74
  ENSP ID: ENSP00000473536
MCVSSSSSSHDEAPVLNDKHLDVPDIIITPPTPTGMMLPRDLGSTVWLDETGSCPDDGEIDPEA

SEQ ID NO: 16035 - protein, 28 aa, Homo sapiens
  Payload ID: 3181
  Gene Symbol: C16orf74
  Gene Name: chromosome 16 open reading frame 74
  ENSP ID: ENSP00000473676
MGLKMSCLKVWLDETGSCPDDGEIDPEA

SEQ ID NO: 16036 - protein, 265 aa, Homo sapiens
  Payload ID: 3182
  Gene Symbol: C16orf78
  Gene Name: chromosome 16 open reading frame 78
  Uniprot ID: Q8WTQ4
  ENSP ID: ENSP00000299191
MSEQQMDLKDLMPTKRKYMWKTAEDRRMSDLTCVLEWLERRQGKKKQAPEKQKPKVVTVLKRNKKKEEKKGKGLMTARGGNRRDTETSQQALGKRFRKDAASYRSLYGVEQKGKHLSMVPGSYIKDGPKKSDTDIKDAVDPESTQRPNPFRRQSIVLDPMLQEGTFNSQRATFIRDWSNKMPDMAYERKLKSLMEKSTEPKMETMRMLKPEEVLSCRYLRLSKENIRTLLKLCKDAGMNVDIHPHMVEEDIDAKKVFTGIPSMAL

SEQ ID NO: 16037 - protein, 317 aa, Homo sapiens
  Payload ID: 3183
  Gene Symbol: C16orf86
  Gene Name: chromosome 16 open reading frame 86
  Uniprot ID: Q6ZW13
  ENSP ID: ENSP00000384117
MASAGAERRPGVQEATVVGQGQLTEEPGSAQTSECPVAGDQFLVPAHEARGTQSEDQRPAGAASESELQEEGPKLGEERPKPHAGALEERGPRPVVSIVRPRHGPKRKPVKSLSLPGLRAHLKAEAELPPKLPLQEEEPEDSQSEPSPSAKQHKKAKKRKSLGAPVLHAVASMVSAPLETLRLERKAQRLRPLYQYVNYCNPELNQAGKGDGEAEVEAEAELAPVPEEGGVEQLQALLPLAGELGPGLALPCPSPLVTPTHALAPLGEEAGEEPGGLPSLGVSDHKAEVDKSTQVDIDKMLSVCTAPLVPPLSPQYK

SEQ ID NO: 16038 - protein, 56 aa, Homo sapiens
  Payload ID: 3183
  Gene Symbol: C16orf86
  Gene Name: chromosome 16 open reading frame 86
  ENSP ID: ENSP00000400874
MASAGAERRPGVQEATVVGQGQLTEEPGSAQTSEVFSDGSLCPLPGHGDRWPVCHL

SEQ ID NO: 16039 - protein, 198 aa, Homo sapiens
  Payload ID: 3183
  Gene Symbol: C16orf86
  Gene Name: chromosome 16 open reading frame 86
  ENSP ID: ENSP00000473620
MASAGAERRPGVQEATVVGQGQLTEEPGSAQTSECPVAGDQFLVPAHEARGTQSEDQRPAGAASESELQEEGPKLGEERPKPHAGALEERGPRPVVSIVRPRHGPKRKPVKSLSLPGLRAHLKAEAELPPKLPLQEEEPEDSQSEPSPSAKQHKKAKKRKSLGAPVLHAVASMVSAPLETLRLEPSALPWVFAGKAQR

SEQ ID NO: 16040 - protein, 170 aa, Homo sapiens
  Payload ID: 3183
  Gene Symbol: C16orf86
  Gene Name: chromosome 16 open reading frame 86
  ENSP ID: ENSP00000484244
GDQFLVPAHEARGTQSEDQRPAGAASESELQEEGPKLGEERPKPHAGALEERGPRPVVSIVRPRHGPKRKPVKSLSLPGLRAHLKAEAELPPKLPLQEEEPEDSQSEPSPSAKQHKKAKKRKSLGAPVLHAVASMVSAPLETLRLEREWQSLDCSFSPCLWGPTWHNLAL

SEQ ID NO: 16041 - protein, 154 aa, Homo sapiens
  Payload ID: 3184
  Gene Symbol: C16orf87
  Gene Name: chromosome 16 open reading frame 87
  Uniprot ID: Q6PH81
  ENSP ID: ENSP00000285697
MSATRAKKVKMATKSCPECDQQVPVACKSCPCGYIFISRKLLNAKHSEKSPPSTENKHEAKRRRTERVRREKINSTVNKDLENRKRSRSNSHSDHIRRGRGRPKSASAKKHEEEREKQEKEIDIYANLSDEKAFVFSVALAEINRKIINQRLIL

SEQ ID NO: 16042 - protein, 93 aa, Homo sapiens
  Payload ID: 3184
  Gene Symbol: C16orf87
  Gene Name: chromosome 16 open reading frame 87
  Uniprot ID: Q6PH81
  ENSP ID: ENSP00000378285
MSATRAKKVKMATKSCPECDQQVPVACKSCPCGYIFISRKLLNAKHSEKSPPSTEKQEKEIDIYANLSDEKAFVFSVALAEINRKIINQRLIL

SEQ ID NO: 16043 - protein, 161 aa, Homo sapiens
  Payload ID: 3184
  Gene Symbol: C16orf87
  Gene Name: chromosome 16 open reading frame 87
  ENSP ID: ENSP00000455829
  MOD_RES (1)..(1): Any amino acid
XGARAGGSGLAAVVCGGGPRRAPGGRAVPVACKSCPCGYIFISRKLLNAKHSEKSPPSTENKHEAKRRRTERVRREKINSTVNKDLENRKRSRSNSHSDHIRRGRGRPKSASAKKHEEERGCRKPMPRTPILEGKLGKEKSAEKKEKREILPGSENNILFS

SEQ ID NO: 16044 - protein, 402 aa, Homo sapiens
  Payload ID: 3185
  Gene Symbol: C16orf89
  Gene Name: chromosome 16 open reading frame 89
  Uniprot ID: Q6UX73
  ENSP ID: ENSP00000324672
MASLGLLLLLLLTALPPLWSSSLPGLDTAESKATIADLILSALERATVFLEQRLPEINLDGMVGVRVLEEQLKSVREKWAQEPLLQPLSLRVGMLGEKLEAAIQRSLHYLKLSDPKYLREFQLTLQPGFWKLPHAWIHTDASLVYPTFGPQDSFSEERSDVCLVQLLGTGTDSSEPCGLSDLCRSLMTKPGCSGYCLSHQLLFFLWARMRGCTQGPLQQSQDYINLFCANMMDLNRRAEAIGYAYPTRDIFMENIMFCGMGGFSDFYKLRWLEAILSWQKQQEGCFGEPDAEDEELSKAIQYQQHFSRRVKRREKQFPDSRSVAQAGVQWRNLGSLQPLPPGFKQFSCLILPSSWDYRSVPPYLANFYIFLVETGFHHVAHAGLELLISRDPPTSGSQSVGL

SEQ ID NO: 16045 - protein, 434 aa, Homo sapiens
  Payload ID: 3185
  Gene Symbol: C16orf89
  Gene Name: chromosome 16 open reading frame 89
  ENSP ID: ENSP00000417158
MASLGLLLLLLLTALPPLWSSSLPGLDTAESKATIADLILSALERATVFLEQRLPEINLDGMVGVRVLEEQLKSVREKWAQEPLLQPLSLRVGMLGEKLEAAIQRSLHYLKLSDPKYLREFQLTLQPGFWKLPHAWIHTDASLVYPTFGPQDSFSEERSDVCLVQLLGTGTDSSEPCGLSDLCRSLMTKPGCSGYCLSHQLLFFLWARMRGCTQGPLQQSQDYINLFCANMMDLNRRAEAIGYAYPTRDIFMENNVTGHPVFYLPLCDSFLPPKAAPVTELYTDGPVMFCGMGGFSDFYKLRWLEAILSWQKQQEGCFGEPDAEDEELSKAIQYQQHFSRRVKRREKQFPDSRSVAQAGVQWRNLGSLQPLPPGFKQFSCLILPSSWDYRSVPPYLANFYIFLVETGFHHVAHAGLELLISRDPPTSGSQSVGL

SEQ ID NO: 16046 - protein, 361 aa, Homo sapiens
  Payload ID: 3185
  Gene Symbol: C16orf89
  Gene Name: chromosome 16 open reading frame 89
  Uniprot ID: Q6UX73
  ENSP ID: ENSP00000420566
MASLGLLLLLLLTALPPLWSSSLPGLDTAESKATIADLILSALERATVFLEQRLPEINLDGMVGVRVLEEQLKSVREKWAQEPLLQPLSLRVGMLGEKLEAAIQRSLHYLKLSDPKYLREFQLTLQPGFWKLPHAWIHTDASLVYPTFGPQDSFSEERSDVCLVQLLGTGTDSSEPCGLSDLCRSLMTKPGCSGYCLSHQLLFFLWARMRGCTQGPLQQSQDYINLFCANMMDLNRRAEAIGYAYPTRDIFMENIMFCGMGGFSDFYKLRWLEAILSWQKQQEGCFGEPDAEDEELSKAIQYQQHFSRRVKRREKQFPDGCSSHNTATAVAALGGFLYILAEYPPANREPHPSTPPPPSSR

SEQ ID NO: 16047 - protein, 191 aa, Homo sapiens
  Payload ID: 3186
  Gene Symbol: C16orf90
  Gene Name: chromosome 16 open reading frame 90
  ENSP ID: ENSP00000382553
  MOD_RES (1)..(1): Any amino acid
XEQGPAAPKSWLLLPTTLALHGSLDAVSQAQGRPGHPDAPPNIYEGGLGSPQPQCPSAQGSKPKNFRLRHLRGLGLYLESHPPPTGQCESHWLGRLMAGGCLPQPEGTAWALDLPQGTLGPRNSLCSALLEARLPRDSLGSSASSSSMDPDKGALPQPSPSRLRPKRSWGTWEEAMCPLCKRTRSGALERP

SEQ ID NO: 16048 - protein, 182 aa, Homo sapiens
  Payload ID: 3186
  Gene Symbol: C16orf90
  Gene Name: chromosome 16 open reading frame 90
  Uniprot ID: A8MZG2
  ENSP ID: ENSP00000401335
MEALVCAFSELHIREDAVSQAQGRPGHPDAPPNIYEGGLGSPQPQCPSAQGSKPKNFRLRHLRGLGLYLESHPPPTGQCESHWLGRLMAGGCLPQPEGTAWALDLPQGTLGPRNSLCSALLEARLPRDSLGSSASSSSMDPDKGALPQPSPSRLRPKRSWGTWEEAMCPLCKRTRSGALERP

SEQ ID NO: 16049 - protein, 132 aa, Homo sapiens
  Payload ID: 3187
  Gene Symbol: C16orf91
  Gene Name: chromosome 16 open reading frame 91
  Uniprot ID: Q4G0I0
  ENSP ID: ENSP00000413100
MNRVLCAPAAGAVRALRLIGWASRSLHPLPGSRDRAHPAAEEEDDPDRPIEFSSSKANPHRWSVGHTMGKGHQRPWWKVLPLSCFLVALIIWCYLREESEADQWLRQVWGEVPEPSDRSEEPETPAAYRART

SEQ ID NO: 16050 - protein, 65 aa, Homo sapiens
  Payload ID: 3187
  Gene Symbol: C16orf91
  Gene Name: chromosome 16 open reading frame 91
  ENSP ID: ENSP00000455147
MGKGHQRPWWKVLPLSCFLVALIIWCYLREESEADQWLRQVWGEVPEPSDRSEEPETPAAYRART

SEQ ID NO: 16051 - protein, 132 aa, Homo sapiens
  Payload ID: 3188
  Gene Symbol: C16orf92
  Gene Name: chromosome 16 open reading frame 92
  Uniprot ID: Q96LL3
  ENSP ID: ENSP00000300575
MGAGVGVAGCTRGHRNWVPSQLPPREIKAGVSLAVVTEFAWVLAPRPKRATASALGTESPRFLDRPDFFDYPDSDQARLLAVAQFIGEKPIVFINSGSSPGLFHHILVGLLVVAFFFLLFQFCTHINFQKGA

SEQ ID NO: 16052 - protein, 114 aa, Homo sapiens
  Payload ID: 3188
  Gene Symbol: C16orf92
  Gene Name: chromosome 16 open reading frame 92
  ENSP ID: ENSP00000454560
APRPKRATASALGTESPRFLDRPDFFDYPDSDQARLLAVAQFIGEKPIVFINSGSSPGLFHHILVGLLVVAFFFLLFQFCTHIIVGGKEKTRRCPQTKRHRYSAKISPGQAAKR

SEQ ID NO: 16053 - protein, 39 aa, Homo sapiens
  Payload ID: 3188
  Gene Symbol: C16orf92
  Gene Name: chromosome 16 open reading frame 92
  ENSP ID: ENSP00000456798
MGAGVGVAGCTRGHRNCTQTQACHGVSPGDRVSALLRQT

SEQ ID NO: 16054 - protein, 49 aa, Homo sapiens
  Payload ID: 3188
  Gene Symbol: C16orf92
  Gene Name: chromosome 16 open reading frame 92
  ENSP ID: ENSP00000458048
SALGTESPRFLDRPDFFDYPDSDQARLLAVAQFIGEKPIVFINSGTAKR

SEQ ID NO: 16055 - protein, 158 aa, Homo sapiens
  Payload ID: 3189
  Gene Symbol: C16orf95
  Gene Name: chromosome 16 open reading frame 95
  Uniprot ID: Q9H693
  ENSP ID: ENSP00000253461
MRASRSPPSPRRCHHHHEATGAASGAAAGGPGAGCVGLCRLALTPSAQDGRNSTFQTYKKEVCLPRHSMHPGPWAICCECQTRFGGRLPVSRVEAALPYWVPLSLRPRKQHPCWMHAAGTTAGGSAVMSACCPSSSSSRPPTRTSYRLLQRVCCPSAS

SEQ ID NO: 16056 - protein, 239 aa, Homo sapiens
  Payload ID: 3189
  Gene Symbol: C16orf95
  Gene Name: chromosome 16 open reading frame 95
  ENSP ID: ENSP00000455079
MRASRSPPSPRRCHHHHEATGAASGAAAGGPGAGCVGLCRLALTPSAQDGRNSTFQTYKKEVCLPRHSMHPGPWAICCECQTRFGGRLPVSRVEAALPYWVPLSLRPRKQSQKTVQFPIPQTAKMCPCLCHRFGGRLPMPRDQAVMPYWVPQVLRSQQQIVRRQQSLKGIQAPLLDACCWHNCWRICGDECLLSKFQQLQAPYQDQLPAPAARLLPLGLLTLLQAIPRVIMAIRQCFGV

SEQ ID NO: 16057 - protein, 143 aa, Homo sapiens
  Payload ID: 3189
  Gene Symbol: C16orf95
  Gene Name: chromosome 16 open reading frame 95
  ENSP ID: ENSP00000484646
MRPLEQPQALLPGGRARGASGSAGWHSHPARRMAGKNSTFQTYKKEVCLPRHSMHPGPWAICCECQTRFGGRLPVSRVEAALPYWVPLSLRPRKQHPCWMHAAGTTAGGSAVMSACCPSSSSSRPPTRTSYRLLQRVCCPSAS

SEQ ID NO: 16058 - protein, 1141 aa, Homo sapiens
  Payload ID: 3190
  Gene Symbol: C16orf96
  Gene Name: chromosome 16 open reading frame 96
  Uniprot ID: A6NNT2
  ENSP ID: ENSP00000415027
MSFSLTFTELANIAIPQCGVLNFKALHLLLHGILEHIHMAELKKVLSGDEDFLQTSQVVIMPREGDAQPILNPMKRLSNVFDHVVSRLDKLENQLALLQDLPSTAQLLEASQGTARPVQDLWHLIKLRKMVEGHDEVMAKSMQTLQDLLTDLHALQVTITALRKEVDMLKNMLDKVHPERMDIFAEDFKIQNWKMVALQREVASLQNKFKTIPKTEDMVLWSGLHDAMFTSEIGSSPLDLWQSVEQLPEAALAQTTKYLEATRAIQVSEPVQNPQLLQTVWHYEVPELLPEGSSAQAVSLSRAQEPAQPPALTPESAPGCTTEFAPGPAPGTEPVPGLELGLELEPVPALGPVPGPSVTPGSLPAPWPVLGPVPAPGAQPPPLGDWPALPRRWPLPQGWPRVGSWPLWDLGVLRPTQPQPSRAPPPATEFGSLWPRPLQPYQSRQGEALQLAAVQVKGEENDVPSLRGLRERARKDGAPKDRTRKDGVPKDRGGKDVDPKDRAHKDDVPKDRGGKDVDPKDRAHKDDVPKDRGGKDGDPKDRVGKDGAPKEAQPKAPQSALHRLKTTAAIAAAAAAAYAAATSSAAQAAKVAAKFVKDAPATKMAAIATDTAAAGPLGVFADVLGAGPSRGATESQILGDDSEIYEILSPSYSAASIGPDPALSQAMVATKQAMSPEDKKRAVKYSMSHIAQIPVKHDSLKEEFAQLSCNLNQRLSYLANMGGPSSLGTTVDILQKKIGSLQKSRLKEEELERIWGNQIEMMKDRYITLDKAVENLQIRMDEFKTLQAQIKRLEMNKVNKSTMEEELREKADRSALAGKASRVDLETVALELNEMIQGILFKVTIHEDSWKKAMEELSKDVNTKLVHSDLDPLKKEMEEVWKIVRKLLIEGLRLDPDSAAGFRRKLFKRVKCISCDRPVEMMTGPQLITIRKAHLLSRLRPASANSCEYLQRQQMREQQWLQLQDLGIQEDCQQDWGDGPQNATSLKCKSCNLLTLYPYGDPHVIDYDSAEVDILGVDGILYKGRVNSQRGAQPLAVAKELAAVKAPSPPSQSLYDRVHSSALFGAICPPLCPRSSACSAASGPHLTMPARPPSLPPLLLLPPLIPSLRDPQQAPGSTRLSRAPHIESRVGRKPPEEPANP

SEQ ID NO: 16059 - protein, 118 aa, Homo sapiens
  Payload ID: 3191
  Gene Symbol: C17orf100
  Gene Name: chromosome 17 open reading frame 100
  ENSP ID: ENSP00000485561
MASARGAKQSSPRVGTTRYTETSTVRVETSSHRVETSSRRVETSQRRSEGPSLSPSGKRLPRILEASSRHVESSSQRTETTSRHVRASSLRVETSLHCAESPTPRAKPAARQNEKTAR

SEQ ID NO: 16060 - protein, 952 aa, Homo sapiens
  Payload ID: 3192
  Gene Symbol: C17orf104
  Gene Name: chromosome 17 open reading frame 104
  Uniprot ID: A2RUB1
  ENSP ID: ENSP00000386452
MEVRRGDTCPRPHPSGLREEGLEPKVAFPGGANRCWNLGADAGSRLTDVFGSVMLTGSASFYDCYTSQSEDNVDLRQTYTPFSSTEYSSSVDSSLFCAPWSTYGDDIKQPSNSQISIKNRIQTERNDYGSETDLYGLVSNILEEQDKSQPYFAEGTCSSNLKSVWPMNTSRFADHHDLLTETKRPIDTVISQQAFYSDESVSAMEKQYLRNSNLTPQQKIDELHHGFTGLDLEEQWMYPSRSDHSNCHNIQTNDTAKTTFQEYPLIKNCFTPQTGLSDIMKESGVDIYHYGRDRICTKGLEAPLQQKRAEMFLSQFNRYNENVDYCRYPEYVHPNKAKLNKCSNFSVQDSKKLANGTPETPTVEADTYTKLFQVKPANQKKMEETIPDQQNFTFPKTTPHLTEKQFAKEAVFTADFGLTSEYGLKPHTACPANDFANVTEKQQFAKPDPPHSEYFKSVNLLSNSATSSGGINLNRPTWMNVQTKNNTPIPYRNQGNLMKLNSHLSAASKGSNHSSDFPQLSSTNLTPNSNLFQKYCQENPSAFSSFDFSYSGAERIQSVNHIEGLTKPGEENLFKLVTDKKIKQPNGFCDNYSAQKYGIIENVNKHNFQAKPQSGHYDPEEGPKHLDGLSQNTYQDLLESQGHSNSHRTRGGDNSRVNRTQVSCFSNNYMMGDLRHNQCFQQLGSNGFPLRSTHPFGHSVVPLLDSYDLLSYDDLSHLYPYFNMMYGDNSFSGLMPTFGFQRPIKTRSGPASELHIRLEECCEQWRALEKERKKTELALAKNYPGKKVSSTNNTPVPRLTSNPSRVDRLIVDELRELARVVTLLGKMERLRSSLLHASISTALDRHLESIHIVQSRRKDEIVNASNRQRQGVPRCQDDRDVFALASAIKEMCVATRKTRTALWCALQMTLPKTASTADVVKPLQDTVNCEDKVHESINSSNPMNQRGETNKH

SEQ ID NO: 16061 - protein, 659 aa, Homo sapiens
  Payload ID: 3192
  Gene Symbol: C17orf104
  Gene Name: chromosome 17 open reading frame 104
  Uniprot ID: A2RUB1
  ENSP ID: ENSP00000386586
MNTSRFADHHDLLTETKRPIDTVISQQAFYSDESVSAMEKQYLRNSNLTPQQKIDELHHGFTGLDLEEQWMYPSRSDHSNCHNIQTNDTAKTTFQEYPLIKNCFTPQTGLSDIMKESGVDIYHYGRDRICTKGLEAPLQQKRAEMFLSQFNRYNENVDYCRYPEYVHPNKAKLNKCSNFSVQDSKKLANGTPETPTVEADTYTKLFQVKPANQKKMEETIPDQQNFTFPKTTPHLTEKQFAKEAVFTADFGLTSEYGLKPHTACPANDFANVTEKQQFAKPDPPHSEYFKSVNLLSNSATSSGGINLNRPTWMNVQTKNNTPIPYRNQGNLMKLNSHLSAASKGSNHSSDFPQLSSTNLTPNSNLFQKYCQENPSAFSSFDFSYSGAERIQSVNHIEGLTKPGEENLFKLVTDKKIKQPNGFCDNYSAQKYGIIENVNKHNFQAKPQSGHYDPEEGPKHLDGLSQNTYQDLLESQGHSNSHRTRGGDNSRVNRTQVSCFSNNYMMGDLRHNQCFQQLGSNGFPLRSTHPFGHSVVPLLDSYDLLSYDDLSHLYPYFNMMYGDNSFSGLMPTFGFQRPIKTRSGPASELHIRLEECCEQWRALEKERKKTELALAKNYPGKKVSSTNNTPVPRLTSNPSRVDRLIVDELRELARVSCKNR

SEQ ID NO: 16062 - protein, 129 aa, Homo sapiens
  Payload ID: 3192
  Gene Symbol: C17orf104
  Gene Name: chromosome 17 open reading frame 104
  ENSP ID: ENSP00000397957
MNTSRFADHHDLLTETKRPIDTVISQQAFYSDESVSAMEKQYLRNSNLTPQQKIDELHHGFTGLDLEEQWMYPSRSDHSNCHNIQTNDTAKTTFQEYPLIKNCFTPQTGLSDIMKESGVDIYHYGRDRI

SEQ ID NO: 16063 - protein, 163 aa, Homo sapiens
  Payload ID: 3192
  Gene Symbol: C17orf104
  Gene Name: chromosome 17 open reading frame 104
  ENSP ID: ENSP00000399809
MNTSRFADHHDLLTETKRPIDTVISQQAFYSDESVSAMEKQYLRNSNLTPQQKIDELHHGFTGLDLEEQWMYPSRSDHSNCHNIQTNDTAKTTFQEYPLIKNCFTPQTGLSDIMKESGVDIYHYGRDRICTKGLEAPLQQKRAEMFLSQFNRYNENVDYCRYP

SEQ ID NO: 16064 - protein, 71 aa, Homo sapiens
  Payload ID: 3192
  Gene Symbol: C17orf104
  Gene Name: chromosome 17 open reading frame 104
  ENSP ID: ENSP00000404941
MEPKVAFPGGANRCWNLGADAGSRLTDVFGSVMLTGSASFYDCYTSQSEDNVDLRQTYTPFSSTEYSSSVD

SEQ ID NO: 16065 - protein, 150 aa, Homo sapiens
  Payload ID: 3192
  Gene Symbol: C17orf104
  Gene Name: chromosome 17 open reading frame 104
  ENSP ID: ENSP00000467305
ERKKTELALAKNYPGKKVSSTNNTPVPRLTSNPSRVDRLIVDELRELARVVTLLGKMERLRSSLLHASISTALDRHLESIHIVQSRRKDEIVNASNRQRQGVPRCQDDRDVFALASAIKEMCVATRKTRTALWCALQMTLPKTASTADVH

SEQ ID NO: 16066 - protein, 164 aa, Homo sapiens
  Payload ID: 3193
  Gene Symbol: C17orf105
  Gene Name: chromosome 17 open reading frame 105
  Uniprot ID: B2RV13
  ENSP ID: ENSP00000415662
MNNSLDYLAYPVIVSNHRQSTTFRKKLDFGHYVSHKNRIQIAKPTVDTKPPVAHTNHILKLSKLQGEQKKINKIEYENKQLCQKIANAHRGPAKVDCWNEYFSKSLNRETRNRELVRITMENQGILKRLVDRKPHYDRRASEIDWQNSRRYIRNTTRYLLSQNE

SEQ ID NO: 16067 - protein, 58 aa, Homo sapiens
  Payload ID: 3193
  Gene Symbol: C17orf105
  Gene Name: chromosome 17 open reading frame 105
  ENSP ID: ENSP00000468141
  MOD_RES (1)..(1): Any amino acid
XRETRNRELVRITMENQGILKRLVDRKPHYDRRASEIDWQNSRRYIRNTTRYLLSQNE

SEQ ID NO: 16068 - protein, 190 aa, Homo sapiens
  Payload ID: 3194
  Gene Symbol: C17orf107
  Gene Name: chromosome 17 open reading frame 107
  Uniprot ID: Q6ZR85
  ENSP ID: ENSP00000370770
MKGTPSSLDTLMWIYHFHSSTEVALQPPLLSSLELSVAAAHEYLEQRFRELKSLEPPEPKMQGMLPAPKPTLGLVLREATASLVSFGTTLLEISALWLQQEARRLDGSAGPAPDGRDPGAALSRVAQAAGQGVRQAGAAVGASARLLVQGAWLCLCGRGLQGSASFLRQSQQQLGLGIPGEPVSSGHGVS

SEQ ID NO: 16069 - protein, 98 aa, Homo sapiens
  Payload ID: 3194
  Gene Symbol: C17orf107
  Gene Name: chromosome 17 open reading frame 107
  ENSP ID: ENSP00000429241
MKGTPSSLDTLMWIYHFHSSTEVALQPPLLSSLELSVAAAHEYLEQRFRELKSLEPPEPKMQGMLPAPKPTLGLVLREATASLVSFGTTLLEVGYWGA

SEQ ID NO: 16070 - protein, 570 aa, Homo sapiens
  Payload ID: 3195
  Gene Symbol: C17orf47
  Gene Name: chromosome 17 open reading frame 47
  Uniprot ID: Q8NEP4
  ENSP ID: ENSP00000354874
MVKTNKPGAKVAVSAQRGSEVTTNTSPQQGHGYVLASSHRSAAVSLNPSHRRSEAAHPTTPHSASDYPRSVSLQSGPGHYAVPTPRGPETGPRTESSRHSSPHLKSQKTQTLASHASSRQWKVSPPREEAARRGSESKSGREVGHHASSIPDAKSTHQLSFQDQKNNLQSQILEDDPPSKVQNPQGVRVPRRILSYPKDEAVQTEPIQRITTTSEIRSPRSPSLLEHGSSCVSADYQTAQRRVPVEESETGPYGPIPSKPKALYRNMNLDSLLKLSVLKDSDGVHRVSARVDPESLHKYSAYPETKPSAKVLVSSQVESNVRTPIRGNSEVGRRVTISPGVQSVEPTHHVTVPSVSEGSHKSSMFVTPEPIYKQQTQKPPEITYMSQGPTPRYPELSQKPSIHAELELTPRPLPPRSLPRYGPDSSWWPLLNPEVETPQSQLTTPDFEPKCSPSLDLLLSGFKIDSSPFCEDLKFQREKASLSPPSPPKEFPSWAPLSEVPQTPKHTCKQPIQRFTAFFLDVSEEMYNRVIWWLKGLCFSLLWAHCGSLGDGRTGEEWHLCIYRAGSFRR

SEQ ID NO: 16071 - protein, 172 aa, Homo sapiens
  Payload ID: 3196
  Gene Symbol: C17orf49
  Gene Name: chromosome 17 open reading frame 49
  Uniprot ID: Q8IXM2
  ENSP ID: ENSP00000411851
MTSASTKVGEIFSAAGAAFTKLGELTMQLHPVADSSPAGAKWTETEIEMLRAAVKRFGDDLNHISCVIKERTVAQIKATVKRKVYEDSGIPLPAESPKKGPKKVASGVLSPPPAAPPPSSSSVPEAGGPPIKKQKADVTLSALNDSDANSDVVDIEGLGETPPAKKLNFDQA

SEQ ID NO: 16072 - protein, 166 aa, Homo sapiens
  Payload ID: 3196
  Gene Symbol: C17orf49
  Gene Name: chromosome 17 open reading frame 49
  ENSP ID: ENSP00000447063
MQLHPVADSSPAGAKWTETEIEMLRAAVKRFGDDLNHISCVIKERTVAQIKATVKRKVYEDSGIPLPAESPKKGPKKVASGVLSPPPAAPPPSSSSVPEAGGPPIKKQKADVTLSALNDSDANSDVVDIEGLGETPPAKKLNFDQDSLTLDSGLLMTSADPPLLSC

SEQ ID NO: 16073 - protein, 157 aa, Homo sapiens
  Payload ID: 3196
  Gene Symbol: C17orf49
  Gene Name: chromosome 17 open reading frame 49
  ENSP ID: ENSP00000447646
MTSASTKVGEIFSAAGAAFTKLGELTMQLHPVADSSPAGAKWTETEIEMLRAAVKRFGDDLNHISCVIKERTVAQIKATVKRKVYEDSGIPLPAESPKKGPKKVASGVLSPPPAAPPPSSSSVPEAGGPPIKKQKADSLTLDSGLLMTSADPPLLSC

SEQ ID NO: 16074 - protein, 192 aa, Homo sapiens
  Payload ID: 3196
  Gene Symbol: C17orf49
  Gene Name: chromosome 17 open reading frame 49
  Uniprot ID: Q8IXM2
  ENSP ID: ENSP00000448598
MTSASTKVGEIFSAAGAAFTKLGELTMQLHPVADSSPAGAKWTETEIEMLRAAVKRFGDDLNHISCVIKERTVAQIKATVKRKVYEDSGIPLPAESPKKGPKKVASGVLSPPPAAPPPSSSSVPEAGGPPIKKQKADVTLSALNDSDANSDVVDIEGLGETPPAKKLNFDQDSLTLDSGLLMTSADPPLLSC

SEQ ID NO: 16075 - protein, 138 aa, Homo sapiens
  Payload ID: 3196
  Gene Symbol: C17orf49
  Gene Name: chromosome 17 open reading frame 49
  Uniprot ID: Q8IXM2
  ENSP ID: ENSP00000448746
MTSASTKVGEIFSAAGAAFTKLGELTMQLHPVADSSPAGAQIKATVKRKVYEDSGIPLPAESPKKGPKKVASGVLSPPPAAPPPSSSSVPEAGGPPIKKQKADVTLSALNDSDANSDVVDIEGLGETPPAKKLNFDQA

SEQ ID NO: 16076 - protein, 23 aa, Homo sapiens
  Payload ID: 3196
  Gene Symbol: C17orf49
  Gene Name: chromosome 17 open reading frame 49
  ENSP ID: ENSP00000468587
  MOD_RES (1)..(1): Any amino acid
XHISCVIKERTVAQIKATVKRKM

SEQ ID NO: 16077 - protein, 173 aa, Homo sapiens
  Payload ID: 3197
  Gene Symbol: C17orf50
  Gene Name: chromosome 17 open reading frame 50
  ENSP ID: ENSP00000474048
MQDCPDLLPARRCEDPLVEEGNGRAPGRGRGARGREGGVGGRGRGQPEAAGGQRDGGRGAAAGSGGGRRPRAALSVLLPAAPGVQHPAGGAAAARGQRLLGLARPLSAAGRPNSSHRQEAEPPGGAVRAGDPATTAAPRGLCLLRAPLLQEMQESAQPPSLCGALRSGSPGSG

SEQ ID NO: 16078 - protein, 136 aa, Homo sapiens
  Payload ID: 3197
  Gene Symbol: C17orf50
  Gene Name: chromosome 17 open reading frame 50
  ENSP ID: ENSP00000474618
MDKHGVKTPLWKKETEELRAEDAEQEEGKEGSEDEDEDNQRPLEDSATEGEEPPRVAEEGEGRERRSVSYCPLRQESSTQQEAEPPGGAVRAGDPATTAAPRGLCLLRAPLLQEMQESAQPPSLCGALRSGSPGSG

SEQ ID NO: 16079 - protein, 174 aa, Homo sapiens
  Payload ID: 3197
  Gene Symbol: C17orf50
  Gene Name: chromosome 17 open reading frame 50
  Uniprot ID: Q8WW18
  ENSP ID: ENSP00000475146
MDKHGVKTPLWKKETEELRAEDAEQEEGKEGSEDEDEDNQRPLEDSATEGEEPPRVAEEGEGRERRSVSYCPLRQESSTQQVALLRRADSGFWGWLGPLALLGGLTAPTDRKRSLPEEPCVLEIRRRPPRRGGCACCELLFCKKCRSLHSHPAYVAHCVLDHPDLGKAGAAGNS

SEQ ID NO: 16080 - protein, 221 aa, Homo sapiens
  Payload ID: 3198
  Gene Symbol: C17orf51
  Gene Name: chromosome 17 open reading frame 51
  Uniprot ID: A8MQB3
  ENSP ID: ENSP00000384286
MGEKSRRKGPAPRHADGKLGRTCDHPYAPWSFTPSSRAPTAWVRPPCPVWASRLQEHSPEPRRARAPPTRRAQAALYAPALRLRDHLDRFSILMTSCTSWLQAPQAPGLCRDEQSSRISVPQLSGAPILLPDLEGTKLSNFQESSPLPHKHERKDKRSTPEEEGRSAPEKIIQSLKLCPGGHRPASLSSGCPAGCRLSFNLPPSMLLSVQKCCMPSSLKTC

SEQ ID NO: 16081 - protein, 182 aa, Homo sapiens
  Payload ID: 3198
  Gene Symbol: C17orf51
  Gene Name: chromosome 17 open reading frame 51
  ENSP ID: ENSP00000445158
MGEKSRRKGPAPRHADGKLGRTCDHPYAPWSFTPSSRAPTAWVRPPCPVWASRLQEHSPEPRRARAPPTRRAQAALYAPALRLRDHLDRFSILMTSCTSWLQAPQAPGLCRDEQSSRISVPQLSGAPILLPDLEGTKLSNFQEMGSHSIVQAGLELLASNNPPASASPSAGITGIISPAPQT

SEQ ID NO: 16082 - protein, 521 aa, Homo sapiens
  Payload ID: 3199
  Gene Symbol: C17orf53
  Gene Name: chromosome 17 open reading frame 53
  Uniprot ID: Q8N3J3
  ENSP ID: ENSP00000245382
MACSLQKLFAVEEEFEDEDFLSAVEDAENRFTGSLPVNAGRLRPVSSRPQETVQAQSSRLLLLHPTAPSEALGLPDLDLCLPASSTPSADSRPSCIGAAPLRPVSTSSSWIGNQRRVTVTEVLRETARPQSSALHPLLTFESQQQQVGGFEGPEQDEFDKVLASMELEEPGMELECGVSSEAIPILPAQQREGSVLAKKARVVDLSGSCQKGPVPAIHKAGIMSAQDESLDPVIQCRTPRPPLRPGAVGHLPVPTALTVPTQQLHWEVCPQRSPVQALQPLQAARGTIQSSPQNRFPCQPFQSPSSWLSGKAHLPRPRTPNSSCSTPSRTSSGLFPRIPLQPQAPVSSIGSPVGTPKGPQGALQTPIVTNHLVQLVTAASRTPQQPTHPSTRAKTRRFPGPAGILPHQAALKQLPRNKVPNMAVMIKSLTRSTMDASVVFKDPTGEMQGTVHRLLLETCQNELKPGSVLLLKQIGVFSPSLRNHYLNVTPNNLVHIYSPDSGDGSFLKPSQPFPKMTWMDS

SEQ ID NO: 16083 - protein, 647 aa, Homo sapiens
  Payload ID: 3199
  Gene Symbol: C17orf53
  Gene Name: chromosome 17 open reading frame 53
  Uniprot ID: Q8N3J3
  ENSP ID: ENSP00000313500
MACSLQKLFAVEEEFEDEDFLSAVEDAENRFTGSLPVNAGRLRPVSSRPQETVQAQSSRLLLLHPTAPSEALGLPDLDLCLPASSTPSADSRPSCIGAAPLRPVSTSSSWIGNQRRVTVTEVLRETARPQSSALHPLLTFESQQQQVGGFEGPEQDEFDKVLASMELEEPGMELECGVSSEAIPILPAQQREGSVLAKKARVVDLSGSCQKGPVPAIHKAGIMSAQDESLDPVIQCRTPRPPLRPGAVGHLPVPTALTVPTQQLHWEVCPQRSPVQALQPLQAARGTIQSSPQNRFPCQPFQSPSSWLSGKAHLPRPRTPNSSCSTPSRTSSGLFPRIPLQPQAPVSSIGSPVGTPKGPQGALQTPIVTNHLVQLVTAASRTPQQPTHPSTRAKTRRFPGPAGILPHQQSGRSLEDIMVSAPQTPTHGALAKFQTEIVASSQASVEEDFGRGPWLTMKSTLGLDERDPSCFLCTYSIVMVLRKQAALKQLPRNKVPNMAVMIKSLTRSTMDASVVFKDPTGEMQGTVHRLLLETCQNELKPGSVLLLKQIGVFSPSLRNHYLNVTPNNLVHIYSPDSGDGSFLKPSQPFPKDSGSFQHDVAAKPEEGFRTAQNLEAEASPEEELPEADDLDGLLSELPEDFFCGTSS

SEQ ID NO: 16084 - protein, 646 aa, Homo sapiens
  Payload ID: 3199
  Gene Symbol: C17orf53
  Gene Name: chromosome 17 open reading frame 53
  Uniprot ID: Q8N3J3
  ENSP ID: ENSP00000466618
MACSLQKLFAVEEEFEDEDFLSAVEDAENRFTGSLPVNAGRLRPVSSRPQETVQAQSSRLLLLHPTAPSEALGLPDLDLCLPASSTPSADSRPSCIGAAPLRPVSTSSSWIGNQRRVTVTEVLRETARPQSSALHPLLTFESQQQQVGGFEGPEQDEFDKVLASMELEEPGMELECGVSSEAIPILPAQQREGSVLAKKARVVDLSGSCQKGPVPAIHKAGIMSAQDESLDPVIQCRTPRPPLRPGAVGHLPVPTALTVPTQQLHWEVCPQRSPVQALQPLQAARGTIQSSPQNRFPCQPFQSPSSWLSGKAHLPRPRTPNSSCSTPSRTSSGLFPRIPLQPQAPVSSIGSPVGTPKGPQGALQTPIVTNHLVQLVTAASRTPQQPTHPSTRAKTRRFPGPAGILPHQQSGRSLEDIMVSAPQTPTHGALAKFQTEIVASSQASVEEDFGRGPWLTMKSTLGLDERDPSCFLCTYSIVMVLRKAALKQLPRNKVPNMAVMIKSLTRSTMDASVVFKDPTGEMQGTVHRLLLETCQNELKPGSVLLLKQIGVFSPSLRNHYLNVTPNNLVHIYSPDSGDGSFLKPSQPFPKDSGSFQHDVAAKPEEGFRTAQNLEAEASPEEELPEADDLDGLLSELPEDFFCGTSS

SEQ ID NO: 16085 - protein, 75 aa, Homo sapiens
  Payload ID: 3200
  Gene Symbol: C17orf58
  Gene Name: chromosome 17 open reading frame 58
  Uniprot ID: Q2M2W7
  ENSP ID: ENSP00000334741
MNRLYLTPDGFFFRVHMLALDSSSCNKPCPEFKPGIETDLNDAAYVLYTTVCNVGATARAVGRPAFFWERWETMT

SEQ ID NO: 16086 - protein, 97 aa, Homo sapiens
  Payload ID: 3200
  Gene Symbol: C17orf58
  Gene Name: chromosome 17 open reading frame 58
  Uniprot ID: Q2M2W7
  ENSP ID: ENSP00000402020
MNRLYLTPDGFFFRVHMLALDSSSCNKPCPEFKPGSRYIVMGHIYHKRRQLPTALLQVLRGRLRPGDGLLRSSSSYVKRFNRKREGQIQGAIHTQCI

SEQ ID NO: 16087 - protein, 75 aa, Homo sapiens; identical to SEQ ID NO: 16085
  Payload ID: 3200
  Gene Symbol: C17orf58
  Gene Name: chromosome 17 open reading frame 58
  Uniprot ID: Q2M2W7
  ENSP ID: ENSP00000443680

SEQ ID NO: 16088 - protein, 187 aa, Homo sapiens
  Payload ID: 3201
  Gene Symbol: C17orf62
  Gene Name: chromosome 17 open reading frame 62
  Uniprot ID: Q9BQA9
  ENSP ID: ENSP00000307765
MYLQVETRTSSRLHLKRAPGIRSWSLLVGILSIGLAAAYYSGDSLGWKLFYVTGCLFVAVQNLEDWEEAIFDKSTGKVVLKTFSLYKKLLTLFRAGHDQVVVLLHDVRDVSVEEEKVRYFGKGYMVVLRLATGFSHPLTQSAVMGHRSDVEAIAKLITSFLELHCLESPTELSQSSDSEAGDPASQS

SEQ ID NO: 16089 - protein, 227 aa, Homo sapiens
  Payload ID: 3201
  Gene Symbol: C17orf62
  Gene Name: chromosome 17 open reading frame 62
  ENSP ID: ENSP00000337560
MGHRSDVEAIASSSPASWSCTALRAPQSCLRAATVRPVTLQARADSPTVPEPVHRPQDPWHIPGVPEPVHRPQDPWHIPGVPEPVHRPQDPWHIPGVPEPVHRPQDPWHIPGVPEPVHRPQDPWPWLQLVPPAELAYCLLMLLLAHCMKQQARPGHPDFLHREAWACLSAAGVSPALDSCFGPQQDLGRVERRARPALVGADAACCPRHSVLSLVDIPSGQVLPQGQ

SEQ ID NO: 16090 - protein, 63 aa, Homo sapiens
  Payload ID: 3201
  Gene Symbol: C17orf62
  Gene Name: chromosome 17 open reading frame 62
  ENSP ID: ENSP00000342228
MVVLRLATGFSHPLTQSAVMGHRSDVEAIAKLITSFLELHCLESPTELSQSSDSEAGDPASQS

SEQ ID NO: 16091 - protein, 187 aa, Homo sapiens; identical to SEQ ID NO: 16088
  Payload ID: 3201
  Gene Symbol: C17orf62
  Gene Name: chromosome 17 open reading frame 62
  Uniprot ID: Q9BQA9
  ENSP ID: ENSP00000388909

SEQ ID NO: 16092 - protein, 173 aa, Homo sapiens
  Payload ID: 3201
  Gene Symbol: C17orf62
  Gene Name: chromosome 17 open reading frame 62
  Uniprot ID: Q9BQA9
  ENSP ID: ENSP00000401626
MYLQVETRTSSRLHLKRAPGIRSWSLLVDSLGWKLFYVTGCLFVAVQNLEDWEEAIFDKSTGKVVLKTFSLYKKLLTLFRAGHDQVVVLLHDVRDVSVEEEKVRYFGKGYMVVLRLATGFSHPLTQSAVMGHRSDVEAIAKLITSFLELHCLESPTELSQSSDSEAGDPASQS

SEQ ID NO: 16093 - protein, 80 aa, Homo sapiens
  Payload ID: 3201
  Gene Symbol: C17orf62
  Gene Name: chromosome 17 open reading frame 62
  ENSP ID: ENSP00000462346
MYLQVETRTSSRLHLKRAPGIRSWSLLVGILSIGLAAAYYSGGSHLRQEHREGCFEDVQPLQEAADSFQSWPRPGGGPAP

SEQ ID NO: 16094 - protein, 78 aa, Homo sapiens
  Payload ID: 3201
  Gene Symbol: C17orf62
  Gene Name: chromosome 17 open reading frame 62
  ENSP ID: ENSP00000462410
MYLQVETRTSSRLHLKRAPGIRSWSLLVGILSIGLAAAYYSGDSLGWKLFYVTGCLFVAVQNLEDWESWPRPGGGPAP

SEQ ID NO: 16095 - protein, 190 aa, Homo sapiens
  Payload ID: 3201
  Gene Symbol: C17orf62
  Gene Name: chromosome 17 open reading frame 62
  ENSP ID: ENSP00000462515
MYLQVETRTSSRLHLKRAPGIRSWSLLVGILSIGLAAAYYSGDSLGWKLFYVTGCLFVAVQNLEDWEEAIFDKSTGKVVLKTFSLYKKLLTLFRAGHDQVVVLLHDVRDVSVEEEKVRYFGKGYMVVLRLATGFSHPLTQSAVMGHRRTRGTFPVCLSPCTAHRTRGLGFSWCLQPSWPIACSCCCLHTA

SEQ ID NO: 16096 - protein, 187 aa, Homo sapiens; identical to SEQ ID NO: 16088
  Payload ID: 3201
  Gene Symbol: C17orf62
  Gene Name: chromosome 17 open reading frame 62
  Uniprot ID: Q9BQA9
  ENSP ID: ENSP00000462529

SEQ ID NO: 16097 - protein, 88 aa, Homo sapiens
  Payload ID: 3201
  Gene Symbol: C17orf62
  Gene Name: chromosome 17 open reading frame 62
  ENSP ID: ENSP00000462956
VVLKTFSLYKKLLTLFRAGHDQVVVLLHDVRDVSVEEEKVRYFGKGYMVVLRLATGFSHPLTQSAVMGHRSVLSLVDIPSGQVLPQGQ

SEQ ID NO: 16098 - protein, 78 aa, Homo sapiens
  Payload ID: 3201
  Gene Symbol: C17orf62
  Gene Name: chromosome 17 open reading frame 62
  ENSP ID: ENSP00000462997
MYLQVETRTSSRLHLKRAPGIRSWSLLESCRLAWLLPTTAEIAWAGSSSTSQAACLWLCRTWRTGRKPSSTRAQGRLF

SEQ ID NO: 16099 - protein, 130 aa, Homo sapiens
  Payload ID: 3201
  Gene Symbol: C17orf62
  Gene Name: chromosome 17 open reading frame 62
  ENSP ID: ENSP00000463215
MYLQVETRTSSRLHLKRAPGIRSWSLLVGILSIGLAAAYYSGDSLGWKLFYVTGCLFVAVQNLEDWEEAIFDKSTGKVVLKTFSLYKKLLTLFRAGHDQVVVLLHDVRDVSVEEEKVRYFGKGYMVVLRL

SEQ ID NO: 16100 - protein, 187 aa, Homo sapiens; identical to SEQ ID NO: 16088
  Payload ID: 3201
  Gene Symbol: C17orf62
  Gene Name: chromosome 17 open reading frame 62
  Uniprot ID: Q9BQA9
  ENSP ID: ENSP00000463228

SEQ ID NO: 16101 - protein, 51 aa, Homo sapiens
  Payload ID: 3201
  Gene Symbol: C17orf62
  Gene Name: chromosome 17 open reading frame 62
  ENSP ID: ENSP00000463306
MYLQVETRTSSRLHLKRAPGIRSWSLLVGRQSLSLHRNLVDWPGCCLLQRR

SEQ ID NO: 16102 - protein, 119 aa, Homo sapiens
  Payload ID: 3201
  Gene Symbol: C17orf62
  Gene Name: chromosome 17 open reading frame 62
  ENSP ID: ENSP00000463475
MYLQVETRTSSRLHLKRAPGIRSWSLLVGILSIGLAAAYYSGDSLGWKLFYVTGCLFVAVQNLEDWEEAIFDKSTGKVVLKTFSLYKKLLTLFRAGHDQVVVLLHDVRDVSVEEEKVRY

SEQ ID NO: 16103 - protein, 59 aa, Homo sapiens
  Payload ID: 3201
  Gene Symbol: C17orf62
  Gene Name: chromosome 17 open reading frame 62
  ENSP ID: ENSP00000463840
  MOD_RES (1)..(1): Any amino acid
XKGYMVVLRLATGFSHPLTQSAVMGHRSRRSRQPWTPALGHSKTSGEWRGGARPGPCGC

SEQ ID NO: 16104 - protein, 187 aa, Homo sapiens; identical to SEQ ID NO: 16088
  Payload ID: 3201
  Gene Symbol: C17orf62
  Gene Name: chromosome 17 open reading frame 62
  Uniprot ID: Q9BQA9
  ENSP ID: ENSP00000463846

SEQ ID NO: 16105 - protein, 187 aa, Homo sapiens; identical to SEQ ID NO: 16088
  Payload ID: 3201
  Gene Symbol: C17orf62
  Gene Name: chromosome 17 open reading frame 62
  Uniprot ID: Q9BQA9
  ENSP ID: ENSP00000464080

SEQ ID NO: 16106 - protein, 148 aa, Homo sapiens
  Payload ID: 3201
  Gene Symbol: C17orf62
  Gene Name: chromosome 17 open reading frame 62
  ENSP ID: ENSP00000464201
MYLQVETRTSSRLHLKRAPGIRSWSLLVGILSIGLAAAYYSGDSLGWKLFYVTGCLFVAVQNLEDWEEAIFDKSTGKVVLKTFSLYKKLLTLFRAGHDQVVVLLHDVRDVSVEEEKVRYFGKGYMVVLRLATGFSHPLTQSAVMGHRR

SEQ ID NO: 16107 - protein, 117 aa, Homo sapiens
  Payload ID: 3201
  Gene Symbol: C17orf62
  Gene Name: chromosome 17 open reading frame 62
  ENSP ID: ENSP00000464442
MYLQVETRTSSRLHLKRAPGIRSWSLLVGILSIGLAAAYYSGDSLGWKLFYVTGCLFVAVQNLEDWEEAIFDKSTGKVVLKTFSLYKKLLTLFRAGHDQVVVLLHDVRDVSVEEEKV

SEQ ID NO: 16108 - protein, 85 aa, Homo sapiens
  Payload ID: 3201
  Gene Symbol: C17orf62
  Gene Name: chromosome 17 open reading frame 62
  ENSP ID: ENSP00000464531
MYLQVETRTSSRLHLKRAPGIRSWSLLVDSLGWKLFYVTGCLFVAVQNLEDWEEAIFDKSTGKVVLKTFSLYKKLLTLFRAGHDQ

SEQ ID NO: 16109 - protein, 173 aa, Homo sapiens; identical to SEQ ID NO: 16092
  Payload ID: 3201
  Gene Symbol: C17orf62
  Gene Name: chromosome 17 open reading frame 62
  Uniprot ID: Q9BQA9
  ENSP ID: ENSP00000464633

SEQ ID NO: 16110 - protein, 63 aa, Homo sapiens; identical to SEQ ID NO: 16090
  Payload ID: 3201
  Gene Symbol: C17orf62
  Gene Name: chromosome 17 open reading frame 62
  ENSP ID: ENSP00000488983

SEQ ID NO: 16111 - protein, 63 aa, Homo sapiens; identical to SEQ ID NO: 16090
  Payload ID: 3201
  Gene Symbol: C17orf62
  Gene Name: chromosome 17 open reading frame 62
  ENSP ID: ENSP00000489034

SEQ ID NO: 16112 - protein, 17 aa, Homo sapiens
  Payload ID: 3201
  Gene Symbol: C17orf62
  Gene Name: chromosome 17 open reading frame 62
  ENSP ID: ENSP00000489093
MVVLRLATGFSHPLTQS

SEQ ID NO: 16113 - protein, 63 aa, Homo sapiens; identical to SEQ ID NO: 16090
  Payload ID: 3201
  Gene Symbol: C17orf62
  Gene Name: chromosome 17 open reading frame 62
  ENSP ID: ENSP00000489494

SEQ ID NO: 16114 - protein, 236 aa, Homo sapiens
  Payload ID: 3202
  Gene Symbol: C17orf64
  Gene Name: chromosome 17 open reading frame 64
  Uniprot ID: Q86WR6
  ENSP ID: ENSP00000269127
MEASDGQGGEGDKPLEQVTNVSCLETSSSASPARDSLMRHAKGLDQDTFKTCKEYLRPLKKFLRKLHLPRDLPQKKKLKYMKQSLVVLGDHINTFLQHYCQAWEIKHWRKMLWRFISLFSELEAKQLRRLYKYTKSSQPAKFLVTFCASDAPERSLLADREDSLPKLCHAWGLHSNISGMKERLSNMQTPGQGSPLPGQPRSQDHVKKDSLRELSQKPKLKRKRIKEAPETPETEP

SEQ ID NO: 16115 - protein, 98 aa, Homo sapiens
  Payload ID: 3202
  Gene Symbol: C17orf64
  Gene Name: chromosome 17 open reading frame 64
  ENSP ID: ENSP00000467637
MRHAKGLDQDTFKTCKEYLRPLKKFLRKLHLPRDLPQKKKLKYMKQSLVVLGDHINTFLQHYCQAWEIKHWRKMLWRFISLFSELEAKQLRRLYKYTK

SEQ ID NO: 16116 - protein, 9 aa, Homo sapiens
  Payload ID: 3202
  Gene Symbol: C17orf64
  Gene Name: chromosome 17 open reading frame 64
  ENSP ID: ENSP00000468617
MRHAKGLDQ

SEQ ID NO: 16117 - protein, 90 aa, Homo sapiens
  Payload ID: 3203
  Gene Symbol: C17orf67
  Gene Name: chromosome 17 open reading frame 67
  Uniprot ID: Q0P5P2
  ENSP ID: ENSP00000380959
MKTLPVLVLSLTLLTVFSETSPILTEKQAKQLLRSRRQDRPSKPGFPDEPMREYMHHLLALEHRAEEQFLEHWLNPHCKPHCDRNRIHPV

SEQ ID NO: 16118 - protein, 501 aa, Homo sapiens
  Payload ID: 3204
  Gene Symbol: C17orf74
  Gene Name: chromosome 17 open reading frame 74
  Uniprot ID: Q0P670
  ENSP ID: ENSP00000328061
MENQLWHNTVRCCNQYQESPHDAEDILLLLLGLIVLVNIGINVATMMWHGLQNALDKMIDWATQKNEIQASESPPSGPPDKAQDVHIHCILDPVQVKMSRPTQYSSFSCHHFSNHHSSSLLRCVRRRRRRHRRCRRRCCNHQQRPQNYRQIPHSHSVFRNPHRSQKMSQLHRVPFFDQEDPDSYLEEEDNLPFPYPKYPRRGWGGFYQRAGLPSNVGLWGHQGGILASLPPPSLYLSPELRCMPKRVEARSELRLQSYGRHGSQSRLWGNVEAEQWASSPPPPHRLPPNPSWVPVGHSPYPSVGWMLYDSWDQRRRGTEGFERPPASVSRNARPEAQGCREHHSPQSHQQSLLGHAYGQSHRSPHPSTEPLGYSSQDPREVRRRAADWAEALPAWRPLTTSASLTVLDEASHQRTPAPSSVLVPHSSQPWPKVQAADPAPPPTMFVPLSRNPGGNANYQVYDSLELKRQVQKSRARSSSLPPASTSTLRPSLHRSQTEKLN

SEQ ID NO: 16119 - protein, 125 aa, Homo sapiens
  Payload ID: 3204
  Gene Symbol: C17orf74
  Gene Name: chromosome 17 open reading frame 74
  ENSP ID: ENSP00000458799
MENQLWHNTVRCCNQYQESPHDAEDILLLLLGLIVLVNIGINVATMMWHGLQNALDKMIDWATQKRGPGFLPGGGGQPALPVSQVPTSRLGRVLSESGPALQCGAVGPPGWYPGQSATTLSLPVT

SEQ ID NO: 16120 - protein, 396 aa, Homo sapiens [sequence omitted]

SEQ ID NO: 16121 - protein, 275 aa, Homo sapiens
  Payload ID: 3205
  Gene Symbol: C17orf75
  Gene Name: chromosome 17 open reading frame 75
  ENSP ID: ENSP00000462127
MDGDEKELESSEEGGSAEERRLEPPSSSHYCLYSYRGSRLAQQRGDSEDGSPSGTNAETPSGDDFSLSLADTNLPSEVEPELRSFIAKRLSRGAVFEGLGNVASVELKIPGYRVGCYYCLFQNEKLLPETVTIDSERNPSEYVVCFLGGSEKGLELFRLELDKYIQGLKNNMNCEARGLESHIKSYLSSWFEDVVCPIQRVVLLFQEKLTFLLHAALSYTPVEVKESDEKTKRDINRFLSVASLQGLIHEGTMTSLCMAMTEEQHKSVVIDCSSS

SEQ ID NO: 16122 - protein, 97 aa, Homo sapiens
  Payload ID: 3205
  Gene Symbol: C17orf75
  Gene Name: chromosome 17 open reading frame 75
  ENSP ID: ENSP00000462873
  MOD_RES (1)..(1): Any amino acid
XLLFQEKLTFLLHAALSYTPVEVKESDEKTKRDINRFLSVASLQGLIHEGTMTSLCMAMTEEQHKSVVIDCSSSQPQFCNAEILDPPPLLFTLSHPS

SEQ ID NO: 16123 - protein, 75 aa, Homo sapiens
  Payload ID: 3205
  Gene Symbol: C17orf75
  Gene Name: chromosome 17 open reading frame 75
  ENSP ID: ENSP00000463184
MLPSLQESMDGDEKELESSEEGGSAEERRLEPPSSSHYCLYSYRGSRLAQQRGDSEDGSPSGTNAETPSGDDFRY

SEQ ID NO: 16124 - protein, 396 aa, Homo sapiens
  Payload ID: 3205
  Gene Symbol: C17orf75
  Gene Name: chromosome 17 open reading frame 75
  Uniprot ID: Q9HAS0
  ENSP ID: ENSP00000464275
MLPSLQESMDGDEKELESSEEGGSAEERRLEPPSSSHYCLYSYRGSRLAQQRGDSEDGSPSGTNAETPSGDDFSLSLADTNLPSEVEPELRSFIAKRLSRGAVFEGLGNVASVELKIPGYRVGCYYCLFQNEKLLPETVTIDSERNPSEYVVCFLGGSEKGLELFRLELDKYIQGLKNNMNCEARGLESHIKSYLSSWFEDVVCPIQRVVLLFQEKLTFLLHAALSYTPVEVKESDEKTKRDINRFLSVASLQGLIHEGTMTSLCMAMTEEQHKSVVIDCSSSQPQFCNAGSNRFCEDWMQAFLNGAKGGNPFLFRQVLENFKLKAIQDTNNLKRFIRQAEMNHYALFKCYMFLKNCGSGDILLKIVKVEHEEMPEAKNVIAVLEEFMKEALDQSF

SEQ ID NO: 16125 - protein, 48 aa, Homo sapiens
  Payload ID: 3205
  Gene Symbol: C17orf75
  Gene Name: chromosome 17 open reading frame 75
  ENSP ID: ENSP00000464416
  MOD_RES (1)..(1): Any amino acid
XAMTEEQHKSVVIDCSSSQPQFCNAGHTRHKQFEEIYPTGRNESLCFV

SEQ ID NO: 16126 - protein, 132 aa, Homo sapiens
  Payload ID: 3205
  Gene Symbol: C17orf75
  Gene Name: chromosome 17 open reading frame 75
  ENSP ID: ENSP00000464759
MNCEARGLESHIKSYLSSWFEDVVCPIQRVVLLFQEKLTFLLHAALSYTPVEVKESDEKTKRDINRFLSVASLQGLIHEGTMTSLCMAMTEEQHKSVVIDCSSSQPQFCNAGSNRFCEDWMQAFLNGAKGGN

SEQ ID NO: 16127 - protein, 88 aa, Homo sapiens
  Payload ID: 3205
  Gene Symbol: C17orf75
  Gene Name: chromosome 17 open reading frame 75
  ENSP ID: ENSP00000464845
MNCEARGLESHIKSYLSSWFEDVVCPIQRVVLLFQEKLTFLLHAALSYTPVEVKESDEKTKRDINRFLSVASLQGLIHEGTMTSLCMA

SEQ ID NO: 16128 - protein, 37 aa, Homo sapiens
  Payload ID: 3205
  Gene Symbol: C17orf75
  Gene Name: chromosome 17 open reading frame 75
  ENSP ID: ENSP00000468451
MNCEARGLESHIKSYLSSWFEDVVCPIQRVVLLFQEK

SEQ ID NO: 16129 - protein, 159 aa, Homo sapiens
  Payload ID: 3206
  Gene Symbol: C17orf78
  Gene Name: chromosome 17 open reading frame 78
  Uniprot ID: Q8N4C9
  ENSP ID: ENSP00000477816
MDTILVFSLIIASYDANKKDLRDSSCRLEQLPGIFPKDVRSIRELQMQETHTETKRTTFIQNRTIATLQCLGSDSKVKVNLVYLERRPKVKHILKNLRIIAAPRRNSSASSSCHLIPTSKFQTGSLLKGKVSMPRSQEAVPMPVVVEMAKEGRPATWDS

SEQ ID NO: 16130 - protein, 275 aa, Homo sapiens
  Payload ID: 3206
  Gene Symbol: C17orf78
  Gene Name: chromosome 17 open reading frame 78
  Uniprot ID: Q8N4C9
  ENSP ID: ENSP00000478886
MDTILVFSLIIASYDANKKDLRDSSCRLEQLPGIFPKDVRSIRELQMQETHTETKRTTFIQNRTIATLQCLGSDSKVKVNLVYLERRPKVKHILKNLRIIAAPRRNSSASSSCHLIPTSKFQTGSLLKGKAFLPGISQCKVLGASSETFPTTAPSITPGNKEGEKTTSTDTDENLEKRQKWSIVVKILIAVTLLLSGVAIIVFVIFEVPCPYQCLGARKLCQCQWLWRWQKKGGQPPGTAESKPDSQPQKVGQDAANSSNPKKAAEITVIHQTYF

SEQ ID NO: 16131 - protein, 275 aa, Homo sapiens; identical to SEQ ID NO: 16130
  Payload ID: 3206
  Gene Symbol: C17orf78
  Gene Name: chromosome 17 open reading frame 78
  Uniprot ID: Q8N4C9
  ENSP ID: ENSP00000484072

SEQ ID NO: 16132 - protein, 159 aa, Homo sapiens; identical to SEQ ID NO: 16129
  Payload ID: 3206
  Gene Symbol: C17orf78
  Gene Name: chromosome 17 open reading frame 78
  Uniprot ID: Q8N4C9
  ENSP ID: ENSP00000488505

SEQ ID NO: 16133 - protein, 547 aa, Homo sapiens
  Payload ID: 3207
  Gene Symbol: C17orf80
  Gene Name: chromosome 17 open reading frame 80
  ENSP ID: ENSP00000255557
MSDNPPRMEVCPYCKKPFKRLKSHLPYCKMIGPTIPTDQKVYQSKPATLPRAKKMKGPIKDLIKAKGKELETENEERNSKLVVDKPEQTVKTFPLPAVGLERAATTKADKDIKNPIQPSFKMLKNTKPMTTFQEETKAQFYASEKTSPKRELAKDLPKSGESRCNPSEAGASLLVGSIEPSLSNQDRKYSSTLPNDVQTTSGDLKLDKIDPQRQELLVKLLDVPTGDCHISPKNVSDGVKRVRTLLSNERDSKGRDHLSGVPTDVTVTETPEKNTESLILSLKMSSLGKIQVMEKQEKGLTLGVETCGSKGNAEKSMSATEKQERTVMSHGCENFNTRDSVTGKESQGERPHLSLFIPRETTYQFHSVSQSSSQSLASLATTFLQEKKAEAQNHHCVPDVKALMESPEGQLSLEPKSDSQFQASHTGCQSPLCSAQRHTPQSPFTNHAAAAGRKTLRSCMGLEWFPELYPGYLGLGVLPGKPQCWNAMTQKPQLISPQGERLSQGWIRCNTTIRKSGFGGITMLFTGYFVLCCSWSFRRLKLQRWRK

SEQ ID NO: 16134 - protein, 573 aa, Homo sapiens
  Payload ID: 3207
  Gene Symbol: C17orf80
  Gene Name: chromosome 17 open reading frame 80
  Uniprot ID: Q9BSJ5
  ENSP ID: ENSP00000268942
MSDNPPRMEVCPYCKKPFKRLKSHLPYCKMIGPTIPTDQKVYQSKPATLPRAKKMKGPIKDLIKAKGKELETENEERNSKLVVDKPEQTVKTFPLPAVGLERAATTKADKDIKNPIQPSFKMLKNTKPMTTFQEETKAQFYASEKTSPKRELAKDLPKSGESRCNPSEAGASLLVGSIEPSLSNQDRKYSSTLPNDVQTTSGDLKLDKIDPQRQELLVKLLDVPTGDCHISPKNVSDGVKRVRTLLSNERDSKGRDHLSGVPTDVTVTETPEKNTESLILSLKMSSLGKIQVMEKQEKGLTLGVETCGSKGNAEKSMSATEKQERTVMSHGCENFNTRDSVTGKESQGERPHLSLFIPRETTYQFHSVSQSSSQSLASLATTFLQEKKAEAQNHHCVPDVKALMESPEGQLSLEPKSDSQFQASHTGCQSPLCSAQRHTPQSPFTNHAAAAGRKTLRSCMGLEWFPELYPGYLGLGVLPGKPQCWNAMTQKPQLISPQGERLSQGWIRCNTTIRKSGFGGITMLFTGYFVLCCSWSFRRLKKLCRPLPWKSTVPPCIGVAKTTGDCRSKTCLD

SEQ ID NO: 16135 - protein, 609 aa, Homo sapiens
  Payload ID: 3207
  Gene Symbol: C17orf80
  Gene Name: chromosome 17 open reading frame 80
  Uniprot ID: Q9BSJ5
  ENSP ID: ENSP00000351937
MSDNPPRMEVCPYCKKPFKRLKSHLPYCKMIGPTIPTDQKVYQSKPATLPRAKKMKGPIKDLIKAKGKELETENEERNSKLVVDKPEQTVKTFPLPAVGLERAATTKADKDIKNPIQPSFKMLKNTKPMTTFQEETKAQFYASEKTSPKRELAKDLPKSGESRCNPSEAGASLLVGSIEPSLSNQDRKYSSTLPNDVQTTSGDLKLDKIDPQRQELLVKLLDVPTGDCHISPKNVSDGVKRVRTLLSNERDSKGRDHLSGVPTDVTVTETPEKNTESLILSLKMSSLGKIQVMEKQEKGLTLGVETCGSKGNAEKSMSATEKQERTVMSHGCENFNTRDSVTGKESQGERPHLSLFIPRETTYQFHSVSQSSSQSLASLATTFLQEKKAEAQNHHCVPDVKALMESPEGQLSLEPKSDSQFQASHTGCQSPLCSAQRHTPQSPFTNHAAAAGRKTLRSCMGLEWFPELYPGYLGLGVLPGKPQCWNAMTQKPQLISPQGERLSQVSLLERSSTHIRSLEPPAGLTTSNFSLMRLLGAVQKGWIRCNTTIRKSGFGGITMLFTGYFVLCCSWSFRRLKKLCRPLPWKSTVPPCIGVAKTTGDCRSKTCLD

SEQ ID NO: 16136 - protein, 583 aa, Homo sapiens
  Payload ID: 3207
  Gene Symbol: C17orf80
  Gene Name: chromosome 17 open reading frame 80
  Uniprot ID: Q9BSJ5
  ENSP ID: ENSP00000396970
MSDNPPRMEVCPYCKKPFKRLKSHLPYCKMIGPTIPTDQKVYQSKPATLPRAKKMKGPIKDLIKAKGKELETENEERNSKLVVDKPEQTVKTFPLPAVGLERAATTKADKDIKNPIQPSFKMLKNTKPMTTFQEETKAQFYASEKTSPKRELAKDLPKSGESRCNPSEAGASLLVGSIEPSLSNQDRKYSSTLPNDVQTTSGDLKLDKIDPQRQELLVKLLDVPTGDCHISPKNVSDGVKRVRTLLSNERDSKGRDHLSGVPTDVTVTETPEKNTESLILSLKMSSLGKIQVMEKQEKGLTLGVETCGSKGNAEKSMSATEKQERTVMSHGCENFNTRDSVTGKESQGERPHLSLFIPRETTYQFHSVSQSSSQSLASLATTFLQEKKAEAQNHHCVPDVKALMESPEGQLSLEPKSDSQFQASHTGCQSPLCSAQRHTPQSPFTNHAAAAGRKTLRSCMGLEWFPELYPGYLGLGVLPGKPQCWNAMTQKPQLISPQGERLSQVSLLERSSTHIRSLEPPAGLTTSNFSLMRLLGAVQKGWIRCNTTIRKSGFGGITMLFTGYFVLCCSWSFRRLKLQRWRK

SEQ ID NO: 16137 - protein, 609 aa, Homo sapiens; identical to SEQ ID NO: 16135
  Payload ID: 3207
  Gene Symbol: C17orf80
  Gene Name: chromosome 17 open reading frame 80
  Uniprot ID: Q9BSJ5
  ENSP ID: ENSP00000440551

SEQ ID NO: 16138 - protein, 109 aa, Homo sapiens
  Payload ID: 3207
  Gene Symbol: C17orf80
  Gene Name: chromosome 17 open reading frame 80
  ENSP ID: ENSP00000462818
MSDNPPRMEVCPYCKKPFKRLKSHLPYCKMIGPTIPTDQKVYQSKPATLPRAKKMKGPIKDLIKAKGKELETENEERNSKLVVDKPEQTVKTFPLPAVGLERAATTKAD

SEQ ID NO: 16139 - protein, 180 aa, Homo sapiens
  Payload ID: 3207
  Gene Symbol: C17orf80
  Gene Name: chromosome 17 open reading frame 80
  ENSP ID: ENSP00000463019
MSDNPPRMEVCPYCKKPFKRLKSHLPYCKMIGPTIPTDQKVYQSKPATLPRAKKMKGPIKDLIKAKGKELETENEERNSKLVVDKPEQTVKTFPLPAVGLERAATTKADKDIKNPIQPSFKMLKNTKPMTTFQEETKAQFYASEKTSPKRELAKDLPKSGESRCNPSEAGASLLVGSIEP

SEQ ID NO: 16140 - protein, 78 aa, Homo sapiens
  Payload ID: 3207
  Gene Symbol: C17orf80
  Gene Name: chromosome 17 open reading frame 80
  ENSP ID: ENSP00000463718
MRLLGAVQKGWIRCNTTIRKSGFGGITMLFTGYFVLCCSWSFRRLKKLCRPLPWKSTVPPCIGVAKTTGDCRSKTCLD

SEQ ID NO: 16141 - protein, 573 aa, Homo sapiens; identical to SEQ ID NO: 16134
  Payload ID: 3207
  Gene Symbol: C17orf80
  Gene Name: chromosome 17 open reading frame 80
  Uniprot ID: Q9BSJ5
  ENSP ID: ENSP00000464132

SEQ ID NO: 16142 - protein, 74 aa, Homo sapiens
  Payload ID: 3208
  Gene Symbol: C17orf89
  Gene Name: chromosome 17 open reading frame 89
  Uniprot ID: A1L188
  ENSP ID: ENSP00000400184
MSANGAVWGRVRSRLRAFPERLAACGAEAAAYGRCVQASTAPGGRLSKDFCAREFEALRSCFAAAAKKTLEGGC

SEQ ID NO: 16143 - protein, 79 aa, Homo sapiens
  Payload ID: 3208
  Gene Symbol: C17orf89
  Gene Name: chromosome 17 open reading frame 89
  ENSP ID: ENSP00000461155
  MOD_RES (1)..(1): Any amino acid
XGRLSKDFCAREFEALRSCFAAAVGQEDAGGRLLGGTLSFTPVCCHGCRALVLMAPGGTYRMPRAERKWEWRRCDIPRC

SEQ ID NO: 16144 - protein, 379 aa, Homo sapiens
  Payload ID: 3209
  Gene Symbol: C17orf96
  Gene Name: chromosome 17 open reading frame 96
  Uniprot ID: A6NHQ4
  ENSP ID: ENSP00000483859
METLCPAPRLAVPASPRGSPCSPTPRKPCRGTQEFSPLCLRALAFCALAKPRASSLGPGPGELAARSPVLRGPQAPLRPGGWAPDGLKHLWAPTGRPGVPNTAAGEDADVAACPRRGEEEEGGGGFPHFGVRSCAPPGRCPAPPHPRESTTSFASAPPRPAPGLEPQRGPAASPPQEPSSRPPSPPAGLSTEPAGPGTAPRPFLPGQPAEVDGNPPPAAPEAPAASPSTASPAPAAPGDLRQEHFDRLIRRSKLWCYAKGFALDTPSLRRGPERPPAKGPARGAAKKRRLPAPPPRTAQPRRPAPTLPTTSTFSLLNCFPCPPALVVGEDGDLKPASSLRLQGDSKPPPAHPLWRWQMGGPAVPEPPGLKFWGINMDES

SEQ ID NO: 16145 - protein, 379 aa, Homo sapiens; identical to SEQ ID NO: 16144
  Payload ID: 3209
  Gene Symbol: C17orf96
  Gene Name: chromosome 17 open reading frame 96
  Uniprot ID: A6NHQ4
  ENSP ID: ENSP00000484710

SEQ ID NO: 16146 - protein, 423 aa, Homo sapiens
  Payload ID: 3210
  Gene Symbol: C17orf97
  Gene Name: chromosome 17 open reading frame 97
  Uniprot ID: Q6ZQX7
  ENSP ID: ENSP00000353245
METRGPGLAVRAESRRLVGIGPRAPPGRVGLQPSGRLDRRGGAGTMGYKDNDGEEEEREGGAAGPRGSRLPPITGGASELAKRKVKKKKRKKKTKGSGKGDDKHQSQSLKSQPLSSSFHDILSPCKERGPKPEHRQSKVEKKHLPSDSSTVSLPDFAEIENLANRINESLRWDGILADPEAEKERIRIYKLNRRKRYRCLALKGFHPDPEALKGFHPDPDALKGFHPDPEALKGFHPDPEALKGIHPDPEALKGFHPDPEALKGFHPDPEALKGFHTDPEALKGFHIDPEALKGFHPDPKALKGFHPDPKALKGFHTDPEALKGFHPDPKALKGFHPDPEALKGFHPDPEALKGFHPDPEALKGFHTDPNAEEAPENLPYLSDKDGSSSHRQPTSKAECPNLCFEGNLTPKLLHSDLAPTLLE

SEQ ID NO: 16147 - protein, 209 aa, Homo sapiens
  Payload ID: 3210
  Gene Symbol: C17orf97
  Gene Name: chromosome 17 open reading frame 97
  ENSP ID: ENSP00000419482
GLAVRAESRRLVGIGPRAPPGRVGLQPSGRLDRRGGAGTMGYKDNDGEEEEREGGAAGPRGSRLPPITGGASELAKRKVKKKKRKKKTKGSGKGDDKHQSQSLKSQPLSSSFHDILSPCKERGPKPEHRQSKVEKKHLPSDSSTVSLPDFAEIENLANRINESLRWDGILADPEAEKERIRIYKLNRRKRWQLQPQAAHVESRVPQSLF

SEQ ID NO: 16148 - protein, 153 aa, Homo sapiens
  Payload ID: 3210
  Gene Symbol: C17orf97
  Gene Name: chromosome 17 open reading frame 97
  ENSP ID: ENSP00000458320
METRGPGLAVRAESRRLVGIGPRAPPGRVGLQPSGRLDRRGGAGTMGYKDNDGEEEEREGGAAGPRGSRLPPITGGASELAKRKVKKKKRKKKTKGSGKGDGILLWGKPAAVLCGLPEERCPPERNDVSAQQHGGPESCYQPHECAWKQVEPS

SEQ ID NO: 16149 - protein, 6 aa, Homo sapiens
  Payload ID: 3210
  Gene Symbol: C17orf97
  Gene Name: chromosome 17 open reading frame 97
  ENSP ID: ENSP00000466848
APTLLE

SEQ ID NO: 16150 - protein, 154 aa, Homo sapiens
  Payload ID: 3211
  Gene Symbol: C17orf98
  Gene Name: chromosome 17 open reading frame 98
  Uniprot ID: A8MV24
  ENSP ID: ENSP00000479396
MAYLSECRLRLEKGFILDGVAVSTAARAYGRSRPKLWSAIPPYNAQQDYHARSYFQSHVVPPLLRKTDQDHGGTGRDGWIVDYIHIFGQGQRYLNRRNWAGTGHSLQQVTGHDHYNADLKPIDGFNGRFGYRRNTPALRQSTSVFGEVTHFPLF

SEQ ID NO: 16151 - protein, 154 aa, Homo sapiens; identical to SEQ ID NO: 16150
  Payload ID: 3211
  Gene Symbol: C17orf98
  Gene Name: chromosome 17 open reading frame 98
  Uniprot ID: A8MV24
  ENSP ID: ENSP00000482299

SEQ ID NO: 16152 - protein, 265 aa, Homo sapiens
  Payload ID: 3212
  Gene Symbol: C17orf99
  Gene Name: chromosome 17 open reading frame 99
  Uniprot ID: Q6UX52
  ENSP ID: ENSP00000343493
MGLPGLFCLAVLAASSFSKAREEEITPVVSIAYKVLEVFPKGRWVLITCCAPQPPPPITYSLCGTKNIKVAKKVVKTHEPASFNLNVTLKSSPDLLTYFCWASSTSGAHVDSARLQMHWELWSKPVSELRANFTLQDRGAGPRVEMICQASSGSPPITNSLIGKDGQVHLQQRPCHRQPANFSFLPSQTSDWFWCQAANNANVQHSALTVVPPGGDQKMEDWQGPLESPILALPLYRSTRRLSEEEFGGFRIGNGEVRGRKAAAM

SEQ ID NO: 16153 - protein, 189 aa, Homo sapiens
  Payload ID: 3212
  Gene Symbol: C17orf99
  Gene Name: chromosome 17 open reading frame 99
  ENSP ID: ENSP00000466133
LIALTSLTAASSFSKAREEEITPVVSIAYKVLEVFPKGRWVLITCCAPQPPPPITYSLCGTKNIKVAKKVVKTHEPASFNLNVTLKSSPDLLTYFCWASSTSGAHVDSARLQMHWELWSKPVSELRANFTLQDRGAGPRVEMICQASSGSPPITNSLIGKDGQVHLQQRPCHRQPANFSFLPSQTSDWF

SEQ ID NO: 16154 - protein, 151 aa, Homo sapiens
  Payload ID: 3212
  Gene Symbol: C17orf99
  Gene Name: chromosome 17 open reading frame 99
  ENSP ID: ENSP00000487393
  MOD_RES (1)..(1): Any amino acid
XQPPPPITYSLCGTKNIKVAKKVVKTHEPASFNLNVTLKSSPDLLTYFCWASSTSGAHVDSARLQMHWELWSRQRGRPQGGDDLPGVLGQPTYHQQPDREGWAGPPAAETMPQAACQLLLPAEPDIGLVLVPGCKQRQCPAQRPHSGAPRW

SEQ ID NO: 16155 - protein, 110 aa, Homo sapiens
  Payload ID: 3213
  Gene Symbol: C18orf21
  Gene Name: chromosome 18 open reading frame 21
  ENSP ID: ENSP00000269194
MVKKFKDSKSVLLITCKTCNRTVKHHGKSRSFVSTLKSNPATPTSKLSLKTPERRTANPNHDMSGSKGKSPASVFRTPTSGQSVSTCSSKNTSKTKKHFSQLKMLLSQNE

SEQ ID NO: 16156 - protein, 132 aa, Homo sapiens
  Payload ID: 3213
  Gene Symbol: C18orf21
  Gene Name: chromosome 18 open reading frame 21
  Uniprot ID: Q32NC0
  ENSP ID: ENSP00000329492
MVKKFKDSKSVLLITCKTCNRTVKHHGKSRSFVSTLKSNPATPTSKLSLKTPERRTANPNHDMSGSKGKSPASVFRTPTSGQSVSTCSSKNTSKTKKHFSQLKMLLSQNESQKIPKVDFRNFLSSLKGGLLK

SEQ ID NO: 16157 - protein, 220 aa, Homo sapiens
  Payload ID: 3213
  Gene Symbol: C18orf21
  Gene Name: chromosome 18 open reading frame 21
  Uniprot ID: Q32NC0
  ENSP ID: ENSP00000465517
MRQKHYLEAAARGLHDSCPGQARYLLWAYTSSHDDKSTFEETCPYCFQLLVLDNSRVRLKPKARLTPKIQKLLNREARNYTLSFKEAKMVKKFKDSKSVLLITCKTCNRTVKHHGKSRSFVSTLKSNPATPTSKLSLKTPERRTANPNHDMSGSKGKSPASVFRTPTSGQSVSTCSSKNTSKTKKHFSQLKMLLSQNESQKIPKVDFRNFLSSLKGGLLK

SEQ ID NO: 16158 - protein, 88 aa, Homo sapiens
  Payload ID: 3213
  Gene Symbol: C18orf21
  Gene Name: chromosome 18 open reading frame 21
  ENSP ID: ENSP00000466400
MVKKFKDSKSVLLITCKTCNRTVKHHGKSRSFVSTLKSNPATPTSKLSLKTPERRTANPNHDMSGSKGKSPASVFRTPTSGQSVSTCS

SEQ ID NO: 16159 - protein, 132 aa, Homo sapiens; identical to SEQ ID NO: 16156
  Payload ID: 3213
  Gene Symbol: C18orf21
  Gene Name: chromosome 18 open reading frame 21
  Uniprot ID: Q32NC0
  ENSP ID: ENSP00000480486

SEQ ID NO: 16160 - protein, 130 aa, Homo sapiens
  Payload ID: 3213
  Gene Symbol: C18orf21
  Gene Name: chromosome 18 open reading frame 21
  ENSP ID: ENSP00000483334
MRQKHYLEAAARGLHDSCPGQARYLLWAYTSSHDDKSTFEETCPYCFQLLVLDNSRVRLKPKARLTPKIQKLLNREARNYTLSFKEAKMVKKFKDSKSVLNTYIWTVSIYLLLKEHQQNKETLLSTKNVT

SEQ ID NO: 16161 - protein, 146 aa, Homo sapiens
  Payload ID: 3214
  Gene Symbol: C18orf25
  Gene Name: chromosome 18 open reading frame 25
  ENSP ID: ENSP00000467826
MKMEEAVGKVEELIESEAPPKASEQETAKEEDGSVELESQVQKDGVADSTVISSMPCLLMELRRDSSESQLASTESDKPTTGRVYESDSSNHCMLSPSSSGHLADSDTLSSAEENEPSQAETAVEGDPSGVSGATVGRKSRRSRSE

SEQ ID NO: 16162 - protein, 103 aa, Homo sapiens
  Payload ID: 3214
  Gene Symbol: C18orf25
  Gene Name: chromosome 18 open reading frame 25
  ENSP ID: ENSP00000468128
MAAKKNRQSSDKQNGRVAKVKGHRSQKHKERIRLLRQKREAAARKKYNLLQDSSTSDSDLTCDSSTSSSDDDEEVSGSSKTITAEIPDGPPVVAHYDMSDTNS

SEQ ID NO: 16163 - protein, 275 aa, Homo sapiens
  Payload ID: 3214
  Gene Symbol: C18orf25
  Gene Name: chromosome 18 open reading frame 25
  ENSP ID: ENSP00000479398
MKMEEAVGKVEELIESEAPPKASEQETAKEEDGSVELESQVQKDGVADSTVISSMPCLLMELRRDSSESQLASTESDKPTTGRVYESDSSNHCMLSPSSSGHLADSDTLSSAEENEPSQAETAVEGDPSGVSGATVGRKSRRSRSESETSTMAAKKNRQSSDKQNGRVAKVKGHRSQKHKERIRLLRQKREAAARKKYNLLQDSSTSDSDLTCDSSTSSSDDDEEVSGSSKTITAEIPGTGFCYVVQAGLRRLGLSDLHTLASQSAEILWDSHLA

SEQ ID NO: 16164 - protein, 343 aa, Homo sapiens
  Payload ID: 3214
  Gene Symbol: C18orf25
  Gene Name: chromosome 18 open reading frame 25
  Uniprot ID: Q96B23
  ENSP ID: ENSP00000480074
MKMEEAVGKVEELIESEAPPKASEQETAKEEDGSVELESQVQKDGVADSTVISSMPCLLMELRRDSSESQLASTESDKPTTGRVYESDSSNHCMLSPSSSGHLADSDTLSSAEENEPSQAETAVEGDPSGVSGATVGRKSRRSRSESETSTMAAKKNRQSSDKQNGRVAKVKGHRSQKHKERIRLLRQKREAAARKKYNLLQDSSTSDSDLTCDSSTSSSDDDEEVSGSSKTITAEIPGHLDPGFLASDKTSAGNAPLNEEINIASSDSEVEIVGVQEHARCVHPRGGVIQSVSSWKHGSGTQYVSTRQTQSWTAVTPQQTWASPAEVVDLTLDEDSRRKYLL

SEQ ID NO: 16165 - protein, 404 aa, Homo sapiens
  Payload ID: 3214
  Gene Symbol: C18orf25
  Gene Name: chromosome 18 open reading frame 25
  ENSP ID: ENSP00000481626
MKMEEAVGKVEELIESEAPPKASEQETAKEEDGSVELESQVQKDGVADSTVISSMPCLLMELRRDSSESQLASTESDKPTTGRVYESDSSNHCMLSPSSSGHLADSDTLSSAEENEPSQAETAVEGDPSGVSGATVGRKSRRSRSESETSTMAAKKNRQSSDKQNGRVAKVKGHRSQKHKERIRLLRQKREAAARKKYNLLQDSSTSDSDLTCDSSTSSSDDDEEVSGSSKTITAEIPDGPPVVAHYDMSDTNSDPEVVNVDNLLAAAVVQEHSNSVGGQDTGATWRTSGLLEELNAEAGHLDPGFLASDKTSAGNAPLNEEINIASSDSEVEIVGVQEHARCVHPRGGVIQSVSSWKHGSGTQYVSTRQTQSWTAVTPQQTWASPAEVVDLTLDEDSRRKYLL

SEQ ID NO: 16166 - protein, 76 aa, Homo sapiens
  Payload ID: 3215
  Gene Symbol: C18orf32
  Gene Name: chromosome 18 open reading frame 32
  Uniprot ID: Q8TCD1
  ENSP ID: ENSP00000323199
MVCIPCIVIPVLLWIYKKFLEPYIYPLVSPFVSRIWPKKAIQESNDTNKGKVNFKGADMNGLPTKGPTEICDKKKD

SEQ ID NO: 16167 - protein, 76 aa, Homo sapiens; identical to SEQ ID NO: 16166
  Payload ID: 3215
  Gene Symbol: C18orf32
  Gene Name: chromosome 18 open reading frame 32
  Uniprot ID: Q8TCD1
  ENSP ID: ENSP00000462538

SEQ ID NO: 16168 - protein, 76 aa, Homo sapiens; identical to SEQ ID NO: 16166
  Payload ID: 3215
  Gene Symbol: C18orf32
  Gene Name: chromosome 18 open reading frame 32
  Uniprot ID: Q8TCD1
  ENSP ID: ENSP00000480941

SEQ ID NO: 16169 - protein, 69 aa, Homo sapiens
  Payload ID: 3216
  Gene Symbol: C18orf42
  Gene Name: chromosome 18 open reading frame 42
  Uniprot ID: P0CW23
  ENSP ID: ENSP00000399075
MVFAPGEKPGNEPEEVKLQNASKQIVQNAILQAVQQVSQESQRREERISDNRDHIQLGVGELTKKHEKK

SEQ ID NO: 16170 - protein, 76 aa, Homo sapiens
  Payload ID: 3216
  Gene Symbol: C18orf42
  Gene Name: chromosome 18 open reading frame 42
  ENSP ID: ENSP00000462259
MSVQYPRRRATAGEKPGNEPEEVKLQNASKQIVQNAILQAVQQVSQESQRREERISDNRDHIQLGVGELTKKHEKK

SEQ ID NO: 16171 - protein, 372 aa, Homo sapiens
  Payload ID: 3217
  Gene Symbol: C18orf54
  Gene Name: chromosome 18 open reading frame 54
  Uniprot ID: Q8IYD9
  ENSP ID: ENSP00000300091
MAKSKTKHRLCSQESSVSALLASCTLSGSNSSNSDGSFHYKDKLYRSASQALQAYIDDFDLGQIYPGASTGKINIDEDFTNMSQFCNYIYKPNNAFENLDHKKHSNFISCRRHTVNDIDSMSLTTDDLLRLPADGSFSYTYVGPSHRTSKKNKKCRGRLGSLDIEKNPHFQGPYTSMGKDNFVTPVIRSNINGKQCGDKIELLILKAKRNLEQCTEELPKSMKKDDSPCSLDKLEADRSWENIPVTFKSPVPVNSDDSPQQTSRAKSAKGVLEDFLNNDNQSCTLSGGKHHGPVEALKQMLFNLQAVQERFNQNKTTDPKEEIKQVSEDDFSKLQLKESMIPITRSLQKALHHLSRLRDLVDDTNGERSPKM

SEQ ID NO: 16172 - protein, 533 aa, Homo sapiens
  Payload ID: 3217
  Gene Symbol: C18orf54
  Gene Name: chromosome 18 open reading frame 54
  Uniprot ID: Q8IYD9
  ENSP ID: ENSP00000372368
MAKSKTKHRLCSQESSVSALLASCTLSGSNSSNSDGSFHYKDKLYRSASQALQAYIDDFDLGQIYPGASTGKINIDEDFTNMSQFCNYIYKPNNAFENLDHKKHSNFISCRRHTVNDIDSMSLTTDDLLRLPADGSFSYTYVGPSHRTSKKNKKCRGRLGSLDIEKNPHFQGPYTSMGKDNFVTPVIRSNINGKQCGRLKNPKLMNRTNNCISESSLSFPKKSSFKDSSEHSLEKNYPRWLTSQKSDLNVSGITSIPDFKYPVWLHNQDLLPDANSQRVYQIFKDDQCSPRHSHQAQGTSRLINKLDCFEYAFEPSNFSNSLSDDKELVNEYKCDFEHSQCQCENPLLPGQSTKPFSGDKIELLILKAKRNLEQCTEELPKSMKKDDSPCSLDKLEADRSWENIPVTFKSPVPVNSDDSPQQTSRAKSAKGVLEDFLNNDNQSCTLSGGKHHGPVEALKQMLFNLQAVQERFNQNKTTDPKEEIKQVSEDDFSKLQLKESMIPITRSLQKALHHLSRLRDLVDDTNGERSPKM

SEQ ID NO: 16173 - protein, 35 aa, Homo sapiens
  Payload ID: 3217
  Gene Symbol: C18orf54
  Gene Name: chromosome 18 open reading frame 54
  ENSP ID: ENSP00000462201
ESMIPITRSLQKALHHLSRLRDLVDDTNGERSPKM

SEQ ID NO: 16174 - protein, 151 aa, Homo sapiens
  Payload ID: 3217
  Gene Symbol: C18orf54
  Gene Name: chromosome 18 open reading frame 54
  ENSP ID: ENSP00000462317
MKKDDSPCSLDKLEADRSWENIPVTFKSPVPVNSDDSPQQTSRAKSAKGVLEDFLNNDNQSCTLSGGKHHGPVEALKQMLFNLQAVQERFNQNKTTDPKEEIKQVSEDDFSKLQLKESMIPITRSLQKALHHLSRLRDLVDDTNGERSPKM

SEQ ID NO: 16175 - protein, 533 aa, Homo sapiens; identical to SEQ ID NO: 16172
  Payload ID: 3217
  Gene Symbol: C18orf54
  Gene Name: chromosome 18 open reading frame 54
  Uniprot ID: Q8IYD9
  ENSP ID: ENSP00000477654

SEQ ID NO: 16176 - protein, 685 aa, Homo sapiens
  Payload ID: 3218
  Gene Symbol: C18orf63
  Gene Name: chromosome 18 open reading frame 63
  Uniprot ID: Q68DL7
  ENSP ID: ENSP00000464330
MNDSRQQSLFFITLPDLNKLCAVRIILSNKVADTEIRTIQMKMCRQLLFLHQDILTSPVSGILNQIWVVMAIPFYKARKLNAYVEKYGAKMEAPQRVIPVILQNCLSYSFMARLAPAWNRTGHLLIQGRDFLSQMGKQSAVVLNINVTETQVCLSIEACTIRLPAPELKEFEISQSIIKDFHANKHAVIERHSILSNWCYVLPSMKMGQIINIFHAIPAACPFHSYGDFQRHWDALYGYKLPGDCGKIKIYCNIYFKMLGERTFTYPLSCIRSQPMQFFPRVDSEVVLKSFLSDLKSKLPHICGFPIKMTSKPCYYTQELTKPNIQEHKVKPPNLTTKKMLRASLTQATSRKPACAQSLLPCSVAVDHKVELSVSQPTSGIFSALHLQPESVQGRKKSLSIRAPQVHSEVLMPNRGNTQVQHTNLSSQSNITPKFVPVFKNRLLQMNKNTSVLGSPKRKQHDVTQSKLFSLKTSMIQHDKLNLGPAIKNRYSSNIQMQAANNLNQENSRPLQEKNTESSENMTKFPSSRGKSTVSLNKNKQLSNSAVFVVSNNNLGVVKSAVDFQMKGKENLTGKGITQILGKSHGSLKLKRQPHIFESDGETEDPRLLQQQSENQAKEVGTSDHRLIVSKIAHRSKRKLCPESSKTSKKHHSDTVHYGQSSSSKKQILDSDKSKLKKSLIIHNA

SEQ ID NO: 16177 - protein, 657 aa, Homo sapiens
  Payload ID: 3219
  Gene Symbol: C18orf8
  Gene Name: chromosome 18 open reading frame 8
  Uniprot ID: Q96DM3
  ENSP ID: ENSP00000269221
MGEEDYYLELCERPVQFEKANPVNCVFFDEANKQVFAVRSGGATGVVVKGPDDRNPISFRMDDKGEVKCIKFSLENKILAVQRTSKTVDFCNFIPDNSQLEYTQECKTKNANILGFCWTSSTEIVFITDQGIEFYQVLPEKRSLKLLKSHNLNVNWYMYCPESAVILLSTTVLENVLQPFHFRAGTMSKLPKFEIELPAAPKSTKPSLSERDIAMATIYGQLYVLFLRHHSRTSNSTGAEVVLYHLPREGACKKMHILKLNRTGKFALNVVDNLVVVHHQDTETSVIFDIKLRGEFDGSVTFHHPVLPARSIQPYQIPITGPAAVTSQSPVPCKLYSSSWIVFQPDIIISASQGYLWNLQVKLEPIVNLLPDKGRLMDFLLQRKECKMVILSVCSQMLSESDRASLPVIATVFDKLNHEYKKYLDAEQSYAMAVEAGQSRSSPLLKRPVRTQAVLDQSDVYTHVLSAFVEKKEMPHKFVIAVLMEYIRSLNQFQIAVQHYLHELVIKTLVQHNLFYMLHQFLQYHVLSDSKPLACLLLSLESFYPPAHQLSLDMLKRLSTANDEIVEVLLSKHQVLAALRFIRGIGGHDNISARKFLDAAKQTEDNMLFYTIFRFFEQRNQRLRGSPNFTPGEHCEEHVAFFKQIFGDQALMRPTTF

SEQ ID NO: 16178 - protein, 333 aa, Homo sapiens
  Payload ID: 3219
  Gene Symbol: C18orf8
  Gene Name: chromosome 18 open reading frame 8
  ENSP ID: ENSP00000464875
MGEEDYYLELCERPVQFEKANPVNCVFFDEANKQVFAVRSGGATGVVVKGPDDRNPISFRMDDKGEVKCIKFSLENKILAVQRTSKTVDFCNFIPDNSQLEYTQECKTKNANILGFCWTSSTEIVFITDQGIEFYQVLPEKRSLKLLKSHNLNVNWYMYCPESAVILLSTTVLENVLQPFHFRAGTMSKLPKFEIELPAAPKSTKPSLSERDIAMATIYGQLYVLFLRHHSRTSNSTGAEVVLYHLPREGACKKMHILKLNRTGKFALNVVDNLVVVHHQDTETSVIFDIKLRGEFDGSVTFHHPVLPARSIQPYQIPITGPAAVTSQSPNFL

SEQ ID NO: 16179 - protein, 66 aa, Homo sapiens
  Payload ID: 3219
  Gene Symbol: C18orf8
  Gene Name: chromosome 18 open reading frame 8
  ENSP ID: ENSP00000465956
MGEEDYYLELCERPVQFEKANPVNCVFFDEANKQVFAVRSGGATGVVVKGPDDRNPISFRLRMPTF

SEQ ID NO: 16180 - protein, 609 aa, Homo sapiens
  Payload ID: 3219
  Gene Symbol: C18orf8
  Gene Name: chromosome 18 open reading frame 8
  ENSP ID: ENSP00000467007
MGEEDYYLELCERPVQFEKANPVNCVFFDEANKQVFAVRSGGATGVVVKGPDDRNPISFRMDDKGEVKCIKFSLENKILAVQRTSKTVVLPEKRSLKLLKSHNLNVNWYMYCPESAVILLSTTVLENVLQPFHFRAGTMSKLPKFEIELPAAPKSTKPSLSERDIAMATIYGQLYVLFLRHHSRTSNSTGAEVVLYHLPREGACKKMHILKLNRTGKFALNVVDNLVVVHHQDTETSVIFDIKLRGEFDGSVTFHHPVLPARSIQPYQIPITGPAAVTSQSPVPCKLYSSSWIVFQPDIIISASQGYLWNLQVKLEPIVNLLPDKGRLMDFLLQRKECKMVILSVCSQMLSESDRASLPVIATVFDKLNHEYKKYLDAEQSYAMAVEAGQSRSSPLLKRPVRTQAVLDQSDVYTHVLSAFVEKKEMPHKFVIAVLMEYIRSLNQFQIAVQHYLHELVIKTLVQHNLFYMLHQFLQYHVLSDSKPLACLLLSLESFYPPAHQLSLDMLKRLSTANDEIVEVLLSKHQVLAALRFIRGIGGHDNISARKFLDAAKQTEDNMLFYTIFRFFEQRNQRLRGSPNFTPGEHCEEHVAFFKQIFGDQALMRPTTF

SEQ ID NO: 16181 - protein, 154 aa, Homo sapiens
  Payload ID: 3219
  Gene Symbol: C18orf8
  Gene Name: chromosome 18 open reading frame 8
  ENSP ID: ENSP00000467692
MGEEDYYLELCERPVQFEKANPVNCVFFDEANKQVFAVRSGGATGVVVKGPDDRNPISFRMDDKGEVKCIKFSLENKILAVQRTSKTVDFCNFIPDNSQLEYTQECKGGLFGEERCIPTTVLPALQWPRVKRPSARPFSNLSALKRVGLRMPTF

SEQ ID NO: 16182 - protein, 85 aa, Homo sapiens
  Payload ID: 3219
  Gene Symbol: C18orf8
  Gene Name: chromosome 18 open reading frame 8
  ENSP ID: ENSP00000467852
MGEEDYYLELCERPVQFEKANPVNCVFFDEANKQVFAVRSGGATGVVVKGPDDRNPISFRIFVILSLIIPSWNTHRSARLRMPTF

SEQ ID NO: 16183 - protein, 561 aa, Homo sapiens
  Payload ID: 3219
  Gene Symbol: C18orf8
  Gene Name: chromosome 18 open reading frame 8
  ENSP ID: ENSP00000482573
MGEEDYYLELCERPVQFEKANPVNCVFFDEANKQVFAVRSGGATGVVVKGPDDRNPISFRMDDKGEVKCIKFSLENKILAVQRTSKTVVLPEKRSLKLLKSHNLNVNWYMYCPESAVILLSTTVLENVLQPFHFRAGTMSKLPKFEIELPAAPKSTKPSLSERDIAMATIYGQLYVLFLRHHSRTSNSTGAEVVLYHLPREGACKKMHILKLNRTGKFALNVVDNLVVVHHQDTETSVIFDIKLRGEFDGSVTFHHPVLPARSIQPYQIPITGPAAVTSQSPVPCKLYSSSWIVFQPDIIISASQGYLWNLQVKLEPIVNLLPDKGRLMDFLLQRKECKMVILSVCSQMLSESDRASLPVIATVFDKLNHEYKKYLDAEQSYAMAVEAGQSRSSPLLKRPVRTQAVLDQSDVYTHVLSAFVEKKEMPHKFVIAVLMEYIRSLNQFQIAVQHYLHELVIKTLVQHNLFYMLHQFLQYHVLSDSKPLACLLLSLESFYPPAHQLSLDMLKMLQSRLKTTCFSIQYSAFLNSETSVCEGAPISHQGNTVKNMLLFSNRFLETKL

SEQ ID NO: 16184 - protein, 141 aa, Homo sapiens
  Payload ID: 3220
  Gene Symbol: C19orf12
  Gene Name: chromosome 19 open reading frame 12
  Uniprot ID: Q9NSK7
  ENSP ID: ENSP00000313332
MTIMVEDIMKLLCSLSGERKMKAAVKHSGKGALVTGAMAFVGGLVGGPPGLAVGGAVGGLLGAWMTSGQFKPVPQILMELPPAEQQRLFNEAAAIIRHLEWTDAVQLTALVMGSEALQQQLLAMLVNYVTKELRAEIQYDD

SEQ ID NO: 16185 - protein, 68 aa, Homo sapiens
  Payload ID: 3220
  Gene Symbol: C19orf12
  Gene Name: chromosome 19 open reading frame 12
  ENSP ID: ENSP00000345497
MTIMVEDIMKLLCSLSGERKMKAAVKHSGKGALVTGAMAFVGGLVGGPPGLAVGSSLRHRIALNRLLS

SEQ ID NO: 16186 - protein, 77 aa, Homo sapiens
  Payload ID: 3220
  Gene Symbol: C19orf12
  Gene Name: chromosome 19 open reading frame 12
  Uniprot ID: Q9NSK7
  ENSP ID: ENSP00000376102
MTSGQFKPVPQILMELPPAEQQRLFNEAAAIIRHLEWTDAVQLTALVMGSEALQQQLLAMLVNYVTKELRAEIQYDD

SEQ ID NO: 16187 - protein, 152 aa, Homo sapiens
  Payload ID: 3220
  Gene Symbol: C19orf12
  Gene Name: chromosome 19 open reading frame 12
  Uniprot ID: Q9NSK7
  ENSP ID: ENSP00000376103
MERLKSHKPATMTIMVEDIMKLLCSLSGERKMKAAVKHSGKGALVTGAMAFVGGLVGGPPGLAVGGAVGGLLGAWMTSGQFKPVPQILMELPPAEQQRLFNEAAAIIRHLEWTDAVQLTALVMGSEALQQQLLAMLVNYVTKELRAEIQYDD

SEQ ID NO: 16188 - protein, 107 aa, Homo sapiens
  Payload ID: 3220
  Gene Symbol: C19orf12
  Gene Name: chromosome 19 open reading frame 12
  Uniprot ID: Q9NSK7
  ENSP ID: ENSP00000467117
MTIMVEDIMKLLCSLSGERKMKAAVKHSGKGALVTGAMAFVGGLVGGPPGLAVGGAVGGLLGAWMTSGQFKPVPQILMELPPAEQQRLFNEAAAIIRPCSSSCWPCW

SEQ ID NO: 16189 - protein, 106 aa, Homo sapiens
  Payload ID: 3220
  Gene Symbol: C19orf12
  Gene Name: chromosome 19 open reading frame 12
  ENSP ID: ENSP00000467516
MTIMVEDIMKLLCSLSGERKMKAAVKHSGKGALVTGAMAFVGGLVGGPPGLAVGGAVGGLLGAWMTSGQFKPVPQILMELPPAEQQRLFNEAAAIIRHLEWTDAVQ

SEQ ID NO: 16190 - protein, 141 aa, Homo sapiens; identical to SEQ ID NO: 16184
  Payload ID: 3220
  Gene Symbol: C19orf12
  Gene Name: chromosome 19 open reading frame 12
  Uniprot ID: Q9NSK7
  ENSP ID: ENSP00000482097

SEQ ID NO: 16191 - protein, 77 aa, Homo sapiens; identical to SEQ ID NO: 16186
  Payload ID: 3220
  Gene Symbol: C19orf12
  Gene Name: chromosome 19 open reading frame 12
  Uniprot ID: Q9NSK7
  ENSP ID: ENSP00000485413

SEQ ID NO: 16192 - protein, 215 aa, Homo sapiens
  Payload ID: 3221
  Gene Symbol: C19orf18
  Gene Name: chromosome 19 open reading frame 18
  Uniprot ID: Q8NEA5
  ENSP ID: ENSP00000321519
MDKVQSGFLILFLFLMECQLHLCLPYADGLHPTGNITGLPGSKRSQPPRNITKEPKVFFHKTQLPGIQGAASRSTAASPTNPMKFLRNKAIIRHRPALVKVILISSVAFSIALICGMAISYMIYRLAQAEERQQLESLYKNLRIPLLGDEEEGSEDEGESTHLLPENENELEKFIHSVIISKRSKNIKKKLKEEQNSVTENKTKNASHNGKMEDL

SEQ ID NO: 16193 - protein, 132 aa, Homo sapiens
  Payload ID: 3222
  Gene Symbol: C19orf24
  Gene Name: chromosome 19 open reading frame 24
  Uniprot ID: Q9BVV8
  ENSP ID: ENSP00000386557
MGPRVLQPPLLLLLLALLLAALPCGAEEASPLRPAQVTLSPPPAVTNGSQPGAPHNSTHTRPPGASGSALTRSFYVILGFCGLTALYFLIRAFRLKKPQRRRYGLLANTEDPTEMASLDSDEETVFESRNLR

SEQ ID NO: 16194 - protein, 132 aa, Homo sapiens
  Payload ID: 3222
  Gene Symbol: C19orf24
  Gene Name: chromosome 19 open reading frame 24
  ENSP ID: ENSP00000473955
MREGQEMGPTPVPSNPLLHRSFPCWPRGWSHPVPTRELLLEPAQPADLLPPAPTAGPCSLASWMLSQPGRGSQVKTGGTPTATAQDAEAPLPDCDLCLSPAPVGTWQPRAKAGWAGDPRNLSGNTFSPGWEQ

SEQ ID NO: 16195 - protein, 158 aa, Homo sapiens
  Payload ID: 3223
  Gene Symbol: C19orf25
  Gene Name: chromosome 19 open reading frame 25
  ENSP ID: ENSP00000389254
MGSKAKKRVLLPTRPAPPTVEQILEDVRGAPAEDPVFTILAPEGRGSPVPGKSGPETPAARGRERSTPLTPDPTPWEPPQHGHDPPVPFRMMEDAEAPGEQLYQQSRAYVAANQRLQQAGNVLRQRCELLQRAGEDLEREVAQMKQAALPAAEAASSG

SEQ ID NO: 16196 - protein, 118 aa, Homo sapiens
  Payload ID: 3223
  Gene Symbol: C19orf25
  Gene Name: chromosome 19 open reading frame 25
  Uniprot ID: Q9UFG5
  ENSP ID: ENSP00000397394
MGSKAKKRVLLPTRPAPPTVEQILEDVRGAPAEDPVFTILAPEDPPVPFRMMEDAEAPGEQLYQQSRAYVAANQRLQQAGNVLRQRCELLQRAGEDLEREVAQMKQAALPAAEAASSG

SEQ ID NO: 16197 - protein, 160 aa, Homo sapiens
  Payload ID: 3223
  Gene Symbol: C19orf25
  Gene Name: chromosome 19 open reading frame 25
  ENSP ID: ENSP00000465469
MGSKAKKRVLLPTRPAPPTVEQILEDVRGAPAEDPVFTILAPEDPPVPFRMMEDAEAPGEQLYQQSRAYVAANQRLQQAGNPRLPPQADLSGPAGLGSAQGGLHPGFPWGSVGPRLAFTGSQPTWVLTQAPLLMLGLRFIRRLIHAELVGPTQLAPSCVT

SEQ ID NO: 16198 - protein, 86 aa, Homo sapiens
  Payload ID: 3223
  Gene Symbol: C19orf25
  Gene Name: chromosome 19 open reading frame 25
  ENSP ID: ENSP00000466283
MGSKAKKRVLLPTRPAPPTVEQILEDVRGAPAEDPVFTILAPEEMGVSLCCPGWSLTLGLKCSSRLGLPKCWITGVSHHTWLHPSC

SEQ ID NO: 16199 - protein, 118 aa, Homo sapiens; identical to SEQ ID NO: 16196
  Payload ID: 3223
  Gene Symbol: C19orf25
  Gene Name: chromosome 19 open reading frame 25
  Uniprot ID: Q9UFG5
  ENSP ID: ENSP00000466372

SEQ ID NO: 16200 - protein, 118 aa, Homo sapiens; identical to SEQ ID NO: 16196
  Payload ID: 3223
  Gene Symbol: C19orf25
  Gene Name: chromosome 19 open reading frame 25
  Uniprot ID: Q9UFG5
  ENSP ID: ENSP00000467861

SEQ ID NO: 16201 - protein, 71 aa, Homo sapiens
  Payload ID: 3223
  Gene Symbol: C19orf25
  Gene Name: chromosome 19 open reading frame 25
  ENSP ID: ENSP00000468000
MGSKAKKRVLLPTRPAPPTVEQILEDVRGAPAEDPVFTILAPEGWSAVARSRLTAGSDSPVQAILLPQPPE

SEQ ID NO: 16202 - protein, 42 aa, Homo sapiens
  Payload ID: 3223
  Gene Symbol: C19orf25
  Gene Name: chromosome 19 open reading frame 25
  ENSP ID: ENSP00000468064
SKAKKRVLLPTRPAPPTVEQILEDVRGAPAEDPVFTILAPEG

SEQ ID NO: 16203 - protein, 118 aa, Homo sapiens; identical to SEQ ID NO: 16196
  Payload ID: 3223
  Gene Symbol: C19orf25
  Gene Name: chromosome 19 open reading frame 25
  Uniprot ID: Q9UFG5
  ENSP ID: ENSP00000468688

SEQ ID NO: 16204 - protein, 78 aa, Homo sapiens
  Payload ID: 3223
  Gene Symbol: C19orf25
  Gene Name: chromosome 19 open reading frame 25
  ENSP ID: ENSP00000478936
MGSKAKKRVLLPTRPAPPTVEQILEDVRGAPAEDPVFTILAPEGDDRGDLISPDPCGTWSLRPWETTLPRGRPEPRGP

SEQ ID NO: 16205 - protein, 106 aa, Homo sapiens
  Payload ID: 3224
  Gene Symbol: C19orf33
  Gene Name: chromosome 19 open reading frame 33
  Uniprot ID: Q9GZP8
  ENSP ID: ENSP00000301246
MEFDLGAALEPTSQKPGVGAGHGGDPKLSPHKVQGRSEAGAGPGPKQGHHSSSDSSSSSSDSDTDVKSHAAGSKQHESIPGKAKKPKVKKKEKGKKEKGKKKEAPH

SEQ ID NO: 16206 - protein, 85 aa, Homo sapiens
  Payload ID: 3224
  Gene Symbol: C19orf33
  Gene Name: chromosome 19 open reading frame 33
  Uniprot ID: Q9GZP8
  ENSP ID: ENSP00000464940
MEFDLGAALEPTSQKPGVGAGHGGDPKLSPHKVQGRSEAGAGPGPKASNFRGLGKGRRLTAAPPSSKDTTALPTPAAAPAIRTRM

SEQ ID NO: 16207 - protein, 473 aa, Homo sapiens
  Payload ID: 3225
  Gene Symbol: C19orf35
  Gene Name: chromosome 19 open reading frame 35
  Uniprot ID: Q6ZS72
  ENSP ID: ENSP00000345102
MSSPEPPTEPPEPDNPTWSTQPTYSNLGQIRAHLLPSKACRLRTPGSLSTNPEPLPPPLPKKILTRTQSLPTRRTLHPSSIQVQPPRRPFLGSHSVDKSQAAVGPACLPAELTFGPADAPLGLSLRDLHSPEAVHTALAARQLQGLRTIYARLRARLMGGHPGPCHPGHSFRLLDSSPCAESGDALYYRVVRAHEDAWHILVAKVPKPGADVPHPWGLELQASLSPHFNLQGLCGLVPEGTLPGAPWRGAVALAAEVPERTVAQWLAEACTQPPEEFVWAVALLLLQLSAALKFLEAWGAALVELRPENLLLVAPRGCATTGPPRLLLTDFGRVCLQPPGPPGSPGPHAPQLGSLLRALLSLAAPSTTPLAAGLELLAAQLTRLRPSASRTRGALQALLWGPGPELRGRGAPLGPWLRALGPWLRVRRGLLVLRLAERAAGGEAPSLEDWLCCEYLAEATESSMGQALALLWD

SEQ ID NO: 16208 - protein, 230 aa, Homo sapiens
  Payload ID: 3226
  Gene Symbol: C19orf38
  Gene Name: chromosome 19 open reading frame 38
  Uniprot ID: A8MVS5
  ENSP ID: ENSP00000380920
MPWTILLFAAGSLAIPAPSIRLVPPYPSSQEDPIHIACMAPGNFPGANFTLYRGGQVVQLLQAPTDQRGVTFNLSGGSSKAPGGPFHCQYGVLGELNQSQLSDLSEPVNVSFPVPTWILVLSLSLAGALFLLAGLVAVALVVRKVKLRNLQKKRDRESCWAQINFDSTDMSFDNSLFTVSAKTMPEEDPATLDDHSGTTATPSNSRTRKRPTSTSSSPETPEFSTFRACQ

SEQ ID NO: 16209 - protein, 230 aa, Homo sapiens; identical to SEQ ID NO: 16208
  Payload ID: 3226
  Gene Symbol: C19orf38
  Gene Name: chromosome 19 open reading frame 38
  Uniprot ID: A8MVS5
  ENSP ID: ENSP00000468568

SEQ ID NO: 16210 - protein, 176 aa, Homo sapiens
  Payload ID: 3227
  Gene Symbol: C19orf43
  Gene Name: chromosome 19 open reading frame 43
  Uniprot ID: Q9BQ61
  ENSP ID: ENSP00000242784
MAARGRRAEPQGREAPGPAGGGGGGSRWAESGSGTSPESGDEEVSGAGSSPVSGGVNLFANDGSFLELFKRKMEEEQRQRQEEPPPGPQRPDQSAAAAGPGDPKRKGGPGSTLSFVGKRRGGNKLALKTGIVAKKQKTEDEVLTSKGDAWAKYMAEVKKYKAHQCGDDDKTRPLVK

SEQ ID NO: 16211 - protein, 132 aa, Homo sapiens
  Payload ID: 3227
  Gene Symbol: C19orf43
  Gene Name: chromosome 19 open reading frame 43
  ENSP ID: ENSP00000466196
MAARGRRAEPQGREAPGPAGGGGGGSRWAESGSGTSPESGDEEVSGAGSSPVSGGVNLFANDGSFLELFKRKMEEEQRQRQEEPPPGPQRPDQSAAAAGPGDPKRKGGGQTQRREQTSPQDGNSSQEAEDGG

SEQ ID NO: 16212 - protein, 150 aa, Homo sapiens
  Payload ID: 3227
  Gene Symbol: C19orf43
  Gene Name: chromosome 19 open reading frame 43
  ENSP ID: ENSP00000466801
MAARGRRAEPQGREAPGPAGGGGGGSRWAESGSGTSPESGDEEVSGAGSSPVSGGVNLFANDGSFLELFKRKMEEEQRQRQEEPPPGPQRPDQSAAAAGPGDPKRKGGPGSTLSFVLTSKGDAWAKYMAEVKKYKAHQCGDDDKTRPLVK

SEQ ID NO: 16213 - protein, 133 aa, Homo sapiens
  Payload ID: 3227
  Gene Symbol: C19orf43
  Gene Name: chromosome 19 open reading frame 43
  ENSP ID: ENSP00000468415
MAARGRRAEPQGREAPGPAGGGGGGSRWAESGSGTSPESGDEEVSGAGSSPVSGGVNLFANDGSFLELFKRKMEEEQRQRQEEPPPGPQRPDQSAAAAGPGDPKRKGGPGSTLSFVGRLAELGAASGRATRPG

SEQ ID NO: 16214 - protein, 657 aa, Homo sapiens
  Payload ID: 3228
  Gene Symbol: C19orf44
  Gene Name: chromosome 19 open reading frame 44
  Uniprot ID: Q9H6X5
  ENSP ID: ENSP00000221671
MASARKASRPMRDVFGDFSDVSLEDSTMEEIRNFQISRNLTKIAPGHSRFLKRNQTLDEKHLLLKENPVLGSGPRLASCRPPTTASRIRANAALMKLAQLETRIMNRKLQRNLSDTESDSMTADAGLPKRADRILSGGALELASQNTDKTSQNQARELPVTENNAQNAKVSRFLKKKQAPVENISPEAPAGKERTLQTPKQKEPARTFDSPDSDEEEMKVLLGSLMDSSREKNTNQGFSSANVSEEEERKLFSVPSQLRAFTVPSVELSSAKPSQTSHLPTSLAADRTLHSTRSRADYPQSHVSSDTASHTPSVSITGAFSNSVSLKMGHVKLVSSPGRSEAETVDEPVSEGADDSLDEFRINILSLDGLAPAVSENSDLEQEEESAQRQKTAGKIFRAEASTGQDAPRQAQARSWASQGKAASAEGDESEVSEHLSASSASAIQQDSTSSMQPPSEAPMVNTVSSAYSEDFENSPSLTASEPTAHSKESLDRTLDALSESSSSVKTDLPQTAESRKKSGRHVTRVLVKDTAVQTPDPAFTYEWTKVASMAAMGPALGGAYVDPTPIANHVISADAIEALTAYSPAVLALHDVLKQQLSLTQQFIQASRHLHASLLRSLDADSFHYHTLEEAKEYIRCHRPAPLTMEDALEEVNKEL

SEQ ID NO: 16215 - protein, 61 aa, Homo sapiens
  Payload ID: 3228
  Gene Symbol: C19orf44
  Gene Name: chromosome 19 open reading frame 44
  ENSP ID: ENSP00000469339
MASARKASRPMRDVFGDFSDVSLEDSTMEEIRNFQISRNLTKIAPGHSRFLKRNQTLDEKH

SEQ ID NO: 16216 - protein, 35 aa, Homo sapiens
  Payload ID: 3228
  Gene Symbol: C19orf44
  Gene Name: chromosome 19 open reading frame 44
  ENSP ID: ENSP00000469749
GACPGRRLRGPDTHRQSCYQCRCNRSTLGATDLPH

SEQ ID NO: 16217 - protein, 256 aa, Homo sapiens
  Payload ID: 3228
  Gene Symbol: C19orf44
  Gene Name: chromosome 19 open reading frame 44
  ENSP ID: ENSP00000470238
MASARKASRPMRDVFGDFSDVSLEDSTMEEIRNFQISRNLTKIAPGHSRFLKRNQTLDEKHLLLKENPVLGSGPRLASCRPPTTASRIRANAALMKLAQLETRIMNRKLQRNLSDTESDSMTADAGLPKRADRILSGGALELASQNTDKTSQNQARELPVTENNAQNAKVSRFLKKKQAPVENISPEAPAGKERTLQTPKQKEPARTFDSPDSDEEEMKVLLGSLMDSSREKNTNQGFSSANVSEEEERKLFSSLE

SEQ ID NO: 16218 - protein, 93 aa, Homo sapiens
  Payload ID: 3228
  Gene Symbol: C19orf44
  Gene Name: chromosome 19 open reading frame 44
  ENSP ID: ENSP00000471623
  MOD_RES (1)..(1): Any amino acid
XPIANHVISADAIEALTAYSPAVLALHDVLKQQLSLTQQFIQASRHLHASLLRSLDADSFHYHTLEEAKEYIRCHRPAPLTMEDALEEVNKEL

SEQ ID NO: 16219 - protein, 111 aa, Homo sapiens
  Payload ID: 3228
  Gene Symbol: C19orf44
  Gene Name: chromosome 19 open reading frame 44
  ENSP ID: ENSP00000471806
MASARKASRPMRDVFGDFSDVSLEDSTMEEIRNFQISRNLTKIAPGHSRFLKRNQTLDEKHLLLKENPVLGSGPRLASCRPPTTASRIRANAALMKLAQLETRIMNRKLQR

SEQ ID NO: 16220 - protein, 618 aa, Homo sapiens
  Payload ID: 3228
  Gene Symbol: C19orf44
  Gene Name: chromosome 19 open reading frame 44
  Uniprot ID: Q9H6X5
  ENSP ID: ENSP00000472255
MASARKASRPMRDVFGDFSDVSLEDSTMEEIRNFQISRNLTKIAPGHSRFLKRNQTLDEKHLLLKENPVLGSGPRLASCRPPTTASRIRANAALMKLAQLETRIMNRKLQRNLSDTESDSMTADAGLPKRADRILSGGALELASQNTDKTSQNQARELPVTENNAQNAKVSRFLKKKQAPVENISPEAPAGKERTLQTPKQKEPARTFDSPDSDEEEMKVLLGSLMDSSREKNTNQGFSSANVSEEEERKLFSVPSQLRAFTVPSVELSSAKPSQTSHLPTSLAADRTLHSTRSRADYPQSHVSSDTASHTPSVSITGAFSNSVSLKMGHVKLVSSPGRSEAETVDEPVSEGADDSLDEFRINILSLDGLAPAVSENSDLEQEEESAQRQKTAGKIFRAEASTGQDAPRQAQARSWASQGKAASAEGDESEVSEHLSASSASAIQQDSTSSMQPPSEAPMVNTVSSAYSEDFENSPSLTASEPTAHSKESLDRTLDALSESSSSVKTDLPQTAESRKKSGRHVTRVLVKDTAVQTPDPAFTYEWTKVASMAAMGPALGGAYVDPTPIANHVISADAIEAAEPDAAVHPGQPAPARLPPALPGRGLLPLPHPGGSQRVH

SEQ ID NO: 16221 - protein, 625 aa, Homo sapiens
  Payload ID: 3228
  Gene Symbol: C19orf44
  Gene Name: chromosome 19 open reading frame 44
  ENSP ID: ENSP00000472436
MASARKASRPMRDVFGDFSDVSLEDSTMEEIRNFQISRNLTKIAPGHSRFLKRNQTLDEKHLLLKENPVLGSGPRLASCRPPTTASRIRANAALMKLAQLETRIMNRKLQRNLSDTESDSMTADAGLPKRADRILSGGALELASQNTDKTSQNQARELPVTENNAQNAKVSRFLKKKQAPVENISPEAPAGKERTLQTPKQKEPARTFDSPDSDEEEMKVLLGSLMDSSREKNTNQGFSSANVSEEEERKLFSVPSQLRAFTVPSVELSSAKPSQTSHLPTSLAADRTLHSTRSRADYPQSHVSSDTASHTPSVSITGAFSNSVSLKMGHVKLVSSPGRSEAETVDEPVSEGADDSLDEFRINILSLDGLAPAVSENSDLEQEEESAQRQKTAGKIFRAEASTGQDAPRQAQARSWASQGKAASAEGDESEVSEHLSASSASAIQQDSTSSMQPPSEAPMVNTVSSAYSEDFENSPSLTASEPTAHSKESLDRTLDALSESSSSVKTDLPQTAESRKKSGRHVTRVLVKDTAVQTPDPAFTYEWTKALTAYSPAVLALHDVLKQQLSLTQQFIQASRHLHASLLRSLDADSFHYHTLEEAKEYIRCHRPAPLTMEDALEEVNKEL

SEQ ID NO: 16222 - protein, 505 aa, Homo sapiens
  Payload ID: 3229
  Gene Symbol: C19orf45
  Gene Name: chromosome 19 open reading frame 45
  Uniprot ID: Q8NA69
  ENSP ID: ENSP00000355241
MATGALLPCSRPCPMSRLDFLKASHFSLGPDLRLHEGTMRTTSHRDFAYPAATREPPSLQPPPALLFPMDPRWDREERVSEAHRAFPPPSTPPWELLQAQARERTLAMQAGNLHLHEDAHAGIGLSNAHAAYGWPELPARTRERIRGARLIFDRDSLPPGDRDKLRIPPTTHQALFPPHDARPQPRAPSCHLGGPNTLKWDYTRQDGTSYQRQFQALPGPPALRCKRASSGVELGDCKISYGSTCSEQKQAYRPQDLPEDRYDKAQATAHIHCVNIRPGDGLFRDRTTKAEHFYAREPEPFVLHHDQTPESHILKGNWCPGPGSLDTFMQYFYGQPPPPTQPPSRHVPHEKLQSHVTLGEPKLLKRFFKTTMGSDYCPSEWRQVQKAPNLHLQQSYLPRGTGEFDFLTMNQKMLKPHRTPPAPVTEEMLQRCKYSHMEPPLGGLRFFSTQYKDEFPFKYQGPAALRLKNPQEGFVPLGTPHQRGCREKIDPLVPQPPMYLCPSQQ

SEQ ID NO: 16223 - protein, 192 aa, Homo sapiens
  Payload ID: 3229
  Gene Symbol: C19orf45
  Gene Name: chromosome 19 open reading frame 45
  ENSP ID: ENSP00000469556
MATGALLPCSRPCPMSRLDFLKASHFSLGPDLRLHEGTMRTTSHRDFAYPAATREPPSLQPPPALLFPMDPRWDREERVSEAHRAFPPPSTPPWELLQAQARERTLAMQAGNLHLHEDAHAGIGLSNAHAAYGWPELPARTRERIRGARLIFDRDSLPPGDRDKLRIPPTTHQALFPPHDARPQPRAPSCHL

SEQ ID NO: 16224 - protein, 223 aa, Homo sapiens
  Payload ID: 3229
  Gene Symbol: C19orf45
  Gene Name: chromosome 19 open reading frame 45
  ENSP ID: ENSP00000469882
MATGALLPCSRPCPMSRLDFLKASHFSLGPDLRLHEGTMRTTSHRDFAYPAATREPPSLQPPPALLFPMDPRWDREERVSEAHRAFPPPSTPPWELLQAQARERTLAMQAGNLHLHEDAHAGIGLSNAHAAYGWPELPARTRERIRGARLIFDRDSLPPGDRDKLRIPPTTHQALFPPHDARPQPRAPSCHLGGPNTLKWDYTRQDGTSYQRQFQALPGPPAL

SEQ ID NO: 16225 - protein, 180 aa, Homo sapiens
  Payload ID: 3229
  Gene Symbol: C19orf45
  Gene Name: chromosome 19 open reading frame 45
  ENSP ID: ENSP00000471093
MATGALLPCSRPCPMSRLDFLKASHFSLGPDLRLHEGTMRTTSHRDFAYPAATREPPSLQPPPALLFPMDPRWDREERVSEAHRAFPPPSTPPWELLQAQARERTLAMQAGNLHLHEDAHAGIGLSNAHAAYGWPELPARTRERIRGARLIFDRDSLPPGDRDKLRIPPTTHQALFPPHD

SEQ ID NO: 16226 - protein, 90 aa, Homo sapiens
  Payload ID: 3229
  Gene Symbol: C19orf45
  Gene Name: chromosome 19 open reading frame 45
  ENSP ID: ENSP00000471316
IFDRDSLPPGDRDKLRIPPTTHQALFPPHDARPQPRAPSCHLGGPNTLKWDYTRQDGTSYQRQFQALPGPPALRCKRDHQGRALLCQGAR

SEQ ID NO: 16227 - protein, 146 aa, Homo sapiens
  Payload ID: 3230
  Gene Symbol: C19orf47
  Gene Name: chromosome 19 open reading frame 47
  ENSP ID: ENSP00000350556
  MOD_RES (1)..(1): Any amino acid
XGSSVRARETMVSVTMATSEWIQFFKEAGIPPGPAVNYAVMFVDNRIQKSMLLDLNKEIMNELGVTVVGDIIAILKHAKVVHRQDMCKAATESVPCSPSPLAGEIRRGTSDGVSLCCPGWSTVARPWLSATSASRVQAVLLPQPPE

SEQ ID NO: 16228 - protein, 355 aa, Homo sapiens
  Payload ID: 3230
  Gene Symbol: C19orf47
  Gene Name: chromosome 19 open reading frame 47
  Uniprot ID: Q8N9M1
  ENSP ID: ENSP00000375889
MFVDNRIQKSMLLDLNKEIMNELGVTVVGDIIAILKHAKVVHRQDMCKAATESVPCSPSPLAGEIRRGTSAASRMITNSLNHDSPPSTPPRRPDTSTSKISVTVSNKMAAKSAKATAALARREEESLAVPAKRRRVTAEMEGKYVINMPKGTTPRTRKILEQQQAAKGLHRTSVFDRLGAETKADTTTGSKPTGVFSRLGATPETDEDLAWDSDNDSSSSVLQYAGVLKKLGRGPAKASPQPALTVKAKATSSATTAAAPTLRRLALSSRSGLERKPESLSKVSIIKRLGAAALVPEAQDSQVTSTKSKSSAEVKVTIKRTLVGPRGSSSSEGLGAQMDHAGTVSVFKRLGRRTF

SEQ ID NO: 16229 - protein, 422 aa, Homo sapiens
  Payload ID: 3230
  Gene Symbol: C19orf47
  Gene Name: chromosome 19 open reading frame 47
  Uniprot ID: Q8N9M1
  ENSP ID: ENSP00000463159
MVMAALSLVAACWGRAAADESVQLPAAPGSSVRARETMVSVTMATSEWIQFFKEAGIPPGPAVNYAVMFVDNRIQKSMLLDLNKEIMNELGVTVVGDIIAILKHAKVVHRQDMCKAATESVPCSPSPLAGEIRRGTSAASRMITNSLNHDSPPSTPPRRPDTSTSKISVTVSNKMAAKSAKATAALARREEESLAVPAKRRRVTAEMEGKYVINMPKGTTPRTRKILEQQQAAKGLHRTSVFDRLGAETKADTTTGSKPTGVFSRLGATPETDEDLAWDSDNDSSSSVLQYAGVLKKLGRGPAKASPQPALTVKAKATSSATTAAAPTLRRLALSSRSGLERKPESLSKVSIIKRLGAAALVPEAQDSQVTSTKSKSSAEVKVTIKRTLVGPRGSSSSEGLGAQMDHAGTVSVFKRLGRRTF

SEQ ID NO: 16230 - protein, 141 aa, Homo sapiens
  Payload ID: 3230
  Gene Symbol: C19orf47
  Gene Name: chromosome 19 open reading frame 47
  ENSP ID: ENSP00000463294
MVMAALSLVAACWGRAAADESVQLPAAPGSSVRARETMVSVTMATSEWIQFFKEAGIPPGPAVNYAVMFVDNRIQKSMLLDLNKEIMNELGVTVVGDIIAILKHAKVVHRQGLTPSPRLECSSTISAHCNLCLPGHVQSCH

SEQ ID NO: 16231 - protein, 142 aa, Homo sapiens
  Payload ID: 3230
  Gene Symbol: C19orf47
  Gene Name: chromosome 19 open reading frame 47
  ENSP ID: ENSP00000463305
MFVDNRIQKSMLLDLNKEIMNELGVTVVGDIIAILKHAKVVHRQDMCKAATESVPCSPSPLAGEIRRGTSAASRMITNSLNHDSPPSTPPRRPDTSTSKISVTVSNKMAAKSAKATAALARREEESLAVPAKRRRVTAEMEG

SEQ ID NO: 16232 - protein, 146 aa, Homo sapiens
  Payload ID: 3230
  Gene Symbol: C19orf47
  Gene Name: chromosome 19 open reading frame 47
  ENSP ID: ENSP00000464478
MVSVTMATSEWIQFFKEAGIPPGPAVNYAVMFVDNRIQKSMLLDLNKEIMNELGVTVVGDIIAILKHAKVVHRQDMCKAATESVPCSPSPLAGEIRRGTSAASRMITNSLNHDSPPSTPPRRPDTSTSKISVTVSNKMAAKSAKAT

SEQ ID NO: 16233 - protein, 168 aa, Homo sapiens
  Payload ID: 3230
  Gene Symbol: C19orf47
  Gene Name: chromosome 19 open reading frame 47
  ENSP ID: ENSP00000464567
  MOD_RES (1)..(1): Any amino acid
XEMEGKYVINMPKGTTPRTRKILEQQQAAKGLHRTSVFDRLGAETKADTTTGSKPTGVFSRLGATPETDEDLAWDSDNDSSSSVLQYAGVLKKLGRGPAKASPQPALTVKAKATSSATTAAAPTLRRLALSSRSGLERKPESLSKVSIIKRLGAAALVPEAQDSQASA

SEQ ID NO: 16234 - protein, 117 aa, Homo sapiens
  Payload ID: 3231
  Gene Symbol: C19orf48
  Gene Name: chromosome 19 open reading frame 48
  Uniprot ID: Q6RUI8
  ENSP ID: ENSP00000301419
MTVLEAVLEIQAITGSRLLSMVPGPARPPGSCWDPTQCTRTWLLSHTPRRRWISGLPRASCRLGEEPPPLPYCDQAYGEELSIRHRETWAWLSRTDTAWPGAPGVKQARILGELLLV

SEQ ID NO: 16235 - protein, 117 aa, Homo sapiens; identical to SEQ ID NO: 16234
  Payload ID: 3231
  Gene Symbol: C19orf48
  Gene Name: chromosome 19 open reading frame 48
  Uniprot ID: Q6RUI8
  ENSP ID: ENSP00000375688

SEQ ID NO: 16236 - protein, 25 aa, Homo sapiens
  Payload ID: 3231
  Gene Symbol: C19orf48
  Gene Name: chromosome 19 open reading frame 48
  ENSP ID: ENSP00000469238
MTVLEAVLEIQAITGSRLLSMVPGP

SEQ ID NO: 16237 - protein, 12 aa, Homo sapiens
  Payload ID: 3231
  Gene Symbol: C19orf48
  Gene Name: chromosome 19 open reading frame 48
  ENSP ID: ENSP00000470222
MLGPNPVHKDLA

SEQ ID NO: 16238 - protein, 48 aa, Homo sapiens
  Payload ID: 3231
  Gene Symbol: C19orf48
  Gene Name: chromosome 19 open reading frame 48
  ENSP ID: ENSP00000470455
MTVLEAVLEIQAITGSRLLSMVPGPARPPGSCWDPTQCTRTWLLSHTP

SEQ ID NO: 16239 - protein, 117 aa, Homo sapiens; identical to SEQ ID NO: 16234
  Payload ID: 3231
  Gene Symbol: C19orf48
  Gene Name: chromosome 19 open reading frame 48
  Uniprot ID: Q6RUI8
  ENSP ID: ENSP00000471005

SEQ ID NO: 16240 - protein, 117 aa, Homo sapiens; identical to SEQ ID NO: 16234
  Payload ID: 3231
  Gene Symbol: C19orf48
  Gene Name: chromosome 19 open reading frame 48
  Uniprot ID: Q6RUI8
  ENSP ID: ENSP00000471463

SEQ ID NO: 16241 - protein, 38 aa, Homo sapiens
  Payload ID: 3231
  Gene Symbol: C19orf48
  Gene Name: chromosome 19 open reading frame 48
  ENSP ID: ENSP00000471910
MTVLEAVLEIQAITGSRLLSMVPGPARPPGSCWDPTQC

SEQ ID NO: 16242 - protein, 82 aa, Homo sapiens
  Payload ID: 3231
  Gene Symbol: C19orf48
  Gene Name: chromosome 19 open reading frame 48
  ENSP ID: ENSP00000472200
MTVLEAVLEIQAITGSRLLSMVPGPARPPGSCWDPTQCTRTWLLSHTPRRRWISGLPRASCRLGEEPPPLPYCDQAYGEELS

SEQ ID NO: 16243 - protein, 81 aa, Homo sapiens
  Payload ID: 3231
  Gene Symbol: C19orf48
  Gene Name: chromosome 19 open reading frame 48
  ENSP ID: ENSP00000473143
MTVLEAVLEIQAITGSRLLSMVPGPARPPGSCWDPTQCTRTWLLSHTPRRRWISGLPRASCRLGEEPPPLPYCDQAYGEEL

SEQ ID NO: 16244 - protein, 260 aa, Homo sapiens
  Payload ID: 3232
  Gene Symbol: C19orf52
  Gene Name: chromosome 19 open reading frame 52
  Uniprot ID: Q9BSF4
  ENSP ID: ENSP00000270502
MAAAALRRFWSRRRAEAGDAVVAKPGVWARLGSWARALLRDYAEACRDASAEARARPGRAAVYVGLLGGAAACFTLAPSEGAFEEALLEASGTLLLLAPATRNRESEAFVQRLLWLRGRGRLRYVNLGLCSLVYEAPFDAQASLYQARCRYLQPRWTDFPGRVLDVGFVGRWWVLGAWMRDCDINDDEFLHLPAHLRVVGPQQLHSETNERLFDEKYKPVVLTDDQVDQALWEEQVLQKEKKDRLALSQAHSLVQAEAPR

SEQ ID NO: 16245 - protein, 27 aa, Homo sapiens
  Payload ID: 3232
  Gene Symbol: C19orf52
  Gene Name: chromosome 19 open reading frame 52
  ENSP ID: ENSP00000466926
  MOD_RES (1)..(1): Any amino acid
XQVLQKEKKDRLALSQAHSLVQAEAPR

SEQ ID NO: 16246 - protein, 80 aa, Homo sapiens
  Payload ID: 3233
  Gene Symbol: C19orf53
  Gene Name: chromosome 19 open reading frame 53
  ENSP ID: ENSP00000221576
WRRGSASFRRTNPQRVRRQRQPLKRIGAQEKANLEVGIRKKIEHDVVMKASSSLPKKLALLKAPAKKKGAAAATSSKTPS

SEQ ID NO: 16247 - protein, 5 aa, Homo sapiens
  Payload ID: 3233
  Gene Symbol: C19orf53
  Gene Name: chromosome 19 open reading frame 53
  ENSP ID: ENSP00000464785
PKKRR

SEQ ID NO: 16248 - protein, 31 aa, Homo sapiens
  Payload ID: 3233
  Gene Symbol: C19orf53
  Gene Name: chromosome 19 open reading frame 53
  ENSP ID: ENSP00000464891
  MOD_RES (1)..(1): Any amino acid
XKGGRVIAPKKARVVQQQKLKKVSLCCSGWS

SEQ ID NO: 16249 - protein, 99 aa, Homo sapiens
  Payload ID: 3233
  Gene Symbol: C19orf53
  Gene Name: chromosome 19 open reading frame 53
  Uniprot ID: Q9UNZ5
  ENSP ID: ENSP00000465432
MAQGQRKFQAHKPAKSKTAAAASEKNRGPRKGGRVIAPKKARVVQQQKLKKNLEVGIRKKIEHDVVMKASSSLPKKLALLKAPAKKKGAAAATSSKTPS

SEQ ID NO: 16250 - protein, 49 aa, Homo sapiens
  Payload ID: 3233
  Gene Symbol: C19orf53
  Gene Name: chromosome 19 open reading frame 53
  ENSP ID: ENSP00000466736
  MOD_RES (1)..(1): Any amino acid
XKSKTAAAASEKNRGPRKGGRVIAPKKARVVQQQKLKKRQVSLCCSGWS

SEQ ID NO: 16251 - protein, 56 aa, Homo sapiens
  Payload ID: 3233
  Gene Symbol: C19orf53
  Gene Name: chromosome 19 open reading frame 53
  ENSP ID: ENSP00000468676
MEPGAQRGNLEVGIRKKIEHDVVMKASSSLPKKLALLKAPAKKKGAAAATSSKTPS

SEQ ID NO: 16252 - protein, 351 aa, Homo sapiens
  Payload ID: 3234
  Gene Symbol: C19orf54
  Gene Name: chromosome 19 open reading frame 54
  Uniprot ID: Q5BKX5
  ENSP ID: ENSP00000367564
MTSPCSPPLKPPISPPKTPVPQASSIPSPPLPPSPLDFSALPSPPWSQQTPVPPPLPLPPPPAATGPAPRHVFGLEKSQLLKEAFDKAGPVPKGREDVKRLLKLHKDRFRGDLRWILFCADLPSLIQEGPQCGLVALWMAGTLLSPPSGVPLERLIRVATERGYTAQGEMFSVADMGRLAQEVLGCQAKLLSGGLGGPNRDLVLQHLVTGHPLLIPYDEDFNHEPCQRKGHKAHWAVSAGVLLGVRAVPSLGYTEDPELPGLFHPVLGTPCQPPSLPEEGSPGAVYLLSKQGKSWHYQLWDYDQVRESNLQLTDFSPSRATDGRVYVVPVGGVRAGLCGQALLLTPQDCSH

SEQ ID NO: 16253 - protein, 67 aa, Homo sapiens
  Payload ID: 3234
  Gene Symbol: C19orf54
  Gene Name: chromosome 19 open reading frame 54
  ENSP ID: ENSP00000469330
MRAGGLVDGRYSPVAPQWRPPGETHTGGHGKRLHGPGRDVLSTSYDEDFNHEPCQRKGHKAHWAAQE

SEQ ID NO: 16254 - protein, 57 aa, Homo sapiens
  Payload ID: 3234
  Gene Symbol: C19orf54
  Gene Name: chromosome 19 open reading frame 54
  ENSP ID: ENSP00000469807
MAGTLLSPPSGVPLERLIRVATERGYTAQGEMFSAPATTRTSTMSRVRGRATRHTGR

SEQ ID NO: 16255 - protein, 57 aa, Homo sapiens; identical to SEQ ID NO: 16254
  Payload ID: 3234
  Gene Symbol: C19orf54
  Gene Name: chromosome 19 open reading frame 54
  ENSP ID: ENSP00000471114

SEQ ID NO: 16256 - protein, 170 aa, Homo sapiens
  Payload ID: 3234
  Gene Symbol: C19orf54
  Gene Name: chromosome 19 open reading frame 54
  ENSP ID: ENSP00000471589
MAGTLLSPPSGVPLERLIRVATERGYTAQGEMFSVADMGRLAQEVLGCQAKLLSGGLGGPNRDLVLQHLVTGHPLLIPYDEDFNHEPCQRKGHKAHWAGSCWVFGLCPVSATLRTLSCRACSTQCWARPANHHPCQRRAPRELSTCCPSRARVGTISCGTTTRSGRATCS

SEQ ID NO: 16257 - protein, 57 aa, Homo sapiens; identical to SEQ ID NO: 16254
  Payload ID: 3234
  Gene Symbol: C19orf54
  Gene Name: chromosome 19 open reading frame 54
  ENSP ID: ENSP00000472022

SEQ ID NO: 16258 - protein, 112 aa, Homo sapiens
  Payload ID: 3234
  Gene Symbol: C19orf54
  Gene Name: chromosome 19 open reading frame 54
  ENSP ID: ENSP00000472820
  MOD_RES (1)..(1): Any amino acid
XFDKAGPVPKGREDVKRLLKLHKDRFRGDLRWILFCADLPSLIQEGPQCGLVALWMAGTLLSPPSGVPLERLIRVATERGYTAQGEMFSAPATTRTSTMSRVRGRATRHTGR

SEQ ID NO: 16259 - protein, 65 aa, Homo sapiens
  Payload ID: 3234
  Gene Symbol: C19orf54
  Gene Name: chromosome 19 open reading frame 54
  ENSP ID: ENSP00000472948
  MOD_RES (1)..(1): Any amino acid
XHVFGLEKSQLLKEAFDKAGPVPKGREDVKRLLKLHKDRFRGDLRWILFCADLPSLIQEGPQYVP

SEQ ID NO: 16260 - protein, 182 aa, Homo sapiens
  Payload ID: 3234
  Gene Symbol: C19orf54
  Gene Name: chromosome 19 open reading frame 54
  ENSP ID: ENSP00000473024
PAPRHVFGLEKSQLLKEAFDKAGPVPKGREDVKRLLKLHKDRFRGDLRWILFCADLPSLIQEGPQCGLVALWMAGTLLSPPSGVPLERLIRVATERGYTAQGEMFSAPATTRTSTMSRVRGRATRHTGRGRLCHLTRHLRNLLPGPSASHRTGTLNCVSLSSPLLSPSFKAHLGAVTCASPS

SEQ ID NO: 16261 - protein, 637 aa, Homo sapiens
  Payload ID: 3235
  Gene Symbol: C19orf57
  Gene Name: chromosome 19 open reading frame 57
  Uniprot ID: Q0VDD7
  ENSP ID: ENSP00000254336
MTKRKKLRTSGEGLCPPKPLKNPRLGDFYGDPQSSMLGCLHHPEEPEGKLGPVPSTQQHGEEPGKAVSSSPDEETGSPCRLLRQPEKEPAPLPPSQNSFGRFVPQFAKSRKTVTRKEEMKDEDRGSGAFSLETIAESSAQSPGCQLLVETLGVPLQEATELGDPTQADSARPEQSSQSPVQAVPGSGDSQPDDPPDRGTGLSASQRASQDHLSEQGADDSKPETDRVPGDGGQKEHLPSIDSEGEKPDRGAPQEGGAQRTAGAGLPGGPQEEGDGVPCTPASAPTSGPAPGLGPASWCLEPGSVAQGSPDPQQTPSRMGREGEGTHSSLGCSSLGMVVIADLSTDPTELEERALEVAGPDGQASAISPASPRRKAADGGHRRALPGCTSLTGETTGESGEAGQDGKPPGDVLVGPTASLALAPGSGESMMGAGDSGHASPDTGPCVNQKQEPGPAQEEAELGGQNLERDLEGFRVSPQASVVLEHREIADDPLQEPGAQQGIPDTTSELAGQRDHLPHSADQGTWADSLAVELDFLLDSQIQDALDASDFEAPPEQLFPSGNKPGPCWPGPSSHANGDPVAVAKAQPSRLIMGTHRDLEAFKRLNYRKTKLGGKAPLPYPSKGPGNIPRGDPPWREL

SEQ ID NO: 16262 - protein, 295 aa, Homo sapiens
  Payload ID: 3235
  Gene Symbol: C19orf57
  Gene Name: chromosome 19 open reading frame 57
  ENSP ID: ENSP00000464829
  MOD_RES (1)..(1): Any amino acid
XQGSPDPQQTPSRMGREGEGTHSSLGCSSLGMVVIADLSTDPTELEERALEVAGPDGQASAISPASPRRKAADGGHRRALPGCTSLTGETTGESGEAGQDGKPPGDVLVGPTASLALAPGSGESMMGAGDSGHASPDTGPCVNQKQEPGPAQEEAELGGQNLERDLEGFRVSPQASVVLEHREIADDPLQEPGAQQGIPDTTSELAGQRDHLPHSADQGTWADSLAVELDFLLDSQIQDALDASDFEAPPEQLFPSGNKPGPCWPGPSSHANGDPVAVAKAQPRPPVSRPPACCV

SEQ ID NO: 16263 - protein, 668 aa, Homo sapiens
  Payload ID: 3235
  Gene Symbol: C19orf57
  Gene Name: chromosome 19 open reading frame 57
  Uniprot ID: Q0VDD7
  ENSP ID: ENSP00000465822
MTKRKKLRTSGEGLCPPKPLKNPRLGDFYGDPQSSMLGCLHHPEEPEGKLGPVPSTQQHGEEPGKAVSSSPDEETGSPCRLLRQPEKEPAPLPPSQNSFGRFVPQFAKSRKTVTRKEEMKDEDRGSGAFSLETIAESSAQSPGCQLLVETLGVPLQEATELGDPTQADSARPEQSSQSPVQAVPGSGDSQPDDPPDRGTGLSASQRASQDHLSEQGADDSKPETDRVPGDGGQKEHLPSIDSEGEKPDRGAPQEGGAQRTAGAGLPGGPQEEGDGVPCTPASAPTSGPAPGLGPASWCLEPGSVAQGSPDPQQTPSRMGREGEGTHSSLGCSSLGMVVIADLSTDPTELEERALEVAGPDGQASAISPASPRRKAADGGHRRALPGCTSLTGETTGESGEAGQDGKPPGDVLVGPTASLALAPGSGESMMGAGDSGHASPDTGPCVNQKQEPGPAQEEAELGGQNLERDLEGFRVSPQASVVLEHREIADDPLQEPGAQQGIPDTTSELAGQRDHLPHSADQGTWADSLAVELDFLLDSQIQDALDASDFEAPPEQLFPSGNKPGPCWPGPSSHANGDPVAVAKAQPRTFVGIQASEASRMEDATNVVRGLIVELSNLNRLIMGTHRDLEAFKRLNYRKTKLGGKAPLPYPSKGPGNIPRGDPPWREL

SEQ ID NO: 16264 - protein, 25 aa, Homo sapiens
  Payload ID: 3235
  Gene Symbol: C19orf57
  Gene Name: chromosome 19 open reading frame 57
  ENSP ID: ENSP00000466119
MTKRKKLRTSAPLMRKQDLPAGSSV

SEQ ID NO: 16265 - protein, 243 aa, Homo sapiens
  Payload ID: 3235
  Gene Symbol: C19orf57
  Gene Name: chromosome 19 open reading frame 57
  ENSP ID: ENSP00000466723
MTKRKKLRTSGEGLCPPKPLKNPRLGDFYGDPQSSMLGCLHHPEEPEGKLGPVPSTQQHGEEPGKAVSSSPDEETGSPCRLLRQPEKEPAPLPPSQNSFGRFVPQFAKSRKTVTRKEEMKDEDRGSGAFSLLFPSGNKPGPCWPGPSSHANGDPVAVAKAQPRTFVGIQASEASRMEDATNVVRGLIVELSNLNRLIMGTHRDLEAFKRLNYRKTKLGGKAPLPYPSKGPGNIPRGDPPWREL

SEQ ID NO: 16266 - protein, 87 aa, Homo sapiens
  Payload ID: 3235
  Gene Symbol: C19orf57
  Gene Name: chromosome 19 open reading frame 57
  ENSP ID: ENSP00000467241
FVRLLELFPSGNKPGPCWPGPSSHANGDPVAVAKAQPSRLIMGTHRDLEAFKRLNYRKTKLGGKAPLPYPSKGPGNIPRGDPPWREL

SEQ ID NO: 16267 - protein, 139 aa, Homo sapiens
  Payload ID: 3235
  Gene Symbol: C19orf57
  Gene Name: chromosome 19 open reading frame 57
  ENSP ID: ENSP00000468467
RVSPQASVVLEHREIADDPLQEPGAQQGIPDTTSELAGQRDHLPHSADQGTWADSLAVELDFLLDSQIQDALDASDFEAPPEQLFPSGNKPGPCWPGPSSHANGDPVAVAKAQPRGRLCPCLLPSLPVTCTCCATGHLP

SEQ ID NO: 16268 - protein, 201 aa, Homo sapiens
  Payload ID: 3236
  Gene Symbol: C19orf60
  Gene Name: chromosome 19 open reading frame 60
  Uniprot ID: Q96EN9
  ENSP ID: ENSP00000351422
MITETAAEPTVPAVPAAEEATEARGREEPAWPWKDAPIRTLVQRIHQLQAERAQGFRRLEEWLAPVQGLRAWGRGLRVPTCRRGHRQYLRSGPDYDFARYRSTVHGVTQAFAAASREVLAVEAELGGPRRQPLLAGHVRSLQELEQTRLGTVALLQLMETPELAGQEDAVRMQQLKMKVIKTMEAISEVLQDLRFDAESAE

SEQ ID NO: 16269 - protein, 179 aa, Homo sapiens
  Payload ID: 3236
  Gene Symbol: C19orf60
  Gene Name: chromosome 19 open reading frame 60
  Uniprot ID: Q96EN9
  ENSP ID: ENSP00000398467
MITETAAEPTVPAVPAAEEATEARGREEPAWPWKDAPIRTLVQRIHQLQAERAQGFRRLEEGHRQYLRSGPDYDFARYRSTVHGVTQAFAAASREVLAVEAELGGPRRQPLLAGHVRSLQELEQTRLGTVALLQLMETPELAGQEDAVRMQQLKMKVIKTMEAISEVLQDLRFDAESAE

SEQ ID NO: 16270 - protein, 60 aa, Homo sapiens
  Payload ID: 3236
  Gene Symbol: C19orf60
  Gene Name: chromosome 19 open reading frame 60
  ENSP ID: ENSP00000469859
  MOD_RES (1)..(1): Any amino acid
XLGGPRRQPLLAGHVRSLQELEQTRLGTVALLQLMETPELAGQEDAVRMQQLKMNSHPLL

SEQ ID NO: 16271 - protein, 66 aa, Homo sapiens
  Payload ID: 3236
  Gene Symbol: C19orf60
  Gene Name: chromosome 19 open reading frame 60
  ENSP ID: ENSP00000471429
MITETAAEPTVPAVPAAEEATEARGREEPAWPWKDAPIRTLVQRIHQLQAERAQGFRRLEEWPCCS

SEQ ID NO: 16272 - protein, 291 aa, Homo sapiens
  Payload ID: 3237
  Gene Symbol: C19orf66
  Gene Name: chromosome 19 open reading frame 66
  Uniprot ID: Q9NUL5
  ENSP ID: ENSP00000253110
MSQEGVELEKSVRRLREKFHGKVSSKKAGALMRKFGSDHTGVGRSIVYGVKQKDGQELSNDLDAQDPPEDMKQDRDIQAVATSLLPLTEANLRMFQRAQDDLIPAVDRQFACSSCDHVWWRRVPQRKEVSRCRKCRKRYEPVPADKMWGLAEFHCPKCRHNFRGWAQMGSPSPCYGCGFPVYPTRILPPRWDRDPDRRSTHTHSCSAADCYNRREPHVPGTSCAHPKSRKQNHLPKVLHPSNPHISSGSTVATCLSQGGLLEDLDNLILEDLKEEEEEEEEVEDEEGGPRE

SEQ ID NO: 16273 - protein, 240 aa, Homo sapiens
  Payload ID: 3237
  Gene Symbol: C19orf66
  Gene Name: chromosome 19 open reading frame 66
  Uniprot ID: Q9NUL5
  ENSP ID: ENSP00000380978
MSQHQQACGICRQEDPPEDMKQDRDIQAVATSLLPLTEANLRMFQRAQDDLIPAVDRQFACSSCDHVWWRRVPQRKEVSRCRKCRKRYEPVPADKMWGLAEFHCPKCRHNFRGWAQMGSPSPCYGCGFPVYPTRILPPRWDRDPDRRSTHTHSCSAADCYNRREPHVPGTSCAHPKSRKQNHLPKVLHPSNPHISSGSTVATCLSQGGLLEDLDNLILEDLKEEEEEEEEVEDEEGGPRE

SEQ ID NO: 16274 - protein, 77 aa, Homo sapiens
  Payload ID: 3237
  Gene Symbol: C19orf66
  Gene Name: chromosome 19 open reading frame 66
  ENSP ID: ENSP00000466217
  MOD_RES (1)..(1): Any amino acid
XVYGVKQKDGQELSNDLDAQTKKLRPKSLASKQGQLRFEPWPPGVRAWALTCLRAQRGLKGAICHNINKHVAFAGRK

SEQ ID NO: 16275 - protein, 71 aa, Homo sapiens
  Payload ID: 3237
  Gene Symbol: C19orf66
  Gene Name: chromosome 19 open reading frame 66
  ENSP ID: ENSP00000466550
MPPSTTWPQRGDMSQHQQACGICRQEDPPEDMKQDRDIQAVATSLLPLTEANLRMFQRAQDDLIPAVDRQF

SEQ ID NO: 16276 - protein, 127 aa, Homo sapiens
  Payload ID: 3237
  Gene Symbol: C19orf66
  Gene Name: chromosome 19 open reading frame 66
  ENSP ID: ENSP00000466633
MSQEGVELEKSVRRLREKFHGKVSSKKAGALMRKFGSDHTGVGRSIVYGVKQKDGQELSNDLDAQTKKLRPKSLASKQGQLRFEPWPPGVRAWALTCLRAQRGLKGAICHNINKHVAFAGRKIHQKI

SEQ ID NO: 16277 - protein, 143 aa, Homo sapiens
  Payload ID: 3237
  Gene Symbol: C19orf66
  Gene Name: chromosome 19 open reading frame 66
  ENSP ID: ENSP00000467167
DPPEDMKQDRDIQKPTYACFNVPRTTLSLLWTGSLPAPPATTSGGAACPSGRRYPGAGNAGSATSQCQLTRCGAWLSSTARSVGTTSAPTLTPAQLPTATTGESPTCLGHPVLTPRAGSRTTCPKCSTPATLTLAVAPLWPPA

SEQ ID NO: 16278 - protein, 255 aa, Homo sapiens
  Payload ID: 3237
  Gene Symbol: C19orf66
  Gene Name: chromosome 19 open reading frame 66
  Uniprot ID: Q9NUL5
  ENSP ID: ENSP00000467182
MSQEGVELEKSVRRLREKFHGKVSSKKAGALMRKFGSDHTGVGRSIVYGVKQKDGQELSNDLDAQDPPEDMKQDRDIQAVATSLLPLTEANLRMFQRAQDDLIPAVDRQFACSSCDHVWWRRVPQRKEVSRCRKCRKRYEPVPADKMWGLAEFHCPKCRHNFRTHTHSCSAADCYNRREPHVPGTSCAHPKSRKQNHLPKVLHPSNPHISSGSTVATCLSQGGLLEDLDNLILEDLKEEEEEEEEVEDEEGGPRE

SEQ ID NO: 16279 - protein, 216 aa, Homo sapiens
  Payload ID: 3238
  Gene Symbol: C19orf67
  Gene Name: chromosome 19 open reading frame 67
  ENSP ID: ENSP00000340842
MPTFLQMCEPYFLYLEAAARSIPPIYGPLQELVRKGLLEISQQLTLRLEQLVLMYASFGFVDLEEMNPLSISCFFCGRFSISLSHEVSIFRYCAPTAYTASRFPRYLYKKMRWHLEATPEAPGRGQDSLVDYYFLCYRDTWEDTGQSPANSCPQIQKLWSIGRWVPLGPAEDDLYSWILCPQPLGDYQQLLTIGFEEPTPTLATDLLVQILTGQAG

SEQ ID NO: 16280 - protein, 358 aa, Homo sapiens
  Payload ID: 3238
  Gene Symbol: C19orf67
  Gene Name: chromosome 19 open reading frame 67
  Uniprot ID: A6NJJ6
  ENSP ID: ENSP00000449137
MATEQWFEGSLPLDPGETPPPDALEPGTPPCGDPSRSTPPGRPGNPSEPDPEDAEGRLAEARASTSSPKPLVPRPGPAPPRLSLDTLFSPITQQLRYLLKKADDFQSYLLYSRDQVQKEQLAKAMPTFLQMCEPYFLYLEAAARSIPPIYGPLQELVRKGLLEISQQLTLRLEQLVLMYASFGFVDLEEMNPLSISCFFCGRFSISLSHEVSIFRYCAPTAYTASRFPRYLYKKMRWHLEATPEAPGRGQDSLVDYYFLCYRDTWEDTGQSPANSCPQIQKLWSIGRWVPLGPAEDDLYSWILCPQPLGDYQQLLTIGFEEPTPTLATDLLVQILTGQAGQARPPSAAGPAGWAAQGS

SEQ ID NO: 16281 - protein, 627 aa, Homo sapiens
  Payload ID: 3239
  Gene Symbol: C19orf68
  Gene Name: chromosome 19 open reading frame 68
  Uniprot ID: Q86XI8
  ENSP ID: ENSP00000331363
MERPEPPPGTAAGQEEQELRERAFFSWAEFSRFFDAWCQQRLALFFVKSSMHLARCRWASAPPLYTLIDVLKYSYVRLVCKDVRAPSRPAVGPPQPGCPAFIIVKLSPLRDRLVVTECQLTHSHPACPLEFAYYFRPGHLLANACLPVRTTNKISKQFVAPADVRRLLSYCKGRDHGVLDALHVLEGLFRTDPEAKVKLVFVEDQAVVETVFFLTSRTRALLRRFPRMLLVDRLPGLQGALDLLAVLCVDGSGRARQAACCVARPGTPSLLRFALASLLQSAPDVKGRVRCLTAGPEVAAQLPAVRQLLPCARVQICRAQGLETLFSKAQELGGAGREDPGLWSRLCRLAGASSPAAYDEALAELHAHGPAAFVDYFERNWEPRRDMWVRFRAFEAARDLDACALVRGHRRRLLRRLSPSRGVAQCLRDLVAMQWADAAGEAVPEGPDGGGPWLEDEPGRGAQGENERVRGLETGDWGGAPKEGSIWRGAQMEKEWARALETRDWGGAQFEGEKGRALQIRDWRGGRLENQKPRGLEGGVLRGSKLEKGHLRGPEIRDWRGPQLEGEKDWGLEGYVWRGSQLEDQALRGLEGYTWRVAQLEDRRSTTDLRGTQFDYERGKGESTEDR

SEQ ID NO: 16282 - protein, 920 aa, Homo sapiens
  Payload ID: 3239
  Gene Symbol: C19orf68
  Gene Name: chromosome 19 open reading frame 68
  ENSP ID: ENSP00000480314
MERPEPPPGTAAGQEEQELRERAFFSWAEFSRFFDAWCQQRLALFFVKSSMHLARCRWASAPPLYTLIDVLKYSYVRLVCKDVRAPSRPAVGPPQPGCPAFIIVKLSPLRDRLVVTECQLTHSHPACPLEFAYYFRPGHLLANACLPVRTTNKISKQFVAPADVRRLLSYCKGRDHGVLDALHVLEGLFRTDPEAKVKLVFVEDQAVVETVFFLTSRTRALLRRFPRMLLVDRLPGLQGALDLLAVLCVDGSGRARQAACCVARPGTPSLLRFALASLLQSAPDVKGRVRCLTAGPEVAAQLPAVRQLLPCARVQICRAQGLETLFSKAQELGGAGREDPGLWSRLCRLAGASSPAAYDEALAELHAHGPAAFVDYFERNWEPRRDMWVRFRAFEAARDLDACALVRGHRRRLLRRLSPSRGVAQCLRDLVAMQWADAAGEAVPEGPDGGGPWLEDEPGRGAQGENERVRGLETGDWGGAPKEGSIWRGAQMEKEWARALETRDWGGAQFEGEKGRALQIRDWRGGRLENQKPRGLEGGVLRGSKLEKGHLRGPEIRDWRGPQLEGEKDWGLEGYVWRGSQLEDQALRGLEGYTWRVAQLEDRRSTTDLRGTQFDYERVRSLEGSPWRGAQLHDERAGGLRTAEWKGPQSEVEKGRGLEVRNLRGIPLEKSLELAPENGDQRGPQWEDERRRGPEIAEERGARVGVKRRRGLEDIVLVQLGDTRVTGMENGDGGGARSVGPKSRAGRGMEWGDAGGRCLGLGNGVVSGTPVGTVLEGSPEWAAARSEHLAAGDGLQEGGEDGPREPKRLCRPPGEEEVDWEPLAKFRAACGPELADLVAEELAFARQHGTRGFHWTGAGFALKDGTSDFFLDGALTRCSCSIHAARRLPCRHLFAARLLTGAALFHMDLLRDCWGRAPEP

SEQ ID NO: 16283 - protein, 118 aa, Homo sapiens
  Payload ID: 3240
  Gene Symbol: C19orf70
  Gene Name: chromosome 19 open reading frame 70
  Uniprot ID: Q5XKP0
  ENSP ID: ENSP00000309561
MVARVWSLMRFLIKGSVAGGAVYLVYDQELLGPSDKSQAALQKAGEVVPPAMYQFSQYVCQQTGLQIPQLPAPPKIYFPIRDSWNAGIMTVMSALSVAPSKAREYSKEGWEYVKARTK

SEQ ID NO: 16284 - protein, 88 aa, Homo sapiens
  Payload ID: 3240
  Gene Symbol: C19orf70
  Gene Name: chromosome 19 open reading frame 70
  ENSP ID: ENSP00000464857
MVARVWSLMRFLIKGSVAGGAVYLVYDQELLGPSDKSQAALQKAGEVVPPAMYQFSQYVCQQTGLQIPQLPAPPKIYFPIRDSWNAGI

SEQ ID NO: 16285 - protein, 110 aa, Homo sapiens
  Payload ID: 3240
  Gene Symbol: C19orf70
  Gene Name: chromosome 19 open reading frame 70
  ENSP ID: ENSP00000465739
MRSECVLGAASDSGQEAPRDTWFLQGWKASRRFLIKGSVAGGAVYLVYDQELLGPSDKSQAALQKAGEVVPPAMYQFSQYVCQQTGLQIPQLPAPPKIYFPIRDSWNAGI

SEQ ID NO: 16286 - protein, 140 aa, Homo sapiens
  Payload ID: 3240
  Gene Symbol: C19orf70
  Gene Name: chromosome 19 open reading frame 70
  ENSP ID: ENSP00000468723
MRSECVLGAASDSGQEAPRDTWFLQGWKASRRFLIKGSVAGGAVYLVYDQELLGPSDKSQAALQKAGEVVPPAMYQFSQYVCQQTGLQIPQLPAPPKIYFPIRDSWNAGIMTVMSALSVAPSKAREYSKEGWEYVKARTK

SEQ ID NO: 16287 - protein, 209 aa, Homo sapiens
  Payload ID: 3241
  Gene Symbol: C19orf71
  Gene Name: chromosome 19 open reading frame 71
  Uniprot ID: A6NCJ1
  ENSP ID: ENSP00000327950
MQTLRQEAARPCIPSGTLEASFPAPLYSDDYLSLEGSRWPPAIRQATRWKYTPMGRDAAGQLWYTGLTNSDAWEAWYNLPRAPASPFREAYNRWHSCYQHRECSMPSAYTQHLRETAWHDPIVPAQYQAPSTRWGSALWKDRPIRGKEYVLNRNRYGVEPLWRASDYVPSLSAPQRPPGTTQNYREWVLEPYCPSTCQRSPPSLTPTPR

SEQ ID NO: 16288 - protein, 129 aa, Homo sapiens
  Payload ID: 3242
  Gene Symbol: C19orf73
  Gene Name: chromosome 19 open reading frame 73
  Uniprot ID: Q9NVV2
  ENSP ID: ENSP00000386230
MRLKVGFQGGGCFRKDALCLEGGVSARWARAPHSAPLRPPRELHAAPPPATPTQTVVRPAGFPRRTRLMVRSAPPTQRPPTGSGCVSGLWRKGLGLRPQTLLRVGSVVLSSAPALRPRLGPCLRPPPSD

SEQ ID NO: 16289 - protein, 198 aa, Homo sapiens
  Payload ID: 3243
  Gene Symbol: C19orf80
  Gene Name: chromosome 19 open reading frame 80
  Uniprot ID: Q6UXH0
  ENSP ID: ENSP00000252453
MPVPALCLLWALAMVTRPASAAPMGGPELAQHEELTLLFHGTLQLGQALNGVYRTTEGRLTKARNSLGLYGRTIELLGQEVSRGRDAAQELRASLLETQMEEDILQLQAEATAEVLGEVAQAQKVLRDSVQRLEVQLRSAWLGPAYREFEVLKAHADKQSHILWALTGHVQRQRREMVAQQHRLRQIQERLHTAALPA

SEQ ID NO: 16290 - protein, 99 aa, Homo sapiens
  Payload ID: 3243
  Gene Symbol: C19orf80
  Gene Name: chromosome 19 open reading frame 80
  ENSP ID: ENSP00000464941
MEEDILQLQAEATAEVLGEVAQAQKVLRDSVQRLEVQLRSAWLGPAYREFEVLKAHADKQSHILWALTGHVQRQRREMVAQQHRLRQIQERLHTAALPA

SEQ ID NO: 16291 - protein, 58 aa, Homo sapiens
  Payload ID: 3243
  Gene Symbol: C19orf80
  Gene Name: chromosome 19 open reading frame 80
  ENSP ID: ENSP00000465378
  MOD_RES (1)..(1): Any amino acid
XAQELRASLLETQAHADKQSHILWALTGHVQRQRREMVAQQHRLRQIQERLHTAALPA

SEQ ID NO: 16292 - protein, 198 aa, Homo sapiens; identical to SEQ ID NO: 16289
  Payload ID: 3243
  Gene Symbol: C19orf80
  Gene Name: chromosome 19 open reading frame 80
  Uniprot ID: Q6UXH0
  ENSP ID: ENSP00000479969

SEQ ID NO: 16293 - protein, 157 aa, Homo sapiens
  Payload ID: 3244
  Gene Symbol: C19orf81
  Gene Name: chromosome 19 open reading frame 81
  ENSP ID: ENSP00000391035
MDLETPEEMQARSLGRPIKSSKQYLRQVIAEYEALDRELPCIRKFPTPPASQPLCLCMETLPEEDFTHLEVLQALEAQLPGAMESGRVSSIRFENMNVICGTAGRRNRWLIAVTDFQTRSRLLRSGLSPRGLAHQIVRHDDLLLGDYRLHLRRSLVR

SEQ ID NO: 16294 - protein, 198 aa, Homo sapiens
  Payload ID: 3244
  Gene Symbol: C19orf81
  Gene Name: chromosome 19 open reading frame 81
  Uniprot ID: C9J6K1
  ENSP ID: ENSP00000417035
MQPEVEPVCFPAMGSPTMHRKAGALLMDLETPEEMQARSLGRPIKSSKQYLRQVIAEYEALDRELPCIRKFPTPPASQPLCLCMETLPEEDFTHLEVLQALEAQLPGAMESGRVSSIRFENMNVICGTAGRRNRWLIAVTDFQTRSRLLRSGLSPRGLAHQIVRHDDLLLGDYRLHLRRSLVRRRMLEALGAEPNEEA

SEQ ID NO: 16295 - protein, 186 aa, Homo sapiens
  Payload ID: 3245
  Gene Symbol: C19orf84
  Gene Name: chromosome 19 open reading frame 84
  Uniprot ID: I3L1E1
  ENSP ID: ENSP00000458772
MEQPKDGAGPEGNNLSLPSSGTEPWPPAPLPAPPPLLLNSTDPTHLGLPESVASVTVPIRLDTLSCLLHSALLGAYTFQQALPSCPCCSQAGHSQPGAVRRPPRGRGGWEVRHRPGWGRGLHRRGLGRAEQPERGRAGGPGAGPRTPPMTLPSPPTLPAQDGKKEARGPEPPLETPLAAEDWETEY

SEQ ID NO: 16296 - protein, 38 aa, Homo sapiens
  Payload ID: 3245
  Gene Symbol: C19orf84
  Gene Name: chromosome 19 open reading frame 84
  ENSP ID: ENSP00000466779
MTLPSPPTLPAQDGKKEARGPEPPLETPLAAEDWETEY

SEQ ID NO: 16297 - protein, 125 aa, Homo sapiens
  Payload ID: 3246
  Gene Symbol: C2orf15
  Gene Name: chromosome 2 open reading frame 15
  Uniprot ID: Q8WU43
  ENSP ID: ENSP00000302202
MSSTLGKLSNQVEETLPLLKKVPANYFHICSAILMGFSLSKSATQVSAIHMDSKVDDHLIRGTEKSRLEPATQLFQNTKKIRLEDTNQENFTRIEGTGTGSLSGKALGSVVYVKESDGLEMTDVE

SEQ ID NO: 16298 - protein, 125 aa, Homo sapiens; identical to SEQ ID NO: 16297
  Payload ID: 3246
  Gene Symbol: C2orf15
  Gene Name: chromosome 2 open reading frame 15
  Uniprot ID: Q8WU43
  ENSP ID: ENSP00000386654

SEQ ID NO: 16299 - protein, 1984 aa, Homo sapiens
  Payload ID: 3247
  Gene Symbol: C2orf16
  Gene Name: chromosome 2 open reading frame 16
  Uniprot ID: Q68DN1
  ENSP ID: ENSP00000386190
MELTPGAQQQGINYQELTSGWQDVKSMMLVPEPTRKFPSGPLLTSVRFSNLSPESQQQDVKSLEFTVEPKLQSVKHVKLSSVSLQQTIKSVELAPGSLPQRVKYGEQTPRTNYQIMESSELIPRPGHQFAKYAEMIPQPKYQIPKSANLISIPIYHATESSEMAQGLAYKGIDTVEKSVGLTPKLTGRAKESLGMLLQPDLQVPKFVDLTPMVRDQGSKFLGLTPEKSYQILETMELLSQSRPRVKDVGELYMKPLQQTVEYEGITPELKHYFTEAMGLTAEARIQANEFFGMTPKPTSQATGFAERSPRLCPQNLECVEVISEKRLQGEESVVLIPKSLHHVPDSASGMTPGLGHRVPESVELTSKSGVQVEKTLQLTPKPQHHVGSPGIISGLGHQVPESVNLTCKQWLQMEESLEVPLKQTSQVIGHEESVELTSEARQHREVSMGLTKSKNQSMKSPGTTPGPLGRIVEFMRISPEPLDQVTESARTQLQVAQSEEVILIDVPKVVQSVKVTPGPPFQIVKSVTIPRPTPQMVEYIELTPKLQYVRPSEHHTGPCLQDVKSTKLITKPKHQILETVELTGFQIVKTMLIPGPSLQIVKSEELAPGPIPQVVEPIGVALESGIEAINCVDLLPRPHLQELIVPAELTPSPCTQVKSAELTSPQTSPFEEHTILTHKQGLQAVKSTVIKTEPPKVMETEDLNLGHVCQNRDCQKLTSEELQVGTDFSRFLQSSSTTLISSSVRTASELGGLWDSGIQEVSRALDIKNPGTDILQPEETYIDPTMIQSLTFPLALHNQSSDKTANIVENPCPEILGVDVISKETTKRKQMEELENSLQRHLPQSWRSRSRTFQAESGVQKGLIKSFPGRQHNVWESHAWRQRLPRKYLSTMLMLGNILGTTMERKLCSQTSLAERATADTCQSIQNLFGIPAELMEPSQSLPEKGPVTISQPSVVKNYIQRHTFYHGHKKRMALRIWTRGSTSSIIQQYSGTRVRIKKTNSTFNGISQEVIQHMPVSCAGGQLPVLVKSESSLSIFYDREDLVPMEESEDSQSDSQTRISESQHSLKPNYLSQAKTDFSEQFQLLEDLQLKIAAKLLRSQIPPDVPPPLASGLVLKYPICLQCGRCSGLNCHHKLQTTSGPYLLIYPQLHLVRTPEGHGEVRLHLGFRLRIGKRSQISKYRERDRPVIRRSPISPSQRKAKIYTQASKSPTSTIDLQSGPSQSPAPVQVYIRRGQRSRPDLVEKTKTRAPGHYEFTQVHNLPESDSESTQNEKRAKVRTKKTSDSKYPMKRITKRLRKHRKFYTNSRTTIESPSRELAAHLRRKRIGATQTSTASLKRQPKKPSQPKFMQLLFQSLKRAFQTAHRVIASVGRKPVDGTRPDNLWASKNYYPKQNARDYCLPSSIKRDKRSADKLTPAGSTIKQEDILWGGTVQCRSAQQPRRAYSFQPRPLRLPKPTDSQSGIAFQTASVGQPLRTVQKDSSSRSKKNFYRNETSSQESKNLSTPGTRVQARGRILPGSPVKRTWHRHLKDKLTHKEHNHPSFYRERTPRGPSERTRHNPSWRNHRSPSERSQRSSLERRHHSPSQRSHCSPSRKNHSSPSERSWRSPSQRNHCSPPERSCHSLSERGLHSPSQRSHRGPSQRRHHSPSERSHRSPSERSHRSSSERRHRSPSQRSHRGPSERSHCSPSERRHRSPSQRSHRGPSERRHHSPSKRSHRSPARRSHRSPSERSHHSPSERSHHSPSERRHHSPSERSHCSPSERSHCSPSERRHRSPSERRHHSPSEKSHHSPSERSHHSPSERRRHSPLERSRHSLLERSHRSPSERRSHRSFERSHRRISERSHSPSEKSHLSPLERSRCSPSERRGHSSSGKTCHSPSERSHRSPSGMRQGRTSERSHRSSCERTRHSPSEMRPGRPSGRNHCSPSERSRRSPLKEGLKYSFPGERPSHSLSRDFKNQTTLLGTTHKNPKAGQVWRPEATR

SEQ ID NO: 16300 - protein, 148 aa, Homo sapiens
  Payload ID: 3248
  Gene Symbol: C2orf40
  Gene Name: chromosome 2 open reading frame 40
  Uniprot ID: Q9H1Z8
  ENSP ID: ENSP00000238044
MAASPARPAVLALTGLALLLLLCWGPGGISGNKLKLMLQKREAPVPTKTKVAVDENKAKEFLGSLKRQKRQLWDRTRPEVQQWYQQFLYMGFDEAKFEDDITYWLNRDRNGHEYYGDYYQRHYDEDSAIGPRSPYGFRHGASVNYDDY

SEQ ID NO: 16301 - protein, 112 aa, Homo sapiens
  Payload ID: 3248
  Gene Symbol: C2orf40
  Gene Name: chromosome 2 open reading frame 40
  ENSP ID: ENSP00000386421
MLQKREAPVPTKTKVAVDENKAKEFLGSLKRQKRQLWDRTRPEVQQWYQQFLYMGFDEAKFEDDITYWLNRDRNGHEYYGDYYQRHYDEDSAIGPRSPYGFRHGASVNYDDY

SEQ ID NO: 16302 - protein, 142 aa, Homo sapiens
  Payload ID: 3248
  Gene Symbol: C2orf40
  Gene Name: chromosome 2 open reading frame 40
  ENSP ID: ENSP00000388664
MQQLRVRGSYRSASQFAGWRRVFYQARQGGISGNKLKLMLQKREAPVPTKTKVAVDENKAKEFLGSLKRQKRQLWDRTRPEVQQWYQQFLYMGFDEAKFEDDITYWLNRDRNGHEYYGDYYQRHYDEDSAIGPRSPYGFRHG

SEQ ID NO: 16303 - protein, 574 aa, Homo sapiens
  Payload ID: 3249
  Gene Symbol: C2orf42
  Gene Name: chromosome 2 open reading frame 42
  Uniprot ID: Q9NWW7
  ENSP ID: ENSP00000264434
MEPNSLRTKVPAFLSDLGKATLRGIRKCPRCGTYNGTRGLSCKNKTCGTIFRYGARKQPSVEAVKIITGSDLQVYSVRQRDRGPDYRCFVELGVSETTIQTVDGTIITQLSSGRCYVPSCLKAATQGVVENQCQHIKLAVNCQAEATPLTLKSSVLNAMQASPETKQTIWQLATEPTGPLVQRITKNILVVKCKASQKHSLGYLHTSFVQKVSGKSLPERRFFCSCQTLKSHKSNASKDETAQRCIHFFACICAFASDETLAQEFSDFLNFDSSGLKEIIVPQLGCHSESTVSACESTASKSKKRRKDEVSGAQMNSSLLPQDAVSSNLRKSGLKKPVVASSLKRQACGQLLDEAQVTLSFQDWLASVTERIHQTMHYQFDGKPEPLVFHIPQSFFDALQQRISIGSAKKRLPNSTTAFVRKDALPLGTFSKYTWHITNILQVKQILDTPEMPLEITRSFIQNRDGTYELFKCPKVEVESIAETYGRIEKQPVLRPLELKTFLKVGNTSPDQKEPTPFIIEWIPDILPQSKIGELRIKFEYGHHRNGHVAEYQDQRPPLDQPLELAPLTTITFP

SEQ ID NO: 16304 - protein, 59 aa, Homo sapiens
  Payload ID: 3249
  Gene Symbol: C2orf42
  Gene Name: chromosome 2 open reading frame 42
  ENSP ID: ENSP00000388437
MEPNSLRTKVPAFLSDLGKATLRGIRKCPRCGTYNGTRGLSCKNKTCGTIFRYGARKQP

SEQ ID NO: 16305 - protein, 127 aa, Homo sapiens
  Payload ID: 3249
  Gene Symbol: C2orf42
  Gene Name: chromosome 2 open reading frame 42
  ENSP ID: ENSP00000389921
MEPNSLRTKVPAFLSDLGKATLRGIRKCPRCGTYNGTRGLSCKNKTCGTIFRYGARKQPSVEAVKIITGSDLQVYSVRQRDRGPDYRCFVELGVSETTIQTVDGTIITQLSSGRCYVPSCLKAATQG

SEQ ID NO: 16306 - protein, 112 aa, Homo sapiens
  Payload ID: 3249
  Gene Symbol: C2orf42
  Gene Name: chromosome 2 open reading frame 42
  ENSP ID: ENSP00000391119
MEPNSLRTKVPAFLSDLGKATLRGIRKCPRCGTYNGTRGLSCKNKTCGTIFRYGARKQPSVEAVKIITGSDLQVYSVRQRDRGPDYRCFVELGVSETTIQTVDGTIITQLSS

SEQ ID NO: 16307 - protein, 60 aa, Homo sapiens
  Payload ID: 3249
  Gene Symbol: C2orf42
  Gene Name: chromosome 2 open reading frame 42
  ENSP ID: ENSP00000394401
MEPNSLRTKVPAFLSDLGKATLRGIRKCPRCGTYNGTRGLSCKNKTCGTIFRYGARKQPS

SEQ ID NO: 16308 - protein, 168 aa, Homo sapiens
  Payload ID: 3249
  Gene Symbol: C2orf42
  Gene Name: chromosome 2 open reading frame 42
  ENSP ID: ENSP00000396751
MEPNSLRTKVPAFLSDLGKATLRGIRKCPRCGTYNGTRGLSCKNKTCGTIFRYGARKQPSVEAVKIITGSDLQVYSVRQRDRGPDYRCFVELGVSETTIQTVDGTIITQLSSGRCYVPSCLKAATQGVVENQCQHIKLAVNCQAEATPLTLKSSVLNAMQASPETKQT

SEQ ID NO: 16309 - protein, 22 aa, Homo sapiens
  Payload ID: 3249
  Gene Symbol: C2orf42
  Gene Name: chromosome 2 open reading frame 42
  ENSP ID: ENSP00000399442
MEPNSLRTKVPAFLSDLGKATL

SEQ ID NO: 16310 - protein, 574 aa, Homo sapiens; identical to SEQ ID NO: 16303
  Payload ID: 3249
  Gene Symbol: C2orf42
  Gene Name: chromosome 2 open reading frame 42
  Uniprot ID: Q9NWW7
  ENSP ID: ENSP00000404515

SEQ ID NO: 16311 - protein, 31 aa, Homo sapiens
  Payload ID: 3249
  Gene Symbol: C2orf42
  Gene Name: chromosome 2 open reading frame 42
  ENSP ID: ENSP00000405955
MEPNSLRTKVPAFLSDLGKATLRGIRKCPRC

SEQ ID NO: 16312 - protein, 159 aa, Homo sapiens
  Payload ID: 3249
  Gene Symbol: C2orf42
  Gene Name: chromosome 2 open reading frame 42
  ENSP ID: ENSP00000407799
MEPNSLRTKVPAFLSDLGKATLRGIRKCPRCGTYNGTRGLSCKNKTCGTIFRYGARKQPSVEAVKIITGSDLQVYSVRQRDRGPDYRCFVELGVSETTIQTVDGTIITQLSSGRCYVPSCLKAATQGVVENQCQHIKLAVNCQAEATPLTLKSSVLNAM

SEQ ID NO: 16313 - protein, 721 aa, Homo sapiens
  Payload ID: 3250
  Gene Symbol: C2orf44
  Gene Name: chromosome 2 open reading frame 44
  Uniprot ID: Q9H6R7
  ENSP ID: ENSP00000295148
MELGKGKLLRTGLNALHQAVHPIHGLAWTDGNQVVLTDLRLHSGEVKFGDSKVIGQFECVCGLSWAPPVADDTPVLLAVQHEKHVTVWQLCPSPMESSKWLTSQTCEIRGSLPILPQGCVWHPKCAILTVLTAQDVSIFPNVHSDDSQVKADINTQGRIHCACWTQDGLRLVVAVGSSLHSYIWDSAQKTLHRCSSCLVFDVDSHVCSITATVDSQVAIATELPLDKICGLNASETFNIPPNSKDMTPYALPVIGEVRSMDKEATDSETNSEVSVSSSYLEPLDLTHIHFNQHKSEGNSLICLRKKDYLTGTGQDSSHLVLVTFKKAVTMTRKVTIPGILVPDLIAFNLKAHVVAVASNTCNIILIYSVIPSSVPNIQQIRLENTERPKGICFLTDQLLLILVGKQKLTDTTFLPSSKSDQYAISLIVREIMLEEEPSITSGESQTTYSTFSAPLNKANRKKLIESLSPDFCHQNKGLLLTVNTSSQNGRPGRTLIKEIQSPLSSICDGSIALDAEPVTQPASLPRHSSTPDHTSTLEPPRLPQRKNLQSEKETYQLSKEVEILSRNLVEMQRCLSELTNRLHNGKKSSSVYPLSQDLPYVHIIYQKPYYLGPVVEKRAVLLCDGKLRLSTVQQTFGLSLIEMLHDSHWILLSADSEGFIPLTFTATQEIIIRDGSLSRSDVFRDSFSHSPGAVSSLKVFTGLAAPSLDTTGCCNHVDGMA

SEQ ID NO: 16314 - protein, 622 aa, Homo sapiens
  Payload ID: 3250
  Gene Symbol: C2orf44
  Gene Name: chromosome 2 open reading frame 44
  Uniprot ID: Q9H6R7
  ENSP ID: ENSP00000385816
MELGKGKLLRTGLNALHQAVHPIHGLAWTDGNQVVLTDLRLHSGEVKFGDSKVIGQFECVCGLSWAPPVADDTPVLLAVQHEKHVTVWQLCPSPMESSKWLTSQTCEIRGSLPILPQGCVWHPKCAILTVLTAQDVSIFPNVHSDDSQVKADINTQGRIHCACWTQDGLRLVVAVGSSLHSYIWDSAQKTLHRCSSCLVFDVDSHVCSITATVDSQVAIATELPLDKICGLNASETFNIPPNSKDMTPYALPVIGEVRSMDKEATDSETNSEVSVSSSYLEPLDLTHIHFNQHKSEGNSLICLRKKDYLTGTGQDSSHLVLVTFKKAVTMTRKVTIPGILVPDLIAFNLKAHVVAVASNTCNIILIYSVIPSSVPNIQQIRLENTERPKGICFLTDQLLLILVGKQKLTDTTFLPSSKSDQYAISLIVREIMLEEEPSITSGESQTTYSTFSAPLNKANRKKLIESLSPDFCHQNKGLLLTVNTSSQNGRPGRTLIKEIQSPLSSICDGSIALDAEPVTQPASLPRHSSTPDHTSTLEPPRLPQRKNLQSEKETYQLSKEVEILSRNLVEMQRCLSELTNRLHNGKKSSSVYPLSQDLPYVHIIYQIPTGFFSLLTVRALSR

SEQ ID NO: 16315 - protein, 174 aa, Homo sapiens
  Payload ID: 3250
  Gene Symbol: C2orf44
  Gene Name: chromosome 2 open reading frame 44
  ENSP ID: ENSP00000413426
MELGKGKLLRTGLNALHQAVHPIHGLAWTDGNQVVLTDLRLHSGEVKFGDSKVIGQFECVCGLSWAPPVADDTPVLLAVQHEKHVTVWQLCPSPMESSKWLTSQTCEIRGSLPILPQGCVWHPKCAILTVLTAQDVSIFPNVHSDDSQVKADINTQGRIHCACWTQDGLRLVVA

SEQ ID NO: 16316 - protein, 291 aa, Homo sapiens
  Payload ID: 3251
  Gene Symbol: C2orf47
  Gene Name: chromosome 2 open reading frame 47
  Uniprot ID: Q8WWC4
  ENSP ID: ENSP00000295079
MALAARLLPQFLHSRSLPCGAVRLRTPAVAEVRLPSATLCYFCRCRLGLGAALFPRSARALAASALPAQGSRWPVLSSPGLPAAFASFPACPQRSYSTEEKPQQHQKTKMIVLGFSNPINWVRTRIKAFLIWAYFDKEFSITEFSEGAKQAFAHVSKLLSQCKFDLLEELVAKEVLHALKEKVTSLPDNHKNALAANIDEIVFTSTGDISIYYDEKGRKFVNILMCFWYLTSANIPSETLRGASVFQVKLGNQNVETKQLLSASYEFQREFTQGVKPDWTIARIEHSKLLE

SEQ ID NO: 16317 - protein, 291 aa, Homo sapiens; identical to SEQ ID NO: 16316
  Payload ID: 3251
  Gene Symbol: C2orf47
  Gene Name: chromosome 2 open reading frame 47
  Uniprot ID: Q8WWC4
  ENSP ID: ENSP00000376111

SEQ ID NO: 16318 - protein, 225 aa, Homo sapiens
  Payload ID: 3251
  Gene Symbol: C2orf47
  Gene Name: chromosome 2 open reading frame 47
  ENSP ID: ENSP00000396846
  MOD_RES (1)..(1): Any amino acid
XPQFLHSRSLPCGAVRLRTPAVAEVRLPSATLCYFCRCRLGLGAALFPRSARALAASALPAQGSRWPVLSSPGLPAAFASFPACPQRSYSTEEKPQQHQKTKMIVLGFSNPINWVRTRIKAFLIWAYFDKEFSITEFSEGAKQAFAHVSKLLSQCKFDLLEELVAKEVLHALKEKVTSLPDNHKNALAANIDEIVFTSTGDISIYYDEKGKYLSVELLDYERKRP

SEQ ID NO: 16319 - protein, 232 aa, Homo sapiens
  Payload ID: 3252
  Gene Symbol: C2orf49
  Gene Name: chromosome 2 open reading frame 49
  Uniprot ID: Q9BVC5
  ENSP ID: ENSP00000258457
MAGDVGGRSCTDSELLLHPELLSQEFLLLTLEQKNIAVETDVRVNKDSLTDLYVQHAIPLPQRDLPKNRWGKMMEKKREQHEIKNETKRSSTVDGLRKRPLIVFDGSSTSTSIKVKKTENGDNDRLKPPPQASFTSNAFRKLSNSSSSVSPLILSSNLPVNNKTEHNNNDAKQNHDLTHRKSPSGPVKSPPLSPVGTTPVKLKRAAPKEEAEAMNNLKPPQAKRKIQHVTWP

SEQ ID NO: 16320 - protein, 190 aa, Homo sapiens
  Payload ID: 3252
  Gene Symbol: C2orf49
  Gene Name: chromosome 2 open reading frame 49
  ENSP ID: ENSP00000386361
MAGDVGGRSCTDSELLLHPELLSQEFLLLTLEQKNIAVETDVRVNKDSLTDLYVQHAIPLPQRDLPKNRWGKMMEKKREQHEIKNETKRSSTVDGLRKRPLIVFDGSSTSTSIKVKKTENGDNDRLKPPPQNHDLTHRKSPSGPVKSPPLSPVGTTPVKLKRAAPKEEAEAMNNLKPPQAKRKIQHVTWP

SEQ ID NO: 16321 - protein, 162 aa, Homo sapiens
  Payload ID: 3253
  Gene Symbol: C2orf50
  Gene Name: chromosome 2 open reading frame 50
  Uniprot ID: Q96LR7
  ENSP ID: ENSP00000370997
MGSHPTPGLQRTTSAGYRLPPTRPPASVSPAARGGPMASRGLAGGCQAPQALKAQRVAQGAACDGVQQDQLWRELLEAERRGQQRWIQNWSFLKDYDPMGNKKEPEKLPDHVPLFSDTVPSSTNQVVGSRLDTPLGQTLIRMDFFFTEGARKKKLEDQMQPI

SEQ ID NO: 16322 - protein, 162 aa, Homo sapiens; identical to SEQ ID NO: 16321
  Payload ID: 3253
  Gene Symbol: C2orf50
  Gene Name: chromosome 2 open reading frame 50
  Uniprot ID: Q96LR7
  ENSP ID: ENSP00000384186

SEQ ID NO: 16323 - protein, 298 aa, Homo sapiens
  Payload ID: 3254
  Gene Symbol: C2orf54
  Gene Name: chromosome 2 open reading frame 54
  Uniprot ID: Q08AI8
  ENSP ID: ENSP00000302779
MDTGVWGWGAAACRWGPAERAAGSLNAASLREEQLHLSLLVSSGWRTISFHVVPVVRRKLGAPALEGVQQMPGFPEGSLRRILSQGVDLVPASAQLWRTSTDYLLTRLLGELGSLQGHRLDSLSILDRVNHESWRDSGQTDGLTFGHLKMVLLWASVLFLAPEDWAELQGAVYRLLVVLLCCLATRKLPHFLHPQRNLLQGSGLDLGAIYQRVEGFASQPEAALRIHATHLGRSPPPRIGSGLKALLQLPASDPTYWATAYFDVLLDKFQVFNIQDKDRISAMQSIFQKTRTLGGEES

SEQ ID NO: 16324 - protein, 447 aa, Homo sapiens
  Payload ID: 3254
  Gene Symbol: C2orf54
  Gene Name: chromosome 2 open reading frame 54
  Uniprot ID: Q08AI8
  ENSP ID: ENSP00000373586
MPAPALPTSAMAVQVPLWHHYLQAIRSREAPRAQDFQRAENVLLTVLERVHALDPRFIVDYSRGLEAFQFALRSSEDPMDMEVPLWVDAEALLIEEPEATQPEDGLELCHLGVPREGAGLERWTTEDTFTASSEGDAKCRGHIVPSKVLCVLKDLLVAAIVHCKHHSLIAPGSLNAASLREEQLHLSLLVSSGWRTISFHVVPVVRRKLGAPALEGVQQMPGFPEGSLRRILSQGVDLVPASAQLWRTSTDYLLTRLLGELGSLQGHRLDSLSILDRVNHESWRDSGQTDGLTFGHLKMVLLWASVLFLAPEDWAELQGAVYRLLVVLLCCLATRKLPHFLHPQRNLLQGSGLDLGAIYQRVEGFASQPEAALRIHATHLGRSPPPRIGSGLKALLQLPASDPTYWATAYFDVLLDKFQVFNIQDKDRISAMQSIFQKTRTLGGEES

SEQ ID NO: 16325 - protein, 279 aa, Homo sapiens
  Payload ID: 3254
  Gene Symbol: C2orf54
  Gene Name: chromosome 2 open reading frame 54
  Uniprot ID: Q08AI8
  ENSP ID: ENSP00000385338
MDTGSLNAASLREEQLHLSLLVSSGWRTISFHVVPVVRRKLGAPALEGVQQMPGFPEGSLRRILSQGVDLVPASAQLWRTSTDYLLTRLLGELGSLQGHRLDSLSILDRVNHESWRDSGQTDGLTFGHLKMVLLWASVLFLAPEDWAELQGAVYRLLVVLLCCLATRKLPHFLHPQRNLLQGSGLDLGAIYQRVEGFASQPEAALRIHATHLGRSPPPRIGSGLKALLQLPASDPTYWATAYFDVLLDKFQVFNIQDKDRISAMQSIFQKTRTLGGEES

SEQ ID NO: 16326 - protein, 132 aa, Homo sapiens
  Payload ID: 3254
  Gene Symbol: C2orf54
  Gene Name: chromosome 2 open reading frame 54
  ENSP ID: ENSP00000390935
MPAPALPTSAMAVQVPLWHHYLQAIRSREAPRAQDFQRAENVLLTVLERVHALDPRFIVDYSRGLEAFQFALRSSEDPMDMEVPLWVDAEALLIEEPEATQPEDGLELCHLGVPREGAGLERWTTEDTFTAS

SEQ ID NO: 16327 - protein, 108 aa, Homo sapiens
  Payload ID: 3254
  Gene Symbol: C2orf54
  Gene Name: chromosome 2 open reading frame 54
  ENSP ID: ENSP00000394874
MAVQVPLWHHYLQAIRSREAPRAQDFQRAENVLLTVLERVHALDPRFIVDYSRGLEAFQFALRSSEDPMDMEVPLWVDAEALLIEEPEATQPEDGLELCHLGVPREGA

SEQ ID NO: 16328 - protein, 395 aa, Homo sapiens
  Payload ID: 3255
  Gene Symbol: C2orf57
  Gene Name: chromosome 2 open reading frame 57
  Uniprot ID: Q53QW1
  ENSP ID: ENSP00000315557
MALPGYPLGNVDDSRSKDSPAGEPQGQVPLTADVLAVSSSVASTDWQDIDQASFKTATPRAISTSGDKDKSAVVPEHGQKTPRKITPLLPSQNPSPLQVSMSLQNPAWDRQVQDARTSQSLVVFPSHLLGKDKMSQMASVPEREPESAPSAPSAELQSTQHMEAQPVESDADHVTAGANGQHGPQAASTTKSAEEKAEHPKAPHPEAEALPSDESPVAMGANVVDSLGDLQTWFFPPPPAGSVSPSPGPHEVALGRRPLDSSLYTASEENSYMRSMTSLLDRGEGSISSLADILVWSETTMGMAIATGFLDSGHSTVADLLHSSGPSLRSVPSLVGSVSSAFSSGLVSGTSSALRTITRVLETVEQRTVEGIRSAMRYLTSHLTPRQAQADPNYD

SEQ ID NO: 16329 - protein, 177 aa, Homo sapiens
  Payload ID: 3256
  Gene Symbol: C2orf61
  Gene Name: chromosome 2 open reading frame 61
  Uniprot ID: Q8N801
  ENSP ID: ENSP00000294947
MDQPAVATASTSIREDLVGGESFITASKPAQKTSSFEREGWWRIALTDTPIPGTYHLKTFIEESLLNPVIATYNFKNEGRKKPPLVQRNNPVLNDLPQYMPPDFLDLLKKQVATYSFKDKPRPSPSTLVDKDQSLQLSPGQYNVLPAPVPKYASRSCVFRSTVQRFPTTYFIPVSIM

SEQ ID NO: 16330 - protein, 248 aa, Homo sapiens
  Payload ID: 3256
  Gene Symbol: C2orf61
  Gene Name: chromosome 2 open reading frame 61
  Uniprot ID: Q8N801
  ENSP ID: ENSP00000408527
MDQPAVATASTSIREDLVGGESFITASKPAQKTSSFEREGWWRIALTDTPIPGTYHLKTFIEESLLNPVIATYNFKNEGRKKPPLVQRNNPVLNDLPQYMPPDFLDLLKKQVATYSFKDKPRPSPSTLVDKDQSLQLSPGQYNVLPAPVPKYASRSCVFRSTVQRFPTTYFIPHEGPGPGHYNVKMPPTSSVTSCFQSRVPRFLPSCSKTPGPGAYTTLRQFPKQSPTIAKMGQEHSLFFNNNNWLLK

SEQ ID NO: 16331 - protein, 128 aa, Homo sapiens
  Payload ID: 3256
  Gene Symbol: C2orf61
  Gene Name: chromosome 2 open reading frame 61
  ENSP ID: ENSP00000414210
  MOD_RES (1)..(1): Any amino acid
XRPSPSTLVDKDQSLQLSPGQYNVLPAPVPKYASRSCVFRSTVQRFPTTYFIPHEGPGPGHYNVKMPPTSSVTSCFQSRVPRFLPSCSKTPGPGAYTTLRQFPKQSPTIAKMGQEHSLFFNNNNWLLK

SEQ ID NO: 16332 - protein, 117 aa, Homo sapiens
  Payload ID: 3257
  Gene Symbol: C2orf66
  Gene Name: chromosome 2 open reading frame 66
  Uniprot ID: Q6UXQ4
  ENSP ID: ENSP00000339384
MIIDSSRIPSFTQLHSTMTRAPLLLLCVALVLLGHVNGATVRNEDKWKPLNNPRNRDLFFRRLQAYFKGRGLDLGTFPNPFPTNENPRPLSFQSELTASASADYEEQKNSFHNYLKG

SEQ ID NO: 16333 - protein, 166 aa, Homo sapiens
  Payload ID: 3258
  Gene Symbol: C2orf68
  Gene Name: chromosome 2 open reading frame 68
  Uniprot ID: Q2NKX9
  ENSP ID: ENSP00000304410
MEAGPHPRPGHCCKPGGRLDMNHGFVHHIRRNQIARDDYDKKVKQAAKEKVRRRHTPAPTRPRKPDLQVYLPRHRDVSAHPRNPDYEESGESSSSGGSELEPSGHQLFCLEYEADSGEVTSVIVYQGDDPGKVSEKVSAHTPLDPPMREALKLRIQEEIAKRQSQH

SEQ ID NO: 16334 - protein, 127 aa, Homo sapiens
  Payload ID: 3258
  Gene Symbol: C2orf68
  Gene Name: chromosome 2 open reading frame 68
  Uniprot ID: Q2NKX9
  ENSP ID: ENSP00000386301
MEAGPHPRPGHCCKPGGRLDMNHGFVHHIRRNQIARDDYDKKVKQAAKEKVRRRHTPAPTRPRKPDLQVYLPRHRGEAARPACLQPARSSCNALPFSIGKNHFLLLRFSSSRLFPEPPPQRSQISAE

SEQ ID NO: 16335 - protein, 58 aa, Homo sapiens
  Payload ID: 3258
  Gene Symbol: C2orf68
  Gene Name: chromosome 2 open reading frame 68
  ENSP ID: ENSP00000395730
MEAGPHPRPGHCCKPGGRLDMNHGFVHHIRRNQIARYRPALRRRRHHSWPGLARPDSP

SEQ ID NO: 16336 - protein, 42 aa, Homo sapiens
  Payload ID: 3258
  Gene Symbol: C2orf68
  Gene Name: chromosome 2 open reading frame 68
  ENSP ID: ENSP00000401625
  MOD_RES (1)..(1): Any amino acid
XRLDMNHGFVHHIRRNQIARYRPALRRRRHHSWPGLARPDSP

SEQ ID NO: 16337 - protein, 385 aa, Homo sapiens
  Payload ID: 3259
  Gene Symbol: C2orf69
  Gene Name: chromosome 2 open reading frame 69
  Uniprot ID: Q8N8R5
  ENSP ID: ENSP00000312770
MWGFRLLRSPPLLLLLPQLGIGNASSCSQARTMNPGGSGGARCSLSAEVRRRQCLQLSTVPGADPQRSNELLLLAAAGEGLERQDLPGDPAKEEPQPPPQHHVLYFPGDVQNYHEIMTRHPENYQWENWSLENVATILAHRFPNSYIWVIKCSRMHLHKFSCYDNFVKSNMFGAPEHNTDFGAFKHLYMLLVNAFNLSQNSLSKKSLNVWNKDSIASNCRSSPSHTTNGCQGEKVRTCEKSDESAMSFYPPSLNDASFTLIGFSKGCVVLNQLLFELKEAKKDKNIDAFIKSIRTMYWLDGGHSGGSNTWVTYPEVLKEFAQTGIIVHTHVTPYQVRDPMRSWIGKEHKKFVQILGDLGMQVTSQIHFTKEAPSIENHFRVHEVF

SEQ ID NO: 16338 - protein, 201 aa, Homo sapiens
  Payload ID: 3260
  Gene Symbol: C2orf70
  Gene Name: chromosome 2 open reading frame 70
  Uniprot ID: A6NJV1
  ENSP ID: ENSP00000332875
MASRSAGTLLTEFNAAYVPPGLMPGYQGHVPTVAFSFGAPYGTTTLKYFQDHRNRAMEKSHTPFSQGGHFPTIFSTNPNLLLMERASTRDRWLHKPSYTRFNLDSHRSTELTNFYQMVQQHRKYYQDKTGTVPRVPYFAMPVREPERYPLPTVLPPLCPKKKWHLLRLAPENLKTYQTFPSGKRVSPQERKKRDCYFEFRA

SEQ ID NO: 16339 - protein, 184 aa, Homo sapiens
  Payload ID: 3260
  Gene Symbol: C2orf70
  Gene Name: chromosome 2 open reading frame 70
  ENSP ID: ENSP00000386615
MPWVDSDLKRFLVPGPRPHCGLLLWRSLRHHHPQVLPGPPQQSHGEEPHSLQPRRPFPHHLLHQPQPPADGARQHPGPLAAQAQLHSLQPGQPSLHRAYEFLPDGPAASEVLSRQDGHSASSPLLCDAREGAGTVPPPHRPASSVPKEEVAPFKTSPREPEDLPDLPIREEGLSTGAEKERLLL

SEQ ID NO: 16340 - protein, 128 aa, Homo sapiens
  Payload ID: 3260
  Gene Symbol: C2orf70
  Gene Name: chromosome 2 open reading frame 70
  ENSP ID: ENSP00000395924
  MOD_RES (1)..(1): Any amino acid
XLQPGQPSLHRAYEFLPDGPAASEVLSRQDGHSASSPLLCDAREGAGTVPPPHRPVAWPLALLLTVSQRTQRANQVVGRRGPPLCPKKKWHLLRLAPENLKTYQTFPSGKRVSPQERKKRDCYFEFRA

SEQ ID NO: 16341 - protein, 1288 aa, Homo sapiens
  Payload ID: 3261
  Gene Symbol: C2orf71
  Gene Name: chromosome 2 open reading frame 71
  Uniprot ID: A6NGG8
  ENSP ID: ENSP00000332809
MGCTPSHSDLVNSVAKSGIQFLKKPKAIRPGCQGGSERGSIPLLVKNSTCYDAGEGLAEEQPSPRRNQTTAKGLCQLMGDPASGKRKDMEGLIPGTKTSSSQLNKSQSHMAKDIPFKTQGSHGSQGADFSGDESEESSTQDTSKWKRTAKCHTSSTQSHCYQTIHPAHEPEGKVDFPEPLVKAHQQAYTYLHSSLSKYEAILCIIHQATQTRELLQPMVSFLLLCFEEISQLLGEISKDGEVLLQEVREDLAWPLKKREPQEQPNLLQQLLQYTVSKLQVLNGTVASLTGSFLEGSSSYLHSTATHLENKLSTKRNVDERLLRALRQLESLASGCGDPGVQGLPLCSEDSGIGADNESVQSVDKLGKQTSWDLAPEPEEWKSVTSPHTEARQSGHTWQQSPFCLGSGRPQDCLLSGAPMAKVQPRAQDEARSPCLSSTSPENITSPPLKLGTSTPCDSFGIGVSVEPHLSKTSRPMDASSLSDSEDSSPEEEEEDKMSSMSLCAWQEKTPHSRPQSSPADRESPFQARTRRLRSLQAQEMILKMKESISERIKFVPVPCGHQDWSEEEEGRTVVPPRPSTVSGSRRAPERQTRSQSESCLQSHVEDPTFQELRRVQRDLSQKLEAFYALGAKGQGQSQEQILQPRAAAVWPNGTCRVSPSNTTSRLKASLTKNFSILPSQDKSILQKCNPHPEDEQGKAGKLPNAIPSGEVSEAAKATDWNVRGCPTRTSVKKLIETFSPTESLRMLGDSKDAGASPCLRNCIMPPRFPKYTGLAPLYPKPQISPASGRESLKMGIGWKPLAPIFPPLPKAEAAKSEELSCEMEGNLEHLPPPPMEVLMDKSFASLESPESSKSTENSPKETQEPGPGEAGPTRRTWASPKLRASVSPLDLLPSKSTASLTKPHSTGPGSGRSSCQPRKPALDLSSPPATSQSPEVKGGTWSQAEKATSLYRQPRKAIAWHHSGPPSGQNRTSESSLARPRQSRERSPPVGRKASPTRTHWVPQADKRRRSLPSSYRPAQPSPSAVQTPPSPPVSPRVLSPPTTKRRTSPPHQPKLPNPPPESAPAQCKVPSPPTQHPEASPPFSIPSPSPPMSPSQEHKETRDSEDSQAVIAKVSGNTHSIFCPATSSLFEAKPPLSTAHPLTPPSLPPEAGGPLGNPAECWKNSSGPWLRADSQRRAALCALNPLPFLRRTASDRQPGGRPQPPTLDPTSTSYESQLGQNSSSEESPKKDTEPGSSPCSPELQGGTRRASPPEFCVLGHGLQPEPRTGHIQDKSQPEAQPQQEEVS

SEQ ID NO: 16342 - protein, 295 aa, Homo sapiens
  Payload ID: 3262
  Gene Symbol: C2orf72
  Gene Name: chromosome 2 open reading frame 72
  Uniprot ID: A6NCS6
  ENSP ID: ENSP00000362743
MERELEALAARLARPAEPPFQALVEAAGGRGQVLLVGELWEREQSRALLRDFARAVFPPEPGAAKPGGAAAEGAGPGAARGAQRAARAAGAAGAAAAAARAIRSPLVFVLCRASSLAAREPRRRLREMLRDVRGRRRAGAALVGVLVAEAGPEDAVAPGLRLLEALLRAVFGRQAGGPVQAAAYCPGLPASCLAVQAAACRALQAAGAGQPVEGAWERPGLPGLLACFSWGPWSRRKNQDVAACRSSAQEDFQEPEEELPLTAIFPNGDCDDLGRGSKACDGVVHTPAEPTGDSR

SEQ ID NO: 16343 - protein, 59 aa, Homo sapiens
  Payload ID: 3263
  Gene Symbol: C2orf73
  Gene Name: chromosome 2 open reading frame 73
  ENSP ID: ENSP00000325555
MEEKEDKHQVTGGHMVKHWNLSSYHLTTLRAPRGVTSKNHRVHWFCQSNTARCKSLLVE

SEQ ID NO: 16344 - protein, 287 aa, Homo sapiens
  Payload ID: 3263
  Gene Symbol: C2orf73
  Gene Name: chromosome 2 open reading frame 73
  Uniprot ID: Q8N5S3
  ENSP ID: ENSP00000381631
MEEKEDKHQQHKIEDAAITYVSENEEIKHEEKPGKSIHHSKSHVGRGRIYYAKFINTNARTYNEPFPYIDPKKGPEIQGDWWSHGKALEPVFLPPYDSKSTQRSDFQKPSCPLVLPVKHSKMQKPSCGIVPLASPGTSAELQNNFIEYISFIHQYDARKTPNEPLQGKRHGAFVQREIKPGSRPTVPKGAEVLLNTPGSRSSEQSKKTEKGNSAESRMISPGLCQQNSQELLEPKTHLSETDVRQAAKACPSTPESREKTSGATQTTVGDALFTRHKPLNPPIKKSE

SEQ ID NO: 16345 - protein, 113 aa, Homo sapiens
  Payload ID: 3263
  Gene Symbol: C2orf73
  Gene Name: chromosome 2 open reading frame 73
  ENSP ID: ENSP00000385348
MEEKEDKHQQHKIEDAAITYGDWWSHGKALEPVFLPPYDSKSTQRSDFQKPSCPLVLPVKHSKMQKPSCGIDETLRKGAKTVTVVLCHSAGRKGTERSRACFFRWFHAILFSP

SEQ ID NO: 16346 - protein, 211 aa, Homo sapiens
  Payload ID: 3263
  Gene Symbol: C2orf73
  Gene Name: chromosome 2 open reading frame 73
  ENSP ID: ENSP00000389570
MEEKEDKHQQHKIEDAAITYGDWWSHGKALEPVFLPPYDSKSTQRSDFQKPSCPLVLPVKHSKMQKPSCGIVPLASPGTSAELQNNFIEYISFIHQYDARKTPNEPLQGKRHGAFVQREIKPGSRPTVPKGAEVLLNTPGSRSSEQSKKTEKGNSAESRMISPGLCQQNSQELLEPKTHLSETDVRQAAKACPSTPESREKTSGATQTTVG

SEQ ID NO: 16347 - protein, 82 aa, Homo sapiens
  Payload ID: 3263
  Gene Symbol: C2orf73
  Gene Name: chromosome 2 open reading frame 73
  ENSP ID: ENSP00000403195
  MOD_RES (1)..(1): Any amino acid
XEDKHQQHKIEDAAITYGDWWSHGKALEPVFLPPYDSKSTQRSDFQKPSCPLVLPVKHSKMQKPSCGIETRSFCTERDKTRQ

SEQ ID NO: 16348 - protein, 223 aa, Homo sapiens
  Payload ID: 3263
  Gene Symbol: C2orf73
  Gene Name: chromosome 2 open reading frame 73
  ENSP ID: ENSP00000417971
MQVSNGFSQELALFGQHKIEDAAITYVSENEEIKHEEKPGKSIHHSKSHVGRGRIYYAKFINTNARTYNEPFPYIDPKKGPEIQGDWWSHGKALEPVFLPPYDSKSTQRSDFQKPSCPLVLPVKHSKMQKPSCGIVPLASPGTSAELQNNFIEYISFIHQYDARKTPNEPLQGKRHGAFVQREIKPGSRPTVPKGAEVLLNTPGSRSSEQSKKTEKGNSAESR

SEQ ID NO: 16349 - protein, 70 aa, Homo sapiens
  Payload ID: 3263
  Gene Symbol: C2orf73
  Gene Name: chromosome 2 open reading frame 73
  ENSP ID: ENSP00000481108
MISPGLCQQNSQELLEPKTHLSETDVRQAAKACPSTPESREKTSGATQTTVGDALFTRHKPLNPPIKKSE

SEQ ID NO: 16350 - protein, 52 aa, Homo sapiens
  Payload ID: 3264
  Gene Symbol: C2orf74
  Gene Name: chromosome 2 open reading frame 74
  ENSP ID: ENSP00000381621
MDQGLREVVGDSRMPWTIWSPSCCRSCHHEWTPSGHHSKEVCRQEMESRSVA

SEQ ID NO: 16351 - protein, 115 aa, Homo sapiens
  Payload ID: 3264
  Gene Symbol: C2orf74
  Gene Name: chromosome 2 open reading frame 74
  ENSP ID: ENSP00000398725
MQVMNLNVPMRPGILVQRQSKEVLATPLENRRDMEAEEENQINEKQEPENAGETGQEEDDGLQKIHTSVTRTPSVVESQKRPLKGVTFSREVIVVDLGNEYPTPRSYTREHKERK

SEQ ID NO: 16352 - protein, 194 aa, Homo sapiens
  Payload ID: 3264
  Gene Symbol: C2orf74
  Gene Name: chromosome 2 open reading frame 74
  Uniprot ID: A8MZ97
  ENSP ID: ENSP00000402915
MSLLAKPMSFETTAITFFIILLICLICILLLLVVFLYKCFQGRKGKETKKVPCTDANGGVDCAAAKVVTSNPEDHERILMQVMNLNVPMRPGILVQRQSKEVLATPLENRRDMEAEEENQINEKQEPENAGETGQEEDDGLQKIHTSVTRTPSVVESQKRPLKGVTFSREVIVVDLGNEYPTPRSYTREHKERK

SEQ ID NO: 16353 - protein, 28 aa, Homo sapiens
  Payload ID: 3264
  Gene Symbol: C2orf74
  Gene Name: chromosome 2 open reading frame 74
  ENSP ID: ENSP00000481253
MQVMNLNVPMRPGILVQRQSKEVLATPL

SEQ ID NO: 16354 - protein, 115 aa, Homo sapiens; identical to SEQ ID NO: 16351
  Payload ID: 3264
  Gene Symbol: C2orf74
  Gene Name: chromosome 2 open reading frame 74
  ENSP ID: ENSP00000482798

SEQ ID NO: 16355 - protein, 187 aa, Homo sapiens
  Payload ID: 3264
  Gene Symbol: C2orf74
  Gene Name: chromosome 2 open reading frame 74
  ENSP ID: ENSP00000484061
MSLLAKPMSFETTAITFFIILLICLICILLLLVVFLYKCFQGRKGKETKKVPCTDANGGVDCAAAKVVTSNPEDHERRVWCRMPGILVQRQSKEVLATPLENRRDMEAEEENQINEKQEPENAGETGQEEDDGLQKIHTSVTRTPSVVESQKRPLKGVTFSREVIVVDLGNEYPTPRSYTREHKERK

SEQ ID NO: 16356 - protein, 126 aa, Homo sapiens
  Payload ID: 3265
  Gene Symbol: C2orf76
  Gene Name: chromosome 2 open reading frame 76
  Uniprot ID: Q3KRA6
  ENSP ID: ENSP00000335041
MAPGEVTITVRLIRSFEHRNFKPVVYHGVNLDQTVKEFIVFLKQDIPLRTNLPPPFRNYKYDALKIIHQAHKSKTNELVLSLEDDERLLLKEDSTLKAAGIASETEIAFFCEEDYKNYKANPISSW

SEQ ID NO: 16357 - protein, 126 aa, Homo sapiens; identical to SEQ ID NO: 16356
  Payload ID: 3265
  Gene Symbol: C2orf76
  Gene Name: chromosome 2 open reading frame 76
  Uniprot ID: Q3KRA6
  ENSP ID: ENSP00000386302

SEQ ID NO: 16358 - protein, 126 aa, Homo sapiens; identical to SEQ ID NO: 16356
  Payload ID: 3265
  Gene Symbol: C2orf76
  Gene Name: chromosome 2 open reading frame 76
  Uniprot ID: Q3KRA6
  ENSP ID: ENSP00000386714

SEQ ID NO: 16359 - protein, 126 aa, Homo sapiens; identical to SEQ ID NO: 16356
  Payload ID: 3265
  Gene Symbol: C2orf76
  Gene Name: chromosome 2 open reading frame 76
  Uniprot ID: Q3KRA6
  ENSP ID: ENSP00000387234

SEQ ID NO: 16360 - protein, 85 aa, Homo sapiens
  Payload ID: 3265
  Gene Symbol: C2orf76
  Gene Name: chromosome 2 open reading frame 76
  ENSP ID: ENSP00000388482
MSSVMVESWTGLPKGEAEASSSELLEFLHMAPGEVTITVRLIRSFEHRNFKPVVYHGVNLDQTVKEFIVFLKQDIPLRTNLPPPF

SEQ ID NO: 16361 - protein, 922 aa, Homo sapiens
  Payload ID: 3266
  Gene Symbol: C2orf78
  Gene Name: chromosome 2 open reading frame 78
  Uniprot ID: A6NCI8
  ENSP ID: ENSP00000387124
MHWLASATQTSASIVSSSLLSAVDVSSSLTMSEYFQNTSLPGTANSRQFSLPVVSNAAFLTGSISNFSRASAPAISSAWLQPSASGTSFQPLMGSAYLYQHSSTTMLSGVTGQSHICTSAASYPGVFEWDSTASTVKKSSSLRDFTVTVIDQNTAVSSMSMTAQYYKTSDTNTMVPLYPSLSASLVQGTLTQIPNQQGHNLSLPCQIGSQVYYYNQGTLGPQLSCLQSYGSVSYTGYRASAHQPEMVMVLKEVQPTNVLPPVSTSGMYYSVSSQPITETSVQVMETSLGMDTSLGLQSPSQTFCLPQTPEFSKSFSSRNTQTLESNPSPELGDISITPVQSPTNLLTLSPAPSQEKNENENLDEIKTNLSKPLDVHQILIGNQDPPLLPVEIPDIHPLLACIDPLGQEEQPGSENANLRNKSLSLEDQGIFENGIESSSDLADITTWVEDTYLPPIFSSLQDLDQPESPSAKKAKDTSAIKVNQVQEKSCVIKGHSDQVRKNKHKASEPIQGAPKAKIQPKNPECLLEREVVVGSATVSNSASVNKAKHSSNKPHKAASSRISKTKSHGQEKTKGNRKNSSKKSEESKQSGKKVKVEEKQTIPNMKRKKNQPELSQKTLKKPRSSLGMHMLESVQVFHALGKKIDMKTGFSSSRTLGSSSNTQNRQPFPALKPWLDIQHEGKGPEKIQVKAQKLDGSAEKECTSPSHSELPPPGKVKLIPLPFLTLDQPQARHVSRRPNPLASRRPAVAYPARPDSTNSAQSNAVNPSRPAPTNTSLTGPATPAQPISAKATQPSSANPTQPTVPQSAASRPSAYKTSSCSSLQREPVSTAVTSLRSLPKPQNQFLIQDFSLQPRPWRKPTVPEPVMSTPITEEQRPEREAMKRKAQQERENAAKYTSLGKVQFFIERERDMEIAEYYGYTI

SEQ ID NO: 16362 - protein, 193 aa, Homo sapiens
  Payload ID: 3267
  Gene Symbol: C2orf80
  Gene Name: chromosome 2 open reading frame 80
  Uniprot ID: Q0P641
  ENSP ID: ENSP00000343171
MERRLIKKEMKKLLGDYIGIRLRENEFDPKGRRQLTFLDDMAHYDLAISVALQWLDPSEDLTWLEWEELKIPLHGRPIYPNRREREAMILSSYAGILMNSIPIEEVFKIYGADSSADSGTIKVPRVSSLCLSLHPFAMLTAPKAAAYARKQSVKSRKVTTNKNATSISAKEANATEWKSSQRFSDTQPKHKVT

SEQ ID NO: 16363 - protein, 139 aa, Homo sapiens
  Payload ID: 3267
  Gene Symbol: C2orf80
  Gene Name: chromosome 2 open reading frame 80
  ENSP ID: ENSP00000389385
RPIYPNRREREAMILSSYAGILMNSIPIEEVFKIYGADSSADSGTIKVPRVSSLCLSLHPFAMLTAPKAAAYARKQIETGFHRGLDLLTSRSARLGLPKRWDYRLEPPRPAQLLGHLENWNCTMELHNRFSGSRREASS

SEQ ID NO: 16364 - protein, 124 aa, Homo sapiens
  Payload ID: 3267
  Gene Symbol: C2orf80
  Gene Name: chromosome 2 open reading frame 80
  ENSP ID: ENSP00000397144
MERRLIKKEMKKLLGDYIGIRLRENEFDPKGRRQLTFLDDMAHYDLAISVALQWLDPSEDLTWLEWEELKIPLHGRPIYPNRREREAMILSSYAGILMNSIPIEEVFKIYGADSSADSGTIKVT

SEQ ID NO: 16365 - protein, 66 aa, Homo sapiens
  Payload ID: 3267
  Gene Symbol: C2orf80
  Gene Name: chromosome 2 open reading frame 80
  ENSP ID: ENSP00000397281
MERRLIKKEMKKLLGDYIGIRLRENEFDPKGRRQLTFLDDMAHYDLAISVALQWLDPSEDLTWLEW

SEQ ID NO: 16366 - protein, 174 aa, Homo sapiens
  Payload ID: 3267
  Gene Symbol: C2orf80
  Gene Name: chromosome 2 open reading frame 80
  ENSP ID: ENSP00000405393
MRGCFSMPPEAEKEQKHWNRSPAHYDLAISVALQWLDPSEDLTWLEWEELKIPLHGRPIYPNRREREAMILSSYAGILMNSIPIEEVFKIYGADSSADSGTIKVPRVSSLCLSLHPFAMLTAPKAAAYARKQSVKSRKVTTNKNATSISAKEANATEWKSSQRFSDTQPKHKVT

SEQ ID NO: 16367 - protein, 128 aa, Homo sapiens
  Payload ID: 3267
  Gene Symbol: C2orf80
  Gene Name: chromosome 2 open reading frame 80
  ENSP ID: ENSP00000408378
  MOD_RES (1)..(1): Any amino acid
XVALQWLDPSEDLTWLEWEELKIPLHGRPIYPNRREREAMILSSYAGILMNSIPIEEVFKIYGADSSADSGTIKVPRVSSLCLSLHPFAMLTAPKAAAYARKQSHLENWNCTMELHNRFSGSRREASS

SEQ ID NO: 16368 - protein, 83 aa, Homo sapiens
  Payload ID: 3267
  Gene Symbol: C2orf80
  Gene Name: chromosome 2 open reading frame 80
  ENSP ID: ENSP00000413016
MILSSYAGILMNSIPIEEVFKIYGADSSADSGTIKVPRVSSLCLSLHPFAMLTAPKAAAYARKQSVKSRKVTTNKNATSISAK

SEQ ID NO: 16369 - protein, 588 aa, Homo sapiens
  Payload ID: 3268
  Gene Symbol: C2orf81
  Gene Name: chromosome 2 open reading frame 81
  ENSP ID: ENSP00000290390
MEMQSPIVQRQERQVRDRGVTRSKAEKVRPPTVPVPQVDIVPGRLSEAEWMALTALEEGEDVVGDILADLLARVMDSAFKVYLTQQCIPFTISQAREAMLQITEWRFLARDEGESAVAEDPTWGEDEEPSACTTDSWAQGSVPVLHASTSEGLENFQGEDPGGVDRIPLGRSWMGRGSQEQMESWEPSPQLRVTSAPPPTSELFQEAGPGGPVEEADGQSRGLSSAGSLSASFQLSVEEAPADDADPSLDPYLVASPQASTGRGHPLGFHLSLEDLYCCMPQLDAAGDRLELRSEGVPCIASGVLVSYPSVGGATRPSASCQQQRAGHSDVRLSAHHHRMRRKAAVKRLDPARLPCHWVRPLAEVLVPDSQTRPLEAYRGRQRGEKTKARAEPQALGPGTRVSPAAFFPLRPGIPFRDLDSGPALLFPTLNLGLSSPSLESKLPLPNSRIRFLTTHPVLPDVARSRSPKLWPSVRWPSGWEGKAELLGELWAGRTRVPPQGLELADREGQDPGRWPRTTPPVLEATSQVMWKPVLLPEALKLAPGVSMWNRSTQVLLSSGVPEQEDKEGSTFPPVEQHPIQTGAPKPR

SEQ ID NO: 16370 - protein, 161 aa, Homo sapiens
  Payload ID: 3268
  Gene Symbol: C2orf81
  Gene Name: chromosome 2 open reading frame 81
  ENSP ID: ENSP00000429388
MLQITEWRFLARDEGESAVAEDPTWGEDEEPSACTTDSWAQGSVPVLHASTSEGLENFQGEVHSSGASPDSSAIAPALPFPTSHCPSAFPQDPGGVDRIPLGRSWMGRGSQEQMESWEPSPQLRVTSAPPPTSELFQEAGPGGPVEEADGQSRGLSSAGSL

SEQ ID NO: 16371 - protein, 109 aa, Homo sapiens
  Payload ID: 3268
  Gene Symbol: C2orf81
  Gene Name: chromosome 2 open reading frame 81
  ENSP ID: ENSP00000430670
MSESSSKSSQPLASKQKKDGTEKRGRGRPRKQPPRQERQVRDRGVTRSKAEKVRPPTVPVPQVDIVPGRLSEAEWMALTALEEGEDVVGDILADLLARVMDSAFKVYLT

SEQ ID NO: 16372 - protein, 196 aa, Homo sapiens
  Payload ID: 3268
  Gene Symbol: C2orf81
  Gene Name: chromosome 2 open reading frame 81
  ENSP ID: ENSP00000430754
MEMQSPIVQRQERQVRDRGVTRSKAEKVRPPTVPVPQVDIVPGRLSEAEWMALTALEEGEDVVGDILADLLARVMDSAFKVYLTQQCIPFTISQAREAMLQITEWRFLARDEGESAVAEDPTWGEDEEPSACTTDSWAQGSVPVLHASTSEGLENFQGEVHSSGASPDSSAIAPALPFPTSHCPSAFPQDPGGVDR

SEQ ID NO: 16373 - protein, 520 aa, Homo sapiens
  Payload ID: 3268
  Gene Symbol: C2orf81
  Gene Name: chromosome 2 open reading frame 81
  ENSP ID: ENSP00000431103
MLQITEWRFLARDEGESAVAEDPTWGEDEEPSACTTDSWAQGSVPVLHASTSEGLENFQGEVHSSGASPDSSAIAPALPFPTSHCPSAFPQDPGGVDRIPLGRSWMGRGSQEQMESWEPSPQLRVTSAPPPTSELFQEAGPGGPVEEADGQSRGLSSAGSLSASFQLSVEEAPADDADPSLDPYLVASPQASTGRGHPLGFHLSLEDLYCCMPQLDAAGDRLELRSEGVPCIASGVLVSYPSVGGATRPSASCQQQRAGHSDVRLSAHHHRMRRKAAVKRLDPARLPCHWVRPLAEVLVPDSQTRPLEAYRGRQRGEKTKARAEPQALGPGTRVSPAAFFPLRPGIPFRDLDSGPALLFPTLNLGLSSPSLESKLPLPNSRIRFLTTHPVLPDVARSRSPKLWPSVRWPSGWEGKAELLGELWAGRTRVPPQGLELADREGQDPGRWPRTTPPVLEATSQVMWKPVLLPEALKLAPGVSMWNRSTQVLLSSGVPEQEDKEGSTFPPVEQHPIQTGAPKPR

SEQ ID NO: 16374 - protein, 582 aa, Homo sapiens
  Payload ID: 3268
  Gene Symbol: C2orf81
  Gene Name: chromosome 2 open reading frame 81
  ENSP ID: ENSP00000481409
MAHEGSRQVRDRGVTRSKAEKVRPPTVPVPQVDIVPGRLSEAEWMALTALEEGEDVVGDILADLLARVMDSAFKVYLTQQCIPFTISQAREAMLQITEWRFLARDEGESAVAEDPTWGEDEEPSACTTDSWAQGSVPVLHASTSEGLENFQGEDPGGVDRIPLGRSWMGRGSQEQMESWEPSPQLRVTSAPPPTSELFQEAGPGGPVEEADGQSRGLSSAGSLSASFQLSVEEAPADDADPSLDPYLVASPQASTGRGHPLGFHLSLEDLYCCMPQLDAAGDRLELRSEGVPCIASGVLVSYPSVGGATRPSASCQQQRAGHSDVRLSAHHHRMRRKAAVKRLDPARLPCHWVRPLAEVLVPDSQTRPLEAYRGRQRGEKTKARAEPQALGPGTRVSPAAFFPLRPGIPFRDLDSGPALLFPTLNLGLSSPSLESKLPLPNSRIRFLTTHPVLPDVARSRSPKLWPSVRWPSGWEGKAELLGELWAGRTRVPPQGLELADREGQDPGRWPRTTPPVLEATSQVMWKPVLLPEALKLAPGVSMWNRSTQVLLSSGVPEQEDKEGSTFPPVEQHPIQTGAPKPR

SEQ ID NO: 16375 - protein, 121 aa, Homo sapiens
  Payload ID: 3269
  Gene Symbol: C2orf82
  Gene Name: chromosome 2 open reading frame 82
  Uniprot ID: Q6UX34
  ENSP ID: ENSP00000333208
MASCLALRMALLLVSGVLAPAVLTDDVPQEPVPTLWNEPAELPSGEGPVESTSPGREPVDTGPPAPTVAPGPEDSTAQERLDQGGGSLGPGAIAAIVIAALLATCVVLALVVVALRKFSAS

SEQ ID NO: 16376 - protein, 121 aa, Homo sapiens; identical to SEQ ID NO: 16375
  Payload ID: 3269
  Gene Symbol: C2orf82
  Gene Name: chromosome 2 open reading frame 82
  Uniprot ID: Q6UX34
  ENSP ID: ENSP00000386804

SEQ ID NO: 16377 - protein, 121 aa, Homo sapiens; identical to SEQ ID NO: 16375
  Payload ID: 3269
  Gene Symbol: C2orf82
  Gene Name: chromosome 2 open reading frame 82
  Uniprot ID: Q6UX34
  ENSP ID: ENSP00000387130

SEQ ID NO: 16378 - protein, 19 aa, Homo sapiens
  Payload ID: 3269
  Gene Symbol: C2orf82
  Gene Name: chromosome 2 open reading frame 82
  ENSP ID: ENSP00000401100
MASCLALRMALLLVSGVLA

SEQ ID NO: 16379 - protein, 150 aa, Homo sapiens
  Payload ID: 3270
  Gene Symbol: C2orf83
  Gene Name: chromosome 2 open reading frame 83
  Uniprot ID: Q53S99
  ENSP ID: ENSP00000264387
MEDYALTFGINPFIALMIQPIVTMTVVDNQGLGLPVDIQHKAKPSPKASQMLPPDLGPPSFQNLLSPSEKLEPWDPGMRKLTVQTCGLTFIHPAGHGLCHPTAEASAETLSSTALNRPSVREGACNEKSTENKKPQDSVLWSHSRWFQGN

SEQ ID NO: 16380 - protein, 96 aa, Homo sapiens
  Payload ID: 3270
  Gene Symbol: C2orf83
  Gene Name: chromosome 2 open reading frame 83
  Uniprot ID: Q53S99
  ENSP ID: ENSP00000387149
MEDYALTFGINPFIALMIQPIVTMTVVDNQGLGLPVDIQHKAKPSPKASQMLPPDLGPPSFQNCFTCRTAPSLVMVLSWKSGVRREVPVHPSYAKY

SEQ ID NO: 16381 - protein, 95 aa, Homo sapiens
  Payload ID: 3271
  Gene Symbol: C2orf88
  Gene Name: chromosome 2 open reading frame 88
  Uniprot ID: Q9BSF0
  ENSP ID: ENSP00000345107
MGCMKSKQTFPFPTIYEGEKQHESEEPFMPEERCLPRMASPVNVKEEVKEPPGTNTVILEYAHRLSQDILCDALQQWACNNIKYHDIPYIESEGP

SEQ ID NO: 16382 - protein, 95 aa, Homo sapiens; identical to SEQ ID NO: 16381
  Payload ID: 3271
  Gene Symbol: C2orf88
  Gene Name: chromosome 2 open reading frame 88
  Uniprot ID: Q9BSF0
  ENSP ID: ENSP00000380172

SEQ ID NO: 16383 - protein, 95 aa, Homo sapiens; identical to SEQ ID NO: 16381
  Payload ID: 3271
  Gene Symbol: C2orf88
  Gene Name: chromosome 2 open reading frame 88
  Uniprot ID: Q9BSF0
  ENSP ID: ENSP00000386649

SEQ ID NO: 16384 - protein, 67 aa, Homo sapiens
  Payload ID: 3271
  Gene Symbol: C2orf88
  Gene Name: chromosome 2 open reading frame 88
  ENSP ID: ENSP00000386976
MGCMKSKQTFPFPTIYEGEKQHESEEPFMPEERCLPRMASPVNVKEEVKEPPGTNTVILEYAHRLSQ

SEQ ID NO: 16385 - protein, 30 aa, Homo sapiens
  Payload ID: 3271
  Gene Symbol: C2orf88
  Gene Name: chromosome 2 open reading frame 88
  ENSP ID: ENSP00000394370
MGCMKSKQTFPFPTIYEGEKQHESEEPFMP

SEQ ID NO: 16386 - protein, 95 aa, Homo sapiens; identical to SEQ ID NO: 16381
  Payload ID: 3271
  Gene Symbol: C2orf88
  Gene Name: chromosome 2 open reading frame 88
  Uniprot ID: Q9BSF0
  ENSP ID: ENSP00000405225

SEQ ID NO: 16387 - protein, 131 aa, Homo sapiens
  Payload ID: 3272
  Gene Symbol: C2orf91
  Gene Name: chromosome 2 open reading frame 91
  Uniprot ID: Q6ZV80
  ENSP ID: ENSP00000367983
MVRMSRPLFLDWAWRPLCSPSQSLPLTYGPEGWILQWKGTCRQQTALHCPFDFPQAPLRGRHTLSQVPNKGHEKASAVQLPEKQGTDQSRRGPTSAVTKARTSYPESETFIVYLCSYFWNSSKGVYMSGST

SEQ ID NO: 16388 - protein, 131 aa, Homo sapiens
  Payload ID: 3272
  Gene Symbol: C2orf91
  Gene Name: chromosome 2 open reading frame 91
  ENSP ID: ENSP00000479699
MVRMSRPLFLDWAWRPLCSPSQSLPLTYGPEGWILQWKGTCRQQTALHCPFDFPQAPLRGRHTLSQVPNKGHEKASAVQLPEKQGTDQSRRGPTSAVTKARTSYPESETFIVYLCSYFWNSSKGVYMSGKD

SEQ ID NO: 16389 - protein, 165 aa, Homo sapiens
  Payload ID: 3273
  Gene Symbol: C20orf141
  Gene Name: chromosome 20 open reading frame 141
  Uniprot ID: Q9NUB4
  ENSP ID: ENSP00000369963
MTRLCLPRPEAREDPIPVPPRGLGAGEGSGSPVRPPVSTWGPSWAQLLDSVLWLGALGLTIQAVFSTTGPALLLLLVSFLTFDLLHRPAGHTLPQRKLLTRGQSQGAGEGPGQQEALLLQMGTVSGQLSLQDALLLLLMGLGPLLRACGMPLTLLGLAFCLHPWA

SEQ ID NO: 16390 - protein, 165 aa, Homo sapiens; identical to SEQ ID NO: 16389
  Payload ID: 3273
  Gene Symbol: C20orf141
  Gene Name: chromosome 20 open reading frame 141
  Uniprot ID: Q9NUB4
  ENSP ID: ENSP00000473907

SEQ ID NO: 16391 - protein, 153 aa, Homo sapiens
  Payload ID: 3274
  Gene Symbol: C20orf144
  Gene Name: chromosome 20 open reading frame 144
  Uniprot ID: Q9BQM9
  ENSP ID: ENSP00000364370
MGNYSSHKRTKAPKQARKERPADMDKAWWKSFLNHLTRKKPATRIVLILPLDKRQPLANAGQRIDYASGAGLGSPAAPRLRGAGEGSEREPRMPVLLLLRRQEARRPEEGGARAALSWPRLLSRFRSPGKAPREAGPAEEQPRKRCRCPRPQL

SEQ ID NO: 16392 - protein, 149 aa, Homo sapiens
  Payload ID: 3275
  Gene Symbol: C20orf173
  Gene Name: chromosome 20 open reading frame 173
  Uniprot ID: Q96LM9
  ENSP ID: ENSP00000246199
MLSGPHPSPTFRPNPCPWPCLHSLWMEISPTQLCFLSPGPSPQSPSCCFQGMNSGSELGKLWRKLFKGIPRLSVSHFDFYCGTCVLLGRPQIPQGSSLGNDIDQYPVVFRNASDQGSWMQLEMLLRKLSDLVWTSDALSDKILEDGLVP

SEQ ID NO: 16393 - protein, 202 aa, Homo sapiens
  Payload ID: 3275
  Gene Symbol: C20orf173
  Gene Name: chromosome 20 open reading frame 173
  Uniprot ID: Q96LM9
  ENSP ID: ENSP00000363465
MKRWQIFVLWVFWVLILWLMTPYLDLTPESAPQEKRMYLVPQHCDCPWFSSGKCGCPSETLNCSSCHHTADEWNWLDACSRKTMGYLMRTRESMTSDTVLWWLGMNSGSELGKLWRKLFKGIPRLSVSHFDFYCGTCVLLGRPQIPQGSSLGNDIDQYPVVFRNASDQGSWMQLEMLLRKLSDLVWTSDALSDKILEDGLVP

SEQ ID NO: 16394 - protein, 65 aa, Homo sapiens
  Payload ID: 3275
  Gene Symbol: C20orf173
  Gene Name: chromosome 20 open reading frame 173
  ENSP ID: ENSP00000388785
MGYLMRTRESMTSDTVLWWLGMNSGSELGKLWRKLFKGIPRLSVSHFDFYCGTCVLLGRPQIPQG

SEQ ID NO: 16395 - protein, 202 aa, Homo sapiens; identical to SEQ ID NO: 16393
  Payload ID: 3275
  Gene Symbol: C20orf173
  Gene Name: chromosome 20 open reading frame 173
  Uniprot ID: Q96LM9
  ENSP ID: ENSP00000403566

SEQ ID NO: 16396 - protein, 1177 aa, Homo sapiens
  Payload ID: 3276
  Gene Symbol: C20orf194
  Gene Name: chromosome 20 open reading frame 194
  Uniprot ID: Q5TEA3
  ENSP ID: ENSP00000252032
MDVYPPRRQGLPRARSPGGSSRGSPSVSCSRLRQVQSILTQSSKSRPDGILCILGIDSRYNEGCRELANYLLFGLYNQNTSDFEKTGFSEEVLDDVIILIKSDSVHLYCNPVNFRYLLPYVAHWRNLHFHCMTENEYEDEEAAEEFKITSFVDMVRDCSRIGIPYSSQGHLQIFDMFVVEKWPIVQAFALEGIGGDGFFTMKYELQDVSLNLWNVYSKMDPMSLESLLSDDLVAFEHQWTSFFANFDTEIPFLLELSESQAGEPFRSYFSHGMISSHITENSPNRQPFVLFGNHSTRENLNAGNFNFPSEGHLVRSTGPGGSFAKHMVAQCVSPKGPLACSRTYFFGATHVPYLGGDSKLPKKTEQIRLLSQIYAAVIEAVLAGIACYAKTSSLTKAKEVAEQTLGSGLDSFELIPFKAALRSKMTFHIHAVNNQGRIVPLDSEDSLSFVKTACMAVYDIPDLLGGNGCLGSVVFSESFLTSQILVKEKDGTVTTETSSVVLTAAVPRFCSWLVEDNEVKLSEKTQQAVRGDESFLGTYLTGGEGAYLYSSNLQSWPEEGNVHFFSSGLLFSHCRHRSIIISKDHMNSISFYDGDSTSTVAALLIDFKSSLLPHLPVHFHGSSNFLMIALFPKSKIYQAFYSEVFSLWKQQDNSGISLKVIQEDGLSVEQKRLHSSAQKLFSALSQPAGEKRSSLKLLSAKLPELDWFLQHFAISSISQEPVMRTHLPVLLQQAEINTTHRIESDKVIISIVTGLPGCHASELCAFLVTLHKECGRWMVYRQIMDSSECFHAAHFQRYLSSALEAQQNRSARQSAYIRKKTRLLVVLQGYTDVIDVVQALQTHPDSNVKASFTIGAITACVEPMSCYMEHRFLFPKCLDQCSQGLVSNVVFTSHTTEQRHPLLVQLQSLIRAANPAAAFILAENGIVTRNEDIELILSENSFSSPEMLRSRYLMYPGWYEGKLNAGSVYPLMVQICVWFGRPLEKTRFVAKCKAIQSSIKPSPFSGNIYHILGKVKFSDSERTMEVCYNTLANSLSIMPVLEGPTPPPDSKSVSQDSSGQQECYLVFIGCSLKEDSIKDWLRQSAKQKPQRKALKTRGMLTQQEIRSIHVKRHLEPLPAGYFYNGTQFVNFFGDKTDFHPLMDQFMNDYVEEANREIEKYNQELEQQEYHDLFELKP

SEQ ID NO: 16397 - protein, 318 aa, Homo sapiens
  Payload ID: 3277
  Gene Symbol: C20orf195
  Gene Name: chromosome 20 open reading frame 195
  Uniprot ID: Q9BVV2
  ENSP ID: ENSP00000359115
MSTHVAGLGLDKMKLGNPQSFLDQEEADDQQLLEPEAWKTYTERRNALREFLTSDLSPHLLKRHHARMQLLRKCSYYIEVLPKHLALGDQNPLVLPSALFQLIDPWKFQRMKKVGTAQTKIQLLLLGDLLEQLDHGRAELDALLRSPDPRPFLADWALVERRLADVSAVMDSFLTMMVPGRLHVKHRLVSDVSATKIPHIWLMLSTKMPVVFDRKASAAHQDWARLRWFVTIQPATSEQYELRFRLLDPRTQQECAQCGVIPVAACTFDVRNLLPNRSYKFTIKRAETSTLVYEPWRDSLTLHTKPEPLEGPALSHSV

SEQ ID NO: 16398 - protein, 318 aa, Homo sapiens; identical to SEQ ID NO: 16397
  Payload ID: 3277
  Gene Symbol: C20orf195
  Gene Name: chromosome 20 open reading frame 195
  Uniprot ID: Q9BVV2
  ENSP ID: ENSP00000359116

SEQ ID NO: 16399 - protein, 318 aa, Homo sapiens; identical to SEQ ID NO: 16397
  Payload ID: 3277
  Gene Symbol: C20orf195
  Gene Name: chromosome 20 open reading frame 195
  Uniprot ID: Q9BVV2
  ENSP ID: ENSP00000480914

SEQ ID NO: 16400 - protein, 81 aa, Homo sapiens
  Payload ID: 3277
  Gene Symbol: C20orf195
  Gene Name: chromosome 20 open reading frame 195
  ENSP ID: ENSP00000483577
MSTHVAGLGLDKMKLGNPQSFLDQEEADDQQLLEPEAWKTYTERRNALREFLTSDLSPHLLKRHHARMQLLRKCSYYIEVL

SEQ ID NO: 16401 - protein, 205 aa, Homo sapiens
  Payload ID: 3278
  Gene Symbol: C20orf196
  Gene Name: chromosome 20 open reading frame 196
  Uniprot ID: Q8IYI0
  ENSP ID: ENSP00000305875
MAARDATSGSLSEESSALDLPSACDIRDYVLQGPSQEANSEAFSSLEFHSFPYSSDVDPDTSNLNIEQNNSWTAENFWLDPAVKGQSEKEEDDGLRKSLDRFYEMFGHPQPGSANSLSASVCKCLSQKITQLRGQESQKYALRSFQMARVIFNRDGCSVLQRHSRDTHFYPLEEGSTSLDDEKPNPGLSKDITHFLLQQNVMKDL

SEQ ID NO: 16402 - protein, 62 aa, Homo sapiens
  Payload ID: 3278
  Gene Symbol: C20orf196
  Gene Name: chromosome 20 open reading frame 196
  ENSP ID: ENSP00000368263
MAARDATSGSLSEESSALDLPSACDIRDYVLQGPSQEANSEAFSSLEFHSFPYSSDVDPADL

SEQ ID NO: 16403 - protein, 121 aa, Homo sapiens
  Payload ID: 3278
  Gene Symbol: C20orf196
  Gene Name: chromosome 20 open reading frame 196
  ENSP ID: ENSP00000399331
MAARDATSGSLSEESSALDLPSACDIRDYVLQGPSQEANSEAFSSLEFHSFPYSSDVDPDTSNLNIEQNNSWTAENFWLDPAVKGQSEKEEDDGLRKSLDRFYEMFGHPQPGSANSLSASV

SEQ ID NO: 16404 - protein, 200 aa, Homo sapiens
  Payload ID: 3278
  Gene Symbol: C20orf196
  Gene Name: chromosome 20 open reading frame 196
  ENSP ID: ENSP00000410534
MESHSCSPSWSTMTISAHCNLRLPSASQSVGITGVSHHIWPRIFYMTMAARDATSGSLSEESSALDLPSACDIRDYVLQGPSQEANSEAFSSLEFHSFPYSSDVDPDTSNLNIEQNNSWTAENFWLDPAVKGQSEKEEDDGLRKSLDRFYEMFGHPQPGSANSLSASVCKCLSQKITQLRGQESQKYALRSFQMARVIFN

SEQ ID NO: 16405 - protein, 122 aa, Homo sapiens
  Payload ID: 3279
  Gene Symbol: C20orf202
  Gene Name: chromosome 20 open reading frame 202
  Uniprot ID: A1L168
  ENSP ID: ENSP00000383474
MYKSKIPRAQNQVSVKVTPKNTEMKIAEEPSPSLGQTLEWLRKELSEMQIQDQSLLLTLRHLHSVLEELRADSAHWEDARSSGGTSPIRARAGSEGRGCQPVCSRGLAQLLRGEDSRRSSLP

SEQ ID NO: 16406 - protein, 129 aa, Homo sapiens
  Payload ID: 3280
  Gene Symbol: C20orf24
  Gene Name: chromosome 20 open reading frame 24
  Uniprot ID: Q9BUV8
  ENSP ID: ENSP00000340164
MSGGRRKEEPPQPQLANGALKVSVWSKVLRSDAAWEDKDEFLDVIYWFRQIIAVVLGVIWGVLPLRGFLGIAGFCLINAGVLYLYFSNYLQIDEEEYGGTWELTKEGFMTSFALFMVIWIIFYTAIHYD

SEQ ID NO: 16407 - protein, 143 aa, Homo sapiens
  Payload ID: 3280
  Gene Symbol: C20orf24
  Gene Name: chromosome 20 open reading frame 24
  Uniprot ID: Q9BUV8
  ENSP ID: ENSP00000341213
MSGGRRKEEPPQPQLANGALKVSVWSKVLRSDAAWEDKDEFLDVIYWFRQIIAVVLGVIWGVLPLRGFLGIAGSFGSSFTLPSIMTDGVQLPSAPYPVQRTLLITAQELDRWGTPAPWNLEDPCFLDRESVCWASVFSARVVT

SEQ ID NO: 16408 - protein, 137 aa, Homo sapiens
  Payload ID: 3280
  Gene Symbol: C20orf24
  Gene Name: chromosome 20 open reading frame 24
  Uniprot ID: Q9BUV8
  ENSP ID: ENSP00000362958
MSGGRRKEEPPQPQLANGALKVSVWSKVLRSDAAWEDKDEFLDVIYWFRQIIAVVLGVIWGVLPLRGFLGIAGFCLINAGVLYLYFSNYLQIDEEEYGGTWELTKEGFMTSFALFMVCVADSFTTGHLDHLLHCHPL

SEQ ID NO: 16409 - protein, 87 aa, Homo sapiens
  Payload ID: 3280
  Gene Symbol: C20orf24
  Gene Name: chromosome 20 open reading frame 24
  Uniprot ID: Q9BUV8
  ENSP ID: ENSP00000432510
MSGGRRKEEPPQPQLANGALKVSVWSKVLRSDAAWEDKDEFLDVIYWFRQIIAVVLGVIWGVLPLRGFLGIAGKGHCCSGAVCVCDD

SEQ ID NO: 16410 - protein, 87 aa, Homo sapiens; identical to SEQ ID NO: 16409
  Payload ID: 3280
  Gene Symbol: C20orf24
  Gene Name: chromosome 20 open reading frame 24
  Uniprot ID: Q9BUV8
  ENSP ID: ENSP00000435871

SEQ ID NO: 16411 - protein, 199 aa, Homo sapiens
  Payload ID: 3281
  Gene Symbol: C20orf27
  Gene Name: chromosome 20 open reading frame 27
  Uniprot ID: Q9GZN8
  ENSP ID: ENSP00000217195
MAAANKGKCLPGVVGLAQALPVGPGRRAIAAGNKPRVRSIRFAAGHDAEGSHSHVHFDEKLHDSVVMVTQESDSSFLVKVGFLKILHRYEITFTLPPVHRLSKDVREAPVPSLHLKLLSVVPVPEGYSVKCEYSAHKEGVLKEEILLACEGGTGTCVRVTVQARVMDRHHGTPMLLDGVKCVGAELEYDSEHSDWHGFD

SEQ ID NO: 16412 - protein, 174 aa, Homo sapiens
  Payload ID: 3281
  Gene Symbol: C20orf27
  Gene Name: chromosome 20 open reading frame 27
  Uniprot ID: Q9GZN8
  ENSP ID: ENSP00000369097
MAAANKGNKPRVRSIRFAAGHDAEGSHSHVHFDEKLHDSVVMVTQESDSSFLVKVGFLKILHRYEITFTLPPVHRLSKDVREAPVPSLHLKLLSVVPVPEGYSVKCEYSAHKEGVLKEEILLACEGGTGTCVRVTVQARVMDRHHGTPMLLDGVKCVGAELEYDSEHSDWHGFD

SEQ ID NO: 16413 - protein, 174 aa, Homo sapiens; identical to SEQ ID NO: 16412
  Payload ID: 3281
  Gene Symbol: C20orf27
  Gene Name: chromosome 20 open reading frame 27
  Uniprot ID: Q9GZN8
  ENSP ID: ENSP00000382580

SEQ ID NO: 16414 - protein, 127 aa, Homo sapiens
  Payload ID: 3281
  Gene Symbol: C20orf27
  Gene Name: chromosome 20 open reading frame 27
  ENSP ID: ENSP00000382591
  MOD_RES (1)..(1): Any amino acid
XNKPRVRSIRFAAGHDAEGSHSHVHFDEKLHDSVVMVTQESDSSFLVKVGFLKILHRYEITFTLPPVHRLSKDVREAPVPSLHLKLLSVVPVPEDRHHGTPMLLDGVKCVGAELEYDSEHSDWHGFD

SEQ ID NO: 16415 - protein, 137 aa, Homo sapiens
  Payload ID: 3282
  Gene Symbol: C20orf85
  Gene Name: chromosome 20 open reading frame 85
  Uniprot ID: Q9H1P6
  ENSP ID: ENSP00000360210
MAQKPLSTAAAERMNLVGQDEIWKYRLKAESEARQNWPQNWGFLTTPFEELIKCEEDLPTPKPKIELPERFRIRPVTPVEKYIKVFPSPPVPQTTQGFIGWRSAVPGLNKCLELDDAIRSCKGAFARELCWPKQGVH

SEQ ID NO: 16416 - protein, 363 aa, Homo sapiens
  Payload ID: 3283
  Gene Symbol: C20orf96
  Gene Name: chromosome 20 open reading frame 96
  Uniprot ID: Q9NUD7
  ENSP ID: ENSP00000353470
MAHVLQKPKHSGTHSIVQEFQVPDYVPWQQSKQETKPSTLPPVQQANSLHTSKMKTLTRVQPVFHFKPTTVVTSCQPKNPRELHRRRKLDPGKMHAKIWLMKTSLRSGRAALRELRSRENFLSKLNRELIETIQEMENSTTLHVRALLQQQDTLATIIDILEYSNKKRLQQLKSELQEWEEKKKCKMSYLEQQAEQLNAKIEKTQEEVNFLSTYMDHEYSIKSVQISTLMRQLQQVKDSQQDELDDLGEMRRKVLESLSDKIQKKKKKILSSVVAETQRPYEEALLQKMWESQDFLKCMQRFREIIDQFEENMPVLRAEVEELQAQTREPREVIFEDVLLRRPKCTPDMDVILNIPVEEPLPF

SEQ ID NO: 16417 - protein, 328 aa, Homo sapiens
  Payload ID: 3283
  Gene Symbol: C20orf96
  Gene Name: chromosome 20 open reading frame 96
  ENSP ID: ENSP00000371806
MEVLSLPNSFQTQALWDSLHSPGVPGSVFHFKPTTVVTSCQPKNPRELHRRRKLDPGKMHAKIWLMKTSLRSGRAALRELRSRENFLSKLNRELIETIQEMENSTTLHVRALLQQQDTLATIIDILEYSNKKRLQQLKSELQEWEEKKKCKMSYLEQQAEQLNAKIEKTQEEVNFLSTYMDHEYSIKSVQISTLMRQLQQVKDSQQDELDDLGEMRRKVLESLSDKIQKKKKKILSSVVAETQRPYEEALLQKMWESQDFLKCMQRFREIIDQFEENMPVLRAEVEELQAQTREPREVIFEDVLLRRPKCTPDMDVILNIPVEEPLPF

SEQ ID NO: 16418 - protein, 362 aa, Homo sapiens
  Payload ID: 3283
  Gene Symbol: C20orf96
  Gene Name: chromosome 20 open reading frame 96
  ENSP ID: ENSP00000383128
MSYKSRPKHSGTHSIVQEFQVPDYVPWQQSKQETKPSTLPPVQQANSLHTSKMKTLTRVQPVFHFKPTTVVTSCQPKNPRELHRRRKLDPGKMHAKIWLMKTSLRSGRAALRELRSRENFLSKLNRELIETIQEMENSTTLHVRALLQQQDTLATIIDILEYSNKKRLQQLKSELQEWEEKKKCKMSYLEQQAEQLNAKIEKTQEEVNFLSTYMDHEYSIKSVQISTLMRQLQQVKDSQQDELDDLGEMRRKVLESLSDKIQKKKKKILSSVVAETQRPYEEALLQKMWESQDFLKCMQRFREIIDQFEENMPVLRAEVEELQAQTREPREVIFEDVLLRRPKCTPDMDVILNIPVEEPLPF

SEQ ID NO: 16419 - protein, 251 aa, Homo sapiens
  Payload ID: 3284
  Gene Symbol: C21orf140
  Gene Name: chromosome 21 open reading frame 140
  Uniprot ID: B9A014
  ENSP ID: ENSP00000386791
MPRFASPLLRNVIIRSQFDGIKRKQCLQYLKTLRTLQYDGFKTVYFGETNIPESLVTGEDISDGYFIQTPTWCIVHAAGSQGWVPWKYRVFLRDELCIKQEDSLFSEFCDVVRKAYGKCVIVVKERRQQEEQRPKEDREAEGQFYIPTVISLASIMCCPEVAKSCGHELLSLPSPCNYLNPLDSAWSSLKWFIINNRNEFCLQSIDSGYSYQCILFSNLISKGIERINASKWRTLTSKVRRWENYYLGKFS

SEQ ID NO: 16420 - protein, 255 aa, Homo sapiens
  Payload ID: 3285
  Gene Symbol: C21orf2
  Gene Name: chromosome 21 open reading frame 2
  Uniprot ID: O43822
  ENSP ID: ENSP00000317302
MKLTRKMVLTRAKASELHSVRKLNCWGSRLTDISICQEMPSLEVITLSVNSISTLEPVSRCQRLSELYLRRNRIPSLAELFYLKGLPRLRVLWLAENPCCGTSPHRYRMTVLRTLPRLQKLDNQAVTEEELSRALSEGEEITAAPEREGTGHGGPKLCCTLSSLSSAAETGRDPLDSEEEATGAQDERGLKPPSRGQFPSLSARDASSSHRGRNVLTAILLLLRELDAEGLEAVQQTVGSRLQALRGEEVQEHAE

SEQ ID NO: 16421 - protein, 256 aa, Homo sapiens
  Payload ID: 3285
  Gene Symbol: C21orf2
  Gene Name: chromosome 21 open reading frame 2
  Uniprot ID: O43822
  ENSP ID: ENSP00000344566
MKLTRKMVLTRAKASELHSVRKLNCWGSRLTDISICQEMPSLEVITLSVNSISTLEPVSRCQRLSELYLRRNRIPSLAELFYLKGLPRLRVLWLAENPCCGTSPHRYRMTVLRTLPRLQKLDNQAVTEEELSRALSEGEEITAAPEREGTGHGGPKLCCTLSSLSSAAETGRDPLDSEEEATSGAQDERGLKPPSRGQFPSLSARDASSSHRGRNVLTAILLLLRELDAEGLEAVQQTVGSRLQALRGEEVQEHAE

SEQ ID NO: 16422 - protein, 375 aa, Homo sapiens
  Payload ID: 3285
  Gene Symbol: C21orf2
  Gene Name: chromosome 21 open reading frame 2
  Uniprot ID: O43822
  ENSP ID: ENSP00000381047
MKLTRKMVLTRAKASELHSVRKLNCWGSRLTDISICQEMPSLEVITLSVNSISTLEPVSRCQRLSELYLRRNRIPSLAELFYLKGLPRLRVLWLAENPCCGTSPHRYRMTVLRTLPRLQKLDNQAVTEEELSRALSEGEEITAAPEREGTGHGGPKLCCTLSSLSSAAETGRDPLDSEEEATGAQDERGLKPPSRGQFPSLSARDASSSHRGRVSGGPLGAAAASAHCTHCTETVGREHGASQGPVGREHGASQGLEELCPRGSCVCGSVNAHTRVTRAPHGAVLAPQPLLLSWSVECGPGPCWAEGNRSHVEEVPHTRPQAGLLCSDSPSVPNVLTAILLLLRELDAEGLEAVQQTVGSRLQALRGEEVQEHAE

SEQ ID NO: 16423 - protein, 268 aa, Homo sapiens
  Payload ID: 3286
  Gene Symbol: C21orf33
  Gene Name: chromosome 21 open reading frame 33
  Uniprot ID: P30042
  ENSP ID: ENSP00000291577
MAAVRVLVASRLAAASAFTSLSPGGRTPSQRAALHLSVPRPAARVALVLSGCGVYDGTEIHEASAILVHLSRGGAEVQIFAPDVPQMHVIDHTKGQPSEGESRNVLTESARIARGKITDLANLSAANHDAAIFPGGFGAAKNLSTFAVDGKDCKVNKEVERVLKEFHQAGKPIGLCCIAPVLAAKVLRGVEVTVGHEQEEGGKWPYAGTAEAIKALGAKHCVKEVVEAHVDQKNKVVTTPAFMCETALHYIHDGIGAMVRKVLELTGK

SEQ ID NO: 16424 - protein, 237 aa, Homo sapiens
  Payload ID: 3286
  Gene Symbol: C21orf33
  Gene Name: chromosome 21 open reading frame 33
  Uniprot ID: P30042
  ENSP ID: ENSP00000344901
MAAVRVLVASRLAAASAFTSLSPGGRTPSQRAALHLSVPRPAARVALVLSGCGVYDGTEIHEASAILVHLSRGGAEVQIFAPDVPQMHVIDHTKGQPSEGESRNVLTESARIARGKITDLANLSAANHDAAIFPGGFGAAKNLLCCIAPVLAAKVLRGVEVTVGHEQEEGGKWPYAGTAEAIKALGAKHCVKEVVEAHVDQKNKVVTTPAFMCETALHYIHDGIGAMVRKVLELTGK

SEQ ID NO: 16425 - protein, 224 aa, Homo sapiens; identical to SEQ ID NO: 1061
  Payload ID: 3286
  Gene Symbol: C21orf33
  Gene Name: chromosome 21 open reading frame 33
  ENSP ID: ENSP00000374340

SEQ ID NO: 16426 - protein, 217 aa, Homo sapiens
  Payload ID: 3286
  Gene Symbol: C21orf33
  Gene Name: chromosome 21 open reading frame 33
  ENSP ID: ENSP00000396655
MAAVRVLVASRLAAASAFTSLSPGGRTPSQRAALHLSVPRPAARVALVLSGCGVYDGTEIHEASAILVHLSRGGAEVQIFAPDVPQMHVIDHTKGQPSEGESRNVLTESARIARGKITDLANLSAANHDAAIFPGGFGAAKNLSTFAVDGKDCKVNKEVERVLKEFHQAGKPIGCDASTSLPAPAPWWSWNAALCCPGLSCVWCWQGESRTCVGEHQ

SEQ ID NO: 16427 - protein, 257 aa, Homo sapiens
  Payload ID: 3286
  Gene Symbol: C21orf33
  Gene Name: chromosome 21 open reading frame 33
  ENSP ID: ENSP00000400044
  MOD_RES (1)..(1): Any amino acid
XRPAARVALVLSGCGVYDGTEIHEASAILVHLSRGGAEVQIFAPDVPQMHVIDHTKGQPSEGESRNVLTESARIARGKITDLANLSAANHDAAIFPGGFGAAKNLCVFELQGLPLSMWSRWEGGAPVCCPMWSTFAVDGKDCKVNKEVERVLKEFHQAGKPIGLCCIAPVLAAKVLRGVEVTVGHEQEEGGKWPYAGTAEAIKALGAKHCVKEVVEAHVDQKNKVVTTPAFMCETALHYIHDGIGAMVRKVLELTGK

SEQ ID NO: 16428 - protein, 191 aa, Homo sapiens
  Payload ID: 3286
  Gene Symbol: C21orf33
  Gene Name: chromosome 21 open reading frame 33
  ENSP ID: ENSP00000405713
  MOD_RES (1)..(1): Any amino acid
XQMHVIDHTKGQPSEGESRNVLTESARIARGKITDLANLSAANHDAAIFPGGFGAAKNLSTFAVDGKDCKVNKEVERVLKEFHQAGKPIGLCCIAPVLAAKVLRGVEVTVGHEQEEGGKWPYAGTAEAIKALGAKHCVKEVVEAHVDQKNKVVTTPAFMCETALHYIHDGIGAMEEREIAAPQPPGLTSGE

SEQ ID NO: 16429 - protein, 322 aa, Homo sapiens
  Payload ID: 3287
  Gene Symbol: C21orf58
  Gene Name: chromosome 21 open reading frame 58
  Uniprot ID: P58505
  ENSP ID: ENSP00000291691
MARSRLPATSLRKPWKLDRQKLPSPDSGHSLLCGWSPGGKARPAGNTGAWAPAEQFFPASNRTREGGGLWPPLPLQSSPAAPTMLDSSAAEQVTRLTLKLLGQKLEQERQNVEGGPEGLHLEPGNEDRPDDALQTALKRRRDLLQRLREQHLLDELSRAQAWSGPSRGALGSALPPELPPTGILPTASPSPLAPDPPRIILPTVPQPPATIIQQLPQQPLIAQIPPPQAFPTQRSGSIKEDMVELLLLQNAQVHQLVLQNWMLKALPPALQDPPHVPPRVPRAARPRLPAVHHHHHHHHAVWPPGAATVLQPAPSLWTPGPP

SEQ ID NO: 16430 - protein, 216 aa, Homo sapiens
  Payload ID: 3287
  Gene Symbol: C21orf58
  Gene Name: chromosome 21 open reading frame 58
  ENSP ID: ENSP00000380796
MAILPGEAPVPGPGWPEPDAGGASVALGLPVPVCSSSASALQEQHLLDELSRAQAWSGPSRGALGSALPPELPPTGILPTASPSPLAPDPPRIILPTVPQPPATIIQQLPQQPLIAQIPPPQAFPTQRSGSIKEDMVELLLLQNAQVHQLVLQNWMLKALPPALQDPPHVPPRVPRAARPRLPAVHHHHHHHHAVWPPGAATVLQPAPSLWTPGPP

SEQ ID NO: 16431 - protein, 216 aa, Homo sapiens; identical to SEQ ID NO: 16430
  Payload ID: 3287
  Gene Symbol: C21orf58
  Gene Name: chromosome 21 open reading frame 58
  ENSP ID: ENSP00000380797

SEQ ID NO: 16432 - protein, 216 aa, Homo sapiens; identical to SEQ ID NO: 16430
  Payload ID: 3287
  Gene Symbol: C21orf58
  Gene Name: chromosome 21 open reading frame 58
  ENSP ID: ENSP00000380798

SEQ ID NO: 16433 - protein, 216 aa, Homo sapiens; identical to SEQ ID NO: 16430
  Payload ID: 3287
  Gene Symbol: C21orf58
  Gene Name: chromosome 21 open reading frame 58
  ENSP ID: ENSP00000380799

SEQ ID NO: 16434 - protein, 45 aa, Homo sapiens
  Payload ID: 3287
  Gene Symbol: C21orf58
  Gene Name: chromosome 21 open reading frame 58
  ENSP ID: ENSP00000390432
MAILPGEAPVPGPGWPEPDAGGASVALGLPVPVCSSSASALQEQH

SEQ ID NO: 16435 - protein, 284 aa, Homo sapiens
  Payload ID: 3287
  Gene Symbol: C21orf58
  Gene Name: chromosome 21 open reading frame 58
  ENSP ID: ENSP00000402356
GKARPAGNTGAWAPAEQFFPASNRTREGGGLWPPLPLQSSPAAPTMLDSSAAEQVTRLTLKLLGQKLEQERQNVEGGPEGLHLEPGNEDRPDDALQTALKRRRDLLQRLREQHLLDELSRAQAWSGPSRGALGSALPPELPPTGILPTASPSPLAPDPPRIILPTVPQPPATIIQQLPQQPLIAQIPPPQAFPTQRSGSIKEDMVELLLLQNAQVHQLVLQNWMLKALPPALQDPPHVPPRVPRAARPRLPAVHHHHHHHHAVWPPGAATVLQPAPSLWTPGPP

SEQ ID NO: 16436 - protein, 239 aa, Homo sapiens
  Payload ID: 3287
  Gene Symbol: C21orf58
  Gene Name: chromosome 21 open reading frame 58
  ENSP ID: ENSP00000431312
GKARPAGNTGAWAPAEQFFPASNRTREGGGLWPPLPLQSSPAAPTMLDSSAAEQVTRLTLKLLGQKLEQERQNVEGGPEGLHLEPGNEDRPDDALQTALKRRRDLLQRLREQHLLDELSRAQAWSGPSRGALGSALPPELPPTGILPTASPSPLAPDPPRIILPTVPQPPATIIQQLPQQPLIAQIPPPQAFPTQRSGSIKEDMVELLLLQNAQVHQLVLQNWMLKALPPALQDRFFHS

SEQ ID NO: 16437 - protein, 290 aa, Homo sapiens
  Payload ID: 3288
  Gene Symbol: C21orf59
  Gene Name: chromosome 21 open reading frame 59
  Uniprot ID: P57076
  ENSP ID: ENSP00000290155
MVLLHVKRGDESQFLLQAPGSTELEELTVQVARVYNGRLKVQRLCSEMEELAEHGIFLPPNMQGLTDDQIEELKLKDEWGEKCVPSGGAVFKKDDIGRRNGQAPNEKMKQVLKKTIEEAKAIISKKQVEAGVCVTMEMVKDALDQLRGAVMIVYPMGLPPYDPIRMEFENKEDLSGTQAGLNVIKEAEAQLWWAAKELRRTKKLSDYVGKNEKTKIIAKIQQRGQGAPAREPIISSEEQKQLMLYYHRRQEELKRLEENDDDAYLNSPWADNTALKRHFHGVKDIKWRPR

SEQ ID NO: 16438 - protein, 138 aa, Homo sapiens
  Payload ID: 3288
  Gene Symbol: C21orf59
  Gene Name: chromosome 21 open reading frame 59
  ENSP ID: ENSP00000300260
MVLLHVKRGDESQFLLQAPGSTELEELTVQVARVYNGRLKVQRLCSEMEELAEHGIFLPPNMQGLTDDQIEELKLKDEWGEKCVPSGGAVFKKDDIGRRNGQETSGSRCLCYHGDGERCLGPASRRGDDCLPHGVATV

SEQ ID NO: 16439 - protein, 245 aa, Homo sapiens
  Payload ID: 3288
  Gene Symbol: C21orf59
  Gene Name: chromosome 21 open reading frame 59
  ENSP ID: ENSP00000371989
MVLLHVKRGDESQFLLQAPGSTELEELTVQVARVYNGRLKVQRLCSEMEELAEHGIFLPPNMQGLTDDQIEELKLKDEWGEKCVPSGGAVFKKDDIGRRNGQAPNEKMKQVLKKTIEEAKAIISKKQVEAGVCVTMEMVKDALDQLRGAVMIVYPMGLPPYDPIRMEFENKEDLSGTQAGLNVIKEAEAQLWWAAKELRRTKKLSDYVGKNEKTKIIAKIQQVSTFCFNVSVVFVISLQTDKNVQ

SEQ ID NO: 16440 - protein, 183 aa, Homo sapiens
  Payload ID: 3288
  Gene Symbol: C21orf59
  Gene Name: chromosome 21 open reading frame 59
  ENSP ID: ENSP00000393104
MVLLHVKRGDESQFLLQAPGSTELEELTVQVARVYNGRLKVQRLCSGLTDDQIEELKLKDEWGEKCVPSGGAVFKKDDIGRRNGQAPNEKMKQVLKKTIEEAKAIISKKQVEAGVCVTMEMVKDALDQLRGAVMIVYPMGLPPYDPIRMEFENKEDLSGTQAGLNVIKEAEAQLWWAAKELRR

SEQ ID NO: 16441 - protein, 117 aa, Homo sapiens
  Payload ID: 3288
  Gene Symbol: C21orf59
  Gene Name: chromosome 21 open reading frame 59
  ENSP ID: ENSP00000407362
  MOD_RES (1)..(1): Any amino acid
XYPMGLPPYDPIRMEFENKEDLSGTQAGLNVIKEAEAQLWWAAKELRRTKKLSDYVGKNEKTKIIAKIQQRGQGAPAREPIISSEEQKQLMLYYHRRQEELKVAGDRWAFCSAGAHT

SEQ ID NO: 16442 - protein, 79 aa, Homo sapiens
  Payload ID: 3288
  Gene Symbol: C21orf59
  Gene Name: chromosome 21 open reading frame 59
  ENSP ID: ENSP00000411306
  MOD_RES (1)..(1): Any amino acid
XLRRTKKLSDYVGKNEKTKIIAKIQQIFATFQVVVLCPPELGPRSLGPLDQNPNQLRNRLLADEPGGSGARDAVSNVAP

SEQ ID NO: 16443 - protein, 258 aa, Homo sapiens
  Payload ID: 3288
  Gene Symbol: C21orf59
  Gene Name: chromosome 21 open reading frame 59
  ENSP ID: ENSP00000411467
MVLLHVKRGDESQFLLQAPGSTELEELTVQVARVYNGRLKVQRLCSEMEELAEHGIFLPPNMQGLTDDQIEELKLKDEWGEKCVPSGGAVFKKDDIGRRNGQAPNEKMKQVLKKTIEEAKAIISKKQVEAGVCVTMEMVKDALDQLRGAVMIVYPMGLPPYDPIRMEFENKEDLSGTQAGLNVIKEAEAQLWWAAKELRRTKKLSDYVGKNEKTKIIAKIQQRLEENDDDAYLNSPWADNTALKRHFHGVKDIKWRPR

SEQ ID NO: 16444 - protein, 266 aa, Homo sapiens
  Payload ID: 3289
  Gene Symbol: C21orf62
  Gene Name: chromosome 21 open reading frame 62
  ENSP ID: ENSP00000371810
CRLNQLSSQGEGSVARQRSVEWRGEASRWNSQMTACRHQESGRTYRRQPCTELGTCNNNSTLGVFALNCFTKGQKNSTLIFTRENTIRNCSCSADIRDCDYSLANLMCNCKTVLPLAVERTSYNGHLTIWFTDTSALGHLLNFTLVQDLKLSLCSTNTLPTEYLAICGLKRLRINMEAKHPFPEQSLLIHSGGDSDSREKPMWLHKGWQPCMYISFLDMALFNRDSALKSYSIENVTSIANNFPDFSYFRTFPMPSNKSYVVTFIY

SEQ ID NO: 16445 - protein, 219 aa, Homo sapiens
  Payload ID: 3289
  Gene Symbol: C21orf62
  Gene Name: chromosome 21 open reading frame 62
  Uniprot ID: Q9NYP8
  ENSP ID: ENSP00000418511
MAPPSRHCLLLISTLGVFALNCFTKGQKNSTLIFTRENTIRNCSCSADIRDCDYSLANLMCNCKTVLPLAVERTSYNGHLTIWFTDTSALGHLLNFTLVQDLKLSLCSTNTLPTEYLAICGLKRLRINMEAKHPFPEQSLLIHSGGDSDSREKPMWLHKGWQPCMYISFLDMALFNRDSALKSYSIENVTSIANNFPDFSYFRTFPMPSNKSYVVTFIY

SEQ ID NO: 16446 - protein, 219 aa, Homo sapiens; identical to SEQ ID NO: 16445
  Payload ID: 3289
  Gene Symbol: C21orf62
  Gene Name: chromosome 21 open reading frame 62
  Uniprot ID: Q9NYP8
  ENSP ID: ENSP00000418653

SEQ ID NO: 16447 - protein, 219 aa, Homo sapiens; identical to SEQ ID NO: 16445
  Payload ID: 3289
  Gene Symbol: C21orf62
  Gene Name: chromosome 21 open reading frame 62
  Uniprot ID: Q9NYP8
  ENSP ID: ENSP00000418830

SEQ ID NO: 16448 - protein, 219 aa, Homo sapiens; identical to SEQ ID NO: 16445
  Payload ID: 3289
  Gene Symbol: C21orf62
  Gene Name: chromosome 21 open reading frame 62
  Uniprot ID: Q9NYP8
  ENSP ID: ENSP00000444950

SEQ ID NO: 16449 - protein, 219 aa, Homo sapiens; identical to SEQ ID NO: 16445
  Payload ID: 3289
  Gene Symbol: C21orf62
  Gene Name: chromosome 21 open reading frame 62
  Uniprot ID: Q9NYP8
  ENSP ID: ENSP00000460629

SEQ ID NO: 16450 - protein, 266 aa, Homo sapiens; identical to SEQ ID NO: 16444
  Payload ID: 3289
  Gene Symbol: C21orf62
  Gene Name: chromosome 21 open reading frame 62
  ENSP ID: ENSP00000461325

SEQ ID NO: 16451 - protein, 219 aa, Homo sapiens; identical to SEQ ID NO: 16445
  Payload ID: 3289
  Gene Symbol: C21orf62
  Gene Name: chromosome 21 open reading frame 62
  Uniprot ID: Q9NYP8
  ENSP ID: ENSP00000461359

SEQ ID NO: 16452 - protein, 219 aa, Homo sapiens; identical to SEQ ID NO: 16445
  Payload ID: 3289
  Gene Symbol: C21orf62
  Gene Name: chromosome 21 open reading frame 62
  Uniprot ID: Q9NYP8
  ENSP ID: ENSP00000461558

SEQ ID NO: 16453 - protein, 219 aa, Homo sapiens; identical to SEQ ID NO: 16445
  Payload ID: 3289
  Gene Symbol: C21orf62
  Gene Name: chromosome 21 open reading frame 62
  Uniprot ID: Q9NYP8
  ENSP ID: ENSP00000479857

SEQ ID NO: 16454 - protein, 297 aa, Homo sapiens
  Payload ID: 3290
  Gene Symbol: C21orf91
  Gene Name: chromosome 21 open reading frame 91
  Uniprot ID: Q9NYK6
  ENSP ID: ENSP00000284881
MNEEEQFVNIDLNDDNICSVCKLGTDKETLSFCHICFELNIEGVPKSDLLHTKSLRGHKDCFEKYHLIANQGCPRSKLSKSTYEEVKTILSKKINWIVQYAQNKDLDSDSECSKNPQHHLFNFRHKPEEKLLPQFDSQVPKYSAKWIDGSAGGISNCTQRILEQRENTDFGLSMLQDSGATLCRNSVLWPHSHNQAQKKEETISSPEANVQTQHPHYSREELNSMTLGEVEQLNAKLLQQIQEVFEELTHQVQEKDSLASQLHVRHVAIEQLLKNCSKLPCLQVGRTGMKSHLPINN

SEQ ID NO: 16455 - protein, 221 aa, Homo sapiens
  Payload ID: 3290
  Gene Symbol: C21orf91
  Gene Name: chromosome 21 open reading frame 91
  Uniprot ID: Q9NYK6
  ENSP ID: ENSP00000383403
MNEEEQFVNIDLNDDNICSVCKLGTDKETLSFCHICFELNIEGVPKSDLLHTKSLRGHKDCFEKYHLIANQGCPRSKLSKSTYEEVKTILSKKINWIVQYAQNKDLDSDSECSKNPQHHLFNFRHKPEEKLLPQFDSQVPKYSAKWIDGSAGGISNCTQRILEQRENTDFGLSMLQDSGATLCRNSVLWPHSHNQAQKKEETISSPEANVQTQHPHYSREE

SEQ ID NO: 16456 - protein, 296 aa, Homo sapiens
  Payload ID: 3290
  Gene Symbol: C21orf91
  Gene Name: chromosome 21 open reading frame 91
  Uniprot ID: Q9NYK6
  ENSP ID: ENSP00000383404
MNEEEQFVNIDLNDDNICSVCKLGTDKETLSFCHICFELNIEGVPKSDLLHTKSLRGHKDCFEKYHLIANQGCPRSKLSKSTYEEVKTILSKKINWIVQYAQNKDLDSDSECSKNPQHHLFNFRHKPEEKLLPQFDSQVPKYSAKWIDGSAGGISNCTQRILEQRENTDFGLSMLQDSGATLCRNSVLWPHSHNQAQKKEETISSPEANVQTQHPHYSREELNSMTLGEVEQLNAKLLQQIQVFEELTHQVQEKDSLASQLHVRHVAIEQLLKNCSKLPCLQVGRTGMKSHLPINN

SEQ ID NO: 16457 - protein, 242 aa, Homo sapiens
  Payload ID: 3290
  Gene Symbol: C21orf91
  Gene Name: chromosome 21 open reading frame 91
  ENSP ID: ENSP00000385566
MNEEEQFVNIDLNDDNICSVCKLGTDKETLSFCHICFELNIEGVPKSDLLHTKSLRGHKDCFEKYHLIANQGCPRSKLSKSTYEEVKTILSKKINWIVQYAQNKDLDSDSECSKNPQHHLFNFRHKPEEKLLPQFDSQVPKYSAKWIDGSAGGISNCTQRILEQRENTDFGLSMLQDSGATLCRNSVLWPHSHNQAQKKEETISSPEANVQTQHPHYSREELNSMTLGEVEQLNAKLLQQIQ

SEQ ID NO: 16458 - protein, 157 aa, Homo sapiens
  Payload ID: 3291
  Gene Symbol: C22orf15
  Gene Name: chromosome 22 open reading frame 15
  ENSP ID: ENSP00000305096
MFIKVMFGAGCSVLVNTSCRLVNLTAHLRQKAGLPPDATIALLAEDGNLVSLEEDLKEGASRAQTMGNSLLKERAIYVLVRIISKRERTWPPPAMSPYWRTWMTITQSWQRNCAGCQASPLWATTGGSVWALGEAAMSKAPLQGPERALIKGMDCTL

SEQ ID NO: 16459 - protein, 142 aa, Homo sapiens
  Payload ID: 3291
  Gene Symbol: C22orf15
  Gene Name: chromosome 22 open reading frame 15
  Uniprot ID: Q8WYQ4
  ENSP ID: ENSP00000372271
MFIKVMFGAGCSVLVNTSCRLVNLTAHLRQKAGLPPDATIALLAEDGNLVSLEEDLKEGASRAQTMGNSLLKERAIYVLVRIISKVAQEGEDMASTRYESLLENLDDHYPELAGANRQQPSRTPLAESGIAEKLHQQEGQGP

SEQ ID NO: 16460 - protein, 148 aa, Homo sapiens
  Payload ID: 3291
  Gene Symbol: C22orf15
  Gene Name: chromosome 22 open reading frame 15
  Uniprot ID: Q8WYQ4
  ENSP ID: ENSP00000384965
MFIKVMFGAGCSVLVNTSCRLVNLTAHLRQKAGLPPDATIALLAEDGNLVSLEEDLKEGASRAQTMGNSLLKERAIYVLVRIIKGEDMASTRYESLLENLDDHYPELAEELRRLSGLSSVGHNWRKRMGTRRGRHEQSPTSRPRKGPD

SEQ ID NO: 16461 - protein, 132 aa, Homo sapiens
  Payload ID: 3291
  Gene Symbol: C22orf15
  Gene Name: chromosome 22 open reading frame 15
  ENSP ID: ENSP00000478052
MLCSQPGLANSSRVRGRVGTIRPVRCPSSSLHMSQRERTWPPPAMSPYWRTWMTITQSWQVSVRVQPRGRAHLLPNPYQQDFLGLPEELRRLSGLSSVGHNWRKRMGTRRGRHEQSPTSRPRKVSSLPPRSC

SEQ ID NO: 16462 - protein, 134 aa, Homo sapiens
  Payload ID: 3291
  Gene Symbol: C22orf15
  Gene Name: chromosome 22 open reading frame 15
  ENSP ID: ENSP00000486337
  MOD_RES (1)..(1): Any amino acid
XGCSVLVNTSCRLVNLTAHLRQKAGLPPDATIALLAEDGNLVSLEEDLKEGASRAQTMGNSLLKERAIYVLVRIISKVAQEGEDMASTRYESLLENLDDHYPELAGANRQQPSRTPLAESGIAEKLHQQEGQGP

SEQ ID NO: 16463 - protein, 149 aa, Homo sapiens
  Payload ID: 3291
  Gene Symbol: C22orf15
  Gene Name: chromosome 22 open reading frame 15
  ENSP ID: ENSP00000486344
  MOD_RES (1)..(1): Any amino acid
XGCSVLVNTSCRLVNLTAHLRQKAGLPPDATIALLAEDGNLVSLEEDLKEGASRAQTMGNSLLKERAIYVLVRIISKRERTWPPPAMSPYWRTWMTITQSWQRNCAGCQASPLWATTGGSVWALGEAAMSKAPLQGPERALIKGMDCTL

SEQ ID NO: 16464 - protein, 140 aa, Homo sapiens
  Payload ID: 3291
  Gene Symbol: C22orf15
  Gene Name: chromosome 22 open reading frame 15
  ENSP ID: ENSP00000486389
  MOD_RES (1)..(1): Any amino acid
XGCSVLVNTSCRLVNLTAHLRQKAGLPPDATIALLAEDGNLVSLEEDLKEGASRAQTMGNSLLKERAIYVLVRIIKGEDMASTRYESLLENLDDHYPELAEELRRLSGLSSVGHNWRKRMGTRRGRHEQSPTSRPRKGPD

SEQ ID NO: 16465 - protein, 217 aa, Homo sapiens
  Payload ID: 3292
  Gene Symbol: C22orf23
  Gene Name: chromosome 22 open reading frame 23
  Uniprot ID: Q9BZE7
  ENSP ID: ENSP00000249079
MASQKQMEVVTKGTGFRRRPKTITYTPGTCELLRVMMKESKLTNIQQRHIMDIMKRGDALPLQCSPTSSQRVLPSKQIASPIYLPPILAARPHLRPANMCQANGAYSREQFKPQATRDLEKEKQRLQNIFATGKDMEERKRKAPPARQKAPAPELDRFEELVKEIQERKEFLADMEALGQGKQYRGIILAEISQKLREMEDIDHRRSEELRKGLATT

SEQ ID NO: 16466 - protein, 217 aa, Homo sapiens; identical to SEQ ID NO: 16465
  Payload ID: 3292
  Gene Symbol: C22orf23
  Gene Name: chromosome 22 open reading frame 23
  Uniprot ID: Q9BZE7
  ENSP ID: ENSP00000384618

SEQ ID NO: 16467 - protein, 217 aa, Homo sapiens; identical to SEQ ID NO: 16465
  Payload ID: 3292
  Gene Symbol: C22orf23
  Gene Name: chromosome 22 open reading frame 23
  Uniprot ID: Q9BZE7
  ENSP ID: ENSP00000384667

SEQ ID NO: 16468 - protein, 162 aa, Homo sapiens
  Payload ID: 3292
  Gene Symbol: C22orf23
  Gene Name: chromosome 22 open reading frame 23
  ENSP ID: ENSP00000395077
MASQKQMEVVTKGTGFRRRPKTITYTPGTCELLRVMMKESKLTNIQQRHIMDIMKRGDALPLQCSPTSSQRVLPSKQIASPIYLPPILAARPHLRPANMCQANGAYSREQFKPQATRDLEKEKQRLQNIFATGKDMEERKRKAPPARQKAPAPELDRFEELV

SEQ ID NO: 16469 - protein, 120 aa, Homo sapiens
  Payload ID: 3292
  Gene Symbol: C22orf23
  Gene Name: chromosome 22 open reading frame 23
  ENSP ID: ENSP00000407707
MASQKQMEVVTKGTGFRRRPKTITYTPGTCELLRVMMKESKLTNIQQRHIMDIMKRGDALPLQCSPTSSQRVLPSKQIASPIYLPPILAARPHLRPANMCQANGAYSREQFKPQATRDLE

SEQ ID NO: 16470 - protein, 196 aa, Homo sapiens
  Payload ID: 3292
  Gene Symbol: C22orf23
  Gene Name: chromosome 22 open reading frame 23
  ENSP ID: ENSP00000483445
MASQKQMEVVTKGTGFRRRPKTITYTPGTCELLRGGDALPLQCSPTSSQRVLPSKQIASPIYLPPILAARPHLRPANMCQANGAYSREQFKPQATRDLEKEKQRLQNIFATGKDMEERKRKAPPARQKAPAPELDRFEELVKEIQERKEFLADMEALGQGKQYRGIILAEISQKLREMEDIDHRRSEELRKGLATT

SEQ ID NO: 16471 - protein, 364 aa, Homo sapiens
  Payload ID: 3293
  Gene Symbol: C22orf29
  Gene Name: chromosome 22 open reading frame 29
  Uniprot ID: Q7L3V2
  ENSP ID: ENSP00000330596
MPRGRCRQQGPRIPIWAAANYANAHPWQQMDKASPGVAYTPLVDPWIERPCCGDTVCVRTTMEQKSTASGTCGGKPAERGPLAGHMPSSRPHRVDFCWVPGSDPGTFDGSPWLLDRFLAQLGDYMSFHFEHYQDNISRVCEILRRLTGRAQAWAAPYLDGDLPLPDDYELFCQDLKEVVQDPNSFAEYHAVVTCPLPLASSQLPVAPQLPVVRQYLARFLEGLALDMGTAPRSLPAAMATPAVSGSNSVSRSALFEQQLTKESTPGPKEPPVLPSSTCSSKPGPVEPASSQPEEAAPTPVPRLSESANPPAQRPDPAHPGGPKPQKTEEEVLETEGDQEVSLGTPQEVVEAPETPGEPPLSPGF

SEQ ID NO: 16472 - protein, 364 aa, Homo sapiens; identical to SEQ ID NO: 16471
  Payload ID: 3293
  Gene Symbol: C22orf29
  Gene Name: chromosome 22 open reading frame 29
  Uniprot ID: Q7L3V2
  ENSP ID: ENSP00000384924

SEQ ID NO: 16473 - protein, 364 aa, Homo sapiens; identical to SEQ ID NO: 16471
  Payload ID: 3293
  Gene Symbol: C22orf29
  Gene Name: chromosome 22 open reading frame 29
  Uniprot ID: Q7L3V2
  ENSP ID: ENSP00000386111

SEQ ID NO: 16474 - protein, 91 aa, Homo sapiens
  Payload ID: 3293
  Gene Symbol: C22orf29
  Gene Name: chromosome 22 open reading frame 29
  ENSP ID: ENSP00000392994
MPRGRCRQQGPRIPIWAAANYANAHPWQQMDKASPGVAYTPLVDPWIERPCCGDTVCVRTTMEQKSTASGTCGGKPAERGPLAGHMPSSRP

SEQ ID NO: 16475 - protein, 290 aa, Homo sapiens
  Payload ID: 3294
  Gene Symbol: C22orf31
  Gene Name: chromosome 22 open reading frame 31
  Uniprot ID: O95567
  ENSP ID: ENSP00000216071
MHPINVRRDPSIPIYGLRQSILLNTRLQDCYVDSPALTNIWMARTCAKQNINAPAPATTSSWEVVRNPLIASSFSLVKLVLRRQLKNKCCPPPCKFGEGKLSKRLKHKDDSVMKATQQARKRNFISSKSKQPAGHRRPAGGIRESKESSKEKKLTVRQDLEDRYAEHVAATQALPQDSGTAAWKGRVLLPETQKRQQLSEDTLTIHGLPTEGYQALYHAVVEPMLWNPSGTPKRYSLELGKAIKQKLWEALCSQGAISEGAQRDRFPGRKQPGVHEEPVLKKWPKLKSKK

SEQ ID NO: 16476 - protein, 105 aa, Homo sapiens
  Payload ID: 3295
  Gene Symbol: C22orf39
  Gene Name: chromosome 22 open reading frame 39
  ENSP ID: ENSP00000333064
MADGSGWQPPRPCEAYRAEWKLCRSARHFLHHYYVHGERPACEQWQRDLASCRDWEERRNAEAQQSLCESERARVRAARKHILVWAPRQSPPPDWHLPLPQEKDE

SEQ ID NO: 16477 - protein, 142 aa, Homo sapiens
  Payload ID: 3295
  Gene Symbol: C22orf39
  Gene Name: chromosome 22 open reading frame 39
  Uniprot ID: Q6P5X5
  ENSP ID: ENSP00000382474
MCRCSLVLLSVDHEVPFSSFFIGWRTEGRAWRAGRPDMADGSGWQPPRPCEAYRAEWKLCRSARHFLHHYYVHGERPACEQWQRDLASCRDWEERRNAEAQQSLCESERARVRAARKHILVWAPRQSPPPDWHLPLPQEKDE

SEQ ID NO: 16478 - protein, 80 aa, Homo sapiens
  Payload ID: 3295
  Gene Symbol: C22orf39
  Gene Name: chromosome 22 open reading frame 39
  ENSP ID: ENSP00000382478
MADGSGWQPPRPCEAYRAEWKLCRSARHFLHHYYVHGERPACEQWQRDLASCRDWEERRNAEAQVLSVVAHTCNLSYLGG

SEQ ID NO: 16479 - protein, 92 aa, Homo sapiens
  Payload ID: 3295
  Gene Symbol: C22orf39
  Gene Name: chromosome 22 open reading frame 39
  ENSP ID: ENSP00000424903
MADGSGWQPPRPCEAYRAEWKLCRSARHFLHHYYVHGERPACEQWQRDLASCRDWEERRNAEAQASRFFQLIFTLTGPSSQLEDKGRILGRL

SEQ ID NO: 16480 - protein, 117 aa, Homo sapiens
  Payload ID: 3295
  Gene Symbol: C22orf39
  Gene Name: chromosome 22 open reading frame 39
  Uniprot ID: Q6P5X5
  ENSP ID: ENSP00000439212
MCRCSLVLLSVDHEVPFSSFFIGWRTEGRAWRAGRPDMADGSGWQPPRPCEAYRAEWKLCRSARHFLHHYYVHGERPACEQWQRDLASCRDWEERRNAEAQVLSVVAHTCNLSYLGG

SEQ ID NO: 16481 - protein, 142 aa, Homo sapiens; identical to SEQ ID NO: 16477
  Payload ID: 3295
  Gene Symbol: C22orf39
  Gene Name: chromosome 22 open reading frame 39
  Uniprot ID: Q6P5X5
  ENSP ID: ENSP00000479673

SEQ ID NO: 16482 - protein, 251 aa, Homo sapiens
  Payload ID: 3296
  Gene Symbol: C22orf42
  Gene Name: chromosome 22 open reading frame 42
  Uniprot ID: Q6IC83
  ENSP ID: ENSP00000371529
MGSKLTCCLGPSGGLNCDCCRPDVGPCHECEIPETVAATAPASTTAKPAKLDLKAKKAQLMQYLSLPKTPKMLKMSKGLDARSKRWLKIIWRRHGIWPLENIGPTEDVQASAHGGVEENMTSDIEIPEAKHDHRPTEDVQVSAHGGVEENITSDIEISEAKHDHHLVEDLSESLSVCLEDFMTSDLSESLSVSLEDFMTSGLSESLSVSLEDLMTPEMAKERYEDYLCWVKMARSRLNEPISSQVLGLLRL

SEQ ID NO: 16483 - protein, 243 aa, Homo sapiens
  Payload ID: 3297
  Gene Symbol: C22orf46
  Gene Name: chromosome 22 open reading frame 46
  Uniprot ID: C9J442
  ENSP ID: ENSP00000385467
MLLSLLGACAVVGPFHGPEWEPVQGLLSQNHSCRDPQCCGNLLVLCLFLVWQVRHCWHQVTRTRFSTRNVIKVPLQKRAVPSMRCETVFKLTPEFFSPGKSRGLDSQQCAQRQRWGYRRSLQESWAQNLLSPQHPCPGPPSGVHTHSEPIFCTTSISNTCLLPQNSSWKAWQVPWCLHDGQTRPALDMCQEMEQLLLHSQERLVSLEPVISVRSRPTSMTLTTSLPNLLSAERLQFCPQRAPA

SEQ ID NO: 16484 - protein, 128 aa, Homo sapiens
  Payload ID: 3298
  Gene Symbol: C3orf14
  Gene Name: chromosome 3 open reading frame 14
  Uniprot ID: Q9HBI5
  ENSP ID: ENSP00000232519
MTSLFAQEIRLSKRHEEIVSQRLMLLQQMENKLGDQHTEKASQLQTVETAFKRNLSLLKDIEAAEKSLQTRIHPLPRPEVVSLETRYWASVEEYIPKWEQFLLGRAPYPFAVENQNEAENTIQNEAQR

SEQ ID NO: 16485 - protein, 128 aa, Homo sapiens; identical to SEQ ID NO: 16484
  Payload ID: 3298
  Gene Symbol: C3orf14
  Gene Name: chromosome 3 open reading frame 14
  Uniprot ID: Q9HBI5
  ENSP ID: ENSP00000418086

SEQ ID NO: 16486 - protein, 62 aa, Homo sapiens
  Payload ID: 3298
  Gene Symbol: C3orf14
  Gene Name: chromosome 3 open reading frame 14
  ENSP ID: ENSP00000419937
MTSLFAQEIRLSKRHEEIVSQRLMLLQQMENKLGDQHTEKASQLQTVETAFKRNLSLLKDIE

SEQ ID NO: 16487 - protein, 128 aa, Homo sapiens; identical to SEQ ID NO: 16484
  Payload ID: 3298
  Gene Symbol: C3orf14
  Gene Name: chromosome 3 open reading frame 14
  Uniprot ID: Q9HBI5
  ENSP ID: ENSP00000419977

SEQ ID NO: 16488 - protein, 128 aa, Homo sapiens; identical to SEQ ID NO: 16484
  Payload ID: 3298
  Gene Symbol: C3orf14
  Gene Name: chromosome 3 open reading frame 14
  Uniprot ID: Q9HBI5
  ENSP ID: ENSP00000438275

SEQ ID NO: 16489 - protein, 567 aa, Homo sapiens
  Payload ID: 3299
  Gene Symbol: C3orf17
  Gene Name: chromosome 3 open reading frame 17
  Uniprot ID: Q6NW34
  ENSP ID: ENSP00000320251
MMAAVPPGLEPWNRVRIPKAGNRSAVTVQNPGAALDLCIAAVIKECHLVILSLKSQTLDAETDVLCAVLYSNHNRMGRHKPHLALKQVEQCLKRLKNMNLEGSIQDLFELFSSNENQPLTTKVCVVPSQPVVELVLMKVLGACKLLLRLLDCCCKTFLLTVKHLGLQEFIILNLVMVGLVSRLWVLYKGVLKRLILLYEPLFGLLQEVARIQPMPYFKDFTFPSDITEFLGQPYFEAFKKKMPIAFAAKGINKLLNKLFLINEQSPRASEETLLGISKKAKQMKINVQNNVDLGQPVKNKRVFKEESSEFDVRAFCNQLKHKATQETSFDFKCSQSRLKTTKYSSQKVIGTPHAKSFVQRFREAESFTQLSEEIQMAVVWCRSKKLKAQAIFLGNKLLKSNRLKHLEAQGTSLPKKLECIKTSICNHLLRGSGIKTSKHHLRQRRSQNKFLRRQRKPQRKLQSTLLREIQQFSQGTRKSATDTSAKWRLSHCTVHRTDLYPNSKQLLNSGVSMPVIQTKEKMIHENLRGIHENETDSWTVMQINKNSTSGTIKETDDIDDIFALMGV

SEQ ID NO: 16490 - protein, 497 aa, Homo sapiens
  Payload ID: 3299
  Gene Symbol: C3orf17
  Gene Name: chromosome 3 open reading frame 17
  Uniprot ID: Q6NW34
  ENSP ID: ENSP00000373173
MMAAVPPGLEPWNRVRIPKAGNRSAVTVQNPGAALDLCIAAVIKECHLVILSLKSQTLDAETDVLCAVLYSNHNRMGRHKPHLALKQVEQCLKRLKNMNLEGSIQDLFELFSSKVLYKGVLKRLILLYEPLFGLLQEVARIQPMPYFKDFTFPSDITEFLGQPYFEAFKKKMPIAFAAKGINKLLNKLFLINEQSPRASEETLLGISKKAKQMKINVQNNVDLGQPVKNKRVFKEESSEFDVRAFCNQLKHKATQETSFDFKCSQSRLKTTKYSSQKVIGTPHAKSFVQRFREAESFTQLSEEIQMAVVWCRSKKLKAQAIFLGNKLLKSNRLKHLEAQGTSLPKKLECIKTSICNHLLRGSGIKTSKHHLRQRRSQNKFLRRQRKPQRKLQSTLLREIQQFSQGTRKSATDTSAKWRLSHCTVHRTDLYPNSKQLLNSGVSMPVIQTKEKMIHENLRGIHENETDSWTVMQINKNSTSGTIKETDDIDDIFALMGV

SEQ ID NO: 16491 - protein, 81 aa, Homo sapiens
  Payload ID: 3299
  Gene Symbol: C3orf17
  Gene Name: chromosome 3 open reading frame 17
  ENSP ID: ENSP00000417613
MGRHKPHLALKQVEQCLKRLKNMNLEGSIQDLFELFSSNENQPLTTKVCVVPSQPVVELVLMKVLGACKLLLRLLDCCCKT

SEQ ID NO: 16492 - protein, 36 aa, Homo sapiens
  Payload ID: 3299
  Gene Symbol: C3orf17
  Gene Name: chromosome 3 open reading frame 17
  ENSP ID: ENSP00000417734
MMAAVPPGLEPWNRVRIPKAGNRSAVTVQNPGAALG

SEQ ID NO: 16493 - protein, 36 aa, Homo sapiens; identical to SEQ ID NO: 16492
  Payload ID: 3299
  Gene Symbol: C3orf17
  Gene Name: chromosome 3 open reading frame 17
  ENSP ID: ENSP00000417968

SEQ ID NO: 16494 - protein, 36 aa, Homo sapiens; identical to SEQ ID NO: 16492
  Payload ID: 3299
  Gene Symbol: C3orf17
  Gene Name: chromosome 3 open reading frame 17
  ENSP ID: ENSP00000417983

SEQ ID NO: 16495 - protein, 114 aa, Homo sapiens
  Payload ID: 3299
  Gene Symbol: C3orf17
  Gene Name: chromosome 3 open reading frame 17
  ENSP ID: ENSP00000418133
MMAAVPPGLEPWNRVRIPKAGNRSAVTVQNPGAALDLCIAAVIKECHLVILSLKSQTLDAETDVLCAVLYSNHNRMGRHKPHLALKQVEQCLKRLKNMNLEGSIQDLFELFSSK

SEQ ID NO: 16496 - protein, 238 aa, Homo sapiens
  Payload ID: 3299
  Gene Symbol: C3orf17
  Gene Name: chromosome 3 open reading frame 17
  ENSP ID: ENSP00000418309
MMAAVPPGLEPWNRVRIPKAGNRSAVTVQNPGAALDLCIAAVIKECHLVILSLKSQTLDAETDVLCAVLYSNHNRMGRHKPHLALKQVEQCLKRLKNMNLEGSIQDLFELFSSKVLYKGVLKRLILLYEPLFGLLQEVARIQPMPYFKDFTFPSDITEFLGQPYFEAFKKKMPIAFAAKGINKLLNKLFLINEQSPRASEETLLGISKKAKQMKINVQNNVDLGQPVKNKRVFKGDQF

SEQ ID NO: 16497 - protein, 39 aa, Homo sapiens
  Payload ID: 3299
  Gene Symbol: C3orf17
  Gene Name: chromosome 3 open reading frame 17
  ENSP ID: ENSP00000418677
MMAAVPPGLEPWNRVRIPKAGNRSAVTVQNPGAALGDQF

SEQ ID NO: 16498 - protein, 36 aa, Homo sapiens; identical to SEQ ID NO: 16492
  Payload ID: 3299
  Gene Symbol: C3orf17
  Gene Name: chromosome 3 open reading frame 17
  ENSP ID: ENSP00000418902

SEQ ID NO: 16499 - protein, 36 aa, Homo sapiens; identical to SEQ ID NO: 16492
  Payload ID: 3299
  Gene Symbol: C3orf17
  Gene Name: chromosome 3 open reading frame 17
  ENSP ID: ENSP00000419174

SEQ ID NO: 16500 - protein, 36 aa, Homo sapiens; identical to SEQ ID NO: 16492
  Payload ID: 3299
  Gene Symbol: C3orf17
  Gene Name: chromosome 3 open reading frame 17
  ENSP ID: ENSP00000419462

SEQ ID NO: 16501 - protein, 36 aa, Homo sapiens; identical to SEQ ID NO: 16492
  Payload ID: 3299
  Gene Symbol: C3orf17
  Gene Name: chromosome 3 open reading frame 17
  ENSP ID: ENSP00000419716

SEQ ID NO: 16502 - protein, 113 aa, Homo sapiens
  Payload ID: 3299
  Gene Symbol: C3orf17
  Gene Name: chromosome 3 open reading frame 17
  ENSP ID: ENSP00000420036
MAAVPPGLEPWNRVRIPKAGNRSAVTVQNPGAALDLCIAAVIKECHLVILSLKSQTLDAETDVLCAVLYSNHNRMGRHKPHLALKQVEQCLKRLKNMNLEGSIQDLFELFSSK

SEQ ID NO: 16503 - protein, 36 aa, Homo sapiens; identical to SEQ ID NO: 16492
  Payload ID: 3299
  Gene Symbol: C3orf17
  Gene Name: chromosome 3 open reading frame 17
  ENSP ID: ENSP00000420471

SEQ ID NO: 16504 - protein, 36 aa, Homo sapiens; identical to SEQ ID NO: 16492
  Payload ID: 3299
  Gene Symbol: C3orf17
  Gene Name: chromosome 3 open reading frame 17
  ENSP ID: ENSP00000420505

SEQ ID NO: 16505 - protein, 36 aa, Homo sapiens; identical to SEQ ID NO: 16492
  Payload ID: 3299
  Gene Symbol: C3orf17
  Gene Name: chromosome 3 open reading frame 17
  ENSP ID: ENSP00000420577

SEQ ID NO: 16506 - protein, 162 aa, Homo sapiens
  Payload ID: 3300
  Gene Symbol: C3orf18
  Gene Name: chromosome 3 open reading frame 18
  Uniprot ID: Q9UK00
  ENSP ID: ENSP00000349732
MNSRTASARGWFSSRPPTSESDLEPATDGPASETTTLSPEATTFNDTRIPDAAGGTAGVGTMLLSFGIITVIGLAVALVLYIRKKKRLEKLRHQLMPMYNFDPTEEQDELEQELLEHGRDAASVQAATSVQAMQGKTTLPSQGPLQRPSRLVFTDVANAIHA

SEQ ID NO: 16507 - protein, 162 aa, Homo sapiens; identical to SEQ ID NO: 16506
  Payload ID: 3300
  Gene Symbol: C3orf18
  Gene Name: chromosome 3 open reading frame 18
  Uniprot ID: Q9UK00
  ENSP ID: ENSP00000387606

SEQ ID NO: 16508 - protein, 110 aa, Homo sapiens
  Payload ID: 3300
  Gene Symbol: C3orf18
  Gene Name: chromosome 3 open reading frame 18
  ENSP ID: ENSP00000399129
MSPSRRAAGFLRASSPCHLMLLLLLQVLYIRKKKRLEKLRHQLMPMYNFDPTEEQDELEQELLEHGRDAASVQAATSVQAMQGKTTLPSQGPLQRPSRLVFTDVANAIHA

SEQ ID NO: 16509 - protein, 104 aa, Homo sapiens
  Payload ID: 3300
  Gene Symbol: C3orf18
  Gene Name: chromosome 3 open reading frame 18
  ENSP ID: ENSP00000400599
MNSRTASARGWFSSRPPTSESDLEPATDGPASETTTLSPEATTFNDTRIPDAAGGTAGVGTMLLSFGIITVIGLAVALRRGVSMLPRLDLNSWAQEILLPQPLE

SEQ ID NO: 16510 - protein, 162 aa, Homo sapiens; identical to SEQ ID NO: 16506
  Payload ID: 3300
  Gene Symbol: C3orf18
  Gene Name: chromosome 3 open reading frame 18
  Uniprot ID: Q9UK00
  ENSP ID: ENSP00000404913

SEQ ID NO: 16511 - protein, 142 aa, Homo sapiens
  Payload ID: 3300
  Gene Symbol: C3orf18
  Gene Name: chromosome 3 open reading frame 18
  Uniprot ID: Q9UK00
  ENSP ID: ENSP00000414124
MNSRTASARGWFSSRPPTSESDLEPATDGPASETTTLSPEATTFNDTRIPDAAGGTAGVLYIRKKKRLEKLRHQLMPMYNFDPTEEQDELEQELLEHGRDAASVQAATSVQAMQGKTTLPSQGPLQRPSRLVFTDVANAIHA

SEQ ID NO: 16512 - protein, 904 aa, Homo sapiens
  Payload ID: 3301
  Gene Symbol: C3orf20
  Gene Name: chromosome 3 open reading frame 20
  Uniprot ID: Q8ND61
  ENSP ID: ENSP00000253697
MSYIKSNLELYQQYTAMAPKLLARISKLLMICQNAGISVPKGIRNIFEFTWEELISDPSVPTPSDILGLEVSFGAPLVVLMEPTFVQVPTLKKPLPPPPPAPPRPVLLATTGAAKRSTLSPTMARQVRTHQETLNRFQQQSIHLLTELLRLKMKAMVESMSVGANPLDITRRFVEASQLLHLNAKEMAFNCLISTAGRSGYSSGQLWKESLANMSAIGVNSPYQLIYHSSTACLSFSLSAGKEAKKKIGKSRTTEDVSMPPLHRGVGTPANSLEFSDPCPEAREKLQELCRHIEAERATWKGRNISYPMILRNYKAKMPSHLMLARKGDSQTPGLHYPPTAGAQTLSPTSHPSSANHHFSQHCQEGKAPKKAFKFHYTFYDGSSFVYYPSGNVAVCQIPTCCRGRTITCLFNDIPGFSLLALFNTEGQGCVHYNLKTSCPYVLILDEEGGTTNDQQGYVVHKWSWTSRTETLLSLEYKVNEEMKLKVLGQDSITVTFTSLNETVTLTVSANNCPHGMAYDKRLNRRISNMDDKVYKMSRALAEIKKRFQKTVTQFINSILLAAGLFTIEYPTKKEEEEFVRFKMRSRTHPERLPKLSLYSGESLLRSQSGHLESSIAETLKDEPESAPVSPVRKTTKIHTKAKVTSRGKAREGRSPTRWAALPSDCPLVLRKLMLKEDTRAGCKCLVKAPLVSDVELERFLLAPRDPSQVLVFGIISSQNYTSTGQLQWLLNTLYNHQQRGRGSPCIQCRYDSYRLLQYDLDSPLQEDPPLMVKKNSVVQGMILMFAGGKLIFGGRVLNGYGLSKQNLLKQIFRSQQDYKMGYFLPDDYKFSVPNSVLSLEDSESVKKAESEDIQGSSSSLALEDYVEKELSLEAEKTREPEVELHPLSRDSKITSWKKQASKK

SEQ ID NO: 16513 - protein, 782 aa, Homo sapiens
  Payload ID: 3301
  Gene Symbol: C3orf20
  Gene Name: chromosome 3 open reading frame 20
  Uniprot ID: Q8ND61
  ENSP ID: ENSP00000396081
MARQVRTHQETLNRFQQQSIHLLTELLRLKMKAMVESMSVGANPLDITRRFVEASQLLHLNAKEMAFNCLISTAGRSGYSSGQLWKESLANMSAIGVNSPYQLIYHSSTACLSFSLSAGKEAKKKIGKSRTTEDVSMPPLHRGVGTPANSLEFSDPCPEAREKLQELCRHIEAERATWKGRNISYPMILRNYKAKMPSHLMLARKGDSQTPGLHYPPTAGAQTLSPTSHPSSANHHFSQHCQEGKAPKKAFKFHYTFYDGSSFVYYPSGNVAVCQIPTCCRGRTITCLFNDIPGFSLLALFNTEGQGCVHYNLKTSCPYVLILDEEGGTTNDQQGYVVHKWSWTSRTETLLSLEYKVNEEMKLKVLGQDSITVTFTSLNETVTLTVSANNCPHGMAYDKRLNRRISNMDDKVYKMSRALAEIKKRFQKTVTQFINSILLAAGLFTIEYPTKKEEEEFVRFKMRSRTHPERLPKLSLYSGESLLRSQSGHLESSIAETLKDEPESAPVSPVRKTTKIHTKAKVTSRGKAREGRSPTRWAALPSDCPLVLRKLMLKEDTRAGCKCLVKAPLVSDVELERFLLAPRDPSQVLVFGIISSQNYTSTGQLQWLLNTLYNHQQRGRGSPCIQCRYDSYRLLQYDLDSPLQEDPPLMVKKNSVVQGMILMFAGGKLIFGGRVLNGYGLSKQNLLKQIFRSQQDYKMGYFLPDDYKFSVPNSVLSLEDSESVKKAESEDIQGSSSSLALEDYVEKELSLEAEKTREPEVELHPLSRDSKITSWKKQASKK

SEQ ID NO: 16514 - protein, 782 aa, Homo sapiens; identical to SEQ ID NO: 16513
  Payload ID: 3301
  Gene Symbol: C3orf20
  Gene Name: chromosome 3 open reading frame 20
  Uniprot ID: Q8ND61
  ENSP ID: ENSP00000402933

SEQ ID NO: 16515 - protein, 141 aa, Homo sapiens
  Payload ID: 3302
  Gene Symbol: C3orf22
  Gene Name: chromosome 3 open reading frame 22
  Uniprot ID: Q8N5N4
  ENSP ID: ENSP00000316644
MDSSACKKSHQSKKWRIQAQENFAKKFPYRLSWLTEPDPEPLQPWEVTNDSNTVQLPLQKRLVPTRSIPVRGLGAPDFTSPSGSCPAPLPAPSPPPLCNLWELKLLSRRFPRQLAFLLSTRHTEAACPQTSKAAGLSRGLS

SEQ ID NO: 16516 - protein, 102 aa, Homo sapiens
  Payload ID: 3302
  Gene Symbol: C3orf22
  Gene Name: chromosome 3 open reading frame 22
  Uniprot ID: Q8N5N4
  ENSP ID: ENSP00000422064
MDSSACKKSHQSKKWRIQAQENFAKKFPYRLSWLTEPDPEPLQPWEVTNDSNTVQLPLQKRLVPTRSIPVRGVGVRIKKSMNVTSRTLSQMYTHTGKWAPFH

SEQ ID NO: 16517 - protein, 536 aa, Homo sapiens
  Payload ID: 3303
  Gene Symbol: C3orf30
  Gene Name: chromosome 3 open reading frame 30
  Uniprot ID: Q96M34
  ENSP ID: ENSP00000295622
MEEPPQEALAEPLKHESPAAPSSAGHTKGQEEDDQKNQAERKADNHTAHRIADQTALRVPSQAESSIFSQATNGVAEQNGHSTPGQAGRRASNPADVSDLRADDQVNQTPSEQTKGKASSQANNVQHEQSDGQVSGLTEERTAEQTERRLPTQAERRTSGQIDGRLAMPSDQRGSRQTDHRMAGQSERRASEQMDRRMSGEAERRTSEQITHRLSKLSERRPSVQIDSGSSVPSDQSPSVQIDSGSSVPSDQRPSVQIDRRMSGKVRRRSSEKTDYRLAGLADPGTSEQTDLRLYGLVDHKTSVKTHHQVYGQATELAEHQAIDQAHSNADQPPVDNAHYTESDQTDHLADRQANHKDQLSYYETRGQSEDRIFPQLGNSKEDKEADYRVQPCKFEDSQVDLNSKPSVEMETQNATTIPPYNPVDARFTSNFQAKDQALFPRLPSISSKLNYTSSQEKTQAIVTKSDEFSEIDQGKGYHIRNQTYRRFPSIVYEDPYQVSLQYMEKHHILQIFQQITENLVYEKPEDPLNFMLCQV

SEQ ID NO: 16518 - protein, 441 aa, Homo sapiens
  Payload ID: 3303
  Gene Symbol: C3orf30
  Gene Name: chromosome 3 open reading frame 30
  ENSP ID: ENSP00000418207
  MOD_RES (1)..(1): Any amino acid
XQAERKADNHTAHRIADQTALRVPSQAESSIFSQATNGVAEQNGHSTPGQAGRRASNPADVSDLRADDQVNQTPSEQTKGKASSQANNVQHEQSDGQVSGLTEERTAEQTERRLPTQAERRTSGQIDGRLAMPSDQRGSRQTDHRMAGQSERRASEQMDRRMSGEAERRTSEQITHRLSKLSERRPSVQIDSGSSVPSDQSPSVQIDSGSSVPSDQRPSVQIDRRMSGKVRRRSSEKTDYRLAGLADPGTSEQTDLRLYGLVDHKTSVKTHHQVYGQATELAEHQAIDQAHSNADQPPVDNAHYTESDQTDHLADRQANHKDQLSYYETRGQSEDRIFPQLGNSKEDKEADYRVQPCKFEDSQVDLNSKPSVEMETQNATTIPPYNPVDARFTSNFQAKDQALFPRLPSISSKLNYTSSQEKTQAIVTKSVQEMMKKRDKM

SEQ ID NO: 16519 - protein, 222 aa, Homo sapiens
  Payload ID: 3303
  Gene Symbol: C3orf30
  Gene Name: chromosome 3 open reading frame 30
  ENSP ID: ENSP00000419083
  MOD_RES (1)..(1): Any amino acid
XRRRSSEKTDYRLAGLADPGTSEQTDLRLYGLVDHKTSVKTHHQVYGQATELAEHQAIDQAHSNADQPPVDNAHYTESDQTDHLADRQANHKDQLSYYETRGQSEDRIFPQLGNSKEDKEADYRVQPCKFEDSQVDLNSKPSVEMETQNATTIPPYNPVDARFTSNFQAKDQALFPRLPSISSKLNYTSSQEKTQAIVTKSITENLVYEKPEDPLNFMLCQV

SEQ ID NO: 16520 - protein, 287 aa, Homo sapiens
  Payload ID: 3303
  Gene Symbol: C3orf30
  Gene Name: chromosome 3 open reading frame 30
  ENSP ID: ENSP00000419675
  MOD_RES (1)..(1): Any amino acid
XQITHRLSKLSERRPSVQIDSGSSVPSDQSPSVQIDSGSSVPSDQRPSVQIDRRMSGKVRRRSSEKTDYRLAGLADPGTSEQTDLRLYGLVDHKTSVKTHHQVYGQATELAEHQAIDQAHSNADQPPVDNAHYTESDQTDHLADRQANHKDQLSYYETRGQSEDRIFPQLGNSKEDKEADYRVQPCKFEDSQVDLNSKPSVEMETQNATTIPPYNPVDARFTSNFQAKDQALFPRLPSISSKLNYTSSQEKTQAIVTKSFMKILTKFHSNTWKNTTFCKYSSRLLKT

SEQ ID NO: 16521 - protein, 535 aa, Homo sapiens
  Payload ID: 3303
  Gene Symbol: C3orf30
  Gene Name: chromosome 3 open reading frame 30
  ENSP ID: ENSP00000474929
MEEPPQEALAEPLKHESPAAPSSAGHTKGQEEDDQKNQAERKADNHTAHRIADQTALRVPSQAESSIFSQATNGVAEQNGHSTPGQAGRRASNPADVSDLRADDQVNQTPSEQTKGKASSQANNVQHEQSDGQVSGLTEERTAEQTERRLPTQAERRTSGQIDGRLAMPSDQRGSRQTDHRMAGQSERRASEQMDRRMSGEAERRTSEQITHRLSKLSERRPSVQIDSGSSVPSDQSPSVQIDSGSSVPSDQRPSVQIDRRMSGKVRRRSSEKTDYRLAGLADPGTSEQTDLRLYGLVDHKTSVKTHHQVYGQATELAEHQAIDQAHSNADQPPVDNAHYTESDQTDHLADRQANHKDQLSYYETRGQSEDRIFPQLGNSKEDKEADYRVQPCKFEDSQVDLNSKPSVEMETQNATTIPPYNPVDARFTSNFQAKDQALFPRLPSISSKLNYTSSQEKTQAIVTKSDEFSEIDQGKGYHIRNQTYRRFPSIVYEDPYQVSLQYMEKHHILQIFQITENLVYEKPEDPLNFMLCQV

SEQ ID NO: 16522 - protein, 294 aa, Homo sapiens
  Payload ID: 3304
  Gene Symbol: C3orf33
  Gene Name: chromosome 3 open reading frame 33
  Uniprot ID: Q6P1S2
  ENSP ID: ENSP00000342512
MAGQPAATGSPSADKDGMEPNVVARISQWADDHLRLVRNISTGMAIAGIMLLLRSIRLTSKFTSSSDIPVEFIRRNVKLRGRLRRITENGLEIEHIPITLPIIASLRKEPRGALLVKLAGVELAETGKAWLQKELKPSQLLWFQLLGKENSALFCYLLVSKGGYFSVNLNEEILRRGLGKTVLVKGLKYDSKIYWTVHRNLLKAELTALKKGEGIWKEDSEKESYLEKFKDSWREIWKKDSFLKTTGSDFSLKKESYYEKLKRTYEIWKDNMNNCSLILKFRELISRINFRRKG

SEQ ID NO: 16523 - protein, 115 aa, Homo sapiens
  Payload ID: 3304
  Gene Symbol: C3orf33
  Gene Name: chromosome 3 open reading frame 33
  ENSP ID: ENSP00000417361
  MOD_RES (1)..(1): Any amino acid
XAGQPAATGSPSADKDGMEPNVVARISQWADDHLRLVRGHGIPLWPKLECSGTIIAHCCCSTHFGRKDPPTSASRVAGTTDQVLHLSPRLECNGVISAHCNLCLPGSSDCPASPS

SEQ ID NO: 16524 - protein, 119 aa, Homo sapiens
  Payload ID: 3304
  Gene Symbol: C3orf33
  Gene Name: chromosome 3 open reading frame 33
  ENSP ID: ENSP00000418410
MAGQPAATGSPSADKDGMEPNVVARISQWADDHLRLVRGHGIPLWPKLECSGTIIAHCCCSTHFGRKDPPTSASRVAGTTEHQHWNGHSWNNVTFEKHSTDIKIYKLFGYSSRIYKKKC

SEQ ID NO: 16525 - protein, 71 aa, Homo sapiens
  Payload ID: 3304
  Gene Symbol: C3orf33
  Gene Name: chromosome 3 open reading frame 33
  ENSP ID: ENSP00000420246
MAGQPAATGSPSADKDGMEPNVVARISQWADDHLRLVRNISTGMAIAGIMLLLRSIRLKSHVVLCWLSWLE

SEQ ID NO: 16526 - protein, 251 aa, Homo sapiens
  Payload ID: 3304
  Gene Symbol: C3orf33
  Gene Name: chromosome 3 open reading frame 33
  Uniprot ID: Q6P1S2
  ENSP ID: ENSP00000445446
MAIAGIMLLLRSIRLTSKFTSSSDIPVEFIRRNVKLRGRLRRITENGLEIEHIPITLPIIASLRKEPRGALLVKLAGVELAETGKAWLQKELKPSQLLWFQLLGKENSALFCYLLVSKGGYFSVNLNEEILRRGLGKTVLVKGLKYDSKIYWTVHRNLLKAELTALKKGEGIWKEDSEKESYLEKFKDSWREIWKKDSFLKTTGSDFSLKKESYYEKLKRTYEIWKDNMNNCSLILKFRELISRINFRRKG

SEQ ID NO: 16527 - protein, 165 aa, Homo sapiens
  Payload ID: 3305
  Gene Symbol: C3orf36
  Gene Name: chromosome 3 open reading frame 36
  Uniprot ID: Q3SXR2
  ENSP ID: ENSP00000386219
MQAETILEGLEAGLPQAVSSGLSLVPAPGLVLTCLSAPSGPGGMALEPPPTTLRKAFLAQSTLLESTLEGAPEWAAPHPEEQRRSPPACSQHTPPLPSTPTGPPPCSPGGNHPLCALSGRGGGRCSIPSLSSSSTFSLFSSGCWNPRVKLRVRKSQSQGRAGQLI

SEQ ID NO: 16528 - protein, 329 aa, Homo sapiens
  Payload ID: 3306
  Gene Symbol: C3orf38
  Gene Name: chromosome 3 open reading frame 38
  Uniprot ID: Q5JPI3
  ENSP ID: ENSP00000322469
MEMSGLSFSEMEGCRNLLGLLDNDEIMALCDTVTNRLVQPQDRQDAVHAILAYSQSAEELLRRRKVHREVIFKYLATQGIVIPPATEKHNLIQHAKDYWQKQPQLKLKETPEPVTKTEDIHLFQQQVKEDKKAEKVDFRRLGEEFCHWFFGLLNSQNPFLGPPQDEWGPQHFWHDVKLRFYYNTSEQNVMDYHGAEIVSLRLLSLVKEEFLFLSPNLDSHGLKCASSPHGLVMVGVAGTVHRGNTCLGIFEQIFGLIRCPFVENTWKIKFINLKIMGESSLAPGTLPKPSVKFEQSDLEAFYNVITVCGTNEVRHNVKQASDSGTGDQV

SEQ ID NO: 16529 - protein, 140 aa, Homo sapiens
  Payload ID: 3306
  Gene Symbol: C3orf38
  Gene Name: chromosome 3 open reading frame 38
  ENSP ID: ENSP00000418774
MEMSGLSFSEMEGCRNLLGLLDNDEIMALCDTVTNRLVQPQDRQDAVHAILAYSQSAEELLRRRKVHREVIFKYLATQGIVIPPATEKHNLIQHAKDYWQKQPQLKLKETPEPVTKTEDIHLFQQDHLKMNGDHSTSGMM

SEQ ID NO: 16530 - protein, 292 aa, Homo sapiens
  Payload ID: 3307
  Gene Symbol: C3orf49
  Gene Name: chromosome 3 open reading frame 49
  Uniprot ID: Q96BT1
  ENSP ID: ENSP00000295896
MAQPQLYLPEPFKIAYRKVGQCRRFQQLKKKNGSFKRKGIERWHRAVSTNLLKQNVLVPKEESSSDSDMGFHESQQNQKSNLKTKVKTAFGRMLSYKYRSKPACASQEGSTDHKEALLSNTQSLLPRIVKEFSSPKLFTAKMRKLSENATIQLDVVEAETEEITQGNTLLRARRTTKRLSVTSLPSGLQKGPYSPKKRPHFPALKKKKRGMENILRKSDLTVGKLQMQVDDLIETVTDKSMKLLAQRHAELQQCEFLGDEILQSSKQFQRISKRTMRKYKLKNMTTKGPGDS

SEQ ID NO: 16531 - protein, 292 aa, Homo sapiens [sequence omitted]

SEQ ID NO: 16532 - protein, 217 aa, Homo sapiens
  Payload ID: 3308
  Gene Symbol: C3orf52
  Gene Name: chromosome 3 open reading frame 52
  Uniprot ID: Q5BVD1
  ENSP ID: ENSP00000264848
MDLAQPSQPVDELELSVLERQPEENTPLNGADKVFPSLDEEVPPAEANKESPWSSCNKNVVGRCKLWMIITSIFLGVITVIIIGLCLAAVTYVDEDENEILELSSNKTFFIMLKIPEECVAEEELPHLLTERLTDVYSTSPSLGRYFTSVEIVDFSGENATVTYDLQFGVPSDDENFMKYMMSEELVLGILLQDFRDQNIPGCESLGLDPTSLLLYE

SEQ ID NO: 16533 - protein, 250 aa, Homo sapiens
  Payload ID: 3308
  Gene Symbol: C3orf52
  Gene Name: chromosome 3 open reading frame 52
  Uniprot ID: Q5BVD1
  ENSP ID: ENSP00000399392
MDLAQPSQPVDELELSVLERQPEENTPLNGADKVFPSLDEEVPPAEANKESPWSSCNKNVVGRCKLWMIITSIFLGVITVIIIGLCLAAVTYVDEDENEILELSSNKTFFIMLKIPEECVAEEELPHLLTERNEVMEAGLCLKAVLYQVLEMKGIHSVLQKRFCGLIQKHQQHQRGGDSFLSRFYSLALSPVKQLPSTASAGSSLDKGRKPARVGAIGSAGMSHCWRSLVFCLFLFCFVLFFETGSRSVA

SEQ ID NO: 16534 - protein, 241 aa, Homo sapiens
  Payload ID: 3308
  Gene Symbol: C3orf52
  Gene Name: chromosome 3 open reading frame 52
  ENSP ID: ENSP00000420077
  MOD_RES (1)..(1): Any amino acid
XDELELSVLERQPEENTPLNGADKVFPSLDEEVPPAEANKESPWSSCNKNVVGRCKLWMIITSIFLGVITVIIIGLCLAAVTYVDEDENEILELSSNKTFFIMLKIPEECVAEEELPHLLTERNEVMEAGLCLKAVLYQVLEMKGIHSVLQKRFCGLIQKHQQHQRGGDSFLSRFYSLALSPVKQLPSTASAGSSLDKGRKPARVGAIGSAGMSHCWRSLVFCLFLFCFVLFFETGSRSVA

SEQ ID NO: 16535 - protein, 147 aa, Homo sapiens
  Payload ID: 3308
  Gene Symbol: C3orf52
  Gene Name: chromosome 3 open reading frame 52
  Uniprot ID: Q5BVD1
  ENSP ID: ENSP00000420539
MDLAQPSQPVDELELSVLERQPEENTPLNGADKVFPSLDEEVPPAEANKESPWSSCNKNVVGRCKLWMIITSIFLGVITVIIIGLCLAAVTYVDEDENEILELSSNKTFFIMLKIPEECVAEEELPHLLTEREVGLKPNPEALVGFE

SEQ ID NO: 16536 - protein, 430 aa, Homo sapiens
  Payload ID: 3309
  Gene Symbol: C3orf58
  Gene Name: chromosome 3 open reading frame 58
  Uniprot ID: Q8NDZ4
  ENSP ID: ENSP00000320081
MWRLVPPKLGRLSRSLKLAALGSLLVLMVLHSPSLLASWQRNELTDRRFLQLNKCPACFGTSWCRRFLNGQVVFEAWGRLRLLDFLNVKNVYFAQYGEPREGGRRRVVLKRLGSQRELAQLDQSICKRATGRPRCDLLQAMPRTEFARLNGDVRLLTPEAVEGWSDLVHCPSQRLLDRLVRRYAETKDSGSFLLRNLKDSERMQLLLTLAFNPEPLVLQSFPSDEGWPFAKYLGACGRMVAVNYVGEELWSYFNAPWEKRVDLAWQLMEIAEQLTNNDFEFALYLLDVSFDNFAVGPRDGKVIIVDAENVLVADKRLIRQNKPENWDVWYESKFDDCDKEACLSFSKEILCARATVDHNYYAVCQNLLSRHATWRGTSGGLLHDPPSEIAKDGRLEALLDECANPKKRYGRFQAAKELREYLAQLSNNVR

SEQ ID NO: 16537 - protein, 192 aa, Homo sapiens
  Payload ID: 3309
  Gene Symbol: C3orf58
  Gene Name: chromosome 3 open reading frame 58
  ENSP ID: ENSP00000390796
MVAVNYVGEELWSYFNAPWEKRVDLAWQLMEIAEQLTNNDFEFALYLLDVSFDNFAVGPRDGKVIIVDAENVLVADKRLIRQNKPENWDVWYESKFDDCDKEACLSFSKEILCARATVDHNYYAVCQNLLSRHATWRGTSGGLLHDPPSEIAKDGRLEALLDECANPKKRYGRFQAAKELREYLAQLSNNVR

SEQ ID NO: 16538 - protein, 221 aa, Homo sapiens
  Payload ID: 3309
  Gene Symbol: C3orf58
  Gene Name: chromosome 3 open reading frame 58
  Uniprot ID: Q8NDZ4
  ENSP ID: ENSP00000417382
MKSENGTVVGSFPSDEGWPFAKYLGACGRMVAVNYVGEELWSYFNAPWEKRVDLAWQLMEIAEQLTNNDFEFALYLLDVSFDNFAVGPRDGKVIIVDAENVLVADKRLIRQNKPENWDVWYESKFDDCDKEACLSFSKEILCARATVDHNYYAVCQNLLSRHATWRGTSGGLLHDPPSEIAKDGRLEALLDECANPKKRYGRFQAAKELREYLAQLSNNVR

SEQ ID NO: 16539 - protein, 213 aa, Homo sapiens
  Payload ID: 3309
  Gene Symbol: C3orf58
  Gene Name: chromosome 3 open reading frame 58
  ENSP ID: ENSP00000419947
MESLLLLPRFGRISDLTVDLSTPEGSFPSDEGWPFAKYLGACGRMVAVNYVGEELWSYFNAPWEKRVDLAWQLMEIAEQLTNNDFEFALYLLDVSFDNFAVGPRDGKVIIVDAENVLVADKRLIRQNKPENWDVWYESKFDDCDKEACLSFSKEILCARATVDHNYYAVCQNLLSRHATWRGTSGGLLHDPPSEIAKDGRLEALLDECANPKK

SEQ ID NO: 16540 - protein, 267 aa, Homo sapiens
  Payload ID: 3310
  Gene Symbol: C3orf62
  Gene Name: chromosome 3 open reading frame 62
  Uniprot ID: Q6ZUJ4
  ENSP ID: ENSP00000341139
MHYIKTWSLLGEMSEKLRRCRKELTAAIDRAFEGVSYSQECTGQQRLELSAAPLSFSLPVHRLLCRRHPLAACSSAAPFAAVPCAPENENPAFATNHAPVNAKPHALCPERKPLTSKENVLMHSSILAPERESWRTAGEGENWRKENLRKDMERDLKADSNMPLNNSSQEVTKDLLDMIDHTSIRTIEELAGKIEFENELNHMCGHCQDSPFKEEAWALLMDKSPQKATDADPGSLKQAFDDHNIVETVLDLEEDYNVMTSFKYQIE

SEQ ID NO: 16541 - protein, 98 aa, Homo sapiens
  Payload ID: 3310
  Gene Symbol: C3orf62
  Gene Name: chromosome 3 open reading frame 62
  ENSP ID: ENSP00000391945
GEMSEKLRRCRKELTAAIDRAFEGVSYSQECTGQQRLELSAAPLSFSLPVHRLLCRRHPLAACSSAAPFAAVPCAPENENPAFATNHAPERYGERFEG

SEQ ID NO: 16542 - protein, 190 aa, Homo sapiens
  Payload ID: 3310
  Gene Symbol: C3orf62
  Gene Name: chromosome 3 open reading frame 62
  ENSP ID: ENSP00000413663
MGRRHCAAGEMSEKLRRCRKELTAAIDRAFEGVSYSQECTGQQRLELSAAPLSFSLPVHRLLCRRHPLAACSSAAPFAAVPCAPENENPAFATNHAPVNAKPHALCPERKPLTSKENVLMHSSILAPERESWRTAGEGENWRKENLRKDMERDLKADSNMPLNNSSQEVTKDLLDMIDHTSIRTIEELAG

SEQ ID NO: 16543 - protein, 563 aa, Homo sapiens
  Payload ID: 3311
  Gene Symbol: C3orf67
  Gene Name: chromosome 3 open reading frame 67
  Uniprot ID: Q6ZVT6
  ENSP ID: ENSP00000295966
MIKRKIWCNLCIDLVAFTSEIFKGAVFQSLDGIVVSANCKLRKIFTLKSKPQDTADKDAVYGVPFSTDEPTDIIPRSCQLMTDVPHVTQLLNMTKLRQTEIKFGGHPLRSAESDQFINRGTSITRNSKNQDVCHIAFGSKVLGPPPLSGRRNNMKISSETVRSVGSKNNRSCQPSTVEKCVNGTEMSALLIPESEEQGNKENIHQIKQTVPIHAANLHIMHPHPPQEPSADKNNNRRRLRLKSTSRERTETPSGSSSGNNRIEDKASTILTTVSQQGAELLNSGTLGPQSPDQSDEWIFPENADHISYLASSRQSLLLGDDSCNPSHLWLEASKESEHDQQAEESQSVPKDIFTFSSRPRSAPHGKTQTMSPEELSFILDLKEDNSVTSRDTQSEDDFYGGDSSEEEYDWRNYQPSQMSESELQMLASLRWQQNEELEDAGTSHGLSASQVDNCNVSISTSSDDTTTWNSCLPPPVNQGRHYQKEMNPPSPSNPRDWLNMLSPPIVPPSQQPAEQRPDSCESLSVQGEEDLSVEEDEEVLTLLYDPCLNCYFDPQTGKYYELV

SEQ ID NO: 16544 - protein, 689 aa, Homo sapiens
  Payload ID: 3311
  Gene Symbol: C3orf67
  Gene Name: chromosome 3 open reading frame 67
  Uniprot ID: Q6ZVT6
  ENSP ID: ENSP00000417122
MIKRKIWCNLCIDLVAFTSEIFKGAVFQSLDGIVVSANCKLRKIFTLKSKPQDTADKDAVYGVPFSTDEPTDIIPRSCQLMTDVPHVTQLLNMTKLRQTEIKFGGHPLRSAESDQFINRGTSITRNSKNQDVCHIAFGSKVLGPPPLSGRRNNMKISSETVRSVGSKNNRSCQPSTVEKCVNGTEMSALLIPESEEQGNKENIHQIKQTVPIHAANLHIMHPHPPQEPSADKNNNRRRLRLKSTSRERTETPSGSSSGNNRIEDKASTILTTVSQQGAELLNSGTLGPQSPDQSDEWIFPENADHISYLASSRQSLLLGDDSCNPSHLWLEASKESEHDQQAEESQSVPKDIFTFSSRPRSAPHGKTQTMSPEELSFILDLKEDNSVTSRDTQSEDDFYGGDSSEEGNHSIQGSRGPTTGPSELTQLTLESLLGKAAKRTSKEYLRSAYTEAGATESQDSSMEQIDRNNFEMSLLPTTCLSPTGRRCGSCQKTPEPVIKAKDLSAQQVPASLNKTSLKEISGERLSSIPEASEYDWRNYQPSQMSESELQMLASLRWQQNEELEDAGTSHGLSASQVDNCNVSISTSSDDTTTWNSCLPPPVNQGRHYQKEMNPPSPSNPRDWLNMLSPPIVPPSQQPAEQRPDSCESLSVQGEEDLSVEEDEEVLTLLYDPCLNCYFDPQTGKYYELV

SEQ ID NO: 16545 - protein, 334 aa, Homo sapiens
  Payload ID: 3311
  Gene Symbol: C3orf67
  Gene Name: chromosome 3 open reading frame 67
  ENSP ID: ENSP00000417271
MTDVPHVTQLLNMTKLRQTEIKFGGHPLRSAESDQFINRGTSITRNSKNQDVCHIAFGSKVLGPPPLSGRRNNMKISSETVRSVGSKNNRSCQPSTVEKCVNGTEMSALLIPESEEQGNKENIHQIKQTVPIHEPSADKNNNRRRLRLKSTSRERTETPSGSSSGNNRIEDKASTILTTVSQQGAELLNSGTLGPQSPDQSDEWIFPENADHISYLASSRQSLLLGDDSCNPSHLWLEASKESEHDQQAEESQSVPKDIFTFSSRPRSAPHGKTQTMSPEELSFILDLKEDNSVTSRDTQSEDDFYGGDSSEEVHCLISEVVLKHSCFLSSNKH

SEQ ID NO: 16546 - protein, 166 aa, Homo sapiens
  Payload ID: 3311
  Gene Symbol: C3orf67
  Gene Name: chromosome 3 open reading frame 67
  ENSP ID: ENSP00000417639
MFKNEYQGGAFVEIFSAQGKNPGAKWKILGSPSVIWKEFDKEVKSFVFVLEGSSQTNKIQLPKENKQSLGLIQRFLVLQIYVPLGQDFSTELLITDLGNIKRRLYLSTVHKELSSTPLHAKIPLFMIKRKIWCNLCIDLVAFTSEIFKGAVFQSLDGIVVSANCKL

SEQ ID NO: 16547 - protein, 40 aa, Homo sapiens
  Payload ID: 3311
  Gene Symbol: C3orf67
  Gene Name: chromosome 3 open reading frame 67
  ENSP ID: ENSP00000417881
SISTSSDDTTTWNSCLPPPVNQGRHYQKEMNPPSPSNPRL

SEQ ID NO: 16548 - protein, 44 aa, Homo sapiens
  Payload ID: 3311
  Gene Symbol: C3orf67
  Gene Name: chromosome 3 open reading frame 67
  ENSP ID: ENSP00000417917
  MOD_RES (1)..(1): Any amino acid
XDWLNMLSPPIVPPSQQPAEQRPDSCESLSVQDISHTPDQAVTR

SEQ ID NO: 16549 - protein, 74 aa, Homo sapiens
  Payload ID: 3311
  Gene Symbol: C3orf67
  Gene Name: chromosome 3 open reading frame 67
  ENSP ID: ENSP00000418832
MIKRKIWCNLCIDLVAFTSEIFKGAVFQSLDGIVVSANCKLRKIFTLKSKPQDTADKDGMFRLLSRFFNSLMYF

SEQ ID NO: 16550 - protein, 191 aa, Homo sapiens
  Payload ID: 3311
  Gene Symbol: C3orf67
  Gene Name: chromosome 3 open reading frame 67
  ENSP ID: ENSP00000419028
MFKNEYQGGAFVEIFSAQGKNPGAKWKILGSPSVIWKEFDKEVKSFVFVLEGSSQTNKIQLPKENKQSLGLIQRFLVLQIYVPLGQDFSTELLITDLGNIKRRLYLSTVHKELSSTPLHAKIPLFMIKRKIWCNLCIDLVAFTSEIFKGAVFQSLDGIVVSANCKLRKIFTLKSKPQDTADKDGNSAPWNS

SEQ ID NO: 16551 - protein, 196 aa, Homo sapiens
  Payload ID: 3311
  Gene Symbol: C3orf67
  Gene Name: chromosome 3 open reading frame 67
  ENSP ID: ENSP00000419142
MFKNEYQGGAFVEIFSAQGKNPGAKWKILGSPSVIWKEFDKEVKSFVFVLEGSSQTNKIQLPKENKQSLGLIQRFLVLQIYVPLGQDFSTELLITDLGNIKRRLYLSTVHKELSSTPLHAKIPLFMIKRKIWCNLCIDLVAFTSEIFKGAVFQSLDGIVVSANCKLRKIFTLKSKPQDTADKDGMFSCLWCSLFNR

SEQ ID NO: 16552 - protein, 26 aa, Homo sapiens
  Payload ID: 3311
  Gene Symbol: C3orf67
  Gene Name: chromosome 3 open reading frame 67
  ENSP ID: ENSP00000419245
  MOD_RES (1)..(1): Any amino acid
XPPIVPPSQQPAEQRPDSCESLSVQG

SEQ ID NO: 16553 - protein, 186 aa, Homo sapiens
  Payload ID: 3311
  Gene Symbol: C3orf67
  Gene Name: chromosome 3 open reading frame 67
  ENSP ID: ENSP00000419949
NNFEMSLLPTTCLSPTGRRCGSCQKTPEPVIKAKDLSAQQVPASLNKTSLKEISGERLSSIPEASEYDWRNYQPSQMSESELQMLASLRWQQNEELEDAGTSHGLSASQVDNCNVSISTSSDDTTTWNSCLPPPVNQGRHYQKEMNPPSPSNPRDWLNMLSPPIVPPSQQPAEQRPDSCESLSVQG

SEQ ID NO: 16554 - protein, 79 aa, Homo sapiens
  Payload ID: 3311
  Gene Symbol: C3orf67
  Gene Name: chromosome 3 open reading frame 67
  ENSP ID: ENSP00000421046
  MOD_RES (1)..(1): Any amino acid
XSDDTTTWNSCLPPPVNQGRHYQKEMNPPSPSNPRDWLNMLSPPIVPPSQQPAEQRPDSCESLSVQEEMSGSATAILQL

SEQ ID NO: 16555 - protein, 238 aa, Homo sapiens
  Payload ID: 3311
  Gene Symbol: C3orf67
  Gene Name: chromosome 3 open reading frame 67
  ENSP ID: ENSP00000484997
MSGFPENADHISYLASSRQSLLLGDDSCNPSHLWLEASKESEHDQQAEESQSVPKDIFTFSSRPRSAPHGKTQTMSPEELSFILDLKEDNSVTSRDTQSEDDFYGGDSSEEGNHSIQGSRGPTTGPSELTQLTLESLLGKAAKRTSKEYLRSAYTEAGATESQDSSMEQIDRNNFEMSLLPTTCLSPTGRRCGSCQKTPEPVIKAKDLSAQQVPASLNKTSLKEISGERLSSIPEASE

SEQ ID NO: 16556 - protein, 250 aa, Homo sapiens
  Payload ID: 3312
  Gene Symbol: C3orf70
  Gene Name: chromosome 3 open reading frame 70
  Uniprot ID: A6NLC5
  ENSP ID: ENSP00000334974
MSAAASPASERGWKSEKLDEAQALARSCAARRPDFQPCDGLSICATHSHGKCFKLHWCCHLGWCHCKYMYQPMTPVEQLPSTEIPARPREPTNTIQISVSLTEHFLKFASVFQPPLPPDSPRYCMISDLFIDNYQVKCINGKMCYVQKQPAPHSHRMSPEEVSAHDALISKESNTPKIDHCSSPSSSEDSGINAIGAHYVESCDEDTEEGAELSSEEDYSPESSWEPDECTLLSPSQSDLEVIETIETTV

SEQ ID NO: 16557 - protein, 247 aa, Homo sapiens
  Payload ID: 3313
  Gene Symbol: C3orf80
  Gene Name: chromosome 3 open reading frame 80
  Uniprot ID: F5H4A9
  ENSP ID: ENSP00000313324
MWGPGVTAEGLSVAPAPPPLLPLLLLLALALVAPSRGGGGCAELACGERERCCDATNATAVRCCKLPLHAFLDNVGWFVRKLSGLLILLVLFAIGYFLQRIICPSPRRYPRGQARPGQRPGPPGGAGPLGGAGPPDDDDDSPALLRDEAAAGSQDSLLDSGGGGRGRGGGGRSDPSCASEHEMRVVSPVFLQLPSYEEVKYLPTYEESMRLQQLSPGEVVLPVSVLGRPRGGVAAEPDGGEGRYPLI

SEQ ID NO: 16558 - protein, 204 aa, Homo sapiens
  Payload ID: 3314
  Gene Symbol: C3orf84
  Gene Name: chromosome 3 open reading frame 84
  Uniprot ID: H3BNL1
  ENSP ID: ENSP00000454903
MQSALVGSWHNNGFYGHYRSQFKSESAREYHLAAKPQPPAVFLQRCQEPAQRHFFSKHDNRTSFDKGPYCLLQGIGRRKDLERLWQRHTFLRWAPCEIELRQQGPLESSYQADFRPGPGLSGLPQHLIHFVQVQPSHTRTTYQQNFCCPSQGGHYGSYKVGPQAPVTDVLPDLPGIPRPKLLQHYLHAGVSECLNWSRALNKDS

SEQ ID NO: 16559 - protein, 205 aa, Homo sapiens
  Payload ID: 3314
  Gene Symbol: C3orf84
  Gene Name: chromosome 3 open reading frame 84
  ENSP ID: ENSP00000455944
MQSALVGSWHNNGFYGHYRSQFKSESAREYHLAAKPQPPAVFLQRCQEPAQRHFFSKHDNRTSFDKEGPYCLLQGIGRRKDLERLWQRHTFLRWAPCEIELRQQGPLESSYQADFRPGPGLSGLPQHLIHFVQVQPSHTRTTYQQNFCCPSQGGHYGSYKVGPQAPVTDVLPDLPGIPRPKLLQHYLHAGVSECLNWSRALNKDS

SEQ ID NO: 16560 - protein, 359 aa, Homo sapiens
  Payload ID: 3315
  Gene Symbol: C4orf17
  Gene Name: chromosome 4 open reading frame 17
  Uniprot ID: Q53FE4
  ENSP ID: ENSP00000322582
MNLNPPTSALQIEGKGSHIMARNVSCFLVRHTPHPRRVCHIKGLNNIPICTVNDDENAFGTLWGVGQSNYLEKNRIPFANCSYPSSTAVQESPVRGMSPAPNGAKVPPRPHSEPSRKIKECFKTSSENPLVIKKEEIKAKRPPSPPKACSTPGSCSSGMTSTKNDVKANTICIPNYLDQEIKILAKLCSILHTDSLAEVLQWLLHATSKEKEWVSALIHSELAEINLLTHHRRNTSMEPAAETGKPPTVKSPPTVKLPPNFTAKSKVLTRDTEGDQPTRVSSQGSEENKEVPKEAEHKPPLLIRRNNMKIPVAEYFSKPNSPPRPNTQESGSAKPVSARSIQEYNLCPQRACYPSTHRR

SEQ ID NO: 16561 - protein, 186 aa, Homo sapiens
  Payload ID: 3315
  Gene Symbol: C4orf17
  Gene Name: chromosome 4 open reading frame 17
  Uniprot ID: Q53FE4
  ENSP ID: ENSP00000423411
MNLNPPTSALQIEGKGSHIMARNVSCFLVRHTPHPRRVCHIKGLNNIPICTVNDDENAFGTLWGVGQSNYLEKNRIPFANCSYPSSTAVQESPVRGMSPAPNGAKVPPRPHSEPSRKIKECFKTSSENPLVIKKEEIKAKRPPSPPKACSTPGSCSSGMTSTKNDVKANTICIPNYLDQEIKATLL

SEQ ID NO: 16562 - protein, 294 aa, Homo sapiens
  Payload ID: 3315
  Gene Symbol: C4orf17
  Gene Name: chromosome 4 open reading frame 17
  ENSP ID: ENSP00000427663
MNLNPPTSALQIEGKGSHIMARNVSCFLVRHTPHPRRVCHIKGLNNIPICTVNDDENAFGTLWGVGQSNYLEKNRIPFANCSYPSSTAVQESPVRGMSPAPNGAKVPPRPHSEPSRKIKECFKTSSENPLVIKKEEIKAKRPPSPPKACSTPGSCSSGMTSTKNDVKANTICIPNYLDQEIKILAKLCSILHTDSLAEVLQWLLHATSKEKEWVSALIHSELAEINLLTHHRRNTSMEPAAETGKPPTVKSPPTVKLPPNFTAKSKVLTRDTEGDQPTRVSSQGSEENKEVPKG

SEQ ID NO: 16563 - protein, 314 aa, Homo sapiens
  Payload ID: 3316
  Gene Symbol: C4orf19
  Gene Name: chromosome 4 open reading frame 19
  Uniprot ID: Q8IY42
  ENSP ID: ENSP00000284437
MGCRCCKIIQSYLFDPVQVPSPGYVNEVNSCKLDEDDTDKLKGKWSSEVLVQKNDPQRQGSKKTESSSRTADPWEPCWPHQGPLPQGDAGGEHHACGVNGIGPAATPQPTGNSSPTQDDRGSWASTANTVPPTQPFLEGGGTRKQDCVLLASEGTQVMRNGDSRAPSEAESFALEVQDHVFQIPAPDYLQHWGPAGDNVDHNEKDCVFKNHTEDESLEGIQPPVGEHGLNTPFSVRRSWDSLNEDVETEVLSICFNEKGPVHAMPVVDSGNRQEDTHGSDGDGDGEIVDEDAAVAEALAALEAATAGEDLDETD

SEQ ID NO: 16564 - protein, 314 aa, Homo sapiens; identical to SEQ ID NO: 16563
  Payload ID: 3316
  Gene Symbol: C4orf19
  Gene Name: chromosome 4 open reading frame 19
  Uniprot ID: Q8IY42
  ENSP ID: ENSP00000371408

SEQ ID NO: 16565 - protein, 38 aa, Homo sapiens
  Payload ID: 3316
  Gene Symbol: C4orf19
  Gene Name: chromosome 4 open reading frame 19
  ENSP ID: ENSP00000421537
MGCRCCKIIQRQSLAVVTPAEVQWHDLGSRQPLPPGFN

SEQ ID NO: 16566 - protein, 233 aa, Homo sapiens
  Payload ID: 3317
  Gene Symbol: C4orf22
  Gene Name: chromosome 4 open reading frame 22
  Uniprot ID: Q6V702
  ENSP ID: ENSP00000350818
MDQEEGLKALDNIVTQFNAYEDFLDSQITTVDLYYLEDETLARQLVELGYRGTGERVKREDFEARKAAIEIARLAERAQQKTLTSAGKDLQDNFLTALAMREEDNRSGKLSSVIFIRDRNSHGQEISGYIDYAHRLKTEDFEVYFTGKKRLLPRPTDISFYNWDADIAVSNSSPNYQVIADNPEGLLFRYKRDRKILNVDPKAQPGDNSTRITILTELYVQAVIFDHISRRKT

SEQ ID NO: 16567 - protein, 156 aa, Homo sapiens
  Payload ID: 3317
  Gene Symbol: C4orf22
  Gene Name: chromosome 4 open reading frame 22
  ENSP ID: ENSP00000422569
MDQEEGLKALDNIVTQFNAYEDFLDSQITTVDLYYLEDETLARQLVELGYRGTGERVKREDFEARKAAIEIARLAERAQQKTLTSAGKDLQDNFLTALAMREEDNRSGKLSAGVQWHHLGSLQPLPPGFKEFSCFSLPSSWDYRHAPPHPVRDLYS

SEQ ID NO: 16568 - protein, 250 aa, Homo sapiens
  Payload ID: 3317
  Gene Symbol: C4orf22
  Gene Name: chromosome 4 open reading frame 22
  Uniprot ID: Q6V702
  ENSP ID: ENSP00000425786
MDQEEGLKALDNIVTQFNAYEDFLDSQITTVDLYYLEDETLARQLVELGYRGTGERVKREDFEARKAAIEIARLAERAQQKTLTSAGKDLQDNFLTALAMREEDNRSGKLSLNQQETDAAHILKKQLASVIFIRDRNSHGQEISGYIDYAHRLKTEDFEVYFTGKKRLLPRPTDISFYNWDADIAVSNSSPNYQVIADNPEGLLFRYKRDRKILNVDPKAQPGDNSTRITILTELYVQAVIFDHISRRKT

SEQ ID NO: 16569 - protein, 86 aa, Homo sapiens
  Payload ID: 3317
  Gene Symbol: C4orf22
  Gene Name: chromosome 4 open reading frame 22
  ENSP ID: ENSP00000426308
MDQEEGLKALDNIVTQFNAYEDFLDSQITTVDLYYLEDETLARQLVELGYRGTGERVKREDFEARKAAIEIARLAERAQQKCQTLS

SEQ ID NO: 16570 - protein, 75 aa, Homo sapiens
  Payload ID: 3317
  Gene Symbol: C4orf22
  Gene Name: chromosome 4 open reading frame 22
  ENSP ID: ENSP00000480723
SFYNWDADIAVSNSSPNYQVIADNPEGLLFRYKRDRKILNVDPKAQPGDNSTRITILTELYVQAVIFDHISRRKT

SEQ ID NO: 16571 - protein, 130 aa, Homo sapiens
  Payload ID: 3318
  Gene Symbol: C4orf26
  Gene Name: chromosome 4 open reading frame 26
  Uniprot ID: Q17RF5
  ENSP ID: ENSP00000311307
MARRHCFSYWLLVCWLVVTVAEGQEEVFTPPGDSQNNADATDCQIFTLTPPPAPRSPVTRAQPITKTPRCPFHFFPRRPRIHFRFPNRPFVPSRCNHRFPFQPFYWPHRYLTYRYFPRRRLQRGSSSEES

SEQ ID NO: 16572 - protein, 176 aa, Homo sapiens
  Payload ID: 3318
  Gene Symbol: C4orf26
  Gene Name: chromosome 4 open reading frame 26
  Uniprot ID: Q17RF5
  ENSP ID: ENSP00000406925
MARRHCFSYWLLVCWLVVTVAEALSTFYLQQHINLHMDKKRYLRLLEIHKIMRTLPTARSLHSPLHLPRGVRSQGPSPSQRHPGVPSIFFHEGPESILGFQTDLSSLQGVTTVFHSSHFIGHTVTLLIGISPEEDSREEAHLRKAEREEKPKHTEAKKSLSFRKKQQKDFCFIFRN

SEQ ID NO: 16573 - protein, 40 aa, Homo sapiens
  Payload ID: 3318
  Gene Symbol: C4orf26
  Gene Name: chromosome 4 open reading frame 26
  ENSP ID: ENSP00000421429
MARRHCFSYWLLVCWLVVTVAEVETGFHHVSQDGLDLLTS

SEQ ID NO: 16574 - protein, 85 aa, Homo sapiens
  Payload ID: 3318
  Gene Symbol: C4orf26
  Gene Name: chromosome 4 open reading frame 26
  ENSP ID: ENSP00000479147
MARRHCFSYWLLVCWLVVTVAEGQEEVFTPPGDSQNNADATDCQIFTLTPPPAPRSPVTRAQPITKTPRYFPRRRLQRGSSSEES

SEQ ID NO: 16575 - protein, 346 aa, Homo sapiens [sequence omitted]

SEQ ID NO: 16576 - protein, 199 aa, Homo sapiens
  Payload ID: 3320
  Gene Symbol: C4orf3
  Gene Name: chromosome 4 open reading frame 3
  Uniprot ID: Q8WVX3
  ENSP ID: ENSP00000382026
MTSLINSPINRRPLQNVEGNNRCQRKAKNYGNKYFIHCLDLEKITLSPRRKHDIEGGDKLNVKFSQLRSRRQRKAEPGACALGRVGSECIPEPGARRTAQAAGLRSVSGAANTKVRELKHFRFLGLLRSCRSEMEVDAPGVDGRDGLRERRGFSEGGRQNFDVRPQSGANGLPKHSYWLDLWLFILFDVVVFLFVYFLP

SEQ ID NO: 16577 - protein, 66 aa, Homo sapiens
  Payload ID: 3320
  Gene Symbol: C4orf3
  Gene Name: chromosome 4 open reading frame 3
  Uniprot ID: Q8WVX3
  ENSP ID: ENSP00000485697
MEVDAPGVDGRDGLRERRGFSEGGRQNFDVRPQSGANGLPKHSYWLDLWLFILFDVVVFLFVYFLP

SEQ ID NO: 16578 - protein, 132 aa, Homo sapiens
  Payload ID: 3321
  Gene Symbol: C4orf32
  Gene Name: chromosome 4 open reading frame 32
  Uniprot ID: Q8N8J7
  ENSP ID: ENSP00000310182
MCSAGELLRGGDGGERDEDGDALAEREAAGTGWDPGASPRRRGQRPKESEQDVEDSQNHTGEPVGDDYKKMGTLFGELNKNLINMGFTRMYFGERIVEPVIVIFFWVMLWFLGLQALGLVAVLCLVIIYVQQ

SEQ ID NO: 16579 - protein, 199 aa, Homo sapiens
  Payload ID: 3322
  Gene Symbol: C4orf33
  Gene Name: chromosome 4 open reading frame 33
  Uniprot ID: Q8N1A6
  ENSP ID: ENSP00000281146
MDFKIEHTWDGFPVKHEPVFIRLNPGDRGVMMDISAPFFRDPPAPLGEPGKPFNELWDYEVVEAFFLNDITEQYLEVELCPHGQHLVLLLSGRRNVWKQELPLSFRMSRGETKWEGKAYLPWSYFPPNVTKFNSFAIHGSKDKRSYEALYPVPQHELQQGQKPDFHCLEYFKSFNFNTLLGEEWKQPESDLWLIEKCDI

SEQ ID NO: 16580 - protein, 199 aa, Homo sapiens; identical to SEQ ID NO: 16579
  Payload ID: 3322
  Gene Symbol: C4orf33
  Gene Name: chromosome 4 open reading frame 33
  Uniprot ID: Q8N1A6
  ENSP ID: ENSP00000401090

SEQ ID NO: 16581 - protein, 102 aa, Homo sapiens
  Payload ID: 3322
  Gene Symbol: C4orf33
  Gene Name: chromosome 4 open reading frame 33
  ENSP ID: ENSP00000427096
MDFKIEHTWDGFPVKHEPVFIRLNPGDRGVMMDISAPFFRDPPAPLGEPGKPFNELWDYEVVEAFFLNDITEQYLEVELCPKNFLYRSECPEERQNGKAKLI

SEQ ID NO: 16582 - protein, 165 aa, Homo sapiens
  Payload ID: 3322
  Gene Symbol: C4orf33
  Gene Name: chromosome 4 open reading frame 33
  ENSP ID: ENSP00000427406
MDFKIEHTWDGFPVKHEPVFIRLNPGDRGVMMDISAPFFRDPPAPLGEPGKPFNELWDYEVVEAFFLNDITEQYLEVELCPHGQHLVLLLSGRRNVWKQELPLSFRMSRGETKWEGKAYLPWSYFPPNVTKFNSFAIHGSKDKRSYEALYPVPQHELQQGQKPDL

SEQ ID NO: 16583 - protein, 64 aa, Homo sapiens
  Payload ID: 3322
  Gene Symbol: C4orf33
  Gene Name: chromosome 4 open reading frame 33
  ENSP ID: ENSP00000427431
MDFKIEHTWDGFPVKHEPVFIRLNPGDRGVMMDISAPFFRDPPAPLGEPGKPFNELWDYEVVEA

SEQ ID NO: 16584 - protein, 117 aa, Homo sapiens
  Payload ID: 3323
  Gene Symbol: C4orf36
  Gene Name: chromosome 4 open reading frame 36
  Uniprot ID: Q96KX1
  ENSP ID: ENSP00000295898
MAYGVPRKNTVKTILRGSCYNVQEPWDIALLAKTWSTNLANIKLPFLEEISFGGSVQLTKCTTIKDGLLPSAESIKLEREYEVKRLCKLKCQENTSKEIQLLLRERPAGLRRPLPSK

SEQ ID NO: 16585 - protein, 117 aa, Homo sapiens; identical to SEQ ID NO: 16584
  Payload ID: 3323
  Gene Symbol: C4orf36
  Gene Name: chromosome 4 open reading frame 36
  Uniprot ID: Q96KX1
  ENSP ID: ENSP00000420949

SEQ ID NO: 16586 - protein, 113 aa, Homo sapiens
  Payload ID: 3323
  Gene Symbol: C4orf36
  Gene Name: chromosome 4 open reading frame 36
  ENSP ID: ENSP00000421141
MAYGVPRKNTVKTILRGSCYNVQEPWDIALLAKTWSTNLANIKLPFLEEISFGGSVQLTKCTTIKDGLLPSAESIKLEREYEVKRLCKLKCQENTSKEIQLLLRERPAGLRRP

SEQ ID NO: 16587 - protein, 32 aa, Homo sapiens
  Payload ID: 3323
  Gene Symbol: C4orf36
  Gene Name: chromosome 4 open reading frame 36
  ENSP ID: ENSP00000421568
MAYGVPRKNTVKTILRGSCYNVLECCAPPGLE

SEQ ID NO: 16588 - protein, 81 aa, Homo sapiens
  Payload ID: 3323
  Gene Symbol: C4orf36
  Gene Name: chromosome 4 open reading frame 36
  ENSP ID: ENSP00000422720
MAYGVPRKNTVKTILRGSCYNVQEPWDIALLAKTWSTNLANIKLPFLEEISFGGSVQLTKCTTIKDGLLPSAESIKLEREY

SEQ ID NO: 16589 - protein, 46 aa, Homo sapiens
  Payload ID: 3323
  Gene Symbol: C4orf36
  Gene Name: chromosome 4 open reading frame 36
  ENSP ID: ENSP00000427122
MAYGVPRKNTVKTILRGSCYNVVSHCHAGWNVVHLLGLSDPPISAS

SEQ ID NO: 16590 - protein, 186 aa, Homo sapiens
  Payload ID: 3324
  Gene Symbol: C4orf45
  Gene Name: chromosome 4 open reading frame 45
  Uniprot ID: Q96LM5
  ENSP ID: ENSP00000412215
MASVSYQKPTSTTVGKQMIFTGPDYIKDYLPKIHQHTSYVGEQHLALEKTGDLRYLWRPASNRSLPAKYKHEYVSEIGWRIPQYNFINKSRLGSGFHIKYEELSQASLDSITHRYQNPWQPKPHVLDMQGKQSRASFAWHMSAFEDTDQRNSKWAILVRQCKSSLPRASKPPKLPKLPKKEKKRKH

SEQ ID NO: 16591 - protein, 113 aa, Homo sapiens
  Payload ID: 3325
  Gene Symbol: C4orf46
  Gene Name: chromosome 4 open reading frame 46
  Uniprot ID: Q504U0
  ENSP ID: ENSP00000368503
MADPEELQVSSPPPPPPSSPSSSDASAASSPGGPVSLGWPVPSRSSGPTVDQLEEVELQIGDAAFSLTKLLEATSAVSAQVEELAFKCTENARFLKTWRDLLKEGYDSLKPDD

SEQ ID NO: 16592 - protein, 65 aa, Homo sapiens
  Payload ID: 3325
  Gene Symbol: C4orf46
  Gene Name: chromosome 4 open reading frame 46
  ENSP ID: ENSP00000421533
MADPEELQVSSPPPPPPSSPSSSDASAASSPGGPVSLGWPVPSRSSGPTVDQLEEVELQIGDPFH

SEQ ID NO: 16593 - protein, 309 aa, Homo sapiens
  Payload ID: 3326
  Gene Symbol: C4orf47
  Gene Name: chromosome 4 open reading frame 47
  Uniprot ID: A7E2U8
  ENSP ID: ENSP00000368127
MPAEGGKTDMERIGLFSEMEYITVGDKYVSQFNRPFNEAASKNKQMLPGGSKEMSDLQAGYFDPHFVRIFEGEGYINLNQVRRRDMVEAAKKNLGKAFLPSNGEKKPCGLGSYYGTIGGPVPFFSAQSKPREKYKAPGKNLYTNPGKKGTGYGYANITIGKQFSHSADFYDAAKLKYKKANEEHHRLLKGAPFKLNLHPRDYFDANPYFSEESLPPIKKEEKKKTISNTFKPSSPGKKPGGMKAGTFDPYPSHSADPYVAKLANISGKDDKIFHPPSGPKSRPVESIMTLNVRRALNSKNYKTSSVPSY

SEQ ID NO: 16594 - protein, 161 aa, Homo sapiens
  Payload ID: 3326
  Gene Symbol: C4orf47
  Gene Name: chromosome 4 open reading frame 47
  ENSP ID: ENSP00000422279
MPAEGGKTDMERIGLFSEMEYITVGDKYVSQFNRPFNEAASKNKQMLPGGSKEMSDLQAGYFDPHFVRIFEGEGYINLNQVRRRDMVEAAKKNLGKAFLPSNGEKKPCGLGSYYGTIGGPVPFFSAQSKPREKYKAPGKNLYTNPGKKGTGYGYANITIGK

SEQ ID NO: 16595 - protein, 178 aa, Homo sapiens
  Payload ID: 3326
  Gene Symbol: C4orf47
  Gene Name: chromosome 4 open reading frame 47
  ENSP ID: ENSP00000423127
MPAEGGKTDMERIGLFSEMEYITVGDKYVSQFNRPFNEAASKNKQMLPGGSKEMSDLQAGYFDPHFVRIFEGEGYINLNQVRRRDMVEAAKKNLGKAFLPSNGEKKPCGLGSYYGTIGGPVPFFSAQSKPREKYKAPGKNLYTNPGKKGTGYGYANITIGKQFSHSADFYDAAKLKYK

SEQ ID NO: 16596 - protein, 36 aa, Homo sapiens
  Payload ID: 3326
  Gene Symbol: C4orf47
  Gene Name: chromosome 4 open reading frame 47
  ENSP ID: ENSP00000425418
MPAEGGKTDMERIGLFSEMEYITVGDKYVSQFNHVA

SEQ ID NO: 16597 - protein, 95 aa, Homo sapiens
  Payload ID: 3327
  Gene Symbol: C4orf48
  Gene Name: chromosome 4 open reading frame 48
  Uniprot ID: Q5BLP8
  ENSP ID: ENSP00000386528
MAPPPACRSPMSPPPPPLLLLLLSLALLGARARAEPAGSAVPAQSRPCVDCHAFEFMQRALQDLRKTACSLDARTETLLLQAERRALCACWPAGH

SEQ ID NO: 16598 - protein, 128 aa, Homo sapiens
  Payload ID: 3327
  Gene Symbol: C4orf48
  Gene Name: chromosome 4 open reading frame 48
  Uniprot ID: Q5BLP8
  ENSP ID: ENSP00000386807
MRVARRTRNVCRCPRAAGPGVPEPRAAPLPLLAMAPPPACRSPMSPPPPPLLLLLLSLALLGARARAEPAGSAVPAQSRPCVDCHAFEFMQRALQDLRKTACSLDARTETLLLQAERRALCACWPAGH

SEQ ID NO: 16599 - protein, 276 aa, Homo sapiens
  Payload ID: 3328
  Gene Symbol: C4orf50
  Gene Name: chromosome 4 open reading frame 50
  Uniprot ID: Q6ZRC1
  ENSP ID: ENSP00000317287
MLRDSEAEVTEEDPRLRAQQLHHRVLTLQCQLRDQGAAHQASLDEATRLQEELQAKLEELQKKQHEAKLAVTPLKAKIASLVRKCRERNRLITHLLQELHRHGLGNLLLSELAQNMLNDVALAEYTATFLAPGVPETSHHLDVKSEMTAALRAQTYLLNPEMDSVLQSSLSSESWPIPEPEWPAQTAQLDSLKLPLSLVSTLDPGTCLAAVTVEPGLPAQRLQEKGGMPCPALQVDNVPAPSELLSPARILAFHQELRQSICSNSQVHKSPLELEM

SEQ ID NO: 16600 - protein, 750 aa, Homo sapiens
  Payload ID: 3328
  Gene Symbol: C4orf50
  Gene Name: chromosome 4 open reading frame 50
  ENSP ID: ENSP00000437121
MLFFAGETGLPLFPRFALSVEGAEPTDHGHPQAVSKGHNRCALTIDELAQDVEACFQQLSTLQPGSRGWQCSASACRGENWSFAQKWHSGWERAHSQQVWGNWGICSNEEAKSKESGEGDKPGKTTALGTSEVPGNPGTLPHWDEASPNPPQGPAEPWGALERVRSRFHQLISGLKKQRSQILHDNTKLHGDQERFHERVCALEREREREVTKISRLERDNHRLVGDISQLKKELDQYLQAISDLEDCNGKSYCKILELEEENETLKGNLGQLQKATSESVRKSKDTMEQVTLENWKLQTLISELGVSYKELIKDIVLGIEDMIRALSGENEHLLRRVHVLEREVTLQRSTDQGRLVRGREHLQGKAKMHALDKEVQVTPLTGQLLSRACGPPLEEEMSLAAGQTGPSTGTGNSRRGADSPPPSLVWRNTGVANALQGNVSGAEVKEAHLEKEEKRPRCSVAQGQALSSLSNGPMLRDSEAEVTEEDPRLRAQQLHHRVLTLQCQLRDQGAAHQASLDEATRLQEELQAKLEELQKKQHEAKLAVTPLKAKIASLVRKCRERNRLITHLLQELHRHGLGNLLLSELAQNMLNDVALAEYTATFLAPGVPETSHHLDVKSEMTAALRAQTYLLNPEMDSVLQSSLSSESWPIPEPEWPAQTAQLDSLKLPLSLVSTLDPGTCLAAVTVEPGLPAQRLQEKGGMPCPALQVDNVPAPSELLSPARILAFHQELRQSICSNSQVHKSPLELEM

SEQ ID NO: 16601 - protein, 202 aa, Homo sapiens
  Payload ID: 3329
  Gene Symbol: C4orf51
  Gene Name: chromosome 4 open reading frame 51
  Uniprot ID: C9J302
  ENSP ID: ENSP00000391404
MSHYFYLTPQILLPFSPLTSQEFDLIRRKAGASWQDETRWSDSSVTTYTGSYRKKQLDKSMCSQFSFRAGQHEPECKQMSLTNSSACHLLCWAGTQETTDIKGLFPDITRPFKKSFDVKHGVAHQIWDFGDCFPTPPNYGKYCVRPKKPAQEALINYSRRGKGVLKHLHGRCDSESKVCSSEDSEADRYSDYGWGGPSSPFN

SEQ ID NO: 16602 - protein, 162 aa, Homo sapiens
  Payload ID: 3329
  Gene Symbol: C4orf51
  Gene Name: chromosome 4 open reading frame 51
  ENSP ID: ENSP00000425306
  MOD_RES (1)..(1): Any amino acid
XDSSVTTYTGSYRKKQLDKSMCSQFSFRAGQHEPECKQMSLTNSSACHLLCWAGTQETTDIKGLFPDITRPFKKSFDVKHGVAHQIWDFGDCFPTPPNYGKYCVRPKKPAQEALINYSRRGKGVLKHLHGRCDSESKVCSSEDSEADRYSDYGWGGPSSPFN

SEQ ID NO: 16603 - protein, 265 aa, Homo sapiens
  Payload ID: 3330
  Gene Symbol: C5orf15
  Gene Name: chromosome 5 open reading frame 15
  Uniprot ID: Q8NC54
  ENSP ID: ENSP00000231512
MAAAVPKRMRGPAQAKLLPGSAIQALVGLARPLVLALLLVSAALSSVVSRTDSPSPTVLNSHISTPNVNALTHENQTKPSISQISTTLPPTTSTKKSGGASVVPHPSPTPLSQEEADNNEDPSIEEEDLLMLNSSPSTAKDTLDNGDYGEPDYDWTTGPRDDDESDDTLEENRGYMEIEQSVKSFKMPSSNIEEEDSHFFFHLIIFAFCIAVVYITYHNKRKIFLLVQSRKWRDGLCSKTVEYHRLDQNVNEAMPSLKITNDYIF

SEQ ID NO: 16604 - protein, 442 aa, Homo sapiens
  Payload ID: 3331
  Gene Symbol: C5orf22
  Gene Name: chromosome 5 open reading frame 22
  Uniprot ID: Q49AR2
  ENSP ID: ENSP00000326879
MSDSAGGRAGLRRYPKLPVWVVEDHQEVLPFIYRAIGSKHLPASNVSFLHFDSHPDLLIPVNMPADTVFDKETLFGELSIENWIMPAVYAGHFSHVIWFHPTWAQQIREGRHHFLVGKDTSTTTIRVTSTDHYFLSDGLYVPEDQLENQKPLQLDVIMVKPYKLCNNQEENDAVSSAKKPKLALEDSENTASTNCDSSSEGLEKDTATQRSDQTCLEPSCSCSSENQECQTAASTGEILEILKKGKAFVLDIDLDFFSVKNPFKEMFTQEEYKILQELYQFKKPGTNLTEEDLVDIVDTRIHQLEDLEATFADLCDGDDEETVQRWASNPGMESLVPLVQSLKKRMEVPDYEMVHQAGLTCDYSELPHHISTEQEIECLIQSVHYLLKNLPNPTLVTIARSSLDDYCPSDQVDTIQEKVLNMLRALYGNLDLQVYAAESPPS

SEQ ID NO: 16605 - protein, 136 aa, Homo sapiens
  Payload ID: 3331
  Gene Symbol: C5orf22
  Gene Name: chromosome 5 open reading frame 22
  ENSP ID: ENSP00000421667
MSDSAGGRAGLRRYPKLPVWVVEDHQEVLPFIYRAIGSKHLPASNVSFLHFDSHPDLLIPVNMPADTVFDKETLFGELSIENWIMPAVYAGHFSHVIWFHPTWAQQIREGRHHFLVGKDTSTTTIRTGKGHSNTEK

SEQ ID NO: 16606 - protein, 136 aa, Homo sapiens; identical to SEQ ID NO: 16605
  Payload ID: 3331
  Gene Symbol: C5orf22
  Gene Name: chromosome 5 open reading frame 22
  ENSP ID: ENSP00000423039

SEQ ID NO: 16607 - protein, 49 aa, Homo sapiens
  Payload ID: 3331
  Gene Symbol: C5orf22
  Gene Name: chromosome 5 open reading frame 22
  ENSP ID: ENSP00000428898
MSDSAGGRAGLRRYPKLPVWVVEDHQEVLPFIYRAIGSKHLPASNRIKY

SEQ ID NO: 16608 - protein, 136 aa, Homo sapiens; identical to SEQ ID NO: 16605
  Payload ID: 3331
  Gene Symbol: C5orf22
  Gene Name: chromosome 5 open reading frame 22
  ENSP ID: ENSP00000430261

SEQ ID NO: 16609 - protein, 156 aa, Homo sapiens
  Payload ID: 3331
  Gene Symbol: C5orf22
  Gene Name: chromosome 5 open reading frame 22
  ENSP ID: ENSP00000430860
MSDSAGGRAGLRRYPKLPVWVVEDHQEVLPFIYRAIGSKHLPASNVSFLHFDSHPDLLIPVNMPADTVFDKETLFGDHWILTSISAFSPLPYAVLVEIYDEDSGFHRELSIENWIMPAVYAGHFSHVIWFHPTWAQQIREGRHHFLVGKDTSTTTI

SEQ ID NO: 16610 - protein, 188 aa, Homo sapiens
  Payload ID: 3332
  Gene Symbol: C5orf24
  Gene Name: chromosome 5 open reading frame 24
  Uniprot ID: Q7Z6I8
  ENSP ID: ENSP00000337044
MMHPVASSNPAFCGPGKPSCLNEDAMRAADQFDIYSSQQSKYSHTVNHKPMVCQRQDPLNETHLQTTSGRSIEIKDELKKKKNLNRSGKRGRPSGTTKSAGYRTSTGRPLGTTKAAGFKTSPGRPLGTTKAAGYKVSPGRPPGSIKALSRLADLGYGCGTAAFPYPMMHGRAVHGVEETSSEVKPPNE

SEQ ID NO: 16611 - protein, 188 aa, Homo sapiens; identical to SEQ ID NO: 16610
  Payload ID: 3332
  Gene Symbol: C5orf24
  Gene Name: chromosome 5 open reading frame 24
  Uniprot ID: Q7Z6I8
  ENSP ID: ENSP00000378427

SEQ ID NO: 16612 - protein, 188 aa, Homo sapiens; identical to SEQ ID NO: 16610
  Payload ID: 3332
  Gene Symbol: C5orf24
  Gene Name: chromosome 5 open reading frame 24
  Uniprot ID: Q7Z6I8
  ENSP ID: ENSP00000395764

SEQ ID NO: 16613 - protein, 155 aa, Homo sapiens
  Payload ID: 3332
  Gene Symbol: C5orf24
  Gene Name: chromosome 5 open reading frame 24
  Uniprot ID: Q7Z6I8
  ENSP ID: ENSP00000421647
MMHPVASSNPAFCGPGKPSCLNEDAMRAADQFDIYSSQQSKYSHTVNHKPMVCQRQDPLNETHLQTTSGRSIEIKDELKKKKNLNRSGKRGRPSGTTKSAGYRTSTGRPLGTTKAAGFKTSPGRPLGTTKAAGYKVSPGRPPGKKQQAFRCSSDA

SEQ ID NO: 16614 - protein, 7 aa, Homo sapiens
  Payload ID: 3332
  Gene Symbol: C5orf24
  Gene Name: chromosome 5 open reading frame 24
  ENSP ID: ENSP00000422620
MMHPVAS

SEQ ID NO: 16615 - protein, 84 aa, Homo sapiens
  Payload ID: 3332
  Gene Symbol: C5orf24
  Gene Name: chromosome 5 open reading frame 24
  ENSP ID: ENSP00000426824
  MOD_RES (1)..(1): Any amino acid
XPSCLNEDAMRAADQFDIYSSQQSKYSHTVNHKPMVCQRQDPLNETHLQTTSGRSIEIKDELKKKKNLNRSGKKQQAFRCSSDA

SEQ ID NO: 16616 - protein, 215 aa, Homo sapiens
  Payload ID: 3333
  Gene Symbol: C5orf28
  Gene Name: chromosome 5 open reading frame 28
  Uniprot ID: Q0VDI3
  ENSP ID: ENSP00000380270
MASETEKTHALLQTCSTESLISSLGLGAFCLVADRLLQFSTIQQNDWLRALSDNAVHCVIGMWSWAVVTGIKKKTDFGEIILAGFLASVIDVDHFFLAGSMSLKAALTLPRRPFLHCSTVIPVVVLTLKFTMHLFKLKDSWCFLPWMLFISWTSHHIRDGIRHGLWICPFGKTSPLPFWLYVIITSSLPHICSFVMYLTGTRQMMSSKHGVRIDV

SEQ ID NO: 16617 - protein, 215 aa, Homo sapiens; identical to SEQ ID NO: 16616
  Payload ID: 3333
  Gene Symbol: C5orf28
  Gene Name: chromosome 5 open reading frame 28
  Uniprot ID: Q0VDI3
  ENSP ID: ENSP00000422881

SEQ ID NO: 16618 - protein, 176 aa, Homo sapiens
  Payload ID: 3333
  Gene Symbol: C5orf28
  Gene Name: chromosome 5 open reading frame 28
  ENSP ID: ENSP00000424720
MASETEKTHALLQTCSTESLISSLGLGAFCLVADRLLQFSTIQQNDWLRALSDNAVHCVIGMWSWAVVTGIKKKTDFGEIILAGFLASVIDVDHFFLAGSMSLKAALTLPRRPFLHCSTVIPVVVLTLKFTMHLFKLKDSWCFLPWMLFISWTSHHIRDGIRHGLWICPFGKTSPL

SEQ ID NO: 16619 - protein, 215 aa, Homo sapiens; identical to SEQ ID NO: 16616
  Payload ID: 3333
  Gene Symbol: C5orf28
  Gene Name: chromosome 5 open reading frame 28
  Uniprot ID: Q0VDI3
  ENSP ID: ENSP00000426067

SEQ ID NO: 16620 - protein, 113 aa, Homo sapiens
  Payload ID: 3333
  Gene Symbol: C5orf28
  Gene Name: chromosome 5 open reading frame 28
  ENSP ID: ENSP00000427099
MEAALTLPRRPFLHCSTVIPVVVLTLKFTMHLFKLKDSWCFLPWMLFISWTSHHIRDGIRHGLWICPFGKTSPLPFWLYVIITSSLPHICSFVMYLTGTRQMMSSKHGVRIDV

SEQ ID NO: 16621 - protein, 206 aa, Homo sapiens
  Payload ID: 3334
  Gene Symbol: C5orf30
  Gene Name: chromosome 5 open reading frame 30
  Uniprot ID: Q96GV9
  ENSP ID: ENSP00000326110
MEVDINGESRSTLTTLPFPGAEANSPGKAEAEKPRCSSTPCSPMRRTVSGYQILHMDSNYLVGFTTGEELLKLAQKCTGGEESKAEAMPSLRSKQLDAGLARSSRLYKTRSRYYQPYEIPAVNGRRRRRMPSSGDKCTKSLPYEPYKALHGPLPLCLLKGKRAHSKSLDYLNLDKMIKEPADTEVLQYQLQHLTLRGDRVFARNNT

SEQ ID NO: 16622 - protein, 206 aa, Homo sapiens; identical to SEQ ID NO: 16621
  Payload ID: 3334
  Gene Symbol: C5orf30
  Gene Name: chromosome 5 open reading frame 30
  Uniprot ID: Q96GV9
  ENSP ID: ENSP00000421270

SEQ ID NO: 16623 - protein, 206 aa, Homo sapiens; identical to SEQ ID NO: 16621
  Payload ID: 3334
  Gene Symbol: C5orf30
  Gene Name: chromosome 5 open reading frame 30
  Uniprot ID: Q96GV9
  ENSP ID: ENSP00000422836

SEQ ID NO: 16624 - protein, 638 aa, Homo sapiens
  Payload ID: 3335
  Gene Symbol: C5orf34
  Gene Name: chromosome 5 open reading frame 34
  Uniprot ID: Q96MH7
  ENSP ID: ENSP00000303490
MAAELRMILYEDDSVQVQYVDGSTLQLSPCGSEFLFEKSPPVSAHPLEQPERIRQRTHFVISTYREQLQRALDFRNSSATCPFLSETIIPSERKKHIFIDITEVRWPSLDTDGTMIYMESGIVKITSLDGHAYLCLPRSQHEFTVHFLCKVSQKSDSSAVLSETNNKAPKDKLVEKTGKICIRGNLPGQRLKNKENEFHCQIMKSKETLKKMSCVNGTEGREELPSPGTKHTCVYTWVKQCWSVAACPEEWKYPLSLALHFHNKISNMSKIDAHITQSRFLTSDISEERGKVVSVLPRALSLSCPVPHLHRWNFCDSLLQRQSDEYSYPELVKMVWYKGVTYRLTHQNMNSIEIYSGDGSVFKSEGAYFGNYFTYYSIQEGSGKREEKTYSVNNLPPDRPGSPFTVGSLIKQATRILQHCVKMRLSLSHNYRICCWKMVPGINDSNILPLVLKESLIPSVGRFLAYSDDKVHAIFLDGITLTLNWNFSSPIEKRQVNQGLNLGWCKLTFPDGQEQLIQIEHPEPYERYVTTVTSWCRRLTQTSPREMPTHSSSSVLQENWSVASELEKIQKFNLLLENSGILNQISNKKNEQQSFDHYKPGSSETLLGEVNENRVSIALKKTSEILHDIDCLLSNSKK

SEQ ID NO: 16625 - protein, 228 aa, Homo sapiens
  Payload ID: 3335
  Gene Symbol: C5orf34
  Gene Name: chromosome 5 open reading frame 34
  ENSP ID: ENSP00000424486
MIYMESGIVKITSLDGHAYLCLPRSQHEFTVHFLCKVSQKSDSSAVLSETNNKAPKDKLVEKTGKICIRGNLPGQRLKNKENEFHCQIMKSKETLKKMSCVNGTEGREELPSPGTKHTCVYTWVKQCWSVAACPEEWKYPLSLALHFHNKISNMSKIDAHITQSRFLTSDISEERGKVVSVLPRALSLSCPVPHLHRWNFCDSLLQRQSDEYSYPELVKMVWYKGVTY

SEQ ID NO: 16626 - protein, 126 aa, Homo sapiens
  Payload ID: 3335
  Gene Symbol: C5orf34
  Gene Name: chromosome 5 open reading frame 34
  ENSP ID: ENSP00000426724
  MOD_RES (1)..(1): Any amino acid
XSPGTKHTCVYTWVKQCWSVAACPEEWKYPLSLALHFHNKISNMSKIDAHITQSRFLTSDISEERGKVVSVLPRALSLSCPVPHLHRWNFCDSLLQRQSDEYSYPELVKMVWYKGVTYREKRKLTQ

SEQ ID NO: 16627 - protein, 138 aa, Homo sapiens
  Payload ID: 3336
  Gene Symbol: C5orf38
  Gene Name: chromosome 5 open reading frame 38
  Uniprot ID: Q86SI9
  ENSP ID: ENSP00000334267
MVAPAARVFLRAVRAALTSTVPDLLCLLARGSPRGLASGRLPLAVHSAQHGPGSGAPWLRIARRALRFVLSKHWGDDCYLTNRLWQDLKPPSHVENGQELRLAPPVQWALQVQGNQLQTAVLCLRMAPPEPAGSRQRI

SEQ ID NO: 16628 - protein, 226 aa, Homo sapiens
  Payload ID: 3336
  Gene Symbol: C5orf38
  Gene Name: chromosome 5 open reading frame 38
  Uniprot ID: Q86SI9
  ENSP ID: ENSP00000380935
MVAPAARVFLRAVRAALTSTVPDLLCLLARGSPRGLASGRLPLAVHSAQHGPGSGAPWLRIARRALRFVLSKHWGDDCYLTNRLWQDLKPPSHVENGQELRLAPPVQWALQPKNLERVYVDTQVSASGDFLRGRARGTAGPGGSGSGSPRGRGRLRRPGRSPGAAPSSVSRGRKEATQARSRARGRRGGAVARVCRPESRQRWARPTSSPGGLIRGRRKNGIEAFQ

SEQ ID NO: 16629 - protein, 70 aa, Homo sapiens
  Payload ID: 3336
  Gene Symbol: C5orf38
  Gene Name: chromosome 5 open reading frame 38
  Uniprot ID: Q86SI9
  ENSP ID: ENSP00000408820
MVAPAARVFLRAVRAALTSTVPDLLCLLARGSPRGLASGRLPLAVHSAQHGPGSGAPWLRIARRALSQRI

SEQ ID NO: 16630 - protein, 68 aa, Homo sapiens
  Payload ID: 3336
  Gene Symbol: C5orf38
  Gene Name: chromosome 5 open reading frame 38
  ENSP ID: ENSP00000424088
MVAPAARVFLRAVRAALTSTVPDLLCLLARGSPRGLASGRLPLAVHSAQHGPGSGAPWLRIARRALRT

SEQ ID NO: 16631 - protein, 68 aa, Homo sapiens; identical to SEQ ID NO: 16630
  Payload ID: 3336
  Gene Symbol: C5orf38
  Gene Name: chromosome 5 open reading frame 38
  ENSP ID: ENSP00000425109

SEQ ID NO: 16632 - protein, 135 aa, Homo sapiens
  Payload ID: 3336
  Gene Symbol: C5orf38
  Gene Name: chromosome 5 open reading frame 38
  ENSP ID: ENSP00000426001
MVAPAARVFLRAVRAALTSTVPDLLCLLARGSPRGLASGRLPLAVHSAQHGPGSGAPWLRIARRALRFVLSKHWGDDCYLTNRLWQDLKPPSHVENGQELRLAPPVQWALQVQGNQLQTAVLCLRMAPPEPAGSR

SEQ ID NO: 16633 - protein, 135 aa, Homo sapiens; identical to SEQ ID NO: 16632
  Payload ID: 3336
  Gene Symbol: C5orf38
  Gene Name: chromosome 5 open reading frame 38
  ENSP ID: ENSP00000426967

SEQ ID NO: 16634 - protein, 3197 aa, Homo sapiens
  Payload ID: 3337
  Gene Symbol: C5orf42
  Gene Name: chromosome 5 open reading frame 42
  Uniprot ID: Q9H799
  ENSP ID: ENSP00000389014
MEIRLEILTSTGIKQKKPWPRVSWLGKEKEAVFLLDDKFINEINLLSGKIKKKIPSLQPFLKDVIVLTTSSNDAWLAGVLTTGELFLWNKDQDCLKTIPITEKPKEMIKATVASSLRLYLYVSGNGKRIVLITPSGCIFLWEYLELKNILSSKSLSLAGRWSQVIPEEAVLLPSTEDKEAVVNAVFIKNELFGDCCLCSFTFYSGECLKLTFLAIRWHENVFTSVRSLPYHVHWAQQDCHLCSLIPKCESVKSRGALISAFSRDGLTLAVTLNQKDPKATQVLFINTLNFVTLCGSLKGCSNKSPVVPATLIRSYWVGDISWTHDSLFLACMLKRGSLVLLTCQGELLTLITFGCSIEFGPAEFIPLHPLITYRPQQFTFQDSNNSVDSSASDSDPMRQRFSIKAHSRLPYLVISDGYMVTTLRFLDSLSPSVHMRSLLLDSTQRLEKIYQSVILSKPKGKGLNLRSLNSLRSSLLEHQGNESSADFTVPKFLQAEETINENAADFQDFEAEETNEGRHFPDNLCPFWNKRDDVLCSSMKEGRLEFASMFDTIHAKDDSEETDRTITELHSIQKSLLAAWTIGISKTVTEKNLMLNYIVVCITHFFYILQFIKCPFPKLDLVLSKSSRHNAWILCIFQLFHQCLSIHYWDIRYKQDVGHLIKLTSNTVKLLLTQQQKGQLFSEKLLACFYLLKMVADNLNGVYILQPEVISASADGSKITAQDSLVVPIFQMFQDSGFQKNWSWNSFFKIHPQVVNPVQQPGHRLLILWRILYKKTLWYQAQLNRRVPEADSQLTEKMTHEASTVKSLLCHLQANLQSTGDCLNQTLELKSINGEECFLLGSYEKSVQLWKKALQEIEEKGGRRTYFLQIRYYLSLLYCHLYSYNLNDAQGLCDQLAREILRWSQLPVKENKDFSGAAKSHFECGMVGGVHPEAAVRVVQSMARFMAAYFTNQQLCILPPHHVNVLPPLHIKTEQSFRLIPLQHSKVASVVRDQNLSNVWTVEYALELLFIGGLVPEAVWLAYKLGDWKTSVSIGVAFQLFCKRDSNFMRSKKKSLNLPLRMTPAQIFQEKLQCVLGQPASLEAKNEMGSKYKQFTDPIEEEDANLLFGSVQEVLKASVMADADILSETFQLLIDSAKDFSKRLWGLVPFGLYLPAPPLYCPQPAILSEEDGDDLLLKAEKNNRQKVSGILQRVLLLFRAAQCSFPVAQWYILQLRWARKVMQKIRMKGSLPSLSPFPQSLLNYCKGGIAFFRPGAAGDHKLDEVSIRAIGCFRELCALCWMLHVRDKLSYSCRQYQKARENVKGEKDLEVEFDSCMIEHCLSAVEWAYRMLPFSRFFNMEELIQDIILSLIGELPPIRKVAEIFVKAFPYPEDVRVPLRDKYHSLHQRLRHCVVKGPQTEEMMSVVMHSIQKVRVKALKRVQRNIGSFEVNIWEPIEEEKPDEAPGVDRYSLGTSLSRSTLTELGDSVVHSDADTFSEALSVEEKSRINIYQRNAPNHMELTSIHKPTDKRKMCNQKENPTKKEDHEKLSQNTLPVIGVWEFERDDDEYIKFLDLFLSYILERDLPYSRDADIPFLTSFSGKLREHELNSLLFDVHTTLKRHQSKTKSQNVFRAGSCFVVAPESYESEKSSSLNDEYGMHLENQKLSSSVLVNQGIKPFLQYPSNEVNKNEGMSGLFGLKQRSIYKIQDDTREKCLIQRSSNHIFWTPKSIKTRRCIFKAIQCNDINPQEDLPLALNTFGSIGRLLEWMIRWSNRRLLCDSGITESSSEYSPVIRVKTSTAAILTSLWLLEQPYFATYKAKNAIIKMVENRDTGCQIGPNIERESKSDAGGSVAVATPGGTEERNGQNKSCQNILNRMPTEAKNPDIKEINDDIISITHNTKKEFIDIDENLLEVEAFTEEEMDMHISDYEEDIEESVGGFRSPSLAICMMTLPQQLEEEFTEEVQCQREEPLETIMEEKSTEQKGMIEAFSHPGHTTPQSMQVDTSSEISSAQISTYKEKSSSVPLLISNGVNVASQPPAPTPQKTQRNEFTAQLPDCSESVRQMLQDEMFKLVQLQQINFMSLMQIVGSSFANLPDTQQLVQQSQSVHLGESQESNLRGCGDVEDSNKNLKERFFIKPQSMGENAREPRKNSPHCHEGTIPSGQNSTGNVQNVPHGSIPLCQLNGQPRKKGPIPSSQNLPSTSFYPAPAGNTHLYLLSTPSVVQKAPRLIPHAKTFSPGDGFPLLQFKSKQEFQPLFLHTGSIPQVPFRPLPQPREAWGLSDSFQPALPQRAAQTTPASHLNVSQYNTEARKKEVEQKTWAETVITEIPNHVNLDQYVGQENLTPQQDSSVFIKPEKLFDVKPGTLEISPHHSFGLPLLYLPLKPPNMFPSTSRASITVPSTPIQPIAEERKYPRLSLLHSHLSPENRCKKTQLIPLENLIAFKQSQQKLTHNLFEQGDAGHLQLLKVKIEPPEVRQGKDSKKRQRRRAEKELQEKRCEKLRRKPNVTFRPENSIINNDDSEIIKKPKEQQEHCGSHPLDDFDVPFEMLQDDNTSAGLHFMASVKKKAIGSQDASTNTDPEHEPLTAPQLLVPDVYLNLKLSSEMSEKPWSPSIPHTVTNLELPVREEPSNDNVIKQQSDHLAVPSSAELHYMAASVTNAVPPHNFKSQGLPKPEFRFKGQSTKSDSAEDYLLWKRLQGVSAACPAPSSAAHQLEHLSAKLQKIDEQLLAIQNIAENIEQDFPKPEMLDLHCDKIGPVDHIEFSSGPEFKKTLASKTISISEEVRFLTHMDEEDQSDKKETSEPEFSITENYSGQKTCVFPTADSAVSLSSSSDQNTTSPGMNSSDELCESVSVHPLQMTGLTDIADIIDDLIIKDGVSSEELGLTEQAMGTSRIQHYSGRHSQRTDKERREIQAWMKRKRKERMAKYLNELAEKRGQEHDPFCPRSNPLYMTSREIRLRQKMKHEKDRLLLSEHYSRRISQAYGLMNELLSESVQLPTLPQKPLPNKPSPTQSSSCQHCPSPRGENQHGHSFLINRPGKVKYMSKPSYIHKRKSFGQPQGSPWPHGTATFTIQKKAGGAKAAVRKATQSPVTFQKGSNAPCHSLQHTKKHGSAGLAPQTKQVCVEYEREETVVSPWTIPSEIHKILHESHNSLLQDLSPTEEEEPEHPFGVGGVDSVSESTGSILSKLDWNAIEDMVASVEDQGLSVHWALDL

SEQ ID NO: 16635 - protein, 3197 aa, Homo sapiens; identical to SEQ ID NO: 16634
  Payload ID: 3337
  Gene Symbol: C5orf42
  Gene Name: chromosome 5 open reading frame 42
  Uniprot ID: Q9H799
  ENSP ID: ENSP00000421690

SEQ ID NO: 16636 - protein, 2263 aa, Homo sapiens
  Payload ID: 3337
  Gene Symbol: C5orf42
  Gene Name: chromosome 5 open reading frame 42
  ENSP ID: ENSP00000424223
QQLCILPPHHVNVLPPLHIKTEQSFRLIPLQHSKVASVVRDQNLSNVWTVEYALELLFIGGLVPEAVWLAYKLGDWKTSVSIGVAFQLFCKRDSNFMRSKKKSLNLPLRMTPAQIFQEKLQCVLGQPASLEAKNEMGSKYKQFTDPIEEEDANLLFGSVQEVLKASVMADADILSETFQLLIDSAKDFSKRLWGLVPFGLYLPAPPLYCPQPAILSEEDGDDLLLKAEKNNRQKVSGILQRVLLLFRAAQCSFPVAQWYILQLRWARKVMQKIRMKGSLPSLSPFPQSLLNYCKGGIAFFRPGAAGDHKLDEVSIRAIGCFRELCALCWMLHVRDKLSYSCRQYQKARENVKGEKDLEVEFDSCMIEHCLSAVEWAYRMLPFSRFFNMEELIQDIILSLIGELPPIRKVAEIFVKAFPYPEDVRVPLRDKYHSLHQRLRHCVVKGPQTEEMMSVVMHSIQKVRVKALKRVQRNIGSFEVNIWEPIEEEKPDEAPGVDRYSLGTSLSRSTLTELGDSVVHSDADTFSEALSVEEKSRINIYQRNAPNHMELTSIHKPTDKRKMCNQKENPTKKEDHEKLSQNTLPVIGVWEFERDDDEYIKFLDLFLSYILERDLPYSRDADIPFLTSFSGKLREHELNSLLFDVHTTLKRHQSKTKSQNVFRAGSCFVVAPESYESEKSSSLNDEYGMHLENQKLSSSVLVNQGIKPFLQYPSNEVNKNEGMSGLFGLKQRSIYKIQDDTREKCLIQRSSNHIFWTPKSIKTRRCIFKAIQCNDINPQEDLPLALNTFGSIGRLLEWMIRWSNRRLLCDSGITESSSEYSPVIRVKTSTAAILTSLWLLEQPYFATYKAKNAIIKMVENRDTGCQIGPNIERESKSDAGGSVAVATPGGTEERNGQNKSCQNILNRMPTEAKNPDIKEINDDIISITHNTKKEFIDIDENLLEVEAFTEEEMDMHISDYEEDIEESVGGFRSPSLAICMMTLPQQLEEEFTEEVQCQREEPLETIMEEKSTEQKGMIEAFSHPGHTTPQSMQVDTSSEISSAQISTYKEKSSSVPLLISNGVNVASQPPAPTPQKTQRNEFTAQLPDCSESVRQMLQDEMFKLVQLQQINFMSLMQIVGSSFANLPDTQQLVQQSQSVHLGESQESNLRGCGDVEDSNKNLKERFFIKPQSMGENAREPRKNSPHCHEGTIPSGQNSTGNVQNVPHGSIPLCQLNGQPRKKGPIPSSQNLPSTSFYPAPAGNTHLYLLSTPSVVQKAPRLIPHAKTFSPGDGFPLLQFKSKQEFQPLFLHTGSIPQVPFRPLPQPREAWGLSDSFQPALPQRAAQTTPASHLNVSQYNTEARKKEVEQKTWAETVITEIPNHVNLDQYVGQENLTPQQDSSVFIKPEKLFDVKPGTLEISPHHSFGLPLLYLPLKPPNMFPSTSRASITVPSTPIQPIAEERKYPRLSLLHSHLSPENRCKKTQLIPLENLIAFKQSQQKLTHNLFEQGDAGHLQLLKVKIEPPEVRQGKDSKKRQRRRAEKELQEKRCEKLRRKPNVTFRPENSIINNDDSEIIKKPKEQQEHCGSHPLDDFDVPFEMLQDDNTSAGLHFMASVKKKAIGSQDASTNTDPEHEPLTAPQLLVPDVYLNLKLSSEMSEKPWSPSIPHTVTNLVGHTYINVIDIEANDLLQELPVREEPSNDNVIKQQSDHLAVPSSAELHYMAASVTNAVPPHNFKSQGLPKPEFRFKGQSTKSDSAEDYLLWKRLQGVSAACPAPSSAAHQLEHLSAKLQKIDEQLLAIQNIAENIEQDFPKPEMLDLHCDKIGPVDHIEFSSGPEFKKTLASKTISISEEVRFLTHMDEEDQSDKKETSEPEFSITENYSGQKTCVFPTADSAVSLSSSSDQNTTSPGMNSSDELCESVSVHPLQMTGLTDIADIIDDLIIKDGVSSEELGLTEQAMGTSRIQHYSGRHSQRTDKERREIQAWMKRKRKERMAKYLNELAEKRGQEHDPFCPRSNPLYMTSREIRLRQKMKHEKDRLLLSEHYSRRISQAYGLMNELLSESVQLPTLPQKPLPNKPSPTQSSSCQHCPSPRGENQHGHSFLINRPGKVKYMSKPSYIHKRKSFGQPQGSPWPHGTATFTIQKKAGGAKAAVRKATQSPVTFQKGSNAPCHSLQHTKKHGSAGLAPQTKQVCVEYEREETVVSPWTIPSEIHKILHESHNSLLQDLSPTEEEEPEHPFGVGGVDSVSESTGSILSKLDWNAIEDMVASVEDQGLSVHWALDL

SEQ ID NO: 16637 - protein, 1889 aa, Homo sapiens
  Payload ID: 3337
  Gene Symbol: C5orf42
  Gene Name: chromosome 5 open reading frame 42
  ENSP ID: ENSP00000426337
QQLCILPPHHVNVLPPLHIKTEAVWLAYKLGDWKTSVSIGVAFQLFCKRDSNFMRSKKKSLNLPLRMTPAQIFQEKLQCVLGQPASLEAKNEMGSKYKQFTDPIEEEDANLLFGSVQEVLKASVMADADILSETFQLLIDSAKDFSKRLWGLVPFGLYLPAPPLYCPQPAILSEEDGDDLLLKAEKNNRQKVSGILQRVLLLFRAAQCSFPVAQWYILQLRWARKVMQKIRMKGSLPSLSPFPQSLLNYCKGGIAFFRPGAAGDHKLDEVSIRAIGCFRELCALCWMLHVRDKLSYSCRQYQKARENVKGEKDLEVEFDSCMIEHCLSAVEWAYRMLPFSRFFNMEELIQDIILSLIGELPPIRKVAEIFVKAFPYPEDVRVPLRDKYHSLHQRLRHCVVKGPQTEEMMSVVMHSIQKVRVKALKRVQRNIGSFEVNIWEPIEEEKPDEAPGVDRYSLGTSLSRSTLTELGDSVVHSDADTFSEALSVEEKSRINIYQRNAPNHMELTSIHKPTDKRKMCNQKENPTKKEDHEKLSQNTLPVIGVWEFERDDDEYIKFLDLFLSYILERDLPYSRDADIPFLTSFSGKLREHELNSLLFDVHTTLKRHQSKTKSQNVFRAGSCFVVAPESYESEKSSSLNDEYGMHLENQKLSSSVLVNQGIKPFLQYPSNEVNKNEGMSGLFGLKQRSIYKIQDDTREKCLIQRSSNHIFWTPKSIKTRRCIFKAIQCNDINPQEDLPLALNTFGSIGRLLEWMIRWSNRRLLCDSGITESSSEYSPVIRVKTSTAAILTSLWLLEQPYFATYKAKNAIIKMVENRDTGCQIGPNIERESKSDAGGSVAVATPGGTEERNGQNKSCQNILNRMPTEAKNPDIKEINDDIISITHNTKKEFIDIDENLLEVEAFTEEEMDMHISDYEDIEESVGGFRSPSLAICMMTLPQQLEEEFTEEVQCQREEPLETIMEEKSTEQKGMIEAFSHPGHTTPQSMQVDTSSEISSAQISTYKEKSSSVPLLISNGVNVASQPPAPTPQKTQRNEFTAQLPDCSESVRQMLQDEMFKLVQLQQINFMSLMQIVGSSFANLPDTQQLVQQSQSVHLGESQESNLRGCGDVEDSNKNLKERFFIKPQSMGENAREPRKNSPHCHEGTIPSGQNSTGNVQNVPHGSIPLCQLNGQPRKKGPIPSSQNLPSTSFYPAPAGNTHLYLLSTPSVVQKAPRLIPHAKTFSPGDGFPLLQFKSKQEFQPLFLHTGSIPQVPFRPLPQPREAWGLSDSFQPALPQRAAQTTPASHLNVSQYNTEARKKEVEQKTWAETVITEIPNHVNLDQYVGQENLTPQQDSSVFIKPEKLFDVKPGTLEISPHHSFGLPLLYLPLKPPNMFPSTSRASITVPSTPIQPIAEERKYPRLSLLHSHLSPENRCKKTQLIPLENLIAFKQSQQKLTHNLFEQGDAGHLQLLKVKIEPPEVRQGKDSKKRQRRRAEKELQEKRCEKLRRKPNVTFRPENSIINNDDSEIIKKPKEQQEHCGSHPLDDFDVPFEMLQDDNTSAGLHFMASVKKKAIGSQDASTNTDPEHEPLTAPQLLVPDVYLNLKLSSEMSEKPWSPSIPHTVTNLVGHTYINVIDIEANDLLQELPVREEPSNDNVIKQQSDHLAVPSSAELHYMAASVTNAVPPHNFKSQEVTPACLDGKSLRAGITEVKEPSVTSPTPSDIQQNKGLPKPEFRFKGQSTKSDSAEDYLLWKRLQGVSAACPAPSSAAHQLEHLSAKLQKIDEQLLAIQNIAENIEQDFPKPEMLDLHCDKIGPVDHIEFSSGPEFKKTLASKTISISEEVRFLTHMDEEDQSDKKETSEPEFSITENYSGQKTCVFPTADSAVSLSSSSDQNTTSPVFQYIRSR

SEQ ID NO: 16638 - protein, 496 aa, Homo sapiens
  Payload ID: 3337
  Gene Symbol: C5orf42
  Gene Name: chromosome 5 open reading frame 42
  ENSP ID: ENSP00000473657
  MOD_RES (1)..(1): Any amino acid
XIPNHVNLDQYVGQENLTPQQDSSVFIKPEKLFDVKPGTLEISPHHSFGLPLLYLPLKPPNMFPSTSRASITVPSTPIQPIAEERKYPRLSLLHSHLSPENRCKKTQLIPLENLIAFKQSQQKLTHNLFEQGDAGHLQLLKVKIEPPEVRQGKDSKKRQRRRAEKELQEKRCEKLRRKPNVTFRPENSIINNDDSEIIKKPKEQQEHCGSHPLDDFDVPFEMLQDDNTSAGLHFMASVKKKAIGSQDASTNTDPEHEPLTAPQLLVPDVYLNLKLSSEMSEKPWSPSIPHTVTNLVGHTYINVIDIEANDLLQELPVREEPSNDNVIKQQSDHLAVPSSAELHYMAASVTNAVPPHNFKSQESANSSMDLFSKPAEVTPACLDGKSLRAGITEVKEPSVTSPTPSDIQQNKGLPKPEFRFKGQSTKSDSAEDYLLWKRLQGVSAACPAPSSAAHQLEHLSAKLQKIDEQLLAIQNIAENIEQDFPKPEMLDLHCDK

SEQ ID NO: 16639 - protein, 343 aa, Homo sapiens
  Payload ID: 3338
  Gene Symbol: C5orf45
  Gene Name: chromosome 5 open reading frame 45
  Uniprot ID: Q6NTE8
  ENSP ID: ENSP00000292586
MASLQRSRVLRCCSCRLFQAHQVKKSVKWTCKACGEKQSFLQAYGEGSGADCRRHVQKLNLLQGQVSELPLRSLEETVSASEEENVGHQQAGNVKQQEKSQPSESRWLKYLEKDSQELELEGTGVCFSKQPSSKMEEPGPRFSQDLPRKRKWSRSTVQPPCSRGVQDSGGSEVAWGPQKGQAGLTWKVKQGSSPCLQENSADCSAGELRGPGKELWSPIQQVTATSSKWAQFVLPPRKSSHVDSEQPRSLQRDPRPAGPAQAKQGTPRAQASREGLSRPTAAVQLPRATHPVTSGSERPCGKTSWDARTPWAEGGPLVLEAQNPRPTRLCDLFITGEDFDDDV

SEQ ID NO: 16640 - protein, 288 aa, Homo sapiens
  Payload ID: 3338
  Gene Symbol: C5orf45
  Gene Name: chromosome 5 open reading frame 45
  Uniprot ID: Q6NTE8
  ENSP ID: ENSP00000366130
MASLQRSRVLRCCSCRLFQAHQVKKSVKWTCKACGEKQSFLQEKSQPSESRWLKYLEKDSQELELEGTGVCFSKQPSSKMEEPGPRFSQDLPRKRKWSRSTVQPPCSRGVQDSGGSEVAWGPQKGQAGLTWKVKQGSSPCLQENSADCSAGELRGPGKELWSPIQQVTATSSKWAQFVLPPRKSSHVDSEQPRSLQRDPRPAGPAQAKQGTPRAQASREGLSRPTAAVQLPRATHPVTSGSERPCGKTSWDARTPWAEGGPLVLEAQNPRPTRLCDLFITGEDFDDDV

SEQ ID NO: 16641 - protein, 174 aa, Homo sapiens
  Payload ID: 3338
  Gene Symbol: C5orf45
  Gene Name: chromosome 5 open reading frame 45
  ENSP ID: ENSP00000427849
MASLQRSRVLRCCSCRLFQAHQVKKSVKWTCKACGEKQSFLQEKSQPSESRWLKYLEKDSQELELEGTGVCFSKQPSSKMEEPGPRFSQDLPRKRKWSRSTVQPPCSRGVQDSGGSEVAWGPQKGQAGLTWKVKQGSSPCLQENSADCSAGELRGPGKELWSPIQQDGYKEILF

SEQ ID NO: 16642 - protein, 93 aa, Homo sapiens
  Payload ID: 3338
  Gene Symbol: C5orf45
  Gene Name: chromosome 5 open reading frame 45
  ENSP ID: ENSP00000428081
MASLQRSRVLRCCSCRLFQAHQVKKSVKWTCKACGEKQSFLQVSPTKQKASGAQACSEPFQGVPACHSWDHPLSNRVPQTRSSCFRASCSFRK

SEQ ID NO: 16643 - protein, 192 aa, Homo sapiens
  Payload ID: 3338
  Gene Symbol: C5orf45
  Gene Name: chromosome 5 open reading frame 45
  ENSP ID: ENSP00000428460
MASLQRSRVLRCCSCRLFQAHQVKKSVKWTCKACGEKQSFLQAYGEGSGADCRRHVQKLNLLQGQVSELPLRSLEETVSASEEENVGHQQAGNVKQQEKSQPSESRWLKYLEKDSQELELEGTGVCFSKQPSSKMEEPGPRFSQDLPRKRKWSRSTVQPPCSRGVQDSGGSEVAWGPQKVSDKQFLSGPSDH

SEQ ID NO: 16644 - protein, 85 aa, Homo sapiens
  Payload ID: 3338
  Gene Symbol: C5orf45
  Gene Name: chromosome 5 open reading frame 45
  ENSP ID: ENSP00000429047
MASLQRSRVLRCCSCRLFQAHQVKKSVKWTCKACGEKQSFLQSSPDTELLLPSFLFLQEVKWMEQNLERLMVKALVLIVDAMSKS

SEQ ID NO: 16645 - protein, 209 aa, Homo sapiens
  Payload ID: 3338
  Gene Symbol: C5orf45
  Gene Name: chromosome 5 open reading frame 45
  ENSP ID: ENSP00000429107
MEEPGPRFSQDLPRKRKWSRSTVQPPCSRGVQDSGGSEVAWGPQKGQAGLTWKVKQGSSPCLQENSADCSAGELRGPGKELWSPIQQVTATSSKWAQFVLPPRKSSHVDSEQPRSLQRDPRPAGPAQAKQGTPRAQASREGLSRPTAAVQLPRATHPVTSGSERPCGKTSWDARTPWAEGGPLVLEAQNPRPTRLCDLFITGEDFDDDV

SEQ ID NO: 16646 - protein, 63 aa, Homo sapiens
  Payload ID: 3338
  Gene Symbol: C5orf45
  Gene Name: chromosome 5 open reading frame 45
  ENSP ID: ENSP00000429427
MASLQRSRVLRCCSCRLFQAHQVKKSVKWTCKACGEKQSFLQTVQSDSLLQVHRISFQANWKS

SEQ ID NO: 16647 - protein, 82 aa, Homo sapiens
  Payload ID: 3338
  Gene Symbol: C5orf45
  Gene Name: chromosome 5 open reading frame 45
  ENSP ID: ENSP00000429563
MASLQRSRVLRCCSCRLFQAHQVKKSVKWTCKACGEKQSFLQAYGEGSGADCRRHVQKLNLLQGQVSELPLRKNRSPQRVAG

SEQ ID NO: 16648 - protein, 113 aa, Homo sapiens
  Payload ID: 3338
  Gene Symbol: C5orf45
  Gene Name: chromosome 5 open reading frame 45
  ENSP ID: ENSP00000429651
MASLQRSRVLRCCSCRLFQAHQVKKSVKWTCKACGEKQSFLQAYGEGSGADCRRHVQKLNLLQGQVSELPLRSLEETVSASEEENVGHQQCRGAEGSWEGAMESHPAGYSHIL

SEQ ID NO: 16649 - protein, 85 aa, Homo sapiens; identical to SEQ ID NO: 16644
  Payload ID: 3338
  Gene Symbol: C5orf45
  Gene Name: chromosome 5 open reading frame 45
  ENSP ID: ENSP00000429835

SEQ ID NO: 16650 - protein, 94 aa, Homo sapiens
  Payload ID: 3338
  Gene Symbol: C5orf45
  Gene Name: chromosome 5 open reading frame 45
  ENSP ID: ENSP00000430187
MASLQRSRVLRCCSCRLFQAHQVKKSVKWTCKACGEKQSFLQSSPDTELLLPSFLFLQEVKWMEQNLERLFSQILCSKSIESHSKPTGRAESQL

SEQ ID NO: 16651 - protein, 229 aa, Homo sapiens
  Payload ID: 3338
  Gene Symbol: C5orf45
  Gene Name: chromosome 5 open reading frame 45
  ENSP ID: ENSP00000430298
MASLQRSRVLRCCSCRLFQAHQVKKSVKWTCKACGEKQSFLQAYGEGSGADCRRHVQKLNLLQGQVSELPLRSLEETVSASEEENVGHQQAGNVKQQEKSQPSESRWLKYLEKDSQELELEGTGVCFSKQPSSKMEEPGPRFSQDLPRKRKWSRSTVQPPCSRGVQDSGGSEVAWGPQKGQAGLTWKVKQGSSPCLQENSADCSAGELRGPGKELWSPIQQDGYKEILF

SEQ ID NO: 16652 - protein, 90 aa, Homo sapiens
  Payload ID: 3338
  Gene Symbol: C5orf45
  Gene Name: chromosome 5 open reading frame 45
  ENSP ID: ENSP00000430766
MASLQRSRVLRCCSCRLFQAHQVKKSVKWTCKACGEKQSFLQEKQPGWPRLTRMPTSGPVNWDWVSEERGWLTRLMVKALVLIVDAMSKS

SEQ ID NO: 16653 - protein, 82 aa, Homo sapiens; identical to SEQ ID NO: 16647
  Payload ID: 3338
  Gene Symbol: C5orf45
  Gene Name: chromosome 5 open reading frame 45
  ENSP ID: ENSP00000430814

SEQ ID NO: 16654 - protein, 51 aa, Homo sapiens
  Payload ID: 3338
  Gene Symbol: C5orf45
  Gene Name: chromosome 5 open reading frame 45
  ENSP ID: ENSP00000431019
MASLQRSRVLRCCSCRLFQAHQVKKSVKWTCKACGEKQSFLQVSRRNCQCQ

SEQ ID NO: 16655 - protein, 158 aa, Homo sapiens
  Payload ID: 3338
  Gene Symbol: C5orf45
  Gene Name: chromosome 5 open reading frame 45
  ENSP ID: ENSP00000482350
MEGETGSSPCLQENSADCSAGELRGPGKELWSPIQQVTATSSKWAQFVLPPRKSSHVDSEQPRSLQRDPRPAGPAQAKQGTPRAQASREGLSRPTAAVQLPRATHPVTSGSERPCGKTSWDARTPWAEGGPLVLEAQNPRPTRLCDLFITGEDFDDDV

SEQ ID NO: 16656 - protein, 87 aa, Homo sapiens
  Payload ID: 3339
  Gene Symbol: C5orf46
  Gene Name: chromosome 5 open reading frame 46
  Uniprot ID: Q6UWT4
  ENSP ID: ENSP00000315370
MAVSVLRLTVVLGLLVLFLTCYADDKPDKPDDKPDDSGKDPKPDFPKFLSLLGTEIIENAVEFILRSMSRSTGFMEFDDNEGKHSSK

SEQ ID NO: 16657 - protein, 72 aa, Homo sapiens
  Payload ID: 3339
  Gene Symbol: C5orf46
  Gene Name: chromosome 5 open reading frame 46
  Uniprot ID: Q6UWT4
  ENSP ID: ENSP00000425984
MAVSVLRLTVVLGLLVLFLTCYADDKPDKPDDKPDDSGKDPKPDFPKFLSLLGTEIIENAVEFILRSMSRST

SEQ ID NO: 16658 - protein, 176 aa, Homo sapiens
  Payload ID: 3340
  Gene Symbol: C5orf47
  Gene Name: chromosome 5 open reading frame 47
  Uniprot ID: Q569G3
  ENSP ID: ENSP00000340887
MAAAGRGREQDSARFVYVTRFGSHQCSGVLQLGGRGAQGLWGQGPGAGCRQEKPREAMAVAGVQGGSELPLGSQLRVPTTPGVEAAASASSQLRASRVQSGTRQSARAGLIQKDAAKKYDFPIPLNEASKIMKKKKKVLVWNRVYKVISRMLEENEKYRHRLKCQRLSSESSNYTR

SEQ ID NO: 16659 - protein, 147 aa, Homo sapiens
  Payload ID: 3341
  Gene Symbol: C5orf49
  Gene Name: chromosome 5 open reading frame 49
  Uniprot ID: A4QMS7
  ENSP ID: ENSP00000382708
MEDDEEETTASTLRGKPRPPPVSAQSAFSYIPPRRLDPKEHSYYYRPARTGIISLYDCIFKRRLDYDQKLHRDDREHAKSLGLHVNEEEQERPVGVLTSSVYGKRINQPIEPLNRDFGRANHVQADFYRKNDIPSLKEPGFGHIAPS

SEQ ID NO: 16660 - protein, 145 aa, Homo sapiens
  Payload ID: 3341
  Gene Symbol: C5orf49
  Gene Name: chromosome 5 open reading frame 49
  ENSP ID: ENSP00000426019
MEDDEEETTASTLRGKPRPPPVSAQSAFSYIPPRRLDPKEHSYYYRPARTGIISLYDCIFKRRLDYDQKLHRDDREHAKSLGLHVNEEERPVGVLTSSVYGKRINQPIEPLNRDFGRANHVQADFYRKNDIPSLKEPGFGHIAPS

SEQ ID NO: 16661 - protein, 294 aa, Homo sapiens
  Payload ID: 3342
  Gene Symbol: C5orf51
  Gene Name: chromosome 5 open reading frame 51
  Uniprot ID: A6NDU8
  ENSP ID: ENSP00000371061
MAAAVSSVVRRVEELGDLAQAHIQQLSEAAGEDDHFLIRASAALEKLKLLCGEEKECSNPSNLLELYTQAILDMTYFEENKLVDEDFPEDSSSQKVKELISFLSEPEILVKENNMHPKHCNLLGDELLECLSWRRGALLYMYCHSLTKRREWLLRKSSLLKKYLLDGISYLLQMLNYRCPIQLNEGVSFQDLDTAKLLSAGIFSDIHLLAMMYSGEMCYWGSKYCADQQPENHEVDTSVSGAGCTTYKEPLDFREVGEKILKKYVSVCEGPLKEQEWNTTNAKQILNFFHHRCN

SEQ ID NO: 16662 - protein, 152 aa, Homo sapiens
  Payload ID: 3342
  Gene Symbol: C5orf51
  Gene Name: chromosome 5 open reading frame 51
  ENSP ID: ENSP00000481500
MAAAVSSVVRRVEELGDLAQAHIQQLSEAAGEDDHFLIRASAALEKLKLLCGEEKECSNPSNLLELYTQAILDMTYFEENKLVDEDFPEDSSSQKVKELISFLSEPEILVKENNMHPKHCNLLGDELLECLSHFPLWLSQTSLLSLGPLPLP

SEQ ID NO: 16663 - protein, 159 aa, Homo sapiens
  Payload ID: 3343
  Gene Symbol: C5orf52
  Gene Name: chromosome 5 open reading frame 52
  Uniprot ID: A6NGY3
  ENSP ID: ENSP00000387027
MTQPTRPSVTCDQGSSTIGGTAAQATTSSSATSGSNYQRDRLGRRPEIGVGGQPQICFPRPRSAQQPVLFSLMNSSEAAMKKTLPKSHLSRVIIHDNRITQRIYEMEVSALEKTKKKISHYYEHLKKKFMTEQLRKLGRWREESVNSNRYLTFGIPPPV

SEQ ID NO: 16664 - protein, 126 aa, Homo sapiens
  Payload ID: 3344
  Gene Symbol: C5orf56
  Gene Name: chromosome 5 open reading frame 56
  Uniprot ID: Q8N8D9
  ENSP ID: ENSP00000338228
MDSLAAGELNASHQPWVPEFVAYWRKTHQGNLQTLLLHWLLLCSCLHHLYNASCHPAFPVEYSHAVCCLQPRFWKEMSPFSSSSTTHLFSKCFFYTCLCWAWQQCSSEQNHQPCSHAAYNQVERQT

SEQ ID NO: 16665 - protein, 80 aa, Homo sapiens
  Payload ID: 3344
  Gene Symbol: C5orf56
  Gene Name: chromosome 5 open reading frame 56
  ENSP ID: ENSP00000368230
MDSLAAGELNASHQPWVPEFVAYWRKTHQAYATLCPLAKEAQLRPRSVPAQQSYRRPEAPSCSLLLYRRHAAKQMCRDTT

SEQ ID NO: 16666 - protein, 117 aa, Homo sapiens
  Payload ID: 3344
  Gene Symbol: C5orf56
  Gene Name: chromosome 5 open reading frame 56
  Uniprot ID: Q8N8D9
  ENSP ID: ENSP00000368236
MDSLAAGELNASHQPWVPEFVAYWRKTHQDHLCSLHSRAFGLLDARVTWALRRAPEPVPGKDRLLLAAFPAEASPVDTASVSVYGRAPRYMHKGVKKCVCTPVSKNSTAWLLLGGIS

SEQ ID NO: 16667 - protein, 37 aa, Homo sapiens
  Payload ID: 3344
  Gene Symbol: C5orf56
  Gene Name: chromosome 5 open reading frame 56
  ENSP ID: ENSP00000385513
MDSLAAGELNASHQPWVPEFVAYWRKTHQAPNSTVNG

SEQ ID NO: 16668 - protein, 126 aa, Homo sapiens; identical to SEQ ID NO: 16664
  Payload ID: 3344
  Gene Symbol: C5orf56
  Gene Name: chromosome 5 open reading frame 56
  Uniprot ID: Q8N8D9
  ENSP ID: ENSP00000481774

SEQ ID NO: 16669 - protein, 115 aa, Homo sapiens
  Payload ID: 3345
  Gene Symbol: C5orf63
  Gene Name: chromosome 5 open reading frame 63
  Uniprot ID: A6NC05
  ENSP ID: ENSP00000453964
MLWFQGNSMQLARSSFGLFLRNCSASKTTLPVLTLFTKDPCPLCDEAKEVLKPYENRFILQEVNITLPENSVWYERYKFDIPVFHLNGQFLMMHRVNTSKLEKQLLKLEQQSTGG

SEQ ID NO: 16670 - protein, 138 aa, Homo sapiens
  Payload ID: 3345
  Gene Symbol: C5orf63
  Gene Name: chromosome 5 open reading frame 63
  Uniprot ID: A6NC05
  ENSP ID: ENSP00000454153
MLWFQGNSMQLARSSFGLFLRNCSASKTTLPVLTLFTKDPCPLCDEAKEVLKPYENRQPYKDQKLPGTRRRRSPSSPSHPHMASQSGKRYNLTLNQVLSFDYDMGLDAPKTISSDCGAFYCLRMFKSPDMTCCFYPKQ

SEQ ID NO: 16671 - protein, 55 aa, Homo sapiens
  Payload ID: 3345
  Gene Symbol: C5orf63
  Gene Name: chromosome 5 open reading frame 63
  ENSP ID: ENSP00000475157
MLWFQGNSMQLARSSFGLFLRNCSASKTTLPVLTLFTKEFLSTRSLFACCHPCKM

SEQ ID NO: 16672 - protein, 59 aa, Homo sapiens
  Payload ID: 3345
  Gene Symbol: C5orf63
  Gene Name: chromosome 5 open reading frame 63
  ENSP ID: ENSP00000475415
MLWFQGNSMQLARSSFGLFLRNCSASKTTLPVLTLFTKDPCPLCDEAKEVLKPYENRVI

SEQ ID NO: 16673 - protein, 57 aa, Homo sapiens
  Payload ID: 3345
  Gene Symbol: C5orf63
  Gene Name: chromosome 5 open reading frame 63
  ENSP ID: ENSP00000475733
KTTLPVLTLFTKDPCPLCDEAKEVLKPYENRFLMMHRVNTSKLEKQLLKLEQQSTGG

SEQ ID NO: 16674 - protein, 138 aa, Homo sapiens; identical to SEQ ID NO: 16670
  Payload ID: 3345
  Gene Symbol: C5orf63
  Gene Name: chromosome 5 open reading frame 63
  Uniprot ID: A6NC05
  ENSP ID: ENSP00000475810

SEQ ID NO: 16675 - protein, 89 aa, Homo sapiens
  Payload ID: 3345
  Gene Symbol: C5orf63
  Gene Name: chromosome 5 open reading frame 63
  ENSP ID: ENSP00000476160
MLWFQGNSMQLARSSFGLFLRNCSASKTTLPVLTLFTKDPCPLCDEAKEVLKPYENRRSTSQSLGNAIYRKKVLHSCCCPGGLNFLMKE

SEQ ID NO: 16676 - protein, 127 aa, Homo sapiens
  Payload ID: 3346
  Gene Symbol: C5orf67
  Gene Name: chromosome 5 open reading frame 67
  Uniprot ID: F2Z3F1
  ENSP ID: ENSP00000406718
MKRIFYKHRKRRAPVFKEPEHGYQSLPELVLVPAQPLVCLGDYRTPDPGGLFPWSLRLMMPGAWTKLPGDGGSVPEKGKHGILGAQGQEHPGLNVSSPFSSPWTCYLSGHQPQNNNSPELQVKEILL

SEQ ID NO: 16677 - protein, 117 aa, Homo sapiens
  Payload ID: 3346
  Gene Symbol: C5orf67
  Gene Name: chromosome 5 open reading frame 67
  ENSP ID: ENSP00000480926
RRAPVFKEPEHGYQSLPELVLVPAQPLVCLGDYRTPDPGGLFPWSLRLMMPGAWTKLPGDGGSVPEKGKHGILGAQGQEHPGLNVSSPFSSPWTCYLSGHQPQNNNSPELQVKEILL

SEQ ID NO: 16678 - protein, 139 aa, Homo sapiens
  Payload ID: 3347
  Gene Symbol: C6orf1
  Gene Name: chromosome 6 open reading frame 1
  ENSP ID: ENSP00000334260
MTQLRNCMRLSRSCSLTWETPRWYMAGRVATSTSGCHCWMSRRDLTPLPHPSEPGVLDCLGPCHLLPLLSPGSPCWVLGLHFSLHPPSAASASHALTITSLPPGLLPFVGVELTAHPQALMGRGFPSGMGAAGRHLCFL

SEQ ID NO: 16679 - protein, 159 aa, Homo sapiens
  Payload ID: 3347
  Gene Symbol: C6orf1
  Gene Name: chromosome 6 open reading frame 1
  Uniprot ID: Q86T20
  ENSP ID: ENSP00000378441
MYRRKSGWTGCAITCSPCTAMTQLRNCMRLSRSCSLTWETPRWYMAGRVATSTSGCHCWMSRRDLTPLPHPSEPGVLDCLGPCHLLPLLSPGSPCWVLGLHFSLHPPSAASASHALTITSLPPGLLPFVGVELTAHPQALMGRGFPSGMGAAGRHLCFL

SEQ ID NO: 16680 - protein, 139 aa, Homo sapiens; identical to SEQ ID NO: 16678
  Payload ID: 3347
  Gene Symbol: C6orf1
  Gene Name: chromosome 6 open reading frame 1
  ENSP ID: ENSP00000387460

SEQ ID NO: 16681 - protein, 159 aa, Homo sapiens; identical to SEQ ID NO: 16679
  Payload ID: 3347
  Gene Symbol: C6orf1
  Gene Name: chromosome 6 open reading frame 1
  Uniprot ID: Q86T20
  ENSP ID: ENSP00000417604

SEQ ID NO: 16682 - protein, 159 aa, Homo sapiens; identical to SEQ ID NO: 16679
  Payload ID: 3347
  Gene Symbol: C6orf1
  Gene Name: chromosome 6 open reading frame 1
  Uniprot ID: Q86T20
  ENSP ID: ENSP00000418062

SEQ ID NO: 16683 - protein, 159 aa, Homo sapiens; identical to SEQ ID NO: 16679
  Payload ID: 3347
  Gene Symbol: C6orf1
  Gene Name: chromosome 6 open reading frame 1
  Uniprot ID: Q86T20
  ENSP ID: ENSP00000418884

SEQ ID NO: 16684 - protein, 561 aa, Homo sapiens
  Payload ID: 3348
  Gene Symbol: C6orf10
  Gene Name: chromosome 6 open reading frame 10
  ENSP ID: ENSP00000364146
MTVLEITLAVILTLLGLAILAILLTRWARCKQSEMYISRYSSEQSARLLDYEDGRGSRHAYSTQSGNLCFQRSKRDYTPSTNSLVSMASKFSLGQTELILLLMCFILALSRSSIGSIKCLQTTEEPPSRTAGAMMQFTAPIPGATGPIKLSQKTIVQTPGPIVQYPGSNAGPPSAPRGPPMAPIIISQRTARIPQVHTMDSSGKITLTPVVILTGYMDEELAKKSCSKIQILKCGGTARSQNSREENKEALKNDIIFTNSVESLKSAHIKEPEREGKGTDLEKDKIGMEVKVDSDAGIPKRQETQLKISEMSIPQGQGAQIKKSVSDVPRGQESQVKKSESGVPKGQEAQVTKSGLVVLKGQEAQVEKSEMGVPRRQESQVKKSQSGVSKGQEAQVKKRESVVLKGQEAQVEKSELKVPKGQEGQVEKTEADVPKEQEVQEKKSEAGVLKGPESQVKNTEVSVPETLESQVKKSESGVLKGQEAQEKKESFEDKGNNDKEKERDAEKDPNKKEKGDKNTKGDKGKDKVKGKRESEINGEKSKGSKRAKANTGRKYNKKVEE

SEQ ID NO: 16685 - protein, 562 aa, Homo sapiens
  Payload ID: 3348
  Gene Symbol: C6orf10
  Gene Name: chromosome 6 open reading frame 10
  Uniprot ID: Q5SRN2
  ENSP ID: ENSP00000364155
MTVLEITLAVILTLLGLAILAILLTRWARCKQSEMYISRYSSEQSARLLDYEDGRGSRHAYSTQSDTSYDNRERSKRDYTPSTNSLALSRSSIALPQGSMSSIKCLQTTEEPPSRTAGAMMQFTAPIPGATGPIKLSQKTIVQTPGPIVQYPGSNVRSHPHTITGPPSAPRGPPMAPIIISQRTASQLAAPIRIPQVHTMDSSGKITLTPVVILTGYMDEELAKKSCSKIQILKCGGTARSQNSREENKEALKNDIIFTNSVESLKSAHIKEPEREGKGTDLEKDKIGMEVKVDSDAGIPKRQETQLKISEMSIPQGQGAQIKKSVSDVPRGQESQVKKSESGVPKGQEAQVTKSGLVVLKGQEAQVEKSEMGVPRRQESQVKKSQSGVSKGQEAQVKKRESVVLKGQEAQVEKSELKVPKGQEGQVEKTEADVPKEQEVQEKKSEAGVLKGPESQVKNTEVSVPETLESQVKKSESGVLKGQEAQEKKESFEDKGNNDKEKERDAEKDPNKKEKGDKNTKGDKGKDKVKGKRESEINGEKSKGSKRAKANTGRKYNKKVEE

SEQ ID NO: 16686 - protein, 563 aa, Homo sapiens
  Payload ID: 3348
  Gene Symbol: C6orf10
  Gene Name: chromosome 6 open reading frame 10
  Uniprot ID: Q5SRN2
  ENSP ID: ENSP00000372611
MTVLEITLAVILTLLGLAILAILLTRWARCKQSEMYISRYSSEQSARLLDYEDGRGSRHAYSTQSDTSYDNRERSKRDYTPSTNSLVSMASKFSLGQTELILLLMCFILALSRSSIGSIKCLQTTEEPPSRTAGAMMQFTAPIPGATGPIKLSQKTIVQTPGPIVQYPGSNAGPPSAPRGPPMAPIIISQRTARIPQVHTMDSSGKITLTPVVILTGYMDEELAKKSCSKIQILKCGGTARSQNSREENKEALKNDIIFTNSVESLKSAHIKEPEREGKGTDLEKDKIGMEVKVDSDAGIPKRQETQLKISEMSIPQGQGAQIKKSVSDVPRGQESQVKKSESGVPKGQEAQVTKSGLVVLKGQEAQVEKSEMGVPRRQESQVKKSQSGVSKGQEAQVKKRESVVLKGQEAQVEKSELKVPKGQEGQVEKTEADVPKEQEVQEKKSEAGVLKGPESQVKNTEVSVPETLESQVKKSESGVLKGQEAQEKKESFEDKGNNDKEKERDAEKDPNKKEKGDKNTKGDKGKDKVKGKRESEINGEKSKGSKRAKANTGRKYNKKVEE

SEQ ID NO: 16687 - protein, 562 aa, Homo sapiens
  Payload ID: 3348
  Gene Symbol: C6orf10
  Gene Name: chromosome 6 open reading frame 10
  ENSP ID: ENSP00000372749
MTVLEITLAVILTLLGLAILAILLTRWARRKQSEMYISRYSSEQSARLLDYEDGRGSRHAYSTQSDTSYDNRERSKRDYTPSTNSLALSRSSIALPQGSMSSIKCLQTTEEPPSRTAGAMMQFTAPIPGATGPIKLSQKTIVQTLGPIVQYPGSNVRSHPHTITGPPSAPRGPPMAPIIISQRTASQLAAPIRIPQVHTMDSSGKITLTPVVILTGYMDEELAKKSCSKIQILKCGGTARSQNSREENKEALKNDIIFTNSVESLKSAHIKEPEREGKGTDLEKDKIGMEVKVDSDAGIPKRQETQLKISEMSIPQGQGAQIKKSVSDVPRGQESQVKKSESGVPKGQEAQVTKSGLVVLKGQEAQVEKSEMGVPRRQESQVKKSQSGVSKGQEAQVKKRESVVLKGQEAQVEKSELKVPKGQEGQVEKTEADVPKEQEVQEKKSEAGVLKGPESQVKNTEVSVPETLESQVKKSESGVLKGQEAQEKKESFEDKGNNDKEKERDAEKDPNKKEKGDKNTKGDKGKDKVKGKRESEINGEKSKGSKRAKANTGRKYNKKVEE

SEQ ID NO: 16688 - protein, 563 aa, Homo sapiens
  Payload ID: 3348
  Gene Symbol: C6orf10
  Gene Name: chromosome 6 open reading frame 10
  Uniprot ID: Q5SRN2
  ENSP ID: ENSP00000382654
MTVLEITLAVILTLLGLAILAILLTRWARRKQSEMYISRYSSEQSARLLDYEDGRGSRHAYSTQSDTSYDNRERSKRDYTPSTNSLVSMASKFSLGQTELILLLMCFILALSRSSIGSIKCLQTTEEPPSRTAGAMMQFTAPIPGATGPIKLSQKTIVQTLGPIVQYPGSNAGPPSAPRGPPMAPIIISQRTARIPQVHTMDSSGKITLTPVVILTGYMDEELAKKSCSKIQILKCGGTARSQNSREENKEALKNDIIFTNSVESLKSAHIKEPEREGKGTDLEKDKIGMEVKVDSDAGIPKRQETQLKISEMSIPQGQGAQIKKSVSDVPRGQESQVKKSESGVPKGQEAQVTKSGLVVLKGQEAQVEKSEMGVPRRQESQVKKSQSGVSKGQEAQVKKRESVVLKGQEAQVEKSELKVPKGQEGQVEKTEADVPKEQEVQEKKSEAGVLKGPESQVKNTEVSVPETLESQVKKSESGVLKGQEAQEKKESFEDKGNNDKEKERDAEKDPNKKEKGDKNTKGDKGKDKVKGKRESEINGEKSKGSKRAKANTGRKYNKKVEE

SEQ ID NO: 16689 - protein, 193 aa, Homo sapiens
  Payload ID: 3348
  Gene Symbol: C6orf10
  Gene Name: chromosome 6 open reading frame 10
  ENSP ID: ENSP00000390018
MTVLEITLAVILTLLGLAILAILLTRWARRKQSEMHISRYSSEQSARLLDYEDGRGSRHAYSTQSDTSCDNRERSKRDYTPSTNSLVSMASKFSLGQTELILLLMCFILALSRSSIGSIKCLQTTEELPSRTAGAMMQFTAPIPGATGPIKLSQKTIVQTPGPIVQYPGPNAGPPSAPRGPPMAPIIISQRTA

SEQ ID NO: 16690 - protein, 562 aa, Homo sapiens
  Payload ID: 3348
  Gene Symbol: C6orf10
  Gene Name: chromosome 6 open reading frame 10
  ENSP ID: ENSP00000393107
MTVLEITLAVILTLLGLAILAILLTRWARRKQSEMYISRYSSEQSARLLDYEDGRGSRHAYSTQSDTSYDNRERSKRDYTPSTNSLALSRSSIALPQGSMSSIKCLQTTEEPPSRTAGAMMQFTAPIPGATGPIKLSQKTIVQTLGPIVQYPGSNVRSHPHTITGPPSAPRGPPMAPIIISQRTASQLAAPIRIPQVHTMDSSGKITLTPVVILTGYMDEELAKKSCSKIQILKCGGTARSQNSREENKEALKNDIIFTNSVESLKSAHIKEPEREGKGTDLEKDKIGMEVKVDSDAGIPKRQETQLKISEMSVPQGQGAQIKKSVSDVPRGQESQVKKSESGVPKGQEAQVTKSGLVVLKGQEAQVEKSEMGVPRRQESQVKKSQSGVSKGQEAQVKKRESVVLKGQEAQVEKSELKVPKGQEGQVEKTEADVPKEQEVQEKKSEAGVLKGPESQVKNTEVSVPETLESQVKKSESGVLKGQEAQEKKESFEDKGNNDKEKERDAEKDPNKKEKGDKNTKGDKGKDKVKGKRESEINGEKSKGSKRAKANTGRKYNKKVEE

SEQ ID NO: 16691 - protein, 192 aa, Homo sapiens
  Payload ID: 3348
  Gene Symbol: C6orf10
  Gene Name: chromosome 6 open reading frame 10
  ENSP ID: ENSP00000400272
MTVLEITLAVILTLLGLAILAILLTRWARRKQSEMHISRYSSEQSARLLDYEDGRGSRHAYSTQSDTSCDNRERSKRDYTPSTNSLALSRSSIALPQGSMSSIKCLQTTEELPSRTAGAMMQFTAPIPGATGPIKLSQKTIVQTPGPIVQYPGPNVRSHPHTITGPPSAPRGPPMAPIIISQRTASQLAAPI

SEQ ID NO: 16692 - protein, 563 aa, Homo sapiens
  Payload ID: 3348
  Gene Symbol: C6orf10
  Gene Name: chromosome 6 open reading frame 10
  ENSP ID: ENSP00000400675
MTVLEITLAVILTLLGLAILAILLTRWARRKQSEMYISRYSSEQSARLLDYEDGRGSRHAYSTQSDTSYDNRERSKRDYTPSTNSLVSMASKFSLGQTELILLLMCFILALSRSSIGSIKCLQTTEEPPSRTAGAMMQFTAPIPGATGPIKLSQKTIVQTLGPIVQYPGSNAGPPSAPRGPPMAPIIISQRTARIPQVHTMDSSGKITLTPVVILTGYMDEELAKKSCSKIQILKCGGTARSQNSREENKEALKNDIIFTNSVESLKSAHIKEPEREGKGTDLEKDKIGMEVKVDSDAGIPKRQETQLKISEMSVPQGQGAQIKKSVSDVPRGQESQVKKSESGVPKGQEAQVTKSGLVVLKGQEAQVEKSEMGVPRRQESQVKKSQSGVSKGQEAQVKKRESVVLKGQEAQVEKSELKVPKGQEGQVEKTEADVPKEQEVQEKKSEAGVLKGPESQVKNTEVSVPETLESQVKKSESGVLKGQEAQEKKESFEDKGNNDKEKERDAEKDPNKKEKGDKNTKGDKGKDKVKGKRESEINGEKSKGSKRAKANTGRKYNKKVEE

SEQ ID NO: 16693 - protein, 563 aa, Homo sapiens
  Payload ID: 3348
  Gene Symbol: C6orf10
  Gene Name: chromosome 6 open reading frame 10
  ENSP ID: ENSP00000406760
MTVLEITLAVILTLLGLAILAILLTRWARRKQSEMYISRYSSEQSARLLDYEDGRGSRHAYSTQSDTSYDNRERSKRDYTPSTNSLVSMASKFSLGQTELILLLMCFILALSRSSIGSIKCLQTTEEPPSRTAGAMMQFTAPIPGATGPFKLSQKTIVQTLGPIVQYPGSNAGPPSAPRGPPMAPIIISQRTARIPQVHTMDSSGKITLTPVVILTGYMDEELAKKSCSKIQILKCGGTARSQNSREENKEALKNDIIFTNSVESLKSAHIKEPEREGKGTDLEKDKIGMEVKVDSDAGIPKRQETQLKISEMSVPQGQGAQIKKSVSDVPRGQESQVKKSESGVPKGQEAQVTKSGLVVLKGQEAQVEKSEMGVPRRQESQVKKSQSGVSKGQEAQVKQRESVVLKGQEAQVEKSELKVPKGQEGQVEKTEADVPKEQEVQEKKSEAGVLKGPESQVKNTEVSVPETLESQVKKSESGVLKGQEAQEKKESFEDKGNNDKEKERDAEKDPNKKEKGDKNTKGDKGKDKVKGKRESEINGEKSKGSKRAKANTGRKYNKKVEE

SEQ ID NO: 16694 - protein, 563 aa, Homo sapiens
  Payload ID: 3348
  Gene Symbol: C6orf10
  Gene Name: chromosome 6 open reading frame 10
  Uniprot ID: Q5SRN2
  ENSP ID: ENSP00000408514
MTVLEITLAVILTLLGLAILAILLTRWARRKQSEMHISRYSSEQSARLLDYEDGRGSRHAYSTQSDTSCDNRERSKRDYTPSTNSLVSMASKFSLGQTELILLLMCFILALSRSSIGSIKCLQTTEELPSRTAGAMMQFTAPIPGATGPIKLSQKTIVQTPGPIVQYPGPNAGPPSAPRGPPMAPIIISQRTARIPQVHTMDSSGKITLTPVVILTGYMDEELAKKPCSKIQILKCGGTARSQNSREENKEALKNDIIFTNSVESLKSAHIKEPEREGKGTDLEKDKIGMEVKVDSDAGIPKRQETQLKISEMSIPQGQGAQIKKSVSDVPRGQESQVKKSESGVPKGQEAQVTKSGLVVLKGQEAQVEKSEMGVPRRQESQVKKSQSGVSKGQEAQVKKRESVVLKGQEAQVEKSELKVPKGQEGQVEKTEADVPKEQEVQEKKSEAGVLKGPESQVKNTEVSVPETLESQVKKSESGVLKGQEAQEKKESFEDKGNNDKEKERDAEKDPNKKEKGDKNTKGDKGKDKVKGKRESEINGEKSKGSKRAKANTGRKYNKKVEE

SEQ ID NO: 16695 - protein, 193 aa, Homo sapiens; identical to SEQ ID NO: 16689
  Payload ID: 3348
  Gene Symbol: C6orf10
  Gene Name: chromosome 6 open reading frame 10
  ENSP ID: ENSP00000410028

SEQ ID NO: 16696 - protein, 562 aa, Homo sapiens; identical to SEQ ID NO: 16685
  Payload ID: 3348
  Gene Symbol: C6orf10
  Gene Name: chromosome 6 open reading frame 10
  Uniprot ID: Q5SRN2
  ENSP ID: ENSP00000410514

SEQ ID NO: 16697 - protein, 468 aa, Homo sapiens
  Payload ID: 3348
  Gene Symbol: C6orf10
  Gene Name: chromosome 6 open reading frame 10
  ENSP ID: ENSP00000411164
MTVLEITLAVILTLLGLAILAILLTRWARCKQSEMYISRYSSEQSARLLDYEDGRGSRHAYSTQSERSKRDYTPSTNSLALSRSSIALPQGSMSSIKCLQTTEEPPSRTAGAMMQFTAPIPGATGPIKLSQKTIVQTPGPIVQYPGSNAGPPSAPRGPPMAPIIISQRTASQLAAPIIISQRTARIPQVHTMDSSGKITLTPVVILTGYMDEELAKKSCSKIQILKCGGTARSQNSREENKEALKNDIIFTNSVESLKSAHIKEPEREGKGTDLEKDKIGMEVKVDSDAGIPKRQETQLKISEMSIPQGQGAQIKKSVSDVPRGQESQVKKSESGVPKGQEAQVTKSGLVVLKGQEAQVEKSEMGVPRRQESQVKKSQSGVSKGQEAQVKKRESVVLKGQEAQVEKSELKVPKGQEGQVEKTEADVPKEQEVQEKKSEAGVLKGPESQVKNTECFRNKDTLIYHHPEA

SEQ ID NO: 16698 - protein, 192 aa, Homo sapiens; identical to SEQ ID NO: 16691
  Payload ID: 3348
  Gene Symbol: C6orf10
  Gene Name: chromosome 6 open reading frame 10
  ENSP ID: ENSP00000414408

SEQ ID NO: 16699 - protein, 562 aa, Homo sapiens
  Payload ID: 3348
  Gene Symbol: C6orf10
  Gene Name: chromosome 6 open reading frame 10
  ENSP ID: ENSP00000415507
MTVLEITLAVILTLLGLAILAILLTRWARRKQSEMHISRYSSEQSARLLDYEDGRGSRHAYSTQSDTSCDNRERSKRDYTPSTNSLALSRSSIALPQGSMSSIKCLQTTEELPSRTAGAMMQFTAPIPGATGPIKLSQKTIVQTPGPIVQYPGPNVRSHPHTITGPPSAPRGPPMAPIIISQRTASQLAAPIRIPQVHTMDSSGKITLTPVVILTGYMDEELAKKPCSKIQILKCGGTARSQNSREENKEALKNDIIFTNSVESLKSAHIKEPEREGKGTDLEKDKIGMEVKVDSDAGIPKRQETQLKISEMSIPQGQGAQIKKSVSDVPRGQESQVKKSESGVPKGQEAQVTKSGLVVLKGQEAQVEKSEMGVPRRQESQVKKSQSGVSKGQEAQVKKRESVVLKGQEAQVEKSELKVPKGQEGQVEKTEADVPKEQEVQEKKSEAGVLKGPESQVKNTEVSVPETLESQVKKSESGVLKGQEAQEKKESFEDKGNNDKEKERDAEKDPNKKEKGDKNTKGDKGKDKVKGKRESEINGEKSKGSKRAKANTGRKYNKKVEE

SEQ ID NO: 16700 - protein, 563 aa, Homo sapiens; identical to SEQ ID NO: 16686
  Payload ID: 3348
  Gene Symbol: C6orf10
  Gene Name: chromosome 6 open reading frame 10
  Uniprot ID: Q5SRN2
  ENSP ID: ENSP00000415517

SEQ ID NO: 16701 - protein, 562 aa, Homo sapiens
  Payload ID: 3348
  Gene Symbol: C6orf10
  Gene Name: chromosome 6 open reading frame 10
  ENSP ID: ENSP00000416682
MTVLEITLAVILTLLGLAILAILLTRWARRKQSEMYISRYSSEQSARLLDYEDGRGSRHAYSTQSDTSYDNRERSKRDYTPSTNSLALSRSSIALPQGSMSSIKCLQTTEEPPSRTAGAMMQFTAPIPGATGPFKLSQKTIVQTLGPIVQYPGSNVRSHPHTITGPPSAPRGPPMAPIIISQRTASQLAAPIRIPQVHTMDSSGKITLTPVVILTGYMDEELAKKSCSKIQILKCGGTARSQNSREENKEALKNDIIFTNSVESLKSAHIKEPEREGKGTDLEKDKIGMEVKVDSDAGIPKRQETQLKISEMSVPQGQGAQIKKSVSDVPRGQESQVKKSESGVPKGQEAQVTKSGLVVLKGQEAQVEKSEMGVPRRQESQVKKSQSGVSKGQEAQVKQRESVVLKGQEAQVEKSELKVPKGQEGQVEKTEADVPKEQEVQEKKSEAGVLKGPESQVKNTEVSVPETLESQVKKSESGVLKGQEAQEKKESFEDKGNNDKEKERDAEKDPNKKEKGDKNTKGDKGKDKVKGKRESEINGEKSKGSKRAKANTGRKYNKKVEE

SEQ ID NO: 16702 - protein, 561 aa, Homo sapiens
  Payload ID: 3348
  Gene Symbol: C6orf10
  Gene Name: chromosome 6 open reading frame 10
  Uniprot ID: Q5SRN2
  ENSP ID: ENSP00000431199
MTVLEITLAVILTLLGLAILAILLTRWARCKQSEMYISRYSSEQSARLLDYEDGRGSRHAYSTQSDTSYDNRERSKRDYTPSTNSLALSRSSIALPQGSMSSIKCLQTTEEPPSRTAGAMMQFTAPIPGATGPIKLSQKTIVQTPGPIVQYPGSNAGPPSAPRGPPMAPIIISQRTASQLAAPIIISQRTARIPQVHTMDSSGKITLTPVVILTGYMDEELAKKSCSKIQILKCGGTARSQNSREENKEALKNDIIFTNSVESLKSAHIKEPEREGKGTDLEKDKIGMEVKVDSDAGIPKRQETQLKISEMSIPQGQGAQIKKSVSDVPRGQESQVKKSESGVPKGQEAQVTKSGLVVLKGQEAQVEKSEMGVPRRQESQVKKSQSGVSKGQEAQVKKRESVVLKGQEAQVEKSELKVPKGQEGQVEKTEADVPKEQEVQEKKSEAGVLKGPESQVKNTEVSVPETLESQVKKSESGVLKGQEAQEKKESFEDKGNNDKEKERDAEKDPNKKEKGDKNTKGDKGKDKVKGKRESEINGEKSKGSKRAKANTGRKYNKKVEE

SEQ ID NO: 16703 - protein, 125 aa, Homo sapiens
  Payload ID: 3348
  Gene Symbol: C6orf10
  Gene Name: chromosome 6 open reading frame 10
  ENSP ID: ENSP00000432566
MTVLEITLAVILTLLGLAILAILLTRWARCKQSEMYISRYSSEQSARLLDYEDGRGSRHAYSTQSDTSYDNRERSKRDYTPSTNSLVSMASKFSLGQTELILLLMCFILALSRSSIALPQGSMMQ

SEQ ID NO: 16704 - protein, 132 aa, Homo sapiens
  Payload ID: 3348
  Gene Symbol: C6orf10
  Gene Name: chromosome 6 open reading frame 10
  ENSP ID: ENSP00000432814
MTVLEITLAVILTLLGLAILAILLTRWARCKQSEMYISRYSSEQSARLLDYEDGRDFSSQRSKRGRGSRHAYSTQSERSKRDYTPSTNSLALSRSSIALPQGSMSSIKCLQTTEEPPSRTAGAMMQFTAPIP

SEQ ID NO: 16705 - protein, 547 aa, Homo sapiens
  Payload ID: 3348
  Gene Symbol: C6orf10
  Gene Name: chromosome 6 open reading frame 10
  ENSP ID: ENSP00000435103
MTVLEITLAVILTLLGLAILAILLTRWARCKQSEMYISRYSSEQSARLLDYEDGRGSRHAYSTQSERSKRDYTPSTNSLALSRSSIALPQGSMSSIKCLQTTEEPPSRTAGAMMQFTAPIPGATGPIKLSQKTIVQTPGPIVQYPGSNAGPPSAPRGPPMAPIIISQRTASQLAAPIRIPQVHTMDSSGKITLTPVVILTGYMDEELAKKSCSKIQILKCGGTARSQNSREENKEALKNDIIFTNSVESLKSAHIKEPEREGKGTDLEKDKIGMEVKVDSDAGIPKRQETQLKISEMSIPQGQGAQIKKSVSDVPRGQESQVKKSESGVPKGQEAQVTKSGLVVLKGQEAQVEKSEMGVPRRQESQVKKSQSGVSKGQEAQVKKRESVVLKGQEAQVEKSELKVPKGQEGQVEKTEADVPKEQEVQEKKSEAGVLKGPESQVKNTEVSVPETLESQVKKSESGVLKGQEAQEKKESFEDKGNNDKEKERDAEKDPNKKEKGDKNTKGDKGKDKVKGKRESEINGEKSKGSKRAKANTGRKYNKKVEE

SEQ ID NO: 16706 - protein, 561 aa, Homo sapiens; identical to SEQ ID NO: 16702
  Payload ID: 3348
  Gene Symbol: C6orf10
  Gene Name: chromosome 6 open reading frame 10
  Uniprot ID: Q5SRN2
  ENSP ID: ENSP00000448472

SEQ ID NO: 16707 - protein, 561 aa, Homo sapiens; identical to SEQ ID NO: 16684
  Payload ID: 3348
  Gene Symbol: C6orf10
  Gene Name: chromosome 6 open reading frame 10
  ENSP ID: ENSP00000449235

SEQ ID NO: 16708 - protein, 565 aa, Homo sapiens
  Payload ID: 3348
  Gene Symbol: C6orf10
  Gene Name: chromosome 6 open reading frame 10
  ENSP ID: ENSP00000449655
MTVLEITLAVILTLLGLAILAILLTRWARCKQSEMYISRYSSEQSARLLDYEDGRGSRHAYHKVTLHMITERISKRDYTPSTNSLALSRSSIALPQGSMSSIKCLQTTEEPPSRTAGAMMQFTAPIQPELQDLSSSLKKPLCKLQDLLYNWIQCQIASSHNHTVHLQHPGPPMAPIIISQRTASQLAAPIRIPQVHTMDSSGKITLTPVVILTGYMDEELAKKSCSKIQILKCGGTARSQNSREENKEALKNDIIFTNSVESLKSAHIKEPEREGKGTDLEKDKIGMEVKVDSDAGIPKRQETQLKISDEYTTRTGSPNKEKCVRCTKRTGQVKKSESGVPKGQEAQVTKSGLVVLKGQEAQVEKSEMGVPRRQESQVKKSQSGVSKGQEAQVKKRESVVLKGQEAQVEKSELKVPKGQEGQVEKTEADVPKEQEVQEKKSEAGVLKGPESQVKNTEVSVPETLESQVKKSESGVLKGQEAQEKKESFEDKGNNDKEKERDAEKDPNKKEKGDKNTKGDKGKDKVKGKRESEINGEKSKGSKRRQIQEGSTTKKWKSKDKFFKGP

SEQ ID NO: 16709 - protein, 547 aa, Homo sapiens; identical to SEQ ID NO: 16705
  Payload ID: 3348
  Gene Symbol: C6orf10
  Gene Name: chromosome 6 open reading frame 10
  ENSP ID: ENSP00000477696

SEQ ID NO: 16710 - protein, 561 aa, Homo sapiens
  Payload ID: 3348
  Gene Symbol: C6orf10
  Gene Name: chromosome 6 open reading frame 10
  ENSP ID: ENSP00000478475
MTVLEITLAVILTLLGLAILAILLTRWARRKQSEMHISRYSSEQSARLLDYEDGRGSRHAYSTQSDTSCDNRERSKRDYTPSTNSLALSRSSIALPQGSMSSIKCLQTTEELPSRTAGAMMQFTAPIPGATGPIKLSQKTIVQTPGPIVQYPGPNAGPPSAPRGPPMAPIIISQRTASQLAAPIIISQRTARIPQVHTMDSSGKITLTPVVILTGYMDEELAKKPCSKIQILKCGGTARSQNSREENKEALKNDIIFTNSVESLKSAHIKEPEREGKGTDLEKDKIGMEVKVDSDAGIPKRQETQLKISEMSIPQGQGAQIKKSVSDVPRGQESQVKKSESGVPKGQEAQVTKSGLVVLKGQEAQVEKSEMGVPRRQESQVKKSQSGVSKGQEAQVKKRESVVLKGQEAQVEKSELKVPKGQEGQVEKTEADVPKEQEVQEKKSEAGVLKGPESQVKNTEVSVPETLESQVKKSESGVLKGQEAQEKKESFEDKGNNDKEKERDAEKDPNKKEKGDKNTKGDKGKDKVKGKRESEINGEKSKGSKRAKANTGRKYNKKVEE

SEQ ID NO: 16711 - protein, 563 aa, Homo sapiens; identical to SEQ ID NO: 16688
  Payload ID: 3348
  Gene Symbol: C6orf10
  Gene Name: chromosome 6 open reading frame 10
  ENSP ID: ENSP00000478762

SEQ ID NO: 16712 - protein, 547 aa, Homo sapiens
  Payload ID: 3348
  Gene Symbol: C6orf10
  Gene Name: chromosome 6 open reading frame 10
  ENSP ID: ENSP00000478814
MTVLEITLAVILTLLGLAILAILLTRWARRKQSEMYISRYSSEQSARLLDYEDGRGSRHAYSTQSERSKRDYTPSTNSLALSRSSIALPQGSMSSIKCLQTTEEPPSRTAGAMMQFTAPIPGATGPIKLSQKTIVQTLGPIVQYPGSNAGPPSAPRGPPMAPIIISQRTASQLAAPIRIPQVHTMDSSGKITLTPVVILTGYMDEELAKKSCSKIQILKCGGTARSQNSREENKEALKNDIIFTNSVESLKSAHIKEPEREGKGTDLEKDKIGMEVKVDSDAGIPKRQETQLKISEMSVPQGQGAQIKKSVSDVPRGQESQVKKSESGVPKGQEAQVTKSGLVVLKGQEAQVEKSEMGVPRRQESQVKKSQSGVSKGQEAQVKKRESVVLKGQEAQVEKSELKVPKGQEGQVEKTEADVPKEQEVQEKKSEAGVLKGPESQVKNTEVSVPETLESQVKKSESGVLKGQEAQEKKESFEDKGNNDKEKERDAEKDPNKKEKGDKNTKGDKGKDKVKGKRESEINGEKSKGSKRAKANTGRKYNKKVEE

SEQ ID NO: 16713 - protein, 547 aa, Homo sapiens
  Payload ID: 3348
  Gene Symbol: C6orf10
  Gene Name: chromosome 6 open reading frame 10
  ENSP ID: ENSP00000479242
MTVLEITLAVILTLLGLAILAILLTRWARRKQSEMYISRYSSEQSARLLDYEDGRGSRHAYSTQSERSKRDYTPSTNSLALSRSSIALPQGSMSSIKCLQTTEEPPSRTAGAMMQFTAPIPGATGPIKLSQKTIVQTLGPIVQYPGSNAGPPSAPRGPPMAPIIISQRTASQLAAPIRIPQVHTMDSSGKITLTPVVILTGYMDEELAKKSCSKIQILKCGGTARSQNSREENKEALKNDIIFTNSVESLKSAHIKEPEREGKGTDLEKDKIGMEVKVDSDAGIPKRQETQLKISEMSIPQGQGAQIKKSVSDVPRGQESQVKKSESGVPKGQEAQVTKSGLVVLKGQEAQVEKSEMGVPRRQESQVKKSQSGVSKGQEAQVKKRESVVLKGQEAQVEKSELKVPKGQEGQVEKTEADVPKEQEVQEKKSEAGVLKGPESQVKNTEVSVPETLESQVKKSESGVLKGQEAQEKKESFEDKGNNDKEKERDAEKDPNKKEKGDKNTKGDKGKDKVKGKRESEINGEKSKGSKRAKANTGRKYNKKVEE

SEQ ID NO: 16714 - protein, 547 aa, Homo sapiens
  Payload ID: 3348
  Gene Symbol: C6orf10
  Gene Name: chromosome 6 open reading frame 10
  ENSP ID: ENSP00000479509
MTVLEITLAVILTLLGLAILAILLTRWARRKQSEMHISRYSSEQSARLLDYEDGRGSRHAYSTQSERSKRDYTPSTNSLALSRSSIALPQGSMSSIKCLQTTEELPSRTAGAMMQFTAPIPGATGPIKLSQKTIVQTPGPIVQYPGPNAGPPSAPRGPPMAPIIISQRTASQLAAPIRIPQVHTMDSSGKITLTPVVILTGYMDEELAKKPCSKIQILKCGGTARSQNSREENKEALKNDIIFTNSVESLKSAHIKEPEREGKGTDLEKDKIGMEVKVDSDAGIPKRQETQLKISEMSIPQGQGAQIKKSVSDVPRGQESQVKKSESGVPKGQEAQVTKSGLVVLKGQEAQVEKSEMGVPRRQESQVKKSQSGVSKGQEAQVKKRESVVLKGQEAQVEKSELKVPKGQEGQVEKTEADVPKEQEVQEKKSEAGVLKGPESQVKNTEVSVPETLESQVKKSESGVLKGQEAQEKKESFEDKGNNDKEKERDAEKDPNKKEKGDKNTKGDKGKDKVKGKRESEINGEKSKGSKRAKANTGRKYNKKVEE

SEQ ID NO: 16715 - protein, 563 aa, Homo sapiens; identical to SEQ ID NO: 16686
  Payload ID: 3348
  Gene Symbol: C6orf10
  Gene Name: chromosome 6 open reading frame 10
  Uniprot ID: Q5SRN2
  ENSP ID: ENSP00000480403

SEQ ID NO: 16716 - protein, 565 aa, Homo sapiens
  Payload ID: 3348
  Gene Symbol: C6orf10
  Gene Name: chromosome 6 open reading frame 10
  ENSP ID: ENSP00000480415
MTVLEITLAVILTLLGLAILAILLTRWARRKQSEMHISRYSSEQSARLLDYEDGRGSRHAYHKVTLHVITERISKRDYTPSTNSLALSRSSIALPQGSMSSIKCLQTTEELPSRTAGAMMQFTAPIQPELQDLSSSLKKPLCKLQDLLARVQQQCIVAIHTVLVHLQHPGPPMAPIIISQRTASQLAAPIRIPQVHTMDSSGKITLTPVVILTGYMDEELAKKPCSKIQILKCGGTARSQNSREENKEALKNDIIFTNSVESLKSAHIKEPEREGKGTDLEKDKIGMEVKVDSDAGIPKRQETQLKISDEYTTRTGSPNKEKCVRCTKRTGQVKKSESGVPKGQEAQVTKSGLVVLKGQEAQVEKSEMGVPRRQESQVKKSQSGVSKGQEAQVKKRESVVLKGQEAQVEKSELKVPKGQEGQVEKTEADVPKEQEVQEKKSEAGVLKGPESQVKNTEVSVPETLESQVKKSESGVLKGQEAQEKKESFEDKGNNDKEKERDAEKDPNKKEKGDKNTKGDKGKDKVKGKRESEINGEKSKGSKRRQIQEGSTTKKWKSKDKFFKGP

SEQ ID NO: 16717 - protein, 561 aa, Homo sapiens
  Payload ID: 3348
  Gene Symbol: C6orf10
  Gene Name: chromosome 6 open reading frame 10
  ENSP ID: ENSP00000480915
MTVLEITLAVILTLLGLAILAILLTRWARRKQSEMYISRYSSEQSARLLDYEDGRGSRHAYSTQSDTSYDNRERSKRDYTPSTNSLALSRSSIALPQGSMSSIKCLQTTEEPPSRTAGAMMQFTAPIPGATGPIKLSQKTIVQTLGPIVQYPGSNAGPPSAPRGPPMAPIIISQRTASQLAAPIIISQRTARIPQVHTMDSSGKITLTPVVILTGYMDEELAKKSCSKIQILKCGGTARSQNSREENKEALKNDIIFTNSVESLKSAHIKEPEREGKGTDLEKDKIGMEVKVDSDAGIPKRQETQLKISEMSVPQGQGAQIKKSVSDVPRGQESQVKKSESGVPKGQEAQVTKSGLVVLKGQEAQVEKSEMGVPRRQESQVKKSQSGVSKGQEAQVKKRESVVLKGQEAQVEKSELKVPKGQEGQVEKTEADVPKEQEVQEKKSEAGVLKGPESQVKNTEVSVPETLESQVKKSESGVLKGQEAQEKKESFEDKGNNDKEKERDAEKDPNKKEKGDKNTKGDKGKDKVKGKRESEINGEKSKGSKRAKANTGRKYNKKVEE

SEQ ID NO: 16718 - protein, 565 aa, Homo sapiens; identical to SEQ ID NO: 16708
  Payload ID: 3348
  Gene Symbol: C6orf10
  Gene Name: chromosome 6 open reading frame 10
  ENSP ID: ENSP00000482001

SEQ ID NO: 16719 - protein, 566 aa, Homo sapiens
  Payload ID: 3348
  Gene Symbol: C6orf10
  Gene Name: chromosome 6 open reading frame 10
  ENSP ID: ENSP00000482193
MTVLEITLAVILTLLGLAILAILLTRWARRKQSEMYISRYSSEQSARLLDYEDGRGSRHAYHKVTLHMITERISKRDYTPSTNSLALSRSSIALPQGSMSSIKCLQTTEEPPSRTAGAMMQFTAPIQPELQDLSSSLKKPLCKLQDIGYNTWVTDQIASSHNHTVHLQHPGPPMAPIIISQRTASQLAAPIRIPQVHTMDSSGKITLTPVVILTGYMDEELAKKSCSKIQILKCGGTARSQNSREENKEALKNDIIFTNSVESLKSAHIKEPEREGKGTDLEKDKIGMEVKVDSDAGIPKRQETQLKISDEYTTRTGSPNKEKCVRCTKRTGQVKKSESGVPKGQEAQVTKSGLVVLKGQEAQVEKSEMGVPRRQESQVKKSQSGVSKGQEAQVKKRESVVLKGQEAQVEKSELKVPKGQEGQVEKTEADVPKEQEVQEKKSEAGVLKGPESQVKNTEVSVPETLESQVKKSESGVLKGQEAQEKKESFEDKGNNDKEKERDAEKDPNKKEKGDKNTKGDKGKDKVKGKRESEINGEKSKGSKRRQIQEGSTTKKWKSKDKFFKGP

SEQ ID NO: 16720 - protein, 563 aa, Homo sapiens; identical to SEQ ID NO: 16692
  Payload ID: 3348
  Gene Symbol: C6orf10
  Gene Name: chromosome 6 open reading frame 10
  ENSP ID: ENSP00000482853

SEQ ID NO: 16721 - protein, 561 aa, Homo sapiens
  Payload ID: 3348
  Gene Symbol: C6orf10
  Gene Name: chromosome 6 open reading frame 10
  ENSP ID: ENSP00000483277
MTVLEITLAVILTLLGLAILAILLTRWARRKQSEMYISRYSSEQSARLLDYEDGRGSRHAYSTQSDTSYDNRERSKRDYTPSTNSLALSRSSIALPQGSMSSIKCLQTTEEPPSRTAGAMMQFTAPIPGATGPIKLSQKTIVQTLGPIVQYPGSNAGPPSAPRGPPMAPIIISQRTASQLAAPIIISQRTARIPQVHTMDSSGKITLTPVVILTGYMDEELAKKSCSKIQILKCGGTARSQNSREENKEALKNDIIFTNSVESLKSAHIKEPEREGKGTDLEKDKIGMEVKVDSDAGIPKRQETQLKISEMSIPQGQGAQIKKSVSDVPRGQESQVKKSESGVPKGQEAQVTKSGLVVLKGQEAQVEKSEMGVPRRQESQVKKSQSGVSKGQEAQVKKRESVVLKGQEAQVEKSELKVPKGQEGQVEKTEADVPKEQEVQEKKSEAGVLKGPESQVKNTEVSVPETLESQVKKSESGVLKGQEAQEKKESFEDKGNNDKEKERDAEKDPNKKEKGDKNTKGDKGKDKVKGKRESEINGEKSKGSKRAKANTGRKYNKKVEE

SEQ ID NO: 16722 - protein, 566 aa, Homo sapiens
  Payload ID: 3348
  Gene Symbol: C6orf10
  Gene Name: chromosome 6 open reading frame 10
  ENSP ID: ENSP00000484784
MTVLEITLAVILTLLGLAILAILLTRWARRKQSEMYISRYSSEQSARLLDYEDGRGSRHAYHKVTLHMITERISKRDYTPSTNSLALSRSSIALPQGSMSSIKCLQTTEEPPSRTAGAMMQFTAPIQPELQDLSSSLKKPLCKLQDIGYNTWVTDQIASSHNHTVHLQHPGPPMAPIIISQRTASQLAAPIRIPQVHTMDSSGKITLTPVVILTGYMDEELAKKSCSKIQILKCGGTARSQNSREENKEALKNDIIFTNSVESLKSAHIKEPEREGKGTDLEKDKIGMEVKVDSDAGIPKRQETQLKISDECTTRTGSPNKEKCVRCTKRTGQVKKSESGVPKGQEAQVTKSGLVVLKGQEAQVEKSEMGVPRRQESQVKKSQSGVSKGQEAQVKKRESVVLKGQEAQVEKSELKVPKGQEGQVEKTEADVPKEQEVQEKKSEAGVLKGPESQVKNTEVSVPETLESQVKKSESGVLKGQEAQEKKESFEDKGNNDKEKERDAEKDPNKKEKGDKNTKGDKGKDKVKGKRESEINGEKSKGSKRRQIQEGSTTKKWKSKDKFFKGP

SEQ ID NO: 16723 - protein, 563 aa, Homo sapiens; identical to SEQ ID NO: 16686
  Payload ID: 3348
  Gene Symbol: C6orf10
  Gene Name: chromosome 6 open reading frame 10
  Uniprot ID: Q5SRN2
  ENSP ID: ENSP00000485011

SEQ ID NO: 16724 - protein, 224 aa, Homo sapiens
  Payload ID: 3349
  Gene Symbol: C6orf106
  Gene Name: chromosome 6 open reading frame 106
  ENSP ID: ENSP00000363133
MSFVEDVTIGEGESIPPDTQFVKTWRIQNSGAEAWPPGVCLKYVGGDQFGHVNMVMVRSLEPQEIADVSVQMCSPSRAGMYQGQWRMCTATGLYYGDVIWVILSVEVGGLLGVTQQLSSFETEFNTQPHRKVEGNFNPFASPQKNRQSDENNLKDPGGSEFDSISKNTWAPAPDTWAPAPDQTEQDQNRLSQNSVNLSPSSHANNLSVVTYSKGLHGPYPFGQS

SEQ ID NO: 16725 - protein, 298 aa, Homo sapiens
  Payload ID: 3349
  Gene Symbol: C6orf106
  Gene Name: chromosome 6 open reading frame 106
  Uniprot ID: Q9H6K1
  ENSP ID: ENSP00000363135
MEGMDVDLDPELMQKFSCLGTTDKDVLISEFQRLLGFQLNPAGCAFFLDMTNWNLQAAIGAYYDFESPNISVPSMSFVEDVTIGEGESIPPDTQFVKTWRIQNSGAEAWPPGVCLKYVGGDQFGHVNMVMVRSLEPQEIADVSVQMCSPSRAGMYQGQWRMCTATGLYYGDVIWVILSVEVGGLLGVTQQLSSFETEFNTQPHRKVEGNFNPFASPQKNRQSDENNLKDPGGSEFDSISKNTWAPAPDTWAPAPDQTEQDQNRLSQNSVNLSPSSHANNLSVVTYSKGLHGPYPFGQS

SEQ ID NO: 16726 - protein, 232 aa, Homo sapiens
  Payload ID: 3349
  Gene Symbol: C6orf106
  Gene Name: chromosome 6 open reading frame 106
  Uniprot ID: Q9H6K1
  ENSP ID: ENSP00000363138
MEGMDVDLDPELMQKFSCLGTTDKDVLISEFQRLLGFQLNPAGCAFFLDMTNWNLQAAIGAYYDFESPNISVPSMSFVEDVTIGEGESIPPDTQFVKTWRIQNSDVIWVILSVEVGGLLGVTQQLSSFETEFNTQPHRKVEGNFNPFASPQKNRQSDENNLKDPGGSEFDSISKNTWAPAPDTWAPAPDQTEQDQNRLSQNSVNLSPSSHANNLSVVTYSKGLHGPYPFGQS

SEQ ID NO: 16727 - protein, 469 aa, Homo sapiens
  Payload ID: 3350
  Gene Symbol: C6orf118
  Gene Name: chromosome 6 open reading frame 118
  Uniprot ID: Q5T5N4
  ENSP ID: ENSP00000230301
MAEEREPELYLKWKHCETPGVKTLCNLKHCETPGVKTLCNLKKLLNRLQKDHREDVYLYISGHLNPNKLYQPPETILQHWPNAHRPKGERASEVGEPPAGKVARMKEALAHFTIHTALVPSEAQDTPLFRYLNPQASLSHTSEEDFLPVEAVREGKEEKKGGPPGRGPPGWRRREELRLPDLKVLCYQEAGSRGTRDRHHYVSSYLAGATSADRYRMFLRFQKEVLAKQDLLKNDFTGSKAAAGHERKLQQELQKICTCSPQQFNRLHVFGKVFEDICNSSLIFGDLLKKVKDEYELYMATLLESQPAAQYEALLAQLKALGQRPVKTADMDLAREELRMLVTATKAALEQNDRLRSELEMEVALLQSAKERSESSEKHIIDENRLTLTEKVEKKRCEILSKWDEIQALEKEIKTTLVHTGISDITENRIKSIEHEAIQLETENMILKKKIKGPLEIYQGICKIRGNRR

SEQ ID NO: 16728 - protein, 191 aa, Homo sapiens
  Payload ID: 3351
  Gene Symbol: C6orf120
  Gene Name: chromosome 6 open reading frame 120
  Uniprot ID: Q7Z4R8
  ENSP ID: ENSP00000346931
MAAPRGRAAPWTTALLLLLASQVLSPGSCADEEEVPEEWVLLHVVQGQIGAGNYSYLRLNHEGKIVLRMRSLKGDADLYVSASSLHPSFDDYELQSATCGPDAVSIPAHFRRPVGIGVYGHPSHLESEFEMKVYYDGTVEQHPFGEAAYPADGADAGQKHAGAPEDASQEEESVLWTILISILKLVLEILF

SEQ ID NO: 16729 - protein, 1188 aa, Homo sapiens
  Payload ID: 3352
  Gene Symbol: C6orf132
  Gene Name: chromosome 6 open reading frame 132
  Uniprot ID: Q5T0Z8
  ENSP ID: ENSP00000341368
MKKKQTVQGTFSKLFGKKHTTTPSTSLYATNPPWIFTQEAPEEGTGGFDGIYYGDNRFNTVSESGTATLKARPRVRPLLTFLPLNAQENHGLAVPTPSVPDDFADKEVTGTSSLVNGNLRLYSSVGDLRPGQYGQDLLIPPPPPGPAPGPPQDISEPPGGSPLPSPPSTAPPPPPLLLEPPPPPSMAPPPPPVLEALSPPHTLSSPSIPTPPDFIPPAPPLAFLAPPPPPVPAPAPPAPASPHTVGTRLFPPGGVTKWKSDVALNGRQAEATRASPPRSPAEPKGSALGPNPEPHLTFPRSFKVPPPTPVRTSSIPVQEAQEAPRKEEGATKKAPSRLPLPPSFHIRPASQVYPDRAPEPDCPGELKATAPASPRLGQSQSQADERAGTPPPAPPLPPPAPPLPPPAPPLPPAAPPLPCAQKAAHPPAGFTKTPKSSSPALKPKPNPPSPENTASSAPVDWRDPSQMEKLRNELAAYLCGSRREDRFLSHRPGPTVAPQSKEGKKGPRLPEKETLLSLPAKDTPPGVPEKSLGGSSLTETEAAPSLTLPSVDYIPQDSPTPSVRQIRNELEARLSSAAEKEAKPSIGSLPPKPRLEGGRICENGADDDKLSKPVAKNLPPQSTTLLPTTSLQPKAMLGPAIPPKATPEPAIPPKATLWPATPPKATLGPATPLKATSGPTTPLKATSGPAIASTATTLPTTTSQLMAEKDSGPAGQPEKPASQEVSTPSQARGEGSPSEATRLPTQGARSSAAFPPKTSPGGGEVPCLYKPHCHQSSLSREVAVVMPTLARGGAAGPGEPVEVKEPPGLPAKPPASAQPTDELLRHPVTGEVVERGSPMALLLAARQRAQKGRSVGAALGRSSLPGSLRDHSHQAEASSDSIFHSQGTPNSFTVVPKLPKEAEKDSPLTTEIPNKWGPRLGRDAEGTELSRRHNWTKPEPQAPVAWERVAPSNLPQGHPLPKSFSSPPSPSNKREEEEEEFNFEVIPPPPEFSNDPEPPAPALQYLGRQSSPPRNNYSDLRQLPNAGPGAPPALGFSRFPAGARYAGAGGLERFSGGGRSLIKKRLYVGEPHRGPGLPHGGTGRSLSSPNCFGPQPGGPEMRRVNSAGRAPPGGLHAPRLSLEGAARGAAEAKHKAPGSADYGFAPAAGRSPYTTTRYGSPINTFTVRPGTRHPISYVCSGAHRKATS

SEQ ID NO: 16730 - protein, 99 aa, Homo sapiens
  Payload ID: 3352
  Gene Symbol: C6orf132
  Gene Name: chromosome 6 open reading frame 132
  Uniprot ID: Q5T0Z8
  ENSP ID: ENSP00000348941
MKKKQTVQGTFSKLFGKKHTTTPSTSLYATNPPWIFTQEAPEEGTGGFDGIYYGDNRFNTVSESGTATLKARPRVRPLLTFLPLTEFHSCCPGWSGTMA

SEQ ID NO: 16731 - protein, 496 aa, Homo sapiens
  Payload ID: 3353
  Gene Symbol: C6orf136
  Gene Name: chromosome 6 open reading frame 136
  Uniprot ID: Q5SQH8
  ENSP ID: ENSP00000293604
MYQPSRGAARRLGPCLRAYQARPQVSGGEEGGRRGGGERPSSKPVRGAERALGSAQAQRHPPPLPTCALQRVDRLGVAGAGGRRCRACRARTSVLPGLRAVRRGQGQAAGRVCVAPDSPRLPVPRGDLKGRGREIRSPAAAPSRSSPAQTRPAGRPQQPARLALGERSWQEGRPVCTRFGPLRPGWQDGHAPSRDGASRTPSGTEDQLYPGTLPFPPLWPHSTTTTSPSSPLFWSPLPPRLPTQRLPQVPPLPLPQIQALSSAWVVLPPGKGEEGPGPELHSGCLDGLRSLFEGPPCPYPGAWIPFQVPGTAHPSPATPSGDPSMEEHLSVMYERLRQELPKLFLQSHDYSLYSLDVEFINEILNIRTKGRTWYILSLTLCRFLAWNYFAHLRLEVLQLTRHPENWTLQARWRLVGLPVHLLFLRFYKRDKDEHYRTYDAYSTFYLNSSGLICRHRLDKLMPSHSPPTPVKKLLVGALVALGLSEPEPDLNLCSKP

SEQ ID NO: 16732 - protein, 181 aa, Homo sapiens
  Payload ID: 3353
  Gene Symbol: C6orf136
  Gene Name: chromosome 6 open reading frame 136
  Uniprot ID: Q5SQH8
  ENSP ID: ENSP00000365654
MYQPSRGAARRLGPCLRAYQARPQLPKLFLQSHDYSLYSLDVEFINEILNIRTKGRTWYILSLTLCRFLAWNYFAHLRLEVLQLTRHPENWTLQARWRLVGLPVHLLFLRFYKRDKDEHYRTYDAYSTFYLNSSGLICRHRLDKLMPSHSPPTPVKKLLVGALVALGLSEPEPDLNLCSKP

SEQ ID NO: 16733 - protein, 315 aa, Homo sapiens
  Payload ID: 3353
  Gene Symbol: C6orf136
  Gene Name: chromosome 6 open reading frame 136
  Uniprot ID: Q5SQH8
  ENSP ID: ENSP00000365656
MYQPSRGAARRLGPCLRAYQARPQDQLYPGTLPFPPLWPHSTTTTSPSSPLFWSPLPPRLPTQRLPQVPPLPLPQIQALSSAWVVLPPGKGEEGPGPELHSGCLDGLRSLFEGPPCPYPGAWIPFQVPGTAHPSPATPSGDPSMEEHLSVMYERLRQELPKLFLQSHDYSLYSLDVEFINEILNIRTKGRTWYILSLTLCRFLAWNYFAHLRLEVLQLTRHPENWTLQARWRLVGLPVHLLFLRFYKRDKDEHYRTYDAYSTFYLNSSGLICRHRLDKLMPSHSPPTPVKKLLVGALVALGLSEPEPDLNLCSKP

SEQ ID NO: 16734 - protein, 181 aa, Homo sapiens; identical to SEQ ID NO: 16732
  Payload ID: 3353
  Gene Symbol: C6orf136
  Gene Name: chromosome 6 open reading frame 136
  Uniprot ID: Q5SQH8
  ENSP ID: ENSP00000373074

SEQ ID NO: 16735 - protein, 315 aa, Homo sapiens; identical to SEQ ID NO: 16733
  Payload ID: 3353
  Gene Symbol: C6orf136
  Gene Name: chromosome 6 open reading frame 136
  Uniprot ID: Q5SQH8
  ENSP ID: ENSP00000373075

SEQ ID NO: 16736 - protein, 181 aa, Homo sapiens; identical to SEQ ID NO: 16732
  Payload ID: 3353
  Gene Symbol: C6orf136
  Gene Name: chromosome 6 open reading frame 136
  Uniprot ID: Q5SQH8
  ENSP ID: ENSP00000387592

SEQ ID NO: 16737 - protein, 433 aa, Homo sapiens
  Payload ID: 3353
  Gene Symbol: C6orf136
  Gene Name: chromosome 6 open reading frame 136
  ENSP ID: ENSP00000389259
LPTCALQRVDRLGVAGAGGRRCRACRARTSVLPGLRAVRRGQGQAAGRVCVAPDSPRLPVPRGDLKGRGREIRSPAAAPSRSSPAQTRPAGRPQQPARLALGERSWQEGRPVCTRFGPLRPGWQDGHAPSRDGASRTPSGTEDQLYPGTLPFPPLWPHSTTTTSPSSPLFWSPLPPRLPTQRLPQVPPLPLPQIQALSSAWVVLPPGKGEEGPGPELHSGCLDGLRSLFEGPPCPYPGAWIPFQVPGTAHPSPATPSGDPSMEEHLSVMYERLRQELPKLFLQSHDYSLYSLDVEFINEILNIRTKGRTWYILSLTLCRFLAWNYFAHLRLEVLQLTRHPENWTLQARWRLVGLPVHLLFLRFYKRDKDEHYRTYDAYSTFYLNSSGLICRHRLDKLMPSHSPPTPVKKLLVGALVALGLSEPEPDLNLCSKP

SEQ ID NO: 16738 - protein, 315 aa, Homo sapiens; identical to SEQ ID NO: 16733
  Payload ID: 3353
  Gene Symbol: C6orf136
  Gene Name: chromosome 6 open reading frame 136
  Uniprot ID: Q5SQH8
  ENSP ID: ENSP00000390275

SEQ ID NO: 16739 - protein, 181 aa, Homo sapiens; identical to SEQ ID NO: 16732
  Payload ID: 3353
  Gene Symbol: C6orf136
  Gene Name: chromosome 6 open reading frame 136
  Uniprot ID: Q5SQH8
  ENSP ID: ENSP00000391657

SEQ ID NO: 16740 - protein, 433 aa, Homo sapiens; identical to SEQ ID NO: 16737
  Payload ID: 3353
  Gene Symbol: C6orf136
  Gene Name: chromosome 6 open reading frame 136
  ENSP ID: ENSP00000393004

SEQ ID NO: 16741 - protein, 181 aa, Homo sapiens; identical to SEQ ID NO: 16732
  Payload ID: 3353
  Gene Symbol: C6orf136
  Gene Name: chromosome 6 open reading frame 136
  Uniprot ID: Q5SQH8
  ENSP ID: ENSP00000395979

SEQ ID NO: 16742 - protein, 315 aa, Homo sapiens; identical to SEQ ID NO: 16733
  Payload ID: 3353
  Gene Symbol: C6orf136
  Gene Name: chromosome 6 open reading frame 136
  Uniprot ID: Q5SQH8
  ENSP ID: ENSP00000396916

SEQ ID NO: 16743 - protein, 315 aa, Homo sapiens; identical to SEQ ID NO: 16733
  Payload ID: 3353
  Gene Symbol: C6orf136
  Gene Name: chromosome 6 open reading frame 136
  Uniprot ID: Q5SQH8
  ENSP ID: ENSP00000398769

SEQ ID NO: 16744 - protein, 181 aa, Homo sapiens; identical to SEQ ID NO: 16732
  Payload ID: 3353
  Gene Symbol: C6orf136
  Gene Name: chromosome 6 open reading frame 136
  Uniprot ID: Q5SQH8
  ENSP ID: ENSP00000402805

SEQ ID NO: 16745 - protein, 433 aa, Homo sapiens
  Payload ID: 3353
  Gene Symbol: C6orf136
  Gene Name: chromosome 6 open reading frame 136
  ENSP ID: ENSP00000403409
LPTCALQRVDRLGVAEAGGRRCRACRARTSVLPGLRAVRRGQGQAAGRVCVAPDSPRLPVPRGDLKGRGREIRSPAAAPSRSSPAQTRPAGRPQQPARLALGERSWQEGRPVCTRFGPLRPGWQDGHAPSRDGASRTPSGTEDQLYPGTLPFPPLWPHSTTTTSPSSPLFWSPLPPRLPTQRLPQVPPLPLPQIQALSSAWVVLPPGKGEEGPGPELHSGCLDGLRSLFEGPPCPYPGAWIPFQVPGTAHPSPATPSGDPSMEEHLSVMYERLRQELPKLFLQSHDYSLYSLDVEFINEILNIRTKGRTWYILSLTLCRFLAWNYFAHLRLEVLQLTRHPENWTLQARWRLVGLPVHLLFLRFYKRDKDEHYRTYDAYSTFYLNSSGLICRHRLDKLMPSHSPPTPVKKLLVGALVALGLSEPEPDLNLCSKP

SEQ ID NO: 16746 - protein, 433 aa, Homo sapiens; identical to SEQ ID NO: 16737
  Payload ID: 3353
  Gene Symbol: C6orf136
  Gene Name: chromosome 6 open reading frame 136
  ENSP ID: ENSP00000404560

SEQ ID NO: 16747 - protein, 315 aa, Homo sapiens; identical to SEQ ID NO: 16733
  Payload ID: 3353
  Gene Symbol: C6orf136
  Gene Name: chromosome 6 open reading frame 136
  Uniprot ID: Q5SQH8
  ENSP ID: ENSP00000404588

SEQ ID NO: 16748 - protein, 181 aa, Homo sapiens; identical to SEQ ID NO: 16732
  Payload ID: 3353
  Gene Symbol: C6orf136
  Gene Name: chromosome 6 open reading frame 136
  Uniprot ID: Q5SQH8
  ENSP ID: ENSP00000405594

SEQ ID NO: 16749 - protein, 433 aa, Homo sapiens; identical to SEQ ID NO: 16737
  Payload ID: 3353
  Gene Symbol: C6orf136
  Gene Name: chromosome 6 open reading frame 136
  ENSP ID: ENSP00000411113

SEQ ID NO: 16750 - protein, 433 aa, Homo sapiens; identical to SEQ ID NO: 16737
  Payload ID: 3353
  Gene Symbol: C6orf136
  Gene Name: chromosome 6 open reading frame 136
  ENSP ID: ENSP00000415028

SEQ ID NO: 16751 - protein, 433 aa, Homo sapiens; identical to SEQ ID NO: 16737
  Payload ID: 3353
  Gene Symbol: C6orf136
  Gene Name: chromosome 6 open reading frame 136
  ENSP ID: ENSP00000415810

SEQ ID NO: 16752 - protein, 315 aa, Homo sapiens; identical to SEQ ID NO: 16733
  Payload ID: 3353
  Gene Symbol: C6orf136
  Gene Name: chromosome 6 open reading frame 136
  Uniprot ID: Q5SQH8
  ENSP ID: ENSP00000415915

SEQ ID NO: 16753 - protein, 104 aa, Homo sapiens
  Payload ID: 3353
  Gene Symbol: C6orf136
  Gene Name: chromosome 6 open reading frame 136
  ENSP ID: ENSP00000418154
INEILNIRTKGRTWYILSLTLCRFLAWNYFAHLRLEVLQLTRHPENWTLQARWRLVGLPVHLLFLRFYKRDKDEHYRTYDAYSTFYLNSSGLICRHRLDKVSPR

SEQ ID NO: 16754 - protein, 58 aa, Homo sapiens
  Payload ID: 3353
  Gene Symbol: C6orf136
  Gene Name: chromosome 6 open reading frame 136
  ENSP ID: ENSP00000418223
MYQPSRGAARRLGPCLRAYQARPQGPDMVHSFTDPLPFPGLELFCTPSFGGFTADPPP

SEQ ID NO: 16755 - protein, 90 aa, Homo sapiens
  Payload ID: 3353
  Gene Symbol: C6orf136
  Gene Name: chromosome 6 open reading frame 136
  ENSP ID: ENSP00000418599
MYQPSRGAARRLGPCLRAYQARPQERGRRDQDLSCIAAAWMGLEAFLRDLPAPILGLGYLSKSLELPTLPLPPRQEILVWRNICLSCMRD

SEQ ID NO: 16756 - protein, 48 aa, Homo sapiens
  Payload ID: 3353
  Gene Symbol: C6orf136
  Gene Name: chromosome 6 open reading frame 136
  ENSP ID: ENSP00000418616
DPSMEEHLSVMYERLRQELPKLFLQSHDYSLYSLDVEFINEILNIRTK

SEQ ID NO: 16757 - protein, 28 aa, Homo sapiens
  Payload ID: 3353
  Gene Symbol: C6orf136
  Gene Name: chromosome 6 open reading frame 136
  ENSP ID: ENSP00000419460
QARWRLVGLPVHLLFLRFYKRDKDEHYR

SEQ ID NO: 16758 - protein, 95 aa, Homo sapiens
  Payload ID: 3353
  Gene Symbol: C6orf136
  Gene Name: chromosome 6 open reading frame 136
  ENSP ID: ENSP00000419610
  MOD_RES (1)..(1): Any amino acid
XGRTWYILSLTLCRFLAWNYFAHLRLEVLQLTRHPENWTLQARWRLVGLPVHLLFLRFYKRDKDEHYRTYDAYSTFYLNSSGLICRHRLDKVSPS

SEQ ID NO: 16759 - protein, 188 aa, Homo sapiens
  Payload ID: 3353
  Gene Symbol: C6orf136
  Gene Name: chromosome 6 open reading frame 136
  ENSP ID: ENSP00000419968
MYQPSRGAARRLGPCLRAYQARPQDQLYPGTLPFPPLWPHSTTTTSPSSPLFWSPLPPRLPTQRLPQVPPLPLPQIQALSSAWVVLPPGKGEEGPGPELHSGCLDGLRSLFEGPPCPYPGAWIPFQVPGTAHPSPATPSGDPSMEEHLSVMYERLRQELPKLFLQSHDYSLYSLDVEFINEILNIRTK

SEQ ID NO: 16760 - protein, 244 aa, Homo sapiens
  Payload ID: 3354
  Gene Symbol: C6orf141
  Gene Name: chromosome 6 open reading frame 141
  Uniprot ID: Q5SZD1
  ENSP ID: ENSP00000431184
MNDPFARMETRGPQGAANPMDSSRSLGDLGPFPREVGRGAPLAPGARNPATAGASRSQGGGHEDRTADRALGPRAGEELDRESWVREKVLFLLHPERWLGTRGDPAREEVAGAEDLPHAGGEDHGEEPNYPSVFQRQKRISGRRVAPPRDAADPPKYVLVRVEDYQVTQEVLQTSWAKGRMTTRTEEHFVTALTFRSSREGQPGERWGPAESRALQARTGASRVHAAGRRVSPSPGTWLEEIKL

SEQ ID NO: 16761 - protein, 72 aa, Homo sapiens
  Payload ID: 3354
  Gene Symbol: C6orf141
  Gene Name: chromosome 6 open reading frame 141
  ENSP ID: ENSP00000434131
  MOD_RES (1)..(1): Any amino acid
XTSWAKGRMTTRTEEHFVTALTFRSSREGQPGERWGPAESRALQARTGASRVHAAGRRVSPSPGTWLEEIKL

SEQ ID NO: 16762 - protein, 244 aa, Homo sapiens; identical to SEQ ID NO: 16760
  Payload ID: 3354
  Gene Symbol: C6orf141
  Gene Name: chromosome 6 open reading frame 141
  Uniprot ID: Q5SZD1
  ENSP ID: ENSP00000434602

SEQ ID NO: 16763 - protein, 244 aa, Homo sapiens; identical to SEQ ID NO: 16760
  Payload ID: 3354
  Gene Symbol: C6orf141
  Gene Name: chromosome 6 open reading frame 141
  Uniprot ID: Q5SZD1
  ENSP ID: ENSP00000436754

SEQ ID NO: 16764 - protein, 325 aa, Homo sapiens
  Payload ID: 3355
  Gene Symbol: C6orf15
  Gene Name: chromosome 6 open reading frame 15
  Uniprot ID: Q6UXA7
  ENSP ID: ENSP00000259870
MQGRVAGSCAPLGLLLVCLHLPGLFARSIGVVEEKVSQNLGTNLPQLGQPSSTGPSNSEHPQPALDPRSNDLARVPLKLSVPASDGFPPAGGSAVQRWPPSWGLPAMDSWPPEDPWQMMAAAAEDRLGEALPEELSYLSSAAALAPGSGPLPGESSPDATGLSPKASLLHQDSESRRLPRSNSLGAGGKILSQRPPWSLIHRVLPDHPWGTLNPSVSWGGGGPGTGWGTRPMPHPEGIWGINNQPPGTSWGNINRYPGGSWGNINRYPGGSWGNINRYPGGSWGNIHLYPGINNPFPPGVLRPPGSSWNIPAGFPNPPSPRLQWG

SEQ ID NO: 16765 - protein, 325 aa, Homo sapiens
  Payload ID: 3355
  Gene Symbol: C6orf15
  Gene Name: chromosome 6 open reading frame 15
  Uniprot ID: Q6UXA7
  ENSP ID: ENSP00000373024
MQGRVAGSCAPLGLLLVCLHLPGLFARSIGVVEEKVSQNFGTDLPQLGQPSSTGPSNSEHPQPALDPRSNDLARVPLKLSVPPSDGFPPAGGSAVQRWPPSWGLPAMDSWPPEDPWQMMAAAAEDRLGEALPEELSYLSSAAALAPGSGPLPGESSPDATGLSPEASLLHQDSESRRLPRSNSLGAGGKILSQRPPWSLIHRVLPDHPWGTLNPSVSWGGGGPGTGWGTRPMPHPEGIWGINNQPPGTSWGNINRYPGGSWGNINRYPGGSWGNINRYPGGSWGNIHLYPGINNPFPPGVLRPPGSSWNIPAGFPNPPSPRLQWG

SEQ ID NO: 16766 - protein, 325 aa, Homo sapiens; identical to SEQ ID NO: 16764
  Payload ID: 3355
  Gene Symbol: C6orf15
  Gene Name: chromosome 6 open reading frame 15
  Uniprot ID: Q6UXA7
  ENSP ID: ENSP00000391756

SEQ ID NO: 16767 - protein, 325 aa, Homo sapiens; identical to SEQ ID NO: 16764
  Payload ID: 3355
  Gene Symbol: C6orf15
  Gene Name: chromosome 6 open reading frame 15
  Uniprot ID: Q6UXA7
  ENSP ID: ENSP00000394931

SEQ ID NO: 16768 - protein, 325 aa, Homo sapiens; identical to SEQ ID NO: 16764
  Payload ID: 3355
  Gene Symbol: C6orf15
  Gene Name: chromosome 6 open reading frame 15
  Uniprot ID: Q6UXA7
  ENSP ID: ENSP00000398496

SEQ ID NO: 16769 - protein, 325 aa, Homo sapiens [sequence omitted]

SEQ ID NO: 16770 - protein, 329 aa, Homo sapiens
  Payload ID: 3356
  Gene Symbol: C6orf163
  Gene Name: chromosome 6 open reading frame 163
  Uniprot ID: Q5TEZ5
  ENSP ID: ENSP00000373575
MIRNSDYKNFVCCAVCNKIIPPAPFGKTFKRIHEYKPLKTRFYTHKDILDIGANILKKEEQFQEDILREHIAKAEAEVWAQANERQKQAVEKALEEANDRHKIEIQILKEEHQKDLQEVTAKTKTEMYQNMDDEMKREHLAAEQRMVHRIQRIMMECHREKVEAVEKARAEERHIAQEAIQAQKSKAVEEIVNTGVTVIKDEKTSVARLMREKEHEMSILYGIAQRQRQEEVQEVLQEAEKTHQATLGNMMDKLANTQGELLSIAKQLGIMTNWKDFLEEELQETRMAFQKYINYTFPKLSPGHADFILPERKKTPSNLVIKENKTTLD

SEQ ID NO: 16771 - protein, 199 aa, Homo sapiens
  Payload ID: 3356
  Gene Symbol: C6orf163
  Gene Name: chromosome 6 open reading frame 163
  ENSP ID: ENSP00000477323
MDDEMKREHLAAEQRMVHRIQRIMMECHREKVEAVEKARAEERHIAQEAIQAQKSKAVEEIVNTGVTVIKDEKTSVARLMREKEHEMSILYGIAQRQRQEEVQEVLQEAEKTHQATLGNMMDKLANTQGELLSIAKQLGIMTNWKDFLEEELQETRMAFQKYINYTFPKLSPGHADFILPERKKTPSNLVIKENKTTLD

SEQ ID NO: 16772 - protein, 624 aa, Homo sapiens
  Payload ID: 3357
  Gene Symbol: C6orf183
  Gene Name: chromosome 6 open reading frame 183
  ENSP ID: ENSP00000475092
MDEIYKITSTERVQLLEKKLAVQLTELKSEIEEQGALQGTANRVYSSIQMPKDIYYFRRERELALKKTLQVAESKPLVVQADAVQRELESCLRREYTPENLPLLLLQYYTERIAQLAQSKYLHMLRWKRFCQHSKIMEQLYPLYKKQVGYIMQEYNDTLQRAERLSVARENFLMGKNNPPNLVTQEDLTIYTKWLVCHLHSLGTVHQYLQALQYLPISKVLSVAFNRVAEAGQKNENVCVNDIDPDIQGSASPDPVDTSISGPMRTEAAFVLPQHATETGELKPQLKLLLSHFSIPYDVEELWDSAKEMELFSLVSQKFQSVFMEQQRLQMFPDCEAGIAKADNLGLAGPRMTLKKKANWISFIKIKPKCDPWQKKLLTKLKERRRTDALLQLQAKFLKISNPEVMQVLQDHAAKTVMLAPHQPSFVASQGLHQGNYDQVWENIDNNINLCQNKNMKDDDLSMKQNENDLSQITLSQHADGPLKQIQETGYNYAMTLQLLGLEDGTDPSDRNPVLMRGAYLSFLYLCHLRIRELQHICLGILNYFRSVERTLTINTSGLTLVSGKLVPTMEDSSWVNMAKGGLGTLQGLGAHHYVRETPAEHKVHSVQFMEFSEVENQDDYYST

SEQ ID NO: 16773 - protein, 115 aa, Homo sapiens
  Payload ID: 3358
  Gene Symbol: C6orf201
  Gene Name: chromosome 6 open reading frame 201
  ENSP ID: ENSP00000417981
MLSNLHELLPNHLMETLYSRKSEEDKKKCENPELSGLERILARHQLPKEINLTPKPNRMPPWKRKIINNVTDGWKKCHLLKRNTKEPPMSTIVVSNTIPSILLPCYMAEKEHATH

SEQ ID NO: 16774 - protein, 131 aa, Homo sapiens
  Payload ID: 3358
  Gene Symbol: C6orf201
  Gene Name: chromosome 6 open reading frame 201
  Uniprot ID: Q7Z4U5
  ENSP ID: ENSP00000419568
MASGPLGPGARPTRLHPPFPPPAHIKPGAPPGENPELSGLERILARHQLPKEINLTPKPNRMPPWKRKIINNVTDGWKKCHLLKRNTKEPPMSTIVVRKLIQKNVPRRHSLRNTSRKLRNLPTTAKGTQTE

SEQ ID NO: 16775 - protein, 140 aa, Homo sapiens
  Payload ID: 3358
  Gene Symbol: C6orf201
  Gene Name: chromosome 6 open reading frame 201
  Uniprot ID: Q7Z4U5
  ENSP ID: ENSP00000420610
MLSNLHELLPNHLMETLYSRKSEEDKKKCENPELSGLERILARHQLPKEINLTPKPNRMPPWKRKIINNVTDGWKKCHLLKRNTKEPPMSTIVVRKLIQKNVPRRHSLRNTSRKLRNLPTTAKGTQTGKSQCLLGISEPT

SEQ ID NO: 16776 - protein, 138 aa, Homo sapiens
  Payload ID: 3358
  Gene Symbol: C6orf201
  Gene Name: chromosome 6 open reading frame 201
  ENSP ID: ENSP00000420763
MLSNLHELLPNHLMETLYSRKSEEDKKKCENPELSGLERILARHQLPKEINLTPKPNRMPPWKRKIINNVTDGWKKCHLLKRNTKEPPMSTIVVRKLIQKNVPRRHSLRNTSRKLRNLPTTAKGTQTVKSHETSRMNR

SEQ ID NO: 16777 - protein, 240 aa, Homo sapiens
  Payload ID: 3359
  Gene Symbol: C6orf203
  Gene Name: chromosome 6 open reading frame 203
  Uniprot ID: Q9P0P8
  ENSP ID: ENSP00000310951
MAMASVKLLAGVLRKPDAWIGLWGVLRGTPSSYKLCTSWNRYLYFSSTKLRAPNYKTLFYNIFSLRLPGLLLSPECIFPFSVRLKSNIRSTKSTKKSLQKVDEEDSDEESHHDEMSEQEEELEDDPTVVKNYKDLEKAVQSFRYDVVLKTGLDIGRNKVEDAFYKGELRLNEEKLWKKSRTVKVGDTLDLLIGEDKEAGTETVMRILLKKVFEEKTESEKYRVVLRRWKSLKLPKKRMSK

SEQ ID NO: 16778 - protein, 240 aa, Homo sapiens; identical to SEQ ID NO: 16777
  Payload ID: 3359
  Gene Symbol: C6orf203
  Gene Name: chromosome 6 open reading frame 203
  Uniprot ID: Q9P0P8
  ENSP ID: ENSP00000384867

SEQ ID NO: 16779 - protein, 245 aa, Homo sapiens
  Payload ID: 3359
  Gene Symbol: C6orf203
  Gene Name: chromosome 6 open reading frame 203
  ENSP ID: ENSP00000485698
MIISAMAMASVKLLAGVLRKPDAWIGLWGVLRGTPSSYKLCTSWNRYLYFSSTKLRAPNYKTLFYNIFSLRLPGLLLSPECIFPFSVRLKSNIRSTKSTKKSLQKVDEEDSDEESHHDEMSEQEEELEDDPTVVKNYKDLEKAVQSFRYDVVLKTGLDIGRNKVEDAFYKGELRLNEEKLWKKSRTVKVGDTLDLLIGEDKEAGTETVMRILLKKVFEEKTESEKYRVVLRRWKSLKLPKKRMSK

SEQ ID NO: 16780 - protein, 652 aa, Homo sapiens
  Payload ID: 3360
  Gene Symbol: C6orf222
  Gene Name: chromosome 6 open reading frame 222
  Uniprot ID: P0C671
  ENSP ID: ENSP00000418983
MENPRCPRRPLAEKKARSLDRPQAPGKGSESWDCHWLSLPTAPSRKALHWTTSDWARHSDSPAPSAEAHCTTAAAPTPEETGDFLPSEQRPSQDTKKGWLKTMLNFFVRTGPEEPREKASRRPRGKEGISQHPEPLEAAGEPALRKKAHHDKKPSRKKQGHKKHAAEVTKAAQDQEARGREEGLSKAAAALRSGEADLGPARRGGEDSDHQSFLIKVDGTGALDVSPHATGHQQEEELKKPDQDAIIQMIVELLKRVGDQWEEEQSLASQLGVALPNPAPAVRKKSQEKKTSLKRTSKTNPKKHGSEEAKRGAADVSSPEAWPPKKSSFLPLCVSGHRPSISSSYGLEEPKVQEAPSTEAGAPGPSVLPTPSESQEPGEELPLDRASEYKEFIQKIISMLQDAEEQQGEEQPQVQQEEVGVENPAPHCRRKSQEKRSSFRRAFYHKKHTSKEPRRAGAAGAASPEARRPKRPSFLPLCVGGHRPSTSSSLDPEDLECREPLPAEGEPVVISEAPSQARGHTPEGAPQLSGACESKEIIIQKLVALLQEVDGQLGQQIRRHPSFKRFFYEFSDSSLSKLVATLRSQVAHSSKLDRNRARRLYQFDVSLANKFAGSNSHAMCILMGLRDHYNCTQFPYREDQPNITSPKVESPD

SEQ ID NO: 16781 - protein, 105 aa, Homo sapiens
  Payload ID: 3361
  Gene Symbol: C6orf223
  Gene Name: chromosome 6 open reading frame 223
  Uniprot ID: Q8N319
  ENSP ID: ENSP00000423262
MMPLAEAGALAQGGGPSATEWACILRRLLRKEGVDGGLFSPEDPQAQAAHLTDGQSIQKKWQDFSCPQSRKTECFWQKEQHKQRSGNPRCLQFEGGERTPPPPQT

SEQ ID NO: 16782 - protein, 242 aa, Homo sapiens
  Payload ID: 3361
  Gene Symbol: C6orf223
  Gene Name: chromosome 6 open reading frame 223
  Uniprot ID: Q8N319
  ENSP ID: ENSP00000426159
MMPLAEAGALAQGGGPSATEWACILRRKTPRHKQPTLLMVRASRRSGKTSAVLKAGRQSVSGRKNSTSKDLVTLGASSLREERGHPLHPRHRKAVHLRTRGRTRGWVQTLARMSRRTRGPVERAAAAAAAAAGGDAGHAPFPPPPAADGARAPRSPGQVTPRGLRLRLPRRESLLRGLCRPLRPLLGFRESDSAKPASLRLLQHTPSARRNYRIAGARLMRSNYPPPLSSAALRGAGPTRRN

SEQ ID NO: 16783 - protein, 222 aa, Homo sapiens
  Payload ID: 3361
  Gene Symbol: C6orf223
  Gene Name: chromosome 6 open reading frame 223
  ENSP ID: ENSP00000477091
MEGSFHQKTPRHKQPTLLMVRASRRSGKTSAVLKAGRQSVSGRKNSTSKDLVTLGASSLREERGHPLHPRHRKAVHLRTRGRTRGWVQTLARMSRRTRGPVERAAAAAAAAAGGDAGHAPFPPPPAADGARAPRSPGQVTPRGLRLRLPRRESLLRGLCRPLRPLLGFRESDSAKPASLRLLQHTPSARRNYRIAGARLMRSNYPPPLSSAALRGAGPTRRN

SEQ ID NO: 16784 - protein, 101 aa, Homo sapiens
  Payload ID: 3362
  Gene Symbol: C6orf226
  Gene Name: chromosome 6 open reading frame 226
  Uniprot ID: Q5I0X4
  ENSP ID: ENSP00000386146
MERPRSPQCSAPASASASVTLAQLLQLVQQGQELPGLEKRHIAAIHGEPTASRLPRRPKPWEAAALAESLPPPTLRIGTAPAEPGLVEAATAPSSWHTVGP

SEQ ID NO: 16785 - protein, 230 aa, Homo sapiens
  Payload ID: 3363
  Gene Symbol: C6orf229
  Gene Name: chromosome 6 open reading frame 229
  Uniprot ID: H3BNL8
  ENSP ID: ENSP00000454913
MANSRFSCTQIWVKMYGYFAGLCRRLQKFWRVTVKGFFVKKKEKKIPSAETYFHEEKIVVLGQVLMNESLPIEKRAQAAQKIGLLAFTGGPPAGNFAAEYMEEVAHLLQDEELAPKIKILLLQSVACWCYLNPVSQKRAKSLQFIPILISFFEGRFESTIKSETNSYLLLKFWTCYVLSVMTCNNLSCVKELKDHSALKYHLQMLAAENWSGWTENFAEVLYFLIGFHRN

SEQ ID NO: 16786 - protein, 193 aa, Homo sapiens
  Payload ID: 3364
  Gene Symbol: C6orf25
  Gene Name: chromosome 6 open reading frame 25
  Uniprot ID: O95866
  ENSP ID: ENSP00000364962
MAVFLQLLPLLLSRAQGNPGASLDGRPGDRVNLSCGGVSHPIRWVWAPSFPACKGLSKGRRPILWASSSGTPTVPPLQPFVGRLRSLDSGIRRLELLLSAGDSGTFFCKGRHEDESRTVLHVLGDRTYCKAPGPTHALSPPHSSTCENRAPEASKGGRAQDSRGPGPGTEPALCGSGPSSPQQAPPAVHSGPC

SEQ ID NO: 16787 - protein, 217 aa, Homo sapiens
  Payload ID: 3364
  Gene Symbol: C6orf25
  Gene Name: chromosome 6 open reading frame 25
  Uniprot ID: O95866
  ENSP ID: ENSP00000364963
MAVFLQLLPLLLSRAQGNPGASLDGRPGDRVNLSCGGVSHPIRWVWAPSFPACKGLSKGRRPILWASSSGTPTVPPLQPFVGRLRSLDSGIRRLELLLSAGDSGTFFCKGRHEDESRTVLHVLGDRTYCKAPGPTHGACPRNRFDHSLDLLCPPHIAPLVKTEPQRPVKEEEPKIPGDLDQEPSLLYADLDHLALSRPRRLSTADPADASTIYAVVV

SEQ ID NO: 16788 - protein, 241 aa, Homo sapiens
  Payload ID: 3364
  Gene Symbol: C6orf25
  Gene Name: chromosome 6 open reading frame 25
  Uniprot ID: O95866
  ENSP ID: ENSP00000364964
MAVFLQLLPLLLSRAQGNPGASLDGRPGDRVNLSCGGVSHPIRWVWAPSFPACKGLSKGRRPILWASSSGTPTVPPLQPFVGRLRSLDSGIRRLELLLSAGDSGTFFCKGRHEDESRTVLHVLGDRTYCKAPGPTHGSVYPQLLIPLLGAGLVLGLGALGLVWWLHRRLPPQPIRPLPRFAPLVKTEPQRPVKEEEPKIPGDLDQEPSLLYADLDHLALSRPRRLSTADPADASTIYAVVV

SEQ ID NO: 16789 - protein, 237 aa, Homo sapiens
  Payload ID: 3364
  Gene Symbol: C6orf25
  Gene Name: chromosome 6 open reading frame 25
  Uniprot ID: O95866
  ENSP ID: ENSP00000364967
MAVFLQLLPLLLSRAQGNPGASLDGRPGDRVNLSCGGVSHPIRWVWAPSFPACKGLSKGRRPILWASSSGTPTVPPLQPFVGRLRSLDSGIRRLELLLSAGDSGTFFCKGRHEDESRTVLHVLGDRTYCKAPGPTHGSVYPQLLIPLLGAGLVLGLGALGLVWWLHRRLPPQPIRPLPRFALSPPHSSTCENRAPEASKGGRAQDSRGPGPGTEPALCGSGPSSPQQAPPAVHSGPC

SEQ ID NO: 16790 - protein, 222 aa, Homo sapiens
  Payload ID: 3364
  Gene Symbol: C6orf25
  Gene Name: chromosome 6 open reading frame 25
  Uniprot ID: O95866
  ENSP ID: ENSP00000364968
MAVFLQLLPLLLSRAQGNPGASLDGRPGDRVNLSCGGVSHPIRWVWAPSFPACKGLSKGRRPILWASSSGTPTVPPLQPFVGRLRSLDSGIRRLELLLSAGDSGTFFCKGRHEDESRTVLHVLGDRTYCKAPGPTHGSVYPQLLIPLLGAGLVLGLGALGLVWWLHRRLPPQPIRPLPRFALSPPHSSTCENRAPEASKGGRAQDSRGPGPGTGKGMGMGRG

SEQ ID NO: 16791 - protein, 197 aa, Homo sapiens
  Payload ID: 3364
  Gene Symbol: C6orf25
  Gene Name: chromosome 6 open reading frame 25
  Uniprot ID: O95866
  ENSP ID: ENSP00000364972
MAVFLQLLPLLLSRAQGNPGASLDGRPGDRVNLSCGGVSHPIRWVWAPSFPACKGLSKGRRPILWASSSGTPTVPPLQPFVGRLRSLDSGIRRLELLLSAGDSGTFFCKGRHEDESRTVLHVLGDRTYCKAPGPTHAPLVKTEPQRPVKEEEPKIPGDLDQEPSLLYADLDHLALSRPRRLSTADPADASTIYAVVV

SEQ ID NO: 16792 - protein, 197 aa, Homo sapiens; identical to SEQ ID NO: 16791
  Payload ID: 3364
  Gene Symbol: C6orf25
  Gene Name: chromosome 6 open reading frame 25
  Uniprot ID: O95866
  ENSP ID: ENSP00000372902

SEQ ID NO: 16793 - protein, 217 aa, Homo sapiens; identical to SEQ ID NO: 16787
  Payload ID: 3364
  Gene Symbol: C6orf25
  Gene Name: chromosome 6 open reading frame 25
  Uniprot ID: O95866
  ENSP ID: ENSP00000372903

SEQ ID NO: 16794 - protein, 237 aa, Homo sapiens; identical to SEQ ID NO: 16789
  Payload ID: 3364
  Gene Symbol: C6orf25
  Gene Name: chromosome 6 open reading frame 25
  Uniprot ID: O95866
  ENSP ID: ENSP00000372904

SEQ ID NO: 16795 - protein, 193 aa, Homo sapiens; identical to SEQ ID NO: 16786
  Payload ID: 3364
  Gene Symbol: C6orf25
  Gene Name: chromosome 6 open reading frame 25
  Uniprot ID: O95866
  ENSP ID: ENSP00000382940

SEQ ID NO: 16796 - protein, 241 aa, Homo sapiens; identical to SEQ ID NO: 16788
  Payload ID: 3364
  Gene Symbol: C6orf25
  Gene Name: chromosome 6 open reading frame 25
  Uniprot ID: O95866
  ENSP ID: ENSP00000382944

SEQ ID NO: 16797 - protein, 197 aa, Homo sapiens; identical to SEQ ID NO: 16791
  Payload ID: 3364
  Gene Symbol: C6orf25
  Gene Name: chromosome 6 open reading frame 25
  Uniprot ID: O95866
  ENSP ID: ENSP00000388484

SEQ ID NO: 16798 - protein, 193 aa, Homo sapiens; identical to SEQ ID NO: 16786
  Payload ID: 3364
  Gene Symbol: C6orf25
  Gene Name: chromosome 6 open reading frame 25
  Uniprot ID: O95866
  ENSP ID: ENSP00000388982

SEQ ID NO: 16799 - protein, 237 aa, Homo sapiens; identical to SEQ ID NO: 16789
  Payload ID: 3364
  Gene Symbol: C6orf25
  Gene Name: chromosome 6 open reading frame 25
  Uniprot ID: O95866
  ENSP ID: ENSP00000390272

SEQ ID NO: 16800 - protein, 197 aa, Homo sapiens; identical to SEQ ID NO: 16791
  Payload ID: 3364
  Gene Symbol: C6orf25
  Gene Name: chromosome 6 open reading frame 25
  Uniprot ID: O95866
  ENSP ID: ENSP00000390821

SEQ ID NO: 16801 - protein, 241 aa, Homo sapiens; identical to SEQ ID NO: 16788
  Payload ID: 3364
  Gene Symbol: C6orf25
  Gene Name: chromosome 6 open reading frame 25
  Uniprot ID: O95866
  ENSP ID: ENSP00000391097

SEQ ID NO: 16802 - protein, 193 aa, Homo sapiens; identical to SEQ ID NO: 16786
  Payload ID: 3364
  Gene Symbol: C6orf25
  Gene Name: chromosome 6 open reading frame 25
  Uniprot ID: O95866
  ENSP ID: ENSP00000392917

SEQ ID NO: 16803 - protein, 193 aa, Homo sapiens; identical to SEQ ID NO: 16786
  Payload ID: 3364
  Gene Symbol: C6orf25
  Gene Name: chromosome 6 open reading frame 25
  Uniprot ID: O95866
  ENSP ID: ENSP00000392961

SEQ ID NO: 16804 - protein, 197 aa, Homo sapiens; identical to SEQ ID NO: 16791
  Payload ID: 3364
  Gene Symbol: C6orf25
  Gene Name: chromosome 6 open reading frame 25
  Uniprot ID: O95866
  ENSP ID: ENSP00000394082

SEQ ID NO: 16805 - protein, 217 aa, Homo sapiens; identical to SEQ ID NO: 16787
  Payload ID: 3364
  Gene Symbol: C6orf25
  Gene Name: chromosome 6 open reading frame 25
  Uniprot ID: O95866
  ENSP ID: ENSP00000395279

SEQ ID NO: 16806 - protein, 237 aa, Homo sapiens; identical to SEQ ID NO: 16789
  Payload ID: 3364
  Gene Symbol: C6orf25
  Gene Name: chromosome 6 open reading frame 25
  Uniprot ID: O95866
  ENSP ID: ENSP00000395801

SEQ ID NO: 16807 - protein, 217 aa, Homo sapiens; identical to SEQ ID NO: 16787
  Payload ID: 3364
  Gene Symbol: C6orf25
  Gene Name: chromosome 6 open reading frame 25
  Uniprot ID: O95866
  ENSP ID: ENSP00000396823

SEQ ID NO: 16808 - protein, 217 aa, Homo sapiens; identical to SEQ ID NO: 16787
  Payload ID: 3364
  Gene Symbol: C6orf25
  Gene Name: chromosome 6 open reading frame 25
  Uniprot ID: O95866
  ENSP ID: ENSP00000398061

SEQ ID NO: 16809 - protein, 217 aa, Homo sapiens; identical to SEQ ID NO: 16787
  Payload ID: 3364
  Gene Symbol: C6orf25
  Gene Name: chromosome 6 open reading frame 25
  Uniprot ID: O95866
  ENSP ID: ENSP00000401892

SEQ ID NO: 16810 - protein, 237 aa, Homo sapiens; identical to SEQ ID NO: 16789
  Payload ID: 3364
  Gene Symbol: C6orf25
  Gene Name: chromosome 6 open reading frame 25
  Uniprot ID: O95866
  ENSP ID: ENSP00000404519

SEQ ID NO: 16811 - protein, 241 aa, Homo sapiens; identical to SEQ ID NO: 16788
  Payload ID: 3364
  Gene Symbol: C6orf25
  Gene Name: chromosome 6 open reading frame 25
  Uniprot ID: O95866
  ENSP ID: ENSP00000406706

SEQ ID NO: 16812 - protein, 241 aa, Homo sapiens
  Payload ID: 3364
  Gene Symbol: C6orf25
  Gene Name: chromosome 6 open reading frame 25
  ENSP ID: ENSP00000407677
MAVFLQLLPLLLSRAQGNPGASLDGRPGDRVNLSCGGVSHPIRWVWAPSFPACKGLSKGRRPILWASSSGTPTVPPLQPFVGRLRSLDSGIRRLELLLSAGDSGTFFCKGRHEDESRTVLHVLGDRTYCKAPGPTHGSVYPQLLIPLLGAGLVLGLGALGLVWWLHRRLPPQPIGPLPRFAPLVKTEPQRPVKEEEPKIPGDLDQEPSLLYADLDHLALSRPRRLSTADPADASTIYAVVV

SEQ ID NO: 16813 - protein, 237 aa, Homo sapiens
  Payload ID: 3364
  Gene Symbol: C6orf25
  Gene Name: chromosome 6 open reading frame 25
  ENSP ID: ENSP00000407683
MAVFLQLLPLLLSRAQGNPGASLDGRPGDRVNLSCGGVSHPIRWVWAPSFPACKGLSKGRRPILWASSSGTPTVPPLQPFVGRLRSLDSGIRRLELLLSAGDSGTFFCKGRHEDESRTVLHVLGDRTYCKAPGPTHGSVYPQLLIPLLGAGLVLGLGALGLVWWLHRRLPPQPIGPLPRFALSPPHSSTCENRAPEASKGGRAQDSRGPGPGTEPALCGSGPSSPQQAPPAVHSGPC

SEQ ID NO: 16814 - protein, 241 aa, Homo sapiens; identical to SEQ ID NO: 16788
  Payload ID: 3364
  Gene Symbol: C6orf25
  Gene Name: chromosome 6 open reading frame 25
  Uniprot ID: O95866
  ENSP ID: ENSP00000408430

SEQ ID NO: 16815 - protein, 193 aa, Homo sapiens; identical to SEQ ID NO: 16786
  Payload ID: 3364
  Gene Symbol: C6orf25
  Gene Name: chromosome 6 open reading frame 25
  Uniprot ID: O95866
  ENSP ID: ENSP00000412747

SEQ ID NO: 16816 - protein, 193 aa, Homo sapiens; identical to SEQ ID NO: 16786
  Payload ID: 3364
  Gene Symbol: C6orf25
  Gene Name: chromosome 6 open reading frame 25
  Uniprot ID: O95866
  ENSP ID: ENSP00000412937

SEQ ID NO: 16817 - protein, 197 aa, Homo sapiens; identical to SEQ ID NO: 16791
  Payload ID: 3364
  Gene Symbol: C6orf25
  Gene Name: chromosome 6 open reading frame 25
  Uniprot ID: O95866
  ENSP ID: ENSP00000413647

SEQ ID NO: 16818 - protein, 217 aa, Homo sapiens
  Payload ID: 3364
  Gene Symbol: C6orf25
  Gene Name: chromosome 6 open reading frame 25
  ENSP ID: ENSP00000414621
MAVFLQLLPLLLSRAQGNPGASLDGRPGDRVNLSCGGVSHPIRWVWAPSFPACKGLSKGRRPILWASSSGTPTVPPLQPFVGRLRSLDSGIRRLELLLSAGDSGTFFCKGRHEDESRTVLHVLGDRTYCKAPGPTHGACPRNRLDHSLDLLCPPHIAPLVKTEPQRPVKEEEPKIPGDLDQEPSLLYADLDHLALSRPRRLSTADPADASTIYAVVV

SEQ ID NO: 16819 - protein, 197 aa, Homo sapiens; identical to SEQ ID NO: 16791
  Payload ID: 3364
  Gene Symbol: C6orf25
  Gene Name: chromosome 6 open reading frame 25
  Uniprot ID: O95866
  ENSP ID: ENSP00000414824

SEQ ID NO: 16820 - protein, 237 aa, Homo sapiens; identical to SEQ ID NO: 16789
  Payload ID: 3364
  Gene Symbol: C6orf25
  Gene Name: chromosome 6 open reading frame 25
  Uniprot ID: O95866
  ENSP ID: ENSP00000415282

SEQ ID NO: 16821 - protein, 241 aa, Homo sapiens; identical to SEQ ID NO: 16788
  Payload ID: 3364
  Gene Symbol: C6orf25
  Gene Name: chromosome 6 open reading frame 25
  Uniprot ID: O95866
  ENSP ID: ENSP00000416447

SEQ ID NO: 16822 - protein, 220 aa, Homo sapiens
  Payload ID: 3364
  Gene Symbol: C6orf25
  Gene Name: chromosome 6 open reading frame 25
  ENSP ID: ENSP00000419306
MAVFLQLLPLLLSRAQGNPGASLDGRPGDRVNLSCGGVSHPIRWVWAPSFPACKGLSKGRRPILWASSSGTPTVPPLQPFVGRLRSLDSGIRRLELLLSAGDSGTFFCKGRHEDESRTVLHVLGDRTYCKAPGPTHGSVYPQLLIPLLGAGLVLGLGALGLVWWLHRRLPPQPIRPLPRFAPLVKTEPQRPVKEEEPKIPGDLDQEPVRAWGWEGDSQNL

SEQ ID NO: 16823 - protein, 125 aa, Homo sapiens
  Payload ID: 3364
  Gene Symbol: C6orf25
  Gene Name: chromosome 6 open reading frame 25
  ENSP ID: ENSP00000420355
MAVFLQLLPLLLSRAQGNPGASLDGRPGDRVNLSCGGVSHPIRWVWAPSFPACKGLSKGRRPILWASSSGTPTVPPLQPFVGRLRSLDSAPDPAAGRWVGARTGSFGPGLVAAQAPAPATDSTTP

SEQ ID NO: 16824 - protein, 294 aa, Homo sapiens
  Payload ID: 3365
  Gene Symbol: C6orf47
  Gene Name: chromosome 6 open reading frame 47
  Uniprot ID: O95873
  ENSP ID: ENSP00000365076
MFLRRLGGWLPRPWGRRKPMRPDPPYPEPRRVDSSSENSGSDWDSAPETMEDVGHPKTKDSGALRVSGAASEPSKEEPQVEQLGSKRMDSLKWDQPISSTQESGRLEAGGASPKLRWDHVDSGGTRRPGVSPEGGLSVPGPGAPLEKPGRREKLLGWLRGEPGAPSRYLGGPEECLQISTNLTLHLLELLASALLALCSRPLRAALDTLGLRGPLGLWLHGLLSFLAALHGLHAVLSLLTAHPLHFACLFGLLQALVLAVSLREPNGDEAATDWESEGLEREGEEQRGDPGKGL

SEQ ID NO: 16825 - protein, 294 aa, Homo sapiens
  Payload ID: 3365
  Gene Symbol: C6orf47
  Gene Name: chromosome 6 open reading frame 47
  Uniprot ID: O95873
  ENSP ID: ENSP00000375392
MFLRRLGGWLPRPWGRRKPMRPDPPYPEPRRVDSSSENSGSDWDSAPETMEDVGHPKTKDSGALRVSRAASEPSKEEPQVEQLGSKRMDSLKWDQPISSTQESGRLEAGGASPKLRWDHVDSGGTRRPGVSPEGGLSVPGPGAPLEKPGRREKLLGWLRGEPGAPSRYLGGPEECLQISTNLTLHLLELLASALLALCSRPLRAALDTLGLRGPLGLWLHGLLSFLAALHGLHAVLSLLTAHPLHFACLFGLLQALVLAVSLREPNGDEAATDWESEGLEREGEEQRGDPGKGL

SEQ ID NO: 16826 - protein, 294 aa, Homo sapiens; identical to SEQ ID NO: 16825
  Payload ID: 3365
  Gene Symbol: C6orf47
  Gene Name: chromosome 6 open reading frame 47
  Uniprot ID: O95873
  ENSP ID: ENSP00000375400

SEQ ID NO: 16827 - protein, 294 aa, Homo sapiens; identical to SEQ ID NO: 16825
  Payload ID: 3365
  Gene Symbol: C6orf47
  Gene Name: chromosome 6 open reading frame 47
  Uniprot ID: O95873
  ENSP ID: ENSP00000395128

SEQ ID NO: 16828 - protein, 294 aa, Homo sapiens; identical to SEQ ID NO: 16825
  Payload ID: 3365
  Gene Symbol: C6orf47
  Gene Name: chromosome 6 open reading frame 47
  Uniprot ID: O95873
  ENSP ID: ENSP00000398221

SEQ ID NO: 16829 - protein, 294 aa, Homo sapiens; identical to SEQ ID NO: 16825
  Payload ID: 3365
  Gene Symbol: C6orf47
  Gene Name: chromosome 6 open reading frame 47
  Uniprot ID: O95873
  ENSP ID: ENSP00000406870

SEQ ID NO: 16830 - protein, 294 aa, Homo sapiens; identical to SEQ ID NO: 16824
  Payload ID: 3365
  Gene Symbol: C6orf47
  Gene Name: chromosome 6 open reading frame 47
  Uniprot ID: O95873
  ENSP ID: ENSP00000407188

SEQ ID NO: 16831 - protein, 75 aa, Homo sapiens
  Payload ID: 3366
  Gene Symbol: C6orf48
  Gene Name: chromosome 6 open reading frame 48
  Uniprot ID: Q9UBA6
  ENSP ID: ENSP00000364784
MERSFVWLSCLDSDSCNLTFRLGEVESHACSPSLLWNLLTQYLPPGAGHILRTYNFPVLSCVSSCHLIGGKMPEN

SEQ ID NO: 16832 - protein, 75 aa, Homo sapiens; identical to SEQ ID NO: 16831
  Payload ID: 3366
  Gene Symbol: C6orf48
  Gene Name: chromosome 6 open reading frame 48
  Uniprot ID: Q9UBA6
  ENSP ID: ENSP00000364786

SEQ ID NO: 16833 - protein, 75 aa, Homo sapiens; identical to SEQ ID NO: 16831
  Payload ID: 3366
  Gene Symbol: C6orf48
  Gene Name: chromosome 6 open reading frame 48
  Uniprot ID: Q9UBA6
  ENSP ID: ENSP00000364789

SEQ ID NO: 16834 - protein, 75 aa, Homo sapiens; identical to SEQ ID NO: 16831
  Payload ID: 3366
  Gene Symbol: C6orf48
  Gene Name: chromosome 6 open reading frame 48
  Uniprot ID: Q9UBA6
  ENSP ID: ENSP00000364790

SEQ ID NO: 16835 - protein, 75 aa, Homo sapiens; identical to SEQ ID NO: 16831
  Payload ID: 3366
  Gene Symbol: C6orf48
  Gene Name: chromosome 6 open reading frame 48
  Uniprot ID: Q9UBA6
  ENSP ID: ENSP00000364791

SEQ ID NO: 16836 - protein, 75 aa, Homo sapiens; identical to SEQ ID NO: 16831
  Payload ID: 3366
  Gene Symbol: C6orf48
  Gene Name: chromosome 6 open reading frame 48
  Uniprot ID: Q9UBA6
  ENSP ID: ENSP00000364792

SEQ ID NO: 16837 - protein, 75 aa, Homo sapiens; identical to SEQ ID NO: 16831
  Payload ID: 3366
  Gene Symbol: C6orf48
  Gene Name: chromosome 6 open reading frame 48
  Uniprot ID: Q9UBA6
  ENSP ID: ENSP00000364793

SEQ ID NO: 16838 - protein, 75 aa, Homo sapiens; identical to SEQ ID NO: 16831
  Payload ID: 3366
  Gene Symbol: C6orf48
  Gene Name: chromosome 6 open reading frame 48
  Uniprot ID: Q9UBA6
  ENSP ID: ENSP00000372874

SEQ ID NO: 16839 - protein, 75 aa, Homo sapiens; identical to SEQ ID NO: 16831
  Payload ID: 3366
  Gene Symbol: C6orf48
  Gene Name: chromosome 6 open reading frame 48
  Uniprot ID: Q9UBA6
  ENSP ID: ENSP00000372875

SEQ ID NO: 16840 - protein, 75 aa, Homo sapiens; identical to SEQ ID NO: 16831
  Payload ID: 3366
  Gene Symbol: C6orf48
  Gene Name: chromosome 6 open reading frame 48
  Uniprot ID: Q9UBA6
  ENSP ID: ENSP00000372876

SEQ ID NO: 16841 - protein, 75 aa, Homo sapiens; identical to SEQ ID NO: 16831
  Payload ID: 3366
  Gene Symbol: C6orf48
  Gene Name: chromosome 6 open reading frame 48
  Uniprot ID: Q9UBA6
  ENSP ID: ENSP00000379134

SEQ ID NO: 16842 - protein, 75 aa, Homo sapiens; identical to SEQ ID NO: 16831
  Payload ID: 3366
  Gene Symbol: C6orf48
  Gene Name: chromosome 6 open reading frame 48
  Uniprot ID: Q9UBA6
  ENSP ID: ENSP00000379135

SEQ ID NO: 16843 - protein, 75 aa, Homo sapiens; identical to SEQ ID NO: 16831
  Payload ID: 3366
  Gene Symbol: C6orf48
  Gene Name: chromosome 6 open reading frame 48
  Uniprot ID: Q9UBA6
  ENSP ID: ENSP00000382909

SEQ ID NO: 16844 - protein, 75 aa, Homo sapiens; identical to SEQ ID NO: 16831
  Payload ID: 3366
  Gene Symbol: C6orf48
  Gene Name: chromosome 6 open reading frame 48
  Uniprot ID: Q9UBA6
  ENSP ID: ENSP00000382910

SEQ ID NO: 16845 - protein, 75 aa, Homo sapiens; identical to SEQ ID NO: 16831
  Payload ID: 3366
  Gene Symbol: C6orf48
  Gene Name: chromosome 6 open reading frame 48
  Uniprot ID: Q9UBA6
  ENSP ID: ENSP00000382912

SEQ ID NO: 16846 - protein, 75 aa, Homo sapiens; identical to SEQ ID NO: 16831
  Payload ID: 3366
  Gene Symbol: C6orf48
  Gene Name: chromosome 6 open reading frame 48
  Uniprot ID: Q9UBA6
  ENSP ID: ENSP00000382913

SEQ ID NO: 16847 - protein, 75 aa, Homo sapiens; identical to SEQ ID NO: 16831
  Payload ID: 3366
  Gene Symbol: C6orf48
  Gene Name: chromosome 6 open reading frame 48
  Uniprot ID: Q9UBA6
  ENSP ID: ENSP00000382914

SEQ ID NO: 16848 - protein, 75 aa, Homo sapiens; identical to SEQ ID NO: 16831
  Payload ID: 3366
  Gene Symbol: C6orf48
  Gene Name: chromosome 6 open reading frame 48
  Uniprot ID: Q9UBA6
  ENSP ID: ENSP00000387656

SEQ ID NO: 16849 - protein, 75 aa, Homo sapiens; identical to SEQ ID NO: 16831
  Payload ID: 3366
  Gene Symbol: C6orf48
  Gene Name: chromosome 6 open reading frame 48
  Uniprot ID: Q9UBA6
  ENSP ID: ENSP00000387952

SEQ ID NO: 16850 - protein, 75 aa, Homo sapiens; identical to SEQ ID NO: 16831
  Payload ID: 3366
  Gene Symbol: C6orf48
  Gene Name: chromosome 6 open reading frame 48
  Uniprot ID: Q9UBA6
  ENSP ID: ENSP00000388587

SEQ ID NO: 16851 - protein, 75 aa, Homo sapiens; identical to SEQ ID NO: 16831
  Payload ID: 3366
  Gene Symbol: C6orf48
  Gene Name: chromosome 6 open reading frame 48
  Uniprot ID: Q9UBA6
  ENSP ID: ENSP00000388964

SEQ ID NO: 16852 - protein, 75 aa, Homo sapiens; identical to SEQ ID NO: 16831
  Payload ID: 3366
  Gene Symbol: C6orf48
  Gene Name: chromosome 6 open reading frame 48
  Uniprot ID: Q9UBA6
  ENSP ID: ENSP00000389848

SEQ ID NO: 16853 - protein, 75 aa, Homo sapiens; identical to SEQ ID NO: 16831
  Payload ID: 3366
  Gene Symbol: C6orf48
  Gene Name: chromosome 6 open reading frame 48
  Uniprot ID: Q9UBA6
  ENSP ID: ENSP00000390420

SEQ ID NO: 16854 - protein, 75 aa, Homo sapiens; identical to SEQ ID NO: 16831
  Payload ID: 3366
  Gene Symbol: C6orf48
  Gene Name: chromosome 6 open reading frame 48
  Uniprot ID: Q9UBA6
  ENSP ID: ENSP00000392591

SEQ ID NO: 16855 - protein, 75 aa, Homo sapiens; identical to SEQ ID NO: 16831
  Payload ID: 3366
  Gene Symbol: C6orf48
  Gene Name: chromosome 6 open reading frame 48
  Uniprot ID: Q9UBA6
  ENSP ID: ENSP00000392621

SEQ ID NO: 16856 - protein, 75 aa, Homo sapiens; identical to SEQ ID NO: 16831
  Payload ID: 3366
  Gene Symbol: C6orf48
  Gene Name: chromosome 6 open reading frame 48
  Uniprot ID: Q9UBA6
  ENSP ID: ENSP00000392656

SEQ ID NO: 16857 - protein, 75 aa, Homo sapiens; identical to SEQ ID NO: 16831
  Payload ID: 3366
  Gene Symbol: C6orf48
  Gene Name: chromosome 6 open reading frame 48
  Uniprot ID: Q9UBA6
  ENSP ID: ENSP00000394438

SEQ ID NO: 16858 - protein, 75 aa, Homo sapiens; identical to SEQ ID NO: 16831
  Payload ID: 3366
  Gene Symbol: C6orf48
  Gene Name: chromosome 6 open reading frame 48
  Uniprot ID: Q9UBA6
  ENSP ID: ENSP00000394750

SEQ ID NO: 16859 - protein, 75 aa, Homo sapiens; identical to SEQ ID NO: 16831
  Payload ID: 3366
  Gene Symbol: C6orf48
  Gene Name: chromosome 6 open reading frame 48
  Uniprot ID: Q9UBA6
  ENSP ID: ENSP00000395192

SEQ ID NO: 16860 - protein, 75 aa, Homo sapiens; identical to SEQ ID NO: 16831
  Payload ID: 3366
  Gene Symbol: C6orf48
  Gene Name: chromosome 6 open reading frame 48
  Uniprot ID: Q9UBA6
  ENSP ID: ENSP00000395285

SEQ ID NO: 16861 - protein, 75 aa, Homo sapiens; identical to SEQ ID NO: 16831
  Payload ID: 3366
  Gene Symbol: C6orf48
  Gene Name: chromosome 6 open reading frame 48
  Uniprot ID: Q9UBA6
  ENSP ID: ENSP00000396517

SEQ ID NO: 16862 - protein, 75 aa, Homo sapiens; identical to SEQ ID NO: 16831
  Payload ID: 3366
  Gene Symbol: C6orf48
  Gene Name: chromosome 6 open reading frame 48
  Uniprot ID: Q9UBA6
  ENSP ID: ENSP00000397287

SEQ ID NO: 16863 - protein, 75 aa, Homo sapiens; identical to SEQ ID NO: 16831
  Payload ID: 3366
  Gene Symbol: C6orf48
  Gene Name: chromosome 6 open reading frame 48
  Uniprot ID: Q9UBA6
  ENSP ID: ENSP00000397345

SEQ ID NO: 16864 - protein, 75 aa, Homo sapiens; identical to SEQ ID NO: 16831
  Payload ID: 3366
  Gene Symbol: C6orf48
  Gene Name: chromosome 6 open reading frame 48
  Uniprot ID: Q9UBA6
  ENSP ID: ENSP00000397392

SEQ ID NO: 16865 - protein, 75 aa, Homo sapiens; identical to SEQ ID NO: 16831
  Payload ID: 3366
  Gene Symbol: C6orf48
  Gene Name: chromosome 6 open reading frame 48
  Uniprot ID: Q9UBA6
  ENSP ID: ENSP00000397730

SEQ ID NO: 16866 - protein, 75 aa, Homo sapiens; identical to SEQ ID NO: 16831
  Payload ID: 3366
  Gene Symbol: C6orf48
  Gene Name: chromosome 6 open reading frame 48
  Uniprot ID: Q9UBA6
  ENSP ID: ENSP00000401394

SEQ ID NO: 16867 - protein, 75 aa, Homo sapiens; identical to SEQ ID NO: 16831
  Payload ID: 3366
  Gene Symbol: C6orf48
  Gene Name: chromosome 6 open reading frame 48
  Uniprot ID: Q9UBA6
  ENSP ID: ENSP00000402138

SEQ ID NO: 16868 - protein, 75 aa, Homo sapiens; identical to SEQ ID NO: 16831
  Payload ID: 3366
  Gene Symbol: C6orf48
  Gene Name: chromosome 6 open reading frame 48
  Uniprot ID: Q9UBA6
  ENSP ID: ENSP00000405501

SEQ ID NO: 16869 - protein, 75 aa, Homo sapiens; identical to SEQ ID NO: 16831
  Payload ID: 3366
  Gene Symbol: C6orf48
  Gene Name: chromosome 6 open reading frame 48
  Uniprot ID: Q9UBA6
  ENSP ID: ENSP00000405706

SEQ ID NO: 16870 - protein, 75 aa, Homo sapiens; identical to SEQ ID NO: 16831
  Payload ID: 3366
  Gene Symbol: C6orf48
  Gene Name: chromosome 6 open reading frame 48
  Uniprot ID: Q9UBA6
  ENSP ID: ENSP00000406099

SEQ ID NO: 16871 - protein, 75 aa, Homo sapiens; identical to SEQ ID NO: 16831
  Payload ID: 3366
  Gene Symbol: C6orf48
  Gene Name: chromosome 6 open reading frame 48
  Uniprot ID: Q9UBA6
  ENSP ID: ENSP00000408280

SEQ ID NO: 16872 - protein, 75 aa, Homo sapiens; identical to SEQ ID NO: 16831
  Payload ID: 3366
  Gene Symbol: C6orf48
  Gene Name: chromosome 6 open reading frame 48
  Uniprot ID: Q9UBA6
  ENSP ID: ENSP00000408391

SEQ ID NO: 16873 - protein, 75 aa, Homo sapiens; identical to SEQ ID NO: 16831
  Payload ID: 3366
  Gene Symbol: C6orf48
  Gene Name: chromosome 6 open reading frame 48
  Uniprot ID: Q9UBA6
  ENSP ID: ENSP00000414926

SEQ ID NO: 16874 - protein, 75 aa, Homo sapiens; identical to SEQ ID NO: 16831
  Payload ID: 3366
  Gene Symbol: C6orf48
  Gene Name: chromosome 6 open reading frame 48
  Uniprot ID: Q9UBA6
  ENSP ID: ENSP00000415206

SEQ ID NO: 16875 - protein, 75 aa, Homo sapiens; identical to SEQ ID NO: 16831
  Payload ID: 3366
  Gene Symbol: C6orf48
  Gene Name: chromosome 6 open reading frame 48
  Uniprot ID: Q9UBA6
  ENSP ID: ENSP00000417013

SEQ ID NO: 16876 - protein, 75 aa, Homo sapiens; identical to SEQ ID NO: 16831
  Payload ID: 3366
  Gene Symbol: C6orf48
  Gene Name: chromosome 6 open reading frame 48
  Uniprot ID: Q9UBA6
  ENSP ID: ENSP00000448031

SEQ ID NO: 16877 - protein, 75 aa, Homo sapiens; identical to SEQ ID NO: 16831
  Payload ID: 3366
  Gene Symbol: C6orf48
  Gene Name: chromosome 6 open reading frame 48
  Uniprot ID: Q9UBA6
  ENSP ID: ENSP00000448996

SEQ ID NO: 16878 - protein, 75 aa, Homo sapiens; identical to SEQ ID NO: 16831
  Payload ID: 3366
  Gene Symbol: C6orf48
  Gene Name: chromosome 6 open reading frame 48
  Uniprot ID: Q9UBA6
  ENSP ID: ENSP00000449901

SEQ ID NO: 16879 - protein, 75 aa, Homo sapiens; identical to SEQ ID NO: 16831
  Payload ID: 3366
  Gene Symbol: C6orf48
  Gene Name: chromosome 6 open reading frame 48
  Uniprot ID: Q9UBA6
  ENSP ID: ENSP00000449921

SEQ ID NO: 16880 - protein, 75 aa, Homo sapiens; identical to SEQ ID NO: 16831
  Payload ID: 3366
  Gene Symbol: C6orf48
  Gene Name: chromosome 6 open reading frame 48
  Uniprot ID: Q9UBA6
  ENSP ID: ENSP00000480389

SEQ ID NO: 16881 - protein, 152 aa, Homo sapiens
  Payload ID: 3367
  Gene Symbol: C6orf52
  Gene Name: chromosome 6 open reading frame 52
  Uniprot ID: Q5T4I8
  ENSP ID: ENSP00000259983
MAQPESSADFGIAQQNNYYCYWQSLPSAIRVKQEFQPSQSYRYGNWYARQHGSYLLSGYSYGCAVDGNGKDCFSAHETPEHTAGTLVMPKETTPLAENQDEDPLEDPHLHLNIEESNQEFMVKSEELYDSLMNCHWQPLDTVHSEIPDETPK

SEQ ID NO: 16882 - protein, 65 aa, Homo sapiens
  Payload ID: 3367
  Gene Symbol: C6orf52
  Gene Name: chromosome 6 open reading frame 52
  Uniprot ID: Q5T4I8
  ENSP ID: ENSP00000368905
MPKETTPLAENQDEDPLEDPHLHLNIEESNQEFMVKSEELYDSLMNCHWQPLDTVHSEIPDETPK

SEQ ID NO: 16883 - protein, 152 aa, Homo sapiens; identical to SEQ ID NO: 16881
  Payload ID: 3367
  Gene Symbol: C6orf52
  Gene Name: chromosome 6 open reading frame 52
  Uniprot ID: Q5T4I8
  ENSP ID: ENSP00000410749

SEQ ID NO: 16884 - protein, 63 aa, Homo sapiens
  Payload ID: 3367
  Gene Symbol: C6orf52
  Gene Name: chromosome 6 open reading frame 52
  ENSP ID: ENSP00000421264
METTPLAENQDEDPLEDPHLHLNIEESNQEFMVKSEELYDSLMNCHWQPLDTVHSEIPDETPK

SEQ ID NO: 16885 - protein, 93 aa, Homo sapiens
  Payload ID: 3367
  Gene Symbol: C6orf52
  Gene Name: chromosome 6 open reading frame 52
  ENSP ID: ENSP00000421837
METTPLAENQDEDPLEVTSQYVAQADLKLPDLSNSLVSASQSVGVTDPHLHLNIEESNQEFMVKSEELYDSLMNCHWQPLDTVHSEIPDETPK

SEQ ID NO: 16886 - protein, 330 aa, Homo sapiens
  Payload ID: 3368
  Gene Symbol: C6orf58
  Gene Name: chromosome 6 open reading frame 58
  Uniprot ID: Q6P5S2
  ENSP ID: ENSP00000328069
MAFLPSWVCVLVGSFSASLAGTSNLSETEPPLWKESPGQLSDYRVENSMYIINPWVYLERMGMYKIILNQTARYFAKFAPDNEQNILWGLPLQYGWQYRTGRLADPTRRTNCGYESGDHMCISVDSWWADLNYFLSSLPFLAAVDSGVMGISSDQVRLLPPPKNERKFCYDVSSCRSSFPETMNKWNTFYQYLQSPFSKFDDLLKYLWAAHTSTLADNIKSFEDRYDYYSKAEAHFERSWVLAVDHLAAVLFPTTLIRSYKFQKGMPPRILLNTDVAPFISDFTAFQNVVLVLLNMLDNVDKSIGYLCTEKSNVYRDHSESSSRSYGNNS

SEQ ID NO: 16887 - protein, 200 aa, Homo sapiens
  Payload ID: 3369
  Gene Symbol: C6orf62
  Gene Name: chromosome 6 open reading frame 62
  Uniprot ID: Q9GZU0
  ENSP ID: ENSP00000367342
MSENLSDPVSPVVRKKKSALFEVSEVIPVMTNNYEENILKGVRDSSYSLESSLELLQKDVVQLHAPRYQSMRRDVIGCTQEMDFILWPRNDIEKIVCLLFSRWKESDEPFRPVQAKFEFHHGDYEKQFLHVLSRKDKTGIVVNNPNQSVFLFIDRQHLQTPKNKATIFKLCSICLYLPQEQLTHWAVGTIEDHLRPYMPE

SEQ ID NO: 16888 - protein, 229 aa, Homo sapiens
  Payload ID: 3369
  Gene Symbol: C6orf62
  Gene Name: chromosome 6 open reading frame 62
  Uniprot ID: Q9GZU0
  ENSP ID: ENSP00000367359
MGDPNSRKKQALNRLRAQLRKKKESLADQFDFKMYIAFVFKEKKKKSALFEVSEVIPVMTNNYEENILKGVRDSSYSLESSLELLQKDVVQLHAPRYQSMRRDVIGCTQEMDFILWPRNDIEKIVCLLFSRWKESDEPFRPVQAKFEFHHGDYEKQFLHVLSRKDKTGIVVNNPNQSVFLFIDRQHLQTPKNKATIFKLCSICLYLPQEQLTHWAVGTIEDHLRPYMPE

SEQ ID NO: 16889 - protein, 354 aa, Homo sapiens
  Payload ID: 3370
  Gene Symbol: C6orf89
  Gene Name: chromosome 6 open reading frame 89
  Uniprot ID: Q6UWU4
  ENSP ID: ENSP00000347322
MDFILEDMDLAANEISIYDKLSETVDLVRQTGHQCGMSEKAIEKFIRQLLEKNEPQRPPPQYPLLIVVYKVLATLGLILLTAYFVIQPFSPLAPEPVLSGAHTWRSLIHHIRLMSLPIAKKYMSENKGVPLHGGDEDRPFPDFDPWWTNDCEQNESEPIPANCTGCAQKHLKVMLLEDAPRKFERLHPLVIKTGKPLLEEEIQHFLCQYPEATEGFSEGFFAKWWRCFPERWFPFPYPWRRPLNRSQMLRELFPVFTHLPFPKDASLNKCSFLHPEPVVGSKMHKMPDLFIIGSGEAMLQLIPPFQCRRHCQSVAMPIEPGDIGYVDTTHWKVYVIARGVQPLVICDGTAFSEL

SEQ ID NO: 16890 - protein, 241 aa, Homo sapiens
  Payload ID: 3370
  Gene Symbol: C6orf89
  Gene Name: chromosome 6 open reading frame 89
  ENSP ID: ENSP00000352316
MSLPIAKKYMSENKGVPLHGGDEDRPFPDFDPWWTNDCEQNESEPIPANCTGCAQKHLKVMLLEDAPRKFERLHPLVIKTGKPLLEEEIQHFLCQYPEATEGFSEGFFAKWWRCFPERWFPFPYPWRRPLNRSQMLRELFPVFTHLPFPKDASLNKCSFLHPEPVVGSKMHKMPDLFIIGSGEAMLQLIPPFQCRRHCQSVAMPIEPGDIGYVDTTHWKVYVIARGVQPLVICDGTAFSEL

SEQ ID NO: 16891 - protein, 347 aa, Homo sapiens
  Payload ID: 3370
  Gene Symbol: C6orf89
  Gene Name: chromosome 6 open reading frame 89
  Uniprot ID: Q6UWU4
  ENSP ID: ENSP00000362789
MDLAANEISIYDKLSETVDLVRQTGHQCGMSEKAIEKFIRQLLEKNEPQRPPPQYPLLIVVYKVLATLGLILLTAYFVIQPFSPLAPEPVLSGAHTWRSLIHHIRLMSLPIAKKYMSENKGVPLHGGDEDRPFPDFDPWWTNDCEQNESEPIPANCTGCAQKHLKVMLLEDAPRKFERLHPLVIKTGKPLLEEEIQHFLCQYPEATEGFSEGFFAKWWRCFPERWFPFPYPWRRPLNRSQMLRELFPVFTHLPFPKDASLNKCSFLHPEPVVGSKMHKMPDLFIIGSGEAMLQLIPPFQCRRHCQSVAMPIEPGDIGYVDTTHWKVYVIARGVQPLVICDGTAFSEL

SEQ ID NO: 16892 - protein, 347 aa, Homo sapiens; identical to SEQ ID NO: 16891
  Payload ID: 3370
  Gene Symbol: C6orf89
  Gene Name: chromosome 6 open reading frame 89
  Uniprot ID: Q6UWU4
  ENSP ID: ENSP00000475947

SEQ ID NO: 16893 - protein, 421 aa, Homo sapiens
  Payload ID: 3371
  Gene Symbol: C7orf25
  Gene Name: chromosome 7 open reading frame 25
  Uniprot ID: Q9BPX7
  ENSP ID: ENSP00000343364
MSAHSMLCERIAIAKELIKRAESLSRSRKGGIEGGAKLCSKLKAELKFLQKVEAGKVAIKESHLQSTNLTHLRAIVESAENLEEVVSVLHVFGYTDTLGEKQTLVVDVVANGGHTWVKAIGRKAEALHNIWLGRGQYGDKSIIEQAEDFLQASHQQPVQYSNPHIIFAFYNSVSSPMAEKLKEMGISVRGDIVAVNALLDHPEELQPSESESDDEGPELLQVTRVDRENILASVAFPTEIKVDVCKRVNLDITTLITYVSALSYGGCHFIFKEKVLTEQAEQERKEQVLPQLEAFMKDKELFACESAVKDFQSILDTLGGPGERERATVLIKRINVVPDQPSERALRLVASSKINSRSLTIFGTGDTLKAITMTANSGFVRAANNQGVKFSVFIHQPRALTESKEALATPLPKDYTTDSEH

SEQ ID NO: 16894 - protein, 421 aa, Homo sapiens; identical to SEQ ID NO: 16893
  Payload ID: 3371
  Gene Symbol: C7orf25
  Gene Name: chromosome 7 open reading frame 25
  Uniprot ID: Q9BPX7
  ENSP ID: ENSP00000396597

SEQ ID NO: 16895 - protein, 479 aa, Homo sapiens
  Payload ID: 3371
  Gene Symbol: C7orf25
  Gene Name: chromosome 7 open reading frame 25
  Uniprot ID: Q9BPX7
  ENSP ID: ENSP00000413029
MQEVPEAAGLARVEPPRRSSGVGAARLRFPGGSRPLRARACVLALAVLALPERNNADSMSAHSMLCERIAIAKELIKRAESLSRSRKGGIEGGAKLCSKLKAELKFLQKVEAGKVAIKESHLQSTNLTHLRAIVESAENLEEVVSVLHVFGYTDTLGEKQTLVVDVVANGGHTWVKAIGRKAEALHNIWLGRGQYGDKSIIEQAEDFLQASHQQPVQYSNPHIIFAFYNSVSSPMAEKLKEMGISVRGDIVAVNALLDHPEELQPSESESDDEGPELLQVTRVDRENILASVAFPTEIKVDVCKRVNLDITTLITYVSALSYGGCHFIFKEKVLTEQAEQERKEQVLPQLEAFMKDKELFACESAVKDFQSILDTLGGPGERERATVLIKRINVVPDQPSERALRLVASSKINSRSLTIFGTGDTLKAITMTANSGFVRAANNQGVKFSVFIHQPRALTESKEALATPLPKDYTTDSEH

SEQ ID NO: 16896 - protein, 178 aa, Homo sapiens
  Payload ID: 3371
  Gene Symbol: C7orf25
  Gene Name: chromosome 7 open reading frame 25
  ENSP ID: ENSP00000413106
MSAHSMLCERIAIAKELIKRAESLSRSRKGGIEGGAKLCSKLKAELKFLQKVEAGKVAIKESHLQSTNLTHLRAIVESAENLEEVVSVLHVFGYTDTLGEKQTLVVDVVANGGHTWVKAIGRKAEALHNIWLGRGQYGDKSIIEQAEDFLQASHQQPVQYSNPHIIFAFYNSVSSPMA

SEQ ID NO: 16897 - protein, 479 aa, Homo sapiens; identical to SEQ ID NO: 16895
  Payload ID: 3371
  Gene Symbol: C7orf25
  Gene Name: chromosome 7 open reading frame 25
  Uniprot ID: Q9BPX7
  ENSP ID: ENSP00000416290

SEQ ID NO: 16898 - protein, 85 aa, Homo sapiens
  Payload ID: 3371
  Gene Symbol: C7orf25
  Gene Name: chromosome 7 open reading frame 25
  ENSP ID: ENSP00000416542
MSAHSMLCERIAIAKELIKRAESLSRSRKGGIEGGAKLCSKLKAELKFLQKVEAGKVAIKESHLQSTNLTHLRAIVESAENLEEV

SEQ ID NO: 16899 - protein, 449 aa, Homo sapiens
  Payload ID: 3372
  Gene Symbol: C7orf26
  Gene Name: chromosome 7 open reading frame 26
  Uniprot ID: Q96N11
  ENSP ID: ENSP00000340220
MSDIRHSLLRRDALSAAKEVLYHLDIYFSSQLQSAPLPIVDKGPVELLEEFVFQVPKERSAQPKRLNSLQELQLLEIMCNYFQEQTKDSVRQIIFSSLFSPQGNKADDSRMSLLGKLVSMAVAVCRIPVLECAASWLQRTPVVYCVRLAKALVDDYCCLVPGSIQTLKQIFSASPRFCCQFITSVTALYDLSSDDLIPPMDLLEMIVTWIFEDPRLILITFLNTPIAANLPIGFLELTPLVGLIRWCVKAPLAYKRKKKPPLSNGHVSNKVTKDPGVGMDRDSHLLYSKLHLSVLQVLMTLQLHLTEKNLYGRLGLILFDHMVPLVEEINRLADELNPLNASQEIELSLDRLAQALQVAMASGALLCTRDDLRTLCSRLPHNNLLQLVISGPVQQSPHAALPPGFYPHIHTPPLGYGAVPAHPAAHPALPTHPGHTFISGVTFPFRPIR

SEQ ID NO: 16900 - protein, 352 aa, Homo sapiens
  Payload ID: 3372
  Gene Symbol: C7orf26
  Gene Name: chromosome 7 open reading frame 26
  Uniprot ID: Q96N11
  ENSP ID: ENSP00000351974
MSDIRHSLLRRDALSAAKEVLYHLDIYFSSQLQSAPLPIVDKGPVELLEEFVFQVPKERSAQPKEQTKDSVRQIIFSSLFSPQGNKADDSRMSLLGKLVSMAVAVCRIPVLECAASWLQRTPVVYCVRLAKALVDDYCCLVPGSIQTLKQIFSASPRFCCQFITSVTALYDLSSDDLIPPMDLLEMIVTWIFEDPSVLQVLMTLQLHLTEKNLYGRLGLILFDHMVPLVEEINRLADELNPLNASQEIELSLDRLAQALQVAMASGALLCTRDDLRTLCSRLPHNNLLQLVISGPVQQSPHAALPPGFYPHIHTPPLGYGAVPAHPAAHPALPTHPGHTFISGVTFPFRPIR

SEQ ID NO: 16901 - protein, 149 aa, Homo sapiens
  Payload ID: 3372
  Gene Symbol: C7orf26
  Gene Name: chromosome 7 open reading frame 26
  ENSP ID: ENSP00000390166
  MOD_RES (1)..(1): Any amino acid
XNGHVSNKVTKDPGVGMDRDSHLLYSKLHLSVLQVLMTLQLHLTEKNLYGRLGLILFDHMVPLVEEINRLADELNPLNASQEIELSLDRLAQALQVAMASGALLCTRDDLRTLCSRLPHNKTLNFGVVCKASFLGLLLGIQVGRGHSRL

SEQ ID NO: 16902 - protein, 97 aa, Homo sapiens
  Payload ID: 3372
  Gene Symbol: C7orf26
  Gene Name: chromosome 7 open reading frame 26
  ENSP ID: ENSP00000396194
LFDHMVPLVEEINRLADELNPLNASQEIELSLDRLAQALQVAMASGALLCTRDDLRTLCSRLPHNKTVVRMRPSGVCEFLILLLATWRPPQTQSSGL

SEQ ID NO: 16903 - protein, 590 aa, Homo sapiens
  Payload ID: 3373
  Gene Symbol: C7orf31
  Gene Name: chromosome 7 open reading frame 31
  Uniprot ID: Q8N865
  ENSP ID: ENSP00000283905
MEVIHGRPYCCRELEGADILSNTFYSNELHNPLQTVTRPTASEDRYQELRESLQQCRLPWGAEREYGGIIPISLPEDHRPKYEPPRVMGKGHQHYGFGGETWPRKLPVEQFYYLTQNKKSDVYGNDSLIPKPPNSTVGEICLPYPIEHPYHTHICRGAMFPTFTSPEDLYTGIKARTQQPFPPTVPTKAYDSTVLKTRGNPYRYELIDIPMDSKKKALTWPGQGVYYDFPRGVEKNKPVFYPKPPKTFAPNTSLNSWDPICSAKEANIQRNLERSHWLTSYTHDFTGLGPMDPLELDDYHEKMVAELTRKIGFDPEPQEKFHPVFKPPRPLEGRIARLIQNRRSLEAIVQQRPRSCPDCTPRVLCNFHTFVPSSKEMVALSDNIPAGVTHKNQDIEEKIIEEQSLLSTYELPSCYPTKDLTSIYDIKPFPKITDTKKTEDLYWRQQSLKTQPTPYCKPDHWIHYENLKSPLRDQYNMCPDPVSLSKPSVLQNKQDTEAFTLEHFLSKPEEELFLNMENNEETRPVLGWIPRAGVTKPQTNLLELKNSFSKTGAQKRFHKSILEDHKDLRDNEHSGMKHQFYGHNSYYFYN

SEQ ID NO: 16904 - protein, 590 aa, Homo sapiens; identical to SEQ ID NO: 16903
  Payload ID: 3373
  Gene Symbol: C7orf31
  Gene Name: chromosome 7 open reading frame 31
  Uniprot ID: Q8N865
  ENSP ID: ENSP00000386604

SEQ ID NO: 16905 - protein, 153 aa, Homo sapiens
  Payload ID: 3373
  Gene Symbol: C7orf31
  Gene Name: chromosome 7 open reading frame 31
  ENSP ID: ENSP00000388472
MEVIHGRPYCCRELEGADILSNTFYSNELHNPLQTVTRPTASEDRYQELRESLQQCRLPWGAEREYGGIIPISLPEDHRPKYEPPRVMGKGHQHYGFGGETWPRKLPVEQFYYLTQNKKSDVYGNDSLIPKPPNSTVGEICLPYPIEHPYHTH

SEQ ID NO: 16906 - protein, 115 aa, Homo sapiens
  Payload ID: 3373
  Gene Symbol: C7orf31
  Gene Name: chromosome 7 open reading frame 31
  ENSP ID: ENSP00000391212
MEVIHGRPYCCRELEGADILSNTFYSNELHNPLQTVTRPTASEDRYQELRESLQQCRLPWGAEREYGGIIPISLPEDHRPKYEPPRVMGKGHQHYGFGGETWPRKLPVEQFYYLT

SEQ ID NO: 16907 - protein, 92 aa, Homo sapiens
  Payload ID: 3373
  Gene Symbol: C7orf31
  Gene Name: chromosome 7 open reading frame 31
  ENSP ID: ENSP00000403281
MEVIHGRPYCCRELEGADILSNTFYSNELHNPLQTVTRPTASEDRYQELRESLQQCRLPWGAEREYGGIIPISLPEDHRPKYEPPRVMGKGH

SEQ ID NO: 16908 - protein, 177 aa, Homo sapiens
  Payload ID: 3374
  Gene Symbol: C7orf33
  Gene Name: chromosome 7 open reading frame 33
  Uniprot ID: Q8WU49
  ENSP ID: ENSP00000304071
MQVEVQSLSLEECPWRLPGPQCECEALLPSGARRRIDLRLSGRAVAVWVHVRGGPGQFNLSYATGRHKKPNPHQNMNRGMEFIAPVSAPTKSGAPWHFLSQGPTDAQRAVRIRPGTRMGLSSDPVVGTLSSSYLDLLTLSYKPGRTVTSSYLNVRGHEVRKLQNSVEATRISRTDSS

SEQ ID NO: 16909 - protein, 147 aa, Homo sapiens
  Payload ID: 3375
  Gene Symbol: C7orf34
  Gene Name: chromosome 7 open reading frame 34
  Uniprot ID: Q96L11
  ENSP ID: ENSP00000386450
MGQEVHGSCWALGAGGGQRQWVGRSMPPLAPQLCRAVFLVPILLLLQVKPLNGSPGPKDGSQTEKTPSADQNQEQFEEHFVASSVGEMWQVVDMAQQEEDQSSKTAAVHKHSFHLSFCFSLASVMVFSGGPLRRTFPNIQLCFMLTH

SEQ ID NO: 16910 - protein, 153 aa, Homo sapiens
  Payload ID: 3375
  Gene Symbol: C7orf34
  Gene Name: chromosome 7 open reading frame 34
  Uniprot ID: Q96L11
  ENSP ID: ENSP00000401055
  MOD_RES (1)..(1): Any amino acid
XMTHCGHLGSLGHPCWLCSILVPRHWNALVSRNEVQAHGCDVTEHVKSEVLWKVKPLNGSPGPKDGSQTEKTPSADQNQEQFEEHFVASSVGEMWQVVDMAQQEEDQSSKTAAVHKHSFHLSFCFSLASVMVFSGGPLRRTFPNIQLCFMLTH

SEQ ID NO: 16911 - protein, 147 aa, Homo sapiens; identical to SEQ ID NO: 16909
  Payload ID: 3375
  Gene Symbol: C7orf34
  Gene Name: chromosome 7 open reading frame 34
  ENSP ID: ENSP00000484165

SEQ ID NO: 16912 - protein, 152 aa, Homo sapiens
  Payload ID: 3375
  Gene Symbol: C7orf34
  Gene Name: chromosome 7 open reading frame 34
  ENSP ID: ENSP00000488165
MTHCGHLGSLGHPCWLCSILVPRHWNALVSRNEVQAHGCDVTEHVKSEVLWKVKPLNGSPGPKDGSQTEKTPSADQNQEQFEEHFVASSVGEMWQVVDMAQQEEDQSSKTAAVHKHSFHLSFCFSLASVMVFSGGPLRRTFPNIQLCFMLTH

SEQ ID NO: 16913 - protein, 580 aa, Homo sapiens
  Payload ID: 3376
  Gene Symbol: C7orf43
  Gene Name: chromosome 7 open reading frame 43
  Uniprot ID: Q8WVR3
  ENSP ID: ENSP00000324741
MESQCDYSMYFPAVPLPPRAELAGDPGRYRALPRRNHLYLGETVRFLLVLRCRGGAGSGTGGGPGLGSRGAWAELATALAALASVSAGGGMPGGGGAGDQDSEPPGGGDPGGGGLFRGCSPLLTHGPGPATSGGATTLPVEEPIVSTDEVIFPLTVSLDRLPPGTPKAKIVVTVWKREIEAPEVRDQGYLRLLQTRSPGETFRGEQSAFKAQVSTLLTLLPPPVLRCRQFTVAGKHLTVLKVLNSSSQEEISIWDIRILPNFNASYLPVMPDGSVLLVDNVCHQSGEVSMGSFCRLPGTSGCFPCPLNALEEHNFLFQLRGGEQPPPGAKEGLEVPLIAVVQWSTPKLPFTQSIYTHYRLPSVRLDRPCFVMTASCKSPVRTYERFTVTYTLLNNLQDFLAVRLVWTPEHAQAGKQLCEEERRAMQAALDSVVCHTPLNNLGFSRKGSALTFSVAFQALRTGLFELSQHMKLKLQFTASVSHPPPEARPLSRKSSPSSPAVRDLVERHQASLGRSQSFSHQQPSRSHLMRSGSVMERRAITPPVASPVGRPLYLPPDKAVLSLDKIAKRECKVLVVEPVK

SEQ ID NO: 16914 - protein, 25 aa, Homo sapiens
  Payload ID: 3376
  Gene Symbol: C7orf43
  Gene Name: chromosome 7 open reading frame 43
  ENSP ID: ENSP00000377600
LQDFLAVRLVWTPEHAQAVYSTEWL

SEQ ID NO: 16915 - protein, 311 aa, Homo sapiens
  Payload ID: 3376
  Gene Symbol: C7orf43
  Gene Name: chromosome 7 open reading frame 43
  ENSP ID: ENSP00000389672
MPDGSVLLVDNVCHQSGEVSMGSFCRLPGTSGCFPCPLNALEEHNFLFQLRGGEQPPPGAKEGLEVPLIAVVQWSTPKLPFTQSIYTHYRLPSVRLDRPCFVMTASCKSPVRTYERFTVTYTLLNNLQDFLAVRLVWTPEHAQAGKQLCEEERRAMQAALDSVVCHTPLNNLGFSRKGSALTFSVAFQALRTGLFELSQHMKLKLQFTASVSHPPPEARPLSRKSSPSSPAVRDLVERHQASLGRSQSFSHQQPSRSHLMRSGSVMERRAITPPVASPVGRPLYLPPDKAVLSLDKIAKRECKVLVVEPVK

SEQ ID NO: 16916 - protein, 311 aa, Homo sapiens; identical to SEQ ID NO: 16915
  Payload ID: 3376
  Gene Symbol: C7orf43
  Gene Name: chromosome 7 open reading frame 43
  ENSP ID: ENSP00000396432

SEQ ID NO: 16917 - protein, 169 aa, Homo sapiens
  Payload ID: 3376
  Gene Symbol: C7orf43
  Gene Name: chromosome 7 open reading frame 43
  ENSP ID: ENSP00000399397
MESQCDYSMYFPAVPLPPRAELAGDPGRYRALPRRNHLYLGETVRFLLVLRCRGGAGSGTGGGPGLGSRGAWAELATALAALASVSAGGGMPGGGGAGDQDSEPPGGGDPGGGGLFRGCSPLLTHGPGPATSGGATTLPVEEPIVSTDEVIFPLTVSLDRLPPGTPKAK

SEQ ID NO: 16918 - protein, 150 aa, Homo sapiens
  Payload ID: 3376
  Gene Symbol: C7orf43
  Gene Name: chromosome 7 open reading frame 43
  ENSP ID: ENSP00000400075
  MOD_RES (1)..(1): Any amino acid
XPVMPDGSVLLVDNVCHQSGEVSMGSFCRLPGTSGCFPCPLNALEEHNFLFQLRGGEQPPPGAKEGLEVPLIAVVQWSTPKLPFTQSIYTHYRLPSVRLDRPCFVMTASCKSPVRTYERFTVTYTLLNNLQDFLAVRLVWTPEHAQAEWL

SEQ ID NO: 16919 - protein, 99 aa, Homo sapiens
  Payload ID: 3376
  Gene Symbol: C7orf43
  Gene Name: chromosome 7 open reading frame 43
  ENSP ID: ENSP00000406326
VVTVWKREIEAPEVRDQGYLRLLQTRSPGETFRGEQSAFKAQVSTLLTLLPPPVLRCRQFTVAGKHLTVLKGKQGCRLQPPGATRELIGCSSSGQAGGC

SEQ ID NO: 16920 - protein, 254 aa, Homo sapiens
  Payload ID: 3376
  Gene Symbol: C7orf43
  Gene Name: chromosome 7 open reading frame 43
  ENSP ID: ENSP00000483668
MHRLFTPQSGFENQMRLCWRRPCGNEERCSVCWSLFLPPGKQLCEEERRAMQAALDSVVCHTPLNNLGFSRKGSALTFSVAFQALRTGLFELSQHMKLKLQFTASVSHPPPEARPLSRKSSPSSPAVRDLVERHQASLGRSQSFSHQQPSRSHLMRSGSVMERRASRPLWPLLLAAPSTCPRTRLCCLWTRLPSASARSWWWNPSSSTVPALFPLTLQRPNAPRGDPCSRAVPPLGCLPDGGEEAWQSCLSCVC

SEQ ID NO: 16921 - protein, 157 aa, Homo sapiens
  Payload ID: 3377
  Gene Symbol: C7orf49
  Gene Name: chromosome 7 open reading frame 49
  Uniprot ID: Q9BWK5
  ENSP ID: ENSP00000376823
METLQSETKTRVLPSWLTAQVATKNVAPMKAPKRMRMAAVPVAAARLPATRTVYCMNEAEIVDVALGILIESRKQEKACEQPALAGADNPEHSPPCSVSPHTSSGSSSEEEDSGKQALAPGLSPSQRPGGSSSACSRSPEEEEEEDVLKYVREIFFS

SEQ ID NO: 16922 - protein, 156 aa, Homo sapiens
  Payload ID: 3377
  Gene Symbol: C7orf49
  Gene Name: chromosome 7 open reading frame 49
  ENSP ID: ENSP00000389941
MADSPGGYKECGTNEGPQEDENGSSASGSSKVRQLWSEDSCESGKLPATRTVYCMNEAEIVDVALGILIESRKQEKACEQPALAGADNPEHSPPCSVSPHTSSGSSSEEEDSGKQALAPGLSPSQRPGGSSSACSRSPEEEEEEDVLKYVREIFFS

SEQ ID NO: 16923 - protein, 102 aa, Homo sapiens
  Payload ID: 3377
  Gene Symbol: C7orf49
  Gene Name: chromosome 7 open reading frame 49
  Uniprot ID: Q9BWK5
  ENSP ID: ENSP00000400024
MNEAEIVDVALGILIESRKQEKACEQPALAGADNPEHSPPCSVSPHTSSGSSSEEEDSGKQALAPGLSPSQRPGGSSSACSRSPEEEEEEDVLKYVREIFFS

SEQ ID NO: 16924 - protein, 102 aa, Homo sapiens; identical to SEQ ID NO: 16923
  Payload ID: 3377
  Gene Symbol: C7orf49
  Gene Name: chromosome 7 open reading frame 49
  Uniprot ID: Q9BWK5
  ENSP ID: ENSP00000473365

SEQ ID NO: 16925 - protein, 69 aa, Homo sapiens
  Payload ID: 3377
  Gene Symbol: C7orf49
  Gene Name: chromosome 7 open reading frame 49
  ENSP ID: ENSP00000480430
METLQSETKTRVLPSWLTAQVATKNVAPMKAPKRMRMAAVPVAAARCDSSGQKTPANLTPCDKDCVLHE

SEQ ID NO: 16926 - protein, 102 aa, Homo sapiens; identical to SEQ ID NO: 16923
  Payload ID: 3377
  Gene Symbol: C7orf49
  Gene Name: chromosome 7 open reading frame 49
  Uniprot ID: Q9BWK5
  ENSP ID: ENSP00000481014

SEQ ID NO: 16927 - protein, 194 aa, Homo sapiens
  Payload ID: 3378
  Gene Symbol: C7orf50
  Gene Name: chromosome 7 open reading frame 50
  Uniprot ID: Q9BRJ6
  ENSP ID: ENSP00000350011
MAKQKRKVPEVTEKKNKKLKKASAEGPLLGPEAAPSGEGAGSKGEAVLRPGLDAEPELSPEEQRVLERKLKKERKKEERQRLREAGLVAQHPPARRSGAELALDYLCRWAQKHKNWRFQKTRQTWLLLHMYDSDKVPDEHFSTLLAYLEGLQGRARELTVQKAEALMRELDEEGSDPPLPGRAQRIRQVLQLLS

SEQ ID NO: 16928 - protein, 194 aa, Homo sapiens; identical to SEQ ID NO: 16927
  Payload ID: 3378
  Gene Symbol: C7orf50
  Gene Name: chromosome 7 open reading frame 50
  Uniprot ID: Q9BRJ6
  ENSP ID: ENSP00000380286

SEQ ID NO: 16929 - protein, 194 aa, Homo sapiens; identical to SEQ ID NO: 16927
  Payload ID: 3378
  Gene Symbol: C7orf50
  Gene Name: chromosome 7 open reading frame 50
  Uniprot ID: Q9BRJ6
  ENSP ID: ENSP00000380288

SEQ ID NO: 16930 - protein, 162 aa, Homo sapiens
  Payload ID: 3378
  Gene Symbol: C7orf50
  Gene Name: chromosome 7 open reading frame 50
  ENSP ID: ENSP00000396542
GPQDASTCFPLGEAVLRPGLDAEPELSPEEQRVLERKLKKERKKEERQRLREAGLVAQHPPARRSGAELALDYLCRWAQKHKNWRFQKTRQTWLLLHMYDSDKVPDEHFSTLLAYLEGLQGRARELTVQKAEALMRELDEEGSDPPLPGRAQRIRQVLQLLS

SEQ ID NO: 16931 - protein, 179 aa, Homo sapiens
  Payload ID: 3378
  Gene Symbol: C7orf50
  Gene Name: chromosome 7 open reading frame 50
  ENSP ID: ENSP00000407380
  MOD_RES (1)..(1): Any amino acid
XAGRAVRTAGASLPRRRPCPRDLTAGSEGEAVLRPGLDAEPELSPEEQRVLERKLKKERKKEERQRLREAGLVAQHPPARRSGAELALDYLCRWAQKHKNWRFQKTRQTWLLLHMYDSDKVPDEHFSTLLAYLEGLQGRARELTVQKAEALMRELDEEGSDPPLPGRAQRIRQVLQLLS

SEQ ID NO: 16932 - protein, 192 aa, Homo sapiens
  Payload ID: 3378
  Gene Symbol: C7orf50
  Gene Name: chromosome 7 open reading frame 50
  ENSP ID: ENSP00000420130
MAKQKRKVPEVTEKKNKKLKKASAEGPLLGPEAAPSGEGAGSKGEAVLRPGLDAEPELSPEEQRVLERKLKKERKKEERQRLREAGLVAQHPPARRSGAELALDYLCRWAQKHKNWRFQKTRQTWLLLHMYDSDKVPDEHFSTLLAYLEGLQGRARELTVQKAEALMRELDEEGSDPPLPGRAQRIRQVLQL

SEQ ID NO: 16933 - protein, 113 aa, Homo sapiens
  Payload ID: 3379
  Gene Symbol: C7orf55
  Gene Name: chromosome 7 open reading frame 55
  Uniprot ID: Q96HJ9
  ENSP ID: ENSP00000297534
MAALGSPSHTFRGLLRELRYLSAATGRPYRDTAAYRYLVKAFRAHRVTSEKLCRAQHELHFQAATYLCLLRSIRKHVALHQEFHGKGERSVEESAGLVGLKLPHQPGGKGWEP

SEQ ID NO: 16934 - protein, 295 aa, Homo sapiens
  Payload ID: 3380
  Gene Symbol: C7orf57
  Gene Name: chromosome 7 open reading frame 57
  Uniprot ID: Q8NEG2
  ENSP ID: ENSP00000335500
MRNTSKELQGATHRYAPCDWYYHVPVKRSEKAVDAPPASQIPGLSNLGDSHSENLPGTRRYWIKETDSEYVKLAKQGGRPDLLKHFAPGTRKGSPVAYSLPDWYIHHSKPPTASQQEVRAVSMPDYMVHEEFNPDQANGSYASRRGPFDFDMKTVWQREAEELEKEKKKLRLPAIDSKYLSKAGTPLGPKNPAGSRLSFPPVPGQKNSSPTNFSKLISNGYKDEWLQQQQRADSDKRTPKTSRASVLSQSPRDLEGPQDAARLQDAEASEGPEDTPESSQSPEESVSASTPAELK

SEQ ID NO: 16935 - protein, 153 aa, Homo sapiens
  Payload ID: 3380
  Gene Symbol: C7orf57
  Gene Name: chromosome 7 open reading frame 57
  Uniprot ID: Q8NEG2
  ENSP ID: ENSP00000391652
MPDYMVHEEFNPDQANGSYASRRGPFDFDMKTVWQREAEELEKEKKKLRLPAIDSKYLSKAGTPLGPKNPAGSRLSFPPVNGYKDEWLQQQQRADSDKRTPKTSRASVLSQSPRDLEGPQDAARLQDAEASEGPEDTPGPEESVSASTPAELK

SEQ ID NO: 16936 - protein, 324 aa, Homo sapiens
  Payload ID: 3380
  Gene Symbol: C7orf57
  Gene Name: chromosome 7 open reading frame 57
  ENSP ID: ENSP00000394648
MLWFRGALGVWVWLAAASQPCKNSNAGRRGQHPRRPAGSCVQRLTMRNTSKELQGATHRYAPCDWYYHVPVKRSEKAVDAPPASQIPGLSNLGDSHSENLPGTRRYWIKETDSEYVKLAKQGGRPDLLKHFAPGTRKGSPVAYSLPDWYIHHSKPPTASQQEVRAVSMPDYMVHEEFNPDQANGSYASRRGPFDFDMKTVWQREAEELEKEKKKLRLPAIDSKYLSKAGTPLGPKNPAGSRLSFPPVNGYKDEWLQQQQRADSDKRTPKTSRASVLSQSPRDLEGPQDAARLQDAEASEGPEDTPESSQSPEESVSASTPAELK

SEQ ID NO: 16937 - protein, 340 aa, Homo sapiens
  Payload ID: 3380
  Gene Symbol: C7orf57
  Gene Name: chromosome 7 open reading frame 57
  ENSP ID: ENSP00000410944
MLWFRGALGVWVWLAAASQPCKNSNAGRRGQHPRRPAGSCVQRLTMRNTSKELQGATHRYAPCDWYYHVPVKRSEKAVDAPPASQIPGLSNLGDSHSENLPGTRRYWIKETDSEYVKLAKQGGRPDLLKHFAPGTRKGSPVAYSLPDWYIHHSKPPTASQQEVRAVSMPDYMVHEEFNPDQANGSYASRRGPFDFDMKTVWQREAEELEKEKKKLRLPAIDSKYLSKAGTPLGPKNPAGSRLSFPPVPGQKNSSPTNFSKLISNGYKDEWLQQQQRADSDKRTPKTSRASVLSQSPRDLEGPQDAARLQDAEASEGPEDTPESSQSPEESVSASTPAELK

SEQ ID NO: 16938 - protein, 157 aa, Homo sapiens
  Payload ID: 3380
  Gene Symbol: C7orf57
  Gene Name: chromosome 7 open reading frame 57
  ENSP ID: ENSP00000442474
MPDYMVHEEFNPDQANGSYASRRGPFDFDMKTVWQREAEELEKEKKKLRLPAIDSKYLSKAGTPLGPKNPAGSRLSFPPVNGYKDEWLQQQQRADSDKRTPKTSRASVLSQSPRDLEGPQDAARLQDAEASEGPEDTPESSQSPEESVSASTPAELK

SEQ ID NO: 16939 - protein, 405 aa, Homo sapiens
  Payload ID: 3381
  Gene Symbol: C7orf60
  Gene Name: chromosome 7 open reading frame 60
  Uniprot ID: Q1RMZ1
  ENSP ID: ENSP00000297145
MEPGAGGRNTARAQRAGSPNTPPPREQERKLEQEKLSGVVKSVHRRLRKKYREVGDFDKIWREHCEDEETLCEYAVAMKNLADNHWAKTCEGEGRIEWCCSVCREYFQNGGKRKALEKDEKRAVLATKTTPALNMHESSQLEGHLTNLSFTNPEFITELLQASGKIRLLDVGSCFNPFLKFEEFLTVGIDIVPAVESVYKCDFLNLQLQQPLQLAQDAIDAFLKQLKNPIDSLPGELFHVVVFSLLLSYFPSPYQRWICCKKAHELLVLNGLLLIITPDSSHQNRHAMMMKSWKIAIESLGFKRFKYSKFSHMHLMAFRKISLKTTSDLVSRNYPGMLYIPQDFNSIEDEEYSNPSCYVRSDIEDEQLAYGFTELPDAPYDSDSGESQASSIPFYELEDPILLLS

SEQ ID NO: 16940 - protein, 387 aa, Homo sapiens
  Payload ID: 3381
  Gene Symbol: C7orf60
  Gene Name: chromosome 7 open reading frame 60
  ENSP ID: ENSP00000408654
RRLRKKYREVGFKHSCFKILTKSKTLRNFEQILFSMGDFDKIWREHCEDEETLCEYAVAMKNLADNHWAKTCEGEGRIEWCCSVCREYFQNGGKRKALEKDEKRAVLATKTTPALNMHESSQLEGHLTNLSFTNPEFITELLQASGKIRLLDVGSCFNPFLKFEEFLTVGIDIVPAVESVYKCDFLNLQLQQPLQLAQDAIDAFLKQLKNPIDSLPGELFHVVVFSLLLSYFPSPYQRWICCKKAHELLVLNGLLLIITPDSSHQNRHAMMMKSWKIAIESLGFKRFKYSKFSHMHLMAFRKISLKTTSDLVSRNYPGMLYIPQDFNSIEDEEYSNPSCYVRSDIEDEQLAYGFTELPDAPYDSDSGESQASSIPFYELEDPILLLS

SEQ ID NO: 16941 - protein, 206 aa, Homo sapiens
  Payload ID: 3382
  Gene Symbol: C7orf61
  Gene Name: chromosome 7 open reading frame 61
  Uniprot ID: Q8IZ16
  ENSP ID: ENSP00000327732
MVVVMKFFRWVRRAWQRIISWVFFWRQKIKPTISGHPDSKKHSLKKMEKTLQVVETLRLVELPKEAKPKLGESPELADPCVLAKTTEETEVELGQQGQSLLQLPRTAVKSVSTLMVSALQSGWQMCSWKSSVSSASVSSQVRTQSPLKTPEAELLWEVYLVLWAVRKHLRRLYRRQERHRRHHVRCHAAPRPNPAQSLKLDAQSPL

SEQ ID NO: 16942 - protein, 191 aa, Homo sapiens
  Payload ID: 3382
  Gene Symbol: C7orf61
  Gene Name: chromosome 7 open reading frame 61
  ENSP ID: ENSP00000412290
  MOD_RES (1)..(1): Any amino acid
XLACGQTRWSGEEGKDSWGGAGGEGREARKLTAPSLLCLLFCGWCCLCPAPLSCLSSLCLGSQVFFWRQKIKPTISGHPDSKKHSLKKMEKTLQVVETLRLVELPKEAKPKLGESPELADPCVLAKTTEETEVELGQQGQSLLQLPRTAVKSVSTLMVSALQSGWQMCSWKSSVSSASVSSQVRTQSPLKT

SEQ ID NO: 16943 - protein, 253 aa, Homo sapiens
  Payload ID: 3383
  Gene Symbol: C7orf62
  Gene Name: chromosome 7 open reading frame 62
  Uniprot ID: Q8TBZ9
  ENSP ID: ENSP00000297203
MSFSVHNQKGSKRPLPLEPLLFLQVPRSNYLHFQEEKQRLHLKKFLLDRMFLVAKIQANVERKDVADYYEQMFQSVLKHHLGEAVTGLLLIYPTSILHILESSSDTLYKVLLDYIGHVKDETVFFIQQMKIIVISHNIPMRLFMQWHVSVIKVPVMYLDDVTQSQSLKEVITDFLTQTHKLSLYLCQTMKVGTKGPGDNLHQVAPDLLLPEQIIKYLCKSEEFMDPATFINMYNRPIHITLDSEVVWPAPSRF

SEQ ID NO: 16944 - protein, 438 aa, Homo sapiens
  Payload ID: 3384
  Gene Symbol: C7orf72
  Gene Name: chromosome 7 open reading frame 72
  Uniprot ID: A4D263
  ENSP ID: ENSP00000297001
MDVEIQDTPGKISISKRSILSGTVENIDYPHYCDLLRKMNMPFVKGLENRHNYGRFEKKCNPAFLKFHPYPPSVLPDYHLHDPYPPPYGPHYPLFPLRDDVTLGDSCSGFMSPGGDADLNPGIGRTIPTLVDFSDVKPQHRVPRPDTGFQTTIKRQKILSEELQQNRRWNSREVPDISIRARLGGWTSPLKVTPLQPHHEGRSLSHIFTFDEEATCTDEGEPLVQTNKKCNAKDSFYKSSTQKAYEDVPWDKMLPPKLVPEETTLEKTADPISQCFTLKRYKGVPAITQMVGELWDRFQTRSFLAPVKPINFVSSSSRSKYIPLYTGHVQSTNADDVDNPLGDIASLAKQRYSKPLYTNTSRAANIPGYTGKVHFTATHPANSNIPSTTPSPDSELHRVFQKEMAVDLFRHQAPLSRLVTTVRPYNPFNKKDKETIDY

SEQ ID NO: 16945 - protein, 47 aa, Homo sapiens
  Payload ID: 3385
  Gene Symbol: C7orf73
  Gene Name: chromosome 7 open reading frame 73
  Uniprot ID: E0CX11
  ENSP ID: ENSP00000425996
MLQFLLGFTLGNVVGMYLAQNYDIPNLAKKLEEIKKDLDAKKKPPSA

SEQ ID NO: 16946 - protein, 45 aa, Homo sapiens
  Payload ID: 3385
  Gene Symbol: C7orf73
  Gene Name: chromosome 7 open reading frame 73
  ENSP ID: ENSP00000485469
MLQFLLGFTLGNVVGMYLAQNYDGIGSPSVSQAGVQWWDLGSLQL

SEQ ID NO: 16947 - protein, 90 aa, Homo sapiens
  Payload ID: 3386
  Gene Symbol: C7orf77
  Gene Name: chromosome 7 open reading frame 77
  Uniprot ID: A4D0Y5
  ENSP ID: ENSP00000480627
MGAERVCTKAPEITQDEAEIYSLTNMEGNIGIKGCEFKSWLFKFYQARSQVLLCGEVKNPYLLTSNKTTVKEQNACLTHPDRSAMAGLLL

SEQ ID NO: 16948 - protein, 84 aa, Homo sapiens
  Payload ID: 3387
  Gene Symbol: C8orf22
  Gene Name: chromosome 8 open reading frame 22
  Uniprot ID: Q8WWR9
  ENSP ID: ENSP00000304926
MASVPSIGCLLARNQYYRKSSVSSVSSLTSSDSVNFIDDDKPQQGLPEVAESTWWFKSFFHSEPVLSNVRIKDLSATGSLSGRS

SEQ ID NO: 16949 - protein, 81 aa, Homo sapiens
  Payload ID: 3387
  Gene Symbol: C8orf22
  Gene Name: chromosome 8 open reading frame 22
  Uniprot ID: Q8WWR9
  ENSP ID: ENSP00000382561
MASVPSIGCLLARNQYYRKSSVSSVSSLTSSDSVNFIDDDKPQQGLPEVAESTWWFKSFFHSEPVLSNVRIKDLSATGMNS

SEQ ID NO: 16950 - protein, 84 aa, Homo sapiens
  Payload ID: 3387
  Gene Symbol: C8orf22
  Gene Name: chromosome 8 open reading frame 22
  Uniprot ID: Q8WWR9
  ENSP ID: ENSP00000428773
MASVPSIGCLLARNQYYRKSSVSSVSSLTSSDSVNFIDDDKPQQGLPEVAESTWWFKSFFHSEPVLSNVRIKDLSATGLQMSTL

SEQ ID NO: 16951 - protein, 84 aa, Homo sapiens; identical to SEQ ID NO: 16950
  Payload ID: 3387
  Gene Symbol: C8orf22
  Gene Name: chromosome 8 open reading frame 22
  Uniprot ID: Q8WWR9
  ENSP ID: ENSP00000430392

SEQ ID NO: 16952 - protein, 229 aa, Homo sapiens
  Payload ID: 3388
  Gene Symbol: C8orf33
  Gene Name: chromosome 8 open reading frame 33
  Uniprot ID: Q9H7E9
  ENSP ID: ENSP00000330361
MAALGHLAGEAAAAPGPGTPCASRGARLPGPVSSARNPSTVCLCPEQPTCSNADSRAHPLGDEGGTASKKQKNKKKTRNRASVANGGEKASEKLAPEEVPLSAEAQAQQLAQELAWCVEQLELGLKRQKPTPKQKEQAIGAIRTLRSKRTPLPRKRQLMHSLFGDYRAQMEAEWREALRALRAAAYSAQVQPVDGATRKKSQRVCRPRSIWRAKATLDMPDEEFRFNFF

SEQ ID NO: 16953 - protein, 201 aa, Homo sapiens
  Payload ID: 3389
  Gene Symbol: C8orf34
  Gene Name: chromosome 8 open reading frame 34
  Uniprot ID: Q49A92
  ENSP ID: ENSP00000319532
MENGFTMCQTGRQHPVACGLHLSGGKEDLNDLRMEGVTTLVPSGSKFNQGRPTYPAEPQAKVTLNICSRCARLQGDNLEERTEESLPILHSPDEKIPDSFDSLPGTEEALMEEGDEFEKASKLTGPGEASSGVGHSLKNYMEEDESLKQLQVVHQPWILPSDTESEGVEAEQEKHLLNQNLCGWDSEFCIFHTLASFLIYK

SEQ ID NO: 16954 - protein, 427 aa, Homo sapiens
  Payload ID: 3389
  Gene Symbol: C8orf34
  Gene Name: chromosome 8 open reading frame 34
  Uniprot ID: Q49A92
  ENSP ID: ENSP00000337174
MTKLITETPDQPIPFLIDHLQSKQGNRGQLQRTLSGSAALWAESEKSESKGTRRDFRSYDKPWQLNAKKPKKSKSDLAVSNISPPSPDSKSLPRSVEHPKWNWRTKPQSRDFDELNHILQESKKLGKALENLSRSIAISDELDKETVTFNSSLLRPRVIGEWIGREENDADPLAAEMLQPPIPRSKNDQWESEDSGSSPAGSLKMEPKNKGLKQQQQQHKKLLAAMLSQDSFESIHSPTPSVTEEDIDNEDDAMELLEDLNDLRMEGVTTLVPSGSKFNQGRPTYPAEPQAKVTLNICSRCARLQGDNLEERTEESLPILHSPDEKIPDSFDSLPGTEEALMEEGDEFEKASKLTGPGEASSGVGHSLKNYMEEDESLKQLQVVHQPWILPSDTESEGVEAEQEKRSADLLLCVPCSSCPTLVYSGL

SEQ ID NO: 16955 - protein, 287 aa, Homo sapiens
  Payload ID: 3389
  Gene Symbol: C8orf34
  Gene Name: chromosome 8 open reading frame 34
  ENSP ID: ENSP00000345255
MASHPQTRIQAYLEKNKIGPLFEELMTKLITETPDQPIPFLIDHLQSKQGNRGQLQRTLSGSAALWAESEKSESKGTRRDFRSYDKPWQLNAKKPKKSKSDLAVSNISPPSPDSKSLPRSVEHPKWNWRTKPQSRDFDELNHILQESKKLGKALENLSRSIAISDELDKETVTFNSSLLRPRVIGEWIGREENDADPLAAEMLQPPIPRSKNDQWESEDSGSSPAGSLKMEPKNKGLKQQQQQHKKLLAAMLSQDSFESIHSPTPSVTEEDIDNEDDAMELLGNFKN

SEQ ID NO: 16956 - protein, 538 aa, Homo sapiens
  Payload ID: 3389
  Gene Symbol: C8orf34
  Gene Name: chromosome 8 open reading frame 34
  Uniprot ID: Q49A92
  ENSP ID: ENSP00000427820
MSSPLASELSELAALRPGFRLSAPHARVAPRAATHARGRGRASHAGQPRLRSSCPGPSPGKRRVVPSGGAQPRVLPALSSRSHLFPMASHPQTRIQAYLEKNKIGPLFEELMTKLITETPDQPIPFLIDHLQSKQGNRGQLQRTLSGSAALWAESEKSESKGTRRDFRSYDKPWQLNAKKPKKSKSDLAVSNISPPSPDSKSLPRSVEHPKWNWRTKPQSRDFDELNHILQESKKLGKALENLSRSIAISDELDKETVTFNSSLLRPRVIGEWIGREENDADPLAAEMLQPPIPRSKNDQWESEDSGSSPAGSLKMEPKNKGLKQQQQQHKKLLAAMLSQDSFESIHSPTPSVTEEDIDNEDDAMELLEDLNDLRMEGVTTLVPSGSKFNQGRPTYPAEPQAKVTLNICSRCARLQGDNLEERTEESLPILHSPDEKIPDSFDSLPGTEEALMEEGDEFEKASKLTGPGEASSGVGHSLKNYMEEDESLKQLQVVHQPWILPSDTESEGVEAEQEKRSADLLLCVPCSSCPTLVYSGL

SEQ ID NO: 16957 - protein, 206 aa, Homo sapiens
  Payload ID: 3389
  Gene Symbol: C8orf34
  Gene Name: chromosome 8 open reading frame 34
  ENSP ID: ENSP00000429081
MTKLITETPDQPIPFLIDHLQSKQGNRGQLQRTLSGSAALWAESEKSESKGTRRDFRSYDKPWQLNAKKPKKSKSDLAVSNISPPSPDSKSLPRSVEHPKWNWRTKPQSRDFDELNHILQESKKLGKALENLSRSIAISDELDKETVTFNSSLLRPRVIGEWIGREENDADPLAAEMLQPPIPRSKNDQWESEDSGSSPAGSLEDT

SEQ ID NO: 16958 - protein, 129 aa, Homo sapiens
  Payload ID: 3389
  Gene Symbol: C8orf34
  Gene Name: chromosome 8 open reading frame 34
  Uniprot ID: Q49A92
  ENSP ID: ENSP00000429102
MASHPQTRIQAYLEKNKIGPLFEELMTKLITETPDQPIPFLIDHLQSKQGNRGQLQRTLSGSAALWAESEKSESKGTRRDFRSYDKPWQLNAKKPKKSKSDLAVSNISPPSPDSKSCKEVSYSNAIQSM

SEQ ID NO: 16959 - protein, 207 aa, Homo sapiens
  Payload ID: 3390
  Gene Symbol: C8orf37
  Gene Name: chromosome 8 open reading frame 37
  Uniprot ID: Q96NL8
  ENSP ID: ENSP00000286688
MAEDLDELLDEVESKFCTPDLLRRGMVEQPKGCGGGTHSSDRNQAKAKETLRSTETFKKEDDLDSLINEILEEPNLDKKPSKLKSKSSGNTSVRASIEGLGKSCSPVYLGGSSIPCGIGTNISWRACDHLRCIACDFLVVSYDDYMWDKSCDYLFFRNNMPEFHKLKAKLIKKKGTRAYACQCSWRTIEEVTDLQTDHQLRWVCGKH

SEQ ID NO: 16960 - protein, 106 aa, Homo sapiens
  Payload ID: 3391
  Gene Symbol: C8orf4
  Gene Name: chromosome 8 open reading frame 4
  Uniprot ID: Q9NR00
  ENSP ID: ENSP00000319914
MKAKRSHQAVIMSTSLRVSPSIHGYHFDTASRKKAVGNIFENTDQESLERLFRNSGDKKAEERAKIIFAIDQDVEEKTRALMALKKRTKDKLFQFLKLRKYSIKVH

SEQ ID NO: 16961 - protein, 159 aa, Homo sapiens
  Payload ID: 3392
  Gene Symbol: C8orf44
  Gene Name: chromosome 8 open reading frame 44
  Uniprot ID: Q96CB5
  ENSP ID: ENSP00000375087
MRKNESYLNQPAPPIPIPTLSLMGGCREHFENHWKGRARWLMPVIPALWEAKAGRSPEVRSSKPAWPTWRNPIFTKNTKISQVLELFLNYQSLICALEKQKRQKGSLAIFCWSFQGGCVSKRPDVPSLKSQKPKRKRITGRKRLSKGFWSLLFSNLGRF

SEQ ID NO: 16962 - protein, 159 aa, Homo sapiens; identical to SEQ ID NO: 16961
  Payload ID: 3392
  Gene Symbol: C8orf44
  Gene Name: chromosome 8 open reading frame 44
  Uniprot ID: Q96CB5
  ENSP ID: ENSP00000428002

SEQ ID NO: 16963 - protein, 85 aa, Homo sapiens
  Payload ID: 3392
  Gene Symbol: C8orf44
  Gene Name: chromosome 8 open reading frame 44
  ENSP ID: ENSP00000431104
MRKNESYLNQPAPPIPIPTLSLMGGCREHFENHWKGRARWLMPVIPALWEAKAGRSPEVRSSKPAWPTWRNPIFTKNTKISQVIL

SEQ ID NO: 16964 - protein, 207 aa, Homo sapiens
  Payload ID: 3393
  Gene Symbol: C8orf46
  Gene Name: chromosome 8 open reading frame 46
  Uniprot ID: Q8TAG6
  ENSP ID: ENSP00000302260
MMHQIYSCSDENIEVFTTVIPSKVSSPARRRAKSSQHLLTKNVVIESDLYTHQPLELLPHRGDRRDPGDRRRFGRLQTARPPTAHPAKASARPVGISEPKTSNLCGNRAYGKSLIPPVPRISVKTSASASLEATAMGTEKGAVLMRGSRHLKKMTEEYPALPQGAEASLPLTGSASCGVPGILRKMWTRHKKKSEYVGATNSAFEAD

SEQ ID NO: 16965 - protein, 147 aa, Homo sapiens
  Payload ID: 3393
  Gene Symbol: C8orf46
  Gene Name: chromosome 8 open reading frame 46
  ENSP ID: ENSP00000429883
MMHQIYSCSDENIEVFTTVIPSKVSSPARRRAKSSQHLLTKNVVIESDLYTHQPLELLPHRGDRRDPGDRRRFGRLQTARPPTAHPAKASARPVGISEPKTSNLCGNRAYGKSLIPPVPRISVKTSASASLEATAMGTEKGAVLMRG

SEQ ID NO: 16966 - protein, 134 aa, Homo sapiens
  Payload ID: 3393
  Gene Symbol: C8orf46
  Gene Name: chromosome 8 open reading frame 46
  Uniprot ID: Q8TAG6
  ENSP ID: ENSP00000430141
MMHQIYSCSDENIEVFTTVIPSKVSSPARRRAKSSQHLLTKNVVIESDLYTHQPLELLPHRGDRRDPGDRRRFGRLQTARPPTAHPAKASARPDTASAPDLSENFSLCLIGGDSHGHREGSCSDERIQTSQEDD

SEQ ID NO: 16967 - protein, 77 aa, Homo sapiens
  Payload ID: 3393
  Gene Symbol: C8orf46
  Gene Name: chromosome 8 open reading frame 46
  ENSP ID: ENSP00000430388
MMHQIYSCSDENIEVFTTVIPSKVSSPARRRAKSSQHLLTKNILSLFLEFTGITKDPETPSMRAPSAKLLPWGSMGP

SEQ ID NO: 16968 - protein, 122 aa, Homo sapiens
  Payload ID: 3393
  Gene Symbol: C8orf46
  Gene Name: chromosome 8 open reading frame 46
  ENSP ID: ENSP00000430501
MMHQIYSCSDENIEVFTTVIPSKVSSPARRRAKSSQHLLTKNVVIESDLYTHQPLELLPHRGDRRDPGDRRRFGRLQTARPPTAHPAKASARPVGISEPKTSNLCGNRAYGKSLIQTSQEDD

SEQ ID NO: 16969 - protein, 48 aa, Homo sapiens
  Payload ID: 3393
  Gene Symbol: C8orf46
  Gene Name: chromosome 8 open reading frame 46
  ENSP ID: ENSP00000473681
MMHQIYSCSDENIEVFTTVIPSKVSSPARRRAKSSQHLLTKNTLLDQG

SEQ ID NO: 16970 - protein, 319 aa, Homo sapiens
  Payload ID: 3394
  Gene Symbol: C8orf48
  Gene Name: chromosome 8 open reading frame 48
  Uniprot ID: Q96LL4
  ENSP ID: ENSP00000297324
MAICPELAQTDKSALANLSDETETLKNSTDEVQTSSSFSSSGGRQSSPLTSGSKLEREKQTPSLEQGDTQSELLDYKNYEKKLSKKWINYLKLKDSNFERHQPDTKLPTEITRVSDEELNALQSYCTMKINLIHRRGDSKKKTSSRHKKLHLGLDVEASERDAFSCTVPDELLNRIYFKNMRTTPKQEAAAKQHISYQCPYCNRKRAELALSAFLKQKKTLLESFLLQERIDEHLHTKDFLTRIGEAHQDFPRLSDDPRIIWKRLTEKSHIRYSGFERSETEQKLQRDGNSACHLPFSLPFLKRLTLIKPELVIVNDNV

SEQ ID NO: 16971 - protein, 365 aa, Homo sapiens
  Payload ID: 3395
  Gene Symbol: C8orf58
  Gene Name: chromosome 8 open reading frame 58
  Uniprot ID: Q8NAV2
  ENSP ID: ENSP00000289989
MMGRRRAFAVDGRDGAGEGLARGCIVPGVTSTYRRIPDAAHGCSSWERGDKFRGVGREALFLKLASRDSGVEMAVGDSPLAALPGLSQDSLDFESSGSSEPPAQVGRLLASQKLGEVLERSRRLPTAPTSLSGQHRSLRLASKPEREVPLGAGQQESMEADTDLEAGLEEEAVGGLGPGAWACLPGQGLRYLEHLCLVLEQMARLQQLYLQLRIQRPPGDPGEEESTRAPLPSPLHTPGNRGQGPWELLSQTEHTGAKAASPPKVEVPSANPPRLPETPVEPTYHLPSSQGHKRDISHWDKVKVLLNRICRRSHHHPEPPAPPDGSDPRIESRDLPERPQCRPHRKTFMPSLVVKKQRAKNLSVG

SEQ ID NO: 16972 - protein, 357 aa, Homo sapiens
  Payload ID: 3395
  Gene Symbol: C8orf58
  Gene Name: chromosome 8 open reading frame 58
  Uniprot ID: Q8NAV2
  ENSP ID: ENSP00000386265
MMGRRRAFAVDGRDGAGEGLARGCIVPGVTSTYRRIPDAAHGCSSWERGDKFRGVGREALFLKLASRDSGVEMAVGDSPLAALPGLSQDSLDFESSGSSEPPAQVGRLLASQKLGEVLERSRRLPTAPTSLSGQHRSLRLASKPEREVPLGAGQQESMEADTDLEAGLEEEAVGGLGPGAWACLPGQGLRYLEHLCLVLEQMARLQQLYLQLRIQRPPGDPGEEESTRAPLPSPLHTPGNRGQGPWELLSQTEHTGAKAASPPKVEVPSANPPRLPETPVEPTYHLPSSQGHKVKVLLNRICRRSHHHPEPPAPPDGSDPRIESRDLPERPQCRPHRKTFMPSLVVKKQRAKNLSVG

SEQ ID NO: 16973 - protein, 148 aa, Homo sapiens
  Payload ID: 3395
  Gene Symbol: C8orf58
  Gene Name: chromosome 8 open reading frame 58
  ENSP ID: ENSP00000428292
MARLQQLYLQLRIQRPPGDPGEEESTRAPLPSPLHTPGNRGQGPWELLSQTEHTGEGPSCLPLSCLPGVPPAGPLSRSLMGCLLALANLTVFLKEQRLLHPQRWRCPVPTLPGCQKPQWSQRTTCHPPRDTSGISPTGTRSRSCSTGS

SEQ ID NO: 16974 - protein, 175 aa, Homo sapiens
  Payload ID: 3395
  Gene Symbol: C8orf58
  Gene Name: chromosome 8 open reading frame 58
  ENSP ID: ENSP00000428335
  MOD_RES (1)..(1): Any amino acid
XFTVPVTHPRQSGAGAMGAAKPDRAHRSKGCFTPKGGGAQCQPSQAARNPSGANVPLAILPGTQGRGQVYVGQVVGWGGGRGGGGCMGTLGASNSGEMTGLIPVWSRRLVLAVATAVSGSLVGGLSVGRALGDPSSSAQRDISHWDKVKVLLNRICRRSHHHPEPPAPPDGSDPR

SEQ ID NO: 16975 - protein, 300 aa, Homo sapiens
  Payload ID: 3395
  Gene Symbol: C8orf58
  Gene Name: chromosome 8 open reading frame 58
  ENSP ID: ENSP00000480712
MMGRRRAFAVDGRDGAGEGLARGCIVPGVTSTYRRIPDAAHGCSSWERGDKFRGVGREALFLKLASRDSGVEMAVGDSPLAALPGLSQDSLDFESSGSSEPPAQVGRLLASQKLGEVLERSRRLPTAPTSLSGQHRSLRLASKPEREVPLGAGQQESMEADTDLEAGLEEEAVGGLGPGAWACLPGQGLRYLEHLCLVLEQMARLQQLYLQLRIQRPPGDPGEEESTRAPLPSPLHTPGNRGQGPWELLSQTEHTGAKAASPPKVEVPSANPPRLPETPVEPTYHLPSSQGHKDRVQGPP

SEQ ID NO: 16976 - protein, 328 aa, Homo sapiens
  Payload ID: 3395
  Gene Symbol: C8orf58
  Gene Name: chromosome 8 open reading frame 58
  ENSP ID: ENSP00000482344
MAVGDSPLAALPGLSQDSLDFESSGSSEPPAQVGRLLASQKLGEVLERSRRLPTAPTSLSGQHRSLRLASKPEREVPLGAGQQESMEADTDLEAGLEEEAVGGLGPGAWACLPGQGLRYLEHLCLVLEQMARLQQLYLQLRIQRPPGDPGEEESTRAPLPSPLHTPGNRGQGPWELLSQTEHTGAKAASPPKVEVPSANPPRLPETPVEPTYHLPSSQGHKRDISHWDKVKVLLNRICRRSHHHPEPPAPPDGSDPRIESRDLPERPQCRPHRKTFMPSLVVKKQRAKPFCRLRPLGAPGDPGWRGLAVKSSSPSALLLLLHIARKSC

SEQ ID NO: 16977 - protein, 43 aa, Homo sapiens
  Payload ID: 3396
  Gene Symbol: C8orf59
  Gene Name: chromosome 8 open reading frame 59
  Uniprot ID: Q8N0T1
  ENSP ID: ENSP00000319020
MAKNKLRGPKSRNVFHIASQKNFKAKNKAKPVTTNLKKVLHFS

SEQ ID NO: 16978 - protein, 45 aa, Homo sapiens
  Payload ID: 3396
  Gene Symbol: C8orf59
  Gene Name: chromosome 8 open reading frame 59
  ENSP ID: ENSP00000428722
MAKNKLRGPKSRNVFHIASQKNFKAKNKAKPVTTNLKKINIMNEE

SEQ ID NO: 16979 - protein, 61 aa, Homo sapiens
  Payload ID: 3396
  Gene Symbol: C8orf59
  Gene Name: chromosome 8 open reading frame 59
  ENSP ID: ENSP00000444092
MAKNKLRGPKSRNVFHIASQKNFKAKNKAKPVTTNLKKIPQQRHESKPVNVDEATRLMALL

SEQ ID NO: 16980 - protein, 61 aa, Homo sapiens; identical to SEQ ID NO: 16979
  Payload ID: 3396
  Gene Symbol: C8orf59
  Gene Name: chromosome 8 open reading frame 59
  ENSP ID: ENSP00000480167

SEQ ID NO: 16981 - protein, 100 aa, Homo sapiens
  Payload ID: 3396
  Gene Symbol: C8orf59
  Gene Name: chromosome 8 open reading frame 59
  Uniprot ID: Q8N0T1
  ENSP ID: ENSP00000481745
MAKNKLRGPKSRNVFHIASQKNFKAKNKAKPVTTNLKKINIMNEEKVNRVNKAFVNVQKELAHFAKSISLEPLQKELIPQQRHESKPVNVDEATRLMALL

SEQ ID NO: 16982 - protein, 100 aa, Homo sapiens; identical to SEQ ID NO: 16981
  Payload ID: 3396
  Gene Symbol: C8orf59
  Gene Name: chromosome 8 open reading frame 59
  Uniprot ID: Q8N0T1
  ENSP ID: ENSP00000482944

SEQ ID NO: 16983 - protein, 100 aa, Homo sapiens; identical to SEQ ID NO: 16981
  Payload ID: 3396
  Gene Symbol: C8orf59
  Gene Name: chromosome 8 open reading frame 59
  Uniprot ID: Q8N0T1
  ENSP ID: ENSP00000484101

SEQ ID NO: 16984 - protein, 100 aa, Homo sapiens; identical to SEQ ID NO: 16981
  Payload ID: 3396
  Gene Symbol: C8orf59
  Gene Name: chromosome 8 open reading frame 59
  Uniprot ID: Q8N0T1
  ENSP ID: ENSP00000484492

SEQ ID NO: 16985 - protein, 100 aa, Homo sapiens; identical to SEQ ID NO: 16981
  Payload ID: 3396
  Gene Symbol: C8orf59
  Gene Name: chromosome 8 open reading frame 59
  Uniprot ID: Q8N0T1
  ENSP ID: ENSP00000484811

SEQ ID NO: 16986 - protein, 294 aa, Homo sapiens
  Payload ID: 3397
  Gene Symbol: C8orf74
  Gene Name: chromosome 8 open reading frame 74
  Uniprot ID: Q6P047
  ENSP ID: ENSP00000307129
MALLTPQGVKEVFQLQRPQGRERLRRLLNWEEFDEQRDSRRSILLDTLYESIIFAVGKGFPWVEVAQVVKFTEELLRETKGCSITEAVTILGNKLRDYRGHFNTTHLLALCDYFHHTFIRHYKLYQYVLGQDQQVDLTVAHLEVCMPPHPLPLAEGMDRDLWIHEQQVATLTEAEAQKRADVLLLKEALRLERENSLQKAFAAAAPAQPGQVLERQELESLICQAVHTQMELLQELLQRQIQNTFAILDLKLQKKTLNLNAPTPIPPPITSHAGQEEALKPQRASKGKKAKARK

SEQ ID NO: 16987 - protein, 99 aa, Homo sapiens
  Payload ID: 3397
  Gene Symbol: C8orf74
  Gene Name: chromosome 8 open reading frame 74
  ENSP ID: ENSP00000429505
  MOD_RES (1)..(1): Any amino acid
XLLTPQGVKEVFQLQRPQGRERLRRLLNWEEFDEQRDSRRSILLDTLYESIIFAVGKGFPWVEVAQVVKFTEELLRETKGAGLQGLGDHLQEVPSSQCK

SEQ ID NO: 16988 - protein, 99 aa, Homo sapiens
  Payload ID: 3397
  Gene Symbol: C8orf74
  Gene Name: chromosome 8 open reading frame 74
  ENSP ID: ENSP00000430613
MALLTPQGVKEVFQLQRPQGRERLRRLLNWEEFDEQRDSRRSILLDTLYESIIFAVGKGFPWVEVAQVVKFTEELLRETKGSVQEPTQPTSCVGMPAEA

SEQ ID NO: 16989 - protein, 99 aa, Homo sapiens; identical to SEQ ID NO: 16988
  Payload ID: 3397
  Gene Symbol: C8orf74
  Gene Name: chromosome 8 open reading frame 74
  ENSP ID: ENSP00000432993

SEQ ID NO: 16990 - protein, 380 aa, Homo sapiens
  Payload ID: 3398
  Gene Symbol: C8orf76
  Gene Name: chromosome 8 open reading frame 76
  Uniprot ID: Q96K31
  ENSP ID: ENSP00000276704
MDSGCWLFGGEFEDSVFEERPERRSGPPASYCAKLCEPQWFYEETESSDDVEVLTLKKFKGDLAYRRQEYQKALQEYSSISEKLSSTNFAMKRDVQEGQARCLAHLGRHMEALEIAANLENKATNTDHLTTVLYLQLAICSSLQNLEKTIFCLQKLISLHPFNPWNWGKLAEAYLNLGPALSAALASSQKQHSFTSSDKTIKSFFPHSGKDCLLCFPETLPESSLFSVEANSSNSQKNEKALTNIQNCMAEKRETVLIETQLKACASFIRTRLLLQFTQPQQTSFALERNLRTQQEIEDKMKGFSFKEDTLLLIAEVMGEDIPEKIKDEVHPEVKCVGSVALTALVTVSSEEFEDKWFRKIKDHFCPFENQFHTEIQILA

SEQ ID NO: 16991 - protein, 86 aa, Homo sapiens
  Payload ID: 3399
  Gene Symbol: C8orf82
  Gene Name: chromosome 8 open reading frame 82
  ENSP ID: ENSP00000316262
MWPPCGTLRTLALARSRGARACSGDGGVSYTQGQSPEPRTREYFYYVDHQGQLFLDDSKMKNFITCFKGNAVPPSPAPSFSLPGSP

SEQ ID NO: 16992 - protein, 216 aa, Homo sapiens
  Payload ID: 3399
  Gene Symbol: C8orf82
  Gene Name: chromosome 8 open reading frame 82
  Uniprot ID: Q6P1X6
  ENSP ID: ENSP00000434593
MWPPCGTLRTLALARSRGARACSGDGGVSYTQGQSPEPRTREYFYYVDHQGQLFLDDSKMKNFITCFKDPQFLVTFFSRLRPNRSGRYEAAFPFLSPCGRERNFLRCEDRPVVFTHLLTADHGPPRLSYCGGGEALAVPFEPARLLPLAANGRLYHPAPERAGGVGLVRSALAFELSACFEYGPGAPALPSHVRWQGRRLALTMDLAPLLLAARSP

SEQ ID NO: 16993 - protein, 134 aa, Homo sapiens
  Payload ID: 3399
  Gene Symbol: C8orf82
  Gene Name: chromosome 8 open reading frame 82
  ENSP ID: ENSP00000436060
  MOD_RES (1)..(1): Any amino acid
XPREREERRARVAEAGAAGTRSAGLLRAGASSRSTAPGVTCWSLPAREENVAALRDAPDPGLGAVAGSPGLQRGWGRFLHAGPESGAADPRVFLLRGPPGPVPSPGADFSPLPGRHPGRPAFFWKPCQKAAACP

SEQ ID NO: 16994 - protein, 216 aa, Homo sapiens; identical to SEQ ID NO: 16992
  Payload ID: 3399
  Gene Symbol: C8orf82
  Gene Name: chromosome 8 open reading frame 82
  Uniprot ID: Q6P1X6
  ENSP ID: ENSP00000436621

SEQ ID NO: 16995 - protein, 261 aa, Homo sapiens
  Payload ID: 3399
  Gene Symbol: C8orf82
  Gene Name: chromosome 8 open reading frame 82
  ENSP ID: ENSP00000437092
  MOD_RES (1)..(1): Any amino acid
XGELGRSGPRLLHGPRPCCVVQLRTLSYKSPAPALTSRRCQGDTRAALPFFGSPVKRQLHVREAAGQVVSAEEVVQLITNLKRGKRCGKELADQGAELFLDDSKMKNFITCFKDPQFLVTFFSRLRPNRSGRYEAAFPFLSPCGRERNFLRCEDRPVVFTHLLTADHGPPRLSYCGGGEALAVPFEPARLLPLAANGRLYHPAPERAGGVGLVRSALAFELSACFEYGPGAPALPSHVRWQGRRLALTMDLAPLLLAARSP

SEQ ID NO: 16996 - protein, 223 aa, Homo sapiens
  Payload ID: 3400
  Gene Symbol: C8orf86
  Gene Name: chromosome 8 open reading frame 86
  Uniprot ID: Q6ZUL3
  ENSP ID: ENSP00000350856
MRPLGKGLLPAEELIRSNLGVGRSLRDCLSQSGKLAEELGSKRLKPAKFGTEGKERVEQRTERQRTGSSKEPRMQIICRRRWREPPPRLLWGCLMPRAQPLLHVTAYENTGHWERLASVVSSKTQQPTVISHSSISITFSHYPPATLDSFLVLEPIKLFPVSSLRSPLCLNCGSCRESIRISGELIGNAHSPAPPRTPELETLGWDKQAVLSGAQVILVCAEV

SEQ ID NO: 16997 - protein, 140 aa, Homo sapiens
  Payload ID: 3400
  Gene Symbol: C8orf86
  Gene Name: chromosome 8 open reading frame 86
  Uniprot ID: Q6ZUL3
  ENSP ID: ENSP00000389615
MRPLGKGLLPAEELIRSNLGVGRSLRDCLSQSGKLAEELGSKRLKPAKFGTEGKERVEQRTERQRTGSSKEPRMQIICRRRWREPPPRLLWGCLMPRAQPLLHVTPPQSSLLELWLLQRKHQNLRGTDWKCTFSSPAQNS

SEQ ID NO: 16998 - protein, 117 aa, Homo sapiens
  Payload ID: 3401
  Gene Symbol: C8orf88
  Gene Name: chromosome 8 open reading frame 88
  Uniprot ID: P0DMB2
  ENSP ID: ENSP00000454561
METKKLIGKPLQPARPVRHLTSPPGAVFPFNFQNEYPCNTQCIQSGVSRCKTNGMQAFSQGLNEQQQQQSPVKKERIKYSRDFLLKLSSVSICRKKPDFLPDHPIVLQKPENNQSFK

SEQ ID NO: 16999 - protein, 75 aa, Homo sapiens
  Payload ID: 3402
  Gene Symbol: C8orf89
  Gene Name: chromosome 8 open reading frame 89
  ENSP ID: ENSP00000478788
MSVLSPEIKCETSKFTRSSFGSCLIFESSWKKAVLETQKIKKEYTTAFGLEELKECIKMPYLPGLQSCQKSAKED

SEQ ID NO: 17000 - protein, 98 aa, Homo sapiens
  Payload ID: 3402
  Gene Symbol: C8orf89
  Gene Name: chromosome 8 open reading frame 89
  ENSP ID: ENSP00000485199
MSVLSPEIKCETSKFTRSSFGSCLIFESSWKKAVLETQKIKKEYTTAFGLEELKECIKMPYLPGLQSCQKSVSSTPLEVPKRLPRADAEVSAVRFWLQ

SEQ ID NO: 17001 - protein, 161 aa, Homo sapiens
  Payload ID: 3402
  Gene Symbol: C8orf89
  Gene Name: chromosome 8 open reading frame 89
  Uniprot ID: P0DMQ9
  ENSP ID: ENSP00000485524
MSVLSPEIKCETSKFTRSSFGSCLIFESSWKKAVLETQKIKKEYTTAFGLEELKECIKMPYLPGLQSCQKSVSSTPLEVPKRLPRADAEVSAVRLKKTKETCSVAPLWEKSKGSGFSDPLTGAPSQYLERLSKIAILEYDTIRQETTTKSKKSKKRDLRDR

SEQ ID NO: 17002 - protein, 376 aa, Homo sapiens
  Payload ID: 3403
  Gene Symbol: C9orf114
  Gene Name: chromosome 9 open reading frame 114
  Uniprot ID: Q5T280
  ENSP ID: ENSP00000354812
MAERGRKRPCGPGEHGQRIEWRKWKQQKKEEKKKWKDLKLMKKLERQRAQEEQAKRLEEEEAAAEKEDRGRPYTLSVALPGSILDNAQSPELRTYLAGQIARACAIFCVDEIVVFDEEGQDAKTVEGEFTGVGKKGQACVQLARILQYLECPQYLRKAFFPKHQDLQFAGLLNPLDSPHHMRQDEESEFREGIVVDRPTRPGHGSFVNCGMKKEVKIDKNLEPGLRVTVRLNQQQHPDCKTYHGKVVSSQDPRTKAGLYWGYTVRLASCLSAVFAEAPFQDGYDLTIGTSERGSDVASAQLPNFRHALVVFGGLQGLEAGADADPNLEVAEPSVLFDLYVNTCPGQGSRTIRTEEAILISLAALQPGLIQAGARHT

SEQ ID NO: 17003 - protein, 87 aa, Homo sapiens
  Payload ID: 3403
  Gene Symbol: C9orf114
  Gene Name: chromosome 9 open reading frame 114
  ENSP ID: ENSP00000473640
TKAGLYWGYTVRLASCLSAVFAEAPFQDGYDLTIGTSERGSDVASAQLPNFRKPSSSPWPPCSLASSRRVPGTPESSKGPRTSVKQQ

SEQ ID NO: 17004 - protein, 388 aa, Homo sapiens
  Payload ID: 3403
  Gene Symbol: C9orf114
  Gene Name: chromosome 9 open reading frame 114
  ENSP ID: ENSP00000481659
MAERGRKRPCGPGEHGQRIEWRKWKQQKKEEKKKWKDLKLMKKLERQRAQEEQAKRLEEEEAAAEKEDRGRPYTLSVALPGSILTMLSRRSFAPTWPVRLPEPVPSSVWMRSWCLMRRARMPRLWRGNSQELEEGAGVRTAGPDPAVPECPQYLRKAFFPKHQDLQFAGLLNPLDSPHHMRQDEESEFREGIVVDRPTRPGHGSFVNCGMKKEVKIDKNLEPGLRVTVRLNQQQHPDCKTYHGKVVSSQDPRTKAGLYWGYTVRLASCLSAVFAEAPFQDGYDLTIGTSERGSDVASASFPTSGMLLWCSGASRVWKLERMLTPTWRWLNPVSSLTCTSIPVLARVAVPSARRKPSSSPWPPCSLASSRRVPGTPESSKGPRTSVKQQ

SEQ ID NO: 17005 - protein, 92 aa, Homo sapiens
  Payload ID: 3404
  Gene Symbol: C9orf116
  Gene Name: chromosome 9 open reading frame 116
  Uniprot ID: Q5BN46
  ENSP ID: ENSP00000360854
MAEECPRACAEPVAPKATAPPERTSDYYRVSADLPGRFNNPGWFRGYRTQKAVSVYRTSNQAYGSRAPTVHEMPRVECSGTILSMFTWRKAS

SEQ ID NO: 17006 - protein, 92 aa, Homo sapiens; identical to SEQ ID NO: 17005
  Payload ID: 3404
  Gene Symbol: C9orf116
  Gene Name: chromosome 9 open reading frame 116
  Uniprot ID: Q5BN46
  ENSP ID: ENSP00000360856

SEQ ID NO: 17007 - protein, 136 aa, Homo sapiens
  Payload ID: 3404
  Gene Symbol: C9orf116
  Gene Name: chromosome 9 open reading frame 116
  Uniprot ID: Q5BN46
  ENSP ID: ENSP00000395281
MAEECPRACAEPVAPKATAPPERTSDYYRVSADLPGRFNNPGWFRGYRTQKAVSVYRTSNQAYGSRAPTVHEMPKVFYPNSNKFSQQLAAGGMFRNNTLNVYLEKSIVTGPDNCITSCDRLNFHPSYNINRPSICD

SEQ ID NO: 17008 - protein, 70 aa, Homo sapiens
  Payload ID: 3404
  Gene Symbol: C9orf116
  Gene Name: chromosome 9 open reading frame 116
  ENSP ID: ENSP00000396392
  MOD_RES (1)..(1): Any amino acid
XIRAVGGRAVGGESPVVVSAPLICVGTQKAVSVYRTSNQAYGSRAPTVHEMPRVECSGTILSMFTWRKAS

SEQ ID NO: 17009 - protein, 196 aa, Homo sapiens
  Payload ID: 3405
  Gene Symbol: C9orf129
  Gene Name: chromosome 9 open reading frame 129
  Uniprot ID: Q5T035
  ENSP ID: ENSP00000364568
MPGMVPPHVPPQMLNIPQTSLQAKPVAPQVPSPGGAPGQGPYPYSLSEPAPLTLDTSGKNLTEQNSYSNIPHEGKHTPLYERSLPINPAQSGSPNHVDSAYFPGSSTSSSSDNDEGSGGATKYTIYWGFRATDHHVQGRDSQARGTAAHWHGGHVCSPNVFWRISHGPAQQLTFPTEQAAPPVCPAPASRRLSAPG

SEQ ID NO: 17010 - protein, 1079 aa, Homo sapiens
  Payload ID: 3406
  Gene Symbol: C9orf131
  Gene Name: chromosome 9 open reading frame 131
  Uniprot ID: Q5VYM1
  ENSP ID: ENSP00000308279
MEWLLEDLLGAKGDMGLLWGQLTHALACRHCGSSCFQSPGNLVTLFLFVVWQIQRWWQLGRLRQLHPWCSGNMVQGKELPLLHRVAFLDHLCKQKSEVEEEGEEEEEGEDEASLDPLKPCSPTKEAPTGEQATPAPPQPSCGSEGLLKAIGIPEQTVMQPVSPSRSFPIFQILTSFPVRHKIASGNRQQQRKSQLFWGLPSLHSESLEAIFLSSGGPSPLKWSVCSSVFFNKLAFLPRSNLLLPQYHSSAQFSTHGAHTMEDLEGMAPDPQLLPPPSSPSVSSLLLHLRPFPVDHKGVLSGAEAPTQSPGTSPLEVLPGYETHLETTGHKKMPQAFEPPMPPPCQSPASLSEPRKVSPEGGLAISKDFWGTVGYREKPQASESSMPVPCPPLDSLPELQRESSLEDPSRYKPQWECRENSGNLWAFESPVLDLNPELSGTSPECVPPASETPWKGMQSRENIWVPADPVSPPSLPSVPLLESLVMGPQGVLSESKALWETMGQKENLWASDSPDPVHSTPPTTLMEPHRINPGECLATSEATWKDTEHSRNSSASRSPSLALSPPPALAPELLRVRSMGVLSDSEARCGDIQKTKNSWASKHPACNLPQDLHGASPLGVLSDSQSIVGEMEQKENCVPVFPGRGSSPSSNSVSKSHVSEPIADQSNYKPDGEAVEQRKNHWATELPAPSSLSTPLPEPHIDLELVWRNVQQREVPQGPSPLAVDPLHPVPQPPTLAEAVKIERTHPGLPKGVTCPGVKAEAPLSQRWTVPELLTHPGIHAWQWSRELKLRLKKLRQSPASRAPGPSQSFCSSPILSSTIPDFWGLPSCPPQQIYPPNPCPHSSSCHPQEVQRTVPQPVQSSHCHHFQSSSQLQPQESGRAEQGSQRGEKMKGKMVSQVPSQGPCVHMEAGVDYLSPGPGEPSNSKVLVSGKRKDKASASSSAKKREHPRKPKAGDHRRGTARLGLSTVTGKNHPAQARSLVEAPVSTFPQRSQHRGQSSQHTALPQLLLPKASGPQDQPEAGRRASDILTPRHCKHCPWAHMEKYLSFPTLKASLTRGLQKVLAKCLDNHRPLPTKSSQ

SEQ ID NO: 17011 - protein, 1006 aa, Homo sapiens
  Payload ID: 3406
  Gene Symbol: C9orf131
  Gene Name: chromosome 9 open reading frame 131
  Uniprot ID: Q5VYM1
  ENSP ID: ENSP00000346472
MLRKELPLLHRVAFLDHLCKQKSEVEEEGEEEEEGEDEASLDPLKPCSPTKEAPTGEQATPAPPQPSCGSEGLLKAIGIPEQTVMQPVSPSRSFPIFQILTSFPVRHKIASGNRQQQRKSQLFWGLPSLHSESLEAIFLSSGGPSPLKWSVCSSVFFNKLAFLPRSNLLLPQYHSSAQFSTHGAHTMEDLEGMAPDPQLLPPPSSPSVSSLLLHLRPFPVDHKGVLSGAEAPTQSPGTSPLEVLPGYETHLETTGHKKMPQAFEPPMPPPCQSPASLSEPRKVSPEGGLAISKDFWGTVGYREKPQASESSMPVPCPPLDSLPELQRESSLEDPSRYKPQWECRENSGNLWAFESPVLDLNPELSGTSPECVPPASETPWKGMQSRENIWVPADPVSPPSLPSVPLLESLVMGPQGVLSESKALWETMGQKENLWASDSPDPVHSTPPTTLMEPHRINPGECLATSEATWKDTEHSRNSSASRSPSLALSPPPALAPELLRVRSMGVLSDSEARCGDIQKTKNSWASKHPACNLPQDLHGASPLGVLSDSQSIVGEMEQKENCVPVFPGRGSSPSSNSVSKSHVSEPIADQSNYKPDGEAVEQRKNHWATELPAPSSLSTPLPEPHIDLELVWRNVQQREVPQGPSPLAVDPLHPVPQPPTLAEAVKIERTHPGLPKGVTCPGVKAEAPLSQRWTVPELLTHPGIHAWQWSRELKLRLKKLRQSPASRAPGPSQSFCSSPILSSTIPDFWGLPSCPPQQIYPPNPCPHSSSCHPQEVQRTVPQPVQSSHCHHFQSSSQLQPQESGRAEQGSQRGEKMKGKMVSQVPSQGPCVHMEAGVDYLSPGPGEPSNSKVLVSGKRKDKASASSSAKKREHPRKPKAGDHRRGTARLGLSTVTGKNHPAQARSLVEAPVSTFPQRSQHRGQSSQHTALPQLLLPKASGPQDQPEAGRRASDILTPRHCKHCPWAHMEKYLSFPTLKASLTRGLQKVLAKCLDNHRPLPTKSSQ

SEQ ID NO: 17012 - protein, 256 aa, Homo sapiens
  Payload ID: 3406
  Gene Symbol: C9orf131
  Gene Name: chromosome 9 open reading frame 131
  ENSP ID: ENSP00000368019
MEWLLEDLLGAKGDMGLLWGQLTHALACRHCGSSCFQSPGNLELPLLHRVAFLDHLCKQKSEVEEEGEEEEEGEDEASLDPLKPCSPTKEAPTGEQATPAPPQPSCGSEGLLKAIGIPEQTVMQPVSPSRSFPIFQILTSFPVRHKIASGNRQQQRKSQLFWGLPSLHSESLEAIFLSSGGPSPLKWSVCSSVFFNKLAFLPRSNLLLPQYHSSAQFSTHGAHTMEDLEGMAPDPQLLPPPSSPSVSSLLLHLRPF

SEQ ID NO: 17013 - protein, 1031 aa, Homo sapiens
  Payload ID: 3406
  Gene Symbol: C9orf131
  Gene Name: chromosome 9 open reading frame 131
  Uniprot ID: Q5VYM1
  ENSP ID: ENSP00000393683
MLRKIQRWWQLGRLRQLHPWCSGNMVQGKELPLLHRVAFLDHLCKQKSEVEEEGEEEEEGEDEASLDPLKPCSPTKEAPTGEQATPAPPQPSCGSEGLLKAIGIPEQTVMQPVSPSRSFPIFQILTSFPVRHKIASGNRQQQRKSQLFWGLPSLHSESLEAIFLSSGGPSPLKWSVCSSVFFNKLAFLPRSNLLLPQYHSSAQFSTHGAHTMEDLEGMAPDPQLLPPPSSPSVSSLLLHLRPFPVDHKGVLSGAEAPTQSPGTSPLEVLPGYETHLETTGHKKMPQAFEPPMPPPCQSPASLSEPRKVSPEGGLAISKDFWGTVGYREKPQASESSMPVPCPPLDSLPELQRESSLEDPSRYKPQWECRENSGNLWAFESPVLDLNPELSGTSPECVPPASETPWKGMQSRENIWVPADPVSPPSLPSVPLLESLVMGPQGVLSESKALWETMGQKENLWASDSPDPVHSTPPTTLMEPHRINPGECLATSEATWKDTEHSRNSSASRSPSLALSPPPALAPELLRVRSMGVLSDSEARCGDIQKTKNSWASKHPACNLPQDLHGASPLGVLSDSQSIVGEMEQKENCVPVFPGRGSSPSSNSVSKSHVSEPIADQSNYKPDGEAVEQRKNHWATELPAPSSLSTPLPEPHIDLELVWRNVQQREVPQGPSPLAVDPLHPVPQPPTLAEAVKIERTHPGLPKGVTCPGVKAEAPLSQRWTVPELLTHPGIHAWQWSRELKLRLKKLRQSPASRAPGPSQSFCSSPILSSTIPDFWGLPSCPPQQIYPPNPCPHSSSCHPQEVQRTVPQPVQSSHCHHFQSSSQLQPQESGRAEQGSQRGEKMKGKMVSQVPSQGPCVHMEAGVDYLSPGPGEPSNSKVLVSGKRKDKASASSSAKKREHPRKPKAGDHRRGTARLGLSTVTGKNHPAQARSLVEAPVSTFPQRSQHRGQSSQHTALPQLLLPKASGPQDQPEAGRRASDILTPRHCKHCPWAHMEKYLSFPTLKASLTRGLQKVLAKCLDNHRPLPTKSSQ

SEQ ID NO: 17014 - protein, 9 aa, Homo sapiens
  Payload ID: 3406
  Gene Symbol: C9orf131
  Gene Name: chromosome 9 open reading frame 131
  ENSP ID: ENSP00000412967
  MOD_RES (1)..(1): Any amino acid
XVQGKVGDL

SEQ ID NO: 17015 - protein, 14 aa, Homo sapiens
  Payload ID: 3406
  Gene Symbol: C9orf131
  Gene Name: chromosome 9 open reading frame 131
  ENSP ID: ENSP00000444996
MVQGKELPLLHRVA

SEQ ID NO: 17016 - protein, 13 aa, Homo sapiens
  Payload ID: 3406
  Gene Symbol: C9orf131
  Gene Name: chromosome 9 open reading frame 131
  ENSP ID: ENSP00000445600
MQPVSPSRSFPIF

SEQ ID NO: 17017 - protein, 229 aa, Homo sapiens
  Payload ID: 3407
  Gene Symbol: C9orf135
  Gene Name: chromosome 9 open reading frame 135
  Uniprot ID: Q5VTT2
  ENSP ID: ENSP00000366402
MDSLDRSCQDWCDRKQHWLEIGPPDLVERKGSLTLRSHHKKYSKPVLVYSWHRDREAFPKGYDIEGPEKVKKLCNSTYRRLGTDESPIWTSETHEKLSQMCLNTEWVEMKSKALLNEETVSSGIIERVTGLPATGFGAVFPRHPPDWSKMCALTTYSEDYVPPYDYQPHAYPCQDDYSIVHRKCRSQFTDLNGSKRFGINTWHDESGIYANSDVKQKLYPLTSGPIVPI

SEQ ID NO: 17018 - protein, 159 aa, Homo sapiens
  Payload ID: 3407
  Gene Symbol: C9orf135
  Gene Name: chromosome 9 open reading frame 135
  Uniprot ID: Q5VTT2
  ENSP ID: ENSP00000431855
MDSLDRSCQDWCDRKQHWLEIGPPDLVERKGSLTLRSHHKKYSKPVLVYSWHRDREAFPKGYDIEGPEKVKKLCNSTYRRLGTDESPIWTSETHEKLSQMCLNTEWVEMKSKALLNEETVSSGIIERVTGLPATGFGAVFPRHPPDWSKMLIPVKMIIP

SEQ ID NO: 17019 - protein, 149 aa, Homo sapiens
  Payload ID: 3407
  Gene Symbol: C9orf135
  Gene Name: chromosome 9 open reading frame 135
  ENSP ID: ENSP00000433123
  MOD_RES (1)..(1): Any amino acid
XERKGSLTLRSHHKKYSKPVLVYSWHRDREAFPKGYDIEGPEKVKKLCNSTYRRLGTDESPIWTSETHEKLSQMCLNTEWVEMKSKALLNEETVSSGIIERVTGLPATGFGAVFPRHPPDWSKMLVVPKLLQLYKMFLDSEGLFAGAKV

SEQ ID NO: 17020 - protein, 37 aa, Homo sapiens
  Payload ID: 3407
  Gene Symbol: C9orf135
  Gene Name: chromosome 9 open reading frame 135
  ENSP ID: ENSP00000433973
  MOD_RES (1)..(1): Any amino acid
XKQHWLEIGPPDLVERKGSLTLRSHHKKYSKPVLVYS

SEQ ID NO: 17021 - protein, 50 aa, Homo sapiens
  Payload ID: 3407
  Gene Symbol: C9orf135
  Gene Name: chromosome 9 open reading frame 135
  ENSP ID: ENSP00000434032
MDSLDRSCQDWCDRKQHWLEIGPPDLVERKGSLTLRSHHKKYSKPVLVYS

SEQ ID NO: 17022 - protein, 50 aa, Homo sapiens; identical to SEQ ID NO: 17021
  Payload ID: 3407
  Gene Symbol: C9orf135
  Gene Name: chromosome 9 open reading frame 135
  ENSP ID: ENSP00000436701

SEQ ID NO: 17023 - protein, 204 aa, Homo sapiens
  Payload ID: 3408
  Gene Symbol: C9orf142
  Gene Name: chromosome 9 open reading frame 142
  Uniprot ID: Q9BUH6
  ENSP ID: ENSP00000360682
MDPLSPPLCTLPPGPEPPRFVCYCEGEESGEGDRGGFNLYVTDAAELWSTCFTPDSLAALKARFGLSAAEDITPRFRAACEQQAVALTLQEDRASLTLSGGPSALAFDLSKVPGPEAAPRLRALTLGLAKRVWSLERRLAAAEETAVSPRKSPRPAGPQLFLPDPDPQRGGPGPGVRRRCPGESLINPGFKSKKPAGGVDFDET

SEQ ID NO: 17024 - protein, 239 aa, Homo sapiens
  Payload ID: 3409
  Gene Symbol: C9orf152
  Gene Name: chromosome 9 open reading frame 152
  Uniprot ID: Q5JTZ5
  ENSP ID: ENSP00000383456
MEGLPCPCPALPHFWQLRSHLMAEGSRTQAPGKGPPLSIQFLRAQYEGLKRQQRTQAHLLVLPKGGNTPAPAESMVNAVWINKERRSSLSLEEADSEVEGRLEEAAQGCLQAPKSPWHTHLEMHCLVQTSPQDTSHQVHHRGKLVGSDQRLPPEGDTHLFETNQMTQQGTGIPEAAQLPCQVGNTQTKAVESGLKFSTQCPLSIKNPHRSGKPAYYPFPQRKTPRISQAARNLGLYGSA

SEQ ID NO: 17025 - protein, 95 aa, Homo sapiens
  Payload ID: 3410
  Gene Symbol: C9orf153
  Gene Name: chromosome 9 open reading frame 153
  Uniprot ID: Q5TBE3
  ENSP ID: ENSP00000344865
MFLTGDTSPAEDNREATLPQCSLPELYACIENFNKESKKSNLLKMHGISLNEAQEVLARNLNVMSFTRGADVRGDLQPVIRKTIHESKGSGMEIF

SEQ ID NO: 17026 - protein, 101 aa, Homo sapiens
  Payload ID: 3410
  Gene Symbol: C9orf153
  Gene Name: chromosome 9 open reading frame 153
  Uniprot ID: Q5TBE3
  ENSP ID: ENSP00000365169
MFLTGDTSPAEDNREATLPQCSLPELYACIENFNKESKKSNLLKMHGISLNEAQEVLARNLNVMSFTRGADVRGDLQPVISVNKMNKPGKHRKTPSPKINK

SEQ ID NO: 17027 - protein, 95 aa, Homo sapiens; identical to SEQ ID NO: 17025
  Payload ID: 3410
  Gene Symbol: C9orf153
  Gene Name: chromosome 9 open reading frame 153
  Uniprot ID: Q5TBE3
  ENSP ID: ENSP00000484453

SEQ ID NO: 17028 - protein, 101 aa, Homo sapiens; identical to SEQ ID NO: 17026
  Payload ID: 3410
  Gene Symbol: C9orf153
  Gene Name: chromosome 9 open reading frame 153
  Uniprot ID: Q5TBE3
  ENSP ID: ENSP00000484765

SEQ ID NO: 17029 - protein, 83 aa, Homo sapiens
  Payload ID: 3411
  Gene Symbol: C9orf16
  Gene Name: chromosome 9 open reading frame 16
  Uniprot ID: Q9BUW7
  ENSP ID: ENSP00000362085
MSGPNGDLGMPVEAGAEGEEDGFGEAEYAAINSMLDQINSCLDHLEEKNDHLHARLQELLESNRQTRLEFQQQLGEAPSDASP

SEQ ID NO: 17030 - protein, 976 aa, Homo sapiens
  Payload ID: 3412
  Gene Symbol: C9orf172
  Gene Name: chromosome 9 open reading frame 172
  Uniprot ID: C9J069
  ENSP ID: ENSP00000412388
MTRTDPPDLLVSTVYQDIKVATPGPASKCSPCERSVARPAEPAPFNKRHCRSFDFLEALDGPAMETLPEPPPPESAVPRARTREAEPRRRARSKSAPRAPPGLTPAPASPPVLPRRGREAQRAARAEASPRREPAYPALRALANELHPIKLQPQRGGPGRVAPLCAAAGRCAPPEPPAGPAPHVRCRLDIKPDDAVLQHATRGSRSCGPTEAAHWARPAPQFHGLTVPGPRHMALSRTPTPSDSYCADPRAFYCDGPLPGPRDYAERRSLPFTTPPGPTQFFYTEEPQGFRGSFAASPGPTFDAYYPRPYPSEELSGPSPRRMGGYYAGEVRTFPIQEPPSRSYYGEAPRAYGLPYGPRYVPEEPRAHSTARPFYTEDFGRYRERDVLARTYPHPRSSPAWADWGPRPYRTLQVVPPSDPDPLLASWHGGTGTSPPRLATDSRHYSRSWDNILAPGPRREDPLGRGRSYENLLGREVREPRGVSPEGRRPPVVVNLSTSPRRYAALSLSETSLTEKGRAGEGLGRNWYVTPEITITDNDLRATERPSARAWELPGGRTRPPPHAAPDGPTSGRQRSLEQLDELITDLVIDSRPTAGQASEPAADCLGPQLRRLLDSRPAGSGAPALAPPRSPPASAGSAEEPAAPGEAADASPEPSADEDDLMTCSNARCRRTETMFNACLYFKSCHSCYTYYCSRLCRREDWDAHKARCVYGRVGSVCRHVLQFCRDSGPVHRAFSRIARVGFLSRGRGVLFLGFPSPGSADNFLRFGLEGLLLSPTYLSLRELATHAAPLGSYARELAAAGRLYEPAECFLLSVSVAVGPGTAPPGTPALPAPAPRSHGPTVRKFAKVALAAGSPARPPPARSREPDMETLILTPPPGTAGLDQDGEAGRRAREVAFIHIQRELRLRGVFLRHEFPRVYEQLCEFVEANRRFTPTTIYPTDRRTGRPFMCMIMAASEPRALDWVASANLLDDIM

SEQ ID NO: 17031 - protein, 386 aa, Homo sapiens
  Payload ID: 3413
  Gene Symbol: C9orf173
  Gene Name: chromosome 9 open reading frame 173
  Uniprot ID: Q8N7X2
  ENSP ID: ENSP00000373583
MMNSDQKAVKFLANFYINGGKHWTHGHLRQTQPEPTQPKASVLLLGPEPGMAWDETQPPKMKEIPVGLRLQTGTPQESLPTYTQTLRELLLEQRPLITADLEVPSPTRYQVPSPSVRESSPHPHYSIGCKHQGREGGGRRAWQTLWFQSESPFTQKADFDQEQKWPSPAHYQLLSRPAFPAFSFRGCHSASKTPEGHTHLGLPGARGLGLRVQPQSLLQASLQAPGKRCPGPNTYNILPGSRLQSPRSPAFSMSRSPAFTSWLSTSFSFGSPNPWPSRLPRGGLQLTLPFGAWRGHPGCTQTQAPRHRPLLHALEPAGHNLLGPATEWNHGLPRGFPRPPLGLGAPAWPSDPLGTPMHPSGWPTLLWAVDKAGPAWIPHLPISPLH

SEQ ID NO: 17032 - protein, 308 aa, Homo sapiens
  Payload ID: 3413
  Gene Symbol: C9orf173
  Gene Name: chromosome 9 open reading frame 173
  Uniprot ID: Q8N7X2
  ENSP ID: ENSP00000391218
MMNSDQKAVKFLANFYINGGKHWTHGHLRQTQPEPTQPKASVLLLGPEPGMAWDETQPPKMKEIPVGLRLQTGTPQESLPTYTQTLRELLLEQRPLITADLEVPSPTRYQVPSPSVRESSPHPHYSIGCKHQGREGGGRRAWQTLWFQSESPFTQKADFDQEQKWPSPAHYQLLSRPAFPAFSFRGCHSASKTPEGHTHLGLPGARGLGLRVQPQSLLQASLQAPGKRCPGPNTYNILPGSRLQSPRSPAFSMSRSPAFTSWLSTSRTPGPAAYHVEDCNSRFPSAPGVVIQGVRRPKRHDTGPFCTL

SEQ ID NO: 17033 - protein, 331 aa, Homo sapiens
  Payload ID: 3413
  Gene Symbol: C9orf173
  Gene Name: chromosome 9 open reading frame 173
  Uniprot ID: Q8N7X2
  ENSP ID: ENSP00000477998
MMNSDQKAVKFLANFYINGGKHWTHGHLRQTQPEPTQPKASVLLLGPEPGMAWDETQPPKMKEIPVGLRLQTGTPQESLPTYTQTLRELLLEQRPLITADLEVPSPTRYQVPSPSVRESSPHPHYSIGCKHQGREGGGRRAWQTLWFQSESPFTQKADFDQEQKASLQAPGKRCPGPNTYNILPGSRLQSPRSPAFSMSRSPAFTSWLSTSFSFGSPNPWPSRLPRGGLQLTLPFGAWRGHPGCTQTQAPRHRPLLHALEPAGHNLLGPATEWNHGLPRGFPRPPLGLGAPAWPSDPLGTPMHPSGWPTLLWAVDKAGPAWIPHLPISPLH

SEQ ID NO: 17034 - protein, 83 aa, Homo sapiens
  Payload ID: 3413
  Gene Symbol: C9orf173
  Gene Name: chromosome 9 open reading frame 173
  ENSP ID: ENSP00000478004
KAVKFLANFYINGGKHWTHGHLRQTQPEPTQPKASVLLLGPEPGMAWDETQPPKMKEIPVGLRLQTGTPQESLPTYTQTLREL

SEQ ID NO: 17035 - protein, 253 aa, Homo sapiens
  Payload ID: 3413
  Gene Symbol: C9orf173
  Gene Name: chromosome 9 open reading frame 173
  ENSP ID: ENSP00000482144
MMNSDQKAVKFLANFYINGGKHWTHGHLRQTQPEPTQPKASVLLLGPEPGMAWDETQPPKMKEIPVGLRLQTGTPQESLPTYTQTLRELLLEQRPLITADLEVPSPTRYQVPSPSVRESSPHPHYSIGCKHQGREGGGRRAWQTLWFQSESPFTQKADFDQEQKASLQAPGKRCPGPNTYNILPGSRLQSPRSPAFSMSRSPAFTSWLSTSRTPGPAAYHVEDCNSRFPSAPGVVIQGVRRPKRHDTGPFCTL

SEQ ID NO: 17036 - protein, 130 aa, Homo sapiens
  Payload ID: 3413
  Gene Symbol: C9orf173
  Gene Name: chromosome 9 open reading frame 173
  ENSP ID: ENSP00000483862
MMNSDQKAVKFLANFYINGGKHWTHGHLRQTQPEPTQPKASVLLLGPEPGMAWDETQPPKMKEIPVGLRLQTGTPQESLPTYTQTLRELLLEQRPLITADLEVPSPTRGRWPQGMADFVVPERKPLHAES

SEQ ID NO: 17037 - protein, 262 aa, Homo sapiens
  Payload ID: 3414
  Gene Symbol: C9orf24
  Gene Name: chromosome 9 open reading frame 24
  Uniprot ID: Q8NCR6
  ENSP ID: ENSP00000297623
MFLFSRKTRTPISTYSDSYRAPTSIKEVYKDPPLCAWEANKFLTPGLTHTMERHVDPEALQKMAKCAVQDYTYRGSISGHPYLPEKYWLSQEEADKCSPNYLGSDWYNTWRMEPYNSSCCNKYTTYLPRLPKEARMETAVRGMPLECPPRPERLNAYEREVMVNMLNSLSRNQQLPRITPRCGCVDPLPGRLPFHGYESACSGRHYCLRGMDYYASGAPCTDRRLRPWCREQPTMCTSLRAPARNAVCCYNSPAVILPISEP

SEQ ID NO: 17038 - protein, 164 aa, Homo sapiens
  Payload ID: 3414
  Gene Symbol: C9orf24
  Gene Name: chromosome 9 open reading frame 24
  Uniprot ID: Q8NCR6
  ENSP ID: ENSP00000368419
METAVRGMPLECPPRPERLNAYEREVMVNMLNSLSRNQQLPRITPRCGCVDPLPGRLPFHGYESACSGRHYCLRGMDYYASGAPCTDRRLRPWCREQPTVRCVPPYEHRPGMQCAVTTPPPSYYPYPNLRWDTSHFKKSGGPQRNNYVIHPEFVSETYPDYRCW

SEQ ID NO: 17039 - protein, 111 aa, Homo sapiens
  Payload ID: 3414
  Gene Symbol: C9orf24
  Gene Name: chromosome 9 open reading frame 24
  Uniprot ID: Q8NCR6
  ENSP ID: ENSP00000368421
METAVRGMPLECPPRPERLNAYEREVMVNMLNSLSRNQQLPRITPRCGCVPPYEHRPGMQCAVTTPPPSYYPYPNLRWDTSHFKKSGGPQRNNYVIHPEFVSETYPDYRCW

SEQ ID NO: 17040 - protein, 164 aa, Homo sapiens; identical to SEQ ID NO: 17038
  Payload ID: 3414
  Gene Symbol: C9orf24
  Gene Name: chromosome 9 open reading frame 24
  Uniprot ID: Q8NCR6
  ENSP ID: ENSP00000368422

SEQ ID NO: 17041 - protein, 127 aa, Homo sapiens
  Payload ID: 3414
  Gene Symbol: C9orf24
  Gene Name: chromosome 9 open reading frame 24
  Uniprot ID: Q8NCR6
  ENSP ID: ENSP00000368428
METAVRGMPLECPPRPERLNAYEREVMVNMLNSLSRNQQLPRITPRCGCVDPLPGRLPFHGYESACSGRHYCLRGMDYYASGAPCTDRRLRPWCREQPTMCTSLRAPARNAVCCYNSPAVILPISEP

SEQ ID NO: 17042 - protein, 126 aa, Homo sapiens
  Payload ID: 3414
  Gene Symbol: C9orf24
  Gene Name: chromosome 9 open reading frame 24
  ENSP ID: ENSP00000389687
  MOD_RES (1)..(1): Any amino acid
XAWEANKFLTPGLTHTMERHVDPEALQKMAKCAVQDYTYRGSISGHPYLPEKYWLSQEEADKCSPNYLGSDWYNTWRMEPYNSSCCNKYTTYLPRLPKVSVAPSTDVWGLGHAYPTTSQTTVTDIS

SEQ ID NO: 17043 - protein, 566 aa, Homo sapiens
  Payload ID: 3415
  Gene Symbol: C9orf3
  Gene Name: chromosome 9 open reading frame 3
  Uniprot ID: Q8N6M6
  ENSP ID: ENSP00000277198
MDIQLDPARDDLPLMANTSHILVKHYVLDLDVDFESQVIEGTIVLFLEDGNRFKKQNSSIEEACQSESNKACKFGMPEPCHIPVTNARTFSSEMEYNDFAICSKGEKDTSDKDGNHDNQEHASGISSSKYCCDTGNHGSEDFLLVLDCCDLSVLKVEEVDVAAVPGLEKFTRSPELTVVSEEFRNQIVRELVTLPANRWREQLDYYARCSQAPGCGELLFDTDTWSLQIRKTGAQTATDFPHAIRIWYKTKPEGRSVTWTSDQSGRPCVYTVGSPINNRALFPCQEPPVAMSTWQATVRAAASFVVLMSGENSAKPTQLWEECSSWYYYVTMPMPASTFTIAVGCWTEMKMETWSSNDLATERPFSPSEANFRHVGVCSHMEYPCRFQNASATTQEIIPHRVFAPVCLTGACQETLLRLIPPCLSAAHSVLGAHPFSRLDVLIVPANFPSLGMASPHIMFLSQSILTGGNHLCGTRLCHEIAHAWFGLAIGARDWTEEWLSEGFATHLEDVFWATAQQLAPYEAREQQELRACLRWRRLQDEMQCSPEEMQVLRFPHVGGCSGSFS

SEQ ID NO: 17044 - protein, 720 aa, Homo sapiens
  Payload ID: 3415
  Gene Symbol: C9orf3
  Gene Name: chromosome 9 open reading frame 3
  Uniprot ID: Q8N6M6
  ENSP ID: ENSP00000297979
MDIQLDPARDDLPLMANTSHILVKHYVLDLDVDFESQVIEGTIVLFLEDGNRFKKQNSSIEEACQSESNKACKFGMPEPCHIPVTNARTFSSEMEYNDFAICSKGEKDTSDKDGNHDNQEHASGISSSKYCCDTGNHGSEDFLLVLDCCDLSVLKVEEVDVAAVPGLEKFTRSPELTVVSEEFRNQIVRELVTLPANRWREQLDYYARCSQAPGCGELLFDTDTWSLQIRKTGAQTATDFPHAIRIWYKTKPEGRSVTWTSDQSGRPCVYTVGSPINNRALFPCQEPPVAMSTWQATVRAAASFVVLMSGENSAKPTQLWEECSSWYYYVTMPMPASTFTIAVGCWTEMKMETWSSNDLATERPFSPSEANFRHVGVCSHMEYPCRFQNASATTQEIIPHRVFAPVCLTGACQETLLRLIPPCLSAAHSVLGAHPFSRLDVLIVPANFPSLGMARPSKDKTGHTSDSGASVIKHGLNPEKIFMQVHYLKGYFLLRFLAKRLGDETYFSFLRKFVHTFHGQLILSQDFLQMLLENIPEEKRLELSVENIYQDWLESSGIPKPLQRERRAGAECGLARQVRAEVTKWIGVNRRPRKRKRREKEEVFEKLLPDQLVLLLEHLLEQKTLSPRTLQSLQRTYHLQDQDAEVRHRWCELIVKHKFTKAYKSVERFLQEDQAMGVYLYGELMVSEDARQQQLARRCFERTKEQMDRSSAQVVAEMLF

SEQ ID NO: 17045 - protein, 819 aa, Homo sapiens
  Payload ID: 3415
  Gene Symbol: C9orf3
  Gene Name: chromosome 9 open reading frame 3
  Uniprot ID: Q8N6M6
  ENSP ID: ENSP00000364464
MDIQLDPARDDLPLMANTSHILVKHYVLDLDVDFESQVIEGTIVLFLEDGNRFKKQNSSIEEACQSESNKACKFGMPEPCHIPVTNARTFSSEMEYNDFAICSKGEKDTSDKDGNHDNQEHASGISSSKYCCDTGNHGSEDFLLVLDCCDLSVLKVEEVDVAAVPGLEKFTRSPELTVVSEEFRNQIVRELVTLPANRWREQLDYYARCSQAPGCGELLFDTDTWSLQIRKTGAQTATDFPHAIRIWYKTKPEGRSVTWTSDQSGRPCVYTVGSPINNRALFPCQEPPVAMSTWQATVRAAASFVVLMSGENSAKPTQLWEECSSWYYYVTMPMPASTFTIAVGCWTEMKMETWSSNDLATERPFSPSEANFRHVGVCSHMEYPCRFQNASATTQEIIPHRVFAPVCLTGACQETLLRLIPPCLSAAHSVLGAHPFSRLDVLIVPANFPSLGMASPHIMFLSQSILTGGNHLCGTRLCHEIAHAWFGLAIGARDWTEEWLSEGFATHLEDVFWATAQQLAPYEAREQQELRACLRWRRLQDEMQCSPEEMQVLRPSKDKTGHTSDSGASVIKHGLNPEKIFMQVHYLKGYFLLRFLAKRLGDETYFSFLRKFVHTFHGQLILSQDFLQMLLENIPEEKRLELSVENIYQDWLESSGIPKPLQRERRAGAECGLARQVRAEVTKWIGVNRRPRKRKRREKEEVFEKLLPDQLVLLLEHLLEQKTLSPRTLQSLQRTYHLQDQDAEVRHRWCELIVKHKFTKAYKSVERFLQEDQAMGVYLYGELMVSEDARQQQLARRCFERTKEQMDRSSAQVVAEMLF

SEQ ID NO: 17046 - protein, 140 aa, Homo sapiens
  Payload ID: 3415
  Gene Symbol: C9orf3
  Gene Name: chromosome 9 open reading frame 3
  ENSP ID: ENSP00000387736
SSKYCCDTGNHGSEDFLLVLDCCDLSVLKVEEVDVAAVPGLEKFTRSPELTVVSEEFRNQIVRELVTLPANRWREQLDYYARCSQAPGCGELLFDTDTWSLQIRKTGAQTATDFPHAIRIWYKTKPEGRSVTWTSDQSGR

SEQ ID NO: 17047 - protein, 601 aa, Homo sapiens
  Payload ID: 3415
  Gene Symbol: C9orf3
  Gene Name: chromosome 9 open reading frame 3
  ENSP ID: ENSP00000401854
LFDTDTWSLQIRKTGAQTATDFPHAIRIWYKTKPEGRSVTWTSDQSGRPCVYTVGSPINNRALFPCQEPPVAMSTWQATVRAAASFVVLMSGENSAKPTQLWEECSSWYYYVTMPMPASTFTIAVGCWTEMKMETWSSNDLATERPFSPSEANFRHVGVCSHMEYPCRFQNASATTQEIIPHRVFAPVCLTGACQETLLRLIPPCLSAAHSVLGAHPFSRLDVLIVPANFPSLGMASPHIMFLSQSILTGGNHLCGTRLCHEIAHAWFGLAIGARDWTEEWLSEGFATHLEDVFWATAQQLAPYEAREQQELRACLRWRRLQDEMQCSPEEMQVLRPSKDKTGHTSDSGASVIKHGLNPEKIFMQVHYLKGYFLLRFLAKRLGDETYFSFLRKFVHTFHGQLILSQDFLQMLLENIPEEKRLELSVENIYQDWLESSGIPKPLQRERRAGAECGLARQVRAEVTKWIGVNRRPRKRKRREKEEVFEKLLPDQLVLLLEHLLEQKTLSPRTLQSLQRTYHLQDQDAEVRHRWCELIVKHKFTKAYKSVERFLQEDQAMGVYLYGELMVSEDARQQQLARRCFERTKEQMDRSSAQVVAEMLF

SEQ ID NO: 17048 - protein, 508 aa, Homo sapiens
  Payload ID: 3415
  Gene Symbol: C9orf3
  Gene Name: chromosome 9 open reading frame 3
  ENSP ID: ENSP00000402171
VVSEEFRNQIVRELVTLPANRWREQLDYYARCSQAPGCGELLFDTDTWSLQIRKTGAQTATDFPHAIRIWYKTKPEGRSVTWTSDQSGRPCVYTVGSPINNRALFPCQEPPVAMSTWQATVRAAASFVVLMSGENSAKPTQLWEECSSWYYYVTMPMPASTFTIAVGCWTEMKMETWSSNDLATERPFSPSEANFRHVGVCSHMEYPCRFQNASATTQEIIPHRVFAPVCLTGACQETLLRLIPPCLSAAHSVLGAHPFSRLDVLIVPANFPSLGMARPSKDKTGHTSDSGASVIKHGLNPEKIFMQVHYLKGYFLLRFLAKRLGDETYFSFLRKFVHTFHGQLILSQDFLQMLLENIPEEKRLELSVENIYQDWLESSGIPKPLQRERRAGAECGLARQVRAEVTKWIGVNRRPRKRKRREKEEVFEKLLPDQLVLLLEHLLEQKTLSPRTLQSLQRTYHLQDQDAEVRHRWCELIVKHKFTKAYKSVERFLQEDQVGVIFQQMGIL

SEQ ID NO: 17049 - protein, 145 aa, Homo sapiens
  Payload ID: 3415
  Gene Symbol: C9orf3
  Gene Name: chromosome 9 open reading frame 3
  ENSP ID: ENSP00000411451
  MOD_RES (1)..(1): Any amino acid
XDETYFSFLRKFVHTFHGQLILSQDFLQMLLENIPEEKRLELSVENIYQDWLESSGIPKPLQRERRAGAECGLARQVRAEVTKWIGVNRRPRKRKRREKEEVFEKTLNWSHLRNRERRRKKWITFKTLGGILFTVKQMRNLFAQV

SEQ ID NO: 17050 - protein, 184 aa, Homo sapiens
  Payload ID: 3415
  Gene Symbol: C9orf3
  Gene Name: chromosome 9 open reading frame 3
  ENSP ID: ENSP00000413927
  MOD_RES (1)..(1): Any amino acid
XADPGRAQGAGSGAAAASSPAAGEPLQRERRAGAECGLARQVRAEVTKWIGVNRRPRKRKRREKEEVFEKLLPDQLVLLLEHLLEQKTLSPRTLQSLQRTYHLQDQDAEVRHRWCELIVKHKFTKAYKSVERFLQEDQAMGVYLYGELMVSEDARQQQLARRCFERTKEQMDRSSAQVVAEMLF

SEQ ID NO: 17051 - protein, 180 aa, Homo sapiens
  Payload ID: 3415
  Gene Symbol: C9orf3
  Gene Name: chromosome 9 open reading frame 3
  ENSP ID: ENSP00000431923
  MOD_RES (1)..(1): Any amino acid
XRAQGAGSGAAAASSPAAGEPLQRERRAGAECGLARQVRAEVTKWIGVNRRPRKRKRREKEEVFEKLLPDQLVLLLEHLLEQKTLSPRTLQSLQRTYHLQDQDAEVRHRWCELIVKHKFTKAYKSVERFLQEDQAMGVYLYGELMVSEDARQQQLARRCFERTKEQMDRSSAQVVAEMLF

SEQ ID NO: 17052 - protein, 194 aa, Homo sapiens
  Payload ID: 3416
  Gene Symbol: C9orf40
  Gene Name: chromosome 9 open reading frame 40
  Uniprot ID: Q8IXQ3
  ENSP ID: ENSP00000366050
MAKRRAAEPVTFHVPWKRLLLCDFAEQPPPPPLWIRPPGVAHAGQLLGVPEQHRKRKIDAGTMAEPSASPSKRRDSGDNSAPSGQEREDHGLETGDPPLPPPPVLPGPGEELPGARLPGGGGDDGAGRAGPPRGDWGVASRQHNEEFWQYNTFQYWRNPLPPIDLADIEDLSEDTLTEATLQGRNEGAEVDMES

SEQ ID NO: 17053 - protein, 461 aa, Homo sapiens
  Payload ID: 3417
  Gene Symbol: C9orf43
  Gene Name: chromosome 9 open reading frame 43
  Uniprot ID: Q8TAL5
  ENSP ID: ENSP00000288462
MDLPDESQWDETTCGLAVCQHPQCWATIRRIERGHPRILGSSCKTPLDAEDKLPVLTVVDILDSGFAAHHLPECTFTKAHSLLSQSSKFYSKFHGRPPKGLPDKSLINCTNRLPKFPVLNLNETQLPCPEDVRNMVVLWIPEETEIHVSQHGKKKRKNSAVKSKSFLGLSGNQSAGTRVGTPGMIVPPPTPVQLSEQFSSDFLPLWAQSEALPQDLLKELLPGGKQTMLCPEMKIKLAMMKKNLPLEKNRPDSVISSKMFLSIHRLTLERPALRYPERLKKLHNLKTEGYRKQQQRQQQQQQQQKKVKTPIKKQEAKKKAKSDPGIQSTSHKHPVTTVHDRLYGYRTLPGQNSDMKQQQQMEKGTTSKQDSTERPKMNYYDHADFHHSVKSPELYETEPTNKDISAPVDAVPEAQAARQKKISFNFSEIMASTGWNSELKLLRILQDTDDEDEEDQSSGAE

SEQ ID NO: 17054 - protein, 461 aa, Homo sapiens; identical to SEQ ID NO: 17053
  Payload ID: 3417
  Gene Symbol: C9orf43
  Gene Name: chromosome 9 open reading frame 43
  Uniprot ID: Q8TAL5
  ENSP ID: ENSP00000363280

SEQ ID NO: 17055 - protein, 202 aa, Homo sapiens
  Payload ID: 3418
  Gene Symbol: C9orf47
  Gene Name: chromosome 9 open reading frame 47
  Uniprot ID: Q6ZRZ4
  ENSP ID: ENSP00000335616
MVRIWTTIMIVLILLLRIGPNKPSLSGRQAPAQAQTSDLVPSLFPLGLWAPGFCTWSSPDEDKVWRPAWEQGPKGEPDPRGLRPRKPVPGTGNRDSGTRRRLQDATEQDPRPGNDVASAETAGPPSPSGIRAQDRAPRHRRAPPARMPVAPAPSADGEPLQEQGGGLFHRTRSVYNGLELNTWMKVERLFVEKFHQSFSLDN

SEQ ID NO: 17056 - protein, 235 aa, Homo sapiens
  Payload ID: 3418
  Gene Symbol: C9orf47
  Gene Name: chromosome 9 open reading frame 47
  ENSP ID: ENSP00000365010
MVRIWTTIMIVLILLLRIGPNKPSLSGRQAPAQAQTSDLVPSLFPLGLWAPGFCTWSSPDEDKRPRKPVPGTGNRDSGTRRRLQDATEQDPRPGNDVASAETAGPPSPSGIRAQDRAPRHRRAPPARMPVAPAPSADGGERRARAGRGTRVGGWGPKDPPFQQNPHRSRARRGLGRATAAGALHISTPPPEPLQEQGGGLFHRTRSVYNGLELNTWMKVERLFVEKFHQSFSLDN

SEQ ID NO: 17057 - protein, 183 aa, Homo sapiens
  Payload ID: 3418
  Gene Symbol: C9orf47
  Gene Name: chromosome 9 open reading frame 47
  Uniprot ID: Q6ZRZ4
  ENSP ID: ENSP00000365011
MVRIWTTIMIVLILLLRIGPNKPSLSGRQAPAQAQTSDLVPSLFPLGLWAPGFCTWSSPDEDKRPRKPVPGTGNRDSGTRRRLQDATEQDPRPGNDVASAETAGPPSPSGIRAQDRAPRHRRAPPARMPVAPAPSADGEPLQEQGGGLFHRTRSVYNGLELNTWMKVERLFVEKFHQSFSLDN

SEQ ID NO: 17058 - protein, 431 aa, Homo sapiens
  Payload ID: 3419
  Gene Symbol: C9orf50
  Gene Name: chromosome 9 open reading frame 50
  Uniprot ID: Q5SZB4
  ENSP ID: ENSP00000361556
MFWRRLRPGAQDLAPKGLPGDGDFRRSSDPRLPKLTPPALRAALGARGSGDWRIPGGGAAWWPEGDAKPGVGVGRLPPRLPALLTATRRAVRKRGLLRSLLPPPLLSAGASRESAPRQPGPGERERPRRRVAREDPDFLGAFLGELLPSRFREFLHQLQEKCAEEPEPLTSPAPQHQRGVLEHCPGSPRCPNCSFLPDLWGQSSHLQDSLTKISLQQTPILGPLKGDHSQFTTVRKANHRPHGAQVPRLKAALTHNPSGEGSRPCRQRCPFRVRFADETLQDTTLRYWERRRSVQQSVIVNQKAALPVASERVFGSVGKRLESLPKALYPGAKEETLASSSCWDCAGLSTQKTQGYLSEDTSMNSSLPFCSWKKAAAQRPRSSLRAFLDPHRNLEQESLLPNRVLQSVLKQGCPKGYHLLLASATLQPDKR

SEQ ID NO: 17059 - protein, 69 aa, Homo sapiens
  Payload ID: 3419
  Gene Symbol: C9orf50
  Gene Name: chromosome 9 open reading frame 50
  ENSP ID: ENSP00000480795
MNSSLPFCSWKKAAAQRPRSSLRAFLDPHRNLEQESLLPNRVLQSVLKQGCPKGYHLLLASATLQPDKR

SEQ ID NO: 17060 - protein, 161 aa, Homo sapiens
  Payload ID: 3420
  Gene Symbol: C9orf57
  Gene Name: chromosome 9 open reading frame 57
  Uniprot ID: Q5W0N0
  ENSP ID: ENSP00000366223
MKKIEISGTCLSFHLLFGLEIRMRRIVFAGVILFRLLGVILFRLLGVILFGRLGDLGTCQTKPGQYWKEEVHIQDVGGLICRACNLSLPFHGCLLDLGTCQAEPGQYCKEEVHIQGGIQWYSVKGCTKNTSECFKSTLVKRILQLHELVTTHCCNHSLCNF

SEQ ID NO: 17061 - protein, 127 aa, Homo sapiens
  Payload ID: 3420
  Gene Symbol: C9orf57
  Gene Name: chromosome 9 open reading frame 57
  Uniprot ID: Q5W0N0
  ENSP ID: ENSP00000412956
MGVGFTELEYLAPWLRPPFSDLGTCQTKPGQYWKEEVHIQDVGGLICRACNLSLPFHGCLLDLGTCQAEPGQYCKEEVHIQGGIQWYSVKGCTKNTSECFKSTLVKRILQLHELVTTHCCNHSLCNF

SEQ ID NO: 17062 - protein, 200 aa, Homo sapiens
  Payload ID: 3421
  Gene Symbol: C9orf64
  Gene Name: chromosome 9 open reading frame 64
  ENSP ID: ENSP00000318375
MPLVEERHRILNETGKILLEKFGGSFLNCVRESENSAQKLMHLVVESFPSYRDVTLFEGKRVSFYKRAQILVADTWSVLEGKGDGCFKDISSITMFADYRLPQVLAHLGALKYSDDLLKKLLKGEMLSYGDRQEVEIRGCSLWCVELIRDCLLELIEQKGEKPNGEINSILLDYYLWDYAHDHREDMKGIPFHRIRCIYY

SEQ ID NO: 17063 - protein, 60 aa, Homo sapiens
  Payload ID: 3421
  Gene Symbol: C9orf64
  Gene Name: chromosome 9 open reading frame 64
  ENSP ID: ENSP00000365518
MPLVEERHRILNETGKILLEKFGGSFLNCVRESENSAQKLMHLVVESFPSYRDVTLFECT

SEQ ID NO: 17064 - protein, 341 aa, Homo sapiens
  Payload ID: 3421
  Gene Symbol: C9orf64
  Gene Name: chromosome 9 open reading frame 64
  Uniprot ID: Q5T6V5
  ENSP ID: ENSP00000365522
MDGLLNPRESSKFIAENSRDVFIDSGGVRRVAELLLAKAAGPELRVEGWKALHELNPRAADEAAVNWVFVTDTLNFSFWSEQDEHKCVVRYRGKTYSGYWSLCAAVNRALDEGIPITSASYYATVTLDQVRNILRSDTDVSMPLVEERHRILNETGKILLEKFGGSFLNCVRESENSAQKLMHLVVESFPSYRDVTLFEGKRVSFYKRAQILVADTWSVLEGKGDGCFKDISSITMFADYRLPQVLAHLGALKYSDDLLKKLLKGEMLSYGDRQEVEIRGCSLWCVELIRDCLLELIEQKGEKPNGEINSILLDYYLWDYAHDHREDMKGIPFHRIRCIYY

SEQ ID NO: 17065 - protein, 295 aa, Homo sapiens
  Payload ID: 3422
  Gene Symbol: C9orf66
  Gene Name: chromosome 9 open reading frame 66
  Uniprot ID: Q5T8R8
  ENSP ID: ENSP00000371824
MRHSVARPTRLPRRLSPFWDPATCKNLEGGAGEVVRGRDPRRLRTSRSTEILGEDLAGPSAGAAARPAAPPPQPREPGAPGLRRAPPRTRMDSSGLGPCSEAPLHTSAGLSGRNLRAAGGVLPVDLERERAALCARQSGHGPPAVRWLLGSRGAESGGLARRRVAAEHAQPSANLVCRSALETSAFPPSKPKSPRGRVRARSSDGRLRHPAWRAGSGGRGGRGPSAELASRYWGRRRALPGAADLRPKGARADDRRPLRAGRKLHLPEAARLPGNVGKSGEPHKAGEVGNHPRDS

SEQ ID NO: 17066 - protein, 139 aa, Homo sapiens
  Payload ID: 3423
  Gene Symbol: C9orf69
  Gene Name: chromosome 9 open reading frame 69
  Uniprot ID: H0YL14
  ENSP ID: ENSP00000452750
MPVMPIPRRVRSFHGPHTTCLHAACGPVRASHLARTKYNNFDVYIKTRWLYGFIRFLLYFSCSLFTAALWGALAALFCLQYLGVRVLLRFQRKLSVLLLLLGRRRVDFRLVNELLVYGIHVTMLLVGGLGWCFMVFVDM

SEQ ID NO: 17067 - protein, 139 aa, Homo sapiens; identical to SEQ ID NO: 17066
  Payload ID: 3423
  Gene Symbol: C9orf69
  Gene Name: chromosome 9 open reading frame 69
  Uniprot ID: H0YL14
  ENSP ID: ENSP00000453019

SEQ ID NO: 17068 - protein, 38 aa, Homo sapiens
  Payload ID: 3423
  Gene Symbol: C9orf69
  Gene Name: chromosome 9 open reading frame 69
  ENSP ID: ENSP00000455849
MPVMPIPRRVRSFHGPHTTCLHAACGPVRASHLARTKY

SEQ ID NO: 17069 - protein, 139 aa, Homo sapiens; identical to SEQ ID NO: 17066
  Payload ID: 3423
  Gene Symbol: C9orf69
  Gene Name: chromosome 9 open reading frame 69
  Uniprot ID: H0YL14
  ENSP ID: ENSP00000457272

SEQ ID NO: 17070 - protein, 32 aa, Homo sapiens
  Payload ID: 3423
  Gene Symbol: C9orf69
  Gene Name: chromosome 9 open reading frame 69
  ENSP ID: ENSP00000458020
MPVMPIPRRVRSFHGPHTTCLHAACGPVRASH

SEQ ID NO: 17071 - protein, 222 aa, Homo sapiens
  Payload ID: 3424
  Gene Symbol: C9orf72
  Gene Name: chromosome 9 open reading frame 72
  Uniprot ID: Q96LT7
  ENSP ID: ENSP00000369331
MSTLCPPPSPAVAKTEIALSGKSPLLAATFAYWDNILGPRVRHIWAPKTEQVLLSDGEITFLANHTLNGEILRNAESGAIDVKFFVLSEKGVIIVSLIFDGNWNGDRSTYGLSIILPQTELSFYLPLHRVCVDRLTHIIRKGRIWMHKERQENVQKIILEGTERMEDQGQSIIPMLTGEVIPVMELLSSMKSHSVPEEIDIADTVLNDDDIGDSCHEGFLLK

SEQ ID NO: 17072 - protein, 222 aa, Homo sapiens; identical to SEQ ID NO: 17071
  Payload ID: 3424
  Gene Symbol: C9orf72
  Gene Name: chromosome 9 open reading frame 72
  Uniprot ID: Q96LT7
  ENSP ID: ENSP00000369333

SEQ ID NO: 17073 - protein, 481 aa, Homo sapiens
  Payload ID: 3424
  Gene Symbol: C9orf72
  Gene Name: chromosome 9 open reading frame 72
  Uniprot ID: Q96LT7
  ENSP ID: ENSP00000369339
MSTLCPPPSPAVAKTEIALSGKSPLLAATFAYWDNILGPRVRHIWAPKTEQVLLSDGEITFLANHTLNGEILRNAESGAIDVKFFVLSEKGVIIVSLIFDGNWNGDRSTYGLSIILPQTELSFYLPLHRVCVDRLTHIIRKGRIWMHKERQENVQKIILEGTERMEDQGQSIIPMLTGEVIPVMELLSSMKSHSVPEEIDIADTVLNDDDIGDSCHEGFLLNAISSHLQTCGCSVVVGSSAEKVNKIVRTLCLFLTPAERKCSRLCEAESSFKYESGLFVQGLLKDSTGSFVLPFRQVMYAPYPTTHIDVDVNTVKQMPPCHEHIYNQRRYMRSELTAFWRATSEEDMAQDTIIYTDESFTPDLNIFQDVLHRDTLVKAFLDQVFQLKPGLSLRSTFLAQFLLVLHRKALTLIKYIEDDTQKGKKPFKSLRNLKIDLDLTAEGDLNIIMALAEKIKPGLHSFIFGRPFYTSVQERDVLMTF

SEQ ID NO: 17074 - protein, 481 aa, Homo sapiens; identical to SEQ ID NO: 17073
  Payload ID: 3424
  Gene Symbol: C9orf72
  Gene Name: chromosome 9 open reading frame 72
  Uniprot ID: Q96LT7
  ENSP ID: ENSP00000482753

SEQ ID NO: 17075 - protein, 289 aa, Homo sapiens
  Payload ID: 3425
  Gene Symbol: C9orf78
  Gene Name: chromosome 9 open reading frame 78
  Uniprot ID: Q9NZ63
  ENSP ID: ENSP00000361524
MPVVRKIFRRRRGDSESEEDEQDSEEVRLKLEETREVQNLRKRPNGVSAVALLVGEKVQEETTLVDDPFQMKTGGMVDMKKLKERGKDKISEEEDLHLGTSFSAETNRRDEDADMMKYIETELKKRKGIVEHEEQKVKPKNAEDCLYELPENIRVSSAKKTEEMLSNQMLSGIPEVDLGIDAKIKNIISTEDAKARLLAEQQNKKKDSETSFVPTNMAVNYVQHNRFYHEELNAPIRRNKEEPKARPLRVGDTEKPEPERSPPNRKRPANEKATDDYHYEKFKKMNRRY

SEQ ID NO: 17076 - protein, 175 aa, Homo sapiens
  Payload ID: 3425
  Gene Symbol: C9orf78
  Gene Name: chromosome 9 open reading frame 78
  ENSP ID: ENSP00000484941
MVDMKKLKERGKDKISEEEDLHLGTSFSAETNRRDEDADMMKYIETELKKRKGIVEHEEQKVKPKNAEDCLYELPENIRVSSAKKTEEMLSNQMLSGIPEVDLGIDAKIKNIISTEDAKARLLAEQQNKKKDSETSFVPTNMAVNYVQHNRFYHEELNAHTEKQRRAQGPALESR

SEQ ID NO: 17077 - protein, 1444 aa, Homo sapiens
  Payload ID: 3426
  Gene Symbol: C9orf84
  Gene Name: chromosome 9 open reading frame 84
  Uniprot ID: Q5VXU9
  ENSP ID: ENSP00000322108
MTDTSVLDQWKASFFVEDFLEKKTITRMVTQINCEFEEVVPSSNPDSQIEVEEVSLYTHMDYNEVFTPVSCLEKCSALQNQNQDLFIDDKGILFVSSRKHLPTLPTLLSRLKLFLVKDPLLDFKGQIFTEANFSRECFSLQETLEAFVKEDFCMDKVNFCQEKLEDTICLNEPSSFLIEYEFLIPPSLKPEIDIPSLSELKELLNPVPEIINYVDEKEKLFERDLTNKHGIEDIGDIKFSSTEILTIQSQSEPEECSKPGELEMPLTPLFLTCQHSSVNSLRTELQTFPLSPVCKINLLTAEESANEYYMMWQLERCRSPLNPFLLTVPRIQEPHSQYSVTDLKKIFSVKEESLVINLEKAEWWKQAGLNLKMMETLEHLNTYLCHDNLSSNDTKIEIFLPTKVLQLESCLEHKSHSSPIALIDEKSTNAHLSLPQKSPSLAKEVPDLCFSDDYFSDKGAAKEEKPKNDQEPVNRIIQKKENNDHFELDCTGPSIKSPSSSIIKKASFEHGKKQENDLDLLSDFIMLRNKYKTCTSKTEVTNSDEKHDKEACSLTLQEESPIVHINKTLEEINQERGTDSVIEIQASDSQCQAFCLLEAAASPILKNLVSLCTLPTANWKFATVIFDQTRFLLKEQEKVVSDAVRQGTIDEREMTFKHAALLHLLVTIRDVLLTCSLDTALGYLSKAKDIYNSILGPYLGDIWRQLEIVQFIRGKKPETNYKIQELQCQILSWMQSQQQIKVLIIIRMDSDGEKHFLIKILNKIEGLTLTVLHSNERKDFLESEGVLRGTSSCVVVHNQYIGADFPWSNFSFVVEYNYVEDSCWTKHCKELNIPYMAFKVILPDTVLERSTLLDRFGGFLLEIQIPYVFFASEGLLNTPDILQLLESNYNISLVERGCSESLKLFGSSECYVVVTIDEHTAIILQDLEELNYEKASDNIIMRLMALSLQYRYCWIILYTKETLNSEYLLTEKTLHHLALIYAALVSFGLNSEELDVKLIIAPGVEATALIIRQIADHSLMTSKRDPHEWLDKSWLKVSPSEEEMYLLDFPCINPLVAQLMLNKGPSLHWILLATLCQLQELLPEVPEKVLKHFCSITSLFKIGSSSITKSPQISSPQENRNQISTLSSQSSASDLDSVIQEHNEYYQYLGLGETVQEDKTTILNDNSSIMELKEISSFLPPVTSYNQTSYWKDSSCKSNIGQNTPFLINIESRRPAYNSFLNHSDSESDVFSLGLTQMNCETIKSPTDTQKRVSVVPRFINSQKRRTHEAKGFINKDVSDPIFSLEGTQSPLHWNFKKNIWEQENHPFNLQYGAQQTACNKLYSQKGNLFTDQQKCLSDESEGLTCESSKDETFWRELPSVPSLDLFRASDSNANQKEFNSLYFYQRAGKSLGQKRHHESSFNSGDKESLTGFMCSQLPQFKKRRLAYEKVPGRVDGQTRLRFF

SEQ ID NO: 17078 - protein, 488 aa, Homo sapiens
  Payload ID: 3426
  Gene Symbol: C9orf84
  Gene Name: chromosome 9 open reading frame 84
  Uniprot ID: Q5VXU9
  ENSP ID: ENSP00000363401
MFSALKYHAIDYLYENVVRKKFYRDALLLRIPSCLYQDESYHVAVTDNKFRRPWTRVSAVSVPGMTDTSVLDQWKASFFVEDFLEKKTITRMVTQINCEFEEVVPSSNPDSQIEVEEVSLYTHMDYNEVFTPVSCLEKCSALQNQNQDLFIDDKGILFVSSRKHLPTLPTLLSRLKLFLVKDPLLDFKGQIFTEANFSRECFSLQETLEAFVKEDFCMDKVNFCQEKLEDTICLNEPSSFLIEYEFLIPPSLKPEIDIPSLSELKELLNPVPEIINYVDEKEKLFERDLTNKHGIEDIGDIKFSSTEILTIQSQSEPEECSKPGELEMPLTPLFLTCQHSSVNSLRTELQTFPLSPVCKINLLTAEESANEYYMMWQLERCRSPLNPFLLTVPRIQEPHSQYSVTDLKKIFSVKEESLVINLEKAEWWKQAGLNLKMMETLEHLNTYLCHDNLSSNDTKIEIFLPTKVLQLECKYITVNISYVNIFRM

SEQ ID NO: 17079 - protein, 1444 aa, Homo sapiens; identical to SEQ ID NO: 17077
  Payload ID: 3426
  Gene Symbol: C9orf84
  Gene Name: chromosome 9 open reading frame 84
  Uniprot ID: Q5VXU9
  ENSP ID: ENSP00000363405

SEQ ID NO: 17080 - protein, 1370 aa, Homo sapiens
  Payload ID: 3426
  Gene Symbol: C9orf84
  Gene Name: chromosome 9 open reading frame 84
  ENSP ID: ENSP00000378257
MSETLGDELEILRGKMMQRRPRSAEVKYFYFFKILLRLRLAILKYLFIDDKGILFVSSRKHLPTLPTLLSRLKLFLVKDPLLDFKGQIFTEANFSRECFSLQETLEAFVKEDFCMDKVNFCQEKLEDTICLNEPSSFLIEYEFLIPPSLKPEIDIPSLSELKELLNPVPEIINYVDEKEKLFERDLTNKHGIEDIGDIKFSSTEILTIQSQSEPEECSKPGELEMPLTPLFLTCQHSSVNSLRTELQTFPLSPVCKINLLTAEESANEYYMMWQLERCRSPLNPFLLTVPRIQEPHSQYSVTDLKKIFSVKEESLVINLEKAEWWKQAGLNLKMMETLEHLNTYLCHDNLSSNDTKIEIFLPTKVLQLESCLEHKSHSSPIALIDEKSTNAHLSLPQKSPSLAKEVPDLCFSDDYFSDKGAAKEEKPKNDQEPVNRIIQKKENNDHFELDCTGPSIKSPSSSIIKKASFEHGKKQENDLDLLSDFIMLRNKYKTCTSKTEVTNSDEKHDKEACSLTLQEESPIVHINKTLEEINQERGTDSVIEIQASDSQCQAFCLLEAAASPILKNLVSLCTLPTANWKFATVIFDQTRFLLKEQEKVVSDAVRQGYLSKAKDIYNSILGPYLGDIWRQLEIVQFIRGKKPETNYKIQELQCQILSWMQSQQQIKVLIIIRMDSDGEKHFLIKILNKIEGLTLTVLHSNERKDFLESEGVLRGTSSCVVVHNQYIGADFPWSNFSFVVEYNYVEDSCWTKHCKELNIPYMAFKVILPDTVLERSTLLDRFGGFLLEIQIPYVFFASEGLLNTPDILQLLESNYNISLVERGCSESLKLFGSSECYVVVTIDEHTAIILQDLEELNYEKASDNIIMRLMALSLQYRYCWIILYTKETLNSEYLLTEKTLHHLALIYAALVSFGLNSEELDVKLIIAPGVEATALIIRQIADHSLMTSKRDPHEWLDKSWLKVSPSEEEMYLLDFPCINPLVAQLMLNKGPSLHWILLATLCQLQELLPEVPEKVLKHFCSITSLFKIGSSSITKSPQISSPQENRNQISTLSSQSSASDLDSVIQEHNEYYQYLGLGETVQEDKTTILNDNSSIMELKEISSFLPPVTSYNQTSYWKDSSCKSNIGQNTPFLINIESRRPAYNSFLNHSDSESDVFSLGLTQMNCETIKSPTDTQKRVSVVPRFINSQKRRTHEAKGFINKDVSDPIFSLEGTQSPLHWNFKKNIWEQENHPFNLQYGAQQTACNKLYSQKGNLFTDQQKCLSDESEGLTCESSKDETFWRELPSVPSLDLFRASDSNANQKEFNSLYFYQRAGKSLGQKRHHESSFNSGDKESLTGFMCSQLPQFKKRRLAYEKVPGRVDGQTRLRFF

SEQ ID NO: 17081 - protein, 1405 aa, Homo sapiens
  Payload ID: 3426
  Gene Symbol: C9orf84
  Gene Name: chromosome 9 open reading frame 84
  Uniprot ID: Q5VXU9
  ENSP ID: ENSP00000378259
MSETLGDELEILRGKMMQRRPRSAEVKYFYFFKILLRLRLAILKYLFIDDKGILFVSSRKHLPTLPTLLSRLKLFLVKDPLLDFKGQIFTEANFSRECFSLQETLEAFVKEDFCMDKVNFCQEKLEDTICLNEPSSFLIEYEFLIPPSLKPEIDIPSLSELKELLNPVPEIINYVDEKEKLFERDLTNKHGIEDIGDIKFSSTEILTIQSQSEPEECSKPGELEMPLTPLFLTCQHSSVNSLRTELQTFPLSPVCKINLLTAEESANEYYMMWQLERCRSPLNPFLLTVPRIQEPHSQYSVTDLKKIFSVKEESLVINLEKAEWWKQAGLNLKMMETLEHLNTYLCHDNLSSNDTKIEIFLPTKVLQLESCLEHKSHSSPIALIDEKSTNAHLSLPQKSPSLAKEVPDLCFSDDYFSDKGAAKEEKPKNDQEPVNRIIQKKENNDHFELDCTGPSIKSPSSSIIKKASFEHGKKQENDLDLLSDFIMLRNKYKTCTSKTEVTNSDEKHDKEACSLTLQEESPIVHINKTLEEINQERGTDSVIEIQASDSQCQAFCLLEAAASPILKNLVSLCTLPTANWKFATVIFDQTRFLLKEQEKVVSDAVRQGTIDEREMTFKHAALLHLLVTIRDVLLTCSLDTALGYLSKAKDIYNSILGPYLGDIWRQLEIVQFIRGKKPETNYKIQELQCQILSWMQSQQQIKVLIIIRMDSDGEKHFLIKILNKIEGLTLTVLHSNERKDFLESEGVLRGTSSCVVVHNQYIGADFPWSNFSFVVEYNYVEDSCWTKHCKELNIPYMAFKVILPDTVLERSTLLDRFGGFLLEIQIPYVFFASEGLLNTPDILQLLESNYNISLVERGCSESLKLFGSSECYVVVTIDEHTAIILQDLEELNYEKASDNIIMRLMALSLQYRYCWIILYTKETLNSEYLLTEKTLHHLALIYAALVSFGLNSEELDVKLIIAPGVEATALIIRQIADHSLMTSKRDPHEWLDKSWLKVSPSEEEMYLLDFPCINPLVAQLMLNKGPSLHWILLATLCQLQELLPEVPEKVLKHFCSITSLFKIGSSSITKSPQISSPQENRNQISTLSSQSSASDLDSVIQEHNEYYQYLGLGETVQEDKTTILNDNSSIMELKEISSFLPPVTSYNQTSYWKDSSCKSNIGQNTPFLINIESRRPAYNSFLNHSDSESDVFSLGLTQMNCETIKSPTDTQKRVSVVPRFINSQKRRTHEAKGFINKDVSDPIFSLEGTQSPLHWNFKKNIWEQENHPFNLQYGAQQTACNKLYSQKGNLFTDQQKCLSDESEGLTCESSKDETFWRELPSVPSLDLFRASDSNANQKEFNSLYFYQRAGKSLGQKRHHESSFNSGDKESLTGFMCSQLPQFKKRRLAYEKVPGRVDGQTRLRFF

SEQ ID NO: 17082 - protein, 157 aa, Homo sapiens
  Payload ID: 3427
  Gene Symbol: C9orf85
  Gene Name: chromosome 9 open reading frame 85
  Uniprot ID: Q96MD7
  ENSP ID: ENSP00000334289
MSSQKGNVARSRPQKHQNTFSFKNDKFDKSVQTKKINAKLHDGVCQRCKEVLEWRVKYSKYKPLSKPKKCVKCLQKTVKDSYHIMCRPCACELEVCAKCGKKEDIVIPLNKETEKIEHTENNLSSNHRRSCRRNEESDDDLDFDIDLEDTGGDHQMN

SEQ ID NO: 17083 - protein, 22 aa, Homo sapiens
  Payload ID: 3427
  Gene Symbol: C9orf85
  Gene Name: chromosome 9 open reading frame 85
  ENSP ID: ENSP00000366226
  MOD_RES (1)..(1): Any amino acid
XNDKFDKSVQTKSLSANSSHDV

SEQ ID NO: 17084 - protein, 179 aa, Homo sapiens
  Payload ID: 3427
  Gene Symbol: C9orf85
  Gene Name: chromosome 9 open reading frame 85
  Uniprot ID: Q96MD7
  ENSP ID: ENSP00000366230
MSSQKGNVARSRPQKHQNTFSFKNDKFDKSVQTKKINAKLHDGVCQRCKEVLEWRVKYSKYKPLSKPKKCVKCLQKTVKDSYHIMCRPCACELEVCAKCGKKEDIVIPWSLPLLPRLECSGRILAHHNLRLPCSSDSPASASRVAGTTGAHHHAQLIFVFLVEMGFHYVGQAGLELLTS

SEQ ID NO: 17085 - protein, 69 aa, Homo sapiens
  Payload ID: 3427
  Gene Symbol: C9orf85
  Gene Name: chromosome 9 open reading frame 85
  ENSP ID: ENSP00000431527
MSSQKGNVARSRPQKHQNTFSFKNDKFDKSVQTKKINAKLHDGVCQRCKEVLEWRVKYSKYKPLSKPKK

SEQ ID NO: 17086 - protein, 35 aa, Homo sapiens
  Payload ID: 3427
  Gene Symbol: C9orf85
  Gene Name: chromosome 9 open reading frame 85
  Uniprot ID: Q96MD7
  ENSP ID: ENSP00000433086
MSSQKGNVARSRPQKHQNTFSFKNDKFDKSVQTKC

SEQ ID NO: 17087 - protein, 44 aa, Homo sapiens
  Payload ID: 3427
  Gene Symbol: C9orf85
  Gene Name: chromosome 9 open reading frame 85
  ENSP ID: ENSP00000434838
MSSQKGNVARSRPQKHQNTFSFKNDKFDKSVQTKSLSANSSHDV

SEQ ID NO: 17088 - protein, 168 aa, Homo sapiens
  Payload ID: 3428
  Gene Symbol: C9orf9
  Gene Name: chromosome 9 open reading frame 9
  Uniprot ID: Q96E40
  ENSP ID: ENSP00000298546
MNEVKESLRSIEQKYKLFQQQQLTFTAALEHCRENAHDKIRPISSIGQVQSYMEHYCNSSTDRRVLLMFLDICSELNKLCQHFEAVHSGTPVTNNLLEKCKTLVSQSNDLSSLRAKYPHDVVNHLSCDEARNHYGGVVSLIPLILDLMKEWIAHSEKLPRKVLQHGTT

SEQ ID NO: 17089 - protein, 222 aa, Homo sapiens
  Payload ID: 3428
  Gene Symbol: C9orf9
  Gene Name: chromosome 9 open reading frame 9
  Uniprot ID: Q96E40
  ENSP ID: ENSP00000348659
MNEVKESLRSIEQKYKLFQQQQLTFTAALEHCRENAHDKIRPISSIGQVQSYMEHYCNSSTDRRVLLMFLDICSELNKLCQHFEAVHSGTPVTNNLLEKCKTLVSQSNDLSSLRAKYPHDVVNHLSCDEARNHYGGVVSLIPLILDLMKEWIAHSEKLPRKVLQHVSEPQAHQESTRGAARPAQAIGTQPRATKHKCRQLTKASLKPRGCSKPPWRPPGGKL

SEQ ID NO: 17090 - protein, 222 aa, Homo sapiens; identical to SEQ ID NO: 17089
  Payload ID: 3428
  Gene Symbol: C9orf9
  Gene Name: chromosome 9 open reading frame 9
  Uniprot ID: Q96E40
  ENSP ID: ENSP00000361209

SEQ ID NO: 17091 - protein, 342 aa, Homo sapiens
  Payload ID: 3429
  Gene Symbol: C9orf91
  Gene Name: chromosome 9 open reading frame 91
  Uniprot ID: Q5VZI3
  ENSP ID: ENSP00000288502
MACEPQVDPGATGPLPPSSPGWSALPGGSPPGWGQELHNGQVLTVLRIDNTCAPISFDLGAAEEQLQTWGIQVPADQYRSLAESALLEPQVRRYIIYNSRPMRLAFAVVFYVVVWANIYSTSQMFALGNHWAGMLLVTLAAVSLTLTLVLVFERHQKKANTNTDLRLAAANGALLRHRVLLGVTDTVEGCQSVIQLWFVYFDLENCVQFLSDHVQEMKTSQESLLRSRLSQLCVVMETGVSPATAEGPENLEDAPLLPGNSCPNERPLMQTELHQLVPEAEPEEMARQLLAVFGGYYIRLLVTSQLPQAMGTRHTNSPRIPCPCQLIEAYILGTGCCPFLAR

SEQ ID NO: 17092 - protein, 343 aa, Homo sapiens
  Payload ID: 3429
  Gene Symbol: C9orf91
  Gene Name: chromosome 9 open reading frame 91
  Uniprot ID: Q5VZI3
  ENSP ID: ENSP00000363161
MACEPQVDPGATGPLPPSSPGWSALPGGSPPGWGQELHNGQVLTVLRIDNTCAPISFDLGAAEEQLQTWGIQQVPADQYRSLAESALLEPQVRRYIIYNSRPMRLAFAVVFYVVVWANIYSTSQMFALGNHWAGMLLVTLAAVSLTLTLVLVFERHQKKANTNTDLRLAAANGALLRHRVLLGVTDTVEGCQSVIQLWFVYFDLENCVQFLSDHVQEMKTSQESLLRSRLSQLCVVMETGVSPATAEGPENLEDAPLLPGNSCPNERPLMQTELHQLVPEAEPEEMARQLLAVFGGYYIRLLVTSQLPQAMGTRHTNSPRIPCPCQLIEAYILGTGCCPFLAR

SEQ ID NO: 17093 - protein, 108 aa, Homo sapiens
  Payload ID: 3430
  Gene Symbol: C9orf92
  Gene Name: chromosome 9 open reading frame 92
  Uniprot ID: A6NGG3
  ENSP ID: ENSP00000370058
MELNTNIKSKKGLGRRNLKPMNGAWPPARREMARFQRTKEREEDRCSLNIYYVRNTTQGTAPACVGKRMQPSPTGKGGKCCTVHGLTRKIHNVQPNLQSPILSAACVD

SEQ ID NO: 17094 - protein, 77 aa, Homo sapiens
  Payload ID: 3430
  Gene Symbol: C9orf92
  Gene Name: chromosome 9 open reading frame 92
  Uniprot ID: A6NGG3
  ENSP ID: ENSP00000370060
MARFQRTKEREEDRCSLNIYYVRNTTQGTAPACVGKRMQPSPTGKGGKCCTVHGLTRKIHNVQPNLQSPILSAACVD

SEQ ID NO: 17095 - protein, 73 aa, Homo sapiens
  Payload ID: 3430
  Gene Symbol: C9orf92
  Gene Name: chromosome 9 open reading frame 92
  ENSP ID: ENSP00000412109
  MOD_RES (1)..(1): Any amino acid
XNGAWPPARREMARFQRTKEREEDRCSLNIYYVRNTTQGTAPACSQGRYIMYSRIYSLLFCQLLVLIKTSIKI

SEQ ID NO: 17096 - protein, 812 aa, Homo sapiens
  Payload ID: 3431
  Gene Symbol: CHAMP1
  Gene Name: chromosome alignment maintaining phosphoprotein 1
  Uniprot ID: Q96JM3
  ENSP ID: ENSP00000354730
MEAFQELRKPSARLECDHCSFRGTDYENVQIHMGTIHPEFCDEMDAGGLGKMIFYQKSAKLFHCHKCFFTSKMYSNVYYHITSKHASPDKWNDKPKNQLNKETDPVKSPPLPEHQKIPCNSAEPKSIPALSMETQKLGSVLSPESPKPTPLTPLEPQKPGSVVSPELQTPLPSPEPSKPASVSSPEPPKSVPVCESQKLAPVPSPEPQKPAPVSPESVKATLSNPKPQKQSHFPETLGPPSASSPESPVLAASPEPWGPSPAASPESRKSARTTSPEPRKPSPSESPEPWKPFPAVSPEPRRPAPAVSPGSWKPGPPGSPRPWKSNPSASSGPWKPAKPAPSVSPGPWKPIPSVSPGPWKPTPSVSSASWKSSSVSPSSWKSPPASPESWKSGPPELRKTAPTLSPEHWKAVPPVSPELRKPGPPLSPEIRSPAGSPELRKPSGSPDLWKLSPDQRKTSPASLDFPESQKSSRGGSPDLWKSSFFIEPQKPVFPETRKPGPSGPSESPKAASDIWKPVLSIDTEPRKPALFPEPAKTAPPASPEARKRALFPEPRKHALFPELPKSALFSESQKAVELGDELQIDAIDDQKCDILVQEELLASPKKLLEDTLFPSSKKLKKDNQESSDAELSSSEYIKTDLDAMDIKGQESSSDQEQVDVESIDFSKENKMDMTSPEQSRNVLQFTEEKEAFISEEEIAKYMKRGKGKYYCKICCCRAMKKGAVLHHLVNKHNVHSPYKCTICGKAFLLESLLKNHVAAHGQSLLKCPRCNFESNFPRGFKKHLTHCQSRHNEEANKKLMEALEPPLEEQQI

SEQ ID NO: 17097 - protein, 145 aa, Homo sapiens
  Payload ID: 3431
  Gene Symbol: CHAMP1
  Gene Name: chromosome alignment maintaining phosphoprotein 1
  ENSP ID: ENSP00000474448
MEAFQELRKPSARLECDHCSFRGTDYENVQIHMGTIHPEFCDEMDAGGLGKMIFYQKSAKLFHCHKCFFTSKMYSNVYYHITSKHASPDKWNDKPKNQLNKETDPVKSPPLPEHQKIPCNSAEPKSIPALSMETQKLGSVLSPES

SEQ ID NO: 17098 - protein, 975 aa, Homo sapiens
  Payload ID: 3432
  Gene Symbol: CHTF18
  Gene Name: chromosome transmission fidelity  factor 18
  Uniprot ID: Q8WVB6
  ENSP ID: ENSP00000262315
MEDYEQELCGVEDDFHNQFAAELEVLAELEGASTPSPSGVPLFTAGRPPRTFEEALARGDAASSPAPAASVGSSQGGARKRQVDADLQPAGSLPHAPRIKRPRLQVVKRLNFRSEEMEEPPPPDSSPTDITPPPSPEDLAELWGHGVSEAAADVGLTRASPAARNPVLRRPPILEDYVHVTSTEGVRAYLVLRADPMAPGVQGSLLHVPWRGGGQLDLLGVSLASLKKQVDGERRERLLQEAQKLSDTLHSLRSGEEEAAQPLGAPEEEPTDGQDASSHCLWVDEFAPRHYTELLSDDFTNRCLLKWLKLWDLVVFGHERPSRKPRPSVEPARVSKEATAPGKWKSHEQVLEEMLEAGLDPSQRPKQKVALLCGPPGLGKTTLAHVIARHAGYSVVEMNASDDRSPEVFRTRIEAATQMESVLGAGGKPNCLVIDEIDGAPVAAINVLLSILNRKGPQEVGPQGPAVPSGGGRRRRAEGGLLMRPIICICNDQFAPSLRQLKQQAFLLHFPPTLPSRLVQRLQEVSLRQGMRADPGVLAALCEKTDNDIRACINTLQFLYSRGQRELSVRDVQATRVGLKDQRRGLFSVWQEVFQLPRAQRRRVGQDPALPADTLLLGDGDAGSLTSASQRFYRVLHAAASAGEHEKVVQGLFDNFLRLRLRDSSLGAVCVALDWLAFDDLLAGAAHHSQSFQLLRYPPFLPVAFHVLFASSHTPRITFPSSQQEAQNRMSQMRNLIQTLVSGIAPATRSRATPQALLLDALCLLLDILAPKLRPVSTQLYSTREKQQLASLVGTMLAYSLTYRQERTPDGQYIYRLEPNVEELCRFPELPARKPLTYQTKQLIAREIEVEKMRRAEASARVENSPQVDGSPPGLEGLLGGIGEKGVHRPAPRNHEQRLEHIMRRAAREEQPEKDFFGRVVVRSTAVPSAGDTAPEQDSVERRMGTAVGRSEVWFRFNEGVSNAVRRSLYIRDLL

SEQ ID NO: 17099 - protein, 975 aa, Homo sapiens
  Payload ID: 3432
  Gene Symbol: CHTF18
  Gene Name: chromosome transmission fidelity  factor 18
  ENSP ID: ENSP00000313029
MEDYEQELCGVEDDFHNQFAAELEVLAELEGASTPSPSGVPLFTAGRPPRTFEEALARGDAASSPAPAASVGSSQGGARKRQVDADLQPAGSLPHAPRIKRPRLQVVKRLNFRSEEMEEPPPPDSSPTDITPPPSPEDLAELWGHGFSEAAADVGLTRASPAARNPVLRRPPILEDYVHVTSTEGVRAYLVLRADPMAPGVQGSLLHVPWRGGGQLDLLGVSLASLKKQVDGERRERLLQEAQKLSDTLHSLRSGEEEAAQPLGAPEEEPTDGQDASSHCLWVDEFAPRHYTELLSDDFTNRCLLKWLKLWDLVVFGHERPSRKPRPSVEPARVSKEATAPGKWKSHEQVLEEMLEAGLDPSQRPKQKVALLCGPPGLGKTTLAHVIARHAGYSVVEMNASDDRSPEVFRTRIEAATQMESVLGAGGKPNCLVIDEIDGAPVAAINVLLSILNRKGPQEVGPQGPAVPSGGGRRRRAEGGLLMRPIICICNDQFAPSLRQLKQQAFLLHFPPTLPSRLVQRLQEVSLRQGMRADPGVLAALCEKTDNDIRACINTLQFLYSRGQRELSVRDVQATRVGLKDQRRGLFSVWQEVFQLPRAQRRRVGQDPALPADTLLLGDGDAGSLTSASQRFYRVLHAAASAGEHEKVVQGLFDNFLRLRLRDSSLGAVCVALDWLAFDDLLAGAAHHSQSFQLLRYPPFLPVAFHVLFASSHTPRITFPSSQQEAQNRMSQMRNLIQTLVSGIAPATRSRATPQALLLDALCLLLDILAPKLRPVSTQLYSTREKQQLASLVGTMLAYSLTYRQERTPDGQYIYRLEPNVEELCRFPELPARKPLTYQTKQLIAREIEVEKMRRAEASARVENSPQVDGSPPGLEGLLGGIGEKGVHRPAPRNHEQRLEHIMRRAAREEQPEKDFFGRVVVRSTAVPSAGDTAPEQDSVERRMGTAVGRSEVWFRFNEGVSNAVRRSLYIRDLL

SEQ ID NO: 17100 - protein, 456 aa, Homo sapiens
  Payload ID: 3432
  Gene Symbol: CHTF18
  Gene Name: chromosome transmission fidelity  factor 18
  ENSP ID: ENSP00000399111
MEDYEQELCGVEDDFHNQFAAELEVLAELEAGASTPSPSGVPLFTAGRPPRTFEEALARGDAASSPAPAASVGSSQGGARKRQVDADLQPAGSLPHAPRIKRPRLQVVKRLNFRSEEMEEPPPPDSSPTDITPPPSPEDLAELWGHGVSEAAADVGLTRASPAARNPVLRRPPILEDYVHVTSTEGVRAYLVLRADPMAPGVQGSLLHVPWRGGGQLDLLGVSLASLKKQVDGERRERLLQEAQKLSDTLHSLRSGEEEAAQPLGAPEEEPTDGQDASSHCLWVDEFAPRHYTELLSDDFTNRCLLKWLKLWDLVVFGHERPSRKPRPSVEPARVSKEATAPGKWKSHEQVLEEMLEAGLDPSQRPKQKVALLCGPPGLGKTTLAHVIARHAGYSVVEMNASDDRSPEVFRTRIEAATQMESVLGAGGKPNCLVIDEIDGAPVVGSLMPGPPSTSS

SEQ ID NO: 17101 - protein, 1003 aa, Homo sapiens
  Payload ID: 3432
  Gene Symbol: CHTF18
  Gene Name: chromosome transmission fidelity  factor 18
  Uniprot ID: Q8WVB6
  ENSP ID: ENSP00000406252
MEDYEQELCGVEDDFHNQFAAELEVLAELEGASTPSPSGVPLFTAGRPPRTFEEALARGDAASSPAPAASVGSSQGGARKRQVDADLQPAGSLPHGRLAALPQGLRSGREAEEASGSLHVSPPAPRIKRPRLQVVKRLNFRSEEMEEPPPPDSSPTDITPPPSPEDLAELWGHGVSEAAADVGLTRASPAARNPVLRRPPILEDYVHVTSTEGVRAYLVLRADPMAPGVQGSLLHVPWRGGGQLDLLGVSLASLKKQVDGERRERLLQEAQKLSDTLHSLRSGEEEAAQPLGAPEEEPTDGQDASSHCLWVDEFAPRHYTELLSDDFTNRCLLKWLKLWDLVVFGHERPSRKPRPSVEPARVSKEATAPGKWKSHEQVLEEMLEAGLDPSQRPKQKVALLCGPPGLGKTTLAHVIARHAGYSVVEMNASDDRSPEVFRTRIEAATQMESVLGAGGKPNCLVIDEIDGAPVAAINVLLSILNRKGPQEVGPQGPAVPSGGGRRRRAEGGLLMRPIICICNDQFAPSLRQLKQQAFLLHFPPTLPSRLVQRLQEVSLRQGMRADPGVLAALCEKTDNDIRACINTLQFLYSRGQRELSVRDVQATRVGLKDQRRGLFSVWQEVFQLPRAQRRRVGQDPALPADTLLLGDGDAGSLTSASQRFYRVLHAAASAGEHEKVVQGLFDNFLRLRLRDSSLGAVCVALDWLAFDDLLAGAAHHSQSFQLLRYPPFLPVAFHVLFASSHTPRITFPSSQQEAQNRMSQMRNLIQTLVSGIAPATRSRATPQALLLDALCLLLDILAPKLRPVSTQLYSTREKQQLASLVGTMLAYSLTYRQERTPDGQYIYRLEPNVEELCRFPELPARKPLTYQTKQLIAREIEVEKMRRAEASARVENSPQVDGSPPGLEGLLGGIGEKGVHRPAPRNHEQRLEHIMRRAAREEQPEKDFFGRVVVRSTAVPSAGDTAPEQDSVERRMGTAVGRSEVWFRFNEGVSNAVRRSLYIRDLL

SEQ ID NO: 17102 - protein, 264 aa, Homo sapiens
  Payload ID: 3432
  Gene Symbol: CHTF18
  Gene Name: chromosome transmission fidelity  factor 18
  ENSP ID: ENSP00000412015
  MOD_RES (1)..(1): Any amino acid
XTPPPSPEDLAELWGHGVSEAAADVGLTRASPAARNPVLRRPPILEDYVHVTSTEGVRAYLVLRADPMAPGVQLTHLDGFIPLAPLSSLPPLTGQLTGGSLLHVPWRGGGQLDLLGVSLASLKKQVDGERRERLLQEAQKLSDTLHSLRSGEEEAAQPLGAPEEEPTDGQDASSHCLWVDEFAPRHYTELLSDDFTNRCLLKWLKLWDLVVFGHERPSRKPRPSVEPARVSKEATAPGKWKSHEQVLEEMLEAGLDPSQRPKQK

SEQ ID NO: 17103 - protein, 81 aa, Homo sapiens
  Payload ID: 3432
  Gene Symbol: CHTF18
  Gene Name: chromosome transmission fidelity  factor 18
  ENSP ID: ENSP00000454679
  MOD_RES (1)..(1): Any amino acid
XSRSTASGGSGCFRRPRSFQTPCTVSGRGRRRQPSPWGPLRRSRLTVKTPPVTASGWMSLHPATTRSCSVMTSPTAACSSG

SEQ ID NO: 17104 - protein, 103 aa, Homo sapiens
  Payload ID: 3432
  Gene Symbol: CHTF18
  Gene Name: chromosome transmission fidelity  factor 18
  ENSP ID: ENSP00000456998
MEDYEQELCGVEDDFHNQFAAELEGRRLRRPPGSPCSPRADPRGRSRRPLPEGTRPPVPPQPHLWAAARAAPGRGRWTPTCSRPGPCPTPPGSNGLGCRWSRG

SEQ ID NO: 17105 - protein, 1184 aa, Homo sapiens
  Payload ID: 3432
  Gene Symbol: CHTF18
  Gene Name: chromosome transmission fidelity  factor 18
  ENSP ID: ENSP00000486314
MHVNASARRWGRGGAAALPGPAASPRRPAPRTGPVGRPTLAPSPSRAHAHAKTNLLPGRAVQAPDAVPGAGSSRAPARWRPRDPGSSAPDAWQRFRPAPLRAQPRPPPRPAPGPPPPRKGGCGGQWRAPQDRTRGLRSRNSPRPPLAQPRLRHANQWRAPPGTPAADWRRPARSGRAVRDGGGGAGGSERELGLADGMEDYEQELCGVEDDFHNQFAAELEVLAELEGASTPSPSGVPLFTAGRPPRTFEEALARGDAASSPAPAASVGSSQGGARKRQVDADLQPAGSLPHAPRIKRPRLQVVKRLNFRSEEMEEPPPPDSSPTDITPPPSPEDLAELWGHGFSEAAADVGLTRASPAARNPVLRRPPILEDYVHVTSTEGVRAYLVLRADPMAPGVQGSLLHVPWRGGGQLDLLGVSLASLKKQVDGERRERLLQEAQKLSDTLHRSGEEEAAQPLGAPEEEPTDGQDASSHCLWVDEFAPRHYTELLSDDFTNRCLLKWLKLWDLVVFGHERPSRKPRPSVEPARVSKEATAPGKWKSHEQVLEEMLEAGLDPSQRPKQKVALLCGPPGLGKTTLAHVIARHAGYSVVEMNASDDRSPEVFRTRIEAATQMESVLGAGGKPNCLVIDEIDGAPVAAINVLLSILNRKGPQEVGPQGPAVPSGGGRRRRAEGGLLMRPIICICNDQFAPSLRQLKQQAFLLHFPPTLPSRLVQRLQEGMRADPGVLAALCEKTDNDIRACINTLQFLYSRGQRELSVRDVQATRVGLKDQRRGLFSVWQEVFQLPRAQRSSQHVSVLTCHGTPGDAGLVVLQDMGDAGLGLWDVLLLAWTRRGTFPGRFYRVLHAAASAGEHEKVVQGLFDNFLRLRLRDSSLGAVCVALDWLAFDDLLAGAAHHSQSFQLLRYPPFLPVAFHVLFASSHTPRITFPSSQQEAQNRMSQMRNLIQTLVSGIAPATRSRATPQALLLDALCLLLDILAPKLRPVSTQLYSTREKQQLASLVGTMLAYSLTYRQERTPDGQYIYRLEPNVEELCRFPELPARKPLTYQTKQLIAREIEVEKMRRAEASARVENSPQVDGSPPGLEGLLGGIGEKGVHRPAPRNHEQRLEHIMRRAAREEQPEKDFFGRVVVRSTAVPSAGDTAPEQDSVERRMGTAVGRSEVWFRFNEGVSNAVRRSLYIRDLL

SEQ ID NO: 17106 - protein, 524 aa, Homo sapiens
  Payload ID: 3433
  Gene Symbol: CHTF8
  Gene Name: chromosome transmission fidelity  factor 8
  Uniprot ID: P0CG12
  ENSP ID: ENSP00000305687
MKEPRIFPRERPTPWTRAPLPPRGRLDGSLGPQGGPVLNTGHPLGVNSDPFLMAAGSLGGNLTPFPRNPSPFPASSGSLASNPAPFPAGARDPSMASFPRGMNPTGTGAVSFPRPGGLLGPGPGPGPTLNPRTGALPGPGPLSNPRLGGLPGPGPMSNPRAGGLLGAGPDPRGGGPMGPGSGPNLRAGVLLTSGNGPPNPRPVGLGPGPNPNLRSGFLGTNPAPRSGVFPGPGLGPNPRPSGLGPGPNLDARAGGLLGTGSGLNLRMAGPQGLDLAPILRAAGLLGANSASFSQASGNMGTSPSSMARVPGPMGPNSGPSSRGIGLPGPNPSPMSRAPGPIGPNSAHFSRPVGPMGVNANPFPRGAGSSAFSQSSGTLASNPATFQRSAGLQGSNPTIFPRASGPLGPNPANFPRATGLQGPSPTTFPRSTGPLGPGQVTFPRPAAGHLGPSPAGPVGINPAPFTRPTGTLGLNPASFPRMNGPAGKSFVPFPRVGSLPGTNPAAFPRPGGPMAAMYPNGMLPP

SEQ ID NO: 17107 - protein, 121 aa, Homo sapiens
  Payload ID: 3433
  Gene Symbol: CHTF8
  Gene Name: chromosome transmission fidelity  factor 8
  Uniprot ID: P0CG13
  ENSP ID: ENSP00000381290
MVQIVISSARAGGLAEWVLMELQGEIEARYSTGLAGNLLGDLHYTTEGIPVLIVGHHILYGKIIHLEKPFAVLVKHTPGDQDCDELGRETGTRYLVTALIKDKILFKTRPKPIITSVPKKV

SEQ ID NO: 17108 - protein, 121 aa, Homo sapiens; identical to SEQ ID NO: 17107
  Payload ID: 3433
  Gene Symbol: CHTF8
  Gene Name: chromosome transmission fidelity  factor 8
  Uniprot ID: P0CG13
  ENSP ID: ENSP00000408367

SEQ ID NO: 17109 - protein, 12 aa, Homo sapiens
  Payload ID: 3433
  Gene Symbol: CHTF8
  Gene Name: chromosome transmission fidelity  factor 8
  ENSP ID: ENSP00000427718
MVQIVISRESLC

SEQ ID NO: 17110 - protein, 12 aa, Homo sapiens
  Payload ID: 3433
  Gene Symbol: CHTF8
  Gene Name: chromosome transmission fidelity  factor 8
  ENSP ID: ENSP00000427728
MVQIVISRESLC

SEQ ID NO: 17111 - protein, 144 aa, Homo sapiens
  Payload ID: 3433
  Gene Symbol: CHTF8
  Gene Name: chromosome transmission fidelity  factor 8
  ENSP ID: ENSP00000428130
  MOD_RES (1)..(1): Any amino acid
XAVLAAAATAAGGSVVARWPRGAALGGRHCSARAGGLAEWVLMELQGEIEARYSTGLAGNLLGDLHYTTEGIPVLIVGHHILYGKIIHLEKPFAVLVKHTPGDQDCDELGRETGTRYLVTALIKDKILFKTRPKPIITSVPKKV

SEQ ID NO: 17112 - protein, 58 aa, Homo sapiens
  Payload ID: 3433
  Gene Symbol: CHTF8
  Gene Name: chromosome transmission fidelity  factor 8
  ENSP ID: ENSP00000430079
MVQIVISSARAGGLAEWVLMELQGEIEARYSTGLAGNLLGDLHYTTEGYIGLQVPVHM

SEQ ID NO: 17113 - protein, 75 aa, Homo sapiens
  Payload ID: 3433
  Gene Symbol: CHTF8
  Gene Name: chromosome transmission fidelity  factor 8
  ENSP ID: ENSP00000430899
MVQIVISSARAGGLAEWVLMELQGEIEARYSTGLAGNLLGDLHYTTELHQAHWLQIQHLSRLVLVTQVWLLFQEG

SEQ ID NO: 17114 - protein, 104 aa, Homo sapiens
  Payload ID: 3433
  Gene Symbol: CHTF8
  Gene Name: chromosome transmission fidelity  factor 8
  ENSP ID: ENSP00000455402
  MOD_RES (1)..(1): Any amino acid
XSARGGGDGGGRFGCRPLAARRRARRPPLQGIPVLIVGHHILYGKIIHLEKPFAVLVKHTPGDQDCDELGRETGTRYLVTALIKDKILFKTRPKPIITSVPKKV

SEQ ID NO: 17115 - protein, 99 aa, Homo sapiens
  Payload ID: 3433
  Gene Symbol: CHTF8
  Gene Name: chromosome transmission fidelity  factor 8
  ENSP ID: ENSP00000455699
MVQIVISSARAGGLAEWVLMELQGEIEARYSTGLAGNLLGDLHYTTEVRGLFFPCLMPQESKLHQGGAPRTQSEDCLRFVIQGLANLRCSLLVLPLPLQ

SEQ ID NO: 17116 - protein, 65 aa, Homo sapiens
  Payload ID: 3433
  Gene Symbol: CHTF8
  Gene Name: chromosome transmission fidelity  factor 8
  ENSP ID: ENSP00000462519
HILYGKIIHLEKPFAVLVKHTPGDQDCDELGRETGTRYLVTALIKDKILFKTRPKPIITSVPKKV

SEQ ID NO: 17117 - protein, 301 aa, Homo sapiens
  Payload ID: 3434
  Gene Symbol: CXorf21
  Gene Name: chromosome X open reading frame 21
  Uniprot ID: Q9HAI6
  ENSP ID: ENSP00000368245
MLSEGYLSGLEYWNDIHWSCASYNEQVAGEKEEETNSVATLSYSSVDETQVRSLYVSCKSSGKFISSVHSRESQHSRSQRVTVLQTNPNPVFESPNLAAVEICRDASRETYLVPSSCKSICKNYNDLQIAGGQVMAINSVTTDFPSESSFEYGPLLKSSEIPLPMEDSISTQPSDFPQKPIQRYSSYWRITSIKEKSSLQMQNPISNAVLNEYLEQKVVELYKQYIMDTVFHDSSPTQILASELIMTSVDQISLQVSREKNLETSKARDIVFSRLLQLMSTEITEISTPSLHISQYSNVNP

SEQ ID NO: 17118 - protein, 234 aa, Homo sapiens
  Payload ID: 3435
  Gene Symbol: CXorf23
  Gene Name: chromosome X open reading frame 23
  ENSP ID: ENSP00000342104
  MOD_RES (1)..(1): Any amino acid
XSQKLPDVKPSPINLRKKSLTVKVDVKKTVDTFRVASSYSTERQMSHDLVAVGRKSENFHPVFEHLDSTQNTENKPTGEFAQEIITIIHQVKANYFPSPGITLHERFSTMQDIHKADVNEIPLNSDPEIHRRIDMSLAELQSKQAVIYESEQTLIKIIDPNDLRHDIERRRKERLQNEDEHIFHIASAAERDDQNSSFSKGLALSPRLECGVTITAYCSLYLQDSSYLPPQPPE

SEQ ID NO: 17119 - protein, 711 aa, Homo sapiens
  Payload ID: 3435
  Gene Symbol: CXorf23
  Gene Name: chromosome X open reading frame 23
  Uniprot ID: A2AJT9
  ENSP ID: ENSP00000369004
MARSRSRSPRWKHRSLSPVPRNAEHYKQRHSHGHYGCEYRKDPKRPVAWRMDSEKHGQSKPRIPSRGNIYYQSYEHRSPSPNIRNSLENVYMYKPHRGYSPGRGDSNRRAQYMPKYSEGIPYKEHERNSYPQKVQGGHSPDDHRVRGSGKGGKPPQRSIADSFRFEGKWHEDELRHQRIQEEKYSQSTRRGSEDFETRSSFQKRYPEDRDFRKYGHTSKRPKDVERYESREPARNPKWKPEHSLPPYQEDTDQWNLGPQTYRHAEREHPETSSATKVSYDYRHKRPKLLDGDQDFSDGRTQKYCKEEDRKYSFQKGPLNRELDCFNTGRGRETQDGQVKEPFKPSKKDSIACTYSNKNDVDLRSSNDKWKEKIKKEGDCRKESNSSSNQLDKSQKLPDVKPSPINLRKKSLTVKVDVKKTVDTFRVASSYSTERQMSHDLVAVGRKSENFHPVFEHLDSTQNTENKPTGEFAQEIITIIHQVKANYFPSPGITLHERFSTMQDIHKADVNEIPLNSDPEIHRRIDMSLAELQSKQAVIYESEQTLIKIIDPNDLRHDIERRRKERLQNEDEHIFHIASAAERDDQNSSFSKVKNVHTDGFQKPTHFIKSNFRKCIEKPYMNYTTQRKDIITHKPFEVEGNHRNTRVRPFKSNFRGGRCQPNYKSGLVQKSLYIQAKYQRLRFTGPRGFITHKFRERLMRKKKEYTDVATGI

SEQ ID NO: 17120 - protein, 682 aa, Homo sapiens
  Payload ID: 3435
  Gene Symbol: CXorf23
  Gene Name: chromosome X open reading frame 23
  Uniprot ID: A2AJT9
  ENSP ID: ENSP00000369009
MARSRSRSPRWKHRSLSPVPRNAEHYKQRHSHGHYGCEYRKDPKRPVAWRMDSEKHGQSKPRIPSRGNIYYQSYEHRSPSPNIRNSLENVYMYKPHRGYSPGRGDSNRRAQYMPKYSEGIPYKEHERNSYPQKVQGGHSPDDHRVRGSGKGGKPPQRSIADSFRFEGKWHEDELRHQRIQEEKYSQSTRRGSEDFETRSSFQKRYPEDRDFRKYGHTSKRPKDVERYESREPARNPKWKPEHSLPPYQEDTDQWNLGPQTYRHAEREHPETSSATKVSYDYRHKRPKLLDGDQDFSDGRTQKYCKEEDRKYSFQKGPLNRELDCFNTGRGRETQDGQVKEPFKPSKKDSIACTYSNKNDVDLRSSNDKWKEKIKKEGDCRKESNSSSNQLDKSQKLPDVKPSPINLRKKSLTVKVDVKKTVDTFRVASSYSTERQMSHDLVAVGRKSENFHPVFEHLDSTQNTENKPTGEFAQEIITIIHQVKANYFPSPGITLHERFSTMQDIHKADVNEIPLNSDPEIHRRIDMSLAELQSKQAVIYESEQTLIKIIDPNDLRHDIERRRKERLQNEDEHIFHIASAAERDDQNSSFSKNYTTQRKDIITHKPFEVEGNHRNTRVRPFKSNFRGGRCQPNYKSGLVQKSLYIQAKYQRLRFTGPRGFITHKFRERLMRKKKEYTDVATGI

SEQ ID NO: 17121 - protein, 240 aa, Homo sapiens
  Payload ID: 3435
  Gene Symbol: CXorf23
  Gene Name: chromosome X open reading frame 23
  ENSP ID: ENSP00000437272
MSHDLVAVGRKSENFHPVFEHLDSTQNTENKPTGEFAQEIITIIHQVKANYFPSPGITLHERFSTMQDIHKADVNEIPLNSDPEIHRRIDMSLAELQSKQAVIYESEQTLIKIIDPNDLRHDIERRRKERLQNEDEHIFHIASAAERDDQNSSFSKNYTTQRKDIITHKPFEVEGNHRNTRVRPFKSNFRGGRCQPNYKSGLVQKSLYIQAKYQRLRFTGPRGFITHKFRERLMRKKKVP

SEQ ID NO: 17122 - protein, 182 aa, Homo sapiens
  Payload ID: 3436
  Gene Symbol: CXorf36
  Gene Name: chromosome X open reading frame 36
  Uniprot ID: Q9H7Y0
  ENSP ID: ENSP00000367168
MEPQLGPEAAALRPGWLALLLWVSALSCSFSLPASSLSSLVPQVRTSYNFGRTFLGLDKCNACIGTSICKKFFKEEIRSDNWLASHLGLPPDSLLSYPANYSDDSKIWRPVEIFRLVSKYQNEISDRRICASASAPKTCSIERVLRKTERFQKWLQAKRLTPDLVQDCHQGQRELKFLCMLR

SEQ ID NO: 17123 - protein, 433 aa, Homo sapiens
  Payload ID: 3436
  Gene Symbol: CXorf36
  Gene Name: chromosome X open reading frame 36
  Uniprot ID: Q9H7Y0
  ENSP ID: ENSP00000381086
MEPQLGPEAAALRPGWLALLLWVSALSCSFSLPASSLSSLVPQVRTSYNFGRTFLGLDKCNACIGTSICKKFFKEEIRSDNWLASHLGLPPDSLLSYPANYSDDSKIWRPVEIFRLVSKYQNEISDRRICASASAPKTCSIERVLRKTERFQKWLQAKRLTPDLVQGLASPLLRCPSQRLLDRVVRRYAEVADAGSIFMDHFTDRDKLRLLYTLAVNSHPILLQIFPGAEGWPLPKYLGSCGRFLVSTSTRPLQEFYDAPPDQAADLAYQLLGVLESLRSNDLNYFFYFTHIDAGMFGVFNNGHLFIRDASAVGVIDKQEGSQEANRAGENKDIFSCLVSGCQAQLPSCESISEKQSLVLVCQKLLPRLLQGRFPSPVQDDIDSILVQCGDSIRPDPEVLGAASQLKDILRPLRTCDSRFAYRYPDCKYNDKF

SEQ ID NO: 17124 - protein, 319 aa, Homo sapiens
  Payload ID: 3437
  Gene Symbol: CXorf38
  Gene Name: chromosome X open reading frame 38
  Uniprot ID: Q8TB03
  ENSP ID: ENSP00000330488
MVLSELAARLNCAEYKNWVKAGHCLLLLRSCLQGFVGREVLSFHRGLLAAAPGLGPRAVCRGGSRCSPRARQFQPQCQVCAEWKREILRHHVNRNGDVHWGNCRPGRWPVDAWEVAKAFMPRGLADKQGPEECDAVALLSLINSCDHFVVDRKKVTEVIKCRNEIMHSSEMKVSSTWLRDFQMKIQNFLNEFKNIPEIVAVYSRIEQLLTSDWAVHIPEEDQRDGCECEMGTYLSESQVNEIEMQLLKEKLQEIYLQAEEQEVLPEELSNRLEVVKEFLRNNEDLRNGLTEDMQKLDSLCLHQKLDSQEPGRQTPDRKA

SEQ ID NO: 17125 - protein, 200 aa, Homo sapiens
  Payload ID: 3437
  Gene Symbol: CXorf38
  Gene Name: chromosome X open reading frame 38
  Uniprot ID: Q8TB03
  ENSP ID: ENSP00000367677
MPRGLADKQGPEECDAVALLSLINSCDHFVVDRKKVTEVIKCRNEIMHSSEMKVSSTWLRDFQMKIQNFLNEFKNIPEIVAVYSRIEQLLTSDWAVHIPEEDQRDGCECEMGTYLSESQVNEIEMQLLKEKLQEIYLQAEEQEVLPEELSNRLEVVKEFLRNNEDLRNGLTEDMQKLDSLCLHQKLDSQEPGRQTPDRKA

SEQ ID NO: 17126 - protein, 200 aa, Homo sapiens; identical to SEQ ID NO: 17125
  Payload ID: 3437
  Gene Symbol: CXorf38
  Gene Name: chromosome X open reading frame 38
  Uniprot ID: Q8TB03
  ENSP ID: ENSP00000367683

SEQ ID NO: 17127 - protein, 158 aa, Homo sapiens
  Payload ID: 3438
  Gene Symbol: CXorf40A
  Gene Name: chromosome X open reading frame 40A
  Uniprot ID: Q8TE69
  ENSP ID: ENSP00000420882
MKFGCLSFRQPYAGFVLNGIKTVETRWRPLLSSQRNCTIAVHIAHRDWEGDAWRELLVERLGMTPAQIQALLRKGEKFGRGVIAGLVDIGETLQCPEDLTPDEVVELENQAVLTNLKQKYLTVISNPRWLLEPIPRKGGKDVFQVDIPEHLIPLGHEV

SEQ ID NO: 17128 - protein, 158 aa, Homo sapiens; identical to SEQ ID NO: 17127
  Payload ID: 3438
  Gene Symbol: CXorf40A
  Gene Name: chromosome X open reading frame 40A
  Uniprot ID: Q8TE69
  ENSP ID: ENSP00000421745

SEQ ID NO: 17129 - protein, 146 aa, Homo sapiens
  Payload ID: 3438
  Gene Symbol: CXorf40A
  Gene Name: chromosome X open reading frame 40A
  ENSP ID: ENSP00000422312
MKFGCLSFRQPYAGFVLNGIKTVETRWRPLLSSQRNCTIAVHIAHRDWEGDAWRELLVERLGMTPAQIQALLRKGEKFGRGVIAGLVDIGETLQCPEDLTPDEVVELENQAVLTNLKQKYLTVISNPRWLLEPIPRKGGKDVFQNP

SEQ ID NO: 17130 - protein, 158 aa, Homo sapiens; identical to SEQ ID NO: 17127
  Payload ID: 3438
  Gene Symbol: CXorf40A
  Gene Name: chromosome X open reading frame 40A
  Uniprot ID: Q8TE69
  ENSP ID: ENSP00000422512

SEQ ID NO: 17131 - protein, 158 aa, Homo sapiens; identical to SEQ ID NO: 17127
  Payload ID: 3438
  Gene Symbol: CXorf40A
  Gene Name: chromosome X open reading frame 40A
  Uniprot ID: Q8TE69
  ENSP ID: ENSP00000423099

SEQ ID NO: 17132 - protein, 146 aa, Homo sapiens; identical to SEQ ID NO: 17129
  Payload ID: 3438
  Gene Symbol: CXorf40A
  Gene Name: chromosome X open reading frame 40A
  ENSP ID: ENSP00000423160

SEQ ID NO: 17133 - protein, 30 aa, Homo sapiens
  Payload ID: 3438
  Gene Symbol: CXorf40A
  Gene Name: chromosome X open reading frame 40A
  ENSP ID: ENSP00000423447
MKFGCLSFRQPYAGFVLNGIKTVETRWRPL

SEQ ID NO: 17134 - protein, 146 aa, Homo sapiens; identical to SEQ ID NO: 17129
  Payload ID: 3438
  Gene Symbol: CXorf40A
  Gene Name: chromosome X open reading frame 40A
  ENSP ID: ENSP00000423708

SEQ ID NO: 17135 - protein, 158 aa, Homo sapiens; identical to SEQ ID NO: 17127
  Payload ID: 3438
  Gene Symbol: CXorf40A
  Gene Name: chromosome X open reading frame 40A
  Uniprot ID: Q8TE69
  ENSP ID: ENSP00000425520

SEQ ID NO: 17136 - protein, 96 aa, Homo sapiens
  Payload ID: 3438
  Gene Symbol: CXorf40A
  Gene Name: chromosome X open reading frame 40A
  ENSP ID: ENSP00000426158
MTPAQIQALLRKGEKFGRGVIAGLVDIGETLQCPEDLTPDEVVELENQAVLTNLKQKYLTVISNPRWLLEPIPRKGGKDVFQVDIPEHLIPLGHEV

SEQ ID NO: 17137 - protein, 158 aa, Homo sapiens; identical to SEQ ID NO: 17127
  Payload ID: 3438
  Gene Symbol: CXorf40A
  Gene Name: chromosome X open reading frame 40A
  Uniprot ID: Q8TE69
  ENSP ID: ENSP00000427540

SEQ ID NO: 17138 - protein, 158 aa, Homo sapiens
  Payload ID: 3439
  Gene Symbol: CXorf40B
  Gene Name: chromosome X open reading frame 40B
  Uniprot ID: Q96DE9
  ENSP ID: ENSP00000347339
MKFGCLSFRQPYAGFVLNGIKTVETRWRPLLSSQRNCTIAVHIAHRDWEGDACRELLVERLGMTPAQIQALLRKGEKFGRGVIAGLVDIGETLQCPEDLTPDEVVELENQAALTNLKQKYLTVISNPRWLLEPIPRKGGKDVFQVDIPEHLIPLGHEV

SEQ ID NO: 17139 - protein, 158 aa, Homo sapiens; identical to SEQ ID NO: 17138
  Payload ID: 3439
  Gene Symbol: CXorf40B
  Gene Name: chromosome X open reading frame 40B
  Uniprot ID: Q96DE9
  ENSP ID: ENSP00000359432

SEQ ID NO: 17140 - protein, 158 aa, Homo sapiens; identical to SEQ ID NO: 17138
  Payload ID: 3439
  Gene Symbol: CXorf40B
  Gene Name: chromosome X open reading frame 40B
  Uniprot ID: Q96DE9
  ENSP ID: ENSP00000359434

SEQ ID NO: 17141 - protein, 146 aa, Homo sapiens
  Payload ID: 3439
  Gene Symbol: CXorf40B
  Gene Name: chromosome X open reading frame 40B
  ENSP ID: ENSP00000417546
MKFGCLSFRQPYAGFVLNGIKTVETRWRPLLSSQRNCTIAVHIAHRDWEGDACRELLVERLGMTPAQIQALLRKGEKFGRGVIAGLVDIGETLQCPEDLTPDEVVELENQAALTNLKQKYLTVISNPRWLLEPIPRKGGKDVFQNP

SEQ ID NO: 17142 - protein, 147 aa, Homo sapiens
  Payload ID: 3439
  Gene Symbol: CXorf40B
  Gene Name: chromosome X open reading frame 40B
  ENSP ID: ENSP00000474324
MKFGCLSFRQPYAGFVLNGIKTVETRWRPLLSSQRNCTIAVHIAHRDWEGDACRELLVERLGMTPAQIQALLRKGEKFGRGVIAGLVDIGETLQCPEDLTPDEVVELENQAALTNLKQKYLTVISNPRWLLEPIPRKGGKDVFQVDI

SEQ ID NO: 17143 - protein, 45 aa, Homo sapiens
  Payload ID: 3439
  Gene Symbol: CXorf40B
  Gene Name: chromosome X open reading frame 40B
  ENSP ID: ENSP00000474715
MKFGCLSFRQPYAGFVLNGIKTVETRWRPLLSSQRNCTIAVHIAH

SEQ ID NO: 17144 - protein, 514 aa, Homo sapiens
  Payload ID: 3440
  Gene Symbol: CXorf49
  Gene Name: chromosome X open reading frame 49
  Uniprot ID: A8MYA2
  ENSP ID: ENSP00000480355
MSSPDKVSVCGAGFDLEGGKKAGSRTASPGAPGAHSHGLDLGVPGSGDGKSESGFTDPEGFSFESESELIEQGRVVLWGREGRPGTPVDDQGDVVDYSFYLADEPAAIVPPPSVQGHPFPEGAAAEGSAENWADAEVGPSGRDVLGHSPGKWQQASAGRLHLCGPGPVRAWKNPERGSKSRWSLRVDPQQPSAKGPTRLPTHDSDSADESSDLPLMKVGICRNEGSQAKPGSPKKRADTSRQASFHCKESYLPVPGRFLTSAPRGLTPVAERPAVGELEDSPQKKMQSRAWGKVEVRPSCSGAAAAGALPQGLSRRKMAGGKKSLGGASQLALGRGFPACGERLSAAPPEPATFPPFSGVRPQGMSKKPQKPKHSSPGKKPAGRKTRESQAAAREDNDPNRDEVPRAQLPTHRPGLPRLSVRRGEFSSSDPNIRAPQLPGTSEPSAYSPGGLVPRRHAPSGNQQPPVHPPRPERQQQPPGAQGCPRCIWLQREIEDLTQQLAAMQFLTDKFQDL

SEQ ID NO: 17145 - protein, 514 aa, Homo sapiens; identical to SEQ ID NO: 17144
  Payload ID: 3441
  Gene Symbol: CXorf49B
  Gene Name: chromosome X open reading frame 49B
  Uniprot ID: A8MYA2
  ENSP ID: ENSP00000482270

SEQ ID NO: 17146 - protein, 173 aa, Homo sapiens
  Payload ID: 3442
  Gene Symbol: CXorf56
  Gene Name: chromosome X open reading frame 56
  Uniprot ID: Q9H5V9
  ENSP ID: ENSP00000320345
MRPRDRSRVIDAAKHAHKFCNTEDEETMYLRRPEGIERQYRKKCAKCGLPLFYQSQPKNAPVTFIVDGAVVKFGQGFGKTNIYTQKQEPPKKVMMTKRTKDMGKFSSVTVSTIDEEEEEIEAREVADSYAQNAKVIEKQLERKGMSKRRLQELAELEAKKAKMKGTLIDNQFK

SEQ ID NO: 17147 - protein, 208 aa, Homo sapiens
  Payload ID: 3442
  Gene Symbol: CXorf56
  Gene Name: chromosome X open reading frame 56
  Uniprot ID: Q9H5V9
  ENSP ID: ENSP00000441786
MPKVVSRSVVCSDTRDREEYDDGEKPLHVYYCLCGQMVLVLDCQLEKLPMRPRDRSRVIDAAKHAHKFCNTEDEETMYLRRCGLPLFYQSQPKNAPVTFIVDGAVVKFGQGFGKTNIYTQKQEPPKKVMMTKRTKDMGKFSSVTVSTIDEEEEEIEAREVADSYAQNAKVIEKQLERKGMSKRRLQELAELEAKKAKMKGTLIDNQFK

SEQ ID NO: 17148 - protein, 758 aa, Homo sapiens
  Payload ID: 3443
  Gene Symbol: CXorf57
  Gene Name: chromosome X open reading frame 57
  Uniprot ID: Q6NSI4
  ENSP ID: ENSP00000361623
MSGESGQPEAGPSHAGLDWPNPERNRAGVPGGVIRRAGSQGPRSWIQKVLEQIMDSPRQCVTPSEVVPVTVLAVQRYLLEDEPRDTVPKPPLYCYDVTISDGVYQEKCYLDPSLNSLVYQNILKVGIQMRISRVSCLYNEKRIGQGILCIDNVHCGETSDSISLETPFRNRAHQEKPERPLRGGKSHYLALWNNEDPYGDIWLTDKQPEEHNFSDTKIISLSHLEMTWTNRRNFPALLVRILHKSKLRYYGKPDKKMIEPYQTFLEVADSSGTVSVIMWNALCPEWYKSLRVGLVLLLQDYSVKKSYPFRIQPVPVDPQIKLISTMEICLNLRDPPTNIIIIPEKQVKPEWRLPKLNHRFTTRSELDDMPENCICDVIGLLVFVGRVQRSKKKENREDFWSYRWIHIADGTSEQPFIVELFSTSQPEIFENIYPMAYFVCTQLKVVRNDNQVPKLLYLTTTNESGVFITGHRGQPYTYDAKNANRPSTSQAARVEIQERNGKRHQDDEPVNSQYFQTTSTNLSLSNKIRILQGPHANPVAVPQPGASVQTKGIKPGMPSIFNRRANINANLQGKARKTISDRWESQLWREKKFGLIDHLHYSRVYPESIPRKFMFEHRKFLSDQYNSQPAKYVPPEGRPPKLDDFKSARSLGHFEVTILGLNHEIAIDVAFLPMYCPEDIRTSQIDTLLTSMNYSCAYPQDTTGNDRLPGPRAVAGDIIKAATELDRVHIVGILDICNLGNNKVEVYLHKIYSPENTS

SEQ ID NO: 17149 - protein, 855 aa, Homo sapiens
  Payload ID: 3443
  Gene Symbol: CXorf57
  Gene Name: chromosome X open reading frame 57
  Uniprot ID: Q6NSI4
  ENSP ID: ENSP00000361628
MSGESGQPEAGPSHAGLDWPNPERNRAGVPGGVIRRAGSQGPRSWIQKVLEQIMDSPRQCVTPSEVVPVTVLAVQRYLLEDEPRDTVPKPPLYCYDVTISDGVYQEKCYLDPSLNSLVYQNILKVGIQMRISRVSCLYNEKRIGQGILCIDNVHCGETSDSISLETPFRNRAHQEKPERPLRGGKSHYLALWNNEDPYGDIWLTDKQPEEHNFSDTKIISLSHLEMTWTNRRNFPALLVRILHKSKLRYYGKPDKKMIEPYQTFLEVADSSGTVSVIMWNALCPEWYKSLRVGLVLLLQDYSVKKSYPFRIQPVPVDPQIKLISTMEICLNLRDPPTNIIIIPEKQVKPEWRLPKLNHRFTTRSELDDMPENCICDVIGLLVFVGRVQRSKKKENREDFWSYRWIHIADGTSEQPFIVELFSTSQPEIFENIYPMAYFVCTQLKVVRNDNQVPKLLYLTTTNESGVFITGHRGQPYTYDAKVKNFIQWIRTKSDSGEQKNMVIGGYYPYPPVPETFSKYSSSIKVESLLTAISEVRKEIEDLQYREQKRIAIQGIITAIKYIPHSSATESASASETLRNANRPSTSQAARVEIQERNGKRHQDDEPVNSQYFQTTSTNLSLSNKIRILQGPHANPVAVPQPGASVQTKGIKPGMPSIFNRRANINANLQGKARKTISDRWESQLWREKKFGLIDHLHYSRVYPESIPRKFMFEHRKFLSDQYNSQPAKYVPPEGRPPKLDDFKSARSLGHFEVTILGLNHEIAIDVAFLPMYCPEDIRTSQIDTLLTSMNYSCAYPQDTTGNDRLPGPRAVAGDIIKAATELDRVHIVGILDICNLGNNKVEVYLHKIYSPENTS

SEQ ID NO: 17150 - protein, 566 aa, Homo sapiens
  Payload ID: 3443
  Gene Symbol: CXorf57
  Gene Name: chromosome X open reading frame 57
  ENSP ID: ENSP00000405866
NNEDPYGDIWLTDKQPEEHNFSDTKIISLSHLEMTWTNRRNFPALLVRILHKSKLRYYGKPDKKMIEPYQTFLEVADSSGTVSVIMWNALCPEWYKSLRVGLVLLLQDYSVKKSYPFRIQPVPVDPQIKLISTMEICLNLRDPPTNIIIIPEKQVKPEWRLPKLNHRFTTRSELDDMPENCICDVIGLLVFVGRVQRSKKKENREDFWSYRWIHIADGTSEQPFIVELFSTSQPEIFENIYPMAYFVCTQLKVVRNDNQVPKLLYLTTTNESGVFITGHRGQPYTYDAKNANRPSTSQAARVEIQERNGKRHQDDEPVNSQYFQTTSTNLSLSNKIRILQGPHANPVAVPQPGASVQTKGIKPGMPSIFNRRANINANLQGKARKTISDRWESQLWREKKFGLIDHLHYSRVYPESIPRKFMFEHRKFLSDQYNSQPAKYVPPEGRPPKLDDFKSARSLGHFEVTILGLNHEIAIDVAFLPMYCPEDIRTSQIDTLLTSMNYSCAYPQDTTGNDRLPGPRAVAGDIIKAATELDRVHIVGILDICNLGNNKVEVYLHKIYSPENTS

SEQ ID NO: 17151 - protein, 567 aa, Homo sapiens
  Payload ID: 3443
  Gene Symbol: CXorf57
  Gene Name: chromosome X open reading frame 57
  Uniprot ID: Q6NSI4
  ENSP ID: ENSP00000432238
MSGESGQPEAGPSHAGLDWPNPERNRAGVPGGVIRRAGSQGPRSWIQKVLEQIMDSPRQCVTPSEVVPVTVLAVQRYLLEDEPRDTVPKPPLYCYDVTISDGVYQEKCYLDPSLNSLVYQNILKVGIQMRISRVSCLYNEKRIGQGILCIDNVHCGETSDSISLETPFRNRAHQEKPERPLRGGKSHYLALWNNEDPYGDIWLTDKQPEEHNFSDTKIISLSHLEMTWTNRRNFPALLVRILHKSKLRYYGKPDKKMIEPYQTFLEVADSSGTVSVIMWNALCPEWYKSLRVGLVLLLQDYSVKKSYPFRIQPVPVDPQIKLISTMEICLNLRDPPTNIIIIPEKQVKPEWRLPKLNHRFTTRSELDDMPENCICDVIGLLVFVGRVQRSKKKENREDFWSYRWIHIADGTSEQPFIVELFSTSQPEIFENIYPMAYFVCTQLKVVRNDNQVPKLLYLTTTNESGVFITGHRGQPYTYDAKVKNFIQWIRTKSDSGEQKNMVIGGYYPYPPVPETFSKYSSSIKGTNVIASPSKYVYILYVWLMLFQLVIFILFFYGSDLKFSNIHR

SEQ ID NO: 17152 - protein, 332 aa, Homo sapiens
  Payload ID: 3444
  Gene Symbol: CXorf58
  Gene Name: chromosome X open reading frame 58
  Uniprot ID: Q96LI9
  ENSP ID: ENSP00000368511
MNRSSNVPRKGILKSGTRSLQKVRRVHFANARNARSLLSMLKDISAQIIQRAWLSHTNKMIFRLLKHAICAAEFYVTHEILKKVAPLEAKLIKDPTMQCKIRFRFRGETFPPFIVFKIFLHTDGHGYKYFSGKNVLMPSSKAVDDACKLMGERKFHRIIMEDERIFPKSKVTDIMDVVTMQDYVQYRSFFDEAPAFSGGRNNSWRKLNLENIPRTMLMYDIVHYSESGVISNRLRNEMKFLLQRPVTQEIHKHQLRIVSEIRGPYLTVQPLYRPYKQQNQVKFLGRRSKQAQMKVEKMRKVYLAKEKNTSEVTEPKTGPSGTKDNYHLHSIF

SEQ ID NO: 17153 - protein, 126 aa, Homo sapiens
  Payload ID: 3444
  Gene Symbol: CXorf58
  Gene Name: chromosome X open reading frame 58
  ENSP ID: ENSP00000407305
  MOD_RES (1)..(1): Any amino acid
XFANARNARSLLSMLKDISAQIIQRAWLSHTNKMIFRLLKHAICAAEFYVTHEILKKVAPLEAKLIKDPTMQCKIRFRFRGETFPPFIVFKIFLHTDGHGYKYFSGKNVLMPSSKVTFHDVHFMLT

SEQ ID NO: 17154 - protein, 183 aa, Homo sapiens
  Payload ID: 3445
  Gene Symbol: CXorf65
  Gene Name: chromosome X open reading frame 65
  Uniprot ID: A6NEN9
  ENSP ID: ENSP00000363369
MFIFIKHGDNQQFLVNTNCAVVVLLYYIRSKVKLPKTNTIDLCEQTGKMKMLFLMKPNHAEYASKYLTARSTYYVCKVERGPPGTRLENAYRAFVPLLKNPEPWLLVALRIQCDALERRRIQMLKMKEAKKVVIIEPPASVPSKQSGRSDKKKSTRKSPTFRNRPDFRKNKGRQLNKTTKQKK

SEQ ID NO: 17155 - protein, 42 aa, Homo sapiens
  Payload ID: 3445
  Gene Symbol: CXorf65
  Gene Name: chromosome X open reading frame 65
  ENSP ID: ENSP00000411354
MFIFIKHGDNQQFLVNTNCAVVVLLYYIRSKTPSICVNKRGK

SEQ ID NO: 17156 - protein, 361 aa, Homo sapiens
  Payload ID: 3446
  Gene Symbol: CXorf66
  Gene Name: chromosome X open reading frame 66
  Uniprot ID: Q5JRM2
  ENSP ID: ENSP00000359571
MNLVICVLLLSIWKNNCMTTNQTNGSSTTGDKPVESMQTKLNYLRRNLLILVGIIIMVFVFICFCYLHYNCLSDDASKAGMVKKKGIAAKSSKTSFSEAKTASQCSPETQPMLSTADKSSDSSSPERASAQSSTEKLIRPSSLQKPSIPNSAGKLTRPSYPKRSSKSSCSKKLSKSSHLEKAHKKGSLEKLCKLDYACKLASSDKPVRPPQLFKPLYSSHPQNEISPSKPFGPQELAKPPKHFNPKRSVSLGRAALLSNSELAETCQPYKKKHLVAKTYRPLVNDISEAKEKNTQNLHVSSKVKSSSRSFRKLDSRNNAYGDHVNDSDTMKYYSEVDSDKVIIITCDRGYNQVTSEVTLND

SEQ ID NO: 17157 - protein, 503 aa, Homo sapiens
  Payload ID: 3447
  Gene Symbol: CXorf67
  Gene Name: chromosome X open reading frame 67
  Uniprot ID: Q86X51
  ENSP ID: ENSP00000342680
MATQSDMEKEQKHQQDEGQGGLNNETALASGDACGTGNQDPAASVTTVSSQASPSGGAALSSSTAGSSAAAATSAAIFITDEASGLPIIAAVLTERHSDRQDCRSPHEVFGCVVPEGGSQAAVGPQKATGHADEHLAQTKSPGNSRRRKQPCRNQAAPAQKPPGRRLFPEPLPPSSPGFRPSSYPCSGASTSSQATQPGPALLSHASEARPATRSRITLVASALRRRASGPGPVIRGCTAQPGPAFPHRATHLDPARLSPESAPGPARRGRASVPGPARRGCDSAPGPARRGRDSAPVSAPRGRDSAPGSARRGRDSAPGPALRVRTARSDAGHRSTSTTPGTGLRSRSTQQRSALLSRRSLSGSADENPSCGTGSERLAFQSRSGSPDPEVPSRASPPVWHAVRMRASSPSPPGRFFLPIPQQWDESSSSSYASNSSSPSRSPGLSPSSPSPEFLGLRSISTPSPESLRYALMPEFYALSPVPPEEQAEIESTAHPATPPEP

SEQ ID NO: 17158 - protein, 121 aa, Homo sapiens
  Payload ID: 3448
  Gene Symbol: CLLU1
  Gene Name: chronic lymphocytic leukemia up-regulated 1
  Uniprot ID: Q5K131
  ENSP ID: ENSP00000367746
MFNKCSFHSSIYRPAADNSASSLCAIICFLNLVIECDLETNSEINKLIIYLFSQNNRIRFSKLLLKILFYISIFSYPELMCEQYVTFIKPGIHYGQVSKKHIIYSTFLSKNFKFQLLRVCW

SEQ ID NO: 17159 - protein, 101 aa, Homo sapiens
  Payload ID: 3449
  Gene Symbol: CLLU1OS
  Gene Name: chronic lymphocytic leukemia up-regulated 1 opposite strand
  Uniprot ID: Q5K130
  ENSP ID: ENSP00000367748
MNKLGHNELKECLKTATDSLQTVQPSISQTCTSYGPALGAPLPGRNEVALLTSLPPNYEISEGKPRAISAYVRAGKGNVTRRRKKTHLGNDDGKKEAQEKM

SEQ ID NO: 17160 - protein, 471 aa, Homo sapiens
  Payload ID: 3450
  Gene Symbol: CHURC1-FNTB
  Gene Name: CHURC1-FNTB readthrough
  ENSP ID: ENSP00000447121
MCGDCVEKEYPNRGNTCLENGSFLLNFTGCAVCSKRDFMLITNKSLKEEDGEEIVTYDHLCKNCHHVIARHEYTFSIMDEFQAKVEEKIQEVFSSYKFNHLVPRLVLQREKHFHYLKRGLRQLTDAYECLDASRPWLCYWILHSLELLDEPIPQIVATDVCQFLELCQSPEGGFGGGPGQYPHLAPTYAAVNALCIIGTEEAYDIINREKLLQYLYSLKQPDGSFLMHVGGEVDVRSAYCAASVASLTNIITPDLFEGTAEWIARCQNWEGGIGGVPGMEAHGGYTFCGLAALVILKRERSLNLKSLLQWVTSRQMRFEGGFQGRCNKLVDGCYSFWQAGLLPLLHRALHAQGDPALSMSHWMFHQQALQEYILMCCQCPAGGLLDKPGKSRDFYHTCYCLSGLSIAQHFGSGAMLHDVVLGVPENALQPTHPVYNIGPDKVIQATTYFLQKPVPGFEELKDETSAEPATD

SEQ ID NO: 17161 - protein, 107 aa, Homo sapiens
  Payload ID: 3450
  Gene Symbol: CHURC1-FNTB
  Gene Name: CHURC1-FNTB readthrough
  ENSP ID: ENSP00000449668
  MOD_RES (1)..(1): Any amino acid
XCVAMCGDCVEKEYPNRGNTCLENGSFLLNFTGCAVCSKRDFMLITNKSLKEEDGEEIVTYDRKSRRKDPRGLQFLQVQPPCTKACFAEGEALPLSEKRPSTTDRCL

SEQ ID NO: 17162 - protein, 85 aa, Homo sapiens
  Payload ID: 3450
  Gene Symbol: CHURC1-FNTB
  Gene Name: CHURC1-FNTB readthrough
  ENSP ID: ENSP00000449709
GCAVCSKRDFMLITNKSLKEEDGEEIVTYDPDLCKNCHHVIARHEYTFSIMDEFQEYTMLCLLCGKAEDTISILPDDPRQMTLLF

SEQ ID NO: 17163 - protein, 69 aa, Homo sapiens
  Payload ID: 3450
  Gene Symbol: CHURC1-FNTB
  Gene Name: CHURC1-FNTB readthrough
  ENSP ID: ENSP00000450692
GCAVCSKRDFMLITNKSLKEEDGEEIVTYDRKSRRKDPRGLQFLQVQPPCTKCLDASRPWLCYWILHSL

SEQ ID NO: 17164 - protein, 108 aa, Homo sapiens
  Payload ID: 3451
  Gene Symbol: CHURC1
  Gene Name: churchill domain containing 1
  ENSP ID: ENSP00000352026
MCGDCVEKEYPNRGNTCLENGSFLLNFTGCAVCSKRDFMLITNKSLKEEDGEEIVTYDPDLCKNCHHVIARHEYTFSIMDEFQEYTMLCLLCAKPKILSVFSLMTPDK

SEQ ID NO: 17165 - protein, 126 aa, Homo sapiens
  Payload ID: 3451
  Gene Symbol: CHURC1
  Gene Name: churchill domain containing 1
  ENSP ID: ENSP00000446610
  MOD_RES (1)..(1): Any amino acid
XPVDCVAMCGDCVEKEYPNRGNTCLENGSFLLNFTGCAVCSKRDFMLITNKSLKEEDGEEIVTYDHLCKNCHHVIARHEYTFSIMDEFQDKIKGTLRRRVCHFLGEKRSFQCLSSCQAEETKLCLS

SEQ ID NO: 17166 - protein, 83 aa, Homo sapiens
  Payload ID: 3451
  Gene Symbol: CHURC1
  Gene Name: churchill domain containing 1
  ENSP ID: ENSP00000446697
  MOD_RES (1)..(1): Any amino acid
XVSSSRKRWRTFPVDCVAMCGDCVEKEYPNRGNTCLENGSFLLNFTGCAVCSKRDFMLITNKSLKEEDGEEIVTYDRQNQRDP

SEQ ID NO: 17167 - protein, 139 aa, Homo sapiens
  Payload ID: 3451
  Gene Symbol: CHURC1
  Gene Name: churchill domain containing 1
  Uniprot ID: Q8WUH1
  ENSP ID: ENSP00000448050
MRQPYLSSREVSSSRKRWRTFPVDCVAMCGDCVEKEYPNRGNTCLENGSFLLNFTGCAVCSKRDFMLITNKSLKEEDGEEIVTYDHLCKNCHHVIARHEYTFSIMDEFQEYTMLCLLCGKAEDTISILPDDPRQMTLLF

SEQ ID NO: 17168 - protein, 95 aa, Homo sapiens
  Payload ID: 3451
  Gene Symbol: CHURC1
  Gene Name: churchill domain containing 1
  ENSP ID: ENSP00000449184
  MOD_RES (1)..(1): Any amino acid
XGSFLLNFTGCAVCSKRDFMLITNKSLKEEDGEEIVTYDHLCKNCHHVIARHEYTFSIMDEFQVAIQIAMPGGLKQWKYLRTVKDLEEDVFLFYF

SEQ ID NO: 17169 - protein, 112 aa, Homo sapiens
  Payload ID: 3451
  Gene Symbol: CHURC1
  Gene Name: churchill domain containing 1
  ENSP ID: ENSP00000450144
MCGDCVEKEYPNRGNTCLENGSFLLNFTGCAVCSKRDFMLITNKSLKEEDGEEIVTYDHLCKNCHHVIARHEYTFSIMDEFQEYTMLCLLCGKAEDTISILPDDPRQMTLLF

SEQ ID NO: 17170 - protein, 105 aa, Homo sapiens
  Payload ID: 3451
  Gene Symbol: CHURC1
  Gene Name: churchill domain containing 1
  Uniprot ID: Q8WUH1
  ENSP ID: ENSP00000450165
MRQPYLSSREVSSSRKRWRTFPVDCVAMCGDCVEKEYPNRGNTCLENGSFLLNFTGCAVCSKRDFMLITNKSLKEEDGEEIVTYDRVYHAVSVMRQSRRYYQYSP

SEQ ID NO: 17171 - protein, 140 aa, Homo sapiens
  Payload ID: 3451
  Gene Symbol: CHURC1
  Gene Name: churchill domain containing 1
  Uniprot ID: Q8WUH1
  ENSP ID: ENSP00000475473
MRQPYLSSREVSSSRKRWRTFPVDCVAMCGDCVEKEYPNRGNTCLENGSFLLNFTGCAVCSKRDFMLITNKSLKEEDGEEIVTYDPDLCKNCHHVIARHEYTFSIMDEFQEYTMLCLLCGKAEDTISILPDDPRQMTLLF

SEQ ID NO: 17172 - protein, 136 aa, Homo sapiens
  Payload ID: 3452
  Gene Symbol: CMA1
  Gene Name: chymase 1, mast cell
  Uniprot ID: P23946
  ENSP ID: ENSP00000206446
MLLKLKEKASLTLAVGTLPFPSQFNFVPPGRMCRVAGWGRTGVLKPGSDTLQEVKLRLMDPQACSHFRDFDHNLQLCVGNPRKTKSAFKGDSGGPLLCAGVAQGIVSYGRSDAKPPAVFTRISHYRPWINQILQAN

SEQ ID NO: 17173 - protein, 247 aa, Homo sapiens
  Payload ID: 3452
  Gene Symbol: CMA1
  Gene Name: chymase 1, mast cell
  Uniprot ID: P23946
  ENSP ID: ENSP00000250378
MLLLPLPLLLFLLCSRAEAGEIIGGTECKPHSRPYMAYLEIVTSNGPSKFCGGFLIRRNFVLTAAHCAGRSITVTLGAHNITEEEDTWQKLEVIKQFRHPKYNTSTLHHDIMLLKLKEKASLTLAVGTLPFPSQFNFVPPGRMCRVAGWGRTGVLKPGSDTLQEVKLRLMDPQACSHFRDFDHNLQLCVGNPRKTKSAFKGDSGGPLLCAGVAQGIVSYGRSDAKPPAVFTRISHYRPWINQILQAN

SEQ ID NO: 17174 - protein, 69 aa, Homo sapiens
  Payload ID: 3453
  Gene Symbol: CTRC
  Gene Name: chymotrypsin C (caldecrin)
  ENSP ID: ENSP00000365110
MLGITVLAALLACATPGPTVWPWERTTWRWKTKKDPCLWVWTPSTSTRDGMPSCCAMILPSSSLQSMWS

SEQ ID NO: 17175 - protein, 268 aa, Homo sapiens [sequence omitted]

SEQ ID NO: 17176 - protein, 264 aa, Homo sapiens
  Payload ID: 3454
  Gene Symbol: CTRL
  Gene Name: chymotrypsin-like
  Uniprot ID: P40313
  ENSP ID: ENSP00000458537
MLLLSLTLSLVLLGSSWGCGIPAIKPALSFSQRIVNGENAVLGSWPWQVSLQDSSGFHFCGGSLISQSWVVTAAHCNVSPGRHFVVLGEYDRSSNAEPLQVLSVSRAITHPSWNSTTMNNDVTLLKLASPAQYTTRISPVCLASSNEALTEGLTCVTTGWGRLSGVGNVTPAHLQQVALPLVTVNQCRQYWGSSITDSMICAGGAGASSCQGDSGGPLVCQKGNTWVLIGIVSWGTKNCNVRAPAVYTRVSKFSTWINQVIAYN

SEQ ID NO: 17177 - protein, 190 aa, Homo sapiens
  Payload ID: 3454
  Gene Symbol: CTRL
  Gene Name: chymotrypsin-like
  ENSP ID: ENSP00000458598
MLLLSLTLSLVLLGSSWGQQRLPLLRWFSHQPVLGGHCCPLQCQVLSVSRVSAWAADTEEKWAVQAITHPSWNSTTMNNDVTLLKLASPAQYTTRISPVCLASSNEALTEGLTCVTTGWGRLSGVGNVTPAHLQQVALPLVTVNQCRQYWGSSITDSMICAGGAGASSCQGDSGGPLVCQKGNTWVLIGI

SEQ ID NO: 17178 - protein, 190 aa, Homo sapiens
  Payload ID: 3454
  Gene Symbol: CTRL
  Gene Name: chymotrypsin-like
  ENSP ID: ENSP00000461842
MLLLSLTLSLVLLGSSWGCGIPAIKPALSFSQRIVNGENAVLGSWPWQVSLQDSSGFHFCGGSLISQSWVVTAAHCNVSPGRHFVVLGEYDRSSNAEPLQVLSVSRAITHPSWNSTTMNNDVTLLKLASPAQYTTRISPVCLASSNEALLSARRETHGCLLVLSPGAPKTAMCAHLLCILELASSAPGST

SEQ ID NO: 17179 - protein, 258 aa, Homo sapiens
  Payload ID: 3455
  Gene Symbol: CELA1
  Gene Name: chymotrypsin-like elastase family, member 1
  Uniprot ID: Q9UNI1
  ENSP ID: ENSP00000293636
MLVLYGHSTQDLPETNARVVGGTEAGRNSWPSQISLQYRSGGSRYHTCGGTLIRQNWVMTAAHCVDYQKTFRVVAGDHNLSQNDGTEQYVSVQKIVVHPYWNSDNVAAGYDIALLRLAQSVTLNSYVQLGVLPQEGAILANNSPCYITGWGKTKTNGQLAQTLQQAYLPSVDYAICSSSSYWGSTVKNTMVCAGGDGVRSGCQGDSGGPLHCLVNGKYSVHGVTSFVSSRGCNVSRKPTVFTQVSAYISWINNVIASN

SEQ ID NO: 17180 - protein, 269 aa, Homo sapiens
  Payload ID: 3456
  Gene Symbol: CELA2A
  Gene Name: chymotrypsin-like elastase family, member 2A
  Uniprot ID: P08217
  ENSP ID: ENSP00000352639
MIRTLLLSTLVAGALSCGDPTYPPYVTRVVGGEEARPNSWPWQVSLQYSSNGKWYHTCGGSLIANSWVLTAAHCISSSRTYRVGLGRHNLYVAESGSLAVSVSKIVVHKDWNSNQISKGNDIALLKLANPVSLTDKIQLACLPPAGTILPNNYPCYVTGWGRLQTNGAVPDVLQQGRLLVVDYATCSSSAWWGSSVKTSMICAGGDGVISSCNGDSGGPLNCQASDGRWQVHGIVSFGSRLGCNYYHKPSVFTRVSNYIDWINSVIANN

SEQ ID NO: 17181 - protein, 269 aa, Homo sapiens
  Payload ID: 3457
  Gene Symbol: CELA2B
  Gene Name: chymotrypsin-like elastase family, member 2B
  Uniprot ID: P08218
  ENSP ID: ENSP00000365075
MIRTLLLSTLVAGALSCGVSTYAPDMSRMLGGEEARPNSWPWQVSLQYSSNGQWYHTCGGSLIANSWVLTAAHCISSSGIYRVMLGQHNLYVAESGSLAVSVSKIVVHKDWNSDQVSKGNDIALLKLANPVSLTDKIQLACLPPAGTILPNNYPCYVTGWGRLQTNGALPDDLKQGQLLVVDYATCSSSGWWGSTVKTNMICAGGDGVICTCNGDSGGPLNCQASDGRWEVHGIGSLTSVLGCNYYYKPSIFTRVSNYNDWINSVIANN

SEQ ID NO: 17182 - protein, 125 aa, Homo sapiens
  Payload ID: 3457
  Gene Symbol: CELA2B
  Gene Name: chymotrypsin-like elastase family, member 2B
  ENSP ID: ENSP00000399811
CGVSTYAPDMSRMLGGEEARPNSWPWQVSLQYSSNGQWYHTCGGSLIANSWVLTAAHCIRQIIKAHKVLQRCSLILFFVRDLCSSQLELTGVSAGSSGIYRVMLGQHNLYVAESGSLAVSVSKIV

SEQ ID NO: 17183 - protein, 270 aa, Homo sapiens
  Payload ID: 3458
  Gene Symbol: CELA3A
  Gene Name: chymotrypsin-like elastase family, member 3A
  Uniprot ID: P09093
  ENSP ID: ENSP00000290122
MMLRLLSSLLLVAVASGYGPPSSHSSSRVVHGEDAVPYSWPWQVSLQYEKSGSFYHTCGGSLIAPDWVVTAGHCISRDLTYQVVLGEYNLAVKEGPEQVIPINSEELFVHPLWNRSCVACGNDIALIKLSRSAQLGDAVQLASLPPAGDILPNKTPCYITGWGRLYTNGPLPDKLQQARLPVVDYKHCSRWNWWGSTVKKTMVCAGGYIRSGCNGDSGGPLNCPTEDGGWQVHGVTSFVSAFGCNFIWKPTVFTRVSAFIDWIEETIASH

SEQ ID NO: 17184 - protein, 121 aa, Homo sapiens
  Payload ID: 3458
  Gene Symbol: CELA3A
  Gene Name: chymotrypsin-like elastase family, member 3A
  ENSP ID: ENSP00000363795
MMLRLLSSLLLVAVASGYGPPSSHSSSRVVHGEDAVPYSWPWQVSLQYEKSGSFYHTCGGSLIAPDWVVTAGHCISRDLTYQVVLGEYNLAVKEGPEQVIPINSEELFVHPLWNRSCVACG

SEQ ID NO: 17185 - protein, 75 aa, Homo sapiens
  Payload ID: 3458
  Gene Symbol: CELA3A
  Gene Name: chymotrypsin-like elastase family, member 3A
  ENSP ID: ENSP00000383130
WWGSTVKKTMVCAGGYIRSGCNGDSGGPLNCPTEDGGWQVHGVTSFVSAFGCNFIWKPTVFTRVSAFIDWIEEGG

SEQ ID NO: 17186 - protein, 270 aa, Homo sapiens
  Payload ID: 3459
  Gene Symbol: CELA3B
  Gene Name: chymotrypsin-like elastase family, member 3B
  Uniprot ID: P08861
  ENSP ID: ENSP00000338369
MMLRLLSSLLLVAVASGYGPPSSRPSSRVVNGEDAVPYSWPWQVSLQYEKSGSFYHTCGGSLIAPDWVVTAGHCISSSRTYQVVLGEYDRAVKEGPEQVIPINSGDLFVHPLWNRSCVACGNDIALIKLSRSAQLGDAVQLASLPPAGDILPNETPCYITGWGRLYTNGPLPDKLQEALLPVVDYEHCSRWNWWGSSVKKTMVCAGGDIRSGCNGDSGGPLNCPTEDGGWQVHGVTSFVSAFGCNTRRKPTVFTRVSAFIDWIEETIASH

SEQ ID NO: 17187 - protein, 164 aa, Homo sapiens
  Payload ID: 3459
  Gene Symbol: CELA3B
  Gene Name: chymotrypsin-like elastase family, member 3B
  ENSP ID: ENSP00000363798
MRSCYVAQAGLKLPGSSDPPASASQSTRITASGYGPPSSRPSSRVVNGEDAVPYSWPWQVSLQYEKSGSFYHTCGGSLIAPDWVVTAGHCISSSRTYQVVLGEYDRAVKEGPEQVIPINSGDLFVHPLWNRSCVACGNDIALIKLSRSAQLGDAVQLASLPPAG

SEQ ID NO: 17188 - protein, 180 aa, Homo sapiens
  Payload ID: 3459
  Gene Symbol: CELA3B
  Gene Name: chymotrypsin-like elastase family, member 3B
  ENSP ID: ENSP00000383135
QVIPINSGDLFVHPLWNRSCVACGNDIALIKLSRSAQLGDAVQLASLPPAGDILPNETPCYITGWGRLYTNGPLPDKLQEALLPVVDYEHCSRWNWWGSSVKKTMVCAGGDIRSGCNGDSGGPLNCPTEDGGWQVHGVTSFVSAFGCNTRRKPTVFTRVSAFIDWIEEKLQGNKAPESRT

SEQ ID NO: 17189 - protein, 263 aa, Homo sapiens
  Payload ID: 3460
  Gene Symbol: CTRB1
  Gene Name: chymotrypsinogen B1
  Uniprot ID: P17538
  ENSP ID: ENSP00000354294
MASLWLLSCFSLVGAAFGCGVPAIHPVLSGLSRIVNGEDAVPGSWPWQVSLQDKTGFHFCGGSLISEDWVVTAAHCGVRTSDVVVAGEFDQGSDEENIQVLKIAKVFKNPKFSILTVNNDITLLKLATPARFSQTVSAVCLPSADDDFPAGTLCATTGWGKTKYNANKTPDKLQQAALPLLSNAECKKSWGRRITDVMICAGASGVSSCMGDSGGPLVCQKDGAWTLVGIVSWGSDTCSTSSPGVYARVTKLIPWVQKILAAN

SEQ ID NO: 17190 - protein, 182 aa, Homo sapiens
  Payload ID: 3460
  Gene Symbol: CTRB1
  Gene Name: chymotrypsinogen B1
  ENSP ID: ENSP00000463301
MCQGGPELASVDWGRTGRAARRQVRPRWVWGLSPYSPHSPPGCGVPAIHPVLSGLSRIVNGEDAVPGSWPWQVSLQDKTGFHFCGGSLISEDWVVTAAHCGVRTSDVVVAGEFDQGSDEENIQVLKIAKVFKNPKFSILTVNNDITLLKLATPARFSQTVSAVCLPSADDDFPAGTLCATTG

SEQ ID NO: 17191 - protein, 263 aa, Homo sapiens
  Payload ID: 3461
  Gene Symbol: CTRB2
  Gene Name: chymotrypsinogen B2
  Uniprot ID: Q6GPI1
  ENSP ID: ENSP00000303963
MAFLWLLSCWALLGTTFGCGVPAIHPVLSGLSRIVNGEDAVPGSWPWQVSLQDKTGFHFCGGSLISEDWVVTAAHCGVRTSDVVVAGEFDQGSDEENIQVLKIAKVFKNPKFSILTVNNDITLLKLATPARFSQTVSAVCLPSADDDFPAGTLCATTGWGKTKYNANKTPDKLQQAALPLLSNAECKKSWGRRITDVMICAGASGVSSCMGDSGGPLVCQKDGAWTLVGIVSWGSRTCSTTTPAVYARVAKLIPWVQKILAAN

SEQ ID NO: 17192 - protein, 168 aa, Homo sapiens
  Payload ID: 3461
  Gene Symbol: CTRB2
  Gene Name: chymotrypsinogen B2
  ENSP ID: ENSP00000454599
EFDQGSDEENIQVLKIAKVFKNPKFSILTVNNDITLLKLATPARFSQTVSAVCLPSADDDFPAGTLCATTGWGKTKYNANKTPDKLQQAALPLLSNAECKKSWGRRITDVMICAGGDSGGPLVCQKDGAWTLVGIVSWGSRTCSTTTPAVYARVAKLIPWVQKILAAN

SEQ ID NO: 17193 - protein, 137 aa, Homo sapiens
  Payload ID: 3461
  Gene Symbol: CTRB2
  Gene Name: chymotrypsinogen B2
  ENSP ID: ENSP00000455207
VAGEFDQGSDEENIQVLKIAKVFKNPKFSILTVNNDITLLKLATPARFSQTVSAVCLPSADDDFPAGTLCATTGWGKTKYNANKTPDKLQQAALPLLSNAECKKSWGRRITDVMICAGASGVSSCMVRLALPRPWPG

SEQ ID NO: 17194 - protein, 114 aa, Homo sapiens
  Payload ID: 3461
  Gene Symbol: CTRB2
  Gene Name: chymotrypsinogen B2
  ENSP ID: ENSP00000457279
DKTGFHFCGGSLISEDWVVTAAHCGVRTSDVVVAGEFDQGSDEENIQVLKIAKVFKNPKFSILTVNNDITLLKLATPARFSQTVSAVCLPSADDDFPAGTLCATTGWGKTKYNG

SEQ ID NO: 17195 - protein, 3096 aa, Homo sapiens
  Payload ID: 3462
  Gene Symbol: CFAP54
  Gene Name: cilia and flagella associated 54
  Uniprot ID: Q96N23
  ENSP ID: ENSP00000431759
MAAQGSPSSSPSDDSTTSGSLPELPPTSTATSRSPPESKGSSRSSLLQWTCPEDSLPLAVFYGPLDAKNPLLASCEKEIQELLGFMRKKKALATTEEEKHEFRRRCATSLFNIWTKYAPRLPADYYNEKLLKVGDSLCQMKEYKLALLQCYGRYLQQFNTNFDENKVDVTQFKATFFPKGFKDKTAGLTFHALSGKNMCNYQLVCDSDENLKNKESVVQCLHILSSLRLIMQVALPQEHLCWIIFNGTIYIYTICRKLMVIGQSSKALEYLLWASMCMESLVPLLSLRYLTWRATLYTAVCQCCYDCHAGIHGEAFARRALAKIDELRQLELMSSSKSQEESRRYFREATMKMAVMIFKRGVFESRRKNKAVFRPKIRINLREVQTLSWPRTVTERLLDEMFDSTASQFLAVLEALSDSNRRILQTGPIVTDEVEIHDVVSELFMAGKELLIMSNIGADGMLDFPKTSLLELMIGRKDVISVDAAVKFIKLAFTYEEWSLFESSAVHLIYFLQRQDDPESKKAEKDLTLLIAMEPLINVKRNKGLIFPLENYKEGQSTQIYLKKIAVHDTCLKTCGYSEDIFHLAATLYVCVCTAPQDVQPDKEIVVDTIMFLWQKCKLGIQRLNISRNDYAKFTQKISTNKWIYLLWQINEVIHCYKMEDIDIVVVAEVTLRLSEILESLGSPGRKFKQSLDVPLREGTNKFPGAPKGITEILPILQKNPVEQLLFAYKLLDRAIGGINLNCMLTSLPNGSSVIDHCYAKRTHHIDGDTYKPLASNSFMMDLHLELIQAQHRIAVVLLDKLQVLQTPTVSKDISTKGPEKLKQSGSTDCFTELNIMNKIKKNTLSKAIYLMQKALLIFEKDATSTSSWELLMEAYSLIQRIEAEQNALYSYQKYLESSKRKKSRVPPPPILLSRTHCSVTLKPAPFTSEVKVSWYCILGCKAEGSYGKVRLNNNHLPNSGEAIPADGKSVFEVKGLETNEKYVFAVAAYSNNGKLVGGAIGETTKPILVYPPLSTITARMFLTQVAYQVGNYELAKKVFSPVWDYFVASPLQDEQSVICLSNIITITQRRLHSDILAETSSILLYLFLRNIFVTSDIKIKEENLFCDNIKGNEIFPSQQIARLIECERVLVALELSNFLNDSSYALQAVTQCYGLLAPIIYHNIVLVPVVQILIKCIVVLQGLPSIVCSKKHTASFESIQHMIACCIFYITKILRSWREYDLAVMIINYGKKMLDITPGCKSLFDGSNEQEEMPEEDSSKKSLKTKKPQQILLPEKINEQLALLETHLLKLTKQYVTSELSGGEDPIFLYPVVLNWSVKGAVKEVMKFKQKPRFLEFFTQVMLKCMNEEKFHLMVEVTTPVHDFLKRRNESLLGLIKVKYKDSALNKKANKSLKFKAAVMEIGRSAEMQQRIRSKKKETLRDFIFKNPAISEMVAHERNRRTSVRKAAQRYLMDYLNPLILSYVKRKRFHRLSLEEMPWRAQMNLYLAGAHFNLVLQKLWECTKMKFGTSHMMVSFRSCDPNMFSLYNSGTVLPTRKLTVENYKAMLDFLLTAKKRKANLPSDAEEFSTFINSIMSDENMSKTQTVYDSDSQSGSSAKEKDRGANLCVMDHFMKIFLYCRRAMVLAHRGGYWTLLQNCCRALWNFTQELQILLKQAVDLDKTFPISQDGFLCTSVLPFYLGAELLIDMLIQLQNTSSIKPIEDKGEFSVPSCYGNIKNDNGGSSLTFEHPLDDVNVVDLKWIHDFVLKSLEVLYQVEKWETLVSLAIQFNTVSHERYTEQVTPLLVYAQRQLLLRIQKFKGPDITQQPCARYEAEYGEKITCRNFIGKQLKINSSTIEATSNCTDLLKMLISSEYSRAKALVCVPVDVTDTLRCFRETLEKSKYHNRSIRHSRKLLSLFLAQTQDVLQASNQRSLKVQALHSLGSLLIFAEKKRAAFKCWCQALDDIFRKPDVLHTWKEFGPSLTNVTNSHSPPGFKDYSEEFLSRVGIWGCLQGAVISAKIAQFIKSLNVEKKTDCCILSALLFQGLLRTTLPHPKAERCYAQYEITQLLPGIELFSDRYRADICSVIASLYYIIRELHFVRQNLIVLPLLALYQYFVSGICQDITRNLEARILKIEVLIDLRFFSEAFYEISQIFYGKNMPCPIPAGYKATGKMKIFQSFDSGKLLTSKENIQAIDELRNKGLPAVLVTIGQPHLLNKFNFVKAYFFLSVAATINCVPENKFKTVITNKSKPNLPNLEEIYSKDDGSSFYNLTKLKDEITLSMLKSMLLMEAEDRLNFLLSEVEQKTLSQCSAGELEIVVEARLQLAAVALQRHRAAYSAAIVFSTLTLLQDSKLFEKKVVQDDTENPVSPGTSVTENKDDSEFLDPISLNAREYFNIHLWLRCRLALVTAFVAQIHGIGIVKEDDMTDCLSLINEVCMEAKSAGDTELQAEFLTQAVILGLQEKHLKADIMTNLQDIIHLLEGNEFISPQSRLTLARSLVLLDDLTKAEKFKESPSSKTGKLNLLTRAHSILTEQMLAFGETIEFRSSNTKYANPLQPLKNIYLPHVMLLAKIKMRIGHTVAKQVYYKNKRKDPSKWLPALHLFDVALKLCRTTAVEEHEVEAEILFQKGKIERQILMEEKSPSFQLESLYEAIQLSLKNDQNSGLIRDSYLEMALLYFHLKKPKIKISGSPLTLKPPLRRSSSVKETSANKFEMYSSLAWIAIRAAAQVSEAVLAINLLIGKKNTRMHKVNQVALPNIPEFAALDLLSSYTDYLLDNYQVLFQTSCTFLYQNDDVCDSADGRKKTQTKVDITWILLLRYYIHLQRINNLSKLLASATPVSGISLPDDTLLTSLYNSELILRQKEVHFFLKKFLQLYSSSCIDEFPKELLCQLENPPLSEKDLRESSAKLYRDSSVQSILSFKPVSGSSCVDITPIEMVTQASNKELCFQWYIPPLDRPPKETEPMVLLLYAYNLKPLKISDVRHSTYNSTCVGSLWIPLNRVIAIHEKLSNLAQIAELSLPAAPEITSNENIYEVEVEEESVDNEMEDMIIQCCSEIASLFLNDKEPTPLSEVPFDISLPSIFNLERLFDLANGCILSGGSLFNWIVSIIP

SEQ ID NO: 17196 - protein, 265 aa, Homo sapiens
  Payload ID: 3462
  Gene Symbol: CFAP54
  Gene Name: cilia and flagella associated 54
  ENSP ID: ENSP00000449035
  MOD_RES (1)..(1): Any amino acid
XPEEDSSKKSLKTKKPQQILLPEKINEQLALLETHLLKLTKQYVTSELSGGEDPIFLYPVVLNWSVKGAVKEVMKFKQKPRFLEFFTQVMLKCMNEEKFHLMVEVTTPVHDFLKRRNESLLGLIKVKYKDSALNKKANKSLKFKAAVMEIGRSAEMQQRIRSKKKETLRDFIFKNPAISEMVAHERNRRTSVRKAAQRYLMDYLNPLILSYVKRKRFHRLSLEEMPWRAQMNLYLAGAHFNLVLQKLWECTKMKFGTSHMMVRHF

SEQ ID NO: 17197 - protein, 644 aa, Homo sapiens
  Payload ID: 3462
  Gene Symbol: CFAP54
  Gene Name: cilia and flagella associated 54
  ENSP ID: ENSP00000452066
MAAQGSPSSSPSDDSTTSGSLPELPPTSTATSRSPPESKGSSRSSLLQWTCPEDSLPLAVFYGPLDAKNPLLASCEKEIQELLGFMRKKKALATTEEEKHEFRRRCATSLFNIWTKYAPRLPADYYNEKLLKVGDSLCQMKFHALSGKNMCNYQLVCDSDENLKNKESVVQCLHILSSLRLIMQVALPQEHLCWIIFNGTIYIYTICRKLMVIGQSSKALEYLLWASMCMESLVPLLSLRYLTWRATLYTAVCQCCYDCHAGIHGEAFARRALAKIDELRQLELMSSSKSQEESRRYFREATMKMAVMIFKRGVFESRRKNKAVFRPKIRINLREVQTLSWPRTVTERLLDEMFDSTASQFLAVLEALSDSNRRILQTGPIVTDEVEIHDVVSELFMAGKELLIMSNIGADGMLDFPKTSLLELMIGRKDVISVDAAVKFIKLAFTYEEWSLFESSAVHLIYFLQRQDDPESKKAEKDLTLLIAMEPLINVKRNKGLIFPLENYKEGQSTQIYLKKIAVHDTCLKTCGYSEDIFHLAATLYVCVCTAPQDVQPDKEIVVDTIMFLWQKCKLGIQRLNISRNDYAKFTQKISTNKVFLSHSLSRVFFAIAYSSCHTHFKSKFFLFFTWLMTFICIYTYIKKIFFL

SEQ ID NO: 17198 - protein, 611 aa, Homo sapiens
  Payload ID: 3463
  Gene Symbol: CFAP100
  Gene Name: cilia and flagella associated protein 100
  Uniprot ID: Q494V2
  ENSP ID: ENSP00000344749
MSEIPSTIVSKNMTNDKNSLESMNISSSSSTEENPKKQARKNEEHGPDPSANPFHLSGDVDFFLLRDQERNKALSERQQQKTMRVHQKMTYSSKVSAKHTSLRRQLQLEDKQEDLEARAEAEHQRAFRDYTTWKLTLTKEKNVEPENMSGYIKQKRQMFLLQYALDVKRREIQRLETLATKEEARLERAEKSLEKDAALFDEFVRENDCSSVQAMRAAEKETKAKIEKILEIRDLTTQIVNIKSEISRFEDTLKHYKVYKDFLYKLSPKEWLEEQEKKHSFLKKAKEVSEASKESSVNSTPGDKGPGIKGKASSMWAKEGQGTKKPWRFLQTMRLGRSPSYLSSPQQGSQPSESSGGDSRGSNSPIPPTQEDTDSDGEEPQLYFTEPQQLLDVFRELEEQNLSLIQNSQETEKTLEELSHTLKHTQIRMDREVNQLKQWVTTMMMSITKEEDTAAELELKARVFHFGEYKGDQQDKLLESLNCKVLDVYRHCTGTQQEANLGTVQMLTIIEHQLDELLENLEHVPQVKIEQAERAKEKERRIRLREEKLQMQKILQEEHLQRARARAQAEIKKKRGRTLVCRSRPPAHRIKQQSEHTLMDKEEEELLFFFT

SEQ ID NO: 17199 - protein, 612 aa, Homo sapiens
  Payload ID: 3463
  Gene Symbol: CFAP100
  Gene Name: cilia and flagella associated protein 100
  Uniprot ID: Q494V2
  ENSP ID: ENSP00000423046
MSEIPSTIVSKNMTNDKNSLESMNISSSSSTEENPKKQARKNEEHGPDPSANPFHLSGDVDFFLLRDQERNKALSERQQQKTMRVHQKMTYSSKVSAKHTSLRRQLQLEDKQEDLEARAEAEHQRAFRDYTTWKLTLTKAEKNVEPENMSGYIKQKRQMFLLQYALDVKRREIQRLETLATKEEARLERAEKSLEKDAALFDEFVRENDCSSVQAMRAAEKETKAKIEKILEIRDLTTQIVNIKSEISRFEDTLKHYKVYKDFLYKLSPKEWLEEQEKKHSFLKKAKEVSEASKESSVNSTPGDKGPGIKGKASSMWAKEGQGTKKPWRFLQTMRLGRSPSYLSSPQQGSQPSESSGGDSRGSNSPIPPTQEDTDSDGEEPQLYFTEPQQLLDVFRELEEQNLSLIQNSQETEKTLEELSHTLKHTQIRMDREVNQLKQWVTTMMMSITKEEDTAAELELKARVFHFGEYKGDQQDKLLESLNCKVLDVYRHCTGTQQEANLGTVQMLTIIEHQLDELLENLEHVPQVKIEQAERAKEKERRIRLREEKLQMQKILQEEHLQRARARAQAEIKKKRGRTLVCRSRPPAHRIKQQSEHTLMDKEEEELLFFFT

SEQ ID NO: 17200 - protein, 117 aa, Homo sapiens
  Payload ID: 3463
  Gene Symbol: CFAP100
  Gene Name: cilia and flagella associated protein 100
  ENSP ID: ENSP00000432494
MSEIPSTIVSKNMTNDKNSLESMNISSSSSTEENPKKQARKNEEHGPDPSANPFHLSGDVDFFLLRDQERNKALSVSIQDRRQHLRELPCSHCFLEWPHCPSQRSTFLRSFSFQNSQ

SEQ ID NO: 17201 - protein, 177 aa, Homo sapiens
  Payload ID: 3464
  Gene Symbol: CFAP126
  Gene Name: cilia and flagella associated protein 126
  Uniprot ID: Q5VTH2
  ENSP ID: ENSP00000356951
MATNYSANQYEKAFSSKYLQNWSPTKPTKESISSHEGYTQIIANDRGHLLPSVPRSKANPWGSFMGTWQMPLKIPPARVTLTSRTTAGAASLTKWIQKNPDLLKASNGLCPEILGKPHDPDSQKKLRKKSITKTVQQARSPTIIPSSPAANLNSPDELQSSHPSAGHTPGPQRPAKS

SEQ ID NO: 17202 - protein, 520 aa, Homo sapiens
  Payload ID: 3465
  Gene Symbol: CFAP157
  Gene Name: cilia and flagella associated protein 157
  Uniprot ID: Q5JU67
  ENSP ID: ENSP00000362392
MAPKKSVSKAGKELEVKKKGGKKEPVVAVEPPLAKEMKEFYHIQIRDLEDRLARYQRKWDELAVQEKMFRQEFEQLANNKKEIVAFLKRTLNQQVDEITDLNEQLQNLQLAKEMEKDAFEAQLAQVRHEFQETKDQLTTENIILGGKLAALEEFRLQKEEVTDKFTLLEEQVRKQENEFRDYAYNLEKKSVLDKDRLRKEIIQRVNLVANEFHKVTTNRMWETTKRAIKENNGITLQMARVSQQGMKLLQENEQLKGRQNNLCKQLELLENTQKVMARHKRGHQKIILMLTKKCQEQQQDTKEAEELRLLLSQLEQRSLQLQVDNQALKSQRDQLSLQLEQQQVDLQRLQQELANEQKVRASLEAALVQATSFLQNILQMHRDEEDSDVDVTFQPWHKEMLQQLLVMLSSTVATRPQKAACPHQESQSHGPPKESRPSIQLPRTGSLLPQLSDITPYQPGDLGLVPRQVHIPPNPQDLRLLSYITRVGTFRAHSSPEMRAPGSLKRLEKFSLPEVPLRPK

SEQ ID NO: 17203 - protein, 425 aa, Homo sapiens
  Payload ID: 3465
  Gene Symbol: CFAP157
  Gene Name: cilia and flagella associated protein 157
  Uniprot ID: Q5JU67
  ENSP ID: ENSP00000478313
MAPKKSVSKAGKELEVKKKGGKKEPVVAVEPPLAKEMKEFYHIQIRDLEDRLARYQRKWDELAVQEKMFRQEFEQLANNKKEIVAFLKRTLNQQVDEITDLNEQLQNLQLAKEMEKDAFEAQLAQVRHEFQETKDQLTTENIILGGKLAALEEFRLQKEEVTDKFTLLEEQVRKQENEFRDYAYNLEKKSVLDKDRLRKEIIQRVNLVANEFHKVTTNRMWETTKRAIKENNGITLQMARVSQQGMKLLQENEQLKGRQNNLCKQLELLENTQKVMARHKRGHQKIILMLTKKCQEQQQDTKEAEELRLLLSQLEQRSLQLQVDNQALKSQRDQLSLQLEQQQVDLQRLQQELANEQKVRASLEAALVQATSFLQNILQTGKTSWKWALRLEFPGRGWVLGPLWACCHPTLTNRCTAMKRTVTLT

SEQ ID NO: 17204 - protein, 137 aa, Homo sapiens
  Payload ID: 3465
  Gene Symbol: CFAP157
  Gene Name: cilia and flagella associated protein 157
  ENSP ID: ENSP00000485445
  MOD_RES (1)..(1): Any amino acid
XDVTFQPWHKEMLQQLLVMLSSTVATRPQKAACPHQESQSHGPPKESRPSIQLPRTGSLLPQLSDITPYQPGDLGLVPRQVHIPPNPQDLRLLSYITRVGTFRAHSSPERPVGPNAEERKRRATLQWGRGAKKGPRN

SEQ ID NO: 17205 - protein, 301 aa, Homo sapiens
  Payload ID: 3466
  Gene Symbol: CFAP161
  Gene Name: cilia and flagella associated protein 161
  Uniprot ID: Q6P656
  ENSP ID: ENSP00000286732
MAQNVYGPGVRIGNWNEDVYLEEELMKDFLEKRDKGKLLIQRSRRLKQNLLRPMQLSVTEDGYIHYGDKVMLVNPDDPDTEADVFLRGDLSLCMTPDEIQSHLKDELEVPCGLSAVQAKTPIGRNTFIILSVHRDATGQVLRYGQDFCLGITGGFDNKMLYLSSDHRTLLKSSKRSWLQEVYLTDEVSHVNCWQAAFPDPQLRLEYEGFPVPANAKILINHCHTNRGLAAHRHLFLSTYFGKEAEVVAHTYLDSHRVEKPRNHWMLVTGNPRDASSSMLDLPKPPTEDTRAMEQAMGLDTQ

SEQ ID NO: 17206 - protein, 111 aa, Homo sapiens
  Payload ID: 3466
  Gene Symbol: CFAP161
  Gene Name: cilia and flagella associated protein 161
  ENSP ID: ENSP00000453414
MKDFLEKRDKGKLLIQRSRRLKQNLLRPMQLSVTEDGYIHYGDKVMLVNPDDPDTEADVFLRGDLSLCMTPDEIQSHLKDELEVPCGLSAVQAKTPIGRNTFIILSVHRDA

SEQ ID NO: 17207 - protein, 105 aa, Homo sapiens
  Payload ID: 3466
  Gene Symbol: CFAP161
  Gene Name: cilia and flagella associated protein 161
  ENSP ID: ENSP00000454135
MKDFLEKRDKGKLLIQRSRRLKQNLLRPMQLSVTEDGYIHYGDKVMLVNPDDPDTEADVFLRGDLSLCMTPDEIQSHLKDELEVPCGLSAVQAKTPIGRNTFIIL

SEQ ID NO: 17208 - protein, 193 aa, Homo sapiens
  Payload ID: 3467
  Gene Symbol: CFAP20
  Gene Name: cilia and flagella associated protein 20
  Uniprot ID: Q9Y6A4
  ENSP ID: ENSP00000262498
MFKNTFQSGFLSILYSIGSKPLQIWDKKVRNGHIKRITDNDIQSLVLEIEGTNVSTTYITCPADPKKTLGIKLPFLVMIIKNLKKYFTFEVQVLDDKNVRRRFRASNYQSTTRVKPFICTMPMRLDDGWNQIQFNLLDFTRRAYGTNYIETLRVQIHANCRIRRVYFSDRLYSEDELPAEFKLYLPVQNKAKQ

SEQ ID NO: 17209 - protein, 108 aa, Homo sapiens
  Payload ID: 3467
  Gene Symbol: CFAP20
  Gene Name: cilia and flagella associated protein 20
  ENSP ID: ENSP00000455220
MFKNTFQSGFLSILYSIGSKPLQIWDKKVRNGHIKRITDNDIQSLVLEIEGTNVSTTYITCPADPKKTLGIKLPFLVMIIKNLKKYFTFEVQMTRMCVVAFGQVTTRA

SEQ ID NO: 17210 - protein, 622 aa, Homo sapiens
  Payload ID: 3468
  Gene Symbol: CFAP206
  Gene Name: cilia and flagella associated protein 206
  Uniprot ID: Q8IYR0
  ENSP ID: ENSP00000358575
MPPTQAESVIRSIIREIGQECAAHGEIVSETLIAFMVKAVVLDPSNGFNMDRTLMKSDVQNLVKLCMTRLLDTKNPSLDTIKMQVYFDMNYTNRVEFLEEHHRVLESRLGSVTREITDNRACAKEELESLYRKIISYVLLRSGLGSPTDIKTVREVTAALQSVFPQAELGTFLTLSKKDKERQLKELTMIVTGIRLFNRDCGKGGEGIDDLPAVLHVAIPATMQHIDYQLETARSQVYRYTAILEKAANDPLMRAELQPYMLKEALYNIRQYEVFLQIILSDIITGAQEVEMMTKQLGAHLEQLKMTIKSKIAVPTSQVFPIFIALSTLWTSLQDETIVVGVLSNLFTHIQPFLGAHELYFPERVMQCHLNGATVKTDVCRMKEHMEDRVNVADFRKLEWLFPETTANFDKLLIQYRGFCAYTFAATDGLLLPGNPAIGILKYKEKYYTFNSKDAAYSFAENPEHYIDIVREKAKKNTELIQLLELHQQFETFIPYSQMRDADKHYIKPITKCESSTQTNTHILPPTIVRSYEWNEWELRRKAIKLANLRQKVTHSVQTDLSHLRRENCSQVYPPKDTSTQSMREDSTGVPRPQIYLAGLRGGKSEITDEVKVNLTRDVDET

SEQ ID NO: 17211 - protein, 251 aa, Homo sapiens
  Payload ID: 3468
  Gene Symbol: CFAP206
  Gene Name: cilia and flagella associated protein 206
  ENSP ID: ENSP00000422494
MPPTQAESVIRSIIREIGQECAAHGEIVSETLIAFMVKAVVLDPSNGFNMDRTLMKSDVQNLVKLCMTRLLDTKNPSLDTIKMQVYFDMNYTNRVEFLEEHHRVLESRLGSVTREITDNRACAKEELESLYRKIISYVLLRSGLGSPTDIKTVREVTAALQSVFPQAELGTFLTLSKKDKERQLKELTMIVTGIRLFNRDCGKGGEGIDDLPAVLHVAIPATMQHIDYQLETARSQVYRYTAILEKAANDP

SEQ ID NO: 17212 - protein, 95 aa, Homo sapiens
  Payload ID: 3468
  Gene Symbol: CFAP206
  Gene Name: cilia and flagella associated protein 206
  ENSP ID: ENSP00000423543
MPPTQAESVIRSIIREIGQECAAHGEIVSETLIAFMVKAVVLDPSNGFNMDRTLMKSDVQNLVKLCMTRLLDTKNPSLDTIKMQVYFDMNYTNRA

SEQ ID NO: 17213 - protein, 269 aa, Homo sapiens
  Payload ID: 3469
  Gene Symbol: CFAP221
  Gene Name: cilia and flagella associated protein 221
  ENSP ID: ENSP00000295220
MAVVKTPSRGLKNAKEPFNNASPHLLKNLVEEPKKRKEVPNHLLESKVYAKLVNNKVIQARPGIIHFGGYQVEKQHQQILHLVNVSNEDTRVHILPPQTKYFEINYVRKEHHLVPGLSLTVTVTFSPDEWRYYYDCIRVHCKGDDTLLVPIHAYPVMNSLDFPSFINLSNVLLGESKTYVIPLQCSCPVDFEFYITLIQSHQAFAIEPTSGIIPANGKMTVTIKFTPFQYGTAQIKMQLWISQFNSQPYECVFTGTCYPNMALPSLSQL

SEQ ID NO: 17214 - protein, 53 aa, Homo sapiens
  Payload ID: 3469
  Gene Symbol: CFAP221
  Gene Name: cilia and flagella associated protein 221
  ENSP ID: ENSP00000391760
MAVVKTPSRGLKNAKEPFNNASPHLLKNLVEEPKKRKEVPNHLLESTSGQCFQ

SEQ ID NO: 17215 - protein, 840 aa, Homo sapiens
  Payload ID: 3469
  Gene Symbol: CFAP221
  Gene Name: cilia and flagella associated protein 221
  Uniprot ID: Q4G0U5
  ENSP ID: ENSP00000393222
MAVVKTPSRGLKNAKEPFNNASPHLLKNLVEEPKKRKEVPNHLLESKVYAKLVNNKVIQARPGIIHFGGYQVEKQHQQILHLVNVSNEDTRVHILPPQTKYFEINYVRKEHHLVPGLSLTVTVTFSPDEWRYYYDCIRVHCKGDDTLLVPIHAYPVMNSLDFPSFINLSNVLLGESKTYVIPLQCSCPVDFEFYITLIQSHQAFAIEPTSGIIPANGKMTVTIKFTPFQYGTAQIKMQLWISQFNSQPYECVFTGTCYPNMALPLEEFERLNTLSKKVNVPPEKAMMHINFHRPPAKPKPQKVKEIEYQNLRFPVDLSNPFAVATVLNQEPGKLKIKELREVLDQGTEISKTRQMKEALFEQKVRQDIHEEMENHLKWQVHLGKDPMSFKLKKELTEEWQKACAKYKLDRGDPILDEEFQRLKTEVSHKRVVRNQEEKIKEFHPTFDPLINNTWLSRSRAQKRFQQVARKVMIQGRLFNMLSAVREMDKESILRKIGQAKQSIAQEANFFKFFLRRISQDDYTSRFSVSPKEVLPFAFPDCSPPQDSNELAPDGLGLVPIKSSEVQIKQSYSFFNLQVPQLYKIKRYQPFSVHKSSTSYRPQKLARALKQGAEDEVTTITALPKQDSTTQLSGKTSVLSMKPPEALAMSLDYDPLYVFNPNPGLFAVMHPLTYAETLIDYHLCSHPKYKFTKESRHGSSIPVTQKQFLHHTDIIPGIMHWKSFQSLVLSSLPDPSKMETTKSCDSFNSFMLPIDVPAILDALPEEDRLETVERELCEQNVEVMLTPEMIKVEFPMLNYKDIRKEKEVKDQAQPAEKAGEKLLEEMRNLRGKALNTYLILE

SEQ ID NO: 17216 - protein, 96 aa, Homo sapiens
  Payload ID: 3469
  Gene Symbol: CFAP221
  Gene Name: cilia and flagella associated protein 221
  ENSP ID: ENSP00000399793
  MOD_RES (1)..(1): Any amino acid
XSRHGSSIPVTQKQFLHHTDIIPGIMHWKSFQSLVLSSLPDPSKMETTKSCDSFNSFMLPIDVPAILDALPEEDRLETVERSTWICCCICDDRVGV

SEQ ID NO: 17217 - protein, 175 aa, Homo sapiens
  Payload ID: 3469
  Gene Symbol: CFAP221
  Gene Name: cilia and flagella associated protein 221
  ENSP ID: ENSP00000409912
MAVVKTPSRGLKNAKEPFNNASPHLLKNLVEEPKKRKEVPNHLLESKVYAKLVNNKVIQARPGIIHFGGYQVEKQHQQILHLVNVSNEDTRVHILPPQTKYFEINYVRKEHHLVPGLSLTVTVTFSPDEWRYYYDCIRVHCKGDDTLLVPIHAYPVMNSLDFPSFINLSNVLLGE

SEQ ID NO: 17218 - protein, 399 aa, Homo sapiens
  Payload ID: 3469
  Gene Symbol: CFAP221
  Gene Name: cilia and flagella associated protein 221
  ENSP ID: ENSP00000413299
  MOD_RES (1)..(1): Any amino acid
XHPTFDPLINNTWLSRSRAQKRFQQVARKVMIQGRLFNMLSAVREMDKESILRKIGQAKQSIAQEANFFKFFLRRISQDDYTSRFSVSPKEVLPFAFPDCSPPQDSNELAPDGLGLVPIKSSEVQIKQSYSFFNLQVPQLYKIKRYQPFSVHKSSTSYRPQKLARALKQGAEDEVTTITALPKQDSTTQLSGKTSVLSMKPPEALAMSLDYDPLYVFNPNPGLFAVMHPLTYAETLIDYHLCSHPKYKFTKESRHGSSIPVTQKQFLHHTDIIPGIMHWKSFQSLVLSSLPDPSKMETTKSCDSFNSFMLPIDVPAILDALPEEDRLETVERELCEQNVEVMLTPEMIKVEFPMLNYKDIRKEKEVKDQAQPAEKAGEKLLEEMRNLRGKALNTYLILE

SEQ ID NO: 17219 - protein, 173 aa, Homo sapiens
  Payload ID: 3469
  Gene Symbol: CFAP221
  Gene Name: cilia and flagella associated protein 221
  ENSP ID: ENSP00000470283
  MOD_RES (1)..(1): Any amino acid
XKNAKEPFNNASPHLLKNLVEEPKKRKEVPNHLLESKVYAKLVNNKVIQARPGIIHFGGYQVEKQHQQILHLVNVSNEDTRVHILPPQTKYFEINYVRKEHHLVPGLSLTVTVTFSPDEWRYYYDCIRVHCKGDDTLLVPIHAYPVMNSLDFPSFINLSNVLLGERIRKHLTE

SEQ ID NO: 17220 - protein, 134 aa, Homo sapiens
  Payload ID: 3469
  Gene Symbol: CFAP221
  Gene Name: cilia and flagella associated protein 221
  ENSP ID: ENSP00000470662
MAVVKTPSRGLKNAKEPFNNASPHLLKNLVEEPKKRKEVPNHLLESKVYAKLVNNKVIQARPGIIHFGGYQVEKQHQQILFTEKAHWHDVPWNCLRHYLVEISLPAPSLCLLTAFSAIHHVDHSSLLPQTPGLK

SEQ ID NO: 17221 - protein, 90 aa, Homo sapiens
  Payload ID: 3469
  Gene Symbol: CFAP221
  Gene Name: cilia and flagella associated protein 221
  ENSP ID: ENSP00000470784
MAVVKTPSRGLKNAKEPFNNASPHLLKNLVEEPKKRKEVPNHLLESKVYAKLVNNKVIQARPGIIHFGGYQVEKQHQQILVLAGSPVLGV

SEQ ID NO: 17222 - protein, 118 aa, Homo sapiens
  Payload ID: 3469
  Gene Symbol: CFAP221
  Gene Name: cilia and flagella associated protein 221
  ENSP ID: ENSP00000471092
  MOD_RES (1)..(1): Any amino acid
XGDPILDEEFQRLKTEVSHKRVVRNQEEKIKEFHPTFDPLINNTWLSRSRAQKRFQQVARKVMIQGRLFNMLSAVREMDKESILRKIGQAKQSIAQGEVWLQSTEMPRLIMPLSVNFP

SEQ ID NO: 17223 - protein, 88 aa, Homo sapiens
  Payload ID: 3469
  Gene Symbol: CFAP221
  Gene Name: cilia and flagella associated protein 221
  ENSP ID: ENSP00000471998
  MOD_RES (1)..(1): Any amino acid
XFNLQVPQLYKIKRYQPFSVHKSSTSYRPQKLARALKQGAEDEVTTITALPKQDSTTQLSGKTSVLSMKPPEALAMSLDYDPLYVFTS

SEQ ID NO: 17224 - protein, 46 aa, Homo sapiens
  Payload ID: 3469
  Gene Symbol: CFAP221
  Gene Name: cilia and flagella associated protein 221
  ENSP ID: ENSP00000472069
VIPLQCSCPVDFEFYITLIQSHQAFAIEPTSGTRSIIYAHLPGILC

SEQ ID NO: 17225 - protein, 187 aa, Homo sapiens
  Payload ID: 3469
  Gene Symbol: CFAP221
  Gene Name: cilia and flagella associated protein 221
  Uniprot ID: Q4G0U5
  ENSP ID: ENSP00000472563
MAVVKTPSRGLKNAKEPFNNASPHLLKNLVEEPKKRKEVPNHLLESKVYAKLVNNKVIQARPGIIHFGGYQVEKQHQQILHLVNVSNEDTRVHILPPQTKYFEINYVRKEHHLVPGLSLTVTVTFSPDEWRYYYDCIRVHCKGDDTLLVPIHAYPVMNSLDFPSFINLSNVLLGESLPNSVFLVPDN

SEQ ID NO: 17226 - protein, 342 aa, Homo sapiens
  Payload ID: 3470
  Gene Symbol: CFAP36
  Gene Name: cilia and flagella associated protein 36
  Uniprot ID: Q96G28
  ENSP ID: ENSP00000295117
MAAEEEDEVEWVVESIAGFLRGPDWSIPILDFVEQKCEVFDDEEESKLTYTEIHQEYKELVEKLLEGYLKEIGINEDQFQEACTSPLAKTHTSQAILQPVLAAEDFTIFKAMMVQKNIEMQLQAIRIIQERNGVLPDCLTDGSDVVSDLEHEEMKILREVLRKSKEEYDQEEERKRKKQLSEAKTEEPTVHSSEAAIMNNSQGDGEHFAHPPSEVKMHFANQSIEPLGRKVERSETSSLPQKDLKIPGLEHASIEGPIANLSVLGTEELRQREHYLKQKRDKLMSMRKDMRTKQIQNMEQKGKPTGEVEEMTEKPEMTAEEKQTLLKRRLLAEKLKEEVINK

SEQ ID NO: 17227 - protein, 367 aa, Homo sapiens
  Payload ID: 3470
  Gene Symbol: CFAP36
  Gene Name: cilia and flagella associated protein 36
  Uniprot ID: Q96G28
  ENSP ID: ENSP00000342699
MAAEEEDEVEWVVESIAGFLRGPDWSIPILDFVEQKCEVNCKGGHVITPGSPEPVILVACVPLVFDDEEESKLTYTEIHQEYKELVEKLLEGYLKEIGINEDQFQEACTSPLAKTHTSQAILQPVLAAEDFTIFKAMMVQKNIEMQLQAIRIIQERNGVLPDCLTDGSDVVSDLEHEEMKILREVLRKSKEEYDQEEERKRKKQLSEAKTEEPTVHSSEAAIMNNSQGDGEHFAHPPSEVKMHFANQSIEPLGRKVERSETSSLPQKDLKIPGLEHASIEGPIANLSVLGTEELRQREHYLKQKRDKLMSMRKDMRTKQIQNMEQKGKPTGEVEEMTEKPEMTAEEKQTLLKRRLLAEKLKEEVINK

SEQ ID NO: 17228 - protein, 313 aa, Homo sapiens
  Payload ID: 3470
  Gene Symbol: CFAP36
  Gene Name: cilia and flagella associated protein 36
  ENSP ID: ENSP00000385376
MAAEEEDEVEWVVESIAGFLRGPDWSIPILDFVEQKCEVFDDEEESKLTYTEIHQEYKELVEKLLEGYLKEIGINEDQFQEACTSPLAKTHTSQAILQPVLAAEDFTIFKAMMVQKNIEMQLQAIRIIQERNGVLPDCLTDGSDVVSDLEHEEMKILREVLRKSKEEYDQEEERKRKKQLSEAKTEEPTVHSSEAAIMNNSQGDGEHFAHPPSDLKIPGLEHASIEGPIANLSVLGTEELRQREHYLKQKRDKLMSMRKDMRTKQIQNMEQKGKPTGEVEEMTEKPEMTAEEKQTLLKRRLLAEKLKEEVINK

SEQ ID NO: 17229 - protein, 218 aa, Homo sapiens
  Payload ID: 3470
  Gene Symbol: CFAP36
  Gene Name: cilia and flagella associated protein 36
  ENSP ID: ENSP00000385400
MAAEEEDEVEWVVESIAGFLRGPDWSIPILDFVEQKCEVFDDEEESKLTYTEIHQEYKELVEKLLEGYLKEIGINEDQFQEACTSPLAKTHTSQAILQPVLAAEDFTIFKAMMVQKNIEMQLQAIRIIQERNGVLPDCLTDGSDVVSDLEHEEMKILREVLRKSKEEYDQEEERKRKKQLSEAKTEEPTVHSSEAAIMNNSQGDGEHFAHPPSEIQGS

SEQ ID NO: 17230 - protein, 223 aa, Homo sapiens
  Payload ID: 3470
  Gene Symbol: CFAP36
  Gene Name: cilia and flagella associated protein 36
  ENSP ID: ENSP00000385972
MAAEEEDEVEWVVESIAGFLRGPDWSIPILDFVEQKCEVFDDEEESKLTYTEIHQEYKELVEKLLEGYLKEIGINEDQFQEACTSPLAKTHTSQAILQPVLAAEDFTIFKAMMVQKNIEMQLQAIRIIQERNGVLPDCLTDGSDVVSDLEHEEMKILREVLRKSKEEYDQEEERKRKKQVPTEHITEVFYCCYLLLSLHLDLTIKIYTYVELHNFKYNVNIDQ

SEQ ID NO: 17231 - protein, 870 aa, Homo sapiens
  Payload ID: 3471
  Gene Symbol: CFAP43
  Gene Name: cilia and flagella associated protein 43
  ENSP ID: ENSP00000278064
MATNIPCEVVAFSDRKLKPLIYVYSFPGLTRRTKLKGNILLDYTLLSFSYCGTYLASYSSLPEFELALWNWESSIILCKKSQPGMDVNQMSFNPMNWRQLCLSSPSTVSVWTIERSNQEHCFRARSVKLPLEDGSFFNETDVVFPQSLPKDLIYGPVLPLSAIAGLVGKEAETFRPKDDLYPLLHPTMHCWTPTSDLYIGCEEGHLLMINGDTLQVTVLNKIEEESPLEDRRNFISPVTLVYQKEGVLASGIDGFVYSFIIKDRSYMIEDFLEIERPVEHMTFSPNYTVLLIQTDKGSVYIYTFGKEPTLNKVLDACDGKFQAIDFITPGTQYFMTLTYSGEICVWWLEDCACVSKIYLNTLATVLACCPSSLSAAVGTEDGSVYFISVYDKESPQVVHKAFLSESSVQHVVYDQQGIFLLVGTAEGKVFIINANSSSSFQIIGFTEVAKDILQISTVSLLETDIVEVMVLSSLPEAGRSRLEMFTLPTLLPQVSTTFADERGRLKDEIIHKYLYELEHALSSAVLGFQSNQIYGFCSQVPYICSYLLPEEEHTGIYILKPYKKVQSRQYGPGLLYLSSHGLWLITIAKCGILCIRDVYTLETFAWCRSHSHQGHGIQSMRISMDGQNILVNGRDDGTLVYLKWKRFGGHLASEILDYYQKLLISLSSAMDKENHYLSTTPKVSVDLGSDSEHTKQKASTDLSQDELVLTDVKKEIPWIQQKSQEAIKKEVNLFSKKRKEIKQGIKSLSKTILNMMEENDKLENIAKLDQQEFGLDLEELERLHDESQEEVAKMIKDVEMHNLAKSYLAELIKEECWNSMAVKGRALKCFHIPCVVENFPMKARTVEELKELERVLQQKKIEAECLKVLF

SEQ ID NO: 17232 - protein, 1665 aa, Homo sapiens
  Payload ID: 3471
  Gene Symbol: CFAP43
  Gene Name: cilia and flagella associated protein 43
  Uniprot ID: Q8NDM7
  ENSP ID: ENSP00000349568
MAQGRERDEGPHSAGGASLSVRWVQGFPKQNVHFVNDNTICYPCGNYVIFINIETKKKTVLQCSNGIVGVMATNIPCEVVAFSDRKLKPLIYVYSFPGLTRRTKLKGNILLDYTLLSFSYCGTYLASYSSLPEFELALWNWESSIILCKKSQPGMDVNQMSFNPMNWRQLCLSSPSTVSVWTIERSNQEHCFRARSVKLPLEDGSFFNETDVVFPQSLPKDLIYGPVLPLSAIAGLVGKEAETFRPKDDLYPLLHPTMHCWTPTSDLYIGCEEGHLLMINGDTLQVTVLNKIEEESPLDRRNFISPVTLVYQKEGVLASGIDGFVYSFIIKDRSYMIEDFLEIERPVEHMTFSPNYTVLLIQTDKGSVYIYTFGKEPTLNKVLDACDGKFQAIDFITPGTQYFMTLTYSGEICVWWLEDCACVSKIYLNTLATVLACCPSSLSAAVGTEDGSVYFISVYDKESPQVVHKAFLSESSVQHVVYDQQGIFLLVGTAEGKVFIINANSSSSFQIIGFTEVAKDILQISTVSLLETDIVEVMVLSSLPEAGRSRLEMFTLPTLLPQVSTTFADERGRLKDEIIHKYLYELEHALSSAVLGFQSNQIYGFCSQVPYICSYLLPEEEHTGIYILKPYKKVQSRQYGPGLLYLSSHGLWLITIAKCGILCIRDVYTLETFAWCRSHSHQGHGIQSMRISMDGQNILVNGRDDGTLVYLKWKRFGGHLASEILDYYQKLLISLSSAMDKENHYLSTTPKVSVDLGSDSEHTKQKASTDLSQDELVLTDVKKEIPWIQQKSQEAIKKEVNLFSKKRKEIKQGIKSLSKTILNMMEENDKLENIAKLDQQEFGLDLEELERLHDESQEEVAKMIKDVEMHNLAKSYLAELIKEECWNSMAVKGRALKCFHIPCVVENFPMKARTVEELKELERVLQQKKIEAECLKLRKEIVEAQSGVKLIKQRHEEDDEEEEEEDKTVKYSNLPNYLLGSLSTDFGVDTSLLSSQLELHSREEKINQIILLKDIIYKVKTVFNNEFDAAYKQKEFEIARVKERNVRIREIILDLELEEAVWQPEFEDCEKPERTLVVQDEEITAHKHIKPWHKAKELIVNHEKEHWLLIQDASTRLRALMDMMGGVLEVKKEDILRMVIPQPAFMAKPDAVWTEEERKQFKDYEKKVKELNEERDKYRKSLEAELKKLQNSIQESTQAFDEHLKRLFERRVKAEMVTNQEELKISNLAFSLLLDEELSSREKFLNNYLTRKQHEKSQTSEAVRKSREDLDVCKEHYDNLLAEDKVMDRSFKKEFSEIPGHQVDILYKLFKRRPRISKQKTHSETTSVVPFGELPGSGKLNKDAFAQLMKAMDELDNISNMPEGLDPLVWNHFCMTRRAKVENEQKVKQKAADLLEMATFLQKRVEEEEKVQQEIERVFHELILLQEEKVRFQLNLTIQILLKQGQVELENFQLVLEYSDAILINKNIIEDLNSVIRTQGQKKVASMMESKDVHKRILQIEWEHKKMEMEREDLNQKAWDIQMLFFSRDRQKYLNEPNYEALISIQIGIMEQTIAVLDKMHKKNVENCKKLLKKLGKFSNQKDIANYALSCNLREELVAVSERKDICNAMGSKLTCEKIVKERYENMMQQQKLTNISKQQAEQISILQTEVERLRMKTFPALVQM

SEQ ID NO: 17233 - protein, 303 aa, Homo sapiens
  Payload ID: 3471
  Gene Symbol: CFAP43
  Gene Name: cilia and flagella associated protein 43
  ENSP ID: ENSP00000358733
MATNIPCEVVAFSDRKLKPLIYVYSFPGLTRRTKLKGNILLDYTLLSFSYCGTYLASYSSLPEFELALWNWESSIILCKKSQPGMDVNQMSFNPMNWRQLCLSSPSTVSVWTIERSNQEHCFRARSVKLPLEDGSFFNETDVVFPQSLPKDLIYGPVLPLSAIAGLVGKEAETFRPKDDLYPLLHPTMHCWTPTSDLYIGCEEGHLLMINGDTLQVTVLNKIEEESPLEDRRNFISPVTLVYQKEGVLASGIDGFVYSFIIKDRSYMIEDFLEIERPVEHMTFSPNYTVLLIQTDKVCWMVIS

SEQ ID NO: 17234 - protein, 412 aa, Homo sapiens
  Payload ID: 3471
  Gene Symbol: CFAP43
  Gene Name: cilia and flagella associated protein 43
  ENSP ID: ENSP00000358734
MATNIPCEVVAFSDRKLKPLIYVYSFPGLTRRTKLKGNILLDYTLLSFSYCGTYLASYSSLPEFELALWNWESSIILCKKSQPGMDVNQMSFNPMNWRQLCLSSPSTVSVWTIERSNQEHCFRARSVKLPLEDGSFFNETDVVFPQSLPKDLIYGPVLPLSAIAGLVGKEAETFRPKDDLYPLLHPTMHCWTPTSDLYIGCEEGHLLMINGDTLQVTVLNKIEEESPLEDRRNFISPVTLVYQKEGVLASGIDGFVYSFIIKDRSYMIEDFLEIERPVEHMTFSPNYTVLLIQTDKGSVYIYTFGKEPTLNKVLDACDGKFQAIDFITPGTQYFMTLTYSGEICVWWLEDCACVSKIYLNTLATVLACCPSSLSAAVGTEDGSVYFISVYDKESPQVVHKAFLSESSVQHVV

SEQ ID NO: 17235 - protein, 997 aa, Homo sapiens
  Payload ID: 3471
  Gene Symbol: CFAP43
  Gene Name: cilia and flagella associated protein 43
  ENSP ID: ENSP00000391364
  MOD_RES (1)..(1): Any amino acid
XPGLLYLSSHGLWLITIAKCGILCIRDVYTLETFAWCRSHSHQGHGIQSMRISMDGQNILVNGRDDGTLVYLKWKRFGGHLASEILDYYQKLLISLSSAMDKENHYLSTTPKVSVDLGSDSEHTKQKASTDLSQDELVLTDVKKEIPWIQQKSQEAIKKEVNLFSKKRKEIKQGIKSLSKTILNMMEENDKLENIAKLDQQEFGLDLEELERLHDESQEEVAKMIKDVEMHNLAKSYLAELIKEECWNSMAVKGRALKCFHIPCVVENFPMKARTVEELKELERVLQQKKIEAECLKLRKEIVEAQSGVKLIKQRHEEDDEEEEEEDKTVKYSNLPNYLLGSLSTDFGVDTSLLSSQLELHSREEKINQIILLKDIIYKVKTVFNNEFDAAYKQKEFEIARVKERNVRIREIILDLELEEAVWQPEFEDCEKPERTLVVQDEEITAHKHIKPWHKAKELIVNHEKEHWLLIQDASTRLRALMDMMGGVLEVKKEDILRMVIPQPAFMAKPDAVWTEEERKQFKDYEKKVKELNEERDKYRKSLEAELKKLQNSIQESTQAFDEHLKRLFERRVKAEMVTNQEELKISNLAFSLLLDEELSSREKFLNNYLTRKQHEKVMDRSFKKEFSEIPGHQVDILYKLFKRRPRISKQKTHSETTSVVPFGELPGSGKLNKDAFAQLMKAMDELDNISNMPEGLDPLVWNHFCMTRRAKVENEQKVKQKAADLLEMATFLQKRVEEEEKVQQEIERVFHELILLQEEKVRFQLNLTIQILLKQGQVELENFQLVLEYSDAILINKNIIEDLNSVIRTQGQKKVASMMESKDVHKRILQIEWEHKKMEMEREDLNQKAWDIQMLFFSRDRQKYLNEPNYEALISIQIGIMEQTIAVLDKMHKKNVENCKKLLKKLGKFSNQKDIANYALSCNLREELVAVSERKDICNAMGSKLTCEKIVKERYENMMQQQKLTNISKQQAEQISILQTEVERLRMKTFPALVQM

SEQ ID NO: 17236 - protein, 514 aa, Homo sapiens
  Payload ID: 3471
  Gene Symbol: CFAP43
  Gene Name: cilia and flagella associated protein 43
  ENSP ID: ENSP00000394274
  MOD_RES (1)..(1): Any amino acid
XWTEEERKQFKDYEKKVKELNEERDKYRKSLEAELKKLQNSIQESTQAFDEHLKRLFERRVKAEMVTNQEELKISNLAFSLLLDEELSSREKFLNNYLTRKQHEKSQTSEAVRKSREDLDVCKEHYDNLLAEDKVMDRSFKKEFSEIPGHQVDILYKLFKRRPRISKQKTHSETTSVVPFGELPGSGKLNKDAFAQLMKAMDELDNISNMPEGLDPLVWNHFCMTRRAKVENEQKVKQKAADLLEMATFLQKRVEEEEKVQQEIERVFHELILLQEEKVRFQLNLTIQILLKQGQVELENFQLVLEYSDAILINKNIIEDLNSVIRTQGQKKVASMMESKDVHKRILQIEWEHKKMEMEREDLNQKAWDIQMLFFSRDRQKYLNEPNYEALISIQIGIMEQTIAVLDKMHKKNVENCKKLLKKLGKFSNQKDIANYALSCNLREELVAVSERKDICNAMGSKLTCEKIVKERYENMMQQQKLTNISKQQAEQISILQTEVERLRMKTFPALVQM

SEQ ID NO: 17237 - protein, 982 aa, Homo sapiens
  Payload ID: 3472
  Gene Symbol: CFAP44
  Gene Name: cilia and flagella associated protein 44
  Uniprot ID: Q96MT7
  ENSP ID: ENSP00000295868
MKEPDDQDTDGEKSVTSKSDGKKSLRSSKSESRSPVQEDNTFLEDDTDETFTKGEGSYLEEDSDEERLEGSLSSFQYGDLQSTTVPQQTPAPAVEEAEEEVKKKISESFFYDYMELASMPFVTLDSNIPLDLLTLVHSFGYDCRKRANLQLLDDSIAIYIAGNQLIFLNLKTKEQIYLRSSSGEGIGVIGVHPHKTYFTVAEKGSFPDIIIYEYPSLRPYRVLRDGTEKGYAYVDFNYSGNLLASVGSNPDYTLTIWNWKEEQPILRTKAFSQEVFKVTFNPDKEEQLTTSGSGHIKFWEMAFTFTGLKLQGSLGRFGKTITTDIEGYMELPDGKVLSGSEWGNMLLWEGGLIKVELCRGTSKSCHNGPINQIMLYEGEVITVGSDGYVRIWDFETIDTADVIDETGLLEIEPINELQVDKNVNLFSMIKMNETGNNFWLAQDANGAIWKLDLSFSNITQDPECLFSFHSGAIEAVAVSPLTYLMATTALDCSVRIYDFASKTPLAQMKFKQGGTALVWVPRMVNFTGAQIIVGFEDGVVRILELYDPKGLTIFAGRKKILDADIQLKQVFKPHTACVTALAYERDGEILATGSKDQTVFFFEVERDYKPIGYINTPGPVCQLMWSPMSHPESTLLIICENGYILEAPLPTIKQEEDDHDVVSYEIKDMCIKCFHFSSVKSKILRLIEIEKRERQRELKEKIREERRNKLAAEMGEDGEKEFQEEEEEKEEEEEEEEPLPEIFIPSTPSPILCGFYSEPGKFWVSLGGYDSGFLYHCEFPPCDESSDFKEQKDEPIDVRYLADTEDNPIQTITFNINKVMMFCGMKNGAIRVYVLNQNDPSLTSLVDYWHFNMHDNNYGCIKSIANSFDDRFLVTAGADGNIFVFNIFSEFMLRKDMKAKVPSPRFGIETEPIPEDIEDPKAYSIENARRKREHDKLMKEVGEIKARKREQIKALRSEFCNLLEMNEKLPKHMQFKRTVSLI

SEQ ID NO: 17238 - protein, 1854 aa, Homo sapiens
  Payload ID: 3472
  Gene Symbol: CFAP44
  Gene Name: cilia and flagella associated protein 44
  Uniprot ID: Q96MT7
  ENSP ID: ENSP00000377428
MKEPDDQDTDGEKSVTSKSDGKKSLRSSKSESRSPVQEDNTFLEDDTDETFTKGEGSYLEEDSDEERLEGSLSSFQYGDLQSTTVPQQTPAPAVEEAEEEVKKKISESFFYDYMELASMPFVTLDSNIPLDLLTLVHSFGYDCRKRANLQLLDDSIAIYIAGNQLIFLNLKTKEQIYLRSSSGEGIGVIGVHPHKTYFTVAEKGSFPDIIIYEYPSLRPYRVLRDGTEKGYAYVDFNYSGNLLASVGSNPDYTLTIWNWKEEQPILRTKAFSQEVFKVTFNPDKEEQLTTSGSGHIKFWEMAFTFTGLKLQGSLGRFGKTITTDIEGYMELPDGKVLSGSEWGNMLLWEGGLIKVELCRGTSKSCHNGPINQIMLYEGEVITVGSDGYVRIWDFETIDTADVIDETGLLEIEPINELQVDKNVNLFSMIKMNETGNNFWLAQDANGAIWKLDLSFSNITQDPECLFSFHSGAIEAVAVSPLTYLMATTALDCSVRIYDFASKTPLAQMKFKQGGTALVWVPRMVNFTGAQIIVGFEDGVVRILELYDPKGLTIFAGRKKILDADIQLKQVFKPHTACVTALAYERDGEILATGSKDQTVFFFEVERDYKPIGYINTPGPVCQLMWSPMSHPESTLLIICENGYILEAPLPTIKQEEDDHDVVSYEIKDMCIKCFHFSSVKSKILRLIEIEKRERQRELKEKIREERRNKLAAEMGEDGEKEFQEEEEEKEEEEEEEEPLPEIFIPSTPSPILCGFYSEPGKFWVSLGGYDSGFLYHCEFPPCDESSDFKEQKDEPIDVRYLADTEDNPIQTITFNINKVMMFCGMKNGAIRVYVLNQNDPSLTSLVDYWHFNMHDNNYGCIKSIANSFDDRFLVTAGADGNIFVFNIFSEFMLRKDMKAKVPSPRFGIETEPIPEDIEDPKAYSIENARRKREHDKLMKEVGEIKARKREQIKALRSEFCNLLEMNEKLPKHMQFKRTDFDVDSQIRAEMHRKTAFKIQQVEKELAWEKEKHELGLMKLKNRFRDPLESDTIVVHAILSDHKISSYRLVQPSKYSKFKRASQSERKPSKLDRFEKEGPGRKDSQRDAGGSVTIQEESIIEKGKKFRPKTLSEIIVENQIEKTRKLILKAERAQLKIQQRKKEWEELYKSKPGDDYEDPKDLQAIKEAQVYMGDFNLKTAPDYKIPEHMRINAAKKEEELGHLDSLVHGNKRHMNKCILSLRDLKVAVVEEIQCLVQELKNIQSTLHISKHIPIPKIPQIHPEEVPEKRFQYDEETLLNFKQQQMKSKDEKSPGVEQTGSGGPVGGFLKLSSRKDGDLTTRDSISRSSKASTFSLDIPKCLEFEKAEPTDVELEIMKRDEIKHVYMQQYLVNRIKELVVTFDAELRLLRHQKLKLDTQMKLSDLHHVTLFQEILLLKNFEKQENILQERVNSLDKEEQYMQWKINETLKEMEEKKNEITKLQEQEKALYAGFQAAIGENNKFANFLMKVLKKKIKRVKKKEVEGDADEDEESEESSEEESSLESDEDESESEDEVFDDSICPTNCDVALFELALHLREKRLDIEEALVEEKKIVDNLKKEYDTLSKKVKIVATNLNAAEEALEAYQREKQQRLNELLVVIPLKLHQIEYVVFGEIPSDLSGTLVFSNHALRRLQERIHELQEENSKQQKLNKEWRERRKQLIREKREMTKTIHKMEETVRQLMISKFGRVVNLEALQTLSVNTTLEELKIRKLRKELANAKEMKMWEEKIAQMRWELMMKTKEHTRKLYQMNDLCIEKKKLDSRLNTLQNQQGNAFQGPREADVVAREEVTELIQLQAERISALKEEIALLRRKGSLILPPIQSPREKEIQPADL

SEQ ID NO: 17239 - protein, 991 aa, Homo sapiens
  Payload ID: 3472
  Gene Symbol: CFAP44
  Gene Name: cilia and flagella associated protein 44
  ENSP ID: ENSP00000417371
  MOD_RES (1)..(1): Any amino acid
XANSFDDRFLVTAGADGNIFVFNIFSEFMLRKDMKAKVPSPRFGIETEPIPEDIEDPKAYSIENARRKREHDKLMKEVGEIKARKREQIKALRSEFCNLLEMNEKLPKHMQFKRTDFDVDSQIRAEMHRKTAFKIQQVEKELAWEKEKHELGLMKLKNRFRDPLESDTIVVHAILSDHKISSYRLVQPSKYSKFKRASQSERKPSKLDRFEKEGPGRKDSQRDAGGSVTIQEESIIEKGKKFRPKTLSEIIVENQIEKTRKLILKAERAQLKIQQRKKEWEELYKSKPGDDYEDPKDLQAIKEAQVYMGDFNLKTAPDYKIPEHMRINAAKKEEELGHLDSLVHGNKRHMNKCILSLRDLKVAVVEEIQCLVQELKNIQSTLHISKHIPIPKIPQIHPEEVPEKRFQYDEETLLNFKQQQMKSKDEKSPGVEQTGSGGPVGGFLKLSSRKDGDLTTRDSISRSSKASTFSLDIPKCLEFEKAEPTDVELEIMKRDEIKHVYMQQYLVNRIKELVVTFDAELRLLRHQKLKLDTQMKLSDLHHVTLFQEILLLKNFEKQENILQERVNSLDKEEQYMQWKINETLKEMEEKKNEITKLQEQEKALYAGFQAAIGENNKFANFLMKVLKKKIKRVKKKEVEGDADEDEESEESSEEESSLESDEDESESEDEVFDDSICPTNCDVALFELALHLREKRLDIEEALVEEKKIVDNLKKEYDTLSKKVKIVATNLNAAEEALEAYQREKQQRLNELLVVIPLKLHQIEYVVFGEIPSDLSGTLVFSNHALRRLQERIHELQEENSKQQKLNKEWRERRKQLIREKREMTKTIHKMEETVRQLMISKFGRVVNLEALQTLSVNTTLEELKIRKLRKELANAKEMKMWEEKIAQMRWELMMKTKEHTRKLYQMNDLCIEKKKLDSRLNTLQNQQGNAFQGPREADVVAREEVTELIQLQAERISALKEEIALLRRKGSLILPPIQSPREKEIQPADL

SEQ ID NO: 17240 - protein, 56 aa, Homo sapiens
  Payload ID: 3472
  Gene Symbol: CFAP44
  Gene Name: cilia and flagella associated protein 44
  ENSP ID: ENSP00000418257
  MOD_RES (1)..(1): Any amino acid
XVFSNHALRRLQERIHELQEENSKQQKLNKEWRERRKQLIREKREMTKTIHMTVFF

SEQ ID NO: 17241 - protein, 26 aa, Homo sapiens
  Payload ID: 3472
  Gene Symbol: CFAP44
  Gene Name: cilia and flagella associated protein 44
  ENSP ID: ENSP00000418743
TVGSDGYVRDANGAIWKLDLSFSNII

SEQ ID NO: 17242 - protein, 419 aa, Homo sapiens
  Payload ID: 3472
  Gene Symbol: CFAP44
  Gene Name: cilia and flagella associated protein 44
  ENSP ID: ENSP00000418795
  MOD_RES (1)..(1): Any amino acid
XDAELRLLRHQKLKLDTQMKLSDLHHVTLFQEILLLKNFEKQENILQERVNSLDKEEQYMQWKINETLKEMEEKKNEITKLQEQEKALYAGFQAAIGENNKFANFLMKVLKKKIKRVKKKEVEGDADEDEESEESSEEESSLESDEDESESEDEVFDDSICPTNCDVALFELALHLREKRLDIEEALVEEKKIVDNLKKEYDTLSKKVKIVATNLNAAEEALEAYQREKQQRLNELLVVIPLKLHQIEYVVFGEIPSDLSGTLVFSNHALRRLQERIHELQEENSKQQKLNKEWRERRKQLIREKREMTKTIHKMEETVRQLMISKFGRVVNLEALQTLSVNTTLEELKIRKLRKELANAKEMKMWEEKIAQMRWELMMKTKEHTRKLYQMNDLCIEKKKLDSRLNTLQNQQNPGNGLS

SEQ ID NO: 17243 - protein, 119 aa, Homo sapiens
  Payload ID: 3472
  Gene Symbol: CFAP44
  Gene Name: cilia and flagella associated protein 44
  ENSP ID: ENSP00000419269
  MOD_RES (1)..(1): Any amino acid
XSIENARRKREHDKLMKEVGEIKARKREQIKALRSEFCNLLEMNEKLPKHMQFKRTDFDVDSQIRAEMHRKTAFKIQQVEKELAWEKEKHELGLMKLKNRWECYHTRRINNRKREEISA

SEQ ID NO: 17244 - protein, 84 aa, Homo sapiens
  Payload ID: 3472
  Gene Symbol: CFAP44
  Gene Name: cilia and flagella associated protein 44
  ENSP ID: ENSP00000419671
MKEPDDQDTDGEKSVTSKSDGKKSLRSSKSESRSPVQEDNTFLEDDTDETFTKGEGSYLEEDSDEERLEGSLSSFQYGDLQSTT

SEQ ID NO: 17245 - protein, 37 aa, Homo sapiens
  Payload ID: 3472
  Gene Symbol: CFAP44
  Gene Name: cilia and flagella associated protein 44
  ENSP ID: ENSP00000419844
MKEPDDQDTDGEKSVTSKSDGKKSLRSSKSESRCSST

SEQ ID NO: 17246 - protein, 10 aa, Homo sapiens
  Payload ID: 3472
  Gene Symbol: CFAP44
  Gene Name: cilia and flagella associated protein 44
  ENSP ID: ENSP00000420375
  MOD_RES (1)..(1): Any amino acid
XKSESRCSST

SEQ ID NO: 17247 - protein, 551 aa, Homo sapiens
  Payload ID: 3473
  Gene Symbol: CFAP45
  Gene Name: cilia and flagella associated protein 45
  Uniprot ID: Q9UL16
  ENSP ID: ENSP00000357079
MPLSTAGILSSSSAASNRSRNKARYRTKAVSSEVDESLFGDIKSPAQGQSDSPIVLLRDKHTLQKTLTALGLDRKPETIQLITRDMVRELIVPTEDPSGESLIISPEEFERIKWASHVLTREELEARDQAFKKEKEATMDAVMTRKKIMKQKEMVWNNNKKLSDLEEVAKERAQNLLQRANKLRMEQEEELKDMSKIILNAKCHAIRDAQILEKQQIQKELDTEEKRLDQMMEVERQKSIQRQEELERKRREERIRGRRQIVEQMEKNQEERSLLAEQREQEKEQMLEYMEQLQEEDLKDMERRQQQKLKMQAEIKRINDENQKQKAELLAQEKLADQMVMEFTKKKMAREAEFEAEQERIRREKEKEIARLRAMQEKAQDYQAEQDALRAKRNQEVADREWRRKEKENARKKMETEAELRKSRLEQVAFKEHALAVQVQRDRDEFERILRAQREQIEKERLEEEKKATGRLQHANELRRQVRENQQKEVQNRIATFEEGRRLKEEAQKRRERIDEIKRKKLEELRATGLPEKYCIEAERKANILPATSVN

SEQ ID NO: 17248 - protein, 466 aa, Homo sapiens
  Payload ID: 3473
  Gene Symbol: CFAP45
  Gene Name: cilia and flagella associated protein 45
  Uniprot ID: Q9UL16
  ENSP ID: ENSP00000403044
MVRELIVPTEDPSGESLIISPEEFERIKWASHVLTREELEARDQAFKKEKEATMDAVMTRKKIMKQKEMVWNNNKKLSDLEEVAKERAQNLLQRANKLRMEQEEELKDMSKIILNAKCHAIRDAQILEKQQIQKELDTEEKRLDQMMEVERQKSIQRQEELERKRREERIRGRRQIVEQMEKNQEERSLLAEQREQEKEQMLEYMEQLQEEDLKDMERRQQQKLKMQAEIKRINDENQKQKAELLAQEKLADQMVMEFTKKKMAREAEFEAEQERIRREKEKEIARLRAMQEKAQDYQAEQDALRAKRNQEVADREWRRKEKENARKKMETEAELRKSRLEQVAFKEHALAVQVQRDRDEFERILRAQREQIEKERLEEEKKATGRLQHANELRRQVRENQQKEVQNRIATFEEGRRLKEEAQKRRERIDEIKRKKLEELRATGLPEKYCIEAERKANILPATSVN

SEQ ID NO: 17249 - protein, 141 aa, Homo sapiens
  Payload ID: 3473
  Gene Symbol: CFAP45
  Gene Name: cilia and flagella associated protein 45
  ENSP ID: ENSP00000478944
MVRELIVPTEDPSGESLIISPEEFERIKWASHVLTREELEARDQAFKKEKEATMDAVMTRKKIMKQKEMVWNNNKKLSDLEEVAKERAQNLLQRANKLRMEQEEELKDMSKIILNAKCHAIRDAQILEKQQIQKELDTEEK

SEQ ID NO: 17250 - protein, 431 aa, Homo sapiens
  Payload ID: 3473
  Gene Symbol: CFAP45
  Gene Name: cilia and flagella associated protein 45
  ENSP ID: ENSP00000483972
MPLSTAGILSSSSAASNRSRNKARYRTKAVSSEVDESLFGDIKSPAQGQSDSPIVLLRDKHTLQKTLTALGLDRKPETIQLITRDMVRELIVPTEDPSGESLIISPEEFERIKWASHVLTREELEARDQAFKKEKEATMDAVMTRKKIMKQKEMVWNNNKKLSDLEEVAKERAQNLLQRANKLRMEQEEELKDMSKIILNAKCHAIRDAQILEKQQIQKELDTEEKRLDQMMEVERQKSIQRQEELERKRREERIRGRRQIVEQMEKNQEERSLLAEQREQEKEQMLEYMEQLQEEDLKDMERRQQQKLKMQAEIKRINDENQKQKAELLAQEKLADQMVMEFTKKKMAREAEFEAEQERIRREKEKEIARLRAMQEKAQDYQAEQLFCALTGPLPTFPGCLAGQAQPGGCRQRVAQKGKGKCAEEDGNRG

SEQ ID NO: 17251 - protein, 405 aa, Homo sapiens
  Payload ID: 3474
  Gene Symbol: CFAP46
  Gene Name: cilia and flagella associated protein 46
  Uniprot ID: Q8IYW2
  ENSP ID: ENSP00000357574
MDLVITQELARAESQQDAASLKKAYELIKSANLGKSEFDPSESFSPDLFVLCAEQALKMRQPEVSEDCIQMYFKVKAPITQFLGRAHLCRAQMCAPKSAENLEEFENCVTEYMKAINFAKGEPRYYFLVYNASVLYWQMVRPFLKPGYRHHLIPSLSQIINVLSQTEEEDKEWRAELMLELLECYLQAGRKEEAARFCSTAAPFIKSHVPQKYRQIFSVMVRHELMDELQLKEEKKNSISLSVTFYINMLKAKAEQNDLPGDISVILRKAYRHLGHYNHQRFPSISEEKMLLLFELARFSLTLKCMEISSACLSDLKKMESKVSGFMTLLPGDEALLTVQLDKRQRKEEQFTRPRPPGLRSVVGTLPSFLPVFCTVAVRWCLQFYTCPFLFTFLVATGPQHHSCF

SEQ ID NO: 17252 - protein, 2715 aa, Homo sapiens
  Payload ID: 3474
  Gene Symbol: CFAP46
  Gene Name: cilia and flagella associated protein 46
  Uniprot ID: Q8IYW2
  ENSP ID: ENSP00000357575
MDLVITQELARAESQQDAASLKKAYELIKSANLGKSEFDPSESFSPDLFVLCAEQALKMRQPEVSEDCIQMYFKVKAPITQFLGRAHLCRAQMCAPKSAENLEEFENCVTEYMKAINFAKGEPRYYFLVYNASVLYWQMVRPFLKPGYRHHLIPSLSQIINVLSQTEEEDKEWRAELMLELLECYLQAGRKEEAARFCSTAAPFIKSHVPQKYRQIFSVMVRHELMDELQLKEEKKNSISLSVTFYINMLKAKAEQNDLPGDISVILRKAYRHLGHYNHQRFPSISEEKMLLLFELARFSLTLKCMEISSACLSDLKKMESKDPGKLIEMECLECESEALRLESKMKVYNRAAVEAQLDIIQRLDVALQRAVRLGDPRVIHVVCATQWNTCLPLLQHNLRHHLRKPLAGVADVLEKLDSLMTLLRCQVHMEMAQIEEDEDRLEPATEHLRKAARLDSLGLYRDRIQMASTRLRLCTTLYQAPERAEDKAIMAVEQAKKATPKDSVRKKRALLVNAGLALAPDAFQIVLDSENEAKVSTGKNRGRFTYLCAKAWHHTVSVDKAAGHLRRLGNENDKERIQIWAELAKVARKQGVWDVCRTASRFCLLYDNVKVKKLRLRRGKKKRGRDGSVQDTWSQPEVVLQRQVCPDLLRKFAEVGFIHAEATVHLLRSEGVELNDRAIPPEDLSQHPAGYVPEPPEVNAEWITYRTWIESLSRCAMNNWLRSAEIGQEIQEAWIVQNAVVYVLNHNHHLILAGRQKELVDALYHLLSIVKATGHSGDPVMLVTLCNTLARGLIISWIPVQAAEKSRKFMRPNAFHSPLDAGATSEIKTAVEVCEFALNLTNGSAPEETVPTGTRQQLIATWVKAKQLLQQQIGPRLGTEEQGTNEDVSSVTRVLVALEMYSCNGLGLMDFTVPSLAQLVKMASECNWSDPLVELQTLTRLTHFAHAARDHETTMACAHRALEMGIKYLKKFGPEESRLVAEMLCTATAIQGRSIMENLKGRKQLRLVAAKAFTESARFGGIAGSSALVMLAARHYWNAWLPLLSSAVYRKKAKGALKRLIGIINKTEARKQEKGKTLLLHQWPTADFQGGGTTEGYFLPGAEDDLALRAALYGLLFHSHADQDDWEGGLKVLDEAVQVLPRTAHRLLIFKHMVIVKAKLGQNFSMEIQKFKAESEDYLARMWHRLALNSPSVSGELACYNNAIQALQKPEMEWQKVEYLMEFGQWLHHRHFPLEDVVFHLRWAVEILLAMKPPGDVPEPQPTPDGEYVAVEMPPRSPVSEAEEAVSLEQLRSVRQLEALARVHILLALVLSPGAEGYEDCCLAAYAFFRHIWQVSLMTAGKSVLENRPLAATSSHLLLPKKEKENERSKEKEKERSKEKENERSKEKDKEKGKEEKVKEPKQSQSPAPIKQLEDLPMSIEEWASYSCPEEVLSVLKQDRSDSTVNPSSIQKPTYSLYFLDHLVKALQKMCLHELTVPVLQLGVLISDSVVGSKGLSDLYHLRLAHACSELKLREAAARHEEAVGQVCVSELEQASCRKEIALKKEKNKEPLLEESLPALNEQTLPVQPGEIKPLDAKDKILKMNGETGRDLDGTSFPHLWMLKAEVLLEMNLYQPARLLLSEAYLAFQELDEPCAEAQCLLLLAQLANKEKNYGQAKKMIAQAQHLGGSEEFWYNSTLTLAEALLSMEHSGREATVCHIFQKLINAFKILKKERPNRLPLLEFMITDLEARCLSLRVRVAQHSAVTEPTECSLLLKEMDDGLLEIERKFIDCGCKENCVDVKLERAKIKRLRAQNEKDEEQKTAYYLEAYGLAQGAVAEEEGRLHSIQGLYGLAQGAMAEEEGRLHSVQGLLSLQDLQNVNTPLMRKLARLKLGLVEMALDMLQFIWEEAHGQQSEQGSLEKLLADYLQNTSDYTSVGLQWFTLKRTLAHGALAQLGSLQPLSVGCVEIRARLLGLAGRALHLLAMQADPVHPTCYWEAGPSVGAKLSGLKSLELEVEEEGATKSSRDPPASRAAPEEHCRRGEDLKRRMVLAQQYLAQASEVLLQCLQVALGSGLLDVAAAASLEMVECVGTLDPATTCQFLALSQSCSASETMRDVLLAATANTSSSQLAALLQLQHQLRCQDRTTTSLGARVEQRLAAVSKAWQNLCVTEQHFNLLNEMPPTFWILFLHLSGDRSRLYGAAYEKPKFITAAKGKVQAVGGSCKVMRLAISPTAFSHLLACAQQFRKQTQAQVYSEDMALNIGSEPEGLQVEEKERPVQRLSSVLGPLEELLQPLFPLLSLSKARVQTPAVVADSGKSKGKDKERKTSTGQHSTVQPEVADKIVLVADRHLLELPLEGLSVFDEGTISSVSREFSLQMLWNRLHKEETEGGVKKEGRSRDPKKRSLAKKGRKGSIPRTIPPDCIIVDSDNFKFVVDPYEEAQGPEMLTPVSITQDILERFQDTFTSRWAGHLGSKHFPSQAQWEQALGSCSGFFFYGMESFLSHILVERLVAMNLQECQVAVLLDLARSYQSLKRHMESVEHRRSVGRWEANWRNSASPSEDEWRRGGEPRRGFSDLEGQAAAAPKLRAPSHHAQLGPVWAAAPSHRVVQAWTCLPSAAGAPALASALGSAPLPTHPHLPAPIPSSQLALPFLGLSPALGAASARDPPPATSRKAAAWTSSSACLCAPWGLRRGWSCVSSRGQDKGGLPLAALVLSCLDQKTIQTVSLFLI

SEQ ID NO: 17253 - protein, 153 aa, Homo sapiens
  Payload ID: 3474
  Gene Symbol: CFAP46
  Gene Name: cilia and flagella associated protein 46
  ENSP ID: ENSP00000417039
  MOD_RES (1)..(1): Any amino acid
XTQAQVYSEDMALNIGSEPEGLQVEEKERPVQRLSSVLGPLEELLQPLFPLLSLSKARVQTPAVVADSGKSKGKDKERKTSTGQHSTVQPEVADKIVLVADRHLLELPLEGLSVFDEGTISSVSREFSLQMLWNRLHKEETDSEKHEGARGRP

SEQ ID NO: 17254 - protein, 976 aa, Homo sapiens
  Payload ID: 3475
  Gene Symbol: CFAP47
  Gene Name: cilia and flagella associated protein 47
  ENSP ID: ENSP00000297866
MNTQKGSLTINVHRGSLAMSIQRGSLVPRDMDSSGRDMQLRVIPAEVKFLDTMAGRVYRLPITVHNICRWNQKIRFKEPVKPQFKLMLTSLDKELASGLQMTAMVEYHPDKDEDTFDRLLISIENKTTEIPLIGLIPSCQLEIESVVNFGTLVANSKVYSKEITITNHGKAPGIFKAEYHGQLPILIFPTSGIVDAKSSMVIKVDFCADQPRIVDEEAIVILQGQPEMLLSIKAHVVEQIIELLSMSSDRRLECIHFGPVFFGSSKIKHARVYNNSPEPINWVAIIQDDAVGEELGTDIQQRTDIALNNLTYIRKIKNIDTTIIISCLPNEGTLQPYQKTVITFCFTPKLMAVGKKDIGPSYRQDYALFLRFESVGSKDGFLRDDDYKTIKSERFQKVELALTGTGLPVLLQFDPGPVLNFKPCFMGERSEIQCIIKNQCELLPVTYHFKKTANFEIDPEKGKITGGGMVDVMCSFVPHQLGVFKVKQMIEIIGLVAEEDLQSLSVKSFHHVYLAFNSICKASTKKVVMKFDPGILPSIRNPTGKFVVKDLAKRKNYAPVAMLQSAMTRTHNHRSCEEPVKDMLLAFPNDRAATIRSKDHHKHFRPIFTKVPRFNYVNHDFAYTTFEKQQKKLHENYYAMYLKYLRSVRLQKKQAERERMYSYDDTDIGLEPGSGLKSPSLSEAEIEEELSSAANSIRANRLLTTRGIASQEEESVRRKVLKGLKSEPSTPQEKHDCSLMLTPKQIHQVIVGPSVLNFGNICVNSPNTHLLHVINMLPMHVLLQLDTDLEELQKTNQFSYVILPTSSTYISMVFDSPTIGKFWKSFTFTVNNVPSGHILVVAVVQPVTLELSSNELVLRPRGFFMKTCFRGTVRLYNRQNCCAQFQWQPVNTGRGIAFSICPAKGTVEAYSSLECEVTWQQGFSSPEEGEFILHVFQGNALKLKCVAHVIIFLEHGFCFEGYEFVGYTLVYIVTYI

SEQ ID NO: 17255 - protein, 502 aa, Homo sapiens
  Payload ID: 3475
  Gene Symbol: CFAP47
  Gene Name: cilia and flagella associated protein 47
  ENSP ID: ENSP00000324767
MAIHLDKQNIILKNDKDEYLKKTRDGVLPPYQDAKPPSPASIKKTYTTSKFNDAEPAKGNLFIGVEVLPENLHLDESETSEEDHGSLEKEKYEQFLSLEEGTKAHYFFEKVVNAAQTWFSLFGWPEGPHSFSIPETIRRDVYKMQFYSSTSPPQKFSRQNDFSKYNKTIYDVLLHLSGKMPPGINSSQSLPVDNHEKRVIQLHLQHSSLLDFLNAQGGCISHVLPEFLLEPEDYKRWIEIMSSTNTMPVSSCTPKKKCSIVIEMSKFEAWSKRAWTDVFLQIYKVLVLSRVVPYCSNNMPPICVQNTPKVNPCFASSNIYSDSERILLSWMNINYENTRHVIWKNCHKDVIPSERWIVNFDKDLSDGLVFATQLGAYCPFLIESHFINMYTRPKSPEEYLHNCLIIVNTLYEIDFDVEIQVCLRVFPKEMDAGVSGLRKEDMPSVWVVTIRLAVAVARTKRQKKGDIQFACFFVCLFFFIFVVISFSLWSRMHFFLLLPLDI

SEQ ID NO: 17256 - protein, 3187 aa, Homo sapiens
  Payload ID: 3475
  Gene Symbol: CFAP47
  Gene Name: cilia and flagella associated protein 47
  ENSP ID: ENSP00000367922
MNTQKGSLTINVHRGSLAMSIQRGSLVPRDMDSSGRDMQLRVIPAEVKFLDTMAGRVYRLPITVHNICRWNQKIRFKEPVKPQFKLMLTSLDKELASGLQMTAMVEYHPDKDEDTFDRLLISIENKTTEIPLIGLIPSCQLEIESVVNFGTLVANSKVYSKEITITNHGKAPGIFKAEYHGQLPILIFPTSGIVDAKSSMVIKVDFCADQPRIVDEEAIVILQGQPEMLLSIKAHVVEQIIELLSMSSDRRLECIHFGPVFFGSSKIKHARVYNNSPEPINWVAIIQDDAVGEELGTDIQQRTDIALNNLTYIRKIKNIDTTIIISCLPNEGTLQPYQKTVITFCFTPKLMAVGKKDIGPSYRQDYALFLRFESVGSKDGFLRDDDYKTIKSERFQKVELALTGTGLPVLLQFDPGPVLNFKPCFMGERSEIQCIIKNQCELLPVTYHFKKTANFEIDPEKGKITGGGMVDVMCSFVPHQLGVFKVKQMIEIIGLVAEEDLQSLSVKSFHHVYLAFNSICKASTKKVVMKFDPGILPSIRNPTGKFVVKDLAKRKNYAPVAMLQSAMTRTHNHRSCEEPVKDMLLAFPNDRAATIRSKDHHKHFRPIFTKVPRFNYVNHDFAYTTFEKQQKKLHENYYAMYLKYLRSVRLQKKQAERERMYSYDDTDIGLEPGSGLKSPSLSEAEIEEELSSAANSIRANRLLTTRGIASQEEESVRRKVLKGLKSEPSTPQEKHDCSLMLTPKQIHQVIVGPSVLNFGNICVNSPNTHLLHVINMLPMHVLLQLDTDLEELQKTNQFSYVILPTSSTYISMVFDSPTIGKFWKSFTFTVNNVPSGHILVVAVVQPVTLELSSNELVLRPRGFFMKTCFRGTVRLYNRQNCCAQFQWQPVNTGRGIAFSICPAKGTVEAYSSLECEVTWQQGFSSPEEGEFILHVFQGNALKLKCVAHLGRTKVLLLQPRILFSNCPQGLTTWRKAILQNVGQNHAYFKVCSQSLLPIINIIPSQGIVPFGGITVLNISCKPTVAEKFDTRAKVSIRHANVIDLRIGGSAEIADVEINPDVFNFSGAYIGGTQIIPFVIKNKGITRARVEFNLKDFPDFSMDLKDKSEEFKDPAVPYIYSLELEENTSLECSITFSPKEVTVVEFIIQVQINFFESSKLYTKYLSSSPSNPKTVPLIRPCYVQATALQSPLNLSSTKFVFEIPLHEMNPNNKVTKTQNLVLYNITKHHVTWTLDLSNTGKLFKDGTFKFSVLNGILRPNEKYNVSISFCPNRPGTYTADIPMLLNYIPVCYKILHLTGEVKSPELLFDPPFIFFTPVPLDITTVMDINILPQNYFRNSTLCVQIPTVRLLDGEEIHPLSVKFPKGRVIPGSHSGINNKLTCHLSFKSSKPVSFFTNLLFCDDRKNWFSLPVTATAENCILTIYPYMAIHLDKQNIILKNDKDEYLKKTRDGVLPPYQDAKPPSPASIKKTYTTSKFNDAEPAKGNLFIGVEVLPENLHLDESETSEEDHGSLEKEKYEQFLSLEEGTKAHYFFEKVVNAAQTWFSLFGWPEGPHSFSIPETIRRDVYKMQFYSSTSPPQKFSRQNDFSKYNKTIYDVLLHLSGKMPPGINSSQSLPVDNHEKRVIQLHLQHSSLLDFLNAQGGCISHVLPEFLLEPEDYKRWIEIMSSTNTMPVSSCTPKKKCSIVIEMSKFEAWSKRAWTDVFLQIYKVLVLSRVVPYCSNNMPPICVQNTPKVNPCFASSNIYSDSERILLSWMNINYENTRHVIWKNCHKDVIPSERWIVNFDKDLSDGLVFATQLGAYCPFLIESHFINMYTRPKSPEEYLHNCLIIVNTLYEIDFDVEIQATDICDPNPILMLMLCVYMYERLPTYLPKKVVSFECTLHDTVLNKILLKNSSSRNLVYNARIVGRDAADFSLSQKGNVVTISPRNEINVTLKFTSRFIRPAEASLLLISKPKNAVRGITMTFALKGKVLDFKAIDIIKCESPCYQFQEVTVNVKNPFHTAGDFSVILVESSTFVSSPTKLTESRQYPKHDDDMSSSGSDTDQGCSDSPNVLHTSIKSTFIREFFCSMHTVHLGVKGTSSLELRFLPFNMHVRYCVIILSNKKIGQLIYVAEGKGMTPLPSSCLPMNTSSSPVYYSTTREEGPNKKYPVLYLKCKPYQILYVDLKLPMTNEAKEKALAFAAQQQMSSIEYERRLITGTLESSSIRVAIALLGLTKIETLMLFRISKLRKPKTVSYTTEVSLPKYFYIPEKISIPWIPEPQVIKLSKAKASDGSVPLPLQFLPLQSGRYPCKILLKSRYDVRAYYVEGIVNEEQPEAKFEFETPAFEALTQNIPIKNQTNDKWTFQVTIEGEWFYGPVDLHVGPDEIVEYPLTFKPIFECVITGKLILQNEVDGREHIFDIKGVGKKPSALEHITVECQVGNVTQKHITLPHFTNTALTFKVTADLPIVWGNPQITVYPYKEILYLIHVRPWKRGILKGTITFSTTRRCTTRRKHDDYEEDTDQDQALSCLDSITEQSSILDDADTYGNFNNLRFWYNLEIHSTPGPPIEIMEMTCIALDSTCIEIPLSNPKDRGLHLEVQLTSAALNGDNEIILSPLQCTKYIVWYSPATTGYSDESIIFQPEMAEEFWYLLKLTIELPKPTTMPEIQCDLGKHVTQIIPLVNCTHETLKLQVTNSNPENFVLDINRKSQLIISPHSTTELPVLFYPSALGRADHQACINFYCTQFTEWKFYLSGVGLFPQPLDTERITTRIGLQSTIVIPFKNPTMEDVLIDIILTSVEHPRNLVMDHCWDSFIYESSAFRFSSPSEIQGIALPPKGNIDISLLFIPQIMKLHKTMVIIEMTKANGKYWPIDNFDELDIKFKSIVGIDSEEIQAIHWIYPIVGLPQAPPPKSPPVVIQCQSRKRAEEKVEIILNAGFFGFSLTPDLTEVLVIPKRNSHNFCEDPNEIPKIHEFEYEIQFESEAMKSKLESCVALYMIEKSYDIMAKRITFIFNLVFTPKKPLRSHITLKIECVTEGIWKFPIMLIATEPDTDAVIDIEGVGLFKESVFELRLKSQTRNPEPFTAHFLPGSDLEFFVKPQAGELLPFNTNGTLITVGFKPKMYCRKYKATLVIQTEEMYWKYEINGLTPTTVPPKNAKAKIDATHKTHDNMPVRPHNFVRENTKLIRTGVSSTIKGAPLVKNQ

SEQ ID NO: 17257 - protein, 633 aa, Homo sapiens
  Payload ID: 3475
  Gene Symbol: CFAP47
  Gene Name: cilia and flagella associated protein 47
  ENSP ID: ENSP00000367926
MEMTCIALDSTCIEIPLSNPKDRGLHLEVQLTSAALNGDNEIILSPLQCTKYIVWYSPATTGYSDESIIFQPEMAEEFWYLLKLTIELPKPTTMPEIQCDLGKHVTQIIPLVNCTHETLKLQVTNSNPENFVLDINRKSQLIISPHSTTELPVLFYPSALGRADHQACINFYCTQFTEWKFYLSGVGLFPQPLDTERITTRIGLQSTIVIPFKNPTMEDVLIDIILTSVEHPRNLVMDHCWDSFIYESSAFRFSSPSEIQGIALPPKGNIDISLLFIPQIMKLHKTMVIIEMTKANGKYWPIDNFDELDIKFKSIVGIDSEEIQAIHWIYPIVGLPQAPPPKSPPVVIQCQSRKRAEEKVEIILNAGFFGFSLTPDLTEVLVIPKRNSHNFCEDPNEIPKIHEFEYEIQFESEAMKSKLESCVALYMIEKSYDIMAKRITFIFNLVFTPKKPLRSHITLKIECVTEGIWKFPIMLIATEPDTDAVIDIEGVGLFKESVFELRLKSQTRNPEPFTAHFLPGSDLEFFVKPQAGELLPFNTNGTLITVGFKPKMYCRKYKATLVIQTEEMYWKYEINGLTPTTVPPKNAKAKIDATHKTHDNMPVRPHNFVRENTKLIRTGVSSTIKGAPLVKNQ

SEQ ID NO: 17258 - protein, 754 aa, Homo sapiens
  Payload ID: 3475
  Gene Symbol: CFAP47
  Gene Name: cilia and flagella associated protein 47
  ENSP ID: ENSP00000433564
MNTQKGSLTINVHRGSLAMSIQRGSLVPRDMDSSGRDMQLRVIPAEVKFLDTMAGRVYRLPITVHNICRWNQKIRFKEPVKPQFKLMLTSLDKELASGLQMTAMVEYHPDKDEDTFDRLLISIENKTTEIPLIGLIPSCQLEIESVVNFGTLVANSKVYSKEITITNHGKAPGIFKAEYHGQLPILIFPTSGIVDAKSSMVIKVDFCADQPRIVDEEAIVILQGQPEMLLSIKAHVVEQIIELLSMSSDRRLECIHFGPVFFGSSKIKHARVYNNSPEPINWVAIIQDDAVGEELGTDIQQRTDIALNNLTYIRKIKNIDTTIIISCLPNEGTLQPYQKTVITFCFTPKLMAVGKKDIGPSYRQDYALFLRFESVGSKDGFLRDDDYKTIKSERFQKVELALTGTGLPVLLQFDPGPVLNFKPCFMGERSEIQCIIKNQCELLPVTYHFKKTANFEIDPEKGKITGGGMVDVMCSFVPHQLGVFKVKQMIEIIGLVAEEDLQSLSVKSFHHVYLAFNSICKASTKKVVMKFDPGILPSIRNPTGKFVVKDLAKRKNYAPVAMLQSAMTRTHNHRSCEEPVKDMLLAFPNDRAATIRSKDHHKHFRPIFTKVPRFNYVNHDFAYTTFEKQQKKLHENYYAMYLKYLRSVRLQKKQAERERMYSYDDTDIGLEPGSGLKSPSLSEAEIEEELSSAANSIRANRLLTTRGIASQEEESVRRKVLKGLKSEPSTPQEKHDCSLMLTPKQIHQVIVVRY

SEQ ID NO: 17259 - protein, 90 aa, Homo sapiens
  Payload ID: 3475
  Gene Symbol: CFAP47
  Gene Name: cilia and flagella associated protein 47
  ENSP ID: ENSP00000485710
  MOD_RES (1)..(1): Any amino acid
XIPKIHEFEYEIQFESEAMKSKLESCVALYMIEKSYDIMAKRITFIFNLVFTPKKPLRNPEPFTAHFLPGSDLEFFVKPQAGELLPFNTN

SEQ ID NO: 17260 - protein, 620 aa, Homo sapiens
  Payload ID: 3476
  Gene Symbol: CFAP52
  Gene Name: cilia and flagella associated protein 52
  Uniprot ID: Q8N1V2
  ENSP ID: ENSP00000339449
MDNKISPEAQVAELELDAVIGFNGHVPTGLKCHPDQEHMIYPLGCTVLIQAINTKEQNFLQGHGNNVSCLAISRSGEYIASGQVTFMGFKADIILWDYKNRELLARLSLHKGKIEALAFSPNDLYLVSLGGPDDGSVVVWSIAKRDAICGSPAAGLNVGNATNVIFSRCRDEMFMTAGNGTIRVWELDLPNRKIWPTECQTGQLKRIVMSIGVDDDDSFFYLGTTTGDILKMNPRTKLLTDVGPAKDKFSLGVSAIRCLKMGGLLVGSGAGLLVFCKSPGYKPIKKIQLQGGITSITLRGEGHQFLVGTEESHIYRVSFTDFKETLIATCHFDAVEDIVFPFGTAELFATCAKKDIRVWHTSSNRELLRITVPNMTCHGIDFMRDGKSIISAWNDGKIRAFAPETGRLMYVINNAHRIGVTAIATTSDCKRVISGGGEGEVRVWQIGCQTQKLEEALKEHKSSVSCIRVKRNNEECVTASTDGTCIIWDLVRLRRNQMILANTLFQCVCYHPEEFQIITSGTDRKIAYWEVFDGTVIRELEGSLSGSINGMDITQEGVHFVTGGNDHLVKVWDYNEGEVTHVGVGHSGNITRIRISPGNQYIVSVSADGAILRWKYPYTS

SEQ ID NO: 17261 - protein, 552 aa, Homo sapiens
  Payload ID: 3476
  Gene Symbol: CFAP52
  Gene Name: cilia and flagella associated protein 52
  Uniprot ID: Q8N1V2
  ENSP ID: ENSP00000379521
MDNKISPEAQVAELELDAVIGFNDIILWDYKNRELLARLSLHKGKIEALAFSPNDLYLVSLGGPDDGSVVVWSIAKRDAICGSPAAGLNVGNATNVIFSRCRDEMFMTAGNGTIRVWELDLPNRKIWPTECQTGQLKRIVMSIGVDDDDSFFYLGTTTGDILKMNPRTKLLTDVGPAKDKFSLGVSAIRCLKMGGLLVGSGAGLLVFCKSPGYKPIKKIQLQGGITSITLRGEGHQFLVGTEESHIYRVSFTDFKETLIATCHFDAVEDIVFPFGTAELFATCAKKDIRVWHTSSNRELLRITVPNMTCHGIDFMRDGKSIISAWNDGKIRAFAPETGRLMYVINNAHRIGVTAIATTSDCKRVISGGGEGEVRVWQIGCQTQKLEEALKEHKSSVSCIRVKRNNEECVTASTDGTCIIWDLVRLRRNQMILANTLFQCVCYHPEEFQIITSGTDRKIAYWEVFDGTVIRELEGSLSGSINGMDITQEGVHFVTGGNDHLVKVWDYNEGEVTHVGVGHSGNITRIRISPGNQYIVSVSADGAILRWKYPYTS

SEQ ID NO: 17262 - protein, 42 aa, Homo sapiens
  Payload ID: 3476
  Gene Symbol: CFAP52
  Gene Name: cilia and flagella associated protein 52
  ENSP ID: ENSP00000458343
MDNKISPEAQVAELELDAVIGFNGPVLLKLFLVNKLPTQAKQ

SEQ ID NO: 17263 - protein, 31 aa, Homo sapiens
  Payload ID: 3476
  Gene Symbol: CFAP52
  Gene Name: cilia and flagella associated protein 52
  ENSP ID: ENSP00000458398
MDNKISPEAQVAELELDAVIGFNGRHHFVGL

SEQ ID NO: 17264 - protein, 48 aa, Homo sapiens
  Payload ID: 3476
  Gene Symbol: CFAP52
  Gene Name: cilia and flagella associated protein 52
  ENSP ID: ENSP00000459347
MDNKISPEAQVAELELDAVIGFNVGQFEYGNWIFQIEKSGQLSAKQDS

SEQ ID NO: 17265 - protein, 31 aa, Homo sapiens; identical to SEQ ID NO: 17263
  Payload ID: 3476
  Gene Symbol: CFAP52
  Gene Name: cilia and flagella associated protein 52
  ENSP ID: ENSP00000459671

SEQ ID NO: 17266 - protein, 93 aa, Homo sapiens
  Payload ID: 3476
  Gene Symbol: CFAP52
  Gene Name: cilia and flagella associated protein 52
  ENSP ID: ENSP00000468193
  MOD_RES (1)..(1): Any amino acid
XTQKLEEALKEHKSSVSCIRVKRNNEECVTASTDGTCIIWDLVRLRRNQMILANTLFQCVCYHPEEFQIITSGTDRKVEMTIWSKFGIIMRVK

SEQ ID NO: 17267 - protein, 127 aa, Homo sapiens
  Payload ID: 3476
  Gene Symbol: CFAP52
  Gene Name: cilia and flagella associated protein 52
  ENSP ID: ENSP00000476293
MDNKISPEAQVAELELDAVIGFNGHVPTGLKCHPDQEHMIYPLGCTVLIQAINTKEQNFLQGHGNNVSCLAISRSGEYIASGQVTFMGFKTSFCGIIRTESCLLGCPFTKAKLKLWPFLQMICTWYH

SEQ ID NO: 17268 - protein, 514 aa, Homo sapiens
  Payload ID: 3477
  Gene Symbol: CFAP53
  Gene Name: cilia and flagella associated protein 53
  Uniprot ID: Q96M91
  ENSP ID: ENSP00000381553
MYSQRFGTVQREVKGPTPKVVIVRSKPPKGQGAEHHLERIRRSHQKHNAILASIKSSERDRLKAEWDQHNDCKILDSLVRARIKDAVQGFIINIEERRNKLRELLALEENEYFTEMQLKKETIEEKKDRMREKTKLLKEKNEKERQDFVAEKLDQQFRERCEELRVELLSIHQKKVCEERKAQIAFNEELSRQKLVEEQMFSKLWEEDRLAKEKREAQEARRQKELMENTRLGLNAQITSIKAQRQATQLLKEEEARLVESNNAQIKHENEQDMLKKQKAKQETRTILQKALQERIEHIQQEYRDEQDLNMKLVQRALQDLQEEADKKKQKREDMIREQKIYHKYLAQRREEEKAQEKEFDRILEEDKAKKLAEKDKELRLEKEARRQLVDEVMCTRKLQVQEKLQREAKEQEERAMEQKHINESLKELNCEEKENFARRQRLAQEYRKQLQMQIAYQQQSQEAEKEEKRREFEAGVAANKMCLDKVQEVLSTHQVLPQNIHPMRKACPSKLPP

SEQ ID NO: 17269 - protein, 1250 aa, Homo sapiens
  Payload ID: 3478
  Gene Symbol: CFAP57
  Gene Name: cilia and flagella associated protein 57
  Uniprot ID: Q96MR6
  ENSP ID: ENSP00000361570
MSAVVAQTLHVFGLRSHVANNIFYFDEQIIIFPSGNHCVKYNVDQKWQKFIPGSEKSQGMLALSISPNRRYLAISETVQEKPAITIYELSSIPCRKRKVLNNFDFQVQKFISMAFSPDSKYLLAQTSPPESNLVYWLWEKQKVMAIVRIDTQNNPVYQVSFSPQDNTQVCVTGNGMFKLLRFAEGTLKQTSFQRGEPQNYLAHTWVADDKIVVGTDTGKLFLFESGDQRWETSIMVKEPTNGSKSLDVIQESESLIEFPPVSSPLPSYEQMVAASSHSQMSMPQVFAIAAYSKGFACSAGPGRVLLFEKMEEKDFYRESREIRIPVDPQSNDPSQSDKQDVLCLCFSPSEETLVASTSKNQLYSITMSLTEISKGEPAHFEYLMYPLHSAPITGLATCIRKPLIATCSLDRSIRLWNYETNTLELFKEYQEEAYSISLHPSGHFIVVGFADKLRLMNLLIDDIRSFKEYSVRGCGECSFSNGGHLFAAVNGNVIHVYTTTSLENISSLKGHTGKIRSIVWNADDSKLISGGTDGAVYEWNLSTGKRETECVLKSCSYNCVTVSPDAKIIFAVGSDHTLKEIADSLILREISAFDVTYTAIVISHSGRMMFVGTSVGTIRAMKYPLPLQKEFNEYQAHAGPITKMLLTFDDQFLLTAAEDGCLFTWKVFDKDGRGIKREREVGFAEEVLVTKTDMEEKAQVMLELKTRVEELKMENEYQLRLKDMNYSEKIKELTDKFIQEMESLKTKNQVLRTEKEKQDVYHHEHIEDLLDKQSRELQDMECCNNQKLLLEYEKYQELQLKSQRMQEEYEKQLRDNDETKSQALEELTEFYEAKLQEKTTLLEEAQEDVRQQLREFEETKKQIEEDEDREIQDIKTKYEKKLRDEKESNLRLKGETGIMRKKFSSLQKEIEERTNDIETLKGEQMKLQGVIKSLEKDIQGLKREIQERDETIQDKEKRIYDLKKKNQELGKFKFVLDYKIKELKKQIEPRENEIRVMKEQIQEMEAELENFHKQNTQLELNITELWQKLRATDQEMRRERQKERDLEALVKRFKTDLHNCVAYIQEPRLLKEKVRGLFEKYVQRADMVEIAGLNTDLQQEYTRQREHLERNLATLKKKVVKEGELHRTDYVRIMQENVSLIKEINELRRELKFTRSQVYDLEAALKLTKKVRPQEVSETEPSRDMLSTAPTARLNEQEETGRIIEMQRLEIQRLRDQIQEQEQVTGFHTLAGVRLPSLSNSEVDLEVKTN

SEQ ID NO: 17270 - protein, 78 aa, Homo sapiens
  Payload ID: 3478
  Gene Symbol: CFAP57
  Gene Name: cilia and flagella associated protein 57
  ENSP ID: ENSP00000416933
  MOD_RES (1)..(1): Any amino acid
XEREVGFAEEVLVTKTDMEEKAQVMLELKTRVEELKMENEYQLRLKDMNYSEKIKELTDKFIQEMESLKTKNQVCLRD

SEQ ID NO: 17271 - protein, 63 aa, Homo sapiens
  Payload ID: 3478
  Gene Symbol: CFAP57
  Gene Name: cilia and flagella associated protein 57
  ENSP ID: ENSP00000432547
MSAVVAQTLHVFGLRSHVANNIFYFDEQIIIFPSGNHCVKYNVDQKWQKFIPGSFWLLYRGQI

SEQ ID NO: 17272 - protein, 166 aa, Homo sapiens
  Payload ID: 3478
  Gene Symbol: CFAP57
  Gene Name: cilia and flagella associated protein 57
  ENSP ID: ENSP00000434133
MSAVVAQTLHVFGLRSHVANNIFYFDEQIIIFPSGNHCVKYNVDQKWQKFIPGSEKSQGMLALSISPNRRYLAISETVQEKPAITIYELSSIPCRKRKVLNNFDFQVQKFISMAFSPDSKYLLAQTSPPESNLVYWLWEKQKVMAIVRIDTQNNPVYQVSFSPQDN

SEQ ID NO: 17273 - protein, 63 aa, Homo sapiens; identical to SEQ ID NO: 17271
  Payload ID: 3478
  Gene Symbol: CFAP57
  Gene Name: cilia and flagella associated protein 57
  ENSP ID: ENSP00000434671

SEQ ID NO: 17274 - protein, 698 aa, Homo sapiens
  Payload ID: 3478
  Gene Symbol: CFAP57
  Gene Name: cilia and flagella associated protein 57
  Uniprot ID: Q96MR6
  ENSP ID: ENSP00000435310
MSAVVAQTLHVFGLRSHVANNIFYFDEQIIIFPSGNHCVKYNVDQKWQKFIPGSEKSQGMLALSISPNRRYLAISETVQEKPAITIYELSSIPCRKRKVLNNFDFQVQKFISMAFSPDSKYLLAQTSPPESNLVYWLWEKQKVMAIVRIDTQNNPVYQVSFSPQDNTQVCVTGNGMFKLLRFAEGTLKQTSFQRGEPQNYLAHTWVADDKIVVGTDTGKLFLFESGDQRWETSIMVKEPTNGSKSLDVIQESESLIEFPPVSSPLPSYEQMVAASSHSQMSMPQVFAIAAYSKGFACSAGPGRVLLFEKMEEKDFYRESREIRIPVDPQSNDPSQSDKQDVLCLCFSPSEETLVASTSKNQLYSITMSLTEISKGEPAHFEYLMYPLHSAPITGLATCIRKPLIATCSLDRSIRLWNYETNTLELFKEYQEEAYSISLHPSGHFIVVGFADKLRLMNLLIDDIRSFKEYSVRGCGECSFSNGGHLFAAVNGNVIHVYTTTSLENISSLKGHTGKIRSIVWNADDSKLISGGTDGAVYEWNLSTGKRETECVLKSCSYNCVTVSPDAKIIFAVGSDHTLKEIADSLILREISAFDVTYTAIVISHSGRMMFVGTSVGTIRAMKYPLPLQKEFNEYQAHAGPITKVSRALSPGTQSHTCLLRALFIPSTSQCLFSLLLLSYLFIHHSLNHHLLTMNILFV

SEQ ID NO: 17275 - protein, 1283 aa, Homo sapiens
  Payload ID: 3478
  Gene Symbol: CFAP57
  Gene Name: cilia and flagella associated protein 57
  ENSP ID: ENSP00000479773
MSAVVAQTLHVFGLRSHVANNIFYFDEQIIIFPSGNHCVKYNVDQKWQKFIPGSEKSQGMLALSISPNRRYLAISETVQEKPAITIYELSSIPCRKRKVLNNFDFQVQKFISMAFSPDSKYLLAQTSPPESNLVYWLWEKQKVMAIVRIDTQNNPVYQVSFSPQDNTQVCVTGNGMFKLLRFAEGTLKQTSFQRGEPQNYLAHTWVADDKIVVGTDTGKLFLFESGDQRWETSIMVKEPTNGSKSLDVIQESESLIEFPPVSSPLPSYEQMVAASSHSQMSMPQVFAIAAYSKGFACSAGPGRVLLFEKMEEKDFYRESREIRIPVDPQSNDPSQSDKQDVLCLCFSPSEETLVASTSKNQLYSITMSLTEISKGEPAHFEYLMYPLHSAPITGLATCIRKPLIATCSLDRSIRLWNYETNTLELFKEYQEEAYSISLHPSGHFIVVGFADKLRLMNLLIDDIRSFKEYSVRGCGECSFSNGGHLFAAVNGNVIHVYTTTSLENISSLKGHTGKIRSIVWNADDSKLISGGTDGAVYEWNLSTGKRETECVLKSCSYNCVTVSPDAKIIFAVGSDHTLKEIADSLILREISAFDVTYTAIVISHSGRMMFVGTSVGTIRAMKYPLPLQKEFNEYQAHAGPITKMLLTFDDQFLLTAAEDGCLFTWKVFDKDGRGIKREREVGFAEEVLVTKTDMEEKAQVMLELKTRVEELKMENEYQLRLKDMNYSEKIKELTDKFIQEMESLKTKNQVLRTEKEKQDVYHHEHIEDLLDKQSRELQDMECCNNQKLLLEYEKYQELQLKSQRMQEEYEKQLRDNDETKSQALEELTEFYEAKLQEKTTLLEEAQEDVRQQLREFEETKKQIEEDEDREIQDIKTKYEKKLRDEKESNLRLKGETGIMRKKFSSLQKEIEERTNDIETLKGEQMKLQGVIKSLEKDIQGLKREIQERDETIQDKEKRIYDLKKKNQELGKFKFVLDYKIKELKKQIEPRENEIRVMKEQIQENDPILKWPQRVEIHLYNFRKQVRKVLLWGTLPQMEAELENFHKQNTQLELNITELWQKLRATDQEMRRERQKERDLEALVKRFKTDLHNCVAYIQEPRLLKEKVRGLFEKYVQRADMVEIAGLNTDLQQEYTRQREHLERNLATLKKKVVKEGELHRTDYVRIMQENVSLIKEINELRRELKFTRSQVYDLEAALKLTKKVRPQEVSETEPSRDMLSTAPTARLNEQEETGRIIEMQRLEIQRLRDQIQEQEQVTGFHTLAGVRLPSLSNSEVDLEVKTN

SEQ ID NO: 17276 - protein, 92 aa, Homo sapiens
  Payload ID: 3479
  Gene Symbol: CFAP58
  Gene Name: cilia and flagella associated protein 58
  ENSP ID: ENSP00000358717
MDELLRERDILNKNMLKAVNATQKQTDLVKLHEQAKRNLEGEIQNYKDEAQKQRKIIFHLEKERDRYINQASDLTQKADSVRMPWPLDKGKW

SEQ ID NO: 17277 - protein, 872 aa, Homo sapiens
  Payload ID: 3479
  Gene Symbol: CFAP58
  Gene Name: cilia and flagella associated protein 58
  Uniprot ID: Q5T655
  ENSP ID: ENSP00000358718
MAEEKGGKQVLEESAFEEMERDFQGVLHELSGDKSLEKFRIEYERLHAVMKKSYDNEKRLMAKCRELNAEIVVNSAKVATALKLSQDDQTTIASLKKEIEKAWKMVDSAYDKEQKAKETILALKEEIVNLTKLVEQGSGLSMDQHSNIRDLLRFKEEVTKERDQLLSEVVKLRESLAQTTEQQQETERSKEEAEHAISQFQQEIQQRQNEASREFRKKEKLEKELKQIQADMDSRQTEIKALQQYVQKSKEELQKLEQQLKEQKILNERAAKELEQFQMRNAKLQQENEQHSLVCEQLSQENQQKALELKAKEEEVHQMRLDIGKLNKIREQIHKKLHHTEDQKAEVEQHKETLKNQIVGLEREVEASKKQAELDRKAMDELLRERDILNKNMLKAVNATQKQTDLVKLHEQAKRNLEGEIQNYKDEAQKQRKIIFHLEKERDRYINQASDLTQKVLMNMEDIKVRETQIFDYRKKIAESEIKLKQQQNLYEAVRSDRNLYSKNLVEAQDEITDMKRKLKIMIHQVDELKEDISAKESALVKLHLEQQRIEKEKETLKAELQKLRQQALETKHFIEKQEAEERKLLRIIAEADGERLRQKKELDQVISERDILGSQLVRRNDELALLYEKIKIQQSVLNKGESQYNQRLEDMRILRLEIKKLRREKGILARSMANVEELRQEFFHMQRELLKERTRCRALEEELENPLNVHRWRKLEASDPNAYELIQKIHTLQKRLISKTEEVVEKELLLQEKEKLYMELKHVLARQPGPEAAEQLKLYRRTLHDKKQQLKVLSSELNMYEVQSKEYKYEVEKLTNELQNLKKKYLAQKRKEQLQKNKDTAPMDNTFLMVKPNGPGFTGGGFPLRSTKMTF

SEQ ID NO: 17278 - protein, 1237 aa, Homo sapiens
  Payload ID: 3480
  Gene Symbol: CFAP61
  Gene Name: cilia and flagella associated protein 61
  Uniprot ID: Q8NHU2
  ENSP ID: ENSP00000245957
MSVLTSPRGKVEVVHCRRTESQDVYCIKSLIRKFTCKLFGKLNIIYLLEKANLAVTLCNDKEEIMAQATFLDYPNWNVAKQDDWVSVFRELDSDIPCTPLNTLFMHLFVAVDEYSVGCCKEILRTVYKAVPELHFIFLIVPSYMSLGSTLITVFDQVGNIPCLTYEEDFAVHICHRHSHYPQLHVRKARVEDHDDLMPIFMRYDTILKETYGEYFLAELIEAQDEENHAVVCEVEGTAVGFMSVCSRVNMQLLHECFDLGPFHGLCFPHPDDVLESPQDLSVRRSQDAELRSSSQGSQKIVEELQEPVSPDTMENIQGNIAREAASEEALTAVQSGNVSEPEDIEKLSDISTGYAQYHHVSSRSLASLVLPEEPVHFRPIYRGASAAFCIQLFCIDEKYEARSLDFMNFVFSLFSDKNFCVISLPHLTPEFFLIQNFVKMVPFNTCTLEQDLYVFHRAGLLKSINIRFATLLDTPGVENLVSTLMLNKSILEDLDRYNKARKDPDGTLLQAFVAEVAEQIVGIAVIRNEMDIEYIRSHYNIEDFIYFSHHQREEHGHMHHFALNPIFRHYTKFFLKEILRLGFKSCLYYRVYPKSREGKFQNPYAHSLTSALHYLVPVRPRRQIVYPLEKLGINAPSKAVSKDPMSYALNHTNRKLTLEPKITVNAKIIVVGASSVGISFLETLVFCSHMKFNNLTLISTHGLPGKKLLDTEQRKFLASDHCFNDKDYALMSLCSWVNVVVGRMTGIDRAAKHVVLSTDEIVPYDHLILCTGQQYQVPCPTEADISQHLTNREVPNSSQRRYTGKVPCNHFTLNEEEDCFKALIWIRNNSITTEGNIIVYGNTIDTYTTVETLLNLGVSGSRIHLVQPPPASTITCINNYSVESAVADALGAAGVTMYRDAILAQWNDGLHPDPIYSASFTTPTKPFRLQCSMFFSFCEKNVDYETFKALNDACLVYDSRLVIDTNFHTNDIAIRAAGSLTKFSNRYYSNEWTHSNFSSKEIGFQLAAAMLHLFDPTLEPVTEPPANLDRLIPMYKGAKIQGGILPGSYHYLHIAKPAIPTPLEVQMAQPNYGLELVTGSAKNGTYFRIHINKYKMVETITCLSREPFPASNYIRLFGQHEQLLNNLCARYDENLITDLYSYFTEPWCLALFHDRFIDLRKELRQILASKEEEDLPSIEQLAHQIEDEEINPTEKPRQYLKRVFEESIYKTLVERSTLDYLHYNRYHLPMYAWPGIV

SEQ ID NO: 17279 - protein, 370 aa, Homo sapiens
  Payload ID: 3480
  Gene Symbol: CFAP61
  Gene Name: cilia and flagella associated protein 61
  ENSP ID: ENSP00000345553
MREKANLAVTLCNDKEEIMAQATFLDYPNWNVAKQDDWVSVFRELDSDIPCTPLNTLFMHLFVAVDEYSVGCCKEILRTVYKAVPELHFIFLIVPSYMSLGSTLITVFDQVGNIPCLTYEEDFAVHICHRHSHYPQLHVRKARVEDHDDLMPIFMRYDTILKETYGEYFLAELIEAQDEENHAVVCEVEGTAVGFMSVCSRVNMQLLHECFDLGPFHGLCFPHPDDVLESPQDLSVRRSQDAELRSSSQGSQKIVEELQEPVSPDTMENIQGNIAREAASEEALTAVQSGNVSEPEDIEKLSDISTGYAQYHHVSSRSLASLVLPEEPVHFRPIYRGASAAFCIQLFCIDEKYEARSLDFMNFVFSLFSV

SEQ ID NO: 17280 - protein, 200 aa, Homo sapiens
  Payload ID: 3480
  Gene Symbol: CFAP61
  Gene Name: cilia and flagella associated protein 61
  Uniprot ID: Q8NHU2
  ENSP ID: ENSP00000366508
MSYALNHTNRKLTLEPKITVNAKIIVVGASSVGISFLETLVFCSHMKFNNLTLISTHGLPGKKLLDTEQRKFLASDHCFNDKDYALMSLCSWVNVVVGRMTGIDRAAKHVVLSTDEIVPYDHLILCTGQQYQVPCPTEADISQHLTNREVPNSSQRRYTGKVPCNHFTLNEEEDCFKALIWIRNNSITTEDGGRASVLFC

SEQ ID NO: 17281 - protein, 189 aa, Homo sapiens
  Payload ID: 3480
  Gene Symbol: CFAP61
  Gene Name: cilia and flagella associated protein 61
  ENSP ID: ENSP00000366518
MSVLTSPRGKVEVVHCRRTESQDVYCIKSLIRKFTCKLFGKLNIIYLLEKANLAVTLCNDKEEIMAQATFLDYPNWNVAKQDDWVSVFRELDSDIPCTPLNTLFMHLFVAVDEYSVGCCKEILRTVYKAVPELHFIFLIVPSYMSLGSTLITVFDQVGNIPCLTYEEDFAVHICHRHSHYPQLHVRKAR

SEQ ID NO: 17282 - protein, 470 aa, Homo sapiens
  Payload ID: 3480
  Gene Symbol: CFAP61
  Gene Name: cilia and flagella associated protein 61
  Uniprot ID: Q8NHU2
  ENSP ID: ENSP00000366521
MSVLTSPRGKVEVVHCRRTESQDVYCIKSLIRKFTCKLFGKLNIIYLLEKANLAVTLCNDKEEIMAQATFLDYPNWNVAKQDDWVSVFRELDSDIPCTPLNTLFMHLFVAVDEYSVGCCKEILRTVYKAVPELHFIFLIVPSYMSLGSTLITVFDQVGNIPCLTYEEDFAVHICHRHSHYPQLHVRKARVEDHDDLMPIFMRYDTILKETYGEYFLAELIEAQDEENHAVVCEVEGTAVGFMSVCSRVNMQLLHECFDLGPFHGLCFPHPDDVLESPQDLSVRRSQDAELRSSSQGSQKIVEELQEPVSPDTMENIQGNIAREAASEEALTAVQSGNVSEPEDIEKLSDISTGYAQYHHVSSRSLASLVLPEEPVHFRPIYRGASAAFCIQLFCIDEKYEARSLDFMNFVFSLFSDKNFCVISLPHLTPEFFLIQNFVKMVPFNTCTLEQDLYVFHRAGLLKNICLGRSS

SEQ ID NO: 17283 - protein, 320 aa, Homo sapiens
  Payload ID: 3480
  Gene Symbol: CFAP61
  Gene Name: cilia and flagella associated protein 61
  Uniprot ID: Q8NHU2
  ENSP ID: ENSP00000366523
MSYALNHTNRKLTLEPKITVNAKIIVVGASSVGISFLETLVFCSHMKFNNLTLISTHGLPGKKLLDTEQRKFLASDHCFNDKDYALMSLCSWVNVVVGRMTGIDRAAKHVVLSTDEIVPYDHLILCTGQQYQVPCPTEADISQHLTNREVPNSSQRRYTGKVPCNHFTLNEEEDCFKALIWIRNNSITTEGNIIVYGNTIDTYTTVETLLNLGVSGSRIHLVQPPPASTITCINNYSVESAVADALGAAGVTMYRDAILAQWNDGLHPDPIYSASFTTPTKPFRLQCSGAFFLGLTIICILPSLPFQLPWRYKWHSLIMV

SEQ ID NO: 17284 - protein, 200 aa, Homo sapiens; identical to SEQ ID NO: 17280
  Payload ID: 3480
  Gene Symbol: CFAP61
  Gene Name: cilia and flagella associated protein 61
  Uniprot ID: Q8NHU2
  ENSP ID: ENSP00000374307

SEQ ID NO: 17285 - protein, 227 aa, Homo sapiens
  Payload ID: 3480
  Gene Symbol: CFAP61
  Gene Name: cilia and flagella associated protein 61
  ENSP ID: ENSP00000388074
  MOD_RES (1)..(1): Any amino acid
XNFVKMVPFNTCTLEQDLYVFHRAGLLKSINIRFATLLDTPGVENLVSTLMLNKSILEDLDRYNKARKDPDIEYIRSHYNIEDFIYFSHHQREEHGHMHHFALNPIFRHYTKFFLKEILRLGFKSCLYYRVYPKSREGKFQNPYAHSLTSALHYLVPVRPRRQIVYPLEKLGINAPSKAVSKDPMSYALNHTNRKLTLEPKITVNAKIIVVGASSVGISFLETLVFW

SEQ ID NO: 17286 - protein, 67 aa, Homo sapiens
  Payload ID: 3480
  Gene Symbol: CFAP61
  Gene Name: cilia and flagella associated protein 61
  ENSP ID: ENSP00000397311
MSVCSRVNMQLLHECFDLGPFHGLCFPHPDDVLESPQDLSVRRSQETRSHFVAQAGVQWCKYGSLQP

SEQ ID NO: 17287 - protein, 470 aa, Homo sapiens; identical to SEQ ID NO: 17282
  Payload ID: 3480
  Gene Symbol: CFAP61
  Gene Name: cilia and flagella associated protein 61
  Uniprot ID: Q8NHU2
  ENSP ID: ENSP00000414537

SEQ ID NO: 17288 - protein, 135 aa, Homo sapiens
  Payload ID: 3480
  Gene Symbol: CFAP61
  Gene Name: cilia and flagella associated protein 61
  ENSP ID: ENSP00000417086
MSVLTSPRGKVEVVHCRRTESQDVYCIKSLIRKFTCKLFGKLNIIYLLEKANLAVTLCNDKEEIMAQATFLDYPNWNVAKQDDWVSVFRELDSDIPCTPLNTLFMHLFVAVDEYSVGCCKEILRTVYKAVPELHF

SEQ ID NO: 17289 - protein, 55 aa, Homo sapiens
  Payload ID: 3480
  Gene Symbol: CFAP61
  Gene Name: cilia and flagella associated protein 61
  ENSP ID: ENSP00000420438
MSVLTSPRGKVEVVHCRRTESQDVYCIKSLIRKFTCKLFGKLNIIYLLFSRSCLH

SEQ ID NO: 17290 - protein, 160 aa, Homo sapiens
  Payload ID: 3480
  Gene Symbol: CFAP61
  Gene Name: cilia and flagella associated protein 61
  ENSP ID: ENSP00000420498
MHLFVAVDEYSVGCCKEILRTVYKAVPELHFIFLIVPSYMSLGSTLITVFDQVGNIPCLTYEEDFAVHICHRHSHYPQLHVRKARVEDHDDLMPIFMRYDTILKETYGEYFLAELIEAQDEENHAVVCEVEGTAVGFMSVCSRVNMQLLHECFDLGPFHG

SEQ ID NO: 17291 - protein, 941 aa, Homo sapiens
  Payload ID: 3481
  Gene Symbol: CFAP69
  Gene Name: cilia and flagella associated protein 69
  Uniprot ID: A5D8W1
  ENSP ID: ENSP00000373948
MWTEEAGATAEAQESGIRNKSSSSSQIPVVGVVTEDDEAQDVFKPMDLNRVIKLLEETDKDGLEEKQLKFVKKLVQCYQNGLPLRDLAQIFKILNLCSGKIKNQPRFIESAYDIIKLCGLPFLKKKVSDEITYAEDTANSIALLGDLMKIPSSELRIQICKCIVDFYHAEPPKKHIPGYQQASSSYKIQMAEVGGLAKTMVQSMTLLENQLVEKLWVLKVLQHLSTSEVNCTIMMKAQAASGICTHLNDPDPSGQLLFRSSEILWNLLEKSSKEEVIQQLSNLECLLALKEVFKNLFMRGFSHYDRQLRNDILVITTIIAQNPEAPMIECGFTKDLILFATFNEVKSQNLLVKGLKLSNSYEDFELKKLLFNVIVILCKDLPTVQLLIDGKVILALFTYVKKPEKQKIIDWSAAQHEELQLHAIATLSSVAPLLIEEYMSCQGNARVLAFLEWCESEDPFFSHGNSFHGTGGRGNKFAQMRYSLRLLRAVVYLEDETVNKDLCEKGTIQQMIGIFKNIISKPNEKEEAIVLEIQSDILLILSGLCENHIQRKEIFGTEGVDIVLHVMKTDPRKLQSGLGYNVLLFSTLDSIWCCILGCYPSEDYFLEKEGIFLLLDLLALNQKKFCNLILGIMVEFCDNPKTAAHVNAWQGKKDQTAASLLIKLWRKEEKELGVKRDKNGKIIDTKKPLFTSFQEEQKIIPLPANCPSIAVMDVSENIRAKIYAILGKLDFENLPGLSAEDFVTLCIIHRYLDFKIGEIWNEIYEEIKLEKLRPVTTDKKALEAITTASENIGKMVASLQSDIIESQACQDMQNEQKVYAKIQATHKQRELANKSWEDFLARTSNAKTLKKAKSLQEKAIEASRYHKRPQNAIFHQTHIKGLNTTVPSGGVVTVESTPARLVGGPLVDTDIALKKLPIRGGALQRVKAVKIVDAPKKSIPT

SEQ ID NO: 17292 - protein, 478 aa, Homo sapiens
  Payload ID: 3481
  Gene Symbol: CFAP69
  Gene Name: cilia and flagella associated protein 69
  ENSP ID: ENSP00000391571
ELQLHAIATLSSVAPLLIEEYMSCQGNARVLAFLEWCESEDPFFSHGNSFHGTGGRGNKFAQMRYSLRLLRAVVYLEDETVNKDLCEKGTIQQMIGIFKNIISKPNEKEEAIVLEIQSDILLILSGLCENHIQRKEIFGTEGVDIVLHVMKTDPRKLQSGLGYNVLLFSTLDSIWCCILGCYPSEDYFLEKEGIFLLLDLLALNQKKFCNLILGIMVEFCDNPKTAAHVNAWQGKKDQTAASLLIKLWRKEEKELGVKRDKNGKIIDFENLPGLSAEDFVTLCIIHRYLDFKIGEIWNEIYEEIKLEKLRPVTTDKKALEAITTASENIGKMVASLQSDIIESQACQDMQNEQKVYAKIQATHKQRELANKSWEDFLARTSNAKTLKKAKSLQEKAIEASRYHKRPQNAIFHQTHIKGLNTTVPSGGVVTVESTPARLVGGPLVDTDIALKKLPIRGGALQRVKAVKIVDAPKKSIPT

SEQ ID NO: 17293 - protein, 515 aa, Homo sapiens
  Payload ID: 3481
  Gene Symbol: CFAP69
  Gene Name: cilia and flagella associated protein 69
  ENSP ID: ENSP00000392365
DGLEEKQLKFVKKLVQCYQNGLPLRDLAQIFKILNLCSGKIKNQPRFIESAYDIIKLCGLPFLKKKVSDEITYAEDTANSIALLGDLMKIPSSELRIQICKCIVDFYHAEPPKKHIPGYQQASSSYKIQMAEVGGLAKTMVQSMTLLENQLVEKLWVLKVLQHLSTSEVNCTIMMKAQAASGICTHLNDPDPSGQLLFRSSEILWNLLEKSSKEEVIQQLSNLECLLALKEVFKNLFMRGFSHYDRQLRNDILVITTIIAQNPEAPMILLIDGKVILALFTYVKKPEKQKIIDWSAAQHEELQLHAIATLSSVAPLLIEEYMSCQGNARVLAFLEWCESEDPFFSHGNSFHGTGGRGNKFAQMRYSLRLLRAVVYLEDETVNKDLCEKGTIQQMIGIFKNIISKPNEKEEAIVLEIQSDILLILSGLCENHIQRKEIFGTEGVDIVLHVMKTDPRKLQSGLGYNVLLFSTLDSIWCCILGCYPSEDYFLEKEGIFLLLDLLAKDQTAASLLIKLW

SEQ ID NO: 17294 - protein, 89 aa, Homo sapiens
  Payload ID: 3481
  Gene Symbol: CFAP69
  Gene Name: cilia and flagella associated protein 69
  ENSP ID: ENSP00000393339
  MOD_RES (1)..(1): Any amino acid
XMVQSMTLLENQLVEKLWVLKVLQHLSTSEVNCTIMMKAQAASGICTHLNDPDPSGQLLFRSSEILWNLLEKSSKEEVIQQLSNLECLL

SEQ ID NO: 17295 - protein, 119 aa, Homo sapiens
  Payload ID: 3481
  Gene Symbol: CFAP69
  Gene Name: cilia and flagella associated protein 69
  ENSP ID: ENSP00000411143
MWTEEAGATAEAQESGIRNKSSSSSQIPVVGVVTEDDEAQDVFKPMDLNRVIKLLEETDKDGLEEKQLKFVKKLVQCYQNGLPLRDLAQIFKILNLCSGKIKNQPRFIESAYDIIKLCG

SEQ ID NO: 17296 - protein, 229 aa, Homo sapiens
  Payload ID: 3481
  Gene Symbol: CFAP69
  Gene Name: cilia and flagella associated protein 69
  Uniprot ID: A5D8W1
  ENSP ID: ENSP00000411234
MWTEEAGATAEAQESGIRNKSSSSSQIPVVGVVTEDDEAQDVFKPMDLNRVIKLLEETDKDGLEEKQLKFVKKLVQCYQNGLPLRDLAQIFKILNLCSGKIKNQPRFIESAYDIIKLCGLPFLKKKVSDEITYAEDTANSIALLGDLMKIPSSELRIQICKCIVDFYHAEPPKKHIPGYQQASSSYKIQMAEVGGLAKTMVQSMTLLENQLVEKLWVLKVLQHLSTSGL

SEQ ID NO: 17297 - protein, 93 aa, Homo sapiens
  Payload ID: 3481
  Gene Symbol: CFAP69
  Gene Name: cilia and flagella associated protein 69
  ENSP ID: ENSP00000414772
  MOD_RES (1)..(1): Any amino acid
XEQKVYAKIQATHKQRELANKSWEDFLARTSNAKTLKVPSGGVVTVESTPARLVGGPLVDTDIALKKLPIRGGALQRVKAVKIVDAPKKSIPT

SEQ ID NO: 17298 - protein, 170 aa, Homo sapiens
  Payload ID: 3481
  Gene Symbol: CFAP69
  Gene Name: cilia and flagella associated protein 69
  ENSP ID: ENSP00000415818
  MOD_RES (1)..(1): Any amino acid
XPSIAVMDVSENIRAKIYAILGKLDFENLPGLSAEDFVTLCIIHRYLDFKIQATHKQRELANKSWEDFLARTSNAKTLKKAKSLQEKAIEASRYHKRPQNAIFHQTHIKGLNTTVPSGGVVTVESTPARLVGGPLVDTDIALKKLPIRGGALQRVKAVKIVDAPKKSIPT

SEQ ID NO: 17299 - protein, 923 aa, Homo sapiens
  Payload ID: 3481
  Gene Symbol: CFAP69
  Gene Name: cilia and flagella associated protein 69
  Uniprot ID: A5D8W1
  ENSP ID: ENSP00000419549
MWTEEAGATAEAQESGIRNKSSSSSQIPVVGVVTEDDEAQDVFKPMDLNRVIKLLEETDKDGLEEKQLKFVKKLVQCYQNGLPLRDLAQIFKILNLCSGKIKNQPRFIESAYDIIKLCGLPFLKKKVSDEITYAEDTANSIALLGDLMKIPSSELRIQICYQQASSSYKIQMAEVGGLAKTMVQSMTLLENQLVEKLWVLKVLQHLSTSEVNCTIMMKAQAASGICTHLNDPDPSGQLLFRSSEILWNLLEKSSKEEVIQQLSNLECLLALKEVFKNLFMRGFSHYDRQLRNDILVITTIIAQNPEAPMIECGFTKDLILFATFNEVKSQNLLVKGLKLSNSYEDFELKKLLFNVIVILCKDLPTVQLLIDGKVILALFTYVKKPEKQKIIDWSAAQHEELQLHAIATLSSVAPLLIEEYMSCQGNARVLAFLEWCESEDPFFSHGNSFHGTGGRGNKFAQMRYSLRLLRAVVYLEDETVNKDLCEKGTIQQMIGIFKNIISKPNEKEEAIVLEIQSDILLILSGLCENHIQRKEIFGTEGVDIVLHVMKTDPRKLQSGLGYNVLLFSTLDSIWCCILGCYPSEDYFLEKEGIFLLLDLLALNQKKFCNLILGIMVEFCDNPKTAAHVNAWQGKKDQTAASLLIKLWRKEEKELGVKRDKNGKIIDTKKPLFTSFQEEQKIIPLPANCPSIAVMDVSENIRAKIYAILGKLDFENLPGLSAEDFVTLCIIHRYLDFKIGEIWNEIYEEIKLEKLRPVTTDKKALEAITTASENIGKMVASLQSDIIESQACQDMQNEQKVYAKIQATHKQRELANKSWEDFLARTSNAKTLKKAKSLQEKAIEASRYHKRPQNAIFHQTHIKGLNTTVPSGGVVTVESTPARLVGGPLVDTDIALKKLPIRGGALQRVKAVKIVDAPKKSIPT

SEQ ID NO: 17300 - protein, 1121 aa, Homo sapiens
  Payload ID: 3482
  Gene Symbol: CFAP70
  Gene Name: cilia and flagella associated protein 70
  Uniprot ID: Q5T0N1
  ENSP ID: ENSP00000310829
MEQVPSAGRLVQITVTEGYDLKGFKGDTPVTFIRAEFNQVVLGDSAKITVSPEGSAKYNFTSSFEFNPEGGITSDDLAHKPVFLTVTEVLPKEKKQKEEKTLILGQAVVDLLPLLEGQSSFQTTVPLHPVQGSPLETPRSSAKQCSLEVKVLVAEPLLTTAQISGGNLLKVTLEAAYSVPESFIPTGPGQNYMVGLQVPSLGEKDYPILFKNGTLKLGGEREPVPRPKKWPIANILAPGANNIPDAFIVGGPYEEEEGELNHPEDSEFRNQAECIKKRIIWDLESRCYLDPSAVVSFQKRIADCRLWPVEITRVPLVTIPKGKAGKTEKTDEEAQLSFHGVAYVNMVPLLYPGVKRIRGAFHVYPYLDSVVHEKTKCLLSLFRDIGHHLIHNNKIGGINSLLSKQAVSKNLKEDKPVKEKDIDGRPRPGDVQAPSIKSQSSDTPLEGEPPLSHNPEGQQYVEAGTYIVLEIQLDKALVPKRMPEELARRVKEMIPPRPPLTRRTGGAQKAMSDYHIQIKNISRAILDEYYRMFGKQVAKLESDMDSETLEEQKCQLSYELNCSGKYFAFKEQLKHAVVKIVRDKYLKTTSFESQEELQTFISELYVFLVDQMHVALNQTMPDDVQGTVATIYTSSEQLQLFAFEAEVNENFEMAAAYYKERLVREPQNLDHWLDYGAFCLLTEDNIKAQECFQKALSLNQSHIHSLLLCGVLAVLLENYEQAEIFFEDATCLEPTNVVAWTLLGLYYEIQNNDIRMEMAFHEASKQLQARMLQAQVTKQKSTGVEDTEERGKRESSLGPWGITNGSATAIKVEAPAGPGAALSILDKFLEESSKLQSDSQEPILTTQTWDPSISQKPSNTFIKEIPTKKEASKCQDSSALLHPGLHYGVSQTTTIFMETIHFLMKVKAVQYVHRVLAHELLCPQGGPSCEYYLVLAQTHILKKNFAKAEEYLQQAAQMDYLNPNVWGLKGHLYFLSGNHSEAKACYERTISFVVDASEMHFIFLRLGLIYLEEKEYEKAKKTYMQACKRSPSCLTWLGLGIACYRLEELTEAEDALSEANALNNYNAEVWAYLALVCLKVGRQLEAEQAYKYMIKLKLKDEALLAEIHTLQETVGFGNPSF

SEQ ID NO: 17301 - protein, 361 aa, Homo sapiens
  Payload ID: 3482
  Gene Symbol: CFAP70
  Gene Name: cilia and flagella associated protein 70
  ENSP ID: ENSP00000343650
MEQVPSAGRLVQITVTEGYDLKGFKGDTPVTFIRAEFNQVVLGDSAKITVSPEGSAKYNFTSSFEFNPEGGITSDDLAHKPVFLTVTEVLPKEKKQKEEKTLILGQAVVDLLPLLEGQSSFQTTVPLHPVQGSPLETPRSSAKQCSLEVKVLVAEPLLTTAQISGGNLLKVTLEAAYSVPESFIPTGPGQNYMVGLQVPSLGEKDYPILFKNGTLNGNHSEAKACYERTISFVVDASEMHFIFLRLGLIYLEEKEYEKAKKTYMQACKRSPSCLTWLGLGIACYRLEELTEAEDALSEANALNNYNAEVWAYLALVCLKVGRQLEAEQAYKYMIKLKLKDEALLAEIHTLQETVGFGNPSF

SEQ ID NO: 17302 - protein, 590 aa, Homo sapiens
  Payload ID: 3482
  Gene Symbol: CFAP70
  Gene Name: cilia and flagella associated protein 70
  ENSP ID: ENSP00000347781
MFGKQVAKLESDMDSETLEEQKCQLSYELNCSGKYFAFKEQLKHAVVKIVRDKYLKTTSFESQEELQTFISELYVFLVDQMHVALNQTMPDDVQGTVATIYTSSEQLQLFAFEAEVNENFEMAAAYYKERLVREPQNLDHWLDYGAFCLLTEDNIKAQECFQKALSLNQSHIHSLLLCGVLAVLLENYEQAEIFFEDATCLEPTNVVAWTLLGLYYEIQNNDIRMEMAFHEASKQLQARMLQAQVTKQKSTGVEDTEERGKRESSLGPWGITNGSATAIKVEAPAGPGAALSILDKFLEESSKLQSDSQEPILTTQTWDPSISQKPSNTFIKEIPTKKEASKCQDSSALLHPGLHYGVSQTTTIFMETIHFLMKVKAVQYVHRVLAHELLCPQGGPSCEYYLVLAQTHILKKNFAKAEEYLQQAAQMDYLNPNVWGLKGHLYFLSGNHSEAKACYERTISFVVDASEMHFIFLRLGLIYLEEKEYEKAKKTYMQACKRSPSCLTWLGLGIACYRLEELTEAEDALSEANALNNYNAEVWAYLALVCLKVGRQLEAEQAYKYMIKLKLKDEALLAEIHTLQETVGFGNPSF

SEQ ID NO: 17303 - protein, 179 aa, Homo sapiens [sequence omitted]

SEQ ID NO: 17304 - protein, 498 aa, Homo sapiens
  Payload ID: 3482
  Gene Symbol: CFAP70
  Gene Name: cilia and flagella associated protein 70
  ENSP ID: ENSP00000409527
QEELQTFISELYVFLVDQMHVALNQTMPDDVQGTVATIYTSSEQLQLFAFEAEVNENFEMAAAYYKERLVREPQNLDHWLDYGAFCLLTEDNIKAQECFQKALSLNQSHIHSLLLCGVLAVLLENYEQAEIFFEDATCLEPTNVVAWTLLGLYYEIQNNDIRMEMAFHEASKQLQARMLQAQVTKQKSTGVEDTEERGKRESSLGPWGITNGSATAIKVEAPAGPGAALSILDKFLEESSKLQSDSQEPILTTQTWDPSISQKPSNTFIKEIPTKKEASKCQDSSALLHPGLHYGVSQTTTIFMETIHFLMKVKAVQYVHRVLAHELLCPQGGPSCEYYLVLAQTHILKKNFAKAEEYLQQAAQMDYLNPNVWGLKGHLYFLSGNHSEAKACYERTISFVVDASEMHFIFLRLGLIYLEEKELEELTEAEDALSEANALNNYNAEVWAYLALVCLKVGRQLEAEQAYKYMIKLKLKDEALLAEIHTLQETVGFGNPSF

SEQ ID NO: 17305 - protein, 308 aa, Homo sapiens
  Payload ID: 3483
  Gene Symbol: CFAP73
  Gene Name: cilia and flagella associated protein 73
  Uniprot ID: A6NFT4
  ENSP ID: ENSP00000333915
MAVPWEEYFRLALQEKLSTKLPEQAEDHVPPVLRLLEKRQELVDADQALQAQKEVFRTKTAALKQRWEQLEQKERELKGSFIRFDKFLQDSEARRNRALRRAAEERHQAGRREVEALRLWTQLQELRREHARLQRRLKRLEPCARLLEQALELLPGFQEVPELVARFDGLAETQAALRLREREQLAELEAARARLQQLRDAWPDEVLAQGQRRAQLQERLEAARERTLQWESKWIQIQNTAAEKTLLLGRSRMAVLNLFQLVCQHQGQPPTLDIEDTEGQLEHVKLFMQDLSAMLAGLGQAEPAAPAS

SEQ ID NO: 17306 - protein, 124 aa, Homo sapiens
  Payload ID: 3483
  Gene Symbol: CFAP73
  Gene Name: cilia and flagella associated protein 73
  ENSP ID: ENSP00000447276
  MOD_RES (1)..(1): Any amino acid
XALRRAAEERHQAGRREVEALRLWTQLQELRREHARLQRRLKRLEPCARLLEQALELLPGESKWIQIQNTAAEKTLLLGRSRMAVLNLFQLVCQHQGQPPTLDIEDTEGQLEHVKLFMQDLSAM

SEQ ID NO: 17307 - protein, 92 aa, Homo sapiens
  Payload ID: 3484
  Gene Symbol: CFAP74
  Gene Name: cilia and flagella associated protein 74
  ENSP ID: ENSP00000367853
EDELLADALLLEDERDELEDPEFDIKCLLQEAEDDVDPGHSSSVKELDTDADKLKKKTAEDRTQAFHLRQNLSALDKMHEEQELFTEKMSVS

SEQ ID NO: 17308 - protein, 1584 aa, Homo sapiens
  Payload ID: 3484
  Gene Symbol: CFAP74
  Gene Name: cilia and flagella associated protein 74
  Uniprot ID: Q9C0B2
  ENSP ID: ENSP00000417061
MEDDGSLLPEDELLADALLLEDERDELEDPEFDIKCLLQEAEDDVDPGHSSSVKELDTDADKLKKKTAEDRTQAFHLRQNLSALDKMHEEQELFTEKMRGELRACRQRRDLIDKQQEAVAAEIATEEEAGNMAAVGRLQAVSRRLFAELENERDLQSRTEAVLKESENTMWHIEIQEGRLEAFRTADREEVEATGRRLQVRAAEQLCREQEALGKVERNRLLRIRKSLNTQKELGLRHQKLLEDARKNHKVAVRFLKASLGRIREQEKKEEMECHEYMRRRMDAVVALKGSISANRDTLRKFQAWDRAKAELAEQRVQAEKKAILAQGRDAFRHLVHQRRRQELEAQKRAFEEEQKLRKQEIISRILKEEAEEEKRKKQHPPTSARHRLTLRDKTWNYISDFCKKTTVPTNTYTLDYEAAAGPGPSRLLEVVSSELIQGDPGASSEEETLAEPEISGLWNEDYKPYQVPKEDVDRKPVGGTKMDKDILERTVERLRSRVVHKQVVWGREFQGRPFNSKPELLHFQDFDIGKVYKKKITLVNTTYTINYCKLVGVEEHLRDFIHVDFDPPGPLSAGMSCEVLVTFKPMINKDLEGNISFLAQTGEFSVPLKCSTKKCSLSLDKELIDFGSYVVGETTSRTITLTNVGGLGTTFKFLPASEPCEMDDSQSALKLSSLLTYEDKSLYDKAATSFSEQQLEGTESSQADMQSRKELEKLDKEQEEEQPAEPERLTTVIPPSEEQTEITLGEVTEGEIGPFSSIKVPIVFTPVVPGDVQARFKVTFKNPQCPTLHFRVVGVAIDVPVWVPKPSVDLKICMYDRLYQDSVLVHTRSKAALRLKFEVCKELRAHLELLPKTGYIQAQSSYSVQLKFLPRHSLPEDAGRYFDKETRVLEAPMTIWVADQNKPVGFTVHAIVTTSDLELSPSEVDFGYCTIYEAIRTEISLHNHSLLPQEFGFVRLPKFVDVQPNDGFGTILPLETLQFCVIFQPTKAEEHRFQLTCKSEINRCFKLSCRAVGVHPPLELSHYQIKFAATALYDTSVATVYVINSHLSMSSPTHSKPRIGSEDASPMGPTSFEFLLPPDSPITISPSVGTVWPGKRCLVQVAFRPVLPEKLIRQEALPLLNKEMETKSFRKNMAPQRKDLHGLSFSVLRAQNRDKLFKVSVPHVLEMRKRELRPSSDEYQAARATLLRAFQAKFDTFVVPCVVASGDIKDRKGSEPLSFSPHNTLYLELWCPTVAPSVVVTSHKGKTIFNFGDVAVGHRSIKKISIQNVSPEDLALDFSLLNPNGPFVLLNHSSLLRAGGTQVLVLSFSPHESILAQETLDIITKRGTLTLTLMGTGVASMITCSIEGSVLNMGYVIAGESVSSGFKLQNNSLLPIKFSMHLDSLSSTRGRGQQQLPQFLSSPSQRTEVVGTQNLNGQSVFSVAPVKGVMDPGKTQDFTVTFSPDHESLYFSDKLQVVLFEKKISHQILLKGAACQHMMFVEGGDPLDVPVESLTAIPVFDPRHREEAEELRPILVTLDYIQFDTDTPAPPATRELQVGCIRTTQPSPKKPDHPLMVSALLQLRGDVKETYKVIFVAQVLTGP

SEQ ID NO: 17309 - protein, 320 aa, Homo sapiens
  Payload ID: 3485
  Gene Symbol: CFAP77
  Gene Name: cilia and flagella associated protein 77
  Uniprot ID: Q6ZQR2
  ENSP ID: ENSP00000343290
MPEARSSGPDLTRWRKQQQPVRRTVSQVCPPPRRPLTVADIRSGMENERLGVVRDSMFQNPLIVKAAGPASVGTSYSVYDSSAVQKVIPSLAGHHIKGGPQAELGKPRERSYSLPGINFNYGLYIRGLDGGVPEAIGRWNVFKQQPTCPHELTRNYIAMNRGAVKAGLVTARENLLYRQLNDIRISDQDDRRMKKEPPPLPPNMTFGIRARPSTPFFDLLQHRYLQLWVQEQKATQKAIKLEKKQKVVLGKLYETRSSQLRKYKPPVKLDTLWHMPHFQKVGRHLDTFPTEADRQRALKAHREECAVRQGTLRMGNYTHP

SEQ ID NO: 17310 - protein, 198 aa, Homo sapiens
  Payload ID: 3485
  Gene Symbol: CFAP77
  Gene Name: cilia and flagella associated protein 77
  ENSP ID: ENSP00000376908
MPEARSSGPDLTRWRKQQQPVRRTVSQVCPPPRRPLTVADIRSGMENERLGVVRDSMFQNPLIVKAELGKPRERSYSLPGINFNYGLYIRGLDGGVPEAIGRWNVFKQQPTCPHELTRNYIAMNRGAVKAGLVTARENLLYRQLNDIRISDQDDRRMKKEPPPLPPNMTFGIRARKLSKQIEKFRSNITNSREPTTWI

SEQ ID NO: 17311 - protein, 284 aa, Homo sapiens
  Payload ID: 3485
  Gene Symbol: CFAP77
  Gene Name: cilia and flagella associated protein 77
  Uniprot ID: Q6ZQR2
  ENSP ID: ENSP00000376909
MPEARSSGPDLTRWRKQQQPVRRTVSQVCPPPRRPLTVADIRSGMENERLGVVRDSMFQNPLIVKAELGKPRERSYSLPGINFNYGLYIRGLDGGVPEAIGRWNVFKQQPTCPHELTRNYIAMNRGAVKAGLVTARENLLYRQLNDIRISDQDDRRMKKEPPPLPPNMTFGIRARPSTPFFDLLQHRYLQLWVQEQKATQKAIKLEKKQKVVLGKLYETRSSQLRKYKPPVKLDTLWHMPHFQKVGRHLDTFPTEADRQRALKAHREECAVRQGTLRMGNYTHP

SEQ ID NO: 17312 - protein, 64 aa, Homo sapiens
  Payload ID: 3486
  Gene Symbol: CFAP97
  Gene Name: cilia and flagella associated protein 97
  ENSP ID: ENSP00000296775
MDQFGDILEGEVDHSFFDSDFEEGKKCETNSVFDKQNDDPKERIDKDTKCKFEHWNANNRKLSY

SEQ ID NO: 17313 - protein, 532 aa, Homo sapiens
  Payload ID: 3486
  Gene Symbol: CFAP97
  Gene Name: cilia and flagella associated protein 97
  Uniprot ID: Q9P2B7
  ENSP ID: ENSP00000409964
MDQFGDILEGEVDHSFFDSDFEEGKKCETNSVFDKQNDDPKERIDKDTKNVNSNTGMQTTENYLTEKGNERNVKFPPEHPVENDVTQTVSSFSLPASSRSKKLCDVTTGLKIHVSIPNRIPKIVKEGEDDYYTDGEESSDDGKKYHVKSKSAKPSTNVKKSIRKKYCKVSSSSSSSLSSSSSGSGTDCLDAGSDSHLSDSSPSSKSSKKHVSGITLLSPKHKYKSGIKSTETQPSSTTPKCGHYPEESEDTVTDVSPLSTPDISPLQSFELGIANDQKVKIKKQENVSQEIYEDVEDLKNNSKYLKAAKKGKEKHEPDVSSKSSSVLDSSLDHRHKQKVLHDTMDLNHLLKAFLQLDKKGPQKHHFDQPSVAPGKNYSFTREEVRQIDRENQRLLKELSRQAEKPGSKSTIPRSADHPPKLYHSALNRQKEQQRIERENLALLKRLEAVKPTVGMKRSEQLMDYHRNMGYLNSSPLSRRARSTLGQYSPLRASRTSSATSGLSCRSERSAVDPSSGHPRRRPKPPNVRTAWL

SEQ ID NO: 17314 - protein, 143 aa, Homo sapiens
  Payload ID: 3486
  Gene Symbol: CFAP97
  Gene Name: cilia and flagella associated protein 97
  ENSP ID: ENSP00000420832
MDQFGDILEGEVDHSFFDSDFEEGKKCETNSVFDKQNDDPKERIDKDTKNVNSNTGMQTTENYLTEKGNERNVKFPPEHPVENDVTQTVSSFSLPASSRSKKLCDVTTGLKIHVSIPNRIPKIVKEGEDDYYTDGEESSDDGK

SEQ ID NO: 17315 - protein, 453 aa, Homo sapiens
  Payload ID: 3486
  Gene Symbol: CFAP97
  Gene Name: cilia and flagella associated protein 97
  Uniprot ID: Q9P2B7
  ENSP ID: ENSP00000423312
MDQFGDILEGEVDHSFFDSDFEEGKKCETNSVFDKQNDDPKERIDKDTKNVNSNTGMQTTENYLTEKGNERNVKFPPEHPVENDVTQTVSSFSLPASSRSKKLCDVTTGLKIHVSIPNRIPKIVKEGEDDYYTDGEESSDDGKKYHVKSKSAKPSTNVKKSIRKKYCKVSSSSSSSLSSSSSGSGTDCLDAGSDSHLSDSSPSSKSSKKHVSGITLLSPKHKYKSGIKSTETQPSSTTPKCGHYPEESEDTVTDVSPLSTPDISPLQSFELGIANDQKVKIKKQENVSQEIYEDVEDLKNNSKYLKAAKKGKEKHEPDVSSKSSSVLDSSLDHRHKQKVLHDTMDLNHLLKAFLQLDKKGPQKHHFDQPSVAPGKNYSFTREEVRQIDRENQRLLKELSRQAEKPGSKSTIPRSADHPPKLYHSALNRQKEQQRIERENLTISLCHPGWSAVT

SEQ ID NO: 17316 - protein, 646 aa, Homo sapiens
  Payload ID: 3487
  Gene Symbol: CFAP99
  Gene Name: cilia and flagella associated protein 99
  ENSP ID: ENSP00000480601
MAYYGKCIETVIEQLDKFTPKRDNPEQFLEAAATSLQALSPQKQSFVLEVLSGCLEYRKLLTVVVDAFYVEDGRLCLRVDHSRFEVICYLATFLLEELGFQLFCNIIKSQPVDKMCKFLRFFFNPLHLCSWIKDEWSLIYEPAHVKENWIDPLMRWQPEVQELINHLEGVSASQSSPLKTKAKVTEPKEFNLTAPRPRTIPAPEPVPVVAKPRPVPQSTYQPPKEQQQLETVKRYNRRKAEELLLRANIEELRCAMPRSCRERVQGSKQQLRLQFPPRIRKTPKLTFYRPDNILVKLNTTAILREGALYQRQVEQELQRVDKLVDGAGDFSEFFEWQKKMQAKDREEQLAASECRRLQGKLSHEEAVLARQSLMQENKQRVEQQKEQMAKLMLQRAERRLREDRSRKELVEQVIEGQKNAKAAQTKLAKGRQQTVQEAIEESRGLLQRRAQAAQEEQRRRCELISQLRALETQPTRKGKLVDLTQIPGYGLEGEMSIVELRERLALLKENQRRKEEEKRDQIIQGKHTKSQELQNMVEQISLCRAAMGRSAALRWEEKKALAAAPAAPSQDERVQQLRRRISERAAERSRQAALLHVSAPRTARPKPRAQLEAQHWLELERSRERRLQALQQGGSGPGPARRLEAA

SEQ ID NO: 17317 - protein, 459 aa, Homo sapiens
  Payload ID: 3488
  Gene Symbol:
  Gene Name: Cilia- and flagella-associated protein 99 [Source:UniProtKB/Swiss-Prot Acc:D6REC4]
  Uniprot ID: D6REC4
  ENSP ID: ENSP00000425050
MPRSCRERVQGSKQQLRLQFPPRIRKTPKLTFYRPDNILVKLNTTAILREGALYQRQVEQELQRVDKLVDGAGDFSEFFEWQKKMQAKDREEQLAASECRRLQGKLSHEEAVLARQSLMQENKQRVEQQKEQMAKLMLQRAERRLREDRSRKELVEQVIEGQKNAKAAQTKLAKGRQQTVQEAIEESRGLLQRRAQAAQEEQRRRCELISQLRALETQPTRKGKLVDLTQIPGYGLEGEMSIVELRERLALLKENQRRKEEEKRDQIIQGKHTKSQELQNMVEQISLCRAAMGRSAALRWEEKKALAAAPAAPSQDERVQQLRRRISERAAERSRQAALLHVSAPRTARPKPRVSPDWWEEPGRLKAGAGWGWRARRAGTGVPGRGWRGDRVRSAAGRYAAAGAGGGGGVPARADAFPGLQAQLEAQHWLELERSRERRLQALQQGGSGPGPARRLEAA

SEQ ID NO: 17318 - protein, 714 aa, Homo sapiens
  Payload ID: 3488
  Gene Symbol:
  Gene Name: Cilia- and flagella-associated protein 99 [Source:UniProtKB/Swiss-Prot Acc:D6REC4]
  ENSP ID: ENSP00000488922
MAYYGKCIETVIEQLDKFTPKRDNPEQFLEAAATSLQALSPQKQSFVLEVLSGCLEYRKLLTVVVDAFYVEDGRLCLRVDHSRFEVICYLATFLLEELGFQLFCNIIKSQPVDKMCKFLRFFFNPLHLCSWIKDEWSLIYEPAHVKENWIDPLMRWQPEVQELINHLEGVSASQSSPLKTKAKVTEPKEFNLTAPRPRTIPAPEPVPVVAKPRPVPQSTYQPPKEQQQLETVKRYNRRKAEELLLRANIEELRCAMPRSCRERVQGSKQQLRLQFPPRIRKTPKLTFYRPDNILVKLNTTAILREGALYQRQVEQELQRVDKLVDGAGDFSEFFEWQKKMQAKDREEQLAASECRRLQGKLSHEEAVLARQSLMQENKQRVEQQKEQMAKLMLQRAERRLREDRSRKELVEQVIEGQKNAKAAQTKLAKGRQQTVQEAIEESRGLLQRRAQAAQEEQRRRCELISQLRALETQPTRKGKLVDLTQIPGYGLEGEMSIVELRERLALLKENQRRKEEEKRDQIIQGKHTKSQELQNMVEQISLCRAAMGRSAALRWEEKKALAAAPAAPSQDERVQQLRRRISERAAERSRQAALLHVSAPRTARPKPRVSPDWWEEPGRLKAGAGWGWRARRAGTGVPGRGWRGDRVRSAAGRYAAAGAGGGGGVPARADAFPGLQAQLEAQHWLELERSRERRLQALQQGGSGPGPARRLEAA

SEQ ID NO: 17319 - protein, 200 aa, Homo sapiens
  Payload ID: 3489
  Gene Symbol: CNTF
  Gene Name: ciliary neurotrophic factor
  Uniprot ID: P26441
  ENSP ID: ENSP00000355370
MAFTEHSPLTPHRRDLCSRSIWLARKIRSDLTALTESYVKHQGLNKNINLDSADGMPVASTDQWSELTEAERLQENLQAYRTFHVLLARLLEDQQVHFTPTEGDFHQAIHTLLLQVAAFAYQIEELMILLEYKIPRNEADGMPINVGDGGLFEKKLWGLKVLQELSQWTVRSIHDLRFISSHQTGIPARGSHYIANNKKM

SEQ ID NO: 17320 - protein, 372 aa, Homo sapiens
  Payload ID: 3490
  Gene Symbol: CNTFR
  Gene Name: ciliary neurotrophic factor receptor
  Uniprot ID: P26992
  ENSP ID: ENSP00000242338
MAAPVPWACCAVLAAAAAVVYAQRHSPQEAPHVQYERLGSDVTLPCGTANWDAAVTWRVNGTDLAPDLLNGSQLVLHGLELGHSGLYACFHRDSWHLRHQVLLHVGLPPREPVLSCRSNTYPKGFYCSWHLPTPTYIPNTFNVTVLHGSKIMVCEKDPALKNRCHIRYMHLFSTIKYKVSISVSNALGHNATAITFDEFTIVKPDPPENVVARPVPSNPRRLEVTWQTPSTWPDPESFPLKFFLRYRPLILDQWQHVELSDGTAHTITDAYAGKEYIIQVAAKDNEIGTWSDWSVAAHATPWTEEPRHLTTEAQAAETTTSTTSSLAPPPTTKICDPGELGSGGGPSAPFLVSVPITLALAAAAATASSLLI

SEQ ID NO: 17321 - protein, 372 aa, Homo sapiens; identical to SEQ ID NO: 17320
  Payload ID: 3490
  Gene Symbol: CNTFR
  Gene Name: ciliary neurotrophic factor receptor
  Uniprot ID: P26992
  ENSP ID: ENSP00000368265

SEQ ID NO: 17322 - protein, 256 aa, Homo sapiens
  Payload ID: 3490
  Gene Symbol: CNTFR
  Gene Name: ciliary neurotrophic factor receptor
  ENSP ID: ENSP00000388082
MAAPVPWACCAVLAAAAAVVYAQRHSPQEAPHVQYERLGSDVTLPCGTANWDAAVTWRVNGTDLAPDLLNGSQLVLHGLELGHSGLYACFHRDSWHLRHQVLLHVGLPPREPVLSCRSNTYPKGFYCSWHLPTPTYIPNTFNVTVLHGSKIMVCEKDPALKNRCHIRYMHLFSTIKYKVSISVSNALGHNATAITFDEFTIVKPDPPENVVARPVPSNPRRLEVTWQTPSTWPDPESFPLKFFLRYRPLILDQWQH

SEQ ID NO: 17323 - protein, 372 aa, Homo sapiens; identical to SEQ ID NO: 17320
  Payload ID: 3490
  Gene Symbol: CNTFR
  Gene Name: ciliary neurotrophic factor receptor
  Uniprot ID: P26992
  ENSP ID: ENSP00000480451

SEQ ID NO: 17324 - protein, 2017 aa, Homo sapiens
  Payload ID: 3491
  Gene Symbol: CROCC
  Gene Name: ciliary rootlet coiled-coil, rootletin
  Uniprot ID: Q5TZA2
  ENSP ID: ENSP00000364691
MSLGLAGAQEVELTLETVIQTLESSVLCQEKGLGARDLAQDAQITSLPALIREIVTRNLSQPESPVLLPATEMASLLSLQEENQLLQQELSRVEDLLAQSRAERDELAIKYNAVSERLEQALRLEPGELETQEPRGLVRQSVELRRQLQEEQASYRRKLQAYQEGQQRQAQLVQRLQGKILQYKKRCSELEQQLLERSGELEQQRLRDTEHSQDLESALIRLEEEQQRSASLAQVNAMLREQLDQAGSANQALSEDIRKVTNDWTRCRKELEHREAAWRREEESFNAYFSNEHSRLLLLWRQVVGFRRLVSEVKMFTERDLLQLGGELARTSRAVQEAGLGLSTGLRLAESRAEAALEKQALLQAQLEEQLRDKVLREKDLAQQQMQSDLDKADLSARVTELGLAVKRLEKQNLEKDQVNKDLTEKLEALESLRLQEQAALETEDGEGLQQTLRDLAQAVLSDSESGVQLSGSERTADASNGSLRGLSGQRTPSPPRRSSPGRGRSPRRGPSPACSDSSTLALIHSALHKRQLQVQDMRGRYEASQDLLGTLRKQLSDSESERRALEEQLQRLRDKTDGAMQAHEDAQREVQRLRSANELLSREKSNLAHSLQVAQQQAEELRQEREKLQAAQEELRRQRDRLEEEQEDAVQDGARVRRELERSHRQLEQLEGKRSVLAKELVEVREALSRATLQRDMLQAEKAEVAEALTKAEAGRVELELSMTKLRAEEASLQDSLSKLSALNESLAQDKLDLNRLVAQLEEEKSALQGRQRQAEQEATVAREEQERLEELRLEQEVARQGLEGSLRVAEQAQEALEQQLPTLRHERSQLQEQLAQLSRQLSGREQELEQARREAQRQVEALERAAREKEALAKEHAGLAVQLVAAEREGRTLSEEATRLRLEKEALEGSLFEVQRQLAQLEARREQLEAEGQALLLAKETLTGELAGLRQQIIATQEKASLDKELMAQKLVQAEREAQASLREQRAAHEEDLQRLQREKEAAWRELEAERAQLQSQLQREQEELLARLEAEKEELSEEIAALQQERDEGLLLAESEKQQALSLKESEKTALSEKLMGTRHSLATISLEMERQKRDAQSRQEQDRSTVNALTSELRDLRAQREEAAAAHAQEVRRLQEQARDLGKQRDSCLREAEELRTQLRLLEDARDGLRRELLEAQRKLRESQEGREVQRQEAGELRRSLGEGAKEREALRRSNEELRSAVKKAESERISLKLANEDKEQKLALLEEARTAVGKEAGELRTGLQEVERSRLEARRELQELRRQMKMLDSENTRLGRELAELQGRLALGERAEKESRRETLGLRQRLLKGEASLEVMRQELQVAQRKLQEQEGEFRTRERRLLGSLEEARGTEKQQLDHARGLELKLEAARAEAAELGLRLSAAEGRAQGLEAELARVEVQRRAAEAQLGGLRSALRRGLGLGRAPSPAPRPVPGSPARDAPAEGSGEGLNSPSTLECSPGSQPPSPGPATSPASPDLDPEAVRGALREFLQELRSAQRERDELRTQTSALNRQLAEMEAERDSATSRARQLQKAVAESEEARRSVDGRLSGVQAELALQEESVRRSERERRATLDQVATLERSLQATESELRASQEKISKMKANETKLEGDKRRLKEVLDASESRTVKLELQRRSLEGELQRSRLGLSDREAQAQALQDRVDSLQRQVADSEVKAGTLQLTVERLNGALAKVEESEGALRDKVRGLTEALAQSSASLNSTRDKNLHLQKALTACEHDRQVLQERLDAARQALSEARKQSSSLGEQVQTLRGEVADLELQRVEAEGQLQQLREVLRQRQEGEAAALNTVQKLQDERRLLQERLGSLQRALAQLEAEKREVERSALRLEKDRVALRRTLDKVEREKLRSHEDTVRLSAEKGRLDRTLTGAELELAEAQRQIQQLEAQVVVLEQSHSPAQLEVDAQQQQLELQQEVERLRSAQAQTERTLEARERAHRQRVRGLEEQVSTLKGQLQQELRRSSAPFSPPSGPPEK

SEQ ID NO: 17325 - protein, 1311 aa, Homo sapiens
  Payload ID: 3491
  Gene Symbol: CROCC
  Gene Name: ciliary rootlet coiled-coil, rootletin
  ENSP ID: ENSP00000402626
  MOD_RES (1)..(1): Any amino acid
XREIVTRNLSQPESPVLLPATEMASLLSLQEENQLLQQELSRVEDLLAQSRAERDELAIKYNAVSERDTEHSQDLESALIRLEEEQQRSASLAQVNAMLREQLDQAGSANQALSEDIRKVTNDWTRCRKELEHREAAWRREEESFNAYFSNEHSRLLLLWRQVVGFRRLVSEVKMFTERDLLQLGGELARTSRAVQEAGLGLSTGLRLAESRAEAALEKQALLQAQLEEQLRDKVLREKDLAQQQMQSDLDKADLSARVTELGLAVKRLEKQNLEKDQVNKDLTEKLEALESLRLQEQAALETEDGEGLQQTLRDLAQAVLSDSESGVQLSGSERTADASNGSLRGLSGQRTPSPPRRSSPGRGRSPRRGPSPACSDSSTLALIHSALHKRQLQVQDMRGRYEASQDLLGTLRKQLSDSESERRALEEQLQRLRDKTDGAMQAHEDAQREVQRLRSANELLSREKSNLAHSLQVAQQQAEELRQEREKLQAAQEELRRQRDRLEEEQEDAVQDGARVRRELERSHRQLEQLEGKRSVLAKELVEVREALSRATLQRDMLQAEKAEVAEALTKAEAGRVELELSMTKLRAEEASLQDSLSKLSALNESLAQDKLDLNRLVAQLEEEKSALQGRQRQAEQEATVAREEQERLEELRLEQEVARQGLEGSLRVAEQAQEALEQQLPTLRHERSQLQEQLAQLSRQLSGREQELEQARREAQRQVEALERAAREKEALAKEHAGLAVQLVAAEREGRTLSEEATRLRLEKEALEGSLFEVQRQLAQLEARREQLEAEGQALLLAKETLTGELAGLRQQIIATQEKASLDKELMAQKLVQAEREAQASLREQRAAHEEDLQRLQREKEAAWRELEAERAQLQSQLQREQEELLARLEAEKEELSEEIAALQQERDEGLLLAESEKQQALSLKESEKTALSEKLMGTRHSLATISLEMERQKRDAQSRQEQDRSTVNALTSELRDLRAQREEAAAAHAQEVRRLQEQARDLGKQRDSCLREAEELRTQLRLLEDARDGLRRELLEAQRKLRESQEGREVQRQEAGELRRSLGEGAKEREALRRSNEELRSAVKKAESERISLKLANEDKEQKLALLEEARTAVGKEAGELRTGLQEVERSRLEARRELQELRRQMKMLDSENTRLGRELAELQGRLALGERAEKESRRETLGLRQRLLKGEASLEVMRQELQVAQRKLQEQEGEFRTRERRLLGSLEEARGTEKQQLDHARGLELKLEAARAEAAELGLRLSAAEGRAQGLEAELARVEVQRRAAEAQLGGLRSALRRGLGLGRAPS

SEQ ID NO: 17326 - protein, 204 aa, Homo sapiens
  Payload ID: 3491
  Gene Symbol: CROCC
  Gene Name: ciliary rootlet coiled-coil, rootletin
  ENSP ID: ENSP00000478281
LRDKVLREKDLAQQQMQSDLDKADLSARVTELGLAVKRLEKQNLEKDQVNKDLTEKLEALAVLSDSESGVQLSGSERTADASNGSLRGLSGQRTPSPPRRSSPGRGRSPRRGPSPACSDSSTLALIHSALHKRQLQVQDMRGRYEASQDLLGTLRKQLSDSESERRALEEQLQRLRDKTDGAMQAHEDAQREVQRLRSANELLS

SEQ ID NO: 17327 - protein, 838 aa, Homo sapiens
  Payload ID: 3491
  Gene Symbol: CROCC
  Gene Name: ciliary rootlet coiled-coil, rootletin
  ENSP ID: ENSP00000480016
  MOD_RES (1)..(1): Any amino acid
XPATSPSLRAQLEQALRLEPGELETQEPRGLVRQSVELRRQLQEEQASYRRKLQAYQEGQQRQAQLVQRLQGKILQYKKRCSELEQQLLERSGELEQQRLRDTEHSQDLESALIRLEEEQQRSASLAQVNAMLREQLDQAGSANQALSEDIRKVTNDWTRCRKELEHREAAWRREEESFNAYFSNEHSRLLLLWRQVVGFRRLVSEVKMFTERDLLQLGGELARTSRAVQEAGLGLSTGLRLAESRAEAALEKQALLQAQLEEQLRDKVLREKDLAQQQMQSDLDKADLSARVTELGLAVKRLEKQNLEKDQVNKDLTEKLEALESLRLQEQAALETEDGEGLQQTLRDLAQAVLSDSESGVQLSGSERTADASNGSLRGLSGQRTPSPPRRSSPGRGRSPRRGPSPACSDSSTLALIHSALHKRQLQVQDMRGRYEASQDLLGTLRKQLSDSESERRALEEQLQRLRDKTDGAMQAHEDAQREVQRLRSANELLSREKSNLAHSLQVAQQQAEELRQEREKLQAAQEELRRQRDRLEEEQEDAVQDGARVRRELERSHRQLEQLEGKRSVLAKELVEVREALSRATLQRDMLQAEKAEVAEALTKAEAGRVELELSMTKLRAEEASLQDSLSKLSALNESLAQDKLDLNRLVAQLEEEKSALQGRQRQAEQEATVAREEQERLEELRLEQEVARQGLEGSLRVAEQAQEALEQQLPTLRHERSQLQEQLAQEAAWRELEAERAQLQSQLQREQEELLARLEAEKEELSEEIAALQQERDEGLLLAESEKQQALSLKESEKTALSEKLMGTRHSLATISLEMERQKRDAQSRQEQDRV

SEQ ID NO: 17328 - protein, 1655 aa, Homo sapiens
  Payload ID: 3492
  Gene Symbol: CROCC2
  Gene Name: ciliary rootlet coiled-coil, rootletin family member 2
  Uniprot ID: H7BZ55
  ENSP ID: ENSP00000397968
MSSASSEPGNGDASQQPLLGLDTVIQRLEDTILSPTASREDRALTVRGEGRQASPTPVPTRIREIVAGSLSEEPPQAGVQEPTATVARVQEENELLQEELTRLGDLLAQASAERDELASRCRVVSEQLQARLETTEAQLRRSELEHSVDLEEALGRLEAAEERSTGLCQVNALLREQLEHMKKANDALGRELAGMTGSVQRLQGELELRRWAQRQTRSGGLGQPRDLLLLWRQAVVLGTDLAELRVATERGLADLQADTARTARRLHTACLNLDSNLRLSASSTASTLGQQLRDKAGEMLQLQGRWDAEKVALQARLSEQTLLVEKLTEQNEQKAKTIAALRTDLQNLVAQEDARCLELAGSSITELGEPRRPLRSPQRATSPHQGASPPHICSPATLDPALQAMRAAIERRWRREQELCLQLKSSQALVASLQEQLSESRRELWAAQKLQQERAREQAREREALRGQLEAQRLEVQQCRASCKLLGREKAALEMVVEELKGKADAADAEKQGLEAEAAELQRSLLLQAERREELALRRERSCRALETSQGRLQQLEEKVSGLREELASVREALSTAQLQRDVVESEREGLRSALARAECSNADLELLVRRLKSEGVEQRDSLAAMAALMEGLAQDKSALNHLALQLEQERDQLREQRKTLEQERARAGEQLAQAEQQLALERAERRGLQQACGRLEQRQEQLEGQAALLGREKAQLQEQVGQVTCQKQALEEQLAQSLQDQEAQMGTLQQALQGKDALSEERAQLLAKQEALERQGRLAAEEAADLRVERDSLESSLLEAQQLATKLQEQLEEEARSAGLARQALQVEMEQLQSDWEVQEMKLRQDTVRLQRQVAQQEREAQRALESQALAHREALAQLQREKETLSLTLAEEKEVARCQLEQEKELVTKSAAEREALKGEIQSLKQERDESLLQLEHKMQQVMALSLKETERSLLSEELSRARRTLERVQQEAQSQQEQAQATISATTEELKALQAQFEDAITAHQRETTALRESLQDLAAERGDVEREAERLRAQLTVAQEGLAALRQELQGVEESREGLHREAQEARRALSDEAREKDVLLLFNSELRATICRAEQEKASFKRSKEEKEQKLLILEEAQAALQQEASALRAHLWELEQAGGDARQELRELHRQVRTLKAENQRRSGEAHELQAQCSQEVLELRRQAAKAEAKHEGARKEVLGLQRKLAEVEAAGEAHGQRLQEHLRESRGAEQTLRAELHSVTRKLQEASGVADALQARLDQACHRIHSLEQELAQAEGARQDAEAQLGRLCSTLRRGLGLQRQSPWASPEQPGSPTKGSDSSQALPGQQGTSPPARPHSPLRWPSPTPGGRSSELMDVATVQDILRDFVQKLREAQRERDDSRIQMATLSSRLSEAECRCARAQSRVGQLQKALAEAEEGQRRVEGALSSARAARALQKEALRRLELEHLASVRAAGQEKRRLQEQLETLRQALEESRRHSQGLAKQGKLLEEQLTNLEHRCQKAEVSLEPLRQMEQETLKREEDVARLGAEKEQLDQSLNSLHQEVDGALRQNQQLQAQMTEMEQAHTQRLQDLTAQHQRDLATEAERLHGARPQATQALESQEWTHQQQVKVLEEQVASLKEQLDQEVQWRQQAHLGQAFQTGHAQRD

SEQ ID NO: 17329 - protein, 387 aa, Homo sapiens
  Payload ID: 3493
  Gene Symbol: CATIP
  Gene Name: ciliogenesis associated TTC17 interacting protein
  Uniprot ID: Q7Z7H3
  ENSP ID: ENSP00000289388
MSSKVYSTGSRAKDHQPSGPECLPLPEANAEAIDFLSSLHKEELQMLFFSETLAMVSDTGEPQGELTIEVQRGKYQEKLGMLTYCLFVHASSRGFLDKMLCGNSLLGYLSEKLELMEQHSQDFIKFLILPMERKMSLLKQDDQLAVTRSIKEGEEVKTGVTSFPWSSIKGFISEAANLVLLRVMAWRRMVPSNARFLTLDTEGKLCYLTYQNLGFQTIQVDHQQAEVFIVEQTVHAEEGIPMSCQYYLLSDGHLAKRIQVGSPGCCIITKMPILREEDEIEPRPVFEKKPLVWEEDMELYSKFLDRKEELRLGHASYLRQHPEAHALISDFLLFLLLRQPEDVVTFAAEFFGPFDPWRPSSPALGSSHRPNPFRSLEPEGDARSGAA

SEQ ID NO: 17330 - protein, 1203 aa, Homo sapiens
  Payload ID: 3494
  Gene Symbol: CGN
  Gene Name: cingulin
  Uniprot ID: Q9P2M7
  ENSP ID: ENSP00000271636
MEQAPNMAEPRGPVDHGVQIRFITEPVSGAEMGTLRRGGRRPAKDARASTYGVAVRVQGIAGQPFVVLNSGEKGGDSFGVQIKGANDQGASGALSSDLELPENPYSQVKGFPAPSQSSTSDEEPGAYWNGKLLRSHSQASLAGPGPVDPSNRSNSMLELAPKVASPGSTIDTAPLSSVDSLINKFDSQLGGQARGRTGRRTRMLPPEQRKRSKSLDSRLPRDTFEERERQSTNHWTSSTKYDNHVGTSKQPAQSQNLSPLSGFSRSRQTQDWVLQSFEEPRRSAQDPTMLQFKSTPDLLRDQQEAAPPGSVDHMKATIYGILREGSSESETSVRRKVSLVLEKMQPLVMVSSGSTKAVAGQGELTRKVEELQRKLDEEVKKRQKLEPSQVGLERQLEEKTEECSRLQELLERRKGEAQQSNKELQNMKRLLDQGEDLRHGLETQVMELQNKLKHVQGPEPAKEVLLKDLLETRELLEEVLEGKQRVEEQLRLRERELTALKGALKEEVASRDQEVEHVRQQYQRDTEQLRRSMQDATQDHAVLEAERQKMSALVRGLQRELEETSEETGHWQSMFQKNKEDLRATKQELLQLRMEKEEMEEELGEKIEVLQRELEQARASAGDTRQVEVLKKELLRTQEELKELQAERQSQEVAGRHRDRELEKQLAVLRVEADRGRELEEQNLQLQKTLQQLRQDCEEASKAKMVAEAEATVLGQRRAAVETTLRETQEENDEFRRRILGLEQQLKETRGLVDGGEAVEARLRDKLQRLEAEKQQLEEALNASQEEEGSLAAAKRALEARLEEAQRGLARLGQEQQTLNRALEEEGKQREVLRRGKAELEEQKRLLDRTVDRLNKELEKIGEDSKQALQQLQAQLEDYKEKARREVADAQRQAKDWASEAEKTSGGLSRLQDEIQRLRQALQASQAERDTARLDKELLAQRLQGLEQEAENKKRSQDDRARQLKGLEEKVSRLETELDEEKNTVELLTDRVNRGRDQVDQLRTELMQERSARQDLECDKISLERQNKDLKTRLASSEGFQKPSASLSQLESQNQLLQERLQAEEREKTVLQSTNRKLERKVKELSIQIEDERQHVNDQKDQLSLRVKALKRQVDEAEEEIERLDGLRKKAQREVEEQHEVNEQLQARIKSLEKDSWRKASRSAAESALKNEGLSSDEEFDSVYDPSSIASLLTESNLQTSSC

SEQ ID NO: 17331 - protein, 131 aa, Homo sapiens
  Payload ID: 3494
  Gene Symbol: CGN
  Gene Name: cingulin
  ENSP ID: ENSP00000390686
  MOD_RES (1)..(1): Any amino acid
XQDPTMLQFKSTPDLLRDQQEAAPPGSVDHMKATIYGILREGSSESETSVRRKVSLVLEKMQPLVAVAGQGELTRKVEELQRKLDEEVKKRQKLEPSQVGLERQLEEKTEECSRLQELLERRKGEAQQSNK

SEQ ID NO: 17332 - protein, 291 aa, Homo sapiens
  Payload ID: 3494
  Gene Symbol: CGN
  Gene Name: cingulin
  ENSP ID: ENSP00000410836
MEQAPNMAEPRGPVDHGVQIRFITEPVSGAEMGTLRRGGRRPAKDARASTYGVAVRVQGIAGQPFVVLNSGEKGGDSFGVQIKGANDQGASGALSSDLELPENPYSQVKGFPAPSQSSTSDEEPGAYWNGKLLRSHSQASLAGPGPVDPSNRSNSMLELAPKVASPGSTIDTAPLSSVDSLINKFDSQLGGQARGRTGRRTRMLPPEQRKRSKSLDSRLPRDTFEERERQSTNHWTSSTKYDNHVGTSKQPAQSQNLSPLSGFSRSRQTQDWVLQSFEEPRRSAQDPTMLQ

SEQ ID NO: 17333 - protein, 170 aa, Homo sapiens
  Payload ID: 3494
  Gene Symbol: CGN
  Gene Name: cingulin
  ENSP ID: ENSP00000422299
MEQAPNMAEPRGPVDHGVQIRFITEPVSGAEMGTLRRGGRRPAKDARASTYGVAVRVQGIAGQPFVVLNSGEKGGDSFGVQIKGANDQGASGALSSDLELPENPYSQVKGFPAPSQSSTSDEEPGAYWNGKLLRSHSQASLAGPGPVDPSNRSNSMLELAPKVASPGSTI

SEQ ID NO: 17334 - protein, 170 aa, Homo sapiens; identical to SEQ ID NO: 17333
  Payload ID: 3494
  Gene Symbol: CGN
  Gene Name: cingulin
  ENSP ID: ENSP00000425532

SEQ ID NO: 17335 - protein, 1302 aa, Homo sapiens
  Payload ID: 3495
  Gene Symbol: CGNL1
  Gene Name: cingulin-like 1
  Uniprot ID: Q0VF96
  ENSP ID: ENSP00000281282
MELYFGEYQHVQQEYGVHLRLASDDTQKSRSSQNSKAGSYGVSIRVQGIDGHPYIVLNNTERCLAGTSFSENGPPFPPPVINNLPLHSSNGSVPKENSEELQLPENPYAQPSPIRNLKQPLLHEGKNGVLDRKDGSVKPSHLLNFQRHPELLQPYDPEKNELNLQNHQPSESNWLKTLTEEGINNKKPWTCFPKPSNSQPTSPSLEDPAKSGVTAIRLCSSVVIEDPKKQTSVCVNVQSCTKERVGEEALFTSGRPLTAHSPHAHPETKKTRPDVLPFRRQDSAGPVLDGARSRRSSSSSTTPTSANSLYRFLLDDQECAIHADNVNRHENRRYIPFLPGTGRDIDTGSIPGVDQLIEKFDQKPGLQRRGRSGKRNRINTDDRKRSRSVDSAFPFGLQGNSEYLIEFSRNLGKSSEHLLRPSQVCPQRPLSQERRGKQSVGRTFAKLQGAAHGASCAHSRPPQPNIDGKVLETEGSQESTVIRAPSLGAQSKKEEEVKTATATLMLQNRATATSPDSGAKKISVKTFPSASNTQATPDLLKGQQELTQQTNEETAKQILYNYLKEGSTDNDDATKRKVNLVFEKIQTLKSRAAGSAQGNNQACNSTSEVKDLLEQKSKLTIEVAELQRQLQLEVKNQQNIKEERERMRANLEELRSQHNEKVEENSTLQQRLEESEGELRKNLEELFQVKMEREQHQTEIRDLQDQLSEMHDELDSAKRSEDREKGALIEELLQAKQDLQDLLIAKEEQEDLLRKRERELTALKGALKEEVSSHDQEMDKLKEQYDAELQALRESVEEATKNVEVLASRSNTSEQDQAGTEMRVKLLQEENEKLQGRSEELERRVAQLQRQIEDLKGDEAKAKETLKKYEGEIRQLEEALVHARKEEKEAVSARRALENELEAAQGNLSQTTQEQKQLSEKLKEESEQKEQLRRLKNEMENERWHLGKTIEKLQKEMADIVEASRTSTLELQNQLDEYKEKNRRELAEMQRQLKEKTLEAEKSRLTAMKMQDEMRLMEEELRDYQRAQDEALTKRQLLEQTLKDLEYELEAKSHLKDDRSRLVKQMEDKVSQLEMELEEERNNSDLLSERISRSREQMEQLRNELLQERAARQDLECDKISLERQNKDLKSRIIHLEGSYRSSKEGLVVQMEARIAELEDRLESEERDRANLQLSNRRLERKVKELVMQVDDEHLSLTDQKDQLSLRLKAMKRQVEEAEEEIDRLESSKKKLQRELEEQMDMNEHLQGQLNSMKKDLRLKKLPSKVLDDMDDDDDLSTDGGSLYEAPVSYTFSKDSTVASQI

SEQ ID NO: 17336 - protein, 385 aa, Homo sapiens
  Payload ID: 3496
  Gene Symbol: CIART
  Gene Name: circadian associated repressor of transcription
  Uniprot ID: Q8N365
  ENSP ID: ENSP00000290363
MDSPSSVSSYSSYSLSSSFPTSPVNSDFGFPSDSEREDKGAHGPRPDTVGQRGGSRPSPGPIRCRHRSKVSGNQHTPSHPKQRGSASPMAGSGAKRSRDGELETSLNTQGCTTEGDLLFAQKCKELQGFIPPLTDLLNGLKMGRFERGLSSFQQSVAMDRIQRIVGVLQKPQMGERYLGTLLQVEGMLKTWFPQIAAQKSSLGGGKHQLTKHFPSHHSDSAASSPASPMEKMDQTQLGHLALKPKQPWHLTQWPAMNLTWIHTTPICNPPLSSPGTISFSHGPLGTGTGIGVILFLQHGVQPFTHSAPTTPVPPTTASPVIPGEPMKLSGEGPRCYSLPVTLPSDWSYTLSPPSLPTLARKMTIGHREQQRSHPPVAADAHLLNL

SEQ ID NO: 17337 - protein, 297 aa, Homo sapiens
  Payload ID: 3496
  Gene Symbol: CIART
  Gene Name: circadian associated repressor of transcription
  ENSP ID: ENSP00000358090
MAGSGAKRSRDGELETSLNTQGCTTEGDLLFAQKCKELQGFIPPLTDLLNGLKMGRFERGLSSFQQSVAMDRIQRIVGVLQKPQMGERYLGTLLQVEGMLKTWFPQIAAQKSSLGGGKHQLTKHFPSHHSDSAASSPASPMEKMDQTQLGHLALKPKQPWHLTQWPAMNLTWIHTTPICNPPLSSPGTISFSHGPLGTGTGIGVILFLQHGVQPFTHSAPTTPVPPTTASPVIPGEPMKLSGEGPRCYSLPVTLPSDWSYTLSPPSLPTLARKMTIGHREQQRSHPPVAADAHLLNL

SEQ ID NO: 17338 - protein, 385 aa, Homo sapiens; identical to SEQ ID NO: 17336
  Payload ID: 3496
  Gene Symbol: CIART
  Gene Name: circadian associated repressor of transcription
  Uniprot ID: Q8N365
  ENSP ID: ENSP00000358091

SEQ ID NO: 17339 - protein, 238 aa, Homo sapiens
  Payload ID: 3496
  Gene Symbol: CIART
  Gene Name: circadian associated repressor of transcription
  ENSP ID: ENSP00000398291
MAGSGAKRSRDGELETSLNTQGCTTEGDLLFAQKCKELQGFIPPLTDLLNGLKMGRFERGLSSFQQSVAMDRIQRIVGVLQKPQMGERYLGTLLQVEGMLKTWFPQIAAQKSSLGGGKHQLTKHFPSHHSDSAASSPASPMEKMDQTQLGHLALKPKQPWHLTQWPAMNLTWIHTTPICNPPLSSPGTISFSHGPLGTGTGIGVILFLQHGVQPFTHSAPTTPVPPTTASPVIPGEPM

SEQ ID NO: 17340 - protein, 225 aa, Homo sapiens
  Payload ID: 3496
  Gene Symbol: CIART
  Gene Name: circadian associated repressor of transcription
  ENSP ID: ENSP00000406199
MAGSGAKRSRDGELETSLNTQGCTTEGDLLFAQKCKELQGFIPPLTDLLNGLKMGRFERGLSSFQQSVAMDRIQRIVGVLQKPQMGERYLGTLLQVEGMLKTWFPQIAAQKSSLGGGKHQLTKHFPSHHSDSAASSPASPMEKMDQTQLGHLALKPKQPWHLTQWPAMNLTWIHTTPICNPPLSSPGTISFSHGPLGTGTGIGVILFLQHGVQPFTHSAPTTPVP

SEQ ID NO: 17341 - protein, 686 aa, Homo sapiens
  Payload ID: 3497
  Gene Symbol: CIRH1A
  Gene Name: cirrhosis, autosomal recessive 1A (cirhin)
  Uniprot ID: Q969X6
  ENSP ID: ENSP00000327179
MGEFKVHRVRFFNYVPSGIRCVAYNNQSNRLAVSRTDGTVEIYNLSANYFQEKFFPGHESRATEALCWAEGQRLFSAGLNGEIMEYDLQALNIKYAMDAFGGPIWSMAASPSGSQLLVGCEDGSVKLFQITPDKIQFERNFDRQKSRILSLSWHPSGTHIAAGSIDYISVFDVKSGSAVHKMIVDRQYMGVSKRKCIVWGVAFLSDGTIISVDSAGKVQFWDSATGTLVKSHLIANADVQSIAVADQEDSFVVGTAEGTVFHFQLVPVTSNSSEKQWVRTKPFQHHTHDVRTVAHSPTALISGGTDTHLVFRPLMEKVEVKNYDAALRKITFPHRCLISCSKKRQLLLFQFAHHLELWRLGSTVATGKNGDTLPLSKNADHLLHLKTKGPENIICSCISPCGSWIAYSTVSRFFLYRLNYEHDNISLKRVSKMPAFLRSALQILFSEDSTKLFVASNQGALHIVQLSGGSFKHLHAFQPQSGTVEAMCLLAVSPDGNWLAASGTSAGVHVYNVKQLKLHCTVPAYNFPVTAMAIAPNTNNLVIAHSDQQVFEYSIPDKQYTDWSRTVQKQGFHHLWLQRDTPITHISFHPKRPMHILLHDAYMFCIIDKSLPLPNDKTLLYNPFPPTNESDVIRRRTAHAFKISKIYKPLLFMDLLDERTLVAVERPLDDIIAQLPPPIKKKKFGT

SEQ ID NO: 17342 - protein, 571 aa, Homo sapiens
  Payload ID: 3497
  Gene Symbol: CIRH1A
  Gene Name: cirrhosis, autosomal recessive 1A (cirhin)
  Uniprot ID: Q969X6
  ENSP ID: ENSP00000339164
MGEFKVHRVRFFNYVPSGIRCVAYNNQSNRLAVSRTDGTVEIYNLSANYFQEKFFPGHESRATEALCWAEGQRLFSAGLNGEIMEYDLQALNIKYAMDAFGGPIWSMAASPSGSQLLVGCEDGSVKLFQITPDKIQFERNFDRQKSRILSLSWHPSGTHIAAGSIDYISVFDVKSGSAVHKMIVDRQYMGVSKRKCIVWGVAFLSDGTIISVDSAGKVQFWDSATGTLVKSHLIANADVQSIAVADQEDSFVVGTAEGTVFHFQLVPVTSNSSEKQWVRTKPFQHHTHDVRTVAHSPTALISGGTDTHLVFRPLMEKVEVKNYDAALRKITFPHRCLISCSKKRQLLLFQFAHHLELWRLGSTVATGTVEAMCLLAVSPDGNWLAASGTSAGVHVYNVKQLKLHCTVPAYNFPVTAMAIAPNTNNLVIAHSDQQVFEYSIPDKQYTDWSRTVQKQGFHHLWLQRDTPITHISFHPKRPMHILLHDAYMFCIIDKSLPLPNDKTLLYNPFPPTNESDVIRRRTAHAFKISKIYKPLLFMDLLDERTLVAVERPLDDIIAQLPPPIKKKKFGT

SEQ ID NO: 17343 - protein, 148 aa, Homo sapiens
  Payload ID: 3497
  Gene Symbol: CIRH1A
  Gene Name: cirrhosis, autosomal recessive 1A (cirhin)
  ENSP ID: ENSP00000455269
MGEFKVHRVRFFNYVPSGIRCVAYNNQSNRLAVSRTDGTVEIYNLSANYFQEKFFPGHESRATEALCWAEGQRLFSAGLNGEIMEYDLQALNIKYAMDAFGGPIWSMAASPSGSQLLVGCEDGSVKLFQITPDKIQFERNFDRQKSRI

SEQ ID NO: 17344 - protein, 211 aa, Homo sapiens
  Payload ID: 3497
  Gene Symbol: CIRH1A
  Gene Name: cirrhosis, autosomal recessive 1A (cirhin)
  ENSP ID: ENSP00000456317
KNADHLLHLKTKGPENIICSCISPCGSWIAYSTVSRFFLYRLNYEHDNISLKRVSKMPAFLRSALQILFSEDSTKLFVASNQGALHIVQLSGGSFKHLHAFQPQSGTVEAMCLLAVSPDGNWLAASGTSAGVHVYNVKQLKLHCTVPAYNFPVTAMAIAPNTNNLVIAHSDQQPLLFMDLLDERTLVAVERPLDDIIAQLPPPIKKKKFGT

SEQ ID NO: 17345 - protein, 625 aa, Homo sapiens
  Payload ID: 3497
  Gene Symbol: CIRH1A
  Gene Name: cirrhosis, autosomal recessive 1A (cirhin)
  Uniprot ID: Q969X6
  ENSP ID: ENSP00000456622
MGEFKVHRVRFFNYVPSGIRCVAYNNQSNRLAVSRTDGTVEIYNLSANYFQEKFFPGHESRATEALCWAEGQRLFSAGLNGEIMEYDLQALNIKYAMDAFGGPIWSMAASPSGSQLLVGCEDGSVKLFQITPDKIQFERNFDRQKSRILSLSWHPSGTHIAAGSIDYISVFDVKSGSAVHKMIVDRQYMGVSKRKCIVWGVAFLSDGTIISVDSAGKVQFWDSATGTLVKSHLIANADVQSIAVADQEDSFVVGTAEGTVFHFQLVPVTSNSSEKQWVRTKPFQHHTHDVRTVAHSPTALISGGTDTHLVFRPLMEKVEVKNYDAALRKITFPHRCLISCSKKRQLLLFQFAHHLELWRLGSTVATGKNGDTLPLSKNADHLLHLKTKGPENIICSCISPCGSWIAYSTVSRFFLYRLNYEHDNISLKRVSKMPAFLRSALQILFSEDSTKLFVASNQGALHIVQLSGGSFKHLHAFQPQSGTVEAMCLLAVSPDGNWLAASGTSAGVHVYNVKQLKLHCTVPAYNFPVTAMAIAPNTNNLVIAHSDQQVFEYSIPDKQYTDWSRTVQKQGFHHLWLQRDTPITHISFHPKRPMHILLHDAYMFCIIDKSLVSSSLLPPKSSSES

SEQ ID NO: 17346 - protein, 700 aa, Homo sapiens
  Payload ID: 3497
  Gene Symbol: CIRH1A
  Gene Name: cirrhosis, autosomal recessive 1A (cirhin)
  ENSP ID: ENSP00000456709
RSTSGAEPESARARGAGAERGEHREGERGAAGIRCVAYNNQSNRLAVSRTDGTVEIYNLSANYFQEKFFPGHESRATEALCWAEGQRLFSAGLNGEIMEYDLQALNIKYAMDAFGGPIWSMAASPSGSQLLVGCEDGSVKLFQITPDKIQFERNFDRQKSRILSLSWHPSGTHIAAGSIDYISVFDVKSGSAVHKMIVDRQYMGVSKRKCIVWGVAFLSDGTIISVDSAGKVQFWDSATGTLVKSHLIANADVQSIAVADQEDSFVVGTAEGTVFHFQLVPVTSNSSEKQWVRTKPFQHHTHDVRTVAHSPTALISGGTDTHLVFRPLMEKVEVKNYDAALRKITFPHRCLISCSKKRQLLLFQFAHHLELWRLGSTVATGKNGDTLPLSKNADHLLHLKTKGPENIICSCISPCGSWIAYSTVSRFFLYRLNYEHDNISLKRVSKMPAFLRSALQILFSEDSTKLFVASNQGALHIVQLSGGSFKHLHAFQPQSGTVEAMCLLAVSPDGNWLAASGTSAGVHVYNVKQLKLHCTVPAYNFPVTAMAIAPNTNNLVIAHSDQQVFEYSIPDKQYTDWSRTVQKQGFHHLWLQRDTPITHISFHPKRPMHILLHDAYMFCIIDKSLPLPNDKTLLYNPFPPTNESDVIRRRTAHAFKISKIYKPLLFMDLLDERTLVAVERPLDDIIAQLPPPIKKKKFGT

SEQ ID NO: 17347 - protein, 511 aa, Homo sapiens
  Payload ID: 3497
  Gene Symbol: CIRH1A
  Gene Name: cirrhosis, autosomal recessive 1A (cirhin)
  Uniprot ID: Q969X6
  ENSP ID: ENSP00000458843
  MOD_RES (1)..(1): Any amino acid
XSAVHKMIVDRQYMGVSKRKCIVWGVAFLSDGTIISVDSAGKVQFWDSATGTLVKSHLIANADVQSIAVADQEDSFVVGTAEGTVFHFQLVPVTSNSSEKQWVRTKPFQHHTHDVRTVAHSPTALISGGTDTHLVFRPLMEKVEVKNYDAALRKITFPHRCLISCSKKRQLLLFQFAHHLELWRLGSTVATGKNGDTLPLSKNADHLLHLKTKGPENIICSCISPCGSWIAYSTVSRFFLYRLNYEHDNISLKRVSKMPAFLRSALQILFSEDSTKLFVASNQGALHIVQLSGGSFKHLHAFQPQSGTVEAMCLLAVSPDGNWLAASGTSAGVHVYNVKQLKLHCTVPAYNFPVTAMAIAPNTNNLVIAHSDQQVFEYSIPDKQYTDWSRTVQKQGFHHLWLQRDTPITHISFHPKRPMHILLHDAYMFCIIDKSLPLPNDKTLLYNPFPPTNESDVIRRRTAHAFKISKIYKPLLFMDLLDERTLVAVERPLDDIIAQLPPPIKKKKFGT

SEQ ID NO: 17348 - protein, 182 aa, Homo sapiens
  Payload ID: 3497
  Gene Symbol: CIRH1A
  Gene Name: cirrhosis, autosomal recessive 1A (cirhin)
  ENSP ID: ENSP00000461517
MASVDLSYCSFLHLLLLCSPILACPPLNGIRCVAYNNQSNRLAVSRTDGTVEIYNLSANYFQEKFFPGHESRATEALCWAEGQRLFSAGLNGEIMEYDLQALNIKYAMDAFGGPIWSMAASPSGSQLLVGCEDGSVKLFQITPDKIQFERNFDRQKSRILSLSWHPSGTHIAAGSIDYISVF

SEQ ID NO: 17349 - protein, 78 aa, Homo sapiens
  Payload ID: 3497
  Gene Symbol: CIRH1A
  Gene Name: cirrhosis, autosomal recessive 1A (cirhin)
  ENSP ID: ENSP00000462451
MEYDLQALNIKYAMDAFGGPIWSMAASPSGSQLLVGCEDGSVKLFQITPDKIQFERNFDRQKSRILSLSWHPSGTHIA

SEQ ID NO: 17350 - protein, 198 aa, Homo sapiens
  Payload ID: 3497
  Gene Symbol: CIRH1A
  Gene Name: cirrhosis, autosomal recessive 1A (cirhin)
  ENSP ID: ENSP00000462497
MVFLQFFPGHESRATEALCWAEGQRLFSAGLNGEIMEYDLQALNIKYAMDAFGGPIWSMAASPSGSQLLVGCEDGSVKLFQITPDKIQFERNFDRQKSRILSLSWHPSGTHIAAGSIDYISVFDVKSGSAVHKMIVDRQYMGVSKRKCIVWGVAFLSDGTIISVDSAGKVQFWDSATGTLVKSHLIANADVQSIAVAD

SEQ ID NO: 17351 - protein, 142 aa, Homo sapiens
  Payload ID: 3497
  Gene Symbol: CIRH1A
  Gene Name: cirrhosis, autosomal recessive 1A (cirhin)
  ENSP ID: ENSP00000463109
MEYDLQALNIKYAMDAFGGPIWSMAASPSGSQLLVGCEDGSVKLFQITPDKIQFERNFDRQKSRILSLSWHPSGTHIAAGSIDYISVFDVKSGSAVHKMIVDRQYMGVSKRKCIVWGVAFLSDGTIISVDSAGKVQFWDSAT

SEQ ID NO: 17352 - protein, 450 aa, Homo sapiens
  Payload ID: 3497
  Gene Symbol: CIRH1A
  Gene Name: cirrhosis, autosomal recessive 1A (cirhin)
  ENSP ID: ENSP00000487999
  MOD_RES (1)..(1): Any amino acid
XSAVHKMIVDRQYMGVSKRKCIVWGVAFLSDGTIISVDSAGKVQFWDSATGTLVKSHLIANADVQSIAVADQEDSFVVGTAEGTVFHFQLVPVTSNSSEKQWVRTKPFQHHTHDVRTVAHSPTALISGGTDTHLVFRPLMEKVEVKNYDAALRKITFPHRCLISCSKKRQLLLFQFAHHLELWRLGSTVATGKNGDTLPLSKNADHLLHLKTKGPENIICSCISPCGSWIAYSTVSRFFLYRLNYEHDNISLKRVSKMPAFLRSALQILFSEDSTKLFVASNQGALHIVQLSGGSFKHLHAFQPQSGTVEAMCLLAVSPDGNWLAASGTSAGVHVYNVKQLKLHCTVPAYNFPVTAMAIAPNTNNLVIAHSDQQVFEYSIPDKQYTDWSRTVQKQGFHHLWLQRDTPITHISFHPKRPMHILLHDAYMFCIIDKSLVSSSLLPPKSSSES

SEQ ID NO: 17353 - protein, 511 aa, Homo sapiens; identical to SEQ ID NO: 17347
  Payload ID: 3497
  Gene Symbol: CIRH1A
  Gene Name: cirrhosis, autosomal recessive 1A (cirhin)
  ENSP ID: ENSP00000488036
  MOD_RES (1)..(1): Any amino acid

SEQ ID NO: 17354 - protein, 71 aa, Homo sapiens
  Payload ID: 3497
  Gene Symbol: CIRH1A
  Gene Name: cirrhosis, autosomal recessive 1A (cirhin)
  ENSP ID: ENSP00000488210
  MOD_RES (1)..(1): Any amino acid
XSAVHKMIVDRQYMGVSKRKCIVWGVAFLSDGTIISVDSAGKVQFWDSATGTLVKSHLIANADVQSIAVAD

SEQ ID NO: 17355 - protein, 396 aa, Homo sapiens
  Payload ID: 3497
  Gene Symbol: CIRH1A
  Gene Name: cirrhosis, autosomal recessive 1A (cirhin)
  ENSP ID: ENSP00000488560
  MOD_RES (1)..(1): Any amino acid
XSAVHKMIVDRQYMGVSKRKCIVWGVAFLSDGTIISVDSAGKVQFWDSATGTLVKSHLIANADVQSIAVADQEDSFVVGTAEGTVFHFQLVPVTSNSSEKQWVRTKPFQHHTHDVRTVAHSPTALISGGTDTHLVFRPLMEKVEVKNYDAALRKITFPHRCLISCSKKRQLLLFQFAHHLELWRLGSTVATGTVEAMCLLAVSPDGNWLAASGTSAGVHVYNVKQLKLHCTVPAYNFPVTAMAIAPNTNNLVIAHSDQQVFEYSIPDKQYTDWSRTVQKQGFHHLWLQRDTPITHISFHPKRPMHILLHDAYMFCIIDKSLPLPNDKTLLYNPFPPTNESDVIRRRTAHAFKISKIYKPLLFMDLLDERTLVAVERPLDDIIAQLPPPIKKKKFGT

SEQ ID NO: 17356 - protein, 50 aa, Homo sapiens
  Payload ID: 3497
  Gene Symbol: CIRH1A
  Gene Name: cirrhosis, autosomal recessive 1A (cirhin)
  ENSP ID: ENSP00000488622
  MOD_RES (1)..(1): Any amino acid
XSAVHKMIVDRQYMGVSKRKCIVWGVAFLSDGTIISVDSAGKVQFWDSAT

SEQ ID NO: 17357 - protein, 211 aa, Homo sapiens; identical to SEQ ID NO: 17344
  Payload ID: 3497
  Gene Symbol: CIRH1A
  Gene Name: cirrhosis, autosomal recessive 1A (cirhin)
  ENSP ID: ENSP00000488731

SEQ ID NO: 17358 - protein, 340 aa, Homo sapiens
  Payload ID: 3498
  Gene Symbol: CLYBL
  Gene Name: citrate lyase beta like
  Uniprot ID: Q8N0X4
  ENSP ID: ENSP00000342991
MALRLLRRAARGAAAAALLRLKASLAADIPRLGYSSSSHHKYIPRRAVLYVPGNDEKKIKKIPSLNVDCAVLDCEDGVAANKKNEARLRIVKTLEDIDLGPTEKCVRVNSVSSGLAEEDLETLLQSRVLPSSLMLPKVESPEEIQWFADKFSFHLKGRKLEQPMNLIPFVETAMGLLNFKAVCEETLKVGPQVGLFLDAVVFGGEDFRASIGATSSKETLDILYARQKIVVIAKAFGLQAIDLVYIDFRDGAGLLRQSREGAAMGFTGKQVIHPNQIAVVQEQFSPSPEKIKWAEELIAAFKEHQQLGKGAFTFQGSMIDMPLLKQAQNTVTLATSIKEK

SEQ ID NO: 17359 - protein, 306 aa, Homo sapiens
  Payload ID: 3498
  Gene Symbol: CLYBL
  Gene Name: citrate lyase beta like
  Uniprot ID: Q8N0X4
  ENSP ID: ENSP00000365532
MALRLLRRAARGAAAAALLRLKASLAADIPRLGYSSSSHHKYIPRRAVLYVPGNDEKKIKKIPSLNVDCAVLDCEDGVAANKKNEARLRIVKTLEDIDLGPTEKCVRVNSVSSGLAEEDLETLLQSRVLPSSLMLPKVESPEEIQWAVCEETLKVGPQVGLFLDAVVFGGEDFRASIGATSSKETLDILYARQKIVVIAKAFGLQAIDLVYIDFRDGAGLLRQSREGAAMGFTGKQVIHPNQIAVVQEQFSPSPEKIKWAEELIAAFKEHQQLGKGAFTFQGSMIDMPLLKQAQNTVTLATSIKEK

SEQ ID NO: 17360 - protein, 340 aa, Homo sapiens; identical to SEQ ID NO: 17358
  Payload ID: 3498
  Gene Symbol: CLYBL
  Gene Name: citrate lyase beta like
  Uniprot ID: Q8N0X4
  ENSP ID: ENSP00000365533

SEQ ID NO: 17361 - protein, 89 aa, Homo sapiens
  Payload ID: 3498
  Gene Symbol: CLYBL
  Gene Name: citrate lyase beta like
  ENSP ID: ENSP00000389062
EELIAAFKEHQQLGKVGRYCCSWLCIQPFPSSPGQRSQSISRVPGRYWVLGARSWESKGAFTFQGSMIDMPLLKQAQNTVTLATSIKEK

SEQ ID NO: 17362 - protein, 103 aa, Homo sapiens
  Payload ID: 3498
  Gene Symbol: CLYBL
  Gene Name: citrate lyase beta like
  ENSP ID: ENSP00000396574
LQAIDLVYIDFRDGAGLLRQSREGAAMGFTGKQVIHPNQIAVVQEQFSPSPEKIKWAEELIAAFKEHQQLGKGAFTFQGSMIDMPLLKQAQNTVTLATSIKEK

SEQ ID NO: 17363 - protein, 147 aa, Homo sapiens
  Payload ID: 3498
  Gene Symbol: CLYBL
  Gene Name: citrate lyase beta like
  ENSP ID: ENSP00000401586
NEARLRIVKTLEDIDLGPTEKCVRVNSVSSGLAEEDLETLLQSRVLPSSLMLPKVESPEEIQWAVCEETLKVGPQVGLFLDAVVFGGEDFRASIGVKDISLSLFLCVCVYMCVYIFSLPLKDGHLHNNVYLPTMTMVFHDNGMDTTS

SEQ ID NO: 17364 - protein, 181 aa, Homo sapiens
  Payload ID: 3498
  Gene Symbol: CLYBL
  Gene Name: citrate lyase beta like
  ENSP ID: ENSP00000403408
NEARLRIVKTLEDIDLGPTEKCVRVNSVSSGLAEEDLETLLQSRVLPSSLMLPKVESPEEIQWFADKFSFHLKGRKLEQPMNLIPFVETAMGLLNFKAVCEETLKVGPQVGLFLDAVVFGGEDFRASIGVKDISLSLFLCVCVYMCVYIFSLPLKDGHLHNNVYLPTMTMVFHDNGMDTTS

SEQ ID NO: 17365 - protein, 466 aa, Homo sapiens [sequence omitted]

SEQ ID NO: 17366 - protein, 453 aa, Homo sapiens
  Payload ID: 3499
  Gene Symbol: CS
  Gene Name: citrate synthase
  ENSP ID: ENSP00000440543
MNASCLVLAARHASASSTNLKDILADLIPKEQARIKTFRQQHGKTVVGQITVDMMYGGMRGMKGLVYETSVLDPDEGIRFRGFSIPECQKLLPKAKGGEEPLPEGLFWLLVTGHIPTEEQVSWLSKEWAKRAALPSHVVTMLDNFPTNLHPMSQLSAAVTALNSESNFARAYAQGISRTKYWELIYEDSMDLIAKLPCVAAKIYRNLYREGSGIGAIDSNLDWSHNFTNMLGYTDHQFTELTRLYLTIHSDHEGGNVSAHTSHLVGSALSDPYLSFAAAMNGLAGPLHGLANQEVLVWLTQLQKEVGKDVSDEKLRDYIWNTLNSGRVVPGYGHAVLRKTDPRYTCQREFALKHLPNDPMFKLVAQLYKIVPNVLLEQGKAKNPWPNVDAHSGVLLQYYGMTEMNYYTVLFGVSRALGVLAQLIWSRALGFPLERPKSMSTEGLMKFVDSKSG

SEQ ID NO: 17367 - protein, 190 aa, Homo sapiens
  Payload ID: 3499
  Gene Symbol: CS
  Gene Name: citrate synthase
  ENSP ID: ENSP00000446492
LADLIPKEQARIKTFRQQHGKTVVGQITVDMMYGGMRGMKGLVYETSVLDPDEGIRFRGFSIPECQKLLPKAKGGEEPLPEGLFWLLVTGHIPTEEQVSWLSKEWAKRAALPSHVVTMLDNFPTNLHPMSQLSAAVTALNSESNFARAYAQGISRTKYWEQRSTEISTEKAAVLGPLTLTWTGLTISPTC

SEQ ID NO: 17368 - protein, 400 aa, Homo sapiens
  Payload ID: 3499
  Gene Symbol: CS
  Gene Name: citrate synthase
  ENSP ID: ENSP00000446779
MMYGGMRGMKGLVYETSVLDPDEGIRFRGFSIPECQKLLPKAKGGEEPLPEGLFWLLVTGHIPTEEQVSWLSKEWAKRAALPSHVVTMLDNFPTNLHPMSQLSAAVTALNSESNFARAYAQGISRTKYWELIYEDSMDLIAKLPCVAAKIYRNLYREGSGIGAIDSNLDWSHNFTNMLGYTDHQFTELTRLYLTIHSDHEGGNVSAHTSHLVGSALSDPYLSFAAAMNGLAGPLHGLANQEVLVWLTQLQKEVGKDVSDEKLRDYIWNTLNSGRVVPGYGHAVLRKTDPRYTCQREFALKHLPNDPMFKLVAQLYKIVPNVLLEQGKAKNPWPNVDAHSGVLLQYYGMTEMNYYTVLFGVSRALGVLAQLIWSRALGFPLERPKSMSTEGLMKFVDSKSG

SEQ ID NO: 17369 - protein, 80 aa, Homo sapiens
  Payload ID: 3499
  Gene Symbol: CS
  Gene Name: citrate synthase
  ENSP ID: ENSP00000447346
MMYGGMRGMKGLVYETSVLDPDEGIRFRGFSIPECQKLLPKAKGGEEPLPEGLFWLLVTGHIPTEEQVSWLSKEWAKRAA

SEQ ID NO: 17370 - protein, 157 aa, Homo sapiens
  Payload ID: 3499
  Gene Symbol: CS
  Gene Name: citrate synthase
  ENSP ID: ENSP00000447442
MALLTAAARLLGTKNASCLVLAARHASASSTMYGGMRGMKGLVYETSVLDPDEGIRFRGFSIPECQKLLPKAKGGEEPLPEGLFWLLVTGHIPTEEQVSWLSKEWAKRAALPSHVVTMLDNFPTNLHPMSQLSAAVTALNSESNFARAYAQGISRTK

SEQ ID NO: 17371 - protein, 75 aa, Homo sapiens
  Payload ID: 3499
  Gene Symbol: CS
  Gene Name: citrate synthase
  ENSP ID: ENSP00000447582
MALLTAAARLLGTKNASCLVLAARHASASSTNLKDILADLIPKEQARIKTFRQQHGKTVVGQITVDMACCSGSCL

SEQ ID NO: 17372 - protein, 142 aa, Homo sapiens
  Payload ID: 3499
  Gene Symbol: CS
  Gene Name: citrate synthase
  ENSP ID: ENSP00000447948
MALLTAAARLLGTKNASCLVLAARHASASSTNLKDILADLIPKEQARIKTFRQQHGKTVVGQITVDMMYGGMRGMKGLVYETSVLDPDEGLFWLLVTGHIPTEEQVSWLSKEWAKRAALPSHVVTMLDNFPTNLHPMSQLSA

SEQ ID NO: 17373 - protein, 149 aa, Homo sapiens
  Payload ID: 3499
  Gene Symbol: CS
  Gene Name: citrate synthase
  ENSP ID: ENSP00000447986
MALLTAAARLLGTKNASCLVLAARHASASSTNLKDILADLIPKEQARIKTFRQQHGKTVVGQITVDMMYGGMRGMKGLVYETSVLDPDEGIRFRGFSIPECQKLLPKAKGGEEPLPEGLFWLLVTGHIPTEEQLIYEDSMDLIAKLPCV

SEQ ID NO: 17374 - protein, 66 aa, Homo sapiens
  Payload ID: 3499
  Gene Symbol: CS
  Gene Name: citrate synthase
  ENSP ID: ENSP00000448166
MMYGGMRGMKGLVYETSVLDPDEGIRFRGFSIPECQKLLPKAKGGEEPLPEGLFWLLVTGHIPTEE

SEQ ID NO: 17375 - protein, 178 aa, Homo sapiens
  Payload ID: 3499
  Gene Symbol: CS
  Gene Name: citrate synthase
  ENSP ID: ENSP00000448172
MALLTAAARLLGTKNASCLVLAARHASASSTNLKDILADLIPKEQARIKTFRQQHGKTVVGQITVDMMYGGMRGMKGLVYETSVLDPDEGIRFRGFSIPECQKLLPKAKGGEEPLPEGLFWLLVTGHIPTEEQVSWLSKEWAKRAALPSHVVTMLDNFPTNLHPMSQLSAAVTALNSE

SEQ ID NO: 17376 - protein, 117 aa, Homo sapiens
  Payload ID: 3499
  Gene Symbol: CS
  Gene Name: citrate synthase
  ENSP ID: ENSP00000448409
MMYGGMRGMKGLVYETSVLDPDEGIRFRGFSIPECQKLLPKAKGGEEPLPEGLFWLLVTGHIPTEEQVSWLSKEWAKRAALPSHVVTMLDNFPTNLHPMSQLSAAVTALNSESNFAR

SEQ ID NO: 17377 - protein, 140 aa, Homo sapiens
  Payload ID: 3499
  Gene Symbol: CS
  Gene Name: citrate synthase
  ENSP ID: ENSP00000448667
MALLTAAARLLGTKGIRFRGFSIPECQKLLPKAKGGEEPLPEGLFWLLVTGHIPTEEQVSWLSKEWAKRAALPSHVVTMLDNFPTNLHPMSQLSAAVTALNSESNFARAYAQGISRTKYWELIYEDSMDLIAKLPCVAAK

SEQ ID NO: 17378 - protein, 144 aa, Homo sapiens
  Payload ID: 3499
  Gene Symbol: CS
  Gene Name: citrate synthase
  ENSP ID: ENSP00000449025
MMYGGMRGMKGLVYETSVLDPDEGIRFRGFSIPECQKLLPKAKGGEEPLPEGLFWLLVTGHIPTEEQVSWLSKEWAKRAALPSHVVTMLDNFPTNLHPMSQLSAAVTALNSESNFARAYAQGISRTKYWELIYEDSMDLIAKLP

SEQ ID NO: 17379 - protein, 123 aa, Homo sapiens
  Payload ID: 3499
  Gene Symbol: CS
  Gene Name: citrate synthase
  ENSP ID: ENSP00000449080
LRDYIWNTLNSGRVVPGYGHAVLRKTDPRYTCQREFALKHLPNDPMFKLVAQLYKIVPNVLLEQGKAKNPWPNVDAHSGVLLQYYGMTEMNYYTVLFGVSRALGVLAQLIWSRALGFPLERKD

SEQ ID NO: 17380 - protein, 120 aa, Homo sapiens
  Payload ID: 3499
  Gene Symbol: CS
  Gene Name: citrate synthase
  ENSP ID: ENSP00000449427
MMYGGMRGMKGLVYETSVLDPDEGIRFRGFSIPECQKLLPKAKGGEEPLPEGLFWLLVTGHIPTEEQVSWLSKEWAKRAALPSHVVTMLDNFPTNLHPMSQLSAAVTALNSESNFARAYA

SEQ ID NO: 17381 - protein, 132 aa, Homo sapiens
  Payload ID: 3499
  Gene Symbol: CS
  Gene Name: citrate synthase
  ENSP ID: ENSP00000449491
MALLTAAARLLGTKNASCLVLAARHASASSTNLKDILADLIPKEQARIKTFRQQHGKTVVGQITVDMGIRFRGFSIPECQKLLPKAKGGEEPLPEGLFWLLVTGHIPTEEQVSWLSKEWAKRAALPSHVVTM

SEQ ID NO: 17382 - protein, 49 aa, Homo sapiens
  Payload ID: 3499
  Gene Symbol: CS
  Gene Name: citrate synthase
  ENSP ID: ENSP00000449571
MALLTAAARLLGTKNASCLVLAATWQDGGGPNHCGHDVWWHERHEGIGL

SEQ ID NO: 17383 - protein, 114 aa, Homo sapiens
  Payload ID: 3499
  Gene Symbol: CS
  Gene Name: citrate synthase
  ENSP ID: ENSP00000449753
MMYGGMRGMKGLVYETSVLDPDEGIRFRGFSIPECQKLLPKAKGGEEPLPEGLFWLLVTGHIPTEEQVSWLSKEWAKRAALPSHVVTMLDNFPTNLHPMSQLSAAVTALNSESN

SEQ ID NO: 17384 - protein, 140 aa, Homo sapiens
  Payload ID: 3499
  Gene Symbol: CS
  Gene Name: citrate synthase
  ENSP ID: ENSP00000450101
MMYGGMRGMKGLVYETSVLDPDEGIRFRGFSIPECQKLLPKAKGGEEPLPEGLFWLLVTGHIPTEEQVSWLSKEWAKRAALPSHVVTMLDNFPTNLHPMSQLSAAVTALNSESNFARAYAQGISRTKYWELIYEDSMDLI

SEQ ID NO: 17385 - protein, 144 aa, Homo sapiens; identical to SEQ ID NO: 17378
  Payload ID: 3499
  Gene Symbol: CS
  Gene Name: citrate synthase
  ENSP ID: ENSP00000450312

SEQ ID NO: 17386 - protein, 146 aa, Homo sapiens
  Payload ID: 3499
  Gene Symbol: CS
  Gene Name: citrate synthase
  ENSP ID: ENSP00000450403
MALLTAAARLLGTKNASCLVLAARHASASSTNLKDILADLIPKEQARIKTFRQQHGKTVVGQITVDMVSWLSKEWAKRAALPSHVVTMLDNFPTNLHPMSQLSAAVTALNSESNFARAYAQGISRTKYWELIYEDSMDLIAKLPCV

SEQ ID NO: 17387 - protein, 2027 aa, Homo sapiens
  Payload ID: 3500
  Gene Symbol: CIT
  Gene Name: citron rho-interacting serine/threonine kinase
  Uniprot ID: O14578
  ENSP ID: ENSP00000261833
MLKFKYGARNPLDAGAAEPIASRASRLNLFFQGKPPFMTQQQMSPLSREGILDALFVLFEECSQPALMKIKHVSNFVRKYSDTIAELQELQPSAKDFEVRSLVGCGHFAEVQVVREKATGDIYAMKVMKKKALLAQEQVSFFEEERNILSRSTSPWIPQLQYAFQDKNHLYLVMEYQPGGDLLSLLNRYEDQLDENLIQFYLAELILAVHSVHLMGYVHRDIKPENILVDRTGHIKLVDFGSAAKMNSNKMVNAKLPIGTPDYMAPEVLTVMNGDGKGTYGLDCDWWSVGVIAYEMIYGRSPFAEGTSARTFNNIMNFQRFLKFPDDPKVSSDFLDLIQSLLCGQKERLKFEGLCCHPFFSKIDWNNIRNSPPPFVPTLKSDDDTSNFDEPEKNSWVSSSPCQLSPSGFSGEELPFVGFSYSKALGILGRSESVVSGLDSPAKTSSMEKKLLIKSKELQDSQDKCHKMEQEMTRLHRRVSEVEAVLSQKEVELKASETQRSLLEQDLATYITECSSLKRSLEQARMEVSQEDDKALQLLHDIREQSRKLQEIKEQEYQAQVEEMRLMMNQLEEDLVSARRRSDLYESELRESRLAAEEFKRKATECQHKLLKAKDQGKPEVGEYAKLEKINAEQQLKIQELQEKLEKAVKASTEATELLQNIRQAKERAERELEKLQNREDSSEGIRKKLVEAEELEEKHREAQVSAQHLEVHLKQKEQHYEEKIKVLDNQIKKDLADKETLENMMQRHEEEAHEKGKILSEQKAMINAMDSKIRSLEQRIVELSEANKLAANSSLFTQRNMKAQEEMISELRQQKFYLETQAGKLEAQNRKLEEQLEKISHQDHSDKNRLLELETRLREVSLEHEEQKLELKRQLTELQLSLQERESQLTALQAARAALESQLRQAKTELEETTAEAEEEIQALTAHRDEIQRKFDALRNSCTVITDLEEQLNQLTEDNAELNNQNFYLSKQLDEASGANDEIVQLRSEVDHLRREITEREMQLTSQKQTMEALKTTCTMLEEQVMDLEALNDELLEKERQWEAWRSVLGDEKSQFECRVRELQRMLDTEKQSRARADQRITESRQVVELAVKEHKAEILALQQALKEQKLKAESLSDKLNDLEKKHAMLEMNARSLQQKLETERELKQRLLEEQAKLQQQMDLQKNHIFRLTQGLQEALDRADLLKTERSDLEYQLENIQVLYSHEKVKMEGTISQQTKLIDFLQAKMDQPAKKKKGLFSRRKEDPALPTQVPLQYNELKLALEKEKARCAELEEALQKTRIELRSAREEAAHRKATDHPHPSTPATARQQIAMSAIVRSPEHQPSAMSLLAPPSSRRKESSTPEEFSRRLKERMHHNIPHRFNVGLNMRATKCAVCLDTVHFGRQASKCLECQVMCHPKCSTCLPATCGLPAEYATHFTEAFCRDKMNSPGLQTKEPSSSLHLEGWMKVPRNNKRGQQGWDRKYIVLEGSKVLIYDNEAREAGQRPVEEFELCLPDGDVSIHGAVGASELANTAKADVPYILKMESHPHTTCWPGRTLYLLAPSFPDKQRWVTALESVVAGGRVSREKAEADAKLLGNSLLKLEGDDRLDMNCTLPFSDQVVLVGTEEGLYALNVLKNSLTHVPGIGAVFQIYIIKDLEKLLMIAGEERALCLVDVKKVKQSLAQSHLPAQPDISPNIFEAVKGCHLFGAGKIENGLCICAAMPSKVVILRYNENLSKYCIRKEIETSEPCSCIHFTNYSILIGTNKFYEIDMKQYTLEEFLDKNDHSLAPAVFAASSNSFPVSIVQVNSAGQREEYLLCFHEFGVFVDSYGRRSRTDDLKWSRLPLAFAYREPYLFVTHFNSLEVIEIQARSSAGTPARAYLDIPNPRYLGPAISSGAIYLASSYQDKLRVICCKGNLVKESGTEHHRGPSTSRSSPNKRGPPTYNEHITKRVASSPAPPEGPSHPREPSTPHRYREGRTELRRDKSPGRPLEREKSPGRMLSTRRERSPGRLFEDSSRGRLPAGAVRTPLSQVNKVWDQSSV

SEQ ID NO: 17388 - protein, 1640 aa, Homo sapiens
  Payload ID: 3500
  Gene Symbol: CIT
  Gene Name: citron rho-interacting serine/threonine kinase
  ENSP ID: ENSP00000376305
  MOD_RES (1)..(1): Any amino acid
XPFVPTLKSDDDTSNFDEPEKNSWVSSSPCQLSPSGFSGEELPFVGFSYSKALGILGRSESVVSGLDSPAKTSSMEKKLLIKSKELQDSQDKCHKMEQEMTRLHRRVSEVEAVLSQKEVELKASETQRSLLEQDLATYITECSSLKRSLEQARMEVSQEDDKALQLLHDIREQSRKLQEIKEQEYQAQVEEMRLMMNQLEEDLVSARRRSDLYESELRESRLAAEEFKRKATECQHKLLKAKDQGKPEVGEYAKLEKINAEQQLKIQELQEKLEKAVKASTEATELLQNIRQAKERAERELEKLQNREDSSEGIRKKLVEAEELEEKHREAQVSAQHLEVHLKQKEQHYEEKIKVLDNQIKKDLADKETLENMMQRHEEEAHEKGKILSEQKAMINAMDSKIRSLEQRIVELSEANKLAANSSLFTQRNMKAQEEMISELRQQKFYLETQAGKLEAQNRKLEEQLEKISHQDHSDKNRLLELETRLREVSLEHEEQKLELKRQLTELQLSLQERESQLTALQAARAALESQLRQAKTELEETTAEAEEEIQALTAHRDEIQRKFDALRNSCTVITDLEEQLNQLTEDNAELNNQNFYLSKQLDEASGANDEIVQLRSEVDHLRREITEREMQLTSQKQTMEALKTTCTMLEEQVMDLEALNDELLEKERQWEAWRSVLGDEKSQFECRVRELQRMLDTEKQSRARADQRITESRQVVELAVKEHKAEILALQQALKEQKLKAESLSDKLNDLEKKHAMLEMNARSLQQKLETERELKQRLLEEQAKLQQQMDLQKNHIFRLTQGLQEALDRADLLKTERSDLEYQLENIQVLYSHEKVKMEGTISQQTKLIDFLQAKMDQPAKKKKVPLQYNELKLALEKEKARCAELEEALQKTRIELRSAREEAAHRKATDHPHPSTPATARQQIAMSAIVRSPEHQPSAMSLLAPPSSRRKESSTPEEFSRRLKERMHHNIPHRFNVGLNMRATKCAVCLDTVHFGRQASKCLECQVMCHPKCSTCLPATCGLPAEYATHFTEAFCRDKMNSPGLQTKEPSSSLHLEGWMKVPRNNKRGQQGWDRKYIVLEGSKVLIYDNEAREAGQRPVEEFELCLPDGDVSIHGAVGASELANTAKADVPYILKMESHPHTTCWPGRTLYLLAPSFPDKQRWVTALESVVAGGRVSREKAEADAKLLGNSLLKLEGDDRLDMNCTLPFSDQVVLVGTEEGLYALNVLKNSLTHVPGIGAVFQIYIIKDLEKLLMIAGEERALCLVDVKKVKQSLAQSHLPAQPDISPNIFEAVKGCHLFGAGKIENGLCICAAMPSKVVILRYNENLSKYCIRKEIETSEPCSCIHFTNYSILIGTNKFYEIDMKQYTLEEFLDKNDHSLAPAVFAASSNSFPVSIVQVNSAGQREEYLLCFHEFGVFVDSYGRRSRTDDLKWSRLPLAFAYREPYLFVTHFNSLEVIEIQARSSAGTPARAYLDIPNPRYLGPAISSGAIYLASSYQDKLRVICCKGNLVKESGTEHHRGPSTSRSSPNKRGPPTYNEHITKRVASSPAPPEGPSHPREPSTPHRYREGRTELRRDKSPGRPLEREKSPGRMLSTRRERSPGRLFEDSSRGRLPAGAVRTPLSQVNKVWDQSSV

SEQ ID NO: 17389 - protein, 2069 aa, Homo sapiens
  Payload ID: 3500
  Gene Symbol: CIT
  Gene Name: citron rho-interacting serine/threonine kinase
  Uniprot ID: O14578
  ENSP ID: ENSP00000376306
MLKFKYGARNPLDAGAAEPIASRASRLNLFFQGKPPFMTQQQMSPLSREGILDALFVLFEECSQPALMKIKHVSNFVRKYSDTIAELQELQPSAKDFEVRSLVGCGHFAEVQVVREKATGDIYAMKVMKKKALLAQEQVSFFEEERNILSRSTSPWIPQLQYAFQDKNHLYLVMEYQPGGDLLSLLNRYEDQLDENLIQFYLAELILAVHSVHLMGYVHRDIKPENILVDRTGHIKLVDFGSAAKMNSNKMVNAKLPIGTPDYMAPEVLTVMNGDGKGTYGLDCDWWSVGVIAYEMIYGRSPFAEGTSARTFNNIMNFQRFLKFPDDPKVSSDFLDLIQSLLCGQKERLKFEGLCCHPFFSKIDWNNIRNSPPPFVPTLKSDDDTSNFDEPEKNSWVSSSPCQLSPSGFSGEELPFVGFSYSKALGILGRSESVVSGLDSPAKTSSMEKKLLIKSKELQDSQDKCHKMEQEMTRLHRRVSEVEAVLSQKEVELKASETQRSLLEQDLATYITECSSLKRSLEQARMEVSQEDDKALQLLHDIREQSRKLQEIKEQEYQAQVEEMRLMMNQLEEDLVSARRRSDLYESELRESRLAAEEFKRKATECQHKLLKAKDQGKPEVGEYAKLEKINAEQQLKIQELQEKLEKAVKASTEATELLQNIRQAKERAERELEKLQNREDSSEGIRKKLVEAEERRHSLENKVKRLETMERRENRLKDDIQTKSQQIQQMADKILELEEKHREAQVSAQHLEVHLKQKEQHYEEKIKVLDNQIKKDLADKETLENMMQRHEEEAHEKGKILSEQKAMINAMDSKIRSLEQRIVELSEANKLAANSSLFTQRNMKAQEEMISELRQQKFYLETQAGKLEAQNRKLEEQLEKISHQDHSDKNRLLELETRLREVSLEHEEQKLELKRQLTELQLSLQERESQLTALQAARAALESQLRQAKTELEETTAEAEEEIQALTAHRDEIQRKFDALRNSCTVITDLEEQLNQLTEDNAELNNQNFYLSKQLDEASGANDEIVQLRSEVDHLRREITEREMQLTSQKQTMEALKTTCTMLEEQVMDLEALNDELLEKERQWEAWRSVLGDEKSQFECRVRELQRMLDTEKQSRARADQRITESRQVVELAVKEHKAEILALQQALKEQKLKAESLSDKLNDLEKKHAMLEMNARSLQQKLETERELKQRLLEEQAKLQQQMDLQKNHIFRLTQGLQEALDRADLLKTERSDLEYQLENIQVLYSHEKVKMEGTISQQTKLIDFLQAKMDQPAKKKKGLFSRRKEDPALPTQVPLQYNELKLALEKEKARCAELEEALQKTRIELRSAREEAAHRKATDHPHPSTPATARQQIAMSAIVRSPEHQPSAMSLLAPPSSRRKESSTPEEFSRRLKERMHHNIPHRFNVGLNMRATKCAVCLDTVHFGRQASKCLECQVMCHPKCSTCLPATCGLPAEYATHFTEAFCRDKMNSPGLQTKEPSSSLHLEGWMKVPRNNKRGQQGWDRKYIVLEGSKVLIYDNEAREAGQRPVEEFELCLPDGDVSIHGAVGASELANTAKADVPYILKMESHPHTTCWPGRTLYLLAPSFPDKQRWVTALESVVAGGRVSREKAEADAKLLGNSLLKLEGDDRLDMNCTLPFSDQVVLVGTEEGLYALNVLKNSLTHVPGIGAVFQIYIIKDLEKLLMIAGEERALCLVDVKKVKQSLAQSHLPAQPDISPNIFEAVKGCHLFGAGKIENGLCICAAMPSKVVILRYNENLSKYCIRKEIETSEPCSCIHFTNYSILIGTNKFYEIDMKQYTLEEFLDKNDHSLAPAVFAASSNSFPVSIVQVNSAGQREEYLLCFHEFGVFVDSYGRRSRTDDLKWSRLPLAFAYREPYLFVTHFNSLEVIEIQARSSAGTPARAYLDIPNPRYLGPAISSGAIYLASSYQDKLRVICCKGNLVKESGTEHHRGPSTSRSSPNKRGPPTYNEHITKRVASSPAPPEGPSHPREPSTPHRYREGRTELRRDKSPGRPLEREKSPGRMLSTRRERSPGRLFEDSSRGRLPAGAVRTPLSQVNKVWDQSSV

SEQ ID NO: 17390 - protein, 109 aa, Homo sapiens
  Payload ID: 3500
  Gene Symbol: CIT
  Gene Name: citron rho-interacting serine/threonine kinase
  ENSP ID: ENSP00000443199
IAELQELQPSAKDFEVRSLVGCGHFAEVQVVREKATGDIYAMKVMKKKALLAQEQVSFFEEERNILSRSTSPWIPQLQYAFQDKNHLYLVLYSHEKVKMEGTISQQTKL

SEQ ID NO: 17391 - protein, 162 aa, Homo sapiens
  Payload ID: 3500
  Gene Symbol: CIT
  Gene Name: citron rho-interacting serine/threonine kinase
  ENSP ID: ENSP00000446105
MRLLAPTTRLYNCEVKWTISAGRSRNERCSLPARSKKSLFKDKAQISATDLQTMEALKTTCTMLEEQVMDLEALNDELLEKERQWEAWRSVLGDEKSQFECRVRELQRMLDTEKQSRARADQRITESRQVVELAVKEHKAEILALQQALKEQKLKAESLSDK

SEQ ID NO: 17392 - protein, 482 aa, Homo sapiens
  Payload ID: 3500
  Gene Symbol: CIT
  Gene Name: citron rho-interacting serine/threonine kinase
  Uniprot ID: O14578
  ENSP ID: ENSP00000482318
MLKFKYGARNPLDAGAAEPIASRASRLNLFFQGKPPFMTQQQMSPLSREGILDALFVLFEECSQPALMKIKHVSNFVRKYSDTIAELQELQPSAKDFEVRSLVGCGHFAEVQVVREKATGDIYAMKVMKKKALLAQEQVSFFEEERNILSRSTSPWIPQLQYAFQDKNHLYLVMEYQPGGDLLSLLNRYEDQLDENLIQFYLAELILAVHSVHLMGYVHRDIKPENILVDRTGHIKLVDFGSAAKMNSNKMVNAKLPIGTPDYMAPEVLTVMNGDGKGTYGLDCDWWSVGVIAYEMIYGRSPFAEGTSARTFNNIMNFQRFLKFPDDPKVSSDFLDLIQSLLCGQKERLKFEGLCCHPFFSKIDWNNIRNSPPPFVPTLKSDDDTSNFDEPEKNSWVSSSPCQLSPSGFSGEELPFVGFSYSKALGILGRSESVVSGLDSPAKTSSMEKKLLIKSKELQDSQDKCHKMEQEMTRLHRRVSGG

SEQ ID NO: 17393 - protein, 64 aa, Homo sapiens
  Payload ID: 3501
  Gene Symbol: CKLF-CMTM1
  Gene Name: CKLF-CMTM1 readthrough
  ENSP ID: ENSP00000433503
INSLVTTVFMLIVSVLALIPETTTLTVGGGDLTNSIITAVFLSVVAILAMQEKKRRHLLYVGGR

SEQ ID NO: 17394 - protein, 60 aa, Homo sapiens
  Payload ID: 3501
  Gene Symbol: CKLF-CMTM1
  Gene Name: CKLF-CMTM1 readthrough
  ENSP ID: ENSP00000433857
MDNVQPKIKHRPFCFSVKGHVKMLRLDIINSLVTTVFMLIVSVLALIPETTTLTVGGGLF

SEQ ID NO: 17395 - protein, 115 aa, Homo sapiens
  Payload ID: 3501
  Gene Symbol: CKLF-CMTM1
  Gene Name: CKLF-CMTM1 readthrough
  ENSP ID: ENSP00000433998
MDNVQPKIKHRPFCFSVKGHVKMLRLDLTNSIITAVFLSVVAILAMQEKKRRHLLYVGGSLCLTAVIVCCIDAFVVTTKMRTNLKRFLGVEVERKLSPAKDAYPETGPDAPQRPA

SEQ ID NO: 17396 - protein, 33 aa, Homo sapiens; identical to SEQ ID NO: 14785
  Payload ID: 3501
  Gene Symbol: CKLF-CMTM1
  Gene Name: CKLF-CMTM1 readthrough
  ENSP ID: ENSP00000435007

SEQ ID NO: 17397 - protein, 168 aa, Homo sapiens
  Payload ID: 3501
  Gene Symbol: CKLF-CMTM1
  Gene Name: CKLF-CMTM1 readthrough
  ENSP ID: ENSP00000479319
MDNVQPKIKHRPFCFSVKGHVKMLRLALTVTSMTFFIIAQAPEPYIVITGFEVTVILFFILLYVLRLDRLMKWLFWPLLDLTNSIITAVFLSVVAILAMQEKKRRHLLYVGGSLCLTAVIVCCIDAFVVTTKMRTNLKRFLGVEVERKLSPAKDAYPETGPDAPQRPA

SEQ ID NO: 17398 - protein, 92 aa, Homo sapiens
  Payload ID: 3501
  Gene Symbol: CKLF-CMTM1
  Gene Name: CKLF-CMTM1 readthrough
  ENSP ID: ENSP00000484781
MDNVQPKIKHRPFCFSVKGHVKMLRLDIINSLVTTVFMLIVSVLALIPETTTLTVGGGDLTNSIITAVFLSVVAILAMQEKKRRHLLYVGGR

SEQ ID NO: 17399 - protein, 231 aa, Homo sapiens
  Payload ID: 3502
  Gene Symbol: CMTM1
  Gene Name: CKLF-like MARVEL transmembrane domain containing 1
  ENSP ID: ENSP00000330061
MDPEHAKPESSEAPSGNLKQPETAAALASSGSVVSSVPKAQRNISAKTAPRKHPAVSIRSAQSAAAARPQGSEGTAPSRKATTRPPPKPTLPPPTPSAHTESKLLNEMAIKERVEGRAKVPYKFRDSLKRFSFSPTGMLKILRLSLILGALACFIITQANESFITITSLEICIVVFFILIYVLTLHHLLTYLHWPLLDLTNSIITAVFLSVVAILAMQEKKRRHLLYVGGR

SEQ ID NO: 17400 - protein, 122 aa, Homo sapiens
  Payload ID: 3502
  Gene Symbol: CMTM1
  Gene Name: CKLF-like MARVEL transmembrane domain containing 1
  Uniprot ID: Q8IZ96
  ENSP ID: ENSP00000331428
MDPEHAKPESSEAPSGNLKQPETAAALASSGSVDLTNSIITAVFLSVVAILAMQEKKRRHLLYVGGSLCLTAVIVCCIDAFVVTTKMRTNLKRFLGVEVERKLSPAKDAYPETGPDAPQRPA

SEQ ID NO: 17401 - protein, 91 aa, Homo sapiens
  Payload ID: 3502
  Gene Symbol: CMTM1
  Gene Name: CKLF-like MARVEL transmembrane domain containing 1
  Uniprot ID: Q8IZ96
  ENSP ID: ENSP00000331494
MDPEHAKPESSEAPSGNLKQPETAAALSLILGALACFIITQANESFITITSLEICIVVFFILIYVLTLHHLLTYLHWPLLNAEYRKQTKQI

SEQ ID NO: 17402 - protein, 116 aa, Homo sapiens
  Payload ID: 3502
  Gene Symbol: CMTM1
  Gene Name: CKLF-like MARVEL transmembrane domain containing 1
  Uniprot ID: Q8IZ96
  ENSP ID: ENSP00000337119
MDPEHAKPESSEAPSGNLKQPETAAALDLTNSIITAVFLSVVAILAMQEKKRRHLLYVGGSLCLTAVIVCCIDAFVVTTKMRTNLKRFLGVEVERKLSPAKDAYPETGPDAPQRPA

SEQ ID NO: 17403 - protein, 286 aa, Homo sapiens
  Payload ID: 3502
  Gene Symbol: CMTM1
  Gene Name: CKLF-like MARVEL transmembrane domain containing 1
  Uniprot ID: Q8IZ96
  ENSP ID: ENSP00000368814
MDPEHAKPESSEAPSGNLKQPETAAALASSGSVVSSVPKAQRNISAKTAPRKHPAVSIRSAQSAAAARPQGSEGTAPSRKATTRPPPKPTLPPPTPSAHTESKLLNEMAIKERVEGRAKVPYKFRDSLKRFSFSPTGMLKILRLSLILGALACFIITQANESFITITSLEICIVVFFILIYVLTLHHLLTYLHWPLLDLTNSIITAVFLSVVAILAMQEKKRRHLLYVGGSLCLTAVIVCCIDAFVVTTKMRTNLKRFLGVEVERKLSPAKDAYPETGPDAPQRPA

SEQ ID NO: 17404 - protein, 169 aa, Homo sapiens
  Payload ID: 3502
  Gene Symbol: CMTM1
  Gene Name: CKLF-like MARVEL transmembrane domain containing 1
  Uniprot ID: Q8IZ96
  ENSP ID: ENSP00000405729
MDPEHAKPESSEAPSGNLKQPETAAALSLILGALACFIITQANESFITITSLEICIVVFFILIYVLTLHHLLTYLHWPLLDLTNSIITAVFLSVVAILAMQEKKRRHLLYVGGSLCLTAVIVCCIDAFVVTTKMRTNLKRFLGVEVERKLSPAKDAYPETGPDAPQRPA

SEQ ID NO: 17405 - protein, 131 aa, Homo sapiens
  Payload ID: 3502
  Gene Symbol: CMTM1
  Gene Name: CKLF-like MARVEL transmembrane domain containing 1
  ENSP ID: ENSP00000431135
  MOD_RES (1)..(1): Any amino acid
XRKATTRPPPKPTLPPPTPSAHTESKLLNEMAIKERVEGRAKVPYKFRDSLKRFSFSPTGMLKILRLSLILGALACFIITQANESFITITSLEICIVVFFILIYVLTLHHLLTYLHWPLLNAEYRKQTKQI

SEQ ID NO: 17406 - protein, 38 aa, Homo sapiens
  Payload ID: 3502
  Gene Symbol: CMTM1
  Gene Name: CKLF-like MARVEL transmembrane domain containing 1
  Uniprot ID: Q8IZ96
  ENSP ID: ENSP00000431303
MDPEHAKPESSEAPSGNLKQPETAAALEADKANMSNFN

SEQ ID NO: 17407 - protein, 131 aa, Homo sapiens; identical to SEQ ID NO: 17405
  Payload ID: 3502
  Gene Symbol: CMTM1
  Gene Name: CKLF-like MARVEL transmembrane domain containing 1
  ENSP ID: ENSP00000431609
  MOD_RES (1)..(1): Any amino acid

SEQ ID NO: 17408 - protein, 32 aa, Homo sapiens
  Payload ID: 3502
  Gene Symbol: CMTM1
  Gene Name: CKLF-like MARVEL transmembrane domain containing 1
  Uniprot ID: Q8IZ96
  ENSP ID: ENSP00000432387
MDPEHAKPESSEAPSGNLKQPETAAALLCSFQ

SEQ ID NO: 17409 - protein, 114 aa, Homo sapiens
  Payload ID: 3502
  Gene Symbol: CMTM1
  Gene Name: CKLF-like MARVEL transmembrane domain containing 1
  Uniprot ID: Q8IZ96
  ENSP ID: ENSP00000432398
MDPEHAKPESSEAPSGNLKQPETAAALSLILGALACFIITQANESFITITSLEICIVVFFILIYVLTLHHLLTYLHWPLLDLTNSIITAVFLSVVAILAMQEKKRRHLLYVGGR

SEQ ID NO: 17410 - protein, 61 aa, Homo sapiens
  Payload ID: 3502
  Gene Symbol: CMTM1
  Gene Name: CKLF-like MARVEL transmembrane domain containing 1
  Uniprot ID: Q8IZ96
  ENSP ID: ENSP00000432687
MDPEHAKPESSEAPSGNLKQPETAAALDLTNSIITAVFLSVVAILAMQEKKRRHLLYVGGR

SEQ ID NO: 17411 - protein, 131 aa, Homo sapiens; identical to SEQ ID NO: 17405
  Payload ID: 3502
  Gene Symbol: CMTM1
  Gene Name: CKLF-like MARVEL transmembrane domain containing 1
  ENSP ID: ENSP00000433160
  MOD_RES (1)..(1): Any amino acid

SEQ ID NO: 17412 - protein, 70 aa, Homo sapiens
  Payload ID: 3502
  Gene Symbol: CMTM1
  Gene Name: CKLF-like MARVEL transmembrane domain containing 1
  ENSP ID: ENSP00000434434
MQEKKRRHLLYVGGSLCLTAVIVCCIDAFVVTTKMRTNLKRFLGVEVERKLSPAKDAYPETGPDAPQRPA

SEQ ID NO: 17413 - protein, 28 aa, Homo sapiens
  Payload ID: 3502
  Gene Symbol: CMTM1
  Gene Name: CKLF-like MARVEL transmembrane domain containing 1
  Uniprot ID: Q8IZ96
  ENSP ID: ENSP00000435020
MDPEHAKPESSEAPSGNLKQPETAAALR

SEQ ID NO: 17414 - protein, 131 aa, Homo sapiens; identical to SEQ ID NO: 17405
  Payload ID: 3502
  Gene Symbol: CMTM1
  Gene Name: CKLF-like MARVEL transmembrane domain containing 1
  ENSP ID: ENSP00000435208
  MOD_RES (1)..(1): Any amino acid

SEQ ID NO: 17415 - protein, 131 aa, Homo sapiens; identical to SEQ ID NO: 17405
  Payload ID: 3502
  Gene Symbol: CMTM1
  Gene Name: CKLF-like MARVEL transmembrane domain containing 1
  ENSP ID: ENSP00000435485
  MOD_RES (1)..(1): Any amino acid

SEQ ID NO: 17416 - protein, 91 aa, Homo sapiens; identical to SEQ ID NO: 17401
  Payload ID: 3502
  Gene Symbol: CMTM1
  Gene Name: CKLF-like MARVEL transmembrane domain containing 1
  Uniprot ID: Q8IZ96
  ENSP ID: ENSP00000435755

SEQ ID NO: 17417 - protein, 238 aa, Homo sapiens
  Payload ID: 3502
  Gene Symbol: CMTM1
  Gene Name: CKLF-like MARVEL transmembrane domain containing 1
  ENSP ID: ENSP00000435786
MDPEHAKPESSEAPSGNLKQPETAAALASSGSVVSSVPKAQRNISAKTAPRKHPAVSIRSAQSAAAARPQGSEGTAPSRKATTRPPPKPTLPPPTPSAHTESKLLNEMAIKERVEGRAKVPYKFRDSLKRFSFSPTGMLKILRLVSGELDLTNSIITAVFLSVVAILAMQEKKRRHLLYVGGSLCLTAVIVCCIDAFVVTTKMRTNLKRFLGVEVERKLSPAKDAYPETGPDAPQRPA

SEQ ID NO: 17418 - protein, 38 aa, Homo sapiens; identical to SEQ ID NO: 17406
  Payload ID: 3502
  Gene Symbol: CMTM1
  Gene Name: CKLF-like MARVEL transmembrane domain containing 1
  Uniprot ID: Q8IZ96
  ENSP ID: ENSP00000437079

SEQ ID NO: 17419 - protein, 248 aa, Homo sapiens
  Payload ID: 3503
  Gene Symbol: CMTM2
  Gene Name: CKLF-like MARVEL transmembrane domain containing 2
  Uniprot ID: Q8TAZ6
  ENSP ID: ENSP00000268595
MAPKAAKGAKPEPAPAPPPPGAKPEEDKKDGKEPSDKPQKAVQDHKEPSDKPQKAVQPKHEVGTRRGCRRYRWELKDSNKEFWLLGHAEIKIRSLGCLIAAMILLSSLTVHPILRLIITMEISFFSFFILLYSFAIHRYIPFILWPISDLFNDLIACAFLVGAVVFAVRSRRSMNLHYLLAVILIGAAGVFAFIDVCLQRNHFRGKKAKKHMLVPPPGKEKGPQQGKGPEPAKPPEPGKPPGPAKGKK

SEQ ID NO: 17420 - protein, 195 aa, Homo sapiens
  Payload ID: 3503
  Gene Symbol: CMTM2
  Gene Name: CKLF-like MARVEL transmembrane domain containing 2
  Uniprot ID: Q8TAZ6
  ENSP ID: ENSP00000368800
MAPKAAKGAKPEPAPAPPPPGAKPEEDKKDGKEPSDKPQKAVQDHKEPSDKPQKAVQPKHEVGTRRGCRRYRWELKDSNKEFWLLGHAEIKIRSLDLFNDLIACAFLVGAVVFAVRSRRSMNLHYLLAVILIGAAGVFAFIDVCLQRNHFRGKKAKKHMLVPPPGKEKGPQQGKGPEPAKPPEPGKPPGPAKGKK

SEQ ID NO: 17421 - protein, 51 aa, Homo sapiens
  Payload ID: 3503
  Gene Symbol: CMTM2
  Gene Name: CKLF-like MARVEL transmembrane domain containing 2
  ENSP ID: ENSP00000454319
MAPKAAKGAKPEPAPAPPPPGAKPEEDKKDALPFIDTYPSSCGPFLTSSTT

SEQ ID NO: 17422 - protein, 182 aa, Homo sapiens
  Payload ID: 3504
  Gene Symbol: CMTM3
  Gene Name: CKLF-like MARVEL transmembrane domain containing 3
  Uniprot ID: Q96MX0
  ENSP ID: ENSP00000354579
MWPPDPDPDPDPEPAGGSRPGPAVPGLRALLPARAFLCSLKGRLLLAESGLSFITFICYVASSASAFLTAPLLEFLLALYFLFADAMQLNDKWQGLCWPMMDFLRCVTAALIYFAISITAIAKYSDGASKAAGVFGFFATIVFATDFYLIFNDVAKFLKQGDSADETTAHKTEEENSDSDSD

SEQ ID NO: 17423 - protein, 182 aa, Homo sapiens; identical to SEQ ID NO: 17422
  Payload ID: 3504
  Gene Symbol: CMTM3
  Gene Name: CKLF-like MARVEL transmembrane domain containing 3
  Uniprot ID: Q96MX0
  ENSP ID: ENSP00000400482

SEQ ID NO: 17424 - protein, 122 aa, Homo sapiens
  Payload ID: 3504
  Gene Symbol: CMTM3
  Gene Name: CKLF-like MARVEL transmembrane domain containing 3
  ENSP ID: ENSP00000454628
MWPPDPDPDPDPEPAGGSRPGPAVPGLRALLPARAFLCSLKGRLLLAESGLSFITFICYVASSASAFLTAPLLEFLLALYFLFADAMQLNDKWQGLCWPMMDFLRCVTAALIYFAISITAIA

SEQ ID NO: 17425 - protein, 182 aa, Homo sapiens; identical to SEQ ID NO: 17422
  Payload ID: 3504
  Gene Symbol: CMTM3
  Gene Name: CKLF-like MARVEL transmembrane domain containing 3
  Uniprot ID: Q96MX0
  ENSP ID: ENSP00000455758

SEQ ID NO: 17426 - protein, 182 aa, Homo sapiens; identical to SEQ ID NO: 17422
  Payload ID: 3504
  Gene Symbol: CMTM3
  Gene Name: CKLF-like MARVEL transmembrane domain containing 3
  Uniprot ID: Q96MX0
  ENSP ID: ENSP00000455851

SEQ ID NO: 17427 - protein, 59 aa, Homo sapiens
  Payload ID: 3504
  Gene Symbol: CMTM3
  Gene Name: CKLF-like MARVEL transmembrane domain containing 3
  Uniprot ID: Q96MX0
  ENSP ID: ENSP00000456426
MWPPDPDPDPDPEPAGGSRPGPAVPGLRALLPARAFLCSLKGPGGFVCTWCSCPHQPLW

SEQ ID NO: 17428 - protein, 116 aa, Homo sapiens
  Payload ID: 3504
  Gene Symbol: CMTM3
  Gene Name: CKLF-like MARVEL transmembrane domain containing 3
  ENSP ID: ENSP00000457451
MWPPDPDPDPDPEPAGGSRPGPAVPGLRALLPARAFLCSLKGRLLLAESGLSFITFICYVASSASAFLTAPLLEFLLALYFLFADAMQLNDKWQGLCWPMMDFLRCVTAALIYFAI

SEQ ID NO: 17429 - protein, 150 aa, Homo sapiens
  Payload ID: 3504
  Gene Symbol: CMTM3
  Gene Name: CKLF-like MARVEL transmembrane domain containing 3
  ENSP ID: ENSP00000457589
MWPPDPDPDPDPEPAGGSRPGPAVPGLRALLPARAFLCSLKGRLLLAESGLSFITFICYVASSASAFLTAPLLEFLLALYFLFADAMQLNDKWQGLCWPMMVFGFFATIVFATDFYLIFNDVAKFLKQGDSADETTAHKTEEENSDSDSD

SEQ ID NO: 17430 - protein, 96 aa, Homo sapiens
  Payload ID: 3504
  Gene Symbol: CMTM3
  Gene Name: CKLF-like MARVEL transmembrane domain containing 3
  ENSP ID: ENSP00000457923
MQLNDKWQGLCWPMMDFLRCVTAALIYFAISITAIAKYSDGASKAAGVFGFFATIVFATDFYLIFNDVAKFLKQGDSADETTAHKTEEENSDSDSD

SEQ ID NO: 17431 - protein, 96 aa, Homo sapiens
  Payload ID: 3504
  Gene Symbol: CMTM3
  Gene Name: CKLF-like MARVEL transmembrane domain containing 3
  ENSP ID: ENSP00000460330
MQLNDKWQGLCWPMMDFLRCVTAALIYFAISITAIAKYSDGASKAAGVFGFFATIVFATDFYLIFNDVAKFLKQGDSADETTAHKTEARCWGHGDL

SEQ ID NO: 17432 - protein, 96 aa, Homo sapiens; identical to SEQ ID NO: 17430
  Payload ID: 3504
  Gene Symbol: CMTM3
  Gene Name: CKLF-like MARVEL transmembrane domain containing 3
  ENSP ID: ENSP00000461654

SEQ ID NO: 17433 - protein, 96 aa, Homo sapiens; identical to SEQ ID NO: 17430
  Payload ID: 3504
  Gene Symbol: CMTM3
  Gene Name: CKLF-like MARVEL transmembrane domain containing 3
  ENSP ID: ENSP00000461758

SEQ ID NO: 17434 - protein, 79 aa, Homo sapiens
  Payload ID: 3504
  Gene Symbol: CMTM3
  Gene Name: CKLF-like MARVEL transmembrane domain containing 3
  ENSP ID: ENSP00000462554
MQLNDKWQGLCWPMMDFLRCVTAALIYFAISITAIAKYSDGASKAAGGSVPDTRAVCPSRSEMGREAGAAASRSRESAL

SEQ ID NO: 17435 - protein, 165 aa, Homo sapiens
  Payload ID: 3504
  Gene Symbol: CMTM3
  Gene Name: CKLF-like MARVEL transmembrane domain containing 3
  ENSP ID: ENSP00000462613
MWPPDPDPDPDPEPAGGSRPGPAVPGLRALLPARAFLCSLKGRLLLAESGLSFITFICYVASSASAFLTAPLLEFLLALYFLFADAMQLNDKWQGLCWPMMDFLRCVTAALIYFAISITAIAKYSDGASKAAGGSVPDTRAVCPSRSEMGREAGAAASRSRESAL

SEQ ID NO: 17436 - protein, 234 aa, Homo sapiens
  Payload ID: 3505
  Gene Symbol: CMTM4
  Gene Name: CKLF-like MARVEL transmembrane domain containing 4
  Uniprot ID: Q8IZR5
  ENSP ID: ENSP00000333833
MRSGEELDGFEGEASSTSMISGASSPYQPTTEPVSQRRGLAGLRCDPDYLRGALGRLKVAQVILALIAFICIETIMACSPCEGLYFFEFVSCSAFVVTGVLLIMFSLNLHMRIPQINWNLTDLVNTGLSAFLFFIASIVLAALNHRAGAEIAAVIFGFLATAAYAVNTFLAVQKWRVSVRQQSTNDYIRARTESRDVDSRPEIQRLDTFSYSTNVTVRKKSPTNLLSLNHWQLA

SEQ ID NO: 17437 - protein, 208 aa, Homo sapiens
  Payload ID: 3505
  Gene Symbol: CMTM4
  Gene Name: CKLF-like MARVEL transmembrane domain containing 4
  Uniprot ID: Q8IZR5
  ENSP ID: ENSP00000377666
MRSGEELDGFEGEASSTSMISGASSPYQPTTEPVSQRRGLAGLRCDPDYLRGALGRLKVAQVILALIAFICIETIMACSPCEGLYFFEFVSCSAFVVTGVLLIMFSLNLHMRIPQINWNLTDLVNTGLSAFLFFIASIVLAALNHRAGAEIAAVIFGFLATAAYAVNTFLAVQKWRVSVRQQSTNDYIRARTESRDVDSRPEIQRLDT

SEQ ID NO: 17438 - protein, 179 aa, Homo sapiens
  Payload ID: 3505
  Gene Symbol: CMTM4
  Gene Name: CKLF-like MARVEL transmembrane domain containing 4
  Uniprot ID: Q8IZR5
  ENSP ID: ENSP00000456380
MRSGEELDGFEGEASSTSMISGASSPYQPTTEPILALIAFICIETIMACSPCEGLYFFEFVSCSAFVVTGVLLIMFSLNLHMRIPQINWNLTDLVNTGLSAFLFFIASIVLAALNHRAGAEIAAVIFGFLATAAYAVNTFLAVQKWRVSVRQQSTNDYIRARTESRDVDSRPEIQRLDT

SEQ ID NO: 17439 - protein, 140 aa, Homo sapiens
  Payload ID: 3505
  Gene Symbol: CMTM4
  Gene Name: CKLF-like MARVEL transmembrane domain containing 4
  ENSP ID: ENSP00000464316
FVVTGVLLIMFSLNLHMRIPQINWNLTDLVNTGLSAFLFFIASIVLAALNHRAGAEIAAVIFGFLATAAYAVNTFLAVQKWRVSVRQQSTNDYIRARTESRDVDSRPEIQRLDTFSYSTNVTVRKKSPTNLLSLNHWQLA

SEQ ID NO: 17440 - protein, 74 aa, Homo sapiens
  Payload ID: 3506
  Gene Symbol: CMTM5
  Gene Name: CKLF-like MARVEL transmembrane domain containing 5
  Uniprot ID: Q96DZ9
  ENSP ID: ENSP00000344160
MLSARDRRDRHPEEGVVAELQGFAVDKAFLTSHKGILLETELVFGIILVSIFAYDAFKIYRTEMAPGASQGDQQ

SEQ ID NO: 17441 - protein, 223 aa, Homo sapiens
  Payload ID: 3506
  Gene Symbol: CMTM5
  Gene Name: CKLF-like MARVEL transmembrane domain containing 5
  Uniprot ID: Q96DZ9
  ENSP ID: ENSP00000344819
MLSARDRRDRHPEEGVVAELQGFAVDKAFLTSHKGILLETELALTLIIFICFTASISAYMAAALLEFFITLAFLFLYATQYYQRFDRINWPCLLQGHGQSGGPHPLDLLSHSAKVQPQPWPGLTPPGWHTPAAVPWVPAPAPGFWSWLLWFICFHSLGSSDFLRCVSAIIIFLVVSFAAVTSRDGAAIAAFVFGIILVSIFAYDAFKIYRTEMAPGASQGDQQ

SEQ ID NO: 17442 - protein, 156 aa, Homo sapiens
  Payload ID: 3506
  Gene Symbol: CMTM5
  Gene Name: CKLF-like MARVEL transmembrane domain containing 5
  Uniprot ID: Q96DZ9
  ENSP ID: ENSP00000352270
MLSARDRRDRHPEEGVVAELQGFAVDKAFLTSHKGILLETELALTLIIFICFTASISAYMAAALLEFFITLAFLFLYATQYYQRFDRINWPCLDFLRCVSAIIIFLVVSFAAVTSRDGAAIAAFVFGIILVSIFAYDAFKIYRTEMAPGASQGDQQ

SEQ ID NO: 17443 - protein, 125 aa, Homo sapiens
  Payload ID: 3506
  Gene Symbol: CMTM5
  Gene Name: CKLF-like MARVEL transmembrane domain containing 5
  Uniprot ID: Q96DZ9
  ENSP ID: ENSP00000372259
MLSARDRRDRHPEEGVVAELQGFAVDKAFLTSHKGILLETELALTLIIFICFTASISAYMAAALLEFFITLAFLFLYATQYYQRFDRINWPCLVFGIILVSIFAYDAFKIYRTEMAPGASQGDQQ

SEQ ID NO: 17444 - protein, 105 aa, Homo sapiens
  Payload ID: 3506
  Gene Symbol: CMTM5
  Gene Name: CKLF-like MARVEL transmembrane domain containing 5
  Uniprot ID: Q96DZ9
  ENSP ID: ENSP00000380404
MLSARDRRDRHPEEGVVAELQGFAVDKAFLTSHKGILLETELDFLRCVSAIIIFLVVSFAAVTSRDGAAIAAFVFGIILVSIFAYDAFKIYRTEMAPGASQGDQQ

SEQ ID NO: 17445 - protein, 118 aa, Homo sapiens
  Payload ID: 3506
  Gene Symbol: CMTM5
  Gene Name: CKLF-like MARVEL transmembrane domain containing 5
  ENSP ID: ENSP00000451514
MLSARDRRDRHPEEGVVAELQGFAVDKAFLTSHKGILLETELYYQRFDRINWPCLDFLRCVSAIIIFLVVSFAAVTSRDGAAIAAFVFGIILVSIFAYDAFKIYRTEMAPGASQGDQQ

SEQ ID NO: 17446 - protein, 183 aa, Homo sapiens
  Payload ID: 3507
  Gene Symbol: CMTM6
  Gene Name: CKLF-like MARVEL transmembrane domain containing 6
  Uniprot ID: Q9NX76
  ENSP ID: ENSP00000205636
MENGAVYSPTTEEDPGPARGPRSGLAAYFFMGRLPLLRRVLKGLQLLLSLLAFICEEVVSQCTLCGGLYFFEFVSCSAFLLSLLILIVYCTPFYERVDTTKVKSSDFYITLGTGCVFLLASIIFVSTHDRTSAEIAAIVFGFIASFMFLLDFITMLYEKRQESQLRKPENTTRAEALTEPLNA

SEQ ID NO: 17447 - protein, 142 aa, Homo sapiens
  Payload ID: 3508
  Gene Symbol: CMTM7
  Gene Name: CKLF-like MARVEL transmembrane domain containing 7
  Uniprot ID: Q96FZ5
  ENSP ID: ENSP00000283621
MSHGAGLVRTTCSSGSALGPGAGAAQPSASPLEGLLDLSYPRTHAALLKVAQMVTLLIAFICVRSSLWTNYSAYSYFEVVTICDLIMILAFYLVHLFRFYRVLTCISWPLSIFGFMATFLCMASIWLSYKISCVTQSTDAAV

SEQ ID NO: 17448 - protein, 175 aa, Homo sapiens
  Payload ID: 3508
  Gene Symbol: CMTM7
  Gene Name: CKLF-like MARVEL transmembrane domain containing 7
  Uniprot ID: Q96FZ5
  ENSP ID: ENSP00000335605
MSHGAGLVRTTCSSGSALGPGAGAAQPSASPLEGLLDLSYPRTHAALLKVAQMVTLLIAFICVRSSLWTNYSAYSYFEVVTICDLIMILAFYLVHLFRFYRVLTCISWPLSELLHYLIGTLLLLIASIVAASKSYNQSGLVAGAIFGFMATFLCMASIWLSYKISCVTQSTDAAV

SEQ ID NO: 17449 - protein, 151 aa, Homo sapiens
  Payload ID: 3508
  Gene Symbol: CMTM7
  Gene Name: CKLF-like MARVEL transmembrane domain containing 7
  ENSP ID: ENSP00000414480
MSHGAGLVRTTCSSGSALGPGAGAAQPSASPLEGLLDLSYPRTHAALLKVAQMVTLLIAFICVRSSLWTNYSAYSYFEVVTICDLIMILAFYLVHLFRFYRVLTCISWPLSELLHYLIGTLLLLIASIVAASKSYNQSGLVAGADNQSPLA

SEQ ID NO: 17450 - protein, 163 aa, Homo sapiens
  Payload ID: 3508
  Gene Symbol: CMTM7
  Gene Name: CKLF-like MARVEL transmembrane domain containing 7
  ENSP ID: ENSP00000440333
AALLKVAQMVTLLIAFICVRSSLWTNYSAYSYFEVVTICDLIMILAFYLVHLFRFYRVLTCISWPLSMQPSDEATTPRPLRSFAERRTCTPGEASGPVFLCQSPVRLVGTRKGLHPLPALPGSQLPELLSQPETLPPAFRGEHPSHSGKGKQPPGKCFLPSCF

SEQ ID NO: 17451 - protein, 44 aa, Homo sapiens
  Payload ID: 3508
  Gene Symbol: CMTM7
  Gene Name: CKLF-like MARVEL transmembrane domain containing 7
  ENSP ID: ENSP00000445027
  MOD_RES (1)..(1): Any amino acid
XKSYNQSGLVAGAIFGFMATFLCMASIWLSYKISCVTQSTDAAV

SEQ ID NO: 17452 - protein, 173 aa, Homo sapiens
  Payload ID: 3509
  Gene Symbol: CMTM8
  Gene Name: CKLF-like MARVEL transmembrane domain containing 8
  Uniprot ID: Q8IZV2
  ENSP ID: ENSP00000307741
MEEPQRARSHTVTTTASSFAENFSTSSSSFAYDREFLRTLPGFLIVAEIVLGLLVWTLIAGTEYFRVPAFGWVMFVAVFYWVLTVFFLIIYITMTYTRIPQVPWTTVGLCFNGSAFVLYLSAAVVDASSVSPERDSHNFNSWAASSFFAFLVTICYAGNTYFSFIAWRSRTIQ

SEQ ID NO: 17453 - protein, 115 aa, Homo sapiens
  Payload ID: 3509
  Gene Symbol: CMTM8
  Gene Name: CKLF-like MARVEL transmembrane domain containing 8
  Uniprot ID: Q8IZV2
  ENSP ID: ENSP00000412934
MEEPQRARSHTVTTTASSFAENFSTSSSSFAYDREFLRTLPGFLIVAEIGLCFNGSAFVLYLSAAVVDASSVSPERDSHNFNSWAASSFFAFLVTICYAGNTYFSFIAWRSRTIQ

SEQ ID NO: 17454 - protein, 120 aa, Homo sapiens
  Payload ID: 3510
  Gene Symbol: CLRN1
  Gene Name: clarin 1
  Uniprot ID: P58418
  ENSP ID: ENSP00000295911
MQALQQQPVFPDLLKAIPVSIHVNVILFSAILIVLTMVGTAFFMYNAFGKPFETLHGPLGLYLLSFISGSCGCLVMILFASEVKIHHLSEKIANYKEGTYVYKTQSEKYTTSFWLTKGHS

SEQ ID NO: 17455 - protein, 232 aa, Homo sapiens
  Payload ID: 3510
  Gene Symbol: CLRN1
  Gene Name: clarin 1
  Uniprot ID: P58418
  ENSP ID: ENSP00000322280
MPSQQKKIIFCMAGVFSFACALGVVTALGTPLWIKATVLCKTGALLVNASGQELDKFMGEMQYGLFHGEGVRQCGLGARPFRFSFFPDLLKAIPVSIHVNVILFSAILIVLTMVGTAFFMYNAFGKPFETLHGPLGLYLLSFISGSCGCLVMILFASEVKIHHLSEKIANYKEGTYVYKTQSEKYTTSFWVIFFCFFVHFLNGLLIRLAGFQFPFAKSKDAETTNVAADLMY

SEQ ID NO: 17456 - protein, 245 aa, Homo sapiens
  Payload ID: 3510
  Gene Symbol: CLRN1
  Gene Name: clarin 1
  Uniprot ID: P58418
  ENSP ID: ENSP00000329158
MPSQQKKIIFCMAGVFSFACALGVVTALGTPLWIKATVLCKTGALLVNASGQELDKFMGEMQYGLFHGEGVRQCGLGARPFRFSFFPDLLKAIPVSIHVNVILFSAILIVLTMVGTAFFMYNAFGKPFETLHGPLGLYLLSFISVALWLPATRHQAQGSCGCLVMILFASEVKIHHLSEKIANYKEGTYVYKTQSEKYTTSFWVIFFCFFVHFLNGLLIRLAGFQFPFAKSKDAETTNVAADLMY

SEQ ID NO: 17457 - protein, 39 aa, Homo sapiens
  Payload ID: 3510
  Gene Symbol: CLRN1
  Gene Name: clarin 1
  ENSP ID: ENSP00000419244
MVGTAFFMYNAFGKPFETLHGPLGLYLLSFISGSCGCLV

SEQ ID NO: 17458 - protein, 115 aa, Homo sapiens
  Payload ID: 3510
  Gene Symbol: CLRN1
  Gene Name: clarin 1
  ENSP ID: ENSP00000419892
MQALQQQPVFPDLLKAIPVSIHVNVILFSAILIVLTMVGTAFFMYNAFGKPFETLHGPLGLYLLSFISGSCGCLVMILFASEVKIHHLSEKIANYKEGTYVYKTQSEKYTTSFWV

SEQ ID NO: 17459 - protein, 232 aa, Homo sapiens
  Payload ID: 3511
  Gene Symbol: CLRN2
  Gene Name: clarin 2
  Uniprot ID: A0PK11
  ENSP ID: ENSP00000424711
MPGWFKKAWYGLASLLSFSSFILIIVALVVPHWLSGKILCQTGVDLVNATDRELVKFIGDIYYGLFRGCKVRQCGLGGRQSQFTIFPHLVKELNAGLHVMILLLLFLALALALVSMGFAILNMIQVPYRAVSGPGGICLWNVLAGGVVALAIASFVAAVKFHDLTERIANFQEKLFQFVVVEEQYEESFWICVASASAHAANLVVVAISQIPLPEIKTKIEEATVTAEDILY

SEQ ID NO: 17460 - protein, 226 aa, Homo sapiens
  Payload ID: 3512
  Gene Symbol: CLRN3
  Gene Name: clarin 3
  Uniprot ID: Q8NCR9
  ENSP ID: ENSP00000357660
MPTTKKTLMFLSSFFTSLGSFIVICSILGTQAWITSTIAVRDSASNGSIFITYGLFRGESSEELSHGLAEPKKKFAVLEILNNSSQKTLHSVTILFLVLSLITSLLSSGFTFYNSISNPYQTFLGPTGVYTWNGLGASFVFVTMILFVANTQSNQLSEELFQMLYPATTSKGTTHSYGYSFWLILLVILLNIVTVTIIIFYQKARYQRKQEQRKPMEYAPRDGILF

SEQ ID NO: 17461 - protein, 1332 aa, Homo sapiens
  Payload ID: 3513
  Gene Symbol: CLSPN
  Gene Name: claspin
  Uniprot ID: Q9HAW4
  ENSP ID: ENSP00000251195
MTGEVGSEVHLEINDPNVISQEEADSPSDSGQGSYETIGPLSEGDSDEEIFVSKKLKNRKVLQDSDSETEDTNASPEKTTYDSAEEENKENLYAGKNTKIKRIYKTVADSDESYMEKSLYQENLEAQVKPCLELSLQSGNSTDFTTDRKSSKKHIHDKEGTAGKAKVKSKRRLEKEERKMEKIRQLKKKETKNQEDDVEQPFNDSGCLLVDKDLFETGLEDENNSPLEDEESLESIRAAVKNKVKKHKKKEPSLESGVHSFEEGSELSKGTTRKERKAARLSKEALKQLHSETQRLIRESALNLPYHMPENKTIHDFFKRKPRPTCHGNAMALLKSSKYQSSHHKEIIDTANTTEMNSDHHSKGSEQTTGAENEVETNALPVVSKETQIITGSDESCRKDLVKNEELEIQEKQKQSDIRPSPGDSSVLQQESNFLGNNHSEECQVGGLVAFEPHALEGEGPQNPEETDEKVEEPEQQNKSSAVGPPEKVRRFTLDRLKQLGVDVSIKPRLGADEDSFVILEPETNRELEALKQRFWKHANPAAKPRAGQTVNVNVIVKDMGTDGKEELKADVVPVTLAPKKLDGASHTKPGEKLQVLKAKLQEAMKLRRFEERQKRQALFKLDNEDGFEEEEEEEEEMTDESEEDGEEKVEKEEKEEELEEEEEKEEEEEEEGNQETAEFLLSSEEIETKDEKEMDKENNDGSSEIGKAVGFLSVPKSLSSDSTLLLFKDSSSKMGYFPTEEKSETDENSGKQPSKLDEDDSCSLLTKESSHNSSFELIGSTIPSYQPCNRQTGRGTSFFPTAGGFRSPSPGLFRASLVSSASKSSGKLSEPSLPIEDSQDLYNASPEPKTLFLGAGDFQFCLEDDTQSQLLDADGFLNVRNHRNQYQALKPRLPLASMDENAMDANMDELLDLCTGKFTSQAEKHLPRKSDKKENMEELLNLCSGKFTSQDASTPASSELNKQEKESSMGDPMEEALALCSGSFPTDKEEEDEEEEFGDFRLVSNDNEFDSDEDEHSDSGNDLALEDHEDDDEEELLKRSEKLKRQMRLRKYLEDEAEVSGSDVGSEDEYDGEEIDEYEEDVIDEVLPSDEELQSQIKKIHMKTMLDDDKRQLRLYQERYLADGDLHSDGPGRMRKFRWKNIDDASQMDLFHRDSDDDQTEEQLDESEARWRKERIEREQWLRDMAQQGKITAEEEEEIGEDSQFMILAKKVTAKALQKNASRPMVIQESKSLLRNPFEAIRPGSAQQVKTGSLLNQPKAVLQKLAALSDHNPSAPRNSRNFVFHTLSPVKAEAAKESSKSQKIPEKDSDWLTWSGAPIPGFFRLSFDPHG

SEQ ID NO: 17462 - protein, 1339 aa, Homo sapiens
  Payload ID: 3513
  Gene Symbol: CLSPN
  Gene Name: claspin
  Uniprot ID: Q9HAW4
  ENSP ID: ENSP00000312995
MTGEVGSEVHLEINDPNVISQEEADSPSDSGQGSYETIGPLSEGDSDEEIFVSKKLKNRKVLQDSDSETEDTNASPEKTTYDSAEEENKENLYAGKNTKIKRIYKTVADSDESYMEKSLYQENLEAQVKPCLELSLQSGNSTDFTTDRKSSKKHIHDKEGTAGKAKVKSKRRLEKEERKMEKIRQLKKKETKNQEDDVEQPFNDSGCLLVDKDLFETGLEDENNSPLEDEESLESIRAAVKNKVKKHKKKEPSLESGVHSFEEGSELSKGTTRKERKAARLSKEALKQLHSETQRLIRESALNLPYHMPENKTIHDFFKRKPRPTCHGNAMALLKSSKYQSSHHKEIIDTANTTEMNSDHHSKGSEQTTGAENEVETNALPVVSKETQIITGSDESCRKDLVKNEELEIQEKQKQSDIRPSPGDSSVLQQESNFLGNNHSEECQVGGLVAFEPHALEGEGPQNPEETDEKVEEPEQQNKSSAVGPPEKVRRFTLDRLKQLGVDVSIKPRLGADEDSFVILEPETNRELEALKQRFWKHANPAAKPRAGQTVNVNVIVKDMGTDGKEELKADVVPVTLAPKKLDGASHTKPGEKLQVLKAKLQEAMKLRRFEERQKRQALFKLDNEDGFEEEEEEEEEMTDESEEDGEEKVEKEEKEEELEEEEEKEEEEEEEGNQETAEFLLSSEEIETKDEKEMDKENNDGSSEIGKAVGFLSVPKSLSSDSTLLLFKDSSSKMGYFPTEEKSETDENSGKQPSKLDEDDSCSLLTKESSHNSSFELIGSTIPSYQPCNRQTGRGTSFFPTAGGFRSPSPGLFRASLVSSASKSSGKLSEPSLPIEDSQDLYNASPEPKTLFLGAGDFQFCLEDDTQSQLLDADGFLNVRNHRNQYQALKPRLPLASMDENAMDANMDELLDLCTGKFTSQAEKHLPRKSDKKENMEELLNLCSGKFTSQDASTPASSELNKQEKESSMGDPMEEALALCSGSFPTDKEEEDEEEEFGDFRLVSNDNEFDSDEDEHSDSGNDLALEDHEDDDEEELLKRSEKLKRQMRLRKYLEDEAEVSGSDVGSEDEYDGEEIDEYEEDVIDEVLPSDEELQSQIKKIHMKTMLDDDKRQLRLYQERYLADGDLHSDGPGRMRKFRWKNIDDASQMDLFHRDSDDDQTEEQLDESEARWRKERIEREQWLRDMAQQGKITAEEEEEIGEDSQFMILAKKVTAKALQKNASRPMVIQESKSLLRNPFEAIRPGSAQQVKTGSLLNQPKAVLQKLAALSDHNPSAPRNSRNFVFHTLSPVKAEAAKESSKSQVKKRGPSFMTSPSPKHLKTDDSTSGLTRSIFKYLES

SEQ ID NO: 17463 - protein, 1275 aa, Homo sapiens
  Payload ID: 3513
  Gene Symbol: CLSPN
  Gene Name: claspin
  Uniprot ID: Q9HAW4
  ENSP ID: ENSP00000362317
MTGEVGSEVHLEINDPNVISQEEADSPSDSGQGSYETIGPLSEGDSDEEIFVSKKLKNRKVLQDSDSETEDTNASPEKTTYDSAEEENKENLYAGKNTKIKRIYKTVADSDESYMEKSLYQENLEAQVKPCLELSLQSGNSTDFTTDRKSSKKHIHDKEGTAGKAKVKSKRRLEKEERKMEKIRQLKKKETKNQEDDVEQPFNDSGCLLVDKDLFETGLEDENNSPLEDEESLESIRAAVKNKVKKHKKKEPSLESGVHSFEEGSELSKGTTRKERKAARLSKEALKQLHSETQRLIRESALNLPYHMPENKTIHDFFKRKPRPTCHGNAMALLKSSKYQSSHHKEIIDTANTTEMNSDHHSKGSEQTTGAENEVETNALPVVSKETQIITGSDESCRKDLVKNEELEIQEKQKQSDIRPSPGDSSVLQQESNFLGNNHSEECQVGGLVAFEPHALEGEGPQNPEETDEKVEEPEQQNKSSAVGPPEKVRRFTLDRLKQLGVDVSIKPRLGADEDSFVILEPETNRGEKLQVLKAKLQEAMKLRRFEERQKRQALFKLDNEDGFEEEEEEEEEMTDESEEDGEEKVEKEEKEEELEEEEEKEEEEEEEGNQETAEFLLSSEEIETKDEKEMDKENNDGSSEIGKAVGFLSVPKSLSSDSTLLLFKDSSSKMGYFPTEEKSETDENSGKQPSKLDEDDSCSLLTKESSHNSSFELIGSTIPSYQPCNRQTGRGTSFFPTAGGFRSPSPGLFRASLVSSASKSSGKLSEPSLPIEDSQDLYNASPEPKTLFLGAGDFQFCLEDDTQSQLLDADGFLNVRNHRNQYQALKPRLPLASMDENAMDANMDELLDLCTGKFTSQAEKHLPRKSDKKENMEELLNLCSGKFTSQDASTPASSELNKQEKESSMGDPMEEALALCSGSFPTDKEEEDEEEEFGDFRLVSNDNEFDSDEDEHSDSGNDLALEDHEDDDEEELLKRSEKLKRQMRLRKYLEDEAEVSGSDVGSEDEYDGEEIDEYEEDVIDEVLPSDEELQSQIKKIHMKTMLDDDKRQLRLYQERYLADGDLHSDGPGRMRKFRWKNIDDASQMDLFHRDSDDDQTEEQLDESEARWRKERIEREQWLRDMAQQGKITAEEEEEIGEDSQFMILAKKVTAKALQKNASRPMVIQESKSLLRNPFEAIRPGSAQQVKTGSLLNQPKAVLQKLAALSDHNPSAPRNSRNFVFHTLSPVKAEAAKESSKSQVKKRGPSFMTSPSPKHLKTDDSTSGLTRSIFKYLES

SEQ ID NO: 17464 - protein, 1286 aa, Homo sapiens
  Payload ID: 3513
  Gene Symbol: CLSPN
  Gene Name: claspin
  ENSP ID: ENSP00000428848
MTGEVGSEVHLEINDPNVISQEEADSPSDSGQGSYETIGPLSEGDSDEEIFVSKKLKNRKVLQDSDSETEDTNASPEKTTYDSAEEENKENLYAGKNTKIKRIYKTVADSDESYMEKSLYQENLEAQVKPCLELSLQSGNSTDFTTDRKSSKKHIHDKEGTAGKAKVKSKRRLEKEERKMEKIRQLKKKETKNQEDDVEQPFNDSGCLLVDKDLFETGLEDENNSPLEDEESLESIRAAVKNKVKKHKKKEPSLESGVHSFEEGSELSKGTTRKERKAARLSKEALKQLHSETQRLIRESALNLPYHMPENKTIHDFFKRKPRPTCHGNAMALLKSSKYQSSHHKEIIDTANTTEMNSDHHSKGSEQTTGAENEVETNALPVVSKETQIITGSDESCRKDLVKNEELEIQEKQKQSDIRPSPGDSSVLQQESNFLGNNHSEECQVGGLVAFEPHALEGEGPQNPEETDEKVEEPEQQNKSSAVGPPEKVRRFTLDRLKQLGVDVSIKPRLGADEDSFVILEPETNRELEALKQRFWKHANPAAKPRAGQTVNVNVIVKDMGTDGKEELKADVVPVTLAPKKLDGASHTKPGEKLQVLKAKLQEAMKLRRFEERQKRQALFKLDNEDGFEEEEEEEEEMTDESEEDGEEKVEKEEKEEELEEEEEKEEEEEEEGNQEDSSSKMGYFPTEEKSETDENSGKQPSKLDEDDSCSLLTKESSHNSSFELIGSTIPSYQPCNRQTGRGTSFFPTAGGFRSPSPGLFRASLVSSASKSSGKLSEPSLPIEDSQDLYNASPEPKTLFLGAGDFQFCLEDDTQSQLLDADGFLNVRNHRNQYQALKPRLPLASMDENAMDANMDELLDLCTGKFTSQAEKHLPRKSDKKENMEELLNLCSGKFTSQDASTPASSELNKQEKESSMGDPMEEALALCSGSFPTDKEEEDEEEEFGDFRLVSNDNEFDSDEDEHSDSGNDLALEDHEDDDEEELLKRSEKLKRQMRLRKYLEDEAEVSGSDVGSEDEYDGEEIDEYEEDVIDEVLPSDEELQSQIKKIHMKTMLDDDKRQLRLYQERYLADGDLHSDGPGRMRKFRWKNIDDASQMDLFHRDSDDDQTEEQLDESEARWRKERIEREQWLRDMAQQGKITAEEEEEIGEDSQFMILAKKVTAKALQKNASRPMVIQESKSLLRNPFEAIRPGSAQQVKTGSLLNQPKAVLQKLAALSDHNPSAPRNSRNFVFHTLSPVKAEAAKESSKSQVKKRGPSFMTSPSPKHLKTDDSTSGLTRSIFKYLES

SEQ ID NO: 17465 - protein, 1130 aa, Homo sapiens
  Payload ID: 3514
  Gene Symbol: CIITA
  Gene Name: class II, major histocompatibility complex, transactivator
  ENSP ID: ENSP00000316328
MRCLAPRPAGSYLSEPQGSSQCATMELGPLEGGYLELLNSDADPLCLYHFYDQMDLAGEEEIELYSEPDTDTINCDQFSRLLCDMEGDEETREAYANIAELDQYVFQDSQLEGLSKDIFKHIGPDEVIGESMEMPAEVGQKSQKRPFPEELPADLKHWKPAEPPTVVTGSLLVGPVSDCSTLPCLPLPALFNQEPASGQMRLEKTDQIPMPFSSSSLSCLNLPEGPIQFVPTISTLPHGLWQISEAGTGVSSIFIYHGEVPQASQVPPPSGFTVHGLPTSPDRPGSTSPFAPSATDLPSMPEPALTSRANMTEHKTSPTQCPAAGEVSNKLPKWPEPVEQFYRSLQDTYGAEPAGPDGILVEVDLVQARLERSSSKSLERELATPDWAERQLAQGGLAEVLLAAKEHRRPRETRVIAVLGKAGQGKSYWAGAVSRAWACGRLPQYDFVFSVPCHCLNRPGDAYGLQDLLFSLGPQPLVAADEVFSHILKRPDRVLLILDGFEELEAQDGFLHSTCGPAPAEPCSLRGLLAGLFQKKLLRGCTLLLTARPRGRLVQSLSKADALFELSGFSMEQAQAYVMRYFESSGMTEHQDRALTLLRDRPLLLSHSHSPTLCRAVCQLSEALLELGEDAKLPSTLTGLYVGLLGRAALDSPPGALAELAKLAWELGRRHQSTLQEDQFPSADVRTWAMAKGLVQHPPRAAESELAFPSFLLQCFLGALWLALSGEIKDKELPQYLALTPRKKRPYDNWLEGVPRFLAGLIFQPPARCLGALLGPSAAASVDRKQKVLARYLKRLQPGTLRARQLLELLHCAHEAEEAGIWQHVVQELPGRLSFLGTRLTPPDAHVLGKALEAAGQDFSLDLRSTGICPSGLGSLVGLSCVTRFRAALSDTVALWESLQQHGETKLLQAAEEKFTIEPFKAKSLKDVEDLGKLVQTQRTRSSSEDTAGELPAVRDLKKLEFALGPVSGPQAFPKLVRILTAFSSLQHLDLDALSENKIGDEGVSQLSATFPQLKSLETLNLSQNNITDLGAYKLAEALPSLAASLLRLSLYNNCICDVGAESLARVLPDMVSLRVMDVQYNKFTAAGAQQLAASLRRCPHVETLAMWTPTIPFSVQEHLQQQDSRISLR

SEQ ID NO: 17466 - protein, 546 aa, Homo sapiens
  Payload ID: 3514
  Gene Symbol: CIITA
  Gene Name: class II, major histocompatibility complex, transactivator
  Uniprot ID: P33076
  ENSP ID: ENSP00000371257
MRCLAPRPAGSYLSEPQGSSQCATMELGPLEGGYLELLNSDADPLCLYHFYDQMDLAGEEEIELYSEPDTDTINCDQFSRLLCDMEGDEETREAYANIAELDQYVFQDSQLEGLSKDIFKHIGPDEVIGESMEMPAEVGQKSQKRPFPEELPADLKHWKPVPFSSSSLSCLNLPEGPIQFVPTISTLPHGLWQISEAGTGVSSIFIYHGEVPQASQVPPPSGFTVHGLPTSPDRPGSTSPFAPSATDLPSMPEPALTSRANMTEHKTSPTQCPAAGEVSNKLPKWPGLAWSPCLGLRPSLHRAALSDTVALWESLQQHGETKLLQAAEEKFTIEPFKAKSLKDVEDLGKLVQTQRTRSSSEDTAGELPAVRDLKKLEFALGPVSGPQAFPKLVRILTAFSSLQHLDLDALSENKIGDEGVSQLSATFPQLKSLETLNLSQNNITDLGAYKLAEALPSLAASLLRLSLYNNCICDVGAESLARVLPDMVSLRVMDVQYNKFTAAGAQQLAASLRRCPHVETLAMWTPTIPFSVQEHLQQQDSRISLR

SEQ ID NO: 17467 - protein, 177 aa, Homo sapiens
  Payload ID: 3514
  Gene Symbol: CIITA
  Gene Name: class II, major histocompatibility complex, transactivator
  ENSP ID: ENSP00000459608
MELGPLEGGYLELLNSDADPLCLYHFYDQMDLAGEEEIELYSEPDTDTINCDQFSRLLCDMEGDEETREAYANIAELDQYVFQDSQLEGLSKDIFKHIGPDEVIGESMEMPAEVGQKSQKRPFPEELPADLKHWKPAEPPTVVTGSLLVGPVSDCSTLPCLPLPALFNQEPASGQMR

SEQ ID NO: 17468 - protein, 172 aa, Homo sapiens
  Payload ID: 3514
  Gene Symbol: CIITA
  Gene Name: class II, major histocompatibility complex, transactivator
  ENSP ID: ENSP00000459829
MRCLAPRPAGSYLSEPQGSSQCATMELGPLEGGYLELLNSDADPLCLYHFYDQMDLAGEEEIELYSEPDTDTINCDQFSRLLCDMEGDEETREAYANIAELDQYVFQDSQLEGLSKDIFKHIGPDEVIGESMEMPAEVGQKSQKRPFPEELPADLKHWKPALRVEALGSCSA

SEQ ID NO: 17469 - protein, 884 aa, Homo sapiens
  Payload ID: 3514
  Gene Symbol: CIITA
  Gene Name: class II, major histocompatibility complex, transactivator
  ENSP ID: ENSP00000483487
MRCLAPRPAGSYLSEPQGSSQCATMELGPLEGGYLELLNSDADPLCLYHFYDQMDLAGEEEIELYSEPDTDTINCDQFSRLLCDMEGDEETREAYANIAELDQYVFQDSQLEGLSKDIFIEHIGPDEVIGESMEMPAEVGQKSQKRPFPEELPADLKHWKPVPFSSSSLSCLNLPEGPIQFVPTISTLPHGLWQISEAGTGVSSIFIYHGEVPQASQVPPPSGFTVHGLPTSPDRPGSTSPFAPSATDLPSMPEPALTSRANMTEHKTSPTQCPAAGEVSNKLPKWPEPVEQFYRSLQDTYGAEPAGPDGILVEVDLVQARLERSSSKSLERELATPDWAERQLAQGGLAEVLLAAKEHRRPRETRVIAVLGKAGQGKSYWAGAVSRAWACGRLPQYDFVFSVPCHCLNRPGDAYGLQDLLFSLGPQPLVAADEVFSHILKRPDRVLLILDGFEELEAQDGFLHSTCGPAPAEPCSLRGLLAGLFQKKLLRGCTLLLTARPRGRLVQSLSKADALFELSGFSMEQAQAYVMRYFESSGMTEHQDRALTLLRDRPLLLSHSHSPTLCRAVCQLSEALLELGEDAKLPSTLTGLYVGLLGRAALDSPPGALAELAKLAWELGRRHQSTLQEDQFPSADVRTWAMAKGLVQHPPRAAESELAFPSFLLQCFLGALWLALSGEIKDKELPQYLALTPRKKRPYDNWLEGVPRFLAGLIFQPPARCLGALLGPSAAASVDRKQKVLARYLKRLQPGTLRARQLLELLHCAHEAEEAGIWQHVVQELPGRLSFLGTRLTPPDAHVLGKALEAAGQDFSLDLRSTGICPSGLGSLVGLSCVTRFRWGEGLGRDILVLGINCGLGAKPSALWGSFSMQSSRVGQNGFSPFLR

SEQ ID NO: 17470 - protein, 353 aa, Homo sapiens
  Payload ID: 3514
  Gene Symbol: CIITA
  Gene Name: class II, major histocompatibility complex, transactivator
  ENSP ID: ENSP00000484761
MRCLAPRPAGSYLSEPQGSSQCATMELGPLEGGYLELLNSDADPLCLYHFYDQMDLAGEEEIELYSEPDTDTINCDQFSRLLCDMEGDEETREAYANIAELDQYVFQDSQLEGLSKDIFKHIGPDEVIGESMEMPAEVGQKSQKRPFPEELPADLKHWKPAEPPTVVTGSLLVGPVSDCSTLPCLPLPALFNQEPASGQMRLEKTDQIPMPFSSSSLSCLNLPEGPIQFVPTISTLPHGLWQISEAGTGVSSIFIYHGEVPQASQVPPPSGFTVHGLPTSPDRPGSTSPFAPSATDLPSMPEPALTSRANMTEHKTSPTQCPAAGEVSNKLPKWPGREVPRKTQLGSSLLFGT

SEQ ID NO: 17471 - protein, 1131 aa, Homo sapiens
  Payload ID: 3514
  Gene Symbol: CIITA
  Gene Name: class II, major histocompatibility complex, transactivator
  ENSP ID: ENSP00000485010
MRCLAPRPAGSYLSEPQGSSQCATMELGPLEGGYLELLNSDADPLCLYHFYDQMDLAGEEEIELYSEPDTDTINCDQFSRLLCDMEGDEETREAYANIAELDQYVFQDSQLEGLSKDIFIEHIGPDEVIGESMEMPAEVGQKSQKRPFPEELPADLKHWKPAEPPTVVTGSLLVGPVSDCSTLPCLPLPALFNQEPASGQMRLEKTDQIPMPFSSSSLSCLNLPEGPIQFVPTISTLPHGLWQISEAGTGVSSIFIYHGEVPQASQVPPPSGFTVHGLPTSPDRPGSTSPFAPSATDLPSMPEPALTSRANMTEHKTSPTQCPAAGEVSNKLPKWPEPVEQFYRSLQDTYGAEPAGPDGILVEVDLVQARLERSSSKSLERELATPDWAERQLAQGGLAEVLLAAKEHRRPRETRVIAVLGKAGQGKSYWAGAVSRAWACGRLPQYDFVFSVPCHCLNRPGDAYGLQDLLFSLGPQPLVAADEVFSHILKRPDRVLLILDGFEELEAQDGFLHSTCGPAPAEPCSLRGLLAGLFQKKLLRGCTLLLTARPRGRLVQSLSKADALFELSGFSMEQAQAYVMRYFESSGMTEHQDRALTLLRDRPLLLSHSHSPTLCRAVCQLSEALLELGEDAKLPSTLTGLYVGLLGRAALDSPPGALAELAKLAWELGRRHQSTLQEDQFPSADVRTWAMAKGLVQHPPRAAESELAFPSFLLQCFLGALWLALSGEIKDKELPQYLALTPRKKRPYDNWLEGVPRFLAGLIFQPPARCLGALLGPSAAASVDRKQKVLARYLKRLQPGTLRARQLLELLHCAHEAEEAGIWQHVVQELPGRLSFLGTRLTPPDAHVLGKALEAAGQDFSLDLRSTGICPSGLGSLVGLSCVTRFRAALSDTVALWESLQQHGETKLLQAAEEKFTIEPFKAKSLKDVEDLGKLVQTQRTRSSSEDTAGELPAVRDLKKLEFALGPVSGPQAFPKLVRILTAFSSLQHLDLDALSENKIGDEGVSQLSATFPQLKSLETLNLSQNNITDLGAYKLAEALPSLAASLLRLSLYNNCICDVGAESLARVLPDMVSLRVMDVQYNKFTAAGAQQLAASLRRCPHVETLAMWTPTIPFSVQEHLQQQDSRISLR

SEQ ID NO: 17472 - protein, 586 aa, Homo sapiens
  Payload ID: 3515
  Gene Symbol: CLHC1
  Gene Name: clathrin heavy chain linker domain containing 1
  Uniprot ID: Q8NHS4
  ENSP ID: ENSP00000384869
MSVHQIRKHAVLPPIICRSDKEFLESVQRYIITETERLGCSEEGPADEYYIIYRNVFDKVIEHITAYKSILTSIKKEYDAFIETIKKDRRTTFCLHGKLKGLAAEPTALVYYRKRTIQLEAKMRIIESNSSKIQSQIDHIKQCRAEYDTKEVKYCTFSKDPSKPIPGMTLQESMNLDALTKYMKHLEDKYAEIKQAMLIKYVPAQRKADLDEEMIVLLKRRDVAENLNKKLQFCHQRLQIISQALSSWVKSDMSSPFQDFVEQIQKTKYLQGDQGIVEELMEDDPRRAKEAEIMLHYIERFNELISLGEYEKAACYAANSPRRILRNIGTMNTFKAVGKIRGKPLPLLLFFEALFITSHAFPCPVDAALTLEGIKCGLSEKRLDLVTNWVTQERLTFSEEAGDVICDYGEQDTYNKAKCLALAQIVYSECGLHKKAILCLCKQGQTHRVMEYIQQLKDFTTDDLLQLLMSCPQVELIQCLTKELNEKQPSLSFGLAILHLFSADMKKVGIKLLQEINKGGIDAVESLMINDSFCSIEKWQEVANICSQNGFDKLSNDITSILRSQAAVTEISEEDDAVNLMEHVFW

SEQ ID NO: 17473 - protein, 464 aa, Homo sapiens
  Payload ID: 3515
  Gene Symbol: CLHC1
  Gene Name: clathrin heavy chain linker domain containing 1
  Uniprot ID: Q8NHS4
  ENSP ID: ENSP00000385512
MRIIESNSSKIQSQIDHIKQCRAEYDTKEVKYCTFSKDPSKPIPGMTLQESMNLDALTKYMKHLEDKYAEIKQAMLIKYVPAQRKADLDEEMIVLLKRRDVAENLNKKLQFCHQRLQIISQALSSWVKSDMSSPFQDFVEQIQKTKYLQGDQGIVEELMEDDPRRAKEAEIMLHYIERFNELISLGEYEKAACYAANSPRRILRNIGTMNTFKAVGKIRGKPLPLLLFFEALFITSHAFPCPVDAALTLEGIKCGLSEKRLDLVTNWVTQERLTFSEEAGDVICDYGEQDTYNKAKCLALAQIVYSECGLHKKAILCLCKQGQTHRVMEYIQQLKDFTTDDLLQLLMSCPQVELIQCLTKELNEKQPSLSFGLAILHLFSADMKKVGIKLLQEINKGGIDAVESLMINDSFCSIEKWQEVANICSQNGFDKLSNDITSILRSQAAVTEISEEDDAVNLMEHVFW

SEQ ID NO: 17474 - protein, 46 aa, Homo sapiens
  Payload ID: 3515
  Gene Symbol: CLHC1
  Gene Name: clathrin heavy chain linker domain containing 1
  ENSP ID: ENSP00000385598
MSVHQIRKHAVLPPIICRSDKEFLESVQRYIITETERLGCSEEGPA

SEQ ID NO: 17475 - protein, 586 aa, Homo sapiens; identical to SEQ ID NO: 17472
  Payload ID: 3515
  Gene Symbol: CLHC1
  Gene Name: clathrin heavy chain linker domain containing 1
  Uniprot ID: Q8NHS4
  ENSP ID: ENSP00000385778

SEQ ID NO: 17476 - protein, 49 aa, Homo sapiens
  Payload ID: 3515
  Gene Symbol: CLHC1
  Gene Name: clathrin heavy chain linker domain containing 1
  ENSP ID: ENSP00000399821
LNKKLQFCHQRLQIISQALSSWVKSDMSSPFQDFVEQIQKTKYLQGLMS

SEQ ID NO: 17477 - protein, 17 aa, Homo sapiens
  Payload ID: 3515
  Gene Symbol: CLHC1
  Gene Name: clathrin heavy chain linker domain containing 1
  ENSP ID: ENSP00000400116
MSVHQIRKHAVLPPIIC

SEQ ID NO: 17478 - protein, 92 aa, Homo sapiens
  Payload ID: 3515
  Gene Symbol: CLHC1
  Gene Name: clathrin heavy chain linker domain containing 1
  ENSP ID: ENSP00000401526
MSVHQIRKHAVLPPIICRSDKEFLESVQRYIITETERLGCSEEGPADEYYIIYRNVFDKLLEKLEESLFHYSYFLRPSLSQVMLFHVLLMQL

SEQ ID NO: 17479 - protein, 80 aa, Homo sapiens
  Payload ID: 3515
  Gene Symbol: CLHC1
  Gene Name: clathrin heavy chain linker domain containing 1
  ENSP ID: ENSP00000407575
MSVHQIRKHAVLPPIICRSDKEFLESVQRYIITETERLGCSEEGPADEYYIIYRNVFDKVIEHITAYKSILTSIKKEYDA

SEQ ID NO: 17480 - protein, 625 aa, Homo sapiens
  Payload ID: 3516
  Gene Symbol: CLINT1
  Gene Name: clathrin interactor 1
  Uniprot ID: Q14677
  ENSP ID: ENSP00000388340
MLNMWKVRELVDKATNVVMNYSEIESKVREATNDDPWGPSGQLMGEIAKATFMYEQFPELMNMLWSRMLKDNKKNWRRVYKSLLLLAYLIRNGSERVVTSAREHIYDLRSLENYHFVDEHGKDQGINIRQKVKELVEFAQDDDRLREERKKAKKNKDKYVGVSSDSVGGFRYSERYDPEPKSKWDEEWDKNKSAFPFSDKLGELSDKIGSTIDDTISKFRRKDREDSPERCSDSDEEKKARRGRSPKGEFKDEEETVTTKHIHITQATETTTTRHKRTANPSKTIDLGAAAHYTGDKASPDQNASTHTPQSSVKTSVPSSKSSGDLVDLFDGTSQSTGGSADLFGGFADFGSAAASGSFPSQVTATSGNGDFGDWSAFNQAPSGPVASSGEFFGSASQPAVELVSGSQSALGPPPAASNSSDLFDLMGSSQATMTSSQSMNFSMMSTNTVGLGLPMSRSQNTDMVQKSVSKTLPSTWSDPSVNISLDNLLPGMQPSKPQQPSLNTMIQQQNMQQPMNVMTQSFGAVNLSSPSNMLPVRPQTNALIGGPMPMSMPNVMTGTMGMAPLGNTPMMNQSMMGMNMNIGMSAAGMGLTGTMGMGMPNIAMTSGTVQPKQDAFANFANFSK

SEQ ID NO: 17481 - protein, 625 aa, Homo sapiens
  Payload ID: 3516
  Gene Symbol: CLINT1
  Gene Name: clathrin interactor 1
  Uniprot ID: Q14677
  ENSP ID: ENSP00000429345
MNYSEIESKVREATNDDPWGPSGQLMGEIAKATFMYEQFPELMNMLWSRMLKDNKKNWRRVYKSLLLLAYLIRNGSERVVTSAREHIYDLRSLENYHFVDEHGKDQGINIRQKVKELVEFAQDDDRLREERKKAKKNKDKYVGVSSDSVGGFRYSERYDPEPKSKWDEEWDKNKSAFPFSDKLGELSDKIGSTIDDTISKFRRKDREDSPERCSDSDEEKKARRGRSPKGEFKDEEETVTTKHIHITQATETTTTRHKRTANPSKTIDLGAAAHYTGDKASPDQNASTHTPQSSVKTSVPSSKSSGDLVDLFDGTSQSTGGSADLFGGFADFGSAAASGSFPSQVTATSGNGDFGDWSAFNQAPSGPVASSGEFFGSASQPAVELVSGSQSALGPPPAASNSSDLFDLMGSSQATMTSSQSMNFSMMSTNTVGLGLPMSRSQPLQNVSTVLQKPNPLYNQNTDMVQKSVSKTLPSTWSDPSVNISLDNLLPGMQPSKPQQPSLNTMIQQQNMQQPMNVMTQSFGAVNLSSPSNMLPVRPQTNALIGGPMPMSMPNVMTGTMGMAPLGNTPMMNQSMMGMNMNIGMSAAGMGLTGTMGMGMPNIAMTSGTVQPKQDAFANFANFSK

SEQ ID NO: 17482 - protein, 643 aa, Homo sapiens
  Payload ID: 3516
  Gene Symbol: CLINT1
  Gene Name: clathrin interactor 1
  Uniprot ID: Q14677
  ENSP ID: ENSP00000429824
MLNMWKVRELVDKATNVVMNYSEIESKVREATNDDPWGPSGQLMGEIAKATFMYEQFPELMNMLWSRMLKDNKKNWRRVYKSLLLLAYLIRNGSERVVTSAREHIYDLRSLENYHFVDEHGKDQGINIRQKVKELVEFAQDDDRLREERKKAKKNKDKYVGVSSDSVGGFRYSERYDPEPKSKWDEEWDKNKSAFPFSDKLGELSDKIGSTIDDTISKFRRKDREDSPERCSDSDEEKKARRGRSPKGEFKDEEETVTTKHIHITQATETTTTRHKRTANPSKTIDLGAAAHYTGDKASPDQNASTHTPQSSVKTSVPSSKSSGDLVDLFDGTSQSTGGSADLFGGFADFGSAAASGSFPSQVTATSGNGDFGDWSAFNQAPSGPVASSGEFFGSASQPAVELVSGSQSALGPPPAASNSSDLFDLMGSSQATMTSSQSMNFSMMSTNTVGLGLPMSRSQPLQNVSTVLQKPNPLYNQNTDMVQKSVSKTLPSTWSDPSVNISLDNLLPGMQPSKPQQPSLNTMIQQQNMQQPMNVMTQSFGAVNLSSPSNMLPVRPQTNALIGGPMPMSMPNVMTGTMGMAPLGNTPMMNQSMMGMNMNIGMSAAGMGLTGTMGMGMPNIAMTSGTVQPKQDAFANFANFSK

SEQ ID NO: 17483 - protein, 55 aa, Homo sapiens
  Payload ID: 3516
  Gene Symbol: CLINT1
  Gene Name: clathrin interactor 1
  ENSP ID: ENSP00000431858
  MOD_RES (1)..(1): Any amino acid
XPAASNSSDLFDLMGSSQATMTSSQSMNFSMMSTNTVGLGLPMSRSQILVFGVLG

SEQ ID NO: 17484 - protein, 133 aa, Homo sapiens
  Payload ID: 3516
  Gene Symbol: CLINT1
  Gene Name: clathrin interactor 1
  ENSP ID: ENSP00000433013
  MOD_RES (1)..(1): Any amino acid
XIDLGAAAHYTGDKASPDQNASTHTPQSSVKTSVPSSKSSGDLVDLFDGTSQSTVTATSGNGDFGDWSAFNQAPSGPVASSGEFFGSASQPAVELVSGSQSALGPPPAASNSSDLFDLMGSSQATMTSSQSMN

SEQ ID NO: 17485 - protein, 625 aa, Homo sapiens; identical to SEQ ID NO: 17481
  Payload ID: 3516
  Gene Symbol: CLINT1
  Gene Name: clathrin interactor 1
  Uniprot ID: Q14677
  ENSP ID: ENSP00000433419

SEQ ID NO: 17486 - protein, 66 aa, Homo sapiens
  Payload ID: 3516
  Gene Symbol: CLINT1
  Gene Name: clathrin interactor 1
  ENSP ID: ENSP00000434334
  MOD_RES (1)..(1): Any amino acid
XLPMSRSQNTDMVQKSVSKTLPSTWSDPSVNISLDNLLPGMQPSKPQQPSLNTMIQQQILLSVFVW

SEQ ID NO: 17487 - protein, 1675 aa, Homo sapiens
  Payload ID: 3517
  Gene Symbol: CLTC
  Gene Name: clathrin, heavy chain (Hc)
  Uniprot ID: Q00610
  ENSP ID: ENSP00000269122
MAQILPIRFQEHLQLQNLGINPANIGFSTLTMESDKFICIREKVGEQAQVVIIDMNDPSNPIRRPISADSAIMNPASKVIALKAGKTLQIFNIEMKSKMKAHTMTDDVTFWKWISLNTVALVTDNAVYHWSMEGESQPVKMFDRHSSLAGCQIINYRTDAKQKWLLLTGISAQQNRVVGAMQLYSVDRKVSQPIEGHAASFAQFKMEGNAEESTLFCFAVRGQAGGKLHIIEVGTPPTGNQPFPKKAVDVFFPPEAQNDFPVAMQISEKHDVVFLITKYGYIHLYDLETGTCIYMNRISGETIFVTAPHEATAGIIGVNRKGQVLSVCVEEENIIPYITNVLQNPDLALRMAVRNNLAGAEELFARKFNALFAQGNYSEAAKVAANAPKGILRTPDTIRRFQSVPAQPGQTSPLLQYFGILLDQGQLNKYESLELCRPVLQQGRKQLLEKWLKEDKLECSEELGDLVKSVDPTLALSVYLRANVPNKVIQCFAETGQVQKIVLYAKKVGYTPDWIFLLRNVMRISPDQGQQFAQMLVQDEEPLADITQIVDVFMEYNLIQQCTAFLLDALKNNRPSEGPLQTRLLEMNLMHAPQVADAILGNQMFTHYDRAHIAQLCEKAGLLQRALEHFTDLYDIKRAVVHTHLLNPEWLVNYFGSLSVEDSLECLRAMLSANIRQNLQICVQVASKYHEQLSTQSLIELFESFKSFEGLFYFLGSIVNFSQDPDVHFKYIQAACKTGQIKEVERICRESNCYDPERVKNFLKEAKLTDQLPLIIVCDRFDFVHDLVLYLYRNNLQKYIEIYVQKVNPSRLPVVIGGLLDVDCSEDVIKNLILVVRGQFSTDELVAEVEKRNRLKLLLPWLEARIHEGCEEPATHNALAKIYIDSNNNPERFLRENPYYDSRVVGKYCEKRDPHLACVAYERGQCDLELINVCNENSLFKSLSRYLVRRKDPELWGSVLLESNPYRRPLIDQVVQTALSETQDPEEVSVTVKAFMTADLPNELIELLEKIVLDNSVFSEHRNLQNLLILTAIKADRTRVMEYINRLDNYDAPDIANIAISNELFEEAFAIFRKFDVNTSAVQVLIEHIGNLDRAYEFAERCNEPAVWSQLAKAQLQKGMVKEAIDSYIKADDPSSYMEVVQAANTSGNWEELVKYLQMARKKARESYVETELIFALAKTNRLAELEEFINGPNNAHIQQVGDRCYDEKMYDAAKLLYNNVSNFGRLASTLVHLGEYQAAVDGARKANSTRTWKEVCFACVDGKEFRLAQMCGLHIVVHADELEELINYYQDRGYFEELITMLEAALGLERAHMGMFTELAILYSKFKPQKMREHLELFWSRVNIPKVLRAAEQAHLWAELVFLYDKYEEYDNAIITMMNHPTDAWKEGQFKDIITKVANVELYYRAIQFYLEFKPLLLNDLLMVLSPRLDHTRAVNYFSKVKQLPLVKPYLRSVQNHNNKSVNESLNNLFITEEDYQALRTSIDAYDNFDNISLAQRLEKHELIEFRRIAAYLFKGNNRWKQSVELCKKDSLYKDAMQYASESKDTELAEELLQWFLQEEKRECFGACLFTCYDLLRPDVVLETAWRHNIMDFAMPYFIQVMKEYLTKVDKLDASESLRKEEEQATETQPIVYGQPQLMLTAGPSVAVPPQAPFGYGYTAPPYGQPQPGFGYSM

SEQ ID NO: 17488 - protein, 1639 aa, Homo sapiens
  Payload ID: 3517
  Gene Symbol: CLTC
  Gene Name: clathrin, heavy chain (Hc)
  Uniprot ID: Q00610
  ENSP ID: ENSP00000376763
MAQILPIRFQEHLQLQNLGINPANIGFSTLTMESDKFICIREKVGEQAQVVIIDMNDPSNPIRRPISADSAIMNPASKVIALKAGKTLQIFNIEMKSKMKAHTMTDDVTFWKWISLNTVALVTDNAVYHWSMEGESQPVKMFDRHSSLAGCQIINYRTDAKQKWLLLTGISAQQNRVVGAMQLYSVDRKVSQPIEGHAASFAQFKMEGNAEESTLFCFAVRGQAGGKLHIIEVGTPPTGNQPFPKKAVDVFFPPEAQNDFPVAMQISEKHDVVFLITKYGYIHLYDLETGTCIYMNRISGETIFVTAPHEATAGIIGVNRKGQVLSVCVEEENIIPYITNVLQNPDLALRMAVRNNLAGAEELFARKFNALFAQGNYSEAAKVAANAPKGILRTPDTIRRFQSVPAQPGQTSPLLQYFGILLDQGQLNKYESLELCRPVLQQGRKQLLEKWLKEDKLECSEELGDLVKSVDPTLALSVYLRANVPNKVIQCFAETGQVQKIVLYAKKVGYTPDWIFLLRNVMRISPDQGQQFAQMLVQDEEPLADITQIVDVFMEYNLIQQCTAFLLDALKNNRPSEGPLQTRLLEMNLMHAPQVADAILGNQMFTHYDRAHIAQLCEKAGLLQRALEHFTDLYDIKRAVVHTHLLNPEWLVNYFGSLSVEDSLECLRAMLSANIRQNLQICVQVASKYHEQLSTQSLIELFESFKSFEGLFYFLGSIVNFSQDPDVHFKYIQAACKTGQIKEVERICRESNCYDPERVKNFLKEAKLTDQLPLIIVCDRFDFVHDLVLYLYRNNLQKYIEIYVQKVNPSRLPVVIGGLLDVDCSEDVIKNLILVVRGQFSTDELVAEVEKRNRLKLLLPWLEARIHEGCEEPATHNALAKIYIDSNNNPERFLRENPYYDSRVVGKYCEKRDPHLACVAYERGQCDLELINVCNENSLFKSLSRYLVRRKDPELWGSVLLESNPYRRPLIDQVVQTALSETQDPEEVSVTVKAFMTADLPNELIELLEKIVLDNSVFSEHRNLQNLLILTAIKADRTRVMEYINRLDNYDAPDIANIAISNELFEEAFAIFRKFDVNTSAVQVLIEHIGNLDRAYEFAERCNEPAVWSQLAKAQLQKGMVKEAIDSYIKADDPSSYMEVVQAANTSGNWEELVKYLQMARKKARESYVETELIFALAKTNRLAELEEFINGPNNAHIQQVGDRCYDEKMYDAAKLLYNNVSNFGRLASTLVHLGEYQAAVDGARKANSTRTWKEVCFACVDGKEFRLAQMCGLHIVVHADELEELINYYQDRGYFEELITMLEAALGLERAHMGMFTELAILYSKFKPQKMREHLELFWSRVNIPKVLRAAEQAHLWAELVFLYDKYEEYDNAIITMMNHPTDAWKEGQFKDIITKVANVELYYRAIQFYLEFKPLLLNDLLMVLSPRLDHTRAVNYFSKVKQLPLVKPYLRSVQNHNNKSVNESLNNLFITEEDYQALRTSIDAYDNFDNISLAQRLEKHELIEFRRIAAYLFKGNNRWKQSVELCKKDSLYKDAMQYASESKDTELAEELLQWFLQEEKRECFGACLFTCYDLLRPDVVLETAWRHNIMDFAMPYFIQVMKEYLTKVDKLDASESLRKEEEQATETQPIVYGNLSL

SEQ ID NO: 17489 - protein, 131 aa, Homo sapiens
  Payload ID: 3517
  Gene Symbol: CLTC
  Gene Name: clathrin, heavy chain (Hc)
  ENSP ID: ENSP00000461977
  MOD_RES (1)..(1): Any amino acid
XEKHELIEFRRIAAYLFKGNNRWKQSVELCKKDSLYKDAMQYASESKDTELAEELLQWFLQEEKRECFGACLFTCYDLLRPDVVLETAWRHNIMDFAMPYFIQVMKEYLTKVDAIKEKVKVDSLTSLSLED

SEQ ID NO: 17490 - protein, 612 aa, Homo sapiens
  Payload ID: 3517
  Gene Symbol: CLTC
  Gene Name: clathrin, heavy chain (Hc)
  ENSP ID: ENSP00000462252
MAQILPIRFQEHLQLQNLGINPANIGFSTLTMESDKFICIREKVGEQAQVVIIDMNDPSNPIRRPISADSAIMNPASKVIALKAGKTLQIFNIEMKSKMKARESYVETELIFALAKTNRLAELEEFINGPNNAHIQQVGDRCYDEKMYDAAKLLYNNVSNFGRLASTLVHLGEYQAAVDGARKANSTRTWKEVCFACVDGKEFRLAQMCGLHIVVHADELEELINYYQDRGYFEELITMLEAALGLERAHMGMFTELAILYSKFKPQKMREHLELFWSRVNIPKVLRAAEQAHLWAELVFLYDKYEEYDNAIITMMNHPTDAWKEGQFKDIITKVANVELYYRAIQFYLEFKPLLLNDLLMVLSPRLDHTRAVNYFSKVKQLPLVKPYLRSVQNHNNKSVNESLNNLFITEEDYQALRTSIDAYDNFDNISLAQRLEKHELIEFRRIAAYLFKGNNRWKQSVELCKKDSLYKDAMQYASESKDTELAEELLQWFLQEEKRECFGACLFTCYDLLRPDVVLETAWRHNIMDFAMPYFIQVMKEYLTKVDKLDASESLRKEEEQATETQPIVYGQPQLMLTAGPSVAVPPQAPFGYGYTAPPYGQPQPGFGYSM

SEQ ID NO: 17491 - protein, 122 aa, Homo sapiens
  Payload ID: 3517
  Gene Symbol: CLTC
  Gene Name: clathrin, heavy chain (Hc)
  ENSP ID: ENSP00000462592
MAQILPIRFQEHLQLQNLGINPANIGFSTLTMESDKFICIREKVGEQAQVVIIDMNDPSNPIRRPISADSAIMNPASKVIALKGIKESGKTLQIFNIEMKSKMKAHTMTDDVTFWKWISLNT

SEQ ID NO: 17492 - protein, 24 aa, Homo sapiens
  Payload ID: 3517
  Gene Symbol: CLTC
  Gene Name: clathrin, heavy chain (Hc)
  ENSP ID: ENSP00000463068
  MOD_RES (1)..(1): Any amino acid
XTIFVTAPHEATAGIIGVNRKGQN

SEQ ID NO: 17493 - protein, 97 aa, Homo sapiens
  Payload ID: 3517
  Gene Symbol: CLTC
  Gene Name: clathrin, heavy chain (Hc)
  ENSP ID: ENSP00000463336
MAQILPIRFQEHLQLQNLGINPANIGFSTLTMESDKFICIREKVGEQAQVVIIDMNDPSNPIRRPISADSAIMNPASKVIALKAKSCGGSYAAIFCR

SEQ ID NO: 17494 - protein, 222 aa, Homo sapiens
  Payload ID: 3517
  Gene Symbol: CLTC
  Gene Name: clathrin, heavy chain (Hc)
  ENSP ID: ENSP00000465200
  MOD_RES (1)..(1): Any amino acid
XRSVQNHNNKSVNESLNNLFITEEDYQALRTSIDAYDNFDNISLAQRLEKHELIEFRRIAAYLFKGNNRWKQSVELCKKDSLYKDAMQYASESKDTELAEELLQWFLQEEKRECFGACLFTCYDLLRPDVVLETAWRHNIMDFAMPYFIQVMKEYLTKVDAIKEKVDKLDASESLRKEEEQATETQPIVYGQPQLMLTAGPSVAVPPQAPFGYGYTAPPYGQ

SEQ ID NO: 17495 - protein, 1679 aa, Homo sapiens
  Payload ID: 3517
  Gene Symbol: CLTC
  Gene Name: clathrin, heavy chain (Hc)
  ENSP ID: ENSP00000479606
MAQILPIRFQEHLQLQNLGINPANIGFSTLTMESDKFICIREKVGEQAQVVIIDMNDPSNPIRRPISADSAIMNPASKVIALKGIKESGKTLQIFNIEMKSKMKAHTMTDDVTFWKWISLNTVALVTDNAVYHWSMEGESQPVKMFDRHSSLAGCQIINYRTDAKQKWLLLTGISAQQNRVVGAMQLYSVDRKVSQPIEGHAASFAQFKMEGNAEESTLFCFAVRGQAGGKLHIIEVGTPPTGNQPFPKKAVDVFFPPEAQNDFPVAMQISEKHDVVFLITKYGYIHLYDLETGTCIYMNRISGETIFVTAPHEATAGIIGVNRKGQVLSVCVEEENIIPYITNVLQNPDLALRMAVRNNLAGAEELFARKFNALFAQGNYSEAAKVAANAPKGILRTPDTIRRFQSVPAQPGQTSPLLQYFGILLDQGQLNKYESLELCRPVLQQGRKQLLEKWLKEDKLECSEELGDLVKSVDPTLALSVYLRANVPNKVIQCFAETGQVQKIVLYAKKVGYTPDWIFLLRNVMRISPDQGQQFAQMLVQDEEPLADITQIVDVFMEYNLIQQCTAFLLDALKNNRPSEGPLQTRLLEMNLMHAPQVADAILGNQMFTHYDRAHIAQLCEKAGLLQRALEHFTDLYDIKRAVVHTHLLNPEWLVNYFGSLSVEDSLECLRAMLSANIRQNLQICVQVASKYHEQLSTQSLIELFESFKSFEGLFYFLGSIVNFSQDPDVHFKYIQAACKTGQIKEVERICRESNCYDPERVKNFLKEAKLTDQLPLIIVCDRFDFVHDLVLYLYRNNLQKYIEIYVQKVNPSRLPVVIGGLLDVDCSEDVIKNLILVVRGQFSTDELVAEVEKRNRLKLLLPWLEARIHEGCEEPATHNALAKIYIDSNNNPERFLRENPYYDSRVVGKYCEKRDPHLACVAYERGQCDLELINVCNENSLFKSLSRYLVRRKDPELWGSVLLESNPYRRPLIDQVVQTALSETQDPEEVSVTVKAFMTADLPNELIELLEKIVLDNSVFSEHRNLQNLLILTAIKADRTRVMEYINRLDNYDAPDIANIAISNELFEEAFAIFRKFDVNTSAVQVLIEHIGNLDRAYEFAERCNEPAVWSQLAKAQLQKGMVKEAIDSYIKADDPSSYMEVVQAANTSGNWEELVKYLQMARKKARESYVETELIFALAKTNRLAELEEFINGPNNAHIQQVGDRCYDEKMYDAAKLLYNNVSNFGRLASTLVHLGEYQAAVDGARKANSTRTWKEVCFACVDGKEFRLAQMCGLHIVVHADELEELINYYQDRGYFEELITMLEAALGLERAHMGMFTELAILYSKFKPQKMREHLELFWSRVNIPKVLRAAEQAHLWAELVFLYDKYEEYDNAIITMMNHPTDAWKEGQFKDIITKVANVELYYRAIQFYLEFKPLLLNDLLMVLSPRLDHTRAVNYFSKVKQLPLVKPYLRSVQNHNNKSVNESLNNLFITEEDYQALRTSIDAYDNFDNISLAQRLEKHELIEFRRIAAYLFKGNNRWKQSVELCKKDSLYKDAMQYASESKDTELAEELLQWFLQEEKRECFGACLFTCYDLLRPDVVLETAWRHNIMDFAMPYFIQVMKEYLTKVDKLDASESLRKEEEQATETQPIVYGQPQLMLTAGPSVAVPPQAPFGYGYTAPPYGQPQPGFGYSM

SEQ ID NO: 17496 - protein, 43 aa, Homo sapiens
  Payload ID: 3518
  Gene Symbol: CLTCL1
  Gene Name: clathrin, heavy chain-like 1
  ENSP ID: ENSP00000396140
LCEKAGLLQQALEHYTDLYDIKRAVVHTHLLNPEASSTSWAQS

SEQ ID NO: 17497 - protein, 1640 aa, Homo sapiens
  Payload ID: 3518
  Gene Symbol: CLTCL1
  Gene Name: clathrin, heavy chain-like 1
  Uniprot ID: P53675
  ENSP ID: ENSP00000441158
MAQILPVRFQEHFQLQNLGINPANIGFSTLTMESDKFICIREKVGEQAQVTIIDMSDPMAPIRRPISAESAIMNPASKVIALKAGKTLQIFNIEMKSKMKAHTMAEEVIFWKWVSVNTVALVTETAVYHWSMEGDSQPMKMFDRHTSLVGCQVIHYRTDEYQKWLLLVGISAQQNRVVGAMQLYSVDRKVSQPIEGHAAAFAEFKMEGNAKPATLFCFAVRNPTGGKLHIIEVGQPAAGNQPFVKKAVDVFFPPEAQNDFPVAMQIGAKHGVIYLITKYGYLHLYDLESGVCICMNRISADTIFVTAPHKPTSGIIGVNKKGQVLSVCVEEDNIVNYATNVLQNPDLGLRLAVRSNLAGAEKLFVRKFNTLFAQGSYAEAAKVAASAPKGILRTRETVQKFQSIPAQSGQASPLLQYFGILLDQGQLNKLESLELCHLVLQQGRKQLLEKWLKEDKLECSEELGDLVKTTDPMLALSVYLRANVPSKVIQCFAETGQFQKIVLYAKKVGYTPDWIFLLRGVMKISPEQGLQFSRMLVQDEEPLANISQIVDIFMENSLIQQCTSFLLDALKNNRPAEGLLQTWLLEMNLVHAPQVADAILGNKMFTHYDRAHIAQLCEKAGLLQQALEHYTDLYDIKRAVVHTHLLNPEWLVNFFGSLSVEDSVECLHAMLSANIRQNLQLCVQVASKYHEQLGTQALVELFESFKSYKGLFYFLGSIVNFSQDPDVHLKYIQAACKTGQIKEVERICRESSCYNPERVKNFLKEAKLTDQLPLIIVCDRFGFVHDLVLYLYRNNLQRYIEIYVQKVNPSRTPAVIGGLLDVDCSEEVIKHLIMAVRGQFSTDELVAEVEKRNRLKLLLPWLESQIQEGCEEPATHNALAKIYIDSNNSPECFLRENAYYDSSVVGRYCEKRDPHLACVAYERGQCDLELIKVCNENSLFKSEARYLVCRKDPELWAHVLEETNPSRRQLIDQVVQTALSETRDPEEISVTVKAFMTADLPNELIELLEKIVLDNSVFSEHRNLQNLLILTAIKADRTRVMEYISRLDNYDALDIASIAVSSALYEEAFTVFHKFDMNASAIQVLIEHIGNLDRAYEFAERCNEPAVWSQLAQAQLQKDLVKEAINSYIRGDDPSSYLEVVQSASRSNNWEDLVKFLQMARKKGRESYIETELIFALAKTSRVSELEDFINGPNNAHIQQVGDRCYEEGMYEAAKLLYSNVSNFARLASTLVHLGEYQAAVDNSRKASSTRTWKEVCFACMDGQEFRFAQLCGLHIVIHADELEELMCYYQDRGYFEELILLLEAALGLERAHMGMFTELAILYSKFKPQKMLEHLELFWSRVNIPKVLRAAEQAHLWAELVFLYDKYEEYDNAVLTMMSHPTEAWKEGQFKDIITKVANVELCYRALQFYLDYKPLLINDLLLVLSPRLDHTWTVSFFSKAGQLPLVKPYLRSVQSHNNKSVNEALNHLLTEEEDYQGLRASIDAYDNFDNISLAQQLEKHQLMEFRCIAAYLYKGNNWWAQSVELCKKDHLYKDAMQHAAESRDAELAQKLLQWFLEEGKRECFAACLFTCYDLLRPDMVLELAWRHNLVDLAMPYFIQVMREYLSKVDKLDALESLRKQEEHVTEPAPLVFDFDGHE

SEQ ID NO: 17498 - protein, 169 aa, Homo sapiens
  Payload ID: 3518
  Gene Symbol: CLTCL1
  Gene Name: clathrin, heavy chain-like 1
  ENSP ID: ENSP00000443264
MAQILPVRFQEHFQLQNLGINPANIGFSTLTMESDKFICIREKVGEQAQVTIIDMSDPMAPIRRPISAESAIMNPASKVIALKGAPGFCSPASNSQSPGSSLCPAGKTLQIFNIEMKSKMKAHTMAEEVIFWKWVSVNTVALVTETAVYHWSMEGDSQPMKMFDRHTSL

SEQ ID NO: 17499 - protein, 67 aa, Homo sapiens
  Payload ID: 3518
  Gene Symbol: CLTCL1
  Gene Name: clathrin, heavy chain-like 1
  ENSP ID: ENSP00000443582
GLRASIDAYDNFDNISLAQQLEKHQLMEFRCIAAYLYKGNNWWAQSVELCKKDHLYKEQCGSGGSDR

SEQ ID NO: 17500 - protein, 369 aa, Homo sapiens
  Payload ID: 3518
  Gene Symbol: CLTCL1
  Gene Name: clathrin, heavy chain-like 1
  ENSP ID: ENSP00000479237
MGVGDRCFSVMQIKIMRSKPHEEVGDRCYEEGMYEAAKLLYSNVSNFARLASTLVHLGEYQAAVDNSRKASSTRTWKEVCFACMDGQEFRFAQLCGLHIVIHADELEELMCYYQDRGYFEELILLLEAALGLERAHMGMFTELAILYSKFKPQKMLEHLELFWSRVNIPKVLRAAEQAHLWAELVFLYDKYEEYDNAVLTMMSHPTEAWKEGQFKDIITKVANVELCYRALQFYLDYKPLLINDLLLVLSPRLDHTWTVSFFSKDAMQHAAESRDAELAQKLLQWFLEEGKRECFAACLFTCYDLLRPDMVLELAWRHNLVDLAMPYFIQVMREYLSKVDKLDALESLRKQEEHVTEPAPLVFDFDGHE

SEQ ID NO: 17501 - protein, 1260 aa, Homo sapiens
  Payload ID: 3518
  Gene Symbol: CLTCL1
  Gene Name: clathrin, heavy chain-like 1
  ENSP ID: ENSP00000480709
MAQILPVRFQEHFQLQNLGINPANIGFSTLTMESDKFICIREKVGEQAQVTIIDMSDPMAPIRRPISAESAIMNPASKVIALKAGKTLQIFNIEMKSKMKAHTMAEEVIFWKWVSVNTVALVTETAVYHWSMEGDSQPMKMFDRHTSLVGCQVIHYRTDEYQKWLLLVGISAQQNRVVGAMQLYSVDRKVSQPIEGHAAAFAEFKMEGNAKPATLFCFAVRNPTGGKLHIIEVGQPAAGNQPFVKKAVDVFFPPEAQNDFPVAMQIGAKHGVIYLITKYGYLHLYDLESGVCICMNRISADTIFVTAPHKPTSGIIGVNKKGQVLSVCVEEDNIVNYATNVLQNPDLGLRLAVRSNLAGAEKLFVRKFNTLFAQGSYAEAAKVAASAPKGILRTRETVQKFQSIPAQSGQASPLLQYFGILLDQGQLNKLESLELCHLVLQQGRKQLLEKWLKEDKLECSEELGDLVKTTDPMLALSVYLRANVPSKVIQCFAETGQFQKIVLYAKKVGYTPDWIFLLRGVMKISPEQGLQFSRMLVQDEEPLANISQIVDIFMENSLIQQCTSFLLDALKNNRPAEGLLQTWLLEMNLVHAPQVADAILGNKMFTHYDRAHIAQLCEKAGLLQQALEHYTDLYDIKRAVVHTHLLNPEWLVNFFGSLSVEDSVECLHAMLSANIRQNLQLCVQVASKYHEQLGTQALVELFESFKSYKGLFYFLGSIVNFSQDPDVHLKYIQAACKTGQIKEVERICRESSCYNPERVKNFLKEAKLTDQLPLIIVCDRFGFVHDLVLYLYRNNLQRYIEIYVQKVNPSRTPAVIGGLLDVDCSEEVIKHLIMAVRGQFSTDELVAEVEKRNRLKLLLPWLESQIQEGCEEPATHNALAKIYIDSNNSPECFLRENAYYDSSVVGRYCEKRDPHLACVAYERGQCDLELIKVCNENSLFKSEARYLVCRKDPELWAHVLEETNPSRRQLIDQVVQTALSETRDPEEISVTVKAFMTADLPNELIELLEKIVLDNSVFSEHRNLQNLLILTAIKADRTRVMEYISRLDNYDALDIASIAVSSALYEEAFTVFHKFDMNASAIQVLIEHIGNLDRAYEFAERCNEPAVWSQLAQAQLQKDLVKEAINSYIRGDDPSSYLEVVQSASRSNNWEDLVKFLQMARKKGRESYIETELIFALAKTSRVSELEDFINGPNNAHIQQVGDRCYEEGMYEAAKLLYSNVSNFARLASTLVHLGVLCLHGWTRVPLRTAVWSSHRHSCR

SEQ ID NO: 17502 - protein, 463 aa, Homo sapiens
  Payload ID: 3518
  Gene Symbol: CLTCL1
  Gene Name: clathrin, heavy chain-like 1
  ENSP ID: ENSP00000481031
MGVGDRCFSVMQIKIMRSKPHEEVGDRCYEEGMYEAAKLLYSNVSNFARLASTLVHLGEYQAAVDNSRKASSTRTWKEVCFACMDGQEFRFAQLCGLHIVIHADELEELMCYYQDRGYFEELILLLEAALGLERAHMGMFTELAILYSKFKPQKMLEHLELFWSRVNIPKVLRAAEQAHLWAELVFLYDKYEEYDNAVLTMMSHPTEAWKEGQFKDIITKVANVELCYRALQFYLDYKPLLINDLLLVLSPRLDHTWTVSFFSKAGQLPLVKPYLRSVQSHNNKSVNEALNHLLTEEEDYQGLRASIDAYDNFDNISLAQQLEKHQLMEFRCIAAYLYKGNNWWAQSVELCKKDHLYKDAMQHAAESRDAELAQKLLQWFLEEGKRECFAACLFTCYDLLRPDMVLELAWRHNLVDLAMPYFIQVMREYLSKVDKLDALESLRKQEEHVTEPAPLVFDFDGHE

SEQ ID NO: 17503 - protein, 1583 aa, Homo sapiens
  Payload ID: 3518
  Gene Symbol: CLTCL1
  Gene Name: clathrin, heavy chain-like 1
  Uniprot ID: P53675
  ENSP ID: ENSP00000485020
MAQILPVRFQEHFQLQNLGINPANIGFSTLTMESDKFICIREKVGEQAQVTIIDMSDPMAPIRRPISAESAIMNPASKVIALKAGKTLQIFNIEMKSKMKAHTMAEEVIFWKWVSVNTVALVTETAVYHWSMEGDSQPMKMFDRHTSLVGCQVIHYRTDEYQKWLLLVGISAQQNRVVGAMQLYSVDRKVSQPIEGHAAAFAEFKMEGNAKPATLFCFAVRNPTGGKLHIIEVGQPAAGNQPFVKKAVDVFFPPEAQNDFPVAMQIGAKHGVIYLITKYGYLHLYDLESGVCICMNRISADTIFVTAPHKPTSGIIGVNKKGQVLSVCVEEDNIVNYATNVLQNPDLGLRLAVRSNLAGAEKLFVRKFNTLFAQGSYAEAAKVAASAPKGILRTRETVQKFQSIPAQSGQASPLLQYFGILLDQGQLNKLESLELCHLVLQQGRKQLLEKWLKEDKLECSEELGDLVKTTDPMLALSVYLRANVPSKVIQCFAETGQFQKIVLYAKKVGYTPDWIFLLRGVMKISPEQGLQFSRMLVQDEEPLANISQIVDIFMENSLIQQCTSFLLDALKNNRPAEGLLQTWLLEMNLVHAPQVADAILGNKMFTHYDRAHIAQLCEKAGLLQQALEHYTDLYDIKRAVVHTHLLNPEWLVNFFGSLSVEDSVECLHAMLSANIRQNLQLCVQVASKYHEQLGTQALVELFESFKSYKGLFYFLGSIVNFSQDPDVHLKYIQAACKTGQIKEVERICRESSCYNPERVKNFLKEAKLTDQLPLIIVCDRFGFVHDLVLYLYRNNLQRYIEIYVQKVNPSRTPAVIGGLLDVDCSEEVIKHLIMAVRGQFSTDELVAEVEKRNRLKLLLPWLESQIQEGCEEPATHNALAKIYIDSNNSPECFLRENAYYDSSVVGRYCEKRDPHLACVAYERGQCDLELIKVCNENSLFKSEARYLVCRKDPELWAHVLEETNPSRRQLIDQVVQTALSETRDPEEISVTVKAFMTADLPNELIELLEKIVLDNSVFSEHRNLQNLLILTAIKADRTRVMEYISRLDNYDALDIASIAVSSALYEEAFTVFHKFDMNASAIQVLIEHIGNLDRAYEFAERCNEPAVWSQLAQAQLQKDLVKEAINSYIRGDDPSSYLEVVQSASRSNNWEDLVKFLQMARKKGRESYIETELIFALAKTSRVSELEDFINGPNNAHIQQVGDRCYEEGMYEAAKLLYSNVSNFARLASTLVHLGEYQAAVDNSRKASSTRTWKEVCFACMDGQEFRFAQLCGLHIVIHADELEELMCYYQDRGYFEELILLLEAALGLERAHMGMFTELAILYSKFKPQKMLEHLELFWSRVNIPKVLRAAEQAHLWAELVFLYDKYEEYDNAVLTMMSHPTEAWKEGQFKDIITKVANVELCYRALQFYLDYKPLLINDLLLVLSPRLDHTWTVSFFSKAGQLPLVKPYLRSVQSHNNKSVNEALNHLLTEEEDYQDAMQHAAESRDAELAQKLLQWFLEEGKRECFAACLFTCYDLLRPDMVLELAWRHNLVDLAMPYFIQVMREYLSKVDKLDALESLRKQEEHVTEPAPLVFDFDGHE

SEQ ID NO: 17504 - protein, 218 aa, Homo sapiens
  Payload ID: 3519
  Gene Symbol: CLTA
  Gene Name: clathrin, light chain A
  Uniprot ID: P09496
  ENSP ID: ENSP00000242284
MAELDPFGAPAGAPGGPALGNGVAGAGEEDPAAAFLAQQESEIAGIENDEAFAILDGGAPGPQPHGEPPGGPDAVDGVMNGEYYQESNGPTDSYAAISQVDRLQSEPESIRKWREEQMERLEALDANSRKQEAEWKEKAIKELEEWYARQDEQLQKTKANNRAAEEAFVNDIDESSPGTEWERVARLCDFNPKSSKQAKDVSRMRSVLISLKQAPLVH

SEQ ID NO: 17505 - protein, 248 aa, Homo sapiens
  Payload ID: 3519
  Gene Symbol: CLTA
  Gene Name: clathrin, light chain A
  Uniprot ID: P09496
  ENSP ID: ENSP00000242285
MAELDPFGAPAGAPGGPALGNGVAGAGEEDPAAAFLAQQESEIAGIENDEAFAILDGGAPGPQPHGEPPGGPDAVDGVMNGEYYQESNGPTDSYAAISQVDRLQSEPESIRKWREEQMERLEALDANSRKQEAEWKEKAIKELEEWYARQDEQLQKTKANNRVADEAFYKQPFADVIGYVTNINHPCYSLEQAAEEAFVNDIDESSPGTEWERVARLCDFNPKSSKQAKDVSRMRSVLISLKQAPLVH

SEQ ID NO: 17506 - protein, 236 aa, Homo sapiens
  Payload ID: 3519
  Gene Symbol: CLTA
  Gene Name: clathrin, light chain A
  Uniprot ID: P09496
  ENSP ID: ENSP00000379848
MAELDPFGAPAGAPGGPALGNGVAGAGEEDPAAAFLAQQESEIAGIENDEAFAILDGGAPGPQPHGEPPGGPDAVDGVMNGEYYQESNGPTDSYAAISQVDRLQSEPESIRKWREEQMERLEALDANSRKQEAEWKEKAIKELEEWYARQDEQLQKTKANNRVADEAFYKQPFADVIGYVAAEEAFVNDIDESSPGTEWERVARLCDFNPKSSKQAKDVSRMRSVLISLKQAPLVH

SEQ ID NO: 17507 - protein, 248 aa, Homo sapiens; identical to SEQ ID NO: 17505
  Payload ID: 3519
  Gene Symbol: CLTA
  Gene Name: clathrin, light chain A
  Uniprot ID: P09496
  ENSP ID: ENSP00000401019

SEQ ID NO: 17508 - protein, 196 aa, Homo sapiens
  Payload ID: 3519
  Gene Symbol: CLTA
  Gene Name: clathrin, light chain A
  ENSP ID: ENSP00000417698
MAELDPFGAPAGAPGGPALGNGVAGAGEEDPAAAFLAQQESEIAGIENDEAFAILDGGAPGPQPHGEPPGGPDANSRKQEAEWKEKAIKELEEWYARQDEQLQKTKANNRVADEAFYKQPFADVIGYVTNINHPCYSLEQAAEEAFVNDIDESSPGTEWERVARLCDFNPKSSKQAKDVSRMRSVLISLKQAPLVH

SEQ ID NO: 17509 - protein, 260 aa, Homo sapiens
  Payload ID: 3519
  Gene Symbol: CLTA
  Gene Name: clathrin, light chain A
  ENSP ID: ENSP00000419158
MAELDPFGAPAGAPGGPALGNGVAGAGEEDPAAAFLAQQESEIAGIENDEAFAILDGGAPGPQPHGEPPGGPDAVDGVMNGEYYQESNGPTDSYAAISQVDRLQSEPESIRKWREEQMERLEALDANSRKQEAEWKEKAIKELEEWYARQDEQLQKTKANNRVSLLPRLECNGVISAHCNLCLPGSSNSPASASRGAGITDMCHRARLIFVFLVEMGFHHVGQAGLKILTSNDLPASARARITGRWKGVKDVAMYVPSLP

SEQ ID NO: 17510 - protein, 230 aa, Homo sapiens
  Payload ID: 3519
  Gene Symbol: CLTA
  Gene Name: clathrin, light chain A
  Uniprot ID: P09496
  ENSP ID: ENSP00000419746
MAELDPFGAPAGAPGGPALGNGVAGAGEEDPAAAFLAQQESEIAGIENDEAFAILDGGAPGPQPHGEPPGGPDAVDGVMNGEYYQESNGPTDSYAAISQVDRLQSEPESIRKWREEQMERLEALDANSRKQEAEWKEKAIKELEEWYARQDEQLQKTKANNSTNINHPCYSLEQAAEEAFVNDIDESSPGTEWERVARLCDFNPKSSKQAKDVSRMRSVLISLKQAPLVH

SEQ ID NO: 17511 - protein, 166 aa, Homo sapiens
  Payload ID: 3519
  Gene Symbol: CLTA
  Gene Name: clathrin, light chain A
  Uniprot ID: P09496
  ENSP ID: ENSP00000437508
MAELDPFGAPAGAPGGPALGNGVAGAGEEDPAAAFLAQQESEIAGIENDEAFAILDGGAPGPQPHGEPPGGPDANSRKQEAEWKEKAIKELEEWYARQDEQLQKTKANNRAAEEAFVNDIDESSPGTEWERVARLCDFNPKSSKQAKDVSRMRSVLISLKQAPLVH

SEQ ID NO: 17512 - protein, 230 aa, Homo sapiens; identical to SEQ ID NO: 17510
  Payload ID: 3519
  Gene Symbol: CLTA
  Gene Name: clathrin, light chain A
  Uniprot ID: P09496
  ENSP ID: ENSP00000442869

SEQ ID NO: 17513 - protein, 64 aa, Homo sapiens
  Payload ID: 3519
  Gene Symbol: CLTA
  Gene Name: clathrin, light chain A
  ENSP ID: ENSP00000474266
AQQESEIAGIENDEAFAILDGGAPGPQPHGEPPGGPDAVDGVMNGEYYQMPILGSKKQSGKKRQ

SEQ ID NO: 17514 - protein, 229 aa, Homo sapiens
  Payload ID: 3520
  Gene Symbol: CLTB
  Gene Name: clathrin, light chain B
  Uniprot ID: P09497
  ENSP ID: ENSP00000309415
MADDFGFFSSSESGAPEAAEEDPAAAFLAQQESEIAGIENDEGFGAPAGSHAAPAQPGPTSGAGSEDMGTTVNGDVFQEANGPADGYAAIAQADRLTQEPESIRKWREEQRKRLQELDAASKVTEQEWREKAKKDLEEWNQRQSEQVEKNKINNRIADKAFYQQPDADIIGYVASEEAFVKESKEETPGTEWEKVAQLCDFNPKSSKQCKDVSRLRSVLMSLKQTPLSR

SEQ ID NO: 17515 - protein, 211 aa, Homo sapiens
  Payload ID: 3520
  Gene Symbol: CLTB
  Gene Name: clathrin, light chain B
  Uniprot ID: P09497
  ENSP ID: ENSP00000310812
MADDFGFFSSSESGAPEAAEEDPAAAFLAQQESEIAGIENDEGFGAPAGSHAAPAQPGPTSGAGSEDMGTTVNGDVFQEANGPADGYAAIAQADRLTQEPESIRKWREEQRKRLQELDAASKVTEQEWREKAKKDLEEWNQRQSEQVEKNKINNRASEEAFVKESKEETPGTEWEKVAQLCDFNPKSSKQCKDVSRLRSVLMSLKQTPLSR

SEQ ID NO: 17516 - protein, 134 aa, Homo sapiens
  Payload ID: 3520
  Gene Symbol: CLTB
  Gene Name: clathrin, light chain B
  ENSP ID: ENSP00000422978
MADDFGFFSSSESGAPEAAEEDPAAAFLAQQESEIAGIENDEGFGAPAGSHAAPAQPGPTSGAGSEDMGTTVNGDVFQPVHHQRVQLQTQLPIQPKDEPAHNYSSSIWHSQGQGQKGPAGLRLPTSAQILSPFP

SEQ ID NO: 17517 - protein, 81 aa, Homo sapiens
  Payload ID: 3520
  Gene Symbol: CLTB
  Gene Name: clathrin, light chain B
  ENSP ID: ENSP00000424739
IAGIENDEGFGAPAGSHAAPAQPGPTSGAGSEDMGTTVNGDVFQEANGPADGYAAIAQADRLTQEPESIRKWREEQRKRLS

SEQ ID NO: 17518 - protein, 125 aa, Homo sapiens
  Payload ID: 3520
  Gene Symbol: CLTB
  Gene Name: clathrin, light chain B
  ENSP ID: ENSP00000427229
MADDFGFFSSSESGAPEAAEEDPAAAFLAQQESEIAGIENDEGFGAPAGSHAAPAQPGPTSGAGSEDMGTTVNGDVFQEAFVKESKEETPGTEWEKVAQLCDFNPKSSKQCKDVSRLRSVLMSLK

SEQ ID NO: 17519 - protein, 211 aa, Homo sapiens
  Payload ID: 3521
  Gene Symbol: CLDN1
  Gene Name: claudin 1
  Uniprot ID: O95832
  ENSP ID: ENSP00000295522
MANAGLQLLGFILAFLGWIGAIVSTALPQWRIYSYAGDNIVTAQAMYEGLWMSCVSQSTGQIQCKVFDSLLNLSSTLQATRALMVVGILLGVIAIFVATVGMKCMKCLEDDEVQKMRMAVIGGAIFLLAGLAILVATAWYGNRIVQEFYDPMTPVNARYEFGQALFTGWAAASLCLLGGALLCCSCPRKTTSYPTPRPYPKPAPSSGKDYV

SEQ ID NO: 17520 - protein, 228 aa, Homo sapiens
  Payload ID: 3522
  Gene Symbol: CLDN10
  Gene Name: claudin 10
  Uniprot ID: P78369
  ENSP ID: ENSP00000299339
MASTASEIIAFMVSISGWVLVSSTLPTDYWKVSTIDGTVITTATYWANLWKACVTDSTGVSNCKDFPSMLALDGYIQACRGLMIAAVSLGFFGSIFALFGMKCTKVGGSDKAKAKIACLAGIVFILSGLCSMTGCSLYANKITTEFFDPLFVEQKYELGAALFIGWAGASLCIIGGVIFCFSISDNNKTPRYTYNGATSVMSSRTKYHGGEDFKTTNPSKQFDKNAYV

SEQ ID NO: 17521 - protein, 73 aa, Homo sapiens
  Payload ID: 3522
  Gene Symbol: CLDN10
  Gene Name: claudin 10
  ENSP ID: ENSP00000366051
MIAAVSLGFFGSIFALFGMKCTKVGGSDKAKAKIACLAGIVFILSGLCSMTGCSLYANKITTEFFDPLFVEQK

SEQ ID NO: 17522 - protein, 226 aa, Homo sapiens
  Payload ID: 3522
  Gene Symbol: CLDN10
  Gene Name: claudin 10
  Uniprot ID: P78369
  ENSP ID: ENSP00000366069
MSRAQIWALVSGVGGFGALVAATTSNEWKVTTRASSVITATWVYQGLWMNCAGNALGSFHCRPHFTIFKVAGYIQACRGLMIAAVSLGFFGSIFALFGMKCTKVGGSDKAKAKIACLAGIVFILSGLCSMTGCSLYANKITTEFFDPLFVEQKYELGAALFIGWAGASLCIIGGVIFCFSISDNNKTPRYTYNGATSVMSSRTKYHGGEDFKTTNPSKQFDKNAYV

SEQ ID NO: 17523 - protein, 207 aa, Homo sapiens
  Payload ID: 3523
  Gene Symbol: CLDN11
  Gene Name: claudin 11
  Uniprot ID: O75508
  ENSP ID: ENSP00000064724
MVATCLQVVGFVTSFVGWIGVIVTTSTNDWVVTCGYTIPTCRKLDELGSKGLWADCVMATGLYHCKPLVDILILPGYVQACRALMIAASVLGLPAILLLLTVLPCIRMGQEPGVAKYRRAQLAGVLLILLALCALVATIWFPVCAHRETTIVSFGYSLYAGWIGAVLCLVGGCVILCCAGDAQAFGENRFYYTAGSSSPTHAKSAHV

SEQ ID NO: 17524 - protein, 165 aa, Homo sapiens
  Payload ID: 3523
  Gene Symbol: CLDN11
  Gene Name: claudin 11
  ENSP ID: ENSP00000417434
MVATCLQVVGFVTSFVGWIGVIVTTSTNDWVVTCGYTIPTCRKLDELGSKGLWADCVMATGLYHCKPLVDILILPGYVQACRALMIAASVLGLPAILLLLTVLPCIRMGQEPGVAKYRRAQLAGVLLILLGCQLLWAKTESSLHSQHLVQFKQKYLEDFSYLQGD

SEQ ID NO: 17525 - protein, 244 aa, Homo sapiens
  Payload ID: 3524
  Gene Symbol: CLDN12
  Gene Name: claudin 12
  Uniprot ID: P56749
  ENSP ID: ENSP00000287916
MGCRDVHAATVLSFLCGIASVAGLFAGTLLPNWRKLRLITFNRNEKNLTVYTGLWVKCARYDGSSDCLMYDTTWYSSVDQLDLRVLQFALPLSMLIAMGALLLCLIGMCNTAFRSSVPNIKLAKCLVNSAGCHLVAGLLFFLAGTVSLSPSIWVIFYNIHLNKKFEPVFSFDYAVYVTIASAGGLFMTSLILFIWYCTCKSLPSPFWQPLYSHPPSMHTYSQPYSARSRLSAIEIDIPVVSHTT

SEQ ID NO: 17526 - protein, 187 aa, Homo sapiens
  Payload ID: 3524
  Gene Symbol: CLDN12
  Gene Name: claudin 12
  ENSP ID: ENSP00000378102
MGCRDVHAATVLSFLCGIASVAGLFAGTLLPNWRKLRLITFNRNEKNLTVYTGLWVKCARYDGSSDCLMYDTTWYSSVDQLDLRVLQFALPLSMLIAMGALLLCLIGMCNTAFRSSVPNIKLAKCLVNSAGCHLVAGLLFFLAGTVSLSPSIWVIFYNIHLNKKFEPVFSFDYAVYVTIASAGGLFM

SEQ ID NO: 17527 - protein, 244 aa, Homo sapiens; identical to SEQ ID NO: 17525
  Payload ID: 3524
  Gene Symbol: CLDN12
  Gene Name: claudin 12
  Uniprot ID: P56749
  ENSP ID: ENSP00000378103

SEQ ID NO: 17528 - protein, 126 aa, Homo sapiens
  Payload ID: 3524
  Gene Symbol: CLDN12
  Gene Name: claudin 12
  ENSP ID: ENSP00000391062
MGCRDVHAATVLSFLCGIASVAGLFAGTLLPNWRKLRLITFNRNEKNLTVYTGLWVKCARYDGSSDCLMYDTTWYSSVDQLDLRVLQFALPLSMLIAMGALLLCLIGMCNTAFRSSVPNIKLAKCL

SEQ ID NO: 17529 - protein, 175 aa, Homo sapiens
  Payload ID: 3524
  Gene Symbol: CLDN12
  Gene Name: claudin 12
  ENSP ID: ENSP00000411399
MGCRDVHAATVLSFLCGIASVAGLFAGTLLPNWRKLRLITFNRNEKNLTVYTGLWVKCARYDGSSDCLMYDTTWYSSVDQLDLRVLQFALPLSMLIAMGALLLCLIGMCNTAFRSSVPNIKLAKCLVNSAGCHLVAGLLFFLAGTVSLSPSIWVIFYNIHLNKKFEPVFSFDYAV

SEQ ID NO: 17530 - protein, 244 aa, Homo sapiens; identical to SEQ ID NO: 17525
  Payload ID: 3524
  Gene Symbol: CLDN12
  Gene Name: claudin 12
  Uniprot ID: P56749
  ENSP ID: ENSP00000419053

SEQ ID NO: 17531 - protein, 239 aa, Homo sapiens
  Payload ID: 3525
  Gene Symbol: CLDN14
  Gene Name: claudin 14
  Uniprot ID: O95500
  ENSP ID: ENSP00000339292
MASTAVQLLGFLLSFLGMVGTLITTILPHWRRTAHVGTNILTAVSYLKGLWMECVWHSTGIYQCQIYRSLLALPQDLQAARALMVISCLLSGIACACAVIGMKCTRCAKGTPAKTTFAILGGTLFILAGLLCMVAVSWTTNDVVQNFYNPLLPSGMKFEIGQALYLGFISSSLSLIGGTLLCLSCQDEAPYRPYQAPPRATTTTANTAPAYQPPAAYKDNRAPSVTSATHSGYRLNDYV

SEQ ID NO: 17532 - protein, 239 aa, Homo sapiens; identical to SEQ ID NO: 17531
  Payload ID: 3525
  Gene Symbol: CLDN14
  Gene Name: claudin 14
  Uniprot ID: O95500
  ENSP ID: ENSP00000382087

SEQ ID NO: 17533 - protein, 239 aa, Homo sapiens; identical to SEQ ID NO: 17531
  Payload ID: 3525
  Gene Symbol: CLDN14
  Gene Name: claudin 14
  Uniprot ID: O95500
  ENSP ID: ENSP00000382088

SEQ ID NO: 17534 - protein, 239 aa, Homo sapiens; identical to SEQ ID NO: 17531
  Payload ID: 3525
  Gene Symbol: CLDN14
  Gene Name: claudin 14
  Uniprot ID: O95500
  ENSP ID: ENSP00000382090

SEQ ID NO: 17535 - protein, 239 aa, Homo sapiens; identical to SEQ ID NO: 17531
  Payload ID: 3525
  Gene Symbol: CLDN14
  Gene Name: claudin 14
  Uniprot ID: O95500
  ENSP ID: ENSP00000382092

SEQ ID NO: 17536 - protein, 228 aa, Homo sapiens
  Payload ID: 3526
  Gene Symbol: CLDN15
  Gene Name: claudin 15
  Uniprot ID: P56746
  ENSP ID: ENSP00000308870
MSMAVETFGFFMATVGLLMLGVTLPNSYWRVSTVHGNVITTNTIFENLWFSCATDSLGVYNCWEFPSMLALSGYIQACRALMITAILLGFLGLLLGIAGLRCTNIGGLELSRKAKLAATAGALHILAGICGMVAISWYAFNITRDFFDPLYPGTKYELGPALYLGWSASLISILGGLCLCSACCCGSDEDPAASARRPYQAPVSVMPVATSDQEGDSSFGKYGRNAYV

SEQ ID NO: 17537 - protein, 228 aa, Homo sapiens; identical to SEQ ID NO: 17536
  Payload ID: 3526
  Gene Symbol: CLDN15
  Gene Name: claudin 15
  Uniprot ID: P56746
  ENSP ID: ENSP00000385300

SEQ ID NO: 17538 - protein, 170 aa, Homo sapiens
  Payload ID: 3526
  Gene Symbol: CLDN15
  Gene Name: claudin 15
  ENSP ID: ENSP00000390230
MSMAVETFGFFMATVGLLMLGVTLPNSYWRVSTVHGNVITTNTIFENLWFSCATDSLGVYNCWEFPSMLALSGIAGLRCTNIGGLELSRKAKLAATAGALHILAGICGMVAISWYAFNITRDFFDPLYPGTKYELGPALYLGWSASLISILGGLCLCSACCCGSDEDPAA

SEQ ID NO: 17539 - protein, 148 aa, Homo sapiens
  Payload ID: 3526
  Gene Symbol: CLDN15
  Gene Name: claudin 15
  ENSP ID: ENSP00000398418
MSMAVETFGFFMATVGLLMLGVTLPNSYWRVSTVHGNVITTNTIFENLWFSCATDSLGVYNCWEFPSMLALSGICGMVAISWYAFNITRDFFDPLYPGTKYELGPALYLGWSASLISILGGLCLCSACCCGSDEDPAASARRPYQAPV

SEQ ID NO: 17540 - protein, 106 aa, Homo sapiens
  Payload ID: 3526
  Gene Symbol: CLDN15
  Gene Name: claudin 15
  ENSP ID: ENSP00000405308
  MOD_RES (1)..(1): Any amino acid
XGNVITTNTIFENLWFSCATDSLGVYNCWEFPSMLALSGYIQACRALMITAILLGFLGLLLGIAGLRCTNIGGLELSRKAKLAATAGALHILADLLAANQPIGSVS

SEQ ID NO: 17541 - protein, 128 aa, Homo sapiens
  Payload ID: 3526
  Gene Symbol: CLDN15
  Gene Name: claudin 15
  ENSP ID: ENSP00000481925
MSMAVETFGFFMATVGLLMLGVTLPNSYWRVSTVHGNVITTNTIFENLWFSCATDSLGVYNCWEFPSMLALSGSTDSPASLSGGTGLLVRLMSIKGPCEGRRLASCRLSVRCKEAVCVQGIFRPAGHS

SEQ ID NO: 17542 - protein, 305 aa, Homo sapiens
  Payload ID: 3527
  Gene Symbol: CLDN16
  Gene Name: claudin 16
  Uniprot ID: Q9Y5I7
  ENSP ID: ENSP00000264734
MTSRTPLLVTACLYYSYCNSRHLQQGVRKSKRPVFSHCQVPETQKTDTRHLSGARAGVCPCCHPDGLLATMRDLLQYIACFFAFFSAGFLIVATWTDCWMVNADDSLEVSTKCRGLWWECVTNAFDGIRTCDEYDSILAEHPLKLVVTRALMITADILAGFGFLTLLLGLDCVKFLPDEPYIKVRICFVAGATLLIAGTPGIIGSVWYAVDVYVERSTLVLHNIFLGIQYKFGWSCWLGMAGSLGCFLAGAVLTCCLYLFKDVGPERNYPYSLRKAYSAAGVSMAKSYSAPRTETAKMYAVDTRV

SEQ ID NO: 17543 - protein, 119 aa, Homo sapiens
  Payload ID: 3527
  Gene Symbol: CLDN16
  Gene Name: claudin 16
  ENSP ID: ENSP00000414136
MTSRTPLLVTACLYYSYCNSRHLQQGVRKSKRPVFSHCQVPETQKTDTRHLSGARAGVCPCCHPDGLLATMRDLLQYIACFFAFFSAGFLIVATWTDCWMVNADDSLEMLDLRETILIP

SEQ ID NO: 17544 - protein, 224 aa, Homo sapiens
  Payload ID: 3528
  Gene Symbol: CLDN17
  Gene Name: claudin 17
  Uniprot ID: P56750
  ENSP ID: ENSP00000286808
MAFYPLQIAGLVLGFLGMVGTLATTLLPQWRVSAFVGSNIIVFERLWEGLWMNCIRQARVRLQCKFYSSLLALPPALETARALMCVAVALSLIALLIGICGMKQVQCTGSNERAKAYLLGTSGVLFILTGIFVLIPVSWTANIIIRDFYNPAIHIGQKRELGAALFLGWASAAVLFIGGGLLCGFCCCNRKKQGYRYPVPGYRVPHTDKRRNTTMLSKTSTSYV

SEQ ID NO: 17545 - protein, 261 aa, Homo sapiens
  Payload ID: 3529
  Gene Symbol: CLDN18
  Gene Name: claudin 18
  Uniprot ID: P56856
  ENSP ID: ENSP00000183605
MSTTTCQVVAFLLSILGLAGCIAATGMDMWSTQDLYDNPVTSVFQYEGLWRSCVRQSSGFTECRPYFTILGLPAMLQAVRALMIVGIVLGAIGLLVSIFALKCIRIGSMEDSAKANMTLTSGIMFIVSGLCAIAGVSVFANMLVTNFWMSTANMYTGMGGMVQTVQTRYTFGAALFVGWVAGGLTLIGGVMMCIACRGLAPEETNYKAVSYHASGHSVAYKPGGFKASTGFGSNTKNKKIYDGGARTEDEVQSYPSKHDYV

SEQ ID NO: 17546 - protein, 261 aa, Homo sapiens
  Payload ID: 3529
  Gene Symbol: CLDN18
  Gene Name: claudin 18
  Uniprot ID: P56856
  ENSP ID: ENSP00000340939
MAVTACQGLGFVVSLIGIAGIIAATCMDQWSTQDLYNNPVTAVFNYQGLWRSCVRESSGFTECRGYFTLLGLPAMLQAVRALMIVGIVLGAIGLLVSIFALKCIRIGSMEDSAKANMTLTSGIMFIVSGLCAIAGVSVFANMLVTNFWMSTANMYTGMGGMVQTVQTRYTFGAALFVGWVAGGLTLIGGVMMCIACRGLAPEETNYKAVSYHASGHSVAYKPGGFKASTGFGSNTKNKKIYDGGARTEDEVQSYPSKHDYV

SEQ ID NO: 17547 - protein, 146 aa, Homo sapiens
  Payload ID: 3529
  Gene Symbol: CLDN18
  Gene Name: claudin 18
  ENSP ID: ENSP00000419732
MSTTTCQVVAFLLSILGLAGCIAATGMDMWSTQDLYDNPVTSVFQYEGLWRSCVRQSSGFTECRPYFTILGLPAMLQAVRALMIVGIVLGAIGLLVSIFALKCIRIGSMEDSAKANMTLTSGIMFIVSGTHLVRLCSWAGSLEASH

SEQ ID NO: 17548 - protein, 224 aa, Homo sapiens
  Payload ID: 3530
  Gene Symbol: CLDN19
  Gene Name: claudin 19
  Uniprot ID: Q8N6F1
  ENSP ID: ENSP00000296387
MANSGLQLLGYFLALGGWVGIIASTALPQWKQSSYAGDAIITAVGLYEGLWMSCASQSTGQVQCKLYDSLLALDGHIQSARALMVVAVLLGFVAMVLSVVGMKCTRVGDSNPIAKGRVAIAGGALFILAGLCTLTAVSWYATLVTQEFFNPSTPVNARYEFGPALFVGWASAGLAVLGGSFLCCTCPEPERPNSSPQPYRPGPSAAAREPVVKLPASAKGPLGV

SEQ ID NO: 17549 - protein, 211 aa, Homo sapiens
  Payload ID: 3530
  Gene Symbol: CLDN19
  Gene Name: claudin 19
  Uniprot ID: Q8N6F1
  ENSP ID: ENSP00000361617
MANSGLQLLGYFLALGGWVGIIASTALPQWKQSSYAGDAIITAVGLYEGLWMSCASQSTGQVQCKLYDSLLALDGHIQSARALMVVAVLLGFVAMVLSVVGMKCTRVGDSNPIAKGRVAIAGGALFILAGLCTLTAVSWYATLVTQEFFNPSTPVNARYEFGPALFVGWASAGLAVLGGSFLCCTCPEPERPNSSPQPYRPGPSAAAREYV

SEQ ID NO: 17550 - protein, 218 aa, Homo sapiens
  Payload ID: 3530
  Gene Symbol: CLDN19
  Gene Name: claudin 19
  Uniprot ID: Q8N6F1
  ENSP ID: ENSP00000443229
MANSGLQLLGYFLALGGWVGIIASTALPQWKQSSYAGDAIITAVGLYEGLWMSCASQSTGQVQCKLYDSLLALDGHIQSARALMVVAVLLGFVAMVLSVVGMKCTRVGDSNPIAKGRVAIAGGALFILAGMNLAQPCSWAGPQLAWPCWAAPSSAAHARSQRDPTAAHSPIGLDPLLLPESTSELRLPWPAPHPVAPLPSIQPASQHPGQGHWGIGWA

SEQ ID NO: 17551 - protein, 230 aa, Homo sapiens
  Payload ID: 3531
  Gene Symbol: CLDN2
  Gene Name: claudin 2
  Uniprot ID: P57739
  ENSP ID: ENSP00000336571
MASLGLQLVGYILGLLGLLGTLVAMLLPSWKTSSYVGASIVTAVGFSKGLWMECATHSTGITQCDIYSTLLGLPADIQAAQAMMVTSSAISSLACIISVVGMRCTVFCQESRAKDRVAVAGGVFFILGGLLGFIPVAWNLHGILRDFYSPLVPDSMKFEIGEALYLGIISSLFSLIAGIILCFSCSSQRNRSNYYDAYQAQPLATRSSPRPGQPPKVKSEFNSYSLTGYV

SEQ ID NO: 17552 - protein, 230 aa, Homo sapiens; identical to SEQ ID NO: 17551
  Payload ID: 3531
  Gene Symbol: CLDN2
  Gene Name: claudin 2
  Uniprot ID: P57739
  ENSP ID: ENSP00000441283

SEQ ID NO: 17553 - protein, 230 aa, Homo sapiens; identical to SEQ ID NO: 17551
  Payload ID: 3531
  Gene Symbol: CLDN2
  Gene Name: claudin 2
  Uniprot ID: P57739
  ENSP ID: ENSP00000443230

SEQ ID NO: 17554 - protein, 219 aa, Homo sapiens
  Payload ID: 3532
  Gene Symbol: CLDN20
  Gene Name: claudin 20
  Uniprot ID: P56880
  ENSP ID: ENSP00000356133
MASAGLQLLAFILALSGVSGVLTATLLPNWKVNVDVDSNIITAIVQLHGLWMDCTWYSTGMFSCALKHSILSLPIHVQAARATMVLACVLSALGICTSTVGMKCTRLGGDRETKSHASFAGGVCFMSAGISSLISTVWYTKEIIANFLDLTVPESNKHEPGGAIYIGFISAMLLFISGMIFCTSCIKRNPEARLDPPTQQPISNTQLENNSTHNLKDYV

SEQ ID NO: 17555 - protein, 220 aa, Homo sapiens
  Payload ID: 3533
  Gene Symbol: CLDN22
  Gene Name: claudin 22
  Uniprot ID: Q8N7P3
  ENSP ID: ENSP00000318113
MALVFRTVAQLAGVSLSLLGWVLSCLTNYLPHWKNLNLDLNEMENWTMGLWQTCVIQEEVGMQCKDFDSFLALPAELRVSRILMFLSNGLGFLGLLVSGFGLDCLRIGESQRDLKRRLLILGGILSWASGVTALVPVSWVAHKTVQEFWDENVPDFVPRWEFGEALFLGWFAGLSLLLGGCLLHCAACSSHAPLASGHYAVAQTQDHHQELETRNTNLKH

SEQ ID NO: 17556 - protein, 292 aa, Homo sapiens
  Payload ID: 3534
  Gene Symbol: CLDN23
  Gene Name: claudin 23
  Uniprot ID: Q96B33
  ENSP ID: ENSP00000428780
MRTPVVMTLGMVLAPCGLLLNLTGTLAPGWRLVKGFLNQPVDVELYQGLWDMCREQSSRERECGQTDQWGYFEAQPVLVARALMVTSLAATVLGLLLASLGVRCWQDEPNFVLAGLSGVVLFVAGLLGLIPVSWYNHFLGDRDVLPAPASPVTVQVSYSLVLGYLGSCLLLLGGFSLALSFAPWCDERCRRRRKGPSAGPRRSSVSTIQVEWPEPDLAPAIKYYSDGQHRPPPAQHRKPKPKPKVGFPMPRPRPKAYTNSVDVLDGEGWESQDAPSCSTHPCDSSLPCDSDL

SEQ ID NO: 17557 - protein, 197 aa, Homo sapiens
  Payload ID: 3535
  Gene Symbol: CLDN24
  Gene Name: claudin 24
  ENSP ID: ENSP00000422519
MQSVGLLLSLLGWILSIITTYLPHWKNLNLDLNEMENWTMGLWQTCVIQEEVGMQCKDFDSFLALPAELRVSRILMFLSNGLGFLGLLVSGFGLDCLRIGESQRDLKRRLLILGGILSWASGITALVPVSWVAHKTVQEFWDENVPDFVPRWEFGEALFLGWFAGLSLLLGGCLLNCAACSSHAPLALGHYAVAQMQ

SEQ ID NO: 17558 - protein, 220 aa, Homo sapiens
  Payload ID: 3535
  Gene Symbol: CLDN24
  Gene Name: claudin 24
  Uniprot ID: A6NM45
  ENSP ID: ENSP00000438400
MALIFRTAMQSVGLLLSLLGWILSIITTYLPHWKNLNLDLNEMENWTMGLWQTCVIQEEVGMQCKDFDSFLALPAELRVSRILMFLSNGLGFLGLLVSGFGLDCLRIGESQRDLKRRLLILGGILSWASGITALVPVSWVAHKTVQEFWDENVPDFVPRWEFGEALFLGWFAGLSLLLGGCLLNCAACSSHAPLALGHYAVAQMQTQCPYLEDGTADPQV

SEQ ID NO: 17559 - protein, 229 aa, Homo sapiens
  Payload ID: 3536
  Gene Symbol: CLDN25
  Gene Name: claudin 25
  Uniprot ID: C9JDP6
  ENSP ID: ENSP00000396304
MAWSFRAKVQLGGLLLSLLGWVCSCVTTILPQWKTLNLELNEMETWIMGIWEVCVDREEVATVCKAFESFLSLPQELQVARILMVASHGLGLLGLLLCSFGSECFQFHRIRWVFKRRLGLLGRTLEASASATTLLPVSWVAHATIQDFWDDSIPDIIPRWEFGGALYLGWAAGIFLALGGLLLIFSACLGKEDVPFPLMAGPTVPLSCAPVEESDGSFHLMLRPRNLVI

SEQ ID NO: 17560 - protein, 220 aa, Homo sapiens
  Payload ID: 3537
  Gene Symbol: CLDN3
  Gene Name: claudin 3
  Uniprot ID: O15551
  ENSP ID: ENSP00000378577
MSMGLEITGTALAVLGWLGTIVCCALPMWRVSAFIGSNIITSQNIWEGLWMNCVVQSTGQMQCKVYDSLLALPQDLQAARALIVVAILLAAFGLLVALVGAQCTNCVQDDTAKAKITIVAGVLFLLAALLTLVPVSWSANTIIRDFYNPVVPEAQKREMGAGLYVGWAAAALQLLGGALLCCSCPPREKKYTATKVVYSAPRSTGPGASLGTGYDRKDYV

SEQ ID NO: 17561 - protein, 214 aa, Homo sapiens
  Payload ID: 3538
  Gene Symbol: CLDN34
  Gene Name: claudin 34
  Uniprot ID: H7C241
  ENSP ID: ENSP00000403980
MVWFCNSADCQFSVFALTTIGWILSSTSTGLVEWRIWYMKDTSLYPPGIACVGIFRVCIYRRRTNSTTTKFCYRYSYQDTFLPFEISMAQRFLLTASIFGFFGRAFNMFALRNMSMRMFEEDTYNSFVVSGILNIAAGVFNLIAVLQNYDAVINSQGITFLPSLQMPFKPDVQEVGTAIQVAGIGVLPMLLTGMFSLFYKCPPYGQVHPGISEM

SEQ ID NO: 17562 - protein, 209 aa, Homo sapiens
  Payload ID: 3539
  Gene Symbol: CLDN4
  Gene Name: claudin 4
  Uniprot ID: O14493
  ENSP ID: ENSP00000342445
MASMGLQVMGIALAVLGWLAVMLCCALPMWRVTAFIGSNIVTSQTIWEGLWMNCVVQSTGQMQCKVYDSLLALPQDLQAARALVIISIIVAALGVLLSVVGGKCTNCLEDESAKAKTMIVAGVVFLLAGLMVIVPVSWTAHNIIQDFYNPLVASGQKREMGASLYVGWAASGLLLLGGGLLCCNCPPRTDKPYSAKYSAARSAAASNYV

SEQ ID NO: 17563 - protein, 209 aa, Homo sapiens; identical to SEQ ID NO: 17562
  Payload ID: 3539
  Gene Symbol: CLDN4
  Gene Name: claudin 4
  Uniprot ID: O14493
  ENSP ID: ENSP00000388639

SEQ ID NO: 17564 - protein, 209 aa, Homo sapiens; identical to SEQ ID NO: 17562
  Payload ID: 3539
  Gene Symbol: CLDN4
  Gene Name: claudin 4
  Uniprot ID: O14493
  ENSP ID: ENSP00000409544

SEQ ID NO: 17565 - protein, 303 aa, Homo sapiens
  Payload ID: 3540
  Gene Symbol: CLDN5
  Gene Name: claudin 5
  ENSP ID: ENSP00000384554
MTRARIGCFGPGGRARGTESAPEPSKRVPPGRSWQTQEVRQTRGANGLGPRAGSAGAKAPGPAQGAAQHGLGGSAGLRVRVSPLAMGSAALEILGLVLCLVGWGGLILACGLPMWQVTAFLDHNIVTAQTTWKGLWMSCVVQSTGHMQCKVYDSVLALSTEVQAARALTVSAVLLAFVALFVTLAGAQCTTCVAPGPAKARVALTGGVLYLFCGLLALVPLCWFANIVVREFYDPSVPVSQKYELGAALYIGWAATALLMVGGCLLCCGAWVCTGRPDLSFPVKYSAPRRPTATGDYDKKNYV

SEQ ID NO: 17566 - protein, 303 aa, Homo sapiens; identical to SEQ ID NO: 17565
  Payload ID: 3540
  Gene Symbol: CLDN5
  Gene Name: claudin 5
  ENSP ID: ENSP00000385477

SEQ ID NO: 17567 - protein, 303 aa, Homo sapiens; identical to SEQ ID NO: 17565
  Payload ID: 3540
  Gene Symbol: CLDN5
  Gene Name: claudin 5
  ENSP ID: ENSP00000400612

SEQ ID NO: 17568 - protein, 218 aa, Homo sapiens
  Payload ID: 3540
  Gene Symbol: CLDN5
  Gene Name: claudin 5
  Uniprot ID: O00501
  ENSP ID: ENSP00000480623
MGSAALEILGLVLCLVGWGGLILACGLPMWQVTAFLDHNIVTAQTTWKGLWMSCVVQSTGHMQCKVYDSVLALSTEVQAARALTVSAVLLAFVALFVTLAGAQCTTCVAPGPAKARVALTGGVLYLFCGLLALVPLCWFANIVVREFYDPSVPVSQKYELGAALYIGWAATALLMVGGCLLCCGAWVCTGRPDLSFPVKYSAPRRPTATGDYDKKNYV

SEQ ID NO: 17569 - protein, 220 aa, Homo sapiens
  Payload ID: 3541
  Gene Symbol: CLDN6
  Gene Name: claudin 6
  Uniprot ID: P56747
  ENSP ID: ENSP00000328674
MASAGMQILGVVLTLLGWVNGLVSCALPMWKVTAFIGNSIVVAQVVWEGLWMSCVVQSTGQMQCKVYDSLLALPQDLQAARALCVIALLVALFGLLVYLAGAKCTTCVEEKDSKARLVLTSGIVFVISGVLTLIPVCWTAHAIIRDFYNPLVAEAQKRELGASLYLGWAASGLLLLGGGLLCCTCPSGGSQGPSHYMARYSTSAPAISRGPSEYPTKNYV

SEQ ID NO: 17570 - protein, 220 aa, Homo sapiens; identical to SEQ ID NO: 17569
  Payload ID: 3541
  Gene Symbol: CLDN6
  Gene Name: claudin 6
  Uniprot ID: P56747
  ENSP ID: ENSP00000380131

SEQ ID NO: 17571 - protein, 39 aa, Homo sapiens
  Payload ID: 3541
  Gene Symbol: CLDN6
  Gene Name: claudin 6
  ENSP ID: ENSP00000458783
MASAGMQILGVVLTLLGWVNGLVSCALPMWKALLFLTLG

SEQ ID NO: 17572 - protein, 211 aa, Homo sapiens
  Payload ID: 3542
  Gene Symbol: CLDN7
  Gene Name: claudin 7
  Uniprot ID: O95471
  ENSP ID: ENSP00000353475
MANSGLQLLGFSMALLGWVGLVACTAIPQWQMSSYAGDNIITAQAMYKGLWMDCVTQSTGMMSCKMYDSVLALSAALQATRALMVVSLVLGFLAMFVATMGMKCTRCGGDDKVKKARIAMGGGIIFIVAGLAALVACSWYGHQIVTDFYNPLIPTNIKYEFGPAIFIGWAGSALVILGGALLSCSCPGNESKAGYRVPRSYPKSNSSKEYV

SEQ ID NO: 17573 - protein, 211 aa, Homo sapiens; identical to SEQ ID NO: 17572
  Payload ID: 3542
  Gene Symbol: CLDN7
  Gene Name: claudin 7
  Uniprot ID: O95471
  ENSP ID: ENSP00000396638

SEQ ID NO: 17574 - protein, 145 aa, Homo sapiens
  Payload ID: 3542
  Gene Symbol: CLDN7
  Gene Name: claudin 7
  ENSP ID: ENSP00000445131
MANSGLQLLGFSMALLGWVGLVACTAIPQWQMSSYAGDNIITAQAMYKGLWMDCVTQSTGMMSCKMYDSVLALSAALQATRALMVVSLVLGFLAMFVATMGMKCTRCGGDDKVKKARIAMGGGIIFIVAGMSLALPSLLAGQGLP

SEQ ID NO: 17575 - protein, 99 aa, Homo sapiens
  Payload ID: 3542
  Gene Symbol: CLDN7
  Gene Name: claudin 7
  ENSP ID: ENSP00000460550
MVVSLVLGFLAMFVATMGMKCTRCGGDDKVKKARIAMGGGIIFIVAGLAALVACSWYGHQIVTDFYNPLIPTNIKYEFGPAIFIGWAGSALVILGGALL

SEQ ID NO: 17576 - protein, 193 aa, Homo sapiens
  Payload ID: 3542
  Gene Symbol: CLDN7
  Gene Name: claudin 7
  ENSP ID: ENSP00000460796
MPEGTVGLPARRPQCFLRAEMANSGLQLLGFSMALLGWVGLVACTAIPQWQMSSYAGDNIITAQAMYKGLWMDCVTQSTGMMSCKMYDSVLALSAALQATRALMVVSLVLGFLAMFVATMGMKCTRCGGDDKVKKARIAMGGGIIFIVAGLAALVACSWYGHQIVTDFYNPLIPTNIKYEFGPAIFIGWAGSA

SEQ ID NO: 17577 - protein, 140 aa, Homo sapiens
  Payload ID: 3542
  Gene Symbol: CLDN7
  Gene Name: claudin 7
  ENSP ID: ENSP00000465963
MANSGLQLLGFSMALLGWVGLVACTAIPQWQMSSYAGDNIITAQAMYKGLWMDCVTQSTGMMSCKIGLAGHSSPNGGLPGAGLPGHVCGHDGHEVHALWGRRQSEEGPYSHGWRHNFHRGRSCRLGSLLLVWPSDCHRLL

SEQ ID NO: 17578 - protein, 129 aa, Homo sapiens
  Payload ID: 3542
  Gene Symbol: CLDN7
  Gene Name: claudin 7
  ENSP ID: ENSP00000467220
MANSGLQLLGFSMALLGWVGLVACTAIPQWQMSSYAGDNIITAQAMYKGLWMDCVTQSTGMMSCKMYDSVLALSAALQATRALMVVSLVLGFLAMFVATMGMKCTRCGGDDKVKKARIAMGGGIIFIVA

SEQ ID NO: 17579 - protein, 225 aa, Homo sapiens
  Payload ID: 3543
  Gene Symbol: CLDN8
  Gene Name: claudin 8
  Uniprot ID: P56748
  ENSP ID: ENSP00000382783
MATHALEIAGLFLGGVGMVGTVAVTVMPQWRVSAFIENNIVVFENFWEGLWMNCVRQANIRMQCKIYDSLLALSPDLQAARGLMCAASVMSFLAFMMAILGMKCTRCTGDNEKVKAHILLTAGIIFIITGMVVLIPVSWVANAIIRDFYNSIVNVAQKRELGEALYLGWTTALVLIVGGALFCCVFCCNEKSSSYRYSIPSHRTTQKSYHTGKKSPSVYSRSQYV

SEQ ID NO: 17580 - protein, 217 aa, Homo sapiens
  Payload ID: 3544
  Gene Symbol: CLDN9
  Gene Name: claudin 9
  Uniprot ID: O95484
  ENSP ID: ENSP00000398017
MASTGLELLGMTLAVLGWLGTLVSCALPLWKVTAFIGNSIVVAQVVWEGLWMSCVVQSTGQMQCKVYDSLLALPQDLQAARALCVIALLLALLGLLVAITGAQCTTCVEDEGAKARIVLTAGVILLLAGILVLIPVCWTAHAIIQDFYNPLVAEALKRELGASLYLGWAAAALLMLGGGLLCCTCPPPQVERPRGPRLGYSIPSRSGASGLDKRDYV

SEQ ID NO: 17581 - protein, 253 aa, Homo sapiens
  Payload ID: 3545
  Gene Symbol: CLDND1
  Gene Name: claudin domain containing 1
  Uniprot ID: Q9NY35
  ENSP ID: ENSP00000340247
MDNRFATAFVIACVLSLISTIYMAASIGTDFWYEYRSPVQENSSDLNKSIWDEFISDEADEKTYNDALFRYNGTVGLWRRCITIPKNMHWYSPPERTESFDVVTKCVSFTLTEQFMEKFVDPGNHNSGIDLLRTYLWRCQFLLPFVSLGLMCFGALIGLCACICRSLYPTIATGILHLLAGLCTLGSVSCYVAGIELLHQKLELPDNVSGEFGWSFCLACVSAPLQFMASALFIWAAHTNRKEYTLMKAYRVA

SEQ ID NO: 17582 - protein, 253 aa, Homo sapiens; identical to SEQ ID NO: 17581
  Payload ID: 3545
  Gene Symbol: CLDND1
  Gene Name: claudin domain containing 1
  Uniprot ID: Q9NY35
  ENSP ID: ENSP00000377734

SEQ ID NO: 17583 - protein, 276 aa, Homo sapiens
  Payload ID: 3545
  Gene Symbol: CLDND1
  Gene Name: claudin domain containing 1
  ENSP ID: ENSP00000377735
MGGDRLENKTSVSVASWSSLNARMDNRFATAFVIACVLSLISTIYMAASIGTDFWYEYRSPVQENSSDLNKSIWDEFISDEADEKTYNDALFRYNGTVGLWRRCITIPKNMHWYSPPERTESFDVVTKCVSFTLTEQFMEKFVDPGNHNSGIDLLRTYLWRCQFLLPFVSLGLMCFGALIGLCACICRSLYPTIATGILHLLAGLCTLGSVSCYVAGIELLHQKLELPDNVSGEFGWSFCLACVSAPLQFMASALFIWAAHTNRKEYTLMKAYRVA

SEQ ID NO: 17584 - protein, 253 aa, Homo sapiens; identical to SEQ ID NO: 17581
  Payload ID: 3545
  Gene Symbol: CLDND1
  Gene Name: claudin domain containing 1
  Uniprot ID: Q9NY35
  ENSP ID: ENSP00000377739

SEQ ID NO: 17585 - protein, 239 aa, Homo sapiens
  Payload ID: 3545
  Gene Symbol: CLDND1
  Gene Name: claudin domain containing 1
  ENSP ID: ENSP00000420913
MDNRFATAFVIACVLSLISTIYMAASIGTDFWYEYRSPVQENSSDLNKSIWDEFISDEADEKTYNDALFRYNGTVGLWRRCITIPKNMHWYSPPERTESFDVVTKCVSFTLTEQFMEKFVDPGNHNSGIDLLRTYLWRCQFLLPFVSLGLMCFGALIGLCACICRSLYPTIATGILHLLAGLCTLGSVSCYVAGIELLHQKLELPDNVSGEFGWSFCLACVSAPLQFMASALFIWAAHT

SEQ ID NO: 17586 - protein, 253 aa, Homo sapiens; identical to SEQ ID NO: 17581
  Payload ID: 3545
  Gene Symbol: CLDND1
  Gene Name: claudin domain containing 1
  Uniprot ID: Q9NY35
  ENSP ID: ENSP00000421226

SEQ ID NO: 17587 - protein, 236 aa, Homo sapiens
  Payload ID: 3545
  Gene Symbol: CLDND1
  Gene Name: claudin domain containing 1
  ENSP ID: ENSP00000421413
MDNRFATAFVIACVLSLISTIYMAASIGTDFWYEYRSPVQENSSDLNKSIWDEFISDEADEKTYNDALFRYNGTVGLWRRCITIPKNMHWYSPPERTESFDVVTKCVSFTLTEQFMEKFVDPGNHNSGIDLLRTYLWRCQFLLPFVSLGLMCFGALIGLCACICRSLYPTIATGILHLLAGLCTLGSVSCYVAGIELLHQKLELPDNVSGEFGWSFCLACVSAPLQFMASALFIWA

SEQ ID NO: 17588 - protein, 155 aa, Homo sapiens
  Payload ID: 3545
  Gene Symbol: CLDND1
  Gene Name: claudin domain containing 1
  ENSP ID: ENSP00000422116
KSIWDEFISDEADEKTYNDALFRYNGTVGLWRRCITIPKNMHWYSPPERTESFDVVTKCVSFTLTEQFMEKFVDPGNHNSGIDLLRTYLWRCQFLLPFVSLGLMCFGALIGLCACICRSLYPTIATGILHLLAAQYYKERFTIMTLQSWETYHKI

SEQ ID NO: 17589 - protein, 210 aa, Homo sapiens
  Payload ID: 3545
  Gene Symbol: CLDND1
  Gene Name: claudin domain containing 1
  ENSP ID: ENSP00000422428
MDNRFATAFVIACVLSLISTIYMAASIGTDFWYEYRSPVQENSSDLNKSIWDEFISDEADEKTYNDALFRYNGTVGLWRRCITIPKNMHWYSPPERTESFDVVTKCVSFTLTEQFMEKFVDPGNHNSGIDLLRTYLWRCQFLLPFVSLGLMCFGALIGLCACICRSLYPTIATGILHLLAVTKESMLPAGAESKHTATPAHACVQTGKPK

SEQ ID NO: 17590 - protein, 180 aa, Homo sapiens
  Payload ID: 3545
  Gene Symbol: CLDND1
  Gene Name: claudin domain containing 1
  ENSP ID: ENSP00000423093
MDNRFATAFVIACVLSLISTIYMAASIGTDFWYEYRSPVQENSSDLNKSIWDEFISDEADEKTYNDALFRYNGTVGLWRRCITIPKNMHWYSPPERTESFDVVTKCVSFTLTEQFMEKFVDPGNHNSGIDLLRTYLWRCQFLLPFVSLGLMCFGALIGLCACICRSLYPTIATGILHLLA

SEQ ID NO: 17591 - protein, 213 aa, Homo sapiens
  Payload ID: 3545
  Gene Symbol: CLDND1
  Gene Name: claudin domain containing 1
  ENSP ID: ENSP00000423151
MDNRFATAFVIACVLSLISTIYMAASIGTDFWYEYRSPVQENSSDLNKSIWDEFISDEADEKTYNDALFRYNGTVGLWRRCITIPKNMHWYSPPERTESFDVVTKCVSFTLTEQFMEKFVDPGNHNSGIDLLRTYLWRCQFLLPFVSLGLMCFGALIGLCACICRSLYPTIATGILHLLAGLCTLGSVSCYVAGIELLHQKLELPDNVSGEFG

SEQ ID NO: 17592 - protein, 253 aa, Homo sapiens; identical to SEQ ID NO: 17581
  Payload ID: 3545
  Gene Symbol: CLDND1
  Gene Name: claudin domain containing 1
  Uniprot ID: Q9NY35
  ENSP ID: ENSP00000423590

SEQ ID NO: 17593 - protein, 87 aa, Homo sapiens
  Payload ID: 3545
  Gene Symbol: CLDND1
  Gene Name: claudin domain containing 1
  ENSP ID: ENSP00000423592
MGESFDVVTKCVSFTLTEQFMEKFVDPGNHNSGIDLLRTYLWRCQFLLPFVSLGLMCFGALIGLCACICRSLYPTIATGILHLLAEN

SEQ ID NO: 17594 - protein, 223 aa, Homo sapiens
  Payload ID: 3545
  Gene Symbol: CLDND1
  Gene Name: claudin domain containing 1
  ENSP ID: ENSP00000423732
MAASIGTDFWYEYRSPVQENSSDLNKSIWDEFISDEADEKTYNDALFRYNGTVGLWRRCITIPKNMHWYSPPERTESFDVVTKCVSFTLTEQFMEKFVDPGNHNSGIDLLRTYLWRCQFLLPFVSLGLMCFGALIGLCACICRSLYPTIATGILHLLAGLCTLGSVSCYVAGIELLHQKLELPDNVSGEFGWSFCLACVSAPLQFMASALFIWAAHTNRKEYT

SEQ ID NO: 17595 - protein, 100 aa, Homo sapiens
  Payload ID: 3545
  Gene Symbol: CLDND1
  Gene Name: claudin domain containing 1
  ENSP ID: ENSP00000424484
MEKFVDPGNHNSGIDLLRTYLWRCQFLLPFVSLGLMCFGALIGLCACICRSLYPTIATGILHLLAGLCTLGSVSCYVAGIELLHQKLELPDNVSGEFGWS

SEQ ID NO: 17596 - protein, 106 aa, Homo sapiens
  Payload ID: 3545
  Gene Symbol: CLDND1
  Gene Name: claudin domain containing 1
  ENSP ID: ENSP00000424589
MDNRFATAFVIACVLSLISTIYMAASIGTDFWYEYRSPVQENSSDLNKSIWDEFISDEADEKTYNDALFRYNGTVGLWRRCITIPKNMHWYSPPERTGNCSCSRVI

SEQ ID NO: 17597 - protein, 158 aa, Homo sapiens
  Payload ID: 3545
  Gene Symbol: CLDND1
  Gene Name: claudin domain containing 1
  Uniprot ID: Q9NY35
  ENSP ID: ENSP00000424669
MGESFDVVTKCVSFTLTEQFMEKFVDPGNHNSGIDLLRTYLWRCQFLLPFVSLGLMCFGALIGLCACICRSLYPTIATGILHLLAGLCTLGSVSCYVAGIELLHQKLELPDNVSGEFGWSFCLACVSAPLQFMASALFIWAAHTNRKEYTLMKAYRVA

SEQ ID NO: 17598 - protein, 177 aa, Homo sapiens
  Payload ID: 3545
  Gene Symbol: CLDND1
  Gene Name: claudin domain containing 1
  ENSP ID: ENSP00000425204
MDNRFATAFVIACVLSLISTIYMAASIGTDFWYEYRSPVQENSSDLNKSIWDEFISDEADEKTYNDALFRYNGTVGLWRRCITIPKNMHWYSPPERTESFDVVTKCVSFTLTEQFMEKFVDPGNHNSGIDLLRTYLWRCQFLLPFVSLGLMCFGALIGLCACICRSLYPTIATGILH

SEQ ID NO: 17599 - protein, 145 aa, Homo sapiens
  Payload ID: 3545
  Gene Symbol: CLDND1
  Gene Name: claudin domain containing 1
  ENSP ID: ENSP00000425256
MDNRFATAFVIACVLSLISTIYMAASIGTDFWYEYRSPVQENSSDLNKSIWDEFISDEADEKTYNDALFRYNGTVGLWRRCITIPKNMHWYSPPERTESFDVVTKCVSFTLTEQFMEKFVDPGNHNSGIDLLRTYLWRCQFLLPF

SEQ ID NO: 17600 - protein, 244 aa, Homo sapiens
  Payload ID: 3545
  Gene Symbol: CLDND1
  Gene Name: claudin domain containing 1
  ENSP ID: ENSP00000425539
MDNRFATAFVIACVLSLISTIYMAASIGTDFWYEYRSPVQENSSDLNKSIWDEFISDEADEKTYNDALFRYNGTVGLWRRCITIPKNMHWYSPPERTESFDVVTKCVSFTLTEQFMEKFVDPGNHNSGIDLLRTYLWRCQFLLPFVSLGLMCFGALIGLCACICRSLYPTIATGILHLLAGLCTLGSVSCYVAGIELLHQKLELPDNVSGEFGWSFCLACVSAPLQFMASALFIWAAHTNRKEY

SEQ ID NO: 17601 - protein, 72 aa, Homo sapiens
  Payload ID: 3545
  Gene Symbol: CLDND1
  Gene Name: claudin domain containing 1
  ENSP ID: ENSP00000426164
FVSLGLMCFGALIGLCACICRSLYPTIATGILHLLAGLCTLGSVSCYVAGIELLHQKLELPDNPSTIKNVSP

SEQ ID NO: 17602 - protein, 253 aa, Homo sapiens; identical to SEQ ID NO: 17581
  Payload ID: 3545
  Gene Symbol: CLDND1
  Gene Name: claudin domain containing 1
  Uniprot ID: Q9NY35
  ENSP ID: ENSP00000426869

SEQ ID NO: 17603 - protein, 89 aa, Homo sapiens
  Payload ID: 3545
  Gene Symbol: CLDND1
  Gene Name: claudin domain containing 1
  ENSP ID: ENSP00000427042
MDNRFATAFVIACVLSLISTIYMAASIGTDFWYEYRSPVQENSSDLNKSIWDEFISDEADEKTYNDALFRYNGTVGLWRRCITIPKNMH

SEQ ID NO: 17604 - protein, 121 aa, Homo sapiens
  Payload ID: 3545
  Gene Symbol: CLDND1
  Gene Name: claudin domain containing 1
  ENSP ID: ENSP00000427119
MEKFVDPGNHNSGIDLLRTYLWRCQFLLPFVSLGLMCFGALIGLCACICRSLYPTIATGILHLLAGLCTLGSVSCYVAGIELLHQKLELPDNVSGEFGWSFCLACVSAPLQFMASALFIWA

SEQ ID NO: 17605 - protein, 138 aa, Homo sapiens
  Payload ID: 3545
  Gene Symbol: CLDND1
  Gene Name: claudin domain containing 1
  ENSP ID: ENSP00000427385
MAASIGTDFWYEYRSPVQENSSDLNKSIWDEFISDEADEKTYNDALFRYNGTVGLWRRCITIPKNMHWYSPPERTESFDVVTKCVSFTLTEQFMEKFVDPGNHNSGIDLLRTYLWRCQFLLPFVSLGLMCFGALIGLC

SEQ ID NO: 17606 - protein, 172 aa, Homo sapiens
  Payload ID: 3545
  Gene Symbol: CLDND1
  Gene Name: claudin domain containing 1
  ENSP ID: ENSP00000427658
MDNRFATAFVIACVLSLISTIYMAASIGTDFWYEYRSPVQENSSDLNKSIWDEFISDEADEKTYNDALFRYNGTVGLWRRCITIPKNMHWYSPPERTESFDVVTKCVSFTLTEQFMEKFVDPGNHNSGIDLLRTYLWRCQFLLPFVSLGLMCFGALIGLCACICRSLYPTIA

SEQ ID NO: 17607 - protein, 167 aa, Homo sapiens
  Payload ID: 3546
  Gene Symbol: CLDND2
  Gene Name: claudin domain containing 2
  Uniprot ID: Q8NHS1
  ENSP ID: ENSP00000291715
MGVKRSLQSGGILLSLVANVLMVLSTATNYWTRQQEGHSGLWQECNHGICSSIPCQTTLAVTVACMVLAVGVGVVGMVMGLRIRCDEGESLRGQTTSAFLFLGGLLLLTALIGYTVKNAWKNNVFFSWSYFSGWLALPFSILAGFCFLLADMIMQSTDAISGFPVCL

SEQ ID NO: 17608 - protein, 109 aa, Homo sapiens
  Payload ID: 3546
  Gene Symbol: CLDND2
  Gene Name: claudin domain containing 2
  ENSP ID: ENSP00000471912
  MOD_RES (1)..(1): Any amino acid
XVVGMVMGLRIRCDEGESLRGQTTSAFLFLGGLLLLTALIGSPAALPGNPGDLSGTPQHTNDSRRPGRDPLGAPNPSPRGPPGHPPQGPPSSPCSAPPSPQASAFCWQT

SEQ ID NO: 17609 - protein, 167 aa, Homo sapiens; identical to SEQ ID NO: 17607
  Payload ID: 3546
  Gene Symbol: CLDND2
  Gene Name: claudin domain containing 2
  Uniprot ID: Q8NHS1
  ENSP ID: ENSP00000472077

SEQ ID NO: 17610 - protein, 354 aa, Homo sapiens
  Payload ID: 3547
  Gene Symbol: CLVS1
  Gene Name: clavesin 1
  Uniprot ID: Q8IUQ0
  ENSP ID: ENSP00000325506
MGPVSLLPKYQKLNTWNGDLAKMTHLQAGLSPETIEKARLELNENPDVLHQDIQQVRDMIITRPDIGFLRTDDAFILRFLRARKFHQADAFRLLAQYFQYRQLNLDMFKNFKADDPGIKRALIDGFPGVLENRDHYGRKILLLFAANWDQSRNSFTDILRAILLSLEVLIEDPELQINGFILIIDWSNFSFKQASKLTPSILKLAIEGLQDSFPARFGGVHFVNQPWYIHALYTLIKPFLKDKTRKRIFLHGNNLNSLHQLIHPEFLPSEFGGTLPPYDMGTWARTLLGPDYSDENDYTHTSYNAMHVKHTSSNLERECSPKLMKRSQSVVEAGTLKHEEKGENENTQPLLALD

SEQ ID NO: 17611 - protein, 2 aa, Homo sapiens
  Payload ID: 3547
  Gene Symbol: CLVS1
  Gene Name: clavesin 1
  ENSP ID: ENSP00000428174
MG

SEQ ID NO: 17612 - protein, 354 aa, Homo sapiens; identical to SEQ ID NO: 17610
  Payload ID: 3547
  Gene Symbol: CLVS1
  Gene Name: clavesin 1
  Uniprot ID: Q8IUQ0
  ENSP ID: ENSP00000428402

SEQ ID NO: 17613 - protein, 79 aa, Homo sapiens
  Payload ID: 3547
  Gene Symbol: CLVS1
  Gene Name: clavesin 1
  ENSP ID: ENSP00000428986
MGPVSLLPKYQKLNTWNGDLAKMTHLQAGLSPETIEKARLELNENPDVLHQDIQQVRDMIITRPDIGFLRTDDAFILRF

SEQ ID NO: 17614 - protein, 10 aa, Homo sapiens
  Payload ID: 3547
  Gene Symbol: CLVS1
  Gene Name: clavesin 1
  ENSP ID: ENSP00000429244
MGPVSLLPKY

SEQ ID NO: 17615 - protein, 59 aa, Homo sapiens
  Payload ID: 3547
  Gene Symbol: CLVS1
  Gene Name: clavesin 1
  ENSP ID: ENSP00000429544
MGTWARTLLGPDYSDENDYTHTSYNAMHVKHTSSNLERECSPKLMKRSQSVVEAGTLKH

SEQ ID NO: 17616 - protein, 75 aa, Homo sapiens
  Payload ID: 3547
  Gene Symbol: CLVS1
  Gene Name: clavesin 1
  ENSP ID: ENSP00000429869
MGTWARTLLGPDYSDENDYTHTSYNAMHVKHTSSNLERECSPKLMKRSQSVVEAGTLKHEEKGENENTQPLLALD

SEQ ID NO: 17617 - protein, 327 aa, Homo sapiens
  Payload ID: 3548
  Gene Symbol: CLVS2
  Gene Name: clavesin 2
  Uniprot ID: Q5SYC1
  ENSP ID: ENSP00000275162
MTHLQAGLSPETLEKARLELNENPDTLHQDIQEVRDMVITRPDIGFLRTDDAFILRFLRARKFHHFEAFRLLAQYFEYRQQNLDMFKSFKATDPGIKQALKDGFPGGLANLDHYGRKILVLFAANWDQSRYTLVDILRAILLSLEAMIEDPELQVNGFVLIIDWSNFTFKQASKLTPSMLRLAIEGLQDSFPARFGGIHFVNQPWYIHALYTVIRPFLKEKTRKRIFLHGNNLNSLHQLIHPEILPSEFGGMLPPYDMGTWARTLLDHEYDDDSEYNVDSYSMPVKEVEKELSPKSMKRSQSVVDPTVLKRMDKNEEENMQPLLSLD

SEQ ID NO: 17618 - protein, 181 aa, Homo sapiens
  Payload ID: 3548
  Gene Symbol: CLVS2
  Gene Name: clavesin 2
  Uniprot ID: Q5SYC1
  ENSP ID: ENSP00000357423
MIEDPELQVNGFVLIIDWSNFTFKQASKLTPSMLRLAIEGLQDSFPARFGGIHFVNQPWYIHALYTVIRPFLKEKTRKRIFLHGNNLNSLHQLIHPEILPSEFGGMLPPYDMGTWARTLLDHEYDDDSEYNVDSYSMPVKEVEKELSPKSMKRSQSVVDPTVLKRMDKNEEENMQPLLSLD

SEQ ID NO: 17619 - protein, 361 aa, Homo sapiens
  Payload ID: 3549
  Gene Symbol: CLP1
  Gene Name: cleavage and polyadenylation factor I subunit 1
  Uniprot ID: Q92989
  ENSP ID: ENSP00000304704
MGEEANDDKKPTTKFELERETELRFEVEASQSVQLELLTGMAEIFGTELTRNKKFTFDAGAKVAVFTWHGCSVQLSGRTEVAYVSKDTPMLLYLNTHTALEQMRRQAEKEEERGPRVMVVGPTDVGKSTVCRLLLNYAITSRLADVFNQRCEVNRRASVSGCVINTCGWVKGSGYQALVHAASAFEVDVVVVLDQERLYNELKRDLPHFVRTVLLPKSGGVVERSKDFRRECRDERIREYFYGFRGCFYPHAFNVKFSDVKIYKVGAPTIPDSCLPLGMSQEDNQLKLVPVTPGRDMVHHLLSVSTAEGTEENLSETSVAGFIVVTSVDLEHQVFTVLSPAPRPLPKNFLLIMDIRFMDLK

SEQ ID NO: 17620 - protein, 132 aa, Homo sapiens
  Payload ID: 3549
  Gene Symbol: CLP1
  Gene Name: cleavage and polyadenylation factor I subunit 1
  ENSP ID: ENSP00000431744
MGEEANDDKKPTTKFELERETELRFEVEASQSVQLELLTGMAEIFGTELTRNKKFTFDAGAKVAVFTWHGCSVQLSGRTEVAYVSKDTPMLLYLNTHTALEQMRRQAEKEEERGPRVMVVGPTDVGKSTVCR

SEQ ID NO: 17621 - protein, 436 aa, Homo sapiens
  Payload ID: 3549
  Gene Symbol: CLP1
  Gene Name: cleavage and polyadenylation factor I subunit 1
  ENSP ID: ENSP00000433406
MTDLHSSYTEEMGEEANDDKKPTTKFELERETELRFEVEASQSVQLELLTGMAEIFGTELTRNKKFTFDAGAKVAVFTWHGCSVQLSGRTEVAYVSKDTPMLLYLNTHTALEQMRRQAEKEEERGPRVMVVGPTDVGKSTVCRLLLNYAVRLGRRPTYVELDVGQGSVSIPGTMGALYIERPADVEEGFSIQAPLVYHFGSTTPGTNIKLYNKITSRLADVFNQRCEVNRRASVSGCVINTCGWVKGSGYQALVHAASAFEVDVVVVLDQERLYNELKRDLPHFVRTVLLPKSGGVVERSKDFRRECRDERIREYFYGFRGCFYPHAFNVKFSDVKIYKVGAPTIPDSCLPLGMSQEDNQLKLVPVTPGRDMVHHLLSVSTAEGTEENLSETSVAGFIVVTSVDLEHQVFTVLSPAPRPLPKNFLLIMDIRFMDLK

SEQ ID NO: 17622 - protein, 425 aa, Homo sapiens
  Payload ID: 3549
  Gene Symbol: CLP1
  Gene Name: cleavage and polyadenylation factor I subunit 1
  Uniprot ID: Q92989
  ENSP ID: ENSP00000434995
MGEEANDDKKPTTKFELERETELRFEVEASQSVQLELLTGMAEIFGTELTRNKKFTFDAGAKVAVFTWHGCSVQLSGRTEVAYVSKDTPMLLYLNTHTALEQMRRQAEKEEERGPRVMVVGPTDVGKSTVCRLLLNYAVRLGRRPTYVELDVGQGSVSIPGTMGALYIERPADVEEGFSIQAPLVYHFGSTTPGTNIKLYNKITSRLADVFNQRCEVNRRASVSGCVINTCGWVKGSGYQALVHAASAFEVDVVVVLDQERLYNELKRDLPHFVRTVLLPKSGGVVERSKDFRRECRDERIREYFYGFRGCFYPHAFNVKFSDVKIYKVGAPTIPDSCLPLGMSQEDNQLKLVPVTPGRDMVHHLLSVSTAEGTEENLSETSVAGFIVVTSVDLEHQVFTVLSPAPRPLPKNFLLIMDIRFMDLK

SEQ ID NO: 17623 - protein, 92 aa, Homo sapiens
  Payload ID: 3549
  Gene Symbol: CLP1
  Gene Name: cleavage and polyadenylation factor I subunit 1
  ENSP ID: ENSP00000435287
MGEEANDDKKPTTKFELERETELRFEVEASQSVQLELLTGMAEIFGTELTRNKKFTFDAGAKVAVFTWHGCSVQLSGRTEVAYVSKDTPMLL

SEQ ID NO: 17624 - protein, 425 aa, Homo sapiens; identical to SEQ ID NO: 17622
  Payload ID: 3549
  Gene Symbol: CLP1
  Gene Name: cleavage and polyadenylation factor I subunit 1
  Uniprot ID: Q92989
  ENSP ID: ENSP00000436066

SEQ ID NO: 17625 - protein, 148 aa, Homo sapiens
  Payload ID: 3550
  Gene Symbol: CPSF1
  Gene Name: cleavage and polyadenylation specific factor 1, 160kDa
  ENSP ID: ENSP00000435761
MYAVYKQAHPPTGLEFSMYCNFFNNSERNLVVAGTSQLYVYRLNRDAEALTKNDRSTEGKAHREKLELAASFSFFGNVMSMASVQLAGAKRDALLLSFKDAKLSVVEYDPGTHDLKTLSLHYFEEPELRDRAAGVGACDLHEDSVSAQ

SEQ ID NO: 17626 - protein, 1443 aa, Homo sapiens
  Payload ID: 3550
  Gene Symbol: CPSF1
  Gene Name: cleavage and polyadenylation specific factor 1, 160kDa
  Uniprot ID: Q10570
  ENSP ID: ENSP00000478145
MYAVYKQAHPPTGLEFSMYCNFFNNSERNLVVAGTSQLYVYRLNRDAEALTKNDRSTEGKAHREKLELAASFSFFGNVMSMASVQLAGAKRDALLLSFKDAKLSVVEYDPGTHDLKTLSLHYFEEPELRDGFVQNVHTPRVRVDPDGRCAAMLVYGTRLVVLPFRRESLAEEHEGLVGEGQRSSFLPSYIIDVRALDEKLLNIIDLQFLHGYYEPTLLILFEPNQTWPGRVAVRQDTCSIVAISLNITQKVHPVIWSLTSLPFDCTQALAVPKPIGGVVVFAVNSLLYLNQSVPPYGVALNSLTTGTTAFPLRTQEGVRITLDCAQATFISYDKMVISLKGGEIYVLTLITDGMRSVRAFHFDKAAASVLTTSMVTMEPGYLFLGSRLGNSLLLKYTEKLQEPPASAVREAADKEEPPSKKKRVDATAGWSAAGKSVPQDEVDEIEVYGSEAQSGTQLATYSFEVCDSILNIGPCANAAVGEPAFLSEEFQNSPEPDLEIVVCSGHGKNGALSVLQKSIRPQVVTTFELPGCYDMWTVIAPVRKEEEDNPKGEGTEQEPSTTPEADDDGRRHGFLILSREDSTMILQTGQEIMELDTSGFATQGPTVFAGNIGDNRYIVQVSPLGIRLLEGVNQLHFIPVDLGAPIVQCAVADPYVVIMSAEGHVTMFLLKSDSYGGRHHRLALHKPPLHHQSKVITLCLYRDLSGMFTTESRLGGARDELGGRSGPEAEGLGSETSPTVDDEEEMLYGDSGSLFSPSKEEARRSSQPPADRDPAPFRAEPTHWCLLVRENGTMEIYQLPDWRLVFLVKNFPVGQRVLVDSSFGQPTTQGEARREEATRQGELPLVKEVLLVALGSRQSRPYLLVHVDQELLIYEAFPHDSQLGQGNLKVRFKKVPHNINFREKKPKPSKKKAEGGGAEEGAGARGRVARFRYFEDIYGYSGVFICGPSPHWLLVTGRGALRLHPMAIDGPVDSFAPFHNVNCPRGFLYFNRQGELRISVLPAYLSYDAPWPVRKIPLRCTAHYVAYHVESKVYAVATSTNTPCARIPRMTGEEKEFETIERDERYIHPQQEAFSIQLISPVSWEAIPNARIELQEWEHVTCMKTVSLRSEETVSGLKGYVAAGTCLMQGEEVTCRGRILIMDVIEVVPEPGQPLTKNKFKVLYEKEQKGPVTALCHCNGHLVSAIGQKIFLWSLRASELTGMAFIDTQLYIHQMISVKNFILAADVMKSISLLRYQEESKTLSLVSRDAKPLEVYSVDFMVDNAQLGFLVSDRDRNLMVYMYLPEAKESFGGMRLLRRADFHVGAHVNTFWRTPCRGATEGLSKKSVVWENKHITWFATLDGGIGLLLPMQEKTYRRLLMLQNALTTMLPHHAGLNPRAFRMLHVDRRTLQNAVRNVLDGELLNRYLYLSTMERSELAKKIGTTPDIILDDLLETDRVTAHF

SEQ ID NO: 17627 - protein, 169 aa, Homo sapiens
  Payload ID: 3550
  Gene Symbol: CPSF1
  Gene Name: cleavage and polyadenylation specific factor 1, 160kDa
  ENSP ID: ENSP00000478161
  MOD_RES (1)..(1): Any amino acid
XPGQPLTKNKFKVLYEKEQKGPVTALCHCNGHLVSAIGQKLYIHQMISVKNFILAADVMKSISLLRYQEESKTLSLVSRDAKPLEVYSVDFMVDNAQLGFLVSDRDRNLMVYMYLPEAKESFGGMRLLRRADFHVGAHVNTFWRTPCRGATEGLSKKSVVWENKHITWF

SEQ ID NO: 17628 - protein, 204 aa, Homo sapiens
  Payload ID: 3550
  Gene Symbol: CPSF1
  Gene Name: cleavage and polyadenylation specific factor 1, 160kDa
  ENSP ID: ENSP00000483775
MKSISLLRYQEESKTLSLVSRVHLWRRCSCLVSDRDRNLMVYMYLPEAKESFGGMRLLRRADFHVGAHVNTFWRTPCRGATEGLSKKSVVWENKHITWFATLDGGIGLLLPMQEKTYRRLLMLQNALTTMLPHHAGLNPRAFRMLHVDRRTLQNAVRNVLDGELLNRYLYLSTMERSELAKKIGTTPDIILDDLLETDRVTAHF

SEQ ID NO: 17629 - protein, 1443 aa, Homo sapiens; identical to SEQ ID NO: 17626
  Payload ID: 3550
  Gene Symbol: CPSF1
  Gene Name: cleavage and polyadenylation specific factor 1, 160kDa
  Uniprot ID: Q10570
  ENSP ID: ENSP00000484669

SEQ ID NO: 17630 - protein, 782 aa, Homo sapiens
  Payload ID: 3551
  Gene Symbol: CPSF2
  Gene Name: cleavage and polyadenylation specific factor 2, 100kDa
  Uniprot ID: Q9P2I0
  ENSP ID: ENSP00000298875
MTSIIKLTTLSGVQEESALCYLLQVDEFRFLLDCGWDEHFSMDIIDSLRKHVHQIDAVLLSHPDPLHLGALPYAVGKLGLNCAIYATIPVYKMGQMFMYDLYQSRHNTEDFTLFTLDDVDAAFDKIQQLKFSQIVNLKGKGHGLSITPLPAGHMIGGTIWKIVKDGEEEIVYAVDFNHKREIHLNGCSLEMLSRPSLLITDSFNATYVQPRRKQRDEQLLTNVLETLRGDGNVLIAVDTAGRVLELAQLLDQIWRTKDAGLGVYSLALLNNVSYNVVEFSKSQVEWMSDKLMRCFEDKRNNPFQFRHLSLCHGLSDLARVPSPKVVLASQPDLECGFSRDLFIQWCQDPKNSIILTYRTTPGTLARFLIDNPSEKITEIELRKRVKLEGKELEEYLEKEKLKKEAAKKLEQSKEADIDSSDESDIEEDIDQPSAHKTKHDLMMKGEGSRKGSFFKQAKKSYPMFPAPEERIKWDEYGEIIKPEDFLVPELQATEEEKSKLESGLTNGDEPMDQDLSDVPTKCISTTESIEIKARVTYIDYEGRSDGDSIKKIINQMKPRQLIIVHGPPEASQDLAECCRAFGGKDIKVYMPKLHETVDATSETHIYQVRLKDSLVSSLQFCKAKDAELAWIDGVLDMRVSKVDTGVILEEGELKDDGEDSEMQVEAPSDSSVIAQQKAMKSLFGDDEKETGEESEIIPTLEPLPPHEVPGHQSVFMNEPRLSDFKQVLLREGIQAEFVGGVLVCNNQVAVRRTETGRIGLEGCLCQDFYRIRDLLYEQYAIV

SEQ ID NO: 17631 - protein, 269 aa, Homo sapiens
  Payload ID: 3551
  Gene Symbol: CPSF2
  Gene Name: cleavage and polyadenylation specific factor 2, 100kDa
  ENSP ID: ENSP00000451390
  MOD_RES (1)..(1): Any amino acid
XAHKTKHDLMMKGEGSRKGSFFKQAKKSYPMFPAPEERIKWDEYGEIIKARVTYIDYEGRSDGDSIKKIINQMKPRQLIIVHGPPEASQDLAECCRAFGGKDIKVYMPKLHETVDATSETHIYQVRLKDSLVSSLQFCKAKDAELAWIDGVLDMRVSKVDTGVILEEGELKDDGEDSEMQVEAPSDSSVIAQQKAMKSLFGDDEKETGEESEIIPTLEPLPPHEVPGHQSVFMNEPRLSDFKQVLLREGIQAEFVGGVLVCNNQVAVRR

SEQ ID NO: 17632 - protein, 80 aa, Homo sapiens
  Payload ID: 3551
  Gene Symbol: CPSF2
  Gene Name: cleavage and polyadenylation specific factor 2, 100kDa
  ENSP ID: ENSP00000451418
MTSIIKLTTLSGVQEESALCYLLQVDEFRFLLDCGWDEHFSMDIIDSLRKHVHQIDAVLLSHPDPLHLGALPYAVGKLGL

SEQ ID NO: 17633 - protein, 62 aa, Homo sapiens
  Payload ID: 3551
  Gene Symbol: CPSF2
  Gene Name: cleavage and polyadenylation specific factor 2, 100kDa
  ENSP ID: ENSP00000452503
MTSIIKLTTLSGVQEESALCYLLQVDEFRFLLDCGWDEHFSMDIIDSLRNLDTIQKILHSLH

SEQ ID NO: 17634 - protein, 684 aa, Homo sapiens
  Payload ID: 3552
  Gene Symbol: CPSF3
  Gene Name: cleavage and polyadenylation specific factor 3, 73kDa
  Uniprot ID: Q9UKF6
  ENSP ID: ENSP00000238112
MSAIPAEESDQLLIRPLGAGQEVGRSCIILEFKGRKIMLDCGIHPGLEGMDALPYIDLIDPAEIDLLLISHFHLDHCGALPWFLQKTSFKGRTFMTHATKAIYRWLLSDYVKVSNISADDMLYTETDLEESMDKIETINFHEVKEVAGIKFWCYHAGHVLGAAMFMIEIAGVKLLYTGDFSRQEDRHLMAAEIPNIKPDILIIESTYGTHIHEKREEREARFCNTVHDIVNRGGRGLIPVFALGRAQELLLILDEYWQNHPELHDIPIYYASSLAKKCMAVYQTYVNAMNDKIRKQININNPFVFKHISNLKSMDHFDDIGPSVVMASPGMMQSGLSRELFESWCTDKRNGVIIAGYCVEGTLAKHIMSEPEEITTMSGQKLPLKMSVDYISFSAHTDYQQTSEFIRALKPPHVILVHGEQNEMARLKAALIREYEDNDEVHIEVHNPRNTEAVTLNFRGEKLAKVMGFLADKKPEQGQRVSGILVKRNFNYHILSPCDLSNYTDLAMSTVKQTQAIPYTGPFNLLCYQLQKLTGDVEELEIQEKPALKVFKNITVIQEPGMVVLEWLANPSNDMYADTVTTVILEVQSNPKIRKGAVQKVSKKLEMHVYSKRLEIMLQDIFGEDCVSVKDDSILSVTVDGKTANLNLETRTVECEEGSEDDESLREMVELAAQRLYEALTPVH

SEQ ID NO: 17635 - protein, 647 aa, Homo sapiens
  Payload ID: 3552
  Gene Symbol: CPSF3
  Gene Name: cleavage and polyadenylation specific factor 3, 73kDa
  ENSP ID: ENSP00000418957
MLDCGIHPGLEGMDALPYIDLIDPAEIDLLLISHFHLDHCGALPWFLQKTSFKGRTFMTHATKAIYRWLLSDYVKVSNISADDMLYTETDLEESMDKIETINFHEVKEVAGIKFWCYHAGHVLGAAMFMIEIAGVKLLYTGDFSRQEDRHLMAAEIPNIKPDILIIESTYGTHIHEKREEREARFCNTVHDIVNRGGRGLIPVFALGRAQELLLILDEYWQNHPELHDIPIYYASSLAKKCMAVYQTYVNAMNDKIRKQININNPFVFKHISNLKSMDHFDDIGPSVVMASPGMMQSGLSRELFESWCTDKRNGVIIAGYCVEGTLAKHIMSEPEEITTMSGQKLPLKMSVDYISFSAHTDYQQTSEFIRALKPPHVILVHGEQNEMARLKAALIREYEDNDEVHIEVHNPRNTEAVTLNFRGEKLAKVMGFLADKKPEQGQRVSGILVKRNFNYHILSPCDLSNYTDLAMSTVKQTQAIPYTGPFNLLCYQLQKLTGDVEELEIQEKPALKVFKNITVIQEPGMVVLEWLANPSNDMYADTVTTVILEVQSNPKIRKGAVQKVSKKLEMHVYSKRLEIMLQDIFGEDCVSVKDDSILSVTVDGKTANLNLETRTVECEEGSEDDESLREMVELAAQRLYEALTPVH

SEQ ID NO: 17636 - protein, 136 aa, Homo sapiens
  Payload ID: 3552
  Gene Symbol: CPSF3
  Gene Name: cleavage and polyadenylation specific factor 3, 73kDa
  ENSP ID: ENSP00000419744
MLDCGIHPGLEGMDALPYIDLIDPAEIDLLLISHFHLDHCGALPWFLQKTSFKGRTFMTHATKAIYRWLLSDYVKVSNISADDMLYTETDLEESMDKIETINFHEVKEVAGIKFWCYHAGHVLGAAMFMIEIAGVK

SEQ ID NO: 17637 - protein, 578 aa, Homo sapiens
  Payload ID: 3553
  Gene Symbol: CPSF3L
  Gene Name: cleavage and polyadenylation specific factor 3-like
  Uniprot ID: Q5TA45
  ENSP ID: ENSP00000392848
MPEIRVTPLGAGQDVGRSCILVSIAGKNVMLDCGMHMGFNDDRRFPDFSYITQNGRLTDFLDCVIISHFHLDHCGALPYFSEMVGYDGPIYMTHPTQAICPILLEDYRKIAVDKKGEANFFTSQMIKDCMKKVVAVHLHQTVQIKVGSESVVYTGDYNMTPDRHLGAAWIDKCRPNLLITESTYATTIRDSKRCRERDFLKKVHETVERGGKVLIPVFALGRAQELCILLETFWERMNLKVPIYFSTGLTEKANHYYKLFIPWTNQKIRKTFVQRNMFEFKHIKAFDRAFADNPGPMVVFATPGMLHAGQSLQIFRKWAGNEKNMVIMPGYCVQGTVGHKILSGQRKLEMEGRQVLEVKMQVEYMSFSAHADAKGIMQLVGQAEPESVLLVHGEAKKMEFLKQKIEQELRVNCYMPANGETVTLPTSPSIPVGISLGLLKREMAQGLLPEAKKPRLLHGTLIMKDSNFRLVSSEQALKELGLAEHQLRFTCRVHLHDTRKEQETALRVYSHLKSVLKDHCVQHLPDGSVTVESVLLQAAAPSEDPGTKVLLVSWTYQDEELGSFLTSLLKKGLPQAPS

SEQ ID NO: 17638 - protein, 502 aa, Homo sapiens
  Payload ID: 3553
  Gene Symbol: CPSF3L
  Gene Name: cleavage and polyadenylation specific factor 3-like
  ENSP ID: ENSP00000400548
MPEIRVTPLGACPVLSWNLVLPPGRGSRAPSSTDTRTGFHVLPHGVDDELEIKAYYAGHVLGAAMFQIKVGSESVVYTGDYNMTPDRHLGAAWIDKCRPNLLITESTYATTIRDSKRCRERDFLKKVHETVERGGKVLIPVFALGRAQELCILLETFWERMNLKVPIYFSTGLTEKANHYYKLFIPWTNQKIRKTFVQRNMFEFKHIKAFDRAFADNPGPMVVFATPGMLHAGQSLQIFRKWAGNEKNMVIMPGYCVQGTVGHKILSGQRKLEMEGRQVLEVKMQVEYMSFSAHADAKGIMQLVGQAEPESVLLVHGEAKKMEFLKQKIEQELRVNCYMPANGETVTLPTSPSIPVGISLGLLKREMAQGLLPEAKKPRLLHGTLIMKDSNFRLVSSEQALKELGLAEHQLRFTCRVHLHDTRKEQETALRVYSHLKSVLKDHCVQHLPDGSVTVESVLLQAAAPSEDPGTKVLLVSWTYQDEELGSFLTSLLKKGLPQAPS

SEQ ID NO: 17639 - protein, 101 aa, Homo sapiens
  Payload ID: 3553
  Gene Symbol: CPSF3L
  Gene Name: cleavage and polyadenylation specific factor 3-like
  ENSP ID: ENSP00000404012
MPEIRVTPLGACPVLSWNLVLPPGRGSRAPSSTDTRTGFHVLPHGAAPRLWPRHPDVWCWLWTLRVAGRGRGRPGRGPKLHPGLHCGQECHAGLWNAHGLQ

SEQ ID NO: 17640 - protein, 499 aa, Homo sapiens
  Payload ID: 3553
  Gene Symbol: CPSF3L
  Gene Name: cleavage and polyadenylation specific factor 3-like
  Uniprot ID: Q5TA45
  ENSP ID: ENSP00000404886
MPEIRVTPLGAGQDVGRSCILVSIAGKNVMLDCGMHMGFNDDVDDELEIKAYYAGHVLGAAMFQIKVGSESVVYTGDYNMTPDRHLGAAWIDKCRPNLLITESTYATTIRDSKRCRERDFLKKVHETVERGGKVLIPVFALGRAQELCILLETFWERMNLKVPIYFSTGLTEKANHYYKLFIPWTNQKIRKTFVQRNMFEFKHIKAFDRAFADNPGPMVVFATPGMLHAGQSLQIFRKWAGNEKNMVIMPGYCVQGTVGHKILSGQRKLEMEGRQVLEVKMQVEYMSFSAHADAKGIMQLVGQAEPESVLLVHGEAKKMEFLKQKIEQELRVNCYMPANGETVTLPTSPSIPVGISLGLLKREMAQGLLPEAKKPRLLHGTLIMKDSNFRLVSSEQALKELGLAEHQLRFTCRVHLHDTRKEQETALRVYSHLKSVLKDHCVQHLPDGSVTVESVLLQAAAPSEDPGTKVLLVSWTYQDEELGSFLTSLLKKGLPQAPS

SEQ ID NO: 17641 - protein, 344 aa, Homo sapiens
  Payload ID: 3553
  Gene Symbol: CPSF3L
  Gene Name: cleavage and polyadenylation specific factor 3-like
  ENSP ID: ENSP00000411233
MPEIRVTPLGAGQDVGRSCILVSIAGKNVMLDCGMHMGFNDDRRFPDFSYITQNGRLTDFLDCVIISHFHLDHCGALPYFSEMVGYDGPIYMTHPTQAICPILLEDYRKIAVDKKGEANFFTSQMIKDCMKKVVAVHLHQTVQVRFPGPQLAQSLPTPTPTMPSARSTQFLEGWGLRVSPPHLTLASSTVGTPGGVSARMRVPDQTGRRPGRARAGWGAAWIDKCRPNLLITESTYATTIRDSKRCRERDFLKKVHETVERGGKVLIPVFALGRAQELCILLETFWERMNLKVPIYFSTGLTEKANHYYKLFIPWTNQKIRKTFVQRNMFEFKHIKAFDRAFAD

SEQ ID NO: 17642 - protein, 600 aa, Homo sapiens
  Payload ID: 3553
  Gene Symbol: CPSF3L
  Gene Name: cleavage and polyadenylation specific factor 3-like
  Uniprot ID: Q5TA45
  ENSP ID: ENSP00000413493
MPEIRVTPLGAGQDVGRSCILVSIAGKNVMLDCGMHMGFNDDRRFPDFSYITQNGRLTDFLDCVIISHFHLDHCGALPYFSEMVGYDGPIYMTHPTQAICPILLEDYRKIAVDKKGEANFFTSQMIKDCMKKVVAVHLHQTVQVDDELEIKAYYAGHVLGAAMFQIKVGSESVVYTGDYNMTPDRHLGAAWIDKCRPNLLITESTYATTIRDSKRCRERDFLKKVHETVERGGKVLIPVFALGRAQELCILLETFWERMNLKVPIYFSTGLTEKANHYYKLFIPWTNQKIRKTFVQRNMFEFKHIKAFDRAFADNPGPMVVFATPGMLHAGQSLQIFRKWAGNEKNMVIMPGYCVQGTVGHKILSGQRKLEMEGRQVLEVKMQVEYMSFSAHADAKGIMQLVGQAEPESVLLVHGEAKKMEFLKQKIEQELRVNCYMPANGETVTLPTSPSIPVGISLGLLKREMAQGLLPEAKKPRLLHGTLIMKDSNFRLVSSEQALKELGLAEHQLRFTCRVHLHDTRKEQETALRVYSHLKSVLKDHCVQHLPDGSVTVESVLLQAAAPSEDPGTKVLLVSWTYQDEELGSFLTSLLKKGLPQAPS

SEQ ID NO: 17643 - protein, 46 aa, Homo sapiens
  Payload ID: 3553
  Gene Symbol: CPSF3L
  Gene Name: cleavage and polyadenylation specific factor 3-like
  ENSP ID: ENSP00000431214
MPEIRVTPLGAGQDVGRSCILVSIAGKNVMLDCGMHMGFNDDSCLD

SEQ ID NO: 17644 - protein, 34 aa, Homo sapiens
  Payload ID: 3553
  Gene Symbol: CPSF3L
  Gene Name: cleavage and polyadenylation specific factor 3-like
  ENSP ID: ENSP00000431425
  MOD_RES (1)..(1): Any amino acid
XLEIKAYYAGHVLGAAMFQIKVGSESVVYTSCLD

SEQ ID NO: 17645 - protein, 92 aa, Homo sapiens
  Payload ID: 3553
  Gene Symbol: CPSF3L
  Gene Name: cleavage and polyadenylation specific factor 3-like
  ENSP ID: ENSP00000431952
MPEIRVTPLGACPVLSWNLVLPPGRGSRAPSSTDTRTGFHVLPHGGPARTWAEAASWSPLRARMSCWTVECTWASMTTDASLTSPTSPRTAA

SEQ ID NO: 17646 - protein, 249 aa, Homo sapiens
  Payload ID: 3553
  Gene Symbol: CPSF3L
  Gene Name: cleavage and polyadenylation specific factor 3-like
  ENSP ID: ENSP00000432009
MPEIRVTPLGACPVLSWNLVLPPGRGSRAPSSTDTRTGFHVLPHGVSASSEGAPRPGAGQDVGRSCILVSIAGKNVMLDCGMHMGFNDDRRFPDFSYITQNGRLTDFLDCVIISHFHLDHCGALPYFSEMVGYDGPIYMTHPTQAICPILLEDYRKIAVDKKGEANFFTSQMIKDCMKKVVAVHLHQTVQVDDELEIKAYYAGHVLGAAMFQIKVGSESVVYTGDYNMTPDRHLGAAWIDKCRPNLLIT

SEQ ID NO: 17647 - protein, 278 aa, Homo sapiens
  Payload ID: 3553
  Gene Symbol: CPSF3L
  Gene Name: cleavage and polyadenylation specific factor 3-like
  ENSP ID: ENSP00000432777
MPEIRVTPLGAGQDVGRSCILVSIAGKNVMLDCGMHMGFNDDRRFPDFSYITQNGRLTDFLDCVIISHFHLDHCGALPYFSEMVGYDGPIYMTHPTQAICPILLEDYRKIAVDKKGEANFFTSQMIKDCMKKVVAVHLHQTVQVDDELEIKAYYAGHVLGAAMFQIKVGSESVVYTGDYNMTPDRHLGAAWIDKCRPNLLITESTYATTIRDSKRCRERDFLKKVHETVERGGKGAHEPEGAHLLLHGADREGQPLLQAVHPLDQPEDPQDFRAEEHV

SEQ ID NO: 17648 - protein, 54 aa, Homo sapiens
  Payload ID: 3553
  Gene Symbol: CPSF3L
  Gene Name: cleavage and polyadenylation specific factor 3-like
  ENSP ID: ENSP00000433264
KDCMKKVVAVHLHQTVQVDDELEIKAYYAGHVLGAAMFQIKVGSESVVYTSCLD

SEQ ID NO: 17649 - protein, 56 aa, Homo sapiens
  Payload ID: 3553
  Gene Symbol: CPSF3L
  Gene Name: cleavage and polyadenylation specific factor 3-like
  ENSP ID: ENSP00000433733
MPEIRVTPLGAGQDVGRSCILVSIAGKNVMLDCGMHMGFNDDPGVLVPPAGWECPA

SEQ ID NO: 17650 - protein, 62 aa, Homo sapiens
  Payload ID: 3553
  Gene Symbol: CPSF3L
  Gene Name: cleavage and polyadenylation specific factor 3-like
  ENSP ID: ENSP00000433930
MPEIRVTPLGACPVLSWNLVLPPGRGSRAPSSTDTRTGFHVLPHGVSASSEGAPRPGVDTVL

SEQ ID NO: 17651 - protein, 55 aa, Homo sapiens
  Payload ID: 3553
  Gene Symbol: CPSF3L
  Gene Name: cleavage and polyadenylation specific factor 3-like
  ENSP ID: ENSP00000434782
  MOD_RES (1)..(1): Any amino acid
XEIRVTPLGAGQDVGRSCILVSIAGKNVMLDCGMHMGFNDDPGVLVPPAGWECPA

SEQ ID NO: 17652 - protein, 109 aa, Homo sapiens
  Payload ID: 3553
  Gene Symbol: CPSF3L
  Gene Name: cleavage and polyadenylation specific factor 3-like
  ENSP ID: ENSP00000434790
MIKDCMKKVVAVHLHQTVQVDDELEIKAYYAGHVLGAAMFQIKVGSESVVYTGDYNMTPDRHLGAAWIDKCRPNLLITESTYATTIRDSKRCRERDFLKKVHETVERGG

SEQ ID NO: 17653 - protein, 81 aa, Homo sapiens
  Payload ID: 3553
  Gene Symbol: CPSF3L
  Gene Name: cleavage and polyadenylation specific factor 3-like
  ENSP ID: ENSP00000435418
MPEIRVTPLGAGQDVGRSCILVSIAGKNVMLDCGMHMGFNDDRRFPDFSYITQNGRLTDFLDCVIIRPSAPSCWRTTARSP

SEQ ID NO: 17654 - protein, 140 aa, Homo sapiens
  Payload ID: 3553
  Gene Symbol: CPSF3L
  Gene Name: cleavage and polyadenylation specific factor 3-like
  ENSP ID: ENSP00000435772
MPEIRVTPLVGAGQDVGRSCILVSIAGKNVMLDCGMHMGFNDDRRFPDFSYITQNGRLTDFLDCVIISHFHLDHCGALPYFSEMVGYDGPIYMTHPTQAICPILLEDYRKIAVDKKGEANFFTSQMIKDCMKKVVAVHLH

SEQ ID NO: 17655 - protein, 64 aa, Homo sapiens
  Payload ID: 3553
  Gene Symbol: CPSF3L
  Gene Name: cleavage and polyadenylation specific factor 3-like
  ENSP ID: ENSP00000436396
  MOD_RES (1)..(1): Any amino acid
XTMPEIRVTPLGACPVLSWNLVLPPGRGSRAPSSTDTRTGFHVLPHGVSASSEGAPRPGVDTVL

SEQ ID NO: 17656 - protein, 209 aa, Homo sapiens
  Payload ID: 3553
  Gene Symbol: CPSF3L
  Gene Name: cleavage and polyadenylation specific factor 3-like
  ENSP ID: ENSP00000436743
MCGAGFGHFEWLAGGGAGQDVGRSCILVSIAGKNVMLDCGMHMGFNDDRRFPDFSYITQNGRLTDFLDCVIISHFHLDHCGALPYFSEMVGYDGPIYMTHPTQAICPILLEDYRKIAVDKKGEANFFTSQMIKDCMKKVVAVHLHQTVQVDDELEIKAYYAGHVLGAAMFQIKVGSESVVYTGDYNMTPDRHLGAAWIDKCRPNLLITE

SEQ ID NO: 17657 - protein, 167 aa, Homo sapiens
  Payload ID: 3553
  Gene Symbol: CPSF3L
  Gene Name: cleavage and polyadenylation specific factor 3-like
  ENSP ID: ENSP00000436824
MPEIRVTPLGACPVLSWNLVLPPGRGSRAPSSTDTRTGFHVLPHGPLGCGPVILMCGAGFGHFEWLAGGGAGQDVGRSCILVSIAGKNVMLDCGMHMGFNDDRRFPDFSYITQNGRLTDFLDCVIISHFHLDHCGALPYFSEMVGYDGPIYMTHPTQAICPILLEDY

SEQ ID NO: 17658 - protein, 571 aa, Homo sapiens
  Payload ID: 3553
  Gene Symbol: CPSF3L
  Gene Name: cleavage and polyadenylation specific factor 3-like
  Uniprot ID: Q5TA45
  ENSP ID: ENSP00000444672
MLDCGMHMGFNDDRRFPDFSYITQNGRLTDFLDCVIISHFHLDHCGALPYFSEMVGYDGPIYMTHPTQAICPILLEDYRKIAVDKKGEANFFTSQMIKDCMKKVVAVHLHQTVQVDDELEIKAYYAGHVLGAAMFQIKVGSESVVYTGDYNMTPDRHLGAAWIDKCRPNLLITESTYATTIRDSKRCRERDFLKKVHETVERGGKVLIPVFALGRAQELCILLETFWERMNLKVPIYFSTGLTEKANHYYKLFIPWTNQKIRKTFVQRNMFEFKHIKAFDRAFADNPGPMVVFATPGMLHAGQSLQIFRKWAGNEKNMVIMPGYCVQGTVGHKILSGQRKLEMEGRQVLEVKMQVEYMSFSAHADAKGIMQLVGQAEPESVLLVHGEAKKMEFLKQKIEQELRVNCYMPANGETVTLPTSPSIPVGISLGLLKREMAQGLLPEAKKPRLLHGTLIMKDSNFRLVSSEQALKELGLAEHQLRFTCRVHLHDTRKEQETALRVYSHLKSVLKDHCVQHLPDGSVTVESVLLQAAAPSEDPGTKVLLVSWTYQDEELGSFLTSLLKKGLPQAPS

SEQ ID NO: 17659 - protein, 606 aa, Homo sapiens
  Payload ID: 3553
  Gene Symbol: CPSF3L
  Gene Name: cleavage and polyadenylation specific factor 3-like
  Uniprot ID: Q5TA45
  ENSP ID: ENSP00000445001
MCGAGFGHFEWLAGGGAGQDVGRSCILVSIAGKNVMLDCGMHMGFNDDRRFPDFSYITQNGRLTDFLDCVIISHFHLDHCGALPYFSEMVGYDGPIYMTHPTQAICPILLEDYRKIAVDKKGEANFFTSQMIKDCMKKVVAVHLHQTVQVDDELEIKAYYAGHVLGAAMFQIKVGSESVVYTGDYNMTPDRHLGAAWIDKCRPNLLITESTYATTIRDSKRCRERDFLKKVHETVERGGKVLIPVFALGRAQELCILLETFWERMNLKVPIYFSTGLTEKANHYYKLFIPWTNQKIRKTFVQRNMFEFKHIKAFDRAFADNPGPMVVFATPGMLHAGQSLQIFRKWAGNEKNMVIMPGYCVQGTVGHKILSGQRKLEMEGRQVLEVKMQVEYMSFSAHADAKGIMQLVGQAEPESVLLVHGEAKKMEFLKQKIEQELRVNCYMPANGETVTLPTSPSIPVGISLGLLKREMAQGLLPEAKKPRLLHGTLIMKDSNFRLVSSEQALKELGLAEHQLRFTCRVHLHDTRKEQETALRVYSHLKSVLKDHCVQHLPDGSVTVESVLLQAAAPSEDPGTKVLLVSWTYQDEELGSFLTSLLKKGLPQAPS

SEQ ID NO: 17660 - protein, 342 aa, Homo sapiens
  Payload ID: 3553
  Gene Symbol: CPSF3L
  Gene Name: cleavage and polyadenylation specific factor 3-like
  ENSP ID: ENSP00000464436
MNLKVPIYFSTGLTEKANHYYKLFIPWTNQKIRKTFVQRNMFEFKHIKAFDRAFADNPGPMVVFATPGMLHAGQSLQIFRKWAGNEKNMVIMPGYCVQGTVGHKILSGQRKLEMEGRQVLEVKMQVEYMSFSAHADAKGIMQLVGQAEPESVLLVHGEAKKMEFLKQKIEQELRVNCYMPANGETVTLPTSPSIPVGISLGLLKREMAQGLLPEAKKPRLLHGTLIMKDSNFRLVSSEQALKELGLAEHQLRFTCRVHLHDTRKEQETALRVYSHLKSVLKDHCVQHLPDGSVTVESVLLQAAAPSEDPGTKVLLVSWTYQDEELGSFLTSLLKKGLPQAPS

SEQ ID NO: 17661 - protein, 389 aa, Homo sapiens
  Payload ID: 3553
  Gene Symbol: CPSF3L
  Gene Name: cleavage and polyadenylation specific factor 3-like
  ENSP ID: ENSP00000480957
MPEIRVTPLGAGQDVGRSCILVSIAGKNVMLDCGMHMGFNDDRRFPDFSYITQNGRLTDFLDCVIISHFHLDHCGALPYFSEMVGYDGPIYMTHPTQAICPILLEDYRKIAVDKKGEANFFTSQMIKDCILLETFWERMNLKVPIYFSTGLTEKANHYYKLFIPWTNQKIRKTFVQRNMFEFKHIKAFDRAFADNPGPMVVFATPGMLHAGQSLQIFRKWAGNEKNMVIMPGYCVQGTVGHKILSGQRKLEMEGRQVLEVKMQVEYMSFSAHADAKGIMQLVSSEQALKELGLAEHQLRFTCRVHLHDTRKEQETALRVYSHLKSVLKDHCVQHLPDGSVTVESVLLQAAAPSEDPGTKVLLVSWTYQDEELGSFLTSLLKKGLPQAPS

SEQ ID NO: 17662 - protein, 289 aa, Homo sapiens
  Payload ID: 3553
  Gene Symbol: CPSF3L
  Gene Name: cleavage and polyadenylation specific factor 3-like
  ENSP ID: ENSP00000481275
MPEIRVTPLGAGQDVGRSCILVSIAGKNVMLDCGMHMGFNDDRRFPDFSYITQNGRLTDFLDCVIISHFHLDHCGALPYFSEMVGYDGPIYMTHPTQAICPILLEDYRKIAVDKKGEANFFTSQMIKDCMKKVVAVHLHQTVQVRFPGPQLAQSLPTPTPTMPSARSTQFLEGWGLRVSPPHLTLASSTVGTPGGVSARMRVPDQTGRRPGRARAGWGYAPAYEPTRLCPSGIEMARVGQAGALRALGAARDSLELPGCCRAGRQGLEGRWASSGGCLVLGVGQGRSEG

SEQ ID NO: 17663 - protein, 502 aa, Homo sapiens
  Payload ID: 3553
  Gene Symbol: CPSF3L
  Gene Name: cleavage and polyadenylation specific factor 3-like
  ENSP ID: ENSP00000481821
MPEIRVTPLGACPVLSWNLVLPPGRGSRAPSSTDTRTGFHVLPHGVNDELEIKAYYAGHVLGAAMFQIKVGSESVVYTGDYNMTPDRHLGAAWIDKCRPNLLITESTYATTIRDSKRCRERDFLKKVHETVERGGKVLIPVFALGRAQELCILLETFWERMNLKVPIYFSTGLTEKANHYYKLFIPWTNQKIRKTFVQRNMFEFKHIKAFDRAFADNPGPMVVFATPGMLHAGQSLQIFRKWAGNEKNMVIMPGYCVQGTVGHKILSGQRKLEMEGRQVLEVKMQVEYMSFSAHADAKGIMQLVGQAEPESVLLVHGEAKKMEFLKQKIEQELRVNCYMPANGETVTLPTSPSIPVGISLGLLKREMAQGLLPEAKKPRLLHGTLIMKDSNFRLVSSEQALKELGLAEHQLRFTCRVHLHDTRKEQETALRVYSHLKSVLKDHCVQHLPDGSVTVESVLLQAAAPSEDPGTKVLLVSWTYQDEELGSFLTSLLKKGLPQAPS

SEQ ID NO: 17664 - protein, 46 aa, Homo sapiens
  Payload ID: 3553
  Gene Symbol: CPSF3L
  Gene Name: cleavage and polyadenylation specific factor 3-like
  ENSP ID: ENSP00000487303
MPEIRVTPLGAGQDVGRSCILVSIAGKNVMLDCGMHMGFNDDLCLD

SEQ ID NO: 17665 - protein, 269 aa, Homo sapiens
  Payload ID: 3554
  Gene Symbol: CPSF4
  Gene Name: cleavage and polyadenylation specific factor 4, 30kDa
  Uniprot ID: O95639
  ENSP ID: ENSP00000292476
MQEIIASVDHIKFDLEIAVEQQLGAQPLPFPGMDKSGAAVCEFFLKAACGKGGMCPFRHISGEKTVVCKHWLRGLCKKGDQCEFLHEYDMTKMPECYFYSKFGECSNKECPFLHIDPESKIKDCPWYDRGFCKHGPLCRHRHTRRVICVNYLVGFCPEGPSCKFMHPRFELPMGTTEQPPLPQQTQPPAKQSNNPPLQRSSSLIQLTSQNSSPNQQRTPQVIGVMQSQNSSAGNRGPRPLEQVTCYKCGEKGHYANRCTKGHLAFLSGQ

SEQ ID NO: 17666 - protein, 229 aa, Homo sapiens
  Payload ID: 3554
  Gene Symbol: CPSF4
  Gene Name: cleavage and polyadenylation specific factor 4, 30kDa
  ENSP ID: ENSP00000392584
TESGAAVCEFFLKAACGKGGMCPFRHISGEKTVVCKHWLRGLCKKGDQCEFLHEYDMTKMPECYFYSKFGECSNKECPFLHIDPESKIKDCPWYDRGFCKHALDLNCPWEPPSSPHCRSRHSLQQSREPRRSSGSCRVKTAARATGDPGHWSRSPVTSVARKDTTPTDAPKGTWPFSVDSDSSWSQLRAARGPRCWECAFNCFMRLLARLWLELARRHVGFITLRGHVC

SEQ ID NO: 17667 - protein, 244 aa, Homo sapiens
  Payload ID: 3554
  Gene Symbol: CPSF4
  Gene Name: cleavage and polyadenylation specific factor 4, 30kDa
  Uniprot ID: O95639
  ENSP ID: ENSP00000395311
MQEIIASVDHIKFDLEIAVEQQLGAQPLPFPGMDKSGAAVCEFFLKAACGKGGMCPFRHISGEKTVVCKHWLRGLCKKGDQCEFLHEYDMTKMPECYFYSKFGECSNKECPFLHIDPESKIKDCPWYDRGFCKHGPLCRHRHTRRVICVNYLVGFCPEGPSCKFMHPRFELPMGTTEQPPLPQQTQPPAKQRTPQVIGVMQSQNSSAGNRGPRPLEQVTCYKCGEKGHYANRCTKGHLAFLSGQ

SEQ ID NO: 17668 - protein, 211 aa, Homo sapiens
  Payload ID: 3554
  Gene Symbol: CPSF4
  Gene Name: cleavage and polyadenylation specific factor 4, 30kDa
  ENSP ID: ENSP00000396060
MQEIIASVDHIKFDLEIAVEQQLGAQPLPFPGMDKSGAAVCEFFLKAACGKGGMCPFRHISGEKTVVCKHWLRGLCKKGDQCEFLHEYDMTKMPECYFYSKFGPLCRHRHTRRVICVNYLVGFCPEGPSCKFMHPRFELPMGTTEQPPLPQQTQPPAKRTPQVIGVMQSQNSSAGNRGPRPLEQVTCYKCGEKGHYANRCTKGHLAFLSGQ

SEQ ID NO: 17669 - protein, 112 aa, Homo sapiens
  Payload ID: 3554
  Gene Symbol: CPSF4
  Gene Name: cleavage and polyadenylation specific factor 4, 30kDa
  ENSP ID: ENSP00000401150
MCPFRHISGEKTVVCKHWLRGLCKKGDQCEFLHEYDMTKMPECYFYSKFGECSNKECPFLHIDPESKIKDCPWYDRGFCKHGPLCRHRHTRRVICVNYLVGFCPEGPSCKFM

SEQ ID NO: 17670 - protein, 44 aa, Homo sapiens
  Payload ID: 3554
  Gene Symbol: CPSF4
  Gene Name: cleavage and polyadenylation specific factor 4, 30kDa
  ENSP ID: ENSP00000401496
MDKSGAAVCEFFLKAACGKEETGFHRDSQDGLRASQDGLDLLTL

SEQ ID NO: 17671 - protein, 191 aa, Homo sapiens
  Payload ID: 3554
  Gene Symbol: CPSF4
  Gene Name: cleavage and polyadenylation specific factor 4, 30kDa
  ENSP ID: ENSP00000402224
MCPFRHISGEKTVVCKHWLRGLCKKGDQCEFLHEYDMTKMPECYFYSKFGECSNKECPFLHIDPESKIKDCPWYDRGFCKHGPLCRHRHTRRVICVNYLVGFCPEGPSCKFMHPRFELPMGTTEQPPLPQQTQPPAKQRTPQVIGVMQSQNSSAGNRGPRPLEQVTCYKCGEKGHYANRCTKGHLAFLSGQ

SEQ ID NO: 17672 - protein, 193 aa, Homo sapiens
  Payload ID: 3554
  Gene Symbol: CPSF4
  Gene Name: cleavage and polyadenylation specific factor 4, 30kDa
  ENSP ID: ENSP00000415188
  MOD_RES (1)..(1): Any amino acid
XKIKDCPWYDRGFCKHGPLCRHRHTRRVICVNYLVGFCPEGPSCKFMHPRFELPMGTTEQPPLPQQTQPPAKQSNNPPLQRSSSLIQLTSQNSSPNQQRTPQVIGVMQSQNSSAGNRGPRPLEQVTCYKCCCLSLLFPHFLLFPVWRERTLRQQMHQRALGLSQWTVTAAGASSEQPGGPAVGSVHLTVSCAC

SEQ ID NO: 17673 - protein, 179 aa, Homo sapiens
  Payload ID: 3555
  Gene Symbol: CPSF4L
  Gene Name: cleavage and polyadenylation specific factor 4-like
  Uniprot ID: A6NMK7
  ENSP ID: ENSP00000343900
MQEVIAGLERFTFAFEKDVEMQKGTGLLPFQGMDKSASAVCNFFTKGLCEKGKLCPFRHDRGEKMVVCKHWLRGLCKKGDHCKFLHQYDLTRMPECYFYSKFGDCSNKECSFLHVKPAFKSQDCPWYDQGFCKDGPLCKYRHVPRIMCLNYLVGFCPEGPKCQFAQKIREFKLLPGSKI

SEQ ID NO: 17674 - protein, 152 aa, Homo sapiens
  Payload ID: 3555
  Gene Symbol: CPSF4L
  Gene Name: cleavage and polyadenylation specific factor 4-like
  ENSP ID: ENSP00000380788
MVVCKHWLRGLCKKGDHCKFLHQYDLTRMPECYFYSKFGDCSNKECSFLHVKPAFKSQDCPWYDQGFCKDAGPLCKYRHVPRIMCLNYLVGFCPEGPKCQFAHCSLPAGPGIQHLLFLLWKLGNPHPQQSACSPAWGSGVKGRACATGPLCQ

SEQ ID NO: 17675 - protein, 588 aa, Homo sapiens
  Payload ID: 3556
  Gene Symbol: CPSF6
  Gene Name: cleavage and polyadenylation specific factor 6, 68kDa
  Uniprot ID: Q16630
  ENSP ID: ENSP00000266679
MADGVDHIDIYADVGEEFNQEAEYGGHDQIDLYDDVISPSANNGDAPEDRDYMDTLPPTVGDDVGKGAAPNVVYTYTGKRIALYIGNLTWWTTDEDLTEAVHSLGVNDILEIKFFENRANGQSKGFALVGVGSEASSKKLMDLLPKRELHGQNPVVTPCNKQFLSQFEMQSRKTTQSGQMSGEGKAGPPGGSSRAAFPQGGRGRGRFPGAVPGGDRFPGPAGPGGPPPPFPGNLIKHLVKGTRPLFLETRIPWHMGHSIEEIPIFGLKAGQTPPRPPLGPPGPPGPPGPPPPGQVLPPPLAGPPNRGDRPPPPVLFPGQPFGQPPLGPLPPGPPPPVPGYGPPPGPPPPQQGPPPPPGPFPPRPPGPLGPPLTLAPPPHLPGPPPGAPPPAPHVNPAFFPPPTNSGMPTSDSRGPPPTDPYGRPPPYDRGDYGPPGREMDTARTPLSEAEFEEIMNRNRAISSSAISRAVSDASAGDYGSAIETLVTAISLIKQSKVSADDRCKVLISSLQDCLHGIESKSYGSGSRRERSRERDHSRSREKSRRHKSRSRDRHDDYYRERSRERERHRDRDRDRDRERDREREYRHR

SEQ ID NO: 17676 - protein, 478 aa, Homo sapiens
  Payload ID: 3556
  Gene Symbol: CPSF6
  Gene Name: cleavage and polyadenylation specific factor 6, 68kDa
  ENSP ID: ENSP00000391437
MADGVDHIDIYADVGEEFNQEAEYGGHDQIDLYDDVISPSANNGDAPEDRDYMDTLPPTVGDDVGKGAAPNVVYTYTGKRIALYIGNLTWWTTDEDLTEAVHSLGVNDILEIKFFENRANGQSKGFALVGVGSEASSKKLMDLLPKRELHGQNPVVTPCNKQFLSQFEMQSRKTTQSGQMSGEGKAGPPGAGPPNRGDRPPPPVLFPGQPFGQPPLGPLPPGPPPPVPGYGPPPGPPPPQQGPPPPPGPFPPRPPGPLGPPLTLAPPPHLPGPPPGAPPPAPHVNPAFFPPPTNSGMPTSDSRGPPPTDPYGRPPPYDRGDYGPPGREMDTARTPLSEAEFEEIMNRNRAISSSAISRAVSDASAGDYGSAIETLVTAISLIKQSKVSADDRCKVLISSLQDCLHGIESKSYGSGSRRERSRERDHSRSREKSRRHKSRSRDRHDDYYRERSRERERHRDRDRDRDRERDREREYRHR

SEQ ID NO: 17677 - protein, 551 aa, Homo sapiens
  Payload ID: 3556
  Gene Symbol: CPSF6
  Gene Name: cleavage and polyadenylation specific factor 6, 68kDa
  Uniprot ID: Q16630
  ENSP ID: ENSP00000391774
MADGVDHIDIYADVGEEFNQEAEYGGHDQIDLYDDVISPSANNGDAPEDRDYMDTLPPTVGDDVGKGAAPNVVYTYTGKRIALYIGNLTWWTTDEDLTEAVHSLGVNDILEIKFFENRANGQSKGFALVGVGSEASSKKLMDLLPKRELHGQNPVVTPCNKQFLSQFEMQSRKTTQSGQMSGEGKAGPPGGSSRAAFPQGGRGRGRFPGAVPGGDRFPGPAGPGGPPPPFPAGQTPPRPPLGPPGPPGPPGPPPPGQVLPPPLAGPPNRGDRPPPPVLFPGQPFGQPPLGPLPPGPPPPVPGYGPPPGPPPPQQGPPPPPGPFPPRPPGPLGPPLTLAPPPHLPGPPPGAPPPAPHVNPAFFPPPTNSGMPTSDSRGPPPTDPYGRPPPYDRGDYGPPGREMDTARTPLSEAEFEEIMNRNRAISSSAISRAVSDASAGDYGSAIETLVTAISLIKQSKVSADDRCKVLISSLQDCLHGIESKSYGSGSRRERSRERDHSRSREKSRRHKSRSRDRHDDYYRERSRERERHRDRDRDRDRERDREREYRHR

SEQ ID NO: 17678 - protein, 107 aa, Homo sapiens
  Payload ID: 3556
  Gene Symbol: CPSF6
  Gene Name: cleavage and polyadenylation specific factor 6, 68kDa
  ENSP ID: ENSP00000446670
MADGVDHIDIYADVGEEFNQEAEYGGHDQIDLYDDVISPSANNGDAPEDRDYMDTLPPTVGDDVGKGAAPNVVYTYTGKRIALYIGNLTWGETEFAKLCHPGWSAVV

SEQ ID NO: 17679 - protein, 56 aa, Homo sapiens
  Payload ID: 3556
  Gene Symbol: CPSF6
  Gene Name: cleavage and polyadenylation specific factor 6, 68kDa
  ENSP ID: ENSP00000450206
MADGVDHIDIYADVGEEFNQEAEYEREAENERGTGIVTETVTESVTESANIVIVRS

SEQ ID NO: 17680 - protein, 514 aa, Homo sapiens
  Payload ID: 3557
  Gene Symbol: CPSF7
  Gene Name: cleavage and polyadenylation specific factor 7, 59kDa
  Uniprot ID: Q8N684
  ENSP ID: ENSP00000345412
MGRPESAGGGSRGPFEGGGRARRAGGIFLTLSILRTRDLPSGAMSEGVDLIDIYADEEFNQDPEFNNTDQIDLYDDVLTATSQPSDDRSSSTEPPPPVRQEPSPKPNNKTPAILYTYSGLRNRRAAVYVGSFSWWTTDQQLIQVIRSIGVYDVVELKFAENRANGQSKGYAEVVVASENSVHKLLELLPGKVLNGEKVDVRPATRQNLSQFEAQARKRECVRVPRGGIPPRAHSRDSSDSADGRATPSENLVPSSARVDKPPSVLPYFNRPPSALPLMGLPPPPIPPPPPLSSSFGVPPPPPGIHYQHLMPPPPRLPPHLAVPPPGAIPPALHLNPAFFPPPNATVGPPPDTYMKASAPYNHHGSRDSGPPPSTVSEAEFEDIMKRNRAISSSAISKAVSGASAGDYSDAIETLLTAIAVIKQSRVANDERCRVLISSLKDCLHGIEAKSYSVGASGSSSRKRHRSRERSPSRSRESSRRHRDLLHNEDRHDDYFQERNREHERHRDRERDRHH

SEQ ID NO: 17681 - protein, 471 aa, Homo sapiens
  Payload ID: 3557
  Gene Symbol: CPSF7
  Gene Name: cleavage and polyadenylation specific factor 7, 59kDa
  Uniprot ID: Q8N684
  ENSP ID: ENSP00000378352
MSEGVDLIDIYADEEFNQDPEFNNTDQIDLYDDVLTATSQPSDDRSSSTEPPPPVRQEPSPKPNNKTPAILYTYSGLRNRRAAVYVGSFSWWTTDQQLIQVIRSIGVYDVVELKFAENRANGQSKGYAEVVVASENSVHKLLELLPGKVLNGEKVDVRPATRQNLSQFEAQARKRECVRVPRGGIPPRAHSRDSSDSADGRATPSENLVPSSARVDKPPSVLPYFNRPPSALPLMGLPPPPIPPPPPLSSSFGVPPPPPGIHYQHLMPPPPRLPPHLAVPPPGAIPPALHLNPAFFPPPNATVGPPPDTYMKASAPYNHHGSRDSGPPPSTVSEAEFEDIMKRNRAISSSAISKAVSGASAGDYSDAIETLLTAIAVIKQSRVANDERCRVLISSLKDCLHGIEAKSYSVGASGSSSRKRHRSRERSPSRSRESSRRHRDLLHNEDRHDDYFQERNREHERHRDRERDRHH

SEQ ID NO: 17682 - protein, 145 aa, Homo sapiens
  Payload ID: 3557
  Gene Symbol: CPSF7
  Gene Name: cleavage and polyadenylation specific factor 7, 59kDa
  ENSP ID: ENSP00000391359
MSEGVDLIDIYADEEFNQDPEFNNTDQIDLYDDVLTATSQPSDDRSSSTEPPPPVRQEPSPKPNNKTPAILYTYSGLRNRRAAVYVGSFSWWTTDQQLIQVIRSIGVYDVVELKFAENRANGQSKGYAEVVVASENSVHKLLELL

SEQ ID NO: 17683 - protein, 143 aa, Homo sapiens
  Payload ID: 3557
  Gene Symbol: CPSF7
  Gene Name: cleavage and polyadenylation specific factor 7, 59kDa
  ENSP ID: ENSP00000392400
MSEGVDLIDIYADEEFNQDPEFNNTDQIDLYDDVLTATSQPSDDRSSSTEPPPPVRQEPSPKPNNKTPAILYTYSGLRNRRAAVYVGSFSWWTTDQQLIQVIRSIGVYDVVELKFAENRANGQSKGYAEVVVASENSVHKLLE

SEQ ID NO: 17684 - protein, 204 aa, Homo sapiens
  Payload ID: 3557
  Gene Symbol: CPSF7
  Gene Name: cleavage and polyadenylation specific factor 7, 59kDa
  ENSP ID: ENSP00000393828
MSEGVDLIDIYADEEFNQDPEFNNTDQIDLYDDVLTATSQPSDDRSSSTEPPPPVRQEPSPKPNNKTPAILYTYSGLRNRRAAVYVGSFSWWTTDQQLIQVIRSIGVYDVVELKFAENRANGQSKGYAEVVVASENSVHKLLELLPGKVLNGEKVDVRPATRQNLSQFEAQARKRIPPRAHSRDSSDSADGRATPSENLVPSSA

SEQ ID NO: 17685 - protein, 462 aa, Homo sapiens
  Payload ID: 3557
  Gene Symbol: CPSF7
  Gene Name: cleavage and polyadenylation specific factor 7, 59kDa
  Uniprot ID: Q8N684
  ENSP ID: ENSP00000397203
MSEGVDLIDIYADEEFNQDPEFNNTDQIDLYDDVLTATSQPSDDRSSSTEPPPPVRQEPSPKPNNKTPAILYTYSGLRNRRAAVYVGSFSWWTTDQQLIQVIRSIGVYDVVELKFAENRANGQSKGYAEVVVASENSVHKLLELLPGKVLNGEKVDVRPATRQNLSQFEAQARKRIPPRAHSRDSSDSADGRATPSENLVPSSARVDKPPSVLPYFNRPPSALPLMGLPPPPIPPPPPLSSSFGVPPPPPGIHYQHLMPPPPRLPPHLAVPPPGAIPPALHLNPAFFPPPNATVGPPPDTYMKASAPYNHHGSRDSGPPPSTVSEAEFEDIMKRNRAISSSAISKAVSGASAGDYSDAIETLLTAIAVIKQSRVANDERCRVLISSLKDCLHGIEAKSYSVGASGSSSRKRHRSRERSPSRSRESSRRHRDLLHNEDRHDDYFQERNREHERHRDRERDRHH

SEQ ID NO: 17686 - protein, 462 aa, Homo sapiens; identical to SEQ ID NO: 17685
  Payload ID: 3557
  Gene Symbol: CPSF7
  Gene Name: cleavage and polyadenylation specific factor 7, 59kDa
  Uniprot ID: Q8N684
  ENSP ID: ENSP00000407394

SEQ ID NO: 17687 - protein, 138 aa, Homo sapiens
  Payload ID: 3557
  Gene Symbol: CPSF7
  Gene Name: cleavage and polyadenylation specific factor 7, 59kDa
  ENSP ID: ENSP00000414295
MSEGVDLIDIYADEEFNQDPEFNNTDQIDLYDDVLTATSQPSDDRSSSTEPPPPVRQEPSPKPNNKTPAILYTYSGLRNRRAAVYVGSFSWWTTDQQLIQVIRSIGVYDVVELKFAENRANGQSKGYAEVVVASENSV

SEQ ID NO: 17688 - protein, 101 aa, Homo sapiens
  Payload ID: 3557
  Gene Symbol: CPSF7
  Gene Name: cleavage and polyadenylation specific factor 7, 59kDa
  ENSP ID: ENSP00000437467
MSEGVDLIDIYADEEFNQDPEFNNTDQIDLYDDVLTATSQPSDDRSSSTEPPPPVRQEPSPKPNNKTPAILYTYSGLRNRRAAVYVGSFSWVGLISERELS

SEQ ID NO: 17689 - protein, 219 aa, Homo sapiens
  Payload ID: 3557
  Gene Symbol: CPSF7
  Gene Name: cleavage and polyadenylation specific factor 7, 59kDa
  ENSP ID: ENSP00000437531
MSEGVDLIDIYADEEFNQDPEFNNTDQIDLYDDVLTATSQPSDDRSSSTEPPPPVRQEPSPKPNNKTPAILYTYSGLRNRRAAVYVGSFSWWTTDQQLIQVIRSIGVYDVVELKFAENRANGQSKGYAEVVVASENSVHKLLELLPGKVLNGEKVDVRPATRQNLSQFEAQARKRIPPRAHSRDSSDSADGRATPSENLVPSSARVDKPPSVLPYFNRP

SEQ ID NO: 17690 - protein, 101 aa, Homo sapiens
  Payload ID: 3557
  Gene Symbol: CPSF7
  Gene Name: cleavage and polyadenylation specific factor 7, 59kDa
  ENSP ID: ENSP00000437768
MSEGVDLIDIYADEEFNQDPEFNNTDQIDLYDDVLTATSQPSDDRSSSTEPPPPVRQEPSPKPNNKTPAILYTYSGLRNRRAAVYVGSFSWQGHLRDEISE

SEQ ID NO: 17691 - protein, 374 aa, Homo sapiens
  Payload ID: 3557
  Gene Symbol: CPSF7
  Gene Name: cleavage and polyadenylation specific factor 7, 59kDa
  ENSP ID: ENSP00000437860
MSEGVDLIDIYADEEFNQDPEFNNTDQIDLYDDVLTATSQPSDDRSSSTEPPPPVRQEPSPKPNNKTPAILYTYSGLRNRRAAVYVGSFSWWTTDQQLIQVIRSIGVYDVVELKFAENRANGQSKGYAEVVVASENSVHKLLELLPGKVLNGEKVDVRPATRQNLSQFEAQARKRIPPRAHSRDSSDSADGRATPSENLVPSSARVDKPPSVLPYFNRPPSALPLMVGPPPDTYMKASAPYNHHGSRDSGPPPSTVSEAEFEDIMKRNRAISSSAISKAVSGASAGDYSDAIETLLTAIAVIKQSRVANDERCRVLISSLKDCLHGIEAKSYSVGASGSSSRKRHRSRERSPSRSRESSRRHRDLLHNEDRHDD

SEQ ID NO: 17692 - protein, 288 aa, Homo sapiens
  Payload ID: 3557
  Gene Symbol: CPSF7
  Gene Name: cleavage and polyadenylation specific factor 7, 59kDa
  ENSP ID: ENSP00000438381
MSEGVDLIDIYADEEFNQDPEFNNTDQIDLYDDVLTATSQPSDDRSSSTEPPPPVRQEPSPKPNNKTPAILYTYSGLRNRRAAVYVGSFSWWTTDQQLIQVIRSIGVYDVVELKFAENRANGQSKGYAEVVVASENSVHKLLELLPGKVLNGEKVDVRPATRQNLSQFEAQARKRIPPRAHSRDSSDSADGRATPSENLVPSSARVDKPPSVLPYFNRPPSALPLMGLPPPPIPPPPPLSSSFGVPPPPPGIHYQHLMPPPPRLPPHLAVPPPGAIPPALHLNPAFFP

SEQ ID NO: 17693 - protein, 102 aa, Homo sapiens
  Payload ID: 3557
  Gene Symbol: CPSF7
  Gene Name: cleavage and polyadenylation specific factor 7, 59kDa
  ENSP ID: ENSP00000440414
MSEGVDLIDIYADEEFNQDPEFNNTDQIDLYDDVLTATSQPSDDRSSSTEPPPPVRQEPSPKPNNKTPAILYTYSGLRNRRAAVYVGSFSWWTTDQQLIQVC

SEQ ID NO: 17694 - protein, 101 aa, Homo sapiens; identical to SEQ ID NO: 17688
  Payload ID: 3557
  Gene Symbol: CPSF7
  Gene Name: cleavage and polyadenylation specific factor 7, 59kDa
  ENSP ID: ENSP00000442819

SEQ ID NO: 17695 - protein, 93 aa, Homo sapiens
  Payload ID: 3557
  Gene Symbol: CPSF7
  Gene Name: cleavage and polyadenylation specific factor 7, 59kDa
  ENSP ID: ENSP00000443504
MSEGVDLIDIYADEEFNQDPEFNNTDQIDLYDDVLTATSQPSDDRSSSTEPPPPVRQEPSPKPNNKTPAILYTYSGLRNRRAAVYVGSFSWVC

SEQ ID NO: 17696 - protein, 100 aa, Homo sapiens
  Payload ID: 3557
  Gene Symbol: CPSF7
  Gene Name: cleavage and polyadenylation specific factor 7, 59kDa
  ENSP ID: ENSP00000446193
MSEGVDLIDIYADEEFNQDPEFNNTDQIDLYDDVLTATSQPSDDRSSSTEPPPPVRQEPSPKPNNKTPAILYTYSGLRNRRAAVYVGSFSWGHLRDEISE

SEQ ID NO: 17697 - protein, 98 aa, Homo sapiens
  Payload ID: 3557
  Gene Symbol: CPSF7
  Gene Name: cleavage and polyadenylation specific factor 7, 59kDa
  ENSP ID: ENSP00000446330
MSEGVDLIDIYADEEFNQDPEFNNTDQIDLYDDVLTATSQPSDDRSSSTEPPPPVRQEPSPKPNNKTPAILYTYSGLRNRRAAVYVGSFSWESMMWWS

SEQ ID NO: 17698 - protein, 101 aa, Homo sapiens; identical to SEQ ID NO: 17688
  Payload ID: 3557
  Gene Symbol: CPSF7
  Gene Name: cleavage and polyadenylation specific factor 7, 59kDa
  ENSP ID: ENSP00000487286

SEQ ID NO: 17699 - protein, 431 aa, Homo sapiens
  Payload ID: 3558
  Gene Symbol: CSTF1
  Gene Name: cleavage stimulation factor, 3' pre-RNA, subunit 1, 50kDa
  Uniprot ID: Q05048
  ENSP ID: ENSP00000217109
MYRTKVGLKDRQQLYKLIISQLLYDGYISIANGLINEIKPQSVCAPSEQLLHLIKLGMENDDTAVQYAIGRSDTVAPGTGIDLEFDADVQTMSPEASEYETCYVTSHKGPCRVATYSRDGQLIATGSADASIKILDTERMLAKSAMPIEVMMNETAQQNMENHPVIRTLYDHVDEVTCLAFHPTEQILASGSRDYTLKLFDYSKPSAKRAFKYIQEAEMLRSISFHPSGDFILVGTQHPTLRLYDINTFQCFVSCNPQDQHTDAICSVNYNSSANMYVTGSKDGCIKLWDGVSNRCITTFEKAHDGAEVCSAIFSKNSKYILSSGKDSVAKLWEISTGRTLVRYTGAGLSGRQVHRTQAVFNHTEDYVLLPDERTISLCCWDSRTAERRNLLSLGHNNIVRCIVHSPTNPGFMTCSDDFRARFWYRRSTTD

SEQ ID NO: 17700 - protein, 345 aa, Homo sapiens
  Payload ID: 3558
  Gene Symbol: CSTF1
  Gene Name: cleavage stimulation factor, 3' pre-RNA, subunit 1, 50kDa
  ENSP ID: ENSP00000387968
MYRTKVGLKDRQQLYKLIISQLLYDGYISIANGLINEIKPQSVCAPSEQLLHLIKLGMENDDTAVQYAIGRSDTVAPGTGIDLEFDADVQTMSPEASEYETCYVTSHKGPCRVATYSRDGQLIATGSADASIKILDTERMLAKSAMPIEVMMNETAQQNMENHPVIRTLYDHVDEVTCLAFHPTEQILASGSRDYTLKLFDYSKPSAKRAFKYIQEAEMLRSISFHPSGDFILVGTQHPTLRLYDINTFQCFVSCNPQDQHTDAICSVNYNSSANMYVTGSKDGCIKLWDGVSNRCITTFEKAHDGAEVCSAIFSKNSKYILSSGKDSVAKLWEISTGRTLVRYT

SEQ ID NO: 17701 - protein, 142 aa, Homo sapiens
  Payload ID: 3558
  Gene Symbol: CSTF1
  Gene Name: cleavage stimulation factor, 3' pre-RNA, subunit 1, 50kDa
  ENSP ID: ENSP00000405171
MYRTKVGLKDRQQLYKLIISQLLYDGYISIANGLINEIKPQSVCAPSEQLLHLIKLGMENDDTAVQYAIGRSDTVAPGTGIDLEFDADVQTMSPEASEYETCYVTSHKGPCRVATYSRDGQLIATGSADASIKILDTERMLA

SEQ ID NO: 17702 - protein, 345 aa, Homo sapiens; identical to SEQ ID NO: 17700
  Payload ID: 3558
  Gene Symbol: CSTF1
  Gene Name: cleavage stimulation factor, 3' pre-RNA, subunit 1, 50kDa
  ENSP ID: ENSP00000409035

SEQ ID NO: 17703 - protein, 59 aa, Homo sapiens
  Payload ID: 3558
  Gene Symbol: CSTF1
  Gene Name: cleavage stimulation factor, 3' pre-RNA, subunit 1, 50kDa
  ENSP ID: ENSP00000477958
MYRTKVGLKDRQQLYKLIISQLLYDGYISIANGLINEIKPQSVCAPSEQLLHLIKLGRL

SEQ ID NO: 17704 - protein, 59 aa, Homo sapiens; identical to SEQ ID NO: 17703
  Payload ID: 3558
  Gene Symbol: CSTF1
  Gene Name: cleavage stimulation factor, 3' pre-RNA, subunit 1, 50kDa
  ENSP ID: ENSP00000479273

SEQ ID NO: 17705 - protein, 577 aa, Homo sapiens
  Payload ID: 3559
  Gene Symbol: CSTF2
  Gene Name: cleavage stimulation factor, 3' pre-RNA, subunit 2, 64kDa
  Uniprot ID: P33240
  ENSP ID: ENSP00000362063
MAGLTVRDPAVDRSLRSVFVGNIPYEATEEQLKDIFSEVGPVVSFRLVYDRETGKPKGYGFCEYQDQETALSAMRNLNGREFSGRALRVDNAASEKNKEELKSLGTGAPVIESPYGETISPEDAPESISKAVASLPPEQMFELMKQMKLCVQNSPQEARNMLLQNPQLAYALLQAQVVMRIVDPEIALKILHRQTNIPTLIAGNPQPVHGAGPGSGSNVSMNQQNPQAPQAQSLGGMHVNGAPPLMQASMQGGVPAPGQMPAAVTGPGPGSLAPGGGMQAQVGMPGSGPVSMERGQVPMQDPRAAMQRGSLPANVPTPRGLLGDAPNDPRGGTLLSVTGEVEPRGYLGPPHQGPPMHHVPGHESRGPPPHELRGGPLPEPRPLMAEPRGPMLDQRGPPLDGRGGRDPRGIDARGMEARAMEARGLDARGLEARAMEARAMEARAMEARAMEARAMEVRGMEARGMDTRGPVPGPRGPIPSGMQGPSPINMGAVVPQGSRQVPVMQGTGMQGASIQGGSQPGGFSPGQNQVTPQDHEKAALIMQVLQLTADQIAMLPPEQRQSILILKEQIQKSTGAP

SEQ ID NO: 17706 - protein, 597 aa, Homo sapiens
  Payload ID: 3559
  Gene Symbol: CSTF2
  Gene Name: cleavage stimulation factor, 3' pre-RNA, subunit 2, 64kDa
  ENSP ID: ENSP00000387996
MAGLTVRDPAVDRSLRSVFVGNIPYEATEEQLKDIFSEVGPVVSFRLVYDRETGKPKGYGFCEYQDQETALSAMRNLNGREFSGRALRVDNAASEKNKEELKSLGTGAPVIESPYGETISPEDAPESISKAVASLPPEQMFELMKQMKLCVQNSPQEARNMLLQNPQLAYALLQAQVVMRIVDPEIALKILHRQTNIPTLIAGNPQPVHGAGPGSGSNVSMNQQNPQAPQAQSLGGMHVNGAPPLMQASMQGGVPAPGQMPAAVTGPGPGSLAPGGGMQAQVGMPGSGPVSMERGQGTLQHSPVGPAGPASIERVQVPMQDPRAAMQRGSLPANVPTPRGLLGDAPNDPRGGTLLSVTGEVEPRGYLGPPHQGPPMHHVPGHESRGPPPHELRGGPLPEPRPLMAEPRGPMLDQRGPPLDGRGGRDPRGIDARGMEARAMEARGLDARGLEARAMEARAMEARAMEARAMEARAMEVRGMEARGMDTRGPVPGPRGPIPSGMQGPSPINMGAVVPQGSRQVPVMQGTGMQGASIQGGSQPGGFSPGQNQVTPQDHEKAALIMQVLQLTADQIAMLPPEQRQSILILKEQIQKSTGAP

SEQ ID NO: 17707 - protein, 225 aa, Homo sapiens
  Payload ID: 3559
  Gene Symbol: CSTF2
  Gene Name: cleavage stimulation factor, 3' pre-RNA, subunit 2, 64kDa
  ENSP ID: ENSP00000415705
MSKEIFPFCRVGNIPYEATEEQLKDIFSEVGPVVSFRLVYDRETGKPKGYGFCEYQDQETALSAMRNLNGREFSGRALRVDNAASEKNKEELKSLGTGAPVIESPYGETISPEDAPESISKAVASLPPEQMFELMKQMKLCVQNSPQEARNMLLQNPQLAYALLQAQVVMRIVDPEIALKILHRQTNIPTLIAGNPQPVHGAGPGSGSNVSMNQQNPQAPQAQSL

SEQ ID NO: 17708 - protein, 438 aa, Homo sapiens
  Payload ID: 3559
  Gene Symbol: CSTF2
  Gene Name: cleavage stimulation factor, 3' pre-RNA, subunit 2, 64kDa
  ENSP ID: ENSP00000432060
MAGLTVRDPAVDRSLRSVFVGNIPYEATEEQLKDIFSEVGPVVSFRLVYDRETGKPKGYGFCEYQDQETALSAMRNLNGREFSGRALRVDNAASEKNKEELKSLGTGAPVIESPYGETISPEDAPESISKAVASLPPEQMFELMKQMKLCVQNSPQEARNMLLQNPQLAYALLQAQVVMRIVDPEIALKILHRQTNIPTLIAGNPQPVHGAGPGSGSNVSMNQQNPQAPQAQSLGGVPAPGQMPAAVTGPGPGSLAPGGGMQAQVGMPGSGPVSMERGQVPMQDPRAAMQRGSLPANVPTPRGLLGDAPNDPRGGTLLSVTGEVEPRGYLGPPHQGPPMHHVPGHESRGPPPHELRGGPLPEPRPLMAEPRGPMLDQRGPPLDGRGGRDPRGIDARGMEARAMEARGLDARGLEARPSHAGNRNARSKYTGWKPAWRL

SEQ ID NO: 17709 - protein, 616 aa, Homo sapiens
  Payload ID: 3560
  Gene Symbol: CSTF2T
  Gene Name: cleavage stimulation factor, 3' pre-RNA, subunit 2, 64kDa, tau variant
  Uniprot ID: Q9H0L4
  ENSP ID: ENSP00000332444
MSSLAVRDPAMDRSLRSVFVGNIPYEATEEQLKDIFSEVGSVVSFRLVYDRETGKPKGYGFCEYQDQETALSAMRNLNGREFSGRALRVDNAASEKNKEELKSLGPAAPIIDSPYGDPIDPEDAPESITRAVASLPPEQMFELMKQMKLCVQNSHQEARNMLLQNPQLAYALLQAQVVMRIMDPEIALKILHRKIHVTPLIPGKSQSVSVSGPGPGPGPGLCPGPNVLLNQQNPPAPQPQHLARRPVKDIPPLMQTPIQGGIPAPGPIPAAVPGAGPGSLTPGGAMQPQLGMPGVGPVPLERGQVQMSDPRAPIPRGPVTPGGLPPRGLLGDAPNDPRGGTLLSVTGEVEPRGYLGPPHQGPPMHHASGHDTRGPSSHEMRGGPLGDPRLLIGEPRGPMIDQRGLPMDGRGGRDSRAMETRAMETEVLETRVMERRGMETCAMETRGMEARGMDARGLEMRGPVPSSRGPMTGGIQGPGPINIGAGGPPQGPRQVPGISGVGNPGAGMQGTGIQGTGMQGAGIQGGGMQGAGIQGVSIQGGGIQGGGIQGASKQGGSQPSSFSPGQSQVTPQDQEKAALIMQVLQLTADQIAMLPPEQRQSILILKEQIQKSTGAS

SEQ ID NO: 17710 - protein, 717 aa, Homo sapiens
  Payload ID: 3561
  Gene Symbol: CSTF3
  Gene Name: cleavage stimulation factor, 3' pre-RNA, subunit 3, 77kDa
  Uniprot ID: Q12996
  ENSP ID: ENSP00000315791
MSGDGATEQAAEYVPEKVKKAEKKLEENPYDLDAWSILIREAQNQPIDKARKTYERLVAQFPSSGRFWKLYIEAEIKAKNYDKVEKLFQRCLMKVLHIDLWKCYLSYVRETKGKLPSYKEKMAQAYDFALDKIGMEIMSYQIWVDYINFLKGVEAVGSYAENQRITAVRRVYQRGCVNPMINIEQLWRDYNKYEEGINIHLAKKMIEDRSRDYMNARRVAKEYETVMKGLDRNAPSVPPQNTPQEAQQVDMWKKYIQWEKSNPLRTEDQTLITKRVMFAYEQCLLVLGHHPDIWYEAAQYLEQSSKLLAEKGDMNNAKLFSDEAANIYERAISTLLKKNMLLYFAYADYEESRMKYEKVHSIYNRLLAIEDIDPTLVYIQYMKFARRAEGIKSGRMIFKKAREDTRTRHHVYVTAALMEYYCSKDKSVAFKIFELGLKKYGDIPEYVLAYIDYLSHLNEDNNTRVLFERVLTSGSLPPEKSGEIWARFLAFESNIGDLASILKVEKRRFTAFKEEYEGKETALLVDRYKFMDLYPCSASELKALGYKDVSRAKLAAIIPDPVVAPSIVPVLKDEVDRKPEYPKPDTQQMIPFQPRHLAPPGLHPVPGGVFPVPPAAVVLMKLLPPPICFQGPFVQVDELMEIFRRCKIPNTVEEAVRIITGGAPELAVEGNGPVESNAVLTKAVKRPNEDSDEDEEKGAVVPPVHDIYRARQQKRIR

SEQ ID NO: 17711 - protein, 103 aa, Homo sapiens
  Payload ID: 3561
  Gene Symbol: CSTF3
  Gene Name: cleavage stimulation factor, 3' pre-RNA, subunit 3, 77kDa
  Uniprot ID: Q12996
  ENSP ID: ENSP00000388711
MSGDGATEQAAEYVPEKVKKAEKKLEENPYDLDAWSILIREAQNQPIDKARKTYERLVAQFPSSGRFWKLYIEAEVTILFYFFLYQYCSIHCSDRKQVRNIAN

SEQ ID NO: 17712 - protein, 44 aa, Homo sapiens
  Payload ID: 3561
  Gene Symbol: CSTF3
  Gene Name: cleavage stimulation factor, 3' pre-RNA, subunit 3, 77kDa
  Uniprot ID: Q12996
  ENSP ID: ENSP00000393064
MSGDGATEQAAEYVPEKVKKAEKKLEENPYDLDAWSILIREAQV

SEQ ID NO: 17713 - protein, 185 aa, Homo sapiens
  Payload ID: 3561
  Gene Symbol: CSTF3
  Gene Name: cleavage stimulation factor, 3' pre-RNA, subunit 3, 77kDa
  ENSP ID: ENSP00000431355
MSGDGATEQVETRSHCVSQAGLELLDLSDPPASAFQTVGLQAAEYVPEKVKKAEKKLEENPYDLDAWSILIREAQNQPIDKARKTYERLVAQFPSSGRFWKLYIEAEIKAKNYDKVEKLFQRCLMKVLHIDLWKCYLSYVRETKGKLPSYKEKMAQAYDFALDKIGMEIMSYQIWVDYINFLKGV

SEQ ID NO: 17714 - protein, 61 aa, Homo sapiens
  Payload ID: 3561
  Gene Symbol: CSTF3
  Gene Name: cleavage stimulation factor, 3' pre-RNA, subunit 3, 77kDa
  ENSP ID: ENSP00000431903
MSGDGATEQAAEYVPEKVKKAEKKLEENPYDLDAWSILIREAQNQPIDKARKTYERLVAQF

SEQ ID NO: 17715 - protein, 52 aa, Homo sapiens
  Payload ID: 3561
  Gene Symbol: CSTF3
  Gene Name: cleavage stimulation factor, 3' pre-RNA, subunit 3, 77kDa
  ENSP ID: ENSP00000434753
MSGDGATEQTGSGSVTQARVQWRQSQFPATSPSRAQAIPPQLPKQLSMSQRR

SEQ ID NO: 17716 - protein, 91 aa, Homo sapiens
  Payload ID: 3561
  Gene Symbol: CSTF3
  Gene Name: cleavage stimulation factor, 3' pre-RNA, subunit 3, 77kDa
  ENSP ID: ENSP00000435138
  MOD_RES (1)..(1): Any amino acid
XCFQGPFVQVDELMEIFRRCKIPNTVEEAVRIITGGAPELAVEGNGPVESNAVLTKAVKRPNEDSDEDEEKGAVVPPVHDIYRARQQKRIR

SEQ ID NO: 17717 - protein, 669 aa, Homo sapiens
  Payload ID: 3562
  Gene Symbol: CLPTM1
  Gene Name: cleft lip and palate associated transmembrane protein 1
  Uniprot ID: O96005
  ENSP ID: ENSP00000336994
MAAAQEADGARSAVVAAGGGSSGQVTSNGSIGRDPPAETQPQNPPAQPAPNAWQVIKGVLFRIFIIWAISSWFRRGPAPQDQAGPGGAPRVASRNLFPKDTLMNLHVYISEHEHFTDFNATSALFWEQHDLVYGDWTSGENSDGCYEHFAELDIPQSVQQNGSIYIHVYFTKSGFHPDPRQKALYRRLATVHMSRMINKYKRRRFQKTKNLLTGETEADPEMIKRAEDYGPVEVISHWHPNITINIVDDHTPWVKGSVPPPLDQYVKFDAVSGDYYPIIYFNDYWNLQKDYYPINESLASLPLRVSFCPLSLWRWQLYAAQSTKSPWNFLGDELYEQSDEEQDSVKVALLETNPYLLALTIIVSIVHSVFEFLAFKNDIQFWNSRQSLEGLSVRSVFFGVFQSFVVLLYILDNETNFVVQVSVFIGVLIDLWKITKVMDVRLDREHRVAGIFPRLSFKDKSTYIESSTKVYDDMAFRYLSWILFPLLGCYAVYSLLYLEHKGWYSWVLSMLYGFLLTFGFITMTPQLFINYKLKSVAHLPWRMLTYKALNTFIDDLFAFVIKMPVMYRIGCLRDDVVFFIYLYQRWIYRVDPTRVNEFGMSGEDPTAAAPVAEVPTAAGALTPTPAPTTTTATREEASTSLPTKPTQGASSASEPQEAPPKPAEDKKKD

SEQ ID NO: 17718 - protein, 655 aa, Homo sapiens
  Payload ID: 3562
  Gene Symbol: CLPTM1
  Gene Name: cleft lip and palate associated transmembrane protein 1
  Uniprot ID: O96005
  ENSP ID: ENSP00000442011
MSRKAHITEKVTSNGSIGRDPPAETQPQNPPAQPAPNAWQVIKGVLFRIFIIWAISSWFRRGPAPQDQAGPGGAPRVASRNLFPKDTLMNLHVYISEHEHFTDFNATSALFWEQHDLVYGDWTSGENSDGCYEHFAELDIPQSVQQNGSIYIHVYFTKSGFHPDPRQKALYRRLATVHMSRMINKYKRRRFQKTKNLLTGETEADPEMIKRAEDYGPVEVISHWHPNITINIVDDHTPWVKGSVPPPLDQYVKFDAVSGDYYPIIYFNDYWNLQKDYYPINESLASLPLRVSFCPLSLWRWQLYAAQSTKSPWNFLGDELYEQSDEEQDSVKVALLETNPYLLALTIIVSIVHSVFEFLAFKNDIQFWNSRQSLEGLSVRSVFFGVFQSFVVLLYILDNETNFVVQVSVFIGVLIDLWKITKVMDVRLDREHRVAGIFPRLSFKDKSTYIESSTKVYDDMAFRYLSWILFPLLGCYAVYSLLYLEHKGWYSWVLSMLYGFLLTFGFITMTPQLFINYKLKSVAHLPWRMLTYKALNTFIDDLFAFVIKMPVMYRIGCLRDDVVFFIYLYQRWIYRVDPTRVNEFGMSGEDPTAAAPVAEVPTAAGALTPTPAPTTTTATREEASTSLPTKPTQGASSASEPQEAPPKPAEDKKKD

SEQ ID NO: 17719 - protein, 567 aa, Homo sapiens
  Payload ID: 3562
  Gene Symbol: CLPTM1
  Gene Name: cleft lip and palate associated transmembrane protein 1
  Uniprot ID: O96005
  ENSP ID: ENSP00000443192
MNLHVYISEHEHFTDFNATSALFWEQHDLVYGDWTSGENSDGCYEHFAELDIPQSVQQNGSIYIHVYFTKSGFHPDPRQKALYRRLATVHMSRMINKYKRRRFQKTKNLLTGETEADPEMIKRAEDYGPVEVISHWHPNITINIVDDHTPWVKGSVPPPLDQYVKFDAVSGDYYPIIYFNDYWNLQKDYYPINESLASLPLRVSFCPLSLWRWQLYAAQSTKSPWNFLGDELYEQSDEEQDSVKVALLETNPYLLALTIIVSIVHSVFEFLAFKNDIQFWNSRQSLEGLSVRSVFFGVFQSFVVLLYILDNETNFVVQVSVFIGVLIDLWKITKVMDVRLDREHRVAGIFPRLSFKDKSTYIESSTKVYDDMAFRYLSWILFPLLGCYAVYSLLYLEHKGWYSWVLSMLYGFLLTFGFITMTPQLFINYKLKSVAHLPWRMLTYKALNTFIDDLFAFVIKMPVMYRIGCLRDDVVFFIYLYQRWIYRVDPTRVNEFGMSGEDPTAAAPVAEVPTAAGALTPTPAPTTTTATREEASTSLPTKPTQGASSASEPQEAPPKPAEDKKKD

SEQ ID NO: 17720 - protein, 152 aa, Homo sapiens
  Payload ID: 3562
  Gene Symbol: CLPTM1
  Gene Name: cleft lip and palate associated transmembrane protein 1
  ENSP ID: ENSP00000464985
PWNFLGDELYEQSDEEQDSVKVALLETNPYLLALTIIVSIVHSVFEFLAFKNDIQFWNSRQSLEGLSVRSVFFGVFQSFVVLLYILDNETNFVVQVSVFIGVLIDLWKITKVMDVRLDREHRVAGIFPRLSFKDKSTYIESSTKVYDDASSP

SEQ ID NO: 17721 - protein, 18 aa, Homo sapiens
  Payload ID: 3562
  Gene Symbol: CLPTM1
  Gene Name: cleft lip and palate associated transmembrane protein 1
  ENSP ID: ENSP00000465731
MNLHVYISEHEHFTDFNA

SEQ ID NO: 17722 - protein, 171 aa, Homo sapiens
  Payload ID: 3562
  Gene Symbol: CLPTM1
  Gene Name: cleft lip and palate associated transmembrane protein 1
  ENSP ID: ENSP00000467927
MAAAQEADGARSAVVAAGGGSSGQVTSNGSIGRDPPAETQPQNPPAQPAPNAWQVIKGVLFRIFIIWAISSWFRRGPAPQDQAGPGGAPRVASRNLFPKDTLMSVQQNGSIYIHVYFTKSGFHPDPRQKALYRRLATVHMSRMINKYKRRRFQKTKNLLTGETEADPEMIK

SEQ ID NO: 17723 - protein, 209 aa, Homo sapiens
  Payload ID: 3562
  Gene Symbol: CLPTM1
  Gene Name: cleft lip and palate associated transmembrane protein 1
  ENSP ID: ENSP00000468310
YKLKSVAHLPWRMLTYKALNTFIDDLFAFVIKMPVMYRIGCLRDGPPGCGRASPTSHCLPPLSRCGFLHLPLPTVDLPRRPHPSQRVWHEWRRPHSCRPRGRGSHSSRGPHAHTCTHHDHRHQGGGLHVPAHQAHPGGQLCQRAPGSPSKASRGQEKGLVETGPHLLRLLATTTPASRPPRLPSLSPFPWTDQAGAVGGPPQVRAQRVM

SEQ ID NO: 17724 - protein, 674 aa, Homo sapiens
  Payload ID: 3563
  Gene Symbol: CLASRP
  Gene Name: CLK4-associating serine/arginine rich protein
  ENSP ID: ENSP00000221455
MWHEARKHERKLRGMMVDYKKRAERRREYYEKIKKDPAQFLQVHGRACKVHLDSAVALAAESPVNMMPWQGDTNNMIDRFDVRAHLDHIPDYTPPLLTTISPEQESDERKCNYERYRGLVQNDFAGISEEQCLYQIYIDELYGGLQRPSEDEKKKLAEKKASIGYTYEDSTVAEVEKAAEKPEEEESAAEEESNSDEDEVIPDIDVEVDVDELNQEQVADLNKQATTYGMADGDFVRMLRKDKEEAEAIKHAKALEEEKAMYSGRRSRRQRREFREKRLRGRKISPPSYARRDSPTYDPYKRSPSESSSESRSRSRSPTPGREEKITFITSFGGSDEEAAAAAAAAAASGVTTGKPPAPPQPGGPAPGRNASARRRSSSSSSSSSASRTSSSRSSSRSSSRSRRGGGYYRSGRHARSRSRSWSRSRSRSRRYSRSRSRGRRHSGGGSRDGHRYSRSPARRGGYGPRRRSRSRSHSGDRYRRGGRGLRHHSSSRSRSSWSLSPSRSRSLTRSRSHSPSPSQSRSRSRSRSQSPSPSPAREKLTRPAASPAVGEKLKKTEPAAGKETGAAKPKLTPQEKLKLRMQKALNRQFKADKKAAQEKMIQQEHERQEREDELRAMARKIRMKERERREKEREEWERQYSRQSRSPSPRYSREYSSSRRRSRSRSRSPHYRH

SEQ ID NO: 17725 - protein, 594 aa, Homo sapiens
  Payload ID: 3563
  Gene Symbol: CLASRP
  Gene Name: CLK4-associating serine/arginine rich protein
  Uniprot ID: Q8N2M8
  ENSP ID: ENSP00000375814
MWHEARKHERKLRGMMVDYKKRAERRREYYEKIKKDPAQFLQVHGRACKVHLDSAVALAAESPVNMMPWQGDTNNMIDRFDVRAHLDHIPDYTPPLLTTISPEQESDERKCNYERYRGLVQNDFAGISEEQCLYQIYIDELYGGLQRPSEDEKKKLAEKKASIGYTYEDSTVAEVEKAAEKPEEEESAAEEESNSDEDEVIPDIDVEVDVDELNQEQVADLNKQATTYGMADGDFVRMLRKDKEEAEAIKHAKALEEEKAMYSGRRSRRQRREFREKRLRGRKISPPSYARRDSPTYDPYKRSPSESSSESRSRSRSPTPGREEKITFITSFGGSDEEAAAAAAAAAASGVTTGKPPAPPQPGGPAPGRNASARRRSSSSSSSSSASRTSSSRSSSRSSSRSRRGGGYYRSGRHARSRSRSWSRSRSRSRRYSRSRSRGRRHSGGGSRDGHRYSRSPARRGGYGPRRRSRSRSHSGDRYRRGGRGLRHHSSSRSRSSWSLSPSRSRSLTRSRSHSPSPSQSRSRSRSRSQSPSPSPAREKLTRPAASPAVGEKLKKTEPAAGKETGAAKVTQADASGEAETEDAEGAEQAVQGG

SEQ ID NO: 17726 - protein, 612 aa, Homo sapiens
  Payload ID: 3563
  Gene Symbol: CLASRP
  Gene Name: CLK4-associating serine/arginine rich protein
  Uniprot ID: Q8N2M8
  ENSP ID: ENSP00000375815
MWHEARKHERKLRGMMVDYKKRAERRREYYEKIKKDPAQFLQESDERKCNYERYRGLVQNDFAGISEEQCLYQIYIDELYGGLQRPSEDEKKKLAEKKASIGYTYEDSTVAEVEKAAEKPEEEESAAEEESNSDEDEVIPDIDVEVDVDELNQEQVADLNKQATTYGMADGDFVRMLRKDKEEAEAIKHAKALEEEKAMYSGRRSRRQRREFREKRLRGRKISPPSYARRDSPTYDPYKRSPSESSSESRSRSRSPTPGREEKITFITSFGGSDEEAAAAAAAAAASGVTTGKPPAPPQPGGPAPGRNASARRRSSSSSSSSSASRTSSSRSSSRSSSRSRRGGGYYRSGRHARSRSRSWSRSRSRSRRYSRSRSRGRRHSGGGSRDGHRYSRSPARRGGYGPRRRSRSRSHSGDRYRRGGRGLRHHSSSRSRSSWSLSPSRSRSLTRSRSHSPSPSQSRSRSRSRSQSPSPSPAREKLTRPAASPAVGEKLKKTEPAAGKETGAAKPKLTPQEKLKLRMQKALNRQFKADKKAAQEKMIQQEHERQEREDELRAMARKIRMKERERREKEREEWERQYSRQSRSPSPRYSREYSSSRRRSRSRSRSPHYRH

SEQ ID NO: 17727 - protein, 655 aa, Homo sapiens
  Payload ID: 3563
  Gene Symbol: CLASRP
  Gene Name: CLK4-associating serine/arginine rich protein
  ENSP ID: ENSP00000438702
MWHEARKHERKLRGMMVDYKKRAERRREYYEKIKKDPAQFLQVHGRACKVHLDSAVALAAESPVNMMPWQGDTNNMIDRFDVRAHLDHIPDYTPPLLTTISPEQESDERKCNYERYRGLVQNDFAGISEEQCLYQIYIDELYGGLQRPSEDEKKKLAEKKASIGYTYEDSTVAEVEKAAEKPEEEESAAEEESNSDEDEVIPDIDVEVDVDELNQEQVADLNKQATTYGMADGDFVRMLRKDKEEAEAIKHAKALEEEKAMYSGRRSRRQRREFREKRLRGRKISPPSYARRDSPTYDPYKRSPSESSSESRSRSRSPTPGREEKITFITSFGGSDEEAAAAAAAAAASGVTTGKPPAPPQPGGPAPGRNASARRRSSSSSSSSSASRTSSSRSSSRSSSRSRRGGGYYRSGRHARSRSRSWSRSRSRSRRYSRSRSRGRRHSGGGSRDGHRYSRSPARRGGYGPRRRSRSRSHSGDRYRRGGRGLRHHSSSRSRSSWSLSPSRSRSLTRSRSHSPSPSQSRSRSRSRSQSPSPSPAREKLTRPAASPAVGEKLKKTEPAAGKETGAAKVIKADKKAAQEKMIQQEHERQEREDELRAMARKIRMKERERREKEREEWERQYSRQSRSPSPRYSREYSSSRRRSRSRSRSPHYRH

SEQ ID NO: 17728 - protein, 86 aa, Homo sapiens
  Payload ID: 3563
  Gene Symbol: CLASRP
  Gene Name: CLK4-associating serine/arginine rich protein
  ENSP ID: ENSP00000465562
MWHEARKHERKLRGMMVDYKKRAERRREYYEKIKKDPAQFLQVHGRACKVHLDSAVALAAESPVNMMPWQGDTNNMIDRFDVRAHL

SEQ ID NO: 17729 - protein, 81 aa, Homo sapiens
  Payload ID: 3563
  Gene Symbol: CLASRP
  Gene Name: CLK4-associating serine/arginine rich protein
  ENSP ID: ENSP00000465750
MWHEARKHERKLRGMMVDYKKRAERRREYYEKISQRSSACTRSTLMSCTEASRDPAKMRRRSWQRRRLPSVIPTRTARWPR

SEQ ID NO: 17730 - protein, 188 aa, Homo sapiens
  Payload ID: 3563
  Gene Symbol: CLASRP
  Gene Name: CLK4-associating serine/arginine rich protein
  ENSP ID: ENSP00000466371
KKRAERRREYYEKIKKDPAQFLQVHGRACKVHLDSAVALAAESPVNMMPWQGDTNNMIDRFDVRAHLDHIPDYTPPLLTTISPEQESDERKCNYERYRGLVQNDFAGISEEQCLYQIYIDELYGGLQRPSEDEKKKLAEKKASIGYTYEDSTVAEVEKAAEKPEEEESAAEEESNSDEDETWRWTWMN

SEQ ID NO: 17731 - protein, 131 aa, Homo sapiens
  Payload ID: 3563
  Gene Symbol: CLASRP
  Gene Name: CLK4-associating serine/arginine rich protein
  ENSP ID: ENSP00000467177
PKLTPQEKLKLRMQKALNRQFKADKKAAQEKMIQQEHERQEREDELRAMARKIRMKVLEAPALPEFSVSSVPGQMLMPCLRRERERREKEREEWERQYSRQSRSPSPRYSREYSSSRRRSRSRSRSPHYRH

SEQ ID NO: 17732 - protein, 846 aa, Homo sapiens
  Payload ID: 3564
  Gene Symbol: CLOCK
  Gene Name: clock circadian regulator
  Uniprot ID: O15516
  ENSP ID: ENSP00000308741
MLFTVSCSKMSSIVDRDDSSIFDGLVEEDDKDKAKRVSRNKSEKKRRDQFNVLIKELGSMLPGNARKMDKSTVLQKSIDFLRKHKEITAQSDASEIRQDWKPTFLSNEEFTQLMLEALDGFFLAIMTDGSIIYVSESVTSLLEHLPSDLVDQSIFNFIPEGEHSEVYKILSTHLLESDSLTPEYLKSKNQLEFCCHMLRGTIDPKEPSTYEYVKFIGNFKSLNSVSSSAHNGFEGTIQRTHRPSYEDRVCFVATVRLATPQFIKEMCTVEEPNEEFTSRHSLEWKFLFLDHRAPPIIGYLPFEVLGTSGYDYYHVDDLENLAKCHEHLMQYGKGKSCYYRFLTKGQQWIWLQTHYYITYHQWNSRPEFIVCTHTVVSYAEVRAERRRELGIEESLPETAADKSQDSGSDNRINTVSLKEALERFDHSPTPSASSRSSRKSSHTAVSDPSSTPTKIPTDTSTPPRQHLPAHEKMVQRRSSFSSQSINSQSVGSSLTQPVMSQATNLPIPQGMSQFQFSAQLGAMQHLKDQLEQRTRMIEANIHRQQEELRKIQEQLQMVHGQGLQMFLQQSNPGLNFGSVQLSSGNSSNIQQLAPINMQGQVVPTNQIQSGMNTGHIGTTQHMIQQQTLQSTSTQSQQNVLSGHSQQTSLPSQTQSTLTAPLYNTMVISQPAAGSMVQIPSSMPQNSTQSAAVTTFTQDRQIRFSQGQQLVTKLVTAPVACGAVMVPSTMLMGQVVTAYPTFATQQQQSQTLSVTQQQQQQSSQEQQLTSVQQPSQAQLTQPPQQFLQTSRLLHGNPSTQLILSAAFPLQQSTFPQSHHQQHQSQQQQQLSRHRTDSLPDPSKVQPQ

SEQ ID NO: 17733 - protein, 846 aa, Homo sapiens; identical to SEQ ID NO: 17732
  Payload ID: 3564
  Gene Symbol: CLOCK
  Gene Name: clock circadian regulator
  Uniprot ID: O15516
  ENSP ID: ENSP00000370723

SEQ ID NO: 17734 - protein, 182 aa, Homo sapiens
  Payload ID: 3564
  Gene Symbol: CLOCK
  Gene Name: clock circadian regulator
  ENSP ID: ENSP00000396649
MLFTVSCSKMSSIVDRDDSSIFDGLVEEDDKDKAKRVSRNKSEKKRRDQFNVLIKELGSMLPGNARKMDKSTVLQKSIDFLRKHKEITAQSDASEIRQDWKPTFLSNEEFTQLMLEALDGFFLAIMTDGSIIYVSESVTSLLEHLPSDLVDQSIFNFIPEGEHSEVYKILSTHLLESDSLTP

SEQ ID NO: 17735 - protein, 846 aa, Homo sapiens; identical to SEQ ID NO: 17732
  Payload ID: 3564
  Gene Symbol: CLOCK
  Gene Name: clock circadian regulator
  Uniprot ID: O15516
  ENSP ID: ENSP00000426983

SEQ ID NO: 17736 - protein, 399 aa, Homo sapiens
  Payload ID: 3565
  Gene Symbol: CIPC
  Gene Name: CLOCK-interacting pacemaker
  Uniprot ID: Q9C0C6
  ENSP ID: ENSP00000355319
MERKNPSRESPRRLSAKVGKGTEMKKVARQLGMAAAESDKDSGFSDGSSECLSSAEQMESEDMLSALGWSREDRPRQNSKTAKNAFPTLSPMVVMKNVLVKQGSSSSQLQSWTVQPSFEVISAQPQLLFLHPPVPSPVSPCHTGEKKSDSRNYLPILNSYTKIAPHPGKRGLSLGPEEKGTSGVQKKICTERLGPSLSSSEPTKAGAVPSSPSTPAPPSAKLAEDSALQGVPSLVAGGSPQTLQPVSSSHVAKAPSLTFASPASPVCASDSTLHGLESNSPLSPLSANYSSPLWAAEHLCRSPDIFSEQRQSKHRRFQNTLVVLHKSGLLEITLKTKELIRQNQATQVELDQLKEQTQLFIEATKSRAPQAWAKLQASLTPGSSNTGSDLEAFSDHPAI

SEQ ID NO: 17737 - protein, 103 aa, Homo sapiens
  Payload ID: 3565
  Gene Symbol: CIPC
  Gene Name: CLOCK-interacting pacemaker
  ENSP ID: ENSP00000450972
MERKNPSRESPRRLSAKVGKGTEMKKVARQLGMAAAESDKDSGFSDGSSECLSSAEQMESEDMLSALGWSREDRPRQNSKTAKNAFPTLSPMVVMKNVLVKQQ

SEQ ID NO: 17738 - protein, 141 aa, Homo sapiens
  Payload ID: 3565
  Gene Symbol: CIPC
  Gene Name: CLOCK-interacting pacemaker
  ENSP ID: ENSP00000451493
MERKNPSRESPRRLSAKVGKGTEMKKVARQLGMAAAESDKDSGFSDGSSECLSSAEQMESEDMLSALGWSREDRPRQNSKTAKNAFPTLSPMVVMKNVLVKQGSSSSQLQSWTVQPSFEVISAQPQLLFLHPPVPSPVSPC

SEQ ID NO: 17739 - protein, 134 aa, Homo sapiens
  Payload ID: 3565
  Gene Symbol: CIPC
  Gene Name: CLOCK-interacting pacemaker
  ENSP ID: ENSP00000451522
MERKNPSRESPRRLSAKVGKGTEMKKVARQLGMAAAESDKDSGFSDGSSECLSSAEQMESEDMLSALGWSREDRPRQNSKTAKNAFPTLSPMVVMKNVLVKQGSSSSQLQSWTVQPSFEVISAQPQLLFLHPPV

SEQ ID NO: 17740 - protein, 61 aa, Homo sapiens
  Payload ID: 3565
  Gene Symbol: CIPC
  Gene Name: CLOCK-interacting pacemaker
  ENSP ID: ENSP00000451997
MERKNPSRESPRRLSAKVGKGTEMKKVARQLGMAAAESDKDSGFSGQQLIPAPVVDCPALL

SEQ ID NO: 17741 - protein, 151 aa, Homo sapiens
  Payload ID: 3565
  Gene Symbol: CIPC
  Gene Name: CLOCK-interacting pacemaker
  ENSP ID: ENSP00000452380
MERKNPSRESPRRLSAKVGKGTEMKKVARQLGMAAAESDKDSGFSDGSSECLSSAEQMESEDMLSALGWSREDRPRQNSKTAKNAFPTLSPMVVMKNVLVKQGSSSSQLQSWTVQPSFEVISAQPQLLFLHPPVPSPVSPCHTGEKKSDSR

SEQ ID NO: 17742 - protein, 156 aa, Homo sapiens
  Payload ID: 3565
  Gene Symbol: CIPC
  Gene Name: CLOCK-interacting pacemaker
  ENSP ID: ENSP00000452589
MERKNPSRESPRRLSAKVGKGTEMKKVARQLGMAAAESDKDSGFSDGSSECLSSAEQMESEDMLSALGWSREDRPRQNSKTAKNAFPTLSPMVVMKNVLVKQGSSSSQLQSWTVQPSFEVISAQPQLLFLHPPVPSPVSPCHTGEKKSDSRNYLPI

SEQ ID NO: 17743 - protein, 707 aa, Homo sapiens
  Payload ID: 3566
  Gene Symbol: CLPB
  Gene Name: ClpB homolog, mitochondrial AAA ATPase chaperonin
  Uniprot ID: Q9H078
  ENSP ID: ENSP00000294053
MLGSLVLRRKALAPRLLLRLLRSPTLRGHGGASGRNVTTGSLGEPQWLRVATGGRPGTSPALFSGRGAATGGRQGGRFDTKCLAAATWGRLPGPEETLPGQDSWNGVPSRAGLGMCALAAALVVHCYSKSPSNKDAALLEAARANNMQEVSRLLSEGADVNAKHRLGWTALMVAAINRNNSVVQVLLAAGADPNLGDDFSSVYKTAKEQGIHSLEDGGQDGASRHITNQWTSALEFRRWLGLPAGVLITREDDFNNRLNNRASFKGCTALHYAVLADDYRTVKELLDGGANPLQRNEMGHTPLDYAREGEVMKLLRTSEAKYQEKQRKREAEERRRFPLEQRLKEHIIGQESAIATVGAAIRRKENGWYDEEHPLVFLFLGSSGIGKTELAKQTAKYMHKDAKKGFIRLDMSEFQERHEVAKFIGSPPGYVGHEEGGQLTKKLKQCPNAVVLFDEVDKAHPDVLTIMLQLFDEGRLTDGKGKTIDCKDAIFIMTSNVASDEIAQHALQLRQEALEMSRNRIAENLGDVQISDKITISKNFKENVIRPILKAHFRRDEFLGRINEIVYFLPFCHSELIQLVNKELNFWAKRAKQRHNITLLWDREVADVLVDGYNVHYGARSIKHEVERRVVNQLAAAYEQDLLPGGCTLRITVEDSDKQLLKSPELPSPQAEKRLPKLRLEIIDKDSKTRRLDIRAPLHPEKVCNTI

SEQ ID NO: 17744 - protein, 648 aa, Homo sapiens
  Payload ID: 3566
  Gene Symbol: CLPB
  Gene Name: ClpB homolog, mitochondrial AAA ATPase chaperonin
  Uniprot ID: Q9H078
  ENSP ID: ENSP00000340385
MLGSLVLRRKALAPRLLLRLLRSPTLRGHGGASGRNVTTGSLGEPQWLRVATGGRPGTSPALFSGRGAATGGRQGGRFDTKCLAAATWGRLPGPEETLPGQDSWNGVPSRAGLGMCALAAALVVHCYSKSPSNKDAALLEAARANNMQEVSSVVQVLLAAGADPNLGDDFSSVYKTAKEQGIHSLEVLITREDDFNNRLNNRASFKGCTALHYAVLADDYRTVKELLDGGANPLQRNEMGHTPLDYAREGEVMKLLRTSEAKYQEKQRKREAEERRRFPLEQRLKEHIIGQESAIATVGAAIRRKENGWYDEEHPLVFLFLGSSGIGKTELAKQTAKYMHKDAKKGFIRLDMSEFQERHEVAKFIGSPPGYVGHEEGGQLTKKLKQCPNAVVLFDEVDKAHPDVLTIMLQLFDEGRLTDGKGKTIDCKDAIFIMTSNVASDEIAQHALQLRQEALEMSRNRIAENLGDVQISDKITISKNFKENVIRPILKAHFRRDEFLGRINEIVYFLPFCHSELIQLVNKELNFWAKRAKQRHNITLLWDREVADVLVDGYNVHYGARSIKHEVERRVVNQLAAAYEQDLLPGGCTLRITVEDSDKQLLKSPELPSPQAEKRLPKLRLEIIDKDSKTRRLDIRAPLHPEKVCNTI

SEQ ID NO: 17745 - protein, 662 aa, Homo sapiens
  Payload ID: 3566
  Gene Symbol: CLPB
  Gene Name: ClpB homolog, mitochondrial AAA ATPase chaperonin
  Uniprot ID: Q9H078
  ENSP ID: ENSP00000407296
MPRGCHLGTPSWSRRNTPRTGQLERGPQQGRTGHVRPGRSAGGSLLQQESVQQGCSPVGSCPCQQYARSQQPQETAKNDAQSRSWAGLNAGVSLKNTKISSSEWPLRLLSEGADVNAKHRLGWTALMVAAINRNNSVVQVLLAAGADPNLGDDFSSVYKTAKEQGIHSLEDGGQDGASRHITNQWTSALEFRRWLGLPAGVLITREDDFNNRLNNRASFKGCTALHYAVLADDYRTVKELLDGGANPLQRNEMGHTPLDYAREGEVMKLLRTSEAKYQEKQRKREAEERRRFPLEQRLKEHIIGQESAIATVGAAIRRKENGWYDEEHPLVFLFLGSSGIGKTELAKQTAKYMHKDAKKGFIRLDMSEFQERHEVAKFIGSPPGYVGHEEGGQLTKKLKQCPNAVVLFDEVDKAHPDVLTIMLQLFDEGRLTDGKGKTIDCKDAIFIMTSNVASDEIAQHALQLRQEALEMSRNRIAENLGDVQISDKITISKNFKENVIRPILKAHFRRDEFLGRINEIVYFLPFCHSELIQLVNKELNFWAKRAKQRHNITLLWDREVADVLVDGYNVHYGARSIKHEVERRVVNQLAAAYEQDLLPGGCTLRITVEDSDKQLLKSPELPSPQAEKRLPKLRLEIIDKDSKTRRLDIRAPLHPEKVCNTI

SEQ ID NO: 17746 - protein, 506 aa, Homo sapiens
  Payload ID: 3566
  Gene Symbol: CLPB
  Gene Name: ClpB homolog, mitochondrial AAA ATPase chaperonin
  Uniprot ID: Q9H078
  ENSP ID: ENSP00000439746
MVAAINRNNSVVQVLLAAGADPNLGDDFSSVYKTAKEQGIHSLEVLITREDDFNNRLNNRASFKGCTALHYAVLADDYRTVKELLDGGANPLQRNEMGHTPLDYAREGEVMKLLRTSEAKYQEKQRKREAEERRRFPLEQRLKEHIIGQESAIATVGAAIRRKENGWYDEEHPLVFLFLGSSGIGKTELAKQTAKYMHKDAKKGFIRLDMSEFQERHEVAKFIGSPPGYVGHEEGGQLTKKLKQCPNAVVLFDEVDKAHPDVLTIMLQLFDEGRLTDGKGKTIDCKDAIFIMTSNVASDEIAQHALQLRQEALEMSRNRIAENLGDVQISDKITISKNFKENVIRPILKAHFRRDEFLGRINEIVYFLPFCHSELIQLVNKELNFWAKRAKQRHNITLLWDREVADVLVDGYNVHYGARSIKHEVERRVVNQLAAAYEQDLLPGGCTLRITVEDSDKQLLKSPELPSPQAEKRLPKLRLEIIDKDSKTRRLDIRAPLHPEKVCNTI

SEQ ID NO: 17747 - protein, 501 aa, Homo sapiens
  Payload ID: 3566
  Gene Symbol: CLPB
  Gene Name: ClpB homolog, mitochondrial AAA ATPase chaperonin
  ENSP ID: ENSP00000440423
MLGSLVLRRKALAPRLLLRLLRSPTLRGHGGASGRNVTTGSLGEPQWLRVATGGRPGTSPALFSGRGAATGGRQGGRFDTKCLAAATWGRLPGPEETLPGQDSWNGVPSRAGLGMCALAAALVVHCYSKSPSNKDAALLEAARANNMQEVSRLLSEGADVNAKHRLGWTALMVAAINRNNSVVQVLLAAGADPNLGDDFSSVYKTAKEQGIHSLEVLITREDDFNNRLNNRASFKGCTALHYAVLADDYRTVKELLDGGANPLQRNEMGHTPLDYAREGEVMKLLRTSEAKYQEKQRKREAEERRRFPLEQRLKEHIIGQESAIATVGAAIRRKENGWYDEEHPLVFLFLGSSGIGKTELAKQTAKYMHKDAKKGFIRLDMSEFQERHEVAKFIGSPPGYVGHEEGGQLTKKLKQCPNAVVLFDEVDKAHPDVLTIMLQLFDEGRLTDGKGKTIDCKDAIFIMTSNVASDEIAQHALQLRQEALEMSRNRIAENLGSLPEG

SEQ ID NO: 17748 - protein, 677 aa, Homo sapiens
  Payload ID: 3566
  Gene Symbol: CLPB
  Gene Name: ClpB homolog, mitochondrial AAA ATPase chaperonin
  Uniprot ID: Q9H078
  ENSP ID: ENSP00000441518
MLGSLVLRRKALAPRLLLRLLRSPTLRGHGGASGRNVTTGSLGEPQWLRVATGGRPGTSPALFSGRGAATGGRQGGRFDTKCLAAATWGRLPGPEETLPGQDSWNGVPSRAGLGMCALAAALVVHCYSKSPSNKDAALLEAARANNMQEVSRLLSEGADVNAKHRLGWTALMVAAINRNNSVVQVLLAAGADPNLGDDFSSVYKTAKEQGIHSLEVLITREDDFNNRLNNRASFKGCTALHYAVLADDYRTVKELLDGGANPLQRNEMGHTPLDYAREGEVMKLLRTSEAKYQEKQRKREAEERRRFPLEQRLKEHIIGQESAIATVGAAIRRKENGWYDEEHPLVFLFLGSSGIGKTELAKQTAKYMHKDAKKGFIRLDMSEFQERHEVAKFIGSPPGYVGHEEGGQLTKKLKQCPNAVVLFDEVDKAHPDVLTIMLQLFDEGRLTDGKGKTIDCKDAIFIMTSNVASDEIAQHALQLRQEALEMSRNRIAENLGDVQISDKITISKNFKENVIRPILKAHFRRDEFLGRINEIVYFLPFCHSELIQLVNKELNFWAKRAKQRHNITLLWDREVADVLVDGYNVHYGARSIKHEVERRVVNQLAAAYEQDLLPGGCTLRITVEDSDKQLLKSPELPSPQAEKRLPKLRLEIIDKDSKTRRLDIRAPLHPEKVCNTI

SEQ ID NO: 17749 - protein, 44 aa, Homo sapiens
  Payload ID: 3566
  Gene Symbol: CLPB
  Gene Name: ClpB homolog, mitochondrial AAA ATPase chaperonin
  ENSP ID: ENSP00000441804
  MOD_RES (1)..(1): Any amino acid
XGNPFFGRWGTGRCKPAHHKPVDKCPGVQEMARTPRWRPDHPRG

SEQ ID NO: 17750 - protein, 152 aa, Homo sapiens
  Payload ID: 3566
  Gene Symbol: CLPB
  Gene Name: ClpB homolog, mitochondrial AAA ATPase chaperonin
  ENSP ID: ENSP00000442651
MQEVSRLLSEGADVNAKHRLGWTALMVAAINRNNSVVQVLLAAGADPNLGDDFSSVYKTAKEQGIHSLEVLITREDDFNNRLNNRASFKGCTALHYAVLADDYRTVKELLDGGANPLQRNEMGHTPLDYAREGEVMKLLRTSEAKYQEKQRK

SEQ ID NO: 17751 - protein, 712 aa, Homo sapiens
  Payload ID: 3566
  Gene Symbol: CLPB
  Gene Name: ClpB homolog, mitochondrial AAA ATPase chaperonin
  ENSP ID: ENSP00000443822
CFRPECDYWESRGAAVAEGSHRGAPWNIAGLVLRTWGSHRGAPGRTLRYQMPRGCHLGTPSWSRRNTPRTGQLERGPQQGRTGHVRPGRSAGGSLLQQESVQQGCSPVGSCPCQQYARSQQPQETAKNDAQSRSWAGLNAGVSLKNTKISSSEWPLRLLSEGADVNAKHRLGWTALMVAAINRNNSVVQVLLAAGADPNLGDDFSSVYKTAKEQGIHSLEDGGQDGASRHITNQWTSALEFRRWLGLPAGVLITREDDFNNRLNNRASFKGCTALHYAVLADDYRTVKELLDGGANPLQRNEMGHTPLDYAREGEVMKLLRTSEAKYQEKQRKREAEERRRFPLEQRLKEHIIGQESAIATVGAAIRRKENGWYDEEHPLVFLFLGSSGIGKTELAKQTAKYMHKDAKKGFIRLDMSEFQERHEVAKFIGSPPGYVGHEEGGQLTKKLKQCPNAVVLFDEVDKAHPDVLTIMLQLFDEGRLTDGKGKTIDCKDAIFIMTSNVASDEIAQHALQLRQEALEMSRNRIAENLGDVQISDKITISKNFKENVIRPILKAHFRRDEFLGRINEIVYFLPFCHSELIQLVNKELNFWAKRAKQRHNITLLWDREVADVLVDGYNVHYGARSIKHEVERRVVNQLAAAYEQDLLPGGCTLRITVEDSDKQLLKSPELPSPQAEKRLPKLRLEIIDKDSKTRRLDIRAPLHPEKVCNTI

SEQ ID NO: 17752 - protein, 75 aa, Homo sapiens
  Payload ID: 3566
  Gene Symbol: CLPB
  Gene Name: ClpB homolog, mitochondrial AAA ATPase chaperonin
  ENSP ID: ENSP00000445180
GWYDEEHPLVFLFLGSSGIGKTELAKQTAKYMHKDAKKLVLACFHTGLHQAGHVRVPGATRGGQVYWVSTRLRWP

SEQ ID NO: 17753 - protein, 149 aa, Homo sapiens
  Payload ID: 3566
  Gene Symbol: CLPB
  Gene Name: ClpB homolog, mitochondrial AAA ATPase chaperonin
  ENSP ID: ENSP00000445327
MQEVSRLLSEGADVNAKHRLGWTALMVAAINRNNSVVQVLLAAGADPNLGDDFSSVYKTAKEQGIHSLEDGGQDGASRHITNQWTSALEFRRWLGLPAGVLITREDDFNNRLNNRASFKGCTALHYAVLADDYRTVKELLDGGANPLQR

SEQ ID NO: 17754 - protein, 538 aa, Homo sapiens
  Payload ID: 3567
  Gene Symbol: CLPTM1L
  Gene Name: CLPTM1-like
  Uniprot ID: Q96KA5
  ENSP ID: ENSP00000313854
MWSGRSSFTSLVVGVFVVYVVHTCWVMYGIVYTRPCSGDANCIQPYLARRPKLQLSVYTTTRSHLGAENNIDLVLNVEDFDVESKFERTVNVSVPKKTRNNGTLYAYIFLHHAGVLPWHDGKQVHLVSPLTTYMVPKPEEINLLTGESDTQQIEAEKKPTSALDEPVSHWRPRLALNVMADNFVFDGSSLPADVHRYMKMIQLGKTVHYLPILFIDQLSNRVKDLMVINRSTTELPLTVSYDKVSLGRLRFWIHMQDAVYSLQQFGFSEKDADEVKGIFVDTNLYFLALTFFVAAFHLLFDFLAFKNDISFWKKKKSMIGMSTKAVLWRCFSTVVIFLFLLDEQTSLLVLVPAGVGAAIELWKVKKALKMTIFWRGLMPEFQFGTYSESERKTEEYDTQAMKYLSYLLYPLCVGGAVYSLLNIKYKSWYSWLINSFVNGVYAFGFLFMLPQLFVNYKLKSVAHLPWKAFTYKAFNTFIDDVFAFIITMPTSHRLACFRDDVVFLVYLYQRWLYPVDKRRVNEFGESYEEKATRAPHTD

SEQ ID NO: 17755 - protein, 369 aa, Homo sapiens
  Payload ID: 3567
  Gene Symbol: CLPTM1L
  Gene Name: CLPTM1-like
  ENSP ID: ENSP00000423321
MVPKPEEINLLTGESDTQQIEAEKKPTSALDEPVSHWRPRLALNVMADNFVFDGSSLPADVHRYMKMIQLGKTVHYLPILFIDQLSNRVKDLMVINRSTTELPLTVSYDKVSLGRLRFWIHMQDAVYSLQQFGFSEKDADEVKGIFVDTNLYFLALTFFVAAFHLLFDFLAFKNDISFWKKKKSMIGMSTKLWKVKKALKMTIFWRGLMPEFQFGTYSESERKTEEYDTQAMKYLSYLLYPLCVGGAVYSLLNIKYKSWYSWLINSFVNGVYAFGFLFMLPQLFVNYKLKSVAHLPWKAFTYKAFNTFIDDVFAFIITMPTSHRLACFRDDVVFLVYLYQRWLYPVDKRRVNEFGESYEEKATRAPHTD

SEQ ID NO: 17756 - protein, 538 aa, Homo sapiens; identical to SEQ ID NO: 17754
  Payload ID: 3567
  Gene Symbol: CLPTM1L
  Gene Name: CLPTM1-like
  Uniprot ID: Q96KA5
  ENSP ID: ENSP00000480372

SEQ ID NO: 17757 - protein, 369 aa, Homo sapiens; identical to SEQ ID NO: 17755
  Payload ID: 3567
  Gene Symbol: CLPTM1L
  Gene Name: CLPTM1-like
  ENSP ID: ENSP00000485923

SEQ ID NO: 17758 - protein, 369 aa, Homo sapiens; identical to SEQ ID NO: 17755
  Payload ID: 3567
  Gene Symbol: CLPTM1L
  Gene Name: CLPTM1-like
  ENSP ID: ENSP00000486059

SEQ ID NO: 17759 - protein, 1309 aa, Homo sapiens
  Payload ID: 3568
  Gene Symbol: CLUH
  Gene Name: clustered mitochondria (cluA/CLU1) homolog
  Uniprot ID: O75153
  ENSP ID: ENSP00000388872
MLLNGDCPESLKKEAAAAEPPRENGLDEAGPGDETTGQEVIVIQDTGFSVKILAPGIEPFSLQVSPQEMVQEIHQVLMDREDTCHRTCFSLHLDGNVLDHFSELRSVEGLQEGSVLRVVEEPYTVREARIHVRHVRDLLKSLDPSDAFNGVDCNSLSFLSVFTDGDLGDSGKRKKGLEMDPIDCTPPEYILPGSRERPLCPLQPQNRDWKPLQCLKVLTMSGWNPPPGNRKMHGDLMYLFVITAEDRQVSITASTRGFYLNQSTAYHFNPKPASPRFLSHSLVELLNQISPTFKKNFAVLQKKRVQRHPFERIATPFQVYSWTAPQAEHAMDCVRAEDAYTSRLGYEEHIPGQTRDWNEELQTTRELPRKNLPERLLRERAIFKVHSDFTAAATRGAMAVIDGNVMAINPSEETKMQMFIWNNIFFSLGFDVRDHYKDFGGDVAAYVAPTNDLNGVRTYNAVDVEGLYTLGTVVVDYRGYRVTAQSIIPGILERDQEQSVIYGSIDFGKTVVSHPRYLELLERTSRPLKILRHQVLNDRDEEVELCSSVECKGIIGNDGRHYILDLLRTFPPDLNFLPVPGEELPEECARAGFPRAHRHKLCCLRQELVDAFVEHRYLLFMKLAALQLMQQNASQLETPSSLENGGPSSLESKSEDPPGQEAGSEEEGSSASGLAKVKELAETIAADDGTDPRSREVIRNACKAVGSISSTAFDIRFNPDIFSPGVRFPESCQDEVRDQKQLLKDAAAFLLSCQIPGLVKDCMEHAVLPVDGATLAEVMRQRGINMRYLGKVLELVLRSPARHQLDHVFKIGIGELITRSAKHIFKTYLQGVELSGLSAAISHFLNCFLSSYPNPVAHLPADELVSKKRNKRRKNRPPGAADNTAWAVMTPQELWKNICQEAKNYFDFDLECETVDQAVETYGLQKITLLREISLKTGIQVLLKEYSFDSRHKPAFTEEDVLNIFPVVKHVNPKASDAFHFFQSGQAKVQQGFLKEGCELINEALNLFNNVYGAMHVETCACLRLLARLHYIMGDYAEALSNQQKAVLMSERVMGTEHPNTIQEYMHLALYCFASSQLSTALSLLYRARYLMLLVFGEDHPEMALLDNNIGLVLHGVMEYDLSLRFLENALAVSTKYHGPKALKVALSHHLVARVYESKAEFRSALQHEKEGYTIYKTQLGEDHEKTKESSEYLKCLTQQAVALQRTMNEIYRNGSSANIPPLKFTAPSMASVLEQLNVINGILFIPLSQKDLENLKAEVARRHQLQEASRNRDRAEEPMATEPAPAGAPGDLGSQPPAAKDPSPSVQG

SEQ ID NO: 17760 - protein, 1309 aa, Homo sapiens; identical to SEQ ID NO: 17759
  Payload ID: 3568
  Gene Symbol: CLUH
  Gene Name: clustered mitochondria (cluA/CLU1) homolog
  Uniprot ID: O75153
  ENSP ID: ENSP00000458986

SEQ ID NO: 17761 - protein, 1236 aa, Homo sapiens
  Payload ID: 3568
  Gene Symbol: CLUH
  Gene Name: clustered mitochondria (cluA/CLU1) homolog
  ENSP ID: ENSP00000459540
MVIKTDELPAAAPADSAREHGSQAGGKGRPGAAELPSVMLLNGDCPESLKKEAAAAEPPRENGLDEAGPGDETTGQEVIVIQDTGFSVKILAPGIEPFSLQVSPQEMVQEIHQVLMDREDTCHRTCFSLHLDGNVLDHFSELRSVEGLQEGSVLRVVEEPYTVREARIHVRHVRDLLKSLDPSDAFNGVDCNSLSFLSVFTDGDLGDSGKRKKGLEMDPIDCTPPEYILPGSRERPLCPLQPQNRDWKPLQCLKVLTMSGWNPPPGNRKMHGDLMYLFVITAEDRQVSITASTRGFYLNQSTAYHFNPKPASPRFLSHSLVELLNQISPTFKKNFAVLQKKRVQRHPFERIATPFQVYSWTAPQAEHAMDCVRAEDAYTSRLGYEEHIPGQTRDWNEELQTTRELPRKNLPERLLRERAIFKVHSDFTAAATRGAMAVIDGNVMAINPSEETKMQMFIWNNIFFSLGFDVRDHYKDFGGDVAAYVAPTNDLNGVRTYNAVDVEGLYTLGTVVVDYRGYRVTAQSIIPGILERDQEQSVIYGSIDFGKTVVSHPRYLELLERTSRPLKILRHQVLNDRDEEVELCSSVECKGIIGNDGRHYILDLLRTFPPDLNFLPVPGEELPEECARAGFPRAHRHKLCCLRQELVDAFVEHRYLLFMKLAALQLMQQNASQLETPSSLENGGPSSLESKSEDPPGQEAGSEEEGSSASGLAKVKELAETIAADDGTADPRSREVIRNACKAVGSISSTAFDIRFNPDIFSPGVRFPESCQDEVRDQKQLLKDAAAFLLSCQIPGLKIGIGELITRSAKHIFKTYLQGVELSGLSAAISHFLNCFLSSYPNPVAHLPADELVSKKRNKRRKNRPPGAADNTAWAVMTPQELWKNICQEAKNYFDFDLECETVDQAVETYGLQKITLLREISLKTGIQVLLKEYSFDSRHKPAFTEEDVLNIFPVVKHVNPKASDAFHFFQSGQAKVQQGFLKEGCELINEALNLFNNVYGAMHVETCACLRLLARLHYIMGDYAEALSNQQKAVLMSERVMGTEHPNTIQEYMHLALYCFASSQLSTALSLLYRARYLMLLVFGEDHPEMALLDNNIGLVLHGVMEYDLSLRFLENALAVSTKYHGPKALKVALSHHLVARVYESKAEFRSALQHEKEGYTIYKTQLGEDHEKTKESSEYLKCLTQQAVALQRTMNEIYRNGSSANIPPLKFTAPSMASVLEQLNVINGILFIPL

SEQ ID NO: 17762 - protein, 164 aa, Homo sapiens
  Payload ID: 3568
  Gene Symbol: CLUH
  Gene Name: clustered mitochondria (cluA/CLU1) homolog
  ENSP ID: ENSP00000460101
MLLNGDCPESLKKEAAAAEPPRENGLDEAGPGDETTGQEVIVIQDTGFSVKILAPGIEPFSLQVSPQEMVQEIHQVLMDREDTCHRTCFSLHLDGNVLDHFSELRSVEGLQEGSVLRVVEEPYTVREARIHVRHVRDLLKSLDPSDAFNGVDCNSLSFLSVFTD

SEQ ID NO: 17763 - protein, 91 aa, Homo sapiens
  Payload ID: 3568
  Gene Symbol: CLUH
  Gene Name: clustered mitochondria (cluA/CLU1) homolog
  ENSP ID: ENSP00000460173
MLLNGDCPESLKKEAAAAEPPRENGLDEAGPGDETTGQEVIVIQDTGFSVKILAPGIEPFSLQVSPQEMVQEIHQVLMDREDTCHRTCFSL

SEQ ID NO: 17764 - protein, 73 aa, Homo sapiens
  Payload ID: 3568
  Gene Symbol: CLUH
  Gene Name: clustered mitochondria (cluA/CLU1) homolog
  ENSP ID: ENSP00000460293
MLLNGDCPESLKKEAAAAEPPRENGLDEAGPGDETTGQEVIVIQDTGFSVKILAPGIEPFSLQVSPQEMVQEI

SEQ ID NO: 17765 - protein, 160 aa, Homo sapiens
  Payload ID: 3568
  Gene Symbol: CLUH
  Gene Name: clustered mitochondria (cluA/CLU1) homolog
  ENSP ID: ENSP00000461126
PPPGNRKMHGDLMYLFVITAEDRQVSITASTRGFYLNQSTAYHFNPKPASPRFLSHSLVELLNQISPTFKKNFAVLQKKRCTAGQPPRRSMPWIACVQRTPTPRGWAMRSTFLDRPETGMRSCRRRGSCLARTCLSGCSEKGPYSRCTATSPRQPPGAPW

SEQ ID NO: 17766 - protein, 1251 aa, Homo sapiens
  Payload ID: 3568
  Gene Symbol: CLUH
  Gene Name: clustered mitochondria (cluA/CLU1) homolog
  ENSP ID: ENSP00000464732
  MOD_RES (1)..(1): Any amino acid
XSLQVSPQEMVQEIHQVLMDREDTCHRTCFSLHLDGNVLDHFSELRSVEGLQEGSVLRVVEEPYTVREARIHVRHVRDLLKSLDPSDAFNGVDCNSLSFLSVFTDGDLGDSGKRKKGLEMDPIDCTPPEYILPGSRERPLCPLQPQNRDWKPLQCLKVLTMSGWNPPPGNRKMHGDLMYLFVITAEDRQVSITASTRGFYLNQSTAYHFNPKPASPRFLSHSLVELLNQISPTFKKNFAVLQKKRVQRHPFERIATPFQVYSWTAPQAEHAMDCVRAEDAYTSRLGYEEHIPGQTRDWNEELQTTRELPRKNLPERLLRERAIFKVHSDFTAAATRGAMAVIDGNVMAINPSEETKMQMFIWNNIFFSLGFDVRDHYKDFGGDVAAYVAPTNDLNGVRTYNAVDVEGLYTLGTVVVDYRGYRVTAQSIIPGILERDQEQSVIYGSIDFGKTVVSHPRYLELLERTSRPLKILRHQVLNDRDEEVELCSSVECKGIIGNDGRHYILDLLRTFPPDLNFLPVPGEELPEECARAGFPRAHRHKLCCLRQELVDAFVEHRYLLFMKLAALQLMQQNASQLETPSSLENGGPSSLESKSEDPPGQEAGSEEEGSSASGLAKVKELAETIAADDGTADPRSREVIRNACKAVGSISSTAFDIRFNPDIFSPGVRFPESCQDEVRDQKQLLKDAAAFLLSCQIPGLVKDCMEHAVLPVDGATLAEVMRQRGINMRYLGKVLELVLRSPARHQLDHVFKIGIGELITRSAKHIFKTYLQGVELSGLSAAISHFLNCFLSSYPNPVAHLPADELVSKKRNKRRKNRPPGAADNTAWAVMTPQELWKNICQEAKNYFDFDLECETVDQAVETYGLQKITLLREISLKTGIQVLLKEYSFDSRHKPAFTEEDVLNIFPVVKHVNPKASDAFHFFQSGQAKVQQGFLKEGCELINEALNLFNNVYGAMHVETCACLRLLARLHYIMGDYAEALSNQQKAVLMSERVMGTEHPNTIQEYMHLALYCFASSQLSTALSLLYRARYLMLLVFGEDHPEMALLDNNIGLVLHGVMEYDLSLRFLENALAVSTKYHGPKALKVALSHHLVARVYESKAEFRSALQHEKEGYTIYKTQLGEDHEKTKESSEYLKCLTQQAVALQRTMNEIYRNGSSANIPPLKFTAPSMASVLEQLNVINGILFIPLSQKDLENLKAEVARRHQLQEASRNRDRAEEPMATEPAPAGAPGDLGSQPPAAKDPSPSVQG

SEQ ID NO: 17767 - protein, 449 aa, Homo sapiens
  Payload ID: 3569
  Gene Symbol: CLU
  Gene Name: clusterin
  Uniprot ID: P10909
  ENSP ID: ENSP00000315130
MMKTLLLFVGLLLTWESGQVLGDQTVSDNELQEMSNQGSKYVNKEIQNAVNGVKQIKTLIEKTNEERKTLLSNLEEAKKKKEDALNETRESETKLKELPGVCNETMMALWEECKPCLKQTCMKFYARVCRSGSGLVGRQLEEFLNQSSPFYFWMNGDRIDSLLENDRQQTHMLDVMQDHFSRASSIIDELFQDRFFTREPQDTYHYLPFSLPHRRPHFFFPKSRIVRSLMPFSPYEPLNFHAMFQPFLEMIHEAQQAMDIHFHSPAFQHPPTEFIREGDDDRTVCREIRHNSTGCLRMKDQCDKCREILSVDCSTNNPSQAKLRRELDESLQVAERLTRKYNELLKSYQWKMLNTSSLLEQLNEQFNWVSRLANLTQGEDQYYLRVTTVASHTSDSDVPSGVTEVVVKLFDSDPITVTVPVEVSRKNPKFMETVAEKALQEYRKKHREE

SEQ ID NO: 17768 - protein, 449 aa, Homo sapiens; identical to SEQ ID NO: 17767
  Payload ID: 3569
  Gene Symbol: CLU
  Gene Name: clusterin
  Uniprot ID: P10909
  ENSP ID: ENSP00000385419

SEQ ID NO: 17769 - protein, 82 aa, Homo sapiens
  Payload ID: 3569
  Gene Symbol: CLU
  Gene Name: clusterin
  ENSP ID: ENSP00000427868
MMKTLLLFVGLLLTWESGQVLGDQTVSDNELQEMSNQGSKYVNKEIQNAVNGVKQIKTLIEKTNEERKTLLSNLEEAKKKKE

SEQ ID NO: 17770 - protein, 140 aa, Homo sapiens
  Payload ID: 3569
  Gene Symbol: CLU
  Gene Name: clusterin
  ENSP ID: ENSP00000428033
  MOD_RES (1)..(1): Any amino acid
XADCSTNNPSQAKLRRELDESLQVAERLTRKYNELLKSYQWKMLNTSSLLEQLNEQFNWVSRLANLTQGEDQYYLRVTTVASHTSDSDVPSGVTEVVVKLFDSDPITVTVPVEVSRKNPKFMETVAEKALQEYRKKHREE

SEQ ID NO: 17771 - protein, 82 aa, Homo sapiens; identical to SEQ ID NO: 17769
  Payload ID: 3569
  Gene Symbol: CLU
  Gene Name: clusterin
  ENSP ID: ENSP00000428526

SEQ ID NO: 17772 - protein, 129 aa, Homo sapiens
  Payload ID: 3569
  Gene Symbol: CLU
  Gene Name: clusterin
  ENSP ID: ENSP00000428779
MMKTLLLFVGLLLTWESGQVLGDQTVSDNELQEMSNQGSKYVNKEIQNAVNGVKQIKTLIEKTNEERKTLLSNLEEAKKKKEDALNETRESETKLKELPGVCNETMMALWEECKPCLKQTCMKFYARVC

SEQ ID NO: 17773 - protein, 32 aa, Homo sapiens
  Payload ID: 3569
  Gene Symbol: CLU
  Gene Name: clusterin
  ENSP ID: ENSP00000429087
MMKTLLLFVGLLLTWESGQVLGDQTVSDNELQ

SEQ ID NO: 17774 - protein, 204 aa, Homo sapiens
  Payload ID: 3569
  Gene Symbol: CLU
  Gene Name: clusterin
  ENSP ID: ENSP00000429336
MMKTLLLFVGLLLTWESGQVLGDQTVSDNELQEMSNQGSKYVNKEIQNAVNGVKQIKTLIEKTNEERKTLLSNLEEAKKKKEDALNETRESETKLKELPGVCNETMMALWEECKPCLKQTCMKFYARVCRSGSGLVGRQLEEFLNQSSPFYFWMNGDRIDSLLENDRQQTHMLDVMQDHFSRASSIIDELFQDRFFTREPQDTY

SEQ ID NO: 17775 - protein, 449 aa, Homo sapiens; identical to SEQ ID NO: 17767
  Payload ID: 3569
  Gene Symbol: CLU
  Gene Name: clusterin
  Uniprot ID: P10909
  ENSP ID: ENSP00000429620

SEQ ID NO: 17776 - protein, 135 aa, Homo sapiens
  Payload ID: 3569
  Gene Symbol: CLU
  Gene Name: clusterin
  ENSP ID: ENSP00000429881
MMKTLLLFVGLLLTWESGQVLGDQTVSDNELQEMSNQGSKYVNKEIQNAVNGVKQIKTLIEKTNEERKTLLSNLEEAKKKKEDALNETRESETKLKELPGVCNETMMALWEECKPCLKQTCMKFYARVCRSGSGL

SEQ ID NO: 17777 - protein, 284 aa, Homo sapiens
  Payload ID: 3569
  Gene Symbol: CLU
  Gene Name: clusterin
  ENSP ID: ENSP00000430821
  MOD_RES (1)..(1): Any amino acid
XQLEEFLNQSSPFYFWMNGDRIDSLLENDRQQTHMLDVMQDHFSRASSIIDELFQDRFFTREPQDTYHYLPFSLPHRRPHFFFPKSRIVRSLMPFSPYEPLNFHAMFQPFLEMIHEAQQAMDIHFHSPAFQHPPTEFIREGDDDRTVCREIRHNSTGCLRMKDQCDKCREILSVDCSTNNPSQAKLRRELDESLQVAERLTRKYNELLKSYQWKMLNTSSLLEQLNEQFNWVSRLANLTQGEDQYYLRVTTVASHTSDSDVPSGVTEVVVKLFDSDPITVTVPV

SEQ ID NO: 17778 - protein, 139 aa, Homo sapiens
  Payload ID: 3569
  Gene Symbol: CLU
  Gene Name: clusterin
  ENSP ID: ENSP00000431026
MMKTLLLFVGLLLTWESGQVLGDQTVSDNELQEMSNQGSKYVNKEIQNAVNGVKQIKTLIEKTNEERKTLLSNLEEAKKKKEDALNETRESETKLKELPGVCNETMMALWEECKPCLKQTCMKFYARVCRSGSGLVGRQ

SEQ ID NO: 17779 - protein, 271 aa, Homo sapiens
  Payload ID: 3569
  Gene Symbol: CLU
  Gene Name: clusterin
  ENSP ID: ENSP00000431070
MMKTLLLFVGLLLTWESGQVLGDQTVSDNELQEMSNQGSKYVNKEIQNAVNGVKQIKTLIEKTNEERKTLLSNLEEAKKKKEDALNETRESETKLKELPGVCNETMMALWEECKPCLKQTCMKFYARVCRSGSGLVGRQLEEFLNQSSPFYFWMNGDRIDSLLENDRQQTHMLDVMQDHFSRASSIIDELFQDSLMPFSPYEPLNFHAMFQPFLEMIHEAQQAMDIHFHSPAFQHPPTEFIREGDDDRTVCREIRHNSTGCLRMKDQCDKC

SEQ ID NO: 17780 - protein, 297 aa, Homo sapiens
  Payload ID: 3569
  Gene Symbol: CLU
  Gene Name: clusterin
  ENSP ID: ENSP00000453247
MEACKDSRIGGMMKTLLLFVGLLLTWESGQVLGDQTVSDNELQEMSNQGSKYVNKEIQNAVNGVKQIKTLIEKTNEERKTLLSNLEEAKKKKEDALNETRESETKLKELPGVCNETMMALWEECKPCLKQTCMKFYARVCRSGSGLVGRQLEEFLNQSSPFYFWMNGDRIDSLLENDRQQTHMLDVMQDHFSRASSIIDELFQDRFFTREPQDTYHYLPFSLPHRRPHFFFPKSRIVRSLMPFSPYEPLNFHAMFQPFLEMIHEAQQAMDIHFHSPAFQHPPTEFIREGDDDRTVCR

SEQ ID NO: 17781 - protein, 432 aa, Homo sapiens
  Payload ID: 3570
  Gene Symbol: CLUAP1
  Gene Name: clusterin associated protein 1
  ENSP ID: ENSP00000344392
MSFRDLRNFTEMMRALGYPRHISMENFRTPNFGLVSEVLLWLVKRYEPQTDIPPDVDTEQDRVFFIKAIAQFMATKAHIKLNTKKLYQADGYAVKELLKITSVLYNAMKTKGMEGSEIVEEDVNKFKFDLGSKIADLKAARQLASEITSKGASLYDLLGMEVELREMRTEAIARPLEINETEKVMRIAIKEILTQVQKTKDLLNNVASDEANLEAKIEKRKLELERNRKRLETLQSVRPCFMDEYEKTEEELQKQYDTYLEKFQNLTYLEQQLEDHHRMEQERFEEAKNTLCLIQNKLKEEEKRLLKSGSNDDSDIDIQEDDESDSELEERRLPKPQTAMEMLMQGRPGKRIVGTMQGGDSDDNMEAAPALLGKCKTSSSKKQEDSEESEIDMEDDDDEDDDLEDESISLSPTKPNRRVRKSEPLDESDNDF

SEQ ID NO: 17782 - protein, 28 aa, Homo sapiens
  Payload ID: 3570
  Gene Symbol: CLUAP1
  Gene Name: clusterin associated protein 1
  ENSP ID: ENSP00000458180
  MOD_RES (1)..(1): Any amino acid
XNRKEKIRTGKKSEATRDSAECQAMFYG

SEQ ID NO: 17783 - protein, 151 aa, Homo sapiens
  Payload ID: 3570
  Gene Symbol: CLUAP1
  Gene Name: clusterin associated protein 1
  ENSP ID: ENSP00000458513
MRTEAIARPLEINETEKVMRIAIKEILTQVQKTKDLLNNVASDEANLEAKIEKRKLELERNRKRLETLQSVRPCFMDEYEKTEEELQKQYDTYLEKFQNLTYLEQQLEDHHRMEQERFEEAKNTLCLIQNKLKEEEKRLLKSGSNDDSDID

SEQ ID NO: 17784 - protein, 201 aa, Homo sapiens
  Payload ID: 3570
  Gene Symbol: CLUAP1
  Gene Name: clusterin associated protein 1
  ENSP ID: ENSP00000458886
MSFRDLRNFTEMMRALGYPRHISMENFRTPNFGLVSEVLLWLVKRYEPQTDIPPDVDTEQDRVFFIKAIAQFMIADLKAARQLASEITSKGASLYDLLGMEVELREMRTEAIARPLEINETEKVMRIAIKEILTQVQKTKDLLNNVASDEANLEAKIEKRKLELERNRKRLETLQSVRPCFMDEYEKTEEELQKQYDTYLE

SEQ ID NO: 17785 - protein, 35 aa, Homo sapiens
  Payload ID: 3570
  Gene Symbol: CLUAP1
  Gene Name: clusterin associated protein 1
  ENSP ID: ENSP00000459399
MSFRDLRNMSPRLTSRLTWILNRTEFSSLRQLPSS

SEQ ID NO: 17786 - protein, 41 aa, Homo sapiens
  Payload ID: 3570
  Gene Symbol: CLUAP1
  Gene Name: clusterin associated protein 1
  ENSP ID: ENSP00000459602
MSFRDLRNMSPRLTSRLTWILNRTEFSSLRQLPSSWPPRHI

SEQ ID NO: 17787 - protein, 387 aa, Homo sapiens
  Payload ID: 3570
  Gene Symbol: CLUAP1
  Gene Name: clusterin associated protein 1
  ENSP ID: ENSP00000460706
MSFRDLRNFTEMMRALGYPRHISMENFRTPNFGLVSEVLLWLVKRYEPQTDIPPDVDTEQDRVFFIKAIAQFMATKAHIKLNTKKLYQADGYAVKELLKITSVLYNAMKTKGMEGSEIVEEDVNKFKFDLGSKIADLKAARQLASEITSKGASLYDLLGMEVELREMRTEAIARPLEINETEKVMRIAIKEILTQVQKTKDLLNNVASDEANLEAKIEKRKLELERNRKRLETLQSVRPCFMDEYEKTEEELQKQYDTYLEKFQNLTYLEQQLEDHHRMEQERFEEAKNTLCLIQNKLKEEEKRLLKSGSNDDSDIDIQEDDESDSELEERRLPKPQTAMEMLMQGRPGKRIVGTMQGGDSDDNVSPPLPSVVLCTLGLAVPIDGSG

SEQ ID NO: 17788 - protein, 413 aa, Homo sapiens
  Payload ID: 3570
  Gene Symbol: CLUAP1
  Gene Name: clusterin associated protein 1
  Uniprot ID: Q96AJ1
  ENSP ID: ENSP00000460850
MSFRDLRNFTEMMRALGYPRHISMENFRTPNFGLVSEVLLWLVKRYEPQTDIPPDVDTEQDRVFFIKAIAQFMATKAHIKLNTKKLYQADGYAVKELLKITSVLYNAMKTKGMEGSEIVEEDVNKFKFDLGSKIADLKAARQLASEITSKGASLYDLLGMEVELREMRTEAIARPLEINETEKVMRIAIKEILTQVQKTKDLLNNVASDEANLEAKIEKRKLELERNRKRLETLQSVRPCFMDEYEKTEEELQKQYDTYLEKFQNLTYLEQQLEDHHRMEQERFEEAKNTLCLIQNKLKEEEKRLLKSGSNDDSDIDIQEDDESDSELEERRLPKPQTAMEMLMQGRPGKRIVGTMQGGDSDDNEDSEESEIDMEDDDDEDDDLEDESISLSPTKPNRRVRKSEPLDESDNDF

SEQ ID NO: 17789 - protein, 247 aa, Homo sapiens
  Payload ID: 3570
  Gene Symbol: CLUAP1
  Gene Name: clusterin associated protein 1
  Uniprot ID: Q96AJ1
  ENSP ID: ENSP00000460889
MRTEAIARPLEINETEKVMRIAIKEILTQVQKTKDLLNNVASDEANLEAKIEKRKLELERNRKRLETLQSVRPCFMDEYEKTEEELQKQYDTYLEKFQNLTYLEQQLEDHHRMEQERFEEAKNTLCLIQNKLKEEEKRLLKSGSNDDSDIDIQEDDESDSELEERRLPKPQTAMEMLMQGRPGKRIVGTMQGGDSDDNEDSEESEIDMEDDDDEDDDLEDESISLSPTKPNRRVRKSEPLDESDNDF

SEQ ID NO: 17790 - protein, 50 aa, Homo sapiens
  Payload ID: 3570
  Gene Symbol: CLUAP1
  Gene Name: clusterin associated protein 1
  ENSP ID: ENSP00000460977
MSFRDLRNFTEMMRALGYPRHISMENFRTPNFGLVSEVLLWLVKRPPRHI

SEQ ID NO: 17791 - protein, 120 aa, Homo sapiens
  Payload ID: 3570
  Gene Symbol: CLUAP1
  Gene Name: clusterin associated protein 1
  ENSP ID: ENSP00000461063
MMRALGYPRHISMENFRTPNFGLVSEVLLWLVKRYEPQTDIPPDVDTEQDRVFFIKAIAQFMATKAHIKLNTKKLYQADGYAVKELLKITSVLYNAMKTKGMEGSEIVEEDVNKFKFDLG

SEQ ID NO: 17792 - protein, 466 aa, Homo sapiens
  Payload ID: 3571
  Gene Symbol: CLUL1
  Gene Name: clusterin-like 1 (retinal)
  Uniprot ID: Q15846
  ENSP ID: ENSP00000341128
MKPPLLVFIVCLLWLKDSHCAPTWKDKTAISENLKSFSEVGEIDADEEVKKALTGIKQMKIMMERKEKEHTNLMSTLKKCREEKQEALKLLNEVQEHLEEEERLCRESLADSWGECRSCLENNCMRIYTTCQPSWSSVKNKIERFFRKIYQFLFPFHEDNEKDLPISEKLIEEDAQLTQMEDVFSQLTVDVNSLFNRSFNVFRQMQQEFDQTFQSHFISDTDLTEPYFFPAFSKEPMTKADLEQCWDIPNFFQLFCNFSVSIYESVSETITKMLKAIEDLPKQDKAPDHGGLISKMLPGQDRGLCGELDQNLSRCFKFHEKCQKCQAHLSEDCPDVPALHTELDEAIRLVNVSNQQYGQILQMTRKHLEDTAYLVEKMRGQFGWVSELANQAPETEIIFNSIQVVPRIHEGNISKQDETMMTDLSILPSSNFTLKIPLEESAESSNFIGYVVAKALQHFKEHFKTW

SEQ ID NO: 17793 - protein, 466 aa, Homo sapiens; identical to SEQ ID NO: 17792
  Payload ID: 3571
  Gene Symbol: CLUL1
  Gene Name: clusterin-like 1 (retinal)
  Uniprot ID: Q15846
  ENSP ID: ENSP00000383449

SEQ ID NO: 17794 - protein, 518 aa, Homo sapiens
  Payload ID: 3571
  Gene Symbol: CLUL1
  Gene Name: clusterin-like 1 (retinal)
  ENSP ID: ENSP00000441726
MRTWDYRWSLALVAQTGVHCCNLSSLQPLPPRFKRFSCLSLSSGWDYSNSGNMKPPLLVFIVCLLWLKDSHCAPTWKDKTAISENLKSFSEVGEIDADEEVKKALTGIKQMKIMMERKEKEHTNLMSTLKKCREEKQEALKLLNEVQEHLEEEERLCRESLADSWGECRSCLENNCMRIYTTCQPSWSSVKNKIERFFRKIYQFLFPFHEDNEKDLPISEKLIEEDAQLTQMEDVFSQLTVDVNSLFNRSFNVFRQMQQEFDQTFQSHFISDTDLTEPYFFPAFSKEPMTKADLEQCWDIPNFFQLFCNFSVSIYESVSETITKMLKAIEDLPKQDKAPDHGGLISKMLPGQDRGLCGELDQNLSRCFKFHEKCQKCQAHLSEDCPDVPALHTELDEAIRLVNVSNQQYGQILQMTRKHLEDTAYLVEKMRGQFGWVSELANQAPETEIIFNSIQVVPRIHEGNISKQDETMMTDLSILPSSNFTLKIPLEESAESSNFIGYVVAKALQHFKEHFKTW

SEQ ID NO: 17795 - protein, 491 aa, Homo sapiens
  Payload ID: 3571
  Gene Symbol: CLUL1
  Gene Name: clusterin-like 1 (retinal)
  ENSP ID: ENSP00000463269
MNSMEAAVGTEVPLLDNLQHCNSGNMKPPLLVFIVCLLWLKDSHCAPTWKDKTAISENLKSFSEVGEIDADEEVKKALTGIKQMKIMMERKEKEHTNLMSTLKKCREEKQEALKLLNEVQEHLEEEERLCRESLADSWGECRSCLENNCMRIYTTCQPSWSSVKNKIERFFRKIYQFLFPFHEDNEKDLPISEKLIEEDAQLTQMEDVFSQLTVDVNSLFNRSFNVFRQMQQEFDQTFQSHFISDTDLTEPYFFPAFSKEPMTKADLEQCWDIPNFFQLFCNFSVSIYESVSETITKMLKAIEDLPKQDKAPDHGGLISKMLPGQDRGLCGELDQNLSRCFKFHEKCQKCQAHLSEDCPDVPALHTELDEAIRLVNVSNQQYGQILQMTRKHLEDTAYLVEKMRGQFGWVSELANQAPETEIIFNSIQVVPRIHEGNISKQDETMMTDLSILPSSNFTLKIPLEESAESSNFIGYVVAKALQHFKEHFKTW

SEQ ID NO: 17796 - protein, 466 aa, Homo sapiens; identical to SEQ ID NO: 17792
  Payload ID: 3571
  Gene Symbol: CLUL1
  Gene Name: clusterin-like 1 (retinal)
  Uniprot ID: Q15846
  ENSP ID: ENSP00000464642

SEQ ID NO: 17797 - protein, 82 aa, Homo sapiens
  Payload ID: 3571
  Gene Symbol: CLUL1
  Gene Name: clusterin-like 1 (retinal)
  ENSP ID: ENSP00000473520
MRTWDYSNSGNMKPPLLVFIVCLLWLKDSHCAPTWKDKTAISENLKSFSEVGEIDADEEVKKALTGIKQMKIMMERKEKEHT

SEQ ID NO: 17798 - protein, 34 aa, Homo sapiens
  Payload ID: 3571
  Gene Symbol: CLUL1
  Gene Name: clusterin-like 1 (retinal)
  ENSP ID: ENSP00000473543
  MOD_RES (1)..(1): Any amino acid
XQFGWVSELANQAPETEIIFNSIQVRRSNASYIQ

SEQ ID NO: 17799 - protein, 518 aa, Homo sapiens; identical to SEQ ID NO: 17794
  Payload ID: 3571
  Gene Symbol: CLUL1
  Gene Name: clusterin-like 1 (retinal)
  ENSP ID: ENSP00000481776

SEQ ID NO: 17800 - protein, 620 aa, Homo sapiens
  Payload ID: 3572
  Gene Symbol: CMIP
  Gene Name: c-Maf inducing protein
  Uniprot ID: Q8IY22
  ENSP ID: ENSP00000381120
MASVAQKKIYKYKKVLSNPSRWEVVLKEIRTLVDMALTSPLQDDSINQAPLEIVSKLLSENTNLTTQEHENIIVAIAPLLENNHPPPDLCEFFCKHCRERPRSMVVIEVFTPVVQRILKHNMDFGKCPRLRLFTQEYILALNELNAGMEVVKKFIQSMHGPTGHCPHPRVLPNLVAVCLAAIYSCYEEFINSRDNSPSLKEIRNGCQQPCDRKPTLPLRLLHPSPDLVSQEATLSEARLKSVVVASSEIHVEVERTSTAKPALTASAGNDSEPNLIDCLMVSPACSTMSIELGPQADRTLGCYVEILKLLSDYDDWRPSLASLLQPIPFPKEALAHEKFTKELKYVIQRFAEDPRQEVHSCLLSVRAGKDGWFQLYSPGGVACDDDGELFASMVHILMGSCYKTKKFLLSLAENKLGPCMLLALRGNQTMVEILCLMLEYNIIDNNDTQLQIISTLESTDVGKRMYEQLCDRQRELKELQRKGGPTRLTLPSKSTDADLARLLSSGSFGNLENLSLAFTNVTSACAEHLIKLPSLKQLNLWSTQFGDAGLRLLSEHLTMLQVLNLCETPVTDAGLLALSSMKSLCSLNMNSTKLSADTYEDLKAKLPNLKEVDVRYTEAW

SEQ ID NO: 17801 - protein, 679 aa, Homo sapiens
  Payload ID: 3572
  Gene Symbol: CMIP
  Gene Name: c-Maf inducing protein
  Uniprot ID: Q8IY22
  ENSP ID: ENSP00000440401
MGQAAEPTGYMENSVSYSAIEDVQLLSWENAPKYCLQLTIPGGTVLLQAANSYLRDQWFHSLQWKKKIYKYKKVLSNPSRWEVVLKEIRTLVDMALTSPLQDDSINQAPLEIVSKLLSENTNLTTQEHENIIVAIAPLLENNHPPPDLCEFFCKHCRERPRSMVVIEVFTPVVQRILKHNMDFGKCPRLRLFTQEYILALNELNAGMEVVKKFIQSMHGPTGHCPHPRVLPNLVAVCLAAIYSCYEEFINSRDNSPSLKEIRNGCQQPCDRKPTLPLRLLHPSPDLVSQEATLSEARLKSVVVASSEIHVEVERTSTAKPALTASAGNDSEPNLIDCLMVSPACSTMSIELGPQADRTLGCYVEILKLLSDYDDWRPSLASLLQPIPFPKEALAHEKFTKELKYVIQRFAEDPRQEVHSCLLSVRAGKDGWFQLYSPGGVACDDDGELFASMVHILMGSCYKTKKFLLSLAENKLGPCMLLALRGNQTMVEILCLMLEYNIIDNNDTQLQIISTLESTDVGKRMYEQLCDRQRELKELQRKGGPTRLTLPSKSTDADLARLLSSGSFGNLENLSLAFTNVTSACAEHLIKLPSLKQLNLWSTQFGDAGLRLLSEHLTMLQVLNLCETPVTDAGLLALSSMKSLCSLNMNSTKLSADTYEDLKAKLPNLKEVDVRYTEAW

SEQ ID NO: 17802 - protein, 773 aa, Homo sapiens
  Payload ID: 3572
  Gene Symbol: CMIP
  Gene Name: c-Maf inducing protein
  Uniprot ID: Q8IY22
  ENSP ID: ENSP00000446100
MDVTSSSGGGGDPRQIEETKPLLGGDVSAPEGTKMGAVPCRRALLLCNGMRYKLLQEGDIQVCVIRHPRTFLSKILTSKFLRRWEPHHLTLADNSLASATPTGYMENSVSYSAIEDVQLLSWENAPKYCLQLTIPGGTVLLQAANSYLRDQWFHSLQWKKKIYKYKKVLSNPSRWEVVLKEIRTLVDMALTSPLQDDSINQAPLEIVSKLLSENTNLTTQEHENIIVAIAPLLENNHPPPDLCEFFCKHCRERPRSMVVIEVFTPVVQRILKHNMDFGKCPRLRLFTQEYILALNELNAGMEVVKKFIQSMHGPTGHCPHPRVLPNLVAVCLAAIYSCYEEFINSRDNSPSLKEIRNGCQQPCDRKPTLPLRLLHPSPDLVSQEATLSEARLKSVVVASSEIHVEVERTSTAKPALTASAGNDSEPNLIDCLMVSPACSTMSIELGPQADRTLGCYVEILKLLSDYDDWRPSLASLLQPIPFPKEALAHEKFTKELKYVIQRFAEDPRQEVHSCLLSVRAGKDGWFQLYSPGGVACDDDGELFASMVHILMGSCYKTKKFLLSLAENKLGPCMLLALRGNQTMVEILCLMLEYNIIDNNDTQLQIISTLESTDVGKRMYEQLCDRQRELKELQRKGGPTRLTLPSKSTDADLARLLSSGSFGNLENLSLAFTNVTSACAEHLIKLPSLKQLNLWSTQFGDAGLRLLSEHLTMLQVLNLCETPVTDAGLLALSSMKSLCSLNMNSTKLSADTYEDLKAKLPNLKEVDVRYTEAW

SEQ ID NO: 17803 - protein, 586 aa, Homo sapiens
  Payload ID: 3572
  Gene Symbol: CMIP
  Gene Name: c-Maf inducing protein
  ENSP ID: ENSP00000478272
MALTSPLQDDSINQAPLEIVSKLLSENTNLTTQEHENIIVAIAPLLENNHPPPDLCEFFCKHCRERPRSMVVIEVFTPVVQRILKHNMDFGKCPRLRLFTQEYILALNELNAGMEVVKKFIQSMHGPTGHCPHPRVLPNLVAVCLAAIYSCYEEFINSRDNSPSLKEIRNGCQQPCDRKPTLPLRLLHPSPDLVSQEATLSEARLKSVVVASSEIHVEVERTSTAKPALTASAGNDSEPNLIDCLMVSPACSTMSIELGPQADRTLGCYVEILKLLSDYDDWRPSLASLLQPIPFPKEALAHEKFTKELKYVIQRFAEDPRQEVHSCLLSVRAGKDGWFQLYSPGGVACDDDGELFASMVHILMGSCYKTKKFLLSLAENKLGPCMLLALRGNQTMVEILCLMLEYNIIDNNDTQLQIISTLESTDVGKRMYEQLCDRQRELKELQRKGGPTRLTLPSKSTDADLARLLSSGSFGNLENLSLAFTNVTSACAEHLIKLPSLKQLNLWSTQFGDAGLRLLSEHLTMLQVLNLCETPVTDAGLLALSSMKSLCSLNMNSTKLSADTYEDLKAKLPNLKEVDVRYTEAW

SEQ ID NO: 17804 - protein, 125 aa, Homo sapiens
  Payload ID: 3572
  Gene Symbol: CMIP
  Gene Name: c-Maf inducing protein
  ENSP ID: ENSP00000478736
MALTSPLQDDSINQAPLEIVSKLLSENTNLTTQEHENIIVAIAPLLENNHPPPDLCEFFCKHCRERPRSMVVIEVFTPVVQRILKHNMVSHPAPTPRPQRPEHEAPRASLAFCVGTDLGNVVGPA

SEQ ID NO: 17805 - protein, 678 aa, Homo sapiens [sequence omitted]

SEQ ID NO: 17806 - protein, 279 aa, Homo sapiens
  Payload ID: 3573
  Gene Symbol: CMSS1
  Gene Name: cms1 ribosomal small subunit homolog (yeast)
  Uniprot ID: Q9BQ75
  ENSP ID: ENSP00000410396
MADDLGDEWWENQPTGAGSSPEASDGEGEGDTEVMQQETVPVPVPSEKTKQPKECFLIQPKERKENTTKTRKRRKKKITDVLAKSEPKPGLPEDLQKLMKDYYSSRRLVIELEELNLPDSCFLKANDLTHSLSSYLKEICPKWVKLRKNHSEKKSVLMLIICSSAVRALELIRSMTAFRGDGKVIKLFAKHIKVQAQVKLLEKRVVHLGVGTPGRIKELVKQGGLNLSPLKFLVFDWNWRDQKLRRMMDIPEIRKEVFELLEMGVLSLCKSESLKLGLF

SEQ ID NO: 17807 - protein, 225 aa, Homo sapiens
  Payload ID: 3573
  Gene Symbol: CMSS1
  Gene Name: cms1 ribosomal small subunit homolog (yeast)
  ENSP ID: ENSP00000417293
MQLVYKNPKECFLIQPKERKENTTKTRKRRKKKITDVLAKSEPKPGLPEDLQKLMKDYYSSRRLVIELEELNLPDSCFLKANDLTHSLSSYLKEICPKWVKLRKNHSEKKSVLMLIICSSAVRALELIRSMTAFRGDGKVIKLFAKHIKVQAQVKLLEKRVVHLGVGTPGRIKELVKQGGLNLSPLKFLVFDWNWRDQKLRRMMDIPEIRKEVFELLEMGVLSLC

SEQ ID NO: 17808 - protein, 38 aa, Homo sapiens
  Payload ID: 3573
  Gene Symbol: CMSS1
  Gene Name: cms1 ribosomal small subunit homolog (yeast)
  ENSP ID: ENSP00000418609
MADDLGDEWWENQPTGAGSSPGPLPVSSRVCASKYLKT

SEQ ID NO: 17809 - protein, 82 aa, Homo sapiens
  Payload ID: 3573
  Gene Symbol: CMSS1
  Gene Name: cms1 ribosomal small subunit homolog (yeast)
  ENSP ID: ENSP00000418762
  MOD_RES (1)..(1): Any amino acid
XEDLQKLMKDYYSSRRLVIELEELNLPDSCFLKANDLTHSLSSYLKEICPKWVKLRKNHSEKKSVLMLIICSSAVRALELIR

SEQ ID NO: 17810 - protein, 25 aa, Homo sapiens
  Payload ID: 3573
  Gene Symbol: CMSS1
  Gene Name: cms1 ribosomal small subunit homolog (yeast)
  ENSP ID: ENSP00000418855
MQQETVPVPVPSEKTKQPKECFLIQ

SEQ ID NO: 17811 - protein, 261 aa, Homo sapiens
  Payload ID: 3573
  Gene Symbol: CMSS1
  Gene Name: cms1 ribosomal small subunit homolog (yeast)
  Uniprot ID: Q9BQ75
  ENSP ID: ENSP00000419161
MHGEASDGEGEGDTEVMQQETVPVPVPSEKTKQPKECFLIQPKERKENTTKTRKRRKKKITDVLAKSEPKPGLPEDLQKLMKDYYSSRRLVIELEELNLPDSCFLKANDLTHSLSSYLKEICPKWVKLRKNHSEKKSVLMLIICSSAVRALELIRSMTAFRGDGKVIKLFAKHIKVQAQVKLLEKRVVHLGVGTPGRIKELVKQGGLNLSPLKFLVFDWNWRDQKLRRMMDIPEIRKEVFELLEMGVLSLCKSESLKLGLF

SEQ ID NO: 17812 - protein, 301 aa, Homo sapiens
  Payload ID: 3574
  Gene Symbol: CDRT1
  Gene Name: CMT1A duplicated region transcript 1
  ENSP ID: ENSP00000261644
  MOD_RES (1)..(1): Any amino acid
XSKAPENEHFLGAASNPEEPWRNSLRCISEMNRLFSGKADITKPGYDPCNLLVDLDDIRDLSSGFSKYRDFIRYLPIHLSKYILSMLGCMRGFPRHLPSWPSSGVSGSIFFFFPGMLDRHTLNKCASVSQHWAAMAQQVKMDLSAHGFIQNQITFLQGSYTRGIDPNYANKVSIPVPKMVDDGKSMRVKHPKWKLRTKNEYNLWTAYQNEETQQVLMEERNVFCGTYNVRILSDTWDQNRVIHYSGGDLIAVSSNRKIHLLDIIQVKAIPVEFRGHAGSVRALFLCEEENFLLSGSYDLSI

SEQ ID NO: 17813 - protein, 252 aa, Homo sapiens
  Payload ID: 3574
  Gene Symbol: CDRT1
  Gene Name: CMT1A duplicated region transcript 1
  Uniprot ID: O95170
  ENSP ID: ENSP00000346416
MDLCKNRLVSGGRDCQVKVWDVDTGKCLKTFRHKDPILATRINDTYIVSSCERGLVKVWHIAMAQLVKTLSGHEGAVKCLFFDQWHLLSGSTDGLVMAWSMVGKYERCLMAFKHPKEVLDVSLLFLRVISACADGKIRIYNFFNGNCMKVIKANGRGDPVLSFFIQGNRISVCHISTFAKRINVGWNGIEPSATAQGGNASLTECAHVRLHIAGHLPASRLPVAAVQPMTGGMAPTTAPTHVLAMLILFSGV

SEQ ID NO: 17814 - protein, 714 aa, Homo sapiens
  Payload ID: 3574
  Gene Symbol: CDRT1
  Gene Name: CMT1A duplicated region transcript 1
  ENSP ID: ENSP00000379026
MENLESRLKNAPYFRCEKGTDSIPLCRKCETRVLAWKIFSTKEWFCRINDISQRRFLVGILKQLNSLYLLHYFQNILQTTQGKDFIYNRSRIDLSKKEGKVVKSSLNQMLDKTVEQKMKEILYWFANSTQWTKANYTLLLLQMCNPKLLLTAANVIRVLFLREENNISGLNQDITDVCFSPEKDHSSKSATSQVYWTAKTQHTSLPLSKAPENEHFLGAASNPEEPWRNSLRCISEMNRLFSGKADITKPGYDPCNLLVDLDDIRDLSSGFSKYRDFIRYLPIHLSKYILRMLDRHTLNKCASVSQHWAAMAQQVKMDLSAHGFIQNQITFLQGSYTRGIDPNYANKVSIPVPKMVDDGKSMRVKHPKWKLRTKNEYNLWTAYQNEETQQVLMEERNVFCGTYNVRILSDTWDQNRVIHYSGGDLIAVSSNRKIHLLDIIQVKAIPVEFRGHAGSVRALFLCEEENFLLSGSYDLSIRYWDLKSGVCTRIFGGHQGTITCMDLCKNRLVSGGRDCQVKVWDVDTGKCLKTFRHKDPILATRINDTYIVSSCERGLVKVWHIAMAQLVKTLSGHEGAVKCLFFDQWHLLSGSTDGLVMAWSMVGKYERCLMAFKHPKEVLDVSLLFLRVISACADGKIRIYNFFNGNCMKVIKANGRGDPVLSFFIQGNSDHLRKTYLPVEWKTDGRRVRKKAEKSAGMCCNNPRKTDDGLKLKH

SEQ ID NO: 17815 - protein, 752 aa, Homo sapiens
  Payload ID: 3574
  Gene Symbol: CDRT1
  Gene Name: CMT1A duplicated region transcript 1
  Uniprot ID: O95170
  ENSP ID: ENSP00000379242
MENLESRLKNAPYFRCEKGTDSIPLCRKCETRVLAWKIFSTKEWFCRINDISQRRFLVGILKQLNSLYLLHYFQNILQTTQGKDFIYNRSRIDLSKKEGKVVKSSLNQMLDKTVEQKMKEILYWFANSTQWTKANYTLLLLQMCNPKLLLTAANVIRVLFLREENNISGLNQDITDVCFSPEKDHSSKSATSQVYWTAKTQHTSLPLSKAPENEHFLGAASNPEEPWRNSLRCISEMNRLFSGKADITKPGYDPCNLLVDLDDIRDLSSGFSKYRDFIRYLPIHLSKYILRMLDRHTLNKCASVSQHWAAMAQQVKMDLSAHGFIQNQITFLQGSYTRGIDPNYANKVSIPVPKMVDDGKSMRVKHPKWKLRTKNEYNLWTAYQNEETQQVLMEERNVFCGTYNVRILSDTWDQNRVIHYSGGDLIAVSSNRKIHLLDIIQVKAIPVEFRGHAGSVRALFLCEEENFLLSGSYDLSIRYWDLKSGVCTRIFGGHQGTITCMDLCKNRLVSGGRDCQVKVWDVDTGKCLKTFRHKDPILATRINDTYIVSSCERGLVKVWHIAMAQLVKTLSGHEGAVKCLFFDQWHLLSGSTDGLVMAWSMVGKYERCLMAFKHPKEVLDVSLLFLRVISACADGKIRIYNFFNGNCMKVIKANGRGDPVLSFFIQGNRISVCHISTFAKRINVGWNGIEPSATAQGGNASLTECAHVRLHIAGHLPASRLPVAAVQPMTGGMAPTTAPTHVLAMLILFSGV

SEQ ID NO: 17816 - protein, 78 aa, Homo sapiens
  Payload ID: 3574
  Gene Symbol: CDRT1
  Gene Name: CMT1A duplicated region transcript 1
  ENSP ID: ENSP00000462959
MDLCKNRLVSGGRDCQVKVWDVDTGKCLKTFRHKDPILATRINDTYIVSSCERGLVKVWHIAMAQLVKNFSLPHQHIC

SEQ ID NO: 17817 - protein, 87 aa, Homo sapiens
  Payload ID: 3574
  Gene Symbol: CDRT1
  Gene Name: CMT1A duplicated region transcript 1
  ENSP ID: ENSP00000463684
MDLCKNRLVSGGRDCQVKVWDVDTGKCLKTFRHKDPILATRINDTYIVSSCERGLVKVWHIAMAQLVKEALMAWSWPGAWWGSTSAA

SEQ ID NO: 17818 - protein, 70 aa, Homo sapiens
  Payload ID: 3574
  Gene Symbol: CDRT1
  Gene Name: CMT1A duplicated region transcript 1
  ENSP ID: ENSP00000468137
  MOD_RES (1)..(1): Any amino acid
XNCMKVIKANGRGDPVLSFFIQGNSDHLRKTYLPVEWKTDGRRVRKKAEKSAGMCCNNPRKTDDGLKLKH

SEQ ID NO: 17819 - protein, 243 aa, Homo sapiens
  Payload ID: 3574
  Gene Symbol: CDRT1
  Gene Name: CMT1A duplicated region transcript 1
  ENSP ID: ENSP00000486674
MSPDQFLLTVSALQHARNSGEFAYPCRPQTEITDVWGPSISYPRKVLNFKGKSIQRAVDRLRLSNPPIDVKRTSIPLEIQKLQPNLKISLHSPRAQSTIPEPMIIRSRFSGSLKGGDQVTSSIERAVCSTGPLTSMQVIKPNRMLAPQVGTATLSLKKERPRIYTALDPFRVNAEFVLLTVKEEKEHQEAKMKEYQARESTGVVDPGKASKAAWIRKIKGLPIDNFTKQGKTAAPELGQNVFI

SEQ ID NO: 17820 - protein, 122 aa, Homo sapiens
  Payload ID: 3575
  Gene Symbol: CDRT15
  Gene Name: CMT1A duplicated region transcript 15
  ENSP ID: ENSP00000399575
MPKKAHPSPQTPVARCNKAHPAPGPCAEVRALPAPAAEPEPAWEEAPPERALELEGAPAKDQTNEELPEITEVPESIKRRLGRRVPAATPAPRGNLLLQAWMRVHSWASRLFAPNVLPGTGP

SEQ ID NO: 17821 - protein, 188 aa, Homo sapiens
  Payload ID: 3575
  Gene Symbol: CDRT15
  Gene Name: CMT1A duplicated region transcript 15
  Uniprot ID: Q96T59
  ENSP ID: ENSP00000402355
MFSCCFPTSRGCCFRNGGSESLFRRCRRRLIPHPRRLSPVVIRRIQVPQDSLGQALAGQATPEIPLGLQLHTVLVQEIQELIEAQTLAPGPCAEVRALPAPAAEPEPAWEEAPPERALELEGAPAKDQTNEELPEITEVPESIKRRLGRRVPAATPAPRGNLLLQAWMRVHSWASRLFAPNVLPGTGP

SEQ ID NO: 17822 - protein, 281 aa, Homo sapiens
  Payload ID: 3576
  Gene Symbol: CDRT15L2
  Gene Name: CMT1A duplicated region transcript 15-like 2
  Uniprot ID: A8MXV6
  ENSP ID: ENSP00000382000
MFSCCFPTSRGCCFRNGGSESLFRQCRRRLIPHPRRLWPFVRRRTQVPQDSPGQALAGQATPEIPSGLPLHIVLVQEEIREPMEAQTHAPGPYADIAALAAPAVEPKPAWEEPPPERALEVEGAPAKDQPSQELPEIMAPTVATGLNAGAENVAGERSGREGVTSTAPASRSHAAPSPGHGGKHGGGDQGIQTGLLYLAGERLLSFAGTTALLLQGLFIVLILVGYISVKVMLKSIKTRLGRRVPAAPPALRRNLLLQAWKCVCNWASRLFAPNVLPRTGS

SEQ ID NO: 17823 - protein, 24 aa, Homo sapiens
  Payload ID: 3577
  Gene Symbol: CDRT4
  Gene Name: CMT1A duplicated region transcript 4
  ENSP ID: ENSP00000452374
MDARRMKKEEGLTENTGLPRKLLE

SEQ ID NO: 17824 - protein, 152 aa, Homo sapiens
  Payload ID: 3577
  Gene Symbol: CDRT4
  Gene Name: CMT1A duplicated region transcript 4
  ENSP ID: ENSP00000482523
MDARRMKKEEGLTENTGLPRKLLEKHDPWPAYVTYTSQTVKRLIEKSKTRELECMRALEERPWASRQNKPSSVIQPKRRKSSKSSGKAVFRDTLSESTLSMWGAYSVLAMAPTMIPEPTHLHADSRDCPTENYNKIIFARKPMMRMLPTVRY

SEQ ID NO: 17825 - protein, 475 aa, Homo sapiens
  Payload ID: 3578
  Gene Symbol: CNDP2
  Gene Name: CNDP dipeptidase 2 (metallopeptidase M20 family)
  Uniprot ID: Q96KP4
  ENSP ID: ENSP00000325548
MAALTTLFKYIDENQDRYIKKLAKWVAIQSVSAWPEKRGEIRRMMEVAAADVKQLGGSVELVDIGKQKLPDGSEIPLPPILLGRLGSDPQKKTVCIYGHLDVQPAALEDGWDSEPFTLVERDGKLYGRGSTDDKGPVAGWINALEAYQKTGQEIPVNVRFCLEGMEESGSEGLDELIFARKDTFFKDVDYVCISDNYWLGKKKPCITYGLRGICYFFIEVECSNKDLHSGVYGGSVHEAMTDLILLMGSLVDKRGNILIPGINEAVAAVTEEEHKLYDDIDFDIEEFAKDVGAQILLHSHKKDILMHRWRYPSLSLHGIEGAFSGSGAKTVIPRKVVGKFSIRLVPNMTPEVVGEQVTSYLTKKFAELRSPNEFKVYMGHGGKPWVSDFSHPHYLAGRRAMKTVFGVEPDLTREGGSIPVTLTFQEATGKNVMLLPVGSADDGAHSQNEKLNRYNYIEGTKMLAAYLYEVSQLKD

SEQ ID NO: 17826 - protein, 391 aa, Homo sapiens
  Payload ID: 3578
  Gene Symbol: CNDP2
  Gene Name: CNDP dipeptidase 2 (metallopeptidase M20 family)
  Uniprot ID: Q96KP4
  ENSP ID: ENSP00000325756
MAALTTLFKYIDENQDRYIKKLAKWVAIQSVSAWPEKRGEIRRMMEVAAADVKQLGGSVELVDIGKQKEIPVNVRFCLEGMEESGSEGLDELIFARKDTFFKDVDYVCISDNYWLGKKKPCITYGLRGICYFFIEVECSNKDLHSGVYGGSVHEAMTDLILLMGSLVDKRGNILIPGINEAVAAVTEEEHKLYDDIDFDIEEFAKDVGAQILLHSHKKDILMHRWRYPSLSLHGIEGAFSGSGAKTVIPRKVVGKFSIRLVPNMTPEVVGEQVTSYLTKKFAELRSPNEFKVYMGHGGKPWVSDFSHPHYLAGRRAMKTVFGVEPDLTREGGSIPVTLTFQEATGKNVMLLPVGSADDGAHSQNEKLNRYNYIEGTKMLAAYLYEVSQLKD

SEQ ID NO: 17827 - protein, 88 aa, Homo sapiens
  Payload ID: 3578
  Gene Symbol: CNDP2
  Gene Name: CNDP dipeptidase 2 (metallopeptidase M20 family)
  ENSP ID: ENSP00000461941
MMEVAAADVKQLGGSVELVDIGKQKLPDGSEIPLPPILLGRLGSDPQKKTVCIYGHLDVQPAALEDGWDSEPFTLVERDGKLYGRGST

SEQ ID NO: 17828 - protein, 109 aa, Homo sapiens
  Payload ID: 3578
  Gene Symbol: CNDP2
  Gene Name: CNDP dipeptidase 2 (metallopeptidase M20 family)
  ENSP ID: ENSP00000462034
DELIFARKDTFFKDVDYVCISDNYWLGKKKPCITYGLRGICYFFIEVECSNKDLHSGVYGGSVHEAMTDLILLMGSLFPFPLVRSSMTLENRHKCIQLSTGGATRWAYE

SEQ ID NO: 17829 - protein, 475 aa, Homo sapiens; identical to SEQ ID NO: 17825
  Payload ID: 3578
  Gene Symbol: CNDP2
  Gene Name: CNDP dipeptidase 2 (metallopeptidase M20 family)
  Uniprot ID: Q96KP4
  ENSP ID: ENSP00000462311

SEQ ID NO: 17830 - protein, 55 aa, Homo sapiens
  Payload ID: 3578
  Gene Symbol: CNDP2
  Gene Name: CNDP dipeptidase 2 (metallopeptidase M20 family)
  ENSP ID: ENSP00000462626
MAALTTLFKYIDENQDRYIKKLAKWVAIQSVSAWPEKRGEIRRMMEVAAADVKQL

SEQ ID NO: 17831 - protein, 149 aa, Homo sapiens
  Payload ID: 3578
  Gene Symbol: CNDP2
  Gene Name: CNDP dipeptidase 2 (metallopeptidase M20 family)
  ENSP ID: ENSP00000462673
MAALTTLFKYIDENQDRYIKKLAKWVAIQSVSAWPEKRGEIRRMMEVAAADVKQLGGSVELVDIGKQKLPDGSEIPLPPILLGRLGSDPQKKTVCIYGHLDVQPAALEDGWDSEPFTLVERDGKLYGRGSTDDKGPVAGWINALEAYQK

SEQ ID NO: 17832 - protein, 128 aa, Homo sapiens
  Payload ID: 3578
  Gene Symbol: CNDP2
  Gene Name: CNDP dipeptidase 2 (metallopeptidase M20 family)
  ENSP ID: ENSP00000463182
MAALTTLFKYIDENQDRYIKKLAKWVAIQSVSAWPEKRGEIRRMMEVAAADVKQLGGSVELVDIGKQKLPDGSEIPLPPILLGRLGSDPQKKTVCIYGHLDVQPAALEDGWDSEPFTLVERDGKLYGR

SEQ ID NO: 17833 - protein, 249 aa, Homo sapiens
  Payload ID: 3578
  Gene Symbol: CNDP2
  Gene Name: CNDP dipeptidase 2 (metallopeptidase M20 family)
  ENSP ID: ENSP00000463222
MAALTTLFKYIDENQDRYIKKLAKWVAIQSVSAWPEKRGEIRRMMEVAAADVKQLGGSVELVDIGKQKLPDGSEIPLPPILLGRLGSDPQKKTVCIYGHLDVQPAALEDGWDSEPFTLVERDGKLYGRGSTDDKGPVAGWINALEAYQKTGQEIPVNVRFCLEGMEESGSEGLDELIFARKDTFFKDVDYVCISDNYWLGKKKPCITYGLRGICYFFIEVECSNKDLHSGVYGGSVHEAMTDLILLMGS

SEQ ID NO: 17834 - protein, 138 aa, Homo sapiens
  Payload ID: 3578
  Gene Symbol: CNDP2
  Gene Name: CNDP dipeptidase 2 (metallopeptidase M20 family)
  ENSP ID: ENSP00000463314
MAALTTLFKYIDENQDRYIKPVQLQQPQRVSLECGNVTGASSPSRTPFQNPSLLLVHKQKLAKWVAIQSVSAWPEKRGEIRRMMEVAAADVKQLGGSVELVDIGKQKLPDGSEIPLPPILLGRLGSDPQKKTVCIYGH

SEQ ID NO: 17835 - protein, 123 aa, Homo sapiens
  Payload ID: 3578
  Gene Symbol: CNDP2
  Gene Name: CNDP dipeptidase 2 (metallopeptidase M20 family)
  ENSP ID: ENSP00000463702
MAALTTLFKYIDENQDRYIKKLAKWVAIQSVSAWPEKRGEIRRMMEVAAADVKQLGGSVELVDIGKQKLPDGSEIPLPPILLGRLGSDPQKKTVCIYGHLDVQPAALEDGWDSEPFTLVERDG

SEQ ID NO: 17836 - protein, 89 aa, Homo sapiens
  Payload ID: 3578
  Gene Symbol: CNDP2
  Gene Name: CNDP dipeptidase 2 (metallopeptidase M20 family)
  ENSP ID: ENSP00000463816
MAALTTLFKYIDENQDRYIKKLAKWVAIQSVSAWPEKRGEIRRMMEVAAADVKQLGGSVELVDIGKQKLPDGSEIPLPPILLGRLGSDP

SEQ ID NO: 17837 - protein, 122 aa, Homo sapiens
  Payload ID: 3578
  Gene Symbol: CNDP2
  Gene Name: CNDP dipeptidase 2 (metallopeptidase M20 family)
  ENSP ID: ENSP00000464014
MAALTTLFKYIDENQDRYIKKLAKWVAIQSVSAWPEKRGEIRRMMEVAAADVKQLGGSVELVDIGKQKLPDGSEIPLPPILLGRLGSDPQKKTVCIYGHLDVQPAALEDGWDSEPFTLVERD

SEQ ID NO: 17838 - protein, 138 aa, Homo sapiens
  Payload ID: 3578
  Gene Symbol: CNDP2
  Gene Name: CNDP dipeptidase 2 (metallopeptidase M20 family)
  ENSP ID: ENSP00000464122
MAALTTLFKYIDENQDRYIKKLAKWVAIQSVSAWPEKRGEIRRMMEVAAADVKQLGGSVELVDIGKQKEIPVNVRFCLEGMEESGSEGLDELIFARKDTFFKDVDYVCISDNYWLGKKKPCITYGLRGICYFFIEVEC

SEQ ID NO: 17839 - protein, 134 aa, Homo sapiens
  Payload ID: 3578
  Gene Symbol: CNDP2
  Gene Name: CNDP dipeptidase 2 (metallopeptidase M20 family)
  ENSP ID: ENSP00000464151
MAALTTLFKYIDENQDRYIKKLAKWVAIQSVSAWPEKRGEIRRMMEVAAADVKQLGGSVELVDIGKQKLPDGSEIPLPPILLGRLGSDPQKKTVCIYGHLDVQPAALEDGWDSEPFTLVERDGKLYGRGSTDDK

SEQ ID NO: 17840 - protein, 204 aa, Homo sapiens
  Payload ID: 3578
  Gene Symbol: CNDP2
  Gene Name: CNDP dipeptidase 2 (metallopeptidase M20 family)
  ENSP ID: ENSP00000464214
MPALRTRRGWWPGRPRGGPAPGVVAGTRGTEPAPRLLLVTGPCLVGLPSQLPDGSEIPLPPILLGRLGSDPQKKTVCIYGHLDVQPAALEDGWDSEPFTLVERDGKLYGRGSTDDKGPVAGWINALEAYQKTGQEIPVNVRFCLEGMEESGSEGLDELIFARKDTFFKDVDYVCISDNYWLGKKKPCITYGLRGICYFFIEVEC

SEQ ID NO: 17841 - protein, 89 aa, Homo sapiens
  Payload ID: 3578
  Gene Symbol: CNDP2
  Gene Name: CNDP dipeptidase 2 (metallopeptidase M20 family)
  ENSP ID: ENSP00000464319
MAALTTLFKYIDENQDRYIKVLSVKQYERVSLFPQYKQFLKSLTQSTRDGSVLFPISLFNCSSHRGNSQNGWLSRVCLRGRRREAKSGG

SEQ ID NO: 17842 - protein, 124 aa, Homo sapiens
  Payload ID: 3578
  Gene Symbol: CNDP2
  Gene Name: CNDP dipeptidase 2 (metallopeptidase M20 family)
  ENSP ID: ENSP00000479635
EIRRMMEVAAADVKQLGGSVELVDIGKQKLPDGSEIPLPPILLGRLGSDPQKKTVCIYGHLDVQPAALEDGWDSEPFTLVERDGKLYGRGSTDDKGPVAGWINALEAYQKTGQLLKGHNIGDSA

SEQ ID NO: 17843 - protein, 157 aa, Homo sapiens
  Payload ID: 3578
  Gene Symbol: CNDP2
  Gene Name: CNDP dipeptidase 2 (metallopeptidase M20 family)
  ENSP ID: ENSP00000482227
MAALTTLFKYIDENQDRYIKKLAKWVAIQSVSAWPEKRGEIRRMMEVAAADVKQLGGSVELVDIGKQKLPDGSEIPLPPILLGRLGSDPQKKTVCIYGHLDVQPAALEDGWDSEPFTLVERDGKLYGRGSTDDKGPVAGWINALEAYQKTGQVCPPR

SEQ ID NO: 17844 - protein, 178 aa, Homo sapiens
  Payload ID: 3579
  Gene Symbol: CNKSR3
  Gene Name: CNKSR family member 3
  ENSP ID: ENSP00000393225
NIKPGEGLGMYIKSTYDGLHVITGTTENVGWQLKNLVKKLRENPTGVVLLLKKRPTGSFNFTPAPLKNLRWKPPLVQTSPPPATTQSPESTMDTSLKKEKSAILDLYIPPPPAVPYSPRDENGSFVYGGSSKCKQPLPGPKGSESPNSFLDQESRRRRFTIADSDQLPGYSVETNILP

SEQ ID NO: 17845 - protein, 475 aa, Homo sapiens
  Payload ID: 3579
  Gene Symbol: CNKSR3
  Gene Name: CNKSR family member 3
  ENSP ID: ENSP00000418975
MKNLVLKLRASSHNLQNYISSRRKSPAYDGNTSRKAPNEFLTSVVELIGAAKALLAWLDRAPFTGITDFSVTKNKIIQLCLDLTTTVQKDCFVAEMEDKVLTVVKVLNGICDKTIRSTTDPVMSQCACLEEVHLPNIKPGEGLGMYIKSTYDGLHVITGTTENSPADRSQKIHAGDEVIQVNQQTVVGWQLKNLVKKLRENPTGVVLLLKKRPTGSFNFTPAPLKNLRWKPPLVQTSPPPATTQSPESTMDTSLKKEKSAILDLYIPPPPAVPYSPRDENGSFVYGGSSKCKQPLPGPKGSESPNSFLDQESRRRRFTIADSDQLPGYSVETNILPTKMREKTPSYGKPRPLSMPADGNWMGIVDPFARPRGHGRKGEDALCRYFSNERIPPIIEESSSPPYRFSRPTTERHLVRGADYIRGSRCYINSDLHSSATIPFQEEGTKKKSGSSATKSSSTEPSLLVSWFTRLKLLTH

SEQ ID NO: 17846 - protein, 555 aa, Homo sapiens
  Payload ID: 3579
  Gene Symbol: CNKSR3
  Gene Name: CNKSR family member 3
  Uniprot ID: Q6P9H4
  ENSP ID: ENSP00000475915
MEPVTKWSPKQVVDWTRGLDDCLQQYVHKFEREKINGEQLLQISHQDLEELGVTRIGHQELVLEAVDLLCALNYGLETDNMKNLVLKLRASSHNLQNYISSRRKSPAYDGNTSRKAPNEFLTSVVELIGAAKALLAWLDRAPFTGITDFSVTKNKIIQLCLDLTTTVQKDCFVAEMEDKVLTVVKVLNGICDKTIRSTTDPVMSQCACLEEVHLPNIKPGEGLGMYIKSTYDGLHVITGTTENSPADRSQKIHAGDEVIQVNQQTVVGWQLKNLVKKLRENPTGVVLLLKKRPTGSFNFTPAPLKNLRWKPPLVQTSPPPATTQSPESTMDTSLKKEKSAILDLYIPPPPAVPYSPRDENGSFVYGGSSKCKQPLPGPKGSESPNSFLDQESRRRRFTIADSDQLPGYSVETNILPTKMREKTPSYGKPRPLSMPADGNWMGIVDPFARPRGHGRKGEDALCRYFSNERIPPIIEESSSPPYRFSRPTTERHLVRGADYIRGSRCYINSDLHSSATIPFQEEGTKKKSGSSATKSSSTEPSLLVSWFTRLKLLTH

SEQ ID NO: 17847 - protein, 899 aa, Homo sapiens
  Payload ID: 3579
  Gene Symbol: CNKSR3
  Gene Name: CNKSR family member 3
  ENSP ID: ENSP00000478800
MEPVTKWSPKQVVDWTRGLDDCLQQYVHKFEREKINGEQLLQISHQDLEELGVTRIGHQELVLEAVDLLCALNYGLETDNMKNLVLKLRASSHNLQNYISSRRKSPAYDGNTSRKAPNEFLTSVVELIGAAKALLAWLDRAPFTGITDFSVTKNKIIQLCLDLTTTVQKDCFVAEMEDKVLTVVKVLNGICDKTIRSTTDPVMSQCACLEEVHLPNIKPGEGLGMYIKSTYDGLHVITGTTENSPADRSQKIHAGDEVIQVNQQTVVGWQLKNLVKKLRENPTGVVLLLKKRPTGSFNFTPAPLKNLRWKPPLVQTSPPPATTQSPESTMDTSLKKEKSAILDLYIPPPPAVPYSPRDENGSFVYGGSSKCKQPLPGPKGSESPNSFLDQESRRRRFTIADSDQLPGYSVETNILPTKMREKTPSYGKPRPLSMPADGNWMGIVDPFARPRGHGRKAFVSTKMTSYMAIDGSALVPLRQKPRRKTQGFLTMSRRRISCKDLGHADCQGWLYKKKEKGSFLSNKWKKFWVILKGSSLYWYSNQMAEKADGFVNLPDFTVERASECKKKHAFKISHPQIKTFYFAAENVQEMNVWLNKLGSAVIHQESTTKDEECYSESEQEDPEIAAETPPPPHASQTQSLTAQQASSSSPSLSGTSYSFSSLENTVKTPSSFPSSLSKERQSLPDTVNSLSAAEDEGQPITFAVQVHSPVPSEAGIHKALENSFVTSESGFLNSLSSDDTSSLSSNHDHLTVPDKPAGSKIMDKEETKVSEDDEMEKLYKSLEQASLSPLGDRRPSTKKELRKSFVKRCKNPSINEKLHKIRTLNSTLKCKEHDLAMINQLLDDPKLTARKYREWKVMNTLLIQDIYQQQRASPAPDDTDDTPQELKKSPSSPSVENSI

SEQ ID NO: 17848 - protein, 564 aa, Homo sapiens
  Payload ID: 3580
  Gene Symbol: COASY
  Gene Name: CoA synthase
  Uniprot ID: Q13057
  ENSP ID: ENSP00000377406
MAVFRSGLLVLTTPLASLAPRLASILTSAARLVNHTLYVHLQPGMSLEGPAQPQSSPVQATFEVLDFITHLYAGADVHRHLDVRILLTNIRTKSTFLPPLPTSVQNLAHPPEVVLTDFQTLDGSQYNPVKQQLVRYATSCYSCCPRLASVLLYSDYGIGEVPVEPLDVPLPSTIRPASPVAGSPKQPVRGYYRGAVGGTFDRLHNAHKVLLSVACILAQEQLVVGVADKDLLKSKLLPELLQPYTERVEHLSEFLVDIKPSLTFDVIPLLDPYGPAGSDPSLEFLVVSEETYRGGMAINRFRLENDLEELALYQIQLLKDLRHTENEEDKVSSSSFRQRMLGNLLRPPYERPELPTCLYVIGLTGISGSGKSSIAQRLKGLGAFVIDSDHLGHRAYAPGGPAYQPVVEAFGTDILHKDGIINRKVLGSRVFGNKKQLKILTDIMWPIIAKLAREEMDRAVAEGKRVCVIDAAVLLEAGWQNLVHEVWTAVIPETEAVRRIVERDGLSEAAAQSRLQSQMSGQQLVEQSHVVLSTLWEPHITQRQVEKAWALLQKRIPKTHQALD

SEQ ID NO: 17849 - protein, 564 aa, Homo sapiens; identical to SEQ ID NO: 17848
  Payload ID: 3580
  Gene Symbol: COASY
  Gene Name: CoA synthase
  Uniprot ID: Q13057
  ENSP ID: ENSP00000393564

SEQ ID NO: 17850 - protein, 593 aa, Homo sapiens
  Payload ID: 3580
  Gene Symbol: COASY
  Gene Name: CoA synthase
  Uniprot ID: Q13057
  ENSP ID: ENSP00000464814
MRTPRLRAQPRGAVYQAPSPPPAPVGLGSMAVFRSGLLVLTTPLASLAPRLASILTSAARLVNHTLYVHLQPGMSLEGPAQPQSSPVQATFEVLDFITHLYAGADVHRHLDVRILLTNIRTKSTFLPPLPTSVQNLAHPPEVVLTDFQTLDGSQYNPVKQQLVRYATSCYSCCPRLASVLLYSDYGIGEVPVEPLDVPLPSTIRPASPVAGSPKQPVRGYYRGAVGGTFDRLHNAHKVLLSVACILAQEQLVVGVADKDLLKSKLLPELLQPYTERVEHLSEFLVDIKPSLTFDVIPLLDPYGPAGSDPSLEFLVVSEETYRGGMAINRFRLENDLEELALYQIQLLKDLRHTENEEDKVSSSSFRQRMLGNLLRPPYERPELPTCLYVIGLTGISGSGKSSIAQRLKGLGAFVIDSDHLGHRAYAPGGPAYQPVVEAFGTDILHKDGIINRKVLGSRVFGNKKQLKILTDIMWPIIAKLAREEMDRAVAEGKRVCVIDAAVLLEAGWQNLVHEVWTAVIPETEAVRRIVERDGLSEAAAQSRLQSQMSGQQLVEQSHVVLSTLWEPHITQRQVEKAWALLQKRIPKTHQALD

SEQ ID NO: 17851 - protein, 219 aa, Homo sapiens
  Payload ID: 3580
  Gene Symbol: COASY
  Gene Name: CoA synthase
  ENSP ID: ENSP00000466838
MAVFRSGLLVLTTPLASLAPRLASILTSAARLVNHTLYVHLQPGMSLEGPAQPQSSPVQATFEVLDFITHLYAGADVHRHLDVRILLTNIRTKSTFLPPLPTSVQNLAHPPEVVLTDFQTLDGSQYNPVKQQLVRYATSCYSCCPRLASVLLYSDYGIGEVPVEPLDVPLPSTIRPASPVAGSPKQPVRGYYRGAVGGTFDRLHNAHKVLLSVACILAQ

SEQ ID NO: 17852 - protein, 90 aa, Homo sapiens
  Payload ID: 3580
  Gene Symbol: COASY
  Gene Name: CoA synthase
  ENSP ID: ENSP00000467174
MAVFRSGLLVLTTPLASLAPRLASILTSAARLVNHTLYVHLQPGMSLEGPAQPQSSPVQATFEVLDFITHLYAGADVHRHLDVRILLTNI

SEQ ID NO: 17853 - protein, 96 aa, Homo sapiens
  Payload ID: 3580
  Gene Symbol: COASY
  Gene Name: CoA synthase
  ENSP ID: ENSP00000467322
MRTPRLRAQPRGAVYQAPSPPPAPVVQNLAHPPEVVLTDFQTLDGSQYNPVKQQLVRYATSCYSCCPRLASVLLYSDYGIGEVPVEPLDVPLPSTI

SEQ ID NO: 17854 - protein, 98 aa, Homo sapiens
  Payload ID: 3580
  Gene Symbol: COASY
  Gene Name: CoA synthase
  ENSP ID: ENSP00000467519
MRTPRLRAQPRGAVYQAPSPPPAPVGLGSMAVFRSGLLVLTTPLASLAPRLASILTSAARLVNHTLYVHLQPGMSLEGPAQPQSSPVQATFEVLDFIT

SEQ ID NO: 17855 - protein, 115 aa, Homo sapiens
  Payload ID: 3580
  Gene Symbol: COASY
  Gene Name: CoA synthase
  ENSP ID: ENSP00000467687
MAINRFRLENDLEELALYQIQLLKDLRHTENEEDKVSSSSFRQRMLGNLLRPPYERPELPTCLYVIGLTGISGSGKSSIAQRLKGLGAFVIDSDHLGHRAYAPGGPAYQPVVEAF

SEQ ID NO: 17856 - protein, 147 aa, Homo sapiens
  Payload ID: 3580
  Gene Symbol: COASY
  Gene Name: CoA synthase
  ENSP ID: ENSP00000468583
MAVFRSGLLVLTTPLASLAPRLASILTSAARLVNHTLYVHLQPGMSLEGPAQPQSSPVQATFEVLDFITHLYAGADVHRHLDVRILLTNIRTKSTFLPPLPTSVQNLAHPPEVVLTDFQTLDGSQYNPVKQQLVRYATSCYSCCPRL

SEQ ID NO: 17857 - protein, 128 aa, Homo sapiens
  Payload ID: 3580
  Gene Symbol: COASY
  Gene Name: CoA synthase
  ENSP ID: ENSP00000468755
MRTPRLRAQPRGAVYQAPSPPPAPVGLGSMAVFRSGLLVLTTPLASLAPRLASILTSAARLVNHTLYVHLQPGMSLEGPAQPQSSPVQATFEVLDFITHLYAGADVHRHLDVRILLTNIRTKSTFLPP

SEQ ID NO: 17858 - protein, 608 aa, Homo sapiens
  Payload ID: 3581
  Gene Symbol: CARM1
  Gene Name: coactivator-associated arginine methyltransferase 1
  Uniprot ID: Q86X55
  ENSP ID: ENSP00000325690
MAAAAAAVGPGAGGAGSAVPGGAGPCATVSVFPGARLLTIGDANGEIQRHAEQQALRLEVRAGPDSAGIALYSHEDVCVFKCSVSRETECSRVGKQSFIITLGCNSVLIQFATPNDFCSFYNILKTCRGHTLERSVFSERTEESSAVQYFQFYGYLSQQQNMMQDYVRTGTYQRAILQNHTDFKDKIVLDVGCGSGILSFFAAQAGARKIYAVEASTMAQHAEVLVKSNNLTDRIVVIPGKVEEVSLPEQVDIIISEPMGYMLFNERMLESYLHAKKYLKPSGNMFPTIGDVHLAPFTDEQLYMEQFTKANFWYQPSFHGVDLSALRGAAVDEYFRQPVVDTFDIRILMAKSVKYTVNFLEAKEGDLHRIEIPFKFHMLHSGLVHGLAFWFDVAFIGSIMTVWLSTAPTEPLTHWYQVRCLFQSPLFAKAGDTLSGTCLLIANKRQSYDISIVAQVDQTGSKSSNLLDLKNPFFRYTGTTPSPPPGSHYTSPSENMWNTGSTYNLSSGMAVAGMPTAYDLSSVIASGSSVGHNNLIPLANTGIVNHTHSRMGSIMSTGIVQGSSGAQGSGGGSTSAHYAVNSQFTMGGPAISMASPMSIPTNTMHYGS

SEQ ID NO: 17859 - protein, 585 aa, Homo sapiens
  Payload ID: 3581
  Gene Symbol: CARM1
  Gene Name: coactivator-associated arginine methyltransferase 1
  Uniprot ID: Q86X55
  ENSP ID: ENSP00000340934
MAAAAAAVGPGAGGAGSAVPGGAGPCATVSVFPGARLLTIGDANGEIQRHAEQQALRLEVRAGPDSAGIALYSHEDVCVFKCSVSRETECSRVGKQSFIITLGCNSVLIQFATPNDFCSFYNILKTCRGHTLERSVFSERTEESSAVQYFQFYGYLSQQQNMMQDYVRTGTYQRAILQNHTDFKDKIVLDVGCGSGILSFFAAQAGARKIYAVEASTMAQHAEVLVKSNNLTDRIVVIPGKVEEVSLPEQVDIIISEPMGYMLFNERMLESYLHAKKYLKPSGNMFPTIGDVHLAPFTDEQLYMEQFTKANFWYQPSFHGVDLSALRGAAVDEYFRQPVVDTFDIRILMAKSVKYTVNFLEAKEGDLHRIEIPFKFHMLHSGLVHGLAFWFDVAFIGSIMTVWLSTAPTEPLTHWYQVRCLFQSPLFAKAGDTLSGTCLLIANKRQSYDISIVAQVDQTGSKSSNLLDLKNPFFRYTGTTPSPPPGSHYTSPSENMWNTGSTYNLSSGMAVAGMPTAYDLSSVIASGSSVGHNNLIPLGSSGAQGSGGGSTSAHYAVNSQFTMGGPAISMASPMSIPTNTMHYGS

SEQ ID NO: 17860 - protein, 111 aa, Homo sapiens
  Payload ID: 3581
  Gene Symbol: CARM1
  Gene Name: coactivator-associated arginine methyltransferase 1
  ENSP ID: ENSP00000464852
AEQQALRLEVRAGPDSAGIALYSHEDVCVFKCSVSRETECSRVGKQSFIITLGCNSVLIQFATPNDFCSFYNILKTCRGHTLERSVFSERTEESSAVQYFQMRKLRLREVK

SEQ ID NO: 17861 - protein, 120 aa, Homo sapiens
  Payload ID: 3581
  Gene Symbol: CARM1
  Gene Name: coactivator-associated arginine methyltransferase 1
  ENSP ID: ENSP00000465417
MAAAAAAVGPGAGGAGSAVPGGAGPCATVSVFPGARLLTIGDANGEIQRHAEQQALRLEVRAGPDSAGIALYSHFCSFYNILKTCRGHTLERSVFSERTEESSAVQYFQFYGYLSQQQNM

SEQ ID NO: 17862 - protein, 161 aa, Homo sapiens
  Payload ID: 3581
  Gene Symbol: CARM1
  Gene Name: coactivator-associated arginine methyltransferase 1
  ENSP ID: ENSP00000467420
MAAAAAAVGPGAGGAGSAVPGGAGPCATVSVFPGARLLTIGDANGEIQRHAEQQALRLEVRAGPDSAGIALYSHEDVCVFKCSVSRETECSRVGKQSFIITLGCNSVLIQFATPNDFCSFYNILKTCRGHTLERSVFSERTEESSAVQYFQMRKLRLREVK

SEQ ID NO: 17863 - protein, 343 aa, Homo sapiens
  Payload ID: 3581
  Gene Symbol: CARM1
  Gene Name: coactivator-associated arginine methyltransferase 1
  ENSP ID: ENSP00000467746
  MOD_RES (1)..(1): Any amino acid
XANGEIQRHAEQQALRLEVRAGPDSAGIALYSHEDVCVFKCSVSRETECSRVGKQSFIITLGCNSVLIQFATPNDFCSFYNILKTCRGHTLERSVFSERTEESSAVQYFQFYGYLSQQQNMMQDYVRTGTYQRAILQNHTDFKDKIVLDVGCGSGILSFFAAQAGARKIYAVEASTMAQHAEVLVKSNNLTDRIVVIPGKVEEVSLPEQVDIIISEPMGYMLFNERMLESYLHAKKYLKPSGNMFPTIGDVHLAPFTDEQLYMEQFTKANFWYQPSFHGVDLSALRGAAVDEYFRQPVVDTFDIRILMAKSVKYTVNFLEAKEGDLHSACLASPAATALCLPG

SEQ ID NO: 17864 - protein, 176 aa, Homo sapiens
  Payload ID: 3581
  Gene Symbol: CARM1
  Gene Name: coactivator-associated arginine methyltransferase 1
  ENSP ID: ENSP00000467761
LAFWFDVAFIGSIQSYDISIVAQVDQTGSKSSNLLDLKNPFFRYTGTTPSPPPGSHYTSPSENMWNTGSTYNLSSGMAVAGMPTAYDLSSVIASGSSVGHNNLIPLANTGIVNHTHSRMGSIMSTGIVQGSSGAQGSGGGSTSAHYAVNSQFTMGGPAISMASPMSIPTNTMHYGS

SEQ ID NO: 17865 - protein, 92 aa, Homo sapiens
  Payload ID: 3581
  Gene Symbol: CARM1
  Gene Name: coactivator-associated arginine methyltransferase 1
  ENSP ID: ENSP00000468319
ALYSHEDVCVFKCSVSRETECSRVGKQSFIITLGCNSVLIQFATPNDFCSFYNILKTCRGHTLERSVFSERTEESSAVQYFQMRKLRLREVK

SEQ ID NO: 17866 - protein, 142 aa, Homo sapiens
  Payload ID: 3582
  Gene Symbol: COTL1
  Gene Name: coactosin-like F-actin binding protein 1
  Uniprot ID: Q14019
  ENSP ID: ENSP00000262428
MATKIDKEACRAAYNLVRDDGSAVIWVTFKYDGSTIVPGEQGAEYQHFIQQCTDDVRLFAFVRFTTGDAMSKRSKFALITWIGENVSGLQRAKTGTDKTLVKEVVQNFAKEFVISDRKELEEDFIKSELKKAGGANYDAQTE

SEQ ID NO: 17867 - protein, 73 aa, Homo sapiens
  Payload ID: 3582
  Gene Symbol: COTL1
  Gene Name: coactosin-like F-actin binding protein 1
  ENSP ID: ENSP00000457033
MSKRSKFALITWIGENVSGLQRAKTGTDKTLVKEVVQNFAKEFVISDRKELEEDFIKSELKKAGGANYDAQTE

SEQ ID NO: 17868 - protein, 48 aa, Homo sapiens
  Payload ID: 3582
  Gene Symbol: COTL1
  Gene Name: coactosin-like F-actin binding protein 1
  ENSP ID: ENSP00000480117
  MOD_RES (1)..(1): Any amino acid
XTIVPGEQGAEYQHFIQQCTGWSAVVQSQLTATSVSRVQEILLPQPPE

SEQ ID NO: 17869 - protein, 622 aa, Homo sapiens
  Payload ID: 3583
  Gene Symbol: F2
  Gene Name: coagulation factor II (thrombin)
  Uniprot ID: P00734
  ENSP ID: ENSP00000308541
MAHVRGLQLPGCLALAALCSLVHSQHVFLAPQQARSLLQRVRRANTFLEEVRKGNLERECVEETCSYEEAFEALESSTATDVFWAKYTACETARTPRDKLAACLEGNCAEGLGTNYRGHVNITRSGIECQLWRSRYPHKPEINSTTHPGADLQENFCRNPDSSTTGPWCYTTDPTVRRQECSIPVCGQDQVTVAMTPRSEGSSVNLSPPLEQCVPDRGQQYQGRLAVTTHGLPCLAWASAQAKALSKHQDFNSAVQLVENFCRNPDGDEEGVWCYVAGKPGDFGYCDLNYCEEAVEEETGDGLDEDSDRAIEGRTATSEYQTFFNPRTFGSGEADCGLRPLFEKKSLEDKTERELLESYIDGRIVEGSDAEIGMSPWQVMLFRKSPQELLCGASLISDRWVLTAAHCLLYPPWDKNFTENDLLVRIGKHSRTRYERNIEKISMLEKIYIHPRYNWRENLDRDIALMKLKKPVAFSDYIHPVCLPDRETAASLLQAGYKGRVTGWGNLKETWTANVGKGQPSVLQVVNLPIVERPVCKDSTRIRITDNMFCAGYKPDEGKRGDACEGDSGGPFVMKSPFNNRWYQMGIVSWGEGCDRDGKYGFYTHVFRLKKWIQKVIDQFGE

SEQ ID NO: 17870 - protein, 324 aa, Homo sapiens
  Payload ID: 3583
  Gene Symbol: F2
  Gene Name: coagulation factor II (thrombin)
  ENSP ID: ENSP00000387413
MGWGLLAGQSTQSWPLMFLAPQQARSLLQRVRRANTFLEEVRKGNLERECVEETCSYEEAFEALESSTATDVFWAKYTACETARTPRDKLAACLEGNCAEGLGTNYRGHVNITRSGIECQLWRSRYPHKPEINSTTHPGADLQENFCRNPDSSTTGPWCYTTDPTVRRQECSIPVCGQDQVTVAMTPRSEGSSVNLSPPLEQCVPDRGQQYQGRLAVTTHGLPCLAWASAQAKALSKHQDFNSAVQLVENFCRNPDGDEEGVWCYVAGKPGDFGYCDLNYCEEAVEEETGDGLDEDSDRAIEGRTATSEYQTFFNPRTFGSGEA

SEQ ID NO: 17871 - protein, 583 aa, Homo sapiens
  Payload ID: 3583
  Gene Symbol: F2
  Gene Name: coagulation factor II (thrombin)
  ENSP ID: ENSP00000433907
MAHVRGLQLPGCLALAALCSLVHSQHVFLAPQQARSLLQRVRRANTFLEEVRKGNLERECVEETCSYEEAFEALESSTATDVFWAKYTACETARTPRDKLAACLEGNCAEGLGTNYRGHVNITRSGIECQLWRSRYPHKPEINSTTHPGADLQENFCRNPDSSTTGPWCYTTDPTVRRQECSIPVCGQDQVTVAMTPRSEGSSVNLSPPLEQCVPDRGQQYQGRLAVTTHGLPCLAWASAQAKALSKHQDFNSAVQLVENFCRNPDGDEEGVWCYVAGKPGDFGYCDLNYCEEAVEEETGDGLDEDSDRAIEGRTATSEYQTFFNPRTFGSGEADCGLRPLFEKKSLEDKTERELLESYIDGRIVEGSDAEIGMSPWQVMLFRKSPQELLCGASLISDRWVLTAAHCLLYPPWDKNFTENDLLVRIGKHSRTRYERNIEKISMLEKIYIHPSLLQAGYKGRVTGWGNLKETWTANVGKGQPSVLQVVNLPIVERPVCKDSTRIRITDNMFCAGYKPDEGKRGDACEGDSGGPFVMKSPFNNRWYQMGIVSWGEGCDRDGKYGFYTHVFRLKKWIQKVIDQFGE

SEQ ID NO: 17872 - protein, 425 aa, Homo sapiens
  Payload ID: 3584
  Gene Symbol: F2R
  Gene Name: coagulation factor II (thrombin) receptor
  Uniprot ID: P25116
  ENSP ID: ENSP00000321326
MGPRRLLLVAACFSLCGPLLSARTRARRPESKATNATLDPRSFLLRNPNDKYEPFWEDEEKNESGLTEYRLVSINKSSPLQKQLPAFISEDASGYLTSSWLTLFVPSVYTGVFVVSLPLNIMAIVVFILKMKVKKPAVVYMLHLATADVLFVSVLPFKISYYFSGSDWQFGSELCRFVTAAFYCNMYASILLMTVISIDRFLAVVYPMQSLSWRTLGRASFTCLAIWALAIAGVVPLLLKEQTIQVPGLNITTCHDVLNETLLEGYYAYYFSAFSAVFFFVPLIISTVCYVSIIRCLSSSAVANRSKKSRALFLSAAVFCIFIICFGPTNVLLIAHYSFLSHTSTTEAAYFAYLLCVCVSSISCCIDPLIYYYASSECQRYVYSILCCKESSDPSSYNSSGQLMASKMDTCSSNLNNSIYKKLLT

SEQ ID NO: 17873 - protein, 102 aa, Homo sapiens
  Payload ID: 3584
  Gene Symbol: F2R
  Gene Name: coagulation factor II (thrombin) receptor
  ENSP ID: ENSP00000426398
MGPRRLLLVAACFSLCGPLLSARTRARRPVTFRWGVPPPSRAQPMPLWTRSWRVQPACHGVLDMEEDGAEAPWGSLQSCVALVIVFLPGPPPKRKALTLLHQ

SEQ ID NO: 17874 - protein, 397 aa, Homo sapiens
  Payload ID: 3585
  Gene Symbol: F2RL1
  Gene Name: coagulation factor II (thrombin) receptor-like 1
  Uniprot ID: P55085
  ENSP ID: ENSP00000296677
MRSPSAAWLLGAAILLAASLSCSGTIQGTSRSSKGRSLIGKVDGTSHVTGKGVTVETVFSVDEFSASVLTGKLTTVFLPIVYTIVFVVGLPSNGMALWVFLFRTKKKHPAVIYMANLALADLLSVIWFPLKIAYHIHGNNWIYGEALCNVLIGFFYGNMYCSILFMTCLSVQRYWVIVNPMGHSRKKANIAIGISLAIWLLILLVTIPLYVVKQTIFIPALNITTCHDVLPEQLLVGDMFNYFLSLAIGVFLFPAFLTASAYVLMIRMLRSSAMDENSEKKRKRAIKLIVTVLAMYLICFTPSNLLLVVHYFLIKSQGQSHVYALYIVALCLSTLNSCIDPFVYYFVSHDFRDHAKNALLCRSVRTVKQMQVSLTSKKHSRKSSSYSSSSTTVKTSY

SEQ ID NO: 17875 - protein, 112 aa, Homo sapiens
  Payload ID: 3585
  Gene Symbol: F2RL1
  Gene Name: coagulation factor II (thrombin) receptor-like 1
  ENSP ID: ENSP00000425622
MALWVFLFRTKKKHPAVIYMANLALADLLSVIWFPLKIAYHIHGNNWIYGEALCNVLIGFFYGNMYCSILFMTCLSVQRYWVIVNPMGHSRKKANIAIGISLAIWLLILLVT

SEQ ID NO: 17876 - protein, 374 aa, Homo sapiens
  Payload ID: 3586
  Gene Symbol: F2RL2
  Gene Name: coagulation factor II (thrombin) receptor-like 2
  Uniprot ID: O00254
  ENSP ID: ENSP00000296641
MKALIFAAAGLLLLLPTFCQSGMENDTNNLAKPTLPIKTFRGAPPNSFEEFPFSALEGWTGATITVKIKCPEESASHLHVKNATMGYLTSSLSTKLIPAIYLLVFVVGVPANAVTLWMLFFRTRSICTTVFYTNLAIADFLFCVTLPFKIAYHLNGNNWVFGEVLCRATTVIFYGNMYCSILLLACISINRYLAIVHPFTYRGLPKHTYALVTCGLVWATVFLYMLPFFILKQEYYLVQPDITTCHDVHNTCESSSPFQLYYFISLAFFGFLIPFVLIIYCYAAIIRTLNAYDHRWLWYVKASLLILVIFTICFAPSNIILIIHHANYYYNNTDGLYFIYLIALCLGSLNSCLDPFLYFLMSKTRNHSTAYLTK

SEQ ID NO: 17877 - protein, 352 aa, Homo sapiens
  Payload ID: 3586
  Gene Symbol: F2RL2
  Gene Name: coagulation factor II (thrombin) receptor-like 2
  Uniprot ID: O00254
  ENSP ID: ENSP00000426703
MENDTNNLAKPTLPIKTFRGAPPNSFEEFPFSALEGWTGATITVKIKCPEESASHLHVKNATMGYLTSSLSTKLIPAIYLLVFVVGVPANAVTLWMLFFRTRSICTTVFYTNLAIADFLFCVTLPFKIAYHLNGNNWVFGEVLCRATTVIFYGNMYCSILLLACISINRYLAIVHPFTYRGLPKHTYALVTCGLVWATVFLYMLPFFILKQEYYLVQPDITTCHDVHNTCESSSPFQLYYFISLAFFGFLIPFVLIIYCYAAIIRTLNAYDHRWLWYVKASLLILVIFTICFAPSNIILIIHHANYYYNNTDGLYFIYLIALCLGSLNSCLDPFLYFLMSKTRNHSTAYLTK

SEQ ID NO: 17878 - protein, 385 aa, Homo sapiens
  Payload ID: 3587
  Gene Symbol: F2RL3
  Gene Name: coagulation factor II (thrombin) receptor-like 3
  Uniprot ID: Q96RI0
  ENSP ID: ENSP00000248076
MWGRLLLWPLVLGFSLSGGTQTPSVYDESGSTGGGDDSTPSILPAPRGYPGQVCANDSDTLELPDSSRALLLGWVPTRLVPALYGLVLVVGLPANGLALWVLATQAPRLPSTMLLMNLAAADLLLALALPPRIAYHLRGQRWPFGEAACRLATAALYGHMYGSVLLLAAVSLDRYLALVHPLRARALRGRRLALGLCMAAWLMAAALALPLTLQRQTFRLARSDRVLCHDALPLDAQASHWQPAFTCLALLGCFLPLLAMLLCYGATLHTLAASGRRYGHALRLTAVVLASAVAFFVPSNLLLLLHYSDPSPSAWGNLYGAYVPSLALSTLNSCVDPFIYYYVSAEFRDKVRAGLFQRSPGDTVASKASAEGGSRGMGTHSSLLQ

SEQ ID NO: 17879 - protein, 113 aa, Homo sapiens
  Payload ID: 3587
  Gene Symbol: F2RL3
  Gene Name: coagulation factor II (thrombin) receptor-like 3
  ENSP ID: ENSP00000471518
MWGRLLLWPLVLGFSLSGGTQTPSVYDESGSTGGGDARPQSCLPPAATQAKSVPMTVTPWSSRTAHGHCFWAGCPPGWCPPSMGWSWWWGCRPMGWRCGCWPRRHLGCPPPCC

SEQ ID NO: 17880 - protein, 295 aa, Homo sapiens
  Payload ID: 3588
  Gene Symbol: F3
  Gene Name: coagulation factor III (thromboplastin, tissue factor)
  Uniprot ID: P13726
  ENSP ID: ENSP00000334145
METPAWPRVPRPETAVARTLLLGWVFAQVAGASGTTNTVAAYNLTWKSTNFKTILEWEPKPVNQVYTVQISTKSGDWKSKCFYTTDTECDLTDEIVKDVKQTYLARVFSYPAGNVESTGSAGEPLYENSPEFTPYLETNLGQPTIQSFEQVGTKVNVTVEDERTLVRRNNTFLSLRDVFGKDLIYTLYYWKSSSSGKKTAKTNTNEFLIDVDKGENYCFSVQAVIPSRTVNRKSTDSPVECMGQEKGEFREIFYIIGAVVFVVIILVIILAISLHKCRKAGVGQSWKENSPLNVS

SEQ ID NO: 17881 - protein, 238 aa, Homo sapiens
  Payload ID: 3588
  Gene Symbol: F3
  Gene Name: coagulation factor III (thromboplastin, tissue factor)
  Uniprot ID: P13726
  ENSP ID: ENSP00000359226
METPAWPRVPRPETAVARTLLLGWVFAQVAGASGTTNTVAAYNLTWKSTNFKTILEWEPKPVNQVYTVQISTKSGDWKSKCFYTTDTECDLTDEIVKDVKQTYLARVFSYPAGNVESTGSAGEPLYENSPEFTPYLETNLGQPTIQSFEQVGTKVNVTVEDERTLVRRNNTFLSLRDVFGKDLIYTLYYWKSSSSGKKYSTSLELWYLWSSSLSSSWLYLYTSVERQEWGRAGRRTPH

SEQ ID NO: 17882 - protein, 461 aa, Homo sapiens
  Payload ID: 3589
  Gene Symbol: F9
  Gene Name: coagulation factor IX
  Uniprot ID: P00740
  ENSP ID: ENSP00000218099
MQRVNMIMAESPGLITICLLGYLLSAECTVFLDHENANKILNRPKRYNSGKLEEFVQGNLERECMEEKCSFEEAREVFENTERTTEFWKQYVDGDQCESNPCLNGGSCKDDINSYECWCPFGFEGKNCELDVTCNIKNGRCEQFCKNSADNKVVCSCTEGYRLAENQKSCEPAVPFPCGRVSVSQTSKLTRAETVFPDVDYVNSTEAETILDNITQSTQSFNDFTRVVGGEDAKPGQFPWQVVLNGKVDAFCGGSIVNEKWIVTAAHCVETGVKITVVAGEHNIEETEHTEQKRNVIRIIPHHNYNAAINKYNHDIALLELDEPLVLNSYVTPICIADKEYTNIFLKFGSGYVSGWGRVFHKGRSALVLQYLRVPLVDRATCLRSTKFTIYNNMFCAGFHEGGRDSCQGDSGGPHVTEVEGTSFLTGIISWGEECAMKGKYGIYTKVSRYVNWIKEKTKLT

SEQ ID NO: 17883 - protein, 423 aa, Homo sapiens
  Payload ID: 3589
  Gene Symbol: F9
  Gene Name: coagulation factor IX
  Uniprot ID: P00740
  ENSP ID: ENSP00000377650
MQRVNMIMAESPGLITICLLGYLLSAECTVFLDHENANKILNRPKRYNSGKLEEFVQGNLERECMEEKCSFEEAREVFENTERTTEFWKQYVDVTCNIKNGRCEQFCKNSADNKVVCSCTEGYRLAENQKSCEPAVPFPCGRVSVSQTSKLTRAETVFPDVDYVNSTEAETILDNITQSTQSFNDFTRVVGGEDAKPGQFPWQVVLNGKVDAFCGGSIVNEKWIVTAAHCVETGVKITVVAGEHNIEETEHTEQKRNVIRIIPHHNYNAAINKYNHDIALLELDEPLVLNSYVTPICIADKEYTNIFLKFGSGYVSGWGRVFHKGRSALVLQYLRVPLVDRATCLRSTKFTIYNNMFCAGFHEGGRDSCQGDSGGPHVTEVEGTSFLTGIISWGEECAMKGKYGIYTKVSRYVNWIKEKTKLT

SEQ ID NO: 17884 - protein, 2229 aa, Homo sapiens
  Payload ID: 3590
  Gene Symbol: F5
  Gene Name: coagulation factor V (proaccelerin, labile factor)
  ENSP ID: ENSP00000356770
MFPGCPRLWVLVVLGTSWVGWGSQGTEAAQLRQFYVAAQGISWSYRPEPTNSSLNLSVTSFKKIVYREYEPYFKKEKPQSTISGLLGPTLYAEVGDIIKVHFKNKADKPLSIHPQGIRYSKLSEGASYLDHTFPAEKMDDAVAPGREYTYEWSISEDSGPTHDDPPCLTHIYYSHENLIEDFNSGLIGPLLICKKGTLTEGGTQKTFDKQIVLLFAVFDESKSWSQSSSLMYTVNGYVNGTMPDITVCAHDHISWHLLGMSSGPELFSIHFNGQVLEQNHHKVSAITLVSATSTTANMTVGPEGKWIISSLTPKHLQAGMQAYIDIKNCPKKTRNLKKITREQRRHMKRWEYFIAAEEVIWDYAPVIPANMDKKYRSQHLDNFSNQIGKHYKKVMYTQYEDESFTKHTVNPNMKEDGILGPIIRAQVRDTLKIVFKNMASRPYSIYPHGVTFSPYEDEVNSSFTSGRNNTMIRAVQPGETYTYKWNILEFDEPTENDAQCLTRPYYSDVDIMRDIASGLIGLLLICKSRSLDRRGIQRAADIEQQAVFAVFDENKSWYLEDNINKFCENPDEVKRDDPKFYESNIMSNFTLSAINGYVPESITTLGFCFDDTVQWHFCSVGTQNEILTIHFTGHSFIYGKRHEDTLTLFPMRGESVTVTMDNVGTWMLTSMNSSPRSKKLRLKFRDVKCIPDDDEDSYEIFEPPESTVMATRKMHDRLEPEDEESDADYDYQNRLAAALGIRSFRNSSLNQEEEEFNLTALALENGTEFVSSNTDIIVGSNYSSPSNISKFTVNNLAEPQKAPSHQQATTAGSPLRHLIGKNSVLNSSTAEHSSPYSEDPIEDPLQPDVTGIRLLSLGAGEFKSQEHAKHKGPKVERDQAAKHRFSWMKLLAHKVGRHLSQDTGSPSGMRPWEDLPSQDTGSPSRMRPWKDPPSDLLLLKQSNSSKILVGRWHLASEKGSYEIIQDTDEDTAVNNWLISPQNASRAWGESTPLANKPGKQSGHPKFPRVRHKSLQVRQDGGKSRLKKSQFLIKTRKKKKEKHTHHAPLSPRTFHPLRSEAYNTFSERRLKHSLVLHKSNETSLPTDLNQTLPSMDFGWIASLPDHNQNSSNDTGQASCPPGLYQTVPPEEHYQTFPIQDPDQMHSTSDPSHRSSSPELSEMLEYDRSHKSFPTDISQMSPSSEHEVWQTVISPDLSQVTLSPELSQTNLSPDLSHTTLSPELIQRNLSPALGQMPISPDLSHTTLSPDLSHTTLSLDLSQTNLSPELSQTNLSPALGQMPLSPDLSHTTLSLDFSQTNLSPELSHMTLSPELSQTNLSPALGQMPISPDLSHTTLSLDFSQTNLSPELSQTNLSPALGQMPLSPDPSHTTLSLDLSQTNLSPELSQTNLSPDLSEMPLFADLSQIPLTPDLDQMTLSPDLGETDLSPNFGQMSLSPDLSQVTLSPDISDTTLLPDLSQISPPPDLDQIFYPSESSQSLLLQEFNESFPYPDLGQMPSPSSPTLNDTFLSKEFNPLVIVGLSKDGTDYIEIIPKEEVQSSEDDYAEIDYVPYDDPYKTDVRTNINSSRDPDNIAAWYLRSNNGNRRNYYIAAEEISWDYSEFVQRETDIEDSDDIPEDTTYKKVVFRKYLDSTFTKRDPRGEYEEHLGILGPIIRAEVDDVIQVRFKNLASRPYSLHAHGLSYEKSSEGKTYEDDSPEWFKEDNAVQPNSSYTYVWHATERSGPESPGSACRAWAYYSAVNPEKDIHSGLIGPLLICQKGILHKDSNMPMDMREFVLLFMTFDEKKSWYYEKKSRSSWRLTSSEMKKSHEFHAINGMIYSLPGLKMYEQEWVRLHLLNIGGSQDIHVVHFHGQTLLENGNKQHQLGVWPLLPGSFKTLEMKASKPGWWLLNTEVGENQRAGMQTPFLIMDRDCRMPMGLSTGIISDSQIKASEFLGYWEPRLARLNNGGSYNAWSVEKLAAEFASKPWIQVDMQKEVIITGIQTQGAKHYLKSCYTTEFYVAYSSNQINWQIFKGNSTRNVMYFNGNSDASTIKENQFDPPIVARYIRISPTRAYNRPTLRLELQGCEVNGCSTPLGMENGKIENKQITASSFKKSWWGDYWEPFRARLNAQGRVNAWQAKANNNKQWLEIDLLKIKKITAIITQGCKSLSSEMYVKSYTIHYSEQGVEWKPYRLKSSMVDKIFEGNTNTKGHVKNFFNPPIISRFIRVIPKTWNQSIALRLELFGCDIY

SEQ ID NO: 17885 - protein, 2224 aa, Homo sapiens
  Payload ID: 3590
  Gene Symbol: F5
  Gene Name: coagulation factor V (proaccelerin, labile factor)
  Uniprot ID: P12259
  ENSP ID: ENSP00000356771
MFPGCPRLWVLVVLGTSWVGWGSQGTEAAQLRQFYVAAQGISWSYRPEPTNSSLNLSVTSFKKIVYREYEPYFKKEKPQSTISGLLGPTLYAEVGDIIKVHFKNKADKPLSIHPQGIRYSKLSEGASYLDHTFPAEKMDDAVAPGREYTYEWSISEDSGPTHDDPPCLTHIYYSHENLIEDFNSGLIGPLLICKKGTLTEGGTQKTFDKQIVLLFAVFDESKSWSQSSSLMYTVNGYVNGTMPDITVCAHDHISWHLLGMSSGPELFSIHFNGQVLEQNHHKVSAITLVSATSTTANMTVGPEGKWIISSLTPKHLQAGMQAYIDIKNCPKKTRNLKKITREQRRHMKRWEYFIAAEEVIWDYAPVIPANMDKKYRSQHLDNFSNQIGKHYKKVMYTQYEDESFTKHTVNPNMKEDGILGPIIRAQVRDTLKIVFKNMASRPYSIYPHGVTFSPYEDEVNSSFTSGRNNTMIRAVQPGETYTYKWNILEFDEPTENDAQCLTRPYYSDVDIMRDIASGLIGLLLICKSRSLDRRGIQRAADIEQQAVFAVFDENKSWYLEDNINKFCENPDEVKRDDPKFYESNIMSTINGYVPESITTLGFCFDDTVQWHFCSVGTQNEILTIHFTGHSFIYGKRHEDTLTLFPMRGESVTVTMDNVGTWMLTSMNSSPRSKKLRLKFRDVKCIPDDDEDSYEIFEPPESTVMATRKMHDRLEPEDEESDADYDYQNRLAAALGIRSFRNSSLNQEEEEFNLTALALENGTEFVSSNTDIIVGSNYSSPSNISKFTVNNLAEPQKAPSHQQATTAGSPLRHLIGKNSVLNSSTAEHSSPYSEDPIEDPLQPDVTGIRLLSLGAGEFKSQEHAKHKGPKVERDQAAKHRFSWMKLLAHKVGRHLSQDTGSPSGMRPWEDLPSQDTGSPSRMRPWKDPPSDLLLLKQSNSSKILVGRWHLASEKGSYEIIQDTDEDTAVNNWLISPQNASRAWGESTPLANKPGKQSGHPKFPRVRHKSLQVRQDGGKSRLKKSQFLIKTRKKKKEKHTHHAPLSPRTFHPLRSEAYNTFSERRLKHSLVLHKSNETSLPTDLNQTLPSMDFGWIASLPDHNQNSSNDTGQASCPPGLYQTVPPEEHYQTFPIQDPDQMHSTSDPSHRSSSPELSEMLEYDRSHKSFPTDISQMSPSSEHEVWQTVISPDLSQVTLSPELSQTNLSPDLSHTTLSPELIQRNLSPALGQMPISPDLSHTTLSPDLSHTTLSLDLSQTNLSPELSQTNLSPALGQMPLSPDLSHTTLSLDFSQTNLSPELSHMTLSPELSQTNLSPALGQMPISPDLSHTTLSLDFSQTNLSPELSQTNLSPALGQMPLSPDPSHTTLSLDLSQTNLSPELSQTNLSPDLSEMPLFADLSQIPLTPDLDQMTLSPDLGETDLSPNFGQMSLSPDLSQVTLSPDISDTTLLPDLSQISPPPDLDQIFYPSESSQSLLLQEFNESFPYPDLGQMPSPSSPTLNDTFLSKEFNPLVIVGLSKDGTDYIEIIPKEEVQSSEDDYAEIDYVPYDDPYKTDVRTNINSSRDPDNIAAWYLRSNNGNRRNYYIAAEEISWDYSEFVQRETDIEDSDDIPEDTTYKKVVFRKYLDSTFTKRDPRGEYEEHLGILGPIIRAEVDDVIQVRFKNLASRPYSLHAHGLSYEKSSEGKTYEDDSPEWFKEDNAVQPNSSYTYVWHATERSGPESPGSACRAWAYYSAVNPEKDIHSGLIGPLLICQKGILHKDSNMPMDMREFVLLFMTFDEKKSWYYEKKSRSSWRLTSSEMKKSHEFHAINGMIYSLPGLKMYEQEWVRLHLLNIGGSQDIHVVHFHGQTLLENGNKQHQLGVWPLLPGSFKTLEMKASKPGWWLLNTEVGENQRAGMQTPFLIMDRDCRMPMGLSTGIISDSQIKASEFLGYWEPRLARLNNGGSYNAWSVEKLAAEFASKPWIQVDMQKEVIITGIQTQGAKHYLKSCYTTEFYVAYSSNQINWQIFKGNSTRNVMYFNGNSDASTIKENQFDPPIVARYIRISPTRAYNRPTLRLELQGCEVNGCSTPLGMENGKIENKQITASSFKKSWWGDYWEPFRARLNAQGRVNAWQAKANNNKQWLEIDLLKIKKITAIITQGCKSLSSEMYVKSYTIHYSEQGVEWKPYRLKSSMVDKIFEGNTNTKGHVKNFFNPPIISRFIRVIPKTWNQSIALRLELFGCDIY

SEQ ID NO: 17886 - protein, 444 aa, Homo sapiens
  Payload ID: 3591
  Gene Symbol: F7
  Gene Name: coagulation factor VII (serum prothrombin conversion accelerator)
  Uniprot ID: P08709
  ENSP ID: ENSP00000329546
MVSQALRLLCLLLGLQGCLAAVFVTQEEAHGVLHRRRRANAFLEELRPGSLERECKEEQCSFEEAREIFKDAERTKLFWISYSDGDQCASSPCQNGGSCKDQLQSYICFCLPAFEGRNCETHKDDQLICVNENGGCEQYCSDHTGTKRSCRCHEGYSLLADGVSCTPTVEYPCGKIPILEKRNASKPQGRIVGGKVCPKGECPWQVLLLVNGAQLCGGTLINTIWVVSAAHCFDKIKNWRNLIAVLGEHDLSEHDGDEQSRRVAQVIIPSTYVPGTTNHDIALLRLHQPVVLTDHVVPLCLPERTFSERTLAFVRFSLVSGWGQLLDRGATALELMVLNVPRLMTQDCLQQSRKVGDSPNITEYMFCAGYSDGSKDSCKGDSGGPHATHYRGTWYLTGIVSWGQGCATVGHFGVYTRVSQYIEWLQKLMRSEPRPGVLLRAPFP

SEQ ID NO: 17887 - protein, 466 aa, Homo sapiens
  Payload ID: 3591
  Gene Symbol: F7
  Gene Name: coagulation factor VII (serum prothrombin conversion accelerator)
  Uniprot ID: P08709
  ENSP ID: ENSP00000364731
MVSQALRLLCLLLGLQGCLAAGGVAKASGGETRDMPWKPGPHRVFVTQEEAHGVLHRRRRANAFLEELRPGSLERECKEEQCSFEEAREIFKDAERTKLFWISYSDGDQCASSPCQNGGSCKDQLQSYICFCLPAFEGRNCETHKDDQLICVNENGGCEQYCSDHTGTKRSCRCHEGYSLLADGVSCTPTVEYPCGKIPILEKRNASKPQGRIVGGKVCPKGECPWQVLLLVNGAQLCGGTLINTIWVVSAAHCFDKIKNWRNLIAVLGEHDLSEHDGDEQSRRVAQVIIPSTYVPGTTNHDIALLRLHQPVVLTDHVVPLCLPERTFSERTLAFVRFSLVSGWGQLLDRGATALELMVLNVPRLMTQDCLQQSRKVGDSPNITEYMFCAGYSDGSKDSCKGDSGGPHATHYRGTWYLTGIVSWGQGCATVGHFGVYTRVSQYIEWLQKLMRSEPRPGVLLRAPFP

SEQ ID NO: 17888 - protein, 74 aa, Homo sapiens
  Payload ID: 3591
  Gene Symbol: F7
  Gene Name: coagulation factor VII (serum prothrombin conversion accelerator)
  ENSP ID: ENSP00000387669
MVSQALRLLCLLLGLQGCLAAGGSPRRPAPAPARQRVPGGAAAGLPGEGVQGGAVLLRGGPGDLQGRGEDVVSG

SEQ ID NO: 17889 - protein, 382 aa, Homo sapiens
  Payload ID: 3591
  Gene Symbol: F7
  Gene Name: coagulation factor VII (serum prothrombin conversion accelerator)
  ENSP ID: ENSP00000442051
MVSQALRLLCLLLGLQGCLAADGDQCASSPCQNGGSCKDQLQSYICFCLPAFEGRNCETHKDDQLICVNENGGCEQYCSDHTGTKRSCRCHEGYSLLADGVSCTPTVEYPCGKIPILEKRNASKPQGRIVGGKVCPKGECPWQVLLLVNGAQLCGGTLINTIWVVSAAHCFDKIKNWRNLIAVLGEHDLSEHDGDEQSRRVAQVIIPSTYVPGTTNHDIALLRLHQPVVLTDHVVPLCLPERTFSERTLAFVRFSLVSGWGQLLDRGATALELMVLNVPRLMTQDCLQQSRKVGDSPNITEYMFCAGYSDGSKDSCKGDSGGPHATHYRGTWYLTGIVSWGQGCATVGHFGVYTRVSQYIEWLQKLMRSEPRPGVLLRAPFP

SEQ ID NO: 17890 - protein, 216 aa, Homo sapiens
  Payload ID: 3592
  Gene Symbol: F8
  Gene Name: coagulation factor VIII, procoagulant component
  Uniprot ID: P00451
  ENSP ID: ENSP00000327895
MRIQDPGKVFFGNVDSSGIKHNIFNPPIIARYIRLHPTHYSIRSTLRMELMGCDLNSCSMPLGMESKAISDAQITASSYFTNMFATWSPSKARLHLQGRSNAWRPQVNNPKEWLQVDFQKTMKVTGVTTQGVKSLLTSMYVKEFLISSSQDGHQWTLFFQNGKVKVFQGNQDSFTPVVNSLDPPLLTRYLRIHPQSWVHQIALRMEVLGCEAQDLY

SEQ ID NO: 17891 - protein, 2351 aa, Homo sapiens
  Payload ID: 3592
  Gene Symbol: F8
  Gene Name: coagulation factor VIII, procoagulant component
  Uniprot ID: P00451
  ENSP ID: ENSP00000353393
MQIELSTCFFLCLLRFCFSATRRYYLGAVELSWDYMQSDLGELPVDARFPPRVPKSFPFNTSVVYKKTLFVEFTDHLFNIAKPRPPWMGLLGPTIQAEVYDTVVITLKNMASHPVSLHAVGVSYWKASEGAEYDDQTSQREKEDDKVFPGGSHTYVWQVLKENGPMASDPLCLTYSYLSHVDLVKDLNSGLIGALLVCREGSLAKEKTQTLHKFILLFAVFDEGKSWHSETKNSLMQDRDAASARAWPKMHTVNGYVNRSLPGLIGCHRKSVYWHVIGMGTTPEVHSIFLEGHTFLVRNHRQASLEISPITFLTAQTLLMDLGQFLLFCHISSHQHDGMEAYVKVDSCPEEPQLRMKNNEEAEDYDDDLTDSEMDVVRFDDDNSPSFIQIRSVAKKHPKTWVHYIAAEEEDWDYAPLVLAPDDRSYKSQYLNNGPQRIGRKYKKVRFMAYTDETFKTREAIQHESGILGPLLYGEVGDTLLIIFKNQASRPYNIYPHGITDVRPLYSRRLPKGVKHLKDFPILPGEIFKYKWTVTVEDGPTKSDPRCLTRYYSSFVNMERDLASGLIGPLLICYKESVDQRGNQIMSDKRNVILFSVFDENRSWYLTENIQRFLPNPAGVQLEDPEFQASNIMHSINGYVFDSLQLSVCLHEVAYWYILSIGAQTDFLSVFFSGYTFKHKMVYEDTLTLFPFSGETVFMSMENPGLWILGCHNSDFRNRGMTALLKVSSCDKNTGDYYEDSYEDISAYLLSKNNAIEPRSFSQNSRHPSTRQKQFNATTIPENDIEKTDPWFAHRTPMPKIQNVSSSDLLMLLRQSPTPHGLSLSDLQEAKYETFSDDPSPGAIDSNNSLSEMTHFRPQLHHSGDMVFTPESGLQLRLNEKLGTTAATELKKLDFKVSSTSNNLISTIPSDNLAAGTDNTSSLGPPSMPVHYDSQLDTTLFGKKSSPLTESGGPLSLSEENNDSKLLESGLMNSQESSWGKNVSSTESGRLFKGKRAHGPALLTKDNALFKVSISLLKTNKTSNNSATNRKTHIDGPSLLIENSPSVWQNILESDTEFKKVTPLIHDRMLMDKNATALRLNHMSNKTTSSKNMEMVQQKKEGPIPPDAQNPDMSFFKMLFLPESARWIQRTHGKNSLNSGQGPSPKQLVSLGPEKSVEGQNFLSEKNKVVVGKGEFTKDVGLKEMVFPSSRNLFLTNLDNLHENNTHNQEKKIQEEIEKKETLIQENVVLPQIHTVTGTKNFMKNLFLLSTRQNVEGSYDGAYAPVLQDFRSLNDSTNRTKKHTAHFSKKGEEENLEGLGNQTKQIVEKYACTTRISPNTSQQNFVTQRSKRALKQFRLPLEETELEKRIIVDDTSTQWSKNMKHLTPSTLTQIDYNEKEKGAITQSPLSDCLTRSHSIPQANRSPLPIAKVSSFPSIRPIYLTRVLFQDNSSHLPAASYRKKDSGVQESSHFLQGAKKNNLSLAILTLEMTGDQREVGSLGTSATNSVTYKKVENTVLPKPDLPKTSGKVELLPKVHIYQKDLFPTETSNGSPGHLDLVEGSLLQGTEGAIKWNEANRPGKVPFLRVATESSAKTPSKLLDPLAWDNHYGTQIPKEEWKSQEKSPEKTAFKKKDTILSLNACESNHAIAAINEGQNKPEIEVTWAKQGRTERLCSQNPPVLKRHQREITRTTLQSDQEEIDYDDTISVEMKKEDFDIYDEDENQSPRSFQKKTRHYFIAAVERLWDYGMSSSPHVLRNRAQSGSVPQFKKVVFQEFTDGSFTQPLYRGELNEHLGLLGPYIRAEVEDNIMVTFRNQASRPYSFYSSLISYEEDQRQGAEPRKNFVKPNETKTYFWKVQHHMAPTKDEFDCKAWAYFSDVDLEKDVHSGLIGPLLVCHTNTLNPAHGRQVTVQEFALFFTIFDETKSWYFTENMERNCRAPCNIQMEDPTFKENYRFHAINGYIMDTLPGLVMAQDQRIRWYLLSMGSNENIHSIHFSGHVFTVRKKEEYKMALYNLYPGVFETVEMLPSKAGIWRVECLIGEHLHAGMSTLFLVYSNKCQTPLGMASGHIRDFQITASGQYGQWAPKLARLHYSGSINAWSTKEPFSWIKVDLLAPMIIHGIKTQGARQKFSSLYISQFIIMYSLDGKKWQTYRGNSTGTLMVFFGNVDSSGIKHNIFNPPIIARYIRLHPTHYSIRSTLRMELMGCDLNSCSMPLGMESKAISDAQITASSYFTNMFATWSPSKARLHLQGRSNAWRPQVNNPKEWLQVDFQKTMKVTGVTTQGVKSLLTSMYVKEFLISSSQDGHQWTLFFQNGKVKVFQGNQDSFTPVVNSLDPPLLTRYLRIHPQSWVHQIALRMEVLGCEAQDLY

SEQ ID NO: 17892 - protein, 164 aa, Homo sapiens
  Payload ID: 3592
  Gene Symbol: F8
  Gene Name: coagulation factor VIII, procoagulant component
  ENSP ID: ENSP00000389153
MHRDARAQKASRGATRRYYLGAVELSWDYMQSDLGELPVDARFPPRVPKSFPFNTSVVYKKTLFVEFTDHLFNIAKPRPPWMGLLGPTIQAEVYDTVVITLKNMASHPVSLHAVGVSYWKASEGAEYDDQTSQREKEDDKVFPGGSHTYVWQVLKENGPMASDP

SEQ ID NO: 17893 - protein, 222 aa, Homo sapiens
  Payload ID: 3592
  Gene Symbol: F8
  Gene Name: coagulation factor VIII, procoagulant component
  ENSP ID: ENSP00000409446
MHRDARAQKASRGFPPRVPKSFPFNTSVVYKKTLFVEFTDHLFNIAKPRPPWMGLLGPTIQAEVYDTVVITLKNMASHPVSLHAVGVSYWKASEGAEYDDQTSQREKEDDKVFPGGSHTYVWQVLKENGPMASDPLCLTYSYLSHVDLVKDLNSGLIGALLVCREGSLAKEKTQTLHKFILLFAVFDEGKSWHSETKNSLMQDRDAASARAWPKMHTVNGYV

SEQ ID NO: 17894 - protein, 371 aa, Homo sapiens
  Payload ID: 3593
  Gene Symbol: F8A1
  Gene Name: coagulation factor VIII-associated 1
  Uniprot ID: P23610
  ENSP ID: ENSP00000479624
MAAAAAGLGGGGAGPGPEAGDFLARYRLVSNKLKKRFLRKPNVAEAGEQFGQLGRELRAQECLPYAAWCQLAVARCQQALFHGPGEALALTEAARLFLRQERDARQRLVCPAAYGEPLQAAASALGAAVRLHLELGQPAAAAALCLELAAALRDLGQPAAAAGHFQRAAQLQLPQLPLAALQALGEAASCQLLARDYTGALAVFTRMQRLAREHGSHPVQSLPPPPPPAPQPGPGATPALPAALLPPNSGSAAPSPAALGAFSDVLVRCEVSRVLLLLLLQPPPAKLLPEHAQTLEKYSWEAFDSHGQESSGQLPEELFLLLQSLVMATHEKDTEAIKSLQVEMWPLLTAEQNHLLHLVLQETISPSGQGV

SEQ ID NO: 17895 - protein, 371 aa, Homo sapiens; identical to SEQ ID NO: 17894
  Payload ID: 3594
  Gene Symbol: F8A2
  Gene Name: coagulation factor VIII-associated 2
  Uniprot ID: P23610
  ENSP ID: ENSP00000358518

SEQ ID NO: 17896 - protein, 371 aa, Homo sapiens; identical to SEQ ID NO: 17894
  Payload ID: 3595
  Gene Symbol: F8A3
  Gene Name: coagulation factor VIII-associated 3
  Uniprot ID: P23610
  ENSP ID: ENSP00000477530

SEQ ID NO: 17897 - protein, 332 aa, Homo sapiens
  Payload ID: 3596
  Gene Symbol: F10
  Gene Name: coagulation factor X
  ENSP ID: ENSP00000364701
MGRPLHLVLLSASLAGLLLLGESLFIRREQANNILARVTRANSFLEEMKKGHLERECMEETCSYEEAREVFEDSDKTNEFWNKYKDGDQCETSPCQNQGKCKDGLGEYTCTCLEGFEGKNCELFTRKLCSLDNGDCDQFCHEEQNSVVCSCARGYTLADNGKACIPTGPYPCGKQTLERRKRSVAQATSSSGEAPDSITWKPYDAADLDPTENPFDLLDFNQTQPERGDNNLTRIVGGQECKDGECPWQALLINEENEGFCGGTILSEFYILTAAHCLYQAKRFKGTGTRSRRRAVRRCTRWRWSSSTTGSQRRPMTSTSPCSGSRPPSPSA

SEQ ID NO: 17898 - protein, 488 aa, Homo sapiens
  Payload ID: 3596
  Gene Symbol: F10
  Gene Name: coagulation factor X
  Uniprot ID: P00742
  ENSP ID: ENSP00000364709
MGRPLHLVLLSASLAGLLLLGESLFIRREQANNILARVTRANSFLEEMKKGHLERECMEETCSYEEAREVFEDSDKTNEFWNKYKDGDQCETSPCQNQGKCKDGLGEYTCTCLEGFEGKNCELFTRKLCSLDNGDCDQFCHEEQNSVVCSCARGYTLADNGKACIPTGPYPCGKQTLERRKRSVAQATSSSGEAPDSITWKPYDAADLDPTENPFDLLDFNQTQPERGDNNLTRIVGGQECKDGECPWQALLINEENEGFCGGTILSEFYILTAAHCLYQAKRFKVRVGDRNTEQEEGGEAVHEVEVVIKHNRFTKETYDFDIAVLRLKTPITFRMNVAPACLPERDWAESTLMTQKTGIVSGFGRTHEKGRQSTRLKMLEVPYVDRNSCKLSSSFIITQNMFCAGYDTKQEDACQGDSGGPHVTRFKDTYFVTGIVSWGEGCARKGKYGIYTKVTAFLKWIDRSMKTRGLPKAKSHAPEVITSSPLK

SEQ ID NO: 17899 - protein, 130 aa, Homo sapiens
  Payload ID: 3596
  Gene Symbol: F10
  Gene Name: coagulation factor X
  ENSP ID: ENSP00000386320
MGRPLHLVLLSASLAGLLLLGESLFIRREQANNILARVTRANSFLEEMKKGHLERECMEETCSYEEAREVFEDSDKTNEFWNKYKDGDQCETSPCQNQGKCKDGLGEYTCTCLEGFEGKNCELCMLIFAL

SEQ ID NO: 17900 - protein, 334 aa, Homo sapiens
  Payload ID: 3596
  Gene Symbol: F10
  Gene Name: coagulation factor X
  ENSP ID: ENSP00000387092
MGRPLHLVLLSASLAGLLLLGESLFIRREQANNILARVTRANSFLEEMKKGHLERECMEETCSYEEAREVFEDSDKTNEFWNKYKDGDQCETSPCQNQGKCKDGLGEYTCTCLEGFEGKNCELFTRKLCSLDNGDCDQFCHEEQNSVVCSCARGYTLADNGKACIPTGPYPCGKQTLERRKRSVAQATSSSGEAPDSITWKPYDAADLDPTENPFDLLDFNQTQPERGDNNLTRIVGGQECKDGECPWQALLINEENEGFCGGTILSEFYILTAAHCLYQAKRFKVRGTGTRSRRRAVRRCTRWRWSSSTTGSQRRPMTSTSPCSGSRPPSPSA

SEQ ID NO: 17901 - protein, 159 aa, Homo sapiens
  Payload ID: 3597
  Gene Symbol: F11
  Gene Name: coagulation factor XI
  ENSP ID: ENSP00000264691
  MOD_RES (1)..(1): Any amino acid
XVESPKILRVYSGILNQSEIKEDTSFFGVQEIIIHDQYKMAESGYDIALLKLETTVNYTDKIQNTLQKAKIPLVTNEECQKRYRGHKITHKMICAGYREGGKDACKGDSGGPLSCKHNEVWHLVGITSWGEGCAQRERPGVYTNVVEYVDWILEKTQAV

SEQ ID NO: 17902 - protein, 571 aa, Homo sapiens
  Payload ID: 3597
  Gene Symbol: F11
  Gene Name: coagulation factor XI
  Uniprot ID: P03951
  ENSP ID: ENSP00000264692
MIFLYQVVHFILFTSVSGECVTQLLKDTCFEGGDITTVFTPSAKYCQVVCTYHPRCLLFTFTAESPSEDPTRWFTCVLKDSVTETLPRVNRTAAISGYSFKQCSHQISNICLLKHTQTGTPTRITKLDKVVSGFSLKSCALSNLACIRDIFPNTVFADSNIDSVMAPDAFVCGRICTHHPGCLFFTFFSQEWPKESQRNLCLLKTSESGLPSTRIKKSKALSGFSLQSCRHSIPVFCHSSFYHDTDFLGEELDIVAAKSHEACQKLCTNAVRCQFFTYTPAQASCNEGKGKCYLKLSSNGSPTKILHGRGGISGYTLRLCKMDNECTTKIKPRIVGGTASVRGEWPWQVTLHTTSPTQRHLCGGSIIGNQWILTAAHCFYGVESPKILRVYSGILNQSEIKEDTSFFGVQEIIIHDQYKMAESGYDIALLKLETTVNYTDSQRPICLPSKGDRNVIYTDCWVTGWGYRKLRDKIQNTLQKAKIPLVTNEECQKRYRGHKITHKMICAGYREGGKDACKGDSGGPLSCKHNEVWHLVGITSWGEGCAQRERPGVYTNVVEYVDWILEKTQAV

SEQ ID NO: 17903 - protein, 625 aa, Homo sapiens
  Payload ID: 3597
  Gene Symbol: F11
  Gene Name: coagulation factor XI
  Uniprot ID: P03951
  ENSP ID: ENSP00000384957
MIFLYQVVHFILFTSVSGECVTQLLKDTCFEGGDITTVFTPSAKYCQVVCTYHPRCLLFTFTAESPSEDPTRWFTCVLKDSVTETLPRVNRTAAISGYSFKQCSHQISACNKDIYVDLDMKGINYNSSVAKSAQECQERCTDDVHCHFFTYATRQFPSLEHRNICLLKHTQTGTPTRITKLDKVVSGFSLKSCALSNLACIRDIFPNTVFADSNIDSVMAPDAFVCGRICTHHPGCLFFTFFSQEWPKESQRNLCLLKTSESGLPSTRIKKSKALSGFSLQSCRHSIPVFCHSSFYHDTDFLGEELDIVAAKSHEACQKLCTNAVRCQFFTYTPAQASCNEGKGKCYLKLSSNGSPTKILHGRGGISGYTLRLCKMDNECTTKIKPRIVGGTASVRGEWPWQVTLHTTSPTQRHLCGGSIIGNQWILTAAHCFYGVESPKILRVYSGILNQSEIKEDTSFFGVQEIIIHDQYKMAESGYDIALLKLETTVNYTDSQRPICLPSKGDRNVIYTDCWVTGWGYRKLRDKIQNTLQKAKIPLVTNEECQKRYRGHKITHKMICAGYREGGKDACKGDSGGPLSCKHNEVWHLVGITSWGEGCAQRERPGVYTNVVEYVDWILEKTQAV

SEQ ID NO: 17904 - protein, 210 aa, Homo sapiens
  Payload ID: 3597
  Gene Symbol: F11
  Gene Name: coagulation factor XI
  ENSP ID: ENSP00000397401
  MOD_RES (1)..(1): Any amino acid
XSGFSLKSCALSNLACIRDIFPNTVFADSNIDSVMAPDAFVCGRICTHHPGCLFFTFFSQEWPKESQRNLCLLKTSESGLPSTRIKKSKALSGFSLQSCRHSIPVFCHSSFYHDTDFLGEELDIVAAKSHEACQKLCTNAVRCQFFTYTPAQASCNEGKGKCYLKLSSNGSPTKILHGRGGISGYTLRLCKMDNELRGAPMKISGWLKTS

SEQ ID NO: 17905 - protein, 162 aa, Homo sapiens
  Payload ID: 3597
  Gene Symbol: F11
  Gene Name: coagulation factor XI
  ENSP ID: ENSP00000424479
MIFLYQVVHFILFTSVSGECVTQLLKDTCFEGGDITTVFTPSAKYCQVVCTYHPRCLLFTFTAESPSEDPTRWFTCVLKDSVTETLPRVNRTAAISGYSFKQCSHQISACNKDIYVDLDMKGINYNSSVAKSAQECQERCTDDVHCHFFTYATRQFPSLEHR

SEQ ID NO: 17906 - protein, 615 aa, Homo sapiens
  Payload ID: 3598
  Gene Symbol: F12
  Gene Name: coagulation factor XII (Hageman factor)
  Uniprot ID: P00748
  ENSP ID: ENSP00000253496
MRALLLLGFLLVSLESTLSIPPWEAPKEHKYKAEEHTVVLTVTGEPCHFPFQYHRQLYHKCTHKGRPGPQPWCATTPNFDQDQRWGYCLEPKKVKDHCSKHSPCQKGGTCVNMPSGPHCLCPQHLTGNHCQKEKCFEPQLLRFFHKNEIWYRTEQAAVARCQCKGPDAHCQRLASQACRTNPCLHGGRCLEVEGHRLCHCPVGYTGAFCDVDTKASCYDGRGLSYRGLARTTLSGAPCQPWASEATYRNVTAEQARNWGLGGHAFCRNPDNDIRPWCFVLNRDRLSWEYCDLAQCQTPTQAAPPTPVSPRLHVPLMPAQPAPPKPQPTTRTPPQSQTPGALPAKREQPPSLTRNGPLSCGQRLRKSLSSMTRVVGGLVALRGAHPYIAALYWGHSFCAGSLIAPCWVLTAAHCLQDRPAPEDLTVVLGQERRNHSCEPCQTLAVRSYRLHEAFSPVSYQHDLALLRLQEDADGSCALLSPYVQPVCLPSGAARPSETTLCQVAGWGHQFEGAEEYASFLQEAQVPFLSLERCSAPDVHGSSILPGMLCAGFLEGGTDACQGDSGGPLVCEDQAAERRLTLQGIISWGSGCGDRNKPGVYTDVAYYLAWIREHTVS

SEQ ID NO: 17907 - protein, 732 aa, Homo sapiens
  Payload ID: 3599
  Gene Symbol: F13A1
  Gene Name: coagulation factor XIII, A1 polypeptide
  Uniprot ID: P00488
  ENSP ID: ENSP00000264870
MSETSRTAFGGRRAVPPNNSNAAEDDLPTVELQGVVPRGVNLQEFLNVTSVHLFKERWDTNKVDHHTDKYENNKLIVRRGQSFYVQIDFSRPYDPRRDLFRVEYVIGRYPQENKGTYIPVPIVSELQSGKWGAKIVMREDRSVRLSIQSSPKCIVGKFRMYVAVWTPYGVLRTSRNPETDTYILFNPWCEDDAVYLDNEKEREEYVLNDIGVIFYGEVNDIKTRSWSYGQFEDGILDTCLYVMDRAQMDLSGRGNPIKVSRVGSAMVNAKDDEGVLVGSWDNIYAYGVPPSAWTGSVDILLEYRSSENPVRYGQCWVFAGVFNTFLRCLGIPARIVTNYFSAHDNDANLQMDIFLEEDGNVNSKLTKDSVWNYHCWNEAWMTRPDLPVGFGGWQAVDSTPQENSDGMYRCGPASVQAIKHGHVCFQFDAPFVFAEVNSDLIYITAKKDGTHVVENVDATHIGKLIVTKQIGGDGMMDITDTYKFQEGQEEERLALETALMYGAKKPLNTEGVMKSRSNVDMDFEVENAVLGKDFKLSITFRNNSHNRYTITAYLSANITFYTGVPKAEFKKETFDVTLEPLSFKKEAVLIQAGEYMGQLLEQASLHFFVTARINETRDVLAKQKSTVLTIPEIIIKVRGTQVVGSDMTVTVEFTNPLKETLRNVWVHLDGPGVTRPMKKMFREIRPNSTVQWEEVCRPWVSGHRKLIASMSSDSLRHVYGELDVQIQRRPSM

SEQ ID NO: 17908 - protein, 102 aa, Homo sapiens
  Payload ID: 3599
  Gene Symbol: F13A1
  Gene Name: coagulation factor XIII, A1 polypeptide
  ENSP ID: ENSP00000394693
  MOD_RES (1)..(1): Any amino acid
XAYGVPPSAWTGSVDILLEYRSSENPVRYGQCWVFAGVFNTFLRCLGIPARIVTNYFSAHDNDANLQMDIFLEEDGNVNSKLTKDSVWYPSIPAAGMSPKSA

SEQ ID NO: 17909 - protein, 147 aa, Homo sapiens
  Payload ID: 3599
  Gene Symbol: F13A1
  Gene Name: coagulation factor XIII, A1 polypeptide
  ENSP ID: ENSP00000411114
  MOD_RES (1)..(1): Any amino acid
XEAHRASPREGTSGGERLQDLVKSKMSETSRTAFGGRRAVPPNNSNAAEDDLPTVELQGVVPRGVNLQEFLNVTSVHLFKERWDTNKVDHHTDKYENNKLIVRRGQSFYVQIDFSRPYDPRRDLFRVEYVIGECHVQAPVLTPWVAL

SEQ ID NO: 17910 - protein, 138 aa, Homo sapiens
  Payload ID: 3599
  Gene Symbol: F13A1
  Gene Name: coagulation factor XIII, A1 polypeptide
  ENSP ID: ENSP00000413334
MSETSRTAFGGRRAVPPNNSNAAEDDLPTVELQGVVPRGVNLQEFLNVTSVHLFKERWDTNKVDHHTDKYENNKLIVRRGQSFYVQIDFSRPYDPRRDLFRVEYVIGRYPQENKGTYIPVPIVSELQSGKWGAKIVMR

SEQ ID NO: 17911 - protein, 185 aa, Homo sapiens
  Payload ID: 3599
  Gene Symbol: F13A1
  Gene Name: coagulation factor XIII, A1 polypeptide
  ENSP ID: ENSP00000416295
MGNWESEGQVGEKGAPAGITGQMNPFEEVPEAHRASPREGTSGGERLQDLVKSKMSETSRTAFGGRRAVPPNNSNAAEDDLPTVELQGVVPRGVNLQEFLNVTSVHLFKERWDTNKVDHHTDKYENNKLIVRRGQSFYVQIDFSRPYDPRRDLFRVEYVIGRYPQENKGTYIPVPIVSELQSGKW

SEQ ID NO: 17912 - protein, 661 aa, Homo sapiens
  Payload ID: 3600
  Gene Symbol: F13B
  Gene Name: coagulation factor XIII, B polypeptide
  Uniprot ID: P05160
  ENSP ID: ENSP00000356382
MRLKNLTFIIILIISGELYAEEKPCGFPHVENGRIAQYYYTFKSFYFPMSIDKKLSFFCLAGYTTESGRQEEQTTCTTEGWSPEPRCFKKCTKPDLSNGYISDVKLLYKIQENMRYGCASGYKTTGGKDEEVVQCLSDGWSSQPTCRKEHETCLAPELYNGNYSTTQKTFKVKDKVQYECATGYYTAGGKKTEEVECLTYGWSLTPKCTKLKCSSLRLIENGYFHPVKQTYEEGDVVQFFCHENYYLSGSDLIQCYNFGWYPESPVCEGRRNRCPPPPLPINSKIQTHSTTYRHGEIVHIECELNFEIHGSAEIRCEDGKWTEPPKCIEGQEKVACEEPPFIENGAANLHSKIYYNGDKVTYACKSGYLLHGSNEITCNRGKWTLPPECVENNENCKHPPVVMNGAVADGILASYATGSSVEYRCNEYYLLRGSKISRCEQGKWSSPPVCLEPCTVNVDYMNRNNIEMKWKYEGKVLHGDLIDFVCKQGYDLSPLTPLSELSVQCNRGEVKYPLCTRKESKGMCTSPPLIKHGVIISSTVDTYENGSSVEYRCFDHHFLEGSREAYCLDGMWTTPPLCLEPCTLSFTEMEKNNLLLKWDFDNRPHILHGEYIEFICRGDTYPAELYITGSILRMQCDRGQLKYPRCIPRQSTLSYQEPLRT

SEQ ID NO: 17913 - protein, 1224 aa, Homo sapiens
  Payload ID: 3601
  Gene Symbol: COPA
  Gene Name: coatomer protein complex, subunit alpha
  Uniprot ID: P53621
  ENSP ID: ENSP00000241704
MLTKFETKSARVKGLSFHPKRPWILTSLHNGVIQLWDYRMCTLIDKFDEHDGPVRGIDFHKQQPLFVSGGDDYKIKVWNYKLRRCLFTLLGHLDYIRTTFFHHEYPWILSASDDQTIRVWNWQSRTCVCVLTGHNHYVMCAQFHPTEDLVVSASLDQTVRVWDISGLRKKNLSPGAVESDVRGITGVDLFGTTDAVVKHVLEGHDRGVNWAAFHPTMPLIVSGADDRQVKIWRMNESKAWEVDTCRGHYNNVSCAVFHPRQELILSNSEDKSIRVWDMSKRTGVQTFRRDHDRFWVLAAHPNLNLFAAGHDGGMIVFKLERERPAYAVHGNMLHYVKDRFLRQLDFNSSKDVAVMQLRSGSKFPVFNMSYNPAENAVLLCTRASNLENSTYDLYTIPKDADSQNPDAPEGKRSSGLTAVWVARNRFAVLDRMHSLLIKNLKNEITKKVQVPNCDEIFYAGTGNLLLRDADSITLFDVQQKRTLASVKISKVKYVIWSADMSHVALLAKHAIVICNRKLDALCNIHENIRVKSGAWDESGVFIYTTSNHIKYAVTTGDHGIIRTLDLPIYVTRVKGNNVYCLDRECRPRVLTIDPTEFKFKLALINRKYDEVLHMVRNAKLVGQSIIAYLQKKGYPEVALHFVKDEKTRFSLALECGNIEIALEAAKALDDKNCWEKLGEVALLQGNHQIVEMCYQRTKNFDKLSFLYLITGNLEKLRKMMKIAEIRKDMSGHYQNALYLGDVSERVRILKNCGQKSLAYLTAATHGLDEEAESLKETFDPEKETIPDIDPNAKLLQPPAPIMPLDTNWPLLTVSKGFFEGTIASKGKGGALAADIDIDTVGTEGWGEDAELQLDEDGFVEATEGLGDDALGKGQEEGGGWDVEEDLELPPELDISPGAAGGAEDGFFVPPTKGTSPTQIWCNNSQLPVDHILAGSFETAMRLLHDQVGVIQFGPYKQLFLQTYARGRTTYQALPCLPSMYGYPNRNWKDAGLKNGVPAVGLKLNDLIQRLQLCYQLTTVGKFEEAVEKFRSILLSVPLLVVDNKQEIAEAQQLITICREYIVGLSVETERKKLPKETLEQQKRICEMAAYFTHSNLQPVHMILVLRTALNLFFKLKNFKTAATFARRLLELGPKPEVAQQTRKILSACEKNPTDAYQLNYDMHNPFDICAASYRPIYRGKPVEKCPLSGACYSPEFKGQICRVTTVTEIGKDVIGLRISPLQFR

SEQ ID NO: 17914 - protein, 1233 aa, Homo sapiens
  Payload ID: 3601
  Gene Symbol: COPA
  Gene Name: coatomer protein complex, subunit alpha
  Uniprot ID: P53621
  ENSP ID: ENSP00000357048
MLTKFETKSARVKGLSFHPKRPWILTSLHNGVIQLWDYRMCTLIDKFDEHDGPVRGIDFHKQQPLFVSGGDDYKIKVWNYKLRRCLFTLLGHLDYIRTTFFHHEYPWILSASDDQTIRVWNWQSRTCVCVLTGHNHYVMCAQFHPTEDLVVSASLDQTVRVWDISGLRKKNLSPGAVESDVRGITGVDLFGTTDAVVKHVLEGHDRGVNWAAFHPTMPLIVSGADDRQVKIWRMNESKAWEVDTCRGHYNNVSCAVFHPRQELILSNSEDKSIRVWDMSKRTGVQTFRRDHDRFWVLAAHPNLNLFAAGHDGGMIVFKLERERPAYAVHGNMLHYVKDRFLRQLDFNSSKDVAVMQLRSGSKFPVFNMSYNPAENAVLLCTRASNLENSTYDLYTIPKDADSQNPDAPEGKRSSGLTAVWVARNRFAVLDRMHSLLIKNLKNEITKKVQVPNCDEIFYAGTGNLLLRDADSITLFDVQQKRTLASVKISKVKYVIWSADMSHVALLAKHEHSCPLPLTAIVICNRKLDALCNIHENIRVKSGAWDESGVFIYTTSNHIKYAVTTGDHGIIRTLDLPIYVTRVKGNNVYCLDRECRPRVLTIDPTEFKFKLALINRKYDEVLHMVRNAKLVGQSIIAYLQKKGYPEVALHFVKDEKTRFSLALECGNIEIALEAAKALDDKNCWEKLGEVALLQGNHQIVEMCYQRTKNFDKLSFLYLITGNLEKLRKMMKIAEIRKDMSGHYQNALYLGDVSERVRILKNCGQKSLAYLTAATHGLDEEAESLKETFDPEKETIPDIDPNAKLLQPPAPIMPLDTNWPLLTVSKGFFEGTIASKGKGGALAADIDIDTVGTEGWGEDAELQLDEDGFVEATEGLGDDALGKGQEEGGGWDVEEDLELPPELDISPGAAGGAEDGFFVPPTKGTSPTQIWCNNSQLPVDHILAGSFETAMRLLHDQVGVIQFGPYKQLFLQTYARGRTTYQALPCLPSMYGYPNRNWKDAGLKNGVPAVGLKLNDLIQRLQLCYQLTTVGKFEEAVEKFRSILLSVPLLVVDNKQEIAEAQQLITICREYIVGLSVETERKKLPKETLEQQKRICEMAAYFTHSNLQPVHMILVLRTALNLFFKLKNFKTAATFARRLLELGPKPEVAQQTRKILSACEKNPTDAYQLNYDMHNPFDICAASYRPIYRGKPVEKCPLSGACYSPEFKGQICRVTTVTEIGKDVIGLRISPLQFR

SEQ ID NO: 17915 - protein, 953 aa, Homo sapiens
  Payload ID: 3602
  Gene Symbol: COPB1
  Gene Name: coatomer protein complex, subunit beta 1
  Uniprot ID: P53618
  ENSP ID: ENSP00000249923
MTAAENVCYTLINVPMDSEPPSEISLKNDLEKGDVKSKTEALKKVIIMILNGEKLPGLLMTIIRFVLPLQDHTIKKLLLVFWEIVPKTTPDGRLLHEMILVCDAYRKDLQHPNEFIRGSTLRFLCKLKEAELLEPLMPAIRACLEHRHSYVRRNAVLAIYTIYRNFEHLIPDAPELIHDFLVNEKDASCKRNAFMMLIHADQDRALDYLSTCIDQVQTFGDILQLVIVELIYKVCHANPSERARFIRCIYNLLQSSSPAVKYEAAGTLVTLSSAPTAIKAAAQCYIDLIIKESDNNVKLIVLDRLIELKEHPAHERVLQDLVMDILRVLSTPDLEVRKKTLQLALDLVSSRNVEELVIVLKKEVIKTNNVSEHEDTDKYRQLLVRTLHSCSVRFPDMAANVIPVLMEFLSDNNEAAAADVLEFVREAIQRFDNLRMLIVEKMLEVFHAIKSVKIYRGALWILGEYCSTKEDIQSVMTEIRRSLGEIPIVESEIKKEAGELKPEEEITVGPVQKLVTEMGTYATQSALSSSRPTKKEEDRPPLRGFLLDGDFFVAASLATTLTKIALRYVALVQEKKKQNSFVAEAMLLMATILHLGKSSLPKKPITDDDVDRISLCLKVLSECSPLMNDIFNKECRQSLSHMLSAKLEEEKLSQKKESEKRNVTVQPDDPISFMQLTAKNEMNCKEDQFQLSLLAAMGNTQRKEAADPLASKLNKVTQLTGFSDPVYAEAYVHVNQYDIVLDVLVVNQTSDTLQNCTLELATLGDLKLVEKPSPLTLAPHDFANIKANVKVASTENGIIFGNIVYDVSGAASDRNCVVLSDIHIDIMDYIQPATCTDAEFRQMWAEFEWENKVTVNTNMVDLNDYLQHILKSTNMKCLTPEKALSGYCGFMAANLYARSIFGEDALANVSIEKPIHQGPDAAVTGHIRIRAKSQGMALSLGDKINLSQKKTSI

SEQ ID NO: 17916 - protein, 953 aa, Homo sapiens; identical to SEQ ID NO: 17915
  Payload ID: 3602
  Gene Symbol: COPB1
  Gene Name: coatomer protein complex, subunit beta 1
  Uniprot ID: P53618
  ENSP ID: ENSP00000397873

SEQ ID NO: 17917 - protein, 137 aa, Homo sapiens
  Payload ID: 3602
  Gene Symbol: COPB1
  Gene Name: coatomer protein complex, subunit beta 1
  ENSP ID: ENSP00000431530
MTAAENVCYTLINVPMDSEPPSEISLKNDLEKGDVKSKTEALKKVIIMILNGEKLPGLLMTIIRFVLPLQDHTIKKLLLVFWEIVPKTTPDGRLLHEMILVCDAYRKDLQHPNEFIRGSTLRFLCKLKEAELLEPLM

SEQ ID NO: 17918 - protein, 485 aa, Homo sapiens
  Payload ID: 3602
  Gene Symbol: COPB1
  Gene Name: coatomer protein complex, subunit beta 1
  ENSP ID: ENSP00000436383
MTAAENVCYTLINVPMDSEPPSEISLKNDLEKGDVKSKTEALKKVIIMILNGEKLPGLLMTIIRFVLPLQDHTIKKLLLVFWEIVPKTTPDGRLLHEMILVCDAYRKDLQHPNEFIRGSTLRFLCKLKEAELLEPLMPAIRACLEHRHSYVRRNAVLAIYTIYRNFEHLIPDAPELIHDFLVNEKDASCKRNAFMMLIHADQDRALDYLSTCIDQVQTFGDILQLVIVELIYKVCHANPSERARFIRCIYNLLQSSSPAVKYEAAGTLVTLSSAPTAIKAAAQCYIDLIIKESDNNVKLIVLDRLIELKEHPAHERVLQDLVMDILRVLSTPDLEVRKKTLQLALDLVSSRNVEELVIVLKKEVIKTNNVSEHEDTDKYRQLLVRTLHSCSVRFPDMAANVIPVLMEFLSDNNEAAAADVLEFVREAIQRFDNLRMLIVEKMLEVFHAIKSVKIYRGALWILGEYCSTKEDIQSVMTEIRRSLGE

SEQ ID NO: 17919 - protein, 132 aa, Homo sapiens
  Payload ID: 3602
  Gene Symbol: COPB1
  Gene Name: coatomer protein complex, subunit beta 1
  ENSP ID: ENSP00000436401
MTAAENVCYTLINVPMDSEPPSEISLKNDLEKGDVKSKTEALKKVIIMILNGEKLPGLLMTIIRFVLPLQDHTIKKLLLVFWEIVPKTTPDGRLLHEMILVCDAYRKDLQHPNEFIRGSTLRFLCKLKEAEL

SEQ ID NO: 17920 - protein, 906 aa, Homo sapiens
  Payload ID: 3603
  Gene Symbol: COPB2
  Gene Name: coatomer protein complex, subunit beta 2 (beta prime)
  Uniprot ID: P35606
  ENSP ID: ENSP00000329419
MPLRLDIKRKLTARSDRVKSVDLHPTEPWMLASLYNGSVCVWNHETQTLVKTFEVCDLPVRAAKFVARKNWVVTGADDMQIRVFNYNTLERVHMFEAHSDYIRCIAVHPTQPFILTSSDDMLIKLWDWDKKWSCSQVFEGHTHYVMQIVINPKDNNQFASASLDRTIKVWQLGSSSPNFTLEGHEKGVNCIDYYSGGDKPYLISGADDRLVKIWDYQNKTCVQTLEGHAQNVSCASFHPELPIIITGSEDGTVRIWHSSTYRLESTLNYGMERVWCVASLRGSNNVALGYDEGSIIVKLGREEPAMSMDANGKIIWAKHSEVQQANLKAMGDAEIKDGERLPLAVKDMGSCEIYPQTIQHNPNGRFVVVCGDGEYIIYTAMALRNKSFGSAQEFAWAHDSSEYAIRESNSIVKIFKNFKEKKSFKPDFGAESIYGGFLLGVRSVNGLAFYDWDNTELIRRIEIQPKHIFWSDSGELVCIATEESFFILKYLSEKVLAAQETHEGVTEDGIEDAFEVLGEIQEIVKTGLWVGDCFIYTSSVNRLNYYVGGEIVTIAHLDRTMYLLGYIPKDNRLYLGDKELNIISYSLLVSVLEYQTAVMRRDFSMADKVLPTIPKEQRTRVAHFLEKQGFKQQALTVSTDPEHRFELALQLGELKIAYQLAVEAESEQKWKQLAELAISKCQFGLAQECLHHAQDYGGLLLLATASGNANMVNKLAEGAERDGKNNVAFMSYFLQGKVDACLELLIRTGRLPEAAFLARTYLPSQVSRVVKLWRENLSKVNQKAAESLADPTEYENLFPGLKEAFVVEEWVKETHADLWPAKQYPLVTPNEERNVMEEGKDFQPSRSTAQQELDGKPASPTPVIVASHTANKEEKSLLELEVDLDNLELEDIDTTDINLDEDILDD

SEQ ID NO: 17921 - protein, 877 aa, Homo sapiens
  Payload ID: 3603
  Gene Symbol: COPB2
  Gene Name: coatomer protein complex, subunit beta 2 (beta prime)
  Uniprot ID: P35606
  ENSP ID: ENSP00000422295
MLASLYNGSVCVWNHETQTLVKTFEVCDLPVRAAKFVARKNWVVTGADDMQIRVFNYNTLERVHMFEAHSDYIRCIAVHPTQPFILTSSDDMLIKLWDWDKKWSCSQVFEGHTHYVMQIVINPKDNNQFASASLDRTIKVWQLGSSSPNFTLEGHEKGVNCIDYYSGGDKPYLISGADDRLVKIWDYQNKTCVQTLEGHAQNVSCASFHPELPIIITGSEDGTVRIWHSSTYRLESTLNYGMERVWCVASLRGSNNVALGYDEGSIIVKLGREEPAMSMDANGKIIWAKHSEVQQANLKAMGDAEIKDGERLPLAVKDMGSCEIYPQTIQHNPNGRFVVVCGDGEYIIYTAMALRNKSFGSAQEFAWAHDSSEYAIRESNSIVKIFKNFKEKKSFKPDFGAESIYGGFLLGVRSVNGLAFYDWDNTELIRRIEIQPKHIFWSDSGELVCIATEESFFILKYLSEKVLAAQETHEGVTEDGIEDAFEVLGEIQEIVKTGLWVGDCFIYTSSVNRLNYYVGGEIVTIAHLDRTMYLLGYIPKDNRLYLGDKELNIISYSLLVSVLEYQTAVMRRDFSMADKVLPTIPKEQRTRVAHFLEKQGFKQQALTVSTDPEHRFELALQLGELKIAYQLAVEAESEQKWKQLAELAISKCQFGLAQECLHHAQDYGGLLLLATASGNANMVNKLAEGAERDGKNNVAFMSYFLQGKVDACLELLIRTGRLPEAAFLARTYLPSQVSRVVKLWRENLSKVNQKAAESLADPTEYENLFPGLKEAFVVEEWVKETHADLWPAKQYPLVTPNEERNVMEEGKDFQPSRSTAQQELDGKPASPTPVIVASHTANKEEKSLLELEVDLDNLELEDIDTTDINLDEDILDD

SEQ ID NO: 17922 - protein, 77 aa, Homo sapiens
  Payload ID: 3603
  Gene Symbol: COPB2
  Gene Name: coatomer protein complex, subunit beta 2 (beta prime)
  ENSP ID: ENSP00000422469
MLASLYNGSVCVWNHETQTLVKTFEVCDLPVRAAKFVARKNWVVTGADDMQIRVFNYNTLERVHMFEAHSDYIRCIA

SEQ ID NO: 17923 - protein, 111 aa, Homo sapiens
  Payload ID: 3603
  Gene Symbol: COPB2
  Gene Name: coatomer protein complex, subunit beta 2 (beta prime)
  ENSP ID: ENSP00000422547
MLASLYNGSVCVWNHETQTLVKTFEVCDLPVRAAKFVARKNWVVTGADDMQIRVFNYNTLERVHMFEAHSDYIRCIAVHPTQPFILTSSDDMLIKLWDWDKKWSCSQVFEG

SEQ ID NO: 17924 - protein, 177 aa, Homo sapiens
  Payload ID: 3603
  Gene Symbol: COPB2
  Gene Name: coatomer protein complex, subunit beta 2 (beta prime)
  ENSP ID: ENSP00000422917
YTAMALRNKSFGSAQEFAWAHDSSEYAIRESNSIVKIFKNFKEKKSFKPDFGAESIYGGFLLGVRSVNGLAFYDWDNTELIRRIEIQPKHIFWSDSGELVCIATEESFFILKYLSEKVLAAQETHEGVTEDGIEDAFEVLGEIQEIVKTGLWVDLDNLELEDIDTTDINLDEDILDD

SEQ ID NO: 17925 - protein, 152 aa, Homo sapiens
  Payload ID: 3603
  Gene Symbol: COPB2
  Gene Name: coatomer protein complex, subunit beta 2 (beta prime)
  ENSP ID: ENSP00000423271
MPLRLDIKRKLTARSDRVKSVDLHPTEPWMLASLYNGSVCVWNHETQTLVKTFEVCDLPVRAAKFVARKNWVVTGADDMQIRVFNYNTLERVHMFEAHSDYIRCIAVHPTQPFILTSSGHTHYVMQIVINPKDNNQFASASLDRTIKVWQLG

SEQ ID NO: 17926 - protein, 89 aa, Homo sapiens
  Payload ID: 3603
  Gene Symbol: COPB2
  Gene Name: coatomer protein complex, subunit beta 2 (beta prime)
  ENSP ID: ENSP00000424144
MLASLYNGSVCVWNHETQTLVKTFEVCDLPVRAAKFVARKNWVVTGADDMQIRVFNYNTLERVHMFEAHSDYIRCIAVHPTQPFILTSS

SEQ ID NO: 17927 - protein, 118 aa, Homo sapiens
  Payload ID: 3603
  Gene Symbol: COPB2
  Gene Name: coatomer protein complex, subunit beta 2 (beta prime)
  ENSP ID: ENSP00000426682
  MOD_RES (1)..(1): Any amino acid
XLADPTEYENLFPGLKEAFVVEEWVKETHADLWPAKQYPLVTPNEERNVMEEGKDFQPSRSTAQQELDGKPASPTPVIVASHTANKEEKQPDPWPLEPTGHLDGARDTAGPSWLHHRF

SEQ ID NO: 17928 - protein, 86 aa, Homo sapiens
  Payload ID: 3603
  Gene Symbol: COPB2
  Gene Name: coatomer protein complex, subunit beta 2 (beta prime)
  ENSP ID: ENSP00000427185
MLASLYNGSVCVWNHETQTLVKTFEVCDLPVRAAKFVARKNWVVTGADDMQIRVFNYNTLERVHMFEAHSDYIRCIAVHPTQPFIL

SEQ ID NO: 17929 - protein, 308 aa, Homo sapiens
  Payload ID: 3604
  Gene Symbol: COPE
  Gene Name: coatomer protein complex, subunit epsilon
  Uniprot ID: O14579
  ENSP ID: ENSP00000262812
MAPPAPGPASGGSGEVDELFDVKNAFYIGSYQQCINEAQRVKLSSPERDVERDVFLYRAYLAQRKFGVVLDEIKPSSAPELQAVRMFADYLAHESRRDSIVAELDREMSRSVDVTNTTFLLMAASIYLHDQNPDAALRALHQGDSLECTAMTVQILLKLDRLDLARKELKRMQDLDEDATLTQLATAWVSLATGGEKLQDAYYIFQEMADKCSPTLLLLNGQAACHMAQGRWEAAEGLLQEALDKDSGYPETLVNLIVLSQHLGKPPEVTNRYLSQLKDAHRSHPFIKEYQAKENDFDRLVLQYAPSA

SEQ ID NO: 17930 - protein, 256 aa, Homo sapiens
  Payload ID: 3604
  Gene Symbol: COPE
  Gene Name: coatomer protein complex, subunit epsilon
  Uniprot ID: O14579
  ENSP ID: ENSP00000343134
MAPPAPGPASGGSGEVDELFDVKNAFYIGSYQQCINEAQRVKLSSPERDVERDVFLYRAYLAQRKFGVVLDEIKPSSAPELQAVRMFADYLAHESRRDSIVAELDREMSRSVDVTNTTFLLMAASIYLHDQNPDAALRALHQGDSLECTAMTVQILLKLDRLDLARKELKRMQDLDEDATLTQLATAWVSLATDSGYPETLVNLIVLSQHLGKPPEVTNRYLSQLKDAHRSHPFIKEYQAKENDFDRLVLQYAPSA

SEQ ID NO: 17931 - protein, 257 aa, Homo sapiens
  Payload ID: 3604
  Gene Symbol: COPE
  Gene Name: coatomer protein complex, subunit epsilon
  Uniprot ID: O14579
  ENSP ID: ENSP00000345674
MAPPAPGPASGGSGEVDELFDVKNAFYIGSYQQCINEAQRVKLSSPERDVERDVFLYRAYLAQRKFGVVLDEIKPSSAPELQAVRMFADYLAHESRSTAMTVQILLKLDRLDLARKELKRMQDLDEDATLTQLATAWVSLATGGEKLQDAYYIFQEMADKCSPTLLLLNGQAACHMAQGRWEAAEGLLQEALDKDSGYPETLVNLIVLSQHLGKPPEVTNRYLSQLKDAHRSHPFIKEYQAKENDFDRLVLQYAPSA

SEQ ID NO: 17932 - protein, 331 aa, Homo sapiens
  Payload ID: 3604
  Gene Symbol: COPE
  Gene Name: coatomer protein complex, subunit epsilon
  ENSP ID: ENSP00000469035
MAPPAPGPASGGSGEVDELFDVKNAFYIGSYQQCINEAQRVKLSSPERDVERDVFLYRAYLAQRKFGVVLDEIKPSSAPELQAVRMFADYLAHESRRDSIVAELDREMSRSVDVTNTTFLLMAASIYLHDQNPDAALRALHQGDSLEWVSSPGRALHLEAQPMEAASPDGRTAMTVQILLKLDRLDLARKELKRMQDLDEDATLTQLATAWVSLATGGEKLQDAYYIFQEMADKCSPTLLLLNGQAACHMAQGRWEAAEGLLQEALDKDSGYPETLVNLIVLSQHLGKPPEVTNRYLSQLKDAHRSHPFIKEYQAKENDFDRLVLQYAPSA

SEQ ID NO: 17933 - protein, 146 aa, Homo sapiens
  Payload ID: 3604
  Gene Symbol: COPE
  Gene Name: coatomer protein complex, subunit epsilon
  ENSP ID: ENSP00000471034
MAPPAPGPASGGSGEVDELFDVKNAFYIGSYQQCINEAQRVKLSSPERDVERDVFLYRAYLAQRKFGVVLDEIKPSSAPELQAVRMFADYLAHESRRVVRSCRMPTTSSRRWLTSARPPCCCSMGRRPATWPRAAGRPLRACCRRR

SEQ ID NO: 17934 - protein, 307 aa, Homo sapiens
  Payload ID: 3604
  Gene Symbol: COPE
  Gene Name: coatomer protein complex, subunit epsilon
  ENSP ID: ENSP00000483420
MAPPAPAGLRGSGEVDELFDVKNAFYIGSYQQCINEAQRVKLSSPERDVERDVFLYRAYLAQRKFGVVLDEIKPSSAPELQAVRMFADYLAHESRRDSIVAELDREMSRSVDVTNTTFLLMAASIYLHDQNPDAALRALHQGDSLECTAMTVQILLKLDRLDLARKELKRMQDLDEDATLTQLATAWVSLATGGEKLQDAYYIFQEMADKCSPTLLLLNGQAACHMAQGRWEAAEGLLQEALDKDSGYPETLVNLIVLSQHLGKPPEVTNRYLSQLKDAHRSHPFIKEYQAKENDFDRLVLQYAPSA

SEQ ID NO: 17935 - protein, 874 aa, Homo sapiens
  Payload ID: 3605
  Gene Symbol: COPG1
  Gene Name: coatomer protein complex, subunit gamma 1
  Uniprot ID: Q9Y678
  ENSP ID: ENSP00000325002
MLKKFDKKDEESGGGSNPFQHLEKSAVLQEARVFNETPINPRKCAHILTKILYLINQGEHLGTTEATEAFFAMTKLFQSNDPTLRRMCYLTIKEMSCIAEDVIIVTSSLTKDMTGKEDNYRGPAVRALCQITDSTMLQAIERYMKQAIVDKVPSVSSSALVSSLHLLKCSFDVVKRWVNEAQEAASSDNIMVQYHALGLLYHVRKNDRLAVNKMISKVTRHGLKSPFAYCMMIRVASKQLEEEDGSRDSPLFDFIESCLRNKHEMVVYEAASAIVNLPGCSAKELAPAVSVLQLFCSSPKAALRYAAVRTLNKVAMKHPSAVTACNLDLENLVTDSNRSIATLAITTLLKTGSESSIDRLMKQISSFMSEISDEFKVVVVQAISALCQKYPRKHAVLMNFLFTMLREEGGFEYKRAIVDCIISIIEENSESKETGLSHLCEFIEDCEFTVLATRILHLLGQEGPKTTNPSKYIRFIYNRVVLEHEEVRAGAVSALAKFGAQNEEMLPSILVLLKRCVMDDDNEVRDRATFYLNVLEQKQKALNAGYILNGLTVSIPGLERALQQYTLEPSEKPFDLKSVPLATAPMAEQRTESTPITAVKQPEKVAATRQEIFQEQLAAVPEFRGLGPLFKSSPEPVALTESETEYVIRCTKHTFTNHMVFQFDCTNTLNDQTLENVTVQMEPTEAYEVLCYVPARSLPYNQPGTCYTLVALPKEDPTAVACTFSCMMKFTVKDCDPTTGETDDEGYEDEYVLEDLEVTVADHIQKVMKLNFEAAWDEVGDEFEKEETFTLSTIKTLEEAVGNIVKFLGMHPCERSDKVPDNKNTHTLLLAGVFRGGHDILVRSRLLLLDTVTMQVTARSLEELPVDIILASVG

SEQ ID NO: 17936 - protein, 76 aa, Homo sapiens
  Payload ID: 3605
  Gene Symbol: COPG1
  Gene Name: coatomer protein complex, subunit gamma 1
  ENSP ID: ENSP00000420916
  MOD_RES (1)..(1): Any amino acid
XMEPTEAYEVLCYVPARSLPYNQPGTCYTLVALPKEDPTAVACTFSCMMKFTVKDCDPTTGETDDEGYEDEYVSHS

SEQ ID NO: 17937 - protein, 188 aa, Homo sapiens
  Payload ID: 3605
  Gene Symbol: COPG1
  Gene Name: coatomer protein complex, subunit gamma 1
  ENSP ID: ENSP00000422478
  MOD_RES (1)..(1): Any amino acid
XITEWSWSMRSLPYNQPGTCYTLVALPKEDPTAVACTFSCMMKFTVKDCDPTTGETDDEGYEDEYVLEDLEVTVADHIQKVMKLNFEAAWDEVGDEFEKEETFTLSTIKTLEEAVGNIVKFLGMHPCERSDKVPDNKNTHTLLLAGVFRGGHDILVRSRLLLLDTVTMQVTARSLEELPVDIILASVG

SEQ ID NO: 17938 - protein, 49 aa, Homo sapiens
  Payload ID: 3605
  Gene Symbol: COPG1
  Gene Name: coatomer protein complex, subunit gamma 1
  ENSP ID: ENSP00000426457
MLKKFDKKDEESGGGSNPFQHLEKSAVLQEASDICSPLASIINIHHQCN

SEQ ID NO: 17939 - protein, 726 aa, Homo sapiens
  Payload ID: 3606
  Gene Symbol: COPG2
  Gene Name: coatomer protein complex, subunit gamma 2
  Uniprot ID: Q9UBF2
  ENSP ID: ENSP00000331218
MIKKFDKKDEESGSGSNPFQHLEKSAVLQEARIFNETPINPRRCLHILTKILYLLNQGEHFGTTEATEAFFAMTRLFQSNDQTLRRMCYLTIKEMATISEDVIIVTSSLTKDMTGKEDVYRGPAIRALCRITDGTMLQAIERYMKQAIVDKVSSVSSSALVSSLHMMKISYDVVKRWINEAQEAASSDNIMVQYHALGVLYHLRKNDRLAVSKMLNKFTKSGLKSQFAYCMLIRIASRLLKETEDGHESPLFDFIESCLRNKHEMVIYEAASAIIHLPNCTARELAPAVSVLQLFCSSPKPALRYAAVRTLNKVAMKHPSAVTACNLDLENLITDSNRSIATLAITTLLKTGSESSVDRLMKQISSFVSEISDEFKVVVVQAISALCQKYPRKHSVMMTFLSNMLRDDGGFEYKRAIVDCIISIVEENPESKEAGLAHLCEFIEDCEHTVLATKILHLLGKEGPRTPVPSKYIRFIFNRVVLENEAVRAAAVSALAKFGAQNESLLPSILVLLQRCMMDTDDEVRDRATFYLNVLQQRQMALNATYIFNGLTVSVPGMEKALHQYTLEPSEKPFDMKSIPLAMAPVFEQKAEITLVATKPEKLAPSRQDIFQEQLAAIPEFLNIGPLFKSSEPVQLTEAETEYFVRCIKHMFTNHIVFQFDCTNTLNDQLLEKVTVQMEPSDSYEVLSCIPAPSLPYNQPGICYTLVRLPDDDPTAGTNPQKGGDT

SEQ ID NO: 17940 - protein, 871 aa, Homo sapiens
  Payload ID: 3606
  Gene Symbol: COPG2
  Gene Name: coatomer protein complex, subunit gamma 2
  Uniprot ID: Q9UBF2
  ENSP ID: ENSP00000402346
MIKKFDKKDEESGSGSNPFQHLEKSAVLQEARIFNETPINPRRCLHILTKILYLLNQGEHFGTTEATEAFFAMTRLFQSNDQTLRRMCYLTIKEMATISEDVIIVTSSLTKDMTGKEDVYRGPAIRALCRITDGTMLQAIERYMKQAIVDKVSSVSSSALVSSLHMMKISYDVVKRWINEAQEAASSDNIMVQYHALGVLYHLRKNDRLAVSKMLNKFTKSGLKSQFAYCMLIRIASRLLKETEDGHESPLFDFIESCLRNKHEMVIYEAASAIIHLPNCTARELAPAVSVLQLFCSSPKPALRYAAVRTLNKVAMKHPSAVTACNLDLENLITDSNRSIATLAITTLLKTGSESSVDRLMKQISSFVSEISDEFKVVVVQAISALCQKYPRKHSVMMTFLSNMLRDDGGFEYKRAIVDCIISIVEENPESKEAGLAHLCEFIEDCEHTVLATKILHLLGKEGPRTPVPSKYIRFIFNRVVLENEAVRAAAVSALAKFGAQNESLLPSILVLLQRCMMDTDDEVRDRATFYLNVLQQRQMALNATYIFNGLTVSVPGMEKALHQYTLEPSEKPFDMKSIPLAMAPVFEQKAEITLVATKPEKLAPSRQDIFQEQLAAIPEFLNIGPLFKSSEPVQLTEAETEYFVRCIKHMFTNHIVFQFDCTNTLNDQLLEKVTVQMEPSDSYEVLSCIPAPSLPYNQPGICYTLVRLPDDDPTAVAGSFSCTMKFTVRDCDPNTGVPDEDGYDDEYVLEDLEVTVSDHIQKVLKPNFAAAWEEVGDTFEKEETFALSSTKTLEEAVNNIITFLGMQPCERSDKVPENKNSHSLYLAGIFRGGYDLLVRSRLALADGVTMQVTVRSKERTPVDVILASVG

SEQ ID NO: 17941 - protein, 177 aa, Homo sapiens
  Payload ID: 3607
  Gene Symbol: COPZ1
  Gene Name: coatomer protein complex, subunit zeta 1
  Uniprot ID: P61923
  ENSP ID: ENSP00000262061
MEALILEPSLYTVKAILILDNDGDRLFAKYYDDTYPSVKEQKAFEKNIFNKTHRTDSEIALLEGLTVVYKSSIDLYFYVIGSSYENELMLMAVLNCLFDSLSQMLRKNVEKRALLENMEGLFLAVDEIVDGGVILESDPQQVVHRVALRGEDVPLTEQTVSQVLQSAKEQIKWSLLR

SEQ ID NO: 17942 - protein, 154 aa, Homo sapiens
  Payload ID: 3607
  Gene Symbol: COPZ1
  Gene Name: coatomer protein complex, subunit zeta 1
  Uniprot ID: P61923
  ENSP ID: ENSP00000410620
MEALILYYDDTYPSVKEQKAFEKNIFNKTHRTDSEIALLEGLTVVYKSSIDLYFYVIGSSYENELMLMAVLNCLFDSLSQMLRKNVEKRALLENMEGLFLAVDEIVDGGVILESDPQQVVHRVALRGEDVPLTEQTVSQVLQSAKEQIKWSLLR

SEQ ID NO: 17943 - protein, 107 aa, Homo sapiens
  Payload ID: 3607
  Gene Symbol: COPZ1
  Gene Name: coatomer protein complex, subunit zeta 1
  ENSP ID: ENSP00000447100
MEALILEPSLYTVKAILILDNDGDRLFAKYYDDTYPSVKEQKAFEKNIFNKTHRTDSEIALLEGLTVVYKSSIDLYFYVIGSSYENEEKCRKASTAGEHGGAVLGCG

SEQ ID NO: 17944 - protein, 95 aa, Homo sapiens
  Payload ID: 3607
  Gene Symbol: COPZ1
  Gene Name: coatomer protein complex, subunit zeta 1
  ENSP ID: ENSP00000448005
MEALILEPSLYTVKAILILDNDGDRLFAKYYDDTYPSVKEQKAFEKNIFNKTHRTDTDAYGCSELSLRLIEPDAEEKCRKASTAGEHGGAVLGCG

SEQ ID NO: 17945 - protein, 119 aa, Homo sapiens
  Payload ID: 3607
  Gene Symbol: COPZ1
  Gene Name: coatomer protein complex, subunit zeta 1
  ENSP ID: ENSP00000448235
MEALILEPSLYTVKAILILDNDGDRLFAKLMLMAVLNCLFDSLSQMLRKNVEKRALLENMEGLFLAVDEIVDGGVILESDPQQVVHRVALRGEDVPLTEQTVSQVLQSAKEQIKWSLLR

SEQ ID NO: 17946 - protein, 160 aa, Homo sapiens
  Payload ID: 3607
  Gene Symbol: COPZ1
  Gene Name: coatomer protein complex, subunit zeta 1
  Uniprot ID: P61923
  ENSP ID: ENSP00000448444
MEALILEPSLYTVKAILILDNDGDRLFAKYYDDTYPSVKEQKAFEKNIFNKTHRTDSEIALLEGLTVVYKSSIDLYFYVIGSSYENELMLMAVLNCLFDSLSQMLRKNVEKRALLENMEGLFLAVDEIVDGGVILESDPQQVVHRVLQSAKEQIKWSLLR

SEQ ID NO: 17947 - protein, 89 aa, Homo sapiens
  Payload ID: 3607
  Gene Symbol: COPZ1
  Gene Name: coatomer protein complex, subunit zeta 1
  ENSP ID: ENSP00000448945
MLMAVLNCLFDSLSQMLRKNVEKRALLENMEGLFLAVDEIVDGGVILESDPQQVVHRVALRGEDVPLTEQTVSQVLQSAKEQIKWSLLR

SEQ ID NO: 17948 - protein, 164 aa, Homo sapiens
  Payload ID: 3607
  Gene Symbol: COPZ1
  Gene Name: coatomer protein complex, subunit zeta 1
  ENSP ID: ENSP00000448997
MEALILYYDDTYPSVKEQKAFEKNIFNKTHRTDSEIALLEGLTVVYKSSIDLYFYVIGSSYENELMLMAVLNCLFDSLSQMLRKNVEKRALLENMEGLFLAVDEIVDGGVILESDPQQVVHRVALRGEDVPLTEQTVSQVYLFSLHPLSGFEFFWNFPNNLLGP

SEQ ID NO: 17949 - protein, 138 aa, Homo sapiens
  Payload ID: 3607
  Gene Symbol: COPZ1
  Gene Name: coatomer protein complex, subunit zeta 1
  ENSP ID: ENSP00000449072
MGGFRTEGMFVSLQEPSLYTVKAILILDNDGDRLFAKYYDDTYPSVKEQKAFEKNIFNKTHRTDSEIALLEGLTVVYKSSIDLYFYVIGSSYENELMLMAVLNCLFDSLSQMLRKNVEKRALLENMEGLFLAVDEIVD

SEQ ID NO: 17950 - protein, 163 aa, Homo sapiens
  Payload ID: 3607
  Gene Symbol: COPZ1
  Gene Name: coatomer protein complex, subunit zeta 1
  ENSP ID: ENSP00000449108
MEALILEPSLYTVKAILILDNDGDRLFAKYYDDTYPSVKEQKAFEKNIFNKTHRTDSEIALLEGLTVVYKSSIDLYFYVIGSSYENELMLMAVLNCLFDSLSQMLRKNVEKRALLENMEGLFLAVDEIVDGGVILESDPQQVVHRVALRGEDVPLTEQTVSQV

SEQ ID NO: 17951 - protein, 185 aa, Homo sapiens
  Payload ID: 3607
  Gene Symbol: COPZ1
  Gene Name: coatomer protein complex, subunit zeta 1
  Uniprot ID: P61923
  ENSP ID: ENSP00000449270
MGGFRTEGMFVSLQEPSLYTVKAILILDNDGDRLFAKYYDDTYPSVKEQKAFEKNIFNKTHRTDSEIALLEGLTVVYKSSIDLYFYVIGSSYENELMLMAVLNCLFDSLSQMLRKNVEKRALLENMEGLFLAVDEIVDGGVILESDPQQVVHRVALRGEDVPLTEQTVSQVLQSAKEQIKWSLLR

SEQ ID NO: 17952 - protein, 198 aa, Homo sapiens
  Payload ID: 3607
  Gene Symbol: COPZ1
  Gene Name: coatomer protein complex, subunit zeta 1
  ENSP ID: ENSP00000449341
MEALILEPSLYTVKAILILDNDGDRLFAKYYDDTYPSVKEQKAFEKNIFNKTHRTDSEIALLEGLTVVYKSSIDLYFYVIGSSYENELMLMAVLNCLFDSLSQMLRTGSTQAGGLHESSSRQAWATQKNVEKRALLENMEGLFLAVDEIVDGGVILESDPQQVVHRVALRGEDVPLTEQTVSQVLQSAKEQIKWSLLR

SEQ ID NO: 17953 - protein, 92 aa, Homo sapiens
  Payload ID: 3607
  Gene Symbol: COPZ1
  Gene Name: coatomer protein complex, subunit zeta 1
  ENSP ID: ENSP00000449414
MEALILEPSLYTVKAILILDNDGDRLFAKYYDDTYPSVKEQKAFEKNIFNKTHRTDSEIALLEGLTVVYKSSIDLYFYVIGSSYENELMLMA

SEQ ID NO: 17954 - protein, 141 aa, Homo sapiens
  Payload ID: 3608
  Gene Symbol: COPZ2
  Gene Name: coatomer protein complex, subunit zeta 2
  ENSP ID: ENSP00000462035
  MOD_RES (1)..(1): Any amino acid
XTIKAVFILDNDGRRLLAKYYDDTFPSMKEQMVFEKNVFNKTSRTESEIAFFGGMTIVYKNSIDLFLYVVGSSYENELMLMSVLTCLFESLNHMLSVILESDPQQVIQKVNFRADDGGLTEQSVAQVLQSAKEQIKWSLLK

SEQ ID NO: 17955 - protein, 45 aa, Homo sapiens
  Payload ID: 3608
  Gene Symbol: COPZ2
  Gene Name: coatomer protein complex, subunit zeta 2
  ENSP ID: ENSP00000463413
DLFLYVVGSSYENEEERGEALVAGEHGRSLLGAGRDCGWRCDSGE

SEQ ID NO: 17956 - protein, 9 aa, Homo sapiens
  Payload ID: 3608
  Gene Symbol: COPZ2
  Gene Name: coatomer protein complex, subunit zeta 2
  ENSP ID: ENSP00000463581
MKEQMVFEK

SEQ ID NO: 17957 - protein, 56 aa, Homo sapiens
  Payload ID: 3608
  Gene Symbol: COPZ2
  Gene Name: coatomer protein complex, subunit zeta 2
  ENSP ID: ENSP00000463687
  MOD_RES (1)..(1): Any amino acid
XIKAVFILDNDGRRLLAKYYDDTFPSMKEQMVFEKNVFNKTSRTETDAHVCSHLPV

SEQ ID NO: 17958 - protein, 79 aa, Homo sapiens
  Payload ID: 3608
  Gene Symbol: COPZ2
  Gene Name: coatomer protein complex, subunit zeta 2
  ENSP ID: ENSP00000463841
RTESEIAFFGGMTIVYKNSIDLFLYVVGSSYENELMLMSVLTCLFESLNHMLRKNVEKRWLLENMDGAFLVLDEIVDGG

SEQ ID NO: 17959 - protein, 116 aa, Homo sapiens
  Payload ID: 3608
  Gene Symbol: COPZ2
  Gene Name: coatomer protein complex, subunit zeta 2
  ENSP ID: ENSP00000464484
GMTIVYKNSIDLFLYVVGSSYENELMLMSVLTCLFESLNHMLRKNVEKRWLLENMDGAFLVLDEIVDGGVILESDPQQVIQKVNFRADDGGLTEQSVAQVSLLRLILLVWNFPPWR

SEQ ID NO: 17960 - protein, 210 aa, Homo sapiens
  Payload ID: 3608
  Gene Symbol: COPZ2
  Gene Name: coatomer protein complex, subunit zeta 2
  Uniprot ID: Q9P299
  ENSP ID: ENSP00000480707
MQRPEAWPRPHPGEGAAAAQAGGPAPPARAGEPSGLRLQEPSLYTIKAVFILDNDGRRLLAKYYDDTFPSMKEQMVFEKNVFNKTSRTESEIAFFGGMTIVYKNSIDLFLYVVGSSYENELMLMSVLTCLFESLNHMLRKNVEKRWLLENMDGAFLVLDEIVDGGVILESDPQQVIQKVNFRADDGGLTEQSVAQVLQSAKEQIKWSLLK

SEQ ID NO: 17961 - protein, 359 aa, Homo sapiens
  Payload ID: 3609
  Gene Symbol: CBWD1
  Gene Name: COBW domain containing 1
  Uniprot ID: Q9BRT8
  ENSP ID: ENSP00000323433
MYFKRAARAFPVLLTGAGKTTLLNYILTEQHSKRVAVILNEFGEGSALEKSLAVSQGGELYEEWLELRNGCLCCSVKDSGLRAIENLMQKKGKFDYILLETTGLADPGAVASMFWVDAELGSDIYLDGIITIVDSKYGLKHLTEEKPDGLINEATRQVALADAILINKTDLVPEEDVKKLRTTIRSINGLGQILETQRSRVDLSNVLDLHAFDSLSGISLQKKLQHVPGTQPHLDQSIVTITFEVPGNAKEEHLNMFIQNLLWEKNVRNKDNHCMEVIRLKGLVSIKDKSQQVIVQGVHELYDLEETPVSWKDDTERTNRLVLLGRNLDKDILKQLFIATVTETEKQWTTRFQEDQVCT

SEQ ID NO: 17962 - protein, 395 aa, Homo sapiens
  Payload ID: 3609
  Gene Symbol: CBWD1
  Gene Name: COBW domain containing 1
  Uniprot ID: Q9BRT8
  ENSP ID: ENSP00000348915
MLPAVGSADEEEDPAEEDCPELVPIETTQSEEEEKSGLGAKIPVTIITGYLGAGKTTLLNYILTEQHSKRVAVILNEFGEGSALEKSLAVSQGGELYEEWLELRNGCLCCSVKDSGLRAIENLMQKKGKFDYILLETTGLADPGAVASMFWVDAELGSDIYLDGIITIVDSKYGLKHLTEEKPDGLINEATRQVALADAILINKTDLVPEEDVKKLRTTIRSINGLGQILETQRSRVDLSNVLDLHAFDSLSGISLQKKLQHVPGTQPHLDQSIVTITFEVPGNAKEEHLNMFIQNLLWEKNVRNKDNHCMEVIRLKGLVSIKDKSQQVIVQGVHELYDLEETPVSWKDDTERTNRLVLLGRNLDKDILKQLFIATVTETEKQWTTRFQEDQVCT

SEQ ID NO: 17963 - protein, 395 aa, Homo sapiens; identical to SEQ ID NO: 17962
  Payload ID: 3609
  Gene Symbol: CBWD1
  Gene Name: COBW domain containing 1
  Uniprot ID: Q9BRT8
  ENSP ID: ENSP00000366617

SEQ ID NO: 17964 - protein, 250 aa, Homo sapiens
  Payload ID: 3609
  Gene Symbol: CBWD1
  Gene Name: COBW domain containing 1
  ENSP ID: ENSP00000366666
MLPAVGSADEEEDPAEEDCPELVPIETTQSEEEEKSGLGAKIPVTIITGYLGAGKTTLLNYILTEQHSKRVAVILNEFGEGSALEKSLAVSQGGELYEEWLELRNGCLCCSVKDSGLRAIENLMQKKGKFDYILLETTGLADPGAVASMFWVDAELGSDIYLDGIITIVDSKYGLKHLTEEKPDGLINEATRQVALADAILINKTDLVPEEDVKKLRTTIRYEMISVLSAYRSMLYTQNIFYSDCCPVET

SEQ ID NO: 17965 - protein, 77 aa, Homo sapiens
  Payload ID: 3609
  Gene Symbol: CBWD1
  Gene Name: COBW domain containing 1
  ENSP ID: ENSP00000371826
MYFKRAARAFPVLLTGAGKTTLLNYILTEQHSKRVAVILNEFGEGSALEKSLAVSQGGELYEEWLELRNGCLCCSVK

SEQ ID NO: 17966 - protein, 113 aa, Homo sapiens
  Payload ID: 3609
  Gene Symbol: CBWD1
  Gene Name: COBW domain containing 1
  Uniprot ID: Q9BRT8
  ENSP ID: ENSP00000371830
MLPAVGSADEEEDPAEEDCPELVPIETTQSEEEEKSGLGAKIPVTIITGYLGAGKTTLLNYILTEQHSKRVAVILNEFGEGSALEKSLAVSQGGELYEEWLELRNGCLCCSVK

SEQ ID NO: 17967 - protein, 376 aa, Homo sapiens
  Payload ID: 3609
  Gene Symbol: CBWD1
  Gene Name: COBW domain containing 1
  Uniprot ID: Q9BRT8
  ENSP ID: ENSP00000371885
MLPAVGSADEEEDPAEEDCPELVPIETTQSEEEEKSGLGAKIPVTIITGYLGAGKTTLLNYILTEQHSKRVAVILNEFGEGSALEKSLAVSQGGELYEEWLELRNGCLCCSVKDSGLRAIENLMQKKGKFDYILLETTGLADPGAVASMFWVDAELGSDIYLDGIITIVDSKYGLKHLTEEKPDGLINEATRQVALADAILINKTDLVPEEDVKKLRTTIRSINGLGQILETQRSSLQKKLQHVPGTQPHLDQSIVTITFEVPGNAKEEHLNMFIQNLLWEKNVRNKDNHCMEVIRLKGLVSIKDKSQQVIVQGVHELYDLEETPVSWKDDTERTNRLVLLGRNLDKDILKQLFIATVTETEKQWTTRFQEDQVCT

SEQ ID NO: 17968 - protein, 38 aa, Homo sapiens
  Payload ID: 3609
  Gene Symbol: CBWD1
  Gene Name: COBW domain containing 1
  ENSP ID: ENSP00000477647
  MOD_RES (1)..(1): Any amino acid
XGAVASMFWVDAELGSDIYLDGIITIVDSKYGLKVKYH

SEQ ID NO: 17969 - protein, 160 aa, Homo sapiens
  Payload ID: 3609
  Gene Symbol: CBWD1
  Gene Name: COBW domain containing 1
  ENSP ID: ENSP00000477749
MLPAVGSADEEEDPAEEDCPELVPIETTQSEEEEKSGLGAKIPVTIITGYLGAGKTTLLNYILTEQHSKRVAVILNEFGEGSALEKSLAVSQGGELYEEWLELRNGCLCCSVKDSGLRAIENLMQKKGKFDYILLETTGLADPGIITIVDSKYGLKVKYH

SEQ ID NO: 17970 - protein, 93 aa, Homo sapiens
  Payload ID: 3609
  Gene Symbol: CBWD1
  Gene Name: COBW domain containing 1
  ENSP ID: ENSP00000478349
  MOD_RES (1)..(1): Any amino acid
XLDLHAFDSLSGISLQKKLQHVPGTQPHLDQSIVTITFEVPGNAKEEHLNMFIQNLLWEKNVRNKDNHCMEVIRLKVQFTVADFRTKSFSWLL

SEQ ID NO: 17971 - protein, 50 aa, Homo sapiens
  Payload ID: 3609
  Gene Symbol: CBWD1
  Gene Name: COBW domain containing 1
  ENSP ID: ENSP00000479698
ELYEEWLELRNGCLCCSVKDSGLRAIENLMQKKGKFDYILLETTGLADPE

SEQ ID NO: 17972 - protein, 38 aa, Homo sapiens; identical to SEQ ID NO: 17968
  Payload ID: 3609
  Gene Symbol: CBWD1
  Gene Name: COBW domain containing 1
  ENSP ID: ENSP00000480295
  MOD_RES (1)..(1): Any amino acid

SEQ ID NO: 17973 - protein, 58 aa, Homo sapiens
  Payload ID: 3609
  Gene Symbol: CBWD1
  Gene Name: COBW domain containing 1
  ENSP ID: ENSP00000481562
MLPAVGSADEEEDPAEEDCPELVPIETTQSEEEEKSGLGAKIPVTIITGYLVIQRLLC

SEQ ID NO: 17974 - protein, 160 aa, Homo sapiens; identical to SEQ ID NO: 17969
  Payload ID: 3609
  Gene Symbol: CBWD1
  Gene Name: COBW domain containing 1
  ENSP ID: ENSP00000482298

SEQ ID NO: 17975 - protein, 180 aa, Homo sapiens
  Payload ID: 3609
  Gene Symbol: CBWD1
  Gene Name: COBW domain containing 1
  ENSP ID: ENSP00000482821
MLPAVGSADEEEDPAEEDCPELVPIETTQSEEEEKSGLGAKIPVTIITGYLGAGKTTLLNYILTEQHSKRVAVILNEFGEGSALEKSLAVSQGGELYEEWLELRNGCLCCSVKDSGLRAIENLMQKKGKFDYILLETTGLADPGAVASMFWVDAELGSDIYLDGIITIVDSKYGLKVKYH

SEQ ID NO: 17976 - protein, 28 aa, Homo sapiens
  Payload ID: 3609
  Gene Symbol: CBWD1
  Gene Name: COBW domain containing 1
  ENSP ID: ENSP00000483746
  MOD_RES (1)..(1): Any amino acid
XAELGSDIYLDGIITIVDSKYGLKVKYH

SEQ ID NO: 17977 - protein, 347 aa, Homo sapiens
  Payload ID: 3609
  Gene Symbol: CBWD1
  Gene Name: COBW domain containing 1
  ENSP ID: ENSP00000483870
MLPAVGSADEEEDPAEEDCPELVPIETTQSEEEEKSGLGAKIPVTIITGYLGAGKTTLLNYILTEQHSKRVAVILNEFGEGSALEKSLAVSQGGELYEEWLELRNGCLCCSVKDSGLRAIENLMQKKGKFDYILLETTGLADPGAVASMFWVDAELGSDIYLDGIITIVDSKYGLKHLTEEKPDGLINEATRSINGLGQILETQRSSLQKKLQHVPGTQPHLDQSIVTITFEVPGNAKEEHLNMFIQNLLWEKNVRNKDNHCMEVIRLKGLVSIKDKSQQVIVQGVHELYDLEETPVSWKDDTERTNRLVLLGRNLDKDILKQLFIATVTETEKQWTTRFQEDQVCT

SEQ ID NO: 17978 - protein, 19 aa, Homo sapiens
  Payload ID: 3609
  Gene Symbol: CBWD1
  Gene Name: COBW domain containing 1
  ENSP ID: ENSP00000484540
  MOD_RES (1)..(1): Any amino acid
XPLKAEKNEIIPPTDPFPI

SEQ ID NO: 17979 - protein, 395 aa, Homo sapiens
  Payload ID: 3610
  Gene Symbol: CBWD2
  Gene Name: COBW domain containing 2
  Uniprot ID: Q8IUF1
  ENSP ID: ENSP00000259199
MLPAVGSADEEEDPAEEDCPELVPMETTQSEEEEKSGLGAKIPVTIITGYLGAGKTTLLNYILTEQHSKRVAVILNEFGEGSALEKSLAVSQGGELYEEWLELRNGCLCCSVKDNGLRAIENLMQKKGKFDYILLETTGLADPGAVASMFWVDAELGSDIYLDGIITIVDSKYGLKHLAEEKPDGLINEATRQVALADAILINKTDLVPEEDVKKLRATIRSINGLGQILETQRSRVDLSNVLDLHAFDSLSGISLQKKLQHVPGTQPHLDQSIVTITFEVPGNAKEEHLNMFIQNLLWEKNVRNKDNHCMEVIRLKGLVSIKDKSQQVIVQGVHELYDLEETPVSWKDDTERTNRLVLLGRNLDKDILKQLFIATVTETEKQWTTHFKEDQVCT

SEQ ID NO: 17980 - protein, 58 aa, Homo sapiens
  Payload ID: 3610
  Gene Symbol: CBWD2
  Gene Name: COBW domain containing 2
  ENSP ID: ENSP00000351418
MLPAVGSADEEEDPAEEDCPELVPMETTQSEEEEKSGLGAKIPVTIITGYLVIQRLLC

SEQ ID NO: 17981 - protein, 182 aa, Homo sapiens
  Payload ID: 3610
  Gene Symbol: CBWD2
  Gene Name: COBW domain containing 2
  ENSP ID: ENSP00000393105
MLPAVGSADEEEDPAEEDCPELVPMETTQSEEEEKSGLGAKIPVTIITGYLGAGKTTLLNYILTEQHSKRVAVILNEFGEGSALEKSLAVSQGGELYEEWLELRNGCLCCSVKDNGLRAIENLMQKKGKFDYILLETTGLADPGAVASMFWVDAELGSDIYLDGIITIVDSKYGLKAKNWTT

SEQ ID NO: 17982 - protein, 180 aa, Homo sapiens [sequence omitted]

SEQ ID NO: 17983 - protein, 376 aa, Homo sapiens
  Payload ID: 3610
  Gene Symbol: CBWD2
  Gene Name: COBW domain containing 2
  ENSP ID: ENSP00000411906
MLPAVGSADEEEDPAEEDCPELVPMETTQSEEEEKSGLGAKIPVTIITGYLGAGKTTLLNYILTEQHSKRVAVILNEFGEGSALEKSLAVSQGGELYEEWLELRNGCLCCSVKDNGLRAIENLMQKKGKFDYILLETTGLADPGAVASMFWVDAELGSDIYLDGIITIVDSKYGLKHLAEEKPDGLINEATRQVALADAILINKTDLVPEEDVKKLRATIRSINGLGQILETQRSSLQKKLQHVPGTQPHLDQSIVTITFEVPGNAKEEHLNMFIQNLLWEKNVRNKDNHCMEVIRLKGLVSIKDKSQQVIVQGVHELYDLEETPVSWKDDTERTNRLVLLGRNLDKDILKQLFIATVTETEKQWTTHFKEDQVCT

SEQ ID NO: 17984 - protein, 395 aa, Homo sapiens
  Payload ID: 3611
  Gene Symbol: CBWD3
  Gene Name: COBW domain containing 3
  Uniprot ID: Q5JTY5
  ENSP ID: ENSP00000353295
MLPAVGSVDEEEDPAEEDCPELVPIETTQSEEEEKSGLGAKIPVTIITGYLGAGKTTLLNYILTEQHSKRVAVILNESGEGSALEKSLAVSQGGELYEEWLELRNGCLCCSVKDNGLRAIENLMQKKGKFDDILLETTGLADPGAVASMFWVDAELGSDIYLDGIITIVDSKYGLKHLTEEKPDGLINEATRQVALADIILINKTDLVPEEDVKKLRTTIRSINGLGQILETQRSRVDLSNVLDLHAFDSLSGISLQKKLQHVPGTQPHLDQSIVTITFEVPGNAKEEHLNMFIQNLLWEKNVRNKDNHCMEVIRLKGLVSIKDKSQQVIVQGVHELYDLEETPVSWKDDTERTNRLVLIGRNLDKDILKQLFIATVTETEKQWTTHFKEDQVCT

SEQ ID NO: 17985 - protein, 376 aa, Homo sapiens
  Payload ID: 3611
  Gene Symbol: CBWD3
  Gene Name: COBW domain containing 3
  ENSP ID: ENSP00000366559
MLPAVGSVDEEEDPAEEDCPELVPIETTQSEEEEKSGLGAKIPVTIITGYLGAGKTTLLNYILTEQHSKRVAVILNESGEGSALEKSLAVSQGGELYEEWLELRNGCLCCSVKDNGLRAIENLMQKKGKFDDILLETTGLADPGAVASMFWVDAELGSDIYLDGIITIVDSKYGLKHLTEEKPDGLINEATRQVALADIILINKTDLVPEEDVKKLRTTIRSINGLGQILETQRSSLQKKLQHVPGTQPHLDQSIVTITFEVPGNAKEEHLNMFIQNLLWEKNVRNKDNHCMEVIRLKGLVSIKDKSQQVIVQGVHELYDLEETPVSWKDDTERTNRLVLIGRNLDKDILKQLFIATVTETEKQWTTHFKEDQVCT

SEQ ID NO: 17986 - protein, 160 aa, Homo sapiens
  Payload ID: 3611
  Gene Symbol: CBWD3
  Gene Name: COBW domain containing 3
  ENSP ID: ENSP00000366561
MLPAVGSVDEEEDPAEEDCPELVPIETTQSEEEEKSGLGAKIPVTIITGYLGAGKTTLLNYILTEQHSKRVAVILNESGEGSALEKSLAVSQGGELYEEWLELRNGCLCCSVKDNGLRAIENLMQKKGKFDDILLETTGLADPGIITIVDSKYGLKVKYH

SEQ ID NO: 17987 - protein, 58 aa, Homo sapiens
  Payload ID: 3611
  Gene Symbol: CBWD3
  Gene Name: COBW domain containing 3
  ENSP ID: ENSP00000366566
MLPAVGSVDEEEDPAEEDCPELVPIETTQSEEEEKSGLGAKIPVTIITGYLVIQRLLY

SEQ ID NO: 17988 - protein, 113 aa, Homo sapiens
  Payload ID: 3611
  Gene Symbol: CBWD3
  Gene Name: COBW domain containing 3
  ENSP ID: ENSP00000475010
MLPAVGSVDEEEDPAEEDCPELVPIETTQSEEEEKSGLGAKIPVTIITGYLGAGKTTLLNYILTEQHSKRVAVILNESGEGSALEKSLAVSQGGELYEEWLELRNGCLCCSVK

SEQ ID NO: 17989 - protein, 58 aa, Homo sapiens; identical to SEQ ID NO: 17987
  Payload ID: 3611
  Gene Symbol: CBWD3
  Gene Name: COBW domain containing 3
  ENSP ID: ENSP00000478468

SEQ ID NO: 17990 - protein, 180 aa, Homo sapiens
  Payload ID: 3611
  Gene Symbol: CBWD3
  Gene Name: COBW domain containing 3
  ENSP ID: ENSP00000479332
MLPAVGSVDEEEDPAEEDCPELVPIETTQSEEEEKSGLGAKIPVTIITGYLGAGKTTLLNYILTEQHSKRVAVILNESGEGSALEKSLAVSQGGELYEEWLELRNGCLCCSVKDNGLRAIENLMQKKGKFDDILLETTGLADPGAVASMFWVDAELGSDIYLDGIITIVDSKYGLKVKYH

SEQ ID NO: 17991 - protein, 347 aa, Homo sapiens
  Payload ID: 3611
  Gene Symbol: CBWD3
  Gene Name: COBW domain containing 3
  ENSP ID: ENSP00000480203
MLPAVGSVDEEEDPAEEDCPELVPIETTQSEEEEKSGLGAKIPVTIITGYLGAGKTTLLNYILTEQHSKRVAVILNESGEGSALEKSLAVSQGGELYEEWLELRNGCLCCSVKDNGLRAIENLMQKKGKFDDILLETTGLADPGAVASMFWVDAELGSDIYLDGIITIVDSKYGLKHLTEEKPDGLINEATRSINGLGQILETQRSSLQKKLQHVPGTQPHLDQSIVTITFEVPGNAKEEHLNMFIQNLLWEKNVRNKDNHCMEVIRLKGLVSIKDKSQQVIVQGVHELYDLEETPVSWKDDTERTNRLVLIGRNLDKDILKQLFIATVTETEKQWTTHFKEDQVCT

SEQ ID NO: 17992 - protein, 180 aa, Homo sapiens; identical to SEQ ID NO: 17990
  Payload ID: 3611
  Gene Symbol: CBWD3
  Gene Name: COBW domain containing 3
  ENSP ID: ENSP00000481598

SEQ ID NO: 17993 - protein, 182 aa, Homo sapiens
  Payload ID: 3611
  Gene Symbol: CBWD3
  Gene Name: COBW domain containing 3
  ENSP ID: ENSP00000481705
MLPAVGSVDEEEDPAEEDCPELVPIETTQSEEEEKSGLGAKIPVTIITGYLGAGKTTLLNYILTEQHSKRVAVILNESGEGSALEKSLAVSQGGELYEEWLELRNGCLCCSVKDNGLRAIENLMQKKGKFDDILLETTGLADPGAVASMFWVDAELGSDIYLDGIITIVDSKYGLKAKNWTT

SEQ ID NO: 17994 - protein, 58 aa, Homo sapiens; identical to SEQ ID NO: 17987
  Payload ID: 3611
  Gene Symbol: CBWD3
  Gene Name: COBW domain containing 3
  ENSP ID: ENSP00000482522

SEQ ID NO: 17995 - protein, 58 aa, Homo sapiens; identical to SEQ ID NO: 17987
  Payload ID: 3611
  Gene Symbol: CBWD3
  Gene Name: COBW domain containing 3
  ENSP ID: ENSP00000483861

SEQ ID NO: 17996 - protein, 180 aa, Homo sapiens; identical to SEQ ID NO: 17990
  Payload ID: 3611
  Gene Symbol: CBWD3
  Gene Name: COBW domain containing 3
  ENSP ID: ENSP00000484719

SEQ ID NO: 17997 - protein, 113 aa, Homo sapiens; identical to SEQ ID NO: 17988
  Payload ID: 3612
  Gene Symbol: CBWD5
  Gene Name: COBW domain containing 5
  ENSP ID: ENSP00000366601

SEQ ID NO: 17998 - protein, 58 aa, Homo sapiens; identical to SEQ ID NO: 17987
  Payload ID: 3612
  Gene Symbol: CBWD5
  Gene Name: COBW domain containing 5
  ENSP ID: ENSP00000366606

SEQ ID NO: 17999 - protein, 176 aa, Homo sapiens
  Payload ID: 3612
  Gene Symbol: CBWD5
  Gene Name: COBW domain containing 5
  ENSP ID: ENSP00000366609
MYFTEFPTAHVSFLPFRVDLSNVLDLHAFDSLSGISLQKKLQHVPGTQPHLDQSIVTITFEVPGNAKEEHLNMFIQNLLWEKNVRNKDNHCMEVIRLKGLVSIKDKSQQVIVQGVHELYDLEETPVSWKDDTERTNRLVLIGRNLDKDILKQLFIATVTETEKQWTTHFKEDQVCT

SEQ ID NO: 18000 - protein, 347 aa, Homo sapiens
  Payload ID: 3612
  Gene Symbol: CBWD5
  Gene Name: COBW domain containing 5
  Uniprot ID: Q5RIA9
  ENSP ID: ENSP00000366612
MLPAVGSVDEEEDPAEEDCPELVPIETTQSEEEEKSGLGAKIPVTIITGYLGAGKTTLLNYILTEQHSKRVAVILNESGEGSALEKSLAVSQGGELYEEWLELRNGCLCCSVKDNGLRAIENLMQKKGKFDDILLETTGLADPGAVTSMFWVDAELGSDIYLDGIITIVDSKYGLKHLTEEKPDGLINEATRSINGLGQILETQRSSLQKKLQHVPGTQPHLDQSIVTITFEVPGNAKEEHLNMFIQNLLWEKNVRNKDNHCMEVIRLKGLVSIKDKSQQVIVQGVHELYDLEETPVSWKDDTERTNRLVLIGRNLDKDILKQLFIATVTETEKQWTTHFKEDQVCT

SEQ ID NO: 18001 - protein, 395 aa, Homo sapiens
  Payload ID: 3612
  Gene Symbol: CBWD5
  Gene Name: COBW domain containing 5
  Uniprot ID: Q5RIA9
  ENSP ID: ENSP00000371842
MLPAVGSVDEEEDPAEEDCPELVPIETTQSEEEEKSGLGAKIPVTIITGYLGAGKTTLLNYILTEQHSKRVAVILNESGEGSALEKSLAVSQGGELYEEWLELRNGCLCCSVKDNGLRAIENLMQKKGKFDDILLETTGLADPGAVTSMFWVDAELGSDIYLDGIITIVDSKYGLKHLTEEKPDGLINEATRQVALADIILINKTDLVPEEDVKKLRTTIRSINGLGQILETQRSRVDLSNVLDLHAFDSLSGISLQKKLQHVPGTQPHLDQSIVTITFEVPGNAKEEHLNMFIQNLLWEKNVRNKDNHCMEVIRLKGLVSIKDKSQQVIVQGVHELYDLEETPVSWKDDTERTNRLVLIGRNLDKDILKQLFIATVTETEKQWTTHFKEDQVCT

SEQ ID NO: 18002 - protein, 376 aa, Homo sapiens
  Payload ID: 3612
  Gene Symbol: CBWD5
  Gene Name: COBW domain containing 5
  ENSP ID: ENSP00000397999
MLPAVGSVDEEEDPAEEDCPELVPIETTQSEEEEKSGLGAKIPVTIITGYLGAGKTTLLNYILTEQHSKRVAVILNESGEGSALEKSLAVSQGGELYEEWLELRNGCLCCSVKDNGLRAIENLMQKKGKFDDILLETTGLADPGAVTSMFWVDAELGSDIYLDGIITIVDSKYGLKHLTEEKPDGLINEATRQVALADIILINKTDLVPEEDVKKLRTTIRSINGLGQILETQRSSLQKKLQHVPGTQPHLDQSIVTITFEVPGNAKEEHLNMFIQNLLWEKNVRNKDNHCMEVIRLKGLVSIKDKSQQVIVQGVHELYDLEETPVSWKDDTERTNRLVLIGRNLDKDILKQLFIATVTETEKQWTTHFKEDQVCT

SEQ ID NO: 18003 - protein, 375 aa, Homo sapiens
  Payload ID: 3612
  Gene Symbol: CBWD5
  Gene Name: COBW domain containing 5
  ENSP ID: ENSP00000405076
MLPAVGSVDEEEDPAEEDCPELVPIETTQSEEEEKSGLGAKIPVTIITGYLGAGKTTLLNYILTEQHSKRVAVILNESGEGSALEKSLAVSQGGELYEEWLELRNGCLCCSVKDNGLRAIENLMQKKGKFDDILLETTGLADPGIITIVDSKYGLKHLTEEKPDGLINEATRQVALADIILINKTDLVPEEDVKKLRTTIRSINGLGQILETQRSRVDLSNVLDLHAFDSLSGISLQKKLQHVPGTQPHLDQSIVTITFEVPGNAKEEHLNMFIQNLLWEKNVRNKDNHCMEVIRLKGLVSIKDKSQQVIVQGVHELYDLEETPVSWKDDTERTNRLVLIGRNLDKDILKQLFIATVTETEKQWTTHFKEDQVCT

SEQ ID NO: 18004 - protein, 177 aa, Homo sapiens
  Payload ID: 3612
  Gene Symbol: CBWD5
  Gene Name: COBW domain containing 5
  ENSP ID: ENSP00000417466
  MOD_RES (1)..(1): Any amino acid
XTDLVPEEDVKKLRTTIRVDLSNVLDLHAFDSLSGISLQKKLQHVPGTQPHLDQSIVTITFEVPGNAKEEHLNMFIQNLLWEKNVRNKDNHCMEVIRLKGLVSIKDKSQQVIVQGVHELYDLEETPVSWKDDTERTNRLVLIGRNLDKDILKQLFIATVTETEKQWTTHFKEDQVCT

SEQ ID NO: 18005 - protein, 58 aa, Homo sapiens; identical to SEQ ID NO: 17987
  Payload ID: 3612
  Gene Symbol: CBWD5
  Gene Name: COBW domain containing 5
  ENSP ID: ENSP00000417957

SEQ ID NO: 18006 - protein, 160 aa, Homo sapiens; identical to SEQ ID NO: 17986
  Payload ID: 3612
  Gene Symbol: CBWD5
  Gene Name: COBW domain containing 5
  ENSP ID: ENSP00000418163

SEQ ID NO: 18007 - protein, 180 aa, Homo sapiens
  Payload ID: 3612
  Gene Symbol: CBWD5
  Gene Name: COBW domain containing 5
  ENSP ID: ENSP00000419839
MLPAVGSVDEEEDPAEEDCPELVPIETTQSEEEEKSGLGAKIPVTIITGYLGAGKTTLLNYILTEQHSKRVAVILNESGEGSALEKSLAVSQGGELYEEWLELRNGCLCCSVKDNGLRAIENLMQKKGKFDDILLETTGLADPGAVTSMFWVDAELGSDIYLDGIITIVDSKYGLKVKYH

SEQ ID NO: 18008 - protein, 180 aa, Homo sapiens; identical to SEQ ID NO: 18007
  Payload ID: 3612
  Gene Symbol: CBWD5
  Gene Name: COBW domain containing 5
  ENSP ID: ENSP00000420033

SEQ ID NO: 18009 - protein, 182 aa, Homo sapiens
  Payload ID: 3612
  Gene Symbol: CBWD5
  Gene Name: COBW domain containing 5
  ENSP ID: ENSP00000420326
MLPAVGSVDEEEDPAEEDCPELVPIETTQSEEEEKSGLGAKIPVTIITGYLGAGKTTLLNYILTEQHSKRVAVILNESGEGSALEKSLAVSQGGELYEEWLELRNGCLCCSVKDNGLRAIENLMQKKGKFDDILLETTGLADPGAVTSMFWVDAELGSDIYLDGIITIVDSKYGLKAKNWTT

SEQ ID NO: 18010 - protein, 58 aa, Homo sapiens; identical to SEQ ID NO: 17987
  Payload ID: 3612
  Gene Symbol: CBWD5
  Gene Name: COBW domain containing 5
  ENSP ID: ENSP00000420334

SEQ ID NO: 18011 - protein, 395 aa, Homo sapiens
  Payload ID: 3613
  Gene Symbol: CBWD7
  Gene Name: COBW domain containing 7
  Uniprot ID: A6NM15
  ENSP ID: ENSP00000366608
MLPAVGSVDEEEDPAEEDCPELVPIETTQSEEEEKSGLGAKIPVTIITGYLGAGKTTLLNYILTEQHSKRVAVILNESGEGSALEKSLAVSQGGELYEEWLELRNGCLCCSVKDNGLRAIENLMQKKGKFDDILLETTGLADPGAVASMFWVDAELGSDIYLDGIITIVDSKYGLKHLTEEKPDGLINEATRQVALADIILINKTDLVPEEDVKKLRTTLRSINGLGQILETQRSRVDLSNVLDLHAFDSLSGISLQKKLQHVPGTQPHLDQSIVTITFDVPGNAKEEHLNMFIQNLLWEKNVRNKDNHCMEVIRLKGLVSIKDKSQQVIVQGVHELCDLEETPVSWKDDTERTNRLVLIGRNLDKDILKQLFIATVTETEKQWTTHFKEDQVCT

SEQ ID NO: 18012 - protein, 376 aa, Homo sapiens
  Payload ID: 3613
  Gene Symbol: CBWD7
  Gene Name: COBW domain containing 7
  ENSP ID: ENSP00000401079
MLPAVGSVDEEEDPAEEDCPELVPIETTQSEEEEKSGLGAKIPVTIITGYLGAGKTTLLNYILTEQHSKRVAVILNESGEGSALEKSLAVSQGGELYEEWLELRNGCLCCSVKDNGLRAIENLMQKKGKFDDILLETTGLADPGAVASMFWVDAELGSDIYLDGIITIVDSKYGLKHLTEEKPDGLINEATRQVALADIILINKTDLVPEEDVKKLRTTLRSINGLGQILETQRSSLQKKLQHVPGTQPHLDQSIVTITFDVPGNAKEEHLNMFIQNLLWEKNVRNKDNHCMEVIRLKGLVSIKDKSQQVIVQGVHELCDLEETPVSWKDDTERTNRLVLIGRNLDKDILKQLFIATVTETEKQWTTHFKEDQVCT

SEQ ID NO: 18013 - protein, 73 aa, Homo sapiens
  Payload ID: 3613
  Gene Symbol: CBWD7
  Gene Name: COBW domain containing 7
  ENSP ID: ENSP00000478412
CSVKDNGLRAIENLMQKKGKFDDILLETTGLADPGAVASMFWVDAELGSDIYLDGIITIVDSKYGLKAKNWTT

SEQ ID NO: 18014 - protein, 46 aa, Homo sapiens
  Payload ID: 3613
  Gene Symbol: CBWD7
  Gene Name: COBW domain containing 7
  ENSP ID: ENSP00000480830
  MOD_RES (1)..(1): Any amino acid
XTGLADPGAVASMFWVDAELGSDIYLDGIITIVDSKYGLKAKNWTT

SEQ ID NO: 18015 - protein, 180 aa, Homo sapiens; identical to SEQ ID NO: 17990
  Payload ID: 3613
  Gene Symbol: CBWD7
  Gene Name: COBW domain containing 7
  ENSP ID: ENSP00000480837

SEQ ID NO: 18016 - protein, 180 aa, Homo sapiens; identical to SEQ ID NO: 17990
  Payload ID: 3613
  Gene Symbol: CBWD7
  Gene Name: COBW domain containing 7
  ENSP ID: ENSP00000481300

SEQ ID NO: 18017 - protein, 359 aa, Homo sapiens
  Payload ID: 3613
  Gene Symbol: CBWD7
  Gene Name: COBW domain containing 7
  ENSP ID: ENSP00000482804
MYFKRAPRAFPVLLTGAGKTTLLNYILTEQHSKRVAVILNESGEGSALEKSLAVSQGGELYEEWLELRNGCLCCSVKDNGLRAIENLMQKKGKFDDILLETTGLADPGAVASMFWVDAELGSDIYLDGIITIVDSKYGLKHLTEEKPDGLINEATRQVALADIILINKTDLVPEEDVKKLRTTLRSINGLGQILETQRSRVDLSNVLDLHAFDSLSGISLQKKLQHVPGTQPHLDQSIVTITFDVPGNAKEEHLNMFIQNLLWEKNVRNKDNHCMEVIRLKGLVSIKDKSQQVIVQGVHELCDLEETPVSWKDDTERTNRLVLIGRNLDKDILKQLFIATVTETEKQWTTHFKEDQVCT

SEQ ID NO: 18018 - protein, 137 aa, Homo sapiens
  Payload ID: 3613
  Gene Symbol: CBWD7
  Gene Name: COBW domain containing 7
  ENSP ID: ENSP00000484049
  MOD_RES (1)..(1): Any amino acid
XTIITGYLGAGKTTLLNYILTEQHSKRVAVILNESGEGSALEKSLAVSQGGELYEEWLELRNGCLCCSVKDNGLRAIENLMQKKGKFDDILLETTGLADPGAVASMFWVDAELGSDIYLDGIITIVDSKYGLKVKYH

SEQ ID NO: 18019 - protein, 160 aa, Homo sapiens; identical to SEQ ID NO: 17986
  Payload ID: 3613
  Gene Symbol: CBWD7
  Gene Name: COBW domain containing 7
  ENSP ID: ENSP00000484231

SEQ ID NO: 18020 - protein, 550 aa, Homo sapiens
  Payload ID: 3614
  Gene Symbol: COCH
  Gene Name: cochlin
  Uniprot ID: O43405
  ENSP ID: ENSP00000216361
MSAAWIPALGLGVCLLLLPGPAGSEGAAPIAITCFTRGLDIRKEKADVLCPGGCPLEEFSVYGNIVYASVSSICGAAVHRGVISNSGGPVRVYSLPGRENYSSVDANGIQSQMLSRWSASFTVTKGKSSTQEATGQAVSTAHPPTGKRLKKTPEKKTGNKDCKADIAFLIDGSFNIGQRRFNLQKNFVGKVALMLGIGTEGPHVGLVQASEHPKIEFYLKNFTSAKDVLFAIKEVGFRGGNSNTGKALKHTAQKFFTVDAGVRKGIPKVVVVFIDGWPSDDIEEAGIVAREFGVNVFIVSVAKPIPEELGMVQDVTFVDKAVCRNNGFFSYHMPNWFGTTKYVKPLVQKLCTHEQMMCSKTCYNSVNIAFLIDGSSSVGDSNFRLMLEFVSNIAKTFEISDIGAKIAAVQFTYDQRTEFSFTDYSTKENVLAVIRNIRYMSGGTATGDAISFTVRNVFGPIRESPNKNFLVIVTDGQSYDDVQGPAAAAHDAGITIFSVGVAWAPLDDLKDMASKPKESHAFFTREFTGLEPIVSDVIRGICRDFLESQQ

SEQ ID NO: 18021 - protein, 550 aa, Homo sapiens; identical to SEQ ID NO: 18020
  Payload ID: 3614
  Gene Symbol: COCH
  Gene Name: cochlin
  Uniprot ID: O43405
  ENSP ID: ENSP00000379862

SEQ ID NO: 18022 - protein, 494 aa, Homo sapiens
  Payload ID: 3614
  Gene Symbol: COCH
  Gene Name: cochlin
  Uniprot ID: O43405
  ENSP ID: ENSP00000451528
MSAAWIPALGLGVCLLLLPGPAGSEGAAPIAITCFTRGLDIRKEKADVLCPGGCPLEEFSVYGNIVYASVSSICGAAVHRGVISNSGGPVRVYSLPGRENYSSVDANGIQSQMLSRWSASFTVTKGKSSTQEATGQAVSTAHPPTGKRLKKTPEKKTGNKDCKADIAFLIDGSFNIGQRRFNLQKNFVGKVALMLGIGTEGPHVGLVQASEHPKIEFYLKNFTSAKDVLFAIKEVGFRGGNSNTGKALKHTAQKFFTVDAGVRKGIPKVVVVFIDGWPSDDIEEAGIVAREFGVNVFIVSVAKPIPEELGMVQDVTFVDKAVCRNNGFFSYHMPNWFGTTKYVKPLVQKLCTHEQMMCSKTCYNSVNIAFLIDGSSSVGDSNFRLMLEFVSNIAKTFEISDIGAKIAAVQFTYDQRTEFSFTDYSTKENVLAVIRNIRYMSGGTATGDAISFTVRNVFGPIRESPNKNFLVIVTDGQSYDDVQGPAAAAHDAAK

SEQ ID NO: 18023 - protein, 55 aa, Homo sapiens
  Payload ID: 3614
  Gene Symbol: COCH
  Gene Name: cochlin
  ENSP ID: ENSP00000451629
PIAITCFTRGLDIRKEKADVLCPGGCPLEEFSVYGNIVYASVSSICGAAVHRRQK

SEQ ID NO: 18024 - protein, 438 aa, Homo sapiens
  Payload ID: 3614
  Gene Symbol: COCH
  Gene Name: cochlin
  ENSP ID: ENSP00000451713
MLSRWSASFTVTKGKSSTQEATGQAVSTAHPPTGKRLKKTPEKKTGNKDCKADIAFLIDGSFNIGQRRFNLQKNFVGKVALMLGIGTEGPHVGLVQASEHPKIEFYLKNFTSAKDVLFAIKEVGFRGGNSNTGKALKHTAQKFFTVDAGVRKGIPKVVVVFIDGWPSDDIEEAGIVAREFGVNVFIVSVAKPIPEELGMVQDVTFVDKAVCRNNGFFSYHMPNWFGTTKYVKPLVQKLCTHEQMMCSKTCYNSVNIAFLIDGSSSVGDSNFRLMLEFVSNIAKTFEISDIGAKIAAVQFTYDQRTEFSFTDYSTKENVLAVIRNIRYMSGGTATGDAISFTVRNVFGPIRESPNKNFLVIVTDGQSYDDVQGPAAAAHDAGITIFSVGVAWAPLDDLKDMASKPKESHAFFTREFTGLEPIVSDVIRGICRDFLESQQ

SEQ ID NO: 18025 - protein, 434 aa, Homo sapiens
  Payload ID: 3614
  Gene Symbol: COCH
  Gene Name: cochlin
  ENSP ID: ENSP00000452284
  MOD_RES (1)..(1): Any amino acid
XCKADIAFLIDGSFNIGQRRFNLQKNFVGKVALMLGIGTEGPHVGLVQASEHPKIEFYLKNFTSAKDVLFAIKEVGFRGGNSNTDITLEKYLFVMLKRSENQQTYLMNADVAERMSSTTVDSEERLLRGKALKHTAQKFFTVDAGVRKGIPKVVVVFIDGWPSDDIEEAGIVAREFGVNVFIVSVAKPIPEELGMVQDVTFVDKAVCRNNGFFSYHMPNWFGTTKYVKPLVQKLCTHEQMMCSKTCYNSVNIAFLIDGSSSVGDSNFRLMLEFVSNIAKTFEISDIGAKIAAVQFTYDQRTEFSFTDYSTKENVLAVIRNIRYMSGGTATGDAISFTVRNVFGPIRESPNKNFLVIVTDGQSYDDVQGPAAAAHDAGITIFSVGVAWAPLDDLKDMASKPKESHAFFTREFTGLEPIVSDVIRGICRDFLESQQ

SEQ ID NO: 18026 - protein, 80 aa, Homo sapiens
  Payload ID: 3614
  Gene Symbol: COCH
  Gene Name: cochlin
  ENSP ID: ENSP00000452343
MSAAWIPALGLGVCLLLLPGPAGSEGAAPIAITCFTRGLDIRKEKADVLCPGGCPLEEFSVYGNIVYASVSSICGAAVHR

SEQ ID NO: 18027 - protein, 193 aa, Homo sapiens
  Payload ID: 3614
  Gene Symbol: COCH
  Gene Name: cochlin
  ENSP ID: ENSP00000452541
MSAAWIPALGLAPIAITCFTRGLDIRKEKADVLCPGGCPLEEFSVYGNIVYASVSSICGAAVHRGVISNSGGPVRVYSLPGRENYSSVDANGIQSQMLSRWSASFTVTKGKSSTQEATGQAVSTAHPPTGKRLKKTPEKKTGNKDCKADIAFLIDGSFNIGQRRFNLQKNFVGKVALMLGIGTEGPHVGLVQA

SEQ ID NO: 18028 - protein, 202 aa, Homo sapiens
  Payload ID: 3614
  Gene Symbol: COCH
  Gene Name: cochlin
  ENSP ID: ENSP00000452569
MSAAWIPALGLGVCLLLLPGPAGSEGAGKRLKKTPEKKTGNKDCKADIAFLIDGSFNIGQRRFNLQKNFVGKVALMLGIGTEGPHVGLVQASEHPKIEFYLKNFTSAKDVLFAIKEVGFRGGNSNTGKALKHTAQKFFTVDAGVRKGIPKVVVVFIDGWPSDDIEEAGIVAREFGVNVFIVSVAKPIPEELGMVQDVTFVDK

SEQ ID NO: 18029 - protein, 1227 aa, Homo sapiens
  Payload ID: 3615
  Gene Symbol: CDAN1
  Gene Name: codanin 1
  Uniprot ID: Q8IWY9
  ENSP ID: ENSP00000348564
MAAVLESLLREEVSVAAVVRWIARSTQGSEDNAGEAAALSSLRALRKEFVPFLLNFLREQSSRVLPQGPPTPAKTPGASAALPGRPGGPPRGSRGARSQLFPPTEAQSTAAEAPLARRGGRRRGPGPARERGGRGLEEGVSGESLPGAGGRRLRGSGSPSRPSLTLSDPPNLSNLEEFPPVGSVPPGPTGTKPSRRINPTPVSEERSLSKPKTCFTSPPISCVPSSQPSALDTSPWGLGLPPGCRSLQEEREMLRKERSKQLQQSPTPTCPTPELGSPLPSRTGSLTDEPADPARVSSRQRLELVALVYSSCIAENLVPNLFLELFFVFQLLTARRMVTAKDSDPELSPAVLDSLESPLFQSIHDCVFFAVQVLECHFQVLSNLDKGTLKLLAENERLLCFSPALQGRLRAAYEGSVAKVSLVMPPSTQAVSFQPETDNRANFSSDRAFHTFKKQRDVFYEVLREWEDHHEEPGWDFEKGLGSRIRAMMGQLSAACSHSHFVRLFQKQLLQMCQSPGGAGGTVLGEAPDVLSMLGADKLGRLWRLQERLMAPQSSGGPCPPPTFPGCQGFFRDFILSASSFQFNQHLMDSLSLKIQELNGLALPQHEPNDEDGESDVDWQGERKQFAVVLLSLRLLAKFLGFVAFLPYRGPEPPPTGELQDSILALRSQVPPVLDVRTLLQRGLQARRAVLTVPWLVEFLSFADHVVPLLEYYRDIFTLLLRLHRSLVLSQESEGKMCFLNKLLLLAVLGWLFQIPTVPEDLFFLEEGPSYAFEVDTVAPEHGLDNAPVVDQQLLYTCCPYIGELRKLLASWVSGSSGRSGGFMRKITPTTTTSLGAQPSQTSQGLQAQLAQAFFHNQPPSLRRTVEFVAERIGSNCVKHIKATLVADLVRQAESLLQEQLVTQGEEGGDPAQLLEILCSQLCPHGAQALALGREFCQRKSPGAVRALLPEETPAAVLSSAENIAVGLATEKACAWLSANITALIRREVKAAVSRTLRAQGPEPAARGERRGCSRACEHHAPLPSHLISEIKDVLSLAVGPRDPDEGVSPEHLEQLLGQLGQTLRCRQFLCPPAEQHLAKCSVELASLLVADQIPILGPPAQYRLERGQARRLLHMLLSLWKEDFQGPVPLQLLLSPRNVGLLADTRPREWDLLLFLLRELVEKGLMGRMEIEACLGSLHQAQWPGDFAEELATLSNLFLAEPHLPEPQLRACELVQPNRGTVLAQS

SEQ ID NO: 18030 - protein, 347 aa, Homo sapiens
  Payload ID: 3615
  Gene Symbol: CDAN1
  Gene Name: codanin 1
  ENSP ID: ENSP00000454246
VPPVLDVRTLLQRGLQARRAVLTVPWLVEFLSFADHVVPLLEYYRDIFTLLLRLHRSLVLSQESEGKMCFLNKLLLLAVLGWLFQIPTVPEDLFFLEEGPSYAFEVDTVAPEHGLDNAPVVDQQLLYTCCPYIGELRKLLASWVSGSSGRSGGFMRKITPTTTTSLGAQPSQTSQGLQAQLAQAFFHNQPPSLRRTVEFVAERIGSNCVKHIKATLVADLVRQAESLLQEQLVTQGEEGGDPAQLLEILCSQLCPHGAQALALGREFCQRKSPGAVRALLPEETPAAVLSSAENIAVGLATEKACAWLSANITALIRREVKAAVSRTLRAQGPEPAARGERRGCSRA

SEQ ID NO: 18031 - protein, 95 aa, Homo sapiens
  Payload ID: 3615
  Gene Symbol: CDAN1
  Gene Name: codanin 1
  ENSP ID: ENSP00000455536
AVVRWIARSTQGSEVTAVTRPQDNAGEAAALSSLRALRKEFVPFLLNFLREQSSRVLPQGPPTPAKTPGASAALPGRPGGPPRGSRGARSQLFPP

SEQ ID NO: 18032 - protein, 247 aa, Homo sapiens
  Payload ID: 3616
  Gene Symbol: COQ10A
  Gene Name: coenzyme Q10A
  Uniprot ID: Q96MF6
  ENSP ID: ENSP00000312587
MAWAGSRRVPAGTRAAAERCCRLSLSPGAQPAPPPGPLPPPRPMRFLTSCSLLLPRAAQILAAEAGLPSSRSFMGFAAPFTNKRKAYSERRIMGYSMQEMYEVVSNVQEYREFVPWCKKSLVVSSRKGHLKAQLEVGFPPVMERYTSAVSMVKPHMVKAVCTDGKLFNHLETIWRFSPGIPAYPRTCTVDFSISFEFRSLLHSQLATMFFDEVVKQNVAAFERRAATKFGPETAIPRELMFHEVHQT

SEQ ID NO: 18033 - protein, 215 aa, Homo sapiens
  Payload ID: 3616
  Gene Symbol: COQ10A
  Gene Name: coenzyme Q10A
  Uniprot ID: Q96MF6
  ENSP ID: ENSP00000407843
MLLQVVREGKFSGFLTSCSLLLPRAAQILAAEAGLPSSRSFMGFAAPFTNKRKAYSERRIMGYSMQEMYEVVSNVQEYREFVPWCKKSLVVSSRKGHLKAQLEVGFPPVMERYTSAVSMVKPHMVKAVCTDGKLFNHLETIWRFSPGIPAYPRTCTVDFSISFEFRSLLHSQLATMFFDEVVKQNVAAFERRAATKFGPETAIPRELMFHEVHQT

SEQ ID NO: 18034 - protein, 230 aa, Homo sapiens
  Payload ID: 3616
  Gene Symbol: COQ10A
  Gene Name: coenzyme Q10A
  Uniprot ID: Q96MF6
  ENSP ID: ENSP00000446723
MHSSSPSPTNDRGLRRTIRLAPLSFGLRFLTSCSLLLPRAAQILAAEAGLPSSRSFMGFAAPFTNKRKAYSERRIMGYSMQEMYEVVSNVQEYREFVPWCKKSLVVSSRKGHLKAQLEVGFPPVMERYTSAVSMVKPHMVKAVCTDGKLFNHLETIWRFSPGIPAYPRTCTVDFSISFEFRSLLHSQLATMFFDEVVKQNVAAFERRAATKFGPETAIPRELMFHEVHQT

SEQ ID NO: 18035 - protein, 153 aa, Homo sapiens
  Payload ID: 3616
  Gene Symbol: COQ10A
  Gene Name: coenzyme Q10A
  ENSP ID: ENSP00000446957
  MOD_RES (1)..(1): Any amino acid
XPPAASSCLGLPRSWRLRLAYLRAVPSWDLLLPSPTSERLTRSVESWGTQCRRCMRWCPTSRSIAVCTDGKLFNHLETIWRFSPGIPAYPRTCTVDFSISFEFRSLLHSQLATMFFDEVVKQNVAAFERRAATKFGPETAIPRELMFHEVHQT

SEQ ID NO: 18036 - protein, 64 aa, Homo sapiens
  Payload ID: 3616
  Gene Symbol: COQ10A
  Gene Name: coenzyme Q10A
  ENSP ID: ENSP00000447964
  MOD_RES (1)..(1): Any amino acid
XRTCTVDFSISFEFRSLLHSQLATMFFDEVVKQNVAAFERRAATKFGPETAIPRELMFHEVHQT

SEQ ID NO: 18037 - protein, 238 aa, Homo sapiens
  Payload ID: 3617
  Gene Symbol: COQ10B
  Gene Name: coenzyme Q10B
  Uniprot ID: Q9H8M1
  ENSP ID: ENSP00000263960
MAARTGHTALRRVVSGCRPKSATAAGAQAPVRNGRYLASCGILMSRTLPLHTSILPKEICARTFFKITAPLINKRKEYSERRILGYSMQEMYDVVSGVEDYKHFVPWCKKSDVISKRSGYCKTRLEIGFPPVLERYTSVVTLVKPHLVKASCTDGRLFNHLETIWRFSPGLPGYPRTCTLDFSISFEFRSLLHSQLATLFFDEVVKQMVAAFERRACKLYGPETNIPRELMLHEVHHT

SEQ ID NO: 18038 - protein, 188 aa, Homo sapiens
  Payload ID: 3617
  Gene Symbol: COQ10B
  Gene Name: coenzyme Q10B
  ENSP ID: ENSP00000386785
MAARTGHTALRRVVSGCRPKSATAAGAQAPVRNGRYSMQEMYDVVSGVEDYKHFVPWCKKSDVISKRSGYCKTRLEIGFPPVLERYTSVVTLVKPHLVKASCTDGRLFNHLETIWRFSPGLPGYPRTCTLDFSISFEFRSLLHSQLATLFFDEVVKQMVAAFERRACKLYGPETNIPRELMLHEVHHT

SEQ ID NO: 18039 - protein, 210 aa, Homo sapiens
  Payload ID: 3617
  Gene Symbol: COQ10B
  Gene Name: coenzyme Q10B
  ENSP ID: ENSP00000387223
MGVCVWRYLASCGILMSRTLPLHTSILPKEICARTFFKITAPLINKRKEYSERRILGYSMQEMYDVVSGVEDYKHFVPWCKKSDVISKRSGYCKTRLEIGFPPVLERYTSVVTLVKPHLVKASCTDGRLFNHLETIWRFSPGLPGYPRTCTLDFSISFEFRSLLHSQLATLFFDEVVKQMVAAFERRACKLYGPETNIPRELMLHEVHHT

SEQ ID NO: 18040 - protein, 421 aa, Homo sapiens
  Payload ID: 3618
  Gene Symbol: COQ2
  Gene Name: coenzyme Q2 4-hydroxybenzoate polyprenyltransferase
  Uniprot ID: Q96H96
  ENSP ID: ENSP00000310873
MTPISQVRMRKGSAHTAAQPGRLGLHPAGATAHACRGMTSIRARPGLTSAMLGSRAAGFARGLRAVALAWLPGWRGRSFALARAAGAPHGGDLQPPACPEPRGRQLSLSAAAVVDSAPRPLQPYLRLMRLDKPIGTWLLYLPCTWSIGLAAEPGCFPDWYMLSLFGTGAILMRGAGCTINDMWDQDYDKKVTRTANRPIAAGDISTFQSFVFLGGQLTLALGVLLCLNYYSIALGAGSLLLVITYPLMKRISYWPQLALGLTFNWGALLGWSAIKGSCDPSVCLPLYFSGVMWTLIYDTIYAHQDKRDDVLIGLKSTALRFGENTKPWLSGFSVAMLGALSLVGVNSGQTAPYYAALGAVGAHLTHQIYTLDIHRPEDCWNKFISNRTLGLIVFLGIVLGNLWKEKKTDKTKKGIENKIEN

SEQ ID NO: 18041 - protein, 328 aa, Homo sapiens
  Payload ID: 3618
  Gene Symbol: COQ2
  Gene Name: coenzyme Q2 4-hydroxybenzoate polyprenyltransferase
  ENSP ID: ENSP00000311835
MLGSRAAGFARGLRAVALAWLPGWRGRSFALARAAGAPHGGDLQPPACPEPRGRQLSLSAAAVVDSAPRPLQPYLRLMRLDKPIGTWLLYLPCTWSIGLAAEPGCFPDWYMLSLFGTGAILMRGAGCTINDMWDQDYDKKVTRTANRPIAAGDISTFQSFVFLGGQLTLALGVLLCLNYYSIALGAGSLLLVITYPLMKRISYWPQLALGLTFNWGALLGWSAIKGSCDPSVCLPLYFSGVMWTLIYDTIYAHQDKRDDVLIGLKSTALRFGENTKPWLSGFSVAMLGALSLVGVNSGQTAPYYAALGAVGAHLTHQKWGLEILPRLV

SEQ ID NO: 18042 - protein, 213 aa, Homo sapiens
  Payload ID: 3618
  Gene Symbol: COQ2
  Gene Name: coenzyme Q2 4-hydroxybenzoate polyprenyltransferase
  ENSP ID: ENSP00000426242
MLGSRAAGFARGLRAVALAWLPGWRGRSFALARAAGAPHGGDLQPPACPEPRGRQLSLSAAAVVDSAPRPLQPYLRLMRLDKPIGTWLLYLPCTWSIGLAAEPGCFPDWYMLSLFGTGAILMRGAGCTINDMWDQDYDKKVTRTANRPIAAGDISTFQSFVFLGGQLTLALGVLLCLNYYSIALGAGSLLLVITYPLMKRISYWPQLALGQKR

SEQ ID NO: 18043 - protein, 225 aa, Homo sapiens
  Payload ID: 3618
  Gene Symbol: COQ2
  Gene Name: coenzyme Q2 4-hydroxybenzoate polyprenyltransferase
  ENSP ID: ENSP00000427146
GCFPDWYMLSLFGTGAILMRGAGCTINDMWDQDYDKKVTRTANRPIAAGDISTFQSFVFLGGQLTLALGVLLCLNYYSIALGAGSLLLVITYPLMKRISYWPQLALGLTFNWGALLGWSAIKGSCDPSVCLPLYFSGVMWTLIYDTIYAHQDKRDDVLIGLKSTALRFGENTKPWLSGFSVAMLGALSLVGVNSGQTAPYYAALGAVGAHLTHQKWGLEILPRLV

SEQ ID NO: 18044 - protein, 369 aa, Homo sapiens
  Payload ID: 3619
  Gene Symbol: COQ3
  Gene Name: coenzyme Q3 methyltransferase
  Uniprot ID: Q9NZJ6
  ENSP ID: ENSP00000254759
MWSGRKLGSSGGWFLRVLGPGGCNTKAARPLISSAVYVKNQLSGTLQIKPGVFNEYRTIWFKSYRTIFSCLNRIKSFRYPWARLYSTSQTTVDSGEVKTFLALAHKWWDEQGVYAPLHSMNDLRVPFIRDNLLKTIPNHQPGKPLLGMKILDVGCGGGLLTEPLGRLGASVIGIDPVDENIKTAQCHKSFDPVLDKRIEYRVCSLEEIVEETAETFDAVVASEVVEHVIDLETFLQCCCQVLKPGGSLFITTINKTQLSYALGIVFSEQIASIVPKGTHTWEKFVSPETLESILESNGLSVQTVVGMLYNPFSGYWHWSENTSLNYAAYAVKSRVQEHPASAEFVLKGETEELQANACTNPAVHEKLKK

SEQ ID NO: 18045 - protein, 141 aa, Homo sapiens
  Payload ID: 3619
  Gene Symbol: COQ3
  Gene Name: coenzyme Q3 methyltransferase
  ENSP ID: ENSP00000358243
MKILDVGCGGGLLTEPGGSLFITTINKTQLSYALGIVFSEQIASIVPKGTHTWEKFVSPETLESILESNGLSVQTVVGMLYNPFSGYWHWSENTSLNYAAYAVKSRVQEHPASAEFVLKGETEELQANACTNPAVHEKLKK

SEQ ID NO: 18046 - protein, 310 aa, Homo sapiens
  Payload ID: 3619
  Gene Symbol: COQ3
  Gene Name: coenzyme Q3 methyltransferase
  ENSP ID: ENSP00000358245
MFKSYRTIFSCLNRIKSFRYPWARLYSTSQTTVDSGEVKTFLALAHKWWDEQGVYAPLHSMNDLRVPFIRDNLLKTIPNHQPGKPLLGMKILDVGCGGGLLTEPLGRLGASVIGIDPVDENIKTAQCHKSFDPVLDKRIEYRVCSLEEIVEETAETFDAVVASEVVEHVIDLETFLQCCCQVLKPGGSLFITTINKTQLSYALGIVFSEQIASIVPKGTHTWEKFVSPETLESILESNGLSVQTVVGMLYNPFSGYWHWSENTSLNYAAYAVKSRVQEHPASAEFVLKGETEELQANACTNPAVHEKLKK

SEQ ID NO: 18047 - protein, 265 aa, Homo sapiens
  Payload ID: 3620
  Gene Symbol: COQ4
  Gene Name: coenzyme Q4
  Uniprot ID: Q9Y3A0
  ENSP ID: ENSP00000300452
MATLLRPVLRRLCGLPGLQRPAAEMPLRARSDGAGPLYSHHLPTSPLQKGLLAAGSAAMALYNPYRHDMVAVLGETTGHRTLKVLRDQMRRDPEGAQILQERPRISTSTLDLGKLQSLPEGSLGREYLRFLDVNRVSPDTRAPTRFVDDEELAYVIQRYREVHDMLHTLLGMPTNILGEIVVKWFEAVQTGLPMCILGAFFGPIRLGAQSLQVLVSELIPWAVQNGRRAPCVLNLYYERRWEQSLRALREELGITAPPMHVQGLA

SEQ ID NO: 18048 - protein, 151 aa, Homo sapiens
  Payload ID: 3620
  Gene Symbol: COQ4
  Gene Name: coenzyme Q4
  ENSP ID: ENSP00000361966
MATLLRPVLRRLCGLPGLQRPAAEMPLRARSDGAGPLYSHHLPTSPLQKGLLAAGSAAMALYNPYRHDMVAVLGETTGHRTLKVLRDQMRRDPEGAQILQERPRISTSTLDLGKLQSLPEGSLGREYLRFLDVNVSFQLLCIWQSPDRTEE

SEQ ID NO: 18049 - protein, 96 aa, Homo sapiens
  Payload ID: 3620
  Gene Symbol: COQ4
  Gene Name: coenzyme Q4
  ENSP ID: ENSP00000476323
MATLLRPVLRRLCGLPGLQRPAAEMPLRARSDGAGPLYSHHLPTSPLQKGLLAAGSAAMALYNPYRHDSWIPPKRTESESESAVEGEMGVKPKVCL

SEQ ID NO: 18050 - protein, 86 aa, Homo sapiens
  Payload ID: 3620
  Gene Symbol: COQ4
  Gene Name: coenzyme Q4
  ENSP ID: ENSP00000477292
MATLLRPVLRRLCGLPGLQRPAAEMPLRARSDGAGPLYSHHLPTSPLQKGLLAAGSAAMALYNPYRHGKAARASPPWGRLGAVSCG

SEQ ID NO: 18051 - protein, 327 aa, Homo sapiens
  Payload ID: 3621
  Gene Symbol: COQ5
  Gene Name: coenzyme Q5, methyltransferase
  Uniprot ID: Q5HYK3
  ENSP ID: ENSP00000288532
MAAPGSCALWSYCGRGWSRAMRGCQLLGLRSSWPGDLLSARLLSQEKRAAETHFGFETVSEEEKGGKVYQVFESVAKKYDVMNDMMSLGIHRVWKDLLLWKMHPLPGTQLLDVAGGTGDIAFRFLNYVQSQHQRKQKRQLRAQQNLSWEEIAKEYQNEEDSLGGSRVVVCDINKEMLKVGKQKALAQGYRAGLAWVLGDAEELPFDDDKFDIYTIAFGIRNVTHIDQALQEAHRVLKPGGRFLCLEFSQVNNPLISRLYDLYSFQVIPVLGEVIAGDWKSYQYLVESIRRFPSQEEFKDMIEDAGFHKVTYESLTSGIVAIHSGFKL

SEQ ID NO: 18052 - protein, 253 aa, Homo sapiens
  Payload ID: 3621
  Gene Symbol: COQ5
  Gene Name: coenzyme Q5, methyltransferase
  ENSP ID: ENSP00000401798
MAAPGSCALWSYCGRGWSRAMRGCQLLGLRSSWPGDLLSARLLSQEKRAAETHFGFETVSEEEKGGKVYQVFESVAKKYDVMNDMMSLGIHRVWKDLLLWKMHPLPGTQLLDVAGGTGLAWVLGDAEELPFDDDKFDIYTIAFGIRNVTHIDQALQEAHRVLKPGGRFLCLEFSQVNNPLISRLYDLYSFQVIPVLGEVIAGDWKSYQYLVESIRRFPSQEEFKDMIEDAGFHKVTYESLTSGIVAIHSGFKL

SEQ ID NO: 18053 - protein, 213 aa, Homo sapiens
  Payload ID: 3621
  Gene Symbol: COQ5
  Gene Name: coenzyme Q5, methyltransferase
  ENSP ID: ENSP00000449863
MNDMMSLGIHRVWKDLLLWKMHPLPGTQLLDVAGGTGDIAFRFLNYVQSQHQRKQKRQLRAQQNLSWEEIAKEYQNEEDSLGGSRVVVCDINKEMLKVGKQKALAQGYRAGLAWVLGDAEELPFDDDKFDIYTIAFGIRNVTHIDQALQEAHRVLKPGGRFLCLEFSQVNNPLISRLYDLYSFQVIPVLGEVIAGDWKSYQYLVESIRRFPSQ

SEQ ID NO: 18054 - protein, 176 aa, Homo sapiens
  Payload ID: 3621
  Gene Symbol: COQ5
  Gene Name: coenzyme Q5, methyltransferase
  ENSP ID: ENSP00000449874
MAAPGSCALWSYCGRGWSRAMRGCQLLGLRSSWPGDLLSARLLSQEKRAAETHFGFETVSEEEKGGKGDIAFRFLNYVQSQHQRKQKRQLRAQQNLSWEEIAKEYQNEEDSLGGSRVVVCDINKEMLKVGKQKALAQGYRAGLAWVLGDAEELPFDDDKFDIYTIAFGIRNVTHID

SEQ ID NO: 18055 - protein, 91 aa, Homo sapiens
  Payload ID: 3621
  Gene Symbol: COQ5
  Gene Name: coenzyme Q5, methyltransferase
  ENSP ID: ENSP00000449933
MLSLSLSPRLECSGPISAHCNLYLPGSSDSPAPTTRVAGITVYQVFESVAKKYDVMNDMMSLGIHRVWKDLLLWKMHPLPGTQLLDVAGGT

SEQ ID NO: 18056 - protein, 130 aa, Homo sapiens
  Payload ID: 3621
  Gene Symbol: COQ5
  Gene Name: coenzyme Q5, methyltransferase
  ENSP ID: ENSP00000450001
MNDMMSLGIHRVWKDLLLWKMHPLPGTQLLDVAGGTGDIAFRFLNYVQSQHQRKQKRQLRAQQNLSWEEIAKEYQNEEDSLGGSRVVVCDINKEMLKVGKQKALAQGYRAGLAWVLGDAEELPFDDDKFD

SEQ ID NO: 18057 - protein, 467 aa, Homo sapiens
  Payload ID: 3622
  Gene Symbol: COQ6
  Gene Name: coenzyme Q6 monooxygenase
  ENSP ID: ENSP00000238709
MAARLVSRCGAVRAAPHSGPLVLAQVVRRSTDTVYDVVVSGGGLVGAAMACALGYDIHFHDKKILLLEAGPKKVLEKLSETYSNRVSSISPGSATLLSSFGAWDHICNMRYRAFRRMQVWDACSEALIMFDKDNLDDMGYIVENDVIMHALTKQLEAVSDRVTVLYRSKAIRYTWPCPFPMADSSPWVHITLGDGSTFQTKLLIGADGHNSGVRQAVGIQNVSWNYDQSAVVATLHLSEATENNVAWQRFLPSGPIALLPLSDTLSSLVWSTSHEHAAELVSMDEEKFVDAVNSAFWSDADHTDFIDTAGAMLQYAVSLLKPTKVSARQLPPSVARVDAKSRVLFPLGLGHAAEYVRPRVALIGDAAHRVHPLAGQGVNMGFGDISSLAHHLSTAAFNGKDLGSVSHLTGYETERQRHNTALLAATDLLKRLYSTSASPLVLLRTWGLQATNAVSPLKEQIMAFASK

SEQ ID NO: 18058 - protein, 468 aa, Homo sapiens
  Payload ID: 3622
  Gene Symbol: COQ6
  Gene Name: coenzyme Q6 monooxygenase
  Uniprot ID: Q9Y2Z9
  ENSP ID: ENSP00000333946
MAARLVSRCGAVRAAPHSGPLVSWRRWSGASTDTVYDVVVSGGGLVGAAMACALGYDIHFHDKKILLLEAGPKKVLEKLSETYSNRVSSISPGSATLLSSFGAWDHICNMRYRAFRRMQVWDACSEALIMFDKDNLDDMGYIVENDVIMHALTKQLEAVSDRVTVLYRSKAIRYTWPCPFPMADSSPWVHITLGDGSTFQTKLLIGADGHNSGVRQAVGIQNVSWNYDQSAVVATLHLSEATENNVAWQRFLPSGPIALLPLSDTLSSLVWSTSHEHAAELVSMDEEKFVDAVNSAFWSDADHTDFIDTAGAMLQYAVSLLKPTKVSARQLPPSVARVDAKSRVLFPLGLGHAAEYVRPRVALIGDAAHRVHPLAGQGVNMGFGDISSLAHHLSTAAFNGKDLGSVSHLTGYETERQRHNTALLAATDLLKRLYSTSASPLVLLRTWGLQATNAVSPLKEQIMAFASK

SEQ ID NO: 18059 - protein, 443 aa, Homo sapiens
  Payload ID: 3622
  Gene Symbol: COQ6
  Gene Name: coenzyme Q6 monooxygenase
  Uniprot ID: Q9Y2Z9
  ENSP ID: ENSP00000377594
MRGQGPPLSSFGVWLASRAASDPSRPRRQGYDIHFHDKKILLLEAGPKKVLEKLSETYSNRVSSISPGSATLLSSFGAWDHICNMRYRAFRRMQVWDACSEALIMFDKDNLDDMGYIVENDVIMHALTKQLEAVSDRVTVLYRSKAIRYTWPCPFPMADSSPWVHITLGDGSTFQTKLLIGADGHNSGVRQAVGIQNVSWNYDQSAVVATLHLSEATENNVAWQRFLPSGPIALLPLSDTLSSLVWSTSHEHAAELVSMDEEKFVDAVNSAFWSDADHTDFIDTAGAMLQYAVSLLKPTKVSARQLPPSVARVDAKSRVLFPLGLGHAAEYVRPRVALIGDAAHRVHPLAGQGVNMGFGDISSLAHHLSTAAFNGKDLGSVSHLTGYETERQRHNTALLAATDLLKRLYSTSASPLVLLRTWGLQATNAVSPLKEQIMAFASK

SEQ ID NO: 18060 - protein, 111 aa, Homo sapiens
  Payload ID: 3622
  Gene Symbol: COQ6
  Gene Name: coenzyme Q6 monooxygenase
  ENSP ID: ENSP00000450511
MAARLVSRCGAVRAAPHSGPLVSWRRWSGASTDTVYDVVVSGGGLVGAAMACALGYDIHFHDKKILLLEAGPKKVLEKLSETYSNRVSSISPGSATLLSSVGRLLRGPDNV

SEQ ID NO: 18061 - protein, 86 aa, Homo sapiens
  Payload ID: 3622
  Gene Symbol: COQ6
  Gene Name: coenzyme Q6 monooxygenase
  ENSP ID: ENSP00000450736
MRGQGPPLSSFGVWLASRAASDPSRPRRQGYDIHFHDKKILLLEAGPKKVLEKLSETYSNRVSSISPGSATLLSSVGRLLRGPDNV

SEQ ID NO: 18062 - protein, 262 aa, Homo sapiens
  Payload ID: 3622
  Gene Symbol: COQ6
  Gene Name: coenzyme Q6 monooxygenase
  ENSP ID: ENSP00000451123
MIFTFMTRKSCCSKQVQRKYWRNCQKLTATGSAPFPLALQRFSVVWDACSEALIMFDKDNLDDMGYIVENDVIMHALTKQLEAVSDRVTVLYRSKAIRYTWPCPFPMADSSPWVHITLGDGSTFQTKLLIGADGHNSGVRQAVGIQNVSWNYDQSAVVATLHLSEATENNVAWQRFLPSGPIALLPLSDTLSSLVWSTSHEHAAELVSMDEEKFVDAVNSAFWSDADHTDFIDTAGAMLQYAVSLLKPTKVSARQLPPSVAR

SEQ ID NO: 18063 - protein, 54 aa, Homo sapiens
  Payload ID: 3622
  Gene Symbol: COQ6
  Gene Name: coenzyme Q6 monooxygenase
  ENSP ID: ENSP00000451301
MIFTFMTRKSCCSKQVQRKYWRNCQKLTATGSAPFPLALQRFSVVLVPGTISAT

SEQ ID NO: 18064 - protein, 200 aa, Homo sapiens
  Payload ID: 3622
  Gene Symbol: COQ6
  Gene Name: coenzyme Q6 monooxygenase
  ENSP ID: ENSP00000451562
MAARLVSRCGAVRAAPHSGPLVSWRRWSGASTDTVYDVVVSGGGLVGAAMACALGYDIHFHDKKILLLEAGPKKVLEKLSETYSNRVSSISPGSATLLSSFGAWDHICNMRYRAFRRMQVWDACSEALIMFDKDNLDDMGYIVENDVIMHALTKQLEAVSGTDYGLCKQMSTPLLKKDYVDEKEHPAQDPSYIFSRSYLI

SEQ ID NO: 18065 - protein, 111 aa, Homo sapiens; identical to SEQ ID NO: 18060
  Payload ID: 3622
  Gene Symbol: COQ6
  Gene Name: coenzyme Q6 monooxygenase
  ENSP ID: ENSP00000451685

SEQ ID NO: 18066 - protein, 393 aa, Homo sapiens
  Payload ID: 3622
  Gene Symbol: COQ6
  Gene Name: coenzyme Q6 monooxygenase
  ENSP ID: ENSP00000486650
MIFTFMTRKSCCSKQVQRKYWRNCQKLTATGSAPFPLALQRFSVVWDACSEALIMFDKDNLDDMGYIVENDVIMHALTKQLEAVSDRVTVLYRSKAIRYTWPCPFPMADSSPWVHITLGDGSTFQTKLLIGADGHNSGVRQAVGIQNVSWNYDQSAVVATLHLSEATENNVAWQRFLPSGPIALLPLSDTLSSLVWSTSHEHAAELVSMDEEKFVDAVNSAFWSDADHTDFIDTAGAMLQYAVSLLKPTKVSARQLPPSVARVDAKSRVLFPLGLGHAAEYVRPRVALIGDAAHRVHPLAGQGVNMGFGDISSLAHHLSTAAFNGKDLGSVSHLTGYETERQRHNTALLAATDLLKRLYSTSASPLVLLRTWGLQATNAVSPLKEQIMAFASK

SEQ ID NO: 18067 - protein, 217 aa, Homo sapiens
  Payload ID: 3623
  Gene Symbol: COQ7
  Gene Name: coenzyme Q7 homolog, ubiquinone (yeast)
  Uniprot ID: Q99807
  ENSP ID: ENSP00000322316
MSCAGAAAAPRLWRLRPGARRSLSAYGRRTSVRFRSSGMTLDNISRAAVDRIIRVDHAGEYGANRIYAGQMAVLGRTSVGPVIQKMWDQEKDHLKKFNELMVTFRVRPTVLMPLWNVLGFALGAGTALLGKEGAMACTVAVEESIAHHYNNQIRTLMEEDPEKYEELLQLIKKFRDEELEHHDIGLDHDAELAPAYAVLKSIIQAGCRVAIYLSERL

SEQ ID NO: 18068 - protein, 179 aa, Homo sapiens
  Payload ID: 3623
  Gene Symbol: COQ7
  Gene Name: coenzyme Q7 homolog, ubiquinone (yeast)
  Uniprot ID: Q99807
  ENSP ID: ENSP00000442923
MTLDNISRAAVDRIIRVDHAGEYGANRIYAGQMAVLGRTSVGPVIQKMWDQEKDHLKKFNELMVTFRVRPTVLMPLWNVLGFALGAGTALLGKEGAMACTVAVEESIAHHYNNQIRTLMEEDPEKYEELLQLIKKFRDEELEHHDIGLDHDAELAPAYAVLKSIIQAGCRVAIYLSERL

SEQ ID NO: 18069 - protein, 194 aa, Homo sapiens
  Payload ID: 3623
  Gene Symbol: COQ7
  Gene Name: coenzyme Q7 homolog, ubiquinone (yeast)
  ENSP ID: ENSP00000455122
MAYGRRTSVRFRSSGMTLDNISRAAVDRIIRVDHAGEYGANRIYAGQMAVLGRTSVGPVIQKMWDQEKDHLKKFNELMVTFRVRPTVLMPLWNVLGFALGAGTALLGKEGAMACTVAVEESIAHHYNNQIRTLMEEDPEKYEELLQLIKKFRDEELEHHDIGLDHDAELAPAYAVLKSIIQAGCRVAIYLSERL

SEQ ID NO: 18070 - protein, 106 aa, Homo sapiens
  Payload ID: 3623
  Gene Symbol: COQ7
  Gene Name: coenzyme Q7 homolog, ubiquinone (yeast)
  ENSP ID: ENSP00000456490
MSCAGAAAAPRLWRLRPGARRSLSAYGRRTSVRFRSSGMTLDNISRAAVDRIIRVDHAGEYGANRIYAGQMAVLGRTSVGPVIQGRGPPCSGRKVPWPAPWRWKRA

SEQ ID NO: 18071 - protein, 217 aa, Homo sapiens; identical to SEQ ID NO: 18067
  Payload ID: 3623
  Gene Symbol: COQ7
  Gene Name: coenzyme Q7 homolog, ubiquinone (yeast)
  Uniprot ID: Q99807
  ENSP ID: ENSP00000456734

SEQ ID NO: 18072 - protein, 103 aa, Homo sapiens
  Payload ID: 3623
  Gene Symbol: COQ7
  Gene Name: coenzyme Q7 homolog, ubiquinone (yeast)
  ENSP ID: ENSP00000456943
MTLDNISRAAVDRIIRVDHAGEYGANRIYAGQMAVLGRTSVGPVIQKMWDQEKDHLKKFNELMVTFRVRPTVLMPLWNVLGFALGAGTALLGKEGAMACTVAV

SEQ ID NO: 18073 - protein, 130 aa, Homo sapiens
  Payload ID: 3623
  Gene Symbol: COQ7
  Gene Name: coenzyme Q7 homolog, ubiquinone (yeast)
  ENSP ID: ENSP00000457256
MTLDNISRAAVDRIIRVDHAGEYGANRIYAGQMAVLGRTSVGPVIQKMWDQEKDHLKKFNELMVTFRVRPTVLMPLWNVLGFALGAGTALLGKEGAMACTVAVEESIAHHYNNQIRTLMEEDPEKYEELL

SEQ ID NO: 18074 - protein, 136 aa, Homo sapiens
  Payload ID: 3623
  Gene Symbol: COQ7
  Gene Name: coenzyme Q7 homolog, ubiquinone (yeast)
  ENSP ID: ENSP00000459076
MSCAGAAAAPRLWRLRPGARRSLSAYGRRTSVRFRSSGMTLDNISRAAVDRIIRVDHAGEYGANRIYAGQMAVLGRTSVGPVIQKMWDQEKDHLKKFNELMVTFRVRPTVLMPLWNVLGFALGTCLSRRAYASLGI

SEQ ID NO: 18075 - protein, 318 aa, Homo sapiens
  Payload ID: 3624
  Gene Symbol: COQ9
  Gene Name: coenzyme Q9
  Uniprot ID: O75208
  ENSP ID: ENSP00000262507
MAAAAVSGALGRAGWRLLQLRCLPVARCRQALVPRAFHASAVGLRSSDEQKQQPPNSFSQQHSETQGAEKPDPESSHSPPRYTDQGGEEEEDYESEEQLQHRILTAALEFVPAHGWTAEAIAEGAQSLGLSSAAASMFGKDGSELILHFVTQCNTRLTRVLEEEQKLVQLGQAEKRKTDQFLRDAVETRLRMLIPYIEHWPRALSILMLPHNIPSSLSLLTSMVDDMWHYAGDQSTDFNWYTRRAMLAAIYNTTELVMMQDSSPDFEDTWRFLENRVNDAMNMGHTAKQVKSTGEALVQGLMGAAVTLKNLTGLNQRR

SEQ ID NO: 18076 - protein, 303 aa, Homo sapiens
  Payload ID: 3624
  Gene Symbol: COQ9
  Gene Name: coenzyme Q9
  ENSP ID: ENSP00000454992
MAAAAVSGALGRAGWRLLQLRCLPVSVSVARCRQALVPRAFHASAVGLRSSDEQKQQPPNSFSQQHSETQGAEKPDPESSHSPPRYTDQGGEEEEDYESEEQLQHRILTAALEFVPAHGWTAEAIAEGAQSLGLSSAAASMFGKDGSELILHFVTQCNTRLTRVLEEEQKLVQLGQAEKRKTDQFLRDAVETRLRMLIPYIEHWPRALSILMLPHNIPSSLSLLTSMVDDMWHYAGDQSTDFNWYTRRAMLAAIYNTTELVMMQDSSPDFEDTWRFLENRVNDAMNMGHTAKQVKSTGEALVQ

SEQ ID NO: 18077 - protein, 188 aa, Homo sapiens
  Payload ID: 3624
  Gene Symbol: COQ9
  Gene Name: coenzyme Q9
  ENSP ID: ENSP00000455256
MAAAAVSGALGRAGWRLLQLRCLPVARCRQALVPRAFHASAVGLRSSDEQKQQPPNSFSQQHSETQGAEKPDPESSHSPPRYTDQGGEEEEDYESEEQLQHRILTAALEFVPAHGWTAEAIAEGAQSLGLSSAAASMFGKDGSELILHFVTQCNTRLTRVLEEEQKLVQLGQAEPSASSCSLTTSRPA

SEQ ID NO: 18078 - protein, 102 aa, Homo sapiens
  Payload ID: 3624
  Gene Symbol: COQ9
  Gene Name: coenzyme Q9
  ENSP ID: ENSP00000455495
QLRCLPVARCRQALVPRAFHASAVGLRSSDEQKQQPPNSFSQQHSETQGAEKPDPESSHSPPRYTDQGGEEEEDYESEEQLQHRILTAALEFVPAHGWTAEV

SEQ ID NO: 18079 - protein, 89 aa, Homo sapiens
  Payload ID: 3624
  Gene Symbol: COQ9
  Gene Name: coenzyme Q9
  ENSP ID: ENSP00000455516
MFGKDGSELILHFVTQCNTRLTRVLEEEQKLVQLGQAEKRKTDQFLRDAVETRLRMLIPYIEHWPRALSILMLPHNIPSSLSLLTSMVD

SEQ ID NO: 18080 - protein, 207 aa, Homo sapiens
  Payload ID: 3624
  Gene Symbol: COQ9
  Gene Name: coenzyme Q9
  ENSP ID: ENSP00000456174
MAAAAVSGALGRAGWRLLQLRCLPVARCRQALVPRAFHASAVGLRSSDEQKQQPPNSFSQQHSETQGAEKPDPESSHSPPRYTDQGGEEEEDYESEEQLQHRILTAALEFVPAHGWTAEAIAEGAQFNWYTRRAMLAAIYNTTELVMMQDSSPDFEDTWRFLENRVNDAMNMGHTAKQVKSTGEALVQGLMGAAVTLKNLTGLNQRR

SEQ ID NO: 18081 - protein, 283 aa, Homo sapiens
  Payload ID: 3624
  Gene Symbol: COQ9
  Gene Name: coenzyme Q9
  ENSP ID: ENSP00000456728
MAAAAVSGALGRAGWRLLQLRCLPVARCRQALVPRAFHASAVGLRSSDEQKQQPPNSFSQQHSETQGAEKPDPESSHSPPRYTDQGGEEEEDYESEEQLQHRILTAALEFVPAHGWTAEAIAEGAQSLGLSSAAASMFGKDGSELILHFVTQCNTRLTRVLEEEQKLALSILMLPHNIPSSLSLLTSMVDDMWHYAGDQSTDFNWYTRRAMLAAIYNTTELVMMQDSSPDFEDTWRFLENRVNDAMNMGHTAKQVKSTGEALVQGLMGAAVTLKNLTGLNQRR

SEQ ID NO: 18082 - protein, 172 aa, Homo sapiens
  Payload ID: 3624
  Gene Symbol: COQ9
  Gene Name: coenzyme Q9
  ENSP ID: ENSP00000458023
MAAAAVSGALGRAGWRLLQLRCLPVARCRQALVPRAFHASAVGLRSSDEQKQQPPNSFSQQHSETQGAEKPDPESSHSPPRYTDQGGEEEEDYESEEQLQHRILTAALEFVPAHGWTAEAIAEGAQALSILMLPHNIPSSLSLLTSMVDDMWHYAGDQSTDFNWYTRRAMLA

SEQ ID NO: 18083 - protein, 166 aa, Homo sapiens
  Payload ID: 3625
  Gene Symbol: CFL1
  Gene Name: cofilin 1 (non-muscle)
  Uniprot ID: P23528
  ENSP ID: ENSP00000309629
MASGVAVSDGVIKVFNDMKVRKSSTPEEVKKRKKAVLFCLSEDKKNIILEEGKEILVGDVGQTVDDPYATFVKMLPDKDCRYALYDATYETKESKKEDLVFIFWAPESAPLKSKMIYASSKDAIKKKLTGIKHELQANCYEEVKDRCTLAEKLGGSAVISLEGKPL

SEQ ID NO: 18084 - protein, 204 aa, Homo sapiens
  Payload ID: 3625
  Gene Symbol: CFL1
  Gene Name: cofilin 1 (non-muscle)
  ENSP ID: ENSP00000431696
MVSPGHGHLRERKELTPHSTNPAAARIWDATYSDGYVRPASGVAVSDGVIKVFNDMKVRKSSTPEEVKKRKKAVLFCLSEDKKNIILEEGKEILVGDVGQTVDDPYATFVKMLPDKDCRYALYDATYETKESKKEDLVFIFWAPESAPLKSKMIYASSKDAIKKKLTGIKHELQANCYEEVKDRCTLAEKLGGSAVISLEGKPL

SEQ ID NO: 18085 - protein, 90 aa, Homo sapiens
  Payload ID: 3625
  Gene Symbol: CFL1
  Gene Name: cofilin 1 (non-muscle)
  ENSP ID: ENSP00000432153
MASGVAVSDGVIKVFNDMKVRKSSTPEEVKKRKKAVLFCLSEDKKNIILEEGKEILVGDVGQTVDDPYATFVKMLPDKDCRYALYDATYE

SEQ ID NO: 18086 - protein, 149 aa, Homo sapiens
  Payload ID: 3625
  Gene Symbol: CFL1
  Gene Name: cofilin 1 (non-muscle)
  ENSP ID: ENSP00000432155
MKVRKSSTPEEVKKRKKAVLFCLSEDKKNIILEEGKEILVGDVGQTVDDPYATFVKMLPDKDCRYALYDATYETKESKKEDLVFIFWAPESAPLKSKMIYASSKDAIKKKLTGIKHELQANCYEEVKDRCTLAEKLGGSAVISLEGKPL

SEQ ID NO: 18087 - protein, 149 aa, Homo sapiens; identical to SEQ ID NO: 18086
  Payload ID: 3625
  Gene Symbol: CFL1
  Gene Name: cofilin 1 (non-muscle)
  ENSP ID: ENSP00000432226

SEQ ID NO: 18088 - protein, 166 aa, Homo sapiens; identical to SEQ ID NO: 18083
  Payload ID: 3625
  Gene Symbol: CFL1
  Gene Name: cofilin 1 (non-muscle)
  Uniprot ID: P23528
  ENSP ID: ENSP00000432660

SEQ ID NO: 18089 - protein, 149 aa, Homo sapiens; identical to SEQ ID NO: 18086
  Payload ID: 3625
  Gene Symbol: CFL1
  Gene Name: cofilin 1 (non-muscle)
  ENSP ID: ENSP00000433131

SEQ ID NO: 18090 - protein, 79 aa, Homo sapiens
  Payload ID: 3625
  Gene Symbol: CFL1
  Gene Name: cofilin 1 (non-muscle)
  ENSP ID: ENSP00000433308
MKVRKSSTPEEVKKRKKAVLFCLSEDKKNIILEEGKEILVGDVGQTVDDPYATFVKMLPDKDCRYALYDATYETKESKK

SEQ ID NO: 18091 - protein, 149 aa, Homo sapiens; identical to SEQ ID NO: 18086
  Payload ID: 3625
  Gene Symbol: CFL1
  Gene Name: cofilin 1 (non-muscle)
  ENSP ID: ENSP00000433910

SEQ ID NO: 18092 - protein, 159 aa, Homo sapiens
  Payload ID: 3625
  Gene Symbol: CFL1
  Gene Name: cofilin 1 (non-muscle)
  ENSP ID: ENSP00000436431
MASGVAVSDGVIKVFNDMKVRKSSTPEEVKKRKKAVLFCLSEDKKNIILEEGKEILVGDVGQTVDDPYATFVKMLPDKDCRYALYDATYETKESKKEDLVFIFWAPESAPLKSKMIYASSKDAIKKKLTGIKHELQANCYEEVKDRCTLAEKLGGSAVI

SEQ ID NO: 18093 - protein, 122 aa, Homo sapiens
  Payload ID: 3625
  Gene Symbol: CFL1
  Gene Name: cofilin 1 (non-muscle)
  ENSP ID: ENSP00000436899
MKVRKSSTPEEVKKRKKAVLFCLSEDKKNIILEEGKEILVGDVGQTVDDPYATFVKMLPDKDCRYALYDATYETKESKKEDLVFIFWAPESAPLKSKMIYASSKDAIKKKLTGIKHELQANC

SEQ ID NO: 18094 - protein, 166 aa, Homo sapiens
  Payload ID: 3626
  Gene Symbol: CFL2
  Gene Name: cofilin 2 (muscle)
  Uniprot ID: Q9Y281
  ENSP ID: ENSP00000298159
MASGVTVNDEVIKVFNDMKVRKSSTQEEIKKRKKAVLFCLSDDKRQIIVEEAKQILVGDIGDTVEDPYTSFVKLLPLNDCRYALYDATYETKESKKEDLVFIFWAPESAPLKSKMIYASSKDAIKKKFTGIKHEWQVNGLDDIKDRSTLGEKLGGNVVVSLEGKPL

SEQ ID NO: 18095 - protein, 166 aa, Homo sapiens; identical to SEQ ID NO: 18094
  Payload ID: 3626
  Gene Symbol: CFL2
  Gene Name: cofilin 2 (muscle)
  Uniprot ID: Q9Y281
  ENSP ID: ENSP00000340635

SEQ ID NO: 18096 - protein, 58 aa, Homo sapiens
  Payload ID: 3626
  Gene Symbol: CFL2
  Gene Name: cofilin 2 (muscle)
  ENSP ID: ENSP00000409326
MASGVTVNDEVIKVFNDMKVRKSSTQEEIKKRKKAVLFCLSDDKRQIIVEEAKQILGS

SEQ ID NO: 18097 - protein, 21 aa, Homo sapiens
  Payload ID: 3626
  Gene Symbol: CFL2
  Gene Name: cofilin 2 (muscle)
  ENSP ID: ENSP00000450862
MASGVTVNDEVIKVFNDMKGS

SEQ ID NO: 18098 - protein, 149 aa, Homo sapiens
  Payload ID: 3626
  Gene Symbol: CFL2
  Gene Name: cofilin 2 (muscle)
  Uniprot ID: Q9Y281
  ENSP ID: ENSP00000452188
MKVRKSSTQEEIKKRKKAVLFCLSDDKRQIIVEEAKQILVGDIGDTVEDPYTSFVKLLPLNDCRYALYDATYETKESKKEDLVFIFWAPESAPLKSKMIYASSKDAIKKKFTGIKHEWQVNGLDDIKDRSTLGEKLGGNVVVSLEGKPL

SEQ ID NO: 18099 - protein, 149 aa, Homo sapiens; identical to SEQ ID NO: 18098
  Payload ID: 3626
  Gene Symbol: CFL2
  Gene Name: cofilin 2 (muscle)
  Uniprot ID: Q9Y281
  ENSP ID: ENSP00000452451

SEQ ID NO: 18100 - protein, 782 aa, Homo sapiens
  Payload ID: 3627
  Gene Symbol: CCHCR1
  Gene Name: coiled-coil alpha-helical rod protein 1
  Uniprot ID: Q8TD31
  ENSP ID: ENSP00000365442
MFPPSGSTGLIPPSHFQARPLSTLPRMAPTWLSDIPLVQPPGHQDVSERRLDTQRPQVTMWERDVSSDRQEPGRRGRSWGLEGSQALSQQAEVIVRQLQELRRLEEEVRLLRETSLQQKMRLEAQAMELEALARAEKAGRAEAEGLRAALAGAEVVRKNLEEGSQRELEEVQRLHQEQLSSLTQAHEEALSSLTSKAEGLEKSLSSLETRRAGEAKELAEAQREAELLRKQLSKTQEDLEAQVTLVENLRKYVGEQVPSEVHSQTWELERQKLLETMQHLQEDRDSLHATAELLQVRVQSLTHILALQEEELTRKVQPSDSLEPEFTRKCQSLLNRWREKVFALMVQLKAQELEHSDSVKQLKGQVASLQEKVTSQSQEQAILQRSLQDKAAEVEVERMGAKGLQLELSRAQEARRRWQQQTASAEEQLRLVVNAVSSSQIWLETTMAKVEGAAAQLPSLNNRLSYAVRKVHTIRGLIARKLALAQLRQESCPLPPPVTDVSLELQQLREERNRLDAELQLSARLIQQEVGRAREQGEAERQQLSKVAQQLEQELQQTQESLASLGLQLEVARQGQQESTEEAASLRQELTQQQELYGQALQEKVAEVETRLREQLSDTERRLNEARREHAKAVVSLRQIQRRAAQEKERSQELRRLQEEARKEEGQRLARRLQELERDKNLMLATLQQEGLLSRYKQQRLLTVLPSLLDKKKSVVSSPRPPECSASAPVAAAVPTRESIKGSLSVLLDDLQDLSEAISKEEAVCQGDNLDRCSSSNPQMSS

SEQ ID NO: 18101 - protein, 782 aa, Homo sapiens
  Payload ID: 3627
  Gene Symbol: CCHCR1
  Gene Name: coiled-coil alpha-helical rod protein 1
  Uniprot ID: Q8TD31
  ENSP ID: ENSP00000372832
MFPPSGSTGLIPPSHFQARPLSTLPRMAPTWLSDIPLVQPPGHQDVSERRLDTQRPQVTMWERDVSSDRQEPGRRGRSWGLEGSQALSQQAEVIVRQLQELRWLEEEVWLLRETSLQQKMRLEAQAMELEALARAEKAGRAEAEGLRAALAGAEVVRKNLEEGRQRELEEVQRLHQEQLSSLTQAHEEALSSLTSKAEGLEKSLSSLETRRAGEAKELAEAQREAELLRKQLSKTQEDLEAQVTLVENLRKYVGEQVPSEVHSQTWELERQKLLETMQHLQEDRDSLHATAELLQVRVQSLTHILALQEEELTRKVQPSDSLEPEFTRKCQSLLNRWREKVFALMVQLKAQELEHSDSVKQLKGQVASLQEKVTSQSQEQAILQRSLQDKAAEVEVERMGAKGLQLELSRAQEARRWWQQQTASAEEQLRLVVNAVSSSQIWLETTMAKVEGAAAQLPSLNNRLSYAVRKVHTIRGLIARKLALAQLRQESCPLPPPVTDVSLELQQLREERNRLDAELQLSARLIQQEVGRAREQGEAERQQLSKVAQQLEQELQQTQESLASLGLQLEVARQCQQESTEEAASLRQELTQQQELYGQALQEKVAEVETRLREQLSDTERRLNEARREHAKAVVSLRQIQRRAAQEKERSQELRRLQEEARKEEGQRLARRLQELERDKNLMLATLQQEGLLSRYKQQRLLTVLPSLLDKKKSVVSSPRPPECSASAPVAAAVPTRESIKGSLSVLLDDLQDLSEAISKEEAVCQGDNLDRCSSCNPQMSS

SEQ ID NO: 18102 - protein, 782 aa, Homo sapiens; identical to SEQ ID NO: 18100
  Payload ID: 3627
  Gene Symbol: CCHCR1
  Gene Name: coiled-coil alpha-helical rod protein 1
  Uniprot ID: Q8TD31
  ENSP ID: ENSP00000373019

SEQ ID NO: 18103 - protein, 729 aa, Homo sapiens
  Payload ID: 3627
  Gene Symbol: CCHCR1
  Gene Name: coiled-coil alpha-helical rod protein 1
  ENSP ID: ENSP00000379561
MFPPSGSTGLIPPSHFQARPLSTLPRMAPTWLSDIPLVQPPGHQDVSERRLDTQRPQVTMWERDVSSDRQEPGRRGRSWGLEGSQALSQQAEVIVRQLQELRRLEEEVRLLRETSLQQKMRLEAQAMELEALARAEKAGRAEAEGLRAALAGAEVVRKNLEEGSQRELEEVQRLHQEQLSSLTQAHEEALSSLTSKAEGLEKSLSSLETRRAGEAKELAEAQREAELLRKQLSKTQEDLEAQVTLVENLRKYVGEQVPSEVHSQTWELERQKLLETMQHLQEDRDSLHATAELLQVRVQSLTHILALQEEELTRKVQPSDSLEPEFTRKCQSLLNRWREKVFALMVQLKAQELEHSDSVKQLKGQVASLQEKVTSQSQEQAILQRSLQDKAAEVEVERMGAKGLQLELSRAQEARRRWQQQTASAEEQLRLVVNAVSSCPLPPPVTDVSLELQQLREERNRLDAELQLSARLIQQEVGRAREQGEAERQQLSKVAQQLEQELQQTQESLASLGLQLEVARQGQQESTEEAASLRQELTQQQELYGQALQEKVAEVETRLREQLSDTERRLNEARREHAKAVVSLRQIQRRAAQEKERSQELRRLQEEARKEEGQRLARRLQELERDKNLMLATLQQEGLLSRYKQQRLLTVLPSLLDKKKSVVSSPRPPECSASAPVAAAVPTRESIKGSLSVLLDDLQDLSEAISKEEAVCQGDNLDRCSSSNPQMSS

SEQ ID NO: 18104 - protein, 871 aa, Homo sapiens
  Payload ID: 3627
  Gene Symbol: CCHCR1
  Gene Name: coiled-coil alpha-helical rod protein 1
  Uniprot ID: Q8TD31
  ENSP ID: ENSP00000379566
MWPHSAGARPWASTLTGKDPRVMACWCLDGLPSGLAEPWRELWRWRSRPLHCVPPFSPLARSSRDHRNLRRRGNIDGWRQNLEPSNNVEMFPPSGSTGLIPPSHFQARPLSTLPRMAPTWLSDIPLVQPPGHQDVSERRLDTQRPQVTMWERDVSSDRQEPGRRGRSWGLEGSQALSQQAEVIVRQLQELRRLEEEVRLLRETSLQQKMRLEAQAMELEALARAEKAGRAEAEGLRAALAGAEVVRKNLEEGSQRELEEVQRLHQEQLSSLTQAHEEALSSLTSKAEGLEKSLSSLETRRAGEAKELAEAQREAELLRKQLSKTQEDLEAQVTLVENLRKYVGEQVPSEVHSQTWELERQKLLETMQHLQEDRDSLHATAELLQVRVQSLTHILALQEEELTRKVQPSDSLEPEFTRKCQSLLNRWREKVFALMVQLKAQELEHSDSVKQLKGQVASLQEKVTSQSQEQAILQRSLQDKAAEVEVERMGAKGLQLELSRAQEARRRWQQQTASAEEQLRLVVNAVSSSQIWLETTMAKVEGAAAQLPSLNNRLSYAVRKVHTIRGLIARKLALAQLRQESCPLPPPVTDVSLELQQLREERNRLDAELQLSARLIQQEVGRAREQGEAERQQLSKVAQQLEQELQQTQESLASLGLQLEVARQGQQESTEEAASLRQELTQQQELYGQALQEKVAEVETRLREQLSDTERRLNEARREHAKAVVSLRQIQRRAAQEKERSQELRRLQEEARKEEGQRLARRLQELERDKNLMLATLQQEGLLSRYKQQRLLTVLPSLLDKKKSVVSSPRPPECSASAPVAAAVPTRESIKGSLSVLLDDLQDLSEAISKEEAVCQGDNLDRCSSSNPQMSS

SEQ ID NO: 18105 - protein, 729 aa, Homo sapiens
  Payload ID: 3627
  Gene Symbol: CCHCR1
  Gene Name: coiled-coil alpha-helical rod protein 1
  ENSP ID: ENSP00000383204
MFPPSGSTGLIPPSHFQARPLSTLPRMAPTWLSDIPLVQPPGHQDVSERRLDTQRPQVTMWERDVSSDRQEPGRRGRSWGLEGSQALSQQAEVIVRQLQELRWLEEEVWLLRETSLQQKMRLEAQAMELEALARAEKAGRAEAEGLRAALAGAEVVRKNLEEGRQRELEEVQRLHQEQLSSLTQAHEEALSSLTSKAEGLEKSLSSLETRRAGEAKELAEAQREAELLRKQLSKTQEDLEAQVTLVENLRKYVGEQVPSEVHSQTWELERQKLLETMQHLQEDRDSLHATAELLQVRVQSLTHILALQEEELTRKVQPSDSLEPEFTRKCQSLLNRWREKVFALMVQLKAQELEHSDSVKQLKGQVASLQEKVTSQSQEQAILQRSLQDKAAEVEVERMGAKGLQLELSRAQEARRWWQQQTASAEEQLRLVVNAVSSCPLPPPVTDVSLELQQLREERNRLDAELQLSARLIQQEVGRAREQGEAERQQLSKVAQQLEQELQQTQESLASLGLQLEVARQCQQESTEEAASLRQELTQQQELYGQALQEKVAEVETRLREQLSDTERRLNEARREHAKAVVSLRQIQRRAAQEKERSQELRRLQEEARKEEGQRLARRLQELERDKNLMLATLQQEGLLSRYKQQRLLTVLPSLLDKKKSVVSSPRPPECSASAPVAAAVPTRESIKGSLSVLLDDLQDLSEAISKEEAVCQGDNLDRCSSCNPQMSS

SEQ ID NO: 18106 - protein, 782 aa, Homo sapiens; identical to SEQ ID NO: 18101
  Payload ID: 3627
  Gene Symbol: CCHCR1
  Gene Name: coiled-coil alpha-helical rod protein 1
  Uniprot ID: Q8TD31
  ENSP ID: ENSP00000383205

SEQ ID NO: 18107 - protein, 729 aa, Homo sapiens; identical to SEQ ID NO: 18103
  Payload ID: 3627
  Gene Symbol: CCHCR1
  Gene Name: coiled-coil alpha-helical rod protein 1
  ENSP ID: ENSP00000383257

SEQ ID NO: 18108 - protein, 871 aa, Homo sapiens; identical to SEQ ID NO: 18104
  Payload ID: 3627
  Gene Symbol: CCHCR1
  Gene Name: coiled-coil alpha-helical rod protein 1
  Uniprot ID: Q8TD31
  ENSP ID: ENSP00000383263

SEQ ID NO: 18109 - protein, 118 aa, Homo sapiens
  Payload ID: 3627
  Gene Symbol: CCHCR1
  Gene Name: coiled-coil alpha-helical rod protein 1
  ENSP ID: ENSP00000388264
MFPPSGSTGLIPPSHFQARPLSTLPRMAPTWLSDIPLVQPPGHQDVSERRLDTQRPQVTMWERDVSSDRQEPGRRGRSWGLEGSQALSQQAEVIVRQLQELRRLEEEVRLLRETSLQQ

SEQ ID NO: 18110 - protein, 188 aa, Homo sapiens
  Payload ID: 3627
  Gene Symbol: CCHCR1
  Gene Name: coiled-coil alpha-helical rod protein 1
  ENSP ID: ENSP00000388748
MFPPSGSTGLIPPSHFQARPLSTLPRMAPTWLSDIPLVQPPGHQDVSERRLDTQRPQVTMWERDVSSDRQEPGRRGRSWGLEGSQALSQQAEVIVRQLQELRRLEEEVRLLRETSLQQKMRLEAQAMELEALARAEKAGRAEAEGLRAALAGAEVVRKNLEEGSQRELEEVQRLHQEQLSSLTQAHEE

SEQ ID NO: 18111 - protein, 171 aa, Homo sapiens
  Payload ID: 3627
  Gene Symbol: CCHCR1
  Gene Name: coiled-coil alpha-helical rod protein 1
  ENSP ID: ENSP00000389131
MFPPSGQWDQTRGVVVVSAWETDHLCFCNSSGSTGLIPPSHFQARPLSTLPRMAPTWLSDIPLVQPPGHQDVSERRLDTQRPQVTMWERDVSSDRQEPGRRGRSWGLEGSQALSQQAEVIVRQLQELRRLEEEVRLLRETSLQQKMRLEAQAMELEALARAEKAGRAEAEG

SEQ ID NO: 18112 - protein, 126 aa, Homo sapiens
  Payload ID: 3627
  Gene Symbol: CCHCR1
  Gene Name: coiled-coil alpha-helical rod protein 1
  ENSP ID: ENSP00000389303
MFPPSGQWDQTRGVVVVSAWETDHLCFCNSSGSTGLIPPSHFQARPLSTLPRMAPTWLSDIPLVQPPGHQDVSERRLDTQRPQVTMWERDVSSDRQEPGRRGRSWGLEGSQALSQQAEVIVRQLQE

SEQ ID NO: 18113 - protein, 126 aa, Homo sapiens; identical to SEQ ID NO: 18112
  Payload ID: 3627
  Gene Symbol: CCHCR1
  Gene Name: coiled-coil alpha-helical rod protein 1
  ENSP ID: ENSP00000389758

SEQ ID NO: 18114 - protein, 188 aa, Homo sapiens; identical to SEQ ID NO: 18110
  Payload ID: 3627
  Gene Symbol: CCHCR1
  Gene Name: coiled-coil alpha-helical rod protein 1
  ENSP ID: ENSP00000390027

SEQ ID NO: 18115 - protein, 256 aa, Homo sapiens
  Payload ID: 3627
  Gene Symbol: CCHCR1
  Gene Name: coiled-coil alpha-helical rod protein 1
  ENSP ID: ENSP00000390313
  MOD_RES (1)..(1): Any amino acid
XRLDAELQLSARLIQQEVGRAREQGEAERQQLSKVAQQLEQELQQTQESLASLGLQLEVARQCQQESTEEAASLRQELTQQQELYGQALQEKVAEVETRLREQLSDTERRLNEARREHAKAVVSLRQIQRRAAQEKERSQELRRLQEEARKEEGQRLARRLQELERDKNLMLQRLLTVLPSLLDKKKSVVSSPRPPECSASAPVAAAVPTRESIKGSLSVLLDDLQDLSEAISKEEAVCQGDNLDRCSSCNPQMSS

SEQ ID NO: 18116 - protein, 256 aa, Homo sapiens
  Payload ID: 3627
  Gene Symbol: CCHCR1
  Gene Name: coiled-coil alpha-helical rod protein 1
  ENSP ID: ENSP00000390347
  MOD_RES (1)..(1): Any amino acid
XRLDAELQLSARLIQQEVGRAREQGEAERQQLSKVAQQLEQELQQTQESLASLGLQLEVARQGQQESTEEAASLRQELTQQQELYGQALQEKVAEVETRLREQLSDTERRLNEARREHAKAVVSLRQIQRRAAQEKERSQELRRLQEEARKEEGQRLARRLQELERDKNLMLQRLLTVLPSLLDKKKSVVSSPRPPECSASAPVAAAVPTRESIKGSLSVLLDDLQDLSEAISKEEAVCQGDNLDRCSSSNPQMSS

SEQ ID NO: 18117 - protein, 256 aa, Homo sapiens; identical to SEQ ID NO: 18115
  Payload ID: 3627
  Gene Symbol: CCHCR1
  Gene Name: coiled-coil alpha-helical rod protein 1
  ENSP ID: ENSP00000390479
  MOD_RES (1)..(1): Any amino acid

SEQ ID NO: 18118 - protein, 316 aa, Homo sapiens
  Payload ID: 3627
  Gene Symbol: CCHCR1
  Gene Name: coiled-coil alpha-helical rod protein 1
  ENSP ID: ENSP00000391018
MFPPSGHQDVSERRLDTQRPQVTMWERDVSSDRQEPGRRGRSWGLEGSQALSQQAEVIVRQLQELRRLEEEVRLLRETSLQQKMRLEAQAMELEALARAEKAGRAEAEGLRAALAGAEVVRKNLEEGRQRELEEVQRLHQEQLSSLTQAHEEALSSLTSKAEGLEKSLSSLETRRAGEAKELAEAQREAELLRKQLSKTQEDLEAQVTLVENLRKYVGEQVPSEVHSQTWELERQKLLDTMQHLQEDRDSLHATAELLQVRVQSLTHILALQEEELTRKVQPSDSLEPEFTRKCQSLLNRWREKVFALMVQLKAQE

SEQ ID NO: 18119 - protein, 782 aa, Homo sapiens
  Payload ID: 3627
  Gene Symbol: CCHCR1
  Gene Name: coiled-coil alpha-helical rod protein 1
  ENSP ID: ENSP00000391181
MFPPSGSTGLIPPSHFQARPLSTLPRMAPTWLSDIPLVQPPGHQDVSERRLDTQRPQVTMWERDVSSDRQEPGRRGRSWGLEGSQALSQQAEVIVRQLQELRRLEEEVRLLRETSLQQKMRLEAQAMELEALARAEKAGRAEAEGLRAALAGAEVVRKNLEEGRQRELEEVQRLHQEQLSSLTQAHEEALSSLTSKAEGLEKSLSSLETRRAGEAKELAEAQREAELLRKQLSKTQEDLEAQVTLVENLRKYVGEQVPSEVHSQTWELERQKLLDTMQHLQEDRDSLHATAELLQVRVQSLTHILALQEEELTRKVQPSDSLEPEFTRKCQSLLNRWREKVFALMVQLKAQELEHSDSVKQLKGQVASLQEKVTSQSQEQAILQRSLQDKAAEVEVERMGAKGLQLELSRAQEARRRWQQQTASAEEQLRLVVNAVSSSQIWLETTMAKVEGAAAQLPSLNNRLSYAVRKVHTIRGLIARKLALAQLRQESCPLPPPVTDVSLELQQLREERNRLDAELQLSARLIQQEVGRAREQGEAERQQLSKVAQQLEQELQQTQESLASLGLQLEVARQGQQESTEEAASLRQELTQQQELYGQALQEKVAEVETRLREQLSDTERRLNEARREHAKAVVSLRQIQRRAAQEKERSQELRRLQEEARKEEGQRLARRLQELERDKNLMLATLQQEGLLSRYKQQRLLTVLPSLLDKKKSVVSSPRPPECSASAPVAAAVPTRESIKGSLSVLLDDLQDLSEAISKEEAVCQGDNLDRCSSSNPQMSS

SEQ ID NO: 18120 - protein, 216 aa, Homo sapiens
  Payload ID: 3627
  Gene Symbol: CCHCR1
  Gene Name: coiled-coil alpha-helical rod protein 1
  ENSP ID: ENSP00000391707
MWPHSAGARPWASTLTGKDPRVMACWCLDGLPSGLAEPWRELWRWRSRPLHCVPPFSPLARSSRDHRNLRRRVEALPRILKGNIDGWRQNLEPSNNVEMFPPSGSTGLIPPSHFQARPLSTLPRMAPTWLSDIPLVQPPGHQDVSERRLDTQRPQVTMWERDVSSDRQEPGRRGRSWGLEGSQALSQQAEVIVRQLQELRRLEEEVRLLRETSLQQ

SEQ ID NO: 18121 - protein, 782 aa, Homo sapiens; identical to SEQ ID NO: 18101
  Payload ID: 3627
  Gene Symbol: CCHCR1
  Gene Name: coiled-coil alpha-helical rod protein 1
  Uniprot ID: Q8TD31
  ENSP ID: ENSP00000393042

SEQ ID NO: 18122 - protein, 126 aa, Homo sapiens; identical to SEQ ID NO: 18112
  Payload ID: 3627
  Gene Symbol: CCHCR1
  Gene Name: coiled-coil alpha-helical rod protein 1
  ENSP ID: ENSP00000393508

SEQ ID NO: 18123 - protein, 171 aa, Homo sapiens
  Payload ID: 3627
  Gene Symbol: CCHCR1
  Gene Name: coiled-coil alpha-helical rod protein 1
  ENSP ID: ENSP00000394964
MFPPSGQWDQTRGVVVVSAWETDHLCFCNSSGSTGLIPPSHFQARPLSTLPRMAPTWLSDIPLVQPPGHQDVSERRLDTQRPQVTMWERDVSSDRQEPGRRGRSWGLEGSQALSQQAEVIVRQLQELRWLEEEVWLLRETSLQQKMRLEAQAMELEALARAEKAGRAEAEG

SEQ ID NO: 18124 - protein, 316 aa, Homo sapiens; identical to SEQ ID NO: 18118
  Payload ID: 3627
  Gene Symbol: CCHCR1
  Gene Name: coiled-coil alpha-helical rod protein 1
  ENSP ID: ENSP00000395434

SEQ ID NO: 18125 - protein, 118 aa, Homo sapiens
  Payload ID: 3627
  Gene Symbol: CCHCR1
  Gene Name: coiled-coil alpha-helical rod protein 1
  ENSP ID: ENSP00000396155
MFPPSGSTGLIPPSHFQARPLSTLPRMAPTWLSDIPLVQPPGHQDVSERRLDTQRPQVTMWERDVSSDRQEPGRRGRSWGLEGSQALSQQAEVIVRQLQELRWLEEEVWLLRETSLQQ

SEQ ID NO: 18126 - protein, 188 aa, Homo sapiens
  Payload ID: 3627
  Gene Symbol: CCHCR1
  Gene Name: coiled-coil alpha-helical rod protein 1
  ENSP ID: ENSP00000396200
MFPPSGSTGLIPPSHFQARPLSTLPRMAPTWLSDIPLVQPPGHQDVSERRLDTQRPQVTMWERDVSSDRQEPGRRGRSWGLEGSQALSQQAEVIVRQLQELRWLEEEVWLLRETSLQQKMRLEAQAMELEALARAEKAGRAEAEGLRAALAGAEVVRKNLEEGRQRELEEVQRLHQEQLSSLTQAHEE

SEQ ID NO: 18127 - protein, 126 aa, Homo sapiens; identical to SEQ ID NO: 18112
  Payload ID: 3627
  Gene Symbol: CCHCR1
  Gene Name: coiled-coil alpha-helical rod protein 1
  ENSP ID: ENSP00000396696

SEQ ID NO: 18128 - protein, 152 aa, Homo sapiens
  Payload ID: 3627
  Gene Symbol: CCHCR1
  Gene Name: coiled-coil alpha-helical rod protein 1
  ENSP ID: ENSP00000397446
MFPPSGSTGLIPPSHFQARPLSTLPRMAPTWLSDIPLVQPPGHQDVSERRLDTQRPQVTMWERDVSSDRQEPGRRGRSWGLEGSQALSQQAEVIVRQLQELRRLEEEVRLLRETSLQQKMRLEAQAMELEALARAEKAGRAEAEGLRAALAG

SEQ ID NO: 18129 - protein, 118 aa, Homo sapiens; identical to SEQ ID NO: 18125
  Payload ID: 3627
  Gene Symbol: CCHCR1
  Gene Name: coiled-coil alpha-helical rod protein 1
  ENSP ID: ENSP00000397856

SEQ ID NO: 18130 - protein, 152 aa, Homo sapiens; identical to SEQ ID NO: 18128
  Payload ID: 3627
  Gene Symbol: CCHCR1
  Gene Name: coiled-coil alpha-helical rod protein 1
  ENSP ID: ENSP00000398715

SEQ ID NO: 18131 - protein, 729 aa, Homo sapiens; identical to SEQ ID NO: 18105
  Payload ID: 3627
  Gene Symbol: CCHCR1
  Gene Name: coiled-coil alpha-helical rod protein 1
  ENSP ID: ENSP00000398934

SEQ ID NO: 18132 - protein, 171 aa, Homo sapiens; identical to SEQ ID NO: 18123
  Payload ID: 3627
  Gene Symbol: CCHCR1
  Gene Name: coiled-coil alpha-helical rod protein 1
  ENSP ID: ENSP00000399391

SEQ ID NO: 18133 - protein, 171 aa, Homo sapiens; identical to SEQ ID NO: 18111
  Payload ID: 3627
  Gene Symbol: CCHCR1
  Gene Name: coiled-coil alpha-helical rod protein 1
  ENSP ID: ENSP00000399555

SEQ ID NO: 18134 - protein, 152 aa, Homo sapiens; identical to SEQ ID NO: 18128
  Payload ID: 3627
  Gene Symbol: CCHCR1
  Gene Name: coiled-coil alpha-helical rod protein 1
  ENSP ID: ENSP00000400469

SEQ ID NO: 18135 - protein, 835 aa, Homo sapiens
  Payload ID: 3627
  Gene Symbol: CCHCR1
  Gene Name: coiled-coil alpha-helical rod protein 1
  Uniprot ID: Q8TD31
  ENSP ID: ENSP00000401039
MWPHSAGARPWASTLTGKDPRVMACWCLDGLPSGLAEPWRELWRWRSRPLHCVPPFSPLARSSRDHRNLRRRGNIDGWRQNLEPSNNVEMFPPSGHQDVSERRLDTQRPQVTMWERDVSSDRQEPGRRGRSWGLEGSQALSQQAEVIVRQLQELRRLEEEVRLLRETSLQQKMRLEAQAMELEALARAEKAGRAEAEGLRAALAGAEVVRKNLEEGSQRELEEVQRLHQEQLSSLTQAHEEALSSLTSKAEGLEKSLSSLETRRAGEAKELAEAQREAELLRKQLSKTQEDLEAQVTLVENLRKYVGEQVPSEVHSQTWELERQKLLETMQHLQEDRDSLHATAELLQVRVQSLTHILALQEEELTRKVQPSDSLEPEFTRKCQSLLNRWREKVFALMVQLKAQELEHSDSVKQLKGQVASLQEKVTSQSQEQAILQRSLQDKAAEVEVERMGAKGLQLELSRAQEARRRWQQQTASAEEQLRLVVNAVSSSQIWLETTMAKVEGAAAQLPSLNNRLSYAVRKVHTIRGLIARKLALAQLRQESCPLPPPVTDVSLELQQLREERNRLDAELQLSARLIQQEVGRAREQGEAERQQLSKVAQQLEQELQQTQESLASLGLQLEVARQGQQESTEEAASLRQELTQQQELYGQALQEKVAEVETRLREQLSDTERRLNEARREHAKAVVSLRQIQRRAAQEKERSQELRRLQEEARKEEGQRLARRLQELERDKNLMLATLQQEGLLSRYKQQRLLTVLPSLLDKKKSVVSSPRPPECSASAPVAAAVPTRESIKGSLSVLLDDLQDLSEAISKEEAVCQGDNLDRCSSSNPQMSS

SEQ ID NO: 18136 - protein, 188 aa, Homo sapiens; identical to SEQ ID NO: 18126
  Payload ID: 3627
  Gene Symbol: CCHCR1
  Gene Name: coiled-coil alpha-helical rod protein 1
  ENSP ID: ENSP00000401869

SEQ ID NO: 18137 - protein, 216 aa, Homo sapiens; identical to SEQ ID NO: 18120
  Payload ID: 3627
  Gene Symbol: CCHCR1
  Gene Name: coiled-coil alpha-helical rod protein 1
  ENSP ID: ENSP00000402432

SEQ ID NO: 18138 - protein, 256 aa, Homo sapiens; identical to SEQ ID NO: 18116
  Payload ID: 3627
  Gene Symbol: CCHCR1
  Gene Name: coiled-coil alpha-helical rod protein 1
  ENSP ID: ENSP00000403227
  MOD_RES (1)..(1): Any amino acid

SEQ ID NO: 18139 - protein, 782 aa, Homo sapiens; identical to SEQ ID NO: 18119
  Payload ID: 3627
  Gene Symbol: CCHCR1
  Gene Name: coiled-coil alpha-helical rod protein 1
  ENSP ID: ENSP00000403628

SEQ ID NO: 18140 - protein, 188 aa, Homo sapiens
  Payload ID: 3627
  Gene Symbol: CCHCR1
  Gene Name: coiled-coil alpha-helical rod protein 1
  ENSP ID: ENSP00000404715
MFPPSGSTGLIPPSHFQARPLSTLPRMAPTWLSDIPLVQPPGHQDVSERRLDTQRPQVTMWERDVSSDRQEPGRRGRSWGLEGSQALSQQAEVIVRQLQELRRLEEEVRLLRETSLQQKMRLEAQAMELEALARAEKAGRAEAEGLRAALAGAEVVRKNLEEGRQRELEEVQRLHQEQLSSLTQAHEE

SEQ ID NO: 18141 - protein, 316 aa, Homo sapiens
  Payload ID: 3627
  Gene Symbol: CCHCR1
  Gene Name: coiled-coil alpha-helical rod protein 1
  ENSP ID: ENSP00000404757
MFPPSGHQDVSERRLDTQRPQVTMWERDVSSDRQEPGRRGRSWGLEGSQALSQQAEVIVRQLQELRRLEEEVRLLRETSLQQKMRLEAQAMELEALARAEKAGRAEAEGLRAALAGAEVVRKNLEEGSQRELEEVQRLHQEQLSSLTQAHEEALSSLTSKAEGLEKSLSSLETRRAGEAKELAEAQREAELLRKQLSKTQEDLEAQVTLVENLRKYVGEQVPSEVHSQTWELERQKLLETMQHLQEDRDSLHATAELLQVRVQSLTHILALQEEELTRKVQPSDSLEPEFTRKCQSLLNRWREKVFALMVQLKAQE

SEQ ID NO: 18142 - protein, 729 aa, Homo sapiens
  Payload ID: 3627
  Gene Symbol: CCHCR1
  Gene Name: coiled-coil alpha-helical rod protein 1
  ENSP ID: ENSP00000404917
MFPPSGSTGLIPPSHFQARPLSTLPRMAPTWLSDIPLVQPPGHQDVSERRLDTQRPQVTMWERDVSSDRQEPGRRGRSWGLEGSQALSQQAEVIVRQLQELRRLEEEVRLLRETSLQQKMRLEAQAMELEALARAEKAGRAEAEGLRAALAGAEVVRKNLEEGRQRELEEVQRLHQEQLSSLTQAHEEALSSLTSKAEGLEKSLSSLETRRAGEAKELAEAQREAELLRKQLSKTQEDLEAQVTLVENLRKYVGEQVPSEVHSQTWELERQKLLDTMQHLQEDRDSLHATAELLQVRVQSLTHILALQEEELTRKVQPSDSLEPEFTRKCQSLLNRWREKVFALMVQLKAQELEHSDSVKQLKGQVASLQEKVTSQSQEQAILQRSLQDKAAEVEVERMGAKGLQLELSRAQEARRRWQQQTASAEEQLRLVVNAVSSCPLPPPVTDVSLELQQLREERNRLDAELQLSARLIQQEVGRAREQGEAERQQLSKVAQQLEQELQQTQESLASLGLQLEVARQGQQESTEEAASLRQELTQQQELYGQALQEKVAEVETRLREQLSDTERRLNEARREHAKAVVSLRQIQRRAAQEKERSQELRRLQEEARKEEGQRLARRLQELERDKNLMLATLQQEGLLSRYKQQRLLTVLPSLLDKKKSVVSSPRPPECSASAPVAAAVPTRESIKGSLSVLLDDLQDLSEAISKEEAVCQGDNLDRCSSSNPQMSS

SEQ ID NO: 18143 - protein, 118 aa, Homo sapiens; identical to SEQ ID NO: 18109
  Payload ID: 3627
  Gene Symbol: CCHCR1
  Gene Name: coiled-coil alpha-helical rod protein 1
  ENSP ID: ENSP00000405010

SEQ ID NO: 18144 - protein, 782 aa, Homo sapiens; identical to SEQ ID NO: 18119
  Payload ID: 3627
  Gene Symbol: CCHCR1
  Gene Name: coiled-coil alpha-helical rod protein 1
  ENSP ID: ENSP00000405118

SEQ ID NO: 18145 - protein, 782 aa, Homo sapiens; identical to SEQ ID NO: 18101
  Payload ID: 3627
  Gene Symbol: CCHCR1
  Gene Name: coiled-coil alpha-helical rod protein 1
  Uniprot ID: Q8TD31
  ENSP ID: ENSP00000408012

SEQ ID NO: 18146 - protein, 171 aa, Homo sapiens; identical to SEQ ID NO: 18111
  Payload ID: 3627
  Gene Symbol: CCHCR1
  Gene Name: coiled-coil alpha-helical rod protein 1
  ENSP ID: ENSP00000408031

SEQ ID NO: 18147 - protein, 316 aa, Homo sapiens
  Payload ID: 3627
  Gene Symbol: CCHCR1
  Gene Name: coiled-coil alpha-helical rod protein 1
  ENSP ID: ENSP00000408519
MFPPSGHQDVSERRLDTQRPQVTMWERDVSSDRQEPGRRGRSWGLEGSQALSQQAEVIVRQLQELRWLEEEVWLLRETSLQQKMRLEAQAMELEALARAEKAGRAEAEGLRAALAGAEVVRKNLEEGRQRELEEVQRLHQEQLSSLTQAHEEALSSLTSKAEGLEKSLSSLETRRAGEAKELAEAQREAELLRKQLSKTQEDLEAQVTLVENLRKYVGEQVPSEVHSQTWELERQKLLETMQHLQEDRDSLHATAELLQVRVQSLTHILALQEEELTRKVQPSDSLEPEFTRKCQSLLNRWREKVFALMVQLKAQE

SEQ ID NO: 18148 - protein, 152 aa, Homo sapiens
  Payload ID: 3627
  Gene Symbol: CCHCR1
  Gene Name: coiled-coil alpha-helical rod protein 1
  ENSP ID: ENSP00000408590
MFPPSGSTGLIPPSHFQARPLSTLPRMAPTWLSDIPLVQPPGHQDVSERRLDTQRPQVTMWERDVSSDRQEPGRRGRSWGLEGSQALSQQAEVIVRQLQELRWLEEEVWLLRETSLQQKMRLEAQAMELEALARAEKAGRAEAEGLRAALAG

SEQ ID NO: 18149 - protein, 316 aa, Homo sapiens; identical to SEQ ID NO: 18147
  Payload ID: 3627
  Gene Symbol: CCHCR1
  Gene Name: coiled-coil alpha-helical rod protein 1
  ENSP ID: ENSP00000409157

SEQ ID NO: 18150 - protein, 126 aa, Homo sapiens; identical to SEQ ID NO: 18112
  Payload ID: 3627
  Gene Symbol: CCHCR1
  Gene Name: coiled-coil alpha-helical rod protein 1
  ENSP ID: ENSP00000409907

SEQ ID NO: 18151 - protein, 152 aa, Homo sapiens; identical to SEQ ID NO: 18128
  Payload ID: 3627
  Gene Symbol: CCHCR1
  Gene Name: coiled-coil alpha-helical rod protein 1
  ENSP ID: ENSP00000410018

SEQ ID NO: 18152 - protein, 126 aa, Homo sapiens; identical to SEQ ID NO: 18112
  Payload ID: 3627
  Gene Symbol: CCHCR1
  Gene Name: coiled-coil alpha-helical rod protein 1
  ENSP ID: ENSP00000410052

SEQ ID NO: 18153 - protein, 152 aa, Homo sapiens; identical to SEQ ID NO: 18148
  Payload ID: 3627
  Gene Symbol: CCHCR1
  Gene Name: coiled-coil alpha-helical rod protein 1
  ENSP ID: ENSP00000412157

SEQ ID NO: 18154 - protein, 188 aa, Homo sapiens; identical to SEQ ID NO: 18140
  Payload ID: 3627
  Gene Symbol: CCHCR1
  Gene Name: coiled-coil alpha-helical rod protein 1
  ENSP ID: ENSP00000412354

SEQ ID NO: 18155 - protein, 191 aa, Homo sapiens
  Payload ID: 3627
  Gene Symbol: CCHCR1
  Gene Name: coiled-coil alpha-helical rod protein 1
  ENSP ID: ENSP00000414323
MFPPSGHQDVSERRLDTQRPQVTMWERDVSSDRQEPGRRGRSWGLEGSQALSQQAEVIVRQLQELRRLEEEVRLLRETSLQQKMRLEAQAMELEALARAEKAGRAEAEGLRAALAGAEVVRKNLEEGSQRELEEVQRLHQEQLSSLTQAHEEALSSLTSKAEGLEKSLSSLETRRAGEAKELAEAQREAEL

SEQ ID NO: 18156 - protein, 782 aa, Homo sapiens; identical to SEQ ID NO: 18119
  Payload ID: 3627
  Gene Symbol: CCHCR1
  Gene Name: coiled-coil alpha-helical rod protein 1
  ENSP ID: ENSP00000414411

SEQ ID NO: 18157 - protein, 256 aa, Homo sapiens; identical to SEQ ID NO: 18116
  Payload ID: 3627
  Gene Symbol: CCHCR1
  Gene Name: coiled-coil alpha-helical rod protein 1
  ENSP ID: ENSP00000414578
  MOD_RES (1)..(1): Any amino acid

SEQ ID NO: 18158 - protein, 729 aa, Homo sapiens; identical to SEQ ID NO: 18142
  Payload ID: 3627
  Gene Symbol: CCHCR1
  Gene Name: coiled-coil alpha-helical rod protein 1
  ENSP ID: ENSP00000416029

SEQ ID NO: 18159 - protein, 115 aa, Homo sapiens
  Payload ID: 3627
  Gene Symbol: CCHCR1
  Gene Name: coiled-coil alpha-helical rod protein 1
  ENSP ID: ENSP00000420911
MFPPSGSTGLIPPSHFQARPLSTLPRMAPTWLSDIPLVQPPGHQDVSERRLDTQRPQVTMWERDVSSDRQEPGRRGRSWGLEGSQALSQQAEVIVRQLQELRRLEEEVRLLRETS

SEQ ID NO: 18160 - protein, 158 aa, Homo sapiens
  Payload ID: 3627
  Gene Symbol: CCHCR1
  Gene Name: coiled-coil alpha-helical rod protein 1
  ENSP ID: ENSP00000420941
MFPPSGSTGLIPPSHFQARPLSTLPRMAPTWLSDIPLVQPPGHQDVSERRLDTQRPQVTMWERDVSSDRQEPGRRGRSWGLEGSQALSQQAEVIVRQLQELRRLEEEVRLLRETSLQQKMRLEAQAMELEALARAEKAGRAEAEGLRAALAGAEVVRK

SEQ ID NO: 18161 - protein, 159 aa, Homo sapiens
  Payload ID: 3627
  Gene Symbol: CCHCR1
  Gene Name: coiled-coil alpha-helical rod protein 1
  ENSP ID: ENSP00000421393
MFPPSGHQDVSERRLDTQRPQVTMWERDVSSDRQEPGRRGRSWGLEGSQALSQQAEVIVRQLQELRRLEEEVRLLRETSLQQKMRLEAQAMELEALARAEKAGRAEAEGLRAALAGAEVVRKNLEEGSQRELEEVQRLHQEQLSSLTQAHEEALSSLTS

SEQ ID NO: 18162 - protein, 80 aa, Homo sapiens
  Payload ID: 3627
  Gene Symbol: CCHCR1
  Gene Name: coiled-coil alpha-helical rod protein 1
  ENSP ID: ENSP00000421523
MFPPSGSTGLIPPSHFQARPLSTLPRMAPTWLSDIPLVQPPGHQDVSERRLDTQRPQVTMWERDVSSDRQEPGRRGSCPL

SEQ ID NO: 18163 - protein, 126 aa, Homo sapiens
  Payload ID: 3627
  Gene Symbol: CCHCR1
  Gene Name: coiled-coil alpha-helical rod protein 1
  ENSP ID: ENSP00000421992
MFPPSGHQDVSERRLDTQRPQVTMWERDVSSDRQEPGRRGRSWGLEGSQALSQQAEVIVRQLQELRRLEEEVRLLRETSLQQKMRLEAQAMELEALARAEKAGRAEAEGLRAALAGAEVVRKNLEE

SEQ ID NO: 18164 - protein, 80 aa, Homo sapiens
  Payload ID: 3627
  Gene Symbol: CCHCR1
  Gene Name: coiled-coil alpha-helical rod protein 1
  ENSP ID: ENSP00000422000
MWPHSAGARPWASTLTGKDPRVMACWCLDGLPSGLAEPWRELWRWRSRPLHCVPPFSPLARSSRDHRNLRRRGLSLWKVA

SEQ ID NO: 18165 - protein, 80 aa, Homo sapiens; identical to SEQ ID NO: 18162
  Payload ID: 3627
  Gene Symbol: CCHCR1
  Gene Name: coiled-coil alpha-helical rod protein 1
  ENSP ID: ENSP00000422503

SEQ ID NO: 18166 - protein, 41 aa, Homo sapiens
  Payload ID: 3627
  Gene Symbol: CCHCR1
  Gene Name: coiled-coil alpha-helical rod protein 1
  ENSP ID: ENSP00000424164
MFPPSGSTGLIPPSHFQARPLSTLPRMAPTWLSDIPLVQPP

SEQ ID NO: 18167 - protein, 96 aa, Homo sapiens
  Payload ID: 3627
  Gene Symbol: CCHCR1
  Gene Name: coiled-coil alpha-helical rod protein 1
  ENSP ID: ENSP00000424335
MFPPSGSTGLIPPSHFQARPLSTLPRMAPTWLSDIPLVQPPGHQDVSERRLDTQRPQVTMWERDVSSDRQEPGRRGRSWGLEGSQALSQQAEVIVR

SEQ ID NO: 18168 - protein, 118 aa, Homo sapiens; identical to SEQ ID NO: 18109
  Payload ID: 3627
  Gene Symbol: CCHCR1
  Gene Name: coiled-coil alpha-helical rod protein 1
  ENSP ID: ENSP00000425377

SEQ ID NO: 18169 - protein, 36 aa, Homo sapiens
  Payload ID: 3627
  Gene Symbol: CCHCR1
  Gene Name: coiled-coil alpha-helical rod protein 1
  ENSP ID: ENSP00000425435
MFPPSGSTGLIPPSHFQARPLSTLPRMAPTWLSDIP

SEQ ID NO: 18170 - protein, 139 aa, Homo sapiens
  Payload ID: 3627
  Gene Symbol: CCHCR1
  Gene Name: coiled-coil alpha-helical rod protein 1
  ENSP ID: ENSP00000425595
MFPPSGSTGLIPPSHFQARPLSTLPRMAPTWLSDIPLVQPPGHQDVSERRLDTQRPQVTMWERDVSSDRQEPGRRGRSWGLEGSQALSQQAEVIVRQLQELRRLEEEVRLLRETSLQQKMRLEAQAMELEALARAEKAG

SEQ ID NO: 18171 - protein, 140 aa, Homo sapiens
  Payload ID: 3627
  Gene Symbol: CCHCR1
  Gene Name: coiled-coil alpha-helical rod protein 1
  ENSP ID: ENSP00000425682
MAPTWLSDIPLVQPPGHQDVSERRLDTQRPQVTMWERDVSSDRQEPGRRGRSWGLEGSQALSQQAEVIVRQLQELRRLEEEVRLLRETSLQQKMRLEAQAMELEALARAEKAGRAEAEGLRAALAGAEVVRKNLEEGSQR

SEQ ID NO: 18172 - protein, 44 aa, Homo sapiens
  Payload ID: 3627
  Gene Symbol: CCHCR1
  Gene Name: coiled-coil alpha-helical rod protein 1
  ENSP ID: ENSP00000426883
MFPPSGHQDVSERRLDTQRPQVTMWERDVSSDRQEPGRRGSCPL

SEQ ID NO: 18173 - protein, 870 aa, Homo sapiens
  Payload ID: 3627
  Gene Symbol: CCHCR1
  Gene Name: coiled-coil alpha-helical rod protein 1
  ENSP ID: ENSP00000479660
MWPHSAGARPWASTLTGKDPRVMACWCLDGLPSGLAEPWRELWRWRSRPLHCVPPFSPLARSSRDHRNLRRRGNIDGRQNLEPSNNVEMFPPSGSTGLIPPSHFQARPLSTLPRMAPTWLSDIPLVQPPGHQDVSERRLDTQRPQVTMWERDVSSDRQEPGRRGRSWGLEGSQALSQQAEVIVRQLQELRWLEEEVWLLRETSLQQKMRLEAQAMELEALARAEKAGRAEAEGLRAALAGAEVVRKNLEEGRQRELEEVQRLHQEQLSSLTQAHEEALSSLTSKAEGLEKSLSSLETRRAGEAKELAEAQREAELLRKQLSKTQEDLEAQVTLVENLRKYVGEQVPSEVHSQTWELERQKLLETMQHLQEDRDSLHATAELLQVRVQSLTHILALQEEELTRKVQPSDSLEPEFTRKCQSLLNRWREKVFALMVQLKAQELEHSDSVKQLKGQVASLQEKVTSQSQEQAILQRSLQDKAAEVEVERMGAKGLQLELSRAQEARRWWQQQTASAEEQLRLVVNAVSSSQIWLETTMAKVEGAAAQLPSLNNRLSYAVRKVHTIRGLIARKLALAQLRQESCPLPPPVTDVSLELQQLREERNRLDAELQLSARLIQQEVGRAREQGEAERQQLSKVAQQLEQELQQTQESLASLGLQLEVARQCQQESTEEAASLRQELTQQQELYGQALQEKVAEVETRLREQLSDTERRLNEARREHAKAVVSLRQIQRRAAQEKERSQELRRLQEEARKEEGQRLARRLQELERDKNLMLATLQQEGLLSRYKQQRLLTVLPSLLDKKKSVVSSPRPPECSASAPVAAAVPTRESIKGSLSVLLDDLQDLSEAISKEEAVCQGDNLDRCSSCNPQMSS

SEQ ID NO: 18174 - protein, 870 aa, Homo sapiens
  Payload ID: 3627
  Gene Symbol: CCHCR1
  Gene Name: coiled-coil alpha-helical rod protein 1
  ENSP ID: ENSP00000483182
MWPHSAGARPWASTLTGKDPRVMACWCLDGLPSGLAEPWRELWRWRSRPLHCVPPFSPLARSSRDHRNLRRRGNIDGRQNLEPSNNVEMFPPSGSTGLIPPSHFQARPLSTLPRMAPTWLSDIPLVQPPGHQDVSERRLDTQRPQVTMWERDVSSDRQEPGRRGRSWGLEGSQALSQQAEVIVRQLQELRRLEEEVRLLRETSLQQKMRLEAQAMELEALARAEKAGRAEAEGLRAALAGAEVVRKNLEEGRQRELEEVQRLHQEQLSSLTQAHEEALSSLTSKAEGLEKSLSSLETRRAGEAKELAEAQREAELLRKQLSKTQEDLEAQVTLVENLRKYVGEQVPSEVHSQTWELERQKLLDTMQHLQEDRDSLHATAELLQVRVQSLTHILALQEEELTRKVQPSDSLEPEFTRKCQSLLNRWREKVFALMVQLKAQELEHSDSVKQLKGQVASLQEKVTSQSQEQAILQRSLQDKAAEVEVERMGAKGLQLELSRAQEARRRWQQQTASAEEQLRLVVNAVSSSQIWLETTMAKVEGAAAQLPSLNNRLSYAVRKVHTIRGLIARKLALAQLRQESCPLPPPVTDVSLELQQLREERNRLDAELQLSARLIQQEVGRAREQGEAERQQLSKVAQQLEQELQQTQESLASLGLQLEVARQGQQESTEEAASLRQELTQQQELYGQALQEKVAEVETRLREQLSDTERRLNEARREHAKAVVSLRQIQRRAAQEKERSQELRRLQEEARKEEGQRLARRLQELERDKNLMLATLQQEGLLSRYKQQRLLTVLPSLLDKKKSVVSSPRPPECSASAPVAAAVPTRESIKGSLSVLLDDLQDLSEAISKEEAVCQGDNLDRCSSSNPQMSS

SEQ ID NO: 18175 - protein, 870 aa, Homo sapiens; identical to SEQ ID NO: 18174
  Payload ID: 3627
  Gene Symbol: CCHCR1
  Gene Name: coiled-coil alpha-helical rod protein 1
  ENSP ID: ENSP00000483995

SEQ ID NO: 18176 - protein, 870 aa, Homo sapiens; identical to SEQ ID NO: 18173
  Payload ID: 3627
  Gene Symbol: CCHCR1
  Gene Name: coiled-coil alpha-helical rod protein 1
  ENSP ID: ENSP00000484259

SEQ ID NO: 18177 - protein, 951 aa, Homo sapiens
  Payload ID: 3628
  Gene Symbol: CC2D1A
  Gene Name: coiled-coil and C2 domain containing 1A
  Uniprot ID: Q6P1N0
  ENSP ID: ENSP00000313601
MHKRKGPPGPPGRGAAAARQLGLLVDLSPDGLMIPEDGANDEELEAEFLALVGGQPPALEKLKGKGPLPMEAIEKMASLCMRDPDEDEEEGTDEDDLEADDDLLAELNEVLGEEQKASETPPPVAQPKPEAPHPGLETTLQERLALYQTAIESARQAGDSAKMRRYDRGLKTLENLLASIRKGNAIDEADIPPPVAIGKGPASTPTYSPAPTQPAPRIASAPEPRVTLEGPSATAPASSPGLAKPQMPPGPCSPGPLAQLQSRQRDYKLAALHAKQQGDTTAAARHFRVAKSFDAVLEALSRGEPVDLSCLPPPPDQLPPDPPSPPSQPPTPATAPSTTEVPPPPRTLLEALEQRMERYQVAAAQAKSKGDQRKARMHERIVKQYQDAIRAHKAGRAVDVAELPVPPGFPPIQGLEATKPTQQSLVGVLETAMKLANQDEGPEDEEDEVPKKQNSPVAPTAQPKAPPSRTPQSGSAPTAKAPPKATSTRAQQQLAFLEGRKKQLLQAALRAKQKNDVEGAKMHLRQAKGLEPMLEASRNGLPVDITKVPPAPVNKDDFALVQRPGPGLSQEAARRYGELTKLIRQQHEMCLNHSNQFTQLGNITETTKFEKLAEDCKRSMDILKQAFVRGLPTPTARFEQRTFSVIKIFPDLSSNDMLLFIVKGINLPTPPGLSPGDLDVFVRFDFPYPNVEEAQKDKTSVIKNTDSPEFKEQFKLCINRSHRGFRRAIQTKGIKFEVVHKGGLFKTDRVLGTAQLKLDALEIACEVREILEVLDGRRPTGGRLEVMVRIREPLTAQQLETTTERWLVIDPVPAAVPTQVAGPKGKAPPVPAPARESGNRSARPLHSLSVLAFDQERLERKILALRQARRPVPPEVAQQYQDIMQRSQWQRAQLEQGGVGIRREYAAQLERQLQFYTEAARRLGNDGSRDAAKEALYRRNLVESELQRLRR

SEQ ID NO: 18178 - protein, 378 aa, Homo sapiens
  Payload ID: 3628
  Gene Symbol: CC2D1A
  Gene Name: coiled-coil and C2 domain containing 1A
  ENSP ID: ENSP00000465376
  MOD_RES (1)..(1): Any amino acid
XQAGDSAKMRRYDRGLKTLENLLASIRKGNAIDEADIPPPVAIGKGPASTPTYSPAPTQPAPRIASAPEPRVTLEGPSATAPASSPGLAKPQMPPGPCSPGPLAQLQSRQRDYKLAALHAKQQGDTTAAARHFRVAKSFDAVLEALSRGEPVDLSCLPPPPDQLPPDPPSPPSQPPTPATAPSTTEVPPPPRTLLEALEQRMERYQVAAAQAKSKGDQRKARMHERIVKQYQDAIRAHKAGRAVDVAELPVPPAEQPCGPHSPAQSPTLKNSPVGISPNSQSAPQSHIHQSPAAAGLPRGPQEAAPAGRTASQAEKRRGGCQDAPAPSQGTGAYAGGLAQWAACGHHQGAACPCQQGRLCPGPAAWPGSVSGGRPALW

SEQ ID NO: 18179 - protein, 405 aa, Homo sapiens
  Payload ID: 3628
  Gene Symbol: CC2D1A
  Gene Name: coiled-coil and C2 domain containing 1A
  ENSP ID: ENSP00000466586
  MOD_RES (1)..(1): Any amino acid
XQVPPAPVNKDDFALVQRPGPGLSQEAARRYGELTKLIRQQHEMCLNHSNQFTQLGNITETTKFEKLAEDCKRSMDILKQAFVRGLPTPTARFEQRTFSVIKIFPDLSSNDMLLFIVKGINLPTPPGLSPGDLDVFVRFDFPYPNVEEAQKDKTSVIKNTDSPEFKEQFKLCINRSHRGFRRAIQTKGIKFEVVHKGGLFKTDRVLGTAQLKLDALEIACEVREILEVLDGRRPTGGRLEVMVRIREPLTAQQLETTTERWLVIDPVPAAVPTVAGPKGKAPPVPAPARESGNRSARPLHSLSVLAFDQERLERKILALRQARRPVPPEVAQQYQDIMQRSQWQRAQLEQGGVGIRREYAAQLERQLQFYTEAARRLGNDGSRDAAKEALYRRNLVESELQRLRR

SEQ ID NO: 18180 - protein, 950 aa, Homo sapiens
  Payload ID: 3628
  Gene Symbol: CC2D1A
  Gene Name: coiled-coil and C2 domain containing 1A
  Uniprot ID: Q6P1N0
  ENSP ID: ENSP00000467526
MHKRKGPPGPPGRGAAAARQLGLLVDLSPDGLMIPEDGANDEELEAEFLALVGGQPPALEKLKGKGPLPMEAIEKMASLCMRDPDEDEEEGTDEDDLEADDDLLAELNEVLGEEQKASETPPPVAQPKPEAPHPGLETTLQERLALYQTAIESARQAGDSAKMRRYDRGLKTLENLLASIRKGNAIDEADIPPPVAIGKGPASTPTYSPAPTQPAPRIASAPEPRVTLEGPSATAPASSPGLAKPQMPPGPCSPGPLAQLQSRQRDYKLAALHAKQQGDTTAAARHFRVAKSFDAVLEALSRGEPVDLSCLPPPPDQLPPDPPSPPSQPPTPATAPSTTEVPPPPRTLLEALEQRMERYQVAAAQAKSKGDQRKARMHERIVKQYQDAIRAHKAGRAVDVAELPVPPGFPPIQGLEATKPTQQSLVGVLETAMKLANQDEGPEDEEDEVPKKQNSPVAPTAQPKAPPSRTPQSGSAPTAKAPPKATSTRAQQQLAFLEGRKKQLLQAALRAKQKNDVEGAKMHLRQAKGLEPMLEASRNGLPVDITKVPPAPVNKDDFALVQRPGPGLSQEAARRYGELTKLIRQQHEMCLNHSNQFTQLGNITETTKFEKLAEDCKRSMDILKQAFVRGLPTPTARFEQRTFSVIKIFPDLSSNDMLLFIVKGINLPTPPGLSPGDLDVFVRFDFPYPNVEEAQKDKTSVIKNTDSPEFKEQFKLCINRSHRGFRRAIQTKGIKFEVVHKGGLFKTDRVLGTAQLKLDALEIACEVREILEVLDGRRPTGGRLEVMVRIREPLTAQQLETTTERWLVIDPVPAAVPTVAGPKGKAPPVPAPARESGNRSARPLHSLSVLAFDQERLERKILALRQARRPVPPEVAQQYQDIMQRSQWQRAQLEQGGVGIRREYAAQLERQLQFYTEAARRLGNDGSRDAAKEALYRRNLVESELQRLRR

SEQ ID NO: 18181 - protein, 852 aa, Homo sapiens
  Payload ID: 3629
  Gene Symbol: CC2D1B
  Gene Name: coiled-coil and C2 domain containing 1B
  Uniprot ID: Q5T0F9
  ENSP ID: ENSP00000284376
MMPGPRPRKGPQARGQGVAAAKQMGLFMEFGPEDMLLGMDEAEDDEDLEAELLALTGEAQTTGKKPAPKGQAPLPMAHIEKLAADCMRDVEEEEEEEGLEEDAELLTELQEVLGVDEETEPLDGDEVADPGGSEEENGLEDTEPPVQTAVLTASAPAAQAGASQGLHALLEERIHNYREAAASAKEAGEAAKARRCERGLKTLESQLASVRRGRKINEDEIPPPVALGKRPLAPQEPANRSPETDPPAPPALESDNPSQPETSLPGISAQPVSDLDPDPRALLSSRQREYKVAALSAKRAGELDRARELMRIGKRFGAVLEALEKGQPVDLSAMPPAPEDLKPQQASQAPTAPSVIPPAVERVQPVMAPDVPATPVAPTESQTVLDALQQRLNKYREAGIQARSGGDERKARMHERIAKQYQDAIRAHRAGRKVNFAELPVPPGFPPIPGLESTMGVEEDAVAATLAAAEKLASAEDSAPADKDEDEGEPPAQAPVAKKPARPTVPSSQRLPEPRASSSKESPSPSVREQLALLEARKLQYQRAALQAKRSQDLEQAKAYLRVAKWLEAQIIQARSGRPVDLSKVPSPLTDEEGDFILIHHEDLRLSQKAEEVYAQLQKMLLEQQEKCLLFSKQFMHQGNVAETTRFEKLAQDRKKQLEILQLAQAQGLDPPTHHFELKTFQTVRIFSELNSTEMHLIIVRGMNLPAPPGVTPDDLDAFVRFEFHYPNSDQAQKSKTAVVKNTNSPEFDQLFKLNINRNHRGFKRVIQSKGIKFEIFHKGSFFRSDKLVGTAHLKLERLENECEIREIVEVLDGRKPTGGKLEVKVRLREPLSGQDVQMVTENWLVLEPRGL

SEQ ID NO: 18182 - protein, 858 aa, Homo sapiens
  Payload ID: 3629
  Gene Symbol: CC2D1B
  Gene Name: coiled-coil and C2 domain containing 1B
  Uniprot ID: Q5T0F9
  ENSP ID: ENSP00000360642
MMPGPRPRKGPQARGQGVAAAKQMGLFMEFGPEDMLLGMDEAEDDEDLEAELLALTGEAQTTGKKPAPKGQAPLPMAHIEKLAADCMRDVEEEEEEEGLEEDAELLTELQEVLGVDEETEPLDGDEVADPGGSEEENGLEDTEPPVQTAVLTASAPAAQAGASQGLHALLEERIHNYREAAASAKEAGEAAKARRCERGLKTLESQLASVRRGRKINEDEIPPPVALGKRPLAPQEPANRSPETDPPAPPALESDNPSQPETSLPGISAQPVSDLDPDPRALLSSRQREYKVAALSAKRAGELDRARELMRIGKRFGAVLEALEKGQPVDLSAMPPAPEDLKPQQASQAPTAPSVIPPAVERVQPVMAPDVPATPVAPTESQTVLDALQQRLNKYREAGIQARSGGDERKARMHERIAKQYQDAIRAHRAGRKVNFAELPVPPGFPPIPGLESTMGVEEDAVAATLAAAEKLASAEDSAPADKDEDEPPGHLQGEPPAQAPVAKKPARPTVPSSQRLPEPRASSSKESPSPSVREQLALLEARKLQYQRAALQAKRSQDLEQAKAYLRVAKWLEAQIIQARSGRPVDLSKVPSPLTDEEGDFILIHHEDLRLSQKAEEVYAQLQKMLLEQQEKCLLFSKQFMHQGNVAETTRFEKLAQDRKKQLEILQLAQAQGLDPPTHHFELKTFQTVRIFSELNSTEMHLIIVRGMNLPAPPGVTPDDLDAFVRFEFHYPNSDQAQKSKTAVVKNTNSPEFDQLFKLNINRNHRGFKRVIQSKGIKFEIFHKGSFFRSDKLVGTAHLKLERLENECEIREIVEVLDGRKPTGGKLEVKVRLREPLSGQDVQMVTENWLVLEPRGL

SEQ ID NO: 18183 - protein, 628 aa, Homo sapiens
  Payload ID: 3629
  Gene Symbol: CC2D1B
  Gene Name: coiled-coil and C2 domain containing 1B
  ENSP ID: ENSP00000395921
  MOD_RES (1)..(1): Any amino acid
XKINEDEIPPPVALGKRPLAPQEPANRSPETDPPAPPALESDNPSQPETSLPGISAQPVSDLDPDPRALLSSRQREYKVAALSAKRAGELDRARELMRIGKRFGAVLEALEKGQPVDLSAMPPAPEDLKPQQASQAPTAPSVIPPAVERVQPVMAPDVPATPVAPTESQTVLDALQQRLNKYREAGIQARSGGDERKARMHERIAKQYQDAIRAHRAGRKVNFAELPVPPGFPPIPGLESTMGVEEDAVAATLAAAEKLASAEDSAPADKDEDEGEPPAQAPVAKKPARPTVPSSQRLPEPRASSSKESPSPSVREQLALLEARKLQYQRAALQAKRSQDLEQAKAYLRVAKWLEAQIIQARSGRPVDLSKVPSPLTDEEGDFILIHHEDLRLSQKAEEVYAQLQKMLLEQQEKCLLFSKQFMHQGNVAETTRFEKLAQDRKKQLEILQLAQAQGLDPPTHHFELKTFQTVRIFSELNSTEMHLIIVRGMNLPAPPGVTPDDLDAFVRFEFHYPNSDQAQKSKTAVVKNTNSPEFDQLFKLNINRNHRGFKRVIQSKGIKFEIFHKGSFFRSDKLVGTAHLKLERLENECEIREIVEVLDGRKPTGGKLEVKPMASTRRGVRPRLCRR

SEQ ID NO: 18184 - protein, 672 aa, Homo sapiens
  Payload ID: 3629
  Gene Symbol: CC2D1B
  Gene Name: coiled-coil and C2 domain containing 1B
  ENSP ID: ENSP00000402440
  MOD_RES (1)..(1): Any amino acid
XGASQGLHALLEERIHNYREAAASAKEAGEAAKARRCERGLKTLESQLASVRRGRKINEDEIPPPVALGKRPLAPQEPANRSPETDPPAPPALESDPDPRALLSSRQREYKVAALSAKRAGELDRARELMRIGKRFGAVLEALEKGQPVDLSAMPPAPEDLKPQQASQAPTAPSVIPPAVERVQPVMAPDVPATPVAPTESQTVLDALQQRLNKYREAGIQARSGGDERKARMHERIAKQYQDAIRAHRAGRKVNFAELPVPPGFPPIPGLESTMGVEEDAVAATLAAAEKLASAEDSAPADKDEDEGEPPAQAPVAKKPARPTVPSSQRLPEPRASSSKESPSPSVREQLALLEARKLQYQRAALQAKRSQDLEQAKAYLRVAKWLEAQIIQARSGRPVDLSKVPSPLTDEEGDFILIHHEDLRLSQKAEEVYAQLQKMLLEQQEKCLLFSKQFMHQGNVAETTRFEKLAQDRKKQLEILQLAQAQGLDPPTHHFELKTFQTVRIFSELNSTEMHLIIVRGMNLPAPPGVTPDDLDAFVRFEFHYPNSDQAQKSKTAVVKNTNSPEFDQLFKLNINRNHRGFKRVIQSKGIKFEIFHKGSFFRSDKLVGTAHLKLERLENECEIREIVEVLDGRKPTGGKLEVKVRLREPLSGQDVQMVTENWLVLEPRGL

SEQ ID NO: 18185 - protein, 1453 aa, Homo sapiens
  Payload ID: 3630
  Gene Symbol: CC2D2A
  Gene Name: coiled-coil and C2 domain containing 2A
  ENSP ID: ENSP00000374303
  MOD_RES (1)..(1): Any amino acid
XVPPGFPSAEEAYNFFTFNFDPEPEGSEEKPKARHRAGTNQEEEEGEEEEPPAQGGGKEMDEEELLNGDDAEDFLLGLDHVADDFVAVRPADYESIHDRLQMEREMLFIPSRQTVPTYKKLPENVQPRFLEDEGLYTGVRPEVARTNQNIMENRLLMQDPERRWFGDDGRILALPNPIKPFPSRPPVLTQEQSIKAELETLYKKAVKYVHSSQHVIRSGDPPGNFQLDIDISGLIFTHHPCFSREHVLAAKLAQLYDQYLARHQRNKAKFLTDKLQALRNAVQTGLDPEKPHQSLDTIQKTINEYKSEIRQTRKFRDAEQEKDRTLLKTIIKVWKEMKSLREFQRFTNTPLKLVLRKEKADQKADEEAYEAEIQAEISELLEEHTEEYAQKMEEYRTSLQQWKAWRKVQRAKKKKRKQAAEEHPGDEIAEPYPEEDLVKPSPPEPTDRAVIEQEVRERAAQSRRRPWEPTLVPELSLAGSVTPNDQCPRAEVSRREDVKKRSVYLKVLFNNKEVSRTVSRPLGADFRVHFGQIFNLQIVNWPESLTLQVYETVGHSSPTLLAEVFLPIPETTVVTGRAPTEEVEFSSNQHVTLDHEGVGSGVPFSFEADGSNQLTLMTSGKVSHSVAWAIGENGIPLIPPLSQQNIGFRSALKKADAISSIGTSGLTDMKKLAKWAAESKLDPNDPNNAPLMQLISVATSGESYVPDFFRLEQLQQEFNFVSDQELNRSKRFRLLHLRSQEVPEFRNYKQVPVYDREIMEKVFQDYEKRLRDRNVIETKEHIDTHRAIVAKYLQQVRESVINRFLIAKQYFLLADMIVEEEVPNISSEGSGILGLSLFKLAEQKRPLRPRRKGRKKVTAQNLSDGDIKLLVNIVRAYDIPVRKPAVSKFQQPSRSSRMFSEKHAASPSTYSPTHNADYPLGQVLVRPFVEVSFQRTVCHTTTAEGPNPSWNEELELPFRAPNGDYSTASLQSVKDVVFINIFDEVLHDVLEDDRERGSGIHTRIERHWLGCVKMPFSTIYFQARIDGTFKIDIPPVLLGYSKERNMILERGFDSVRSLSEGSYITLFITIEPQLVPGESIREKMSNMLKKFESQEDEKLLQATEKFQAECALKFPNRQCLTTVIDISGKTVFITRYLKPLNPPQELLNVYPNNLQATAELVARYVSLIPFLPDTVSFGGICDLWSTSDQFLDLLAGDEEEHAVLLCNYFLSLGKKAWLLMGNAIPEGPTAYVLTWEQGRYLIWNPCSGHFYGQFDTFCPLKNVGCLIGPDNIWFNIQRYESPLRINFDVTRPKLWKSFFSRSLPYPGLSSVQPEELIYQRSDKAAAAELQDRIEKILKEKIMDWRPRHLTRWNRYCTSTLRHFLPLLEKSQGEDVEDDHRAELLKQLGDYRFSGFPLHMPYSEVKPLIDAVYSTGVHNIDVPNVEFALAVYIHPYPKNVLSVWIYVASLIRNR

SEQ ID NO: 18186 - protein, 122 aa, Homo sapiens
  Payload ID: 3630
  Gene Symbol: CC2D2A
  Gene Name: coiled-coil and C2 domain containing 2A
  Uniprot ID: Q9P2K1
  ENSP ID: ENSP00000401154
MNPREEKVKIITEEFIENDEDADMGRQNKNSKVRRQPRKKQKPTPFSRACWQILPHLSAGVPLLGWEHPVQGKSFQATNCCPQGNGVRKIPPWQPPGACAGGAQDPPPEYDSPERPTERAGC

SEQ ID NO: 18187 - protein, 1620 aa, Homo sapiens
  Payload ID: 3630
  Gene Symbol: CC2D2A
  Gene Name: coiled-coil and C2 domain containing 2A
  Uniprot ID: Q9P2K1
  ENSP ID: ENSP00000403465
MNPREEKVKIITEEFIENDEDADMGRQNKNSKVRRQPRKKQPPTAVPKEMVSEKSHLGNPQEPVQEEPKTRLLSMTVRRGPRSLPPIPSTSRTGFAEFSMRGRMREKLQAARSKAESALLQEIPTPRPRRLRSPSKKELETEFGTEPGKEVERTQQEVDSQSYSRVKFHDSARKIKPKPQVPPGFPSAEEAYNFFTFNFDPEPEGSEEKPKARHRAGTNQEEEEGEEEEPPAQGGGKEMDEEELLNGDDAEDFLLGLDHVADDFVAVRPADYESIHDRLQMEREMLFIPSRQTVPTYKKLPENVQPRFLEDEGLYTGVRPEVARTNQNIMENRLLMQDPERRWFGDDGRILALPNPIKPFPSRPPVLTQEQSIKAELETLYKKAVKYVHSSQHVIRSGDPPGNFQLDIDISGLIFTHHPCFSREHVLAAKLAQLYDQYLARHQRNKAKFLTDKLQALRNAVQTGLDPEKPHQSLDTIQKTINEYKSEIRQTRKFRDAEQEKDRTLLKTIIKVWKEMKSLREFQRFTNTPLKLVLRKEKADQKADEEAYEAEIQAEISELLEEHTEEYAQKMEEYRTSLQQWKAWRKVQRAKKKKRKQAAEEHPGDEIAEPYPEEDLVKPSPPEPTDRAVIEQEVRERAAQSRRRPWEPTLVPELSLAGSVTPNDQCPRAEVSRREDVKKRSVYLKVLFNNKEVSRTVSRPLGADFRVHFGQIFNLQIVNWPESLTLQVYETVGHSSPTLLAEVFLPIPETTVVTGRAPTEEVEFSSNQHVTLDHEGVGSGVPFSFEADGSNQLTLMTSGKVSHSVAWAIGENGIPLIPPLSQQNIGFRSALKKADAISSIGTSGLTDMKKLAKWAAESKLDPNDPNNAPLMQLISVATSGESYVPDFFRLEQLQQEFNFVSDQELNRSKRFRLLHLRSQEVPEFRNYKQVPVYDREIMEKVFQDYEKRLRDRNVIETKEHIDTHRAIVAKYLQQVRESVINRFLIAKQYFLLADMIVEEEVPNISILGLSLFKLAEQKRPLRPRRKGRKKVTAQNLSDGDIKLLVNIVRAYDIPVRKPAVSKFQQPSRSSRMFSEKHAASPSTYSPTHNADYPLGQVLVRPFVEVSFQRTVCHTTTAEGPNPSWNEELELPFRAPNGDYSTASLQSVKDVVFINIFDEVLHDVLEDDRERGSGIHTRIERHWLGCVKMPFSTIYFQARIDGTFKIDIPPVLLGYSKERNMILERGFDSVRSLSEGSYITLFITIEPQLVPGESIREKFESQEDEKLLQATEKFQAECALKFPNRQCLTTVIDISGKTVFITRYLKPLNPPQELLNVYPNNLQATAELVARYVSLIPFLPDTVSFGGICDLWSTSDQFLDLLAGDEEEHAVLLCNYFLSLGKKAWLLMGNAIPEGPTAYVLTWEQGRYLIWNPCSGHFYGQFDTFCPLKNVGCLIGPDNIWFNIQRYESPLRINFDVTRPKLWKSFFSRSLPYPGLSSVQPEELIYQRSDKAAAAELQDRIEKILKEKIMDWRPRHLTRWNRYCTSTLRHFLPLLEKSQGEDVEDDHRAELLKQLGDYRFSGFPLHMPYSEVKPLIDAVYSTGVHNIDVPNVEFALAVYIHPYPKNVLSVWIYVASLIRNR

SEQ ID NO: 18188 - protein, 1620 aa, Homo sapiens; identical to SEQ ID NO: 18187
  Payload ID: 3630
  Gene Symbol: CC2D2A
  Gene Name: coiled-coil and C2 domain containing 2A
  Uniprot ID: Q9P2K1
  ENSP ID: ENSP00000421809

SEQ ID NO: 18189 - protein, 588 aa, Homo sapiens
  Payload ID: 3630
  Gene Symbol: CC2D2A
  Gene Name: coiled-coil and C2 domain containing 2A
  ENSP ID: ENSP00000422875
MNPREEKVKIITEEFIENDEDADMGRQNKNSKVRRQPRKKQPPTAVPKEMVSEKSHLGNPQEPVQEEPKTRLLSMTVRRGPRSLPPIPSTSRTGFAEFSMRGRMREKLQAARSKAESALLQEIPTPRPRRLRSPSKKELETEFGTEPGKEVERTQQEVDSQSYSRVKFHDSARKIKPKPQVPPGFPSAEEAYNFFTFNFDPEPEGSEEKPKARHRAGTNQEEEEGEEEEPPAQGGGKEMDEEELLNGDDAEDFLLGLDHVADDFVAVRPADYESIHDRLQMEREMLFIPSRQTVPTYKKLPENVQPRFLEDEGLYTGVRPEVARTNQNIMENRLLMQDPERRWFGDDGRILALPNPIKPFPSRPPVLTQEQSIKAELETLYKKAVKYVHSSQHVIRSGDPPGNFQLDIDISGLIFTHHPCFSREHVLAAKLAQLYDQYLARHQRNKAKFLTDKLQALRNAVQTGLDPEKPHQSLDTIQKTINEYKSEIRQTRKFRDAEQEKDRTLLKTIIKVWKEMKSLREFQRFTNTPLKLVLRKEKADQKADEEAYEAEIQAEISELLEEHTEEYAQKMEEYRTSLQQWKAWRKVQ

SEQ ID NO: 18190 - protein, 903 aa, Homo sapiens
  Payload ID: 3630
  Gene Symbol: CC2D2A
  Gene Name: coiled-coil and C2 domain containing 2A
  ENSP ID: ENSP00000422931
  MOD_RES (1)..(1): Any amino acid
XLLEEHTEEYAQKMEEYRTSLQQWKAWRKVQRAKKKKRKQAAEEHPGDEIAEPYPEEDLVKPSPPEPTDRAVIEQEVRERAAQSRRRPWEPTLVPELSLAGSVTPNDQCPRAEVSRREDVKKRSVYLKVLFNNKEVSRTVSRPLGADFRVHFGQIFNLQIVNWPESLTLQVYETVGHSSPTLLAEVFLPIPETTVVTGRAPTEEVEFSSNQHVTLDHEGVGSGVPFSFEADGSNQLTLMTSGKVSHSVAWAIGENGIPLIPPLSQQNIGFRSALKKADAISSIGTSGLTDMKKLAKWAAESKLDPNDPNNAPLMQLISVATSGESYVPDFFRLEQLQQEFNFVSDQELNRSKRFRLLHLRSQEVPEFRNYKQVPVYDREIMEKVFQDYEKRLRDRNVIETKEHIDTHRAIVAKYLQQVRESVINRFLIAKQYFLLADMIVEEEVPNISILGLSLFKLAEQKRPLRPRRKGRKKVTAQNLSDGDIKLLVNIVRAYDIPVRKPAVSKFQQPSRSSRMFSEKHAASPSTYSPTHNADYPLGQVLVRPFVEVSFQRTVCHTTTAEGPNPSWNEELELPFRAPNGDYSTASLQSVKDVVFINIFDEVLHDVLEDDRERGSGIHTRIERHWLGCVKMPFSTIYFQARIDGTFKIDIPPVLLGYSKERNMILERGFDSVRSLSEGSYITLFITIEPQLVPGESIREKFESQEDEKLLQATEKFQAECALKFPNRQCLTTVIDISGKTVFITRYLKPLNPPQELLNVYPNNLQATAELVARYVSLIPFLPDTVSFGGICDLWSTSDQFLDLLAGDEEEHAVLLCNYFLSLGKKAWLLMGNAIPEGPTAYVLTWEQGRYLIWNPCSGHFYGQFDTFCPLKNVGCLIGPDNAQAMEIFLFKKPSISWPFQCSA

SEQ ID NO: 18191 - protein, 111 aa, Homo sapiens
  Payload ID: 3630
  Gene Symbol: CC2D2A
  Gene Name: coiled-coil and C2 domain containing 2A
  Uniprot ID: Q9P2K1
  ENSP ID: ENSP00000424368
MNPREEKVKIITEEFIENDEDADMGRQNKNSKVRRQPRKKQPPTAVPKEMVSEKSHLGNPQEPVQEEPKTRLLSMTVRRGPRRELVVKKSLGRPGTVTHVCNPSTLEGRGG

SEQ ID NO: 18192 - protein, 73 aa, Homo sapiens
  Payload ID: 3630
  Gene Symbol: CC2D2A
  Gene Name: coiled-coil and C2 domain containing 2A
  ENSP ID: ENSP00000426109
MNPREEKVKIITEEFIENDEDADMGRQNKNSKVRRQPRKKQAEANSFLPSLLADPPPPLRRSSPPRLGASRAG

SEQ ID NO: 18193 - protein, 122 aa, Homo sapiens; identical to SEQ ID NO: 18186
  Payload ID: 3630
  Gene Symbol: CC2D2A
  Gene Name: coiled-coil and C2 domain containing 2A
  Uniprot ID: Q9P2K1
  ENSP ID: ENSP00000426846

SEQ ID NO: 18194 - protein, 111 aa, Homo sapiens; identical to SEQ ID NO: 18191
  Payload ID: 3630
  Gene Symbol: CC2D2A
  Gene Name: coiled-coil and C2 domain containing 2A
  Uniprot ID: Q9P2K1
  ENSP ID: ENSP00000427221

SEQ ID NO: 18195 - protein, 142 aa, Homo sapiens
  Payload ID: 3630
  Gene Symbol: CC2D2A
  Gene Name: coiled-coil and C2 domain containing 2A
  ENSP ID: ENSP00000488534
  MOD_RES (1)..(1): Any amino acid
XDTFCPLKNVGCLIGPDNPEELIYQRSDKAAAAELQDRIEKILKEKIMDWRPRHLTRWNRYCTSTLRHFLPLLEKSQGEDVEDDHRAELLKQLGDYRFSGFPLHMPYSEVKPLIDAVYSTGVHNIDVPNVEFALAVYIHPYP

SEQ ID NO: 18196 - protein, 129 aa, Homo sapiens
  Payload ID: 3630
  Gene Symbol: CC2D2A
  Gene Name: coiled-coil and C2 domain containing 2A
  ENSP ID: ENSP00000488669
KPTPFSRACWQILPHLSAGVPLLGWEHPVQGKSFQATNCCPQGNGVRKIPPWQPPGACAGGAQDPPPEYDSPERPTELTSNSFNFQNRLCRIFHEGTHEGEIASSEVQSRKCIAAGNPHSSAQTLTKSQ

SEQ ID NO: 18197 - protein, 322 aa, Homo sapiens
  Payload ID: 3631
  Gene Symbol: CC2D2B
  Gene Name: coiled-coil and C2 domain containing 2B
  Uniprot ID: Q6DHV5
  ENSP ID: ENSP00000343747
MMTEKHEDHCLKSCSGHSYIRKNWLGCIVFPFSALLQQSEFLDQTEVLQRAQIFKKNCKAMFPNRRIVTTVFNDEGIQFLVTRYIKALNPPQQLLDIFLHNSNATFDLIARFVSLIPFVPNTPDENDGSDIWMTSEHCISLAIGNKEEHAILLCNFFLYFGKKALVLLGTSVLEGHVAYVVTQETNEYLLWNPSTGQCYKQFDPFCPLKSVDCLFDDRNVWFNIQQNNTPMAVFFDYSKESFWKQLLPKNVQGTKIQSIQVTGFPIQMPYIDVQSIIDAVYQTGIHSAEFPQTEFALAVYIHPYPNNILSVWVYLASLVQHQ

SEQ ID NO: 18198 - protein, 401 aa, Homo sapiens
  Payload ID: 3631
  Gene Symbol: CC2D2B
  Gene Name: coiled-coil and C2 domain containing 2B
  Uniprot ID: Q6DHV5
  ENSP ID: ENSP00000386988
MMTEKHEDHCLKSCSGHSYIRKNWLGCIVFPFSALLQQSEFLDQTEVLQRAQIFKKNCKAMFPNRRIVTTVFNDEGIQFLVTRYIKALNPPQQLLDIFLHNSNATFDLIARFVSLIPFVPNTPDENDGSDIWMTSEHCISLAIGNKEEHAILLCNFFLYFGKKALVLLGTSVLEGHVAYVVTQETNEYLLWNPSTGQCYKQFDPFCPLKSVDCLFDDRNVWFNIQQNNTPMAVFFDYSKESFWKQLLPKNVQGTKIQSIQPEEIIYFETDKSMVEDLRNRIERTLKSKVMEWRPKHPTHWNRQCTFILRQILPKLEFGIGSFVSSEGDNEFERILQFYWVTGFPIQMPYIDVQSIIDAVYQTGIHSAEFPQTEFALAVYIHPYPNNILSVWVYLASLVQHQ

SEQ ID NO: 18199 - protein, 195 aa, Homo sapiens
  Payload ID: 3631
  Gene Symbol: CC2D2B
  Gene Name: coiled-coil and C2 domain containing 2B
  ENSP ID: ENSP00000391834
MMTEKHEDHCLKSCSGHSYIRKNWLGCIVFPFSALLQQSEISGTFQVTIPPVLLGYTWSNTYVFPKEDSNEQNLKECTFLNIFATIEPQISYVTCNPTLDKFLDQTEVLQRAQIFKKNCKAMFPNRRIVTTVFNDEGIQFLVTRYIKALNPPQQLLDIFLHNSNATFDLIARFVSLIPFVPNTPDENDGSDIWMT

SEQ ID NO: 18200 - protein, 550 aa, Homo sapiens
  Payload ID: 3632
  Gene Symbol: CCDC102A
  Gene Name: coiled-coil domain containing 102A
  Uniprot ID: Q96A19
  ENSP ID: ENSP00000258214
MSHGPSPRLAESPQLSKGSLLTILGSPSPERMGPADSLPPTPPSGTPSPGPPPALPLPPAPALLADGDWESREELRLRELEEARARAAQMEKTMRRWSDCTANWREKWSKVRAERNRAREEVRQLRQRLDALTKELAGARRERQEAQGECEARGRELARLRGARGVADQTRDGPEPEAEREPVRDVGSERPPGSQELELVESLLKSMPEESEDCWEARSLGAGGPRGSSGRQERSRLPWEDTAATEEEASKLTALRLRLDESQKVLLKEREDKLALSRNIEKLEGELSQWKIKYEELSKTKQEMLKQLSILKEAHQDELGRMSEDLEDELGARSSMDRKMAELRGEMERLQAENAAEWGRRERLETEKLGLERENKKLRAQVGDLEEALARRRRQTASALDCDLRASQAALFEKNKELADLKHVHGKLKKQFQEKVAELAHANRRVEQHEAEVKKLRLRVEELKKELAQAEDELDEAHNQARKLQRSLDEQTEQSENLQVQLEHLQSRLRRQQQNAPLFGKIRSARFGTEEAEDGTSDLDEDEDLQIQVA

SEQ ID NO: 18201 - protein, 513 aa, Homo sapiens
  Payload ID: 3633
  Gene Symbol: CCDC102B
  Gene Name: coiled-coil domain containing 102B
  Uniprot ID: Q68D86
  ENSP ID: ENSP00000316237
MNLDSIHRLIEETQIFQMQQSSIKSRGDMVAPASPPRDTCNTCFPLHGLQSHAAHNFCAHSYNTNKWDICEELRLRELEEVKARAAQMEKTMRWWSDCTANWREKWSKVRAERNSAREEGRQLRIKLEMAMKELSTLKKKQSLPPQKEALEAKVTQDLKLPGFVEESCEHTDQFQLSSQMHESIREYLVKRQFSTKEDTNNKEQGVVIDSLKLSEEMKPNLDGVDLFNNGGSGNGETKTGLRLKAINLPLENEVTEISALQVHLDEFQKILWKEREMRTALEKEIERLESALSLWKWKYEELKESKPKNVKEFDILLGQHNDEMQELSGNIKEESKSQNSKDRVICELRAELERLQAENTSEWDKREILEREKQGLERENRRLKIQVKEMEELLDKKNRLSANSQSPDFKMSQIDLQEKNQELLNLQHAYYKLNRQYQANIAELTHANNRVDQNEAEVKKLRLRVEELKQGLNQKEDELDDSLNQIRKLQRSLDEEKERNENLETELRHLQNW

SEQ ID NO: 18202 - protein, 139 aa, Homo sapiens
  Payload ID: 3633
  Gene Symbol: CCDC102B
  Gene Name: coiled-coil domain containing 102B
  ENSP ID: ENSP00000351479
MEGKRNAHSFGKRNRETGVGFVSVEVEFDILLGQHNDEMQELSGNIKEESKSQNSKDRVICELRAELERLQAENTSEWDKREILEREKQGLERENRRLKIQVKEMEELLDKKNRLSANSQSPDFKMSQIDLQEKNQDVK

SEQ ID NO: 18203 - protein, 513 aa, Homo sapiens; identical to SEQ ID NO: 18201
  Payload ID: 3633
  Gene Symbol: CCDC102B
  Gene Name: coiled-coil domain containing 102B
  Uniprot ID: Q68D86
  ENSP ID: ENSP00000353377

SEQ ID NO: 18204 - protein, 92 aa, Homo sapiens
  Payload ID: 3633
  Gene Symbol: CCDC102B
  Gene Name: coiled-coil domain containing 102B
  ENSP ID: ENSP00000461987
MNLDSIHRLIEETQIFQMQQSSIKSRGDMVAPASPPRDTCNTCFPLHGLQSHAAHNFCAHSYNTNKWDICEELRLRELEEVKARAAQMEKTM

SEQ ID NO: 18205 - protein, 137 aa, Homo sapiens
  Payload ID: 3633
  Gene Symbol: CCDC102B
  Gene Name: coiled-coil domain containing 102B
  ENSP ID: ENSP00000462150
MNLDSIHRLIEETQIFQMQQSSIKSRGDMVAPASPPRDTCNTCFPLHGLQSHAAHNFCAHSYNTNKWDICEELRLRELEEVKARAAQMEKTMRWWSDCTANWREKWSKVRAERNSAREEGRQLRIKLEMAMKELSTL

SEQ ID NO: 18206 - protein, 483 aa, Homo sapiens
  Payload ID: 3633
  Gene Symbol: CCDC102B
  Gene Name: coiled-coil domain containing 102B
  Uniprot ID: Q68D86
  ENSP ID: ENSP00000463111
MNLDSIHRLIEETQIFQMQQSSIKSRGDMVAPASPPRDTCNTCFPLHGLQSHAAHNFCAHSYNTNKWDICEELRLRELEEVKARAAQMEKTMRWWSDCTANWREKWSKVRAERNSAREEGRQLRIKLEMAMKELSTLKKKQSLPPQKEALEAKVTQDLKLPGFVEESCEHTDQFQLSSQMHESIREYLVKRQFSTKEDTNNKEQGVVIDSLKLSEEMKPNLDGVDLFNNGGSGNGETKTGLRLKAINLPLENEVTEISALQVHLDEFQKILWKEREMRTALEKEIERLESALSLWKWKYEELKESKPKNVKEFDILLGQHNDEMQELSGNIKEESKSQNSKDRVICELRAELERLQAENTSEWDKREILEREKQGLERENRRLKIQVKEMEELLDKKNRLSANSQSPDFKMSQIDLQEKNQELLNLQHAYYKLNRQYQANIAELTHANNRVDQNEAEVKKLRLRVEELKQGLNQKEDEVLLYE

SEQ ID NO: 18207 - protein, 124 aa, Homo sapiens
  Payload ID: 3633
  Gene Symbol: CCDC102B
  Gene Name: coiled-coil domain containing 102B
  ENSP ID: ENSP00000463399
MNLDSIHRLIEETQIFQMQQSSIKSRGDMVAPASPPRDTCNTCFPLHGLQSHAAHNFCAHSYNTNKWDICEELRLRELEEVKARAAQMEKTMRWWSDCTANWREKWSKVRAERNSAREEGRQLR

SEQ ID NO: 18208 - protein, 325 aa, Homo sapiens
  Payload ID: 3633
  Gene Symbol: CCDC102B
  Gene Name: coiled-coil domain containing 102B
  ENSP ID: ENSP00000463538
MNLDSIHRLIEETQIFQMQQSSIKSRGDMVAPASPPRDTCNTCFPLHGLQSHAAHNFCAHSYNTNKWDICEELRLRELEEVKARAAQMEKTMRWWSDCTANWREKWSKVRAERNSAREEGRQLRIKLEMAMKELSTLKKKQSLPPQKEALEAKVTQDLKLPGFVEESCEHTDQFQLSSQMHESIREYLVKRQFSTKEDTNNKEQGVVIDSLKLSEEMKPNLDGVDLFNNGGSGNGETKTGLRLKAINLPLENEVTEISALQVHLDEFQKILWKEREMRTALEKEIERLESALSLWKWKYEELKESKPKNVKEFDILLGQHNDEMQ

SEQ ID NO: 18209 - protein, 237 aa, Homo sapiens
  Payload ID: 3634
  Gene Symbol: CCDC103
  Gene Name: coiled-coil domain containing 103
  ENSP ID: ENSP00000350420
MERNDIINFKALEKELQAALTADEKYKRENAAKLRAVEQRVASYEEFRGIVLASHLKPLERKDKMGGKRTVPWNCHTIQGRTFQDVATEISPEKAPLQPETSADFYRDWRRHLPSGPERYQALLQLGGPRLGCLFQTDVGFGLLGELLVALADHVGPADRAAVLGILCSLASTGRFTLNLSLLSRAERESCKGLFQKLQAMGNPRSVKEGLSWEEQGLEEQSGGLQEEERLLQELLE

SEQ ID NO: 18210 - protein, 98 aa, Homo sapiens
  Payload ID: 3634
  Gene Symbol: CCDC103
  Gene Name: coiled-coil domain containing 103
  Uniprot ID: Q8IW40
  ENSP ID: ENSP00000386640
MERNDIINFKALEKELQAALTADEKYKRENAAKLRAVEQRVASYEEFRGIVLASHLKPLERKDKMGGKRTVPWNCHTIQGRTFQDVATEISPNSWKSS

SEQ ID NO: 18211 - protein, 242 aa, Homo sapiens
  Payload ID: 3634
  Gene Symbol: CCDC103
  Gene Name: coiled-coil domain containing 103
  Uniprot ID: Q8IW40
  ENSP ID: ENSP00000387252
MERNDIINFKALEKELQAALTADEKYKRENAAKLRAVEQRVASYEEFRGIVLASHLKPLERKDKMGGKRTVPWNCHTIQGRTFQDVATEISPEKAPLQPETSADFYRDWRRHLPSGPERYQALLQLGGPRLGCLFQTDVGFGLLGELLVALADHVGPADRAAVLGILCSLASTGRFTLNLSLLSRAERESCKGLFQKLQAMGNPRSVKEGLSWEEQGLEEQSGGLQEEERLLQELLELYQVD

SEQ ID NO: 18212 - protein, 242 aa, Homo sapiens; identical to SEQ ID NO: 18211
  Payload ID: 3634
  Gene Symbol: CCDC103
  Gene Name: coiled-coil domain containing 103
  Uniprot ID: Q8IW40
  ENSP ID: ENSP00000391692

SEQ ID NO: 18213 - protein, 59 aa, Homo sapiens
  Payload ID: 3634
  Gene Symbol: CCDC103
  Gene Name: coiled-coil domain containing 103
  ENSP ID: ENSP00000462450
MERNDIINFKALEKELQAALTADEKYKRENAAKLRAVEQRVASYEEFRGIVLASHLKPL

SEQ ID NO: 18214 - protein, 499 aa, Homo sapiens
  Payload ID: 3635
  Gene Symbol: CCDC105
  Gene Name: coiled-coil domain containing 105
  Uniprot ID: Q8IYK2
  ENSP ID: ENSP00000292574
MRVLVPPAERSQDTRVGAPAWREAAQAMARTAHILTDRCGQEAVTMWQPKDSVLDPNVAHHLGRAAYIQPWRFRVEMIKGGGTLEKPPPGEGVTLWKGKMKPPAWYARLPLPLHRKARALQTTEVVHAHARGARLTAARLGRAQHQINGRVRQLLRQREVTDHRLSEVRKGLLINQQSVKLRGYRPKSEKVPDKADSMLTWEKEELKSMKRKMERDMEKSEVLLKTLASCRDTLNFCFKERLQAVDLMNQPLDKVLEQARRHSWVNLSRAPTPRTQGQKTPPPDPVGTYNPACALALNEAKRLLVESKDTLVEMAKNEVDVREQQLQISDRVCASLAQKASETLELKERLNMTLGLMRGTILRCTKYNQELYTTHGLIKGPLSKVHLETAEKLDRPLVRMYQRHVGTQLPEAARLAQGTDKLQCHITYLEKNLDELLATHKNLSWGLNCKNIGHEVDGNVVRLRLRQRQPHVCYEQAQRLVKDWDPRTPPPRSKSSADP

SEQ ID NO: 18215 - protein, 280 aa, Homo sapiens
  Payload ID: 3636
  Gene Symbol: CCDC106
  Gene Name: coiled-coil domain containing 106
  Uniprot ID: Q9BWC9
  ENSP ID: ENSP00000309681
MNDRSSRRRTMKDDETFEISIPFDEAPHLDPQIFYSLSPSRRNFEEPPEAASSALALMNSVKTQLHMALERNSWLQKRIEDLEEERDFLRCQLDKFISSARMEAEDHCRMKPGPRRMEGDSRGGAGGEASDPESAASSLSGASEEGSASERRRQKQKGGASRRRFGKPKARERQRVKDADGVLCRYKKILGTFQKLKSMSRAFEHHRVDRNTVALTTPIAELLIVAPEKLAEVGEFDPSKERLLEYSRRCFLALDDETLKKVQALKKSKLLLPITYRFKR

SEQ ID NO: 18216 - protein, 280 aa, Homo sapiens; identical to SEQ ID NO: 18215
  Payload ID: 3636
  Gene Symbol: CCDC106
  Gene Name: coiled-coil domain containing 106
  Uniprot ID: Q9BWC9
  ENSP ID: ENSP00000465757

SEQ ID NO: 18217 - protein, 245 aa, Homo sapiens
  Payload ID: 3636
  Gene Symbol: CCDC106
  Gene Name: coiled-coil domain containing 106
  ENSP ID: ENSP00000466521
MNDRSSRRRTKPPEAASSALALMNSVKTQLHMALERNSWLQKRIEDLEEERDFLRCQLDKFISSARMEAEDHCRMKPGPRRMEGDSRGGAGGEASDPESAASSLSGASEEGSASERRRQKQKGGASRRRFGKPKARERQRVKDADGVLCRYKKILGTFQKLKSMSRAFEHHRVDRNTVALTTPIAELLIVAPEKLAEVGEFDPSKERLLEYSRRCFLALDDETLKKVQALKKSKLLLPITYRFKR

SEQ ID NO: 18218 - protein, 172 aa, Homo sapiens
  Payload ID: 3636
  Gene Symbol: CCDC106
  Gene Name: coiled-coil domain containing 106
  ENSP ID: ENSP00000466597
MNDRSSRRRTMKDDETFEISIPFDEAPHLDPQIFYSLSPSRRNFEEPPEAASSALALMNSVKTQLHMALERNSWLQKRIEDLEEERDFLRCQLDKFISSARMEAEDHCRMKPGPRRMEGDSRGGAGGEASDPESAASSLSGASEEGSASERRRQKQKGGASRRRFGKPKARE

SEQ ID NO: 18219 - protein, 280 aa, Homo sapiens; identical to SEQ ID NO: 18215
  Payload ID: 3636
  Gene Symbol: CCDC106
  Gene Name: coiled-coil domain containing 106
  Uniprot ID: Q9BWC9
  ENSP ID: ENSP00000466870

SEQ ID NO: 18220 - protein, 39 aa, Homo sapiens
  Payload ID: 3636
  Gene Symbol: CCDC106
  Gene Name: coiled-coil domain containing 106
  ENSP ID: ENSP00000468077
MNDRSSRRRTMKDDETFEISIPFDEAPHLDPQIFYSLSP

SEQ ID NO: 18221 - protein, 45 aa, Homo sapiens
  Payload ID: 3636
  Gene Symbol: CCDC106
  Gene Name: coiled-coil domain containing 106
  ENSP ID: ENSP00000468521
MNDRSSRRRTMKDDETFEISIPFDEAPHLDPQIFYSLSPSRRNFE

SEQ ID NO: 18222 - protein, 280 aa, Homo sapiens; identical to SEQ ID NO: 18215
  Payload ID: 3636
  Gene Symbol: CCDC106
  Gene Name: coiled-coil domain containing 106
  Uniprot ID: Q9BWC9
  ENSP ID: ENSP00000468539

SEQ ID NO: 18223 - protein, 155 aa, Homo sapiens
  Payload ID: 3637
  Gene Symbol: CCDC107
  Gene Name: coiled-coil domain containing 107
  Uniprot ID: Q8WV48
  ENSP ID: ENSP00000330327
MAGAVSLLGVVGLLLVSALSGVLGDRANPDLRAHPGNAAHPGSGATEPRRRPPLKDQRERTRAGSLPLGALYTAAVAAFVLYKCLQGKDETAVLHEEASKQQPLQSEQQLAQLTQQLAQTEQHLNNLMAQLDPLFERPAGASEHEAMDHPRAAAR

SEQ ID NO: 18224 - protein, 137 aa, Homo sapiens
  Payload ID: 3637
  Gene Symbol: CCDC107
  Gene Name: coiled-coil domain containing 107
  ENSP ID: ENSP00000367661
MAGAVSLLGVVGLLLVSALSGVLGDRANPDLRAHPGNAAHPGSGATEPRRRPPLKDQRERTRAGSLPLGALYTAAVAAFVLYKCLQGKDETAVLHEEASKQQPLQSEQQLAQLTQQLAQTEQHLNNLMAQLDPLFER

SEQ ID NO: 18225 - protein, 139 aa, Homo sapiens
  Payload ID: 3637
  Gene Symbol: CCDC107
  Gene Name: coiled-coil domain containing 107
  Uniprot ID: Q8WV48
  ENSP ID: ENSP00000367662
MAGAVSLLGVVGLLLVSALSGVLGDRANPDLRAHPGNAAHPGSGATEPRRRPPLKDQRERTRAGSLPLGALYTAAVAAFVLYKCLQGKDETAVLHEEASKQQPLQSEQQLAQLTQQLAQTEQHLNNLMAQLDPLFERSF

SEQ ID NO: 18226 - protein, 256 aa, Homo sapiens
  Payload ID: 3637
  Gene Symbol: CCDC107
  Gene Name: coiled-coil domain containing 107
  Uniprot ID: Q8WV48
  ENSP ID: ENSP00000367665
MAGAVSLLGVVGLLLVSALSGVLGDRANPDLRAHPGNAAHPGSGATEPRRRPPLKDQRERTRAGSLPLGALYTAAVAAFVLYKCLQGKDETAVLHEEASKQQPLQSEQQLAQLTQQLAQTEQHLNNLMAQLDPLFERVTTLAGAQQELLNMKLWTIHELLQDSKPDKDMEASEPEASRPLPEDFCLKEDEEEIGDSQAWEEPTNWSTETWNLATSWEVGRGLRRRCSQAVAKGPSHSLGWEGGTTAEGRLKQSLFS

SEQ ID NO: 18227 - protein, 119 aa, Homo sapiens
  Payload ID: 3637
  Gene Symbol: CCDC107
  Gene Name: coiled-coil domain containing 107
  Uniprot ID: Q8WV48
  ENSP ID: ENSP00000413003
MAGAVSLLGVVGLLLVSALSGVLGDRANPDLRAHPGNAAHPGSGATEPRRRPPLKDQRERTRAGSLPLGALYTAAVAAFVLYKCLQGKDETAVLHEEASKQQPLQSGGFSRSLCWVGGV

SEQ ID NO: 18228 - protein, 283 aa, Homo sapiens
  Payload ID: 3637
  Gene Symbol: CCDC107
  Gene Name: coiled-coil domain containing 107
  Uniprot ID: Q8WV48
  ENSP ID: ENSP00000414964
MAGAVSLLGVVGLLLVSALSGVLGDRANPDLRAHPGNAAHPGSGATEPRRRPPLKDQRERTRAGSLPLGALYTAAVAAFVLYKCLQGKDETAVLHEEASKQQPLQSEQQLAQLTQQLAQTEQHLNNLMAQLDPLFERVTTLAGAQQELLNMKLWTIHELLQDSKPDKDMEASEPGEGSGGESAGGGDKVSETGTFLISPHTEASRPLPEDFCLKEDEEEIGDSQAWEEPTNWSTETWNLATSWEVGRGLRRRCSQAVAKGPSHSLGWEGGTTAEGRLKQSLFS

SEQ ID NO: 18229 - protein, 164 aa, Homo sapiens
  Payload ID: 3638
  Gene Symbol: CCDC108
  Gene Name: coiled-coil domain containing 108
  Uniprot ID: Q6ZU64
  ENSP ID: ENSP00000295729
MMLTQAPSSVVRSRNSRNHTVNSGGSCLSASTVAIPAINDSSAAMSACSTISAQPASSMDTQMHSPKKQERVNKRVIWGIEVAEELHWKGWELGKETTRNLVLKNRSLKLQKMKYRYQYKGSRTQCHSLEPRKQALFKTKQNKQKKPLTCHIKASECLKYVQYE

SEQ ID NO: 18230 - protein, 1925 aa, Homo sapiens
  Payload ID: 3638
  Gene Symbol: CCDC108
  Gene Name: coiled-coil domain containing 108
  Uniprot ID: Q6ZU64
  ENSP ID: ENSP00000340776
MFTLTGCRLVEKTQKVENPSVSFASSFPLIPLLLRGKSVQKKQAESKSQIKLHTQSAPFGLCPKDMMLTQAPSSVVRSRNSRNHTVNSGGSCLSASTVAIPAINDSSAAMSACSTISAQPASSMDTQMHSPKKQERVNKRVIWGIEVAEELHWKGWELGKETTRNLVLKNRSLKLQKMKYRPPKTKFFFTVIPQPIFLSPGITLTLPIVFRPLEAKEYMDQLWFEKAEGMFCVGLRATLPCHRLICRPPSLQLPMCAVGDTTEAFFCLDNVGDLPTFFTWEFSSPFQMLPATGLLEPGQASQIKVTFQPLTAVIYEVQATCWYGAGSRQRSSIQLQAVAKCAQLLVSIKHKCPEDQDAEGFQKLLYFGSVAVGCTSERQIRLHNPSAVNAPFRIEISPDELAEDQAFSCPTAHGIVLPGEKKCVSVFFHPKTLDTRTVDYCSIMPSGCASKTLLKVVGFCRGPAVSLQHYCVNFSWVNLGERSEQPLWIENQSDCTAHFQFAIDCLESVFTIRPAFGTLVGKARMTLHCAFQPTHPIICFRRVACLIHHQDPLFLDLMGTCHSDSTKPAILKPQHLTWYRTHLARGLTLYPPDILDAMLKEKKLAQDQNGALMIPIQDLEDMPAPQYPYIPPMTEFFFDGTSDITIFPPPISVEPVEVDFGACPGPEAPNPVPLCLMNHTKGKIMVVWTRRSDCPFWVTPESCDVPPLKSMAMRLHFQPPHPNCLYTVELEAFAIYKVLQSYSNIEEDCTMCPSWCLTVRARGHSYFAGFEHHIPQYSLDVPKLFPAVSSGEPTYRSLLLVNKDCKLLTFSLAPQRGSDVILRPTSGLVAPGAHQIILICTYPEGSSWKQHTFYLQCNASPQYLKEVSMYSREEPLQLKLDTHKSLYFKPTWVGCSSTSPFTFRNPSRLPLQFEWRVSEQHRKLLAVQPSRGLIQPNERLTLTWTFSPLEETKYLFQVGMWVWEAGLSPNANPAATTHYMLRLVGVGLTSSLSAKEKELAFGNVLVNSKQSRFLVLLNDGNCTLYYRLYLEQGSPEAVDNHPLALQLDRTEGSMPPRSQDTICLTACPKQRSQYSWTITYSLLSHRDNKAGEKQELCCVSLVAVYPLLSILDVSSMGSAEGITRKHLWRLFSLDLLNSYLERDPTPCELTYKVPTRHSMSQIPPVLTPLRLDFNFGAAPFKAPPSVVFLALKNSGVVSLDWAFLLPSDQRIDVELWAEQAELNSTELHQMRVQDNCLFSISPKAGSLSPGQEQMVELKYSHLFIGTDHLPVLFKVSHGREILLNFIGVTVKPEQKYVHFTSTTHQFIPIPIGDTLPPRQIYELYNGGSVPVTYEVQTDVLSQVQEKNFDHPIFCCLNPKGEIQPGSTARVLWIFSPIEAKTYTVDVPIHILGWNSALIHFQGVGYNPHMMGDTAPFHNISSWDNSSIHSRLVVPGQNVFLSQSHISLGNIPVQSKCSRLLFLNNISKNEEIAFSWQPSPLDFGEVSVSPMIGVVAPEETVPFVVTLRASVHASFYSADLVCKLYSQQLMRQYHKELQEWKDEKVRQEVEFTITDMKVKKRTCCTACEPARKYKTLPPIKNQQSVSRPASWKLQTPKEEVSWPCPQPPSPGMLCLGLTARAHATDYFLANFFSEFPCHFLHRELPKRKAPREESETSEEKSPNKWGPVSKQKKQLLVDILTTIIRGLLEDKNFHEAVDQSLVEQVPYFRQFWNEQSTKFMDQKNSLYLMPILPVPSSSWEDGKGKQPKEDRPEHYPGLGKKEEGEEEKGEEEEEELEEEEEEEEETEEEELGKEEIEEKEEERDEKEEKVSWAGIGPTPQPESQESMQWQWQQQLNVMVKEEQEQDEKEAIRRLPAFANLQEALLENMIQNILVEASRGEVVLTSRPRVIALPPFCVPRSLTPDTLLPTQQAEVLHPVVPLPTDLP

SEQ ID NO: 18231 - protein, 730 aa, Homo sapiens
  Payload ID: 3638
  Gene Symbol: CCDC108
  Gene Name: coiled-coil domain containing 108
  Uniprot ID: Q6ZU64
  ENSP ID: ENSP00000386258
MMLTQAPSSVVRSRNSRNHTVNSGGSCLSASTVAIPAINDSSAAMSACSTISAQPASSMDTQMHSPKKQERVNKRVIWGIEVAEELHWKGWELGKETTRNLVLKNRSLKLQKMKYRPPKTKFFFTVIPQPIFLSPGITLTLPIVFRPLEAKEYMDQLWFEKAEGMFCVGLRATLPCHRLICRPPSLQLPMCAVGDTTEAFFCLDNVGDLPTFFTWEFSSPFQMLPATGLLEPGQASQIKVTFQPLTAVIYEVQATCWYGAGSRQRSSIQLQAVAKCAQLLVSIKHKCPEDQDAEGFQKLLYFGSVAVGCTSERQIRLHNPSAVNAPFRIEISPDELAEDQAFSCPTAHGIVLPGEKKCVSVFFHPKTLDTRTVDYCSIMPSGCASKTLLKVVGFCRGPAVSLQHYCVNFSWVNLGERSEQPLWIENQSDCTAHFQFAIDCLESVFTIRPAFGTLVGKARMTLHCAFQPTHPIICFRRVACLIHHQDPLFLDLMGTCHSDSTKPAILKPQHLTWYRTHLARGLTLYPPDILDAMLKEKKLAQDQNGALMIPIQDLEDMPAPQYPYIPPMTEFFFDGTSDITIFPPPISVEPVEVDFGACPGPEAPNPVPLCLMNHTKGKIMVVWTRRSDCPFWVTPESCDVPPLKSMAMRLHFQPPHPNCLYTVELEAFAIYKVCARNEREECGVSARSLSGLVGWQEVTEGSFRLHPLRARLSLGWTVTPMSLSPPKLLA

SEQ ID NO: 18232 - protein, 784 aa, Homo sapiens
  Payload ID: 3638
  Gene Symbol: CCDC108
  Gene Name: coiled-coil domain containing 108
  Uniprot ID: Q6ZU64
  ENSP ID: ENSP00000386945
METAIWRRSYISLISSERPVHNWRGKSVQKKQAESKSQIKLHTQSAPFGLCPKDMMLTQAPSSVVRSRNSRNHTVNSGGSCLSASTVAIPAINDSSAAMSACSTISAQPASSMDTQMHSPKKQERVNKRVIWGIEVAEELHWKGWELGKETTRNLVLKNRSLKLQKMKYRPPKTKFFFTVIPQPIFLSPGITLTLPIVFRPLEAKEYMDQLWFEKAEGMFCVGLRATLPCHRLICRPPSLQLPMCAVGDTTEAFFCLDNVGDLPTFFTWEFSSPFQMLPATGLLEPGQASQIKVTFQPLTAVIYEVQATCWYGAGSRQRSSIQLQAVAKCAQLLVSIKHKCPEDQDAEGFQKLLYFGSVAVGCTSERQIRLHNPSAVNAPFRIEISPDELAEDQAFSCPTAHGIVLPGEKKCVSVFFHPKTLDTRTVDYCSIMPSGCASKTLLKVVGFCRGPAVSLQHYCVNFSWVNLGERSEQPLWIENQSDCTAHFQFAIDCLESVFTIRPAFGTLVGKARMTLHCAFQPTHPIICFRRVACLIHHQDPLFLDLMGTCHSDSTKPAILKPQHLTWYRTHLARGLTLYPPDILDAMLKEKKLAQDQNGALMIPIQDLEDMPAPQYPYIPPMTEFFFDGTSDITIFPPPISVEPVEVDFGACPGPEAPNPVPLCLMNHTKGKIMVVWTRRSDCPFWVTPESCDVPPLKSMAMRLHFQPPHPNCLYTVELEAFAIYKVCARNEREECGVSARSLSGLVGWQEVTEGSFRLHPLRARLSLGWTVTPMSLSPPKLLA

SEQ ID NO: 18233 - protein, 234 aa, Homo sapiens
  Payload ID: 3638
  Gene Symbol: CCDC108
  Gene Name: coiled-coil domain containing 108
  ENSP ID: ENSP00000393483
METAIWRRSYISLISSERPVHNWRGKSVQKKQAESKSQIKLHTQSAPFGLCPKDMMLTQAPSSVVRSRNSRNHTVNSGGSCLSASTVAIPAINDSSAAMSACSTISAQPASSMDTQMHSPKKQERVNKRVIWGIEVAEELHWKGWELGKETTRNLVLKNRSLKLQKMKYRPPKTKFFFTVIPQPIFLSPGITLTLPIVFRPLEAPLTAVIYEVQATCWYGAGSRQRSSIQLQAV

SEQ ID NO: 18234 - protein, 127 aa, Homo sapiens
  Payload ID: 3638
  Gene Symbol: CCDC108
  Gene Name: coiled-coil domain containing 108
  ENSP ID: ENSP00000394019
  MOD_RES (1)..(1): Any amino acid
XKQELCCVSLVAVYPLLSILDVSSMGSAEGITRKHLWRLFSLDLLNSYLERDPTPCELTYKVPTRHSMSQIPPVLTPLRLDFNFGAAPFKAPPSVVFLALKNSGVVSLDWYGLKGATGGPGRQVPRG

SEQ ID NO: 18235 - protein, 117 aa, Homo sapiens
  Payload ID: 3638
  Gene Symbol: CCDC108
  Gene Name: coiled-coil domain containing 108
  ENSP ID: ENSP00000396836
MMLTQAPSSVVRSRNSRNHTVNSGGSCLSASTVAIPAINDSSAAMSACSTISAQPASSMDTQMHSPKKQERVNKRVIWGIEVAEELHWKGWELGKETTRNLVLKNRSLKLQKMKYRP

SEQ ID NO: 18236 - protein, 1925 aa, Homo sapiens; identical to SEQ ID NO: 18230
  Payload ID: 3638
  Gene Symbol: CCDC108
  Gene Name: coiled-coil domain containing 108
  Uniprot ID: Q6ZU64
  ENSP ID: ENSP00000409117

SEQ ID NO: 18237 - protein, 271 aa, Homo sapiens
  Payload ID: 3638
  Gene Symbol: CCDC108
  Gene Name: coiled-coil domain containing 108
  ENSP ID: ENSP00000413377
MTLHCAFQPTHPIICFRRVACLIHHQDPLFLDLMGTCHSDSTKPAILKPQHLTWYRTHLARGLTLYPPDILDAMLKEKKLAQDQNGALMIPIQDLEDMPAPQYPYIPPMTEFFFDGTSDITIFPPPISVEPVEVDFGACPGPEAPNPVPLCLMNHTKGKIMVVWTRRSDCPFWVTPESCDVPPLKSMAMRLHFQPPHPNCLYTVELEAFAIYKVCARNEREECGVSARSLSGLVGWQEVTEGSFRLHPLRARLSLGWTVTPMSLSPPKLLA

SEQ ID NO: 18238 - protein, 114 aa, Homo sapiens
  Payload ID: 3638
  Gene Symbol: CCDC108
  Gene Name: coiled-coil domain containing 108
  ENSP ID: ENSP00000413746
MMLTQAPSSVVRSRNSRNHTVNSGGSCLSASTVAIPAINDSSAAMSACSTISAQPASSMDTQMHSPKKQERVNKRVIWGIEVAEELHWKGWELGKETTRNLVLKNRSLKLQKMK

SEQ ID NO: 18239 - protein, 336 aa, Homo sapiens
  Payload ID: 3639
  Gene Symbol: CCDC109B
  Gene Name: coiled-coil domain containing 109B
  Uniprot ID: Q9NWR8
  ENSP ID: ENSP00000378145
MLQRGLWPWRTRLLPTPGTWRPARPWPLPPPPQVLRVKLCGNVKYYQSHHYSTVVPPDEITVIYRHGLPLVTLTLPSRKERCQFVVKPMLSTVGSFLQDLQNEDKGIKTAAIFTADGNMISASTLMDILLMNDFKLVINKIAYDVQCPKREKPSNEHTAEMEHMKSLVHRLFTILHLEESQKKREHHLLEKIDHLKEQLQPLEQVKAGIEAHSEAKTSGLLWAGLALLSIQGGALAWLTWWVYSWDIMEPVTYFITFANSMVFFAYFIVTRQDYTYSAVKSRQFLQFFHKKSKQQHFDVQQYNKLKEDLAKAKESLKQARHSLCLQMQVEELNEKN

SEQ ID NO: 18240 - protein, 833 aa, Homo sapiens
  Payload ID: 3640
  Gene Symbol: CCDC110
  Gene Name: coiled-coil domain containing 110
  Uniprot ID: Q8TBZ0
  ENSP ID: ENSP00000306776
MSPEKQHREEDEVDSVLLSASKILNSSEGVKESGCSDTEYGCIAESENQIQPQSALKVLQQQLESFQALRMQTLQNVSMVQSEISEILNKSIIEVENPQFSSEKNLVFGTRIEKDLPTENQEENLSMEKSHHFEDSKTLHSVEEKLSGDSVNSLPQSVNVPSQIHSEDTLTLRTSTDNLSSNIIIHPSENSDILKNYNNFYRFLPTAPPNVMSQADTVILDKSKITVPFLKHGFCENLDDICHSIKQMKEELQKSHDGEVALTNELQTLQTDPDVHRNGKYDMSPIHQDKMNFIKEENLDGNLNEDIKSKRISELEALVKKLLPFRETVSKFHVHFCRKCKKLSKSEMHRGKKNEKNNKEIPITGKNITDLKFHSRVPRYTLSFLDQTKHEMKDKERQPFLVKQGSIISENEKTSKVNSVTEQCVAKIQYLQNYLKESVQIQKKVMELESENLNLKSKMKPLIFTTQSLIQKVETYEKQLKNLVEEKSTIQSKLSKTEEYSKECLKEFKKIISKYNVLQGQNKTLEEKNIQLSLEKQQMMEALDQLKSKEHKTQSDMAIVNNENNRMSIEMEAMKTNILLIQDEKEMLEKKTHQLLKEKSSLGNELKESQLEIIQLKEKERLAKTEQETLLQIIETVKDEKLNLETTLQESTAARQIMEREIENIQTYQSTAEENFLQEIKNAKSEASIYKNSLSEIGKECEMLSKMVMETKTDNQILKEELKKHSQENIKFENSISRLTEDKILLENYVRSIENERDTLEFEMRHLQREYLSLSDKICNQHNDPSKTTYISRREKFHFDNYTHEDTSSPQSRPLASDLKGYFKVKDRTLKHH

SEQ ID NO: 18241 - protein, 796 aa, Homo sapiens
  Payload ID: 3640
  Gene Symbol: CCDC110
  Gene Name: coiled-coil domain containing 110
  Uniprot ID: Q8TBZ0
  ENSP ID: ENSP00000377172
MSPEKQHREEDEVDSVLLSASKILNSSEGVKESGCSDTEYGCIAESENQIQPQSALKVLQQQLESFQALRMQTLQNVSMPTENQEENLSMEKSHHFEDSKTLHSVEEKLSGDSVNSLPQSVNVPSQIHSEDTLTLRTSTDNLSSNIIIHPSENSDILKNYNNFYRFLPTAPPNVMSQADTVILDKSKITVPFLKHGFCENLDDICHSIKQMKEELQKSHDGEVALTNELQTLQTDPDVHRNGKYDMSPIHQDKMNFIKEENLDGNLNEDIKSKRISELEALVKKLLPFRETVSKFHVHFCRKCKKLSKSEMHRGKKNEKNNKEIPITGKNITDLKFHSRVPRYTLSFLDQTKHEMKDKERQPFLVKQGSIISENEKTSKVNSVTEQCVAKIQYLQNYLKESVQIQKKVMELESENLNLKSKMKPLIFTTQSLIQKVETYEKQLKNLVEEKSTIQSKLSKTEEYSKECLKEFKKIISKYNVLQGQNKTLEEKNIQLSLEKQQMMEALDQLKSKEHKTQSDMAIVNNENNRMSIEMEAMKTNILLIQDEKEMLEKKTHQLLKEKSSLGNELKESQLEIIQLKEKERLAKTEQETLLQIIETVKDEKLNLETTLQESTAARQIMEREIENIQTYQSTAEENFLQEIKNAKSEASIYKNSLSEIGKECEMLSKMVMETKTDNQILKEELKKHSQENIKFENSISRLTEDKILLENYVRSIENERDTLEFEMRHLQREYLSLSDKICNQHNDPSKTTYISRREKFHFDNYTHEDTSSPQSRPLASDLKGYFKVKDRTLKHH

SEQ ID NO: 18242 - protein, 66 aa, Homo sapiens
  Payload ID: 3640
  Gene Symbol: CCDC110
  Gene Name: coiled-coil domain containing 110
  ENSP ID: ENSP00000424520
MSPEKQHREEDEVDSVLLSASKILNSSEGVKESGCSDTGPSAAVGIISGFANADFAECQHGTVGNQ

SEQ ID NO: 18243 - protein, 124 aa, Homo sapiens
  Payload ID: 3640
  Gene Symbol: CCDC110
  Gene Name: coiled-coil domain containing 110
  ENSP ID: ENSP00000424878
EDKILLENYVRSIENERDTLEFEMRHLQREYLSLSDKICNQHNDPSKTTYISRREKFHFDNYTHEDTSSPQSRPLASDLKGGNNTHACPGSRGNTISSFQGCKHTCSVLQRHSVFQDCYSNIPC

SEQ ID NO: 18244 - protein, 257 aa, Homo sapiens
  Payload ID: 3640
  Gene Symbol: CCDC110
  Gene Name: coiled-coil domain containing 110
  ENSP ID: ENSP00000425276
MSPEKQHREEDEVDSVLLSASKILNSSEGVKESGCSDTEYGCIAESENQIQPQSALKVLQQQLESFQALRMQTLQNVSMVQSEISEILNKSIIEVENPQFSSEKNLVFGTRIEKDLEKWTIRDENKETPVLKTLKDPTENQEENLSMEKSHHFEDSKTLHSVEEKLSGDSVNSLPQSVNVPSQIHSEDTLTLRTSTDNLSSNIIIHPSENSDILKNYNNFYRFLPTAPPNVMSQADTVILDKSKITVPFLKHGFCEN

SEQ ID NO: 18245 - protein, 49 aa, Homo sapiens
  Payload ID: 3640
  Gene Symbol: CCDC110
  Gene Name: coiled-coil domain containing 110
  ENSP ID: ENSP00000425547
MSPEKQHREEDEVDSVLLSASKILNSSEGVKESGCSDTDKETGTERLTP

SEQ ID NO: 18246 - protein, 836 aa, Homo sapiens
  Payload ID: 3640
  Gene Symbol: CCDC110
  Gene Name: coiled-coil domain containing 110
  ENSP ID: ENSP00000427246
MSPEKQHREEDEVDSVLLSASKILNSSEGVKESGCSDTEYGCIAESENQIQPQSALKVLQQQLESFQALRMQTLQNVSMVQSEISEILNKSIIEVENPQFSSEKNLVFGTRIEKDLPTENQEENLSMEKSHHFEDSKTLHSVEEKLSGDSVNSLPQSVNVPSQIHSEDTLTLRTSTDNLSSNIIIHPSENSDILKNYNNFYRFLPTAPPNVMSQADTVILDKSKITVPFLKHGFCENLDDICHSIKQMKEELQKSHDGEVALTNELQTLQTDPDVHRNGKYDMSPIHQDKMNFIKEENLDGNLNEDIKSKRISELEALVKKLLPFRETVSKFHVHFCRKCKKLSKSEMHRGKKNEKNNKEIPITGKNITDLKFHSRVPRYTLSFLDQTKHEMKDKERQPFLVKQGSIISENEKTSKVNSVTEQCVAKIQYLQNYLKESVQIQKKVMELESENLNLKSKMKPLIFTTQSLIQKVETYEKQLKNLVEEKSTIQSKLSKTEEYSKECLKEFKKIISKYNVLQGQNKTLEEKNIQLSLEKQQMMEALDQLKSKEHKTQSDMAIVNNENNRMSIEMEAMKTNILLIQDEKEMLEKKTHQLLKEKSSLGNELKESQLEIIQLKEKERLAKTEQETLLQIIETVKDEKLNLETTLQESTAARQIMEREIENIQTYQSTAEENFLQEIKNAKSEASIYKNSLSEIGKECEMLSKMVMETKTDNQILKEELKKHSQENIKFENSISRLTEDKILLENYVRSIENERDTLEFEMRHLQREYLSLSDKICNQHNDPSKTTYISRREKFHFDNYTHEDTSSPQSRPLASDLKGIPSKLYHLLPSKIYK

SEQ ID NO: 18247 - protein, 115 aa, Homo sapiens
  Payload ID: 3640
  Gene Symbol: CCDC110
  Gene Name: coiled-coil domain containing 110
  ENSP ID: ENSP00000485145
MQTLQNVSMVQSEISEILNKSIIEVENPQFSSEKNLVFGTRIEKDLPTENQEENLSMEKSHHFEDSKTLHSVEEKLSGDSVNSLPQSVNVPSQIHSEDTLTLRTSTDNLSSNIII

SEQ ID NO: 18248 - protein, 150 aa, Homo sapiens
  Payload ID: 3640
  Gene Symbol: CCDC110
  Gene Name: coiled-coil domain containing 110
  ENSP ID: ENSP00000485309
MQTLQNVSMVQSEISEILNKSIIEVENPQFSSEKNLVFGTRIEKDLPTENQEENLSMEKSHHFEDSKTLHSVEEKLSGDSVNSLPQSVNVPSQIHSEDTLTLRTSTDNLSSNIIIHPSENSDILKNYNNFYRFLPTAPPNVMSQADTVIL

SEQ ID NO: 18249 - protein, 529 aa, Homo sapiens
  Payload ID: 3641
  Gene Symbol: CCDC112
  Gene Name: coiled-coil domain containing 112
  Uniprot ID: Q8NEF3
  ENSP ID: ENSP00000368931
MAALTTVVVAAAATAVAGAVAGAGAATGTGVGATPAPQQSDGCFSTSGGIRPFHLQNWKQKVNQTKKAEFVRTAEKFKNQVINMEKDKHSHFYNQKSDFRIEHSMLEELENKLIHSRKTERAKIQQQLAKIHNNVKKLQHQLKDVKPTPDFVEKLREMMEEIENAINTFKEEQRLIYEELIKEEKTTNNELSAISRKIDTWALGNSETEKAFRAISSKVPVDKVTPSTLPEEVLDFEKFLQQTGGRQGAWDDYDHQNFVKVRNKHKGKPTFMEEVLEHLPGKTQDEVQQHEKWYQKFLALEERKKESIQIWKTKKQQKREEIFKLKEKADNTPVLFHNKQEDNQKQKEEQRKKQKLAVEAWKKQKSIEMSMKCASQLKEEEEKEKKHQKERQRQFKLKLLLESYTQQKKEQEEFLRLEKEIREKAEKAEKRKNAADEISRFQERDLHKLELKILDRQAKEDEKSQKQRRLAKLKEKVENNVSRDPSRLYKPTKGWEERTKKIGPTGSGPLLHIPHRAIPTWRQGIQRRV

SEQ ID NO: 18250 - protein, 446 aa, Homo sapiens
  Payload ID: 3641
  Gene Symbol: CCDC112
  Gene Name: coiled-coil domain containing 112
  Uniprot ID: Q8NEF3
  ENSP ID: ENSP00000378925
MEKDKHSHFYNQKSDFRIEHSMLEELENKLIHSRKTERAKIQQQLAKIHNNVKKLQHQLKDVKPTPDFVEKLREMMEEIENAINTFKEEQRLIYEELIKEEKTTNNELSAISRKIDTWALGNSETEKAFRAISSKVPVDKVTPSTLPEEVLDFEKFLQQTGGRQGAWDDYDHQNFVKVRNKHKGKPTFMEEVLEHLPGKTQDEVQQHEKWYQKFLALEERKKESIQIWKTKKQQKREEIFKLKEKADNTPVLFHNKQEDNQKQKEEQRKKQKLAVEAWKKQKSIEMSMKCASQLKEEEEKEKKHQKERQRQFKLKLLLESYTQQKKEQEEFLRLEKEIREKAEKAEKRKNAADEISRFQERDLHKLELKILDRQAKEDEKSQKQRRLAKLKEKVENNVSRDPSRLYKPTKGWEERTKKIGPTGSGPLLHIPHRAIPTWRQGIQRRV

SEQ ID NO: 18251 - protein, 446 aa, Homo sapiens; identical to SEQ ID NO: 18250
  Payload ID: 3641
  Gene Symbol: CCDC112
  Gene Name: coiled-coil domain containing 112
  Uniprot ID: Q8NEF3
  ENSP ID: ENSP00000423712

SEQ ID NO: 18252 - protein, 414 aa, Homo sapiens
  Payload ID: 3641
  Gene Symbol: CCDC112
  Gene Name: coiled-coil domain containing 112
  ENSP ID: ENSP00000424876
MEKDKHSHFYNQKSDFRIEHSMLEELENKLIHSRKTERAKIQQQLAKIHNNVKKLQHQLKDVKPTPDFVEKLREMMEEIENAINTFKEEQRLIYEELIKEEKTTNNELSAISRKIDTWALGNSETEKAFRAISSKVPVDKVTPSTLPEEVLDFEKFLQQTGGRQGAWDDYDHQNFVKVRNKHKGKPTFMEEVLEHLPGKTQDEVQQHEKWYQKFLALEERKKESIQIWKTKKQQKREEIFKLKEKADNTPVLFHNKQEDNQKQKEEQRKKQKLAVEAWKKQKSIEMSMKCASQLKEEEEKEKKHQKERQRQFKLKLLLESYTQQKKEQEEFLRLEKEIREKAEKAEKRKNAADEISRFQERVENNVSRDPSRLYKPTKGWEERTKKIGPTGSGPLLHIPHRAIPTWRQGIQRRV

SEQ ID NO: 18253 - protein, 377 aa, Homo sapiens
  Payload ID: 3642
  Gene Symbol: CCDC113
  Gene Name: coiled-coil domain containing 113
  Uniprot ID: Q9H0I3
  ENSP ID: ENSP00000219299
MTDDESESVLSDSHEGSELELPVIQLCGLVEELSYVNSALKTETEMFEKYYAKLEPRDQRPPRLSEIKISAADYAQFRGRRRSKSRTGMDRGVGLTADQKLELVQKEVADMKDDLRHTRANAERDLQHHEAIIEEAEIRWSEVSREVHEFEKDILKAISKKKGSILATQKVMKYIEDMNRRRDNMKEKLRLKNVSLKVQRKKMLLQLRQKEEVSEALHDVDFQQLKIENAQFLETIEARNQELTQLKLSSGNTLQVLNAYKSKLHKAMEIYLNLDKEILLRKELLEKIEKETLQVEEDRAKAEAVNKRLRKQLAEFRAPQVMTYVREKILNADLEKSIRMWERKVEIAEMSLKGHRKAWNRMKITNEQLQADYLAGK

SEQ ID NO: 18254 - protein, 323 aa, Homo sapiens
  Payload ID: 3642
  Gene Symbol: CCDC113
  Gene Name: coiled-coil domain containing 113
  Uniprot ID: Q9H0I3
  ENSP ID: ENSP00000402588
MTDDESESVLSDSHEGSELELPVIQLCGLVEELSYVNSALKTETEMFEKYYAKLEPRDQRPPRLSEIKISAADYAQAIIEEAEIRWSEVSREVHEFEKDILKAISKKKGSILATQKVMKYIEDMNRRRDNMKEKLRLKNVSLKVQRKKMLLQLRQKEEVSEALHDVDFQQLKIENAQFLETIEARNQELTQLKLSSGNTLQVLNAYKSKLHKAMEIYLNLDKEILLRKELLEKIEKETLQVEEDRAKAEAVNKRLRKQLAEFRAPQVMTYVREKILNADLEKSIRMWERKVEIAEMSLKGHRKAWNRMKITNEQLQADYLAGK

SEQ ID NO: 18255 - protein, 58 aa, Homo sapiens
  Payload ID: 3642
  Gene Symbol: CCDC113
  Gene Name: coiled-coil domain containing 113
  ENSP ID: ENSP00000454618
MTDDESESVLSDSHEGSELELPVIQLCGLVEELRRSLRRLKFDGVKFREKCMSLKKIF

SEQ ID NO: 18256 - protein, 64 aa, Homo sapiens
  Payload ID: 3642
  Gene Symbol: CCDC113
  Gene Name: coiled-coil domain containing 113
  ENSP ID: ENSP00000455923
MFEKYYAKLEPRDQRPPRLSEIKISAADYAQFRGRRRSKSRTGMDRGVGLTADQKLELVQKEVA

SEQ ID NO: 18257 - protein, 190 aa, Homo sapiens [sequence omitted]

SEQ ID NO: 18258 - protein, 670 aa, Homo sapiens
  Payload ID: 3643
  Gene Symbol: CCDC114
  Gene Name: coiled-coil domain containing 114
  Uniprot ID: Q96M63
  ENSP ID: ENSP00000318429
MEGERRAYSKEVHQRINKQLEEIRRLEEVRGDLQVQISAAQNQVKRLRDSQRLENMDRLLKGRAQVQAEIEELQEQTRALDKQIQEWETRIFTHSKNVRSPGFILDQKVKIRRRIRILENQLDRVTCHFDNQLVRNAALREELDLLRIDRNRYLNVDRKLKKEIHHLHHLVSTLILSSTSAYAVREEAKAKMGLLRERAEKEEAQSEMEAQVLQRQILHLEQLHHFLKLKNNDRQPDPDVLEKREKQAGEVAEGVWKTSQERLVLCYEDALNKLSQLMGESDPDLLVQKYLEIEERNFAEFNFINEQNLELEHVQEEIKEMQEALVSARASKDDQHLLQEQQQKVLQQRMDKVHSEAERLEARFQDVRGQLEKLKADIQLLFTKAHCDSSMIDDLLGVKTSMGDRDMGLFLSLIEKRLVELLTVQAFLHAQSFTSLADAALLVLGQSLEDLPKKMAPLQPPDTLEDPPGFEASDDYPMSREELLSQVEKLVELQEQAEAQRQKDLAAAAAKLDGTLSVDLASTQRAGSSTVLVPTRHPHAIPGSILSHKTSRDRGSLGHVTFGGLSSSTGHLPSHITHGDPNTGHVTFGSTSASSGGHVTFRPVSASSYLGSTGYVGSSRGGENTEGGVESGGTASDSSGGLGSSRDHVSSTGPASSTGPGSSTSKDSRG

SEQ ID NO: 18259 - protein, 180 aa, Homo sapiens
  Payload ID: 3644
  Gene Symbol: CCDC115
  Gene Name: coiled-coil domain containing 115
  Uniprot ID: Q96NT0
  ENSP ID: ENSP00000259229
MAALDLRAELDSLVLQLLGDLEELEGKRTVLNARVEEGWLSLAKARYAMGAKSVGPLQYASHMEPQVCLHASEAQEGLQKFKVVRAGVHAPEEVGPREAGLRRRKGPTKTPEPESSEAPQDPLNWFGILVPHSLRQAQASFRDGLQLAADIASLQNRIDWGRSQLRGLQEKLKQLEPGAA

SEQ ID NO: 18260 - protein, 175 aa, Homo sapiens
  Payload ID: 3644
  Gene Symbol: CCDC115
  Gene Name: coiled-coil domain containing 115
  ENSP ID: ENSP00000387301
MGTPLDGGSRVPIGCPAKLRRVTRKKVAPDLEGWLSLAKARYAMGAKSVGPLQYASHMEPQVCLHASEAQEGLQKFKVVRAGVHAPEEVGPREAGLRRRKGPTKTPEPESSEAPQDPLNWFGILVPHSLRQAQASFRDGLQLAADIASLQNRIDWGRSQLRGLQEKLKQLEPGAA

SEQ ID NO: 18261 - protein, 193 aa, Homo sapiens
  Payload ID: 3644
  Gene Symbol: CCDC115
  Gene Name: coiled-coil domain containing 115
  ENSP ID: ENSP00000403480
MAALDLRAELDSLVLQLLGDLEELEGKRTVLNARVEEGWLSLAKARYAMGAKSVGPLQYASHMEPQVCLHASEAQEGLQKFKVVRAGVHAPEEVGPREAGLRRRKGPTKTPEPESSEAPQDPLNWFGILVPHSLRQAQASFRDGVLEAKKRKCFLERVIQCVVSPAAEQEAEDESCPEDWAAAVPAETSAKAI

SEQ ID NO: 18262 - protein, 613 aa, Homo sapiens
  Payload ID: 3645
  Gene Symbol: CCDC116
  Gene Name: coiled-coil domain containing 116
  Uniprot ID: Q8IYX3
  ENSP ID: ENSP00000292779
MARCRHHSGYLADDEASHSMCSARVQLPKKPLVPEMRPACKPGRVPHPPSTCGSSALQGQRRNKRHPQPFGHFLDFLTESQVLDSLETVVEKATERMAAMKTEAGVPLVEVQDPVEVPSGGRRAHARPSLSTVHRHRVRPTLCTGHPNNYPSSSSSMSNCHSSLMAGCLGSHSRDSDLGAQGSLPPVRDKLLLEKNLKRLLQLEREGKGLSQSCSQRDSLLWDSLGSQTSFQWTQEQPLSWFSGLLGSSSGVPEASEPRPGEQEPIFRKREFNKEIKSLLSQLESLDLPGYCPLREPHRTLNFLADHRLFPALQSVVSQAVDKLRGAHCRDGRPLFPTSLEPTSDLPPLGSEPAKPTNGGQPYASPRPTVSSPKMLQRKRKDRGGSPSMSSAQVATRFKLKSPCSSSRFTKKKPLPSISSKSSMSHFSNRLYEELADFLTQQAASLVIRKYEFEKDLSKQLGFFSFPITHVLRDLSLGLKKVKGSRIHLSSETHRSCLLRKLEESKRARQASRLSTSHCSTETPSVQQEPATHTAQDQATEPCRSLYTNLPASRQLSPLEPKLYMSACTGMGSSPPKSKDMDNEGRDKAEIEDEDEDEFKDEDQDEDKDEDGV

SEQ ID NO: 18263 - protein, 152 aa, Homo sapiens
  Payload ID: 3645
  Gene Symbol: CCDC116
  Gene Name: coiled-coil domain containing 116
  ENSP ID: ENSP00000401637
MGAMEQRKGWMHEGGGVRGARDPQTPGPQMRGPIGDPQVVSPPHAERNAQLKREVGSRPGHLPGDHMARCRHHSGYLADDEASHSMCSARVQLPKKPLVPEMRPACKPGRVPHPPSTCGSSALQGQRRNKRHPQPFGHFLDFLTESQVLDSL

SEQ ID NO: 18264 - protein, 526 aa, Homo sapiens
  Payload ID: 3645
  Gene Symbol: CCDC116
  Gene Name: coiled-coil domain containing 116
  Uniprot ID: Q8IYX3
  ENSP ID: ENSP00000476296
MARCRHHSGYLADDEASHSMCSARVQLPKKPLVPEMRPACKPGRVPHPPSTCGSSALQGQRRNKRHPQPFGHFLDFLTESQVLDSLETVVEKATERMAAMKTEAGVPLVEVQDPVEVPSGGRRAHARPSLSTVHRHRVRPTLCTGHPNNYPSSSSSMSNCHSSLMAGCLGSHSRDSDLGAQGSLPPVRDKLLLEKNLKRLLQLEREGKGLSQSCSQRDSLLWDSLGSQTSFQWTQEQPLSWFSGLLGSSSGVPEASEPRPGEQEPIFRKREFNKEIKSLLSQLESLDLPGYCPLREPHRTLNFLADHRLFPALQSVVSQAVDKLRGAHCRDGRPLFPTSLEPTSDLPPLGSEPAKPTNGGQPYASPRPTVSSPKMLQRKRKDRGGSPSMSSAQVATRFKLKVTPTEKPNVPSPSLHSREEAPDSDPKLQNPPVSLSSSQRAQPWQGLHLTLPTPGIVVEVACSQGHLRGPVTPPLSSPYPRSSCYLLPELSPVASSSPASLCPEVTSSKVGPGMSLQEKGSLTHHS

SEQ ID NO: 18265 - protein, 279 aa, Homo sapiens
  Payload ID: 3646
  Gene Symbol: CCDC117
  Gene Name: coiled-coil domain containing 117
  Uniprot ID: Q8IWD4
  ENSP ID: ENSP00000249064
MAALGRPFSGLPLSGGSDFLQPPQPAFPGRAFPPGADGAELAPRPGPRAVPSSPAGSAARGRVSVHCKKKHKREEEEDDDCPVRKKRITEAELCAGPNDWILCAHQDVEGHGVNPSVSGLSIPGILDVICEEMDQTTGEPQCEVARRKLQEIEDRIIDEDEEVEADRNVNHLPSLVLSDTMKTGLKREFDEVFTKKMIESMSRPSMELVLWKPLPELLSDKPKPSSNTKNYTGESQAKHVAAGTAFPQRTELFSEPRPTGMSLYNSLETATSTEEEMEL

SEQ ID NO: 18266 - protein, 204 aa, Homo sapiens
  Payload ID: 3646
  Gene Symbol: CCDC117
  Gene Name: coiled-coil domain containing 117
  Uniprot ID: Q8IWD4
  ENSP ID: ENSP00000387827
MAALGRPFSGLPLSGGSDFLQPPQPAFPGRAFPPGADGAELAPRPGPRAVPSSPAGSAARGRVSVHCKKKHKREEEEDDEIIDEDEEVEADRNVNHLPSLVLSDTMKTGLKREFDEVFTKKMIESMSRPSMELVLWKPLPELLSDKPKPSSNTKNYTGESQAKHVAAGTAFPQRTELFSEPRPTGMSLYNSLETATSTEEEMEL

SEQ ID NO: 18267 - protein, 261 aa, Homo sapiens
  Payload ID: 3646
  Gene Symbol: CCDC117
  Gene Name: coiled-coil domain containing 117
  Uniprot ID: Q8IWD4
  ENSP ID: ENSP00000389478
MAALGRPFSGLPLSGGSDFLQPPQPAFPGRAFPPGADGAELAPRPGPRAVPSSPAGSAARGRCPVRKKRITEAELCAGPNDWILCAHQDVEGHGVNPSVSGLSIPGILDVICEEMDQTTGEPQCEVARRKLQEIEDRIIDEDEEVEADRNVNHLPSLVLSDTMKTGLKREFDEVFTKKMIESMSRPSMELVLWKPLPELLSDKPKPSSNTKNYTGESQAKHVAAGTAFPQRTELFSEPRPTGMSLYNSLETATSTEEEMEL

SEQ ID NO: 18268 - protein, 113 aa, Homo sapiens
  Payload ID: 3646
  Gene Symbol: CCDC117
  Gene Name: coiled-coil domain containing 117
  ENSP ID: ENSP00000399536
MAALGRPFSGLPLSGGSDFLQPPQPAFPGRAFPPGADGAELAPRPGPRAVPSSPAGSAARGRCPVRKKRITEAELCAGPNDWILCAHQDVEGHGVNPSVSGLSIPGILDVICE

SEQ ID NO: 18269 - protein, 62 aa, Homo sapiens
  Payload ID: 3646
  Gene Symbol: CCDC117
  Gene Name: coiled-coil domain containing 117
  ENSP ID: ENSP00000411668
MAALGRPFSGLPLSGGSDFLQPPQPAFPGRAFPPGADGAELAPRPGPRAVPSSPAGSAARGR

SEQ ID NO: 18270 - protein, 70 aa, Homo sapiens
  Payload ID: 3646
  Gene Symbol: CCDC117
  Gene Name: coiled-coil domain containing 117
  ENSP ID: ENSP00000415728
MDQTTGEPQCEVARRKLQEIEDRIIDEDEEVEADRNVNHLPSLVLSDTMKTGLKREFDEVFTKKMIESMS

SEQ ID NO: 18271 - protein, 179 aa, Homo sapiens
  Payload ID: 3647
  Gene Symbol: CCDC12
  Gene Name: coiled-coil domain containing 12
  ENSP ID: ENSP00000292314
MQDGRKGGAYAGKMEATTAGVGRLEEEALRRKERLKALREKTGRKDKEDGEPKTKHLREEEEEGEKHRELRLRNYVPEDEDLKKRRVPQAKPVAVEEKVKEQLEAAKPEPVIEEVDLANLAPRKPDWDLKRDVAKKLEKLKKRTQRAIAELIRERLKGQEDSLASAVDAATEQKTCDSD

SEQ ID NO: 18272 - protein, 89 aa, Homo sapiens
  Payload ID: 3647
  Gene Symbol: CCDC12
  Gene Name: coiled-coil domain containing 12
  ENSP ID: ENSP00000387490
MEATTAGVGRLEEEALRRKERLKALREKTGRKDKEDGEPKTKHLREEEEEGEKHRELRLRNYVPEDEDLKKRRVPQAKPVAVEEKVKEQ

SEQ ID NO: 18273 - protein, 166 aa, Homo sapiens
  Payload ID: 3647
  Gene Symbol: CCDC12
  Gene Name: coiled-coil domain containing 12
  Uniprot ID: Q8WUD4
  ENSP ID: ENSP00000416263
MEATTAGVGRLEEEALRRKERLKALREKTGRKDKEDGEPKTKHLREEEEEGEKHRELRLRNYVPEDEDLKKRRVPQAKPVAVEEKVKEQLEAAKPEPVIEEVDLANLAPRKPDWDLKRDVAKKLEKLKKRTQRAIAELIRERLKGQEDSLASAVDAATEQKTCDSD

SEQ ID NO: 18274 - protein, 81 aa, Homo sapiens
  Payload ID: 3647
  Gene Symbol: CCDC12
  Gene Name: coiled-coil domain containing 12
  ENSP ID: ENSP00000473887
MEATTAGVGRLEEEALRRKERLKALREKTGRKDKEDGEPKTKHLREEEEEGEKHRELRLRNYVPEDEDLKKRRVPQAKPVA

SEQ ID NO: 18275 - protein, 618 aa, Homo sapiens
  Payload ID: 3648
  Gene Symbol: CCDC120
  Gene Name: coiled-coil domain containing 120
  Uniprot ID: Q96HB5
  ENSP ID: ENSP00000443351
MEVKAALFGEAAPQVKSERLRGLLDRQRTLQEALSLKLQELRKVCLQEAELTGQLPPECPLEPGERPQLVRRRPPTARAYPPPHPNQAHHSLCPAEELALEALEREVSVQQQIAAAARRLALAPDLSTEQRRRRRQVQADALRRLHELEEQLRDVRARLGLPVLPLPQPLPLSTGSVITTQGVCLGMRLAQLSQEDVVLHSESSSLSESGASHDNEEPHGCFSLAERPSPPKAWDQLRAVSGGSPERRTPWKPPPSDLYGDLKSRRNSVASPTSPTRSLPRSASSFEGRSVPATPVLTRGAGPQLCKPEGLHSRQWSGSQDSQMGFPRADPASDRASLFVARTRRSNSSEALLVDRAAGGGAGSPPAPLAPSASGPPVCKSSEVLYERPQPTPAFSSRTAGPPDPPRAARPSSAAPASRGAPRLPPVCGDFLLDYSLDRGLPRSGGGTGWGELPPAAEVPGPLSRRDGLLTMLPGPPPVYAADSNSPLLRTKDPHTRATRTKPCGLPPEAAEGPEVHPNPLLWMPPPTRIPSAGERSGHKNLALEGLRDWYIRNSGLAAGPQRRPVLPSVGPPHPPFLHARCYEVGQALYGAPSQAPLPHSRSFTAPPVSGRYGGCFY

SEQ ID NO: 18276 - protein, 630 aa, Homo sapiens
  Payload ID: 3648
  Gene Symbol: CCDC120
  Gene Name: coiled-coil domain containing 120
  Uniprot ID: Q96HB5
  ENSP ID: ENSP00000470294
MEVKGQLISSPTFNAPAALFGEAAPQVKSERLRGLLDRQRTLQEALSLKLQELRKVCLQEAELTGQLPPECPLEPGERPQLVRRRPPTARAYPPPHPNQAHHSLCPAEELALEALEREVSVQQQIAAAARRLALAPDLSTEQRRRRRQVQADALRRLHELEEQLRDVRARLGLPVLPLPQPLPLSTGSVITTQGVCLGMRLAQLSQEDVVLHSESSSLSESGASHDNEEPHGCFSLAERPSPPKAWDQLRAVSGGSPERRTPWKPPPSDLYGDLKSRRNSVASPTSPTRSLPRSASSFEGRSVPATPVLTRGAGPQLCKPEGLHSRQWSGSQDSQMGFPRADPASDRASLFVARTRRSNSSEALLVDRAAGGGAGSPPAPLAPSASGPPVCKSSEVLYERPQPTPAFSSRTAGPPDPPRAARPSSAAPASRGAPRLPPVCGDFLLDYSLDRGLPRSGGGTGWGELPPAAEVPGPLSRRDGLLTMLPGPPPVYAADSNSPLLRTKDPHTRATRTKPCGLPPEAAEGPEVHPNPLLWMPPPTRIPSAGERSGHKNLALEGLRDWYIRNSGLAAGPQRRPVLPSVGPPHPPFLHARCYEVGQALYGAPSQAPLPHSRSFTAPPVSGRYGGCFY

SEQ ID NO: 18277 - protein, 696 aa, Homo sapiens
  Payload ID: 3648
  Gene Symbol: CCDC120
  Gene Name: coiled-coil domain containing 120
  Uniprot ID: Q96HB5
  ENSP ID: ENSP00000474071
MRREPRYQGQVGPDIHTDSERTLSSHQPRPLDSTKMEVKGQLISSPTFNAPAALFGEAAPQVKSERLRGLLDRQRTLQEALSLKLQELRKVCLQEAELTGQLPPECPLEPGERPQLVRRRPPTARAYPPPHPNQAHHSLCPAEELALEALEREVSVQQQIAAAARRLALAPDLSTEQRRRRRQVQADALRRLHELEEQLRDVRARLGLPVLPLPQPLPLSTGSVITTQGVCLGMRLAQLSQEDVVLHSESSSLSESGASHDNEEPHGCFSLAERPSPPKAWDQLRAVSGGSPERRTPWKPPPSDLYGDLKSRRNSVASPTSPTRSLPRSASSFEGRSVPATPVLTRGAGPQLCKPEGLHSRQWSGSQDSQMGFPRADPASDRASLFVARTRRSNSSEALLVDRAAGGGAGSPPAPLAPSASGPPVCKSSEVLYERPQPTPAFSSRTAGPPDPPRAARPSSAAPASRGAPRLPPVCGDFLLDYSLDRGLPRSGGGTGWGELPPAAEVPGPLSRRDGLLTMLPGPPPVYAADSNSPLLRTKDPHTRATRTKPCGLPPEAAEGPEVHPNPLLWMPPPTRIPSAGERSGHKNLALEGLRDWYIRNSGLAAGPQRRPVLPSVGPPHPPFLHARCYEVGQALYGAPSQAPLPHSRSFTAPPVSGRYYADFLYPPELSARLSDLTLEGEQSSSSDTQTPGTLV

SEQ ID NO: 18278 - protein, 63 aa, Homo sapiens
  Payload ID: 3648
  Gene Symbol: CCDC120
  Gene Name: coiled-coil domain containing 120
  ENSP ID: ENSP00000474713
MRREPRYQGQVGPDIHTDSERAGQADFVQPSATASRQHQDGSQSCPVRRGCPPGEVRASAGAA

SEQ ID NO: 18279 - protein, 630 aa, Homo sapiens; identical to SEQ ID NO: 18276
  Payload ID: 3648
  Gene Symbol: CCDC120
  Gene Name: coiled-coil domain containing 120
  Uniprot ID: Q96HB5
  ENSP ID: ENSP00000474761

SEQ ID NO: 18280 - protein, 630 aa, Homo sapiens; identical to SEQ ID NO: 18276
  Payload ID: 3648
  Gene Symbol: CCDC120
  Gene Name: coiled-coil domain containing 120
  Uniprot ID: Q96HB5
  ENSP ID: ENSP00000475676

SEQ ID NO: 18281 - protein, 278 aa, Homo sapiens
  Payload ID: 3649
  Gene Symbol: CCDC121
  Gene Name: coiled-coil domain containing 121
  Uniprot ID: Q6ZUS5
  ENSP ID: ENSP00000339087
MTDLNKHIKQAQTQRKQLLEESRELHREKLLVQAENRFFLEYLTNKTEEYTEQPEKVWNSYLQKSGEIERRRQESASRYAEQISVLKTALLQKENIQSSLKRKLQAMRDIAILKEKQEKEIQTLQEETKKVQAETASKTREVQAQLLQEKRLLEKQLSEPDRRLLGKRKRRELNMKAQALKLAAKRFIFEYSCGINRENQQFKKELLQLIEQAQKLTATQSHLENRKQQLQQEQWYLESLIQARQRLQGSHNQCLNRQDVPKTTPSLPQGTKSRINPK

SEQ ID NO: 18282 - protein, 440 aa, Homo sapiens
  Payload ID: 3649
  Gene Symbol: CCDC121
  Gene Name: coiled-coil domain containing 121
  Uniprot ID: Q6ZUS5
  ENSP ID: ENSP00000412150
MGSRGQGSHSKKTRSMPVILSPQRTGSGATGGPAARAYSVAEAVKQFRAGPAGTGAGCSLQGCWAAPRPFEHRTNKLRELSTLAHCSRELQTQVPDASAHSLAVTLSELHSCRDLQDECLDSRFAEGPRRLLPPYHSLINNFVKPEKLTKVETRLKEKIVAEMTDLNKHIKQAQTQRKQLLEESRELHREKLLVQAENRFFLEYLTNKTEEYTEQPEKVWNSYLQKSGEIERRRQESASRYAEQISVLKTALLQKENIQSSLKRKLQAMRDIAILKEKQEKEIQTLQEETKKVQAETASKTREVQAQLLQEKRLLEKQLSEPDRRLLGKRKRRELNMKAQALKLAAKRFIFEYSCGINRENQQFKKELLQLIEQAQKLTATQSHLENRKQQLQQEQWYLESLIQARQRLQGSHNQCLNRQDVPKTTPSLPQGTKSRINPK

SEQ ID NO: 18283 - protein, 144 aa, Homo sapiens
  Payload ID: 3649
  Gene Symbol: CCDC121
  Gene Name: coiled-coil domain containing 121
  ENSP ID: ENSP00000428530
MGSRGQGSHSKKTRSMPVILSPQRTGSGATGGPAARAYSVAEAVKQFRAGPAGTGAGCSLQGCWAAPRPFEHRTNKLRELSTLAHCSRELQTQVPDASAHSLAVTLSELHSCRDLQDECLDSRCKFAEGPRRLLPPYHSLINNF

SEQ ID NO: 18284 - protein, 273 aa, Homo sapiens
  Payload ID: 3650
  Gene Symbol: CCDC122
  Gene Name: coiled-coil domain containing 122
  Uniprot ID: Q5T0U0
  ENSP ID: ENSP00000407763
MSDNKERKSQGFPKEDNQDTSSLADAVEKVAKQQQSQASEIEKNKKVLFNLKNELHELEKEIAAISAETKETERQIYQQDSAIENTKLHCDSLETQIKSLHSENVKLKFDIETAQEDFEEHMIKYNAYYAKIKAHKNSLGEVESKWSFMTELHEKRDFVKKLKTMKEELMQDLQNPGGNRITQVQEDITNLKDKIITVKESIIEKTCFLEEEKKTHEKLRKEIEVQHKRYDAILKRLHCQVNKLQSNRRQWQWNIQQLEKTAAELRKCIGMQE

SEQ ID NO: 18285 - protein, 22 aa, Homo sapiens
  Payload ID: 3650
  Gene Symbol: CCDC122
  Gene Name: coiled-coil domain containing 122
  ENSP ID: ENSP00000480362
KLRKEIEVSLNYLDFNVLWDHF

SEQ ID NO: 18286 - protein, 223 aa, Homo sapiens
  Payload ID: 3651
  Gene Symbol: CCDC124
  Gene Name: coiled-coil domain containing 124
  Uniprot ID: Q96CT7
  ENSP ID: ENSP00000408730
MPKKFQGENTKSAAARARRAEAKAAADAKKQKELEDAYWKDDDKHVMRKEQRKEEKEKRRLDQLERKKETQRLLEEEDSKLKGGKAPRVATSSKVTRAQIEDTLRRDHQLREAPDTAEKAKSHLEVPLEENVNRRVLEEGSVEARTIEDAIAVLSVAEEAADRHPERRMRAAFTAFEEAQLPRLKQENPNMRLSQLKQLLKKEWLRSPDNPMNQRAVPFNAPK

SEQ ID NO: 18287 - protein, 223 aa, Homo sapiens; identical to SEQ ID NO: 18286
  Payload ID: 3651
  Gene Symbol: CCDC124
  Gene Name: coiled-coil domain containing 124
  Uniprot ID: Q96CT7
  ENSP ID: ENSP00000471455

SEQ ID NO: 18288 - protein, 136 aa, Homo sapiens
  Payload ID: 3651
  Gene Symbol: CCDC124
  Gene Name: coiled-coil domain containing 124
  ENSP ID: ENSP00000472520
MPKKFQGENTKSAAARARRAEAKAAADAKKQKELEDAYWKDDDKHVMRKEQRKEEKEKRRLDQLERKKETQRLLEEEDSKLKGGKAPRVATSSKVTRAQIEDTLRRDHQLREAPDTAEKAKSHLEVPLEENVNRRV

SEQ ID NO: 18289 - protein, 312 aa, Homo sapiens
  Payload ID: 3652
  Gene Symbol: CCDC125
  Gene Name: coiled-coil domain containing 125
  ENSP ID: ENSP00000372865
MSKVARSSSESDVQLWETEEDDMTEGDLGYGLGRKPGGIYEIEFSHRSRKRSDGKNFSPPPFPRKGEERNEASFQYSKHKSQQDTFPQVSRISNYRRQSSTDSNSELSNEELRQCLNETLEEVEMLKTELEASQRQLRGKEEALKILQSMAILGKATSHTQAVLQKTMEQNRSLEKEINALQWEIEFDHNRFKNIEESWIQKYDRLNCENAVLKENLKVKTEEIKMLKSDNAVLNQRYLEALAMLDIKQQKMAQENMCCDKSGFAEASGLEDFHHQGVRRPSGRDCWVCSLQKTVLRGWKTRTVLKRSLRCS

SEQ ID NO: 18290 - protein, 511 aa, Homo sapiens
  Payload ID: 3652
  Gene Symbol: CCDC125
  Gene Name: coiled-coil domain containing 125
  Uniprot ID: Q86Z20
  ENSP ID: ENSP00000379754
MSKVARSSSESDVQLWETEEDDMTEGDLGYGLGRKPGGIYEIEFSHRSRKRSDGKNFSPPPFPRKGEERNEASFQYSKHKSQQDTFPQVSRISNYRRQSSTVDSNSELSNEELRQCLNETLEEVEMLKTELEASQRQLRGKEEALKILQSMAILGKATSHTQAVLQKTMEQNRSLEKEINALQWEIEFDHNRFKNIEESWIQKYDRLNCENAVLKENLKVKTEEIKMLKSDNAVLNQRYLEALAMLDIKQQKMAQENMCCDKSGFAEASGLELAVLGACLCHGPGGNPCSCARMAASTRKLLLQLKQELEILQKSKEEAYVMADAFRIAFEQQLMRKNDQALQLTQMDKMHKKATKWMNWKHLKEDGFPSPRSKKTFGQRLLGMLPSENSSKRMEDQDSPQEVLKMLIDLLNDKEEALAHQRKVSYMLARALEDKDTASNENKEKNPIKENFPFNNPWRKTSEFSVLGDPIHSSVCILNSVGCICSIQHSQIDPNYRTLKRSHSLPSSIIF

SEQ ID NO: 18291 - protein, 511 aa, Homo sapiens; identical to SEQ ID NO: 18290
  Payload ID: 3652
  Gene Symbol: CCDC125
  Gene Name: coiled-coil domain containing 125
  Uniprot ID: Q86Z20
  ENSP ID: ENSP00000379756

SEQ ID NO: 18292 - protein, 386 aa, Homo sapiens
  Payload ID: 3652
  Gene Symbol: CCDC125
  Gene Name: coiled-coil domain containing 125
  Uniprot ID: Q86Z20
  ENSP ID: ENSP00000426795
MLKTELEASQRQLRGKEEALKILQSMAILGKATSHTQAVLQKTMEQNRSLEKEINALQWEIEFDHNRFKNIEESWIQKYDRLNCENAVLKENLKVKTEEIKMLKSDNAVLNQRYLEALAMLDIKQQKMAQENMCCDKSGFAEASGLELAVLGACLCHGPGGNPCSCARMAASTRKLLLQLKQELEILQKSKEEAYVMADAFRIAFEQQLMRKNDQALQLTQMDKMHKKATKWMNWKHLKEDGFPSPRSKKTFGQRLLGMLPSENSSKRMEDQDSPQEVLKMLIDLLNDKEEALAHQRKVSYMLARALEDKDTASNENKEKNPIKENFPFNNPWRKTSEFSVLGDPIHSSVCILNSVGCICSIQHSQIDPNYRTLKRSHSLPSSIIF

SEQ ID NO: 18293 - protein, 511 aa, Homo sapiens; identical to SEQ ID NO: 18290
  Payload ID: 3652
  Gene Symbol: CCDC125
  Gene Name: coiled-coil domain containing 125
  Uniprot ID: Q86Z20
  ENSP ID: ENSP00000479651

SEQ ID NO: 18294 - protein, 312 aa, Homo sapiens; identical to SEQ ID NO: 18289
  Payload ID: 3652
  Gene Symbol: CCDC125
  Gene Name: coiled-coil domain containing 125
  ENSP ID: ENSP00000481171

SEQ ID NO: 18295 - protein, 511 aa, Homo sapiens; identical to SEQ ID NO: 18290
  Payload ID: 3652
  Gene Symbol: CCDC125
  Gene Name: coiled-coil domain containing 125
  Uniprot ID: Q86Z20
  ENSP ID: ENSP00000481190

SEQ ID NO: 18296 - protein, 386 aa, Homo sapiens; identical to SEQ ID NO: 18292
  Payload ID: 3652
  Gene Symbol: CCDC125
  Gene Name: coiled-coil domain containing 125
  Uniprot ID: Q86Z20
  ENSP ID: ENSP00000484313

SEQ ID NO: 18297 - protein, 140 aa, Homo sapiens
  Payload ID: 3653
  Gene Symbol: CCDC126
  Gene Name: coiled-coil domain containing 126
  Uniprot ID: Q96EE4
  ENSP ID: ENSP00000304355
MFFTISRKNMSQKLSLLLLVFGLIWGLMLLHYTFQQPRHQSSVKLREQILDLSKRYVKALAEENKNTVDVENGASMAGYADLKRTIAVLLDDILQRLVKLENKVDYIVVNGSAANTTNGTSGNLVPVTTNKRTNVSGSIR

SEQ ID NO: 18298 - protein, 140 aa, Homo sapiens; identical to SEQ ID NO: 18297
  Payload ID: 3653
  Gene Symbol: CCDC126
  Gene Name: coiled-coil domain containing 126
  Uniprot ID: Q96EE4
  ENSP ID: ENSP00000386355

SEQ ID NO: 18299 - protein, 140 aa, Homo sapiens; identical to SEQ ID NO: 18297
  Payload ID: 3653
  Gene Symbol: CCDC126
  Gene Name: coiled-coil domain containing 126
  Uniprot ID: Q96EE4
  ENSP ID: ENSP00000386675

SEQ ID NO: 18300 - protein, 110 aa, Homo sapiens
  Payload ID: 3653
  Gene Symbol: CCDC126
  Gene Name: coiled-coil domain containing 126
  ENSP ID: ENSP00000406558
MFFTISRKNMSQKLSLLLLVFGLIWGLMLLHYTFQQPRHQSSVKLREQILDLSKRYVKALAEENKNTVDVENGASMAGYADLKRTIAVLLDDILQRLVKLENKVDYIVVN

SEQ ID NO: 18301 - protein, 260 aa, Homo sapiens
  Payload ID: 3654
  Gene Symbol: CCDC127
  Gene Name: coiled-coil domain containing 127
  Uniprot ID: Q96BQ5
  ENSP ID: ENSP00000296824
MNNLNDPPNWNIRPNSRADGGDGSRWNYALLVPMLGLAAFRWIWSRESQKEVEKEREAYRRRTAAFQQDLEAKYHAMISENRRAVAQLSLELEKEQNRTASYREALISQGRKLVEEKKLLEQERAQVMQEKRQVQPLRSAYLSCLQREENWQRRARLLLKEFEAVLTERQNIYCSLFLPRSKRLEIEKSLLVRASVDPVAADLEMAAGLTDIFQHDTYCGDVWNTNKRQNGRLMWLYLKYWELVVELKKFKRVEEAILEK

SEQ ID NO: 18302 - protein, 69 aa, Homo sapiens
  Payload ID: 3654
  Gene Symbol: CCDC127
  Gene Name: coiled-coil domain containing 127
  ENSP ID: ENSP00000411206
MNNLNDPPNWNIRPNSRADGGDGSRWNYALLVPMLGLAAFRWIWSRESQKEVEKEREAYRRRTAAFQQD

SEQ ID NO: 18303 - protein, 896 aa, Homo sapiens
  Payload ID: 3655
  Gene Symbol: CCDC129
  Gene Name: coiled-coil domain containing 129
  Uniprot ID: Q6ZRS4
  ENSP ID: ENSP00000313062
MMAQKSQGSDNLQEGQEKSKREILKCTKSAWAPLDEWLPPDPEEESQSLTIPMLEDSKQESIQQWLDSGFFVSANENFQQVIDRTVSLYEQGMVQMTVKDYMRSLHQFSETPILSRGTSFNSCYSTASVPQSIPEWLEFWEIDPVEILLDLGFGADEPDICMQIPARFLGCGSAARGINIRVFLEAQKQRMDIENPNLYGRFRQLEILDHVTNAFSSLLSDVSILPNRAEEKAGGESVQRTSVQSFEEETGNPLDMTSGTVGARVDRANSCQSDSSGFLEEPLEPLPLQMPSLPNSQSPAENGGRKPRDQSHSLVSSQDCQLESDGPDSKSRASMSFSSQEANALEQRASVSVMEEEFLLEAMEGPPELYIPDMACAKTTTRGECPRKDSHLWQLLPMPHAEYEVTRPTATSKYDHPLGFMVTHVTEMQDSFVRPEGAGKVQSHHNESQRSPGNDHTQDKFLHVDSEAPREEESSGFCPHTNHSLLVPESSSQCIPKHSEITPYATDLAQTSEKLIPHLHKLPGDPAQVKSRSGTLGQILPGTEAEMENLPLNTGSSRSVMTQMSSSLVSAAQRAVALGTGPRGTSLECTVCDPVTATETRLGTKARQLNDASIQTSALSNKTLTHGPQPLTKSVSLDSGFSSICPMGTCHAIPAHCCICCHHHPHCHGERQSPGPEPSVCRHCLCSLTGHQEAQFMTTLKALQDTTVRELCSCTVHEMEAMKTICQSFREYLEEIEQHLMGQQALFSRDMSEEEREEAEQLQTLREALRQQVAELEFQLGDRAQQIREGILLQLEVLTAEPPEHYSNLHQYNWIEESNGQTSCSKIHPGMAPRTVFPPDDGQEAPCSGGTQLAAFTPPTLENSTRMSPSSSAWAKLGPTPLSNCPVGEKDADVFL

SEQ ID NO: 18304 - protein, 1044 aa, Homo sapiens
  Payload ID: 3655
  Gene Symbol: CCDC129
  Gene Name: coiled-coil domain containing 129
  Uniprot ID: Q6ZRS4
  ENSP ID: ENSP00000384416
MMAQKSQGSDNLQEGQEKSKREILKCTKSAWAPLDEWLPPDPEEESQSLTIPMLEDSKQESIQQWLDSGFFVSANENFQQVIDRTVSLYEQGMVQMTVKDYMRSLHQFSETPILSRGTSFNSCYSTASVPQSIPEWLEFWEIDPVEILLDLGFGADEPDICMQIPARFLGCGSAARGINIRVFLEAQKQRMDIENPNLYGRFRQLEILDHVTNAFSSLLSDVSILPNRAEEKAGGESVQRTSVSAAKEHRRRMGKLLRRASKQNIRRDCNPEVSESFKVKDEVFVPFTKPWDCGAELAATSINHKQNHLSLSVEHQSLQACDDLLPYPPHGLLSKQWPCSSMPAKQAPPSCVSEGSVKGRTQKENLFQTNKLKSLSHLAGKGPDSFEMEEVQSFEEETGNPLDMTSGTVGARVDRANSCQSDSSGFLEEPLEPLPLQMPSLPNSQSPAENGGRKPRDQSHSLVSSQDCQLESDGPDSKSRASMSFSSQEANALEQRASVSVMEEEFLLEAMEGPPELYIPDMACAKTTTRGECPRKDSHLWQLLPMPHAEYEVTRPTATSKYDHPLGFMVTHVTEMQDSFVRPEGAGKVQSHHNESQRSPGNDHTQDKFLHVDSEAPREEESSGFCPHTNHSLLVPESSSQCIPKHSEITPYATDLAQTSEKLIPHLHKLPGDPAQVKSRSGTLGQILPGTEAEMENLPLNTGSSRSVMTQMSSSLVSAAQRAVALGTGPRGTSLECTVCDPVTATETRLGTKARQLNDASIQTSALSNKTLTHGPQPLTKSVSLDSGFSSICPMGTCHAIPAHCCICCHHHPHCHGERQSPGPEPSVCRHCLCSLTGHQEAQFMTTLKALQDTTVRELCSCTVHEMEAMKTICQSFREYLEEIEQHLMGQQALFSRDMSEEEREEAEQLQTLREALRQQVAELEFQLGDRAQQIREGILLQLEVLTAEPPEHYSNLHQYNWIEESNGQTSCSKIHPGMAPRTVFPPDDGQEAPCSGGTQLAAFTPPTLENSTRMSPSSSAWAKLGPTPLSNCPVGEKDADVFL

SEQ ID NO: 18305 - protein, 952 aa, Homo sapiens
  Payload ID: 3655
  Gene Symbol: CCDC129
  Gene Name: coiled-coil domain containing 129
  Uniprot ID: Q6ZRS4
  ENSP ID: ENSP00000387214
MVQMTVKDYMRSLHQFSETPILSRGTSFNSCYSTASVPQSIPEWLEFWEIDPVEILLDLGFGADEPDICMQIPARFLGCGSAARGINIRVFLEAQKQRMDIENPNLYGRFRQLEILDHVTNAFSSLLSDVSILPNRAEEKAGGESVQRTSVSAAKEHRRRMGKLLRRASKQNIRRDCNPEVSESFKVKDEVFVPFTKPWDCGAELAATSINHKQNHLSLSVEHQSLQACDDLLPYPPHGLLSKQWPCSSMPAKQAPPSCVSEGSVKGRTQKENLFQTNKLKSLSHLAGKGPDSFEMEEVQSFEEETGNPLDMTSGTVGARVDRANSCQSDSSGFLEEPLEPLPLQMPSLPNSQSPAENGGRKPRDQSHSLVSSQDCQLESDGPDSKSRASMSFSSQEANALEQRASVSVMEEEFLLEAMEGPPELYIPDMACAKTTTRGECPRKDSHLWQLLPMPHAEYEVTRPTATSKYDHPLGFMVTHVTEMQDSFVRPEGAGKVQSHHNESQRSPGNDHTQDKFLHVDSEAPREEESSGFCPHTNHSLLVPESSSQCIPKHSEITPYATDLAQTSEKLIPHLHKLPGDPAQVKSRSGTLGQILPGTEAEMENLPLNTGSSRSVMTQMSSSLVSAAQRAVALGTGPRGTSLECTVCDPVTATETRLGTKARQLNDASIQTSALSNKTLTHGPQPLTKSVSLDSGFSSICPMGTCHAIPAHCCICCHHHPHCHGERQSPGPEPSVCRHCLCSLTGHQEAQFMTTLKALQDTTVRELCSCTVHEMEAMKTICQSFREYLEEIEQHLMGQQALFSRDMSEEEREEAEQLQTLREALRQQVAELEFQLGDRAQQIREGILLQLEVLTAEPPEHYSNLHQYNWIEESNGQTSCSKIHPGMAPRTVFPPDDGQEAPCSGGTQLAAFTPPTLENSTRMSPSSSAWAKLGPTPLSNCPVGEKDADVFL

SEQ ID NO: 18306 - protein, 142 aa, Homo sapiens
  Payload ID: 3655
  Gene Symbol: CCDC129
  Gene Name: coiled-coil domain containing 129
  ENSP ID: ENSP00000387220
MMAQKSQGSDNLQEGQEKSKREILKCTKSAWAPLDEWLPPDPEEESQSLTIPMLEDSKQESIQQWLDSGFFVSANENFQQVIDRTVSLYEQGMVQMTVKDYMRSLHQFSETPILSRGTSFNSCYSTASVPQSIPEWLEFWEI

SEQ ID NO: 18307 - protein, 168 aa, Homo sapiens
  Payload ID: 3655
  Gene Symbol: CCDC129
  Gene Name: coiled-coil domain containing 129
  ENSP ID: ENSP00000390544
MMAQKSQGSDNLQEGQEKSKREILKCTKSAWAPLDEWLPPDPEEESQSLTIPMLEDSKQESIQQWLDSGFFVSANENFQQVIDRTVSLYEQGMVQMTVKDYMRSLHQFSETPILSRGTSFNSCYSTASVPQSIPEWLEFWEIDPVEILLDLGFGADEPDICMQIPARF

SEQ ID NO: 18308 - protein, 1062 aa, Homo sapiens
  Payload ID: 3655
  Gene Symbol: CCDC129
  Gene Name: coiled-coil domain containing 129
  Uniprot ID: Q6ZRS4
  ENSP ID: ENSP00000395835
MPTTASCKTISLLKLLYSVSLQNYSPMMAQKSQGSDNLQEGQEKSKREILKCTKSAWAPLDEWLPPDPEEESQSLTIPMLEDSKQESIQQWLDSGFFVSANENFQQVIDRTVSLYEQGMVQMTVKDYMRSLHQFSETPILSRGTSFNSCYSTASVPQSIPEWLEFWEIDPVEILLDLGFGADEPDICMQIPARFLGCGSAARGINIRVFLEAQKQRMDIENPNLYGRFRQLEILDHVTNAFSSLLSDVSILPNRAEEKAGGESVQRTSVSAAKEHRRRMGKLLRRASKQNIRRDCNPEVSESFKVKDEVFVPFTKPWDCGAELAATSINHKQNHLSLSVEHQSLQACDDLLPYPPHGLLSKQWPCSSMPAKQAPPSCVSEGSVKGRTQKENLFQTNKLKSLSHLAGKGPDSFEMEEVQSFEEETGNPLDMTSGTVGARVDRANSCQSDSSGFLEEPLEPLPLQMPSLPNSQSPAENGGRKPRDQSHSLVSSQDCQLESDGPDSKSRASMSFSSQEANALEQRASVSVMEEEFLLEAMEGPPELYIPDMACAKTTTRGECPRKDSHLWQLLPMPHAEYEVTRPTATSKYDHPLGFMVTHVTEMQDSFVRPEGAGKVQSHHNESQRSPGNDHTQDKFLHVDSEAPREEESSGFCPHTNHSLLVPESSSQCIPKHSEITPYATDLAQTSEKLIPHLHKLPGDPAQVKSRSGTLGQILPGTEAEMENLPLNTGSSRSVMTQMSSSLVSAAQRAVALGTGPRGTSLECTVCDPVTATETRLGTKARQLNDASIQTSALSNKTLTHGPQPLTKSVSLDSGFSSICPMGTCHAIPAHCCICCHHHPHCHGERQSPGPEPSVCRHCLCSLTGHQEAQFMTTLKALQDTTVRELCSCTVHEMEAMKTICQSFREYLEEIEQHLMGQQALFSRDMSEEEREEAEQLQTLREALRQQVAELEFQLGDRAQQIREGILLQLEVLTAEPPEHYSNLHQYNWIEESNGQTSCSKIHPGMAPRTVFPPDDGQEAPCSGELLSAELDPFFFSSKANNSAKDEKIKSKDFLKTQDSGLL

SEQ ID NO: 18309 - protein, 163 aa, Homo sapiens
  Payload ID: 3655
  Gene Symbol: CCDC129
  Gene Name: coiled-coil domain containing 129
  ENSP ID: ENSP00000413233
MMAQKSQGSDNLQEGQEKSKREILKCTKSAWAPLDEWLPPDPEEESQSLTIPMLEDSKQESIQQWLDSGFFVSANENFQQVIDRTVSLYEQGMVQMTVKDYMRSLHQFSETPILSRGTSFNSCYSTASVPQSIPEWLEFWEIDPVEILLDLGFGADEPDICMQ

SEQ ID NO: 18310 - protein, 1054 aa, Homo sapiens
  Payload ID: 3655
  Gene Symbol: CCDC129
  Gene Name: coiled-coil domain containing 129
  ENSP ID: ENSP00000478518
MSVSLQNYSPMMAQKSQGSDNLQEGQEKSKREILKCTKSAWAPLDEWLPPDPEEESQSLTIPMLEDSKQESIQQWLDSGFFVSANENFQQVIDRTVSLYEQGMVQMTVKDYMRSLHQFSETPILSRGTSFNSCYSTASVPQSIPEWLEFWEIDPVEILLDLGFGADEPDICMQIPARFLGCGSAARGINIRVFLEAQKQRMDIENPNLYGRFRQLEILDHVTNAFSSLLSDVSILPNRAEEKAGGESVQRTSVSAAKEHRRRMGKLLRRASKQNIRRDCNPEVSESFKVKDEVFVPFTKPWDCGAELAATSINHKQNHLSLSVEHQSLQACDDLLPYPPHGLLSKQWPCSSMPAKQAPPSCVSEGSVKGRTQKENLFQTNKLKSLSHLAGKGPDSFEMEEVQSFEEETGNPLDMTSGTVGARVDRANSCQSDSSGFLEEPLEPLPLQMPSLPNSQSPAENGGRKPRDQSHSLVSSQDCQLESDGPDSKSRASMSFSSQEANALEQRASVSVMEEEFLLEAMEGPPELYIPDMACAKTTTRGECPRKDSHLWQLLPMPHAEYEVTRPTATSKYDHPLGFMVTHVTEMQDSFVRPEGAGKVQSHHNESQRSPGNDHTQDKFLHVDSEAPREEESSGFCPHTNHSLLVPESSSQCIPKHSEITPYATDLAQTSEKLIPHLHKLPGDPAQVKSRSGTLGQILPGTEAEMENLPLNTGSSRSVMTQMSSSLVSAAQRAVALGTGPRGTSLECTVCDPVTATETRLGTKARQLNDASIQTSALSNKTLTHGPQPLTKSVSLDSGFSSICPMGTCHAIPAHCCICCHHHPHCHGERQSPGPEPSVCRHCLCSLTGHQEAQFMTTLKALQDTTVRELCSCTVHEMEAMKTICQSFREYLEEIEQHLMGQQALFSRDMSEEEREEAEQLQTLREALRQQVAELEFQLGDRAQQIREGILLQLEVLTAEPPEHYSNLHQYNWIEESNGQTSCSKIHPGMAPRTVFPPDDGQEAPCSGGTQLAAFTPPTLENSTRMSPSSSAWAKLGPTPLSNCPVGEKDADVFL

SEQ ID NO: 18311 - protein, 715 aa, Homo sapiens
  Payload ID: 3656
  Gene Symbol: CCDC13
  Gene Name: coiled-coil domain containing 13
  Uniprot ID: Q8IYE1
  ENSP ID: ENSP00000309836
MAADESSQNTLRLQFKAMQEMQHKRLQKQMEKKREKELSLKSRADDQEEPLEVSDGLSLLHAGEPNSKNSFEKRVLEDEIEHLRNELRETVDENGRLYKLLKERDFEIKHLKKKIEEDRFAFTGTAGVAGDVVATKIVELSKKNRLLMAESEGAKTRVKQLTNRIQELERELQTALTRLSAKGATDAGAKPPRAQMGDRALLETPEVKALQDRLVATNLKMSDLRNQIQSVKQELRMAQKVLAREVGEDINVQQLLSSPGTWRGRAQQILVLQSKVQELEKQLGQARSQSAGTASDELSVYPDPRKLSAQEKNLLRIRSLEREKQEGLEKLASERDVLQRELEELKKKFEGMRSRNKLLSSEMKTLKSQMGTLVEKGRHDDELIDALMDQLKQLQEILGSLSLQEEKTRVSQHHLDQQLNSEAQRSNSLVAQLQAMVAEREAKVRQLEMEIGQLNVHYLRNKGVGEGSSGREVSPAYTQFLEDPGLTKSPASAGDHVGRLGSSRSVTSLGHTLVESALTRPSLPSPHRTSPRFSDSPEQKGWQAQVSEIKALWQAAEVERDRLTEFVTVLQKRVEESNSKLLESERKLQEERHRTVVLEQHLEKIRLEPGKASASQRAAPRTKTGLPTSNNRHNPTGSEKKDPSFAQLSDVPVESQMEELTTRLAIQVEENEMLKAALGSALRGKEEDFRMYHEILGQVKSVFLQALRQQKTGKQ

SEQ ID NO: 18312 - protein, 396 aa, Homo sapiens
  Payload ID: 3657
  Gene Symbol: CCDC130
  Gene Name: coiled-coil domain containing 130
  Uniprot ID: P13994
  ENSP ID: ENSP00000221554
MGERKGVNKYYPPDFNPEKHGSLNRYHNSHPLRERARKLSQGILIIRFEMPYNIWCDGCKNHIGMGVRYNAEKKKVGNYYTTPIYRFRMKCHLCVNYIEMQTDPANCDYVIVSGAQRKEERWDMADNEQVLTTEHEKKQKLETDAMFRLEHGEADRSTLKKALPTLSHIQEAQSAWKDDFALNSMLRRRFREKKKAIQEEEERDQALQAKASLTIPLVPETEDDRKLAALLKFHTLDSYEDKQKLKRTEIISRSWFPSAPGSASSSKVSGVLKKLAQSRRTALATSPITVGDLGIVRRRSRDVPESPQHAADTPKSGEPRVPEEAAQDRPMSPGDCPPETTETPKCSSPRGQEGSRQDKPLSPAGSSQEAADTPDTRHPCSLGSSLVADYSDSESE

SEQ ID NO: 18313 - protein, 190 aa, Homo sapiens
  Payload ID: 3657
  Gene Symbol: CCDC130
  Gene Name: coiled-coil domain containing 130
  ENSP ID: ENSP00000465392
  MOD_RES (1)..(1): Any amino acid
XNRYHNSHPLRERARKLSQGILIIRFEMPYNIWCDGCKNHIGMGVRYNAEKKKVGNYYTTPIYRFRMKCHLCVNYIEMQTDPANCDYVIVSGAQRKEERWDMADNEQVLTTEAGDGRHVPAGAWRGRPQHTQEGAAHTEPHPGGPERLEGRLRPQQHAAEKVPGEGGSSPGSERMHGGPRPGSSPPPTTS

SEQ ID NO: 18314 - protein, 396 aa, Homo sapiens; identical to SEQ ID NO: 18312
  Payload ID: 3657
  Gene Symbol: CCDC130
  Gene Name: coiled-coil domain containing 130
  Uniprot ID: P13994
  ENSP ID: ENSP00000465776

SEQ ID NO: 18315 - protein, 237 aa, Homo sapiens
  Payload ID: 3657
  Gene Symbol: CCDC130
  Gene Name: coiled-coil domain containing 130
  ENSP ID: ENSP00000466095
MPYNIWCDGCKNHIGMGVRYNAEKKKVGNYYTTPIYRFRMKCHLCVNYIEMQTDPANCDYVIVSGAQRKEERWDMADNEQVLTTEHEKKQKLETDAMFRLEHGEADRSTLKKALPTLSHIQEAQSAWKDDFALNSMLRRRFREKKKAIQEEEERDQALQAKASLTIPLVPETEDDRKLAALLKFHTLDSYEDKQKLKRTEIISRSWFPSAPGSASSSKVSGVLKKLAQSRRTALATS

SEQ ID NO: 18316 - protein, 60 aa, Homo sapiens
  Payload ID: 3657
  Gene Symbol: CCDC130
  Gene Name: coiled-coil domain containing 130
  ENSP ID: ENSP00000467202
MQTDPANCDYVIVSGAQRKEERWDMADNEQVLTTGERHPLTCLGALALSLRWGPQSPAEL

SEQ ID NO: 18317 - protein, 102 aa, Homo sapiens
  Payload ID: 3657
  Gene Symbol: CCDC130
  Gene Name: coiled-coil domain containing 130
  ENSP ID: ENSP00000468544
KQKLETDAMFRLEHGEADRSTLKKALPTLSHIQEAQSAWKDDFALNSMLRRRFREKKKAIQEEEERDQALQAKASLTIPLVPETEDDRKLAALLKFHTLDCA

SEQ ID NO: 18318 - protein, 229 aa, Homo sapiens
  Payload ID: 3658
  Gene Symbol: CCDC134
  Gene Name: coiled-coil domain containing 134
  Uniprot ID: Q9H6E4
  ENSP ID: ENSP00000255784
MDLLQFLAFLFVLLLSGMGATGTLRTSLDPSLEIYKKMFEVKRREQLLALKNLAQLNDIHQQYKILDVMLKGLFKVLEDSRTVLTAADVLPDGPFPQDEKLKDAFSHVVENTAFFGDVVLRFPRIVHYYFDHNSNWNLLIRWGISFCNQTGVFNQGPHSPILSLMAQELGISEKDSNFQNPFKIDRTEFIPSTDPFQKALREEEKRRKKEEKRKEIRKGPRISRSQSEL

SEQ ID NO: 18319 - protein, 116 aa, Homo sapiens
  Payload ID: 3658
  Gene Symbol: CCDC134
  Gene Name: coiled-coil domain containing 134
  ENSP ID: ENSP00000385803
MDLLQFLAFLFVLLLSGMGATGTLRTSLDPSLEIYKKMFEVKRREQLLALKNLAQLNDIHQQYKILDVMLKGLFKFIPSTDPFQKALREEEKRRKKEEKRKEIRKGPRISRSQSEL

SEQ ID NO: 18320 - protein, 1154 aa, Homo sapiens
  Payload ID: 3659
  Gene Symbol: CCDC136
  Gene Name: coiled-coil domain containing 136
  Uniprot ID: Q96JN2
  ENSP ID: ENSP00000297788
MQAMEGEVLLPALYEEEEEEEEEEEEVEEEEEQVQKGGSVGSLSVNKHRGLSLTETELEELRAQVLQLVAELEETRELAGQHEDDSLELQGLLEDERLASAQQAEVFTKQIQQLQGELRSLREEISLLEHEKESELKEIEQELHLAQAEIQSLRQAAEDSATEHESDIASLQEDLCRMQNELEDMERIRGDYEMEIASLRAEMEMKSSEPSGSLGLSDYSGLQEELQELRERYHFLNEEYRALQESNSSLTGQLADLESERTQRATERWLQSQTLSMTSAESQTSEMDFLEPDPEMQLLRQQLRDAEEQMHGMKNKCQELCCELEELQHHRQVSEEEQRRLQRELKCAQNEVLRFQTSHSVTQNEELKSRLCTLQKKYDTSQDEQNELLKMQLQLQTELRQLKVMKSTLVENQSEKELLCRLQKLHLQHQNVTCEKEKLLERQQQLQEELQCHEAELQHLRDTVASFKESNEKDTETHAQLQEMKQLYQASKDELERQKHMYDQLEQDLLLCQLELKELKASHPIPEDKGKCANKCDTLLSRLTELQEKYKASQKEMGQLQMEQCELLEDQRRMQEEQGQLQEELHRLTLPLPKSGLLLKSQELLTKLEDLCELQLLYQGMQEEQKKLIQNQDCVLKEQLEIHEELRRFKESHFQEVLENPDDSKLAKSSKCNRNKQSKLLMEQMQALQVMYDAGQAKQELLQQEQGRLLEERKRLQADLQLCLEEMQLLQVQSPSIKMSLESYGKSYGSMVPSNENCRKTYDTTVDDNESYYKSYTSTQTSSKSFLKSYDSSTSASEAYGKSYCTTSNSSITYKKSYGSTSSSDTCQKSFVSSCTDEEPAEPEDMERFEEMVVKVLIKLQAVQAMYQISQEEHSQLQEQMEKLLAKQKDLKEELDACEREFKECMECLEKPMAPQNDKNEIKELQTKLRELQLQYQASMDEQGRLLVVQEQLEGQLQCCQEELRQLREKRPSVVKEARGKNANKNMNKNANGVKMKKVTKPCSDTSESDLETRKSLEVVLYYKASQRKLDGLAKEEEKKEEMEEEKKQVKEEAKEQCGDELVAEPADPEEAKSTEDQEENEEDKEEEEKEEDSEEEEDDADSSLESPEENNPLRLSESKKSSPTPNPPIFSLPLVGLVVISALLWCWWAETSS

SEQ ID NO: 18321 - protein, 434 aa, Homo sapiens
  Payload ID: 3659
  Gene Symbol: CCDC136
  Gene Name: coiled-coil domain containing 136
  Uniprot ID: Q96JN2
  ENSP ID: ENSP00000367956
MEAGAGAGAGAAGWSCPGPGPTVTTLGSYEASEGCERKKGQRWGSLERRGMQAMEGEVLLPALYEEEEEEEEEEEEVEEEEEQVQKGGSVGSLSVNKHRGLSLTETELEELRAQVLQLVAELEETRELAGQHEDDSLELQGLLEDERLASAQQAEVFTKQIQQLQGELRSLREEISLLEHEKESELKEIEQELHLAQAEIQSLRQAAEDSATEHESDIASLQEDLCRMQNELEDMERIRGDYEMEIASLRAEMEMKSSEPSEELQELRERYHFLNEEYRALQESNSSLTGQLADLESERTQRATERWLQSQTLSMTSAESQTSEMDFLEPDPEMQLLRQQLRDAEEQMHGMKNKCQELCCELEELQHHRQVSEEEQRRLQRELKCAQNEVLRFQTSHSVTQSSPTPNPPIFSLPLVGLVVISALLWCWWAETSS

SEQ ID NO: 18322 - protein, 5 aa, Homo sapiens
  Payload ID: 3659
  Gene Symbol: CCDC136
  Gene Name: coiled-coil domain containing 136
  ENSP ID: ENSP00000417209
MQAME

SEQ ID NO: 18323 - protein, 102 aa, Homo sapiens
  Payload ID: 3659
  Gene Symbol: CCDC136
  Gene Name: coiled-coil domain containing 136
  ENSP ID: ENSP00000417708
MQAMEGEVLLPALYEEEEEEEEEEEEVEEEEEQVQKGGSVGSLSVNKHRGLSLTETELEELRAQVLQLVAELEETRELAGQHEDDSLELQGLLEDERLASAQ

SEQ ID NO: 18324 - protein, 1034 aa, Homo sapiens
  Payload ID: 3659
  Gene Symbol: CCDC136
  Gene Name: coiled-coil domain containing 136
  ENSP ID: ENSP00000417931
  MOD_RES (1)..(1): Any amino acid
XISLLEHEKESELKEIEQELHLAQAEIQSLRQAAEDSATEHESDIASLQEDLCRMQNELEDMERIRGDYEMEIASLRAEMEMKSSEPSGSLGLSDYSGLQEELQELRERYHFLNEEYRALQESNSSLTGQLADLESERTQRATERWLQSQTLSMTSAESQTSEMDFLEPDPEMQLLRQQLRDAEEQMHGMKNKCQELCCELEELQHHRQVSEEEQRRLQRELKCAQNEVLRFQTSHSVTQNEELKSRLCTLQKKYDTSQDEQNELLKMQLQLQTELRQLKVMKSTLVENQSEKELLCRLQKLHLQHQNVTCEKEKLLERQQQLQEELQCHEAELQHLRDTVASFKESNEKDTETHAQLQEMKQLYQASKDELERQKHMYDQLEQDLLLCQLELKELKASHPIPEDKGKCANKCDTLLSRLTELQEKYKASQKEMGQLQMEQCELLEDQRRMQEEQGQLQEELHRLTLPLPKSGLLLKSQELLTKLEDLCELQLLYQGMQEEQKKLIQNQDCVLKEQLEIHEELRRFKESHFQEVLENPDDSKLAKSSKCNRNKQSKLLMEQMQALQVMYDAGQAKQELLQQEQGRLLEERKRLQADLQLCLEEMQLLQVQSPSIKMSLESYGKSYGSMVPSNENCRKTYDTTVDDNESYYKSYTSTQTSSKSFLKSYDSSTSASEAYGKSYCTTSNSSITYKKSYGSTSSSDTCQKSFVSSCTDEEPAEPEDMERFEEMVVKVLIKLQAVQAMYQISQEEHSQLQEQMEKLLAKQKDLKEELDACEREFKECMECLEKPMAPQNDKNEIKELQTKLRELQLQYQASMDEQGRLLVVQEQLEGQLQCCQEELRQLREKRPSVVKEARGKNANKNMNKNANGVKMKKVTKPCSDTSESDLETRKSLEVVLYYKASQRKLDGLAKEEEKKEEMEEEKKQVKEEAKEQCGDELVAEPADPEEAKSTEDQEENEEDKEEEEKEEDSEEEEDDADSSLESPEENNPLRLSESKKNMFGLWKPMVFLAIAAVALYVLPNMRQQESEFCLME

SEQ ID NO: 18325 - protein, 548 aa, Homo sapiens
  Payload ID: 3659
  Gene Symbol: CCDC136
  Gene Name: coiled-coil domain containing 136
  ENSP ID: ENSP00000417991
VENQSEKELLCRLQKLHLQHQNVTCEKEKLLERQQQLQEELQCHEAELQHLRDTVASFKESNEKDTETHAQLQEMKQLYQASKDELERQKHMYDQLEQDLLLCQLELKELKASHPIPEDKGKCANKCDTLLSRLTELQEKYKASQKEMGQLQMEQCELLEDQRRMQEEQGQLQEELHRLTLPLPKSGLLLKSQELLTKLEDLCELQLLYQGMQEEQKKLIQNQDCVLKEQLEIHEELRRFKESHFQEVLENPDDSKLAKSSKCNRNKQSKLLMEQMQALQVMYDAGQAKQELLQQEQGRLLEERKRLQADLQLCLEEMQLLQVQSPSIKMSLESYGKSYGSMVPSNENCRKTYDTTVDDNESYYKSYTSTQTSSKSFLKSYDSSTSASEAYGKSYCTTSNSSITYKKSYGSTSSSDTCQKSFVSSCTDEEPAEPEDMERFEEMVVKVLIKLQAVQAMYQISQEEHSQLQEQMEKLLAKQKDLKEELDACEREFKECMECLEKPMAPQNDKNENMFGLWKPMVFLAIAAVALYVLPNMRQQESEFCLME

SEQ ID NO: 18326 - protein, 63 aa, Homo sapiens
  Payload ID: 3659
  Gene Symbol: CCDC136
  Gene Name: coiled-coil domain containing 136
  ENSP ID: ENSP00000418042
MQAMEGEVLLPALYEEEEEEEEEEEEVEEEEEQVQKGGSVGSLSVNKHRGLSLTETELEELRA

SEQ ID NO: 18327 - protein, 137 aa, Homo sapiens
  Payload ID: 3659
  Gene Symbol: CCDC136
  Gene Name: coiled-coil domain containing 136
  ENSP ID: ENSP00000418838
MQAMEGEVLLPALYEEEEEEEEEEEEVEEEEEQVQKGGSVGSLSVNKHRGLSLTETELEELRAQVLQLVAELEETRELAGQHEDDSLELQGLLEDERLASAQQAEVFTKQIQQLQGELRSLREEISLLEHEKESELK

SEQ ID NO: 18328 - protein, 446 aa, Homo sapiens
  Payload ID: 3659
  Gene Symbol: CCDC136
  Gene Name: coiled-coil domain containing 136
  ENSP ID: ENSP00000419515
MEAGAGAGAGAAGWSCPGPGPTVTTLGSYEASEGCERKKGQRWGSLERRGMQAMEGEVLLPALYEEEEEEEEEEEEVEEEEEQVQKGGSVGSLSVNKHRGLSLTETELEELRAQVLQLVAELEETRELAGQHEDDSLELQGLLEDERLASAQQAEVFTKQIQQLQGELRSLREEISLLEHEKESELKEIEQELHLAQAEIQSLRQAAEDSATEHESDIASLQEDLCRMQNELEDMERIRGDYEMEIASLRAEMEMKSSEPSGSLGLSDYSGLQEELQELRERYHFLNEEYRALQESNSSLTGQLADLESERTQRATERWLQSQTLSMTSAESQTSEMDFLEPDPEMQLLRQQLRDAEEQMHGMKNKCQELCCELEELQHHRQVSEEEQRRLQRELKCAQNEVLRFQTSHSVTQSSPTPNPPIFSLPLVGLVVISALLWCWWAETSS

SEQ ID NO: 18329 - protein, 515 aa, Homo sapiens
  Payload ID: 3659
  Gene Symbol: CCDC136
  Gene Name: coiled-coil domain containing 136
  ENSP ID: ENSP00000420509
MQAMEGEVLLPALYEEEEEEEEEEEEVEEEEEQVQKGGSVGSLSVNKHRGLSLTETELEELRAQVLQLVAELEETRELAGQHEDDSLELQGLLEDERLASAQQAEVFTKQIQQLQGELRSLREEISLLEHEKESELKEIEQELHLAQAEIQSLRQAAEDSATEHESDIASLQEDLCRMQNELEDMERIRGDYEMEIASLRAEMEMKSSEPSGSLGLSDYSGLQEELQELRERYHFLNEEYRALQESNSSLTGQLADLESERTQRATERWLQSQTLSMTSAESQTSEMDFLEPDPEMQLLRQQLRDAEEQMHGMKNKCQELCCELEELQHHRQVSEEEQRRLQRELKCAQNEVLRFQTSHSVTQELLCRLQKLHLQHQNVTCEKEKLLERQQQLQEELQCHEAELQHLRDTVASFKESNEKDTETHAQLQEMKQLYQASKDELERQKHMYDQLEQDLLLCQLELKELKASHPIPEDKGKCANKSSPTPNPPIFSLPLVGLVVISALLWCWWAETSS

SEQ ID NO: 18330 - protein, 289 aa, Homo sapiens
  Payload ID: 3660
  Gene Symbol: CCDC137
  Gene Name: coiled-coil domain containing 137
  Uniprot ID: Q6PK04
  ENSP ID: ENSP00000329360
MAGAGRGAAVSRVQAGPGSPRRARGRQQVQPLGKQRPAPWPGLRSKEKKKVNCKPKNQDEQEIPFRLREIMRSRQEMKNPISNKKRKKAAQVTFRKTLEKEAKGEEPDIAVPKFKQRKGESDGAYIHRMQQEAQHVLFLSKNQAIRQPEVQAAPKEKSEQKKAKKAFQKRRLDKVRRKKEEKAADRLEQELLRDTVKFGEVVLQPPELTARPQRSVSKDQPGRRSQMLRMLLSPGGVSQPLTASLARQRIVEEERERAVQAYRALKQRQQQLHGERPHLTSRKKPEPQL

SEQ ID NO: 18331 - protein, 292 aa, Homo sapiens
  Payload ID: 3660
  Gene Symbol: CCDC137
  Gene Name: coiled-coil domain containing 137
  ENSP ID: ENSP00000458350
MAGAGRGAAVSRVQAGPGSPRRARGRQQVQPLGKQRPAPWPGLRSKEKKKVNCKPKNQDEQEIPFRLREIMRSRQEMKNPISNKKRKKAAVLQWTSVTAQVTFRKTLEKEAKGEEPDIAVPKFKQRKGESDGAYIHRMQQEAQHVLFLSKNQAIRQPEVQAAPKEKSEQKKAKKAFQKRRLDKVRRKKEEKAADRLEQELLRDTVKFGEVVLQPPELTARPQRSVSKDQPGRRSQMLRMLLSPGGVSQPLTASLARQRIVEEERERAVQAYRALKQRQQQLHGERPHLTSRK

SEQ ID NO: 18332 - protein, 289 aa, Homo sapiens; identical to SEQ ID NO: 18330
  Payload ID: 3660
  Gene Symbol: CCDC137
  Gene Name: coiled-coil domain containing 137
  Uniprot ID: Q6PK04
  ENSP ID: ENSP00000458884

SEQ ID NO: 18333 - protein, 61 aa, Homo sapiens
  Payload ID: 3660
  Gene Symbol: CCDC137
  Gene Name: coiled-coil domain containing 137
  ENSP ID: ENSP00000460261
DEQEIPFRLREIMRSRQEMKNPISNKKRKKAGDLQKDIGEGSKGRGARHRSPQVQTEEGGV

SEQ ID NO: 18334 - protein, 44 aa, Homo sapiens
  Payload ID: 3660
  Gene Symbol: CCDC137
  Gene Name: coiled-coil domain containing 137
  ENSP ID: ENSP00000461207
  MOD_RES (1)..(1): Any amino acid
XGAGRGAAVSRVQAGPGSPRRARGRQQVQPLGKQRPAPWPGLRR

SEQ ID NO: 18335 - protein, 665 aa, Homo sapiens
  Payload ID: 3661
  Gene Symbol: CCDC138
  Gene Name: coiled-coil domain containing 138
  Uniprot ID: Q96M89
  ENSP ID: ENSP00000295124
MEPRVVKPPGQDLVVESLKSRYGLGGSCPDEYDFSNFYQSKYKRRTLTSPGDLDIYSGDKVGSSLKYSDESKHCRTPLGSLFKHVNVNCLDDELDSFHDLKKQETEEELIENDYRVSTSKITKQSFKEIEKVALPTNTTSSRPRTECCSDAGDSPLKPVSCPKSKASDKRSLLPHQISQIYDELFQIHLKLQCETAAQQKFAEELQKRERFLLEREQLLFRHENALSKIKGVEEEVLTRFQIIKEQHDAEVEHLTEVLKEKNKETKRLRSSFDALKELNDTLKKQLNEASEENRKIDIQAKRVQARLDNLQRKYEFMTIQRLKGSSHAVHEMKSLKQEKAPVSKTYKVPLNGQVYELLTVFMDWISDHHLSKVKHEESGMDGKKPQLKFASQRNDIQEKCVKLLPLMTEQLQWMPFVNIKLHEPFVKFIYWSLRQLDAGAQHSTMTSTLRRLGEDIFKGVVTKGIQDNSPQHSVENKPKTAAFFKSSNLPLRFLSTLIVLKTVTQADYLAQAFDSLCLDLKTEEGKTLFLEYQAVPVILSHLRISSKGLLSNVIDSLLQMTVESKSLQPFLEACSNSLFFRTCSVLLRAPKLDLQILEKLSIILQKLSKIKSNKKLFELFTIHLMLQEIQRTTNPEHAFLCINLNSTLFNLGLTKCNSLVSSASP

SEQ ID NO: 18336 - protein, 104 aa, Homo sapiens
  Payload ID: 3661
  Gene Symbol: CCDC138
  Gene Name: coiled-coil domain containing 138
  ENSP ID: ENSP00000386418
MEPRVVKPPGQDLVVESLKSRYGLGGSCPDEYDFSNFYQSKYKRRTLTSPGDLDIYSGDKVGSSLKYSDESKHCRTPLGSLFKHVNVNCLKNVFTFFLSYAVNI

SEQ ID NO: 18337 - protein, 352 aa, Homo sapiens
  Payload ID: 3661
  Gene Symbol: CCDC138
  Gene Name: coiled-coil domain containing 138
  ENSP ID: ENSP00000392385
  MOD_RES (1)..(1): Any amino acid
XETEEELIENDYRVSTSKITKQSFKEIEKVALPTNTTSSRPRTECCSDAGDSPLKPVSCPKSKASDKRSLLPHQISQIYDELFQIHLKLQCETAAQQKFAEELQKRERFLLEREQLLFRHENALSKIKGVEEEVLTRFQIIKEHDAEVEHLTEVLKEKNKETKRLRSSFDALKELNDTLKKQLNEASEENRKIDIQAKRVQARLDNLQRKYEFMTIQRLKGSSHAVHEMKSLKQEKAPVSKTYKVPLNGQVYELLTVFMDWISDHHLSKVKHEESGMDGKKPQLKFASQRNDIQEKCVKLLPLMTEQLQWMPFVNIKLHEPFVKFIYWSLRQLDAGAQHSTMTSTLRRLGED

SEQ ID NO: 18338 - protein, 45 aa, Homo sapiens
  Payload ID: 3661
  Gene Symbol: CCDC138
  Gene Name: coiled-coil domain containing 138
  ENSP ID: ENSP00000407328
MEPRVVKPPGQDLVVESLKSRYGLGGSCPDEVIWISTLEIKLVHR

SEQ ID NO: 18339 - protein, 577 aa, Homo sapiens
  Payload ID: 3661
  Gene Symbol: CCDC138
  Gene Name: coiled-coil domain containing 138
  Uniprot ID: Q96M89
  ENSP ID: ENSP00000411800
MEPRVVKPPGQDLVVESLKSRYGLGGSCPDEYDFSNFYQSKYKRRTLTSPGDLDIYSGDKVGSSLKYSDESKHCRTPLGSLFKHVNVNCLDDELDSFHDLKKQETEEELIENDYRVSTSKITKQSFKEIEKVALPTNTTSSRPRTECCSDAGDSPLKPVSCPKSKASDKRSLLPHQISQIYDELFQIHLKLQCETAAQQKFAEELQKRERFLLEREQLLFRHENALSKIKGVEEEVLTRFQIIKEQHDAEVEHLTEVLKEKNKETKRLRSSFDALKELNDTLKKQLNEASEENRKIDIQAKRVQARLDNLQRKYEFMTIQRLKGSSHAVHEMKSLKQEKAPVSKTYKVPLNGQVYELLTVFMDWISDHHLSKVKHEESGMDGKKPQLKFASQRNDIQEKCVKLLPLMTEQLQWMPFVNIKLHEPFVKFIYWSLRQLDAGAQHSTMTSTLRRLGEDIFKGVVTKGIQDNSPQHSVENKPKTAAFFKSSNLPLRFLSTLIVLKTVTQADYLAQAFDSLCLDLKTEEGKTLFLEYQAVPVILSHLRISSKGLLSNVIDSLLQMTVESRVIRSSLNFLRFI

SEQ ID NO: 18340 - protein, 39 aa, Homo sapiens
  Payload ID: 3661
  Gene Symbol: CCDC138
  Gene Name: coiled-coil domain containing 138
  ENSP ID: ENSP00000477316
SNVIDSLLQMTVESSHPPCPSDVHMSLHFLLRPPLSLTI

SEQ ID NO: 18341 - protein, 864 aa, Homo sapiens
  Payload ID: 3662
  Gene Symbol: CCDC14
  Gene Name: coiled-coil domain containing 14
  ENSP ID: ENSP00000312031
MVRSGARPGQVLSSGRHTGPAKLTNGKKATYLRKIPRFNADSGYSIHSDSESQAETVHGLDGCASLLRDILRNEDSASSDNKKQIPNEASARSERDTSDLEQNWSLQDHYRMYSPIIYQALCEHVQTQMSLMNDLTSKNIPNGIPAVPCHAPSHSESQATPHSSYGLCTSTPVWSLQRPPCPPKVHSEVQTDGNSQFASQGKTVSATCTDVLRNSFNTSPGVPCSLPKTDISAIPTLQQLGLVNGILPQQGIHKETDLLKCIQTYLSLFRSHGKETHLDSQTHRSPTQSQPAFLATNEEKCAREQIREATSERKDLNIHVRDTKTVKDVQKAKNVNKTAEKVRIIKYLLGELKALVAEQEDSEIQRLITEMEACISVLPTVSGNTDIQVEIALAMQPLRSENAQLRRQLRILNQQLREQQKTQKPSGAVDCNLELFSLQSLNMSLQNQLEESLKSQELLQSKNEELLKVIENQKDENKKFSSIFKDKDQTILENKQQYDIEITRIKIELEEALVNVKSSQFKLETAEKENQILGITLRQRDAEVTRLRELTRTLQTSMAKLLSDLSVDSARCKPGNNLTKSLLNIHDKQLQHDPAPAHTSIMSYLNKLETNYSFTHSEPLSTIKNEETIEPDKTYENVLSSRGPQNSNTRGMEEASAPGIISALSKQDSDEGSETMALIEDEHNLDNTIYIPFARSTPEKKSPLSKRLSPQPQIRAATTQLVSNSGLAVSGKENKLCTPVICSSSTKEAEDAPEKLSRASDMKDTQLLKKIKEAIGKIPAATKEPEEQTACHGPSGCLSNSLQVKGNTVCDGSVFTSDLMSDWSISSFSTFTSRDEQDFRNGLAALDANIARLQKSLRTGLLEK

SEQ ID NO: 18342 - protein, 52 aa, Homo sapiens
  Payload ID: 3662
  Gene Symbol: CCDC14
  Gene Name: coiled-coil domain containing 14
  ENSP ID: ENSP00000386481
GGRAKKVREPTAVNSFYREASLPSVWASLRRREMVRSGARPGQDLFKKNTTF

SEQ ID NO: 18343 - protein, 905 aa, Homo sapiens
  Payload ID: 3662
  Gene Symbol: CCDC14
  Gene Name: coiled-coil domain containing 14
  ENSP ID: ENSP00000386866
MVRSGARPGQVLSSGRHTGPAKLTNGKKATYLRKIPRFNADSGYSIHSDSESQAETVHGLDGCASLLRDILRNEDSGSETAYLENRSNSRPLESKRYGSKKKRHEKHTIPLVVQKETSSSDNKKQIPNEASARSERDTSDLEQNWSLQDHYRMYSPIIYQALCEHVQTQMSLMNDLTSKNIPNGIPAVPCHAPSHSESQATPHSSYGLCTSTPVWSLQRPPCPPKVHSEVQTDGNSQFASQGKTVSATCTDVLRNSFNTSPGVPCSLPKTDISAIPTLQQLGLVNGILPQQGIHKETDLLKCIQTYLSLFRSHGKETHLDSQTHRSPTQSQPAFLATNEEKCAREQIREATSERKDLNIHVRDTKTVKDVQKAKNVNKTAEKVRIIKYLLGELKALVAEQEDSEIQRLITEMEACISVLPTVSGNTDIQVEIALAMQPLRSENAQLRRQLRILNQQLREQQKTQKPSGAVDCNLELFSLQSLNMSLQNQLEESLKSQELLQSKNEELLKVIENQKDENKKFSSIFKDKDQTILENKQQYDIEITRIKIELEEALVNVKSSQFKLETAEKENQILGITLRQRDAEVTRLRELTRTLQTSMAKLLSDLSVDSARCKPGNNLTKSLLNIHDKQLQHDPAPAHTSIMSYLNKLETNYSFTHSEPLSTIKNEETIEPDKTYENVLSSRGPQNSNTRGMEEASAPGIISALSKQDSDEGSETMALIEDEHNLDNTIYIPFARSTPEKKSPLSKRLSPQPQIRAATTQLVSNSGLAVSGKENKLCTPVICSSSTKEAEDAPEKLSRASDMKDTQLLKKIKEAIGKIPAATKEPEEQTACHGPSGCLSNSLQVKGNTVCDGSVFTSDLMSDWSISSFSTFTSRDEQDFRNGLAALDANIARLQKSLRTGLLEK

SEQ ID NO: 18344 - protein, 117 aa, Homo sapiens
  Payload ID: 3662
  Gene Symbol: CCDC14
  Gene Name: coiled-coil domain containing 14
  ENSP ID: ENSP00000387962
MYSPIIYQALCEHVQTQMSLMNDLTSKNIPNGIPAVPCHAPSHSESQATPHSSYGLCTSTPVWSLQRPPCPPKVHSEVQTDGNSQFASQGKTVSATCTDVLRNSFNTSPGVPCSLPK

SEQ ID NO: 18345 - protein, 912 aa, Homo sapiens
  Payload ID: 3662
  Gene Symbol: CCDC14
  Gene Name: coiled-coil domain containing 14
  Uniprot ID: Q49A88
  ENSP ID: ENSP00000395706
MKRGIRRDPFRKRKLGGRAKKVREPTAVNSFYREASLPSVWASLRRREMVRSGARPGQVLSSGRHTGPAKLTNGKKATYLRKIPRFNADSGYSIHSDSESQAETVHGLDGCASLLRDILRNEDSASSDNKKQIPNEASARSERDTSDLEQNWSLQDHYRMYSPIIYQALCEHVQTQMSLMNDLTSKNIPNGIPAVPCHAPSHSESQATPHSSYGLCTSTPVWSLQRPPCPPKVHSEVQTDGNSQFASQGKTVSATCTDVLRNSFNTSPGVPCSLPKTDISAIPTLQQLGLVNGILPQQGIHKETDLLKCIQTYLSLFRSHGKETHLDSQTHRSPTQSQPAFLATNEEKCAREQIREATSERKDLNIHVRDTKTVKDVQKAKNVNKTAEKVRIIKYLLGELKALVAEQEDSEIQRLITEMEACISVLPTVSGNTDIQVEIALAMQPLRSENAQLRRQLRILNQQLREQQKTQKPSGAVDCNLELFSLQSLNMSLQNQLEESLKSQELLQSKNEELLKVIENQKDENKKFSSIFKDKDQTILENKQQYDIEITRIKIELEEALVNVKSSQFKLETAEKENQILGITLRQRDAEVTRLRELTRTLQTSMAKLLSDLSVDSARCKPGNNLTKSLLNIHDKQLQHDPAPAHTSIMSYLNKLETNYSFTHSEPLSTIKNEETIEPDKTYENVLSSRGPQNSNTRGMEEASAPGIISALSKQDSDEGSETMALIEDEHNLDNTIYIPFARSTPEKKSPLSKRLSPQPQIRAATTQLVSNSGLAVSGKENKLCTPVICSSSTKEAEDAPEKLSRASDMKDTQLLKKIKEAIGKIPAATKEPEEQTACHGPSGCLSNSLQVKGNTVCDGSVFTSDLMSDWSISSFSTFTSRDEQDFRNGLAALDANIARLQKSLRTGLLEK

SEQ ID NO: 18346 - protein, 64 aa, Homo sapiens
  Payload ID: 3662
  Gene Symbol: CCDC14
  Gene Name: coiled-coil domain containing 14
  ENSP ID: ENSP00000398148
MKRGIRRDPFRKRKLGGRAKKVREPTAVNSFYREASLPSVWASLRRREMVRSGARPGQVQKQHI

SEQ ID NO: 18347 - protein, 312 aa, Homo sapiens
  Payload ID: 3662
  Gene Symbol: CCDC14
  Gene Name: coiled-coil domain containing 14
  ENSP ID: ENSP00000400957
MYSPIIYQALCEHVQTQMSLMNDLTSKNIPNGIPAVPCHAPSHSESQATPHSSYGLCTSTPVWSLQRPPCPPKVHSEVQTDGNSQFASQEDSEIQRLITEMEACISVLPTVSGNTDIQVEIALAMQPLRSENAQLRRQLRILNQQLREQQKTQKPSGAVDCNLELFSLQSLNMSLQNQLEESLKSQELLQSKNEELLKVIENQKDENKKFSSIFKDKDQTILENKQQYDIEITRIKIELEEALVNVKSSQFKLETAEKENQILGITLRQRDAEVTRLRELTRSTPEKKSPLSKRLSPQPQIRAATTQLVSNS

SEQ ID NO: 18348 - protein, 37 aa, Homo sapiens
  Payload ID: 3662
  Gene Symbol: CCDC14
  Gene Name: coiled-coil domain containing 14
  ENSP ID: ENSP00000407820
  MOD_RES (1)..(1): Any amino acid
XYREASLPSVWASLRRREMVRSGARPGQDLFKKNTTF

SEQ ID NO: 18349 - protein, 174 aa, Homo sapiens
  Payload ID: 3662
  Gene Symbol: CCDC14
  Gene Name: coiled-coil domain containing 14
  ENSP ID: ENSP00000414655
MYSPIIYQALCEHVQTQMSLMNDLTSKNIPNGIPAVPCHAPSHSESQATPHSSYGLCTSTPVWSLQRPPCPPKVHSEVQTDGNSQFASQETHLDSQTHRSPTQSQPAFLATNEEKCAREQIREATSERKDLNIHVRDTKTVKDVQKAKNVNKTAEKVRIIKYLLGELKALVAEQ

SEQ ID NO: 18350 - protein, 753 aa, Homo sapiens
  Payload ID: 3662
  Gene Symbol: CCDC14
  Gene Name: coiled-coil domain containing 14
  Uniprot ID: Q49A88
  ENSP ID: ENSP00000418002
MYSPIIYQALCEHVQTQMSLMNDLTSKNIPNGIPAVPCHAPSHSESQATPHSSYGLCTSTPVWSLQRPPCPPKVHSEVQTDGNSQFASQGKTVSATCTDVLRNSFNTSPGVPCSLPKTDISAIPTLQQLGLVNGILPQQGIHKETDLLKCIQTYLSLFRSHGKETHLDSQTHRSPTQSQPAFLATNEEKCAREQIREATSERKDLNIHVRDTKTVKDVQKAKNVNKTAEKVRIIKYLLGELKALVAEQEDSEIQRLITEMEACISVLPTVSGNTDIQVEIALAMQPLRSENAQLRRQLRILNQQLREQQKTQKPSGAVDCNLELFSLQSLNMSLQNQLEESLKSQELLQSKNEELLKVIENQKDENKKFSSIFKDKDQTILENKQQYDIEITRIKIELEEALVNVKSSQFKLETAEKENQILGITLRQRDAEVTRLRELTRTLQTSMAKLLSDLSVDSARCKPGNNLTKSLLNIHDKQLQHDPAPAHTSIMSYLNKLETNYSFTHSEPLSTIKNEETIEPDKTYENVLSSRGPQNSNTRGMEEASAPGIISALSKQDSDEGSETMALIEDEHNLDNTIYIPFARSTPEKKSPLSKRLSPQPQIRAATTQLVSNSGLAVSGKENKLCTPVICSSSTKEAEDAPEKLSRASDMKDTQLLKKIKEAIGKIPAATKEPEEQTACHGPSGCLSNSLQVKGNTVCDGSVFTSDLMSDWSISSFSTFTSRDEQDFRNGLAALDANIARLQKSLRTGLLEK

SEQ ID NO: 18351 - protein, 753 aa, Homo sapiens; identical to SEQ ID NO: 18350
  Payload ID: 3662
  Gene Symbol: CCDC14
  Gene Name: coiled-coil domain containing 14
  Uniprot ID: Q49A88
  ENSP ID: ENSP00000418403

SEQ ID NO: 18352 - protein, 912 aa, Homo sapiens; identical to SEQ ID NO: 18345
  Payload ID: 3662
  Gene Symbol: CCDC14
  Gene Name: coiled-coil domain containing 14
  Uniprot ID: Q49A88
  ENSP ID: ENSP00000420180

SEQ ID NO: 18353 - protein, 257 aa, Homo sapiens
  Payload ID: 3662
  Gene Symbol: CCDC14
  Gene Name: coiled-coil domain containing 14
  ENSP ID: ENSP00000420768
  MOD_RES (1)..(1): Any amino acid
XKAKNVNKTAEKVRIIKYLLGELKALVAEQEDSEIQRLITEMEACISVLPTVSGNTDIQVEIALAMQPLRSENAQLRRQLRILNQQLREQQKTQKPSGAVDCNLELFSLQSLNMSLQNQLEESLKSQELLQSKNEELLKVIENQKDENKKFSSIFKDKDQTILENKQQYDIEITRIKIELEEALVNVKSSQFKLETAEKENQILGITLRQRDAEVTRLRELTRLFKTVDLNVLQSLTQKPNTVHELRKSRTALNKEE

SEQ ID NO: 18354 - protein, 163 aa, Homo sapiens
  Payload ID: 3663
  Gene Symbol: CCDC140
  Gene Name: coiled-coil domain containing 140
  Uniprot ID: Q96MF4
  ENSP ID: ENSP00000295226
MGDECSNPDLLAEPGSSPPWDHGNQRQEAANESNTRVPRVLKAHLGPETAQPTKRSKRNRWRRQSCQGPSPARSGQFLGSADLGLQRGVLKSAARTCLSEISNSTRASPESAQSTDPGRAARPRTRTLPTPHSFKIGEEAEEMKKKKERKRRKERKKERNFKK

SEQ ID NO: 18355 - protein, 17 aa, Homo sapiens
  Payload ID: 3663
  Gene Symbol: CCDC140
  Gene Name: coiled-coil domain containing 140
  ENSP ID: ENSP00000407652
MGDECSNPDLLAEPGSS

SEQ ID NO: 18356 - protein, 894 aa, Homo sapiens
  Payload ID: 3664
  Gene Symbol: CCDC141
  Gene Name: coiled-coil domain containing 141
  ENSP ID: ENSP00000344627
RSQVLQTYVAFLKSSEEVEMQFQSLKEFYETEIPQKEQDDAKAKHCSDSAEKQWQLFLKKSFITQDLGLEFLNLINMAKENEILDVKNEVYLMKNTMENQKAEREELSLLRLAWQLKATESKPGKQQWAAFKEQLKKTSHNLKLLQEALMPVSALDLGGSLQFILDLRQKWNDMKPQFQQLNDEVQYIMKESEELTGRGAPVKEKSQQLKDLIHFHQKQKERIQDYEDILYKVVQFHQVKEELGRLIKSRELEFVEQPKELGDAHDVQIHLRCSQEKQARVDHLHRLALSLGVDIISSVQRPHCSNVSAKNLQQQLELLEEDSMKWRAKAEEYGRTLSRSVEYCAMRDEINELKDSFKDIKKKFNNLKFNYTKKNEKSRNLKALKYQIQQVDMYAEKMQALKRKMEKVSNKTSDSFLNYPSDKVNVLLEVMKDLQKHVDDFDKVVTDYKKNLDLTEHFQEVIEECHFWYEDASATVVRVGKYSTECKTKEAVKILHQQFNKFIAPSVPQQEERIQEATDLAQHLYGLEEGQKYIEKIVTKHKEVLESVTELCESLTELEEKLKQGDVLKMNPNLEDFHYDYIDLLKEPAKNKQTIFNEERNKGQVQVADLLGINGTGEERLPQDLKVSTDKEGGVQDLLLPEDMLSGEEYECVSPDDISLPPLPGSPESPLAPSDMEVEEPVSSSLSLHISSYGVQAGTSSPGDAQESVLPPPVAFADACNDKRETFSSHFERPYLQFKAEPPLTSRGFVEKSTALHRISAEHPESMMSEVHERALQQHPQAQGGLLETREKMHADNNFTKTQDRLHASSDAFSGLRFQSGTSRGYQRQMVPREEIKSTSAKSSVVSLADQAPNFSRLLSNVTVMEGSPVTLEVEVTGFPEPTLTWWVAYNDKP

SEQ ID NO: 18357 - protein, 652 aa, Homo sapiens
  Payload ID: 3664
  Gene Symbol: CCDC141
  Gene Name: coiled-coil domain containing 141
  ENSP ID: ENSP00000386503
MSSQGSPSVALSTTTVSSVAVQAGDSKIVIAVIKCGKWVQLQLAESQPNLLEIGSSQDETKKLLHDHELLLAKLKALEDRVWELLQEADKTAEENKDQSQVYDAMAETLGEAWAALVSMLERRTELLRLTSEFFENALEFAIKIDQAEDFLQNTHEFESAESLKSLLQLHEHHTKELLERSLALLNKSQQLTDFIEKFKCEGPNVNPELTQGAHSSCLKVDRLLELLQDRRRQLDKYLKQQWQELSQVLQICQWDQQENQVTCWFQKTIRNLQEQSLGSSLSDNEDRIHKQEELIIKAKEWNSAVEKLKSEALRILLSKDYVEKEHLQLSHQKLSQLQEEFGQLMVERNTWLKKANEFFNSANKAFDVLGRVEAYLKLLKSEGLSLAVLAVRHEELHRKIKDCTTDALQKGQTLISQVDSCSSQVSGIHEMMGCIKRRVDHLTEQCSAHKEYALKKQQLTASVEGYLRKVEMSIQKISPVLSNAMDVGSTRSESEKILNKYLELDIQAKETSHELEAAAKTMMEKNEFVSDEMVSLSSKARWLAEELNLFGQSIDYRSQVLQTYVAFLKSSEEVEMQFQSLKEFYETEIPQKEQDDAKAKHCSDSAEKQWQLFLKKSFITQDLGLEFLNLINMVRMALNGSHLLQGYSSKSK

SEQ ID NO: 18358 - protein, 628 aa, Homo sapiens
  Payload ID: 3664
  Gene Symbol: CCDC141
  Gene Name: coiled-coil domain containing 141
  ENSP ID: ENSP00000388745
MSSQGSPSVALSTTTVSSVAVQAGDSKIVIAVIKCGKWVQLQLAESQPNLLEIGSSQDETKKLLHDHELLLAKLKALEDRVWELLQEADKTAEENKDQSQVYDAMAETLGEAWAALVSMLERRTELLRLTSEFFENALEFAIKIDQAEDFLQNTHEFESAESLKSLLQLHEHHTKELLERSLALLNKSQQLTDFIEKFKCEGPNVNPELTQGAHSSCLKVDRLLELLQDRRRQLDKYLKQQWQELSQVLQICQWDQQENQVTCWFQKTIRNLQEQSLGSSLSDNEDRIHKQEELIIKAKAFDVLGRVEAYLKLLKSEGLSLAVLAVRHEELHRKIKDCTTDALQKGQTLISQVDSCSSQVSGIHEMMGCIKRRVDHLTEQCSAHKEYALKKQQLTASVEGYLRKVEMSIQKISPVLSNAMDVGSTRSESEKILNKYLELDIQAKETSHELEAAAKTMMEKNEFVSDEMVSLSSKARWLAEELNLFGQSIDYRSQVLQTYVAFLKSSEEVEMQFQSLKEFYETEIPQKEQDDAKAKHCSDSAEKQWQLFLKKSFITQDLGLEFLNLINMAKENEILDVKNEVYLMKNTMENQKAEREELSLLRLAWQLKATESKPGKQQWAAFKEQLKK

SEQ ID NO: 18359 - protein, 955 aa, Homo sapiens
  Payload ID: 3664
  Gene Symbol: CCDC141
  Gene Name: coiled-coil domain containing 141
  ENSP ID: ENSP00000390190
MSSQGSPSVALSTTTVSSVAVQAGDSKIVIAVIKCGKWVQLQLAESQPNLLEIGSSQDETKKLLHDHELLLAKLKALEDRVWELLQEADKTAEENKDQSQVYDAMAETLGEAWAALVSMLERRTELLRLTSEFFENALEFAIKIDQAEDFLQNTHEFESAESLKSLLQLHEHHTKELLERSLALLNKSQQLTDFIEKFKCEGPNVNPELTQGAHSSCLKVDRLLELLQDRRRQLDKYLKQQWQELSQVLQICQWDQQENQVTCWFQKTIRNLQEQSLGSSLSDNEDRIHKQEELIIKAKEWNSAVEKLKSEALRILLSKDYVEKEHLQLSHQKLSQLQEEFGQLMVERNTWLKKANEFFNSANKAFDVLGRVEAYLKLLKSEGLSLAVLAVRHEELHRKIKDCTTDALQKGQTLISQVDSCSSQVSGIHEMMGCIKRRVDHLTEQCSAHKEYALKKQQLTASVEGYLRKVEMSIQKISPVLSNAMDVGSTRSESEKILNKYLELDIQAKETSHELEAAAKTMMEKNEFVSDEMVSLSSKARWLAEELNLFGQSIDYRSQVLQTYVAFLKSSEEVEMQFQSLKEFYETEIPQKEQDDAKAKHCSDSAEKQWQLFLKKSFITQDLGLEFLNLINMAKENEILDVKNEVYLMKNTMENQKAEREELSLLRLAWQLKATESKPGKQQWAAFKEQLKKTSHNLKLLQEALMPVSALDLGGSLQFILDLRQKWNDMKPQFQQLNDEVQYIMKESEELTGRGAPVKEKSQQLKDLIHFHQKQKERIQDYEDILYKVVQFHQVKEELGRLIKSRELEFVEQPKELGDAHDVQIHLRCSQEKQARVDHLHRLALSLGVDIISSVQRPHCSNVSAKNLQQQLELLEEDSMKWRAKAEEYGRTLSRSVEYCAMRDEINELKDSFKDIKKKFNNLKFNYTKKNEKSRNLKALKYQIQQVDMYAEKMQ

SEQ ID NO: 18360 - protein, 1530 aa, Homo sapiens
  Payload ID: 3664
  Gene Symbol: CCDC141
  Gene Name: coiled-coil domain containing 141
  Uniprot ID: Q6ZP82
  ENSP ID: ENSP00000395995
MSSQGSPSVALSTTTVSSVAVQAGDSKIVIAVIKCGKWVQLQLAESQPNLLEIGSSQDETKKLLHDHELLLAKLKALEDRVWELLQEADKTAEENKDQSQVYDAMAETLGEAWAALVSMLERRTELLRLTSEFFENALEFAIKIDQAEDFLQNTHEFESAESLKSLLQLHEHHTKELLERSLALLNKSQQLTDFIEKFKCEGPNVNPELTQGAHSSCLKVDRLLELLQDRRRQLDKYLKQQWQELSQVLQICQWDQQENQVTCWFQKTIRNLQEQSLGSSLSDNEDRIHKQEELIIKAKEWNSAVEKLKSEALRILLSKDYVEKEHLQLSHQKLSQLQEEFGQLMVERNTWLKKANEFFNSANKAFDVLGRVEAYLKLLKSEGLSLAVLAVRHEELHRKIKDCTTDALQKGQTLISQVDSCSSQVSGIHEMMGCIKRRVDHLTEQCSAHKEYALKKQQLTASVEGYLRKVEMSIQKISPVLSNAMDVGSTRSESEKILNKYLELDIQAKETSHELEAAAKTMMEKNEFVSDEMVSLSSKARWLAEELNLFGQSIDYRSQVLQTYVAFLKSSEEVEMQFQSLKEFYETEIPQKEQDDAKAKHCSDSAEKQWQLFLKKSFITQDLGLEFLNLINMAKENEILDVKNEVYLMKNTMENQKAEREELSLLRLAWQLKATESKPGKQQWAAFKEQLKKTSHNLKLLQEALMPVSALDLGGSLQFILDLRQKWNDMKPQFQQLNDEVQYIMKESEELTGRGAPVKEKSQQLKDLIHFHQKQKERIQDYEDILYKVVQFHQVKEELGRLIKSRELEFVEQPKELGDAHDVQIHLRCSQEKQARVDHLHRLALSLGVDIISSVQRPHCSNVSAKNLQQQLELLEEDSMKWRAKAEEYGRTLSRSVEYCAMRDEINELKDSFKDIKKKFNNLKFNYTKKNEKSRNLKALKYQIQQVDMYAEKMQALKRKMEKVSNKTSDSFLNYPSDKVNVLLEVMKDLQKHVDDFDKVVTDYKKNLDLTEHFQEVIEECHFWYEDASATVVRVGKYSTECKTKEAVKILHQQFNKFIAPSVPQQEERIQEATDLAQHLYGLEEGQKYIEKIVTKHKEVLESVTELCESLTELEEKLKQGDVLKMNPNLEDFHYDYIDLLKEPAKNKQTIFNEERNKGQVQVADLLGINGTGEERLPQDLKVSTDKEGGVQDLLLPEDMLSGEEYECVSPDDISLPPLPGSPESPLAPSDMEVEEPVSSSLSLHISSYGVQAGTSSPGDAQESVLPPPVAFADACNDKRETFSSHFERPYLQFKAEPPLTSRGFVEKSTALHRISAEHPESMMSEVHERALQQHPQAQGGLLETREKMHADNNFTKTQDRLHASSDAFSGLRFQSGTSRGYQRQMVPREEIKSTSAKSSVVSLADQAPNFSRLLSNVTVMEGSPVTLEVEVTGFPEPTLTWYKKGQKLSADGHLQVLHKETRHSVFIPKVCKADAGLYVARAQNSSGALSSNVILHVTGNCRLPITRVNWITLCVVYVSVSLMYWLLTQ

SEQ ID NO: 18361 - protein, 743 aa, Homo sapiens
  Payload ID: 3665
  Gene Symbol: CCDC142
  Gene Name: coiled-coil domain containing 142
  Uniprot ID: Q17RM4
  ENSP ID: ENSP00000290418
MAQASRSGSLPPLVIVPPLRAQPGGTGEEQWERSRTGGLRWEVHCWPSGTSGGTPWWPTPADVSEDYEADAAAWRRGPAGGGPIPPALQRLRAVLLRLHREREQLLQARDCAYHLQSAVRLMKTLSPGSPSGGPSPLPQWCRDLQLHPSQGAVLRIGPGETLEPLLLARPIGLAAQCLEAVIEMQLRALGREPASPGLSSQLAELLFALPAYHTLQRKALSHVPGAARPFPTSRVLRLLTGERGCQVASRLDEALQGSALRDQLRRRCQEEGDLLPGLLGLVGGVAGSASCGLGLGGAGALWSQYWTLLWAACAQSLDLNLGPWRDPRATAQQLSQALGQASLPQECEKELASLCHRLLHQSLIWSWDQGFCQALGSALGGQSSLPTSSGTAELLQQLFPPLLDALREPRLRRIFCQPAGLCTLQTTLLWFLGRAQQYLAAWDPASFLLLIQKDLPPLLHEAEALYSLASEESLALEVEQQLGLEIQKLTAQIQLLPEESLSVFSQECHKQAMQGFKLYMPRGRYWRLRLCPEPPSAPSEYAGLVVRTVLEPVLQGLQGLPPQAQAPALGQALTAIVGAWLDHILTHGIRFSLQGALQLKQDFGVVRELLEEEQWSLSPDLRQTLLMLSIFQQLDGALLCLLQQPLPKSQVHRRPPCCCACQEVQTTKLPSSCLNSLESLEPPLQPGTSPAQTGQLQSTLGGRGPSPEGYLVGNQQAWLALRQHQRPRWHLPFFSCLGTSPES

SEQ ID NO: 18362 - protein, 750 aa, Homo sapiens
  Payload ID: 3665
  Gene Symbol: CCDC142
  Gene Name: coiled-coil domain containing 142
  Uniprot ID: Q17RM4
  ENSP ID: ENSP00000377537
MAQASRSGSLPPLVIVPPLRAQPGGTGEEQWERSRTGGLRWEVHCWPSGTSGGTPWWPTPADVSEDYEADAAAWRRGPAGGGPIPPALQRLRAVLLRLHREREQLLQARDCAYHLQSAVRLMKTLSPGSPSGGPSPLPQWCRDLQLHPSQGAVLRIGPGETLEPLLLARPIGLAAQCLEAVIEMQLRALGREPASPGLSSQLAELLFALPAYHTLQRKALSHVPGAARPFPTSRVLRLLTGERGCQVASRLDEALQGSALRDQLRRRCQEEGDLLPGLLGLVGGVAGSASCGLGLGGAGALWSQYWTLLWAACAQSLDLNLGPWRDPRATAQQLSQALGQASLPQECEKELASLCHRLLHQSLIWSWDQGFCQALGSALGGQSSLPTSSGTAELLQQLFPPLLDALREPRLRRIFCQPADPAPVALGLCTLQTTLLWFLGRAQQYLAAWDPASFLLLIQKDLPPLLHEAEALYSLASEESLALEVEQQLGLEIQKLTAQIQLLPEESLSVFSQECHKQAMQGFKLYMPRGRYWRLRLCPEPPSAPSEYAGLVVRTVLEPVLQGLQGLPPQAQAPALGQALTAIVGAWLDHILTHGIRFSLQGALQLKQDFGVVRELLEEEQWSLSPDLRQTLLMLSIFQQLDGALLCLLQQPLPKSQVHRRPPCCCACQEVQTTKLPSSCLNSLESLEPPLQPGTSPAQTGQLQSTLGGRGPSPEGYLVGNQQAWLALRQHQRPRWHLPFFSCLGTSPES

SEQ ID NO: 18363 - protein, 567 aa, Homo sapiens
  Payload ID: 3665
  Gene Symbol: CCDC142
  Gene Name: coiled-coil domain containing 142
  ENSP ID: ENSP00000415532
  MOD_RES (1)..(1): Any amino acid
XREREQLLQARDCAYHLQSAVRLMKTLSPGSPSGGPSPLPQWCRDLQLHPSQGAVLRIGPGETLEPLLLARPIGLAAQCLEAVIEMQLRALGREPASPGLSSQLAELLFALPAYHTLQRKALSHVPGAARPFPTSRVLRLLTGERGCQVASRLDEALQGSALRDQLRRRCQEEGDLLPGLLGLVGGVAGSASCGLGLGGAGALWSQYWTLLWAACAQSLDLNLGPWRDPRATAQQLSQALGQASLPQECEKELASLCHRLLHQSLIWSWDQGFCQALGSALGGQSSLPTSSGTAELLQQLFPPLLDALREPRLRRIFCQPADPAPVALGLCTLQTTLLWFLGRAQQYLAAWDPASFLLLIQKDLPPLLHEAEALYSLASEESLALEVEQQLGLEIQKLTAQIQLLPEESLSVFSQECHKQAMQGFKLYMPRGRYWRLRLCPEPPSAPSEYAGLVVRTVLEPVLQGLQGLPPQAQAPALGQALTAIVGAWLDHILTHGIRFSLQGALQLKQDFGVVRELLEEEQWSLSPDLRQTLLMLSIFQQLDGALLCLLQQPLPKSQVHRRPPCC

SEQ ID NO: 18364 - protein, 221 aa, Homo sapiens
  Payload ID: 3666
  Gene Symbol: CCDC144NL
  Gene Name: coiled-coil domain containing 144 family, N-terminal like
  Uniprot ID: Q6NUI1
  ENSP ID: ENSP00000328054
MASWGGEKRGGAGGSPKPAVYATRKTPSVGSQEDQWYLDYPGDQWSLGFSYSWWKNSVGSESKHGEGALDQLQHDVRLEDLGELHRAARSGDVPGVEHVLAPGDTGVDKRDRKKSIQQLVPEYKEKQTPESLPQNNNPAAPSQAEGGEGGVACGTVEQMTWLCSLPHAVGGGDGDHSSTGAVGGHPRGPGEYCHLHEQRVHHHIFARGKRKGKNHVSNVVR

SEQ ID NO: 18365 - protein, 571 aa, Homo sapiens
  Payload ID: 3667
  Gene Symbol: CCDC144A
  Gene Name: coiled-coil domain containing 144A
  ENSP ID: ENSP00000344740
MASWGGEKRGGAEGSPKPAVYATRKTPSVGSQGDQWYLGYPGDQWSSGFPYSWWKNSVGSESKHGEGALDQPQHDVRLEDLGELHRAARSGDVPGVEHILAPGDTGVDKRDRKKSIQQLVPEYKEKQTPESLPQNNNPDWHPTNLTLSDETCQRSKNLKVDDKCPSVSPSMPENQSATKELGQMNLTEREKMDTGVVLLSGNDTLHDLCQSQLPENKESKEEQDSELTSEEEQERLKGCENKQPQKTSQEPEMAKDCDREDIPIYPVLPHVQKSEEMWIEQGKLEWKNQLKLVINELKQRFGEIYEKYKIPACPEEEPLLDNSTRGTDVKDIPFNLTNNIPGCEEEDASEISVSVVFETFPEQKEPSLKNIIHPYYHPYSGSQEHVCQSSSKFHLHENKLDCDNDNKPGIGHIFSTDKNFHNDASTKKARNPEVVMVEMKEDQEFDLQMTKNMNQNSDSGSTNNYKSLKPKLENLSSLPPDSDRTSEVYLHEELQQDMQKFKNEVNTLEEEFLALKKEDVQLHKDVEEEMEKHRSNSTELSGTLTDGTTVGNDDDGLNQQIPRKENGEHDR

SEQ ID NO: 18366 - protein, 726 aa, Homo sapiens
  Payload ID: 3667
  Gene Symbol: CCDC144A
  Gene Name: coiled-coil domain containing 144A
  ENSP ID: ENSP00000353685
MASWGGEKRGGAEGSPKPAVYATRKTPSVGSQGDQWYLGYPGDQWSSGFPYSWWKNSVGSESKHGEGALDQPQHDVRLEDLGELHRAARSGDVPGVEHILAPGDTGVDKRDRKKSIQQLVPEYKEKQTPESLPQNNNPDWHPTNLTLSDETCQRSKNLKVDDKCPSVSPSMPENQSATKELGQMNLTEREKMDTGVVLLSGNDTLHDLCQSQLPENKESKEAEQDSELTSEEEQERLKGCENKQPQKTSQEPEMAKDCDREDIPIYPVLPHVQKSEEMWIEQGKLEWKNQLKLVINELKQRFGEIYEKYKIPACPEEEPLLDNSTRGTDVKDIPFNLTNNIPGCEEEDASEISVSVVFETFPEQKEPSLKNIIHPYYHPYSGSQEHVCQSSSKFHLHENKLDCDNDNKPGIGHIFSTDKNFHNDASTKKARNPEVVMVEMKEDQEFDLQMTKNMNQNSDSGSTNNYKSLKPKLENLSSLPPDSDRTSEVYLHEELQQDMQKFKNEVNTLEEEFLALKKEDVQLHKDVEEEMEKHRSNSTELSGTLTDGTTVGNDDDGLNQQIPRKENGEHDRPADKTSNEKNEVKNQIYPEADFADSMEPSEIASEDCELSHSVYENFMLLIEQLRMEYKDSASLPRIQDTFCLCEHLLKLKNNHCDQLTVKLKQMENMVSVLQNELSETKKTKLQLELQKIEWEKELYDLRFLIGIRKKRISFMKIACCRKKLPC

SEQ ID NO: 18367 - protein, 1427 aa, Homo sapiens
  Payload ID: 3667
  Gene Symbol: CCDC144A
  Gene Name: coiled-coil domain containing 144A
  Uniprot ID: A2RUR9
  ENSP ID: ENSP00000353717
MASWGGEKRGGAEGSPKPAVYATRKTPSVGSQGDQWYLGYPGDQWSSGFPYSWWKNSVGSESKHGEGALDQPQHDVRLEDLGELHRAARSGDVPGVEHILAPGDTGVDKRDRKKSIQQLVPEYKEKQTPESLPQNNNPDWHPTNLTLSDETCQRSKNLKVDDKCPSVSPSMPENQSATKELGQMNLTEREKMDTGVVLLSGNDTLHDLCQSQLPENKESKEAEQDSELTSEEEQERLKGCENKQPQKTSQEPEMAKDCDREDIPIYPVLPHVQKSEEMWIEQGKLEWKNQLKLVINELKQRFGEIYEKYKIPACPEEEPLLDNSTRGTDVKDIPFNLTNNIPGCEEEDASEISVSVVFETFPEQKEPSLKNIIHPYYHPYSGSQEHVCQSSSKFHLHENKLDCDNDNKPGIGHIFSTDKNFHNDASTKKARNPEVVMVEMKEDQEFDLQMTKNMNQNSDSGSTNNYKSLKPKLENLSSLPPDSDRTSEVYLHEELQQDMQKFKNEVNTLEEEFLALKKEDVQLHKDVEEEMEKHRSNSTELSGTLTDGTTVGNDDDGLNQQIPRKENGEHDRPADKTSNEKNEVKNQIYPEADFADSMEPSEIASEDCELSHSVYENFMLLIEQLRMEYKDSASLPRIQDTFCLCEHLLKLKNNHCDQLTVKLKQMENMVSVLQNELSETKKTKLQLELQKIEWEKELYDLRLALKQENEEKRNADMLYNKDSEQLRIKEEECGKVVETKQQLKWNLRRLVKELRTVRNNLDLVVQERNDAQKQLSEEQDARILQDQILTSKQKELEMARKKMNSEISHRHQKEKDLFHEDCMLQEEIALLRLEIDTIKNQNKQKEKKYFEDIEAVKEKNDNLQKIIKLNEETLTETILQYSGQLNNLTAENKILNSELENGKQNQERLEIEMESYRCRLAAAVRDCDQSQTARDLKLDFQRTRQEWVRLHDKMKVDMSGLQAKNEILSEKLSNAESKINSLQIQLHNTRDALGRESLILERVQRDLSQTQCQKKETEQMYQIEQSKLKKYIAKQESVEERLSQLQSENMLLRQQLDDAHKKANSQEKTSSTIQDQFHSAAKNLQAESEKQILSLQEKNKELMDEYNHLKERMDQCEKEKAGRKIDLTEAQETVPSRCLHLDAENEVLQLQQTLFSMKAIQKQCETLQKNKKQLKQEVVNLKSYMERNMLERGKAEWHKLLIEERARKEIEEKLNEAILTLQKQAAVSHEQLVQLREDNTTSIKTQMELTIKDLESEISRIKTSQADFNKTELERYKELYLEEVKVRESLSNELSRTNEMIAEVSTQLTVEKEQTRSRSLFTAYATRPVLESPCVGNLNDSEGLNRKHIPRKKRSALKDMESYLLKMQQKLQNDLTAEVAGSSQTGLHRIPQCSSFSSSSLHLLLCSICQPFFLILQLLLNMNLDPI

SEQ ID NO: 18368 - protein, 1425 aa, Homo sapiens
  Payload ID: 3667
  Gene Symbol: CCDC144A
  Gene Name: coiled-coil domain containing 144A
  ENSP ID: ENSP00000382215
MASWGGEKRGGAEGSPKPAVYATRKTPSVGSQGDQWYLGYPGDQWSSGFPYSWWKNSVGSESKHGEGALDQPQHDVRLEDLGELHRAARSGDVPGVEHILAPGDTGVDKRDRKKSIQQLVPEYKEKQTPESLPQNNNPDWHPTNLTLSDETCQRSKNLKVDDKCPSVSPSMPENQSATKELGQMNLTEREKMDTGVVLLSGNDTLHDLCQSQLPENKESKEAEQDSELTSEEEQERLKGCENKQPQKTSQEPEMAKDCDREDIPIYPVLPHVQKSEEMWIEQGKLEWKNQLKLVINELKQRFGEIYEKYKIPACPEEEPLLDNSTRGTDVKDIPFNLTNNIPGCEEEDASEISVSVVFETFPEQKEPSLKNIIHPYYHPYSGSQEHVCQSSSKFHLHENKLDCDNDNKPGIGHIFSTDKNFHNDASTKKARNPEVVMVEMKEDQEFDLQMTKNMNQNSDSGSTNNYKSLKPKLENLSSLPPDSDRTSEVYLHEELQQDMQKFKNEVNTLEEEFLALKKEDVQLHKDVEEEMEKHRSNSTELSGTLTDGTTVGNDDDGLNQQIPRKENGEHDRPADKTSNEKNEVKNQIYPEADFADSMEPSEIASEDCELSHSVYENFMLLIEQLRMEYKDSASLPRIQDTFCLCEHLLKLKNNHCDQLTVKLKQMENMVSVLQNELSETKKTKLQLELQKIEWEKELYDLRLALKQENEEKRNADMLYNKDSEQLRIKEEECGKVVETKQQLKWNLRRLVKELRTVRNNLDLVVQERNDAQKQLSEEQDARILQDQILTSKQKELEMARKKMNSEISHRHQKEKDLFHEDCMLQEEIALLRLEIDTIKNQNKQKEKKYFEDIEAVKEKNDNLQKIIKLNEETLTETILQYSGQLNNLTAENKILNSELENGKQNQERLEIEMESYRCRLAAAVRDCDQSQTARDLKLDFQRTRQEWVRLHDKMKVDMSGLQAKNEILSEKLSNAESKINSLQIQLHNTRDALGRESLILERVQRDLSQTQCQKKETEQMYQIEQSKLKKYIAKQESVEERLSQLQSENMLLRQQLDDAHKKANSQEKTSSTIQDQFHSAAKNLQAESEKQILSLQEKNKELMDEYNHLKERMDQCEKEKAGRKIDLTEAQETVPSRCLHLDAENEVLQLQQTLFSMKAIQKQCETLQKNKKQLKQEVVNLKSYMERNMLERGKAEWHKLLIEERARKEIEEKLNEAILTLQKQAAVSHEQLVQLREDNTTSIKTQMELTIKDLESEISRIKTSQADFNKTELERYKELYLEEVKVRESLSNELSRTNEMIAEVSTQLTVEKEQTRSRSLFTAYATRPVLESPCVGNLNDSEGLNRKHIPRKKRSALKDMESYLLKMQQKLQNDLTAEVAAATKYEPGSYIASPLGFTHKENLNQDPVLEVTKEYAQILRRKYIL

SEQ ID NO: 18369 - protein, 178 aa, Homo sapiens
  Payload ID: 3667
  Gene Symbol: CCDC144A
  Gene Name: coiled-coil domain containing 144A
  ENSP ID: ENSP00000398774
  MOD_RES (1)..(1): Any amino acid
XTGVDKRDRKKSIQQLVPEYKEKQTPESLPQNNNPDWHPTNLTLSDETCQRSKNLKVDDKCPSVSPSMPENQSATKELGQMNLTEREKMDTGVVLLSGNDTLHDLCQSQLPENKESKEAEQDSELTSEEEQERLKGCENKQPQKTSQEPEMAKDCDREDIPIYPVLPHVQKSEEMWIE

SEQ ID NO: 18370 - protein, 955 aa, Homo sapiens
  Payload ID: 3668
  Gene Symbol: CCDC146
  Gene Name: coiled-coil domain containing 146
  Uniprot ID: Q8IYE0
  ENSP ID: ENSP00000285871
MEDSSTDTEKEEEEEKDEKDQEPIYAIVPTINIQDERFVDLSETPAFIFLHELHAMGKLPGTRMAALKAKYTLLHDAVMSTQESEVQLLQNAKRFTEQIQQQQFHLQQADNFPEAFSTEVSKMREQLLKYQNEYNAVKEREFHNQYRLNSLKEEKIIIVKEFEKITKPGEMEKKMKILRESTEELRKEIMQKKLEIKNLREDLASKQKQLLKEQKELEELLGHQVVLKDEVAHHQTIPVQIGKEIEKITRKKVEMEKKKIVLEQEVKTLNDSLKKVENKVSAIVDEKENVIKEVEGKRALLEIKEREHNQLVKLLELARENEATSLTERGILDLNLRNSLIDKQNYHDELSRKQREKERDFRNLRKMELLLKVSWDALRQTQALHQRLLLEMEAIPKDDSTLSERRRELHKEVEVAKRNLAQQKIISEMESKLVEQQLAEENKLLKEQENMKELVVNLLRMTQIKIDEKEQKSKDFLKAQQKYTNIVKEMKAKDLEIRIHKKKKCEIYRRLREFAKLYDTIRNERNKFVNLLHKAHQKVNEIKERHKMSLNELEILRNSAVSQERKLQNSMLKHANNVTIRESMQNDVRKIVSKLQEMKEKKEAQLNNIDRLANTITMIEEEMVQLRKRYEKAVQHRNESGVQLIEREEEICIFYEKINIQEKMKLNGEIEIHLLEEKIQFLKMKIAEKQRQICVTQKLLPAKRSLDADLAVLQIQFSQCTDRIKDLEKQFVKPDGENRARFLPGKDLTEKEMIQKLDKLELQLAKKEEKLLEKDFIYEQVSRLTDRLCSKTQGCKQDTLLLAKKMNGYQRRIKNATEKMMALVAELSMKQALTIELQKEVREKEDFIFTCNSRIEKGLPLNKEIEKEWLKVLRDEEMHALAIAEKSQEFLEADNRQLPNGVYTTAEQRPNAYIPEADATLPLPKPYGALAPFKPSEPGANMRHIRKPVIKPVEI

SEQ ID NO: 18371 - protein, 170 aa, Homo sapiens
  Payload ID: 3668
  Gene Symbol: CCDC146
  Gene Name: coiled-coil domain containing 146
  ENSP ID: ENSP00000388649
MEDSSTDTEKEEEEEKDEKDQEPIYAIVPTINIQDERFVDLSETPAFIFLHELHAMGKLPGTRMAALKAKYTLLHDAVMSTQESEVQLLQNAKRFTEQIQQQQFHLQQADNFPEAFSTEVSKMREQLLKYQNEYNAVKEREFHNQYRLNSLKEEKIIIVKEFEKITKPGV

SEQ ID NO: 18372 - protein, 591 aa, Homo sapiens
  Payload ID: 3669
  Gene Symbol: CCDC148
  Gene Name: coiled-coil domain containing 148
  Uniprot ID: Q8NFR7
  ENSP ID: ENSP00000283233
MCAASASPDNLVFHMKNEMRNIKYKPVDYQQLRALTEAKKLASASAKLKIRKAMLTSKLSKEQTLIKQHKQVWWQEYQRLNEVRCKMESEIKSLLNEENIGNECLCDLTNFEQELSEQQCTYLKNVINPIQQLRADLKYRQHHTLQHSHPHIEFNSMKVLEEVDFVKKQLKTVFERLRLEQQRIENDLSDWSIKILDHSLEEKTNPLSELPIELESLECPYPDLKSSILSEFYKFTQKYQKKLQDFNLQLEDIYRNCQLSEEDHWIYQAILDQYPGDLFGRRTLYLDMLQRYFPHKSRHDLVEHEKYCDQYRFAIEQQNILISNWNKNKKDFIQKAVLTLTEACATHEMESMLAKDKKKQQELCADLKAKVRQWRAHQEEVARLEMEISARRREKEEEKEKLWKKKELLQRAEKKKKIKKYWAKKKQKWQEMEMRDLQRLEELKKLIAEQSLKDRERVKYRQELLERRLMEKKEVALQEAHEDKERARRLEALRKQVAVVAQFDPVRMMSDTMASKARMGIEIEEEFILQKPLFTLNTYNEQQIISDPRLRFELALREAGLHRTLYAKEILPKISPQKPPRKDMESTVFKI

SEQ ID NO: 18373 - protein, 255 aa, Homo sapiens
  Payload ID: 3669
  Gene Symbol: CCDC148
  Gene Name: coiled-coil domain containing 148
  Uniprot ID: Q8NFR7
  ENSP ID: ENSP00000386583
MCAASASPDNLVFHMKNEMRNIKYKPVDYQQLRALTEAKKLASASAKLKIRKAMLTSKLSKEQTLIKQHKQVWWQEYQRLNEVRCKMESEIKSLLNEENIGNECLCDLTNFEQELSEQQCTYLKNVINPIQQLRADLKYRQHHTLQHSHPHIEFNSMKVLEEVDFVKKQLKTVFERLRLEQQRIENDLSDWSIKILDHSLEEKTNPLSELPIELESLECPYPDLKSSILSEFYKFTQKYQKKLQDFNLQLEDIYR

SEQ ID NO: 18374 - protein, 600 aa, Homo sapiens
  Payload ID: 3669
  Gene Symbol: CCDC148
  Gene Name: coiled-coil domain containing 148
  ENSP ID: ENSP00000386674
MNQRDQPFMTIQRNDSSDNLVFHMKNEMRNIKYKPVDYQQLRALTEAKKLASASAKLKIRKAMLTSKLSKEQTLIKQHKQVWWQEYQRLNEVRCKMESEIKSLLNEENIGNECLCDLTNFEQELSEQQCTYLKNVINPIQQLRADLKYRQHHTLQHSHPHIEFNSMKVLEEVDFVKKQLKTVFERLRLEQQRIENDLSDWSIKILDHSLEEKTNPLSELPIELESLECPYPDLKSSILSEFYKFTQKYQKKLQDFNLQLEDIYRNCQLSEEDHWIYQAILDQYPGDLFGRRTLYLDMLQRYFPHKSRHDLVEHEKYCDQYRFAIEQQNILISNWNKNKKDFIQKAVLTLTEACATHEMESMLAKDKKKQQELCADLKAKVRQWRAHQEEVARLEMEISARRREKEEEKEKLWKKKELLQRAEKKKKIKKYWAKKKQKWQEMEMRDLQRLEELKKLIAEQSLKDRERVKYRQELLERRLMEKKEVALQEAHEDKERARRLEALRKQVAVVAQFDPVRMMSDTMASKARMGIEIEEEFILQKPLFTLNTYNEQQIISDPRLRFELALREAGLHRTLYAKEILPKISPQKPPRKDMESTVFKI

SEQ ID NO: 18375 - protein, 54 aa, Homo sapiens
  Payload ID: 3669
  Gene Symbol: CCDC148
  Gene Name: coiled-coil domain containing 148
  ENSP ID: ENSP00000398372
MCAASASPDNLVFHMKNEMRNIKYKPVDYQQLRALTEAKKLASASAKLKKLSTK

SEQ ID NO: 18376 - protein, 15 aa, Homo sapiens
  Payload ID: 3669
  Gene Symbol: CCDC148
  Gene Name: coiled-coil domain containing 148
  ENSP ID: ENSP00000400751
MCAASASPDVKWNLK

SEQ ID NO: 18377 - protein, 40 aa, Homo sapiens
  Payload ID: 3669
  Gene Symbol: CCDC148
  Gene Name: coiled-coil domain containing 148
  ENSP ID: ENSP00000415343
MCAASASPDQKSNVDFKVIQRTNTNKTTQASVVAGIPEAE

SEQ ID NO: 18378 - protein, 50 aa, Homo sapiens
  Payload ID: 3669
  Gene Symbol: CCDC148
  Gene Name: coiled-coil domain containing 148
  ENSP ID: ENSP00000415540
MCAASASPDNLVFHMKNEMRNIKYKPVDYQQLRALTEAKKLASASAKLKM

SEQ ID NO: 18379 - protein, 529 aa, Homo sapiens
  Payload ID: 3670
  Gene Symbol: CCDC149
  Gene Name: coiled-coil domain containing 149
  Uniprot ID: Q6ZUS6
  ENSP ID: ENSP00000374260
MVVIVVVIIIIIARAATWDSEYLVCKRKLESKKEALLILSKELDTCQQERDQYKLMANQLRERHQSLKKKYRELIDGDPSLPPEKRKQANLAQLLRDSQDRNKHLGEEIKELQQRLGEVQGDNKLLRMTIAKQRLGDEAIGVRHFAAHEREDLVQQLERAKEQIESLEHDLQASVDELQDVKEERSSYQDKVERLNQELNHILSGHENRIIDVDALCMENRYLQERLKQLHEEVNLLKSNIAKYKNALERRKNSKGQGKSSSSALTGVLSAKQVQDLLSEDHGCSLPATPQSISDLKSLATALLETIHEKNMVIQHQRQTNKILGNRVAELEKKLRTLEVSGLWSLPGGKDTILFSDPTLPSGQRSRSPLLKFVEQPTENKADPKDGEAQKQEEDESCAAAEALTAPEDAGRPAVNSPANQSRGNQCKLFHPSLPQLPSEEEVNSLGREIIKLTKEQAAAELEEVRRESPIEGQRSETGPAPPGLAIQGELPKSHLDSFEASRPAAKASTPEDGKGIPEGGGMRSTVKT

SEQ ID NO: 18380 - protein, 529 aa, Homo sapiens
  Payload ID: 3670
  Gene Symbol: CCDC149
  Gene Name: coiled-coil domain containing 149
  Uniprot ID: Q6ZUS6
  ENSP ID: ENSP00000425715
MEEEAMNGDRTESDWQGLVSEYLVCKRKLESKKEALLILSKELDTCQQERDQYKLMANQLRERHQSLKKKYRELIDGDPSLPPEKRKQANLAQLLRDSQDRNKHLGEEIKELQQRLGEVQGDNKLLRMTIAKQRLGDEAIGVRHFAAHEREDLVQQLERAKEQIESLEHDLQASVDELQDVKEERSSYQDKVERLNQELNHILSGHENRIIDVDALCMENRYLQERLKQLHEEVNLLKSNIAKYKNALERRKNSKGQGKSSSSALTGVLSAKQVQDLLSEDHGCSLPATPQSISDLKSLATALLETIHEKNMVIQHQRQTNKILGNRVAELEKKLRTLEVSGLWSLPGGKDTILFSDPTLPSGQRSRSPLLKFVEQPTENKADPKDGEAQKQEEDESCAAAEALTAPEDAGRPAVNSPANQSRGNQCKLFHPSLPQLPSEEEVNSLGREIIKLTKEQAAAELEEVRRESPIEGQRSETGPAPPGLAIQGELPKSHLDSFEASRPAAKASTPEDGKGIPEGGGMRSTVKT

SEQ ID NO: 18381 - protein, 141 aa, Homo sapiens
  Payload ID: 3670
  Gene Symbol: CCDC149
  Gene Name: coiled-coil domain containing 149
  Uniprot ID: Q6ZUS6
  ENSP ID: ENSP00000427529
MEEEAMNGDRTESDWQGLVSEYLVCKRKLESKKEALLILSKELDTCQQERDQYKLMANQLRERHQSLKKKYRELIDGDPSLPPEKRKQANLAQLLRDSQDRNKHLGEEIKELQQRLGEVQGDNKGRLRSKKKMKVVPLLRR

SEQ ID NO: 18382 - protein, 540 aa, Homo sapiens
  Payload ID: 3670
  Gene Symbol: CCDC149
  Gene Name: coiled-coil domain containing 149
  ENSP ID: ENSP00000488929
MEEEAMNGDRTESDWQGLVSEYLVCKRKLESKKEALLILSKELDTCQQERDQYKLMANQLRERHQSLKKKYRELIDGDPSLPPEKRKQANLAQLLRDSQDRNKHLGEEIKELQQRLGEVQGDNKLLRMTIAKQRLGDEAIGVRHFAAHEREDLVQQLERAKEQIESLEHDLQASVDELQDVKEERSSYQDKVERLNQELNHILSGHENRIIDVDALCMENRYLQERLKQLHEEVNLLKSNIAKYKNALERRKNSKGQGKSSSSALTGVLSAKQVQDLLSEDHGCSLPATPQSISDLKSLATALLETIHEKNMVIQHQRQTNKILGNRVAELEKKLRTLEVSGLWSLPGLSYNVSVGFGRGKDTILFSDPTLPSGQRSRSPLLKFVEQPTENKADPKDGEAQKQEEDESCAAAEALTAPEDAGRPAVNSPANQSRGNQCKLFHPSLPQLPSEEEVNSLGREIIKLTKEQAAAELEEVRRESPIEGQRSETGPAPPGLAIQGELPKSHLDSFEASRPAAKASTPEDGKGIPEGGGMRSTVKT

SEQ ID NO: 18383 - protein, 951 aa, Homo sapiens
  Payload ID: 3671
  Gene Symbol: CCDC15
  Gene Name: coiled-coil domain containing 15
  Uniprot ID: Q0P6D6
  ENSP ID: ENSP00000341684
MLGSMARKKPRNTSRLPLALNPLKSKDVLAVLAERNEAIVPVGAWVEPASPGSSEIPAYTSAYLIEEELKEQLRKKQEALKHFQKQVKYRVNQQIRLRKKQQLQKSYERAQKEGSIAMQSSATHLTSKRTSVFPNNLNVAIGSSRLPPSLMPGDGIEDEENQNELFQQQAQALSETMKQARHRLASFKTVIKKKGSVFPDDGRKSFLTREEVLSRKPASTGINTGIRGELPIKVHQGLLAAVPYQNYMENQELDYEEPDYEESSSLVTDEKGKEDLFGRGQQDQQAIHSEDKNKPFSRVQKVKFKNPLFVLMEEEEQKQLHFEGLQDILPEAQDYFLEAQGDLLETQGDLTGIQSVKPDTQAVEMKVQVTEPEGQAIEPEGQPIKTETQGIMLKAQSIELEEGSIVLKTQDFLPTNQALLTKNQDVLLKDHCVLPKDQSILLKYQDQDFLPRDQHVLHKDQDILPKYQDQNFLPKDQNFLSRDQHVLPKDQDILPKYQDQNFLPKDQNFLSRDQHVLPKDQNILPKYQGQDFLPKDQDFLSRDQHVLPKDWNILPKCQDQDFLPRDQGVLPKDQNILPICQDQDFLPRDQGYLPKDQNILPICQDRDFLPRDLHVLSNDQNILPKCQDQDFLPKYQKVHFKEPYSDMTDEKGREDFSLADYQCLPPKSQDQDDIKNQQPASFMREERVREELPLDYHQYVVPKIQDQDSPREQNKHIKLPSSFEKWEIARGNTPGVPLAYDRYQSGLSTEFQAPLAFQSDVDKEEDKKERQKQYLRHRRLFMDIEREQVKEQQRQKEQKKKIEKIKKKREQECYAAEQRILRMNFHEDPYSGEKLSEILAQLQLQEIKGTREKQQREKEYLRYVEALRAQIQEKMQLYNITLPPLCCCGPDFWDAHPDTCANNCIFYKNHRAYTRALHSFINSCDVPGGNSTLRVAIHNFASAHRRTLKNL

SEQ ID NO: 18384 - protein, 962 aa, Homo sapiens
  Payload ID: 3671
  Gene Symbol: CCDC15
  Gene Name: coiled-coil domain containing 15
  ENSP ID: ENSP00000435403
MLGSMARKKPRNTSRLPLALNPLKSKDVLAVLAERNEAIVPVGAWVEPASPGSSEIPAYTSAYLIEEELKEQLRKKQEALKHFQKQVKYRVNQQIRLRKKQQLQKSYERAQKEGSIAMQSSATHLTSKRTSVFPNNLNVAIGSSRLPPSLMPGDGIEDEENQNELFQQQAQALSETMKQARHRLASFKTVIKKKGSVFPDDGRKSFLTREEVLSRKPASTGINTGIRGELPIKVHQGLLAAVPYQNYMENQELDYEEPDYEESSSLVTDEKGKEDLFGRGQQDQQAIHSEDKNKPFSRVQKVKFKNPLFVLMEEEEQKQLHFEGLQDILPEAQDYFLEAQGDLLETQGDLTGIQSVKPDTQAVEMKVQVTEPEGQAIEPEGQPIKTETQGIMLKAQSIELEEGSIVLKTQDFLPTNQALLTKNQDVLLKDHCVLPKDQSILLKYQDQDFLPRDQHVLHKDQDILPKYQDQNFLPKDQNFLSRDQHVLPKDQDILPKYQDQNFLPKDQNFLSRDQHVLPKDQNILPKYQGQDFLPKDQDFLSRDQHVLPKDWNILPKCQDQDFLPRDQGVLPKDQNILPICQDQDFLPRDQGYLPKDQNILPICQDRDFLPRDLHVLSNDQNILPKCQDQDFLPKYQKVHFKEPYSDMTDEKGREDFSLADYQCLPPKSQDQDDIKNQQPASFMREERVREELPLDYHQYVVPKIQDQDSPREQNKHIKLPSSFEKWEIARGNTPGVPLAYDRYQSGLSTEFQAPLAFQSDVDKEEDKKERQKQYLRHRRLFMDIEREQVKEQQRQKEQKKKIEKIKKKREQECYAAEQRILRMNFHEDPYSGEKLSEILAQLQLQEIKGTREKQQREKEYLSSLCLIILYLYRYVEALRAQIQEKMQLYNITLPPLCCCGPDFWDAHPDTCANNCIFYKNHRAYTRALHSFINSCDVPGGNSTLRVAIHNFASAHRRTLKNL

SEQ ID NO: 18385 - protein, 1101 aa, Homo sapiens
  Payload ID: 3672
  Gene Symbol: CCDC150
  Gene Name: coiled-coil domain containing 150
  Uniprot ID: Q8NCX0
  ENSP ID: ENSP00000373827
MDCKVHMETTVSRPVLSPTHINATASETFTVLQQRMRIVEEQTSSLRDDLIMLDFGEKRGYLEAPDCLEDLDSQKVISPIQNEAICAGKTDILWKNCEFLVNRMCRLESLMQSLKMNIFRLQTEKDLNPQKTAFLKDRLNAIQEEHSKDLKLLHLEVMNLRQQLRAVKEEEDKAQDEVQRLTATLKIASQTKKNAAIIEEELKTTKRKMNLKIQELRRQLAQEKYLRESLEKSASAMLLKIQEMGSTVEVERKQVHILQQNCIALRDSIQSAQELLAQEQKKKEELEIATSQLKSDLTSRDDLISKLVEENKNLQISFNKEHEENAYLRSEIMSLHEASEKAQVLNDQLTKKCSELSCMLQTVTMEKARIIADHQAILQVEQKMMTQTFQEQNLLLDAAHASITNELQTVQNEKTQLQAHLDHLILEHNQCIQKAQDAEKRTAVQKELLESTIARLRGELEASMQEKKSLLEEKERFQREVNKTEKEIVQERCNLEKELAKNKVDINTLTHNLQTLEEENKHLADQMASLELQQVTSDYHGLAQQKVEKITESKNKLAYENGKLQIKVKQLEEQVQSFTDTSLQNDHLRKMNKYLQTKYAQANSELSAKRVHLQQADAHLKEVKSILERSKEELSRTVKCRNAALKESQKLKEDLEAVEDRENKKVGNFQRQLAEAKEDNCKVTIMLENVLASHSKMQGALEKVQIELGRRDSEIAGLKKERDLNQQRVQKLEAEVDQWQARMLVMEDQHNSEIESLQKALGVAREDNRKLAMSLEQALQTNNHLQTKLDHIQEQLESKELERQNLETFKDRMTEESKVEAELHAERIEALRKQFQTERETTKKVAQREVAELKKALDEANFRSVEVSRTNRELRQKLAELEKILESNKEKIKNQKTQIKLHLSAKANNAQNIERMKQIEKELKQMELIKDQYQKKNYEQSLSIQRFVCEMTNLQKEMQMLAKSQYDASVRNKQQELHLEAERKIRQELENRCQELEETVRHLKKCKEATENTLKEASVESEQITANLEEAHRWFKHRFDGLQLELTKNRLQRPSGEDRWQEKDQDVKHDVMSNQSVLHRWERKQNLRPMPKKYHSEVQRK

SEQ ID NO: 18386 - protein, 588 aa, Homo sapiens
  Payload ID: 3672
  Gene Symbol: CCDC150
  Gene Name: coiled-coil domain containing 150
  ENSP ID: ENSP00000387257
MPLRKRKSPERTASSKSPEISRSHVNSIKERTSSVGLPSVIPNSTRRVSFAPNLPSMKTSQDIGDSRISLKTLLNAIKTMEGRLEGKIEILASRPLINDESPNFLKQDSVKSILERSKEELSRTVKCRNAALKESQKLKEDLEAVEDRENKKVGNFQRQLAEAKEDNCKVTIMLENVLASHSKMQGALEKVQIELGRRDSEIAGLKKERDLNQQRVQKLEAEVDQWQARMLVMEDQHNSEIESLQKALGVAREDNRKLAMSLEQALQTNNHLQTKLDHIQEQLESKELERQNLETFKDRMTEESKVEAELHAERIEALRKQFQTERETTKKVAQREVAELKKALDEANFRSVEVSRTNRELRQKLAELEKILESNKEKIKNQKTQIKLHLSAKANNAQNIERMKQIEKELKQMELIKDQYQKKNYEQSLSIQRFVCEMTNLQKEMQMLAKSQYDASVRNKQQELHLEAERKIRQELENRCQELEETVRHLKKCKEATENTLKEASVESEQITANLEEAHRWFKHRFDGLQLELTKNRLQRPSGEDRWQEKDQDVKHDVMSNQSVLHRWERKQNLRPMPKKYHSEVQRK

SEQ ID NO: 18387 - protein, 68 aa, Homo sapiens
  Payload ID: 3672
  Gene Symbol: CCDC150
  Gene Name: coiled-coil domain containing 150
  ENSP ID: ENSP00000389008
MDCKVHMETTVSRPVLSPTHINATASETFTVLQQRMRIVEEQTSSLRDDLIMLDFGEKRRMQPLLKRN

SEQ ID NO: 18388 - protein, 182 aa, Homo sapiens
  Payload ID: 3672
  Gene Symbol: CCDC150
  Gene Name: coiled-coil domain containing 150
  ENSP ID: ENSP00000396153
MPLRKRKSPERTASSKSPEISRSHVNSIKERTSSVGLPSVIPNSTRRVSFAPNLPSMKTSQDIGDSRISLKTLLNAIKTMEGRLEGKIEILASRPLINDESPNFLKQDSVKSILERSKEELSRTVKCRNAALKESQKLKEDLEAVEDRENKKVGNFQRQLAEAKEDNCKVTIMLENVLASHS

SEQ ID NO: 18389 - protein, 417 aa, Homo sapiens
  Payload ID: 3672
  Gene Symbol: CCDC150
  Gene Name: coiled-coil domain containing 150
  Uniprot ID: Q8NCX0
  ENSP ID: ENSP00000413957
MPLRKRKSPERTASSKSPEISRSHVNSIKERTSSVGLPSVIPNSTRRVSFAPNLPSMKTSQDIGDSRISLKTLLNAIKTMEGRLEGKIEILASRPLINDESPNFLKQDSVKSILERSKEELSRTVKCRNAALKESQKLKEDLEAVEDRENKKVGNFQRQLAEAKEDNCKVTIMLENVLASHSKMQGALEKVQIELGRRDSEIAGLKKERDLNQQRVQKLEAEVDQWQARMLVMEDQHNSEIESLQKALGVAREDNRKLAMSLEQALQTNNHLQTKLDHIQEQLESKELERQNLETFKDRMTEESKVEAELHAERIEALRKQFQTERETTKKVAQREVAELKKALDEANFRSVEVSRTNRELRQKLAELEKILESNKEKIKNQKTQIKLHLSAKANNAQNIERMKVVWETSSHFLDTL

SEQ ID NO: 18390 - protein, 595 aa, Homo sapiens
  Payload ID: 3673
  Gene Symbol: CCDC151
  Gene Name: coiled-coil domain containing 151
  Uniprot ID: A5D8V7
  ENSP ID: ENSP00000348757
MTSPLCRAASANALPPQDQASTPSSRVKGREASGKPSHLRGKGTAQAWTPGRSKGGSFHRGAGKPSVHSQVAELHKKIQLLEGDRKAFFESSQWNIKKNQETISQLRKETKALELKLLDLLKGDEKVVQAVIREWKWEKPYLKNRTGQALEHLDHRLREKVKQQNALRHQVVLRQRRLEELQLQHSLRLLEMAEAQNRHTEVAKTMRNLENRLEKAQMKAQEAEHITSVYLQLKAYLMDESLNLENRLDSMEAEVVRTKHELEALHVVNQEALNARDIAKNQLQYLEETLVRERKKRERYISECKKRAEEKKLENERMERKTHREHLLLQSDDTIQDSLHAKEEELRQRWSMYQMEVIFGKVKDATGTDETHSLVRRFLAQGDTFAQLETLKSENEQTLVRLKQEKQQLQRELEDLKYSGEATLVSQQKLQAEAQERLKKEERRHAEAKDQLERALRAMQVAKDSLEHLASKLIHITVEDGRFAGKELDPQADNYVPNLLGLVEEKLLKLQAQLQGHDVQEMLCHIANREFLASLEGRLPEYNTRIALPLATSKDKFFDEESEEEDNEVVTRASLKIRSQKLIESHKKHRRSRRS

SEQ ID NO: 18391 - protein, 535 aa, Homo sapiens
  Payload ID: 3673
  Gene Symbol: CCDC151
  Gene Name: coiled-coil domain containing 151
  ENSP ID: ENSP00000466800
MTSPLCRAASANALPPQDQASTPSSRVKGREASGKPSHLRGKGTAQAWTPGRSKGGSFHRGAGKPSVHSQVAELHKKIQLLEGDRKAFFESSQWNIKKNQETISQLRKETKALELKLLDLLKALEHLDHRLREKVKQQNALRHQVVLRQRRLEELQLQHSLRLLEMAEAQNRHTEVAKDESLNLENRLDSMEAEVVRTKHELEALHVVNQEALNARDIAKNQLQYLEETLVRERKKRERYISECKKRAEEKKLENERMERKTHREHLLLQSDDTIQDSLHAKEEELRQRWSMYQMEVIFGKVKDATGTDETHSLVRRFLAQGDTFAQLETLKSENEQTLVRLKQEKQQLQRELEDLKYSGEATLVSQQKLQAEAQERLKKEERRHAEAKDQLERALRAMQVAKDSLEHLASKLIHITVEDGRFAGKELDPQADNYVPNLLGLVEEKLLKLQAQLQGHDVQEMLCHIANREFLASLEGRLPEYNTRIALPLATSKDKFFDEESEEEDNEVVTRASLKIRSQKLIESHKKHRRSRRS

SEQ ID NO: 18392 - protein, 115 aa, Homo sapiens
  Payload ID: 3673
  Gene Symbol: CCDC151
  Gene Name: coiled-coil domain containing 151
  ENSP ID: ENSP00000467313
MTSPLCRAASANALPPQDQASTPSSRVKGREASGKPSHLRGKGTAQAWTPGRSKGGSFHRGAGKPSVHSQVAELHKKIQLLESHSVARWECSGTISAHCNLRLPESLEPGRRRLW

SEQ ID NO: 18393 - protein, 404 aa, Homo sapiens
  Payload ID: 3673
  Gene Symbol: CCDC151
  Gene Name: coiled-coil domain containing 151
  ENSP ID: ENSP00000467429
MAEAQNRHTEVAKTMRNLENRLEKAQMKAQEAEHITSVYLQLKAYLMDESLNLENRLDSMEAEVVRTKHELEALHVVNQEALNARDIAKNQLQYLEETLVRERKKRERYISECKKRAEEKKLENERMERKTHREHLLLQSDDTIQDSLHAKEEELRQRWSMYQMEVIFGKVKDATGTDETHSLVRRFLAQGDTFAQLETLKSENEQTLVRLKQEKQQLQRELEDLKYSGEATLVSQQKLQAEAQERLKKEERRHAEAKDQLERALRAMQVAKDSLEHLASKLIHITVEDGRFAGKELDPQADNYVPNLLGLVEEKLLKLQAQLQGHDVQEMLCHIANREFLASLEGRLPEYNTRIALPLATSKDKFFDEESEEEDNEVVTRASLKIRSQKLIESHKKHRRSRRS

SEQ ID NO: 18394 - protein, 254 aa, Homo sapiens
  Payload ID: 3674
  Gene Symbol: CCDC152
  Gene Name: coiled-coil domain containing 152
  Uniprot ID: Q4G0S7
  ENSP ID: ENSP00000354888
MDQSSEGCMKKISSVNLDKLINDFSQIEKKMVETNGKNNILDIQLEKSNCLLKVMQAKEVSIKEECATLHNIIKGLQQTIEYQQNLKGENEQLKISADLIKEKLKSHEQEYKNNIAKLVSEMKIKEEGYKKEISKLYQDMQRKVELNEEKHKELIEKKEMEISELNAKLRSQEKEKQNEIIKLQLEFDAKLARVQTKSKSYQDSTVLPQSIYRRKLQHFQEEKNKEIAILRNTIRDLEQRLSVGKDSHLKRRRF

SEQ ID NO: 18395 - protein, 198 aa, Homo sapiens
  Payload ID: 3674
  Gene Symbol: CCDC152
  Gene Name: coiled-coil domain containing 152
  Uniprot ID: Q4G0S7
  ENSP ID: ENSP00000373479
MDQSSEGCMKKISSVNLDKLINDFSQIEKKMVETNGKNNILDIQLEKSNCLLKVMQAKEVSIKEECATLHNIIKGLQQTIEYQQNLKVELNEEKHKELIEKKEMEISELNAKLRSQEKEKQNEIIKLQLEFDAKLARVQTKSKSYQDSTVLPQSIYRRKLQHFQEEKNKEIAILRNTIRDLEQRLSVGKDSHLKRRRF

SEQ ID NO: 18396 - protein, 210 aa, Homo sapiens
  Payload ID: 3675
  Gene Symbol: CCDC153
  Gene Name: coiled-coil domain containing 153
  Uniprot ID: Q494R4
  ENSP ID: ENSP00000423567
MPPKNKEKGKKSGAQKKKKNWGADVVAESRHRLVVLEKELLRDHLALRRDEARRAKASEDQLRQRLQGVEAELEGARSEGKAIYAEMSRQCHALQEDMQTRSKQLEEEVKGLRGQLEACQREAAAAREEAEQALGERDQALAQLRAHMADMEAKYEEILHDSLDRLLAKLRAIKQQWDGAALRLHARHKEQQRQFGLTPPGSLRPPAPSL

SEQ ID NO: 18397 - protein, 210 aa, Homo sapiens; identical to SEQ ID NO: 18396
  Payload ID: 3675
  Gene Symbol: CCDC153
  Gene Name: coiled-coil domain containing 153
  Uniprot ID: Q494R4
  ENSP ID: ENSP00000445431

SEQ ID NO: 18398 - protein, 674 aa, Homo sapiens
  Payload ID: 3676
  Gene Symbol: CCDC154
  Gene Name: coiled-coil domain containing 154
  Uniprot ID: A6NI56
  ENSP ID: ENSP00000373828
MSELADSGPSGASAPSQLRAVTLEDLGLLLAGGLASPEPLSLEELSERYESSHPTSTASVPEQDTAKHWNQLEQWVVELQAEVACLREHKQRCERATRSLLRELLQVRARVQLQGSELRQLQQEARPAAQAPEKEAPEFSGLQNQMQALDKRLVEVREALTRLRRRQVQQEAERRGAEQEAGLRLAKLTDLLQQEEQGREVACGALQKNQEDSSRRVDLEVARMQAQVTKLGEEVSLRFLKREAKLCGFLQKSFLALEKRMKASESSRLKLEGSLRGELESRWEKLRGLMEERLRALQGQHEVGPGGRRAEESHLLEQCQGLDAAVAQLTKFVQQNQASLNRVLLAEEKAWDAKGRLEESRAGELAAYVQENLEAAQLAGELARQEMHGELVLLREKSRALEASVAQLAGQLKELSGHLPALSSRLDLQEQMLGLRLSEAKTEWEGAERKSLEDLARWRKEVTEHLRGVREKVDGLPQQIESVSDKCLLHKSDSDLRISAEGKAREFKVGALRQELATLLSSVQLLKEDNPGRKIAEMQGKLATNQIMKLENCVQANKTIQNLRFNTEARLRTQEMATLWESVLRLWSEEGPRTPLGSWKALPSLVRPRVFIKDMAPGKVVPMNCWGVYQAVRWLRWKASLIKLRALRRPGGVLEKPHSQEQVQQLTPSLFIQK

SEQ ID NO: 18399 - protein, 522 aa, Homo sapiens
  Payload ID: 3676
  Gene Symbol: CCDC154
  Gene Name: coiled-coil domain containing 154
  ENSP ID: ENSP00000386744
MQALDKRLVEVREALTRLRRRQVQQEAERRGAEQEAGLRLAKLTDLLQQEEQGREVACGALQKNQEDSSRRVDLEVARMQAQVTKLGEEVSLRFLKREAKLCGFLQKSFLALEKRMKASESSRLKLEGSLRGELESRWEKLRGLMEERLRALQGQHEESHLLEQCQGLDAAVAQLTKFVQQNQASLNRVLLAEEKAWDAKGRLEESRAGELAAYVQENLEAAQLAGELARQEMHGELVLLREKSRALEASVAQLAGQLKELSGHLPALSSRLDLQEQMLGLRLSEAKTEWEGAERKSLEDLARWRKEVTEHLRGVREKVDGLPQQIESVSDKCLLHKSDSDLRISAEGKAREFKVGALRQELATLLSSVQLLKEDNPGRKIAEMQGKLATFQNQIMKLENCVQANKTIQNLRFNTEARLRTQEMATLWESVLRLWSEEGPRTPLGSWKALPSLVRPRVFIKDMAPGKVVPMNCWGVYQAVRWLRWKASLIKLRALRRPGGVLEKPHSQEQVQQLTPSLFIQK

SEQ ID NO: 18400 - protein, 99 aa, Homo sapiens
  Payload ID: 3676
  Gene Symbol: CCDC154
  Gene Name: coiled-coil domain containing 154
  ENSP ID: ENSP00000456484
QLKELSGHLPALSSRLDLQEQMLGLRLSEAKTEWEGAERKSLEDLARWRKEVTEHLRGVREKVDGLPQQIESVSDKCLLHKSDSDLRISAEGKASFRTK

SEQ ID NO: 18401 - protein, 562 aa, Homo sapiens
  Payload ID: 3677
  Gene Symbol: CCDC155
  Gene Name: coiled-coil domain containing 155
  Uniprot ID: Q8N6L0
  ENSP ID: ENSP00000404220
MDLPEGPVGGPTAEMYLRERPEEARLGMPVSLEEQILNSTFEACDPQRTGTVAVAQVLAYLEAVTGQGPQDARLQTLANSLDPNGEGPKATVDLDTFLVVMRDWIAACQLHGGLELEEETAFQGALTSRQLPSGCPEAEEPANLESFGGEDPRPELQATADLLSSLEDLELSNRRLVGENAKLQRSMETAEEGSARLGEEILALRKQLHSTQQALQFAKAMDEELEDLKTLARSLEEQNRSLLAQARQAEKEQQHLVAEMETLQEENGKLLAERDGVKKRSQELAMEKDTLKRQLFECEHLICQRDTILSERTRDVESLAQTLEEYRVTTQELRLEISRLEEQLSQTYEGPDELPEGAQLRRVGWTELLPPSLGLEIEAIRQKQEVATADLSNPLCGVWQWEEVIHETSEETEFPSEAPAGGQRNFQGEPAHPEEGRKEPSMWLTRREEEEDAESQVTADLPVPLGAPRPGDIPENPPERPARRELQQALVPVMKKLVPVRRRAWGQLCLPPQRLRVTRHPLIPAPVLGLLLLLLLSVLLLGPSPPPTWPHLQLCYLQPPPV

SEQ ID NO: 18402 - protein, 75 aa, Homo sapiens
  Payload ID: 3677
  Gene Symbol: CCDC155
  Gene Name: coiled-coil domain containing 155
  ENSP ID: ENSP00000468838
MPVSLEEQILNSTFEACDPQRTGTVAVAQVLAYLEAVTGQGPQDARLQTLANSLDPNGEGPKATVDLDTFLVVMR

SEQ ID NO: 18403 - protein, 91 aa, Homo sapiens
  Payload ID: 3677
  Gene Symbol: CCDC155
  Gene Name: coiled-coil domain containing 155
  ENSP ID: ENSP00000469367
MPVSLEEQILNSTFEACDPQRTGTVAVAQVLAYLEAVTGQGPQDARLQTLANSLDPNGEGPKATVDLDTFLVVMRDWIAACQLHGGLELEE

SEQ ID NO: 18404 - protein, 193 aa, Homo sapiens
  Payload ID: 3677
  Gene Symbol: CCDC155
  Gene Name: coiled-coil domain containing 155
  ENSP ID: ENSP00000469435
MDLPEGPVGGPTAEMYLRERPEEARLGMPVSLEEQILNSTFEACDPQRTGTVAVAQVLAYLEAVTGQGPQDARLQTLANSLDPNGEGPKATVDLDTFLVVMRDWIAACQLHGGLELEEETAFQGALTSRQLPSGCPEAEEPANLESFGGEDPRPELQATADLLSSLEDLELSNRRLVGENAKLQRSMETAEEG

SEQ ID NO: 18405 - protein, 42 aa, Homo sapiens
  Payload ID: 3677
  Gene Symbol: CCDC155
  Gene Name: coiled-coil domain containing 155
  ENSP ID: ENSP00000470765
MDLPEGPVGGPTAESAPEGETALLAGTPEQLLTHCGSSLTVE

SEQ ID NO: 18406 - protein, 524 aa, Homo sapiens
  Payload ID: 3677
  Gene Symbol: CCDC155
  Gene Name: coiled-coil domain containing 155
  ENSP ID: ENSP00000470819
  MOD_RES (1)..(1): Any amino acid
XNSTFEACDPQRTGTVAVAQVLAYLEAVTGQGPQDARLQTLANSLDPNGEGPKATVDLDTFLVVMRDWIAACQLHGGLELEEETAFQGALTSRQLPSGCPEAEEPANLESFGGEDPRPELQATADLLSSLEDLELSNRRLVGENAKLQRSMETAEEGSARLGEEILALRKQLHSTQQALQFAKAMDEELEDLKTLARSLEEQNRSLLAQARQAEKEQQHLVAEMETLQEENGKLLAERDGVKKRSQELAMEKDTLKRQLFECEHLICQRDTILSERTRDVESLAQTLEEYRVTTQELRLEISRLEEQLSQTYEGPDELPEGAQLRRVGWTELLPPSLGLEIEAIRQEVATADLSNPLCGVWQWEEVIHETSEETEFPSEAPAGGQRNFQGEPAHPEEGRKEPSMWLTRREEEEDAESQVTADLPVPLGAPRPGDIPENPPERPARRELQQALVPVMKKLVPVRRRAWGQLCLPPQRLRVTRHPLIPAPVLGLLLLLLLSVLLLGPSPPPTWPHLQLCYLQPPPV

SEQ ID NO: 18407 - protein, 188 aa, Homo sapiens
  Payload ID: 3677
  Gene Symbol: CCDC155
  Gene Name: coiled-coil domain containing 155
  ENSP ID: ENSP00000471777
MYLRERPEEARLGMPVSLEEQILNSTFEACDPQRTGTVAVAQVLAYLEAVTGQGPQDARLQTLANSLDPNGEGPKATVDLDTFLVVMRDWIAACQLHGGLELEEETAFQGALTSRQLPSGCPEAEEPANLESFGGEDPRPELQATADLLSSLEDLELSNRRLVGENAKLQRSMETAEEGSARLGEEIL

SEQ ID NO: 18408 - protein, 752 aa, Homo sapiens
  Payload ID: 3678
  Gene Symbol: CCDC157
  Gene Name: coiled-coil domain containing 157
  Uniprot ID: Q569K6
  ENSP ID: ENSP00000343087
MAHLLGSQACMESLRTDLTDLQGAIVDVFSRAGPVRFPSWKFPDRMACDLDMVALLEHYDHVPGDPEFTQLSHAVLLELVIDRLLLLLQSCMSYLENLGSEQMMPPAQAAGPCMSVGLTVRRFWDSLLRLGTLHQQPLPQKGANQRETPTSKPTTKGEPARSPEYLTTKLIKPSSPVLGLPQTCQEPESIPVRASLQFPATTFKNTRSVHSQTIETALVPCDACASVQGSLQKVGKVVISLCQSQNLPSSLGQFQQLVQDSMGLRPLPAATVGRWAAEQRKDLTRLSKHVEALRAQLEEAEGQKDGLRKQAGKLEQALKQEQGARRRQAEEDEQCLSEWEHDKQQLLTETSDLKTKMATLERELKQQRESTQAVEAKAQQLQEEGERRAAAERQVQQLEEQVQQLEAQVQLLVGRLEGAGQQVCWASTELDKEKARVDSMVRHQESLQAKQRALLKQLDSLDQEREELRGSLDEAEAQRARVEEQLQSEREQGQCQLRAQQELLQSLQREKQGLEQATTDLRLTILELERELEELKERERLLVAFPDLHRPTETQIHGGRSSSVESQITCPTDSGNVTDHMERQVQSNDIRIRVLQEENGRLQSMLSKIREVAQQGGLKLIPQDRLWSPSSKGTQGATPPVQAKSTSPGPLGRQHLPSSRTGRTLLGQPCTSPPRQPCTSPPRQPCTSPPRQPCTSPSRQPCSQPSKSLLEGVTHLDTCTQNPIKVLVRLRKRLSPGRGQASSAHQPQERPM

SEQ ID NO: 18409 - protein, 83 aa, Homo sapiens
  Payload ID: 3678
  Gene Symbol: CCDC157
  Gene Name: coiled-coil domain containing 157
  ENSP ID: ENSP00000382720
MAHLLGSQACMESLRTDLTDLQGAIVDVFSRAGPVRFPSWKFPDRMACDLDMVALLEHYDHVPGDPEFTQLSHAVLLELVIDR

SEQ ID NO: 18410 - protein, 752 aa, Homo sapiens; identical to SEQ ID NO: 18408
  Payload ID: 3678
  Gene Symbol: CCDC157
  Gene Name: coiled-coil domain containing 157
  Uniprot ID: Q569K6
  ENSP ID: ENSP00000385357

SEQ ID NO: 18411 - protein, 196 aa, Homo sapiens
  Payload ID: 3678
  Gene Symbol: CCDC157
  Gene Name: coiled-coil domain containing 157
  ENSP ID: ENSP00000387491
MAHLLGSQACMESLRTDLTDLQGAIVDVFSRAGPVRFPSWKFPDRMACDLDMVALLEHYDHVPGDPEFTQLSHAVLLELVIDRLLLLLQSCMSYLENLGSEQMMPPAQAAGPCMSVGLTVRRFWDSLLRLGTLHQQPLPQKGANQRETPTSKPTTKGEPARSPEYLTTKLIKPSSPVLGLPQTCQEPESIPVRASL

SEQ ID NO: 18412 - protein, 201 aa, Homo sapiens
  Payload ID: 3678
  Gene Symbol: CCDC157
  Gene Name: coiled-coil domain containing 157
  ENSP ID: ENSP00000401837
MAHLLGSQACMESLRTDLTDLQGAIVDVFSRAGPVRFPSWKFPDRMACDLDMVALLEHYDHVPGDPEFTQLSHAVLLELVIDRLLLLLQSCMSYLENLGSEQMMPPAQAAGPCMSVGLTVRRFWDSLLRLGTLHQQPLPQKGANQRETPTSKPTTKGEPARSPEYLTTKLIKPSSPVLGLPQTCQEPESIPVRASLQFPAT

SEQ ID NO: 18413 - protein, 1113 aa, Homo sapiens
  Payload ID: 3679
  Gene Symbol: CCDC158
  Gene Name: coiled-coil domain containing 158
  Uniprot ID: Q5M9N0
  ENSP ID: ENSP00000373566
MESKAWESNNEDLLSSSGVTSNGGSSSSFFVSSIRGTIIENTSSAGTLTQVPFFPKYEVELDSPRKIIPSPGKEHFERVLEEYSHQVKDLQRRLNESNELHEKQKFYLRQSVIDLQTKLQEMQMERDAMADIRRRESQSQEDLRNQLQNTVHELEAAKCLKEDMLKDSNTQIEQLRKMMLSHEGVLQEIRSILVDFEEASGKKICEHDSMSTLHFRSLGSAISKILRELDTEISYLKGRIFPVEDQLEALKSESQNKIELLLQQHQDRIEQLISEHEVEITGLTEKASSARSQANSIQSQMEIIQEQARNQNSMYMRQLSDLESTVSQLRSELREAKRMYEDKTEELEKQLVLANSELTEARTERDQFSQESGNLDDQLQKLLADLHKREKELSLEKEQNKRLWDRDTGNSITIDHLRRELDNRNMEVQRLEALLKALKSECQGQMERQMAAIQGKNESLEKVSSLTAQLESTKEMLRKVVEELTAKKMTLESSERTISDLTTSLQEKERAIEATNAEITKLRSRVDLKLQELQHLKNEGDHLRNVQTECEALKLQMTEKDKVIEILRQQIENMTQLVGQHGRTAGAMQVEKAQLEKEINDRRMELKELKILKDKKDAKIRELEARVSDLELEKVKLVNAGSERLRAVKDIKQERDQLLNEVKTSRSELNNLSEEYEVLKRNFRNKSEEMEMTTNKLKMQLKSAQSELEQTRNTLKSMEGSDGHAMKVAMGMQKQITAKRGQIDALQSKIQFLEEAMTNANKEKHFLKEEKSKLSQELSTVATEKNKMAGELEVLRSQERRLKEKVTNMEVALDKASLQFAECQDIIQRQEQESVRLKLQHTLDIKELQGPGYTSNSSLKPRLLQPASVTRSHSNVPSSQSTASFLSHHSTKANTLKEDPTRDLKQLLQELRSVINEEPAVSLSKTEEDGRTSLGALEDRVRDCITESSLRSDMCHRSNNSLRDSTEGSKSSETLSREPVTLHAGDREDPSGCFTFTSAASPSVKNSASRSFNSSPKKSPVHSLLTSSVEGSIGSTSQYRSAKPIHSSDSVKDSQSPPIETTGKTCRKLQNRLESLQTLVEDLQLKNQAMSSMIRNQEKRIQKVKDQEKMLLK

SEQ ID NO: 18414 - protein, 406 aa, Homo sapiens
  Payload ID: 3679
  Gene Symbol: CCDC158
  Gene Name: coiled-coil domain containing 158
  Uniprot ID: Q5M9N0
  ENSP ID: ENSP00000401742
MESKAWESNNEDLLSSSGVTSNGGSSSSFFVSSIRGTIIENTSSAGTLTQVPFFPKYEVELDSPRKIIPSPGKEHFERVLEEYSHQVKDLQRRLNESNELHEKQKFYLRQSVIDLQTKLQEMQMERDAMADIRRRESQSQEDLRNQLQNTVHELEAAKCLKEDMLKDSNTQIEQLRKMMLSHEGVLQEIRSILVDFEEASGKKICEHDSMSTLHFRSLGSAISKILRELDTEISYLKGRIFPVEDQLEALKSESQNKIELLLQQHQDRIEQLISEHEVEITGLTEKASSARSQANSIQSQMEIIQEQARNQNSMYMRQLSDLESTVSQLRSELREAKRMYEDKENLQNSPLRIWTSRSCHYWLCRFGFTLNFRFLTTKISPDVDSAFIFTTLKAVGAEFCIKKVMI

SEQ ID NO: 18415 - protein, 297 aa, Homo sapiens
  Payload ID: 3680
  Gene Symbol: CCDC159
  Gene Name: coiled-coil domain containing 159
  Uniprot ID: P0C7I6
  ENSP ID: ENSP00000402239
MGEHEQVKPLETSSSKVKAKTIVMIPDSQKLLRCELESLKSQLQAQTKAFEFLNHSVTMLEKESCLQQIKIQQLEEVLSPTGRQGEKEEHKWGMEQGRQELYGALTQGLQGLEKTLRDSEEMQRARTTRCLQLLAQEIRDSKKFLWEELELVREEVTFIYQKLQAQEDEISENLVNIQKMQKTQVKCRKILTKMKQQGHETAACPETEEIPQGASGCWKDDLQKELSDIWSAVHVLQNSIDSLTLCSGACPKASSLRGHKGHQCLSPPLPSWDSDSDCDQDLSQPPFSKSGRSFPPA

SEQ ID NO: 18416 - protein, 155 aa, Homo sapiens
  Payload ID: 3680
  Gene Symbol: CCDC159
  Gene Name: coiled-coil domain containing 159
  ENSP ID: ENSP00000465218
  MOD_RES (1)..(1): Any amino acid
XQKLQAQEDEISENLVNIQKMQKTQVKCRKILTKMKQQGHETAACPETEEIPQGASGCWKDDLQKELSDIWSAVHVLQNSIDSLTLCSGACPKASSLRGHKGHQCLSPPLPSWDSDSDCDQDLSQPPFSKSGRSFPPGADPPQSPPPPISLLTCP

SEQ ID NO: 18417 - protein, 36 aa, Homo sapiens
  Payload ID: 3680
  Gene Symbol: CCDC159
  Gene Name: coiled-coil domain containing 159
  ENSP ID: ENSP00000465290
MGEHEQVVCEALGDQLFQSQSQDHCDDSRLPEAPAM

SEQ ID NO: 18418 - protein, 140 aa, Homo sapiens
  Payload ID: 3680
  Gene Symbol: CCDC159
  Gene Name: coiled-coil domain containing 159
  ENSP ID: ENSP00000465560
MIPDSQKLLRCELESLKSQLQAQTKAFEFLNHSVTMLEKESCLQQIKIQQLEEVLSPTGRQGEKEEHKWGMEQGRQELYGALTQGLQGLEKTLRDSEEMQRARTTRCLQLLAQEIRDSKKFLWEELELVREEVTFIYQKL

SEQ ID NO: 18419 - protein, 36 aa, Homo sapiens; identical to SEQ ID NO: 18417
  Payload ID: 3680
  Gene Symbol: CCDC159
  Gene Name: coiled-coil domain containing 159
  ENSP ID: ENSP00000465744

SEQ ID NO: 18420 - protein, 129 aa, Homo sapiens
  Payload ID: 3680
  Gene Symbol: CCDC159
  Gene Name: coiled-coil domain containing 159
  ENSP ID: ENSP00000465790
MIPDSQKLLRCELESLKSQLQAQTKAFEFLNHSVTMLEKESCLQQIKIQQLEEVLSPTGRQGEKEEHKWGMEQGRQELYGALTQGLQGLEKTLRDSEEMQRARTTRCLQLLAQEIRDSKKFLWEELELV

SEQ ID NO: 18421 - protein, 193 aa, Homo sapiens
  Payload ID: 3680
  Gene Symbol: CCDC159
  Gene Name: coiled-coil domain containing 159
  ENSP ID: ENSP00000466796
ETSSSKVKAKTIVMIPDSQKLLRCELESLKSQLQAQTKAFEFLNHSVTMLEKESCLQQIKIQQLEEAQEDEISENLVNIQKMQKTQVKCRKILTKMKQQGHETAACPETEEIPQGASGCWKDDLQKELSDIWSAVHVLQNSIDSLTLCSGACPKASSLRGHKGHQCLSPPLPSWDSDSDCDQDLSQPPFSKSG

SEQ ID NO: 18422 - protein, 109 aa, Homo sapiens
  Payload ID: 3680
  Gene Symbol: CCDC159
  Gene Name: coiled-coil domain containing 159
  ENSP ID: ENSP00000466882
MIPDSQKLLRCELESLKSQLQAQTKAFEFLNHSVTMLEKESCLQQIKIQQLEEVLSPTGRQGEKEEHKWGMEQGRQELYGALTQGLQGLEKTLRDSEEMQRARTTRCLQ

SEQ ID NO: 18423 - protein, 38 aa, Homo sapiens
  Payload ID: 3680
  Gene Symbol: CCDC159
  Gene Name: coiled-coil domain containing 159
  ENSP ID: ENSP00000467391
MGEHEQVALPRTRLWSVQLTGPGLQSQRPWDALLLGTQ

SEQ ID NO: 18424 - protein, 297 aa, Homo sapiens; identical to SEQ ID NO: 18415
  Payload ID: 3680
  Gene Symbol: CCDC159
  Gene Name: coiled-coil domain containing 159
  Uniprot ID: P0C7I6
  ENSP ID: ENSP00000468232

SEQ ID NO: 18425 - protein, 325 aa, Homo sapiens
  Payload ID: 3681
  Gene Symbol: CCDC160
  Gene Name: coiled-coil domain containing 160
  Uniprot ID: A6NGH7
  ENSP ID: ENSP00000359845
MDARRKHWKENMFTPFFSAQDVLEETSEPESSSEQTTADSSKGMEEIYNLSSRKFQEESKFKRKKYIFQLNEIEQEQNLRENKRNISKNETDTNSASYESSNVDVTTEESFNSTEDNSTCSTDNLPALLRQDIRKKFMERMSPKLCLNLLNEELEELNMKYRKIEEEFENAEKELLHYKKEIFTKPLNFQETETDASKSDYELQALRNDLSEKATNVKNLSEQLQQAKEVIHKLNLENRNLKEAVRKLKHQTEVGNVLLKEEMKSYYELEMAKIRGELSVIKNELRTEKTLQARNNRALELLRKYYASSMVTSSSILDHFTGDFF

SEQ ID NO: 18426 - protein, 325 aa, Homo sapiens; identical to SEQ ID NO: 18425
  Payload ID: 3681
  Gene Symbol: CCDC160
  Gene Name: coiled-coil domain containing 160
  Uniprot ID: A6NGH7
  ENSP ID: ENSP00000427951

SEQ ID NO: 18427 - protein, 118 aa, Homo sapiens
  Payload ID: 3682
  Gene Symbol: CCDC163P
  Gene Name: coiled-coil domain containing 163, pseudogene
  ENSP ID: ENSP00000485784
MNTSLSWFEQLDVLLNATDGNVVRNKQWLYPLGVSTELIGLCICFFCSSGCIFLGSPPQNSTAVTPAVLWEESEIMQKELKLLQYQLSQHQELLLKQLAEGRQAQVGSWKDLHSCCPI

SEQ ID NO: 18428 - protein, 97 aa, Homo sapiens
  Payload ID: 3682
  Gene Symbol: CCDC163P
  Gene Name: coiled-coil domain containing 163, pseudogene
  ENSP ID: ENSP00000486028
MNTSLSWFEQLDVLLNATDGNVVRNKQWLYPLGVSTELIGLCICFFCSSGCIFLGSPPQNSTAVTPAVLWEESEIMQKELKLLQYQPAPGAAAETAG

SEQ ID NO: 18429 - protein, 145 aa, Homo sapiens
  Payload ID: 3682
  Gene Symbol: CCDC163P
  Gene Name: coiled-coil domain containing 163, pseudogene
  ENSP ID: ENSP00000486197
MNTSLSWFEQLDVLLNATDGNVVRNKQWLYPLGVSTELIGLCICFFCSSGCIFLGSPPQNSTAVTPAVLWEESEIMQKELKLLQYQLSQHQELLLKQLAEGRQAQVGSWKIPRGAPFLTWSPASFSSMPRVLSKRTYSFGAPKCS

SEQ ID NO: 18430 - protein, 66 aa, Homo sapiens
  Payload ID: 3682
  Gene Symbol: CCDC163P
  Gene Name: coiled-coil domain containing 163, pseudogene
  ENSP ID: ENSP00000486505
MNTSLSWFEQLDVLLNATDGNVVRNKQWLYPLGVSTELIGLCICFFCSSGCIFLGSPPQASTRSCC

SEQ ID NO: 18431 - protein, 118 aa, Homo sapiens
  Payload ID: 3682
  Gene Symbol: CCDC163P
  Gene Name: coiled-coil domain containing 163, pseudogene
  ENSP ID: ENSP00000487061
MNTSLSWFEQLDVLLNATDGNVVRNKQWLYPLGVSTELIGLCICFFCSSGCIFLGSPPQNSTAVTPAVLWEESEIMQKELKLLQYQLSQHQELLLKQLAEGRQAQVGSWKLLIQSSGQ

SEQ ID NO: 18432 - protein, 439 aa, Homo sapiens
  Payload ID: 3683
  Gene Symbol: CCDC166
  Gene Name: coiled-coil domain containing 166
  Uniprot ID: P0CW27
  ENSP ID: ENSP00000437315
MAPKKKRGPSAGSQPGGAAAAGAEQPLSERAQYLQREHALLSEQLDTCEESVDQVLRENAFLDREALRLREENRLYASYVSARAQRCAKAIVRLDEQNRVDLAQIHWQRAELASLYHGREDGVRAQLLEMEARAAQMAQQVQELQPYKVLQLEQLARIRALERELLHMRVEHTQLLHRVKRRFLEDKAAFEREARQRVQSLARRAEREAVRALVAHTQAIKADNGRLRQELLLLLRRTQLLHHTRRQLLEQREQLHREHEDTRDLARVHGWLRRGPGGPPLWERPAFSQPTSRPGSLAAPISPSRAASQTPSVVPSRAAPRASSVVPSREASRVPSLVLSSMDSRVPSLATSKVGSRMPSLTASRAGSRALSLVQSLEGSGISSGSSPRVSSQDTLRSTKSGPKLLSGLSRDRDPALLPPQSEDSVNAEAAAEASPGRA

SEQ ID NO: 18433 - protein, 439 aa, Homo sapiens; identical to SEQ ID NO: 18432
  Payload ID: 3683
  Gene Symbol: CCDC166
  Gene Name: coiled-coil domain containing 166
  Uniprot ID: P0CW27
  ENSP ID: ENSP00000437468

SEQ ID NO: 18434 - protein, 97 aa, Homo sapiens
  Payload ID: 3684
  Gene Symbol: CCDC167
  Gene Name: coiled-coil domain containing 167
  Uniprot ID: Q9P0B6
  ENSP ID: ENSP00000362507
MTKKKRENLGVALEIDGLEEKLSQCRRDLEAVNSRLHSRELSPEARRSLEKEKNSLMNKASNYEKELKFLRQENRKNMLLSVAIFILLTLVYAYWTM

SEQ ID NO: 18435 - protein, 7081 aa, Homo sapiens
  Payload ID: 3685
  Gene Symbol: CCDC168
  Gene Name: coiled-coil domain containing 168
  Uniprot ID: Q8NDH2
  ENSP ID: ENSP00000320232
MSKQYYSFKKGVGSGLEDNTFMTLWDFLESWIIQNDWVAIFFIILLGIIFEIILMKACASFWKKPTLPEKGSSDVQETEDSCPKSRKLAPENWSVINSSSGERVGTFLEKRITSSLTSEEKECNFEDRILFSREILWSGTSESEDQVSPSSESHVPSSNGISSSLPLFYSEVEETCLSHTEHPDREYETIQFSSKKLFSMMKTNKNKNSGFSSDLSFSASRFTVENEDLDVAPCPLAHLFLSRDQVRLLEENVRNQIPSKPKTKLGSRTTYQCSRSQESLNQNQPSVGMVISVQAQDSFPGQNAFQNQGLYEVQFTSQAQYINHNQESIKSQPESKASNFAQPEDVMKKPFSSSTQDSFQSQDLDRNQHFVEVPSIVEAKYSVKGLESDEHLGEDQHCVWFIDSNKVKYSIKGQDTIFKNAEFLVLTLNPNLVTEDMPQLRSVKAQGQQQIVSSELNQDSVYSSVPLLSTIKGQKNRRKTPDSKSKLSLNVPSLKAKKTPTSQVFQITVCHTLKNRNELGCKNNTEKKELHERKDISDIALHLISVSKLILPYVKNYSRKQLVKVMPGLIKCGHFLQKQNKSPDTEKINYAGPLEETGISDITKKEKEYDKENKRLKNISPKMLPQLEQSFMVNTVQLKAPCLLVETNGKSKESLKDSITQAKGIGITEFHVLNSKKPFDLHIPKHKTSLEEAISKPMQKLVSSPEMESNNRMKIQEDLQSSENSHLQLSNGEELPTSTPKTQRCFPRENTQKQKDFLELVLELSNVGLLISPGSKMHKSSEELEAIKIQVNTESVNLKESKPLILNVTEDSDLRESEELECNTGSNITNMHQDKETSDAFHSATYTTISQLPDTETHSISKAKADTLRIIRLSHSASKQEKLPDEKETQNAEYIDKSCTFKKPQQCDRKEQEKEANSELTQGFRFSIHLKQKPKYVKFQMEQISSGSSKAPNKEQEVQPQTLSTQTILENSPCPMMDPFQVEKVKQSTDRPTDRESAGDPKNPLTMPENLPVGELLIETTEYSVPFGGNLQKTTDSHIAEEKEDVKRYLPAVALGSFNNHLLTLPYFKRQEIKKKLSETKSVLSVKYVIMKVKKPAISLMPYINICGTSNHRKKMGGNFEIIIKQILQDKIAAGMLLNVIYPPMSILPNTRMYSRLNAENHSHIKLVQEESQIEREEKYPYFINEGNESQNTLDAKLQDEVKGVKETLPKAVLHDSCNLGLDAHLEKEIKTEKEMHQPIPFTETIIESVVSPIMELSHAENVKSTQKTQTDCKCTADSETPSPISGKSLIGDPLNQTRESYIPSNGSDTREMGYCFAEEKTEIPKDLPATSPETFNYCTPVLSCSKVMKKRVTFALTTSTAKPKCVNTKAVKPSISETVSVTSHRKKSELDFKTKFKKINQTKGLVPECLNTLCSPMHSRLQREFCLPASQLKQGETADKTYTDVFAKNSISHDREEKLQDGKEEEHKVLLEAAPQLSQHLGSEAGQMKEIHLESDPVLNCLTLELHINGQRLQHQTGFEQTTLETSLQMGPLEAEELQKANETENDIKVLGGPKIPPPKALQALENSDGLILNAYQKDNELVKSDEELNQPGSTNIQVQPQTHFTQTILKSTSCPTLDQFPFEKVESHVRFSPLKSGEAKVDEIIFYAREGGISSDSSHQKEQAGGTEKKETAIFGSCMPALSTPKTTRNLKQFSDMKTLVNPKCGIIKAKKPSISYMLNIRAGAGPKRRKELSCNLTTKMKELHQGKKGVDETYAFLTMTPDINKYSKVETEKDTLREKRLSSTQVKQDTSPHEDSITSRDIKETLLQDEEQEERKQEALLKVIPQHLQHFMFRSGQGKDLDFHKLENQGSRKILFVTKQDVPQQLQPAEPIQREETKKCLQTQNGTICTVNSKLLPLKSEDSVNGEVLTGAIKRGVPTDRKCMGEQHNSGKGEKAEFNKDLQATVLELQKSPHGGEAQKANLTDMESGSSNAMNMNVQHEREDKNIQKMLTESVPCYSQHLRFSTHQMKDPDPCKSGSEPKSPEGRSWNLSHIVQKTKQETHFRETVLEPISGYMMKQSPHMQEGIKCMEGLKTSFPKTGKSKIGSIPRDTPWDENPRRKWDSSISEKTAWNQKNLQTVLKPLDFSSLMSSEYESRSYTLEFIGKKSMSPKCVTLKAKQLRILQLFNIIRYSTENHRKKKQHRFKYKMKGKQWYTSIGEALLSATEYAKSTTSKSMIDKLLYNTAARCILSNRTRRQNLDGHITEEKEEVQENVAAIFLGLLDFFMPVLSDSKNQRNTAQLSEKEIIFNAKCLTMKEKKSSISQIHKINRESTRKHRKKCKSYLKTVSNRKCQENHGHITEEEEEVQENSPATFLGPLDFFMPVLSDSKNQINTIQLSERKIILNPKCLTMKEKKPPISQIHKISGQFTTKHRKKLESNLKTKLKAMWQGENVADTFPNTTSFTPDSSDIKRQSGFQTEIDMRISGLSHTQPTQIESLAEGIARYSDPIDKRRTSNLVKGAKLHDRESGEEKQEHLTEMDPFYAENFMANTYLRKDRHLGKSEDVLLGETFFSKSQIYKGNSEKNVKIEKNKNGKESLKVGLARMEKSDNCAELSEATDDAISNKYDKQNIGHSVLKENAFCNLAAIVPDSVGRHSPASEEMKRQNGRLKMADRSSPQGRPLQAKQSAVSQSPDTAGYAVVSNNKEQKQNFKAQKTEAEVDLIDQEAKINVAEEFNPESVFFSKIHPLQIENKKEFKTADWKTRADPKTFALPKKQQELCVSGTIWSYPNPYTSISPKIIRHKDKAKTADVESTMHTKQIKLKAKRITVSQLLEYGTASNKKELRGNIQQQKSFQLSKNAVHRVLKAVYDSGYCVSSIKKLTEVKMEKDKPKDRTCILPQPKLEKPLKEMQRSLSGCTDMSSILRKQEQDIREKEQKHQSISEDISQYYIGPLRISSQQINYSSFDAPRIRTDEELEFLIAQRAKEKDVGIAKHSVSIPWEREGSKRLDIPLNSKGQNIFFTELDTSQQKTCQEQELLKQEDISMTNLGSMACPIMEPLHLENTGKVTEEEDVYINRKISSHVLGKEGLKETDIFVGSKGQKFLCTNSEVQHKVPAEQKEQVNPDHVPESILDSESFLSKDPLHLKQAVNTARKENVTISESFNENLWGKEQSKLDITLKSNRQKMDFSKKLRMKHLSNYYQNKENILESVLPCILHQLYIENPKKEGSAEEIMSSKVLSPMVEKASHEVGIPVDQPPCSEGIHLNIKGRKEHPQESTHEAFPASVSHSLMDVLQIKSPKVKKALKAINSLGYLTSNTKGIGLLFPRQAEKEEKYTYKALPKPASHSKTDLFQFNASMQQEKLDAMDIPHYDYLTSQTREAVKQMDVIVGYTQNSKKRQDLLKTGQKWQYLPISYENFWEHISCPQKYPCLLQHLMPQEKEALSEGGNLSSRTPGLDLFSADQLSTITKNRLEWIVPLISPRQMKKQDSMLPLGSYHKTIKYASLLFPKGMKSSDGVQVFDLISNNSSPKLRLGKKIETQKANEKVQKEVCLPITLHSLSASMPILQESKGQKDSVEQVIRKGVICHKRRTSKWKKSVFSHILNTSDCGASSNRLEMQWNMTDKMVNVKHRMSEIDLVAAKICESILSLPHFKLNKETIDGVISSNVKSTKQHISQGKNDRVKAMDMKRIKSPNIILKPRKSSLSHILSIKEFPLLLDIIKQEGKMQEGKGKSSMKLTNLCTSLPSLSHSNSNSRTKAGKDKSGTLKGCLPPLKLQASSNARRVSSAESINRDSLSNVIESKCFPQKKKEDRENIVDVKDVMGLKCITLKGKKSLFRHLLHGKEPQRSNKKLEKMTQEDESNLNVVQNKLCASILSPPHLEWNPRIKEVYMRGITRFCLSSSTQQELSDTMEKCEQPIDDSLSSIEKAKHMPQKDKDRVEKALEKIMHSKRIALEVKQPSIFQELELNIKEKGGKIQEDKEVEIWSKPFASISFLPYSKVGTIEGEEAMRIKMRSSFSQPNLQESSDTEKTAYEKCISDNISNSVKKALESILQKEQRQKMEKIRALKKMKSSISQGIQLDIKEQEKRIEHIKGEPSVLLTNACASIPSPSHLQLDTRREKAEYVTEITRYYLPELSHQKSSEAGEKADGVASKGDITIKVQKAKDYMQQKEDDEVKISAKKDIMHPEDKGLKAKKALSQDLPLNTKEPGKMDQEAQEQGKEDREGEEQGKEDRRGAGQEKVDREDKEQGKMDHEVEEQQKADGVGIEQGKMDGDKNEQERVLFLYLPSNSSLTHYILDTRIEGEEDQQGIIRPGILQPRHQKSSETGKKANGVPSEGDSASEVQKAKDYMQQKEEDEVKISAEKDLMHPEDKDLKGKKALSQNLPLNPKEPGKRDGEGQEQGKEDGEGEEQGNRDGETEEQQQADGVGTEQEKRDGHKSKQETVLFLHLPSESSLTCYELNTRKEGEEDLQGIIKSATLQLRQQKSFDAGKIAHTKSFGVDSSNDVKTVQEYKPQKEVDRGKTVSVDYIMQPEGTIFEAEQLSLPHTLNIPGSSGSKTREVLTNIKEKLRHVQERKSELDVFLTIPSLSHCKLDKRTAGKKEEQGVTRSFLPPSWHMESSDTGKLKYTLSYLNDITGDSNRTKYMAQIQKDKANISEKSVMHPEYIAVKAEKSPLSHILKTKELQVNISQQGEKAQEGEVEIVVLLSKTCPFVTSSAFLELDSIKEEEGEPRITRSFMPHLEIQESLPSRQTAPTKPTESLVKKEKQLLPQKEDRVQTVSMHGLMHPNGAVFKAKTSAPPQVFSITEHSPLSKRKEPQWGMKERAGQKQDRTGRPHVILTKTHPFMPSLSHHRFSPSQPKLPISSGAGKSRLANSNEGISSHKVILKANQQMPYKEAKDRVKIEGREGRILPKRIHLRAEALPLALLCNGKNYSLHIEEQGEGVQESKKEPGVVPRKSASFPPPPFYLNCDTRRNEKEGTLGKTQFSFPPLKIQDSSDSGKKAYTESLHGYTLSNSKGPVQPTAQGEEKGGLRIDMEDKMLPKCTDLKAKQLLLSDILNTKKLQWKSKEQKRKIQEDKNKQVKGLPSINTSLLTPPYLKFDTTEGQENVIRIAKVSLPQSRSKESSDAGRIACPEATHGELSSDVKQLKAHLLQKEEKDREKVADMTSVLDPNKMYLKAKKSPVLHTHSFSDLQWKTREQEEEKVQKVKSGPGVMLSKSPSRSSPLHLNVNTGFQEESIPILTRPSFPLVKLQVSPDTEGGTCIRPIAGDILIYLQKGKHVSQNKEEDDVQIVSILIFPKHQEEKVQECEGEPGVVLTKSTSLPSLSQLELDKETHLGNEMLRLKRPILRRISHIGETVHRESVVGDIPKDVKNEKQHIPQKEERNQKKIIDMRGTDITLKSKKSPRSCMLHRTELHVNIGGQGRKEHEGQDKPPGMIQRKMCILFSKPLPSNLKLERATHADEERLGGKTSFVLPLMPSALPDTEKTADAEARSGDVRKGKPHRSQKENRHEVKTIDMRFRIHCQEARISPMSHILNAKELVLNINKLEKKVHKDKDEACVVLSRTFLSIPSAPPLYLDSGNKTDKDTPGITGSSCPQRTLHVPSNTQKITNRDSVEGVDKNVVKQAEQYVPRPEAEQQLTSNFMISVQQRNQPSRVRSEEDLNQLVLNSRDEDIYFTGFGTIRSGKRPEWLFTGKKAQPVKYKTETLTAFLSYPTMDATKMGGLEEDTEIMDNLNHKISPKASVSLIRKISKELYVTLGTPANSKGFSVSERYAHQQETSSKVSPELAGSCKFDKPKEDGQSNDRISKMFSPKVLAPQTKGSLKKISIVTNWNAPQNIEEQDIVMKKQVIRRCEHGHKTRTNTILSKFPLQSGKQKTPSETDVDKKTTAHLSLQMLPGIHMDMTEIDPAKGGRKQALLISEQEEGVLEFLPKSLFPPWTFQFQSGDLEEKHQTDANTNINLEQKKLEMDNDSTVNQKEGKLKIGTNRALHLQEEKTEMHKARTANLEKERGRMDTSSSAHPHLLSLKAEESQMKTQVITHRENSRLIMQKQKKELEASNAKQSIQLQKLFQRNVLDSFYSYVPLSPKRKDQKGRLTIRDLKRELSTKYLTMKIQNHPIPQMLNITGRGTPSNRKKLEYDVKLKNIASWSKDVSGIFIRSLSISIMRSPHTDPKTNLEREKRICLPKFQEKSPNTSEMSKRDTLTIVKGEQNFTNTVPQDPQPFAVDKQQMQKLPNVKSEANLRSEMNKKYLKAQTKERIVPEHDVSRIIKKPDLRIIEQEEKILKRILTPTECPSMLEDPKLPKQRDQSEPVWDMTTQKVQQQKAFPGTVPIPPQVKSSEVKIVADSTNAEHLLPICEATKAISESQVKNMIQDKVSSDKLDNIQAYKPDDLKSPPFPEGPDTISTAIYPKTQHKSLLEQFTPKEKNKLTSHLESKALEIQLNLIPEMARKSLQMFNFYPKGTISKDNSWRFYSRHKTMNFMSLEGTDTIEPNSKHKHQKDSPLASNMKTLIVDVSSDSEETITKLQSINKLENGTSAVTSASEMLLPHTLQNHSVKEKGKLLMHFSVKTLEIQMKAFPRIVRESYAMTSAHERKKPLSNCIHPGFTGPKRQNRILLLSEEKSLHQIDLDLQYKYLRFLLGLPVGSTFPKPNVLPKHSKLNTIAVCKNVNAGGQSGSLSIDTELLEQHISFKKQSPHENSSLIRKFPQPTLVCASDRDLHSPRKKDTQVLSESEFHVTPEKNKQYHVWFQERNTCESVDLRTQRNATGSAVSCETQISEDFVDIQTDIESPADLDECSCLEVSESEECVFLEANSYLSQESENILFELQTGIPLENVYKITTDLKSFYSEDSGSHCTRECRKETLIITPPSCKSHKSRKYRSSSKMKSPDWLCHSSSNTAEIQSRSSSVSFSEEKISWTTKSRTSYSSAPLTESNIKSHLAKNQGKSHRHPESQERKKARSDLFRKNSSHWDHDYSCTHSKGKRDRKKRVYDYESERLDCFQSKHKSASKPHHDDINFYSERKQNRPFFFACVPADSLEVIPKTIRWTIPPETLRKRNFRIPLVAKISSSWNIWSSSKKLLGSLSGSLTTVFHS

SEQ ID NO: 18436 - protein, 214 aa, Homo sapiens
  Payload ID: 3686
  Gene Symbol: CCDC169
  Gene Name: coiled-coil domain containing 169
  Uniprot ID: A6NNP5
  ENSP ID: ENSP00000239859
MKEERNYNFDGVSTNRLKQQLLEEVRKKDAVQLSIFELRHKITELEAKLNTDNEGSEWKTRYETQLELNDELEKQIVYLKEKVEKIHGNSSDRLSSIRVYERMPVESLNTLLKQLEEEKKTLESQVKYYALKLEQESKAYQKINNERRTYLAEMSQGSGLHQVSKRQQVDQLPRMQENLVKTGRYNPAKQKTVSAKRGPVKKITRPNHLPELHP

SEQ ID NO: 18437 - protein, 141 aa, Homo sapiens
  Payload ID: 3686
  Gene Symbol: CCDC169
  Gene Name: coiled-coil domain containing 169
  Uniprot ID: A6NNP5
  ENSP ID: ENSP00000239860
METLQESLNTLLKQLEEEKKTLESQVKYYALKLEQESKAYQKINNERRTYLAEMSQGSGLHQVSKRQQVDQLPRMQENLVKTLLLKEELDPLKVSCLETLGFSAAGVAGPENRTCLGQKALWPACLHGSSTLAVCQTHLKS

SEQ ID NO: 18438 - protein, 112 aa, Homo sapiens
  Payload ID: 3686
  Gene Symbol: CCDC169
  Gene Name: coiled-coil domain containing 169
  Uniprot ID: A6NNP5
  ENSP ID: ENSP00000369191
MPVESLNTLLKQLEEEKKTLESQVKYYALKLEQESKAYQKINNERRTYLAEMSQGSGLHQVSKRQQVDQLPRMQENLVKTGRYNPAKQKTVSAKRGPVKKITRPNHLPELHP

SEQ ID NO: 18439 - protein, 139 aa, Homo sapiens
  Payload ID: 3686
  Gene Symbol: CCDC169
  Gene Name: coiled-coil domain containing 169
  Uniprot ID: A6NNP5
  ENSP ID: ENSP00000369193
MPVESLNTLLKQLEEEKKTLESQVKYYALKLEQESKAYQKINNERRTYLAEMSQGSGLHQVSKRQQVDQLPRMQENLVKTLLLKEELDPLKVSCLETLGFSAAGVAGPENRTCLGQKALWPACLHGSSTLAVCQTHLKS

SEQ ID NO: 18440 - protein, 91 aa, Homo sapiens
  Payload ID: 3686
  Gene Symbol: CCDC169
  Gene Name: coiled-coil domain containing 169
  ENSP ID: ENSP00000420862
MPVESLNTLLKQLEEEKKTLESQVKYYALKLEQESKAYQKINNERRTYLAEMSQGSGLHQVSKRQQVDQLPRMQENLVKTFKVTKSPKGRK

SEQ ID NO: 18441 - protein, 139 aa, Homo sapiens; identical to SEQ ID NO: 18439
  Payload ID: 3686
  Gene Symbol: CCDC169
  Gene Name: coiled-coil domain containing 169
  Uniprot ID: A6NNP5
  ENSP ID: ENSP00000425252

SEQ ID NO: 18442 - protein, 241 aa, Homo sapiens
  Payload ID: 3686
  Gene Symbol: CCDC169
  Gene Name: coiled-coil domain containing 169
  Uniprot ID: A6NNP5
  ENSP ID: ENSP00000426174
MKEERNYNFDGVSTNRLKQQLLEEVRKKDAVQLSIFELRHKITELEAKLNTDNEGSEWKTRYETQLELNDELEKQIVYLKEKVEKIHGNSSDRLSSIRVYERMPVESLNTLLKQLEEEKKTLESQVKYYALKLEQESKAYQKINNERRTYLAEMSQGSGLHQVSKRQQVDQLPRMQENLVKTLLLKEELDPLKVSCLETLGFSAAGVAGPENRTCLGQKALWPACLHGSSTLAVCQTHLKS

SEQ ID NO: 18443 - protein, 112 aa, Homo sapiens; identical to SEQ ID NO: 18438
  Payload ID: 3686
  Gene Symbol: CCDC169
  Gene Name: coiled-coil domain containing 169
  Uniprot ID: A6NNP5
  ENSP ID: ENSP00000427495

SEQ ID NO: 18444 - protein, 59 aa, Homo sapiens
  Payload ID: 3687
  Gene Symbol: CCDC17
  Gene Name: coiled-coil domain containing 17
  ENSP ID: ENSP00000361114
MDSHSGEPALLPCGTCDMVFRSSALLATHTQRFCIGHPTQEMTFGAQASVATEPQRAAN

SEQ ID NO: 18445 - protein, 613 aa, Homo sapiens
  Payload ID: 3687
  Gene Symbol: CCDC17
  Gene Name: coiled-coil domain containing 17
  Uniprot ID: Q96LX7
  ENSP ID: ENSP00000389415
MDSHSGEPALLPCGTCDMVFRSSALLATHTQRFCIGHPTQEMTFGAQASVATEPQRAAVVPQEHQGVPQEPQGLPDQQASRSALKRLTEEEMRPWITEVPRVFAGPWTRSEARPQSPMSEAVGSPSERLRALFRTRARRVAEMEAQSRALQLRGEELSRRLQVVACTRGGMSRLFGLEQEIRELQAEAGRTRGALEVLGARIQELQAEPGNPLSSRREAELYSPVQKANPGTLAAEIRALREAYIRDGGRDPGVLGQIWQLQVEASALELQRSQTRRGRAGATSGELPVVEAENRRLEAEILALQMQRGRAPLGPQDLRLLGDASLQPKGRRDPPLLPPPVAPPLPPLPGFSEPQLPGTMTRNLGLDSHFLLPTSDMLGPAPYDPGAGLVIFYDFLRGLEASWIWVQLRTGLARDGRDTGRTTALPPALCLPPPPAPGPMGNCAILASRQPVPRLPPSSSVSLVCELQVWQGLAWARAPQPKAWVSLGLFDQDQRVLSGRWRLPLRALPLDPSLSLGQLNGIPQAGQAELFLRLVNARDAAVQTLAEINPASVHEYQYPPPVSSTSSLEASFLTPAVGFADPPPRTEEPLSGVKDRDEGLGPHHSSDLPPVSF

SEQ ID NO: 18446 - protein, 110 aa, Homo sapiens
  Payload ID: 3687
  Gene Symbol: CCDC17
  Gene Name: coiled-coil domain containing 17
  Uniprot ID: Q96LX7
  ENSP ID: ENSP00000411335
MDSHSGEPALLPCGTCDMVFRSSALLATHTQRFCIGHPTQEMTFGAQASVATEPQRAAVSSTSSLEASFLTPAVGFADPPPRTEEPLSGVKDRDEGLGPHHSSDLPPVSF

SEQ ID NO: 18447 - protein, 622 aa, Homo sapiens
  Payload ID: 3687
  Gene Symbol: CCDC17
  Gene Name: coiled-coil domain containing 17
  Uniprot ID: Q96LX7
  ENSP ID: ENSP00000432172
MDSHSGEPALLPCGTCDMVFRSSALLATHTQRFCIGHPTQEMTFGAQASVATEPQRAAVVPQEHQGVPQEPQGLPDQQASRSALKRLTEEVQWLRLSLQEMRPWITEVPRVFAGPWTRSEARPQSPMSEAVGSPSERLRALFRTRARRVAEMEAQSRALQLRGEELSRRLQVVACTRGGMSRLFGLEQEIRELQAEAGRTRGALEVLGARIQELQAEPGNPLSSRREAELYSPVQKANPGTLAAEIRALREAYIRDGGRDPGVLGQIWQLQVEASALELQRSQTRRGRAGATSGELPVVEAENRRLEAEILALQMQRGRAPLGPQDLRLLGDASLQPKGRRDPPLLPPPVAPPLPPLPGFSEPQLPGTMTRNLGLDSHFLLPTSDMLGPAPYDPGAGLVIFYDFLRGLEASWIWVQLRTGLARDGRDTGRTTALPPALCLPPPPAPGPMGNCAILASRQPVPRLPPSSSVSLVCELQVWQGLAWARAPQPKAWVSLGLFDQDQRVLSGRWRLPLRALPLDPSLSLGQLNGIPQAGQAELFLRLVNARDAAVQTLAEINPASVHEYQYPPPVSSTSSLEASFLTPAVGFADPPPRTEEPLSGVKDRDEGLGPHHSSDLPPVSF

SEQ ID NO: 18448 - protein, 564 aa, Homo sapiens
  Payload ID: 3687
  Gene Symbol: CCDC17
  Gene Name: coiled-coil domain containing 17
  ENSP ID: ENSP00000437072
MDSHSGEPALLPCGTCDMVFRSSALLATHTQRFCIGHPTQEMTFGAQASVATEPQRAAVQWLRLSLQEMRPWITEVPRVFAGPWTRSEARPQSPMSEAVGSPSERLRALFRTRARRVAEMEAQSRALQLRGEELSRRLQVVACTRGGMSRLFGLEQEIRELQAEAGRTRGALEVLGARIQELQAEPGNPLSSRREAELYSPVQKANPGTLAAEIRALREAYIRDGGRDPGVLGQIWQLQVEASALELQRSQTRRGRAGATSGELPVVEAENRRLEAEILALQMQRGRAPLGPQDLRLLGDASLQPKGRRDPPLLPPPVAPPLPPLPGFSEPQLPGTMTRNLGLDSHFLLPTSDMLGPAPYDPGAGLVIFYDFLRGLEASWIWVQLRTGLARDGRDTGRTTALPPALCLPPPPAPGPMGNCAILASRQPVPRLPPSSSVSLVCELQVWQGLAWARAPQPKAWVSLGLFDQDQRVLSGRWRLPLRALPLDPSLSLGQLNGIPQAGQAELFLRLVNARDAAVQTLAEINPASVHEYQYPPPVRAQLQLGTPQLHIPVWLVWLTASLY

SEQ ID NO: 18449 - protein, 715 aa, Homo sapiens
  Payload ID: 3688
  Gene Symbol: CCDC170
  Gene Name: coiled-coil domain containing 170
  Uniprot ID: Q8IYT3
  ENSP ID: ENSP00000239374
MSLDCTSHIALGAASPAPEETYDHLSEVPVTREQLNHYRNVAQNARSELAATLVKFECAQSELQDLRSKMLSKEVSCQELKAEMESYKENNARKSSLLTSLRDRVQELEEESAALSTSKIRTEITAHAAIKENQELKKKVVELNEKLQKCSKENEENKKQVSKNCRKHEEFLTQLRDCLDPDERNDKASDEDLILKLRDLRKENEFVKGQIVILEETINVHEMEAKASRETIMRLASEVNREQKKAASCTEEKEKLNQDLLSAVEAKEALEREVKIFQERLLAGQQVWDASKQEVSLLKKSSSELEKSLKASQDAVTTSQSQYFSFREKIAALLRGRLSMTGSTEDTILEKIREMDSREESRDRMVSQLEAQISELVEQLGKESGFHQKALQRAQKAENMLETLQGQLTHLEAELVSGGVLRDNLNFEKQKYLKFLDQLSQKMKLDQMAAELGFDMRLDVVLARTEQLVRLESNAVIENKTIAHNLQRKLKTQKERLESKELHMSLLRQKIAQLEEEKQARTALVVERDNAHLTIRNLQKKVERLQKELNTCRDLHTELKAKLADTNELKIKTLEQTKAIEDLNKSRDQLEKMKEKAEKKLMSVKSELDTTEHEAKENKERARNMIEVVTSEMKTLKKSLEEAEKREKQLADFREVVSQMLGLNVTSLALPDYEIIKCLERLVHSHQHHFVTCACLKDVTTGQERHPQGHLQLLH

SEQ ID NO: 18450 - protein, 1326 aa, Homo sapiens
  Payload ID: 3689
  Gene Symbol: CCDC171
  Gene Name: coiled-coil domain containing 171
  Uniprot ID: Q6TFL3
  ENSP ID: ENSP00000370077
MNLNTSSNTGDTQRLKIASLDVKQILKNETELDITDNLRKKLHWAKKEKLEITTKHNAELASYESQIAKLRSEVEKGEALRQSLEYDLAVARKEAGLGRRAAEERLAEAHRIQEKLCAQNSELQAKTNETEKAFQTSQQKWKEECRRFEHDLEERDNMIQNCNREYDLLMKEKSRLEKTLQEALEKHQREKNEMESHIRETALEEFRLQEEQWEAERRELQFIVQEQDTAVQNMHKKVEKLETEHMDCSDLLRRQTSELEFSTQREERLRKEFEATTLRVRKLEENIEAERAAHLESKFNSEIIQLRIRDLEGALQVEKASQAEAVADLEIIKNEFKEVESAYEREKHNAQESFAKLNLLEKEYFSKNKKLNEDIEEQKKVIIDLSKRLQYNEKSCSELQEELVMAKKHQAFLVETCENNVKELESILDSFTVSGQWTSGIHKDKDKPPSFSVVLERLRRTLTDYQNKLEDASNEEKACNELDSTKQKIDSHTKNIKELQDKLADVNKELSHLHTKCADREALISTLKVELQNVLHCWEKEKAQAAQSESELQKLSQAFHKDAEEKLTFLHTLYQHLVAGCVLIKQPEGMLDKFSWSELCAVLQENVDALIADLNRANEKIRHLEYICKNKSDTMRELQQTQEDTFTKVAEQIKAQESCWHRQKKELELQYSELFLEVQKRAQKFQEIAEKNMEKLNHIEKSHEQLVLENSHFKKLLSQTQREQMSLLAACALMAGALYPLYSRSCALSTQRDFLQEQVNTFELFKLEIRTLAQALSTVEEKKQEEAKMKKKTFKGLIRIFRKGVIAVLAANRLKILGQSCASLFTWMESFKEGIGMLVCTGEPQDKHKFPKHQKEQLRCLQALSWLTSSDLLAAIISSMAELQDVIGKADPNSRICGHLLIGAAKNSFAKLMDKISLVMECIPLHSSRSITYVEKDSLVQRLAHGLHKVNTLALKYGLRGHVPITKSTASLQKQILGFTQRLHAAEVERRSLRLEVTEFKRSVNEMKKELDKAQGLQMQLNEFKQSKLITHEKFESACEELNNALLREEQAQMLLNEQAQQLQELNYKLELHSSEEADKNQTLGEAVKSLSEAKMELRRKDQSLRQLNRHLTQLEQDKRRLEENIHDAESALRMAAKDKECVANHMRAVENTLHKVRDQISLSWSAASRNDFTLQLPKLHLETFAMEGLKGGPEVVACQAMIKSFMDVYQLASTRIMTLEKEMTSHRSHIAALKSELHTACLRENASLQSIGSRDHSNLSIPSRAPLPADTTGIGDFLPLKAELDTTYTFLKETFINTVPHALTSSHSSPVTMSANANRPTQIGL

SEQ ID NO: 18451 - protein, 257 aa, Homo sapiens
  Payload ID: 3689
  Gene Symbol: CCDC171
  Gene Name: coiled-coil domain containing 171
  ENSP ID: ENSP00000399526
  MOD_RES (1)..(1): Any amino acid
XHKVNTLALKYGLRGHVPITKSTASLQKQILGFTQRLHAAEVERRSLRLEVTEFKRSVNEMKKELDKAQGLQMQLNEFKQSKLITHEKFESACEELNNALLREEQAQMLLNEQAQQLQELNYKLELHSSEEADKNQTLGEAVKSLSEAKMELRRKDQSLRQLNRHLTQLEQDKRRLEENIHDAESALRMAAKDKECVANHMRAVENTLHKVRDQISLSWSAASRNDFTLQLPKLHLETFAMEGLKGGPEVVACQVRV

SEQ ID NO: 18452 - protein, 469 aa, Homo sapiens
  Payload ID: 3689
  Gene Symbol: CCDC171
  Gene Name: coiled-coil domain containing 171
  ENSP ID: ENSP00000409055
  MOD_RES (1)..(1): Any amino acid
XFELFKLEIRTLAQALSTVEEKKQEEAKMKKKTFKGLIRIFRKGVIAVLAANRLKILGQSCASLFTWMESFKEGIGMLVCTGEPQDKHKFPKHQKEQLRCLQALSWLTSSDLLAAIISSMAELQDVIGKADPNSRICGHLLIGAAKNSFAKLMDKISLVMECIPLHSSRSITYVEKDSLVQRLAHGLHKVNTLALKYGLRGHVPITKSTASLQKQILGFTQRLHAAEVERRSLRLEVTEFKRSVNEMKKELDKAQGLQMQLNEFKQSKLITHEKFESACEELNNALLREEQAQMLLNEQAQQLQELNYKLELHSSEEADKNQTLGEAVKSLSEAKMELRRKDQSLRQLNRHLTQLEQDKRRLEENIHDAESALRMAAKDKECVANHMRAVENTLHKVRDQISLSWSAASRNDFTLQLPKLHLETFAMEGLKGGPEVVACQVRVQWCDHSSLQSQMPGLKQSSCLSLLST

SEQ ID NO: 18453 - protein, 317 aa, Homo sapiens
  Payload ID: 3689
  Gene Symbol: CCDC171
  Gene Name: coiled-coil domain containing 171
  ENSP ID: ENSP00000438838
MNLNTSSNTGDTQRLKIASLDVKQILKNETELDITDNLRKKLHWAKKEKLEITTKHNAELASYESQIAKLRSEVEKGEALRQSLEYDLAVARKEAGLGRRAAEERLAEAHRIQEKLCAQNSELQAKTNETEKAFQTSQQKWKEECRRFEHDLEERDNMIQNCNREYDLLMKEKSRLEKTLQEALEKHQREKNEMESHIRETALEEFRLQEEQWEAERRELQFIVQEQDTAVQNMHKKVEKLETEHMDCSDLLRRQTSELEFSTQREERLRKEFEATTLRVRKLEENIEAERAAHLESKFNSEIIQVKCKQIFWPAFS

SEQ ID NO: 18454 - protein, 258 aa, Homo sapiens
  Payload ID: 3690
  Gene Symbol: CCDC172
  Gene Name: coiled-coil domain containing 172
  Uniprot ID: P0C7W6
  ENSP ID: ENSP00000329860
MSLESLFQHIIFTEHQAEESRRLMREVRSEITRCREKIKKATEELNEEKIKLESKVQQFFEKSFFLQLLKAHENALEKQYSEITNHRNMLLQTFEAIKKQMIEEEDKFIKEITDFNNDYEITKKRELLMKENVKIEISDLENQANMLKSEMKSMEHDSSQLNELQKQKSELIQELFTLQRKLKVFEDEENESICTTKYLEAEKIKISEKPQNDTECLRLKKELELYKEDDMESVYEALQTEIEFLELTLAQKDLQESK

SEQ ID NO: 18455 - protein, 552 aa, Homo sapiens
  Payload ID: 3691
  Gene Symbol: CCDC173
  Gene Name: coiled-coil domain containing 173
  Uniprot ID: Q0VFZ6
  ENSP ID: ENSP00000391504
MDTSSEMLVRFGRRCGRAKESTEIRNSEEDQVLYLPLLPSKVDLQQVTIIPHDEWKRIQDSLDRLTREAACLRAERKAKKEMHLRSQEVVKHWTNTYAGMKEQKLEAKKKRDEEIEAERQILDLEEEIYKQGKRKKAIENAKQYQFYQTERVKNFHSGLLLSRVMKERDAQIEFRKSKIKSDKKWEEQLKLNIEKAFKEEQEKAEKRHRERVALAKDHLKQIKEHEEEEERRKKYEEKDAEEIKRQNALYEIEMRKKLEKKREEMHESRRRFLEHMQDKHIIKAVEQQQQEEEDEKMRKFIKAKKRLIQMGKEKEAETHRLMEKRRERIHNFLSELLKEKLDNEDMIIARDIAEAEAEWEKREREKDEKNKAELKTIAEYRAIVMKNKEEEERQRKIEAKEQLLAVMKADQIFWEHEKEKKCKADKEHQEVQDAHIQQMAKNKFNAKQAKQAELDYCRLTEALVAEKEKEFQDYAREVIELESETTNKYIYPLVKAVQEGPGGGRGPVFVDRGGLRPSYQANDVTGVQLPFYNSQGPKYNFQKSKRRLGFTW

SEQ ID NO: 18456 - protein, 158 aa, Homo sapiens
  Payload ID: 3691
  Gene Symbol: CCDC173
  Gene Name: coiled-coil domain containing 173
  ENSP ID: ENSP00000405608
MKEQKLEAKKKRDEEIEAERQILDLEEEIYKQGKRKKAIENAKQYQFYQTERVKNFHSGLLLSRVMKERDAQIEFRKSKIKSDKKWEEQLKLNIEKAFKEEQEKAEKRHRERVALAKDHLKQIKEHEEEEERRKKYEEKDAEEIKRQNALYEIEMRKK

SEQ ID NO: 18457 - protein, 108 aa, Homo sapiens
  Payload ID: 3691
  Gene Symbol: CCDC173
  Gene Name: coiled-coil domain containing 173
  ENSP ID: ENSP00000408143
MPISELLRRISLKLFPKVDLQQVTIIPHDEWKRIQDSLDRLTREAACLRAERKAKKEMHLRSQEVVKHWTNTYAGMKEQKLEAKKKRDEEIEAERQILDLEEEIYKQG

SEQ ID NO: 18458 - protein, 391 aa, Homo sapiens
  Payload ID: 3692
  Gene Symbol: CCDC174
  Gene Name: coiled-coil domain containing 174
  ENSP ID: ENSP00000302344
MDRRKKPLDVTASSLVDLKAELFRKQEEFKQEKLLKDSGVFGKPKTTNKKPSIWSKQNVGVSNRAEKDAEQKIEEQKTLDKAREKLEEKAKLYEKMTKGDFIDEEVEDMYLVDFTQKIIDKRKEMEASGAHRDSQKAGERDDDEENLPEGEIPPPQDPSEEWVDYVDSLGRSRRCMRKDLPDLLEMDKNLQGRLFISPANEKTLLSEDMRKELQRQQWEEEEREALKRPMGPVHYEDIRENDGDVIGPLPPEPEAVPTPRPAAQSSKVEVIVQERKDTKPGVPHIREWDRGKEFSFGYWSKRQSDLRAERDPEFAPPSDYFVGQKRTGFSSSQAWSRPGPAQSDPGQCPDQSHGPSPEHTSPTPAPDNPPQAPTVTFKTLDDMISYYKQVT

SEQ ID NO: 18459 - protein, 467 aa, Homo sapiens
  Payload ID: 3692
  Gene Symbol: CCDC174
  Gene Name: coiled-coil domain containing 174
  Uniprot ID: Q6PII3
  ENSP ID: ENSP00000373304
MDRRKKPLDVTASSLVDLKAELFRKQEEFKQEKLLKDSGVFGKPKTTNKKPSIWSKQNVGVSNRAEKDAEQKIEEQKTLDKAREKLEEKAKLYEKMTKGDFIDEEVEDMYLVDFTQKIIDKRKEMEASGAHRDSQKAGERDDDEENLPEGEIPPPQDPSEEWVDYVDSLGRSRRCMRKDLPDLLEMDKNLQGRLFISPANEKTLLSEDMRKELQRQQWEEEEREALKRPMGPVHYEDIRENEARQLGVGYFAFARDKELRNKQMKTLEMLREQTTDQRTKRENIKEKRKAILEARLAKLRQKKMKKSKEGGTEEENRDGDVIGPLPPEPEAVPTPRPAAQSSKVEVIVQERKDTKPGVPHIREWDRGKEFSFGYWSKRQSDLRAERDPEFAPPSDYFVGQKRTGFSSSQAWSRPGPAQSDPGQCPDQSHGPSPEHTSPTPAPDNPPQAPTVTFKTLDDMISYYKQVT

SEQ ID NO: 18460 - protein, 294 aa, Homo sapiens [sequence omitted]

SEQ ID NO: 18461 - protein, 828 aa, Homo sapiens
  Payload ID: 3693
  Gene Symbol: CCDC175
  Gene Name: coiled-coil domain containing 175
  ENSP ID: ENSP00000452964
MALSPWTPGLGAGEKLVQAAAVSTGPSLELCTLPSTLGSSVAVEALEQLFVVEQSLQSDYFKCNEEAKIFLKDIAVAVKKLEEMRKATIDLLEIESMELNKLYYLLETLPNSIKRELEECVRDARRLNLFEINTIKMRITRTENEIELLKKKITDLTKYNEALGEKQEELARKHARFVLSLNQTMEKKATTTVYINETYTKINLKREDIALQKKCIQEAEELMEKERAEYLIRKQELTAQINEFENTREVKRMETYQKKKELDKLQTKMSKIKETVTVSAAVLSDHNLEIARLHESIRYWEQEVSELKKDLAILEAKLCFFTDNKEKLDDISNDEKNEFLNKIKQLVETLHAARMEYKDLREKMKTLARQYKIVLSEEEKAFLQKQKIHDENQKQLTFISQKEYFLSQKRVDIKNMEEGLITLQELQQATKTVYQQQIKILSANLERESQRCVITQWKMACLRKKHARWTAKIKAEIQAITEKIQNAEVRRIELLNETSFRQQEISGFVAQIEKLTTELKEEEKAFVNKEKMLMKELSKYEEIFVKETQINKEKEEELVEYLPQLQVAEQEYKEKRRKLEELSNIITAQRQEEDLLNNHIFLFTRDFSRYISNMEDVKQELQQLRDQESKKNKDHFETLKNLENGFYINDQKADLLLLENKKLKEYILYLKNNIEKYREGQEALMHTSSDLSRQLIAQEAQYKDLWAEFQTTVKILVDNGEETLQDINNLTDKLRERDEKMQHVSTWLRGSLEGLRLLVEQESPMDLLSKQQLRALLVTSKEEKTCQLSDLVIPNYATNIQLNIDTYLGLNTLVVLSNSAFHLREFSR

SEQ ID NO: 18462 - protein, 793 aa, Homo sapiens
  Payload ID: 3693
  Gene Symbol: CCDC175
  Gene Name: coiled-coil domain containing 175
  Uniprot ID: P0C221
  ENSP ID: ENSP00000453940
MALSPWTPGLGAGEKLVQAAAVSTGPSLELCTLPSTLGSSVAVEALEQLFVVEQSLQSDYFKCNEEAKIFLKDIAVAVKKLEEMRKATIDLLEIESMELNKLYYLLETLPNSIKRELEECVRDARRLNLFEINTIKMRITRTENEIELLKKKITDLTKYNEALGEKQEELARKHARFVLSLNQTMEKKATTTVYINETYTKINLKREDIALQKKCIQEAEELMEKERAEYLIRKQELTAQINEFENTREVKRMETYQKKKELDKLQTKMSKIKETVTVSAAVLSDHNLEIARLHESIRYWEQEVSELKKDLAILEAKLCFFTDNKEKLDDISNDEKNEFLNKIKQLVETLHAARMEYKDLREKMKTLARQYKIVLSEEEKAFLQKQKIHDENQKQLTFISQKEYFLSQKRVDIKNMEEGLITLQELQQATKTVYQQQIKILSANLERESQRCVITQWKMACLRKKHARWTAKIKAEIQAITEKIQNAEVRRIELLNETSFRQQEISGFVAQIEKLTTELKEEEKAFVNKEKMLMKELSKYEEIFVKETQINKEKEEELVEYLPQLQVAEQEYKEKRRKLEELSNIITAQRQEEDLLNNHIFLFTRDFSRYISNMEDVKQELQQLRDQESKKNKDHFETLKNLENGFYINDQKADLLLLENKKLKEYILYLKNNIEKYREGQEALMHTSSDLSRQLIAQEAQYKDLWAEFQTTVKILVDNGEETLQDINNLTDKLRERDEKMQHVSTWLRGSLEGLRLLVEQESPMDLLKKKKHIRTRVHFPVVKCTEKNTLTK

SEQ ID NO: 18463 - protein, 707 aa, Homo sapiens
  Payload ID: 3694
  Gene Symbol: CCDC177
  Gene Name: coiled-coil domain containing 177
  Uniprot ID: Q9NQR7
  ENSP ID: ENSP00000469474
MVDPVPEEEKAGAEPGDSGGDEAVASVPPDSQGAQEPAASSASASASAAVPRKAEVPCAAAEGGRREQSPLLHLDLFNFDCPEAEGSRYVLTSPRSLEACARCAVKPVELLPRALADLVREAPGRSMRVATGLYEAYEAERRAKLQQCRAERERIMREEKRRLFTPLSPAAAAAAAAAAASAPSAGSSSSCSSASLPASPAPRAARKASPSPSSARTQPPPAGSRTGRKSHSLDSLSRRREGALSSESGASSSSYSGESLRELRWPPRASARNSCPAGSASSTTNAPGRPSALTLVPITGRSFSLGDLSHSPQTAQHVERIVRQVRAERGLRGVPERDRKIAALMLARHQEELLLLEQRAAAHGQWELQRVHAKQRREREEREKQRALEQGRRAWAAQVEERRGRRGREEREAARRRQRQYERSEERRRELAERQGLLRRERAERAAREDRLRKLQQEQNLKQREEGLQEGRERAEQIRRERAQRAARAKQRQEGQLQREKRELSRAERARHEALLQGRTRQQRQEREGLRSSLEASLGRAQENYEHLVEQRTRELRERARREELQGRRAKEAAERKEREHQAHLEALARAGERRLQHATQVAEEAVQQKARRVGQSRLEKERAQRANKEKVERDEDCRRRELLQAIGRKLERSEQLTRERRSALESARSTARASFHVREKVREETNTRSFDRMVREAQLHASLDRK

SEQ ID NO: 18464 - protein, 829 aa, Homo sapiens
  Payload ID: 3695
  Gene Symbol: CCDC178
  Gene Name: coiled-coil domain containing 178
  Uniprot ID: Q5BJE1
  ENSP ID: ENSP00000300227
MTENKTVSSSSTRDDQTNIGLTCQEVKALREKAWSRTNEGNAMSQSLVLYGASKENSEGFHESKMTNTEGVNKGIYFSYPCRRHSCAVVNIPAPCVNKMISHIQDVESKIQEHLKRFETSFEEWSRTSSTKDLKEDWSVTTPVKEVKPGEKRDEKCPELKQEMETLLSEAIRLIKSLETDRADAEEALKQQRSRKNMINMKIDSWSVWKLQELPLAVQKEHEAYLSDVIELQWHLEDKANQLQHFEKQKTELEEANAKIQADIDYMNEHGPLLDSKQNQELQDLKNHYKKKMEVMDLHRKVNEELEEALEACENARLKAQQIKEEIDKDIYQDEKTIEAYKREIYQLNSLFDHYSSSVINVNTNIEEKEEEVTEAIRETKSSKNELHSLSKMLEDLRRVYDQLTWKQKSHENQYLEAVNDFYAAKKTWDIELSDVAKDFSAISLACTKLTEDNKKLEIDINKITVKTNESIRKKSKYESEIKYLTIMKLKNDKHLKNIYKEAYRIGTLFHLTKHKTDEMEDKIAEVRRKFKGREEFLKKLTQGEVAAGMVLQKKLYSIYEVQALERKELIKNRAICAMSLAELQEPLLQLEDEAERIRSLDKEHSVSKRSAIFKDLEATKSKTMIFYAKINELNEELKAKEEEKKSFDQTLEILKNKFITMRFKREHAQTVFDHYMQEKKDCEERIFEEDQRFRVLLAVRQKTLQDTQKIIADSLEENLRLAQEYQQLQITFLKEKDNYFNIYDKQLSLDTSIRDKKQLCQLQRRMHTLWQEHFKLVVLFSQMRLANFQTDSQESIQKILAVQEESSNLMQHILGFFQTLTDGTCENDG

SEQ ID NO: 18465 - protein, 867 aa, Homo sapiens
  Payload ID: 3695
  Gene Symbol: CCDC178
  Gene Name: coiled-coil domain containing 178
  Uniprot ID: Q5BJE1
  ENSP ID: ENSP00000372576
MTENKTVSSSSTRDDQTNIGLTCQEVKALREKAWSRTNEGNAMSQSLVLYGASKENSEGFHESKMTNTEGVNKGIYFSYPCRRHSCAVVNIPAPCVNKMISHIQDVESKIQEHLKRFETSFEEWSRTSSTKDLKEDWSVTTPVKEVKPGEKRDEKCPELKQEMETLLSEAIRLIKSLETDRADAEEALKQQRSRKNMINMKIDSWSVWKLQELPLAVQKEHEAYLSDVIELQWHLEDKANQLQHFEKQKTELEEANAKIQADIDYMNEHGPLLDSKQNQELQDLKNHYKKKMEVMDLHRKVNEELEEALEACENARLKAQQIKEEIDKDIYQDEKTIEAYKREIYQLNSLFDHYSSSVINVNTNIEEKEEEVTEAIRETKSSKNELHSLSKMLEDLRRVYDQLTWKQKSHENQYLEAVNDFYAAKKTWDIELSDVAKDFSAISLACTKLTEDNKKLEIDINKITVKTNESIRKKSKYESEIKYLTIMKLKNDKHLKNIYKEAYRIGTLFHLTKHKTDEMEDKIAEVRRKFKGREEFLKKLTQGEVAAGMVLQKKLYSIYEVQALERKELIKNRAICAMSLAELQEPLLQLEDEAERIRSLDKEHSVMLNNIIDQKDLIRRKVGKVKKKLRKKGKKTLDALIETESKRSAIFKDLEATKSKTMIFYAKINELNEELKAKEEEKKSFDQTLEILKNKFITMRFKREHAQTVFDHYMQEKKDCEERIFEEDQRFRVLLAVRQKTLQDTQKIIADSLEENLRLAQEYQQLQITFLKEKDNYFNIYDKQLSLDTSIRDKKQLCQLQRRMHTLWQEHFKLVVLFSQMRLANFQTDSQESIQKILAVQEESSNLMQHILGFFQTLTDGTCENDG

SEQ ID NO: 18466 - protein, 291 aa, Homo sapiens
  Payload ID: 3695
  Gene Symbol: CCDC178
  Gene Name: coiled-coil domain containing 178
  ENSP ID: ENSP00000382130
MTENKTVSSSSTRDDQTNIGLTCQEVKALREKAWSRTNEGNAMSQSLVLYGASKENSEGFHESKMTNTEGVNKGIYFSYPCRRHSCAVVNIPAPCVNKMISHIQDVESKIQEHLKRFETSFEEWSRTSSTKDLKEDWSVTTPVKEVKPGEKRDEKCPELKQEMETLLSEAIRLIKSLETDRADAEEALKQQRSRKNMINMKIDSWSVWKLQELPLAVQKEHEAYLSDVIELQWHLEDKANQLQHFEKQKTELEEANAKIQADIDYMNEHGPLLDSKQNQELQDLKNHYKKK

SEQ ID NO: 18467 - protein, 867 aa, Homo sapiens; identical to SEQ ID NO: 18465
  Payload ID: 3695
  Gene Symbol: CCDC178
  Gene Name: coiled-coil domain containing 178
  Uniprot ID: Q5BJE1
  ENSP ID: ENSP00000385591

SEQ ID NO: 18468 - protein, 891 aa, Homo sapiens
  Payload ID: 3695
  Gene Symbol: CCDC178
  Gene Name: coiled-coil domain containing 178
  ENSP ID: ENSP00000385867
MTENKTVSSSSTRDDQTNIGLTCQEVKALREKAWSRTNEGNAMSQSLVLYGASKENSEGFHESKMTNTEGVNKGIYFSYPCRRHSCAVVNIPAPCVNKMISHIQDVESKIQEHLKRFETSFEEWSRTSSTKDLKEDWSVTTPVKEVKPGEKRDEKCPELKQEMETLLSEAIRLIKSLETDRADAEEALKQQRSRKNMINMKIDSWSVWKLQELPLAVQKEHEAYLSDVIELQWHLEDKANQLQHFEKQKTELEEANAKIQADIDYMNEHGPLLDSKQNQELQDLKNHYKKKMEVMDLHRKVNEELEEALEACENARLKAQQIKEEIDKDIYQDEKTIEAYKREIYQLNSLFDHYSSSVINVNTNIEEKEEEVTEAIRETKSSKNELHSLSKMLEDLRRVYDQLTWKQKSHENQYLEAVNDFYAAKKTWDIELSDVAKDFSAISLACTKLTEDNKKLEIDINKITVKTNESIRKKSKYESEIKYLTIMKLKNDKHLKNIYKEAYRIGTLFHLTKHKTDEMEDKIAEVRRKFKGREEFLKKLTQGEVAAGMVLQKKLYSIYEVQALERKELIKNRAICAMSLAELQEPLLQLEDEAERIRSLDKEHSVMLNNIIDQKDLIRRKVGKVKKKLRKKGKKTLDALIETESKRSAIFKDLEATKSKTMIFYAKINELNEELKAKEEEKKSFDQTLEILKNKFITMRFKREHAQTVFDHYMQEKKDCEERIFEEDQRFRVLLAVRQKTLQDTQKIIADSLEENLRLAQEYQQLQITFLKEKDNYFNIYDKQLSLDTSIRDKKQVAGFLPKKLPNSLPIISDELSNFQLCQLQRRMHTLWQEHFKLVVLFSQMRLANFQTDSQESIQKILAVQEESSNLMQHILGFFQTLTDGTCENDG

SEQ ID NO: 18469 - protein, 187 aa, Homo sapiens
  Payload ID: 3695
  Gene Symbol: CCDC178
  Gene Name: coiled-coil domain containing 178
  ENSP ID: ENSP00000462153
MTENKTVSSSSTRDDQTNIGLTCQEVKALREKAWSRTNEGNAMSQSLVLYGASKENSEGFHESKMTNTEGVNKGIYFSYPCRRHSCAVVNIPAPCVNKMISHIQDVESKIQEHLKRLCQLQRRMHTLWQEHFKLVVLFSQMRLANFQTDSQESIQKILAVQEESSNLMQHILGFFQTLTDGTCENDG

SEQ ID NO: 18470 - protein, 849 aa, Homo sapiens
  Payload ID: 3695
  Gene Symbol: CCDC178
  Gene Name: coiled-coil domain containing 178
  Uniprot ID: Q5BJE1
  ENSP ID: ENSP00000462370
MTENKTVSSSSTRDDQTNIGLTCQEVKALREKAWSRTNEGNAMSQSLVLYGASKENSEGFHESKMTNTEGVNKGIYFSYPCRRHSCAVVNIPAPCVNKMISHIQDVESKIQEHLKRFETSFEEWSRTSSTKDLKEDWSVTTPVKEVKPGEKRDEKCPELKQEMETLLSEAIRLIKSLETDRADAEEALKQQRSRKNMINMKIDSWSVWKLQELPLAVQKEHEAYLSDVIELQWHLEDKANQLQHFEKQKTELEEANAKIQADIDYMNEHGPLLDSKQNQELQDLKNHYKKKMEVMDLHRKVNEELEEALEACENARLKAQQIKEEIDKDIYQDEKTIEAYKREIYQLNSLFDHYSSSVINVNTNIEEKEEEVTEAIRETKSSKNELHSLSKMLEDLRRVYDQLTWKQKSHENQYLEAVNDFYAAKKTWDIELSDVAKDFSAISLACTKLTEDNKKLEIDINKITVKTNESIRKKSKYESEIKYLTIMKLKNDKHLKNIYKEAYRIGTLFHLTKHKTDEMEDKIAEVRRKFKGREEFLKKLTQGEVAAGMVLQKKLYSIYEVQALERKELIKNRAICAMSLAELQEPLLQLEDEAERIRSLDKEHSVMLNNIIDQKDLIRRKVGKVKKKLRKKGKKTLDALIETESKRSAIFKDLEATKSKTMIFYAKINELNEELKAKEEEKKSFDQTLEILKNKFITMRFKREHAQTVFDHYMQEKKDCEERIFEEDQRFRVLLAVRQKTLQDTQKIIADSLEENLRLAQEYQQLQITFLKEKDNYFNIYDKQLSLDTSIRDKKQLCQLQRRMHTLWQEHFKLVVLFSQMRLANFQTDSQESIQKILAVQNQYDLEKE

SEQ ID NO: 18471 - protein, 364 aa, Homo sapiens
  Payload ID: 3695
  Gene Symbol: CCDC178
  Gene Name: coiled-coil domain containing 178
  ENSP ID: ENSP00000462651
KKLEIDINKITVKTNESIRKKSKYESEIKYLTIMKLKNDKHLKNIYKEAYRIGTLFHLTKHKTDEMEDKIAEVRRKFKGREEFLKKLTQGEVAAGMVLQKKLYSIYEVQALERKELIKNRAICAMSLAELQEPLLQLEDEAERIRSLDKEHSVMLNNIIDQKDLIRRKVGKVKKKLRKKGKKTLDALIETESKRSAIFKDLEATKSKTMIFYAKINELNEELKAKEEEKKSFDQTLEILKNKFITMRFKREHAQTVFDHYMQEKKDCEERIFEEDQRFRVLLAVRQKTLQDTQLCQLQRRMHTLWQEHFKLVVLFSQMRLANFQTDSQESIQKILAVQEESSNLMQHILGFFQTLTDGTCENDG

SEQ ID NO: 18472 - protein, 103 aa, Homo sapiens
  Payload ID: 3695
  Gene Symbol: CCDC178
  Gene Name: coiled-coil domain containing 178
  ENSP ID: ENSP00000463236
MTENKTVSSSSTRDDQTNIGLTCQEVKALREKAWSRTNEGNAMSQSLVLYGASKENSEGFHESKMTNTEGVNKGIYFSYPCRRHSCAVVNIPAPCVNKMISHI

SEQ ID NO: 18473 - protein, 891 aa, Homo sapiens; identical to SEQ ID NO: 18468
  Payload ID: 3695
  Gene Symbol: CCDC178
  Gene Name: coiled-coil domain containing 178
  ENSP ID: ENSP00000463254

SEQ ID NO: 18474 - protein, 72 aa, Homo sapiens
  Payload ID: 3695
  Gene Symbol: CCDC178
  Gene Name: coiled-coil domain containing 178
  ENSP ID: ENSP00000464295
MLCQLQRRMHTLWQEHFKLVVLFSQMRLANFQTDSQESIQKILAVQEESSNLMQHILGFFQTLTDGTCENDG

SEQ ID NO: 18475 - protein, 68 aa, Homo sapiens
  Payload ID: 3696
  Gene Symbol: CCDC179
  Gene Name: coiled-coil domain containing 179
  Uniprot ID: H3BU77
  ENSP ID: ENSP00000457511
MCLYCWDIEPSQVNPEGPRQHHPSEVTERQLANKRIQNMQHLKKEKRRLNKRFSRPSPIPEPGLLWSS

SEQ ID NO: 18476 - protein, 1454 aa, Homo sapiens
  Payload ID: 3697
  Gene Symbol: CCDC18
  Gene Name: coiled-coil domain containing 18
  Uniprot ID: Q5T9S5
  ENSP ID: ENSP00000343377
MESSSSDYYNKDNEEESLLANVASLRHELKITEWSLQSLGEELSSVSPSENSDYAPNPSRSEKLILDVQPSHPGLLNYSPYENVCKISGSSTDFQKKPRDKMFSSSAPVDQEIKSLREKLNKLRQQNACLVTQNHSLMTKFESIHFELTQSRAKVSMLESAQQQAASVPILEEQIINLEAEVSAQDKVLREAENKLEQSQKMVIEKEQSLQESKEECIKLKVDLLEQTKQGKRAERQRNEALYNAEELSKAFQQYKKKVAEKLEKVQAEEEILERNLTNCEKENKRLQERCGLYKSELEILKEKLRQLKEENNNGKEKLRIMAVKNSEVMAQLTESRQSILKLESELENKDEILRDKFSLMNENRELKVRVAAQNERLDLCQQEIESSRVELRSLEKIISQLPLKRELFGFKSYLSKYQMSSFSNKEDRCIGCCEANKLVISELRIKLAIKEAEIQKLHANLTANQLSQSLITCNDSQESSKLSSLETEPVKLGGHQVESVKDQNQHTMNKQYEKERQRLVTGIEELRTKLIQIEAENSDLKVNMAHRTSQFQLIQEELLEKASNSSKLESEMTKKCSQLLTLEKQLEEKIVAYSSIAAKNAELEQELMEKNEKIRSLETNINTEHEKICLAFEKAKKIHLEQHKEMEKQIERLEAQLEKKDQQFKEQEKTMSMLQQDIICKQHHLESLDRLLTESKGEMKKENMKKDEALKALQNQVSEETIKVRQLDSALEICKEELVLHLNQLEGNKEKFEKQLKKKSEEVYCLQKELKIKNHSLQETSEQNVILQHTLQQQQQMLQQETIRNGELEDTQTKLEKQVSKLEQELQKQRESSAEKLRKMEEKCESAAHEADLKRQKVIELTGTARQVKIEMDQYKEELSKMEKEIMHLKRDGENKAMHLSQLDMILDQTKTELEKKTNAVKELEKLQHSTETELTEALQKREVLETELQNAHGELKSTLRQLQELRDVLQKAQLSLEEKYTTIKDLTAELRECKMEIEDKKQELLEMDQALKERNWELKQRAAQVTHLDMTIREHRGEMEQKIIKLEGTLEKSELELKECNKQIESLNDKLQNAKEQLREKEFIMLQNEQEISQLKKEIERTQQRMKEMESVMKEQEQYIATQYKEAIDLGQELRLTREQVQNSHTELAEARHQQVQAQREIERLSSELEDMKQLSKEKDAHGNHLAEELGASKVREAHLEARMQAEIKKLSAEVESLKEAYHMEMISHQENHAKWKISADSQKSSVQQLNEQLEKAKLELEEAQDTVSNLHQQVQDRNEVIEAANEALLTKESELTRLQAKISGHEKAEDIKFLPAPFTSPTEIMPDVQDPKFAKCFHTSFSKCTKLRRSISASDLTFKIHGDEDLSEELLQDLKKMQLEQPSTLEESHKNLTYTQPDSFKPLTYNLEADSSENNDFNTLSGMLRYINKEVRLLKKSSMQTGAGLNQGENV

SEQ ID NO: 18477 - protein, 1508 aa, Homo sapiens
  Payload ID: 3697
  Gene Symbol: CCDC18
  Gene Name: coiled-coil domain containing 18
  ENSP ID: ENSP00000359299
  MOD_RES (1)..(1): Any amino acid
XFEFCAAGVRWFSELCPRLPRAGARERVRGFLTQTRVRSAQSPGGSLPSDDLGEMESSSSDYYNKDNEEESLLANVASLRHELKITEWSLQSLGEELSSVSPSENSDYAPNPSRSEKLILDVQPSHPGLLNYSPYENVCKISGSSTDFQKKPRDKMFSSSAPVDQEIKSLREKLNKLRQQNACLVTQNHSLMTKFESIHFELTQSRAKVSMLESAQQQAASVPILEEQIINLEAEVSAQDKVLREAENKLEQSQKMVIEKEQSLQESKEECIKLKVDLLEQTKQGKRAERQRNEALYNAEELSKAFQQYKKKVAEKLEKVQAEEEILERNLTNCEKENKRLQERCGLYKSELEILKEKLRQLKEENNNGKEKLRIMAVKNSEVMAQLTESRQSILKLESELENKDEILRDKFSLMNENRELKVRVAAQNERLDLCQQEIESSRVELRSLEKIISQLPLKRELFGFKSYLSKYQMSSFSNKEDRCIGCCEANKLVISELRIKLAIKEAEIQKLHANLTANQLSQSLITCNDSQESSKLSSLETEPVKLGGHQVESVKDQNQHTMNKQYEKERQRLVTGIEELRTKLIQIEAENSDLKVNMAHRTSQFQLIQEELLEKASNSSKLESEMTKKCSQLLTLEKQLEEKIVAYSSIAAKNAELEQELMEKNEKIRSLETNINTEHEKICLAFEKAKKIHLEQHKEMEKQIERLEAQLEKKDQQFKEQEKTMSMLQQDIICKQHHLESLDRLLTESKGEMKKENMKKDEALKALQNQVSEETIKVRQLDSALEICKEELVLHLNQLEGNKEKFEKQLKKKSEEVYCLQKELKIKNHSLQETSEQNVILQHTLQQQQQMLQQETIRNGELEDTQTKLEKQVSKLEQELQKQRESSAEKLRKMEEKCESAAHEADLKRQKVIELTGTARQVKIEMDQYKEELSKMEKEIMHLKRDGENKAMHLSQLDMILDQTKTELEKKTNAVKELEKLQHSTETELTEALQKREVLETELQNAHGELKSTLRQLQELRDVLQKAQLSLEEKYTTIKDLTAELRECKMEIEDKKQELLEMDQALKERNWELKQRAAQVTHLDMTIREHRGEMEQKIIKLEGTLEKSELELKECNKQIESLNDKLQNAKEQLREKEFIMLQNEQEISQLKKEIERTQQRMKEMESVMKEQEQYIATQYKEAIDLGQELRLTREQVQNSHTELAEARHQQVQAQREIERLSSELEDMKQLSKEKDAHGNHLAEELGASKVREAHLEARMQAEIKKLSAEVESLKEAYHMEMISHQENHAKWKISADSQKSSVQQLNEQLEKAKLELEEAQDTVSNLHQQVQDRNEVIEAANEALLTKESELTRLQAKISGHEKAEDIKFLPAPFTSPTEIMPDVQDPKFAKCFHTSFSKCTKLRRSISASDLTFKIHGDEDLSEELLQDLKKMQLEQPSTLEESHKNLTYTQPDSFKPLTYNLEADSSENNDFNTLSGMLRYINKEVRLLKKSSMQTGAGLNQGENV

SEQ ID NO: 18478 - protein, 1299 aa, Homo sapiens
  Payload ID: 3697
  Gene Symbol: CCDC18
  Gene Name: coiled-coil domain containing 18
  ENSP ID: ENSP00000383808
MESSSSDYYNKDNEEESLLANVASLRHELKITEWSLQSLGEELSSVSPSENSDYAPNPSRSEKLILDVQPSHPGLLNYSPYENVCKISGSSTDFQKKPRDKMFSSSAPVDQEIKSLREKLNKLRQQNACLVTQNHSLMTKFESIHFELTQSRAKVSMLESAQQQAASVPILEEQIINLEAEVSAQDKVLREAENKLEQSQKMVIEKEQSLQESKEECIKLKVDLLEQTKQGKRAERQRNEALYNAEELSKAFQQYKKKVAEKLEKVQAEEEILERNLTNCEKENKRLQERCGLYKSELEILKEKLRQLKEENNNGKEKLRIMAVKNSEVMAQLTESRQSILKLESELENKDEILRDKFSLMNENRELKVRVAAQNERLDLCQQEIESSRVELRSLEKIISQLPLKRELFGFKSYLSKYQMSSFSNKEDRCIGCCEANKLVISELRIKLAIKEAEIQKLHANLTANQLSQSLITCNDSQESSKLSSLETEPVKLGGHQVAESVKDQNQHTMNKQYEKERQRLVTGIEELRTKLIQIEAENSDLKVNMAHRTSQFQLIQEELLEKASNSSKLESEMTKKCSQLLTLEKQLEEKIVAYSSIAAKNAELEQELMEKNEKIRSLETNINTEHEKICLAFEKAKKIHLEQHKEMEKQIERLEAQLEKKDQQFKEQEKTMSMLQQDIICKQHHLESLDRLLTESKGEMKKENMKKDEALKALQNQVSEETIKVRQLDSALEICKEELVLHLNQLEGNKEKFEKQLKKKSEEVYCLQKELKIKNHSLQETSEQNVILQHTLQQQQQMLQQETIRNGELEDTQTKLEKQVSKLEQELQKQRESSAEKLRKMEEKCESAAHEADLKRQKVIELTGTARQVKIEMDQYKEELSKMEKEIMHLKRDGENKAMHLSQLDMILDQTKTELEKKTNAVKELEKLQHSTETELTEALQKREVLETELQNAHGELKSTLRQLQELRDVLQKAQLSLEEKYTTIKDLTAELRECKMEIEDKKQELLEMDQALKERNWELKQRAAQVTHLDMTIREHRGEMEQKIIKLEGTLEKSELELKECNKQIESLNDKLQNAKEQLREKEFIMLQNEQEISQLKKEIERTQQRMKEMESVMKEQEQYIATQYKEAIDLGQELRLTREQVQNSHTELAEARHQQVQAQREIERLSSELEDMKQLSKEKDAHGNHLAEELGASKVREAHLEARMQAEIKKLSAEVESLKEAYHMEMISHQENHAKWKISADSQKSSVQQLNEQLEKAKLELEEAQDTVSNLHQQVQDRNEVIEAANEALLTKGENV

SEQ ID NO: 18479 - protein, 720 aa, Homo sapiens
  Payload ID: 3697
  Gene Symbol: CCDC18
  Gene Name: coiled-coil domain containing 18
  ENSP ID: ENSP00000391151
EKENKRLQERCGLYKSELEILKEKLRQLKEENNNGKEKLRIMAVKNSEVMAQLTESRQSILKLESELENKDEILRDKFSLMNENRELKVRVAAQNERLDLCQQEIESSRVELRSLEKIISQLPLKRELFGFKSYLSKYQMSSFSNKEDRCIGCCEANKLVISELRIKLAIKEAEIQKLHANLTANQLSQSLITCNDSQESSKLSSLETEPVKLGGHQVESVKDQNQHTMNKQYEKERQRLVTGIEELRTKLIQIEAENSDLKVNMAHRTSQFQLIQEELLEKASNSSKLESEMTKKCSQLLTLEKQLEEKIVAYSSIAAKNAELEQELMLEAQLEKKDQQFKEQEKTMSMLQQDIICKQHHLESLDRLLTESKGEMKKENMKKDEALKALQNQVSEETIKVRQLDSALEICKEELVLHLNQLEGNKEKFEKQLKKKSEEVYCLQKELKIKNHSLQETSEQNVILQHTLQQQQQMLQQETIRNGELEDTQTKLEKQVSKLEQELQKQRESSAEKLRKMEEKCESAAHEADLKRQKVIELTGTARQVKIEMDQYKEELSKMEKEIMHLKRDGENKAMHLSQLDMILDQTKTELEKKTNAVKELEKLQHSTETELTEALQKREVLETELQNAHGELKSTLRQLQELRDVLQKAQLSLEEKYTTIKDLTAELRECKMEIEDKKQELLEMDQALKERNWELKQRAAQVTHLDMTIREHRGEMEQK

SEQ ID NO: 18480 - protein, 166 aa, Homo sapiens
  Payload ID: 3697
  Gene Symbol: CCDC18
  Gene Name: coiled-coil domain containing 18
  ENSP ID: ENSP00000394234
  MOD_RES (1)..(1): Any amino acid
XPRRFEFCAAGVRWFSELCPRLPRAGARERVRGFLTQTRVRSAQSPEMESSSSDYYNKDNEEESLLANVASLRHELKITEWSLQSLGEELSSVSPSENSDYAPNPSRSEKLILDVQPSHPGLLNYSPYENVCKISGSSTDFQKKPRDKMFSSSAPVDQEIKSLREK

SEQ ID NO: 18481 - protein, 443 aa, Homo sapiens
  Payload ID: 3697
  Gene Symbol: CCDC18
  Gene Name: coiled-coil domain containing 18
  ENSP ID: ENSP00000431409
  MOD_RES (1)..(1): Any amino acid
XPRLPRAGARERVRGFLTQTRVRSAQSPGGSLPSDDLGEMESSSSDYYNKDNEEESLLANVASLRHELKITEWSLQSLGEELSSVSPSENSDYAPNPSRSEKLILDVQPSHPGLLNYSPYENVCKISGSSTDFQKKPRDKMFSSSAPVDQEIKSLREKLNKLRQQNACLVTQNHSLMTKFESIHFELTQSRAKVSMLESAQQQAASVPILEEQIINLEAEVSAQDKVLREAENKLEQSQKMVIEKEQSLQESKEECIKLKVDLLEQTKQGKRAERQRNEALYNAEELSKAFQQYKKKVAEKLEKVQAEEEILERNLTNCEKENKRLQERCGLYKSELEILKEKLRQLKEENNNGKEKLRIMAVKNSEVMAQLTESRQSILKLESELENKDEILRDKFSLMNENRELKVRVAAQNERLDLCQQEIESSRVELRSLEKIISQLPN

SEQ ID NO: 18482 - protein, 95 aa, Homo sapiens
  Payload ID: 3697
  Gene Symbol: CCDC18
  Gene Name: coiled-coil domain containing 18
  ENSP ID: ENSP00000434031
SELCPRLPRAGARERVRGFLTQTRVRSAQSPEMESSSSDYYNKDNEEESLLANVASLRHELKITEWSLQSLGEELSRCFHLLPLWIRRLKAFERN

SEQ ID NO: 18483 - protein, 1701 aa, Homo sapiens
  Payload ID: 3698
  Gene Symbol: CCDC180
  Gene Name: coiled-coil domain containing 180
  Uniprot ID: Q9P1Z9
  ENSP ID: ENSP00000434727
MRGGENRPPARVQSSSEELELRHQSLDAFPGRRLPGRGIQPAAKMSSVGKVTQVPNGKAYQQIFQAEVQLVHSLAATRKRAAERSVTLKSGRIPMMKKVETPEGEVMSPRQQKWMHSLPNDWIMENPVLHREKERAKREKARESENTIAAREVRGLMDTIVPEKISTSTFQRQAEHKRKSYESALASFQEEIAQVGKEMEPLIVDTGGLFLKKLTESDEEMNRLFLKVENDTNLEDYTIQALLELWDKVAGRLLLRKQEIKELDEALHSLEFSRTDKLKSVLKKYAEVIEKTSYLMRPEVYRLINEEAMVMNYALLGNRKALAQLFVNLMESTLQQELDSRHRWQGLVDTWKALKKEALLQSFSEFMASESIHTPPAVTKELEVMLKTQNVLQQRRLKHLCTICDLLPPSYSKTQLTEWHSSLNSLNKELDTYHVDCMMRIRLLYEKTWQECLMHVQNCKKQLLDWKAFTEEEAETLVNQFFFQMVGALQGKVEEDLELLDKSFETLADQTEWQSSHLFKYFQEVVQLWEAHQSELLVQELELEKRMEQHRQKHSLESQVQEAHLDRLLDQLRQQSDKETLAFHLEKVKDYLKNMKSRYECFHTLLTKEVMEYPAIMLKELNSYSSALSQYFFVREIFEQNLAGEVIFKFRQPEAHEKPSQKRVKKLRKKQGSKEDMTRSEESISSGTSTARSVEEVEEENDQEMESFITEEVLGQQKKSPLHAKMDESKEGSIQGLEEMQVEREGSLNPSLNEENVKGQGEKKEESEEEDEKEEEEEEEKLEEEKEEKEAQEEQESLSVGEEEDKEEGLEEIYYEDMESFTISSGNTYFVFVPLEEEHCRKSHSTFSAMFINDTSSAKFIEQVTIPSRLILEIKKQLRAGFFEHLEKWFDQCSLNTRVTVATKINELDSELELHLHLHQPRAQQIEKDIHNVRAAELLLHQEQLDSHCAGVTETLKKKRLMFCQFQEEQNVRSKNFRLKIYDMEHIFLNATRSQKLVTLSNTLHQELLSYVDVTQVSLRSFRQYLEESLGKLRYSNIEFIKHCRLFSEGGNFSPKEINSLCSRLEKEAARIELVESVIMLNMEKLENEYLDQANDVINKFESKFHNLSVDLIFIEKIQRLLTNLQVKIKCQVAKSNSQTNGLNFSLQQLQNKIKTCQESRGEKTTVTTEELLSFVQTWKEKLSQRIQYLNCSLDRVSMTELVFTNTILKDQEEDSDILTSSEALEEEAKLDVVTPESFTQLSRVGKPLIEDPAVDVIRKLLQLPNTKWPTHHCDKDPSQTGRGAWACGSRGSSEAGAGGAVCSPPVLCSCPGPSSPKGFKRHRCQPENSGKKAVPSASATSAGSFTPHPKPNKMERKYRVLGDKPPPAAEDFKGIILTLLWESSENLLTVAEEFYRKEKRPVTRPDCMCDTFDQCAENISKKILEYQSQANKYHNSCLIELRIQIRRFEELLPQVCWLVMENFKEHHWKKFFTSVKEIRGQFEEQQKRLEKRKDKNAQKLHLNLGHPVHFQEMESLHLSEEERQEELDSMIRMNKEKLEECTRRNGQVFITNLATFTEKFLLQLDEVVTIDDVQVARMEPPKQKLSMLIRRKLAGLSLKEESEKPLIERGSRKWPGIKPTEVTIQNKILLQPTSSISTTKTTLGHLAAVEARDAVYLKYLASFEEELKRIQDDCTSQIKEAQRWKDSWKQSLHTIQGLYV

SEQ ID NO: 18484 - protein, 508 aa, Homo sapiens
  Payload ID: 3699
  Gene Symbol: CCDC181
  Gene Name: coiled-coil domain containing 181
  Uniprot ID: Q5TID7
  ENSP ID: ENSP00000356779
MNENKDTDSKKSEEYEDDFEKDLEWLINENEKSDASIIEMACEKEENINQDLKENETVMEHTKRHSDPDKSLQDEVSPRRNDIISVPGIQPLDPISDSDSENSFQESKLESQKDLEEEEDEEVRRYIMEKIVQANKLLQNQEPVNDKRERKLKFKDQLVDLEVPPLEDTTTFKNYFENERNMFGKLSQLCISNDFGQEDVLLSLTNGSCEENKDRTILVERDGKFELLNLQDIASQGFLPPINNANSTENDPQQLLPRSSNSSVSGTKKEDSTAKIHAVTHSSTGEPLAYIAQPPLNRKTCPSSAVNSDRSKGNGKSNHRTQSAHISPVTSTYCLSPRQKELQKQLEEKREKLKREEERRKIEEEKEKKRENDIVFKAWLQKKREQVLEMRRIQRAKEIEDMNSRENRDPQQAFRLWLKKKHEEQMKERQTEELRKQEECLFFLKGTEGRERAFKQWLRRKRMEKMAEQQAVRERTRQLRLEAKRSKQLQHHLYMSEAKPFRFTDHYN

SEQ ID NO: 18485 - protein, 509 aa, Homo sapiens
  Payload ID: 3699
  Gene Symbol: CCDC181
  Gene Name: coiled-coil domain containing 181
  Uniprot ID: Q5TID7
  ENSP ID: ENSP00000356780
MNENKDTDSKKSEEYEDDFEKDLEWLINENEKSDASIIEMACEKEENINQDLKENETVMEHTKRHSDPDKSLQDEVSPRRNDIISVPGIQPLDPISDSDSENSFQESKLESQKDLEEEEDEEVRRYIMEKIVQANKLLQNQEPVNDKRERKLKFKDQLVDLEVPPLEDTTTFKNYFENERNMFGKLSQLCISNDFGQEDVLLSLTNGSCEENKDRTILVERDGKFELLNLQDIASQGFLPPINNANSTENDPQQLLPRSSNSSVSGTKKEDSTAKIHAVTHSSTGEPLAYIAQPPLNRKTCPSSAVNSDRSKGNGKSNHRTQSAHISPVTSTYCLSPRQKELQKQLEEKREKLKREEERRKIEEEKEKKRENDIVFKAWLQKKREQVLEMRRIQRAKEIEDMNSRQENRDPQQAFRLWLKKKHEEQMKERQTEELRKQEECLFFLKGTEGRERAFKQWLRRKRMEKMAEQQAVRERTRQLRLEAKRSKQLQHHLYMSEAKPFRFTDHYN

SEQ ID NO: 18486 - protein, 356 aa, Homo sapiens
  Payload ID: 3699
  Gene Symbol: CCDC181
  Gene Name: coiled-coil domain containing 181
  ENSP ID: ENSP00000411000
MNENKDTDSKKSEEYEDDFEKDLEWLINENEKSDASIIEMACEKEENINQDLKENETVMEHTKRHSDPDKSLQDEVSPRRNDIISVPGIQPLDPISDSDSENSFQESKLESQKDLEEEEDEEVRRYIMEKIVQANKLLQNQEPVNDKRERKLKFKDQLVDLEVPPLEDTTTFKNYFENERNMFGKLSQLCISNDFGQEDVLLSLTNGSCEENKDRTILVERDGKFELLNLQDIASQGFLPPINNANSTENDPQQLLPRSSNSSVSGTKKEDSTAKIHAVTHSSTGEPLAYIAQPPLNRKTCPSSAVNSDRSKGNGKSNHRTQSAHISPVTSTYCLSPRQKELQKQLEEKREKLKRE

SEQ ID NO: 18487 - protein, 508 aa, Homo sapiens; identical to SEQ ID NO: 18484
  Payload ID: 3699
  Gene Symbol: CCDC181
  Gene Name: coiled-coil domain containing 181
  Uniprot ID: Q5TID7
  ENSP ID: ENSP00000442297

SEQ ID NO: 18488 - protein, 418 aa, Homo sapiens
  Payload ID: 3699
  Gene Symbol: CCDC181
  Gene Name: coiled-coil domain containing 181
  Uniprot ID: Q5TID7
  ENSP ID: ENSP00000479042
MNENKDTDSKKSEEYEDDFEKDLEWLINENEKSDASIIEMACEKEENINQDLKENETVMEHTKRHSDPDKSLQDEVSPRRNDIISVPGIQPLDPISDSDSENSFQESKLESQKDLEEEEDEEVRRYIMEKIVQANKLLQNQEPVNDKRERKLKFKDQLVDLEVPPLEDTTTFKNYFENERNMFGKLSQLCISNDFGQEDVLLSLTNGSCEENKDRTILVERDGKFELLNLQDIASQGFLPPINNANSTENDPQQLLPRSSNSSVSGTKKEDSTAKIHAVTHSSTGEPLAYIAQPPLNRKTCPSSAVNSDRSKGNGKSNHRTQSAHISPVTSTYCLSPRQKELQKQLEEKREKLKREEERRKIEEEKEKKRENDIVFKAWLQKKREQVLEMRRIQRAKEIEDMNSRVSKTSLKNKFIQI

SEQ ID NO: 18489 - protein, 153 aa, Homo sapiens
  Payload ID: 3700
  Gene Symbol: CCDC182
  Gene Name: coiled-coil domain containing 182
  Uniprot ID: A6NF36
  ENSP ID: ENSP00000299415
MEPLYQAGSILMTVNTLQGKKMIESGLQSGDFSLSQSWPSCLPPPADLEILQQKVAGVQRELEDFKKEALKSIHYLEDAFCEMNGALVQQEEQAARVRQRLREEEDRGIVRNKVLTFLLPREKQLREHCKRLEDLLLDRGRDALRATKKSQAD

SEQ ID NO: 18490 - protein, 534 aa, Homo sapiens
  Payload ID: 3701
  Gene Symbol: CCDC183
  Gene Name: coiled-coil domain containing 183
  Uniprot ID: Q5T5S1
  ENSP ID: ENSP00000338013
MRRHSETDVEEQTQELKTITQLQEQCRALQIQGVKENMDQNKATLALLRSNIRRGAQDWALAKKYDQWTISKACGKNLPLRLAHCRSTMEVVREKLRKYVFDRVNMHNLLIHLVRRRGQKLESMQLELDSLRSQPDASKEELRLLQIIRQLENNIEKTMIKIITSQNIHLLYLDLLDYLKTVLAGYPIELDKLQNLVVNYCSELSDMKIMSQDAMMITDEVKRNMRQREASFIEERRARENRLNQQKKLIDKIHTKETSEKYRRGQMDLDFPSNLMSTETLKLRRKETSTAEMEYQSGVTAVVEKVKSAVRCSHVWDITSRFLAQRNTEENLELQMEDCEEWRVQLKALVKQLELEEAVLKFRQKPSSISFKSVEKKMTDMLKEEEERLQLAHSNMTKGQELLLTIQMGIDNLYVRLMGINLPATQREVVLSNTLDLNSKLAYCEGKLTYLADRVQMVSRTEEGDTKVRDTLESSTLMEKYNTRISFENREEDMIDTFQFPDMDHSYVPSRAEIKRQAQRLIEGKLKAAKKKKK

SEQ ID NO: 18491 - protein, 318 aa, Homo sapiens
  Payload ID: 3701
  Gene Symbol: CCDC183
  Gene Name: coiled-coil domain containing 183
  ENSP ID: ENSP00000419222
MRRHSETDVEEQTQELKTITQLQEQCRALQIQGVKENMDQNKATLALLRSNIRRGAQDWALAKKYDQWTISKACGKNLPLRLAHCRSTMEVVREKLRKYVFDRVNMHNLLIHLVRRRGQKLESMQLELDSLRSQPDASKEELRLLQIIRQLENNIEKTMIKIITSQNIHLLYLDLLDYLKTVLAGYPIELDKLQNLVVNYCSELSDMKIMSQDAMMITDEVKEHEAKGGVLHRGAPGKGEPAQPAEEADRQDPHEGDQREVPPGPDGLGLPLEPDEHGDPEIEEKRDLHSRNGIPVGRDCCGGEGQECCTVLSRLGHH

SEQ ID NO: 18492 - protein, 194 aa, Homo sapiens
  Payload ID: 3702
  Gene Symbol: CCDC184
  Gene Name: coiled-coil domain containing 184
  Uniprot ID: Q52MB2
  ENSP ID: ENSP00000320849
MEDGLLEIMTKDGGDMPAPLEVSTVPAVGDVISGEYNGGMKELMEHLKAQLQALFEDVRAMRGALDEQASHIQVLSDDVCANQRAIVSMCQIMTTAPRQGGLGVVGGKGSFQSDPQEPETPSPGIGDSGLLGRDPEDEEEEEEEKEMPSPATPSSHCERPESPCAGLLGGDGPLVEPLDMPDITLLQLEGEASL

SEQ ID NO: 18493 - protein, 623 aa, Homo sapiens
  Payload ID: 3703
  Gene Symbol: CCDC185
  Gene Name: coiled-coil domain containing 185
  Uniprot ID: Q8N715
  ENSP ID: ENSP00000355840
MAGFSHFSQPPYRDLWEPPRPGGERESTQRLGGQRSGADSTACSRAGTPGAESEAGACWLHPHCSFTPRPRRRGCSDSLRGSRSLSDVARRPLERSRKHRPRSRRLEDAWGETGTKPRPAWQPQTQLPPQRPQPCPHYPLAQGDSPPPCPGGAGTPLSGTFRVEKAQGGDQWAVPLGRHLGRWSPSSVPSERSSVPSQKFKRHSACVCAQKRDSSDQVESLASRDSQPLASSKEMRSPHTQVLKSKLEEVVVSSQDQQIVALVLTRLKKAQRIRELQQQAAKAWEELKRSDQKVQMTLERERRLLLRQSQEQWQEKEQRKTLQSPEQRGLRRDSQRKNVPPGESRWKEQPEDQESPRQEKLEKARAQAEHRKQCQVRRLREQEKMLRNLREQHSLQLQRRLVEACRKRHLHAVEGQKKVQDTNLSSLINYQARKVLMDCQAKAEELLRQLSLEQSFQRSQEIHQGLRKERQRELREKAQKEEEQLQQARWRAGESEEQRKMRKRILVELADEKIRQARSHVHKTTRDKVQHLRELNHLREKNHHILKLKAEKEEKCHIEGIKEAIKKKEQRVQHISQGKDPNFQEFQKLPQASRREERAPPNSSLDQMVLEAQLRACQQNRGY

SEQ ID NO: 18494 - protein, 211 aa, Homo sapiens
  Payload ID: 3704
  Gene Symbol: CCDC186
  Gene Name: coiled-coil domain containing 186
  ENSP ID: ENSP00000358291
MSETDHIASTSSDKNVGKTPELKEDSCNLFSGNESSKLENESKLLSLNTDKTLCQPNEHNNRIEAQENYIPDHGGGEDSCAKTDTGSENSEQIANFPSGNFAKHISKTNETEQKVTQILVELRSSTFPESANEKTYSESPYDTDCTKKFISKIKSVSASEDLLEEIESELLSTEFAEHRVPNGMNKGEHALVLFEKCVQDKYLQQEHIIKK

SEQ ID NO: 18495 - protein, 211 aa, Homo sapiens; identical to SEQ ID NO: 18494
  Payload ID: 3704
  Gene Symbol: CCDC186
  Gene Name: coiled-coil domain containing 186
  ENSP ID: ENSP00000358292

SEQ ID NO: 18496 - protein, 898 aa, Homo sapiens
  Payload ID: 3704
  Gene Symbol: CCDC186
  Gene Name: coiled-coil domain containing 186
  Uniprot ID: Q7Z3E2
  ENSP ID: ENSP00000358293
MSETDHIASTSSDKNVGKTPELKEDSCNLFSGNESSKLENESKLLSLNTDKTLCQPNEHNNRIEAQENYIPDHGGGEDSCAKTDTGSENSEQIANFPSGNFAKHISKTNETEQKVTQILVELRSSTFPESANEKTYSESPYDTDCTKKFISKIKSVSASEDLLEEIESELLSTEFAEHRVPNGMNKGEHALVLFEKCVQDKYLQQEHIIKKLIKENKKHQELFVDICSEKDNLREELKKRTETEKQHMNTIKQLESRIEELNKEVKASRDQLIAQDVTAKNAVQQLHKEMAQRMEQANKKCEEARQEKEAMVMKYVRGEKESLDLRKEKETLEKKLRDANKELEKNTNKIKQLSQEKGRLHQLYETKEGETTRLIREIDKLKEDINSHVIKVKWAQNKLKAEMDSHKETKDKLKETTTKLTQAKEEADQIRKNCQDMIKTYQESEEIKSNELDAKLRVTKGELEKQMQEKSDQLEMHHAKIKELEDLKRTFKEGMDELRTLRTKVKCLEDERLRTEDELSKYKEIINRQKAEIQNLLDKVKTADQLQEQLQRGKQEIENLKEEVESLNSLINDLQKDIEGSRKRESELLLFTERLTSKNAQLQSESNSLQSQFDKVSCSESQLQSQCEQMKQTNINLESRLLKEEELRKEEVQTLQAELACRQTEVKALSTQVEELKDELVTQRRKHASSIKDLTKQLQQARRKLDQVESGSYDKEVSSMGSRSSSSGSLNARSSAEDRSPENTGSSVAVDNFPQVDKAMLIERIVRLQKAHARKNEKIEFMEDHIKQLVEEIRKKTKIIQSYILREESGTLSSEASDFNKVHLSRRGGIMASLYTSHPADNGLTLELSLEINRKLQAVLEDTLLKNITLKENLQTLGTEIERLIKHQHELEQRTKKT

SEQ ID NO: 18497 - protein, 436 aa, Homo sapiens
  Payload ID: 3704
  Gene Symbol: CCDC186
  Gene Name: coiled-coil domain containing 186
  ENSP ID: ENSP00000415344
  MOD_RES (1)..(1): Any amino acid
XRLIREIDKLKEDINSHVIKVKWAQNKLKAEMDSHKETKDKLKETTTKLTQAKEEADQIRKNCQDMIKTYQESEEIKSNELDAKLRVTKGELEKQMQEKSDQLEMHHAKIKELEDLKRTFKEGMDELRTLRTKVKCLEDERLRTEDELSKYKEIINRQKAEIQNLLDKVKTADQLQEQLQRGKQEIENLKEEVESLNSLINDLQKDIEGSRKRESELLLFTERLTSKNAQLQSESNSLQSQFDKVSCSESQLQSQCEQMKQTNINLESRLLKEEELRKEEVQTLQAELACRQTEVKALSTQVEELKDELVTQRRKHASSIKDLTKQLQQARRKLDQVESGSYDKEVSSMGSRSSSSGSLNARSSAEDRSPENTGSSVAVDNFPQVDKAMLIERIVRLQKAHARKNEKIEFMEDHIKQLVEEIRKKTKKIYKHLEQK

SEQ ID NO: 18498 - protein, 965 aa, Homo sapiens
  Payload ID: 3705
  Gene Symbol: CCDC187
  Gene Name: coiled-coil domain containing 187
  ENSP ID: ENSP00000456543
MWSTGPEARDGDSSVSSGRLSCSSGGHDVCVSWKERPPQVLGPQQRPRKSDARLEQLRDKIRAQAWQQGSCASLGTSAPSSASRLHKASTLMLRRKGQEAKNPPPAPECSGFSILSAAERRVEAKASHGQGRELSRVSQHQVPVLREKPKRVKSSSCKREKTPKLPSPRRAAKDKHKDEDSELVGVYAWRKGQALVRSLLGPPPVLRRHHSKDPSRDPALTVDLGDSEKVIAAKCSPVCAQLPDATSAYSDQQVSGNTPSLASFDQPATIQTAMAILQDLRQQIQAGLELAQARKGGQELGPSKRRLQDVAGRGCCRDPNAQSSFSKSPWAMTERKHSSLERARSVHTWEPWSSSTARESCPQRAWGAQGQDRSFQRPESPHERLGHFSQRPWSALAGQACSPQRAWGAQRQGPSSQRPGSPPEKRSPFPQQPWSAVATQPCPRRAWTACETWEDPGPRLRNPLERPSPPAQRPWSSSGVQRAGPQGKGRGIGSPVSAAKHALPRPTGSFPQNPLGKEKDTLRPCPRSRGLLGPSHSSESLREFMRQKAQARRRQALEEKASALRTRELRSRRLQEVYRQQREAVLGRAVPVVSRTTPGIVTFVPSSAQSGGLEASGSLESPVLEWSKVTSGMVLGGQEAPGSFCLCLNRAWNHAETLDPPGMGGPQDGRDAPVLLSASPSLGSLELQDLTTRYLPRGMCIYLDPKEAEHLGTSSSLHLRHKQAQLQALETTAKVLKQRVDSLTAKLQGAEALDTVRDPAVGLLRSCPHSLPAAPTLATPTLATPACPGALGPNWGRGAPGEWVSMQPQPLLPPTYFLDGETLSWGPSWEQQQSVSPRAHCESKPRGFPEEGHVDVKPDKRLQRGVAPFQALSPSAGSSYAGPATLHPIWGSLGLEETPSVGGADSVAPCTPRSCGKGDPADRPWAGWSGGRGIHREHLPLPSTRAWPYGVEKSFSTWRASTPRY

SEQ ID NO: 18499 - protein, 953 aa, Homo sapiens
  Payload ID: 3705
  Gene Symbol: CCDC187
  Gene Name: coiled-coil domain containing 187
  ENSP ID: ENSP00000457438
MPTLVVGTPPTCLGDTPQPCHKNSQRQGPFSHGAPGRAADWKAVAKPRLCAPAAEDDVAALRWPGPSQQPDPPWAAPHVVGSDDLKEPGPWGKACSLPMWSTGPEARDGDSSVSSGRLSCSSGGHDVCVSWKERPPQVLGPQQRPRKSDARLEQLRDKIRAQAWQQGSCASLGTSAPSSASRLHKASTLMLRRKGQEAKNPPPAPECSGFSILSAAERRVEAKASHGQGRELSRVSQHQVPVLREKPKRVKSSSCKREKTPKLPSPRRAAKDKHKDEDSELVGVYAWRKGQALVRSLLGPPPVLRRHHSKDPSRDPALTVDLGDSEKVIAAKCSPVCAQLPDATSAYSDQQVSGNTPSLASFDQPATIQTAMAILQDLRQQIQAGLELAQARKGGQELGPSKRRLQDVAGRGCCRDPNAQSSFSKSPWAMTERKHSSLERARSVHTWEPWSSSTARESCPQRAWGAQGQDRSFQRPESPHERLGHFSQRPWSALAGQACSPQRAWGAQRQGPSSQRPGSPPEKRSPFPQQPWSAVATQPCPRRAWTACETWEDPGPRLRNPLERPSPPAQRPWSSSGVQRAGPQGKGRGIGSPVSAAKHALPRPTGSFPQNPLGKEKDTLRPCPRSRGLLGPSHSSESLREFMRQKAQARRRQALEEKASALRTRELRSRRLQEVYRQQREAVLGRAVPVVSRTTPGIVTFVPSSAQSGGLEASGSLESPVLEWSKVTSGMVLGGQEAPGSFCLCLNRAWNHAETLDPPGMGGPQDGRDAPVLLSASPSLGSLELQDLTTRYLPRGMCIYLDPKEAEHLGTSSSLHLRHKQAQLQALETTAKVLKQRVDSLTAKLQGAEALDTVRDPAVGLLRSCPHSLPAAPTLATPTLATPACPGALGPNWGRGAPGEWVSMQPQPLLPPTYFLDGETLSWGPSWEQQQSVSPRAHCESKPRGVSQAPLLL

SEQ ID NO: 18500 - protein, 1063 aa, Homo sapiens
  Payload ID: 3705
  Gene Symbol: CCDC187
  Gene Name: coiled-coil domain containing 187
  ENSP ID: ENSP00000485393
MPTLVVGTPPTCLGDTPQPCHKNSQRQGPFSHGAPGRAADWKAVAKPRLCAPAAEDDVAALRWPGPSQQPDPPWAAPHVVGSDDLKEPGPWGKACSLPMWSTGPEARDGDSSVSSGRLSCSSGGHDVCVSWKERPPQVLGPQQRPRKSDARLEQLRDKIRAQAWQQGSCASLGTSAPSSASRLHKASTLMLRRKGQEAKNPPPAPECSGFSILSAAERRVEAKASHGQGRELSRVSQHQVPVLREKPKRVKSSSCKREKTPKLPSPRRAAKDKHKDEDSELVGVYAWRKGQALVRSLLGPPPVLRRHHSKDPSRDPALTVDLGDSEKVIAAKCSPVCAQLPDATSAYSDQQVSGNTPSLASFDQPATIQTAMAILQDLRQQIQAGLELAQARKGGQELGPSKRRLQDVAGRGCCRDPNAQSSFSKSPWAMTERKHSSLERARSVHTWEPWSSSTARESCPQRAWGAQGQDRSFQRPESPHERLGHFSQRPWSALAGQACSPQRAWGAQRQGPSSQRPGSPPEKRSPFPQQPWSAVATQPCPRRAWTACETWEDPGPRLRNPLERPSPPAQRPWSSSGVQRAGPQGKGRGIGSPVSAAKHALPRPTGSFPQNPLGKEKDTLRPCPRSRGLLGPSHSSESLREFMRQKAQARRRQALEEKASALRTRELRSRRLQEVYRQQREAVLGRAVPVVSRTTPGIVTFVPSSAQSGGLEASGSLESPVLEWSKVTSGMVLGGQEAPGSFCLCLNRAWNHAETLDPPGMGGPQDGRDAPVLLSASPSLGSLELQDLTTRYLPRGMCIYLDPKEAEHLGTSSSLHLRHKQAQLQALETTAKVLKQRVDSLTAKLQGAEALDTVRDPAVGLLRSCPHSLPAAPTLATPTLATPACPGALGPNWGRGAPGEWVSMQPQPLLPPTYFLDGETLSWGPSWEQQQSVSPRAHCESKPRGFPEEGHVDVKPDKRLQRGVAPFQALSPSAGSSYAGPATLHPIWGSLGLEETPSVGGADSVAPCTPRSCGKGDPADRPWAGWSGGRGIHREHLPLPSTRAWPYGVEKSFSTWRASTPRY

SEQ ID NO: 18501 - protein, 402 aa, Homo sapiens
  Payload ID: 3706
  Gene Symbol: CCDC188
  Gene Name: coiled-coil domain containing 188
  ENSP ID: ENSP00000409542
MEGLKTLGPCGHPHPQCPPTPASSSHGGGLDQPCQGFVGWPCLGPISSAHSVQSQRPFPVPGAGGSGPTVEGEAPGLFLSSQEQRARDTEGPRQGDLEAGLGWGWPLHPGSNQGAPRQGGSIGSGTRPCPCPPLSREGGALASPRVALSQLQCGLLGSAEQSFLQLEQENHSLKRQNQELREQLGALLGPGQQFLPLCPEHSSCTALAWPPDPAGTQPLGNRAPLQLLRRELCQGQEAFVQQSQNELQQIRLCFERKKMVITEVWDNVAEMHMALNNQATGLLNLKKDIRGVLDQMEDIQLEILRERAQCRTRARKEKQMASMSKGRPKLGSSKGLAGQLWLLTLRLLLGALLVWTAAYVYVVNPTPFEGLVPPLLSRATVWKLRALLDPFLRLKVDGFLPF

SEQ ID NO: 18502 - protein, 331 aa, Homo sapiens
  Payload ID: 3707
  Gene Symbol: CCDC189
  Gene Name: coiled-coil domain containing 189
  Uniprot ID: A1A4V9
  ENSP ID: ENSP00000437532
MLNRKTSHFLGMRVQSELEHLSELRREAGKDRSSVHGSAARTRASVRTQWTTAAAAKADEDPGANLFPPPLPRPRICMWKYLDVHSMHQLEKTTNAEMREVLAELLELGCPEQSLRDAITLDLFCHALIFCRQQGFSLEQTSAACALLQDLHKACIATPLGNVEECYRYFTSVLFCHGVRRPPFSIDLFKEEQLLALEDYVVNTYFRHFKLYKYVFTPQVRLDLSLTYMGLQPPKLWPESETEKEESKEMEEQAVTPQKEELETVAPPEPEPSHIHVLRAYIKTQVNKELEQLQGLVEERLKASEERLSSKLTALERPFQLPPGKGKSKTK

SEQ ID NO: 18503 - protein, 177 aa, Homo sapiens
  Payload ID: 3707
  Gene Symbol: CCDC189
  Gene Name: coiled-coil domain containing 189
  Uniprot ID: A1A4V9
  ENSP ID: ENSP00000441164
MLNRKTSHFLGMRVQSELEHLSELRREAGKDRSSVHGSAARTRASVRTQWTTAAAAKADEDPGANLFPPPLPRPRICMWKYLDVHSMHQLEKTTNAEMREVLAELLELGCPEQSLRDAITLDLFCHALIFCRQQGFSLEQTSAACALLQDLHKACIGERGQLPGLSPREKRNRAWHK

SEQ ID NO: 18504 - protein, 145 aa, Homo sapiens
  Payload ID: 3707
  Gene Symbol: CCDC189
  Gene Name: coiled-coil domain containing 189
  ENSP ID: ENSP00000442644
  MOD_RES (1)..(1): Any amino acid
XTPLGNVEECYRYFTSVLFCHGVRRPPFSIDLFKEEQLLALEDYVVNTYFRHFKLYKYVFTPQVRLDLSLTYMGLQPPKLWPESETGHIHVLRAYIKTQVNKELEQLQGLVEERLKASEERLSSKLTALERPFQLPPGKGKSKTK

SEQ ID NO: 18505 - protein, 71 aa, Homo sapiens
  Payload ID: 3707
  Gene Symbol: CCDC189
  Gene Name: coiled-coil domain containing 189
  ENSP ID: ENSP00000442648
MLNRKTSHFLGMRVQSELEHLSELRREAGKDRSSVHGSAARTRASVRTQWTTAAAAKADEDPGANLFPSLR

SEQ ID NO: 18506 - protein, 91 aa, Homo sapiens
  Payload ID: 3707
  Gene Symbol: CCDC189
  Gene Name: coiled-coil domain containing 189
  ENSP ID: ENSP00000455034
  MOD_RES (1)..(1): Any amino acid
XAEPEGRHHPGPLLPRAHFLPPAGLLTGADVSGLCPAPGSSQGLYCGLLSASTSSKRNSCWPWKTTWSTLTSATSSSINTSSHPRCGWICL

SEQ ID NO: 18507 - protein, 396 aa, Homo sapiens
  Payload ID: 3707
  Gene Symbol: CCDC189
  Gene Name: coiled-coil domain containing 189
  ENSP ID: ENSP00000457287
MLNRKTSHFLGMRVQSELEHLSELRREAGKDRSSVHGSAARTRASVRTQWTTAAAAKADEDPGANLFPPPLPRPRICMWKYLDVHSMHQLEKTTNAEMREVLAELLELGCPEQSLRDAITLDLFCHALIFCRQQGFSLEQTSAACALLQDLHKACIATPLGNVEECYRYFTSVLFCHGVRVSSPGTFWKLYPSPDKVSPSLSHIHHPYLLVKTPVGSPCSCCWAFGGKARAPEGSQGSNSESPPQRPPFSIDLFKEEQLLALEDYVVNTYFRHFKLYKYVFTPQVRLDLSLTYMGLQPPKLWPESETEKEESKEMEEQAVTPQKEELETVAPPEPEPSHIHVLRAYIKTQVNKELEQLQGLVEERLKASEERLSSKLTALERPFQLPPGKGKSKTK

SEQ ID NO: 18508 - protein, 302 aa, Homo sapiens
  Payload ID: 3708
  Gene Symbol: CCDC190
  Gene Name: coiled-coil domain containing 190
  Uniprot ID: Q86UF4
  ENSP ID: ENSP00000356886
MERHMVRGQLYKHFDLERKNAKQAEARLDQRLQRLKVICLYHVKLLTWEQRQLQKELQRLQQAETMKKKFSSYLGNGFQKRPEDVLVFSPQGRQKHRAPQAKKMRALATRMAQDTCKSKSQVPPSHDAGLKDPMKSKKQPLSQNNRTACFIKEQPQAQEKDSVNPSKDVDPSKGISVPCQNQEVSTNTIEQGPSSSPASDSGMACADETRSKDVALKPDGNTGKQIPPKHMECAGSFEGEFTKPTFLELLSKARNAHYLRHRVPPESERLLSIGEIFGHGESSSSRAGKECENRVPSKFLPL

SEQ ID NO: 18509 - protein, 302 aa, Homo sapiens; identical to SEQ ID NO: 18508
  Payload ID: 3708
  Gene Symbol: CCDC190
  Gene Name: coiled-coil domain containing 190
  Uniprot ID: Q86UF4
  ENSP ID: ENSP00000356887

SEQ ID NO: 18510 - protein, 207 aa, Homo sapiens
  Payload ID: 3708
  Gene Symbol: CCDC190
  Gene Name: coiled-coil domain containing 190
  Uniprot ID: Q86UF4
  ENSP ID: ENSP00000356888
MERHMVRGQLYKHFDLERKNAKQAEARLDQRLQRLKVICLYHVKLLTWEQRQLQKELQRLQQETMKKKFSSYLGNGFQKRPEDVLVFSPQGRQKHRAPQAKKMRALATRMAQDTCKSKSQVPPSHDAGLKDPMKSKKQPLSQNNRTACFIKEQPQAQEKDSVNPSKDVDPSKGISVPCQNQEVSTNTIEQGPSSSPASGLQWGDNTL

SEQ ID NO: 18511 - protein, 936 aa, Homo sapiens
  Payload ID: 3709
  Gene Symbol: CCDC191
  Gene Name: coiled-coil domain containing 191
  Uniprot ID: Q8NCU4
  ENSP ID: ENSP00000295878
MLLAPQGRSFSKKRMGLNRWKRFTRKPSPKPTFGPDSVEHWIKRVEKASEFAVSNAFFTRNSDLPRSPWGQITDLKTSEQIEDHDEIYAEAQELVNDWLDTKLKQELASEEEGDAKNTVSSVTIMPEANGHLKYDKFDDLCGYLEEEEESTTVQKFIDHLLHKNVVDSAMMEDLGRKENQDKKQQKDPRLTMEMRHKQVKENRLRREKELEYQRIEKTLKKSAFLEAQCLVQEEKKRKALEAKKEEEEIQREMVKLRREIIERRRTVKAAWKIEKKRQEENSQNSSEKVMFQSTHILPDEEKMVKERKRKLKEVLIQTFKENQQCQKRYFAAWHKLILDHRIKLGKAGTLSDWKIQLKVLRAWRDYTRFQKLERETQALENDLREENRKQQLATEYNRKQVLRHCFTEWQHWHGAELLKRELALTKEETRKKMDALLQAASLGKLSANGLSGISLPEEATAMVGPPVKNGQETAVPPLWEKPPLGSSGCMLSPPLGRTTTGNLQGSLQNVSLSAPGNKQHKTLGAEPSQQPGSNETLRTTSQKAEPLCLGHFHNRHVFQQQLIEKQKKKLQEQQKTILELKKNLQLAEAQWAAEHALAVTEAQSHLLSKPREEEPRTCQMLVNSPVASPGTEGRSDSRNSLSGLRRKPKQLMTPHPILKAMEERAIQRAECRRILAEKKKKQEEEKLAQLKAQEEERQKREAEEKEAQLERKREEKRLKKMKELEKQKRIKRNQQLEAIAKEHYERVLLRKKGLEPWKRLRMQSKQNIQVAEEHYSLFLQRKYMLTWFQRSQESLARKMAQADQFYSQILLKRVIQSWLQYVIDLQEEVRKFCVHFLQKKIFRAWFNMVREVKIDSQGKHEIAAEHSDRRILWITLRTWKKFVKFMKEERVKEERRQQLRRKVVEILPDFQVPGRYHELYQQSDTWSLSKTSLVNE

SEQ ID NO: 18512 - protein, 609 aa, Homo sapiens
  Payload ID: 3709
  Gene Symbol: CCDC191
  Gene Name: coiled-coil domain containing 191
  ENSP ID: ENSP00000418099
MLLAPQGRSFSKKRMGLNRWKRFTRKPSPKRVEKASEFAVSNAFFTRNSDLPRSPWGQITDLKTSEQIEDHDEIYAEAQELVNDWLDTKLKQELASEEEGDAKNTVSSVTIMPEANGHLKYDKFDDLCGYLEEEEESTTVQKFIDHLLHKNVVDSAMMEDLGRKENQDKKQQKDPRLTMEMRHKQVKENRLRREKELEYQRIEKTLKKSAFLEAQCLVQEEKKRKALEAKKEEEEIQREMVKLRREIIERRRTVKAAWKIEKKRQEENSQNSSEKVMFQSTHILPDEEKMVKERKRKLKEVLIQTFKENQQCQKRYFAAWHKLILDHRIKLGKAGTLSDWKIQLKVLRAWRDYTRFQKLERETQALENDLREENRKQQLATEYNRKQVLRHCFTEWQHWHGAELLKRELALTKEETRKKMDALLQAASLGKLSANGLSGISLPEEATAMVGPPVKNGQETAVPPLWEKPPLGSSGCMLSPPLGRTTTGNLQGSLQNVSLSAPGNKQHKTLGAEPSQQPGSNETLRTTSQKAEPLCLGHFHNRHVFQQQLIEKQKKKLQEQQKTILELKKNLQLAEAQWAAEHALAVTEAQSHLLSKPREEEPRTCQMLV

SEQ ID NO: 18513 - protein, 81 aa, Homo sapiens
  Payload ID: 3709
  Gene Symbol: CCDC191
  Gene Name: coiled-coil domain containing 191
  ENSP ID: ENSP00000418382
MLLAPQGRSFSKKRMGLNRWKRFTRKPSPKRVEKASEFAVSNAFFTRNSDLPRSPWGQITDLKTSEQIEDHDEIYAEGAGQ

SEQ ID NO: 18514 - protein, 197 aa, Homo sapiens
  Payload ID: 3709
  Gene Symbol: CCDC191
  Gene Name: coiled-coil domain containing 191
  ENSP ID: ENSP00000418991
VTRRQPGQKGGCCSFGRGSGSNLENAPGASGKVLLKEKDGAESLETVHKEAESQAQELVNDWLDTKLKQELASEEEGDAKNTVSSVTIMPEANGHLKYDKFDDLCGYLEEEEESTTVQKFIDHLLHKNVVDSAMMEDLGRKENQDKKQQKDPRLTMEMRHKQVKENRLRREKELEYQRIEKTLKKSAFLEAQCLVQE

SEQ ID NO: 18515 - protein, 38 aa, Homo sapiens
  Payload ID: 3709
  Gene Symbol: CCDC191
  Gene Name: coiled-coil domain containing 191
  ENSP ID: ENSP00000419159
MLLAPQGRSFSKKRMGLNRWKRFTRKPSPKLRSWSMTG

SEQ ID NO: 18516 - protein, 627 aa, Homo sapiens
  Payload ID: 3710
  Gene Symbol: CCDC22
  Gene Name: coiled-coil domain containing 22
  Uniprot ID: O60826
  ENSP ID: ENSP00000365401
MEEADRILIHSLRQAGTAVPPDVQTLRAFTTELVVEAVVRCLRVINPAVGSGLSPLLPLAMSARFRLAMSLAQACMDLGYPLELGYQNFLYPSEPDLRDLLLFLAERLPTDASEDADQPAGDSAILLRAIGSQIRDQLALPWVPPHLRTPKLQHLQGSALQKPFHASRLVVPELSSRGEPREFQASPLLLPVPTQVPQPVGRVASLLEHHALQLCQQTGRDRPGDEDWVHRTSRLPPQEDTRAQRQRLQKQLTEHLRQSWGLLGAPIQARDLGELLQAWGAGAKTGAPKGSRFTHSEKFTFHLEPQAQATQVSDVPATSRRPEQVTWAAQEQELESLREQLEGVNRSIEEVEADMKTLGVSFVQAESECRHSKLSTAEREQALRLKSRAVELLPDGTANLAKLQLVVENSAQRVIHLAGQWEKHRVPLLAEYRHLRKLQDCRELESSRRLAEIQELHQSVRAAAEEARRKEEVYKQLMSELETLPRDVSRLAYTQRILEIVGNIRKQKEEITKILSDTKELQKEINSLSGKLDRTFAVTDELVFKDAKKDDAVRKAYKYLAALHENCSQLIQTIEDTGTIMREVRDLEEQIETELGKKTLSNLEKIREDYRALRQENAGLLGRVREA

SEQ ID NO: 18517 - protein, 307 aa, Homo sapiens
  Payload ID: 3711
  Gene Symbol: CCDC24
  Gene Name: coiled-coil domain containing 24
  Uniprot ID: Q8N4L8
  ENSP ID: ENSP00000361392
MLRHSPSLWELVEEHVPLRERREVKRILGEAAVDLSLELRAEVAMLRALLQEARSSQAPSSRPISDPSSLLAPPPLLKDLLRQELRQLLQGLRHKAICEGRDQAQAWVQYSPRVLHFALEEPRCDLPEQEIFQMRGGGPSSGHRDLSIIKDQLNVSNIDQVARHLRGLLEEECHTLEREILILQRCLEEEYLRPCHPSEAALEPTLAELKEQKKAMEQELQASVGPSCVSPNHRQRPLGSSTQGLRPPLPLCGVAPLQCCLPAPPLEPYLRPRGQSATHRWGRQLQCSPREGPASTPMSSAAPQAPA

SEQ ID NO: 18518 - protein, 96 aa, Homo sapiens
  Payload ID: 3711
  Gene Symbol: CCDC24
  Gene Name: coiled-coil domain containing 24
  ENSP ID: ENSP00000476285
MLRHSPSLWELVEEHVPLRERREVKRILGEAAVDLSLELRAEPPPFRTLPSPVARYPSSPCRWRCYGHCSKRLDPLKPPAPAPSLTPLLFWHHRLS

SEQ ID NO: 18519 - protein, 59 aa, Homo sapiens
  Payload ID: 3711
  Gene Symbol: CCDC24
  Gene Name: coiled-coil domain containing 24
  ENSP ID: ENSP00000476322
MLRHSPSLWELVEEHVPLRERREVKRILGEAAVDLSLELRAERSQRSQHHQGPTERVQH

SEQ ID NO: 18520 - protein, 220 aa, Homo sapiens
  Payload ID: 3711
  Gene Symbol: CCDC24
  Gene Name: coiled-coil domain containing 24
  ENSP ID: ENSP00000476456
MLRHSPSLWELVEEHVPLRERREVKRILGEAAVDLSLELRAEKQLPRSDIWVLKAWGEQHAESDSDFIASSGHRDLSIIKDQLNVSNIDQVARHLRGLLEEECHTLEREILILQRCLEEEYLRPCHPSEAALEPTLAELKEQKKAMEQELQASVGPSCVSPNHSGPWGPPHRASDPRFPSAGLHLSSAACLHLLWSPTFDLEASRLPTAGDGSFSAAPGK

SEQ ID NO: 18521 - protein, 65 aa, Homo sapiens
  Payload ID: 3711
  Gene Symbol: CCDC24
  Gene Name: coiled-coil domain containing 24
  ENSP ID: ENSP00000476589
MLRHSPSLWELVEEHVPLRERREVKRILGEAAVDLSLELRAEVGRGKQRSQRSQHHQGPTERVQH

SEQ ID NO: 18522 - protein, 96 aa, Homo sapiens; identical to SEQ ID NO: 18518
  Payload ID: 3711
  Gene Symbol: CCDC24
  Gene Name: coiled-coil domain containing 24
  ENSP ID: ENSP00000476661

SEQ ID NO: 18523 - protein, 59 aa, Homo sapiens; identical to SEQ ID NO: 18519
  Payload ID: 3711
  Gene Symbol: CCDC24
  Gene Name: coiled-coil domain containing 24
  ENSP ID: ENSP00000476914

SEQ ID NO: 18524 - protein, 208 aa, Homo sapiens
  Payload ID: 3712
  Gene Symbol: CCDC25
  Gene Name: coiled-coil domain containing 25
  Uniprot ID: Q86WR0
  ENSP ID: ENSP00000348933
MVFYFTSSSVNSSAYTIYMGKDKYENEDLIKHGWPEDIWFHVDKLSSAHVYLRLHKGENIEDIPKEVLMDCAHLVKANSIQGCKMNNVNVVYTPWSNLKKTADMDVGQIGFHRQKDVKIVTVEKKVNEILNRLEKTKVERFPDLAAEKECRDREERNEKKAQIQEMKKREKEEMKKKREMDELRSYSSLMKVENMSSNQDGNDSDEFM

SEQ ID NO: 18525 - protein, 42 aa, Homo sapiens
  Payload ID: 3712
  Gene Symbol: CCDC25
  Gene Name: coiled-coil domain containing 25
  ENSP ID: ENSP00000427714
MVFYFTSSSVNSSAYTIYMGKDKYENEDLIKHGWPEDIWERI

SEQ ID NO: 18526 - protein, 140 aa, Homo sapiens
  Payload ID: 3712
  Gene Symbol: CCDC25
  Gene Name: coiled-coil domain containing 25
  Uniprot ID: Q86WR0
  ENSP ID: ENSP00000428000
MDCAHLVKANSIQGCKMNNVNVVYTPWSNLKKTADMDVGQIGFHRQKDVKIVTVEKKVNEILNRLEKTKVERFPDLAAEKECRDREERNEKKAQIQEMKKREKEEMKKKREMDELRSYSSLMKVENMSSNQDGNDSDEFM

SEQ ID NO: 18527 - protein, 26 aa, Homo sapiens
  Payload ID: 3712
  Gene Symbol: CCDC25
  Gene Name: coiled-coil domain containing 25
  ENSP ID: ENSP00000428499
MVFYFTSSSVNSSAYTIYMGKDKYES

SEQ ID NO: 18528 - protein, 92 aa, Homo sapiens
  Payload ID: 3712
  Gene Symbol: CCDC25
  Gene Name: coiled-coil domain containing 25
  ENSP ID: ENSP00000428505
MVFYFTSSSVNSSAYTIYMGKDKYENEDLIKHGWPEDIWFHVDKLSSAHVYLRLHKGENIEDIPKEVLMDCAHLVKANSIQGKNCDSGEESK

SEQ ID NO: 18529 - protein, 42 aa, Homo sapiens; identical to SEQ ID NO: 18525
  Payload ID: 3712
  Gene Symbol: CCDC25
  Gene Name: coiled-coil domain containing 25
  ENSP ID: ENSP00000428587

SEQ ID NO: 18530 - protein, 86 aa, Homo sapiens
  Payload ID: 3712
  Gene Symbol: CCDC25
  Gene Name: coiled-coil domain containing 25
  ENSP ID: ENSP00000429861
MVFYFTSSSVNSSAYTIYMGKDKYENEDLIKHGWPEDIWFHVDKLSSAHVYLRLHKGENIEDIPKEVLMDCAHLVKANSIQGAIHH

SEQ ID NO: 18531 - protein, 92 aa, Homo sapiens; identical to SEQ ID NO: 18528
  Payload ID: 3712
  Gene Symbol: CCDC25
  Gene Name: coiled-coil domain containing 25
  ENSP ID: ENSP00000430662

SEQ ID NO: 18532 - protein, 656 aa, Homo sapiens
  Payload ID: 3713
  Gene Symbol: CCDC27
  Gene Name: coiled-coil domain containing 27
  Uniprot ID: Q2M243
  ENSP ID: ENSP00000294600
MFEAIFPSTPQARLKRDPREKPGLSSFRSTFRQQSSLGLCIPRLMLPKEASPSQRHSSMSSSMARALVLLQSMASRDARCPEWKPHQKPRTLSKSVQTISRYYRKTSEPKDAASLTGFMSKMELRRVFPTHPDCPQFSTRATSMSHCGSPTEADLSGEIDNSSETWRGTQDLFLARRGSDTNVDGYLLPFSKSICEFDYLRKRRKSQTLSPVTSSSVASQSCLRKRMPWYLSVIHEKDHCLSELEIQVQKKDEEILLLQEEREALKMQLKCLLKGKGQETSMSPGRREQLSDASLKLGRLSLLKAFSRHEEELQHWWQMQEESAAPERGKEPDLGGGEEDEGLEGEPDGVEDTGAWGGVSQMGSVHEEGSEEEEEEEGDRDEDSEERELPEEEEIPRRRASSLAESFEEELLAQLEEYEQVILDFQFNLEATRTRYSLATGVIASLQQQVDFQETQLRKINTENETLQKELRERRQQLQAMTDKFSNLREDKKHQEMMGLIEKDNQLLRQQVSELERKLTKRDCVISELDTKVSQLQEQVELDQNHLQRWKQLQEDLQSKKEMIQQAEQHTRVALESSQSRLERLRNKIIQATFSISGTKSLANEISDNDILEALQRIISERSDYYNQLKQKGVKVPPLQQSEAFLTSKSKKGTSK

SEQ ID NO: 18533 - protein, 202 aa, Homo sapiens
  Payload ID: 3713
  Gene Symbol: CCDC27
  Gene Name: coiled-coil domain containing 27
  ENSP ID: ENSP00000463275
MFEAIFPSTPQARLKRDPREKPGLSSFRSTFRQQSSLGLCIPRLMLPKEASPSQRHSSMSSSMARALVLLQSMASRDARCPEWKPHQKPRTLSKSVQTISRYYRKTSEPKDAASLTGFMSKMELRRVFPTHPDCPQFSTRATSMSHCGSPTEADLSGEIDNSSETWRGTQDLFLARRGSDTNVDVRASASSITCGRGENPRL

SEQ ID NO: 18534 - protein, 274 aa, Homo sapiens
  Payload ID: 3714
  Gene Symbol: CCDC28A
  Gene Name: coiled-coil domain containing 28A
  Uniprot ID: Q8IWP9
  ENSP ID: ENSP00000332716
MPRAEPRATLGEQEKAGLPLGAWRLYLLRHFRKQTELRRSGSRDVTGALLVAAAVASEAVGSLRVAEGGPNTLLLQVLRSWPWCNKELKTMEERKVKRRSPKSFSAHCTQVVNAKKNAIPVSKSTGFSNPASQSTSQRPKLKRVMKEKTKPQGGEGKGAQSTPIQHSFLTDVSDVQEMERGLLSLLNDFHSGKLQAFGNECSIEQMEHVRGMQEKLARLNLELYGELEELPEDKRKTASDSNLDRLLSDLEELNSSIQKLHLADAQDVPNTSAS

SEQ ID NO: 18535 - protein, 274 aa, Homo sapiens; identical to SEQ ID NO: 18534
  Payload ID: 3714
  Gene Symbol: CCDC28A
  Gene Name: coiled-coil domain containing 28A
  Uniprot ID: Q8IWP9
  ENSP ID: ENSP00000479060

SEQ ID NO: 18536 - protein, 161 aa, Homo sapiens
  Payload ID: 3714
  Gene Symbol: CCDC28A
  Gene Name: coiled-coil domain containing 28A
  ENSP ID: ENSP00000479544
MPKNAIPVSKSTGFSNPASQSTSQRPKLKRVMKEKTKPQGGEGKGAQSTPIQHSFLTDVSDVQEMERGLLSLLNDFHSGKLQAFGNECSIEQMEHVRGMQEKLARLNLELYGELEELPEDKRKTASDSNLDRLLSDLEELNSSIQKLHLADAQDVPNTSAS

SEQ ID NO: 18537 - protein, 184 aa, Homo sapiens
  Payload ID: 3714
  Gene Symbol: CCDC28A
  Gene Name: coiled-coil domain containing 28A
  ENSP ID: ENSP00000482946
MEERKVKRRSPKSFSAHCTQVVNAKKNAIPVSKSTGFSNPASQSTSQRPKLKRVMKEKTKPQGGEGKGAQSTPIQHSFLTDVSDVQEMERGLLSLLNDFHSGKLQAFGNECSIEQMEHVRGMQEKLARLNLELYGELEELPEDKRKTASDSNLDRLLSDLEELNSSIQKLHLADAQDVPNTSAS

SEQ ID NO: 18538 - protein, 200 aa, Homo sapiens
  Payload ID: 3715
  Gene Symbol: CCDC28B
  Gene Name: coiled-coil domain containing 28B
  Uniprot ID: Q9BUN5
  ENSP ID: ENSP00000362704
MDDKKKKRSPKPCLAQPAQAPGTLRRVPVPTSHSGSLALGLPHLPSPKQRAKFKRVGKEKCRPVLAGGGSGSAGTPLQHSFLTEVTDVYEMEGGLLNLLNDFHSGRLQAFGKECSFEQLEHVREMQEKLARLHFSLDVCGEEEDDEEEEDGVTEGLPEEQKKTMADRNLDQLLSNLEDLSNSIQKLHLAENAEPEEQSAA

SEQ ID NO: 18539 - protein, 241 aa, Homo sapiens
  Payload ID: 3715
  Gene Symbol: CCDC28B
  Gene Name: coiled-coil domain containing 28B
  Uniprot ID: Q9BUN5
  ENSP ID: ENSP00000413017
MDDKKKKRSPKPCLAQPAQAPGTLRRVPVPTSHSGSLALGLPHLPSPKQRAKFKRVGKEKCRPVLAGGGSGSAGTPLQHSFLTEVTDVYEMEGGLLNLLNDFHSGRLQAFGKECSFEQLEHVREMQEKLARLHFSLDVCGEEEDDEEEEDGVTEGLPEEQKKTMADRNLDQLLSNLEDLSNSMYPFQGTRLCVCVPERSVSSSPALQEYSHTTNFPTSCSPVRFSHRLPKPRYRNLEFPQN

SEQ ID NO: 18540 - protein, 129 aa, Homo sapiens
  Payload ID: 3715
  Gene Symbol: CCDC28B
  Gene Name: coiled-coil domain containing 28B
  ENSP ID: ENSP00000431257
MDDKKKKRSPKPCLAQPAQAPGTLRRVPVPTSHSGSLALGLPHLPSPKQRAKFKRVGKEKCRPVLAGGGSGSAGTPLQHSFLTEVTDVYEMEGGLLNLLNDFHSGRLQAFGEASPAALQPGCVWGGGGR

SEQ ID NO: 18541 - protein, 83 aa, Homo sapiens
  Payload ID: 3715
  Gene Symbol: CCDC28B
  Gene Name: coiled-coil domain containing 28B
  ENSP ID: ENSP00000435036
MDDKKKKRSPKPCLAQPAQAPGTLRRVPVPTSHSGSLALGLPHLPSPKQRAKFKRPLRTQSSLRPSPYPQLCGKKARWVTGIT

SEQ ID NO: 18542 - protein, 270 aa, Homo sapiens
  Payload ID: 3716
  Gene Symbol: CCDC3
  Gene Name: coiled-coil domain containing 3
  Uniprot ID: Q9BQI4
  ENSP ID: ENSP00000368102
MLRQLLLAALCLAGPPAPARACQLPSEWRPLSEGCRAELAETIVYARVLALHPEAPGLYNHLPWQYHAGQGGLFYSAEVEMLCDQAWGSMLEVPAGSRLNLTGLGYFSCHSHTVVQDYSYFFFLRMDENYNLLPHGVNFQDAIFPDTQENRRMFSSLFQFSNCSQGQQLATFSSDWEIQEDSRLMCSSVQKALFEEEDHVKKLQQKVATLEKRNRQLRERVKKVKRSLRQARKKGRHLELANQKLSEKLAAGALPHINARGPVRPPYLRG

SEQ ID NO: 18543 - protein, 145 aa, Homo sapiens
  Payload ID: 3716
  Gene Symbol: CCDC3
  Gene Name: coiled-coil domain containing 3
  Uniprot ID: Q9BQI4
  ENSP ID: ENSP00000368116
MDENYNLLPHGVNFQDAIFPDTQENRRMFSSLFQFSNCSQGQQLATFSSDWEIQEDSRLMCSSVQKALFEEEDHVKKLQQKVATLEKRNRQLRERVKKVKRSLRQARKKGRHLELANQKLSEKLAAGALPHINARGPVRPPYLRG

SEQ ID NO: 18544 - protein, 783 aa, Homo sapiens
  Payload ID: 3717
  Gene Symbol: CCDC30
  Gene Name: coiled-coil domain containing 30
  Uniprot ID: Q5VVM6
  ENSP ID: ENSP00000339280
MSQEKNEMFESEWSKEREREKQLASGLDTAEKALKVESEELQKSKSELICLYNEVHNLPGESESKDHFLIACDLLQRENSELETKVLKLSQEFAQLNHFTLGGKTAPSNLITSENTCKDPESNEPILETEIQSRKEETEELCPKLGERKQKEIPEESVKEGSFPREGQKEEGSQQNRDMKDEEKEQQLTMKPEEIVRLREELSHINQSLLQSQSSGDSSDDSGAQHPSSGEKLKYNQQGEVQQLHQNLHRLQILCNSAENELRYERGQNLDLKQHNSLLQEENIKIKIELKHAQQKLLDSTKMCSSLTAEYKHCQQKIKELELEVLKHTQSIKSQNNLQEKLVQEKSKVADAEEKILDLQRKLEHAHKVCLTDTCISEKQQLEEKIKEATQNEAKVKQQYQEEQQKRKLLYQNVDELHRQVRTLQDKENLLEMTCSQQQSRIQQQEALLKQLENEKRKYDEHVKSNQELSEKLSKLQQEKEALREEYLRLLKLLNVHVRNYNEKHHQQKVKLQKVKYRLTNEVELRDKRINQFEDEIGILQHKIEKEKAIQDQITAQNDTLLLEKRKLQEQVIEQEQLIHSNKWTISSIQSRVLYMDKENKQLQENSLRLTQQIGFLERIIRSIHIRRGENLKEFPVPKWWHRGKLASLPPTKKQKEIYSTEVFTSNNAELQHEDESVPEATEKWKHSEQMETTISDILESEVVNEILPLSNSSFSGKGLVESFASLQETEEIKSKEAMASSKSPEKSPENLVCSQNSEAGYINVASLKETHGIQEQDQKSEL

SEQ ID NO: 18545 - protein, 783 aa, Homo sapiens; identical to SEQ ID NO: 18544
  Payload ID: 3717
  Gene Symbol: CCDC30
  Gene Name: coiled-coil domain containing 30
  Uniprot ID: Q5VVM6
  ENSP ID: ENSP00000340378

SEQ ID NO: 18546 - protein, 783 aa, Homo sapiens; identical to SEQ ID NO: 18544
  Payload ID: 3717
  Gene Symbol: CCDC30
  Gene Name: coiled-coil domain containing 30
  Uniprot ID: Q5VVM6
  ENSP ID: ENSP00000397035

SEQ ID NO: 18547 - protein, 481 aa, Homo sapiens
  Payload ID: 3717
  Gene Symbol: CCDC30
  Gene Name: coiled-coil domain containing 30
  ENSP ID: ENSP00000421479
MCSSLTAEYKHCQQKIKELELEVLKHTQSIKSQNNLQEKLVQEKSKVADAEEKILDLQRKLEHAHKVCLTDTCISEKQQLEEKIKEATQNEAKVKQQYQEEQQKRKLLYQNVDELHRQVRTLQDKENLLEMTCSQQQSRIQQQEALLKQLENEKRKYDEHVKSNQELSEKLSKLQQEKEALREEYLRLLKLLNVHVRNYNEKHHQQKVKLQKVKYRLTNEVELRDKRINQFEDEIGILQHKIEKEKAIQDQITAQNDTLLLEKRKLQEQVIEQEQLIHSNKWTISSIQSRVLYMDKENKQLQENSLRLTQQIGFLERIIRSIHIRRGENLKEFPVPKWWHRGKLASLPPTKKQKEIYSTEVFTSNNAELQHEDESVPEATEKWKHSEQMETTISDILESEVVNEILPLSNSSFSGKGLVESFASLQETEEIKSKEAMASSKSPEKSPENLVCSQNSEAGYINVASLKETHGIQEQDQKSEL

SEQ ID NO: 18548 - protein, 61 aa, Homo sapiens
  Payload ID: 3717
  Gene Symbol: CCDC30
  Gene Name: coiled-coil domain containing 30
  ENSP ID: ENSP00000424339
MSQEKNEMFESEWSKEREREKQLASGLDTAEKALKVESESHGLIARFNFLSCHLGKIYQET

SEQ ID NO: 18549 - protein, 312 aa, Homo sapiens
  Payload ID: 3717
  Gene Symbol: CCDC30
  Gene Name: coiled-coil domain containing 30
  ENSP ID: ENSP00000424370
MSQEKNEMFESEWSKEREREKQLASGLDTAEKALKVESEVLKLSQEFAQLNHFTLGGKTAPSNLITSENTCKDPESNEPILETEIQSRKEETEELCPKLGERKQKEIPEESVKEGSFPREGQKEEGSQQNRDMKDEEKEQQLTMKPEEIVRLREELSHINQSLLQSQSSGDSSDDSGAQHPSSGEKLKYNQQGEVQQLHQNLHRLQILCNSAENELRYERGQNLDLKQHNSLLQEENIKIKIELKHAQQKLLDSTKMCSSLTAEYKHCQQKIKELELEVLKHTQSIKSQNNLQEKLVQEKSKVADAEEKCYS

SEQ ID NO: 18550 - protein, 572 aa, Homo sapiens
  Payload ID: 3717
  Gene Symbol: CCDC30
  Gene Name: coiled-coil domain containing 30
  Uniprot ID: Q5VVM6
  ENSP ID: ENSP00000426711
MIHPPRPPKVLGLQHPSSGEKLKYNQQGEVQQLHQNLHRLQILCNSAENELRYERGQNLDLKQHNSLLQEENIKIKIELKHAQQKLLDSTKMCSSLTAEYKHCQQKIKELELEVLKHTQSIKSQNNLQEKLVQEKSKVADAEEKILDLQRKLEHAHKVCLTDTCISEKQQLEEKIKEATQNEAKVKQQYQEEQQKRKLLYQNVDELHRQVRTLQDKENLLEMTCSQQQSRIQQQEALLKQLENEKRKYDEHVKSNQELSEKLSKLQQEKEALREEYLRLLKLLNVHVRNYNEKHHQQKVKLQKVKYRLTNEVELRDKRINQFEDEIGILQHKIEKEKAIQDQITAQNDTLLLEKRKLQEQVIEQEQLIHSNKWTISSIQSRVLYMDKENKQLQENSLRLTQQIGFLERIIRSIHIRRGENLKEFPVPKWWHRGKLASLPPTKKQKEIYSTEVFTSNNAELQHEDESVPEATEKWKHSEQMETTISDILESEVVNEILPLSNSSFSGKGLVESFASLQETEEIKSKEAMASSKSPEKSPENLVCSQNSEAGYINVASLKETHGIQEQDQKSEL

SEQ ID NO: 18551 - protein, 367 aa, Homo sapiens
  Payload ID: 3718
  Gene Symbol: CCDC33
  Gene Name: coiled-coil domain containing 33
  Uniprot ID: Q8N5R6
  ENSP ID: ENSP00000268082
MGEPGPPSPPAPKAAPGLIDSFSEMNNYRRAMQKMAEDILSLRRQASILEGENRILRSRLAQQEEEEGQGKASEAQNTVSMKQKLLLSELDMKKLRDRVQHLQNELIRKNDREKELLLLYQAQQPQAALLKQYQGKLQKMKALEETVRHQEKVIEKMERVLEDRLQDRSKPPPLNRQQGKPYTGFPMLSASGLPLGSMGENLPVELYSVLLAENAKLRTELDKNRHQQAPIILQQQALPVDPGELGAGGDLTERLQETHGPGHSECTETLPAQDLLSGTSDKFNLLAKLEHAQSRILSLESQLEDSARRWGREKQDLATRLQEQEKGFRHPSNSIIIEQPVSDPPGVAPRGSGGGAGSHRTPKVTGP

SEQ ID NO: 18552 - protein, 333 aa, Homo sapiens
  Payload ID: 3718
  Gene Symbol: CCDC33
  Gene Name: coiled-coil domain containing 33
  Uniprot ID: Q8N5R6
  ENSP ID: ENSP00000325661
MGEPGPPSPPAPKAAPGLIDSFSEMNNYRRAMQKMAEDILSLRRQASILEGENRILRSRLAQQEEEEGQGKASEAQNTVSMKQKLLLSELDMKKLRDRVQHLQNELIRKNDREKELLLLYQAQQPQAALLKQYQGKLQKMKALEETVRHQEKVIEKMERVLEDRLQDRSKPPPLNRQQGKPYTGFPMLSASGLPLGSMGENLPVELYSVLLAENAKLRTELDKNRHQQAPIILQQQALPDLLSGTSDKFNLLAKLEHAQSRILSLESQLEDSARRWGREKQDLATRLQEQEKGFRHPSNSIIIEQPVSDPPGVAPRGSGGGAGSHRTPKVTGP

SEQ ID NO: 18553 - protein, 755 aa, Homo sapiens
  Payload ID: 3718
  Gene Symbol: CCDC33
  Gene Name: coiled-coil domain containing 33
  Uniprot ID: Q8N5R6
  ENSP ID: ENSP00000381795
MGLKNKKNTEDPEEPLIASQSTEPEIGHLSPSKKETIMVTLHGATNLPACKDGSEPWPYVVVKSTSEEKNNQSSKAVTSVTSEPTRAPIWGDTVNVEIQAEDAGQEDVILKVVDNRKKQELLSYKIPIKYLRVFHPYHFELVKPTESGKADEATAKTQLYATVVRKSSFIPRYIGCNHMALEIFLRGVNEPLANNPNPIVVIARVVPNYKEFKVSQANRDLASVGLPITPLSFPIPSMMNFDVPRVSQNGCPQLSKPGGPPEQPLWNQSFLFQGRDGATSFSEDTALVLEYYSSTSMKGSQPWTLNQPLGISVLPLKSRLYQKMLTGKGLDGLHVERLPIMDTSLKTINDEAPTVALSFQLLSSERPENFLTPNNSKALPTLDPKILDKKLRTIQESWSKDTVSSTMDLSTSTPREAEEEPLVPEMSHDTEMNNYRRAMQKMAEDILSLRRQASILEGENRILRSRLAQQEEEEGQGKASEAQNTVSMKQKLLLSELDMKKLRDRVQHLQNELIRKNDREKELLLLYQAQQPQAALLKQYQGKLQKMKALEETVRHQEKVIEKMERVLEDRLQDRSKPPPLNRQQGKPYTGFPMLSASGLPLGSMGENLPVELYSVLLAENAKLRTELDKNRHQQAPIILQQQALPDLLSGTSDKFNLLAKLEHAQSRILSLESQLEDSARRWGREKQDLATRLQEQEKGFRHPSNSIIIEQPSALTHSMDLKQPSELEPLLPSSDSKLNKPLSPQKETANSQQT

SEQ ID NO: 18554 - protein, 333 aa, Homo sapiens; identical to SEQ ID NO: 18552
  Payload ID: 3718
  Gene Symbol: CCDC33
  Gene Name: coiled-coil domain containing 33
  Uniprot ID: Q8N5R6
  ENSP ID: ENSP00000452817

SEQ ID NO: 18555 - protein, 701 aa, Homo sapiens
  Payload ID: 3718
  Gene Symbol: CCDC33
  Gene Name: coiled-coil domain containing 33
  ENSP ID: ENSP00000453542
  MOD_RES (1)..(1): Any amino acid
XLLSYKIPIKYLRVFHPYHFELVKPTESGKADEATAKTQLYATVVRKSSFIPRYIGCNHMALEIFLRGVNEPLANNPNPIVVIARVVPNYKEFKVSQANRDLASVGLPITPLSFPIPSMMNFDVPRVSQNGCPQLSKPGGPPEQPLWNQSFLFQGRDGATSFSEDTALVLEYYSSTSMKGSQPWTLNQPLGISVLPLKSRLYQKMLTGKGLDGLHVERLPIMDTSLKTINDEAPTVALSFQLLSSERPENFLTPNNSKALPTLDPKILDKKLRTIQESWSKDTVSSTMDLSTSTPREAEEEPLVPEMSHDTEMNNYRRAMQKMAEDILSLRRQASILEGENRILRSRLAQQEEEEGQGKASEAQNTVSMKQKLLLSELDMKKLRDRVQHLQNELIRKNDREKELLLLYQAQQPQAALLKQYQGKLQKMKALEETVRHQEKVIEKMERVLEDRLQDRSKPPPLNRQQGKPYTGFPMLSASGLPLGSMGENLPVELYSVLLAENAKLRTELDKNRHQQAPIILQQQALPVDPGELGAGGDLTERLQETHGPGHSECTETLPAQDLLSGTSDKFNLLAKLEHAQSRILSLESQLEDSARRWGREKQDLATRLQEQEKGFRHPSNSIIIEQPPYSLPPAPGASIFGKPRATVDPGGWREEAFQSRGQGDGPLPDPEKKQGHQRPALLGNTREACPFHLPQNIYHV

SEQ ID NO: 18556 - protein, 229 aa, Homo sapiens
  Payload ID: 3719
  Gene Symbol: CCDC34
  Gene Name: coiled-coil domain containing 34
  Uniprot ID: Q96HJ3
  ENSP ID: ENSP00000321563
MWAAGRWGPTFPSSYAGFSADCRPRSRPSSDSCSVPMTGARGQGLEVVRSPSPPLPLSCSNSTRSLLSPLGHQSFQFDEDDGDGEDEEDVDDEEDVDEDAHDSEAKVASLRGMELQGCASTQVESENNQEEQKQVRLPESRLTPWEVWFIGKEKEERDRLQLKALEELNQQLEKRKEMEEREKRKIIAEEKHKEWVQKKNEQVRRGKWIHTLTSLLQNISSYYTSLPRF

SEQ ID NO: 18557 - protein, 373 aa, Homo sapiens
  Payload ID: 3719
  Gene Symbol: CCDC34
  Gene Name: coiled-coil domain containing 34
  Uniprot ID: Q96HJ3
  ENSP ID: ENSP00000330240
MWAAGRWGPTFPSSYAGFSADCRPRSRPSSDSCSVPMTGARGQGLEVVRSPSPPLPLSCSNSTRSLLSPLGHQSFQFDEDDGDGEDEEDVDDEEDVDEDAHDSEAKVASLRGMELQGCASTQVESENNQEEQKQVRLPESRLTPWEVWFIGKEKEERDRLQLKALEELNQQLEKRKEMEEREKRKIIAEEKHKEWVQKKNEQKRKEREQKINKEMEEKAAKELEKEYLQEKAKEKYQEWLKKKNAEECERKKKEKEKEKQQQAEIQEKKEIAEKKFQEWLENAKHKPRPAAKSYGYANGKLTGFYSGNSYPEPAFYNPIPWKPIHMPPPKEAKDLSGRKSKRPVISQPHKSSSLVIHKARSNLCLGTLCRIQR

SEQ ID NO: 18558 - protein, 594 aa, Homo sapiens
  Payload ID: 3720
  Gene Symbol: CCDC36
  Gene Name: coiled-coil domain containing 36
  Uniprot ID: Q8IYA8
  ENSP ID: ENSP00000296449
MNFNVWNIKEMLSIPSGSGNKKSSNWNNNQNDYSSLSDSQFLFGSQFCPENSETLSAPLDFGAHLRHSKQSQQNYLEGEPSIFTKYQTKPQLFGGDIKDGGLFPPPLSVGKSKGLLEQFEEKKKRAKDKCDSETLYNFVSNVRESILRLQTSVEKSEDHLSSRSQSILDSLETVAKTLQETIQAQNDLVFEAVQDKGNMEQAILEMKKRFEARQGEFIEMKSNLKHLEVLVAQQSQEFQQLCEQLGQLNVPSVLAELKRLISVPPVKDSASQTSPPLAQSLNLTRQEKYTSEKPVLWQAQALPAAWNPGMGSLQPGEFDVWGEGAKNDDLQEEAALPAFGSHERNRHVKDKVVQTNCKNWAVTKTGAKNHGSSVPGHKIPSDRDLVSQGASQLTSLEINFSTSIKNACQKYQAQSMFLCDPREHLVIKQKDGTVEMRGKDKKQQPRKAHRAHRGRLIASKQKQIPIQTCKFNSKYQSPQPAISVPQSPFLGQQEPRAQPLHLQCPRSPRKPVCPILGGTVMPNKTVRAVQGRLLQLSRCSSQDNWLLSSSSQGDHQMSWFSDLNLGCSETPLCKEAGKNLLYDLGFDSSDDDGF

SEQ ID NO: 18559 - protein, 594 aa, Homo sapiens; identical to SEQ ID NO: 18558
  Payload ID: 3720
  Gene Symbol: CCDC36
  Gene Name: coiled-coil domain containing 36
  Uniprot ID: Q8IYA8
  ENSP ID: ENSP00000391788

SEQ ID NO: 18560 - protein, 203 aa, Homo sapiens
  Payload ID: 3720
  Gene Symbol: CCDC36
  Gene Name: coiled-coil domain containing 36
  Uniprot ID: Q8IYA8
  ENSP ID: ENSP00000403700
MNFNVWNIKEMLSIPSGSGNKKSSNWNNNQNDYSSLSDSQFLFGSQFCPENSETLSAPLDFGAHLRHSKQSQQNYLEGEPSIFTKYQTKPQLFGGDIKDGGLFPPPLSVGKSKGLLEQFEEKKKRAKDKCDSCRRLWKSLRTISVQEANLFWILWRLWPRHVSASCLRYQQRALVNDEHELSDPSLVSSGEVPHRVSDERMGI

SEQ ID NO: 18561 - protein, 594 aa, Homo sapiens; identical to SEQ ID NO: 18558
  Payload ID: 3720
  Gene Symbol: CCDC36
  Gene Name: coiled-coil domain containing 36
  Uniprot ID: Q8IYA8
  ENSP ID: ENSP00000407837

SEQ ID NO: 18562 - protein, 563 aa, Homo sapiens
  Payload ID: 3721
  Gene Symbol: CCDC38
  Gene Name: coiled-coil domain containing 38
  Uniprot ID: Q502W7
  ENSP ID: ENSP00000345470
MSSNLLPTLNSGGKVKDGSTKEDRPYKIFFRDLFLVKENEMAAKETEKFMNRNMKVYQKTTFSSRMKSHSYLSQLAFYPKRSGRSFEKFGPGPAPIPRLIEGSDTKRTVHEFINDQRDRFLLEYALSTKRNTIKKFEKDIAMRERQLKKAEKKLQDDALAFEEFLRENDQRSVDALKMAAQETINKLQMTAELKKASMEVQAVKSEIAKTEFLLREYMKYGFFLLQMSPKHWQIQQALKRAQASKSKANIILPKILAKLSLHSSNKEGILEESGRTAVLSEDASQGRDSQGKPSRSLTRTPEKKKSNLAESFGSEDSLEFLLDDEMDVDLEPALYFKEPEELLQVLRELEEQNLTLFQYSQDVDENLEEVNKREKVIQDKTNSNIEFLLEQEKMLKANCVREEEKAAELQLKSKLFSFGEFNSDAQEILIDSLSKKITQVYKVCIGDAEDDGLNPIQKLVKVESRLVELCDLIESIPKENVEAIERMKQKEWRQKFRDEKMKEKQRHQQERLKAALEKAVAQPKKKLGRRLVFHSKPPSGNKQQLPLVNETKTKSQEEEYFFT

SEQ ID NO: 18563 - protein, 90 aa, Homo sapiens
  Payload ID: 3721
  Gene Symbol: CCDC38
  Gene Name: coiled-coil domain containing 38
  ENSP ID: ENSP00000447129
  MOD_RES (1)..(1): Any amino acid
XREKVIQDKTNSNIEFLLEQEKMLKANCVREEEKAAELQLKSKLFSFGEFNSDAQEILIDSLSKKITQVYKVCIGDAEDDGLNPIQKLVS

SEQ ID NO: 18564 - protein, 47 aa, Homo sapiens
  Payload ID: 3721
  Gene Symbol: CCDC38
  Gene Name: coiled-coil domain containing 38
  ENSP ID: ENSP00000447966
MSSNLLPTLNSGAVRAMSVLWETDRGAVTSTQEMWRQGYLHSTVKAN

SEQ ID NO: 18565 - protein, 13 aa, Homo sapiens
  Payload ID: 3721
  Gene Symbol: CCDC38
  Gene Name: coiled-coil domain containing 38
  ENSP ID: ENSP00000448644
MSSNLLPTLNSGG

SEQ ID NO: 18566 - protein, 62 aa, Homo sapiens
  Payload ID: 3721
  Gene Symbol: CCDC38
  Gene Name: coiled-coil domain containing 38
  ENSP ID: ENSP00000449001
MAAKETEKFMNRNMKVYQKTTFSSRMKSHSYLSQLAFYPKRSGRSFEKFGPGPAPIPRLIEG

SEQ ID NO: 18567 - protein, 941 aa, Homo sapiens
  Payload ID: 3722
  Gene Symbol: CCDC39
  Gene Name: coiled-coil domain containing 39
  Uniprot ID: Q9UFE4
  ENSP ID: ENSP00000405708
MSSEFLAELHWEDGFAIPVANEENKLLEDQLSKLKDERASLQDELREYEERINSMTSHFKNVKQELSITQSLCKARERETESEEHFKAIAQRELGRVKDEIQRLENEMASILEKKSDKENGIFKATQKLDGLKCQMNWDQQALEAWLEESAHKDSDALTLQKYAQQDDNKIRALTLQLERLTLECNQKRKILDNELTETISAQLELDKAAQDFRKIHNERQELIKQWENTIEQMQKRDGDIDNCALELARIKQETREKENLVKEKIKFLESEIGNNTEFEKRISVADRKLLKCRTAYQDHETSRIQLKGELDSLKATVNRTSSDLEALRKNISKIKKDIHEETARLQKTKNHNEIIQTKLKEITEKTMSVEEKATNLEDMLKEEEKDVKEVDVQLNLIKGVLFKKAQELQTETMKEKAVLSEIEGTRSSLKHLNHQLQKLDFETLKQQEIMYSQDFHIQQVERRMSRLKGEINSEEKQALEAKIVELRKSLEEKKSTCGLLETQIKKLHNDLYFIKKAHSKNSDEKQSLMTKINELNLFIDRSEKELDKAKGFKQDLMIEDNLLKLEVKRTREMLHSKAEEVLSLEKRKQQLYTAMEERTEEIKVHKTMLASQIRYVDQERENISTEFRERLSKIEKLKNRYEILTVVMLPPEGEEEKTQAYYVIKAAQEKEELQREGDCLDAKINKAEKEIYALENTLQVLNSCNNNYKQSFKKVTPSSDEYELKIQLEEQKRAVDEKYRYKQRQIRELQEDIQSMENTLDVIEHLANNVKEKLSEKQAYSFQLSKETEEQKPKLERVTKQCAKLTKEIRLLKDTKDETMEEQDIKLREMKQFHKVIDEMLVDIIEENTEIRIILQTYFQQSGLELPTASTKGSRQSSRSPSHTSLSARSSRSTSTSTSQSSIKVLELKFPASSSLVGSPSRPSSASSSSSNVKSKKSSK

SEQ ID NO: 18568 - protein, 671 aa, Homo sapiens
  Payload ID: 3722
  Gene Symbol: CCDC39
  Gene Name: coiled-coil domain containing 39
  ENSP ID: ENSP00000417960
MSSEFLAELHWEDGFAIPVANEENKLLEDQLSKLKDERASLQDELREYEERINSMTSHFKNVKQELSITQSLCKARERETESEEHFKAIAQRELGRVKDEIQRLENEMASILEKKSDKENGIFKATQKLDGLKCQMNWDQQALEAWLEESAHKDSDALTLQKYAQQDDNKIRALTLQLERLTLECNQKRKILDNELTETISAQLELDKAAQDFRKIHNERQELIKQWENTIEQMQKRDGDIDNCALELARIKQETREKENLVKEKIKFLESEIGNNTEFEKRISVADRKLLKCRTAYQDHETSRIQLKGELDSLKATVNRTSSDLEALRKNISKIKKDIHEETARLQKTKNHNEIIQTKLKEITEKTMSVEEKATNLEDMLKEEEKDVKEVDVQLNLIKGVLFKKAQELQTETMKEKAVLSEIEGTRSSLKHLNHQLQKLDFETLKQQEIMYSQDFHIQQVERRMSRLKGEINSEEKQALEAKIVELRKSLEEKKSTCGLLETQIKKLHNDLYFIKKAHSKNSDEKQSLMTKINELNLFIDRSEKELDKAKGFKQDLMIEDNLLKLEVKRTREMLHSKAEEVLSLEKRKQQLYTAMEERTEEIKVHKTMLASQIRYVDQERENISTEFRERLSKIEKLKNRYEILTVVMLPPEGEEEKTQAYYVIKVMSMS

SEQ ID NO: 18569 - protein, 102 aa, Homo sapiens
  Payload ID: 3722
  Gene Symbol: CCDC39
  Gene Name: coiled-coil domain containing 39
  ENSP ID: ENSP00000418482
  MOD_RES (1)..(1): Any amino acid
XDETMEEQDIKLREMKQFHKVIDEMLVDIIEENTEIRIILQTYFQQSGLELPTASTKGSRQSSRSPSHTSLSARSSRSTSTSTSQSSIKVLELKFPASSSLK

SEQ ID NO: 18570 - protein, 97 aa, Homo sapiens
  Payload ID: 3722
  Gene Symbol: CCDC39
  Gene Name: coiled-coil domain containing 39
  ENSP ID: ENSP00000418702
MNFPSSHSVSSKLSKLKDERASLQDELREYEERINSMTSHFKNVKQELSITQSLCKARERETESEEHFKAIAQRELGRVKDEIQRLENEMASILEKK

SEQ ID NO: 18571 - protein, 67 aa, Homo sapiens
  Payload ID: 3722
  Gene Symbol: CCDC39
  Gene Name: coiled-coil domain containing 39
  ENSP ID: ENSP00000420025
REMKQFHKVIDEMLVDIIEENTEIRIILQTYFQQSGLELPTASTKGSRQSSRSPSHTSLSARNRKKA

SEQ ID NO: 18572 - protein, 579 aa, Homo sapiens
  Payload ID: 3723
  Gene Symbol: CCDC40
  Gene Name: coiled-coil domain containing 40
  Uniprot ID: Q4G0X9
  ENSP ID: ENSP00000269318
MAEPGGAAGRSHPEDGSASEGEKEGNNESHMVSPPEKDDGQKGEEAVGSTEHPEEVTTQAEAAIEEGEVETEGEAAVEGEEEAVSYGDAESEEEYYYTETSSPEGQISAADTTYPYFSPPQELPGEEAYDSVSGEAGLQGFQQEATGPPESRERRVTSPEPSHGVLGPSEQMGQVTSGPAVGRLTGSTEEPQGQVLPMGVQHRFRLSHGSDIESSDLEEFVSQEPVIPPGVPDAHPREGDLPVFQDQIQQPSTEEGAMAERVESEGSDEEAEDEGSQLVVLDPDHPLMVRFQAALKNYLNRQIEKLKLDLQELVVATKQSRAQRQELGVNLYEVQQHLVHLQKLLEKSHDRHAMASSERRQKEEELQAARALYTKTCAAANEERKKLAALQTEMENLALHLFYMQNIDQDMRDDIRVMTQVVKKAETERIRAEIEKKKQDLYVDQLTTRAQQLEEDIALFEAQYLAQAEDTRILRKAVSEACTEIDAISVEKRRIMQQWASSLVGMKHRDEAHRAVLEALSVSLERFPSQNINTARSRLSTTWHSAGILLRGSFLPGASRAFASVCYGGAAVDNRIREC

SEQ ID NO: 18573 - protein, 478 aa, Homo sapiens
  Payload ID: 3723
  Gene Symbol: CCDC40
  Gene Name: coiled-coil domain containing 40
  Uniprot ID: Q4G0X9
  ENSP ID: ENSP00000364010
MAEPGGAAGRSHPEDGSASEGEKEGNNESHMVSPPEKDDGQKGEEAVGSTEHPEEVTTQAEAAIEEGEVETEGEAAVEGEEEAVSYGDAESEEEYYYTETSSPEGQISAADTTYPYFSPPQELPGEEAYDSVSGEAGLQGFQQEATGPPESRERRVTSPEPSHGVLGPSEQMGQVTSGPAVGRLTGSTEEPQGQVLPMGVQHRFRLSHGSDIESSDLEEFVSQEPVIPPGVPDAHPREGDLPVFQDQIQQPSTEEGAMAERVESEGSDEEAEDEGSQLVVLDPDHPLMVRFQAALKNYLNRQIEKLKLDLQELVVATKQSRAQRQELGVNLYEVQQHLVHLQKLLEKSHDRHAMASSERRQKEEELQAARALYTKTCAAANEERKKLAALQTEMENLALHLFYMQNIDQDMRDDIRVMTQVVKKAETERIRAEIEKKKQGVGDTGAAFIPKTTQGDQVSGRGKKKPGTVVARVSPAEL

SEQ ID NO: 18574 - protein, 1030 aa, Homo sapiens
  Payload ID: 3723
  Gene Symbol: CCDC40
  Gene Name: coiled-coil domain containing 40
  Uniprot ID: Q4G0X9
  ENSP ID: ENSP00000364011
MAEPGGAAGRSHPEDGSASEGEKEGNNESHMVSPPEKDDGQKGEEAVGSTEHPEEVTTQAEAAIEEGEVETEGEAAVEGEEEAVSYGDAESEEEYYYTETSSPEGQISAADTTYPYFSPPQELPGEEAYDSVSGEAGLQGFQQEATGPPESRERRVTSPEPSHGVLGPSEQMGQVTSGPAVGRLTGSTEEPQGQVLPMGVQHRFRLSHGSDIESSDLEEFVSQEPVIPPGVPDAHPREGDLPVFQDQIQQPSTEEGAMAERVESEGSDEEAEDEGSQLVVLDPDHPLMVRFQAALKNYLNRQIEKLKLDLQELVVATKQSRAQRQELGVNLYEVQQHLVHLQKLLEKSHDRHAMASSERRQKEEELQAARALYTKTCAAANEERKKLAALQTEMENLALHLFYMQNIDQDMRDDIRVMTQVVKKAETERIRAEIEKKKQDLYVDQLTTRAQQLEEDIALFEAQYLAQAEDTRILRKAVSEACTEIDAISVEKRRIMQQWASSLVGMKHRDEAHRAVLEALRGCQHQAKSTDGEIEAYKKSIMKEEEKNEKLASILNRTETEATLLQKLTTQCLTKQVALQSQFNTYRLTLQDTEDALSQDQLEQMILTEELQAIRQAIQGELELRRKTDAAIREKLQEHMTSNKTTKYFNQLILRLQKEKTNMMTHLSKINGDIAQTTLDITHTSSRLDAHQKTLVELDQDVKKVNELITNSQSEISRRTILIERKQGLINFLNKQLERMVSELGGEEVGPLELEIKRLSKLIDEHDGKAVQAQVTWLRLQQEMVKVTQEQEEQLASLDASKKELHIMEQKKLRVESKIEQEKKEQKEIEHHMKDLDNDLKKLNMLMNKNRCSSEELEQNNRVTENEFVRSLKASERETIKMQDKLNQLSEEKATLLNQLVEAEHQIMLWEKKIQLAKEMRSSVDSEIGQTEIRAMKGEIHRMKKYCRTTQDAHRHVHEQHGTHAGTCTKNTGRAQARARTTRDARGHVHEQHGTRAGTCTNNTGRAQARARTRDARRHVHEHRTHTARA

SEQ ID NO: 18575 - protein, 1142 aa, Homo sapiens
  Payload ID: 3723
  Gene Symbol: CCDC40
  Gene Name: coiled-coil domain containing 40
  Uniprot ID: Q4G0X9
  ENSP ID: ENSP00000380679
MAEPGGAAGRSHPEDGSASEGEKEGNNESHMVSPPEKDDGQKGEEAVGSTEHPEEVTTQAEAAIEEGEVETEGEAAVEGEEEAVSYGDAESEEEYYYTETSSPEGQISAADTTYPYFSPPQELPGEEAYDSVSGEAGLQGFQQEATGPPESRERRVTSPEPSHGVLGPSEQMGQVTSGPAVGRLTGSTEEPQGQVLPMGVQHRFRLSHGSDIESSDLEEFVSQEPVIPPGVPDAHPREGDLPVFQDQIQQPSTEEGAMAERVESEGSDEEAEDEGSQLVVLDPDHPLMVRFQAALKNYLNRQIEKLKLDLQELVVATKQSRAQRQELGVNLYEVQQHLVHLQKLLEKSHDRHAMASSERRQKEEELQAARALYTKTCAAANEERKKLAALQTEMENLALHLFYMQNIDQDMRDDIRVMTQVVKKAETERIRAEIEKKKQDLYVDQLTTRAQQLEEDIALFEAQYLAQAEDTRILRKAVSEACTEIDAISVEKRRIMQQWASSLVGMKHRDEAHRAVLEALRGCQHQAKSTDGEIEAYKKSIMKEEEKNEKLASILNRTETEATLLQKLTTQCLTKQVALQSQFNTYRLTLQDTEDALSQDQLEQMILTEELQAIRQAIQGELELRRKTDAAIREKLQEHMTSNKTTKYFNQLILRLQKEKTNMMTHLSKINGDIAQTTLDITHTSSRLDAHQKTLVELDQDVKKVNELITNSQSEISRRTILIERKQGLINFLNKQLERMVSELGGEEVGPLELEIKRLSKLIDEHDGKAVQAQVTWLRLQQEMVKVTQEQEEQLASLDASKKELHIMEQKKLRVESKIEQEKKEQKEIEHHMKDLDNDLKKLNMLMNKNRCSSEELEQNNRVTENEFVRSLKASERETIKMQDKLNQLSEEKATLLNQLVEAEHQIMLWEKKIQLAKEMRSSVDSEIGQTEIRAMKGEIHRMKVRLGQLLKQQEKMIRAMELAVARRETVTTQAEGQRKMDRKALTRTDFHHKQLELRRKIRDVRKATDECTKTVLELEETQRNVSSSLLEKQEKLSVIQADFDTLEADLTRLGALKRQNLSEIVALQTRLKHLQAVKEGRYVFLFRSKQSLVLERQRLDKRLALIATILDRVRDEYPQFQEALHKVSQMIANKLESPGPS

SEQ ID NO: 18576 - protein, 99 aa, Homo sapiens
  Payload ID: 3723
  Gene Symbol: CCDC40
  Gene Name: coiled-coil domain containing 40
  ENSP ID: ENSP00000459489
MVSPPEKDDGQKGEEAVGSTEHPEEVTTQAEAAIEEGEVETEGEAAVEGEEEAVSYGDAESEEEYYYTETSSPEGQISAADTTYPYFSPPQELPGEEAY

SEQ ID NO: 18577 - protein, 126 aa, Homo sapiens
  Payload ID: 3723
  Gene Symbol: CCDC40
  Gene Name: coiled-coil domain containing 40
  ENSP ID: ENSP00000460002
MVSPPEKDDGQKGEEAVGSTEHPEEVTTQAEAAIEEGEVETEGEAAVEGEEEAVSYGDAESEEEYYYTETSSPEGQISAADTTYPYFSPPQELPGEEAYDSVSGEAGLQGFQQEATGPPESRERRV

SEQ ID NO: 18578 - protein, 85 aa, Homo sapiens
  Payload ID: 3723
  Gene Symbol: CCDC40
  Gene Name: coiled-coil domain containing 40
  ENSP ID: ENSP00000460432
  MOD_RES (1)..(1): Any amino acid
XYTETSSPEGQISAPNGRPAPLPAEPRERHRVLRPGGVRLAGASDPPRGARCPPQGRRPASVPGPDPAAQHRGGGHGRESGVRGE

SEQ ID NO: 18579 - protein, 83 aa, Homo sapiens
  Payload ID: 3723
  Gene Symbol: CCDC40
  Gene Name: coiled-coil domain containing 40
  ENSP ID: ENSP00000461034
  MOD_RES (1)..(1): Any amino acid
XQYLAQAEDTRILRKAVSEACTEIDAISVEKRRIMQQWASSLVGMKHRDEAHRAVLEALRCRSRNQSQLWPGKGSSPCVTRVA

SEQ ID NO: 18580 - protein, 316 aa, Homo sapiens
  Payload ID: 3724
  Gene Symbol: CCDC42
  Gene Name: coiled-coil domain containing 42
  Uniprot ID: Q96M95
  ENSP ID: ENSP00000293845
MSLGIMEEEDLAEYFRLQYGERLLQMLQKLPNVEGASESPSIWLLEKKKETEIMHQTMVQKKKMFQRRMETLNLRWEELGVKEAQLKAHIQKSEQFIQENDQKRIRAMKKANKERELKCQHMQELTKRKQEMVALRLEHQRLSAKLKDYYIFNKYLEKVVENSEFEEIHEVIARYKTLVSMRHDLMQSAQEGQEKIERAKARLARYMEEKDDEILQQNNELARLQMRFDRARSNVIFWESRWAHIQNTAAKKTLLLGTIKMATLNLFQIVSKHLKEVTEVALEDTHKQLDMIQQFIQDRSDIWAEVKKKEQQRVRI

SEQ ID NO: 18581 - protein, 242 aa, Homo sapiens
  Payload ID: 3724
  Gene Symbol: CCDC42
  Gene Name: coiled-coil domain containing 42
  Uniprot ID: Q96M95
  ENSP ID: ENSP00000444359
MSLGIMEEEDLAEYFRLQYGERLLQMLQKLPNVEGASESPSIWLLEKKKETEIMHQTMVQKKKMFQRRMETLNLRWEELGVKEAQLKAHIQKSEQFIQENDQKRIRAMKKANKERELKCQHMQELTKRKQEMVALRLEHQRLSAKLKDYYIFNKYLEKVVENSEESRWAHIQNTAAKKTLLLGTIKMATLNLFQIVSKHLKEVTEVALEDTHKQLDMIQQFIQDRSDIWAEVKKKEQQRVRI

SEQ ID NO: 18582 - protein, 12 aa, Homo sapiens
  Payload ID: 3724
  Gene Symbol: CCDC42
  Gene Name: coiled-coil domain containing 42
  ENSP ID: ENSP00000462524
MSLGIMEEEDLA

SEQ ID NO: 18583 - protein, 224 aa, Homo sapiens
  Payload ID: 3725
  Gene Symbol: CCDC43
  Gene Name: coiled-coil domain containing 43
  Uniprot ID: Q96MW1
  ENSP ID: ENSP00000323782
MAAPSEVAAIAPGEGDGGGGGFGSWLDGRLEALGVDRAVYGAYILGILQEEEEEEKLDALQGILSAFLEEDSLLNICKEIVERWSETQNVVTKVKKEDEVQAIATLIEKQAQIVVKPRMVSEEEKQRKAALLAQYADVTDEEDEADEKDDSGATTMNIGSDKLLFRNTNVEDVLNARKLERDSLRDESQRKKEQDKLQRERDKLAKQERKEKEKKRTQRGERKR

SEQ ID NO: 18584 - protein, 154 aa, Homo sapiens
  Payload ID: 3725
  Gene Symbol: CCDC43
  Gene Name: coiled-coil domain containing 43
  Uniprot ID: Q96MW1
  ENSP ID: ENSP00000400845
MAAPSEVAAIAPGEGDGGGGGFGSWLDGRLEALGVDRAVYGAYILGILQEEEEEEKLDALQGILSAFLEEDSLLNICKEIVERWSETQNVVTKVKKEDEVQAIATLIEKQAQIVVKPRMVSEEEKQRKAALLAQYADVTDEEDSVPKHQCGRCP

SEQ ID NO: 18585 - protein, 227 aa, Homo sapiens
  Payload ID: 3725
  Gene Symbol: CCDC43
  Gene Name: coiled-coil domain containing 43
  ENSP ID: ENSP00000467630
MAAPSEVAAIAPGEGDGGGGGFGSWLDGRLEALGVDRAVYGAYILGILQEEEEEEKLDALQGILSAFLEEDSLLNICKEIVERWSETQNVVTKVKKEDEVQAIATLIEKQAQIVVKPRMVSEEEKQRKAALLAQYADVTDEEESLTEADEKDDSGATTMNIGSDKLLFRNTNVEDVLNARKLERDSLRDESQRKKEQDKLQRERDKLAKQERKEKEKKRTQRGERKR

SEQ ID NO: 18586 - protein, 110 aa, Homo sapiens
  Payload ID: 3725
  Gene Symbol: CCDC43
  Gene Name: coiled-coil domain containing 43
  ENSP ID: ENSP00000468079
  MOD_RES (1)..(1): Any amino acid
XAPGEGDGGGGGFGSWLDGRLEALGVDRAVYGAYILGILQEEEEEEKLDALQGILSAFLEEDSLLNICKEIVERWSETQNVVTKVKKEGTPCLCRLEALTISSFLRDCTM

SEQ ID NO: 18587 - protein, 483 aa, Homo sapiens
  Payload ID: 3726
  Gene Symbol: CCDC47
  Gene Name: coiled-coil domain containing 47
  Uniprot ID: Q96A33
  ENSP ID: ENSP00000225726
MKAFHTFCVVLLVFGSVSEAKFDDFEDEEDIVEYDDNDFAEFEDVMEDSVTESPQRVIITEDDEDETTVELEGQDENQEGDFEDADTQEGDTESEPYDDEEFEGYEDKPDTSSSKNKDPITIVDVPAHLQNSWESYYLEILMVTGLLAYIMNYIIGKNKNSRLAQAWFNTHRELLESNFTLVGDDGTNKEATSTGKLNQENEHIYNLWCSGRVCCEGMLIQLRFLKRQDLLNVLARMMRPVSDQVQIKVTMNDEDMDTYVFAVGTRKALVRLQKEMQDLSEFCSDKPKSGAKYGLPDSLAILSEMGEVTDGMMDTKMVHFLTHYADKIESVHFSDQFSGPKIMQEEGQPLKLPDTKRTLLFTFNVPGSGNTYPKDMEALLPLMNMVIYSIDKAKKFRLNREGKQKADKNRARVEENFLKLTHVQRQEAAQSRREEKKRAEKERIMNEEDPEKQRRLEEAALRREQKKLEKKQMKMKQIKVKAM

SEQ ID NO: 18588 - protein, 483 aa, Homo sapiens; identical to SEQ ID NO: 18587
  Payload ID: 3726
  Gene Symbol: CCDC47
  Gene Name: coiled-coil domain containing 47
  Uniprot ID: Q96A33
  ENSP ID: ENSP00000384888

SEQ ID NO: 18589 - protein, 19 aa, Homo sapiens
  Payload ID: 3726
  Gene Symbol: CCDC47
  Gene Name: coiled-coil domain containing 47
  ENSP ID: ENSP00000462202
MKAFHTFCVVLLVFGSVSE

SEQ ID NO: 18590 - protein, 480 aa, Homo sapiens
  Payload ID: 3726
  Gene Symbol: CCDC47
  Gene Name: coiled-coil domain containing 47
  Uniprot ID: Q96A33
  ENSP ID: ENSP00000463577
MKAFHTFCVVLLVFGSVSEAKFDDFEDEEDIVEYDDNDFAEFEDVMEDSVTESPQRVIITEDDEDETTVELEGQDENQEGDFEDADTQEGDTESEPYDDEEFEGYEDKPDTSSSKNKDPITIVDVPAHLQNSWESYYLEILMVTGLLAYIMNYIIGKNKNSRLAQAWFNTHRELLESNFTLVGDDGTNKEATSTGKLNQENEHIYNLWCSGRVCCEGMLIQLRFLKRQDLLNVLARMMRPVSDQVQIKVTMNDEDMDTYVFAVGTRKALVRLQKEMQDLSEFCSDKPKSGAKYGLPDSLAILSEMGEVTDGMMDTKMVHFLTHYADKIESVHFSDQFSGPKIMQEEGQPLKLPDTKRTLLFTFNVPGSGNTYPKDMEALLPLMNMVIYSIDKAKKFRLNREGKQKADKNRARVEENFLKLTHVQRQEAAQSRREEKKRAEKERIMNEEDPEKQRRLEVRQTYHWGKTTICKDDCLCSVGC

SEQ ID NO: 18591 - protein, 190 aa, Homo sapiens
  Payload ID: 3726
  Gene Symbol: CCDC47
  Gene Name: coiled-coil domain containing 47
  ENSP ID: ENSP00000482148
MDCRTLWPSCQRWEVTDGMMDTKMVHFLTHYADKIESVHFSDQFSGPKIMQEEGQPLKLPDTKRTLLFTFNVPGSGNTYPKDMEALLPLMNMVIYSIDKAKKFRLNREGKQKADKNRARVEENFLKLTHVQRQEAAQSRREEKKRAEKERIMNEEDPEKQRRLEEAALRREQKKLEKKQMKMKQIKVKAM

SEQ ID NO: 18592 - protein, 306 aa, Homo sapiens
  Payload ID: 3727
  Gene Symbol: CCDC50
  Gene Name: coiled-coil domain containing 50
  Uniprot ID: Q8IVM0
  ENSP ID: ENSP00000376249
MAEVSIDQSKLPGVKEVCRDFAVLEDHTLAHSLQEQEIEHHLASNVQRNRLVQHDLQVAKQLQEEDLKAQAQLQKRYKDLEQQDCEIAQEIQEKLAIEAERRRIQEKKDEDIARLLQEKELQEEKKRKKHFPEFPATRAYADSYYYEDGGMKPRVMKEAVSTPSRMAHRDQEWYDAEIARKLQEEELLATQVDMRAAQVAQDEEIARLLMAEEKKAYKKAKEREKSSLDKRKQDPEWKPKTAKAANSKSKESDEPHHSKNERPARPPPPIMTDGEDADYTHFTNQQSSTRHFSKSESSHKGFHYKH

SEQ ID NO: 18593 - protein, 482 aa, Homo sapiens
  Payload ID: 3727
  Gene Symbol: CCDC50
  Gene Name: coiled-coil domain containing 50
  Uniprot ID: Q8IVM0
  ENSP ID: ENSP00000376250
MAEVSIDQSKLPGVKEVCRDFAVLEDHTLAHSLQEQEIEHHLASNVQRNRLVQHDLQVAKQLQEEDLKAQAQLQKRYKDLEQQDCEIAQEIQEKLAIEAERRRIQEKKDEDIARLLQEKELQEEKKRKKHFPEFPATRAYADSYYYEDGDQPGSRRARELGSGFSRPCRLQRDGKTVKHKKEKPEHPLENLEEPEQHCSSKRSLSSSSSGKGRDNPHINNEQHERKRSTQERPRRPLLPTISGEVFLSTECDDWETKINHQTRNWEKQSRHQDRLSPKSSQKAGLHCKEVVYGRDHGQGEHRKRRHRPRTPPFSESEEQLHLHDAGMKPRVMKEAVSTPSRMAHRDQEWYDAEIARKLQEEELLATQVDMRAAQVAQDEEIARLLMAEEKKAYKKAKEREKSSLDKRKQDPEWKPKTAKAANSKSKESDEPHHSKNERPARPPPPIMTDGEDADYTHFTNQQSSTRHFSKSESSHKGFHYKH

SEQ ID NO: 18594 - protein, 411 aa, Homo sapiens
  Payload ID: 3728
  Gene Symbol: CCDC51
  Gene Name: coiled-coil domain containing 51
  Uniprot ID: Q96ER9
  ENSP ID: ENSP00000379047
MMGRSPGFAMQHIVGVPHVLVRRGLLGRDLFMTRTLCSPGPSQPGEKRPEEVALGLHHRLPALGRALGHSIQQRATSTAKTWWDRYEEFVGLNEVREAQGKVTEAEKVFMVARGLVREAREDLEVHQAKLKEVRDRLDRVSREDSQYLELATLEHRMLQEEKRLRTAYLRAEDSEREKFSLFSAAVRESHEKERTRAERTKNWSLIGSVLGALIGVAGSTYVNRVRLQELKALLLEAQKGPVSLQEAIREQASSYSRQQRDLHNLMVDLRGLVHAAGPGQDSGSQAGSPPTRDRDVDVLSAALKEQLSHSRQVHSCLEGLREQLDGLEKTCSQMAGVVQLVKSAAHPGLVEPADGAMPSFLLEQGSMILALSDTEQRLEAQVNRNTIYSTLVTCVTFVATLPVLYMLFKAS

SEQ ID NO: 18595 - protein, 302 aa, Homo sapiens
  Payload ID: 3728
  Gene Symbol: CCDC51
  Gene Name: coiled-coil domain containing 51
  Uniprot ID: Q96ER9
  ENSP ID: ENSP00000392898
MVARGLVREAREDLEVHQAKLKEVRDRLDRVSREDSQYLELATLEHRMLQEEKRLRTAYLRAEDSEREKFSLFSAAVRESHEKERTRAERTKNWSLIGSVLGALIGVAGSTYVNRVRLQELKALLLEAQKGPVSLQEAIREQASSYSRQQRDLHNLMVDLRGLVHAAGPGQDSGSQAGSPPTRDRDVDVLSAALKEQLSHSRQVHSCLEGLREQLDGLEKTCSQMAGVVQLVKSAAHPGLVEPADGAMPSFLLEQGSMILALSDTEQRLEAQVNRNTIYSTLVTCVTFVATLPVLYMLFKAS

SEQ ID NO: 18596 - protein, 302 aa, Homo sapiens; identical to SEQ ID NO: 18595
  Payload ID: 3728
  Gene Symbol: CCDC51
  Gene Name: coiled-coil domain containing 51
  Uniprot ID: Q96ER9
  ENSP ID: ENSP00000401194

SEQ ID NO: 18597 - protein, 62 aa, Homo sapiens
  Payload ID: 3728
  Gene Symbol: CCDC51
  Gene Name: coiled-coil domain containing 51
  ENSP ID: ENSP00000408197
MMGRSPGFAMQHIVGVPHVLVRRGLLGRDLFMTRTLCSPGPSQPGEKRPEEVALGLHHRLPA

SEQ ID NO: 18598 - protein, 159 aa, Homo sapiens
  Payload ID: 3728
  Gene Symbol: CCDC51
  Gene Name: coiled-coil domain containing 51
  ENSP ID: ENSP00000409494
MMGRSPGFAMQHIVGVPHVLVRRGLLGRDLFMTRTLCSPGPSQPGEKRPEEVALGLHHRLPALGRALGHSIQQRATSTAKTWWDRYEEFVGLNEVREAQGKVTEAEKVFMVARGLVREAREDLEVHQAKLKEVRDRLDRVSREDSQYLELATLEHRMLQ

SEQ ID NO: 18599 - protein, 302 aa, Homo sapiens; identical to SEQ ID NO: 18595
  Payload ID: 3728
  Gene Symbol: CCDC51
  Gene Name: coiled-coil domain containing 51
  Uniprot ID: Q96ER9
  ENSP ID: ENSP00000412300

SEQ ID NO: 18600 - protein, 194 aa, Homo sapiens
  Payload ID: 3729
  Gene Symbol: CCDC53
  Gene Name: coiled-coil domain containing 53
  Uniprot ID: Q9Y3C0
  ENSP ID: ENSP00000240079
MDEDGLPLMGSGIDLTKVPAIQQKRTVAFLNQFVVHTVQFLNRFSTVCEEKLADLSLRIQQIETTLNILDAKLSSIPGLDDVTVEVSPLNVTSVTNGAHPEATSEQPQQNSTQDSGLQESEVSAENILTVAKDPRYARYLKMVQVGVPVMAIRNKMISEGLDPDLLERPDAPVPDGESEKTVEESSDSESSFSD

SEQ ID NO: 18601 - protein, 50 aa, Homo sapiens
  Payload ID: 3729
  Gene Symbol: CCDC53
  Gene Name: coiled-coil domain containing 53
  ENSP ID: ENSP00000438122
MDEDGLPLMGSGIDLTKVPAIQQKRTVAFLNQFVVHTVQFLNRFSTVCEE

SEQ ID NO: 18602 - protein, 173 aa, Homo sapiens
  Payload ID: 3729
  Gene Symbol: CCDC53
  Gene Name: coiled-coil domain containing 53
  ENSP ID: ENSP00000440134
MDEDGLPLMGSGIDLTKVPAIQQKRTVAFLNQFVVHTVQFLNRFSTVCEEKLADLSLRIQQIETTLNILDAKLSSIPGLDDVTVEVSPLNVTSVTNGAHPEATSEQPQNSTQDSGLQESEVSAENILTVAKDPRYARYLKMVQVGVPVMAIRNKMISEGLDPDLLEKIKKRKK

SEQ ID NO: 18603 - protein, 61 aa, Homo sapiens
  Payload ID: 3729
  Gene Symbol: CCDC53
  Gene Name: coiled-coil domain containing 53
  ENSP ID: ENSP00000440139
MDEDGLPLMGSGIDLTKVPAIQQKRTVAFLNQFVVHTVQFLNRFSTVCEETGSHFVTHAGV

SEQ ID NO: 18604 - protein, 169 aa, Homo sapiens
  Payload ID: 3729
  Gene Symbol: CCDC53
  Gene Name: coiled-coil domain containing 53
  ENSP ID: ENSP00000441810
MDEDGLPLMGSGIDLTKVPAIQQKRTVAFLNQFVVHTVQFLNRFSTVCEEKLADLSLRIQQIETTLNILDAKLSSIPGLDDVTVEVSPLNVTSVTNGAHPEATSEQPQQNSTQDSGLQESEVSAENILTVAKDPRYARYLKMVQVGVPVMAIRNKMISEGLDPDLLEVK

SEQ ID NO: 18605 - protein, 193 aa, Homo sapiens
  Payload ID: 3729
  Gene Symbol: CCDC53
  Gene Name: coiled-coil domain containing 53
  ENSP ID: ENSP00000443857
MDEDGLPLMGSGIDLTKVPAIQQKRTVAFLNQFVVHTVQFLNRFSTVCEEKLADLSLRIQQIETTLNILDAKLSSIPGLDDVTVEVSPLNVTSVTNGAHPEATSEQPQNSTQDSGLQESEVSAENILTVAKDPRYARYLKMVQVGVPVMAIRNKMISEGLDPDLLERPDAPVPDGESEKTVEESSDSESSFSD

SEQ ID NO: 18606 - protein, 107 aa, Homo sapiens
  Payload ID: 3729
  Gene Symbol: CCDC53
  Gene Name: coiled-coil domain containing 53
  ENSP ID: ENSP00000443922
KLADLSLRIQQIETTLNILDAKLSSIPGLDDVTVEVSPLNVTSVTNGAHPEATSEQPQGVPVMAIRNKMISEGLDPDLLERPDAPVPDGESEKTVEESSDSESSFSD

SEQ ID NO: 18607 - protein, 77 aa, Homo sapiens
  Payload ID: 3729
  Gene Symbol: CCDC53
  Gene Name: coiled-coil domain containing 53
  ENSP ID: ENSP00000445501
MDEDGLPLMGSGIDLTKVPAIQQKRTVAFLNQFVVHTVQFLNRFSTVCEETGSCCITEAGVQWRDHSSGQPQLPGLK

SEQ ID NO: 18608 - protein, 328 aa, Homo sapiens
  Payload ID: 3730
  Gene Symbol: CCDC54
  Gene Name: coiled-coil domain containing 54
  Uniprot ID: Q8NEL0
  ENSP ID: ENSP00000261058
MYTLHTKRVKAAARQMWTSNLSKVRQSLKNVYHKCKIRHQDSTGYPTVTSDDCNQDDDSYDGKMNLPVVLQDVKTAQVELFSQMTDIVHMIPKVQEKTDLYQKQMEVLETRMNVNEDKQCTTTKDILSMKEDIKALKKKVTELEIQNSCSTIHCLEILEGERGKEITELLYKLIQPATLKNTLASTDMEISSAEPEKVPSYPKSTDHLEKKTISPQMKTLKKRNHQNASRSFEKAKPNIYIYPDFSTWIKLTFVHGGKWTFFLSATKLEEFIQWLLSRPTILPEEPQVITQRYCPFTGPILSLTTICLSIFNNIYGFICSLKEEVTRL

SEQ ID NO: 18609 - protein, 916 aa, Homo sapiens
  Payload ID: 3731
  Gene Symbol: CCDC57
  Gene Name: coiled-coil domain containing 57
  Uniprot ID: Q2TAC2
  ENSP ID: ENSP00000374292
MLPLGSEPALNELLLRKEEEWRALQAHRTQLQEAALQDTRSQLEEAQGKLRCLQEDFVYNLQVLEERDLELERYDAAFAQAREWEEARRAEVSELKIEAAKLRQALAREARKVEELQQQQQLAFQEHRLELERVHSDKNGEIDHHREQYENLKWTLERKLEELDGELALQRQELLLEFESKMRKREHEFRLQADNMSNTALSRELKVKLLHKELEALKEAGAKAAESLQRAEATNAELERKLQSRAGELQDLEAMSRARVKDLEDKLHSVQLTRKKEEETFKRKHEELDRLAREKDAVLVAVKGAHVEQLQELQTRVLELQAHCETLEAQLRRAEWRQADTAKEKDAAIDQLREDASTVKSAWDAQIAQLSKEMVSRDLQIQTLQEEEVKLKAQVARSQQDIERYKQQLSLAVERERSLERDQVQLGLDWQRRCDDIERDQIQKSEALIQGLSMAKSQVAAKLQETEQALQEQEVVLKAVTLERDQAVQALRMHGLPRPGAQMLLRQHEEEISKDFPSSEIQRLREQNTSLRNAIAQMRKEMEALSHQIPPPIQTAAESTDANQPDPEAGGDAATPDYVLALEAEIRTLKHKFKTLEKHLEDVLDPLKMSSPHAESQPSVRTSTETTGGSAQAGQAGGSVQAGQAGGSVQAGPVSSGLALRKLGDRVQLLNLLVTRLRQKVLREPLEPAALQRELPREVDQVHLEVLELRKQVAELGKHLRIAQHGGAEPSGRKQPPASDAVALGREQDAKSAEDEAPSRHLGKHQPRSAQVGSRLDALQGPKTQHSIHTVTCKSPRQKEDRSPKPPQAPQHPEEHGRQSHSSSSFASGTLQDMWRLLDLGSSPSGVTSQGDSTPELPAPPAADRRPVKMQAGIATPGMKTAAQAKAKTTGASRSHPAKAKGCQRPPKIRNYNIMD

SEQ ID NO: 18610 - protein, 751 aa, Homo sapiens
  Payload ID: 3731
  Gene Symbol: CCDC57
  Gene Name: coiled-coil domain containing 57
  Uniprot ID: Q2TAC2
  ENSP ID: ENSP00000376154
MLPLGSEPALNELLLRKEEEWRALQAHRTQLQEAALQDTRSQLEEAQGKLRCLQEDFVYNLQVLEERDLELERYDAAFAQAREWEEARRAEVSELKIEAAKLRQALAREARKVEELQQQQQLAFQEHRLELERVHSDKNGEIDHHREQYENLKWTLERKLEELDGELALQRQELLLEFESKMRKREHEFRLQADNMSNTALSRELKVKLLHKELEALKEAGAKAAESLQRAEATNAELERKLQSRAGELQDLEAMSRARVKDLEDKLHSVQLTRKKEEETFKRKHEELDRLAREKDAVLVAVKGAHVEQLQELQTRVLELQAHCETLEAQLRRAEWRQADTAKEKDAAIDQLREDASTVKSAWDAQIAQLSKEMVSRDLQIQTLQEEEVKLKAQVARSQQDIERYKQQLSLAVERERSLERDQVQLGLDWQRRCDDIERDQIQKSEALIQGLSMAKSQVAAKLQETEQALQEQEVVLKAVTLERDQAVQALRMHGLPRPGAQMLLRQHEEEISKDFPSSEIQRLREQNTSLRNAIAQMRKEMEALSHQIPPPIQTAAESTDANQPDPEAGGDAATPDYVLALEAEIRTLKHKFKTLEKHLEDVLDPLKMSSPHAESQPSVRTSTETTGGSAQAGQAGGSVQAGQAGGSVQAGPVSSGLALRKLGDRVQLLNLLVTRLRQKVLREPLEPAALQRELPREVDQVHLEVLELRKQVAELGKHLRIAQHGGAEPSGRKQPPASDAVALGREVGAR

SEQ ID NO: 18611 - protein, 212 aa, Homo sapiens
  Payload ID: 3731
  Gene Symbol: CCDC57
  Gene Name: coiled-coil domain containing 57
  ENSP ID: ENSP00000376156
  MOD_RES (1)..(1): Any amino acid
XGKHQPRSAQVGSRLDALQGPKTQHSIHTVTCKSPRQKEDRSPKPPQAPQHPEEHGRQSHSSSSFASGTLQDMWRLLDLGSSPSGVTSQGDSTPGPHSFWNLQTNSIRPSSQCAERQVQKHAPTWGPLPPFWRGSALAPDANLAPCAVQLESNGGAETPWRVTSHTAGAPSSSSSRQEARQDAGRHCHPRDEDSSPGKGQDHRSLPVSSCKS

SEQ ID NO: 18612 - protein, 352 aa, Homo sapiens
  Payload ID: 3731
  Gene Symbol: CCDC57
  Gene Name: coiled-coil domain containing 57
  ENSP ID: ENSP00000376157
MEAEDQGELFLHLRSVARAPQTLSMHRLQRKLKEAARKIISLRLEKEQLIEMGNRLRAELGRPERWLLHHALPPAPEARKPGEEPRRPLDRSPPLGQVQPHFTSQDAKSAEDEAPSRHLGKHQPRSAQVGSRLDALQGPKTQHSIHTVTCKSPRQKEDRSPKPPQAPQHPEEHGRQSHSSSSFASGTLQDMWRLLDLGSSPSGVTSQGDSTPEMGSHYVTQAGLELLGSSSPAALASQSAEMTGVGPTPSLAWSGALHPNMNQEASLVRSTWAPGMRGGMNGGSSSVCKNMQRGPHWSPSQQPCSGIRTVLLSRKERTLLSCFSLPAPVVLVPLLLSGQAVTERAGHAGDIL

SEQ ID NO: 18613 - protein, 916 aa, Homo sapiens; identical to SEQ ID NO: 18609
  Payload ID: 3731
  Gene Symbol: CCDC57
  Gene Name: coiled-coil domain containing 57
  Uniprot ID: Q2TAC2
  ENSP ID: ENSP00000376158

SEQ ID NO: 18614 - protein, 490 aa, Homo sapiens
  Payload ID: 3731
  Gene Symbol: CCDC57
  Gene Name: coiled-coil domain containing 57
  ENSP ID: ENSP00000408124
  MOD_RES (1)..(1): Any amino acid
XPSVRTSTETTGGSAQAGQAGGSVQAGQAGGSVQAGPVSSGLALRKLGDRVQLLNLLVTRLRQKVLREPLEPAALQRELPREVDQVHLEVLELRKQVAELGKHLRIAQHGGAEPSGRKQPPASDAVALGREGLTKRGPMEAEDQGELFLHLRSVARAPQTLSMHRLQRKLKEAARKIISLRLEKEQLIEMGNRLRAELGRPERWLLHHALPPAPEARKPGEEPRRPLDRSPPLGQVQPHFTSQDAKSAEDEAPSRHLGKHQPRSAQVGSRLDALQGPKTQHSIHTVTCKSPRQKEDRSPKPPQAPQHPEEHGRQSHSSSSFASGTLQDMWRLLDLGSSPSGVTSQGDSTPEMGSHYVTQAGLELLGSSSPAALASQSAEMTGVGPTPSLAWSGALHPNMNQEASLVRSTWAPGMRGGMNGGSSSVCKNMQRGPHWSPSQQPCSGIRTVLLSRKERTLLSCFSLPAPVVLVPLLLSGQAVTERAGHAGDIL

SEQ ID NO: 18615 - protein, 35 aa, Homo sapiens
  Payload ID: 3731
  Gene Symbol: CCDC57
  Gene Name: coiled-coil domain containing 57
  ENSP ID: ENSP00000462121
  MOD_RES (1)..(1): Any amino acid
XDKNGEIDHHREQYENLKWTLERKLEELDGTAAGV

SEQ ID NO: 18616 - protein, 45 aa, Homo sapiens
  Payload ID: 3731
  Gene Symbol: CCDC57
  Gene Name: coiled-coil domain containing 57
  ENSP ID: ENSP00000462653
  MOD_RES (1)..(1): Any amino acid
XAADRRPVKMQAGIATPGMKTAAQAKAKTTGASRAGSQMLLRRPC

SEQ ID NO: 18617 - protein, 54 aa, Homo sapiens
  Payload ID: 3731
  Gene Symbol: CCDC57
  Gene Name: coiled-coil domain containing 57
  ENSP ID: ENSP00000463946
EEHGRQSHSSSSFASGTLQDMWRLLDLGSSPSGVTSQGDSTPELHSVLKEAVAA

SEQ ID NO: 18618 - protein, 144 aa, Homo sapiens
  Payload ID: 3732
  Gene Symbol: CCDC58
  Gene Name: coiled-coil domain containing 58
  Uniprot ID: Q4VC31
  ENSP ID: ENSP00000291458
MAAPSGGVNCEEFAEFQELLKVMRTIDDRIVHELNTTVPTASFAGKIDASQTCKQLYESLMAAHASRDRVIKNCIAQTSAVVKNLREEREKNLDDLTLLKQLRKEQTKLKWMQSELNVEEVVNDRSWKVFNERCRIHFKPPKNE

SEQ ID NO: 18619 - protein, 141 aa, Homo sapiens
  Payload ID: 3732
  Gene Symbol: CCDC58
  Gene Name: coiled-coil domain containing 58
  ENSP ID: ENSP00000418810
  MOD_RES (1)..(1): Any amino acid
XKELVSVMDLSLAKELLKVMRTIDDRIVHELNTTVPTASFAGKIDASQTCKQLYESLMAAHASRDRVIKNCIAQTSAVVKNLREEREKNLDDLTLLKQLRKEQTKLKWMQSELNVEEVVNDRSWKVFNERCRIHFKPPKNE

SEQ ID NO: 18620 - protein, 130 aa, Homo sapiens
  Payload ID: 3732
  Gene Symbol: CCDC58
  Gene Name: coiled-coil domain containing 58
  ENSP ID: ENSP00000420248
MWQELLKVMRTIDDRIVHELNTTVPTASFAGKIDASQTCKQLYESLMAAHASRDRVIKNCIAQTSAVVKNLREEREKNLDDLTLLKQLRKEQTKLKWMQSELNVEEVVNDRSWKVFNERCRIHFKPPKNE

SEQ ID NO: 18621 - protein, 53 aa, Homo sapiens
  Payload ID: 3732
  Gene Symbol: CCDC58
  Gene Name: coiled-coil domain containing 58
  ENSP ID: ENSP00000420769
MAAPSGGVNCEEFAEFQLKWMQSELNVEEVVNDRSWKVFNERCRIHFKPPKNE

SEQ ID NO: 18622 - protein, 241 aa, Homo sapiens
  Payload ID: 3733
  Gene Symbol: CCDC59
  Gene Name: coiled-coil domain containing 59
  Uniprot ID: Q9P031
  ENSP ID: ENSP00000256151
MAPVRRSAKWRPGGIEARGEGVSTVGYRNKNVRQKTWRPNHPQAFVGSVREGQGFAFRRKLKIQQSYKKLLRKEKKAQTSLESQFTDRYPDNLKHLYLAEEERHRKQARKVDHPLSEQVHQPLLEEQCSIDEPLFEDQCSFDQPQPEEQCIKTVNSFTIPKKNKKKTSNQKAQEEYEQIQAKRAAKKQEFERRKQEREEAQRQYKKKKMEVFKILNKKTKKGQPNLNVQMEYLLQKIQEKC

SEQ ID NO: 18623 - protein, 181 aa, Homo sapiens
  Payload ID: 3733
  Gene Symbol: CCDC59
  Gene Name: coiled-coil domain containing 59
  ENSP ID: ENSP00000450183
MAPVRRSAKWRPGGIEARGEGVSTVGYRNKNVRQKTWRPNHPQAFVGSVREGQGFAFRRKLKIQQSYKKLLRKEKKAQTSLESQFTDRYPDNLKHLYLAEEERHRKQARKVDHPLSEQVHQPLLEEQCSIDEPLFEDQCSFDQPQPEEQCIKTVKSEFLTCTFSFSLRNVFQHFLQVFGNQ

SEQ ID NO: 18624 - protein, 474 aa, Homo sapiens
  Payload ID: 3734
  Gene Symbol: CCDC6
  Gene Name: coiled-coil domain containing 6
  Uniprot ID: Q16204
  ENSP ID: ENSP00000263102
MADSASESDTDGAGGNSSSSAAMQSSCSSTSGGGGGGGGGGGGGKSGGIVISPFRLEELTNRLASLQQENKVLKIELETYKLKCKALQEENRDLRKASVTIQARAEQEEEFISNTLFKKIQALQKEKETLAVNYEKEEEFLTNELSRKLMQLQHEKAELEQHLEQEQEFQVNKLMKKIKKLENDTISKQLTLEQLRREKIDLENTLEQEQEALVNRLWKRMDKLEAEKRILQEKLDQPVSAPPSPRDISMEIDSPENMMRHIRFLKNEVERLKKQLRAAQLQHSEKMAQYLEEERHMREENLRLQRKLQREMERREALCRQLSESESSLEMDDERYFNEMSAQGLRPRTVSSPIPYTPSPSSSRPISPGLSYASHTVGFTPPTSLTRAGMSYYNSPGLHVQHMGTSHGITRPSPRRSNSPDKFKRPTPPPSPNTQTPVQPPPPPPPPPMQPTVPSAATSQPTPSQHSAHPSSQP

SEQ ID NO: 18625 - protein, 550 aa, Homo sapiens
  Payload ID: 3735
  Gene Symbol: CCDC60
  Gene Name: coiled-coil domain containing 60
  Uniprot ID: Q8IWA6
  ENSP ID: ENSP00000333374
MTKVPATKKLQSSPNSGAVRPFYASENLRQVPDKPMKSIKYMDKEIINLKKDLIRSRFLIQSVKIGRGYFAILREETAKKKKQQQLQKLKEEERNKFQPAEKISEIHYGDTLLSTYDDEKLKTLGARVTRRPFTPIHSCIISPSLTEAHVEPLFRQLCALHWLLEALTIDHTHHTMKPVITCWNPKDPGGSKSTIKKINKDKSMGQKWEHFITAPKTKKFKIPTMRVTNRKPSRRGSTLSLSRASGGSSPQSSMISVNPGSDEPPSVNTQVTSSKDIEDNESSSTKPDEEPLYMNLQKLLEMVREDARRTVTIENGMQRKAPSILSVLKQNKSNSAYKEMQTTLKSSERSSSTSAESHIQPVQKKSKNRTNCDINIHYKSGVCNTMRAKFYSVAQEAGFCLQDKMEILMKRQEERGIQKFRAFVLVSNFQKDIAKMRHHISVVKGDAEEIADHWYFDLLSKLPEDLKNFRPAKKILVKLQKFGENLDLRIRPHVLLKVLQDLRIWELCSPDIAVAIEFVREHIIHMPQEDYISWLQSRINIPIGPYSALR

SEQ ID NO: 18626 - protein, 57 aa, Homo sapiens
  Payload ID: 3735
  Gene Symbol: CCDC60
  Gene Name: coiled-coil domain containing 60
  ENSP ID: ENSP00000443403
MTKVPATKKLQSSPNSGAVRPFYASENLRQVPDKPMKSIKYMDKEIINLKKDLIRSR

SEQ ID NO: 18627 - protein, 133 aa, Homo sapiens
  Payload ID: 3735
  Gene Symbol: CCDC60
  Gene Name: coiled-coil domain containing 60
  ENSP ID: ENSP00000445505
MTKVPATKKLQSSPNSGAVRPFYASENLRQVPDKPMKSIKYMDKEIINLKKDLIRSRLSHCRTQRRMGKRPNREATSKQERNDNEMFHLATLLDPTNIKEGIRIPLQKETPCFPREVISPSGTNSLTPYPSIK

SEQ ID NO: 18628 - protein, 332 aa, Homo sapiens
  Payload ID: 3736
  Gene Symbol: CCDC61
  Gene Name: coiled-coil domain containing 61
  Uniprot ID: Q9Y6R9
  ENSP ID: ENSP00000444279
MDQPAGLQVDYVFRGVEHAVRVMVSGQVLELEVEDRMTADQWRGEFDAGFIEDLTHKTGNFKQFNIFCHMLESALTQSSESVTLDLLTYTDLESLRNRKMGGRPGSLAPRSAQLNSKRYLILIYSVEFDRIHYPLPLPYQGKPDPVVLQGIIRSLKEELGRLQGLDGQNTRDTRENEIWHLREQQQQRNRLGSGGSGDGPSVSWSRQTQPPAALTGRGDAPNRSRNRSSSVDSFRSRCSSASSCSDLEDFSESLSRGGHRRRGKPPSPTPWSGSNMKSPPVERSHHQKSLANSGGWVPIKEYSSEHQAADMAEIDARLKALQEYMNRLDMRS

SEQ ID NO: 18629 - protein, 332 aa, Homo sapiens; identical to SEQ ID NO: 18628
  Payload ID: 3736
  Gene Symbol: CCDC61
  Gene Name: coiled-coil domain containing 61
  Uniprot ID: Q9Y6R9
  ENSP ID: ENSP00000469466

SEQ ID NO: 18630 - protein, 49 aa, Homo sapiens
  Payload ID: 3736
  Gene Symbol: CCDC61
  Gene Name: coiled-coil domain containing 61
  ENSP ID: ENSP00000469524
MDQPAGLQVDYVFRGVEHAVRVMVSGQVLELEVEDRMTADQWRGEFDAG

SEQ ID NO: 18631 - protein, 77 aa, Homo sapiens
  Payload ID: 3736
  Gene Symbol: CCDC61
  Gene Name: coiled-coil domain containing 61
  ENSP ID: ENSP00000469909
MDQPAGLQVDYVFRGVEHAVRVMVSGQVLELEVEDRMTADQWRGEFDAGFIEDLTHKTGNFKQFNIFCHMLESALTQ

SEQ ID NO: 18632 - protein, 512 aa, Homo sapiens
  Payload ID: 3736
  Gene Symbol: CCDC61
  Gene Name: coiled-coil domain containing 61
  Uniprot ID: Q9Y6R9
  ENSP ID: ENSP00000471454
MDQPAGLQVDYVFRGVEHAVRVMVSGQVLELEVEDRMTADQWRGEFDAGFIEDLTHKTGNFKQFNIFCHMLESALTQSSESVTLDLLTYTDLESLRNRKMGGRPGSLAPRSAQLNSKRYLILIYSVEFDRIHYPLPLPYQGKPDPVVLQGIIRSLKEELGRLQGLDGQNTRDTRENEIWHLREQVSRLASEKRELEAQLGRSREEALAGRAARQEAEALRGLVRGLELELRQERGLGHRVAGRRGQDCRRLAKELEEAKASERSLRARLKTLTSELALYKRGRRTPPVQPPPTREDRASSSRERSASRGRGAARSSSRESGRGSRGRGRPARPSPSPTGGRALRFDPTAFVKAKERKQREIQMKQQQRNRLGSGGSGDGPSVSWSRQTQPPAALTGRGDAPNRSRNRSSSVDSFRSRCSSASSCSDLEDFSESLSRGGHRRRGKPPSPTPWSGSNMKSPPVERSHHQKSLANSGGWVPIKEYSSEHQAADMAEIDARLKALQEYMNRLDMRS

SEQ ID NO: 18633 - protein, 684 aa, Homo sapiens
  Payload ID: 3737
  Gene Symbol: CCDC62
  Gene Name: coiled-coil domain containing 62
  Uniprot ID: Q6P9F0
  ENSP ID: ENSP00000253079
MNPPAAFLAGRQNIGSEVEISTIEKQRKELQLLIGELKDRDKELNDMVAVHQQQLLSWEEDRQKVLTLEERCSKLEGELHKRTEIIRSLTKKVKALESNQMECQTALQKTQLQLQEMAQKATHSSLLSEDLEARNETLSNTLVELSAQVGQLQAREQALTTMIKLKDKDIIEAVNHIADCSGKFKMLEHALRDAKMAETCIVKEKQDYKQKLKALKIEVNKLKEDLNEKTTENNEQREEIIRLKQEKSCLHDELLFTVEREKRKDELLNIAKSKQERTNSELHNLRQIYVKQQSDLQFLNFNVENSQELIQMYDSKMEESKALDSSRDMCLSDLENNHPKVDIKREKNQKSLFKDQKFEAMLVQQNRSDKSSCDECKEKKQQIDTVFGEKSVITLSSIFTKDLVEKHNLPWSLGGKTQIEPENKITLCKIHTKSPKCHGTGVQNEGKQPSETPTLSDEKQWHDVSVYLGLTNCPSSKHPEKLDVECQDQMERSEISCCQKNEACLGESGMCDSKCCHPSNFIIEAPGHMSDVEWMSIFKPSKMQRIVRLKSGCTCSESICGTQHDSPASELIAIQDSHSLGSSKSALREDETESSSNKKNSPTSLLIYKDAPAFNEKASIVLPSQDDFSPTSKLQRLLAESRQMVTDLELSTLLPISHENLTGSATNKSEVPEESAQKNTFVSY

SEQ ID NO: 18634 - protein, 682 aa, Homo sapiens
  Payload ID: 3737
  Gene Symbol: CCDC62
  Gene Name: coiled-coil domain containing 62
  Uniprot ID: Q6P9F0
  ENSP ID: ENSP00000341471
MNPPAAFLAGRQNIGSEVEISTIEKQRKELQLLIGELKDRDKELNDMVAVHQQQLLSWEEDRQKVLTLEERCSKLEGELHKRTEIIRSLTKKVKALESNQMECQTALQKTQLQLQEMAQKATHSSLLSEDLEARNETLSNTLVELSAQVGQLQAREQALTTMIKLKDKDIIEAVNHIADCSGKFKMLEHALRDAKMAETCIVKEKQDYKQKLKALKIEVNKLKEDLNEKTTENNEQREEIIRLKQEKSCLHDELLFTVEREKRKDELLNIAKSKQERTNSELHNLRQIYVKQQSDLQFLNFNVENSQELIQMYDSKMEESKALDSSRDMCLSDLENNHPKVDIKREKNQKSLFKDQKFEAMLVQQNRSDKSSCDECKEKKQQIDTVFGEKSVITLSSIFTKDLVEKHNLPWSLGGKTQIEPENKITLCKIHTKSPKCHGTGVQNEGKQPSETPTLSDEKQWHDVSVYLGLTNCPSSKHPEKLDVECQDQMERSEISCCQKNEACLGESGMCDSKCCHPSNFIIEAPGHMSDVEWMSIFKPSKMQRIVRLKSGCTCSESICGTQHDSPASELIAIQDSHSLGSSKSALREDETESSSNKKNSPTSLLIYKDAPAFNEKASIVLPSQDDFSPTSKLQRLLAESRQMVTDLELSTLLPISHENLTGSATNISHLCGRQKADTNTE

SEQ ID NO: 18635 - protein, 497 aa, Homo sapiens
  Payload ID: 3737
  Gene Symbol: CCDC62
  Gene Name: coiled-coil domain containing 62
  ENSP ID: ENSP00000376235
MLEHALRDAKMAETCIVKEKQDYKQKLKALKIEVNKLKEDLNEKTTENNEQREEIIRLKQEKSCLHDELLFTVEREKRKDELLNIAKSKQERTNSELHNLRQIYVKQQSDLQFLNFNVENSQELIQMYDSKMEESKALDSSRDMCLSDLENNHPKVDIKREKNQKSLFKDQKFEAMLVQQNRSDKSSCDECKEKKQQIDTVFGEKSVITLSSIFTKDLVEKHNLPWSLGGKTQIEPENKITLCKIHTKSPKCHGTGVQNEGKQPSETPTLSDEKQWHDVSVYLGLTNCPSSKHPEKLDVECQDQMERSEISCCQKNEACLGESGMCDSKCCHPSNFIIEAPGHMSDVEWMSIFKPSKMQRIVRLKSGCTCSESICGTQHDSPASELIAIQDSHSLGSSKSALREDETESSSNKKNSPTSLLIYKDAPAFNEKASIVLPSQDDFSPTSKLQRLLAESRQMVTDLELSTLLPISHENLTGSATNISHLCGRQKADTNTE

SEQ ID NO: 18636 - protein, 682 aa, Homo sapiens; identical to SEQ ID NO: 18634
  Payload ID: 3737
  Gene Symbol: CCDC62
  Gene Name: coiled-coil domain containing 62
  Uniprot ID: Q6P9F0
  ENSP ID: ENSP00000376236

SEQ ID NO: 18637 - protein, 64 aa, Homo sapiens
  Payload ID: 3737
  Gene Symbol: CCDC62
  Gene Name: coiled-coil domain containing 62
  ENSP ID: ENSP00000439893
MNPPAAFLAGRQARNETLSNTLVELSAQVGQLQAREQALTTMIKLKDKDIIEAVNHIADCSGKF

SEQ ID NO: 18638 - protein, 445 aa, Homo sapiens
  Payload ID: 3737
  Gene Symbol: CCDC62
  Gene Name: coiled-coil domain containing 62
  Uniprot ID: Q6P9F0
  ENSP ID: ENSP00000445045
MPNSSPKDPTTASGNGSKVEREKRKDELLNIAKSKQERTNSELHNLRQIYVKQQSDLQFLNFNVENSQELIQMYDSKMEESKALDSSRDMCLSDLENNHPKVDIKREKNQKSLFKDQKFEAMLVQQNRSDKSSCDECKEKKQQIDTVFGEKSVITLSSIFTKDLVEKHNLPWSLGGKTQIEPENKITLCKIHTKSPKCHGTGVQNEGKQPSETPTLSDEKQWHDVSVYLGLTNCPSSKHPEKLDVECQDQMERSEISCCQKNEACLGESGMCDSKCCHPSNFIIEAPGHMSDVEWMSIFKPSKMQRIVRLKSGCTCSESICGTQHDSPASELIAIQDSHSLGSSKSALREDETESSSNKKNSPTSLLIYKDAPAFNEKASIVLPSQDDFSPTSKLQRLLAESRQMVTDLELSTLLPISHENLTGSATNKSEVPEESAQKNTFVSY

SEQ ID NO: 18639 - protein, 563 aa, Homo sapiens
  Payload ID: 3738
  Gene Symbol: CCDC63
  Gene Name: coiled-coil domain containing 63
  Uniprot ID: Q8NA47
  ENSP ID: ENSP00000312399
MSVLKKNRRKDSDTPQEPSEKAKEQQAEAELRKLRQQFRKMVESRKSFKFRNQQKIASQYKEIKTLKTEQDEITLLLSLMKSSRNMNRSEKNYMELRLLLQTKEDYEALIKSLKVLLAELDEKILQMEKKIANQKQIFAKMQEANNPRKLQKQIHILETRLNLVTVHFDKMLTTNAKLRKEIEDLRFEKAAYDNVYQQLQHCLLMEKKTMNLAIEQSSQAYEQRVEAMARMAAMKDRQKKDTSQYNLEIRELERLYAHESKLKSFLLVKLNDRNEFEEQAKREEALKAKKHVKKNRGESFESYEVAHLRLLKLAESGNLNQLIEDFLAKEEKNFARFTYVTELNNDMEMMHKRTQRIQDEIILLRSQQKLSHDDNHSVLRQLEDKLRKTTEEADMYESKYGEVSKTLDLLKNSVEKLFKKINCDATKILVQLGETGKVTDINLPQYFAIIEKKTNDLLLLETYRRILEVEGAEAEIPPPFINPFWGGSALLKPPEPIKVIPPVLGADPFSDRLDDVEQPLDHSSLRQLVLDNYILKENRSKEVRGDSLPEKVDDFRSRKKVTM

SEQ ID NO: 18640 - protein, 523 aa, Homo sapiens
  Payload ID: 3738
  Gene Symbol: CCDC63
  Gene Name: coiled-coil domain containing 63
  Uniprot ID: Q8NA47
  ENSP ID: ENSP00000445881
MVESRKSFKFRNQQKIASQYKEIKTLKTEQDEITLLLSLMKSSRNMNRSEKNYMELRLLLQTKEDYEALIKSLKVLLAELDEKILQMEKKIANQKQIFAKMQEANNPRKLQKQIHILETRLNLVTVHFDKMLTTNAKLRKEIEDLRFEKAAYDNVYQQLQHCLLMEKKTMNLAIEQSSQAYEQRVEAMARMAAMKDRQKKDTSQYNLEIRELERLYAHESKLKSFLLVKLNDRNEFEEQAKREEALKAKKHVKKNRGESFESYEVAHLRLLKLAESGNLNQLIEDFLAKEEKNFARFTYVTELNNDMEMMHKRTQRIQDEIILLRSQQKLSHDDNHSVLRQLEDKLRKTTEEADMYESKYGEVSKTLDLLKNSVEKLFKKINCDATKILVQLGETGKVTDINLPQYFAIIEKKTNDLLLLETYRRILEVEGAEAEIPPPFINPFWGGSALLKPPEPIKVIPPVLGADPFSDRLDDVEQPLDHSSLRQLVLDNYILKENRSKEVRGDSLPEKVDDFRSRKKVTM

SEQ ID NO: 18641 - protein, 484 aa, Homo sapiens
  Payload ID: 3738
  Gene Symbol: CCDC63
  Gene Name: coiled-coil domain containing 63
  ENSP ID: ENSP00000450217
MKSSRNMNRSEKNYMELRLLLQTKEDYEALIKSLKVLLAELDEKILQMEKKIANQKQIFAKMQEANNPRKLQKQIHILETRLNLVTVHFDKMLTTNAKLRKEIEDLRFEKAAYDNVYQQLQHCLLMEKKTMNLAIEQSSQAYEQRVEAMARMAAMKDRQKKDTSQYNLEIRELERLYAHESKLKSFLLVKLNDRNEFEEQAKREEALKAKKHVKKNRGESFESYEVAHLRLLKLAESGNLNQLIEDFLAKEEKNFARFTYVTELNNDMEMMHKRTQRIQDEIILLRSQQKLSHDDNHSVLRQLEDKLRKTTEEADMYESKYGEVSKTLDLLKNSVEKLFKKINCDATKILVQLGETGKVTDINLPQYFAIIEKKTNDLLLLETYRRILEVEGAEAEIPPPFINPFWGGSALLKPPEPIKVIPPVLGADPFSDRLDDVEQPLDHSSLRQLVLDNYILKENRSKEVRGDSLPEKVDDFRSRKKVTM

SEQ ID NO: 18642 - protein, 573 aa, Homo sapiens
  Payload ID: 3739
  Gene Symbol: CCDC64
  Gene Name: coiled-coil domain containing 64
  Uniprot ID: Q6ZP65
  ENSP ID: ENSP00000380690
MSAFCLGLVGRASAPAEPDSACCMELPAAAGDAVRSPAAAAALIFPGGSGELELALEEELALLAAGERPSDPGEHPQAEPGSLAEGAGPQPPPSQDPELLSVIRQKEKDLVLAARLGKALLERNQDMSRQYEQMHKELTDKLEHLEQEKHELRRRFENREGEWEGRVSELESDVKQLQDELERQQIHLREADREKSRAVQELSEQNQRLLDQLSRASEVERQLSMQVHALREDFREKNSSTNQHIIRLESLQAEIKMLSDRKRELEHRLSATLEENDLLQGTVEELQDRVLILERQGHDKDLQLHQSQLELQEVRLSCRQLQVKVEELTEERSLQSSAATSTSLLSEIEQSMEAEELEQEREQLRLQLWEAYCQVRYLCSHLRGNDSADSAVSTDSSMDESSETSSAKDVPAGSLRTALNELKRLIQSIVDGMEPTVTLLSVEMTALKEERDRLRVTSEDKEPKEQLQKAIRDRDEAIAKKNAVELELAKCRMDMMSLNSQLLDAIQQKLNLSQQLEAWQDDMHRVIDRQLMDTHLKERSQPAAALCRGHSAGRGDEPSIAEGKRLFSFFRKI

SEQ ID NO: 18643 - protein, 291 aa, Homo sapiens
  Payload ID: 3739
  Gene Symbol: CCDC64
  Gene Name: coiled-coil domain containing 64
  ENSP ID: ENSP00000447477
ERSLQSSAATSTSLLSEIEQSMEAEELEQEREQLRLQLWEAYCQVRYLCSHLRGNDSADSAVSTDSSMDESSETSSAKDVPAGSLRTALNELKRLIQSIVDGMEPTGSRRLDDDSLEEQIRQTSEDSRALRELMEGERGKLRQSLEELQRLHSQVTLLSVEMTALKEERDRLRVTSEDKEPKEQLQKAIRDRDEAIAKKNAVELELAKCRMDMMSLNSQLLDAIQQKLNLSQQLEAWQDDMHRVIDRQLMDTHLKERSQPAAALCRGHSAGRGDEPSIAEGKRLFSFFRKI

SEQ ID NO: 18644 - protein, 77 aa, Homo sapiens
  Payload ID: 3739
  Gene Symbol: CCDC64
  Gene Name: coiled-coil domain containing 64
  ENSP ID: ENSP00000447939
  MOD_RES (1)..(1): Any amino acid
XKEPKEQLQKAIRDRDEAIAKKNAVELELAKCRMDMMSLNSQLLDAIQQKLNLSQQLEAWQFASSGLFTIWLLWFLI

SEQ ID NO: 18645 - protein, 228 aa, Homo sapiens
  Payload ID: 3739
  Gene Symbol: CCDC64
  Gene Name: coiled-coil domain containing 64
  ENSP ID: ENSP00000449064
  MOD_RES (1)..(1): Any amino acid
XCLGLVGRASAPAEPDSACCMELPAAAGDAVRSPAAAAALIFPGGSGELELALEEELALLAAGERPSDPGEHPQAEPGSLAEGAGPQPPPSQDPELLSVIRQKEKDLVLAARLGKALLERNQDMSRQYEQMHKELTDKLEHLEQEKHELRRRFENREGEWEGRVSELESDVKQLQDELERQQIHLREADREKSRAVQELSEQNQRLLDQLSRKIKTWIYYSTSALLVY

SEQ ID NO: 18646 - protein, 508 aa, Homo sapiens
  Payload ID: 3740
  Gene Symbol: CCDC64B
  Gene Name: coiled-coil domain containing 64B
  Uniprot ID: A1A5D9
  ENSP ID: ENSP00000373998
MSSPDGPSFPSGPLSGGASPSGDEGFFPFVLERRDSFLGGGPGPEEPEDLALQLQQKEKDLLLAAELGKMLLERNEELRRQLETLSAQHLEREERLQQENHELRRGLAARGAEWEARAVELEGDVEALRAQLGEQRSEQQDSGRERARALSELSEQNLRLSQQLAQASQTEQELQRELDALRGQCQAQALAGAELRTRLESLQGENQMLQSRRQDLEAQIRGLREEVEKGEGRLQTTHEELLLLRRERREHSLELERARSEAGEALSALRRLQRRVSELEEESRLQDADVSAASLQSELAHSLDDGDQGQGADAPGDTPTTRSPKTRKASSPQPSPPEEILEPPKKRTSLSPAEILEEKEVEVAKLQDEISLQQAELQSLREELQRQKELRAQEDPGEALHSALSDRDEAVNKALELSLQLNRVSLERDSLSRELLRAIRQKVALTQELEAWQDDMQVVIGQQLRSQRQKELSASASSSTPRRAAPRFSLRLGPGPAGGFLSNLFRRT

SEQ ID NO: 18647 - protein, 508 aa, Homo sapiens; identical to SEQ ID NO: 18646
  Payload ID: 3740
  Gene Symbol: CCDC64B
  Gene Name: coiled-coil domain containing 64B
  Uniprot ID: A1A5D9
  ENSP ID: ENSP00000459043

SEQ ID NO: 18648 - protein, 301 aa, Homo sapiens
  Payload ID: 3740
  Gene Symbol: CCDC64B
  Gene Name: coiled-coil domain containing 64B
  Uniprot ID: A1A5D9
  ENSP ID: ENSP00000461724
MLQSRRQDLEAQIRGLREEVEKGEGRLQTTHEELLLLRRERREHSLELERARSEAGEALSALRRLQRRVSELEEESRLQDADVSAASLQSELAHSLDDGDQGQGADAPGDTPTTRSPKTRKASSPQPSPPEEILEPPKKRTSLSPAEILEEKEVEVAKLQDEISLQQAELQSLREELQRQKELRAQEDPGEALHSALSDRDEAVNKALELSLQLNRVSLERDSLSRELLRAIRQKVALTQELEAWQDDMQVVIGQQLRSQRQKELSASASSSTPRRAAPRFSLRLGPGPAGGFLSNLFRRT

SEQ ID NO: 18649 - protein, 497 aa, Homo sapiens
  Payload ID: 3741
  Gene Symbol: CCDC65
  Gene Name: coiled-coil domain containing 65
  Uniprot ID: Q8IXS2
  ENSP ID: ENSP00000266984
MPKKEKMAKTPLSDEKQLLLFQQKLLAEEEMAKKKERLLSQFLKDKLAKEEHNSALNLNKINTQWRTVLREVKTRELHKDIEILSQTFERVVDCKDNVIKSLAKDLSEAEEQYAHALRSHLHNVDQLLALQRHRLSLLEESYNMELEALTKEFETERKTIIDQHEKEIHYLQDIFMAMEQNYIDSEYESKLEFQSMWNDLKNMNLEEKHFLRLHLENRVEDLWRKFQDVLKNYTDATEDRKAAFETLQVKDEKSSKEIEVQMKKIQKLQDAITISKGKIMIHSRESEDENRYIRNDKELVLVQLRKLKAQRTQARAASQKNLVRLTLESNATLKALRKIVDKGEKILKLAEICRKFETEEEKVLPFYSSVLTPKEQEGIQKNNLEELTEELTKVMVDYIGMENFWKRYNKVKLEQLSLQHRRAQLLDINGKLREMLKQYLDGISVSDEVLSQLNPLFIVNYQSNLLQPLSIRIAHPGSTSPSAPWRDQRRSFFLGSS

SEQ ID NO: 18650 - protein, 484 aa, Homo sapiens
  Payload ID: 3741
  Gene Symbol: CCDC65
  Gene Name: coiled-coil domain containing 65
  Uniprot ID: Q8IXS2
  ENSP ID: ENSP00000312706
MPKKEKMAKTPLSDEKQLLLFQQKLLAEEEMAKKKERLLSQFLKDKLAKEEHNSALNLNKINTQWRTVLREVKTRELHKDIEILSQTFERVVDCKDNVIKSLAKDLSEAEEQYAHALRSHLHNVDQLLALQRHRLSLLEESYNMELEALTKEFETERKTIIDQHEKEIHYLQDIFMAMEQNYIDSEYESKLEFQSMWNDLKNMNLEEKHFLRLHLENRVEDLWRKFQDVLKNYTDATEDRKAAFETLQVKDEKSSKEIEVQMKKIQKLQDAITISKGKIMIHSRESEDENRYIRNDKELVLVQLRKLKAQRTQARAASQKNLVRLTLESNATLKALRKIVDKGEKILKLAEICRKFETEEEKVLPFYSSVLTPKEQEGIQKNNLEELTEELTKVMVDYIGMENFWKRYNKVKLEQLSLQHRRAQLLDINGKLREMLKQYLDGISVSDEVLSQLNPLFIVNYQSNLLQPLSIRIAHPGDKQHPTT

SEQ ID NO: 18651 - protein, 373 aa, Homo sapiens
  Payload ID: 3741
  Gene Symbol: CCDC65
  Gene Name: coiled-coil domain containing 65
  ENSP ID: ENSP00000446569
MPKKEKMAKTPLSDEKQLLLFQQKLLAEEEMAKKKERLLSQFLKDKLAKEEHNSALNLNKINTQWRTVLREVKTRELHKDIEILSQTFERVVDCKDNVIKNLEEKHFLRLHLENRVEDLWRKFQDVLKNYTDATEDRKAAFETLQVKDEKSSKEIEVQMKKIQKLQDAITISKGKIMIHSRESEDENRYIRNDKELVLVQLRKLKAQRTQARAASQKNLVRLTLESNATLKALRKIVDKGEKILKLAEICRKFETEEEKVLPFYSSVLTPKEQEGIQKNNLEELTEELTKVMVDYIGMENFWKRYNKVKLEQLSLQHRRAQLLDINGKLREMLKQYLDGISVSDEVLSQLNPLFIVNYQSNLLQPLSIRIAHP

SEQ ID NO: 18652 - protein, 42 aa, Homo sapiens
  Payload ID: 3741
  Gene Symbol: CCDC65
  Gene Name: coiled-coil domain containing 65
  ENSP ID: ENSP00000447157
MPKKEKMAKTPLSDEKQLLLFQQKLLAEEEMAKKKERNTTVL

SEQ ID NO: 18653 - protein, 914 aa, Homo sapiens
  Payload ID: 3742
  Gene Symbol: CCDC66
  Gene Name: coiled-coil domain containing 66
  Uniprot ID: A2RUB6
  ENSP ID: ENSP00000326050
MGNKAKIAKCPLRTKTGHILKSTQDTCIGSEKLLQKKPVGSETSQAKGEKNGMTFSSTKDLCKQCIDKDCLHIQKEISPATPNMQKTRNTVNTSLVGKQKPHKKHITAENMKSSLVCLTQDQLQQILMTVNQGNRSLSLTENGKEAKSQYSLYLNSISNQPKDENIMGLFKKTEMVSSVPAENKSVLNEHQETSKQCEQKIAIENEWKPADIFSTLGERECDRSSLEAKKAQWRKELDEQVALKKKEKEVSEKWNDPWKKSESDKIIWEKHQILDQSRETVLLEHPFSAVKQELQRKWIEELNKQIEDDRQRKIEEKIIYSKGEEHDRWAMHFDSLKSYPGSQSQLFSQSTHKQPEYFCVSPDTQELADVSSVCTPTTGSQVEPSEEEHIAKPIKDVVMANSKKTNFLRSMTALLDPAQIEERDRRRQKQLEHQKAITAQVEEKRRKKQLEEEQRKKEEQEEELRLAQEREEMQKQYEEDILKQKQKEEIMTLKTNELFQTMQRAQELAQRLKQEQRIRELAQKGHDTSRLIKNLGVDTIQMEYNASNISNSRHDSDEISGKMNTYMNSTTSKKDTGVQTDDLNIGIFTNAESHCGSLMERDITNCSSPEISAELIGQFSTKKNKQELTQDKGASLEKENNRCNDQCNQFTRIEKQTKHMKKYPKRPDWNINKPPKRYIPASEKYPKQLQKQREEKKVRRQMELLHLVEKNNPGHLSQNRGISPEIFHSSHQETESKLRWHLVKKEEEPLNIHSFSKERSPSSPVPVVKNRTQQTQNTLHLPLKNSSYERENLISGSNQTELSSGISESSHFIPYVRTNEIYYLDPDAPLSGPSTQDPQYQNSQDCGQKRQLFDSDCVRDPLLNPNMVKNRDRQQAILKGLSELRQGLLQKQKELESSLLPLAENQEESFGSSF

SEQ ID NO: 18654 - protein, 230 aa, Homo sapiens
  Payload ID: 3742
  Gene Symbol: CCDC66
  Gene Name: coiled-coil domain containing 66
  ENSP ID: ENSP00000343840
MNLGDGLKLETELLDGKTKLILSPYEHKSKISVKMGNKAKIAKCPLRTKTGHILKSTQDTCIGSEKLLQKKPVGSETSQAKGEKNGMTFSSTKDLCKQCIDKDCLHIQKEISPATPNMQKTRNTVNTSLVGKQKPHKKHITAENMKSSLVCLTQDQLQQILMTVNQGNRSLSLTENGKEAKSQYSLYLNSISNQPKDENIMGLFKKTEMVSSVPAENKSVLNEHQETSKQ

SEQ ID NO: 18655 - protein, 948 aa, Homo sapiens
  Payload ID: 3742
  Gene Symbol: CCDC66
  Gene Name: coiled-coil domain containing 66
  Uniprot ID: A2RUB6
  ENSP ID: ENSP00000378167
MNLGDGLKLETELLDGKTKLILSPYEHKSKISVKMGNKAKIAKCPLRTKTGHILKSTQDTCIGSEKLLQKKPVGSETSQAKGEKNGMTFSSTKDLCKQCIDKDCLHIQKEISPATPNMQKTRNTVNTSLVGKQKPHKKHITAENMKSSLVCLTQDQLQQILMTVNQGNRSLSLTENGKEAKSQYSLYLNSISNQPKDENIMGLFKKTEMVSSVPAENKSVLNEHQETSKQCEQKIAIENEWKPADIFSTLGERECDRSSLEAKKAQWRKELDEQVALKKKEKEVSEKWNDPWKKSESDKIIWEKHQILDQSRETVLLEHPFSAVKQELQRKWIEELNKQIEDDRQRKIEEKIIYSKGEEHDRWAMHFDSLKSYPGSQSQLFSQSTHKQPEYFCVSPDTQELADVSSVCTPTTGSQVEPSEEEHIAKPIKDVVMANSKKTNFLRSMTALLDPAQIEERDRRRQKQLEHQKAITAQVEEKRRKKQLEEEQRKKEEQEEELRLAQEREEMQKQYEEDILKQKQKEEIMTLKTNELFQTMQRAQELAQRLKQEQRIRELAQKGHDTSRLIKNLGVDTIQMEYNASNISNSRHDSDEISGKMNTYMNSTTSKKDTGVQTDDLNIGIFTNAESHCGSLMERDITNCSSPEISAELIGQFSTKKNKQELTQDKGASLEKENNRCNDQCNQFTRIEKQTKHMKKYPKRPDWNINKPPKRYIPASEKYPKQLQKQREEKKVRRQMELLHLVEKNNPGHLSQNRGISPEIFHSSHQETESKLRWHLVKKEEEPLNIHSFSKERSPSSPVPVVKNRTQQTQNTLHLPLKNSSYERENLISGSNQTELSSGISESSHFIPYVRTNEIYYLDPDAPLSGPSTQDPQYQNSQDCGQKRQLFDSDCVRDPLLNPNMVKNRDRQQAILKGLSELRQGLLQKQKELESSLLPLAENQEESFGSSF

SEQ ID NO: 18656 - protein, 60 aa, Homo sapiens
  Payload ID: 3742
  Gene Symbol: CCDC66
  Gene Name: coiled-coil domain containing 66
  ENSP ID: ENSP00000390652
MNLGDGLKLETELLDGKTKLILSPYEHKSKISVKCLKVFACLWIEPSLDDVPLYPSTLSP

SEQ ID NO: 18657 - protein, 60 aa, Homo sapiens; identical to SEQ ID NO: 18656
  Payload ID: 3742
  Gene Symbol: CCDC66
  Gene Name: coiled-coil domain containing 66
  ENSP ID: ENSP00000394704

SEQ ID NO: 18658 - protein, 633 aa, Homo sapiens
  Payload ID: 3742
  Gene Symbol: CCDC66
  Gene Name: coiled-coil domain containing 66
  ENSP ID: ENSP00000401451
MNLGDGLKLETELLDGKTKLILSPYEHKSKISVKMGNKAKIAKCPLRTKTGHILKSTQDTCIGSEKLLQKKPVGSETSQAKGEKNGMTFSSTKDLCKQCIDKDCLHIQKEISPATPNMQKTRNTVNTSLVGKQKPHKKHITAENMKSSLVCLTQDQLQQILMTVNQGNRSLSLTENGKEAKSQYSLYLNSISNQPKDENIMGLFKKTEMVSSVPAENKSVLNEHQETSKQCEQKIAIENEWKPADIFSTLGERECDRSSLEAKKAQWRKELDEQVALKKKEKEVSEKWNDPWKKSESDKIIWEKHQILDQSRGEEHDRWAMHFDSLKSYPGSQSQLFSQSTHKQPEYFCVSPDTQELADVSSVCTPTTGSQVEPSEEEHIAKPIKDVVMANSKKTNFLRSMTALLDPAQIEERDRRRQKQLEHQKAITAQVEEKRRKKQLEEEQRKKEEQEEELRLAQEREEMQKQYEEDILKQKQKEEIMTLKTNELFQTMQRAQELAQRLKQEQRIRELAQKGHDTSRLIKNLGVDTIQMEYNASNISNSRHDSDEISGKMNTYMNSTTSKKDTGVQTDDLNIGIFTNAESHCGSLMERDITNCSSPEISAELIGQFSTKKNKQELTQDKGASLEKENNRC

SEQ ID NO: 18659 - protein, 38 aa, Homo sapiens
  Payload ID: 3742
  Gene Symbol: CCDC66
  Gene Name: coiled-coil domain containing 66
  ENSP ID: ENSP00000410510
MNLGDGLKLETELLDGKTKLILSPYEHKSKISVKADLL

SEQ ID NO: 18660 - protein, 287 aa, Homo sapiens
  Payload ID: 3742
  Gene Symbol: CCDC66
  Gene Name: coiled-coil domain containing 66
  ENSP ID: ENSP00000420192
MGNKAKIAKCPLRTKTGHILKSTQDTCIGSEKLLQKKPVGSETSQAKGEKNGMTFSSTKDLCKQCIDKDCLHIQKEISPATPNMQKTRNTVNTSLVGKQKPHKKHITAENMKSSLVCLTQDQLQQILMTVNQGNRSLSLTENGKEAKSQYSLYLNSISNQPKDENIMGLFKKTEMVSSVPAENKSVLNEHQETSKQCEQKIAIENEWKPADIFSTLGERECDRSSLEAKKAQWRKELDEQVALKKKEKEVSEKWNDPWKKSESDKIIWEKHQILDQSRLFKHSITVS

SEQ ID NO: 18661 - protein, 604 aa, Homo sapiens
  Payload ID: 3743
  Gene Symbol: CCDC67
  Gene Name: coiled-coil domain containing 67
  Uniprot ID: Q05D60
  ENSP ID: ENSP00000298050
MENQAHNTMGTSPCEAELQELMEQIDIMVSNKKMDWERKMRALETRLDLRDQELANAQTCLDQKGQEVGLLRQKLDSLEKCNLAMTQNYEGQLQSLKAQFSKLTNNFEKLRLHQMKQNKVPRKELPHLKEEIPFELSNLNQKLEEFRAKSREWDKQEILYQTHLISLDAQQKLLSEKCNQFQKQAQSYQTQLNGKKQCLEDSSSEIPRLICDPDPNCEINERDEFIIEKLKSAVNEIALSRNKLQDENQKLLQELKMYQRQCQAMEAGLSEVKSELQSRDDLLRIIEMERLQLHRELLKIGECQNAQGNKTRLESSYLPSIKEPERKIKELFSVMQDQPNHEKELNKIRSQLQQVEEYHNSEQERMRNEISDLTEELHQKEITIATVTKKAALLEKQLKMELEIKEKMLAKQKVSDMKYKAVRTENTHLKGMMGDLDPGEYMSMDFTNREQSRHTSINKLQYENERLRNDLAKLHVNGKSTWTNQNTYEETGRYAYQSQIKVEQNEERLSHDCEPNRSTMPPLPPSTFQAKEMTSPLVSDDDVFPLSPPDMSFPASLAAQHFLLEEEKRAKELEKLLNTHIDELQRHTEFTLNKYSKLKQNRHI

SEQ ID NO: 18662 - protein, 553 aa, Homo sapiens
  Payload ID: 3743
  Gene Symbol: CCDC67
  Gene Name: coiled-coil domain containing 67
  ENSP ID: ENSP00000431946
MEQIDIMVSNKKMDWERKMRALETRLDLRDQELANAQTCLDQKGQEVGLLRQKLDSLEKCNLAMTQNYEGQLQSLKAQFSKLTNNFEKLRLHQMKQNKVPRKELPHLKEEIPFELSNLNQKLEEFRAKSREWDKQEILYQTHLISLDAQQKLLSEKCNQFQKQAQSYQTQLNGKKQCLEDSSSEIPRLICDPDPNCEINERDEFIIEKLKSAVNEIALSRNKLQDENQKLLQELKMYQRQCQAMEAGLSEVKSELQSRDDLLRIIEMERLQLHRELLKIGECQNAQGNKTRLESSYLPSIKEPERKIKELFSVMQDQPNHEKELNKIRSQLQQVEEYHNSEQERMRNEISDLTEELHQKEITIATVTKKAALLEKQLKMELEIKEKMLAKQKVSDMKYKAVRTENTHLKGMMGDLDPGEYMSMDFTNREQSRHTSINKLQYENERLRNDLAKLHVNGKSTWTNQNTYEETGRYAYQSQIKVEQNEERLSHDCEPNRSTMPPLPPSTFQAKEMTSPLVSDDDVFPLVSCWLWAFFFFNGLLLYSYTDVNKLTYI

SEQ ID NO: 18663 - protein, 348 aa, Homo sapiens
  Payload ID: 3743
  Gene Symbol: CCDC67
  Gene Name: coiled-coil domain containing 67
  ENSP ID: ENSP00000432111
MENQAHNTMGTSPCEAELQELMEQIDIMVSNKKMDWERKMRALETRLDLRDQELANAQTCLDQKGQEVGLLRQKLDSLEKCNLAMTQNYEGQLQSLKAQFSKLTNNFEKLRLHQMKQNKVPRKELPHLKEEIPFELSNLNQKLEEFRAKSREWDKQEILYQTHLISLDAQQKLLSEKCNQFQKQAQSYQTQLNGKKQCLEDSSSEIPRLICDPDPNCEINERDEFIIEKLKSAVNEIALSRNKLQDENQKLLQELKMYQRQCQAMEAGLSEVKSELQSRDDLLRIIEMERLQLHRELLKIGECQNAQGNKTRLESSYLPSIKEPERKIKELFSVMQDQPNHEKELNKR

SEQ ID NO: 18664 - protein, 106 aa, Homo sapiens
  Payload ID: 3743
  Gene Symbol: CCDC67
  Gene Name: coiled-coil domain containing 67
  ENSP ID: ENSP00000433002
MENQAHNTMGTSPCEAELQELMEQIDIMVSNKKMDWERKMRALETRLDLRDQELANAQTCLDQKGQEVGLLRQKLDSLEKCNLAMTQNYEGQLQSLKAQVRKLIII

SEQ ID NO: 18665 - protein, 53 aa, Homo sapiens
  Payload ID: 3743
  Gene Symbol: CCDC67
  Gene Name: coiled-coil domain containing 67
  ENSP ID: ENSP00000433254
MENQAHNTMGLKCKTSITTCLSSLSDWTYTSSLENASASLKKNSVVRALTNLS

SEQ ID NO: 18666 - protein, 445 aa, Homo sapiens
  Payload ID: 3743
  Gene Symbol: CCDC67
  Gene Name: coiled-coil domain containing 67
  ENSP ID: ENSP00000433537
MENQAHNTMGTSPCEAELQELMEQIDIMVSNKKMDWERKMRALETRLDLRDQELANAQTCLDQKGQEVGLLRQKLDSLEKCNLAMTQNYEGQLQSLKAQFSKLTNNFEKLRLHQMKQNKVPRKELPHLKEEIPFELSNLNQKLEEFRAKSREWDKQEILYQTHLISLDAQQKLLSEKCNQFQKQAQSYQTQLNGKKQCLEDSSSEIPRLICDPDPNCEINERDEFIIEKLKSAVNEIALSRNKLQDENQKLLQELKMYQRQCQAMEAGLSEVKSELQSRDDLLRIIEMERLQLHRELLKIGECQNAQGNKTRLESSYLPSIKEPERKIKELFSVMQDQPNHEKELNKIRSQLQQVEEYHNSEQERMRNEISDLTEELHQKEITIATVTKKAALLEKQLKMELEIKEKMLAKQKVSDMKYKAVRTENTHLKGMMGDLDPGEYMVIC

SEQ ID NO: 18667 - protein, 329 aa, Homo sapiens
  Payload ID: 3743
  Gene Symbol: CCDC67
  Gene Name: coiled-coil domain containing 67
  ENSP ID: ENSP00000434635
MENQAHNTMGTSPCEAELQELMEQIDIMVSNKKMDWERKMRALETRLDLRDQELANAQTCLDQKGQEVGLLRQKLDSLEKCNLAMTQNYEGQLQSLKAQFSKLTNNFEKLRLHQMKQNKVPRKELPHLKEEIPFELSNLNQKLEEFRAKSREWDKQEILYQTHLISLDAQQKLLSEKCNQFQKQAQSYQTQLNGKKQCLEDSSSEIPRLICDPDPNCEINERDEFIIEKLKSAVNEIALSRNKLQDENQKLLQELKMYQRQCQAMEAGLSEVKSELQSRDDLLRIIEMERLQLHRELLKIGECQNAQGNKTRLESSYLPSIKEPERKIK

SEQ ID NO: 18668 - protein, 346 aa, Homo sapiens
  Payload ID: 3743
  Gene Symbol: CCDC67
  Gene Name: coiled-coil domain containing 67
  ENSP ID: ENSP00000435079
MGEFMAMEAGLSEVKSELQSRDDLLRIIEMERLQLHRELLKIGECQNAQGNKTRLESSYLPSIKEPERKIKELFSVMQDQPNHEKELNKIRSQLQQVEEYHNSEQERMRNEISDLTEELHQKEITIATVTKKAALLEKQLKMELEIKEKMLAKQKVSDMKYKAVRTENTHLKGMMGDLDPGEYMSMDFTNREQSRHTSINKLQYENERLRNDLAKLHVNGKSTWTNQNTYEETGRYAYQSQIKVEQNEERLSHDCEPNRSTMPPLPPSTFQAKEMTSPLVSDDDVFPLSPPDMSFPASLAAQHFLLEEEKRAKELEKLLNTHIDELQRHTEFTLNKYSKLKQNRHI

SEQ ID NO: 18669 - protein, 502 aa, Homo sapiens
  Payload ID: 3743
  Gene Symbol: CCDC67
  Gene Name: coiled-coil domain containing 67
  ENSP ID: ENSP00000435527
MENQAHNTMGTSPCEAELQELMEQIDIMVSNKKMDWERKMRALETRLDLRDQELANAQTCLDQKGQEVGLLRQKLDSLEKCNLAMTQNYEGQLQSLKAQFSKLTNNFEKLRLHQMKQNKVPRKELPHLKEEIPFELSNLNQKLEEFRAKSREWDKQEILYQTHLISLDAQQKLLSEKCNQFQKQAQSYQTQLNGKKQCLEDSSSEIPRLICDPDPNCEINERDEFIIEKLKSAVNEIALSRNKLQDENQKLLQELKMYQRQCQAMEAGLSEVKSELQSRDDLLRIIEMERLQLHRELLKIGECQNAQGNKTRLESSYLPSIKEPERKIKELFSVMQDQPNHEKELNKIRSQLQQVEEYHNSEQERMRNEISDLTEELHQKEITIATVTKKAALLEKQLKMELEIKEKMLAKQKVSDMKYKAVRTENTHLKGMMGDLDPGEYMSMDFTNREQSRHTSINKLQYENERLRNDLAKLHVNGKSTWTNQNTYEETGRYAYQSQIKT

SEQ ID NO: 18670 - protein, 599 aa, Homo sapiens
  Payload ID: 3743
  Gene Symbol: CCDC67
  Gene Name: coiled-coil domain containing 67
  ENSP ID: ENSP00000479457
MENQAHNTMGTSPCEAELQELMEQIDIMVSNKKMDWERKMRALETRLDLRDQELANAQTCLDQKGQEVGLLRQKLDSLEKCNLAMTQNYEGQLQSLKAQFSKLTNNFEKLRLHQMKQNKVPRKELPHLKEEIPFELSNLNQKLEEFRAKSREWDKQEILYQTHLISLDAQQKLLSEKCNQFQKQAQSYQTQLNGKKQCLEDSSSEIPRLICDPDPNCEINERDEFIIEKLKSAVNEIALSRNKLQDENQKLLQELKMYQRQCQAMEAGLSEVKSELQSRDDLLRIIEMERLQLHRELLKIGECQNAQGNKTRLESSYLPSIKEPERKIKELFSVMQDQPNHEKELNKIRSQLQQVEEYHNSEQERMRNEISDLTEELHQKEITIATVTKKAALLEKQLKMELEIKEKMLAKQKVSDMKYKAVRTENTHLKGMMGDLDPGEYMSMDFTNREQSRHTSINKLQYENERLRNDLAKLHVNGKSTWTNQNTYEETGRYAYQSQIKVEQNEERLSHDCEPNRSTMPPLPPSTFQAKEMTSPLVSDDDVFPLSPPDMSFPASLAAQHFLLEEEKRAKELEKLLNTHIDELQRHTEFTLNKYSKLK

SEQ ID NO: 18671 - protein, 335 aa, Homo sapiens
  Payload ID: 3744
  Gene Symbol: CCDC68
  Gene Name: coiled-coil domain containing 68
  Uniprot ID: Q9H2F9
  ENSP ID: ENSP00000337209
MTTVTVTTEIPPRDKMEDNSALYESTSAHIIEETEYVKKIRTTLQKIRTQMFKDEIRHDSTNHKLDAKHCGNLQQGSDSEMDPSCCSLDLLMKKIKGKDLQLLEMNKENEVLKIKLQASREAGAAALRNVAQRLFENYQTQSEEVRKKQEDSKQLLQVNKLEKEQKLKQHVENLNQVAEKLEEKHSQITELENLVQRMEKEKRTLLERKLSLENKLLQLKSSATYGKSCQDLQREISILQEQISHLQFVIHSQHQNLRSVIQEMEGLKNNLKEQDKRIENLREKVNILEAQNKELKTQVALSSETPRTKVSKAVSTSELKTEGVSPYLMLIRLRK

SEQ ID NO: 18672 - protein, 335 aa, Homo sapiens; identical to SEQ ID NO: 18671
  Payload ID: 3744
  Gene Symbol: CCDC68
  Gene Name: coiled-coil domain containing 68
  Uniprot ID: Q9H2F9
  ENSP ID: ENSP00000413406

SEQ ID NO: 18673 - protein, 335 aa, Homo sapiens; identical to SEQ ID NO: 18671
  Payload ID: 3744
  Gene Symbol: CCDC68
  Gene Name: coiled-coil domain containing 68
  Uniprot ID: Q9H2F9
  ENSP ID: ENSP00000466690

SEQ ID NO: 18674 - protein, 203 aa, Homo sapiens
  Payload ID: 3744
  Gene Symbol: CCDC68
  Gene Name: coiled-coil domain containing 68
  ENSP ID: ENSP00000466731
  MOD_RES (1)..(1): Any amino acid
XLFENYQTQSEEVRKKQEDSKQLLQVNKLEKEQKLKQHVENLNQVAEKLEEKHSQITELENLVQRMEKEKRTLLERKLSLENKLLQLKSSATYGKSCQDLQREISILQEQISHLQFVIHSQHQNLRSVIQEMEGLKNNLKEQDKRIENLREKVNILEAQNKELKTQVALSSETPRTKVSKAVSTSELKTEGVSPYLMLIRLRK

SEQ ID NO: 18675 - protein, 296 aa, Homo sapiens
  Payload ID: 3745
  Gene Symbol: CCDC69
  Gene Name: coiled-coil domain containing 69
  Uniprot ID: A6NI79
  ENSP ID: ENSP00000347586
MGCRHSRLSSCKPPKKKRQEPEPEQPPRPEPHELGPLNGDTAITVQLCASEEAERHQKDITRILQQHEEEKKKWAQQVEKERELELRDRLDEQQRVLEGKNEEALQVLRASYEQEKEALTHSFREASSTQQETIDRLTSQLEAFQAKMKRVEESILSRNYKKHIQDYGSPSQFWEQELESLHFVIEMKNERIHELDRRLILMETVKEKNLILEEKITTLQQENEDLHVRSRNQVVLSRQLSEDLLLTREALEKEVQLRRQLQQEKEELLYRVLGANASPAFPLAPVTPTEVSFLAT

SEQ ID NO: 18676 - protein, 88 aa, Homo sapiens
  Payload ID: 3745
  Gene Symbol: CCDC69
  Gene Name: coiled-coil domain containing 69
  ENSP ID: ENSP00000428588
KRQEPEPEQPPRPEPHELGPLNGDTAITVQLCASEEAERHQKDITRILQQHEEEKKKWAQQSSGPHMNRRKKRLPTLSGRPVLPSRRP

SEQ ID NO: 18677 - protein, 47 aa, Homo sapiens
  Payload ID: 3745
  Gene Symbol: CCDC69
  Gene Name: coiled-coil domain containing 69
  ENSP ID: ENSP00000430436
MGCRHSRLSSCKPPKKAIPPSLLQPPLHCLLKNRGWCGGLQVLTQAS

SEQ ID NO: 18678 - protein, 186 aa, Homo sapiens
  Payload ID: 3745
  Gene Symbol: CCDC69
  Gene Name: coiled-coil domain containing 69
  ENSP ID: ENSP00000430549
  MOD_RES (1)..(1): Any amino acid
XKRQEPEPEQPPRPEPHELGPLNGDTAITVQLCASEEAERHQKDITRILQQHEEEKKKWAQQVEKERELELRDRLDEQQRVLEGKNEEALQVLRASYEQEKEALTHSFREASSTQQETIDRLTSQLEAFQAKMKRVEESILSRNYKKHIQDYGSPSQFWEQELESLHFVIEMKNERIHELDRKRKI

SEQ ID NO: 18679 - protein, 486 aa, Homo sapiens
  Payload ID: 3746
  Gene Symbol: CCDC7
  Gene Name: coiled-coil domain containing 7
  Uniprot ID: Q96M83
  ENSP ID: ENSP00000277657
MKPVKHLLTTSNKSANVPALTTKKGLHNLPLSPELKEKHNAKLIHDKIEPMVLRSPPTGESILRYALPIPSSKTKNLLPEDEMIGKIIKHLKMVVSTLEETYGHCDQNGEEPFVKHEHEELSLSVGDDMNSFLTYCSQFAAQLEEALKEEQNILESLFKWFQWQVNQMEEISKDQTLLQAEPPKPDKTVILNIAEIVRLVQRFEELKNRLKQRSKSSVKVMLSKTMDKENRPEAVKSCEALAQKIEEFLEAHSTDEFKDVSATEPQTAHSMTNRFNAMLKVFENQANMLERAVNDQVLLDAEYKQMQCDFQLLSEEKLVLENELQKLKDKEKTKPTNNRTKKAVKTVKKKDKGKSEDSEKKMSPEKEFKIKEDLDQVQKVARLEIENKVLQEQLKQALQEAEKAKHQLNYFLNQEKLLKSEGKTETTMQVGNSQTKVKGEDSKNIPLEKETRKSLVSDSGGQRTSDKIQEYPQITAQSGRLIEKRC

SEQ ID NO: 18680 - protein, 647 aa, Homo sapiens
  Payload ID: 3746
  Gene Symbol: CCDC7
  Gene Name: coiled-coil domain containing 7
  ENSP ID: ENSP00000303710
  MOD_RES (1)..(1): Any amino acid
XLSKTKLQIKKQETSTEQPLTTPDKEPNENLILRHQDSMSKSEMQVKEQRTLKGQRIITHDEEPGKNLVLEHQDSVSKLEMQIEKTKKLPREKRHSTHDEESGENPMLKHQDSVSKIQVQLEIQETSEGEGRSIPDKNSMFVHQDSVSKLQMQEKKKITPGRERRNNSKSKLQMQEKKQINSGVERHKTFPLEIKKKDISLEHLLPEEKVLLSRSESQTKKLQAKVTSRKIKNEAASELPDTAENLPAMYPSISDLIIQFDLNKVVETDIESLRGALGRRLLNDEFKTQSKSFPGPDIEQLTDAFGRDILKDEFKTRSKSLPETDERLHSTTERGTINDAIKTQLKRKSYPETVLKHLKGVNGKDIIKHLINIQSKSHGETDKEHLADDTGRGIIKGSINAQLKGHQKTDKNFFAYATGRGLMKESTTTQLKSHPETDKEFLADAIGRGIIIGPITTQLKSHRETDKELLKDAIGRDIIKGPISAQLKSHQETDVEPLTNAIGSSKTIGEIKTQLRTHYDVNLFKNKDMSVQRQEGIFTRSITPSKFPTKVINLSPFENKEETYEYSSPYVTAPSKAIYRTYRAGPSFSKDIHLPLLNQLPSGHSKVVTLSQKTIEFTLPTVTNTVGKPTYKVLHAAARKSVPHPYF

SEQ ID NO: 18681 - protein, 486 aa, Homo sapiens; identical to SEQ ID NO: 18679
  Payload ID: 3746
  Gene Symbol: CCDC7
  Gene Name: coiled-coil domain containing 7
  Uniprot ID: Q96M83
  ENSP ID: ENSP00000355078

SEQ ID NO: 18682 - protein, 628 aa, Homo sapiens
  Payload ID: 3746
  Gene Symbol: CCDC7
  Gene Name: coiled-coil domain containing 7
  Uniprot ID: Q9H943
  ENSP ID: ENSP00000364165
MTEEQTYQAAEKSQAHNEVPNERLVVEHQESLSKTKLQIKKQETSTEQPLTTPDKEPNENLILRHQDSMSKSEMQVKEQRTLKGQRIITHDEEPGKNLVLEHQDSVSKLEMQIEKTKKLPREKRHSTHDEESGENPMLKHQDSVSKIQVQLEIQETSEGEGRSIPDKNSMFVHQDSVSKLQMQEKKKITPGRERRNTRIVVPNENVISVHQDSKSKLQMQEKKQINSGVERHKTFPLEIKKKDISLEHLLPEEKVLLSRSESQTKKLQAKVTSRKKTDIESLRGALGRRLLNDEFKTQSKSFPGPDIEQLTDAFGRDILKDEFKTRSKSLPETDERLHSTTERGTINDAIKTQLKRKSYPETVLKHLKGVNGKDIIKHLINIQSKSHGETDKNFFAYATGRGLMKESTTTQLKSHPETDKEFLADAIGRGIIIGPITTQLKSHRETDKELLKDAIGRDIIKGPISAQLKSHQETDVEPLTNAIGSSKTIGEIKTQLRTHYDVNLFKNKDMSVQRQEGIFTRSITPSKFPTKVINLSPFENKEETYEYSSPYVTAPSKAIYRTYRAGPSFSKDIHLPLLNQLPSGHSKVVTLSQKTIEFTLPTVTNTVGKPTYKVLHAAARKSVPHPYF

SEQ ID NO: 18683 - protein, 632 aa, Homo sapiens
  Payload ID: 3746
  Gene Symbol: CCDC7
  Gene Name: coiled-coil domain containing 7
  ENSP ID: ENSP00000364168
MVPASASGEGLRELLLVQEGEVGADMSHAHNEVPNERLVVEHQESLSKTKLQIKKQETSTEQPLTTPDKEPNENLILRHQDSMSKSEMQVKEQRTLKGQRIITHDEESGENPMLKHQDSVSKIQVQLEIQETSEGEGRSIPDKNSMFVHQDSVSKLQMQEKKKITPGRERRNTRIVVPNENVISVHQDSKSKLQMQEKKQINSGVERHKTFPLEIKKKDISLEHLLPEEKVLLSRSESQTKKLQAKVTSRKKTDIESLRGALGRRLLNDEFKTQSKSFPGPDIEQLTDAFGRDILKDEFKTRSKSLPETDERLHSTTERGTINDAIKTQLKRKSYPETVLKHLKGVNGKDIIKHLINIQSKSHGETDKEHLADDTGRGIIKGSINAQLKGHQKTDKNFFAYATGRGLMKESTTTQLKSHPETDKEFLADAIGRGIIIGPITTQLKSHRETDKELLKDAIGRDIIKGPISAQLKSHQETDVEPLTNAIGSSKTIGEIKTQLRTHYDVNLFKNKDMSVQRQEGIFTRSITPSKFPTKVINLSPFENKEETYEYSSPYVTAPSKAIYRTYRAGPSFSKDIHLPLLNQLPSGHSKVVTLSQKTIEFTLPTVTNTVGKPTYKVLHAAARKSVPHPYF

SEQ ID NO: 18684 - protein, 587 aa, Homo sapiens
  Payload ID: 3746
  Gene Symbol: CCDC7
  Gene Name: coiled-coil domain containing 7
  ENSP ID: ENSP00000364170
MEEHSMLMGRKNQYRENGHTAQAHNEVPNERLVVEHQESLSKTKLQIKKQETSTEQPLTTPDKEPNENLILRHQDSMSKSEMQVKEQRTLKGQRIITHDEEPGKNLVLEHQDSVSKLEMQIEKTKKLPREKRHSTHDEESGENPMLKHQDSVSKIQVQLEIQETSEGEGRSIPDKNSMFVHQDSVSKLQMQEKKKITPGRERRNTRIVVPNENVISVHQDSKSKLQMQEKKQINSGVERHKTFPLEIKKKDISLEHLLPEEKVLLSRSESQTKKLQAKVTSRKIKNEAASELPDTAENLPAMYPSISDLIIQFDLNKVVETVLKHLKGVNGKDIIKHLINIQSKSHGETDKNFFAYATGRGLMKESTTTQLKSHPETDKEFLADAIGRGIIIGPITTQLKSHRETDKELLKDAIGRDIIKGPISAQLKSHQETDVEPLTNAIGSSKTIGEIKTQLRTHYDVNLFKNKDMSVQRQEGIFTRSITPSKFPTKVINLSPFENKEETYEYSSPYVTAPSKAIYRTYRAGPSFSKDIHLPLLNQLPSGHSKVVTLSQKTIEFTLPTVTNTVGKPTYKVLHAAARKSVPHPYF

SEQ ID NO: 18685 - protein, 160 aa, Homo sapiens
  Payload ID: 3746
  Gene Symbol: CCDC7
  Gene Name: coiled-coil domain containing 7
  ENSP ID: ENSP00000401923
KTKPTNNRTKKAVKTVKKKDKGKSEDSEKKMSPEKEFKIKEDLDQVQKVARLEIENKVLQEQLKQALQEAEKAKHQLNYFLNQEKLLKSEGKTETTMQVGNSQTKVKGEDSKNIPLEKETRKSLVSDSGGQRTSDKIQEYPQMLIEFLKYFGKVSQTFRE

SEQ ID NO: 18686 - protein, 267 aa, Homo sapiens
  Payload ID: 3746
  Gene Symbol: CCDC7
  Gene Name: coiled-coil domain containing 7
  Uniprot ID: Q96M83
  ENSP ID: ENSP00000436435
MKPVKHLLTTSNKSANVPALTTKKGLHNLPLSPELKEKHNAKLIHDKIEPMVLRSPPTGESILRYALPIPSSKTKNLLPEDEMIGKIIKHLKMVVSTLEETYGHCDQNGEEPFVKHEHEELSLSVGDDMNSFLTYCSQFAAQLEEALKEEQNILESLFKWFQWQVNQMEEISKDQTLLQAEPPKPDKTVILNIAEIVRLVQRFEELKNRLKQRSKSSVKVMLSKTMDKENRPEAVKSCEALAQKIEEFLEAHSTDEFKDVSATEPQL

SEQ ID NO: 18687 - protein, 171 aa, Homo sapiens
  Payload ID: 3746
  Gene Symbol: CCDC7
  Gene Name: coiled-coil domain containing 7
  ENSP ID: ENSP00000439930
MKPVKHLLTTSNKSANVPALTTKKGLHNLPLSPELKEKHNAKLIHDKIEPMVLRSPPTGESILRYALPIPSSKTKNLLPEDEMIGKIIKHLKMVVSTLEETYGHCDQNGEEPFVKHEHEELSLSVGDDMNSFLTYCSQFAAQLEEALKEEQNILESLFKWFQWQVNQMEEG

SEQ ID NO: 18688 - protein, 175 aa, Homo sapiens
  Payload ID: 3746
  Gene Symbol: CCDC7
  Gene Name: coiled-coil domain containing 7
  ENSP ID: ENSP00000440632
MKPVKHLLTTSNKSANVPALTTKKGLHNLPLSPELKEKHNAKLIHDKIEPMVLRSPPTGESILRYALPIPSSKTKNLLPEDEMIGKIIKHLKMVVSTLEETYGHCDQNGEEPFVKHEHEELSLSVGDDMNSFLTYCSQFAAQLEEALKEEQNILESLFKWFQWQVNQMEEKLLIQ

SEQ ID NO: 18689 - protein, 173 aa, Homo sapiens
  Payload ID: 3746
  Gene Symbol: CCDC7
  Gene Name: coiled-coil domain containing 7
  ENSP ID: ENSP00000441041
MKPVKHLLTTSNKSANVPALTTKKGLHNLPLSPELKEKHNAKLIHDKIEPMVLRSPPTGESILRYALPIPSSKTKNLLPEDEMIGKIIKHLKMVVSTLEETYGHCDQNGEEPFVKHEHEELSLSVGDDMNSFLTYCSQFAAQLEEALKEEQNILESLFKWFQWQVNQMEESCK

SEQ ID NO: 18690 - protein, 171 aa, Homo sapiens; identical to SEQ ID NO: 18687
  Payload ID: 3746
  Gene Symbol: CCDC7
  Gene Name: coiled-coil domain containing 7
  ENSP ID: ENSP00000442531

SEQ ID NO: 18691 - protein, 499 aa, Homo sapiens
  Payload ID: 3746
  Gene Symbol: CCDC7
  Gene Name: coiled-coil domain containing 7
  ENSP ID: ENSP00000485403
RRNTRIVVPNENVISVHQDSKSKLQMQEKKQINSGVERHKTFPLEIKKKDISLEHLLPEEKVLLSRSESQTKKLQAKVTSRKIKNEAASELPDTAENLPAMYPSISDLIIQFDLNKVVETDIESLRGALGRRLLNDEFKTQSKSFPGPDIEQLTDAFGRDILKDEFKTRSKSLPETDERLHSTTERGTINDAIKTQLKRKSYPETVLKHLKGVNGKDIIKHLINIQSKSHGETDKEHLADDTGRGIIKGSINAQLKGHQKTDKNFFAYATGRGLMKESTTTQLKSHPETDKEFLADAIGRGIIIGPITTQLKSHRETDKELLKDAIGRDIIKGPISAQLKSHQETDVEPLTNAIGSSKTIGEIKTQLRTHYDVNLFKNKDMSVQRQEGIFTRSITPSKFPTKVINLSPFENKEETYEYSSPYVTAPSKAIYRTYRAGPSFSKDIHLPLLNQLPSGHSKVVTLSQKTIEFTLPTVTNTVGKPTYKVLHAAARKSVPHPYF

SEQ ID NO: 18692 - protein, 233 aa, Homo sapiens
  Payload ID: 3747
  Gene Symbol: CCDC70
  Gene Name: coiled-coil domain containing 70
  Uniprot ID: Q6NSX1
  ENSP ID: ENSP00000242819
MATPPFRLIRKMFSFKVSRWMGLACFRSLAASSPSIRQKKLMHKLQEEKAFREEMKIFREKIEDFREEMWTFRGKIHAFRGQILGFWEEERPFWEEEKTFWKEEKSFWEMEKSFREEEKTFWKKYRTFWKEDKAFWKEDNALWERDRNLLQEDKALWEEEKALWVEERALLEGEKALWEDKTSLWEEENALWEEERAFWMENNGHIAGEQMLEDGPHNANRGQRLLAFSRGRA

SEQ ID NO: 18693 - protein, 467 aa, Homo sapiens
  Payload ID: 3748
  Gene Symbol: CCDC71
  Gene Name: coiled-coil domain containing 71
  Uniprot ID: Q8IV32
  ENSP ID: ENSP00000319006
MSVVVQHVEEKAVHSWSRISTAGKKALEEALLVFNPMSQDLSATEAQLVAFLQGLRDDGFQPTILRSGDVYGYSSCTANPPSQTKLQARAPNPTATSPPASAPRTAMRLPAGRATLLPMPLSGRLAKASTPALAKHATTNLLLSSLKQSSASHARGAAVGFPTHLYPGVYPAMRLSVVLEALVPLKTPMPCLGAKHKAQSLQLSLADSPLKLRKSSGKGPGNPRPKAPRKTTSKGPKCLTRKGPGAGPRRGSGHQSKTNRATGSPSVRRMKGGSALGTKTAQAKVARTLAKAARAQAKVARTQAKAAKARAKAKAAQVKAKAKAKAAQVKAKAKVMAAWAKAKAKAKAVRAKAKVARTQPRGRGRPKGSAKARTTRKGQKNRPETVGQKRKRAEEAKDLPPKKRTRLGPRSPKAWLGPGTAKLLKFRAIKVDRRSSDDEVRQRAQRILRVNLSPVIRLQPLLPYSAV

SEQ ID NO: 18694 - protein, 235 aa, Homo sapiens
  Payload ID: 3749
  Gene Symbol: CCDC71L
  Gene Name: coiled-coil domain containing 71-like
  Uniprot ID: Q8N9Z2
  ENSP ID: ENSP00000430897
MRRSMKRRRRRRPVAPATAARGGDFRAEDGAGLEAREEKVVYSRSQLSLADSTKALGDAFKLFMPRSTEFMSSDAELWSFLCSLKHQFSPHILRSKDVYGYSSCRALVPDPPGPPTARGQARRPVPRAAARRRRRGARAAAARRRKPRPPPPPPPPPEESCPAKPVAPGPCFGGRTLEEIWRAATPTLTTFPTIRVGSDVWGERSLAAARRRARQVLRVNLEPMVRLRRFPVPRA

SEQ ID NO: 18695 - protein, 316 aa, Homo sapiens
  Payload ID: 3749
  Gene Symbol: CCDC71L
  Gene Name: coiled-coil domain containing 71-like
  ENSP ID: ENSP00000479540
MKRRRRRRPVAPATAARGGDFRAEDGAGLEAREEKVVYSRSQLSLADSTKALGDAFKLFMPRSTEFMSSDAELWSFLCSLKHQFSPHILRSKDVYGYSPYSPRPGAPAGSARSGQEEAPRSPGGRCPQEEAPAATPTAAAPRGELPGQARGPRALLRGPHLGGDLEGGHPDADHLPHHPRRQRRVGRAQPGGSAAQGAPGPASEPGTHGEAPPLPGAPGMRCGLQGASCRPRPWDRPSARRNEQVSVECLQIRPGPRPPMHFTREEVAGWLSLSRAAARSSWTLGQVCPLLPPVPGLRREGTAGPAGEVPFFLTTD

SEQ ID NO: 18696 - protein, 1079 aa, Homo sapiens
  Payload ID: 3750
  Gene Symbol: CCDC73
  Gene Name: coiled-coil domain containing 73
  Uniprot ID: Q6ZRK6
  ENSP ID: ENSP00000335325
MESNFNTESSSTFTLQSSSETLFSIQLLDFKTSLLEALEELRMRREAEIHYEEQIGKIIVETQELKWQKETLQNQKETLAEQHKEAMAVFKKQLQMKMCALEEEKGKYQLATEIKEKEIEGLKETLKALQVSKYSLQKKVSEMEQKVQLHLLAKEDYHKQLSEIEKYYATITGQFGLVKENHEKLEQNVREAIQSNKRLSALNKKQEAEICSLKKELKKAASDLIKSKVTCQYKMGEENINLTIKEQKFQELQERLNMELELNEKINEEITHIQEEKQDIIISFQHMQQLLRQQIQANTEMEAELKVLKENNQTLERDNELQREKVKENEEKFLNLQNEHEKALGTWKRHAEELNGEINKIKNELSSLKETHIKLQEHYNKLCNQKTFEEDKKFQNVPEVNNENSEMSTEKSENTIIQKYNTEQEIREENMENFCSDTEYREKEEKKEGSFIEEIIIDDLQLFEKSFKNEIDTVVSQDENQSEISLSKTLSLDKEVISQGQTSNVTDNRKSVTTEIKDKICLEKDNGCTEFKSPNNHFVVLDTAIETEKIHLERTRGLDVHHTDVNLEVENNKTSFNSILNETAHNTYHNNNKDVSENEPFKQFRLLPGTREHALEKEITNSDQTKADLDSSLDIKKNPVPCQKYSLRNSSNVMLDDKQCKIKQIQLLTKKSECSILLSKQTSDFLQVCNDTLEKSELTVPCDIVIDHHVSYAAFSANSKLLLKNSDKNVHSMSMLVKPNSSPGGKTMCKNMSDMQNSQFNNCLGYLENTNVNISHLHLNNENSHASQAKDVKTAVHMKTCTETEFSNKKNQIDENQVTEATKNDLFLFVSINERQHTLLNNTEKTESLNDIVSGKMFSEGQLEESHSFHIEPSGDLVNRSGRSTFDLSTSDKKTEKTPVYMNFSDPGPWSKVNHIESQTASSSTPCISLLLKERPLDPSENKKIISMALCKNIGVDDVGKDIGPDTTSINRVADTLNNWSIHPDPKGEPSEEKNAMAKTFYDSSFPTEHVKTKPLISTPLQSHLQAIKTTKNTSGDDDWQSLITNQLNKSENLLSLENDNQPKKRKAEETLEKNNRLK

SEQ ID NO: 18697 - protein, 115 aa, Homo sapiens
  Payload ID: 3750
  Gene Symbol: CCDC73
  Gene Name: coiled-coil domain containing 73
  ENSP ID: ENSP00000434365
  MOD_RES (1)..(1): Any amino acid
XAEELNGEINKIKNELSSLKETHIKLQEHYNKLCNQKTFEEDKKFQVKTKPLISTPLQSHLQAIKTTKNTSGDDDWQSLITNQLNKSENLLSLENDNQPKKRKAEETLEKNNRLK

SEQ ID NO: 18698 - protein, 158 aa, Homo sapiens
  Payload ID: 3750
  Gene Symbol: CCDC73
  Gene Name: coiled-coil domain containing 73
  ENSP ID: ENSP00000436440
MESNFNTESSSTFTLQSSSETLFSIQLLDFKTSLLEALEELRMRREAEIHYEEQIGKIIVETQELKWQKETLQNQKETLAEQHKEAMAVFKKQLQMKMCALEEEKGKYQLATEIKEKEIEGLKETLKALQVSKYSLQKKVSEMVRKLQNIFSPIWIST

SEQ ID NO: 18699 - protein, 378 aa, Homo sapiens
  Payload ID: 3751
  Gene Symbol: CCDC74A
  Gene Name: coiled-coil domain containing 74A
  Uniprot ID: Q96AQ1
  ENSP ID: ENSP00000295171
MSGAGVAAGTRPPSSPTPGSRRRRQRPSVGVQSLRPQSPQLRQSDPQKRNLDLEKSLQFLQQQHSEMLAKLHEEIEHLKRENKDLHYKLIMNQTSQKKDGPSGNHLSRASAPLGARWVCINGVWVEPGGPSPARLKEGSSRTHRPGGKRGRLAGGSADTVRSPADSLSMSSFQSVKSISNSGKARPQPGSFNKQDSKADVSQKADLEEEPLLHNSKLDKVPGVQGQARKEKAEASNAGAACMGNSQHQGRQMGAGAHPPMILPLPLRKPTTLRQCEVLIRELWNTNLLQTQELRHLKSLLEGSQRPQAAPEEASFPRDQEATHFPKVSTKSLSKKCLSPPVAERAILPALKQTPKNNFAERQKRLQAMQKRRLHRSVL

SEQ ID NO: 18700 - protein, 312 aa, Homo sapiens
  Payload ID: 3751
  Gene Symbol: CCDC74A
  Gene Name: coiled-coil domain containing 74A
  Uniprot ID: Q96AQ1
  ENSP ID: ENSP00000387009
MSGAGVAAGTRPPSSPTPGSRRRRQRPSVGVQSLRPQSPQLRQSDPQKRNLDLEKSLQFLQQQHSEMLAKLHEEIEHLKRENKDLHYKLIMNQTSQKKDSLSMSSFQSVKSISNSGKARPQPGSFNKQDSKADVSQKADLEEEPLLHNSKLDKVPGVQGQARKEKAEASNAGAACMGNSQHQGRQMGAGAHPPMILPLPLRKPTTLRQCEVLIRELWNTNLLQTQELRHLKSLLEGSQRPQAAPEEASFPRDQEATHFPKVSTKSLSKKCLSPPVAERAILPALKQTPKNNFAERQKRLQAMQKRRLHRSVL

SEQ ID NO: 18701 - protein, 135 aa, Homo sapiens
  Payload ID: 3751
  Gene Symbol: CCDC74A
  Gene Name: coiled-coil domain containing 74A
  ENSP ID: ENSP00000388252
MSGAGVAAGTRPPSSPTPGSRRRRQRPSVGVQSLRPQSPQLRQSDPQKRNLDLEKSLQFLQQQHSEMLAKLHEEIEHLKRENKGEPARGPRPALPPQAHSTLPLPQHRNTAINSSTRLGSGGTQDGSDTPLLKTL

SEQ ID NO: 18702 - protein, 206 aa, Homo sapiens
  Payload ID: 3751
  Gene Symbol: CCDC74A
  Gene Name: coiled-coil domain containing 74A
  ENSP ID: ENSP00000406839
MDEADMPGGLCLGNRQGHSWPDTHDEGVVESGIHGAGPNQPVGGQDFWAQQPGEDRPGFFSQNSCGFTSAEESVCLLSDLHYKLIMNQTSQKKDSLSMSSFQSVKSISNSGKARPQPGSFNKQDSKADVSQKADLEEEPLLHNSKLDKVPGVQGQASPPHLGSAKCSSASCGIPTSCRPKSCGTSSPSWKGARGPRQPRRKLAFPG

SEQ ID NO: 18703 - protein, 272 aa, Homo sapiens
  Payload ID: 3751
  Gene Symbol: CCDC74A
  Gene Name: coiled-coil domain containing 74A
  ENSP ID: ENSP00000444610
MSGAGVAAGTRPPSSPTPGSRRRRQRPSVGVQSLRPQSPQLRQSDPQKRNLDLEKSLQFLQQQHSEMLAKLHEEIEHLKRENKDLHYKLIMNQTSQKKDGPSGNHLSRASAPLGARWVCINGVWVEPGGPSPARLKEGSSRTHRPGGKRGRLAGGSADTVRSPADSLSMSSFQSVKSISNSGKARPQPGSFNKQDSKADVSQKADLEEEPLLHNSKLDKVPGVQGQASCGTSSPSWKGARGPRQPRRKLAFPGTKKPRISPRSPPRASPRNA

SEQ ID NO: 18704 - protein, 380 aa, Homo sapiens
  Payload ID: 3752
  Gene Symbol: CCDC74B
  Gene Name: coiled-coil domain containing 74B
  Uniprot ID: Q96LY2
  ENSP ID: ENSP00000308873
MSGAGVAAGTRPPSSPTPGSRRRRQRPSVGVQSLRPQSPQLRQSDPQKRNLDLEKSLQFLQQQHSEMLAKLHEEIEHLKRENKDLRYKLIMNQTSQKKDGPSGNHLSRASAPLGARWVCINGVWVEPGGPSPARLKEGSSRTHRPGGKHGRLAGGSADTVRSPADSLSTSSFQSVKSISNSGKARPQPGSFNKQDSKADVPQKADLEEEPLLHNSKLDKVPGVQGQARKEKAEASNAGAACMGNSQHQGRQMGAAAHPPMILPLPLRKPTTLRQCEVLIRELWNTNLLQTQELQHLKSLLEGSQRPQAVPEEASFPRDQEATHFPKVSTKSLSKKCLLLSPPVAERAILPALKQTPKNNFAERQKRLQAMQKRRLHRSVL

SEQ ID NO: 18705 - protein, 274 aa, Homo sapiens
  Payload ID: 3752
  Gene Symbol: CCDC74B
  Gene Name: coiled-coil domain containing 74B
  ENSP ID: ENSP00000376710
MSGAGVAAGTRPPSSPTPGSRRRRQRPSVGVQSLRPQSPQLRQSDPQKRNLDLEKSLQFLQQQHSEMLAKLHEEIEHLKRENKDLRYKLIMNQTSQKKDGPSGNHLSRASAPLGARWVCINGVWVEPGGPSPARLKEGSSRTHRPGGKHGRLAGGSADTVRSPADSLSTSSFQSVKSISNSGKARPQPGSFNKQDSKADVPQKADLEEEPLLHNSKLDKVPGVQGQASCSTSSPSWKGARGPRQSRRKLAFPGTKKPRISPRSPPRASPRNACF

SEQ ID NO: 18706 - protein, 314 aa, Homo sapiens
  Payload ID: 3752
  Gene Symbol: CCDC74B
  Gene Name: coiled-coil domain containing 74B
  Uniprot ID: Q96LY2
  ENSP ID: ENSP00000386294
MSGAGVAAGTRPPSSPTPGSRRRRQRPSVGVQSLRPQSPQLRQSDPQKRNLDLEKSLQFLQQQHSEMLAKLHEEIEHLKRENKDLRYKLIMNQTSQKKDSLSTSSFQSVKSISNSGKARPQPGSFNKQDSKADVPQKADLEEEPLLHNSKLDKVPGVQGQARKEKAEASNAGAACMGNSQHQGRQMGAAAHPPMILPLPLRKPTTLRQCEVLIRELWNTNLLQTQELQHLKSLLEGSQRPQAVPEEASFPRDQEATHFPKVSTKSLSKKCLLLSPPVAERAILPALKQTPKNNFAERQKRLQAMQKRRLHRSVL

SEQ ID NO: 18707 - protein, 225 aa, Homo sapiens
  Payload ID: 3752
  Gene Symbol: CCDC74B
  Gene Name: coiled-coil domain containing 74B
  ENSP ID: ENSP00000386303
MSGAGVAAGTRPPSSPTPGSRRRRQRPSVGVQSLRPQSPQLRQSDPQKRNLDLEKSLQFLQQQHSEMLAKLHEEIEHLKRENKDLRYKLIMNQTSQKKGENWALQFLMGCSCHPGEPLQTVLAHLAALAPVCQPSGDRFWGTWTDAATSSRGWMMLRSQAQHVLLSGSPGPEVIAVGRWAQGAPQTSLLQVELKWEGTPGTAPALLDLCLRLLLWPGPGSPALWL

SEQ ID NO: 18708 - protein, 204 aa, Homo sapiens
  Payload ID: 3752
  Gene Symbol: CCDC74B
  Gene Name: coiled-coil domain containing 74B
  ENSP ID: ENSP00000386644
MSGAGVAAGTRPPSSPTPGSRRRRQRPSVGVQSLRPQSPQLRQSDPQKRNLDLEKSLQFLQQQHSEMLAKLHEEIEHLKRENKGEPARGPRPALPPQAHSTLPLPQHRNTAINSSTRLGSGGTQDDLRYKLIMNQTSQKKDSLSTSSFQSVKSISNSGKARPQPGSFNKQDSKADVPQKADLEEEPLLHNSKLDKVPGVQGQAR

SEQ ID NO: 18709 - protein, 159 aa, Homo sapiens
  Payload ID: 3752
  Gene Symbol: CCDC74B
  Gene Name: coiled-coil domain containing 74B
  ENSP ID: ENSP00000396549
MSGAGVAAGTRPPSSPTPGSRRRRQRPSVGVQSLRPQSPQLRQSDPQKRNLDLEKSLQFLQQQHSEMLAKLHEEIEHLKRENKGEPARGPRPALPPQAHSTLPLPQHRNTAINSSTRLGSGGTQDDLRYKLIMNQTSQKKGENWALQFLMGCSCHPGEP

SEQ ID NO: 18710 - protein, 205 aa, Homo sapiens
  Payload ID: 3752
  Gene Symbol: CCDC74B
  Gene Name: coiled-coil domain containing 74B
  ENSP ID: ENSP00000399683
  MOD_RES (1)..(1): Any amino acid
XSGAGVAAGTRPPSSPTPGSRRRRQRPSVGVQSLRPQSPQLRQSDPQKRNLDLEKSLQFLQQQHSEMLAKLHEEIEHLKRENKGEPARGPRPALPPQAHSTLPLPQHRNTAINSSTRLGSGGTQDDLRYKLIMNQTSQKKDGPSGNHLSRASAPLGARWVCINGVWVEPGGPSPARLKEGSSRTHRPGGKHGRLAGGSADTVRSP

SEQ ID NO: 18711 - protein, 93 aa, Homo sapiens
  Payload ID: 3752
  Gene Symbol: CCDC74B
  Gene Name: coiled-coil domain containing 74B
  ENSP ID: ENSP00000404494
MSGAGVAAGTRPPSSPTPGSRRRRQRPSVGVQSLRPQSPQLRQSDPQKRNLDLEKSLQFLQQQHSEMLAKLHEEIEHLKRENKGSDTPLLKTL

SEQ ID NO: 18712 - protein, 115 aa, Homo sapiens
  Payload ID: 3752
  Gene Symbol: CCDC74B
  Gene Name: coiled-coil domain containing 74B
  ENSP ID: ENSP00000410864
MSGAGVAAGTRPPSSPTPGSRRRRQRPSVGVQSLRPQSPQLRQSDPQKRNLDLEKSLQFLQQQHSEMLAKLHEEIEHLKRENKDLRYKLIMNQTSQKKGPLLPWALAGSASTECG

SEQ ID NO: 18713 - protein, 488 aa, Homo sapiens
  Payload ID: 3753
  Gene Symbol: CCDC77
  Gene Name: coiled-coil domain containing 77
  Uniprot ID: Q9BR77
  ENSP ID: ENSP00000239830
MNFTPTHTPVCRKRTVVSKRGVAVSGPTKRRGMADSLESTPLPSPEDRLAKLHPSKELLEYYQKKMAECEAENEDLLKKLELYKEACEGQHKLECDLQQREEEIAELQKALSDMQVCLFQEREHVLRLYSENDRLRIRELEDKKKIQNLLALVGTDAGEVTYFCKEPPHKVTILQKTIQAVGECEQSESSAFKADPKISKRRPSRERKESSEHYQRDIQTLILQVEALQAQLGEQTKLSREQIEGLIEDRRIHLEEIQVQHQRNQNKIKELTKNLHHTQELLYESTKDFLQLRSENQNKEKSWMLEKDNLMSKIKQYRVQCKKKEDKIGKVLPVMHESHHAQSEYIKSLKDKLVQEKKLSNMYQEQCISLEEELARIREEEGMRREIFKDRTNKMGKRLQIMTKRYEALERRRILEVEGFKTDIKVLRQKLKDLEQMLYKATVNARANQDLALLCEVRDSNRRAHKIQGELKNLKSKVFGLENELRLC

SEQ ID NO: 18714 - protein, 456 aa, Homo sapiens
  Payload ID: 3753
  Gene Symbol: CCDC77
  Gene Name: coiled-coil domain containing 77
  Uniprot ID: Q9BR77
  ENSP ID: ENSP00000391870
MADSLESTPLPSPEDRLAKLHPSKELLEYYQKKMAECEAENEDLLKKLELYKEACEGQHKLECDLQQREEEIAELQKALSDMQVCLFQEREHVLRLYSENDRLRIRELEDKKKIQNLLALVGTDAGEVTYFCKEPPHKVTILQKTIQAVGECEQSESSAFKADPKISKRRPSRERKESSEHYQRDIQTLILQVEALQAQLGEQTKLSREQIEGLIEDRRIHLEEIQVQHQRNQNKIKELTKNLHHTQELLYESTKDFLQLRSENQNKEKSWMLEKDNLMSKIKQYRVQCKKKEDKIGKVLPVMHESHHAQSEYIKSLKDKLVQEKKLSNMYQEQCISLEEELARIREEEGMRREIFKDRTNKMGKRLQIMTKRYEALERRRILEVEGFKTDIKVLRQKLKDLEQMLYKATVNARANQDLALLCEVRDSNRRAHKIQGELKNLKSKVFGLENELRLC

SEQ ID NO: 18715 - protein, 456 aa, Homo sapiens; identical to SEQ ID NO: 18714
  Payload ID: 3753
  Gene Symbol: CCDC77
  Gene Name: coiled-coil domain containing 77
  Uniprot ID: Q9BR77
  ENSP ID: ENSP00000412925

SEQ ID NO: 18716 - protein, 456 aa, Homo sapiens; identical to SEQ ID NO: 18714
  Payload ID: 3753
  Gene Symbol: CCDC77
  Gene Name: coiled-coil domain containing 77
  Uniprot ID: Q9BR77
  ENSP ID: ENSP00000440554

SEQ ID NO: 18717 - protein, 92 aa, Homo sapiens
  Payload ID: 3753
  Gene Symbol: CCDC77
  Gene Name: coiled-coil domain containing 77
  ENSP ID: ENSP00000443209
MNFTPTHTPVCRKRTVVSKRGVAVSGPTKRRGMADSLESTPLPSPEDRLAKLHPSKELLEYYQKKMAECEAENEDLLKKLELYKEACEGQHK

SEQ ID NO: 18718 - protein, 386 aa, Homo sapiens
  Payload ID: 3753
  Gene Symbol: CCDC77
  Gene Name: coiled-coil domain containing 77
  ENSP ID: ENSP00000445873
MADSLESTPLPSPEDRLAKLHPSKELLEYYQKKMAECEAENEDLLKKLELYKEACEGQHKLECDLQQREEEIAELQKALSDMQVCLFQEREHVLRLYSENDRLRIRELEDKKKIQNLLALVGTDAGEVTYFCKEPPHKVTILQKTIQAVGECEQSESSAFKADPKISKRRPSRERKESSEHYQRDIQTLILQVEALQAQLGEQTKLSREQIEGLIEDRRIHLEEIQVQHQRNQNKIKELTKNLHHTQELLYESTKDFLQLRSENQNKEKSWMLEKDNLMSKIKQYRVQCKKKEDKIGKVLPVMHESHHAQSEYIKSLKDKLVQEKKLSNMYQEQCISLEEELARIREEEGMRREIFKDRTNKMGKRLQIMTKRYEALERRRILEVE

SEQ ID NO: 18719 - protein, 438 aa, Homo sapiens
  Payload ID: 3754
  Gene Symbol: CCDC78
  Gene Name: coiled-coil domain containing 78
  Uniprot ID: A2IDD5
  ENSP ID: ENSP00000293889
MEHAATTGPRPGPPSRRVENVVLRAKDWLPGAPGGTAVWATSLEAEVPPDLALNKEQQLQISKELVDIQITTHHLHEQHEAEIFQLKSEILRLESRVLELELRGDGTSQGCAVPVESDPRHPRAAAQELRHKAQVPGHSDDHRFQVQPKNTMNPENEQHRLGSGLQGEVKWALEHQEARQQALVTRVATLGRQLQGAREEARAAGQRLATQAVVLCSCQGQLRQAEAENARLQLQLKKLKDEYVLRLQHCAWQAVEHADGAGQAPATTALRTFLEATLEDIRAAHRSREQQLARAARSYHKRLVDLSRRHEELLVAYRAPGNPQAIFDIASLDLEPLPVPLVTDFSHREDQHGGPGALLSSPKKRPGGASQGGTSEPQGLDAASWAQIHQKLRDFSRSTQSWNGSGHSCWSGPRWLKSNFLSYRSTWTSTWAGTSTKS

SEQ ID NO: 18720 - protein, 319 aa, Homo sapiens
  Payload ID: 3754
  Gene Symbol: CCDC78
  Gene Name: coiled-coil domain containing 78
  ENSP ID: ENSP00000316851
  MOD_RES (1)..(1): Any amino acid
XNPENEQHRLGSGLQGEVKWALEHQEARQQALVTRVATLGRQLQGAREEARAAGQRLATQAVVLCSCQGQLRQAEAENARLQLQLKKLKDEYVLRLQHCAWQAVEHADGAGQAPATTALRTFLEATLEDIRAAHRSREQQLARAARSYHKRLVDLSRRHEELLVAYRAPGNPQAIFDIASLDLEPLPVPLVTDFSHREDQHGGPGALLSSPKKRPGGASQGGTSEPQGLDAASWAQIHQKLRDFSRSTQAELERERAQLLVRATMAEEQLSELQEYVDQHLGRYKHEILRLRKLAGAGDPWKVGAVPPAKPQHPRTGSH

SEQ ID NO: 18721 - protein, 56 aa, Homo sapiens
  Payload ID: 3754
  Gene Symbol: CCDC78
  Gene Name: coiled-coil domain containing 78
  ENSP ID: ENSP00000458590
MNPENEQHRLGSGLQGEVKWALEHQEARQQALVTRVATLGRQLQGAREEARAAGQR

SEQ ID NO: 18722 - protein, 110 aa, Homo sapiens
  Payload ID: 3755
  Gene Symbol: CCDC79
  Gene Name: coiled-coil domain containing 79
  ENSP ID: ENSP00000462482
MESEDTKKTQEMKTDLNLLLECLKYQMDNAFSQKEALVTIHSICQQNSNASVYFREIGGLMFVKNLAKSSEHSMVKEAALYTLGAIAEKNVYCQQTLCTSELFEDLTWFL

SEQ ID NO: 18723 - protein, 25 aa, Homo sapiens
  Payload ID: 3755
  Gene Symbol: CCDC79
  Gene Name: coiled-coil domain containing 79
  ENSP ID: ENSP00000462842
  MOD_RES (1)..(1): Any amino acid
XKVIVEAEDRYKSELRKSLICNKSN

SEQ ID NO: 18724 - protein, 727 aa, Homo sapiens
  Payload ID: 3755
  Gene Symbol: CCDC79
  Gene Name: coiled-coil domain containing 79
  Uniprot ID: Q8NA31
  ENSP ID: ENSP00000462883
MESEDTKKTQEMKTDLNLLLECLKYQMDNAFSQKEALVTIHSICQQNSNASVYFREIGGLMFVKNLAKSSEHSMVKEAALYTLGAIAEKNVYCQQTLCTSELFEDLTWFLSNDSNINLKRMSVYVILVLVSNNRTGQTLVRETGCITVLSRLFRTVISKHELDLSDKNVFQSYQLWSSVCSTLCVCVNNPQNDENQMFCCSLFPHANEWLKNCTTPEIIRPICSFIGLTLANNTYVQKYFVSVGGLDVLSQVLMQLESDSHETLSSAKLAVVVTKTVDACIADNPTFGIVLSKYHIVSKLLALLLHESLDSGEKFSIMLTLGHCTEDCEENQYDLFKNNGLPLMIQALTESQNEELNKAATFVLHNCKKITEKLSLSLGEYPFDENETQQLKDISVKENNLEEHWRKAKEILHRIEQLEREGNEEEIQRENYQDNISSMNISIQNTWKHLHADRIGRGSKAEDEDKSHSRQLQSYKSHGVMSKACTNDDQMKTPLKSANPVHACYRESEQNKTLYKAKSSCNQNLHEETTFEKNFVSQSSDHVFKHPVHIAKNIKQQLPVTDPFTLCSDIINKEVVSFLATPSCSEMLTYRCSGCIAVEKSLNSRNFSKLLHSCPYQCDRHKVIVEAEDRYKSELRKSLICNKKILLTPRRRQRLSNESTTPGGIKKRRIRKNFTEEEVNYLFNGVKKMGNHWNSILWSFPFQQGRKAVDLAHKYHKLTKHPTCAAS

SEQ ID NO: 18725 - protein, 727 aa, Homo sapiens; identical to SEQ ID NO: 18724
  Payload ID: 3755
  Gene Symbol: CCDC79
  Gene Name: coiled-coil domain containing 79
  Uniprot ID: Q8NA31
  ENSP ID: ENSP00000463762

SEQ ID NO: 18726 - protein, 508 aa, Homo sapiens
  Payload ID: 3755
  Gene Symbol: CCDC79
  Gene Name: coiled-coil domain containing 79
  Uniprot ID: Q8NA31
  ENSP ID: ENSP00000464579
MESEDTKKTQEMKTDLNLLLECLKYQMDNAFSQKEALVTIHSICQQNSNASVYFREIGGLMFVKNLAKSSEHSMVKEAALYTLGAIAEKNVYCQQTLCTSELFEDLTWFLSNDSNINLKRMSVYVILVLVSNNRTGQTLVRETGCITVLSRLFRTVISKHELDLSDKNVFQSYQLWSSVCSTLCVCVNNPQNDENQMFCCSLFPHANEWLKNCTTPEIIRPICSFIGLTLANNTYVQKYFVSVGGLDVLSQVLMQLESDSHETLSSAKLAVVVTKTVDACIADNPTFGIVLSKYHIVSKLLALLLHESLDSGEKFSIMLTLGHCTEDCAEKLSLSLGEYPFDENETQQLKDISVKENNLEEHWRKAKEILHRIEQLEREGNEEEIQRENYQDNISSMNISIQNTWKHLHADRIGRGSKAEDEDKSHSRQLQSYKSHGVMSKACTNDDQMKTPLKSANPVHACYRESEQNKTLYKAKSSCNQNLHEETTFEKNFVSQSRSIYIMFRYNK

SEQ ID NO: 18727 - protein, 538 aa, Homo sapiens
  Payload ID: 3756
  Gene Symbol: CCDC8
  Gene Name: coiled-coil domain containing 8
  Uniprot ID: Q9H0W5
  ENSP ID: ENSP00000303158
MLQIGEDVDYLLIPREVRLAGGVWRVISKPATKEAEFRERLTQFLEEEGRTLEDVARIMEKSTPHPPQPPKKPKEPRVRRRVQQMVTPPPRLVVGTYDSSNASDSEFSDFETSRDKSRQGPRRGKKVRKMPVSYLGSKFLGSDLESEDDEELVEAFLRRQEKQPSAPPARRRVNLPVPMFEDNLGPQLSKADRWREYVSQVSWGKLKRRVKGWAPRAGPGVGEARLASTAVESAGVSSAPEGTSPGDRLGNAGDVCVPQASPRRWRPKINWASFRRRRKEQTAPTGQGADIEADQGGEAADSQREEAIADQREGAAGNQRAGAPADQGAEAADNQREEAADNQRAGAPAEEGAEAADNQREEAADNQRAEAPADQRSQGTDNHREEAADNQRAEAPADQGSEVTDNQREEAVHDQRERAPAVQGADNQRAQARAGQRAEAAHNQRAGAPGIQEAEVSAAQGTTGTAPGARARKQVKTVRFQTPGRFSWFCKRRRAFWHTPRLPTLPKRVPRAGEARNLRVLRAEARAEAEQGEQEDQL

SEQ ID NO: 18728 - protein, 950 aa, Homo sapiens
  Payload ID: 3757
  Gene Symbol: CCDC80
  Gene Name: coiled-coil domain containing 80
  Uniprot ID: Q76M96
  ENSP ID: ENSP00000206423
MTWRMGPRFTMLLAMWLVCGSEPHPHATIRGSHGGRKVPLVSPDSSRPARFLRHTGRSRGIERSTLEEPNLQPLQRRRSVPVLRLARPTEPPARSDINGAAVRPEQRPAARGSPREMIRDEGSSARSRMLRFPSGSSSPNILASFAGKNRVWVISAPHASEGYYRLMMSLLKDDVYCELAERHIQQIVLFHQAGEEGGKVRRITSEGQILEQPLDPSLIPKLMSFLKLEKGKFGMVLLKKTLQVEERYPYPVRLEAMYEVIDQGPIRRIEKIRQKGFVQKCKASGVEGQVVAEGNDGGGGAGRPSLGSEKKKEDPRRAQVPPTRESRVKVLRKLAATAPALPQPPSTPRATTLPPAPATTVTRSTSRAVTVAARPMTTTAFPTTQRPWTPSPSHRPPTTTEVITARRPSVSENLYPPSRKDQHRERPQTTRRPSKATSLESFTNAPPTTISEPSTRAAGPGRFRDNRMDRREHGHRDPNVVPGPPKPAKEKPPKKKAQDKILSNEYEEKYDLSRPTASQLEDELQVGNVPLKKAKESKKHEKLEKPEKEKKKKMKNENADKLLKSEKQMKKSEKKSKQEKEKSKKKKGGKTEQDGYQKPTNKHFTQSPKKSVADLLGSFEGKRRLLLITAPKAENNMYVQQRDEYLESFCKMATRKISVITIFGPVNNSTMKIDHFQLDNEKPMRVVDDEDLVDQRLISELRKEYGMTYNDFFMVLTDVDLRVKQYYEVPITMKSVFDLIDTFQSRIKDMEKQKKEGIVCKEDKKQSLENFLSRFRWRRRLLVISAPNDEDWAYSQQLSALSGQACNFGLRHITILKLLGVGEEVGGVLELFPINGSSVVEREDVPAHLVKDIRNYFQVSPEYFSMLLVGKDGNVKSWYPSPMWSMVIVYDLIDSMQLRRQEMAIQQSLGMRCPEDEYAGYGYHSYHQGYQDGYQDDYRHHESYHHGYPY

SEQ ID NO: 18729 - protein, 950 aa, Homo sapiens; identical to SEQ ID NO: 18728
  Payload ID: 3757
  Gene Symbol: CCDC80
  Gene Name: coiled-coil domain containing 80
  Uniprot ID: Q76M96
  ENSP ID: ENSP00000411814

SEQ ID NO: 18730 - protein, 212 aa, Homo sapiens
  Payload ID: 3757
  Gene Symbol: CCDC80
  Gene Name: coiled-coil domain containing 80
  ENSP ID: ENSP00000418188
MALRSMGQFSVFFFFFFWAQKKIASLSHSGFLHWFLLFEAVSSNGVLLFFSRFRWRRRLLVISAPNDEDWAYSQQLSALSGQACNFGLRHITILKLLGVGEEVGGVLELFPINGSSVVEREDVPAHLVKDIRNYFQVSPEYFSMLLVGKDGNVKSWYPSPMWSMVIVYDLIDSMQLRRQEMAIQQSLGMRCPEDEYAGYGYHSYHQGYQDGY

SEQ ID NO: 18731 - protein, 261 aa, Homo sapiens
  Payload ID: 3757
  Gene Symbol: CCDC80
  Gene Name: coiled-coil domain containing 80
  ENSP ID: ENSP00000420123
  MOD_RES (1)..(1): Any amino acid
XFTQSPKKSVADLLGSFEGKRRLLLITAPKAENNMYVQQRDEYLESFCKMATRKISVITIFGPVNNSTMKIDHFQLDNEKPMRVVDDEDLVDQRLISELRKEYGMTYNDFFMVLTDVDLRVKQYYEVPITMKSVFDLIDTFQSRIKDMEKQKKEGIVCKEDKKQSLENFLSRFRWRRRLLVISAPNDEDWAYSQQLSALSGQACNFGSSVVEREDVPAHLVKDIRNYFQVSPEYFSMLLVGKDGNVKSWYPSPMWSMVIVY

SEQ ID NO: 18732 - protein, 562 aa, Homo sapiens
  Payload ID: 3758
  Gene Symbol: CCDC81
  Gene Name: coiled-coil domain containing 81
  Uniprot ID: Q6ZN84
  ENSP ID: ENSP00000346800
MLDTIARALQDLGRQVLPTLPSLSQEEVSIIWGNVSEFVRRQLTLHKGVQIPAFGTFTFIRQKLEVGNNKFILIQRPVFIMVEKLVQIHGLKQNKRPGTVDSVLSSREALRKWPSSVLAFPRIELKEMENKLPMETLVEECGENRERKCKLKDQSDKEEGTRDISSPKRLRDRQALFPAKVTNVSLLEKFERSESGGKIMTPESLSYPSCLKHDSEMKPQTSPACQDHNKAGQEMCYVCLQRAQRNSLLYYSEERRREIEDERLIQQYQMLKDQEALFRHQMKSLATREQNQKNAAYNLGVAEAIRNHKNEKPEFYKSFLFDKRPLSPALNALKQEEYSRSLLKQMDNRQENEIKQRQYRELMDRLEQVQLTEELAAQRAKFLKDKMEETQCYKRALDAQIKNKPSRLPPFEPDSSEPIFGKNEGELMVEKQKREQNYMKHQLEAAANHKRKAILHQLVDQRRDLQMLQRTQREHLADRTAELERVNRVNQCLQEDWERSAAMKKQRDLEDKAFERASDKLFLLDQCEKYRRCKQCQRRTSNVGESNLWPLNKFLPGSRLLV

SEQ ID NO: 18733 - protein, 652 aa, Homo sapiens
  Payload ID: 3758
  Gene Symbol: CCDC81
  Gene Name: coiled-coil domain containing 81
  Uniprot ID: Q6ZN84
  ENSP ID: ENSP00000415528
MLDTIARALQDLGRQVLPTLPSLSQEEVSIIWGNVSEFVRRQLTLHKGVQIPAFGTFTFIRQKLEVGNNKFILIQRPVFIMVEKLVQIHGLKQNKVYTPGEIPIVPLNFVMISLEGPFNRDVVEGCVKETLLFLSRSISMKQNVEFTFKGIGVLMIRDSKVKMRFYKDFLCTMDGSGALAKALANRPGTVDSVLSSREALRKWPSSVLAFPRIELKEMENKLPMETLVEECGENRERKCKLKDQSDKEEGTRDISSPKRLRDRQALFPAKVTNVSLLEKFERSESGGKIMTPESLSYPSCLKHDSEMKPQTSPACQDHNKAGQEMCYVCLQRAQRNSLLYYSEERRREIEDERLIQQYQMLKDQEALFRHQMKSLATREQNQKNAAYNLGVAEAIRNHKNEKPEFYKSFLFDKRPLSPALNALKQEEYSRSLLKQMDNRQENEIKQRQYRELMDRLEQVQLTEELAAQRAKFLKDKMEETQCYKRALDAQIKNKPSRLPPFEPDSSEPIFGKNEGELMVEKQKREQNYMKHQLEAAANHKRKAILHQLVDQRRDLQMLQRTQREHLADRTAELERVNRVNQCLQEDWERSAAMKKQRDLEDKAFERASDKLFLLDQCEKYRRCKQCQRRTSNVGESNLWPLNKFLPGSRLLV

SEQ ID NO: 18734 - protein, 88 aa, Homo sapiens
  Payload ID: 3758
  Gene Symbol: CCDC81
  Gene Name: coiled-coil domain containing 81
  ENSP ID: ENSP00000434959
MLDTIARALQDLGRQVLPTLPSLSQEEVSIIWGNVSEFVRRQLTLHKRPGTVDSVLSSREALRKWPSSVLAFPRIELKEMENKLPMET

SEQ ID NO: 18735 - protein, 387 aa, Homo sapiens
  Payload ID: 3758
  Gene Symbol: CCDC81
  Gene Name: coiled-coil domain containing 81
  Uniprot ID: Q6ZN84
  ENSP ID: ENSP00000437165
MENKLPMETLVEECGENRERKCKLKDQSDKEEGTRDISSPKRLRDRQALFPAKVTNVSLLEKFERSESGGKIMTPESLSYPSCLKHDSEMKPQTSPACQDHNKAGQMKSLATREQNQKNAAYNLGVAEAIRNHKNEKPEFYKSFLFDKRPLSPALNALKQEEYSRSLLKQMDNRQENEIKQRQYRELMDRLEQVQLTEELAAQRAKFLKDKMEETQCYKRALDAQIKNKPSRLPPFEPDSSEPIFGKNEGELMVEKQKREQNYMKHQLEAAANHKRKAILHQLVDQRRDLQMLQRTQREHLADRTAELERVNRVNQCLQEDWERSAAMKKQRDLEDKAFERASDKLFLLDQCEKYRRCKQCQRRTSNVGESNLWPLNKFLPGSRLLV

SEQ ID NO: 18736 - protein, 544 aa, Homo sapiens
  Payload ID: 3759
  Gene Symbol: CCDC82
  Gene Name: coiled-coil domain containing 82
  Uniprot ID: Q8N4S0
  ENSP ID: ENSP00000278520
MIHVRRHETRRNSKSHVPEQKSRVDWRRTKRSSISQLLDSDEELDSEEFDSDEELDSDESFENDEELDSNKGPDCNKTPGSERELNLSKIQSEGNDSKCLINSGNGSTYEEETNKIKHRNIDLQDQEKHLSQEDNDLNKQTGQIIEDDQEKHLSQEDNDLNKQTGQIIEDDLEEEDIKRGKRKRLSSVMCDSDESDDSDILVRKVGVKRPRRVVEDEGSSVEMEQKTPEKTLAAQKREKLQKLKELSKQRSRQRRSSGRDFEDSEKESCPSSDEVDEEEEEDNYESDEDGDDYIIDDFVVQDEEGDEENKNQQGEKLTTSQLKLVKQNSLYSFSDHYTHFERVVKALLINALDESFLGTLYDGTRQKSYAKDMLTSLHYLDNRFVQPRLESLVSRSRWKEQYKERVENYSNVSIHLKNPENCSCQACGLHRYCKYSVHLSGELYNTRTMQIDNFMSHDKQVFTVGRICASRTRIYHKLKHFKFKLYQECCTIAMTEEVEDEQVKETVERIFRRSKENGWIKEKYGQLEEYLNFADYFQEEKFEL

SEQ ID NO: 18737 - protein, 544 aa, Homo sapiens; identical to SEQ ID NO: 18736
  Payload ID: 3759
  Gene Symbol: CCDC82
  Gene Name: coiled-coil domain containing 82
  Uniprot ID: Q8N4S0
  ENSP ID: ENSP00000397156

SEQ ID NO: 18738 - protein, 30 aa, Homo sapiens
  Payload ID: 3759
  Gene Symbol: CCDC82
  Gene Name: coiled-coil domain containing 82
  ENSP ID: ENSP00000431148
MIHVRRHETRRNSKSHVPEQKSRVDWRRTK

SEQ ID NO: 18739 - protein, 262 aa, Homo sapiens
  Payload ID: 3759
  Gene Symbol: CCDC82
  Gene Name: coiled-coil domain containing 82
  ENSP ID: ENSP00000442723
MIHVRRHETRRNSKSHVPEQKSRVDWRRTKRSSISQLLDSDEELDSEEFDSDEELDSDESFENDEELDSNKGPDCNKTPGSERELNLSKIQSEGNDSKCLINSGNGSTYEEETNKIKHRNIDLQDQEKHLSQEDNDLNKQTGQIIEDDQEKHLSQEDNDLNKQTGQIIEDDLEEEDIKRGKRKRLSSVMCDSDESDDSDILVRKVGVKRPRRVVEDEGSSVEMEQKTPEKTLAAQKREKLQKLKELSKQRSRQRRSSGRDFE

SEQ ID NO: 18740 - protein, 444 aa, Homo sapiens
  Payload ID: 3760
  Gene Symbol: CCDC83
  Gene Name: coiled-coil domain containing 83
  Uniprot ID: Q8IWF9
  ENSP ID: ENSP00000280245
MENSGKANKKDTHDGPPKEIKLPTSEALLDYQCQIKEDAVEQFMFQIKTLRKKNQKYHERNSRLKEEQIWHIRHLLKELSEEKAEGLPVVTREDVEEAMKEKWKFERDQEKNLRDMRMQISNAEKLFLEKLSEKEYWEEYKNVGSERHAKLITSLQNDINTVKENAEKMSEHYKITLEDTRKKIIKETLLQLDQKKEWATQNAVKLIDKGSYLEIWENDWLKKEVAIHRKEVEELKNAIHELEAENLVLIDQLSNCRLVDLKIPRYPVLHSCPTSNPRHLLLLPLESCLISARRCWRLYLTQAAGLEVPPEEMSLELPETHIEEKSELQPTEVESRDLMSSSDESTILHLSHENSIEDLQYVKIDKEENSGTEFGDTDMKYLLYEDEKDFKDYVNLGPLGVKLMSVESKKMPIHFQEKEIPVKLYKDVRSPESHITYKMMKSFL

SEQ ID NO: 18741 - protein, 413 aa, Homo sapiens
  Payload ID: 3760
  Gene Symbol: CCDC83
  Gene Name: coiled-coil domain containing 83
  Uniprot ID: Q8IWF9
  ENSP ID: ENSP00000344512
MENSGKANKKDTHDGPPKEIKLPTSEALLDYQCQIKEDAVEQFMFQIKTLRKKNQKYHERNSRLKEEQIWHIRHLLKELSEEKAEGLPVVTREDVEEAMKEKWKFERDQEKNLRDMRMQISNAEKLFLEKLSEKEYWEEYKNVGSERHAKLITSLQNDINTVKENAEKMSEHYKITLEDTRKKIIKETLLQLDQKKEWATQNAVKLIDKGSYLEIWENDWLKKEVAIHRKEVEELKNAIHELEAENLVLIDQLSNCRLVDLKIPRRLYLTQAAGLEVPPEEMSLELPETHIEEKSELQPTEVESRDLMSSSDESTILHLSHENSIEDLQYVKIDKEENSGTEFGDTDMKYLLYEDEKDFKDYVNLGPLGVKLMSVESKKMPIHFQEKEIPVKLYKDVRSPESHITYKMMKSFL

SEQ ID NO: 18742 - protein, 318 aa, Homo sapiens
  Payload ID: 3760
  Gene Symbol: CCDC83
  Gene Name: coiled-coil domain containing 83
  ENSP ID: ENSP00000434373
  MOD_RES (1)..(1): Any amino acid
XVEQFMFQIKTLRKKNQKYHERNSRLKEEQIWHIRHLLKELSEEKAEGLPVVTREDVEEAMKEKWKFERDQEKNLREHYKITLEDTRKKIIKETLLQLDQKKEWATQNAVKLIDKGSYLEIWENDWLKKEVAIHRKEVEELKNAIHELEAENLVLIDQLSNCRLVDLKIPRRLYLTQAAGLEVPPEEMSLELPETHIEKSELQPTEVESRDLMSSSDESTILHLSHENSIEDLQYVKIDKEENSGTEFGDTDMKYLLYEDEKDFKDYVNLGPLGVKLMSVESKKMPIHFQEKEIPVKLYKDVRSPESHITYKMMKSFL

SEQ ID NO: 18743 - protein, 332 aa, Homo sapiens
  Payload ID: 3761
  Gene Symbol: CCDC84
  Gene Name: coiled-coil domain containing 84
  Uniprot ID: Q86UT8
  ENSP ID: ENSP00000334767
MAPAQRCPLCRQTFFCGRGHVYSRKHQRQLKEALERLLPQVEAARKAIRAAQVERYVPEHERCCWCLCCGCEVREHLSHGNLTVLYGGLLEHLASPEHKKATNKFWWENKAEVQMKEKFLVTPQDYARFKKSMVKGLDSYEEKEDKVIKEMAAQIREVEQSRQEVVRSVLEPQAVPDPEEGSSAPRSWKGMNSQVASSLQQPSNLDLPPAPELDWMETGPSLTFIGHQDIPGVGNIHSGATPPWMIQDEEYIAGNQEIGPSYEEFLKEKEKQKLKKLPPDRVGANFDHSSRTSAGWLPSFGRVWNNGRRWQSRHQFKTEAAAMKKQSHTEKS

SEQ ID NO: 18744 - protein, 194 aa, Homo sapiens
  Payload ID: 3761
  Gene Symbol: CCDC84
  Gene Name: coiled-coil domain containing 84
  ENSP ID: ENSP00000431889
MAPAQRCPLCRQTFFCGRGHVYSRKHQRQLKEALERLLPQVEAARKAIRAAQVERYVPEHERCCWCLCCGCEVREHLSHGNLTVLYGGLLEHLASPEHKKATNKFWWENKAEVQMKEKFLVTPQDYARFKKSMVKGLDSYEEKEDKVIKEMAAQIREVEQSRQEVVRSVLEVGFPRRIQTTSGSARPRRGLFST

SEQ ID NO: 18745 - protein, 148 aa, Homo sapiens
  Payload ID: 3761
  Gene Symbol: CCDC84
  Gene Name: coiled-coil domain containing 84
  ENSP ID: ENSP00000436340
MAPAQRCPLCRQTFFCGRGHVYSRKHQRQLKEALERLLPQVEAARKAIRAAQVERYVPEHERCCWCLCCGCEVREHLSHGNLTVLYGGLLEHLASPEHKKATNKFWWENKAEVQMKEKFLVTPQDYARLCGSSASFFKLLQISKKIFK

SEQ ID NO: 18746 - protein, 194 aa, Homo sapiens; identical to SEQ ID NO: 18744
  Payload ID: 3761
  Gene Symbol: CCDC84
  Gene Name: coiled-coil domain containing 84
  ENSP ID: ENSP00000486513

SEQ ID NO: 18747 - protein, 148 aa, Homo sapiens; identical to SEQ ID NO: 18745
  Payload ID: 3761
  Gene Symbol: CCDC84
  Gene Name: coiled-coil domain containing 84
  ENSP ID: ENSP00000486537

SEQ ID NO: 18748 - protein, 332 aa, Homo sapiens; identical to SEQ ID NO: 18743
  Payload ID: 3761
  Gene Symbol: CCDC84
  Gene Name: coiled-coil domain containing 84
  Uniprot ID: Q86UT8
  ENSP ID: ENSP00000487197

SEQ ID NO: 18749 - protein, 553 aa, Homo sapiens
  Payload ID: 3762
  Gene Symbol: CCDC85A
  Gene Name: coiled-coil domain containing 85A
  Uniprot ID: Q96PX6
  ENSP ID: ENSP00000384040
MSKAAGGAAAAAAAAESCSPAPAGSSAAPPAPVEDLSKVSDEELLQWSKEELIRSLRRAEAEKVSAMLDHSNLIREVNRRLQLHLGEIRGLKDINQKLQEDNQELRDLCCFLDDDRQKGKRVSREWQRLGRYTAGVMHKEVALYLQKLKDLEVKQEEVVKENMELKELCVLLDEEKGAGCAGSRCSIDSQASLCQLTASTAPYVRDVGDGSSTSSTGSTDSPDHHKHHASSGSPEHLQKPRSEGSPEHSKHRSASPEHPQKPRACGTPDRPKALKGPSPEHHKPLCKGSPEQQRHPHPGSSPETLPKHVLSGSPEHFQKHRSGSSPEHARHSGGSPEHLQKHALGGSLEHLPRARGTSPEHLKQHYGGSPDHKHGGGSGGSGGSGGGSREGTLRRQAQEDGSPHHRNVYSGMNESTLSYVRQLEARVRQLEEENRMLPQASQNRRQPPTRNSSNMEKGWGSRARRVLQWWQGCRGIGRCLPTLPGSFRLSSGADGSNSSPNSAASFSGHATPSQQPEPVVHSLKVVWRKLGDAAGSCPGIRQHLSGNQYKGPM

SEQ ID NO: 18750 - protein, 202 aa, Homo sapiens
  Payload ID: 3763
  Gene Symbol: CCDC85B
  Gene Name: coiled-coil domain containing 85B
  Uniprot ID: Q15834
  ENSP ID: ENSP00000311695
MEAEAGGLEELTDEEMAALGKEELVRRLRREEAARLAALVQRGRLMQEVNRQLQGHLGEIRELKQLNRRLQAENRELRDLCCFLDSERQRGRRAARQWQLFGTQASRAVREDLGGCWQKLAELEGRQEELLRENLALKELCLALGEEWGPRGGPSGAGGSGAGPAPELALPPCGPRDLGDGSSSTGSVGSPDQLPLACSPDD

SEQ ID NO: 18751 - protein, 419 aa, Homo sapiens
  Payload ID: 3764
  Gene Symbol: CCDC85C
  Gene Name: coiled-coil domain containing 85C
  Uniprot ID: A6NKD9
  ENSP ID: ENSP00000369592
MAKPAATAAAASEELSQVPDEELLRWSKEELARRLRRAEGEKVGLMLEHGGLMRDVNRRLQQHLLEIRGLKDVNQRLQDDNQELRELCCFLDDDRQKGRKLAREWQRFGRHAAGAVWHEVARSQQKLRELEARQEALLRENLELKELVLLLDEERAALAATGAASGGGGGGGGAGSRSSIDSQASLSGPLSGGAPGAGARDVGDGSSTSSAGSGGSPDHHHHVPPPLLPPGPHKAPDGKAGATRRSLDDLSAPPHHRSIPNGLHDPSSTYIRQLESKVRLLEGDKLLAQQAGSGEFRTLRKGFSPYHSESQLASLPPSYQDSLQNGPACPAPELPSPPSAGYSPAGQKPEAVVHAMKVLEVHENLDRQLQDSCEEDLSEKEKAIVREMCNVVWRKLGDAASSKPSIRQHLSGNQFKGPL

SEQ ID NO: 18752 - protein, 64 aa, Homo sapiens
  Payload ID: 3764
  Gene Symbol: CCDC85C
  Gene Name: coiled-coil domain containing 85C
  ENSP ID: ENSP00000450602
MKVLEVHENLDRQLQDSCEEDLSEKEKAIVREMCNVVWRKLGDAASSKPSIRQHLSGNQFKGPL

SEQ ID NO: 18753 - protein, 64 aa, Homo sapiens; identical to SEQ ID NO: 18752
  Payload ID: 3764
  Gene Symbol: CCDC85C
  Gene Name: coiled-coil domain containing 85C
  ENSP ID: ENSP00000450850

SEQ ID NO: 18754 - protein, 190 aa, Homo sapiens
  Payload ID: 3764
  Gene Symbol: CCDC85C
  Gene Name: coiled-coil domain containing 85C
  ENSP ID: ENSP00000451294
SSSSHFADRIPGRCLLFRNVRPRGRGQPCPCDSLRDPSSTYIRQLESKVRLLEGDKLLAQQAGSGEFRTLRKGFSPYHSESQLASLPPSYQDSLQNGPACPAPELPSPPSAGYSPAGQKPEAVVHAMKVLEVHENLDRQLQDSCEEDLSEKEKAIVREMCNVVWRKLGDAASSKPSIRQHLSGNQFKGPL

SEQ ID NO: 18755 - protein, 116 aa, Homo sapiens
  Payload ID: 3764
  Gene Symbol: CCDC85C
  Gene Name: coiled-coil domain containing 85C
  ENSP ID: ENSP00000451718
MDKLANKSMDGTVSYPDPSSTYIRQLESKVRLLEGDKLLAQQAGSGEFRTLRKGFSPYHSESQLASLPPSYQDSLQNGPACPAPELPSPPSAGYSPAGQKPEAVVHAMKVLEVHEN

SEQ ID NO: 18756 - protein, 47 aa, Homo sapiens
  Payload ID: 3764
  Gene Symbol: CCDC85C
  Gene Name: coiled-coil domain containing 85C
  ENSP ID: ENSP00000452300
MKVLEVHENLDRQLQDSCEEDLSEKEKAIVREMCNVVWRKLGDAASS

SEQ ID NO: 18757 - protein, 123 aa, Homo sapiens
  Payload ID: 3764
  Gene Symbol: CCDC85C
  Gene Name: coiled-coil domain containing 85C
  ENSP ID: ENSP00000452496
  MOD_RES (1)..(1): Any amino acid
XPSSTYIRQLESKVRLLEGDKLLAQQAGSGEFRTLRKGFSPYHSESQLASLPPSYQDSLQNVLEVHENLDRQLQDSCEEDLSEKEKAIVREMCNVVWRKLGDAASSKPSIRQHLSGNQFKGPL

SEQ ID NO: 18758 - protein, 360 aa, Homo sapiens
  Payload ID: 3765
  Gene Symbol: CCDC86
  Gene Name: coiled-coil domain containing 86
  Uniprot ID: Q9H6F5
  ENSP ID: ENSP00000227520
MDTPLRRSRRLGGLRPESPESLTSVSRTRRALVEFESNPEETREPGSPPSVQRAGLGSPERPPKTSPGSPRLQQGAGLESPQGQPEPGAASPQRQQDLHLESPQRQPEYSPESPRCQPKPSEEAPKCSQDQGVLASELAQNKEELTPGAPQHQLPPVPGSPEPYPGQQAPGPEPSQPLLELTPRAPGSPRGQHEPSKPPPAGETVTGGFGAKKRKGSSSQAPASKKLNKEELPVIPKGKPKSGRVWKDRSKKRFSQMLQDKPLRTSWQRKMKERQERKLAKDFARHLEEEKERRRQEKKQRRAENLKRRLENERKAEVVQVIRNPAKLKRAKKKQLRSIEKRDTLALLQKQPPQQPAAKI

SEQ ID NO: 18759 - protein, 104 aa, Homo sapiens
  Payload ID: 3765
  Gene Symbol: CCDC86
  Gene Name: coiled-coil domain containing 86
  Uniprot ID: Q9H6F5
  ENSP ID: ENSP00000440906
MLQDKPLRTSWQRKMKERQERKLAKDFARHLEEEKERRRQEKKQRRAENLKRRLENERKAEVVQVIRNPAKLKRAKKKQLRSIEKRDTLALLQKQPPQQPAAKI

SEQ ID NO: 18760 - protein, 88 aa, Homo sapiens
  Payload ID: 3765
  Gene Symbol: CCDC86
  Gene Name: coiled-coil domain containing 86
  ENSP ID: ENSP00000442111
  MOD_RES (1)..(1): Any amino acid
XSRRLGGLRPESPESLTSVSRTRRALVEFESNPEETREPGSPPSVQRAGLGSPERPPKTSPGSPRLQQGAGLESPQGQPEPGAASPQP

SEQ ID NO: 18761 - protein, 849 aa, Homo sapiens
  Payload ID: 3766
  Gene Symbol: CCDC87
  Gene Name: coiled-coil domain containing 87
  Uniprot ID: Q9NVE4
  ENSP ID: ENSP00000328487
MMEPPKPEPELQRFYHRLLRPLSLFPTRTTSPEPQKRPPQEGRILQSFPLAKLTVASLCSQVAKLLAGSGIAAGVPPEARLRLIKVILDELKCSWREPPAELSLSHKNNQKLRKRLEAYVLLSSEQLFLRYLHLLVTMSTPRGVFTESATLTRLAASLARDCTLFLTSPNVYRGLLADFQALLRAEQASGDVDKLHPVCPAGTFKLCPIPWPHSTGFAQVQCSNLNLNYLIQLSRPPEFLNEPGRMDPVKELKSIPRLKRKKPFHWLPSIGKKREIDISSSQMVSLPSYPVAPTSRASPSPFCPELRRGQSMPSLREGWRLADELGLPPLPSRPLTPLVLATESKPELTGLIVAEDLKQLIKKMKLEGTRYPPLDSGLPPLLGVVTRHPAAGHRLEELEKMLRNLQEEEASGQWDPQPPKSFPLHPQPVTITLKLRNEVVVQAAAVRVSDRNFLDSFHIEGAGALYNHLAGELDPKAIEKMDIDNFVGSTTREVYKELMSHVSSDHLHFDQGPLVEPAADKDWSTFLSSAFLRQEKQPQIINPELVGLYSQRANTLQSNTKKMPSLPSLQATKSWEKWSNKASLMNSWKTTLSVDDYFKYLTNHETDFLHVIFQMHEEEVPVEIVAPARESLEIQHPPPLLEDEEPDFVPGEWDWNTVLEHRLGAGKTPHLGEPHKILSLQKHLEQLWSVLEVPDKDQVDMTIKYSSKARLRQLPSLVNAWERALKPIQLREALLARLEWFEGQASNPNRFFKKTNLSSSHFLEENQVRSHLHRKLNLMESSLVSLLEEIELIFGEPVIFKGRPYLDKMKSDKVEMLYWLQQQRRVRHLVSALKDPHQSTLFRSSAASL

SEQ ID NO: 18762 - protein, 1843 aa, Homo sapiens
  Payload ID: 3767
  Gene Symbol: CCDC88A
  Gene Name: coiled-coil domain containing 88A
  Uniprot ID: Q3V6T2
  ENSP ID: ENSP00000263630
MENEIFTPLLEQFMTSPLVTWVKTFGPLAAGNGTNLDEYVALVDGVFLNQVMLQINPKLESQRVNKKVNNDASLRMHNLSILVRQIKFYYQETLQQLIMMSLPNVLIIGKNPFSEQGTEEVKKLLLLLLGCAVQCQKKEEFIERIQGLDFDTKAAVAAHIQEVTHNQENVFDLQWMEVTDMSQEDIEPLLKNMALHLKRLIDERDEHSETIIELSEERDGLHFLPHASSSAQSPCGSPGMKRTESRQHLSVELADAKAKIRRLRQELEEKTEQLLDCKQELEQMEIELKRLQQENMNLLSDARSARMYRDELDALREKAVRVDKLESEVSRYKERLHDIEFYKARVEELKEDNQVLLETKTMLEDQLEGTRARSDKLHELEKENLQLKAKLHDMEMERDMDRKKIEELMEENMTLEMAQKQSMDESLHLGWELEQISRTSELSEAPQKSLGHEVNELTSSRLLKLEMENQSLTKTVEELRTTVDSVEGNASKILKMEKENQRLSKKVEILENEIVQEKQSLQNCQNLSKDLMKEKAQLEKTIETLRENSERQIKILEQENEHLNQTVSSLRQRSQISAEARVKDIEKENKILHESIKETSSKLSKIEFEKRQIKKELEHYKEKGERAEELENELHHLEKENELLQKKITNLKITCEKIEALEQENSELERENRKLKKTLDSFKNLTFQLESLEKENSQLDEENLELRRNVESLKCASMKMAQLQLENKELESEKEQLKKGLELLKASFKKTERLEVSYQGLDIENQRLQKTLENSNKKIQQLESELQDLEMENQTLQKNLEELKISSKRLEQLEKENKSLEQETSQLEKDKKQLEKENKRLRQQAEIKDTTLEENNVKIGNLEKENKTLSKEIGIYKESCVRLKELEKENKELVKRATIDIKTLVTLREDLVSEKLKTQQMNNDLEKLTHELEKIGLNKERLLHDEQSTDDSRYKLLESKLESTLKKSLEIKEEKIAALEARLEESTNYNQQLRQELKTVKKNYEALKQRQDEERMVQSSPPISGEDNKWERESQETTRELLKVKDRLIEVERNNATLQAEKQALKTQLKQLETQNNNLQAQILALQRQTVSLQEQNTTLQTQNAKLQVENSTLNSQSTSLMNQNAQLLIQQSSLENENESVIKEREDLKSLYDSLIKDHEKLELLHERQASEYESLISKHGTLKSAHKNLEVEHRDLEDRYNQLLKQKGQLEDLEKMLKVEQEKMLLENKNHETVAAEYKKLCGENDRLNHTYSQLLKETEVLQTDHKNLKSLLNNSKLEQTRLEAEFSKLKEQYQQLDITSTKLNNQCELLSQLKGNLEEENRHLLDQIQTLMLQNRTLLEQNMESKDLFHVEQRQYIDKLNELRRQKEKLEEKIMDQYKFYDPSPPRRRGNWITLKMRKLIKSKKDINRERQKSLTLTPTRSDSSEGFLQLPHQDSQDSSSVGSNSLEDGQTLGTKKSSTMNDLVQSMVLAGQWTGSTENLEVPDDISTGKRRKELGAMAFSTTAINFSTVNSSAGFRSKQLVNNKDTTSFEDISPQGVSDDSSTGSRVHASRPASLDSGRTSTSNSNNNASLHEVKAGAVNNQSRPQSHSSGEFSLLHDHEAWSSSGSSPIQYLKRQTRSSPVLQHKISETLESRHHKIKTGSPGSEVVTLQQFLEESNKLTSVQIKSSSQENLLDEVMKSLSVSSDFLGKDKPVSCGLARSVSGKTPGDFYDRRTTKPEFLRPGPRKTEDTYFISSAGKPTPGTQGKIKLVKESSLSRQSKDSNPYATLPRASSVISTAEGTTRRTSIHDFLTKDSRLPISVDSPPAAADSNTTAASNVDKVQESRNSKSRSREQQSS

SEQ ID NO: 18763 - protein, 1870 aa, Homo sapiens
  Payload ID: 3767
  Gene Symbol: CCDC88A
  Gene Name: coiled-coil domain containing 88A
  Uniprot ID: Q3V6T2
  ENSP ID: ENSP00000338728
MENEIFTPLLEQFMTSPLVTWVKTFGPLAAGNGTNLDEYVALVDGVFLNQVMLQINPKLESQRVNKKVNNDASLRMHNLSILVRQIKFYYQETLQQLIMMSLPNVLIIGKNPFSEQGTEEVKKLLLLLLGCAVQCQKKEEFIERIQGLDFDTKAAVAAHIQEVTHNQENVFDLQWMEVTDMSQEDIEPLLKNMALHLKRLIDERDEHSETIIELSEERDGLHFLPHASSSAQSPCGSPGMKRTESRQHLSVELADAKAKIRRLRQELEEKTEQLLDCKQELEQMEIELKRLQQENMNLLSDARSARMYRDELDALREKAVRVDKLESEVSRYKERLHDIEFYKARVEELKEDNQVLLETKTMLEDQLEGTRARSDKLHELEKENLQLKAKLHDMEMERDMDRKKIEELMEENMTLEMAQKQSMDESLHLGWELEQISRTSELSEAPQKSLGHEVNELTSSRLLKLEMENQSLTKTVEELRTTVDSVEGNASKILKMEKENQRLSKKVEILENEIVQEKQSLQNCQNLSKDLMKEKAQLEKTIETLRENSERQIKILEQENEHLNQTVSSLRQRSQISAEARVKDIEKENKILHESIKETSSKLSKIEFEKRQIKKELEHYKEKGERAEELENELHHLEKENELLQKKITNLKITCEKIEALEQENSELERENRKLKKTLDSFKNLTFQLESLEKENSQLDEENLELRRNVESLKCASMKMAQLQLENKELESEKEQLKKGLELLKASFKKTERLEVSYQGLDIENQRLQKTLENSNKKIQQLESELQDLEMENQTLQKNLEELKISSKRLEQLEKENKSLEQETSQLEKDKKQLEKENKRLRQQAEIKDTTLEENNVKIGNLEKENKTLSKEIGIYKESCVRLKELEKENKELVKRATIDIKTLVTLREDLVSEKLKTQQMNNDLEKLTHELEKIGLNKERLLHDEQSTDDRYKLLESKLESTLKKSLEIKEEKIAALEARLEESTNYNQQLRQELKTVKKNYEALKQRQDEERMVQSSPPISGEDNKWERESQETTRELLKVKDRLIEVERNNATLQAEKQALKTQLKQLETQNNNLQAQILALQRQTVSLQEQNTTLQTQNAKLQVENSTLNSQSTSLMNQNAQLLIQQSSLENENESVIKEREDLKSLYDSLIKDHEKLELLHERQASEYESLISKHGTLKSAHKNLEVEHRDLEDRYNQLLKQKGQLEDLEKMLKVEQEKMLLENKNHETVAAEYKKLCGENDRLNHTYSQLLKETEVLQTDHKNLKSLLNNSKLEQTRLEAEFSKLKEQYQQLDITSTKLNNQCELLSQLKGNLEEENRHLLDQIQTLMLQNRTLLEQNMESKDLFHVEQRQYIDKLNELRRQKEKLEEKIMDQYKFYDPSPPRRRGNWITLKMRKLIKSKKDINRERQKSLTLTPTRSDSSEGFLQLPHQDSQDSSSVGSNSLEDGQTLGTKKSSMVALKRLPFLRNRPKDKDKMKACYRRSMSMNDLVQSMVLAGQWTGSTENLEVPDDISTGKRRKELGAMAFSTTAINFSTVNSSAGFRSKQLVNNKDTTSFEDISPQGVSDDSSTGSRVHASRPASLDSGRTSTSNSNNNASLHEVKAGAVNNQSRPQSHSSGEFSLLHDHEAWSSSGSSPIQYLKRQTRSSPVLQHKISETLESRHHKIKTGSPGSEVVTLQQFLEESNKLTSVQIKSSSQENLLDEVMKSLSVSSDFLGKDKPVSCGLARSVSGKTPGDFYDRRTTKPEFLRPGPRKTEDTYFISSAGKPTPGTQGKIKLVKESSLSRQSKDSNPYATLPRASSVISTAEGTTRRTSIHDFLTKDSRLPISVDSPPAAADSNTTAASNVDKVQESRNSKSRSREQQSS

SEQ ID NO: 18764 - protein, 888 aa, Homo sapiens
  Payload ID: 3767
  Gene Symbol: CCDC88A
  Gene Name: coiled-coil domain containing 88A
  ENSP ID: ENSP00000390012
LLESKLESTLKKSLEIKEEKIAALEARLEESTNYNQQLRQELKTVKKNYEALKQRQDEERMVQSSPPISGEDNKWERESQETTRELLKVKDRLIEVERNNATLQAEKQALKTQLKQLETQNNNLQAQILALQRQTVSLQEQNTTLQTQNAKLQVENSTLNSQSTSLMNQNAQLLIQQSSLENENESVIKEREDLKSLYDSLIKDHEKLELLHERQASEYESLISKHGTLKSAHKNLEVEHRDLEDRYNQLLKQKGQLEDLEKMLKVEQEKMLLENKNHETVAAEYKKLCGENDRLNHTYSQLLKETEVLQTDHKNLKSLLNNSKLEQTRLEAEFSKLKEQYQQLDITSTKLNNQCELLSQLKGNLEEENRHLLDQIQTLMLQNRTLLEQNMESKDLFHVEQRQYIDKLNELRRQKEKLEEKIMDQYKFYDPSPPRRRGNWITLKMRKLIKSKKDINRERQKSLTLTPTRSDSSEGFLQLPHQDSQDSSSVGSNSLEDGQTLGTKKSSTMNDLVQSMVLAGQWTGSTENLEVPDDISTGKRRKELGAMAFSTTAINFSTVNSSAGFRSKQLVNNKDTTSFEDISPQGVSDDSSTGSRVHASRPASLDSGRTSTSNSNNNASLHEVKAGAVNNQSRPQSHSSGEFSLLHDHEAWSSSGSSPIQYLKRQTRSSPVLQHKISETLESRHHKIKTGSPGSEVVTLQQFLEESNKLTSVQIKSSSQENLLDEVMKSLSVSSDFLGKDKPVSCGLARSVSGKTPGDFYDRRTTKPEFLRPGPRKTEDTYFISSAGKPTPGTQGKIKLVKESSLSRQSKDSNPYATLPRASSVISTAEGTTRRTSIHDFLTKDSRLPISVDSPPAAADSNTTAASNVDKVQESRNSKSRSREQQSS

SEQ ID NO: 18765 - protein, 147 aa, Homo sapiens
  Payload ID: 3767
  Gene Symbol: CCDC88A
  Gene Name: coiled-coil domain containing 88A
  ENSP ID: ENSP00000399237
MHNLSILVRQIKFYYQETLQQLIMMSLPNVLIIGKNPFSEQGTEEVKKLLLLLLGCAVQCQKKEEFIERIQGLDFDTKAAVAAHIQEVTHNQENVFDLQWMEVTDMSQEDIEPLLKNMALHLKRLIDERDEHSETIIELSEERDGLH

SEQ ID NO: 18766 - protein, 1796 aa, Homo sapiens
  Payload ID: 3767
  Gene Symbol: CCDC88A
  Gene Name: coiled-coil domain containing 88A
  Uniprot ID: Q3V6T2
  ENSP ID: ENSP00000404431
MENEIFTPLLEQFMTSPLVTWVKTFGPLAAGNGTNLDEYVALVDGVFLNQVMLQINPKLESQRVNKKVNNDASLRMHNLSILVRQIKFYYQETLQQLIMMSLPNVLIIGKNPFSEQGTEEVKKLLLLLLGCAVQCQKKEEFIERIQGLDFDTKAAVAAHIQEVTHNQENVFDLQWMEVTDMSQEDIEPLLKNMALHLKRLIDERDEHSETIIELSEERDGLHFLPHASSSAQSPCGSPGMKRTESRQHLSVELADAKAKIRRLRQELEEKTEQLLDCKQELEQMEIELKRLQQENMNLLSDARSARMYRDELDALREKAVRVDKLESEVSRYKERLHDIEFYKARVEELKEDNQVLLETKTMLEDQLEGTRARSDKLHELEKENLQLKAKLHDMEMERDMDRKKIEELMEENMTLEMAQKQSMDESLHLGWELEQISRTSELSEAPQKSLGHEVNELTSSRLLKLEMENQSLTKTVEELRTTVDSVEGNASKILKMEKENQRLSKKVEILENEIVQEKQSLQNCQNLSKDLMKEKAQLEKTIETLRENSERQIKILEQENEHLNQTVSSLRQRSQISAEARVKDIEKENKILHESIKETSSKLSKIEFEKRQIKKELEHYKEKGERAEELENELHHLEKENELLQKKITNLKITCEKIEALEQENSELERENRKLKKTLDSFKNLTFQLESLEKENSQLDEENLELRRNVESLKCASMKMAQLQLENKELESEKEQLKKGLELLKASFKKTERLEVSYQGLDIENQRLQKTLENSNKKIQQLESELQDLEMENQTLQKNLEELKISSKRLEQLEKENKSLEQETSQLEKDKKQLEKENKRLRQQAEIKDTTLEENNVKIGNLEKENKTLSKEIGIYKESCVRLKELEKENKELVKRATIDIKTLVTLREDLVSEKLKTQQMNNDLEKLTHELEKIGLNKERLLHDEQSTDDRYKLLESKLESTLKKSLEIKEEKIAALEARLEESTNYNQQLRQELKTVKKNYEALKQRQDEERMVQSSPPISGEDNKWERESQETTRELLKVKDRLIEVERNNATLQAEKQALKTQLKQLETQNNNLQAQILALQRQTVSLQEQNTTLQTQNAKLQVENSTLNSQSTSLMNQNAQLLIQQSSLENENESVIKEREDLKSLYDSLIKDHEKLELLHERQASEYESLISKHGTLKSAHKNLEVEHRDLEDRYNQLLKQKGQLEDLEKMLKVEQEKMLLENKNHETVAAEYKKLCGENDRLNHTYSQLLKETEVLQTDHKNLKSLLNNSKLEQTRLEAEFSKLKEQYQQLDITSTKLNNQCELLSQLKGNLEEENRHLLDQIQTLMLQNRTLLEQNMESKDLFHVEQRQYIDKLNELRRQKEKLEEKIMDQYKFYDPSPPRRRGNWITLKMRKLIKSKKDINRERQKSLTLTPTRSDSSEGFLQLPHQDSQDSSSVGSNSLEDGQTLGTKKSSMVALKRLPFLRNRPKDKDKMKACYRRSMSMNDLVQSMVLAGQWTGSTENLEVPDDISTGKRRKELGAMAFSTTAINFSTVNSSAGFRSKQLVNNKDTTSFEDISPQGVSDDSSTGSRVHASRPASLDSGRTSTSNSNNNASLHEVKAGAVNNQSRPQSHSSGEFSLLHDHEAWSSSGSSPIQYLKRQTRSSPVLQHKISETLESRHHKIKTGSPGSEVVTLQQFLEESNKLTSVQIKSSSQENLLDEVMKSLSVSSDFLGKDKPVSCGLASVISTAEGTTRRTSIHDFLTKDSRLPISVDSPPAAADSNTTAASNVDKVQESRNSKSRSREQQSS

SEQ ID NO: 18767 - protein, 1202 aa, Homo sapiens
  Payload ID: 3767
  Gene Symbol: CCDC88A
  Gene Name: coiled-coil domain containing 88A
  ENSP ID: ENSP00000405080
QLEKDKKQLEKENKRLRQQAEIKDTTLEENNVKIGNLEKENKTLSKEIGIYKESCVRLKELEKENKELVKRATIDIKTLVTLREDLVSEKLKTQQMNNDLEKLTHELEKIGLNKERLLHDEQSTDDSRYKLLESKLESTLKKSLEIKEEKIAALEARLEESTNYNQQLRQELKTVKKNYEALKQRQDEERMVQSSPPISGEDNKWERESQETTRELLKVKDRLIEVERNNATLQAEKQALKTQLKQLETQNNNLQAQILALQRQTVSLQEQNTTLQTQNAKLQVENSTLNSQSTSLMNQNAQLLIQQSSLENENESVIKEREDLKSLYDSLIKDHEKLELLHERQASEYESLISKHGTLKSAHKNLEVEHRDLEDRYNQLLKQKGQLEDLEKMLKVEQEKMLLENKNHETVAAEYKKLCGENDRLNHTYSQLLKETEVLQTDHKNLKSLLNNSKLEQTRLEAEFSKLKEQYQQLDITSTKLNNQCELLSQLKGNLEEENRHLLDQIQTLMLQNRTLLEQNMESKDLFHVEQRQYIDKLNELRRQKEKLEEKIMDQYKFYDPSPPRRRGNWITLKMRKLIKSKKDINRERQKSLTLTPTRSDSSEGFLQLPHQDSQDSSSVGSNSLEDGQTLGTKKSSMVALKRLPFLRNRPKDKDKMKACYRRSMSMNDLVQSMVLAGQWTGSTENLEVPDDISTGKRRKELGAMAFSTTAINFSTVNSSAGFRSKQLVNNKDTTSFEDISPQGVSDDSSTGSRVHASRPASLDSGRTSTSNSNNNASLHEVKAGAVNNQSRPQSHSSGEFSLLHDHEAWSSSGSSPIQYLKRQTRSSPVLQHKISETLESRHHKIKTGSPGSEVVTLQQFLEESNKLTSVQIKSSSQENLLDEVMKSLSVSSDFLGKDKPVSCGLARSVSGKTPGDFYDRRTTKPEFLRPGPRKTEDTYFISSAGKPTPGTQGKIKLVKESSLSRQSKDSNPYATLPRASSVISTAEGTTRRTSIHDFLTKDSRLPISVDSPPAAADSNTTAASSEYHLHQWSSHILDIPTHTIGSCAQNDLAIDMPEPLYAQARNSRTGRSHFLNQTFATIRMPSDAFGMLAKDSIGPFTVAHSSQPFLSLNTELVSNISGLPPRPVIRITDQASASLDKPAQKENEQFSDHQNPSNSNLQFSINSNNLVTSACLYPDDTEAALLVSEDNQTVWYEYGCI

SEQ ID NO: 18768 - protein, 1871 aa, Homo sapiens
  Payload ID: 3767
  Gene Symbol: CCDC88A
  Gene Name: coiled-coil domain containing 88A
  Uniprot ID: Q3V6T2
  ENSP ID: ENSP00000410608
MENEIFTPLLEQFMTSPLVTWVKTFGPLAAGNGTNLDEYVALVDGVFLNQVMLQINPKLESQRVNKKVNNDASLRMHNLSILVRQIKFYYQETLQQLIMMSLPNVLIIGKNPFSEQGTEEVKKLLLLLLGCAVQCQKKEEFIERIQGLDFDTKAAVAAHIQEVTHNQENVFDLQWMEVTDMSQEDIEPLLKNMALHLKRLIDERDEHSETIIELSEERDGLHFLPHASSSAQSPCGSPGMKRTESRQHLSVELADAKAKIRRLRQELEEKTEQLLDCKQELEQMEIELKRLQQENMNLLSDARSARMYRDELDALREKAVRVDKLESEVSRYKERLHDIEFYKARVEELKEDNQVLLETKTMLEDQLEGTRARSDKLHELEKENLQLKAKLHDMEMERDMDRKKIEELMEENMTLEMAQKQSMDESLHLGWELEQISRTSELSEAPQKSLGHEVNELTSSRLLKLEMENQSLTKTVEELRTTVDSVEGNASKILKMEKENQRLSKKVEILENEIVQEKQSLQNCQNLSKDLMKEKAQLEKTIETLRENSERQIKILEQENEHLNQTVSSLRQRSQISAEARVKDIEKENKILHESIKETSSKLSKIEFEKRQIKKELEHYKEKGERAEELENELHHLEKENELLQKKITNLKITCEKIEALEQENSELERENRKLKKTLDSFKNLTFQLESLEKENSQLDEENLELRRNVESLKCASMKMAQLQLENKELESEKEQLKKGLELLKASFKKTERLEVSYQGLDIENQRLQKTLENSNKKIQQLESELQDLEMENQTLQKNLEELKISSKRLEQLEKENKSLEQETSQLEKDKKQLEKENKRLRQQAEIKDTTLEENNVKIGNLEKENKTLSKEIGIYKESCVRLKELEKENKELVKRATIDIKTLVTLREDLVSEKLKTQQMNNDLEKLTHELEKIGLNKERLLHDEQSTDDSRYKLLESKLESTLKKSLEIKEEKIAALEARLEESTNYNQQLRQELKTVKKNYEALKQRQDEERMVQSSPPISGEDNKWERESQETTRELLKVKDRLIEVERNNATLQAEKQALKTQLKQLETQNNNLQAQILALQRQTVSLQEQNTTLQTQNAKLQVENSTLNSQSTSLMNQNAQLLIQQSSLENENESVIKEREDLKSLYDSLIKDHEKLELLHERQASEYESLISKHGTLKSAHKNLEVEHRDLEDRYNQLLKQKGQLEDLEKMLKVEQEKMLLENKNHETVAAEYKKLCGENDRLNHTYSQLLKETEVLQTDHKNLKSLLNNSKLEQTRLEAEFSKLKEQYQQLDITSTKLNNQCELLSQLKGNLEEENRHLLDQIQTLMLQNRTLLEQNMESKDLFHVEQRQYIDKLNELRRQKEKLEEKIMDQYKFYDPSPPRRRGNWITLKMRKLIKSKKDINRERQKSLTLTPTRSDSSEGFLQLPHQDSQDSSSVGSNSLEDGQTLGTKKSSMVALKRLPFLRNRPKDKDKMKACYRRSMSMNDLVQSMVLAGQWTGSTENLEVPDDISTGKRRKELGAMAFSTTAINFSTVNSSAGFRSKQLVNNKDTTSFEDISPQGVSDDSSTGSRVHASRPASLDSGRTSTSNSNNNASLHEVKAGAVNNQSRPQSHSSGEFSLLHDHEAWSSSGSSPIQYLKRQTRSSPVLQHKISETLESRHHKIKTGSPGSEVVTLQQFLEESNKLTSVQIKSSSQENLLDEVMKSLSVSSDFLGKDKPVSCGLARSVSGKTPGDFYDRRTTKPEFLRPGPRKTEDTYFISSAGKPTPGTQGKIKLVKESSLSRQSKDSNPYATLPRASSVISTAEGTTRRTSIHDFLTKDSRLPISVDSPPAAADSNTTAASNVDKVQESRNSKSRSREQQSS

SEQ ID NO: 18769 - protein, 374 aa, Homo sapiens
  Payload ID: 3767
  Gene Symbol: CCDC88A
  Gene Name: coiled-coil domain containing 88A
  ENSP ID: ENSP00000413401
  MOD_RES (1)..(1): Any amino acid
XIMDQYKFYDPSPPRRRGNWITLKMRKLIKSKKDINRERQKSLTLTPTRSDSSEGFLQLPHQDSQDSSSVGSNSLEDGQTLGTKKSSNTTSFEDISPQGVSDDSSTGSRVHAGAVNNQSRPQSHSSGEFSLLHDHEAWSSSGSSPIQYLKRQTRSSPVLQHKISETLESRHHKIKTGSPGSEVVTLQQFLEESNKLTSVQIKSSSQENLLDEVMKSLSVSSDFLGKDKPVSCGLARSVSGKTPGDFYDRRTTKPEFLRPGPRKTEDTYFISSAGKPTPGTQGKIKLVKESSLSRQSKDSNPYATLPRASSVISTAEGTTRRTSIHDFLTKDSRLPISVDSPPAAADSNTTAASNVDKVQESRNSKSRSREQQSS

SEQ ID NO: 18770 - protein, 736 aa, Homo sapiens
  Payload ID: 3767
  Gene Symbol: CCDC88A
  Gene Name: coiled-coil domain containing 88A
  ENSP ID: ENSP00000415267
  MOD_RES (1)..(1): Any amino acid
XKKSLEIKEEKIAALEARLEESTNYNQQLRQELKTNATLQAEKQALKTQLKQLETQNNNLQAQILALQRQTVSLQEQNTTLQTQNAKLQVENSTLNSQSTSLMNQNAQLLIQQSSLENENESVIKEREDLKSLYDSLIKDHEKLELLHERQASEYESLISKHGTLKSAHKNLEVEHRDLEDRYNQLLKQKGQLEDLEKMLKVEQEKMLLENKNHETVAAEYKKLCGENDRLNHTYSQLLKETEVLQTDHKNLKSLLNNSKLEQTRLEAEFSKLKEQYQQLDITSTKLNNQCELLSQLKGNLEEENRHLLDQIQTLMLQNRTLLEQNMESKDLFHVEQRQYIDKLNELRRQKEKLEEKIMDQYKFYDPSPPRRRGNWITLKMRKLIKSKKDINRERQKSLTLTPTRSDSSEGFLQLPHQDSQDSSSVGSNSLEDGQTLGTKKSSTMNDLVQSMVLAGQWTGSTENLEVPDDISTGKRRKELGAMAFSTTAINFSTVNSSAGFRSKQLVNNKDTTSFEDISPQGVSDDSSTGSRVHASRPASLDSGRTSTSNSNNNASLHEVKAGAVNNQSRPQSHSSGEFSLLHDHEAWSSSGSSPIQYLKRQTRSSPVLQHKISETLESRHHKIKTGSPGSEVVTLQQFLEESNKLTSVQIKSSSQENLLDEVMKSLSVSSDFLGKDKPVSCGLARSVSGKTPGDFYDRRTTKPEFLRPGPRKTEDTYFISSAGKPTPGTQGKIKL

SEQ ID NO: 18771 - protein, 741 aa, Homo sapiens [sequence omitted]

SEQ ID NO: 18772 - protein, 139 aa, Homo sapiens
  Payload ID: 3768
  Gene Symbol: CCDC88B
  Gene Name: coiled-coil domain containing 88B
  Uniprot ID: A6NC98
  ENSP ID: ENSP00000301897
MPCAARSRSSWRRSWTNTACWSLCPCPGPRSPSPAPMRRAQSSLCLRDETLAGGQRRKLSSRFPVGRSSESFSPGDTPRQRFRQRHPGPLGAPVSHSKGPGVGWENSAETLQEHETDANREGPEVQEPEKRPLTPSLSQ

SEQ ID NO: 18773 - protein, 1476 aa, Homo sapiens
  Payload ID: 3768
  Gene Symbol: CCDC88B
  Gene Name: coiled-coil domain containing 88B
  Uniprot ID: A6NC98
  ENSP ID: ENSP00000349238
MEGGKGPRLRDFLSGSLATWALGLAGLVGEAEDSEGEEEEEEEEPPLWLEKRFLRLSDGALLLRVLGIIAPSSRGGPRMLRGLDGPAAWRVWNLNHLWGRLRDFYQEELQLLILSPPPDLQTLGFDPLSEEAVEQLEGVLRLLLGASVQCEHRELFIRHIQGLSLEVQSELAAAIQEVTQPGAGVVLALSGPDPGELAPAELEMLSRSLMGTLSKLARERDLGAQRLAELLLEREPLCLRPEAPSRAPAEGPSHHLALQLANAKAQLRRLRQELEEKAELLLDSQAEVQGLEAEIRRLRQEAQALSGQAKRAELYREEAEALRERAGRLPRLQEELRRCRERLQAAEAYKSQLEEERVLSGVLEASKALLEEQLEAARERCARLHETQRENLLLRTRLGEAHAELDSLRHQVDQLAEENVELELELQRSLEPPPGSPGEAPLAGAAPSLQDEVREAEAGRLRTLERENRELRGLLQVLQGQPGGQHPLLEAPREDPVLPVLEEAPQTPVAFDHSPQGLVQKARDGGPQALDLAPPALDSVLEASAECPQAPDSDPQEAESPLQAAAMDPQASDWSPQESGSPVETQESPEKAGRRSSLQSPASVAPPQGPGTKIQAPQLLGGETEGREAPQGELVPEAWGLRQEGPEHKPGPSEPSSVQLEEQEGPNQGLDLATGQAEAREHDQRLEGTVRDPAWQKPQQKSEGALEVQVWEGPIPGESLASGVAEQEALREEVAQLRRKAEALGDELEAQARKLEAQNTEAARLSKELAQARRAEAEAHREAEAQAWEQARLREAVEAAGQELESASQEREALVEALAAAGRERRQWEREGSRLRAQSEAAEERMQVLESEGRQHLEEAERERREKEALQAELEKAVVRGKELGDRLEHLQRELEQAALERQEFLREKESQHQRYQGLEQRLEAELQAAATSKEEALMELKTRALQLEEELFQLRQGPAGLGPKKRAEPQLVETQNVRLIEVERSNAMLVAEKAALQGQLQHLEGQLGSLQGRAQELLLQSQRAQEHSSRLQAEKSVLEIQGQELHRKLEVLEEEVRAARQSQEETRGQQQALLRDHKALAQLQRRQEAELEGLLVRHRDLKANMRALELAHRELQGRHEQLQAQRASVEAQEVALLAERERLMQDGHRQRGLEEELRRLQSEHDRAQMLLAELSRERGELQGERGELRGRLARLELERAQLEMQSQQLRESNQQLDLSACRLTTQCELLTQLRSAQEEENRQLLAEVQALSRENRELLERSLESRDHLHREQREYLDQLNALRREKQKLVEKIMDQYRVLEPVPLPRTKKGSWLADKVKRLMRPRREGGPPGGLRLGADGAGSTESLGGPPETELPEGREADGTGSPSPAPMRRAQSSLCLRDETLAGGQRRKLSSRFPVGRSSESFSPGDTPRQRFRQRHPGPLGAPVSHSKGPGVGWENSAETLQEHETDANREGPEVQEPEKRPLTPSLSQ

SEQ ID NO: 18774 - protein, 712 aa, Homo sapiens
  Payload ID: 3768
  Gene Symbol: CCDC88B
  Gene Name: coiled-coil domain containing 88B
  ENSP ID: ENSP00000352974
MAGVAAHRAHPPFTAHMKNRGLREELEKAVVRGKELGDRLEHLQRELEQAALERQEFLREKESQHQRYQGLEQRLEAELQAAATSKEEALMELKTRALQLEEELFQLRQGPAGLGPKKRAEPQLVETQNVRLIEVERSNAMLVAEKAALQGQLQHLEGQLGSLQGRAQELLLQSQRAQEHSSRLQAEKSVLEIQGQELHRKLEVLEEEVRAARQSQEETRGQQQALLRDHKALAQLQRRQEAELEGLLVRHRDLKANMRALELAHRELQGRHEQLQAQRASVEAQEVALLAERERLMQDGHRQRGLEEELRRLQSEHDRAQMLLAELSRERGELQGERGELRGRLARLELERAQLEMQSQQLRESNQQLDLSACRLTTQCELLTQLRSAQEEENRQLLAEVQALSRENRELLERSLESRDHLHREQREYLDQLNALRREKQKLVEKIMDQYRVLEPVPLPRTKKGSWLADKGPLPRHPCAGPRAPSACGMRPWQAGSGGNSAQGSRWGEALSHSALGTPLGNDSDSAIQAPWGRPSPTAKDLVWDGRTPLRPCRNTKQMPTERALRYRNRRNVPSPHPSASDTVGTAGLGVQPSRHWSVSGGPRQPKSSGSQGPQGESLDKEAWALRSSTVSAGARRWSWDECVDRGDGWPPRAAPGWSSGSSRWLPLRQRSLGDPPAEGGWQELAREPPALSRWEAESQCWGTVAWADLEP

SEQ ID NO: 18775 - protein, 506 aa, Homo sapiens
  Payload ID: 3769
  Gene Symbol: CCDC88C
  Gene Name: coiled-coil domain containing 88C
  ENSP ID: ENSP00000330332
MSVLSPGDLKPKRGSPHRGSLDRTDASTDLAMRSWPSELGSRTCSTSATTTAPSNSTPIARHPGRTKGYNSDDNLCEPSLEFEVPNHRQYVSRPSSLESSRNTSSNSSPLNLKGSSEQLHGRSESFSSEDLIPSRDLATLPREASTPGRNALGRHEYPLPRNGPLPQEGAQKRGTAPPYVGVRPCSASPSSEMVTLEEFLEESNRSSPTHDTPSCRDDLLSDYFRKASDPPAIGGQPGPPAKKEGAKMPTNFVAPTVKMAAPTSEGRPLKPGQYVKPNFRLTEAEAPPSVAPRQAQPPQSLSLGRPRQAPEALGGRETGSHTLQSPAPPSSHSLARERTPLVGKAGSSCQGPGPRSRPLDTRRFSLAPPKEERLAPLHQSATAPAIATAGAGAAAAGSGSNSQLLHFSPAAAPAARTKPKAPPRSGEVATITPVRAGLSLSEGDGVPGQGCSEGLPAKSPGRSPDLAPHLGRALEDCSRGSVSKSSPASPEPGGDPQTVWYEYGCV

SEQ ID NO: 18776 - protein, 88 aa, Homo sapiens
  Payload ID: 3769
  Gene Symbol: CCDC88C
  Gene Name: coiled-coil domain containing 88C
  ENSP ID: ENSP00000374506
MGGAEWESEQTGVKTFGPFGSGSQDNLTMYMDLVDGIFLNQIMLQIDPRPTNQRINKHVNNDVNLRIQNLTILVRNIKTYYQDRPFFR

SEQ ID NO: 18777 - protein, 2028 aa, Homo sapiens
  Payload ID: 3769
  Gene Symbol: CCDC88C
  Gene Name: coiled-coil domain containing 88C
  Uniprot ID: Q9P219
  ENSP ID: ENSP00000374507
MDVTVSELLELFLQSPLVTWVKTFGPFGSGSQDNLTMYMDLVDGIFLNQIMLQIDPRPTNQRINKHVNNDVNLRIQNLTILVRNIKTYYQEVLQQLIVMNLPNVLMIGRDPLSGKSMEEIKKVLLLVLGCAVQCERKEEFIERIKQLDIETQAGIVAHIQEVTHNQENVFDLQWLELPDVAPEELEALSRSMVLHLRRLIDQRDECTELIVDLTQERDYLQAQHPPSPIKSSSADSTPSPTSSLSSEDKQHLAVELADTKARLRRVRQELEDKTEQLVDTRHEVDQLVLELQKVKQENIQLAADARSARAYRDELDSLREKANRVERLELELTRCKEKLHDVDFYKARMEELREDNIILIETKAMLEEQLTAARARGDKVHELEKENLQLKSKLHDLELDRDTDKKRIEELLEENMVLEIAQKQSMNESAHLGWELEQLSKNADLSDASRKSFVFELNECASSRILKLEKENQSLQSTIQGLRDASLVLEESGLKCGELEKENHQLSKKIEKLQTQLEREKQSNQDLETLSEELIREKEQLQSDMETLKADKARQIKDLEQEKDHLNRAMWSLRERSQVSSEARMKDVEKENKALHQTVTEANGKLSQLEFEKRQLHRDLEQAKEKGERAEKLERELQRLQEENGRLARKVTSLETATEKVEALEHESQGLQLENRTLRKSLDTLQNVSLQLEGLERDNKQLDAENLELRRLVETMRFTSTKLAQMERENQQLEREKEELRKNVDLLKALGKKSERLELSYQSVSAENLRLQQSLESSSHKTQTLESELGELEAERQALRRDLEALRLANAQLEGAEKDRKALEQEVAQLEKDKKLLEKEAKRLWQQVELKDAVLDDSTAKLSAVEKESRALDKELARCRDAAGKLKELEKDNRDLTKQVTVHARTLTTLREDLVLEKLKSQQLSSELDKLSQELEKVGLNRELLLQEDDSGSDTKYKILEGRNESALKTTLAMKEEKIVLLEAQMEEKASLNRQLESELQMLKKECETLRQNQGEGQHLQNSFKHPAGKTAASHQGKEAWGPGHKEATMELLRVKDRAIELERNNAALQAEKQLLKEQLQHLETQNVTFSSQILTLQKQSAFLQEHNTTLQTQTAKLQVENSTLSSQSAALTAQYTLLQNHHTAKETENESLQRQQEQLTAAYEALLQDHEHLGTLHERQSAEYEALIRQHSCLKTLHRNLELEHKELGERHGDMLKRKAELEEREKVLTTEREALQQEQRTNALAMGENQRLRGELDRVNFLHHQLKGEYEELHAHTKELKTSLNNAQLELNRWQARFDELKEQHQTMDISLTKLDNHCELLSRLKGNLEEENHHLLSQIQLLSQQNQMLLEQNMENKEQYHEEQKQYIDKLNALRRHKEKLEEKIMDQYKFYDPPPKKKNHWIGAKALVKLIKPKKEGSRERLKSTVDSPPWQLESSDPASPAASQPLRSQAENPDTPALGSNCAEERDAHNGSVGKGPGDLKPKRGSPHRGSLDRTDASTDLAMRSWPSELGSRTCSTSATTTAPSNSTPIARHPGRTKGYNSDDNLCEPSLEFEVPNHRQYVSRPSSLESSRNTSSNSSPLNLKGSSEQLHGRSESFSSEDLIPSRDLATLPREASTPGRNALGRHEYPLPRNGPLPQEGAQKRGTAPPYVGVRPCSASPSSEMVTLEEFLEESNRSSPTHDTPSCRDDLLSDYFRKASDPPAIGGQPGPPAKKEGAKMPTNFVAPTVKMAAPTSEGRPLKPGQYVKPNFRLTEAEAPPSVAPRQAQPPQSLSLGRPRQAPVPPASHAPASRSASLSRAFSLASADLLRASGPEACKQESPQKLGAPEALGGRETGSHTLQSPAPPSSHSLARERTPLVGKAGSSCQGPGPRSRPLDTRRFSLAPPKEERLAPLHQSATAPAIATAGAGAAAAGSGSNSQLLHFSPAAAPAARTKPKAPPRSGEVATITPVRAGLSLSEGDGVPGQGCSEGLPAKSPGRSPDLAPHLGRALEDCSRGSVSKSSPASPEPGGDPQTVWYEYGCV

SEQ ID NO: 18778 - protein, 96 aa, Homo sapiens
  Payload ID: 3769
  Gene Symbol: CCDC88C
  Gene Name: coiled-coil domain containing 88C
  ENSP ID: ENSP00000451392
MDVTVSELLELFLQSPLVTWVKTFGPFGSGSQDNLTMYMDLVDGIFLNQIMLQIDPRPTNQRINKHVNNDVNLRIQNLTILVRNIKTYYQDRPFFR

SEQ ID NO: 18779 - protein, 131 aa, Homo sapiens
  Payload ID: 3769
  Gene Symbol: CCDC88C
  Gene Name: coiled-coil domain containing 88C
  ENSP ID: ENSP00000452406
  MOD_RES (1)..(1): Any amino acid
XIGAKALVKLIKPKKEGSRERLKSTVDSPPWQLESSDPASPAASQPLRSQAENPDTPALGSNCAEERDAHNGSVGKAPPRKKSPFLKSKNKDKDKSPTTHPALSKRLRFWSSSDIPSSPNEPLSFSDIGDF

SEQ ID NO: 18780 - protein, 374 aa, Homo sapiens
  Payload ID: 3770
  Gene Symbol: CCDC89
  Gene Name: coiled-coil domain containing 89
  Uniprot ID: Q8N998
  ENSP ID: ENSP00000320649
MRAPMLQKQQAPRMDTPPPEERLEKQNEKLNNQEEETEFKELDGLREALANLRGLSEEERSEKAMLRSRIEEQSQLICILKRRSDEALERCQILELLNAELEEKMMQEAEKLKAQGEYSRKLEERFMTLAANHELMLRFKDEYKSENIKLREENEKLRLENSSLFSQALKDEEAKVLQLTVRCEALTGELETLKERCAQDACQAQAREKELLELQSQQACTHTKETEQLRSQLQTLKQQHQQAVEQIAKAEETHSSLSQELQARLQTVTREKEELLQLSIERGKVLQNKQAEICQLEEKLEIANEDRKHALERFEQEAVAVDSNLRVRELQRKVDGIQKAYDELRLQSEAFKKHSLDLLSKERELNGKLRHLSP

SEQ ID NO: 18781 - protein, 531 aa, Homo sapiens
  Payload ID: 3771
  Gene Symbol: CCDC9
  Gene Name: coiled-coil domain containing 9
  Uniprot ID: Q9Y3X0
  ENSP ID: ENSP00000221922
MAATLDLKSKEEKDAELDKRIEALRRKNEALIRRYQEIEEDRKKAELEGVAVTAPRKGRSVEKENVAVESEKNLGPSRRSPGTPRPPGASKGGRTPPQQGGRAGMGRASRSWEGSPGEQPRGGGAGGRGRRGRGRGSPHLSGAGDTSISDRKSKEWEERRRQNIEKMNEEMEKIAEYERNQREGVLEPNPVRNFLDDPRRRSGPLEESERDRREESRRHGRNWGGPDFERVRCGLEHERQGRRAGLGSAGDMTLSMTGRERSEYLRWKQEREKIDQERLQRHRKPTGQWRREWDAEKTDGMFKDGPVPAHEPSHRYDDQAWARPPKPPTFGEFLSQHKAEASSRRRRKSSRPQAKAAPRAYSDHDDRWETKEGAASPAPETPQPTSPETSPKETPMQPPEIPAPAHRPPEDEGEENEGEEDEEWEDISEDEEEEEIEVEEGDEEEPAQDHQAPEAAPTGIPCSEQAHGVPFSPEEPLLEPQAPGTPSSPFSPPSGHQPVSDWGEEVELNSPRTTHLAGALSPGEAWPFESV

SEQ ID NO: 18782 - protein, 128 aa, Homo sapiens
  Payload ID: 3771
  Gene Symbol: CCDC9
  Gene Name: coiled-coil domain containing 9
  ENSP ID: ENSP00000469717
MAATLDLKSKEEKDAELDKRIEALRRKNEALIRRYQEIEEDRKKAELEGVAVTAPRKGRSVEKENVAVESEKNLGPSRRSPGTPRPPGASKGGRTPPQQGGRAGMGRASRSWEGSPGEQPRGGGAGGR

SEQ ID NO: 18783 - protein, 56 aa, Homo sapiens
  Payload ID: 3771
  Gene Symbol: CCDC9
  Gene Name: coiled-coil domain containing 9
  ENSP ID: ENSP00000470706
MAATLDLKSKEEKDAELDKRIEALRRKNEALIRRYQEIEEDRKKAELEGVAVTAPR

SEQ ID NO: 18784 - protein, 48 aa, Homo sapiens
  Payload ID: 3771
  Gene Symbol: CCDC9
  Gene Name: coiled-coil domain containing 9
  ENSP ID: ENSP00000472843
MAATLDLKSKEEKDAELDKRIEALRRKNEALIRRYQEIEEDRKKAELE

SEQ ID NO: 18785 - protein, 162 aa, Homo sapiens
  Payload ID: 3772
  Gene Symbol: CCDC90B
  Gene Name: coiled-coil domain containing 90B
  ENSP ID: ENSP00000260054
MNSRQAWRLFLSQGRGDRWVSRPRGHFSPALRREFFTTTTKEGYDRRPVDITPLEQRKLTFDTHALVQDLETHGFDKTQAETIVSALTALSNVSLDTIYKEMVTQAQQEITVQQLMAHLDAIRKDMVILEKSEFANLRAENEKMKIELDQVKQQLMVSEFFF

SEQ ID NO: 18786 - protein, 245 aa, Homo sapiens
  Payload ID: 3772
  Gene Symbol: CCDC90B
  Gene Name: coiled-coil domain containing 90B
  Uniprot ID: Q9GZT6
  ENSP ID: ENSP00000390990
MLANCGSVCEETQFRGTTVAPALGEFFTTTTKEGYDRRPVDITPLEQRKLTFDTHALVQDLETHGFDKTQAETIVSALTALSNVSLDTIYKEMVTQAQQEITVQQLMAHLDAIRKDMVILEKSEFANLRAENEKMKIELDQVKQQLMHETSRIRADNKLDINLERSRVTDMFTDQEKQLMETTTEFTKKDTQTKSIISETSNKIDAEIASLKTLMESNKLETIRYLAASVFTCLAIALGFYRFWK

SEQ ID NO: 18787 - protein, 153 aa, Homo sapiens
  Payload ID: 3772
  Gene Symbol: CCDC90B
  Gene Name: coiled-coil domain containing 90B
  Uniprot ID: Q9GZT6
  ENSP ID: ENSP00000431345
MVTQAQQEITVQQLMAHLDAIRKDMVILEKSEFANLRAENEKMKIELDQVKQQLMHETSRIRADNKLDINLERSRVTDMFTDQEKQLMETTTEFTKKDTQTKSIISETSNKIDAEIASLKTLMESNKLETIRYLAASVFTCLAIALGFYRFWK

SEQ ID NO: 18788 - protein, 153 aa, Homo sapiens; identical to SEQ ID NO: 18787
  Payload ID: 3772
  Gene Symbol: CCDC90B
  Gene Name: coiled-coil domain containing 90B
  Uniprot ID: Q9GZT6
  ENSP ID: ENSP00000431424

SEQ ID NO: 18789 - protein, 208 aa, Homo sapiens
  Payload ID: 3772
  Gene Symbol: CCDC90B
  Gene Name: coiled-coil domain containing 90B
  ENSP ID: ENSP00000431523
MNSRQAWRLFLSQGRGDRWVSRPRGHFSPALRREFFTTTTKEGYDRRPVDITPLEQRKLTFDTHALVQDLETHGFDKTQAETIVSALTALSNVSLDTIYKEMVTQAQQEITVQQLMAHLDAIRKDMVILEKSEFANLRAENEKMKIELDQVKQQLMTFFLTSCCFISYSLQIKKSNLWKQLQNLQKRILKPKVLFQRPVIKLTLKLLP

SEQ ID NO: 18790 - protein, 38 aa, Homo sapiens
  Payload ID: 3772
  Gene Symbol: CCDC90B
  Gene Name: coiled-coil domain containing 90B
  ENSP ID: ENSP00000432115
MNSRQAWRLFLSQGRGDRWVSRPRGHFSPALRRVFKPF

SEQ ID NO: 18791 - protein, 117 aa, Homo sapiens
  Payload ID: 3772
  Gene Symbol: CCDC90B
  Gene Name: coiled-coil domain containing 90B
  ENSP ID: ENSP00000432646
MNSRQAWRLFLSQGRGDRWVSRPRGHFSPALRREFFTTTTKEGYDRRPVDITPLEQRKLTFDTHALVQDLETHGFDKTQAETIVSALTALSNVSLDTIYKEMVTQAQQVIFILFSRK

SEQ ID NO: 18792 - protein, 57 aa, Homo sapiens
  Payload ID: 3772
  Gene Symbol: CCDC90B
  Gene Name: coiled-coil domain containing 90B
  ENSP ID: ENSP00000432999
MNSRQAWRLFLSQGRGDRWVSRPRGHFSPALRRGNNSTTANGSFGCYQERHGHPREK

SEQ ID NO: 18793 - protein, 95 aa, Homo sapiens
  Payload ID: 3772
  Gene Symbol: CCDC90B
  Gene Name: coiled-coil domain containing 90B
  ENSP ID: ENSP00000433201
  MOD_RES (1)..(1): Any amino acid
XRQAWRLFLSQGRGDRWVSRPRGHFSPALRREFFTTTTKEGYDRRPVDITPLEQRKLTFDTHALVQDLETHGNNSTTANGSFGCYQERHGHPREK

SEQ ID NO: 18794 - protein, 43 aa, Homo sapiens
  Payload ID: 3772
  Gene Symbol: CCDC90B
  Gene Name: coiled-coil domain containing 90B
  ENSP ID: ENSP00000433992
MNSRQAWRLFLSQGRGDRWVSRPRGHFSPALRRGEARRRVIDA

SEQ ID NO: 18795 - protein, 57 aa, Homo sapiens; identical to SEQ ID NO: 18792
  Payload ID: 3772
  Gene Symbol: CCDC90B
  Gene Name: coiled-coil domain containing 90B
  ENSP ID: ENSP00000434078

SEQ ID NO: 18796 - protein, 97 aa, Homo sapiens
  Payload ID: 3772
  Gene Symbol: CCDC90B
  Gene Name: coiled-coil domain containing 90B
  ENSP ID: ENSP00000434242
MNSRQAWRLFLSQGRGDRWVSRPRGHFSPALRREFFTTTTKEGYDRRPVDITPLEQRKLTFDTHALVQDLETHGNNSTTANGSFGCYQERHGHPREK

SEQ ID NO: 18797 - protein, 254 aa, Homo sapiens
  Payload ID: 3772
  Gene Symbol: CCDC90B
  Gene Name: coiled-coil domain containing 90B
  Uniprot ID: Q9GZT6
  ENSP ID: ENSP00000434724
MNSRQAWRLFLSQGRGDRWVSRPRGHFSPALRREFFTTTTKEGYDRRPVDITPLEQRKLTFDTHALVQDLETHGFDKTQAETIVSALTALSNVSLDTIYKEMVTQAQQEITVQQLMAHLDAIRKDMVILEKSEFANLRAENEKMKIELDQVKQQLMHETSRIRADNKLDINLERSRVTDMFTDQEKQLMETTTEFTKKDTQTKSIISETSNKIDAEIASLKTLMESNKLETIRYLAASVFTCLAIALGFYRFWK

SEQ ID NO: 18798 - protein, 38 aa, Homo sapiens; identical to SEQ ID NO: 18790
  Payload ID: 3772
  Gene Symbol: CCDC90B
  Gene Name: coiled-coil domain containing 90B
  ENSP ID: ENSP00000434775

SEQ ID NO: 18799 - protein, 133 aa, Homo sapiens
  Payload ID: 3772
  Gene Symbol: CCDC90B
  Gene Name: coiled-coil domain containing 90B
  ENSP ID: ENSP00000436974
GFDKTQAETIVSALTALSNVSLDTIYKEMVTQAQQEITVQQLMAHLDAIRKDMVILEKSEFANLRAENEKMKIELDQVKQQLMHETSRIRADNKLDINLERSRVTDMFTDQEKQLMETTTEFTKKLRCLLAWQ

SEQ ID NO: 18800 - protein, 441 aa, Homo sapiens
  Payload ID: 3773
  Gene Symbol: CCDC91
  Gene Name: coiled-coil domain containing 91
  Uniprot ID: Q7Z6B0
  ENSP ID: ENSP00000370658
MDDDDFGGFEAAETFDGGSGETQTTSPAIPWAAFPAVSGVHLSPSSPEIVLDRDHSSSIGCLSSDAIISSPENTHAANSIVSQTIPKAQIQQSTHTHLDISLFPLGLTDEKSNGTIALVDDSEDPGANVSNIQLQQKISSLEIKLKVSEEEKQRIKQDVESLMEKHNVLEKGFLKEKEQEAISFQDRYKELQEKHKQELEDMRKAGHEALSIIVDEYKALLQSSVKQQVEAIEKQYISAIEKQAHKCEELLNAQHQRLLEMLDTEKELLKEKIKEALIQQSQEQKEILEKCLEEERQRNKEALVSAAKLEKEAVKDAVLKVVEEERKNLEKAHAEERELWKTEHAKDQEKVSQEIQKAIQEQRKISQETVKAAIIEEQKRSEKAVEEAVKRTRDELIEYIKEQKRLDQVIRQRSLSSLELFLSCAQKQLSALIATEPVDIE

SEQ ID NO: 18801 - protein, 441 aa, Homo sapiens; identical to SEQ ID NO: 18800
  Payload ID: 3773
  Gene Symbol: CCDC91
  Gene Name: coiled-coil domain containing 91
  Uniprot ID: Q7Z6B0
  ENSP ID: ENSP00000438040

SEQ ID NO: 18802 - protein, 55 aa, Homo sapiens
  Payload ID: 3773
  Gene Symbol: CCDC91
  Gene Name: coiled-coil domain containing 91
  ENSP ID: ENSP00000438558
MDDDDFGGFEAAETFDGGSGETQTTSPAIPWAAFPAGKHAIFIVSCLPEFMVELH

SEQ ID NO: 18803 - protein, 46 aa, Homo sapiens
  Payload ID: 3773
  Gene Symbol: CCDC91
  Gene Name: coiled-coil domain containing 91
  ENSP ID: ENSP00000439935
LDQVIRQRSLSSLELFLSCAQKQDTEGLLVRWQKRDMATRISLSRP

SEQ ID NO: 18804 - protein, 85 aa, Homo sapiens
  Payload ID: 3773
  Gene Symbol: CCDC91
  Gene Name: coiled-coil domain containing 91
  ENSP ID: ENSP00000440194
MDDDDFGGFEAAETFDGGSGETQTTSPAIPWAAFPAVSGVHLSPSSPEIVLDRDHSSSIGCLSSDAIISSPENTHAANSIVSQTI

SEQ ID NO: 18805 - protein, 405 aa, Homo sapiens
  Payload ID: 3773
  Gene Symbol: CCDC91
  Gene Name: coiled-coil domain containing 91
  Uniprot ID: Q7Z6B0
  ENSP ID: ENSP00000440513
MDDDDFGGFEAAETFDGGSGETQTTSPAIPWAAFPAVSGVHLSPSSPEIVLDRDHSSSIGCLSSDAIISSPENTHAANSIVSQTIPKAQIQQSTHTHLDISLFPLGLTDEKSNGTIALVDDSEDPGANVSNIQLQQKISSLEIKLKVSEEEKQRIKQDVESLMEKHNVLEKGFLKEKEQEAISFQDRYKELQEKHKQELEDMRKAGHEALSIIVDEYKHQRLLEMLDTEKELLKEKIKEALIQQSQEQKEILEKCLEEERQRNKEALVSAAKLEKEAVKDAVLKVVEEERKNLEKAHAEERELWKTEHAKDQEKVSQEIQKAIQEQRKISQETVKAAIIEEQKRSEKAVEEAVKRTRDELIEYIKEQKRLDQVIRQRSLSSLELFLSCAQKQLSALIATEPVDIE

SEQ ID NO: 18806 - protein, 267 aa, Homo sapiens
  Payload ID: 3773
  Gene Symbol: CCDC91
  Gene Name: coiled-coil domain containing 91
  ENSP ID: ENSP00000441651
MDDDDFGGFEAAETFDGGSGETQTTSPAIPWAAFPAVSGVHLSPSSPEIVLDRDHSSSIGCLSSDAIISSPENTHAANSIVSQTIPKAQIQQSTHTHLDISLFPLGLTDEKSNGTIALVDDSEDPGANVSNIQLQQKISSLEIKLKVSEEEKQRIKQDVESLMEKHNVLEKGFLKEKEQEAISFQDRYKELQEKHKQELEDMRKAGHEALSIIVDEYKALLQSSVKQQVEAIEKQYISAIEKQAHKCEELLNAQSALFSILPAIGCF

SEQ ID NO: 18807 - protein, 120 aa, Homo sapiens
  Payload ID: 3773
  Gene Symbol: CCDC91
  Gene Name: coiled-coil domain containing 91
  ENSP ID: ENSP00000441714
MIVSFLRPPQPCKPALLQSSVKQQVEAIEKQYISAIEKQAHKCEELLNAQHQRLLEMLDTEKELLKEKIKEALIQQSQEQKEILEKCLEEERQRNKEALVSAAKLEKEAVKDAVLKVVEE

SEQ ID NO: 18808 - protein, 122 aa, Homo sapiens
  Payload ID: 3773
  Gene Symbol: CCDC91
  Gene Name: coiled-coil domain containing 91
  ENSP ID: ENSP00000442473
  MOD_RES (1)..(1): Any amino acid
XKAHAEERELWKTEHAKDQEKVSQEIQKAIQEQRKISQETVKAAIIEEQKRSEKAVEEAVKRTRDELIEYIKEQKRLDQVIRQRSLSSLELFLSCAQKQDTEGLLVRWQKRDMATRISLSRP

SEQ ID NO: 18809 - protein, 362 aa, Homo sapiens
  Payload ID: 3773
  Gene Symbol: CCDC91
  Gene Name: coiled-coil domain containing 91
  ENSP ID: ENSP00000442544
MDDDDFGGFEAAETFDGGSGETQTTSPAIPWAAFPAVSGVHLSPSSPEIVLDRDHSSSIGCLSSDAIISSPENTHAANSIVSQTIPKAQIQQSTHTHLDISLFPLGLTDEKSNGTIALVDDSEDPGANVSNIQLQQKISSLEIKLKVSEEEKQRIKQDVESLMEKHNVLEKGFLKEKEQEAISFQDRYKELQEKHKQELEDMRKAGHEALSIIVDEYKALLQSSVKQQVEAIEKQYISAIEKQAHKCEELLNAQHQRLLEMLDTEKELLKEKIKEALIQQSQEQKEILEKCLEEERQRNKEALVSAAKLEKEAVKDAVLKVVEEERKNLEKAHAEERELWKTEHAKDQEKVSQEIQKAIQEQ

SEQ ID NO: 18810 - protein, 30 aa, Homo sapiens
  Payload ID: 3773
  Gene Symbol: CCDC91
  Gene Name: coiled-coil domain containing 91
  ENSP ID: ENSP00000444038
LDQVIRQRSLSSLELFLSCAQKQPRLTTGN

SEQ ID NO: 18811 - protein, 126 aa, Homo sapiens
  Payload ID: 3773
  Gene Symbol: CCDC91
  Gene Name: coiled-coil domain containing 91
  ENSP ID: ENSP00000444440
MLDTEKELLKEKIKEALIQQSQEQKEILEKCLEEERQRNKEALVSAAKLEKEAVKDAVLKVVEEERKNLEKAHAEERELWKTEHAKDQEKVSQEIQKAIQEQRKISQETVKAAIIEEQKRSEKAVE

SEQ ID NO: 18812 - protein, 361 aa, Homo sapiens
  Payload ID: 3773
  Gene Symbol: CCDC91
  Gene Name: coiled-coil domain containing 91
  ENSP ID: ENSP00000445660
MDDDDFGGFEAAETFDGGSGETQTTSPAIPWAAFPAVSGVHLSPSSPEIVLDRDHSSSIGCLSSDAIISSPENTHAANSIVSQTIPKAQIQQSTHTHLDISLFPLGLTDEKSNGTIALVDDSEDPGANVSNIQLQQKISSLEIKLKVSEEEKQRIKQDVESLMEKHNVLEKGFLKEKEQEAISFQDRYKELQEKHKQELEDMRKAGHEALSIIVDEYKALLQSSVKQQVEAIEKQYISAIEKQAHKCEELLNAQHQRLLEMLDTEKELLKEKIKEALIQQSQEQKEILEKCLEEERQRNKEALVSAAKLEKEAVKDAVLKVVEEERKNLEKAHAEERELWKTEHAKDQEKVSQEIQKAIQE

SEQ ID NO: 18813 - protein, 108 aa, Homo sapiens
  Payload ID: 3773
  Gene Symbol: CCDC91
  Gene Name: coiled-coil domain containing 91
  ENSP ID: ENSP00000445999
ALVSAAKLEKEAVKDAVLKVVEEERKNLEKAHAEERELWKTEHAKDQEKVSQEIQKAIQEQRKISQETVKAAIIEEQKRSEKAVEEAVKRTRDELIEYIKEQKRVSIS

SEQ ID NO: 18814 - protein, 91 aa, Homo sapiens
  Payload ID: 3773
  Gene Symbol: CCDC91
  Gene Name: coiled-coil domain containing 91
  ENSP ID: ENSP00000446045
MDDDDFGGFEAAETFDGGSGETQTTSPAIPWAAFPAVSGVHLSPSSPEIVLDRDHSSSIGCLSSDAIISSPENTHAANSIVSQTIPKAQIQ

SEQ ID NO: 18815 - protein, 27 aa, Homo sapiens
  Payload ID: 3773
  Gene Symbol: CCDC91
  Gene Name: coiled-coil domain containing 91
  ENSP ID: ENSP00000446059
  MOD_RES (1)..(1): Any amino acid
XDQVIRQRSLSSLELFLSCAQKQRSLA

SEQ ID NO: 18816 - protein, 30 aa, Homo sapiens; identical to SEQ ID NO: 18810
  Payload ID: 3773
  Gene Symbol: CCDC91
  Gene Name: coiled-coil domain containing 91
  ENSP ID: ENSP00000446329

SEQ ID NO: 18817 - protein, 331 aa, Homo sapiens
  Payload ID: 3774
  Gene Symbol: CCDC92
  Gene Name: coiled-coil domain containing 92
  Uniprot ID: Q53HC0
  ENSP ID: ENSP00000238156
MTSPHFSSYDEGPLDVSMAATNLENQLHSAQKNLLFLQREHASTLKGLHSEIRRLQQHCTDLTYELTVKSSEQTGDGTSKSSELKKRCEELEAQLKVKENENAELLKELEQKNAMITVLENTIKEREKKYLEELKAKSHKLTLLSSELEQRASTIAYLTSQLHAAKKKLMSSSGTSDASPSGSPVLASYKPAPPKDKLPETPRRRMKKSLSAPLHPEFEEVYRFGAESRKLLLREPVDAMPDPTPFLLARESAEVHLIKERPLVIPPIASDRSGEQHSPAREKPHKAHVGVAHRIHHATPPQAQPEVKTLAVDQVNGGKVVRKHSGTDRTV

SEQ ID NO: 18818 - protein, 96 aa, Homo sapiens
  Payload ID: 3774
  Gene Symbol: CCDC92
  Gene Name: coiled-coil domain containing 92
  ENSP ID: ENSP00000438281
MAATNLENQLHSAQKNLLFLQREHASTLKGLHSEIRRLQQHCTDLTYELTVKSSEQTGDGTSKSSELKKRCEELEAQLKVKENENAELLKELEQKN

SEQ ID NO: 18819 - protein, 122 aa, Homo sapiens
  Payload ID: 3774
  Gene Symbol: CCDC92
  Gene Name: coiled-coil domain containing 92
  ENSP ID: ENSP00000439441
MTSPHFSSYDEGPLDVSMAATNLENQLHSAQKNLLFLQREHASTLKGLHSEIRRLQQHCTDLTYELTVKSSEQTGDGTSKSSELKKRCEELEAQLKVKENENAELLKELEQKNAMITVLENT

SEQ ID NO: 18820 - protein, 314 aa, Homo sapiens
  Payload ID: 3774
  Gene Symbol: CCDC92
  Gene Name: coiled-coil domain containing 92
  Uniprot ID: Q53HC0
  ENSP ID: ENSP00000439526
MAATNLENQLHSAQKNLLFLQREHASTLKGLHSEIRRLQQHCTDLTYELTVKSSEQTGDGTSKSSELKKRCEELEAQLKVKENENAELLKELEQKNAMITVLENTIKEREKKYLEELKAKSHKLTLLSSELEQRASTIAYLTSQLHAAKKKLMSSSGTSDASPSGSPVLASYKPAPPKDKLPETPRRRMKKSLSAPLHPEFEEVYRFGAESRKLLLREPVDAMPDPTPFLLARESAEVHLIKERPLVIPPIASDRSGEQHSPAREKPHKAHVGVAHRIHHATPPQAQPEVKTLAVDQVNGGKVVRKHSGTDRTV

SEQ ID NO: 18821 - protein, 314 aa, Homo sapiens; identical to SEQ ID NO: 18820
  Payload ID: 3774
  Gene Symbol: CCDC92
  Gene Name: coiled-coil domain containing 92
  Uniprot ID: Q53HC0
  ENSP ID: ENSP00000440024

SEQ ID NO: 18822 - protein, 12 aa, Homo sapiens
  Payload ID: 3774
  Gene Symbol: CCDC92
  Gene Name: coiled-coil domain containing 92
  ENSP ID: ENSP00000440203
MTSPHFSSYDEG

SEQ ID NO: 18823 - protein, 96 aa, Homo sapiens
  Payload ID: 3774
  Gene Symbol: CCDC92
  Gene Name: coiled-coil domain containing 92
  ENSP ID: ENSP00000442369
MTSPHFSSYDEGPLDVSMAATNLENQLHSAQKNLLFLQREHASTLKGLHSEIRRLQQHCTDLTYELTVKSSEQTGDGTSKSSELKKRCEELEAQLK

SEQ ID NO: 18824 - protein, 314 aa, Homo sapiens; identical to SEQ ID NO: 18820
  Payload ID: 3774
  Gene Symbol: CCDC92
  Gene Name: coiled-coil domain containing 92
  Uniprot ID: Q53HC0
  ENSP ID: ENSP00000479437

SEQ ID NO: 18825 - protein, 96 aa, Homo sapiens; identical to SEQ ID NO: 18823
  Payload ID: 3774
  Gene Symbol: CCDC92
  Gene Name: coiled-coil domain containing 92
  ENSP ID: ENSP00000487647

SEQ ID NO: 18826 - protein, 314 aa, Homo sapiens; identical to SEQ ID NO: 18820
  Payload ID: 3774
  Gene Symbol: CCDC92
  Gene Name: coiled-coil domain containing 92
  Uniprot ID: Q53HC0
  ENSP ID: ENSP00000487695

SEQ ID NO: 18827 - protein, 17 aa, Homo sapiens
  Payload ID: 3774
  Gene Symbol: CCDC92
  Gene Name: coiled-coil domain containing 92
  ENSP ID: ENSP00000488154
MTSPHFSSYDEGPLDVS

SEQ ID NO: 18828 - protein, 122 aa, Homo sapiens; identical to SEQ ID NO: 18819
  Payload ID: 3774
  Gene Symbol: CCDC92
  Gene Name: coiled-coil domain containing 92
  ENSP ID: ENSP00000488169

SEQ ID NO: 18829 - protein, 96 aa, Homo sapiens; identical to SEQ ID NO: 18818
  Payload ID: 3774
  Gene Symbol: CCDC92
  Gene Name: coiled-coil domain containing 92
  ENSP ID: ENSP00000488179

SEQ ID NO: 18830 - protein, 331 aa, Homo sapiens; identical to SEQ ID NO: 18817
  Payload ID: 3774
  Gene Symbol: CCDC92
  Gene Name: coiled-coil domain containing 92
  Uniprot ID: Q53HC0
  ENSP ID: ENSP00000488830

SEQ ID NO: 18831 - protein, 630 aa, Homo sapiens
  Payload ID: 3775
  Gene Symbol: CCDC93
  Gene Name: coiled-coil domain containing 93
  ENSP ID: ENSP00000324135
MGLPRGPEGQGLPEVETREDEEQNVKLTEILELLVAAGYFRARIKGLSPFDKVVGGMTWCITTCNFDVDVDLLFQENSTIGQKIALSEKIVSVLPRMKCPHQLEPHQIQGMDFIHIFPVVQWLVKRAIETKEEMGDYIRSYSVSQFQKTYSLPEDDDFIKRKEKAIKTVVDLSEVYKPRRKYKRHQGAEELLDEESRIHATLLEYGRYGFSRQSKMEKAEDKKTALPAGLSATEKADAHEEDELRAAEEQRIQSLMTKMTAMANEESRLTASSVGQIVGLCSAEIKQIVSEYAEKQSELSAEESPEKLGTSQLHRRKVISLNKQIAQKTKHLEELRASHTSLQARYNEAKKTLTELKTYSEKLDKEQAALEKIESKADPSILQNLRALVAMNENLKSQEQEFKAHCREEMTRLQQEIENLKAERAPRGDEKTLSSGEPPGTLTSAMTHDEDLDRRYNMEKEKLYKIRLLQARRNREIAILHRKIDEVPSRAELIQYQKRFIELYRQISAVHKETKQFFTLYNTLDDKKVYLEKEISLLNSIHENFSQAMASPAARDQFLRQMEQIVEGIKQSRMKMEKKKQENKMRRDQLNDQYLELLEKQRLYFKTVKEFKEEGRKNEMLLSKVKAKAS

SEQ ID NO: 18832 - protein, 631 aa, Homo sapiens
  Payload ID: 3775
  Gene Symbol: CCDC93
  Gene Name: coiled-coil domain containing 93
  Uniprot ID: Q567U6
  ENSP ID: ENSP00000365477
MGLPRGPEGQGLPEVETREDEEQNVKLTEILELLVAAGYFRARIKGLSPFDKVVGGMTWCITTCNFDVDVDLLFQENSTIGQKIALSEKIVSVLPRMKCPHQLEPHQIQGMDFIHIFPVVQWLVKRAIETKEEMGDYIRSYSVSQFQKTYSLPEDDDFIKRKEKAIKTVVDLSEVYKPRRKYKRHQGAEELLDEESRIHATLLEYGRRYGFSRQSKMEKAEDKKTALPAGLSATEKADAHEEDELRAAEEQRIQSLMTKMTAMANEESRLTASSVGQIVGLCSAEIKQIVSEYAEKQSELSAEESPEKLGTSQLHRRKVISLNKQIAQKTKHLEELRASHTSLQARYNEAKKTLTELKTYSEKLDKEQAALEKIESKADPSILQNLRALVAMNENLKSQEQEFKAHCREEMTRLQQEIENLKAERAPRGDEKTLSSGEPPGTLTSAMTHDEDLDRRYNMEKEKLYKIRLLQARRNREIAILHRKIDEVPSRAELIQYQKRFIELYRQISAVHKETKQFFTLYNTLDDKKVYLEKEISLLNSIHENFSQAMASPAARDQFLRQMEQIVEGIKQSRMKMEKKKQENKMRRDQLNDQYLELLEKQRLYFKTVKEFKEEGRKNEMLLSKVKAKAS

SEQ ID NO: 18833 - protein, 91 aa, Homo sapiens
  Payload ID: 3775
  Gene Symbol: CCDC93
  Gene Name: coiled-coil domain containing 93
  ENSP ID: ENSP00000392989
QNLRALVAMNENLKSQEQEFKAHCREEMTRLQQEIENLKAERAPRGDEKTLSSGEPPGTLTSAMTHDENELQHSSSEVCWILPAAEPLGKT

SEQ ID NO: 18834 - protein, 323 aa, Homo sapiens
  Payload ID: 3776
  Gene Symbol: CCDC94
  Gene Name: coiled-coil domain containing 94
  Uniprot ID: Q9BW85
  ENSP ID: ENSP00000262962
MSERKVLNKYYPPDFDPSKIPKLKLPKDRQYVVRLMAPFNMRCKTCGEYIYKGKKFNARKETVQNEVYLGLPIFRFYIKCTRCLAEITFKTDPENTDYTMEHGATRNFQAEKLLEEEEKRVQKEREDEELNNPMKVLENRTKDSKLEMEVLENLQELKDLNQRQAHVDFEAMLRQHRLSEEERRRQQQEEDEQETAALLEEARKRRLLEDSDSEDEAAPSPLQPALRPNPTAILDEAPKPKRKVEVWEQSVGSLGSRPPLSRLVVVKKAKADPDCSNGQPQAAPTPGAPQNRKEANPTPLTPGASSLSQLGAYLDSDDSNGSN

SEQ ID NO: 18835 - protein, 160 aa, Homo sapiens
  Payload ID: 3776
  Gene Symbol: CCDC94
  Gene Name: coiled-coil domain containing 94
  ENSP ID: ENSP00000472772
MAPFNMRCKTCGEYIYKGKKFNARKETVQNEVYLGLPIFRFYIKCTRCLAEITFKTDPENTDYTMEHGATRNFQAEKLLEEEEKRVQKEREDEELNNPMKVLENRTKDSKLEMEVLENLQELKDLNQRQAHVDFEAMLRQHRLSEEERRRQQQEEDEQET

SEQ ID NO: 18836 - protein, 555 aa, Homo sapiens
  Payload ID: 3777
  Gene Symbol: CCDC96
  Gene Name: coiled-coil domain containing 96
  Uniprot ID: Q2M329
  ENSP ID: ENSP00000309285
MDVSSEHTKDPGGEGGDGESLAARPSKIKASSGPPTSPEPGELESEPEEEEEEQAASQGGTAADEQAEAPKGLTAAEAAGEEGPGEPGRPAEPQPEPEEPAEVGAEEPAQPEPGAGPEELEAEAGAEELEQAAEGKEVRFQASLPLTRIDEEEAAAAPEAETERVEGEEEDKEETQRDGAESKERDGEGRPAKSQEEGKRLYGRDEFEDLEWSEEVQKLQEQQLRSDLLDQYRSLLVERNRSQRYNLYLQHKIFEALRRKKGLEAAEVADRGAEAEAPEKEQAYLRHLGMLEELKKQQADDLQWYHQELGQLKRQCQEKLTRVEKEWRRFQALKKQVVMQAMGSCRMRGGRQAALREVEQIQALEDKKEKEMSAVRLENIQLKQSLVHFETRMRTQEDLTQGLLLIDFEQLKIENQTFNEKIEERNEELLKLRSKVTNSVQVITHVKEKLHFMDMENACKKTQLAEIEAQAALGRDILTKTKQAREGLRTDNIRLNQKCGLLGKDSLLRDLEEKVDKTELLHRRLESLKRHHASLTLSCRGVRQKIREAKAFLPS

SEQ ID NO: 18837 - protein, 343 aa, Homo sapiens
  Payload ID: 3778
  Gene Symbol: CCDC97
  Gene Name: coiled-coil domain containing 97
  Uniprot ID: Q96F63
  ENSP ID: ENSP00000269967
MEAVATATAAKEPDKGCIEPGPGHWGELSRTPVPSKPQDKVEAAEATPVALDSDTSGAENAAVSAMLHAVAASRLPVCSQQQGEPDLTEHEKVAILAQLYHEKPLVFLERFRTGLREEHLACFGHVRGDHRADFYCAEVARQGTARPRTLRTRLRNRRYAALRELIQGGEYFSDEQMRFRAPLLYEQYIGQYLTQEELSARTPTHQPPKPGSPGRPACPLSNLLLQSYEERELQQRLLQQQEEEEACLEEEEEEEDSDEEDQRSGKDSEAWVPDSEERLILREEFTSRMHQRFLDGKDGDFDYSTVDDNPDFDNLDIVARDEEERYFDEEEPEDAPSPELDGD

SEQ ID NO: 18838 - protein, 154 aa, Homo sapiens
  Payload ID: 3778
  Gene Symbol: CCDC97
  Gene Name: coiled-coil domain containing 97
  ENSP ID: ENSP00000469348
  MOD_RES (1)..(1): Any amino acid
XNLLLQSYEERELQQRLLQQQEEEEACLEEEEEEEDSDEEDQRSGKDSEAWVPDSEERLILREEFTSRMHQRFLDGKDGDFDYRCSCASTSPSPSPASHGLWSHAEPLTSCGGLPLWSYKAPKQFQDVGLNSQRKRLGDLGLALSISDPQSPHL

SEQ ID NO: 18839 - protein, 16 aa, Homo sapiens
  Payload ID: 3778
  Gene Symbol: CCDC97
  Gene Name: coiled-coil domain containing 97
  ENSP ID: ENSP00000470858
MLHAVAASRLPVCSQQ

SEQ ID NO: 18840 - protein, 266 aa, Homo sapiens
  Payload ID: 3779
  Gene Symbol: CCER2
  Gene Name: Coiled-coil glutamate rich protein 2
  ENSP ID: ENSP00000488939
MPPRGPASELLLLRLLLLGAATAAPLAPRPSKEELTRCLAEVVTEVLTVGQVQRGPCTALLHKELCGTEPHGCASTEEKGLLLGDFKKQEAGKMRSSQEVRDEEEEEVAERTHKSEVQEQAIRMQGHRQLHQEEDEEEEKEERKRGPMETFEDLWQRHLENGGDLQKRVAEKASDKETAQFQAEEKGVRVLGGDRSLWQGAERGGGERREDLPHHHHHHHQPEAEPRQEKEEASEREEKEVEQLEHLRDELKKVTETLGEQLRREG

SEQ ID NO: 18841 - protein, 122 aa, Homo sapiens
  Payload ID: 3779
  Gene Symbol: CCER2
  Gene Name: Coiled-coil glutamate rich protein 2
  ENSP ID: ENSP00000489598
EDEEEEKEERKRGPMETFEDLWQRHLENGGDLQKRVAEKASDKETAQFQAEEKGVRVLGGDRSLWQGAERGGGERREDLPHHHHHHHQPEAEPRQEKEEASEREEKEVEQLEHLRDELKKDC

SEQ ID NO: 18842 - protein, 406 aa, Homo sapiens
  Payload ID: 3780
  Gene Symbol: CCER1
  Gene Name: coiled-coil glutamate-rich protein 1
  Uniprot ID: Q8TC90
  ENSP ID: ENSP00000351727
MTQTLDTREDPLNLGGGGGGGCGCGWAHSASLSSWSSCHRRRPGAPAYNRPHRYSPKTEYGPPRKQPKQQHGPGFWFQPPVCSNWGCWGGPWRPPPPGFWKFPCPVQVFRVYGLHPLCFCCCSCWSGSWNPGWVKPPGRKKRWGRRGRGLRHHPRHSYPRSPPADVSTLPRPVKLYEWREPGMRAPPNTTQFIMNQIYEDMRQQEKVERQQEALRAQKATVSGEASPARSSGNDAPPGGSKETWGLQETLYGFVQNPSLAFSPNPEENQSLAPLLVEEEEEKKNDDEEEYDQEVCDAKEASEEEEEVEDEEEEVEDEEEEEVEEAEYVEEGEEELEEEELEEEEEVLEENEQRGEEFHLPLEMPLSIFVEAEEKRENFISCTFLNPEQIIPKVPQESLFMAQDFNC

SEQ ID NO: 18843 - protein, 58 aa, Homo sapiens
  Payload ID: 3780
  Gene Symbol: CCER1
  Gene Name: coiled-coil glutamate-rich protein 1
  ENSP ID: ENSP00000446773
  MOD_RES (1)..(1): Any amino acid
XNEQRGEEFHLPLEMPLSIFVEAEEKRENFISCTFLNPEQIIPKVPQESLFMAQDFNC

SEQ ID NO: 18844 - protein, 266 aa, Homo sapiens; identical to SEQ ID NO: 18840
  Payload ID: 3781
  Gene Symbol: CCER2
  Gene Name: coiled-coil glutamate-rich protein 2
  Uniprot ID: I3L3R5
  ENSP ID: ENSP00000460665

SEQ ID NO: 18845 - protein, 122 aa, Homo sapiens; identical to SEQ ID NO: 18841
  Payload ID: 3781
  Gene Symbol: CCER2
  Gene Name: coiled-coil glutamate-rich protein 2
  ENSP ID: ENSP00000460852

SEQ ID NO: 18846 - protein, 677 aa, Homo sapiens
  Payload ID: 3782
  Gene Symbol: CCSER1
  Gene Name: coiled-coil serine-rich protein 1
  Uniprot ID: Q9C0I3
  ENSP ID: ENSP00000389283
MGDSGSRRSTLVSRLPIFRRSINRRHDSLPSSPSSSNTVGVHSSSPSSTNSSSGSTGKRRSIFRTPSISFHHKKGSEPKQEPTNQNLSISNGAQPGHSNMQKLSLEEHIKTRGRHSVGFSSSRNKKITRSLTEDFEREKEHSTNKNVFINCLSSGKSEGDDSGFTEDQTRRSVKQSTRKLLPKSFSSHYKFSKPVLQSQSISLVQQSEFSLEVTQYQEREPVLVRASPSCSVDVTERAGSSLQSPLLSADLTTAQTPSEFLALTEDSVSEMDAFSKSGSMASHCDNFGHNDSTSQMSLNSAAVTKTTTELTGTVPCAIMSPGKYRLEGQCSTESNSLPETSAANQKEVLLQIAELPATSVSHSESNLPADSEREENIGLQNGETMLGTNSPRKLGFYEQHKAIAEHVKGIHPISDSKIIPTSGDHHIFNKTSHGYEANPAKVLASSLSPFREGRFIERRLRSSSEGTAGSSRMILKPKDGNIEEVNSLRKQRAGSSSSKMNSLDVLNNLGSCELDEDDLMLDLEFLEEQSLHPSVCREDSYHSVVSCAAVVLTPMEPMIEMKKREEPEFPEPSKQNLSLKLTKDVDQEARCSHISRMPNSPSADWPLQGVEENGGIDSLPFRLMLQDCTAVKTLLLKMKRVLQESADMSPASSTTSLPVSPLTEEPVPFKTTYPREF

SEQ ID NO: 18847 - protein, 663 aa, Homo sapiens
  Payload ID: 3782
  Gene Symbol: CCSER1
  Gene Name: coiled-coil serine-rich protein 1
  ENSP ID: ENSP00000420964
MGDSGSRRSTLVSRLPIFRRSINRRHDSLPSSPSSSNTVGVHSSSPSSTNSSSGSTGKRRSIFRTPSISFHHKKGSEPKQEPTNQNLSISNGAQPGHSNMQKLSLEEHIKTRGRHSVGFSSSRNKKITRSLTEDFEREKEHSTNKNVFINCLSSGKSEGDDSGFTEDQTRRSVKQSTRKLLPKSFSSHYKFSKPVLQSQSISLVQQSEFSLEVTQYQEREPVLVRASPSCSVDVTERAGSSLQSPLLSADLTTAQTPSEFLALTEDSVSEMDAFSKSGSMASHCDNFGHNDSTSQMSLNSAAVTKTTTELTGTVPCAIMSPGKYRLEGQCSTESNSLPETSAANQKEVLLQIAELPATSVSHSESNLPADSEREENIGLQNGETMLGTNSPRKLGFYEQHKAIAEHVKGIHPISDSKIIPTSGDHHIFNKTSHGYEANPAKVLASSLSPFREGRFIERRLRSSSEGTAGSSRMILKPKDGNIEEVNSLRKQRAGSSSSKMNSLDVLNNLGSCELDEDDLMLDLEFLEEQSLHPSVCREDSYHSVVSCAAVVLTPMEPMIEMKKREEPEFPEPSKQNLSLKLTKDVDQEARCSHISRMPNSPSADWPLQGVEENGGIDSLPFRLMLQDCTAVKTLLLKMKRVLQEVHLSRMSVSNSTNKNCIIF

SEQ ID NO: 18848 - protein, 70 aa, Homo sapiens
  Payload ID: 3782
  Gene Symbol: CCSER1
  Gene Name: coiled-coil serine-rich protein 1
  ENSP ID: ENSP00000421678
MSPASSTTSLPVSPLTEEPVPFKDIMKDECSMLKLQLKEKDELISQLQEELLPKILCSMRGGFICLAVFL

SEQ ID NO: 18849 - protein, 93 aa, Homo sapiens
  Payload ID: 3782
  Gene Symbol: CCSER1
  Gene Name: coiled-coil serine-rich protein 1
  ENSP ID: ENSP00000421693
MSPASSTTSLPVSPLTEEPVPFKDIMKDECSMLKLQLKEKDELISQLQEELLPKILCSMRGGFICLAVFLEDSTDVFSDMHAPIKDSKANYYT

SEQ ID NO: 18850 - protein, 169 aa, Homo sapiens
  Payload ID: 3782
  Gene Symbol: CCSER1
  Gene Name: coiled-coil serine-rich protein 1
  ENSP ID: ENSP00000424033
  MOD_RES (1)..(1): Any amino acid
XNLSLKLTKDVDQEARCSHISRMPNSPSADWPLQGVEENGGIDSLPFRLMLQDCTAVKTLLLKMKRVLQESADMSPASSTTSLPVSPLTEEPVPFKDIMKDECSMLKLQLKEKDELISQLQEELGKVRHLQKAFASRVDKSTQTELLCYDALWNPTCTEGLFKPVLIST

SEQ ID NO: 18851 - protein, 58 aa, Homo sapiens
  Payload ID: 3782
  Gene Symbol: CCSER1
  Gene Name: coiled-coil serine-rich protein 1
  ENSP ID: ENSP00000424376
MSPASSTTSLPVSPLTEEPVPFKNIQHYINCTHIWSDTCHCIIIEEPKDNQFCIDHIP

SEQ ID NO: 18852 - protein, 900 aa, Homo sapiens
  Payload ID: 3782
  Gene Symbol: CCSER1
  Gene Name: coiled-coil serine-rich protein 1
  Uniprot ID: Q9C0I3
  ENSP ID: ENSP00000425040
MGDSGSRRSTLVSRLPIFRRSINRRHDSLPSSPSSSNTVGVHSSSPSSTNSSSGSTGKRRSIFRTPSISFHHKKGSEPKQEPTNQNLSISNGAQPGHSNMQKLSLEEHIKTRGRHSVGFSSSRNKKITRSLTEDFEREKEHSTNKNVFINCLSSGKSEGDDSGFTEDQTRRSVKQSTRKLLPKSFSSHYKFSKPVLQSQSISLVQQSEFSLEVTQYQEREPVLVRASPSCSVDVTERAGSSLQSPLLSADLTTAQTPSEFLALTEDSVSEMDAFSKSGSMASHCDNFGHNDSTSQMSLNSAAVTKTTTELTGTVPCAIMSPGKYRLEGQCSTESNSLPETSAANQKEVLLQIAELPATSVSHSESNLPADSEREENIGLQNGETMLGTNSPRKLGFYEQHKAIAEHVKGIHPISDSKIIPTSGDHHIFNKTSHGYEANPAKVLASSLSPFREGRFIERRLRSSSEGTAGSSRMILKPKDGNIEEVNSLRKQRAGSSSSKMNSLDVLNNLGSCELDEDDLMLDLEFLEEQSLHPSVCREDSYHSVVSCAAVVLTPMEPMIEMKKREEPEFPEPSKQNLSLKLTKDVDQEARCSHISRMPNSPSADWPLQGVEENGGIDSLPFRLMLQDCTAVKTLLLKMKRVLQESADMSPASSTTSLPVSPLTEEPVPFKDIMKDECSMLKLQLKEKDELISQLQEELGKVRHLQKAFASRVDKSTQTELLCYDGLNLKRLETVQGGREATYRNRIVSQNLSTRDRKAIHTPTEDRFRYSAADQTSPYKNKTCQLPSLCLSNFLKDKELAEVIKHSRGTYETLTSDVTQNLRATVGQSSLKPTAKTEGLSTFLEKPKDQVATARQHSTFTGRFGQPPRGPISLHMYSRKNVFLHHNLHSTELQTLGQQDG

SEQ ID NO: 18853 - protein, 137 aa, Homo sapiens
  Payload ID: 3782
  Gene Symbol: CCSER1
  Gene Name: coiled-coil serine-rich protein 1
  ENSP ID: ENSP00000426310
  MOD_RES (1)..(1): Any amino acid
XAEHVKGIHPISDSKIIPTSGDHHIFNKTSHGYEANPAKVLASSLSPFREGRFIERRLRSSSEGTAGSSRMILKPKDGNIEEVNSLRKQRAGSSSSKMNSLGLRQISDHLNRCFTICSTELTFSKLTTCSEVTVTGI

SEQ ID NO: 18854 - protein, 74 aa, Homo sapiens
  Payload ID: 3782
  Gene Symbol: CCSER1
  Gene Name: coiled-coil serine-rich protein 1
  ENSP ID: ENSP00000427172
  MOD_RES (1)..(1): Any amino acid
XRNLSLKLTKDVDQEARCSHISRMPNSPSADWPLQGVEENGGIDSLPFRLMLQDCTAVKTLLLKMKRVLQEFSS

SEQ ID NO: 18855 - protein, 834 aa, Homo sapiens
  Payload ID: 3783
  Gene Symbol: CCSER2
  Gene Name: coiled-coil serine-rich protein 2
  Uniprot ID: Q9H7U1
  ENSP ID: ENSP00000224756
MEEKTQIKTFLGSKLPKYGTKSVRSTLQPMPNGTPVNLLGTSKNSNVKSYIKNNGSDCPSSHSFNWRKANKYQLCAQGVEEPNNTQNSHDKIIDPEKRVPTQGMFDKNGIKGGLKSVSLFTSKLAKPSTMFVSSTEELNQKSFSGPSNLGKFTKGTLLGRTSYSSINTPKSQLNGFYGNRSAGSMQRPRANSCATRSSSGESLAQSPDSSKSINCEKMVRSQSFSHSIQNSFLPPSSITRSHSFNRAVDLTKPYQNQQLSIRVPLRSSMLTRNSRQPEVLNGNEHLGYGFNRPYAAGGKKLALPNGPGVTSTLGYRMVHPSLLKSSRSPFSGTMTVDGNKNSPADTCVEEDATVLAKDRAANKDQELIENESYRTKNNQTMKHDAKMRYLSDDVDDISLSSLSSSDKNDLSEDFSDDFIDIEDSNRTRITPEEMSLKEEKHENGPPQDMFDSPKENEKAFSKTDEWIDISVSDRSECTKHTSGNNLVSPDTDYRAGSSFELSPSDSSDGTYMWDEEGLEPIGNVHPVGSYESSEMNSIDILNNLESCDLEDDDLMLDVDLPEDAPLENVECDNMNRFDRPDRNVRQPQEGFWKRPPQRWSGQEHYHLSHPDHYHHHGKSDLSRGSPYRESPLGHFESYGGMPFFQAQKMFVDVPENTVILDEMTLRHMVQDCTAVKTQLLKLKRLLHQHDGSGSLHDIQLSLPSSPEPEDGDKVYKNEDLLNEIKQLKDEIKKKDEKIQLLELQLATQHICHQKCKEEKCTYADKYTQTPWRRIPGGYSAPSFSPWQGSFQGIPRTVPPHRRQTSSTTAFQQPSQTHRSHPGKTNKATTYRGPQ

SEQ ID NO: 18856 - protein, 567 aa, Homo sapiens
  Payload ID: 3783
  Gene Symbol: CCSER2
  Gene Name: coiled-coil serine-rich protein 2
  Uniprot ID: Q9H7U1
  ENSP ID: ENSP00000353068
MEEKTQIKTFLGSKLPKYGTKSVRSTLQPMPNGTPVNLLGTSKNSNVKSYIKNNGSDCPSSHSFNWRKANKYQLCAQGVEEPNNTQNSHDKIIDPEKRVPTQGMFDKNGIKGGLKSVSLFTSKLAKPSTMFVSSTEELNQKSFSGPSNLGKFTKGTLLGRTSYSSINTPKSQLNGFYGNRSAGSMQRPRANSCATRSSSGESLAQSPDSSKSINCEKMVRSQSFSHSIQNSFLPPSSITRSHSFNRAVDLTKPYQNQQLSIRVPLRSSMLTRNSRQPEVLNGNEHLGYGFNRPYAAGGKKLALPNGPGVTSTLGYRMVHPSLLKSSRSPFSGTMTVDGNKNSPADTCVEEDATVLAKDRAANKDQELIENESYRTKNNQTMKHDAKMRYLSDDVDDISLSSLSSSDKNDLSEDFSDDFIDIEDSNRTRITPEEMSLKEEKHENGPPQDMFDSPKENEKAFSKTDEWIDISVSDRSECTKHTSGNNLVSPDTDYRAGSSFELSPSDSSDGTYMWDEEGLEPIGNVHPVGSYESSEMNSIVCMDLYTLGIFCLPYYRETCDMIDFVKNL

SEQ ID NO: 18857 - protein, 1047 aa, Homo sapiens
  Payload ID: 3783
  Gene Symbol: CCSER2
  Gene Name: coiled-coil serine-rich protein 2
  Uniprot ID: Q9H7U1
  ENSP ID: ENSP00000361160
MEEKTQIKTFLGSKLPKYGTKSVRSTLQPMPNGTPVNLLGTSKNSNVKSYIKNNGSDCPSSHSFNWRKANKYQLCAQGVEEPNNTQNSHDKIIDPEKRVPTQGMFDKNGIKGGLKSVSLFTSKLAKPSTMFVSSTEELNQKSFSGPSNLGKFTKGTLLGRTSYSSINTPKSQLNGFYGNRSAGSMQRPRANSCATRSSSGESLAQSPDSSKSINCEKMVRSQSFSHSIQNSFLPPSSITRSHSFNRAVDLTKPYQNQQLSIRVPLRSSMLTRNSRQPEVLNGNEHLGYGFNRPYAAGGKKLALPNGPGVTSTLGYRMVHPSLLKSSRSPFSGTMTVDGNKNSPADTCVEEDATVLAKDRAANKDQELIENESYRTKNNQTMKHDAKMRYLSDDVDDISLSSLSSSDKNDLSEDFSDDFIDIEDSNRTRITPEEMSLKEEKHENGPPQDMFDSPKENEKAFSKTDEWIDISVSDRSECTKHTSGNNLVSPDTDYRAGSSFELSPSDSSDGTYMWDEEGLEPIGNVHPVGSYESSEMNSIDILNNLESCDLEDDDLMLDVDLPEDAPLENVECDNMNRFDRPDRNVRQPQEGFWKRPPQRWSGQEHYHLSHPDHYHHHGKSDLSRGSPYRESPLGHFESYGGMPFFQAQKMFVDVPENTVILDEMTLRHMVQDCTAVKTQLLKLKRLLHQHDGSGSLHDIQLSLPSSPEPEDGDKVYKNEDLLNEIKQLKDEIKKKDEKIQLLELQLATQHICHQKCKEEKCTYADKYTQTPWRRIPPQVLQPSSSLPRPTDHTQGKLIKPQRIEARSECSIQDMHQGGAHPEESFTHVLHQESNYGLEEQPFSSGPQLTMDVAKSTPSEANLNITVNAQEPYHLANNQISDMQFIPTSLQTPPESSTVDQAKRVGRNQSPPVGYMSQPKSLQLLKPSILSSLVPPPVSESSPSRTPTCKKSPIITTCNSAKLQPTSSQTNLANNQNLKASKLRPPSGSFKQKQTNSPQLEPQSFQAKTSIPRPLTQRKEIMQNPNGNLHSGDCLASNRYSRLPKPKIH

SEQ ID NO: 18858 - protein, 261 aa, Homo sapiens
  Payload ID: 3783
  Gene Symbol: CCSER2
  Gene Name: coiled-coil serine-rich protein 2
  Uniprot ID: Q9H7U1
  ENSP ID: ENSP00000439944
MNRFDRPDRNVRQPQEGFWKRPPQRWSGQEHYHLSHPDHYHHHGKSDLSRGSPYRESPLGHFESYGGMPFFQAQKMFVDVPENTVILDEMTLRHMVQDCTAVKTQLLKLKRLLHQHDGSGSLHDIQLSLPSSPEPEDGDKVYKNEDLLNEIKQLKDEIKKKDEKIQLLELQLATQHICHQKCKEEKCTYADKYTQTPWRRIPGGYSAPSFSPWQGSFQGIPRTVPPHRRQTSSTTAFQQPSQTHRSHPGKTNKATTYRGPQ

SEQ ID NO: 18859 - protein, 118 aa, Homo sapiens
  Payload ID: 3784
  Gene Symbol: CHCHD1
  Gene Name: coiled-coil-helix-coiled-coil-helix domain containing 1
  Uniprot ID: Q96BP2
  ENSP ID: ENSP00000361923
MATPSLRGRLARFGNPRKPVLKPNKPLILANRVGERRREKGEATCITEMSVMMACWKQNEFRDDACRKEIQGFLDCAARAQEARKMRSIQETLGESGSLLPNKLNKLLQRFPNKPYLS

SEQ ID NO: 18860 - protein, 97 aa, Homo sapiens
  Payload ID: 3784
  Gene Symbol: CHCHD1
  Gene Name: coiled-coil-helix-coiled-coil-helix domain containing 1
  ENSP ID: ENSP00000361928
MATPSLRGRLARFGNPRKPVLKPNKPLILANRVGERRREKGEATCITEMSVMMACWKQNEFRDDACRKEIQGFLDCAARAQVTDGSWGAFSGKEWGR

SEQ ID NO: 18861 - protein, 149 aa, Homo sapiens
  Payload ID: 3785
  Gene Symbol: CHCHD10
  Gene Name: coiled-coil-helix-coiled-coil-helix domain containing 10
  ENSP ID: ENSP00000384973
MPRGSRSAASRPASRPAAPSAHPPAHPPPSAAAPAPAPSGQPGLMAQMATTAAGVAVGSAVGHVMGSALTGAFSGGSSEPSQPAVQQPLALYPQAPTPAAPQPLQMGPCAYEIRQFLDCSTTQSDLSLCEGFSEALKQCKYYHGLSSLP

SEQ ID NO: 18862 - protein, 142 aa, Homo sapiens
  Payload ID: 3785
  Gene Symbol: CHCHD10
  Gene Name: coiled-coil-helix-coiled-coil-helix domain containing 10
  Uniprot ID: Q8WYQ3
  ENSP ID: ENSP00000418428
MPRGSRSAASRPASRPAAPSAHPPAHPPPSAAAPAPAPSGQPGLMAQMATTAAGVAVGSAVGHVMGSALTGAFSGGSSEPSQPAVQQAPTPAAPQPLQMGPCAYEIRQFLDCSTTQSDLSLCEGFSEALKQCKYYHGLSSLP

SEQ ID NO: 18863 - protein, 99 aa, Homo sapiens
  Payload ID: 3785
  Gene Symbol: CHCHD10
  Gene Name: coiled-coil-helix-coiled-coil-helix domain containing 10
  ENSP ID: ENSP00000429976
MPRGSRSAASRPASRPSPRPFGPAGAHGSDGDHGRRGSRGLGCGTRHGQRPDRSLQRGELGALPACCPAGPHPRCPPAPADGALRLRDQAVPGLFHHSE

SEQ ID NO: 18864 - protein, 55 aa, Homo sapiens
  Payload ID: 3785
  Gene Symbol: CHCHD10
  Gene Name: coiled-coil-helix-coiled-coil-helix domain containing 10
  ENSP ID: ENSP00000430042
MPRGSRSAASRPARPPPPLPPSPCRWGPAPTRSGSSWTVPPLRVTCPCVRASARP

SEQ ID NO: 18865 - protein, 149 aa, Homo sapiens; identical to SEQ ID NO: 18861
  Payload ID: 3785
  Gene Symbol: CHCHD10
  Gene Name: coiled-coil-helix-coiled-coil-helix domain containing 10
  ENSP ID: ENSP00000480602

SEQ ID NO: 18866 - protein, 55 aa, Homo sapiens; identical to SEQ ID NO: 18864
  Payload ID: 3785
  Gene Symbol: CHCHD10
  Gene Name: coiled-coil-helix-coiled-coil-helix domain containing 10
  ENSP ID: ENSP00000486207

SEQ ID NO: 18867 - protein, 99 aa, Homo sapiens; identical to SEQ ID NO: 18863
  Payload ID: 3785
  Gene Symbol: CHCHD10
  Gene Name: coiled-coil-helix-coiled-coil-helix domain containing 10
  ENSP ID: ENSP00000486793

SEQ ID NO: 18868 - protein, 142 aa, Homo sapiens; identical to SEQ ID NO: 18862
  Payload ID: 3785
  Gene Symbol: CHCHD10
  Gene Name: coiled-coil-helix-coiled-coil-helix domain containing 10
  Uniprot ID: Q8WYQ3
  ENSP ID: ENSP00000487006

SEQ ID NO: 18869 - protein, 151 aa, Homo sapiens
  Payload ID: 3786
  Gene Symbol: CHCHD2
  Gene Name: coiled-coil-helix-coiled-coil-helix domain containing 2
  Uniprot ID: Q9Y6H1
  ENSP ID: ENSP00000378812
MPRGSRSRTSRMAPPASRAPQMRAAPRPAPVAQPPAAAPPSAVGSSAAAPRQPGLMAQMATTAAGVAVGSAVGHTLGHAITGGFSGGSNAEPARPDITYQEPQGTQPAQQQQPCLYEIKQFLECAQNQGDIKLCEGFNEVLKQCRLANGLA

SEQ ID NO: 18870 - protein, 227 aa, Homo sapiens
  Payload ID: 3787
  Gene Symbol: CHCHD3
  Gene Name: coiled-coil-helix-coiled-coil-helix domain containing 3
  Uniprot ID: Q9NX63
  ENSP ID: ENSP00000262570
MGGTTSTRRVTFEADENENITVVKGIRLSENVIDRMKESSPSGSKSQRYSGAYGASVSDEELKRRVAEELALEQAKKESEDQKRLKQAKELDRERAAANEQLTRAILRERICSEEERAKAKHLARQLEEKDRVLKKQDAFYKEQLARLEERSSEFYRVTTEQYQKAAEEVEAKFKRYESHPVCADLQAKILQCYRENTHQTLKCSALATQYMHCVNHAKQSMLEKGG

SEQ ID NO: 18871 - protein, 232 aa, Homo sapiens
  Payload ID: 3787
  Gene Symbol: CHCHD3
  Gene Name: coiled-coil-helix-coiled-coil-helix domain containing 3
  ENSP ID: ENSP00000389297
MGGTTSTRRVTFEADENENITVVKGIRLSENVIDRMKESSPSGSKSQRYSGAYGASVSDEELKRRVAEELALEQAKKESEDQKRLKQAKELDRERAAANEQLTRAILRERICSEEERAKAKHLVSIKNARQLEEKDRVLKKQDAFYKEQLARLEERSSEFYRVTTEQYQKAAEEVEAKFKRYESHPVCADLQAKILQCYRENTHQTLKCSALATQYMHCVNHAKQSMLEKGG

SEQ ID NO: 18872 - protein, 63 aa, Homo sapiens
  Payload ID: 3787
  Gene Symbol: CHCHD3
  Gene Name: coiled-coil-helix-coiled-coil-helix domain containing 3
  ENSP ID: ENSP00000403467
MGGTTSTRRVTFEADENENITVVKGIRLSENVIDRMKESSPSGSKSQRYSGAYGASVPLRTPT

SEQ ID NO: 18873 - protein, 241 aa, Homo sapiens
  Payload ID: 3787
  Gene Symbol: CHCHD3
  Gene Name: coiled-coil-helix-coiled-coil-helix domain containing 3
  ENSP ID: ENSP00000410425
MGGTTSTRRVTFEADENENITVVKGIRLSENVIDRMKESSPSGSKSQRYSGAYGASVSDEELKRRVAEELALEQAKKESEDQKREETSETALRKFCVQSFSSNFLESQNMYTLLLKQAKELDRERAAANEQLTRAILRERICSEEERAKAKHLARQLEEKDRVLKKQDAFYKEQLARLEERSSEFYRVTTEQYQKAAEEVEAKFKFGEMKYHKTGLFILLPLVPVWLLVGELVTSPSFQAT

SEQ ID NO: 18874 - protein, 155 aa, Homo sapiens
  Payload ID: 3788
  Gene Symbol: CHCHD4
  Gene Name: coiled-coil-helix-coiled-coil-helix domain containing 4
  Uniprot ID: Q8N4Q1
  ENSP ID: ENSP00000295767
MPVSYSSVTTRYYHRAGAEEGKDRIIFVTKEDHETPSSAELVADDPNDPYEEHGLILPNGNINWNCPCLGGMASGPCGEQFKSAFSCFHYSTEEIKGSDCVDQFRAMQECMQKYPDLYPQEDEDEEEEREKKPAEQAEETAPIEATATKEEEGSS

SEQ ID NO: 18875 - protein, 142 aa, Homo sapiens
  Payload ID: 3788
  Gene Symbol: CHCHD4
  Gene Name: coiled-coil-helix-coiled-coil-helix domain containing 4
  Uniprot ID: Q8N4Q1
  ENSP ID: ENSP00000380122
MSYCRQEGKDRIIFVTKEDHETPSSAELVADDPNDPYEEHGLILPNGNINWNCPCLGGMASGPCGEQFKSAFSCFHYSTEEIKGSDCVDQFRAMQECMQKYPDLYPQEDEDEEEEREKKPAEQAEETAPIEATATKEEEGSS

SEQ ID NO: 18876 - protein, 33 aa, Homo sapiens
  Payload ID: 3788
  Gene Symbol: CHCHD4
  Gene Name: coiled-coil-helix-coiled-coil-helix domain containing 4
  ENSP ID: ENSP00000402716
MSYCRQEGFAQDGSFWNVYSPPSLPEALCQGQR

SEQ ID NO: 18877 - protein, 110 aa, Homo sapiens
  Payload ID: 3789
  Gene Symbol: CHCHD5
  Gene Name: coiled-coil-helix-coiled-coil-helix domain containing 5
  Uniprot ID: Q9BSY4
  ENSP ID: ENSP00000325655
MQAALEVTARYCGRELEQYGQCVAAKPESWQRDCHYLKMSIAQCTSSHPIIRQIRQACAQPFEAFEECLRQNEAAVGNCAEHMRRFLQCAEQVQPPRSPATVEAQPLPAS

SEQ ID NO: 18878 - protein, 158 aa, Homo sapiens
  Payload ID: 3789
  Gene Symbol: CHCHD5
  Gene Name: coiled-coil-helix-coiled-coil-helix domain containing 5
  Uniprot ID: Q9BSY4
  ENSP ID: ENSP00000386994
MQAALEVTARYCGRELEQYGQCVAAKPESWQRDCHYLKMSIAQCTSSHPIIRQIRQACAQPFEAFEECLRQNEAAVGNCAEHMRRFLQCAEQVQPPRSPATVEVRGAHLSSSLFSITSPSSFWLFRVKTLESSSAPPHHHTGLCHASRIQNIITSCPI

SEQ ID NO: 18879 - protein, 48 aa, Homo sapiens
  Payload ID: 3789
  Gene Symbol: CHCHD5
  Gene Name: coiled-coil-helix-coiled-coil-helix domain containing 5
  ENSP ID: ENSP00000412731
MQAALEVTARYCGRELEQYGQCVAAKPESWQRDCHYLKMSIAQCTSSQ

SEQ ID NO: 18880 - protein, 235 aa, Homo sapiens
  Payload ID: 3790
  Gene Symbol: CHCHD6
  Gene Name: coiled-coil-helix-coiled-coil-helix domain containing 6
  Uniprot ID: Q9BRQ6
  ENSP ID: ENSP00000290913
MGSTESSEGRRVSFGVDEEERVRVLQGVRLSENVVNRMKEPSSPPPAPTSSTFGLQDGNLRAPHKESTLPRSGSSGGQQPSGMKEGVKRYEQEHAAIQDKLFQVAKREREAATKHSKASLPTGEGSISHEEQKSVRLARELESREAELRRRDTFYKEQLERIERKNAEMYKLSSEQFHEAASKMESTIKPRRVEPVCSGLQAQILHCYRDRPHEVLLCSDLVKAYQRCVSAAHKG

SEQ ID NO: 18881 - protein, 166 aa, Homo sapiens
  Payload ID: 3790
  Gene Symbol: CHCHD6
  Gene Name: coiled-coil-helix-coiled-coil-helix domain containing 6
  ENSP ID: ENSP00000422787
  MOD_RES (1)..(1): Any amino acid
XTLPRSGSSGGQQPSGMKEGVKRYEQEHAAIQDKLFQVAKREREAATKHSKASLPTGEGSISHEEQKSVRLARELESREAELRRRDTFYKEQLERIERKNAEMYKLSSEQFHEAASKMESTIKVEPVCSGLQAQILHCYRDRPHEVLLCSDLVKAYQRCVSAAHKG

SEQ ID NO: 18882 - protein, 256 aa, Homo sapiens
  Payload ID: 3790
  Gene Symbol: CHCHD6
  Gene Name: coiled-coil-helix-coiled-coil-helix domain containing 6
  ENSP ID: ENSP00000422912
MGSTESSEGRRVSFGVDEEERVRVLQGVRLSENVVNRMKEPSSPPPAPTSSTFGLQDGNLRAPHKESTLPRSGSSGGQQPSGMKEGVKRYEQEHAAIQDKLFQVAKREREAATKHSKASLPTGEGSISHEEQKSVRLQARELESREAELRRRDTFYKEQLERIERKNAEMYKLSSEQFHEAASKMESTIKPRRVEPVCSGLQAQILHCYRDRPHEVLLCSDLVKAYQRCVSAAHKVRPCLPPRFPRALGGRRGTSI

SEQ ID NO: 18883 - protein, 140 aa, Homo sapiens
  Payload ID: 3790
  Gene Symbol: CHCHD6
  Gene Name: coiled-coil-helix-coiled-coil-helix domain containing 6
  ENSP ID: ENSP00000427517
MGSTESSEGRRVSFGVDEEERVRVLQGVRLSENVVNRMKEPSSPPPAPTSSTFGLQDGNLRAPHKESTLPRSGSSGGQQPSGMKEGVKRYEQEHAAIQDKLFQVAKREREAATKHSKASLPTGEGSISHEEQKSVRLIIH

SEQ ID NO: 18884 - protein, 110 aa, Homo sapiens
  Payload ID: 3791
  Gene Symbol: CHCHD7
  Gene Name: coiled-coil-helix-coiled-coil-helix domain containing 7
  Uniprot ID: Q9BUK0
  ENSP ID: ENSP00000306425
MKCEETHAPNSNWVYVMLPSKKTVRMPSVTQRLRDPDINPCLSESDASTRCLDENNYDRERCSTYFLRYKNCRRFWNSIVMQRRKNGVKPFMPTAAERDEILRAVGNMPY

SEQ ID NO: 18885 - protein, 85 aa, Homo sapiens
  Payload ID: 3791
  Gene Symbol: CHCHD7
  Gene Name: coiled-coil-helix-coiled-coil-helix domain containing 7
  Uniprot ID: Q9BUK0
  ENSP ID: ENSP00000347469
MPSVTQRLRDPDINPCLSESDASTRCLDENNYDRERCSTYFLRYKNCRRFWNSIVMQRRKNGVKPFMPTAAERDEILRAVGNMPY

SEQ ID NO: 18886 - protein, 94 aa, Homo sapiens
  Payload ID: 3791
  Gene Symbol: CHCHD7
  Gene Name: coiled-coil-helix-coiled-coil-helix domain containing 7
  ENSP ID: ENSP00000379949
MLPSKKTVRMPSVTQRLRDPDINPCLSESDASTRCLDENNYDRERCSTYFLRYKNCRRFWNSIVMQRRKNGVKPFMPTAAERDEILRAVGNMPY

SEQ ID NO: 18887 - protein, 56 aa, Homo sapiens
  Payload ID: 3791
  Gene Symbol: CHCHD7
  Gene Name: coiled-coil-helix-coiled-coil-helix domain containing 7
  Uniprot ID: Q9BUK0
  ENSP ID: ENSP00000428095
MPSVTQRLRDPDINPCLSILFYLLNDASLISVRNLMLPPDVWMKITMTGKGVPLTS

SEQ ID NO: 18888 - protein, 68 aa, Homo sapiens
  Payload ID: 3791
  Gene Symbol: CHCHD7
  Gene Name: coiled-coil-helix-coiled-coil-helix domain containing 7
  Uniprot ID: Q9BUK0
  ENSP ID: ENSP00000428274
MHQTRTGKKTVRMPSVTQRLRDPDINPCLSILFYLLNDASLISVRNLMLPPDVWMKITMTGKGVPLTS

SEQ ID NO: 18889 - protein, 97 aa, Homo sapiens
  Payload ID: 3791
  Gene Symbol: CHCHD7
  Gene Name: coiled-coil-helix-coiled-coil-helix domain containing 7
  Uniprot ID: Q9BUK0
  ENSP ID: ENSP00000428917
MHQTRTGKKTVRMPSVTQRLRDPDINPCLSESDASTRCLDENNYDRERCSTYFLRYKNCRRFWNSIVMQRRKNGVKPFMPTAAERDEILRAVGNMPY

SEQ ID NO: 18890 - protein, 65 aa, Homo sapiens
  Payload ID: 3791
  Gene Symbol: CHCHD7
  Gene Name: coiled-coil-helix-coiled-coil-helix domain containing 7
  ENSP ID: ENSP00000429217
MLPSKKTVRMPSVTQRLRDPDINPCLSILFYLLNDASLISVRNLMLPPDVWMKITMTGKGVPLTS

SEQ ID NO: 18891 - protein, 44 aa, Homo sapiens
  Payload ID: 3791
  Gene Symbol: CHCHD7
  Gene Name: coiled-coil-helix-coiled-coil-helix domain containing 7
  ENSP ID: ENSP00000429230
MPSVTQRLRDPDINPCLSESDASTRCLDENNYDRERCSTYFLRY

SEQ ID NO: 18892 - protein, 56 aa, Homo sapiens; identical to SEQ ID NO: 18887
  Payload ID: 3791
  Gene Symbol: CHCHD7
  Gene Name: coiled-coil-helix-coiled-coil-helix domain containing 7
  Uniprot ID: Q9BUK0
  ENSP ID: ENSP00000429635

SEQ ID NO: 18893 - protein, 60 aa, Homo sapiens
  Payload ID: 3791
  Gene Symbol: CHCHD7
  Gene Name: coiled-coil-helix-coiled-coil-helix domain containing 7
  ENSP ID: ENSP00000430350
MPSVTQRLRDPDINPCLSESDASTRCLDENNYDRERCSTYFLRYKNCRRFWVSLDWLALC

SEQ ID NO: 18894 - protein, 68 aa, Homo sapiens; identical to SEQ ID NO: 18888
  Payload ID: 3791
  Gene Symbol: CHCHD7
  Gene Name: coiled-coil-helix-coiled-coil-helix domain containing 7
  Uniprot ID: Q9BUK0
  ENSP ID: ENSP00000430458

SEQ ID NO: 18895 - protein, 65 aa, Homo sapiens; identical to SEQ ID NO: 18890
  Payload ID: 3791
  Gene Symbol: CHCHD7
  Gene Name: coiled-coil-helix-coiled-coil-helix domain containing 7
  ENSP ID: ENSP00000430498

SEQ ID NO: 18896 - protein, 61 aa, Homo sapiens
  Payload ID: 3791
  Gene Symbol: CHCHD7
  Gene Name: coiled-coil-helix-coiled-coil-helix domain containing 7
  ENSP ID: ENSP00000430714
MLPSKKTVRMPSVTQRLRDPDINPCLSESDASTRCLDENNYDRERCSTYFLRYKNCRRFWP

SEQ ID NO: 18897 - protein, 46 aa, Homo sapiens
  Payload ID: 3791
  Gene Symbol: CHCHD7
  Gene Name: coiled-coil-helix-coiled-coil-helix domain containing 7
  ENSP ID: ENSP00000430882
MPSVTQRLRDPDINPCLSESDASTRCLDENNYDRERCSTYFLRILS

SEQ ID NO: 18898 - protein, 576 aa, Homo sapiens
  Payload ID: 3792
  Gene Symbol: COIL
  Gene Name: coilin
  Uniprot ID: P38432
  ENSP ID: ENSP00000240316
MAASETVRLRLQFDYPPPATPHCTAFWLLVDLNRCRVVTDLISLIRQRFGFSSGAFLGLYLEGGLLPPAESARLVRDNDCLRVKLEERGVAENSVVISNGDINLSLRKAKKRAFQLEEGEETEPDCKYSKKHWKSRENNNNNEKVLDLEPKAVTDQTVSKKNKRKNKATCGTVGDDNEEAKRKSPKKKEKCEYKKKAKNPKSPKVQAVKDWANQRCSSPKGSARNSLVKAKRKGSVSVCSKESPSSSSESESCDESISDGPSKVTLEARNSSEKLPTELSKEEPSTKNTTADKLAIKLGFSLTPSKGKTSGTTSSSSDSSAESDDQCLMSSSTPECAAGFLKTVGLFAGRGRPGPGLSSQTAGAAGWRRSGSNGGGQAPGASPSVSLPASLGRGWGREENLFSWKGAKGRGMRGRGRGRGHPVSCVVNRSTDNQRQQQLNDVVKNSSTIIQNPVETPKKDYSLLPLLAAAPQVGEKIAFKLLELTSSYSPDVSDYKEGRILSHNPETQQVDIEILSSLPALREPGKFDLVYHNENGAEVVEYAVTQESKITVFWKELIDPRLIIESPSNTSSTEPA

SEQ ID NO: 18899 - protein, 37 aa, Homo sapiens
  Payload ID: 3792
  Gene Symbol: COIL
  Gene Name: coilin
  ENSP ID: ENSP00000460217
MDNQHYHLLGVKLEERGVAENSVVISNGDINLSLRKA
